United States Patent Application Publication US 2021/0199660 A1 - sequence listing, part 9

SEQ ID NO: 115624 - DNA, 120 bp, Artificial Sequence
  ENSG00000100441_43 (sequence is synthesized)
ctgggcaaactcagcattagtggcggaggatggagccactccattcaggaccccgtgcacgtggtttgcttcaagggcatgggtcaggattcctgccaggtccccgatgtgtatccaggg

SEQ ID NO: 115625 - DNA, 120 bp, Artificial Sequence
  ENSG00000100441_44 (sequence is synthesized)
gaagaattggtggcctgagccgatggggccccccaggcccaggcgaaagggcagcagcatgtggcccatggcaccacccccacggcccagcacaacccctagagcaggaaagagggaagg

SEQ ID NO: 115626 - DNA, 120 bp, Artificial Sequence
  ENSG00000100441_45 (sequence is synthesized)
tacaggggtcctctcagccttgaaggagcccactgctcctcctggtttctgtttccccttcctcactctccccatgctgacttggctctgtaacagaagtgagcagtatggctgtcttta

SEQ ID NO: 115627 - DNA, 120 bp, Artificial Sequence
  ENSG00000100441_46 (sequence is synthesized)
agacctcacaccttctcatctgcaggttggctagaagtggtggcatcctctcactctgtaattgtaatctcagctctcctaatcccatcacttccccagcccagagaagacattccaacc

SEQ ID NO: 115628 - DNA, 120 bp, Artificial Sequence
  ENSG00000100441_47 (sequence is synthesized)
ctgtctgatacccaggcccgtttctcacctgagcgcaccaccacctggcgtgtagaatctccaggaagcctggctgcagcttcccatttggttacgaggttggagaaaaagtcaaagtcc

SEQ ID NO: 115629 - DNA, 120 bp, Artificial Sequence
  ENSG00000100441_48 (sequence is synthesized)
cctcctgggctgtcttcatcatactccgcagtcagactgggctggtagtaagctgccggtggaacacaatcatttgccctgggtgtccttggtcctgcctggctctctgtagtggaggct

SEQ ID NO: 115630 - DNA, 120 bp, Artificial Sequence
  ENSG00000100441_49 (sequence is synthesized)
ccccttggcctcaccttctctggcccttaggatctccccatttggagacagagccatttggatattttccccttgaacttctccatgacctgaagcgttccttccctggaggaactctgg

SEQ ID NO: 115631 - DNA, 120 bp, Artificial Sequence
  ENSG00000100441_50 (sequence is synthesized)
ttgcagggctaaacttagaggctgctagagtgtagtggttaagaacaggaacttgggtaccaggcgcctgaattttaatcagctccctcatttattaactctctgacttgatgcaagtta

SEQ ID NO: 115632 - DNA, 120 bp, Artificial Sequence
  ENSG00000100441_51 (sequence is synthesized)
cttaacctctctgtatagaattttcacatctttaaaatgggaataatagtacctacctcatagggttgttgtaaggaataaatgataataagcataaaacacttcaaatagtggctggtg

SEQ ID NO: 115633 - DNA, 120 bp, Artificial Sequence
  ENSG00000100441_52 (sequence is synthesized)
tgtataattgtttgcaattacttggtcccaaaggtgaccaggaactctgttcctaaagaactatggtgtgagaagtaagggactttgggataggtggacttttccctggcattgagtgat

SEQ ID NO: 115634 - DNA, 120 bp, Artificial Sequence
  ENSG00000100441_53 (sequence is synthesized)
gccactccccactgttttttcagggtctcaatttcttagtgaaagtacacaaaggttaggagaaacatgcatggatcaagggcctaggaagtcattttgcctggaaaagaccagtgctct

SEQ ID NO: 115635 - DNA, 120 bp, Artificial Sequence
  ENSG00000100441_54 (sequence is synthesized)
ggtgtgtgcatagctacagaggtctgagttaccccgttcccctggcgaatataaggggctggtgatttggggggcgtacctacacctgtgactaagacccaggccttggggggttgtggg

SEQ ID NO: 115636 - DNA, 120 bp, Artificial Sequence
  ENSG00000100441_55 (sequence is synthesized)
gctttggtgatggctttagccagcaattgggtggtctctaggcggctgccgattacctctttttggaaggtttcattccatctgcaggagaaacatgggaaataaaaagccactaaatac

SEQ ID NO: 115637 - DNA, 120 bp, Artificial Sequence
  ENSG00000100441_56 (sequence is synthesized)
agtttgcgtgcgatgtggacaagagaggtccccgctgggtgaggaacccgggaaggcccgcccagattcgggccccctgcccttgtcccctgggctgggggcgcgggcaaagcgggggcc

SEQ ID NO: 115638 - DNA, 120 bp, Artificial Sequence
  ENSG00000100441_57 (sequence is synthesized)
cccggcccggcccctgggccctgggcggtgctcctggcccgacggagaggggcagcggacggctgggggaggggtgggagtggcttgaaccttggaaatggcagaccagggcccccagag

SEQ ID NO: 115639 - DNA, 120 bp, Artificial Sequence
  ENSG00000100441_58 (sequence is synthesized)
gacagcctagttcaatcccctgctgaggattcgtccttaagaagcttcagagtgccccaggagactccttctggcctccaggccgagctggagcccccccacccttcttgctccggactg

SEQ ID NO: 115640 - DNA, 120 bp, Artificial Sequence
  ENSG00000100441_59 (sequence is synthesized)
tggtcatccttttccaaagcccagacgcccactctcgatagacagccttgtttaccgggacttcctctccggagaggcctgcgtgacatacaccctccctacctccagtggactcagatg

SEQ ID NO: 115641 - DNA, 120 bp, Artificial Sequence
  ENSG00000100441_60 (sequence is synthesized)
gagggtgggtgagtggtcagaggcggggacccccttgttaggaggttatgcataatctcagttgcaatatctgaattactggggtggtaatggtgggcctgggaaggaagggagcagagc

SEQ ID NO: 115642 - DNA, 120 bp, Artificial Sequence
  ENSG00000100441_61 (sequence is synthesized)
acaaggcttttcaaaggaaaggcatgttggatttgcaagggattggttgggcagggtggaagacagagctagatcttactgtttactaacgaggcacaaagtgttgggtgaaggactatg

SEQ ID NO: 115643 - DNA, 120 bp, Artificial Sequence
  ENSG00000100441_62 (sequence is synthesized)
gttggcagataggatgctactgggagaccaccttggattcatctttgtttcctctctaggccatggcacttgcatctagtcagttgcctgtagctgggtcaaggtgaggtagggggccag

SEQ ID NO: 115644 - DNA, 120 bp, Artificial Sequence
  ENSG00000100441_63 (sequence is synthesized)
atctccatcaccagaagtggcctatgggagacagtaaaacttctggggttggggccttggagagtcccaaatggttgctgtggtttttacttttatttttgtagatttgggggataccaa

SEQ ID NO: 115645 - DNA, 120 bp, Artificial Sequence
  ENSG00000100441_64 (sequence is synthesized)
tacagttttgctacatagatatattgcatagtggtgaagtctaggcttttaatgtaaccatgatccaaacagtgaacattgtacccagtaggtaatttttcaaccctctctcggttgctg

SEQ ID NO: 115646 - DNA, 120 bp, Artificial Sequence
  ENSG00000100442_0 (sequence is synthesized)
gtcagcctacatttttttaagtaaggagtcctgatgttcaactattaaatctttattataggttatagactggactttaaaggcatagctgccttaaatgtgggtaatggttgataaatg

SEQ ID NO: 115647 - DNA, 120 bp, Artificial Sequence
  ENSG00000100442_1 (sequence is synthesized)
tcgctaccatcagaggtcgcttcacaaggtgtctaattcagaatcgaagatctctagcggtcttctactcagtcgactgcagagacgaccgcggtaggtttttcaacccggactcaacaa

SEQ ID NO: 115648 - DNA, 120 bp, Artificial Sequence
  ENSG00000100442_2 (sequence is synthesized)
agaagccctcatagcacagccttgacgtcactcaaagacaggccccaatcccgactgctagagcagaggcccgcccctcgacctccgtgagtggccccgccccgccctagggggcggggc

SEQ ID NO: 115649 - DNA, 120 bp, Artificial Sequence
  ENSG00000100442_3 (sequence is synthesized)
gatgccgaactgcggcgggctggctcagtaaagcggaggcagcgggggaagatggcggcggccgttccacagcgggcgtggaccgtggagcagctgcgcagtgagcagctgcccaagaag

SEQ ID NO: 115650 - DNA, 120 bp, Artificial Sequence
  ENSG00000100442_4 (sequence is synthesized)
gacattatcaagtttctgcaggaacacggttcagattcgtttcttgcagaacataaattattaggaaacattaaaaatgtggccaagacagctaacaaggaccacttggttacagcctat

SEQ ID NO: 115651 - DNA, 120 bp, Artificial Sequence
  ENSG00000100442_5 (sequence is synthesized)
aaccatctttttgaaactaagcgttttaagggtactgaaagtataagtaaagtgtctgagcaagtaaaaaatgtgaagcttaatgaagataaacccaaagaaaccaagtctgaagagacc

SEQ ID NO: 115652 - DNA, 120 bp, Artificial Sequence
  ENSG00000100442_6 (sequence is synthesized)
ctggatgagggtccaccaaaatatactaaatctgttctgaaaaagggagataaaaccaactttcccaaaaagggagatgttgttcactgctggtatacaggaacactacaagatgggact

SEQ ID NO: 115653 - DNA, 120 bp, Artificial Sequence
  ENSG00000100442_7 (sequence is synthesized)
ttgatactaatattcaaacaagtgcaaagaagaagaaaaatgccaagcctttaagttttaaggtcggagtaggcaaagttatcagaggatgggatgaagctctcttgactatgagtaaag

SEQ ID NO: 115654 - DNA, 120 bp, Artificial Sequence
  ENSG00000100442_8 (sequence is synthesized)
gagaaaaggctcgactggagattgaaccagaatgggcttacggaaagaaaggacagcctgatgccaaaattccaccaaatgcaaaactcacttttgaagtggaattagtggatattgatt

SEQ ID NO: 115655 - DNA, 120 bp, Artificial Sequence
  ENSG00000100442_9 (sequence is synthesized)
gaaatagcagtgcttcagctctaaggatattagcaacaatgataaaacttggccttgaagaaatttacacaactagttagaacttgttactattgtaaaggaagagtcaactggaaaatt

SEQ ID NO: 115656 - DNA, 120 bp, Artificial Sequence
  ENSG00000100442_10 (sequence is synthesized)
caaggagttaataaaatttgtttacttggtcccagcttttgagagataaatcccttatgaatccctggtctaaaatactttcctacagctgtgtaaaatactggtcaaggagaacttttt

SEQ ID NO: 115657 - DNA, 120 bp, Artificial Sequence
  ENSG00000100442_11 (sequence is synthesized)
ccttttacctcatgttgtaaacttaagtggctcaataaaaattgatccactgtcttgatctgactgtgatttgtttggtgttaatatattattgttctgattagggaattggaactaagg

SEQ ID NO: 115658 - DNA, 120 bp, Artificial Sequence
  ENSG00000100442_12 (sequence is synthesized)
acctcatcaaaccagggagtaactcccagtaaaattatctggacagattgcctgtataatgagaaggcaaaagcataaggcttgaggggaaacaaaatgctaaaagcagaaaaatcttgg

SEQ ID NO: 115659 - DNA, 120 bp, Artificial Sequence
  ENSG00000100442_13 (sequence is synthesized)
caggaagatcaagacctgaatttagaaaaggtgtacttcaaaaccaatgagccactaataaaggtgaacataaggttaatattactaattgatccccccaaaataaattcataaacaatt

SEQ ID NO: 115660 - DNA, 120 bp, Artificial Sequence
  ENSG00000100442_14 (sequence is synthesized)
aacatatgtatgttacatgcttgtgtaacagtgactcttcctagtcggctaagaatgggttacaaatgcctcaggatagctatgtccaacctggctggaggctctcaagggctgcaccca

SEQ ID NO: 115661 - DNA, 120 bp, Artificial Sequence
  ENSG00000100442_15 (sequence is synthesized)
agtatcctcctgcagtgagcagctgactcaagtcaccacagtgtgcttgctgtataaatgttattttttgtgagtgttgacaggaaaaagtttaggatgaaacactgtgttcagtacata

SEQ ID NO: 115662 - DNA, 120 bp, Artificial Sequence
  ENSG00000100442_16 (sequence is synthesized)
tcttcagtactagtactactgaaaacacaactgctaacataaaaggatcgttttctaattttagacacttcttactcgggagaagttatcttgattacccagcttttttccttatagttt

SEQ ID NO: 115663 - DNA, 67 bp, Artificial Sequence
  ENSG00000100442_17 (sequence is synthesized)
tcgagtagctaggactacaggcgcgtgccaccacgccagtttcttgcagaacataaattattaggaa

SEQ ID NO: 115664 - DNA, 120 bp, Artificial Sequence
  ENSG00000100445_0 (sequence is synthesized)
aaactttacgcaggcgcgttaggtcctagtcgctatgcgtgtgcttgtgggtggcgggacaggcttcattgggacagccctaacccagctgctgaatgccagaggccacgaagtgacgtt

SEQ ID NO: 115665 - DNA, 120 bp, Artificial Sequence
  ENSG00000100445_1 (sequence is synthesized)
ggtctcccgaaagcccgggcccggccggatcacgtgggatgagctcgctgcatcggggctgccgagctgcgatgccgccgtcaacctggccggagagaacatcctcaaccctctccgaag

SEQ ID NO: 115666 - DNA, 120 bp, Artificial Sequence
  ENSG00000100445_2 (sequence is synthesized)
atggaatgaaaccttccaaaaagaggtaatcggcagccgcctagagaccacccaattgctggctaaagccatcaccaaagccccacaaccccccaaggcctgggtcttagtcacaggtgt

SEQ ID NO: 115667 - DNA, 120 bp, Artificial Sequence
  ENSG00000100445_3 (sequence is synthesized)
agcttactaccagcccagtctgactgcggagtatgatgaagacagcccaggaggggactttgactttttctccaacctcgtaaccaaatgggaagctgcagccaggcttcctggagattc

SEQ ID NO: 115668 - DNA, 120 bp, Artificial Sequence
  ENSG00000100445_4 (sequence is synthesized)
tacacgccaggtggtggtgcgctcaggggttgtgctgggccgtgggggtggtgccatgggccacatgctgctgccctttcgcctgggcctggggggccccatcggctcaggccaccaatt

SEQ ID NO: 115669 - DNA, 120 bp, Artificial Sequence
  ENSG00000100445_5 (sequence is synthesized)
aatcctgacccatgcccttgaagcaaaccacgtgcacggggtcctgaatggagtggctccatcctccgccactaatgctgagtttgcccagaccttgggtgctgccctgggccgccgagc

SEQ ID NO: 115670 - DNA, 120 bp, Artificial Sequence
  ENSG00000100445_6 (sequence is synthesized)
cttcatccctctccccagcgctgtggtgcaagctgtctttgggcgacagcgtgccatcatgctgctggagggccagaaggtgatcccacagcgaacactggccactggctaccagtattc

SEQ ID NO: 115671 - DNA, 120 bp, Artificial Sequence
  ENSG00000100445_7 (sequence is synthesized)
cttcccagagctaggggctgccttaaaggaaattgtagcctaagtaggtcgtggcaagggcctgaggcctgttcctcacaggcttccaggttaggcactgtgaataggctcagctcctct

SEQ ID NO: 115672 - DNA, 120 bp, Artificial Sequence
  ENSG00000100445_8 (sequence is synthesized)
agagagctgaagccatctggttcttagattcctctcccagtcctctttcccattgttctgttgctccaccttattgtctcaaggccgtaatctcatcaggttgggacattaatcttttca

SEQ ID NO: 115673 - DNA, 120 bp, Artificial Sequence
  ENSG00000100445_9 (sequence is synthesized)
actccttgtaagatttcccagtttggtttctctacatgtcctgcagctgccccacttctcctttacgctgtgtagagaatgctctgcagtttaggcaataaaaataaattgtctcactaa

SEQ ID NO: 115674 - DNA, 120 bp, Artificial Sequence
  ENSG00000100445_10 (sequence is synthesized)
ttgtgggtgagggagggcagaaagggagagtgctgggcgggcttagtcggagattgaggactgggaatccgcttccgggagggcactgtctagtgcacaggcaacctggccttggcctcc

SEQ ID NO: 115675 - DNA, 120 bp, Artificial Sequence
  ENSG00000100445_11 (sequence is synthesized)
tagcccgagaagccgaatctccctaatccctgtgacctgtgtcacctctgcatcgcgaggagggggataagtggggagaagcctggtgtcagatgggatggcgccggaagagggtgccac

SEQ ID NO: 115676 - DNA, 120 bp, Artificial Sequence
  ENSG00000100445_12 (sequence is synthesized)
agcggggacggaaggcgcccccaccccaactccacgggaatataaacaatttgtattttccgatcaggtggcgggacaggcttcattgggacagccctaacccagctgctgaatgccaga

SEQ ID NO: 115677 - DNA, 120 bp, Artificial Sequence
  ENSG00000100445_13 (sequence is synthesized)
ggccacgaagtgacgttggtctcccgaaagcccgggcccggccggatcacgtgggtaagtccatcctctggaagcgggtgggagggcagagttgggcggcgcagggcggggcaggggcac

SEQ ID NO: 115678 - DNA, 120 bp, Artificial Sequence
  ENSG00000100445_14 (sequence is synthesized)
cgccaggtggtggtgcgctcagagccaagtcagcatggggagagtgaggaaggggaaacagaaaccaggaggagcagtgggctccttcaaggctgagaggacccctgtaccttccctctt

SEQ ID NO: 115679 - DNA, 120 bp, Artificial Sequence
  ENSG00000100445_15 (sequence is synthesized)
gagaagggtcacgcacaggattgcgacctcgattggaacgcgcttcccgaaaggggcatgcgcagagaggtcgtagtcgcgtctgaggtggcgggacaggcttcattgggacagccctaa

SEQ ID NO: 115680 - DNA, 120 bp, Artificial Sequence
  ENSG00000100445_16 (sequence is synthesized)
cccttatattcgccaggggaacggggtaactcagacctctgtagctatgcacacaccagagcactggtcttttccaggcaaaatgacttcctaggcccttgatccatgcatgtttctcct

SEQ ID NO: 115681 - DNA, 120 bp, Artificial Sequence
  ENSG00000100445_17 (sequence is synthesized)
aacctttgtgtactttcactaagaaattgagaccctgaaaaaacagtggggagtggcatcactcaatgccagggaaaagtccacctatcccaaagtcccttacttctcacaccatagttc

SEQ ID NO: 115682 - DNA, 120 bp, Artificial Sequence
  ENSG00000100445_18 (sequence is synthesized)
tttaggaacagagttcctggtcacctttgggaccaagtaattgcaaacaattatacacaccagccactatttgaagtgttttatgcttattatcatttattccttacaacaaccctatga

SEQ ID NO: 115683 - DNA, 120 bp, Artificial Sequence
  ENSG00000100445_19 (sequence is synthesized)
tcagcccgggccctaaagctgatacccactagagcacagggaggacagtgccccactgatgagaacctgtgagctatgggtaatggagctcccagattccgaactaaaccgatatcccag

SEQ ID NO: 115684 - DNA, 120 bp, Artificial Sequence
  ENSG00000100445_20 (sequence is synthesized)
actactcattctgctccactcctccacccccacctgctcctccacccagtcagccaattggcttaagtcctcacgtataactcaggatgcccaggaaatgaatgccctttccctctacag

SEQ ID NO: 115685 - DNA, 120 bp, Artificial Sequence
  ENSG00000100445_21 (sequence is synthesized)
gagacgttgactgtttctcttaagccgaaattcagggctttacaagaaattggtatgaaatagctcccaggaaaagacagagagagggatatgtgcacttatgtatttagtggcttttta

SEQ ID NO: 115686 - DNA, 120 bp, Artificial Sequence
  ENSG00000100445_22 (sequence is synthesized)
cagagagttaataaatgagggagctgattaaaattcaggcgcctggtacccaagttcctgttcttaaccactacactctagcagcctctaagtttagccctgcaaccagagttcctccag

SEQ ID NO: 115687 - DNA, 120 bp, Artificial Sequence
  ENSG00000100448_0 (sequence is synthesized)
aactgactgggcagcctttcaggaaagatgcagccactcctgcttctgctggcctttctcctacccactggggctgaggcaggggagatcatcggaggccgggagagcaggccccactcc

SEQ ID NO: 115688 - DNA, 120 bp, Artificial Sequence
  ENSG00000100448_1 (sequence is synthesized)
cgcccctacatggcgtatcttcagatccagagtccagcaggtcagagcagatgtggagggttcctggtgcgagaagactttgtgctgacagcagctcattgctggggaagcaatataaat

SEQ ID NO: 115689 - DNA, 120 bp, Artificial Sequence
  ENSG00000100448_2 (sequence is synthesized)
gtcaccctgggcgcccacaatatccagagacgggaaaacacccagcaacacatcactgcgcgcagagccatccgccaccctcaatataatcagcggaccatccagaatgacatcatgtta

SEQ ID NO: 115690 - DNA, 120 bp, Artificial Sequence
  ENSG00000100448_3 (sequence is synthesized)
gagacccgggacgctgtgcactgtggccggctggggcagggtcagcatgaggaggggaacagatacactccgagaggtgcagctgagagtgcagagggataggcagtgcctccgcatctt

SEQ ID NO: 115691 - DNA, 120 bp, Artificial Sequence
  ENSG00000100448_4 (sequence is synthesized)
cggttcctacgacccccgaaggcagatttgtgtgggggaccggcgggaacggaaggctgccttcaagggggattccggaggccccctgctgtgtaacaatgtggcccacggcatcgtctc

SEQ ID NO: 115692 - DNA, 120 bp, Artificial Sequence
  ENSG00000100448_5 (sequence is synthesized)
ctatggaaagtcgtcaggggttcctccagaagtcttcaccagggtctcaagtttcctgccctggataaggacaacaatgagaagcttcaaactgctggatcagatggagacccccctgtg

SEQ ID NO: 115693 - DNA, 120 bp, Artificial Sequence
  ENSG00000100448_6 (sequence is synthesized)
actgactcttcttctcggggacacaggccagctccacagtgttgccagagccttaataaacgtccacagagtataaataaccaattcctcatttgttcattaaacgtcattcagtactta

SEQ ID NO: 115694 - DNA, 120 bp, Artificial Sequence
  ENSG00000100448_7 (sequence is synthesized)
aaggaacttcctggccagccaggaacacagccctgcggagctcttcggtggaagagccatctgaaagaagagttgtagcaatgaaagggtgaaagaaagaccaagtgagtctttgcggga

SEQ ID NO: 115695 - DNA, 120 bp, Artificial Sequence
  ENSG00000100448_8 (sequence is synthesized)
gggaacaggccagtgtaaatgaggaggaaaggaggataagatcaaaaagagcaagaggaagagatggaagacacatattggggctcaaaatataaactcaggctatttatcaacttaatc

SEQ ID NO: 115696 - DNA, 120 bp, Artificial Sequence
  ENSG00000100448_9 (sequence is synthesized)
tggggaagcaaacctgaaggcaagtaccaccctgtcatccctagctcagagctgctgagaaagaggatacagctgagccccagggccctcccatcccctcgattctggttagctgcagtc

SEQ ID NO: 115697 - DNA, 120 bp, Artificial Sequence
  ENSG00000100450_0 (sequence is synthesized)
atctccctccagcatttgtttctggaaggagtcaacaccaacagctctgacctgggcagccttcctgagaaaatgcagccattcctcctcctgttggcctttcttctgacccctggggct

SEQ ID NO: 115698 - DNA, 120 bp, Artificial Sequence
  ENSG00000100450_1 (sequence is synthesized)
gggacagaggagatcatcgggggccatgaggccaagccccactcccgcccctacatggcctttgttcagtttctgcaagagaagagtcggaagaggtgtggcggcatcctagtgagaaag

SEQ ID NO: 115699 - DNA, 120 bp, Artificial Sequence
  ENSG00000100450_2 (sequence is synthesized)
gactttgtgctgacagctgctcactgccagggaagctccataaatgtcaccttgggggcccacaatatcaaggaacaggagcggacccagcagtttatccctgtgaaaagacccatcccc

SEQ ID NO: 115700 - DNA, 120 bp, Artificial Sequence
  ENSG00000100450_3 (sequence is synthesized)
ctacctagcagcaaggcccaggtgaagccagggcagctgtgcagtgtggctggctggggttatgtctcaatgagcactttagcaaccacactgcaggaagtgttgctgacagtgcagaag

SEQ ID NO: 115701 - DNA, 120 bp, Artificial Sequence
  ENSG00000100450_4 (sequence is synthesized)
gactgccagtgtgaacgtctcttccatggcaattacagcagagccactgagatttgtgtgggggatccaaagaagacacagaccggtttcaagggggactccggggggcccctcgtgtgt

SEQ ID NO: 115702 - DNA, 120 bp, Artificial Sequence
  ENSG00000100450_5 (sequence is synthesized)
aaggacgtagcccaaggtattctctcctatggaaacaaaaaagggacacctccaggagtctacatcaaggtctcacacttcctgccctggataaagagaacaatgaagcgcctctaacag

SEQ ID NO: 115703 - DNA, 120 bp, Artificial Sequence
  ENSG00000100450_6 (sequence is synthesized)
caggcatgagactaaccttcctctgggcctgaccatctctgggacagaggcaagaatccccaaggggtgggcagtcggggttgcaggactgtaataaatggatctctggtgtaaatatga

SEQ ID NO: 115704 - DNA, 120 bp, Artificial Sequence
  ENSG00000100453_0 (sequence is synthesized)
agctccaaccagggcagccttcctgagaagatgcaaccaatcctgcttctgctggccttcctcctgctgcccagggcagatgcaggggagatcatcgggggacatgaggccaagccccac

SEQ ID NO: 115705 - DNA, 120 bp, Artificial Sequence
  ENSG00000100453_1 (sequence is synthesized)
tcccgcccctacatggcttatcttatgatctgggatcagaagtctctgaagaggtgcggtggcttcctgatacgagacgacttcgtgctgacagctgctcactgttggggaagctccata

SEQ ID NO: 115706 - DNA, 120 bp, Artificial Sequence
  ENSG00000100453_2 (sequence is synthesized)
aatgtcaccttgggggcccacaatatcaaagaacaggagccgacccagcagtttatccctgtgaaaagacccatcccccatccagcctataatcctaagaacttctccaacgacatcatg

SEQ ID NO: 115707 - DNA, 120 bp, Artificial Sequence
  ENSG00000100453_3 (sequence is synthesized)
aggctacctagcaacaaggcccaggtgaagccagggcagacatgcagtgtggccggctgggggcagacggcccccctgggaaaacactcacacacactacaagaggtgaagatgacagtg

SEQ ID NO: 115708 - DNA, 120 bp, Artificial Sequence
  ENSG00000100453_4 (sequence is synthesized)
caggaagatcgaaagtgcgaatctgacttacgccattattacgacagtaccattgagttgtgcgtgggggacccagagattaaaaagacttcctttaagggggactctggaggccctctt

SEQ ID NO: 115709 - DNA, 120 bp, Artificial Sequence
  ENSG00000100453_5 (sequence is synthesized)
gtgtgtaacaaggtggcccagggcattgtctcctatggacgaaacaatggcatgcctccacgagcctgcaccaaagtctcaagctttgtacactggataaagaaaaccatgaaacgctac

SEQ ID NO: 115710 - DNA, 120 bp, Artificial Sequence
  ENSG00000100453_6 (sequence is synthesized)
taactacaggaagcaaactaagcccccgctgtaatgaaacaccttctctggagccaagtccagatttacactgggagaggtgccagcaactgaataaatacctcttagctgagtggaaaa

SEQ ID NO: 115711 - DNA, 120 bp, Artificial Sequence
  ENSG00000100453_7 (sequence is synthesized)
gcaaggaggaaacaacagcagctccaaccagggcagccttcctgagaagatgcaaccaatcctgcttctgctggccttcctcctgctgcccagggcagatgcagacttttccttcagggg

SEQ ID NO: 115712 - DNA, 120 bp, Artificial Sequence
  ENSG00000100453_8 (sequence is synthesized)
gccttcctgagaagatgcaaccaatcctgcttctgctggccttcctcctgctgcccagggcagatgcaggaatgttctgaactccagctcccattctaccaagaccccccaagtgtgatg

SEQ ID NO: 115713 - DNA, 120 bp, Artificial Sequence
  ENSG00000100453_9 (sequence is synthesized)
tgggggactccttcacccactagactgtgatatttctctctggaaagagaagaggggactagactgagctggggagaaattagggcctctgcaaacttaccaggaggcttatggtggatg

SEQ ID NO: 115714 - DNA, 120 bp, Artificial Sequence
  ENSG00000100453_10 (sequence is synthesized)
gtgcttctttggaaggatgaatttgcaacactccacccactccaggtcacagatattaggaaactgtgcccactgggggtgcagtaattataaccaggtgtgtcttcagaggctggtacc

SEQ ID NO: 115715 - DNA, 120 bp, Artificial Sequence
  ENSG00000100461_0 (sequence is synthesized)
agagctgccgccattttgcgggaagaggaggctctgtacctgcagtgctgcttttcttgcctagactctaggaactatccgagctccactccccacaacatactcaaaggaacggagaga

SEQ ID NO: 115716 - DNA, 120 bp, Artificial Sequence
  ENSG00000100461_1 (sequence is synthesized)
accgggacccccctgcggggacccggaactgatctgacaggatggcatctgatgactttgacatagtgattgaggccatgctggaagctccctataaaaaagaagaggatgagcaacaaa

SEQ ID NO: 115717 - DNA, 120 bp, Artificial Sequence
  ENSG00000100461_2 (sequence is synthesized)
ggaaagaagttaaaaaggattatcctagcaataccaccagcagcaccagcaacagtggcaatgagaccagtggaagcagcaccatcggggagacaagcaagaagaagaggagtcggagcc

SEQ ID NO: 115718 - DNA, 120 bp, Artificial Sequence
  ENSG00000100461_3 (sequence is synthesized)
ataataaaagcagggatagaaagcgcagtcgtagtcgagatcgggatcggtatagacggagaaatagtcggagccgaagtccaggtcggcagtgtcgtcaccgtagccgtagctgggatc

SEQ ID NO: 115719 - DNA, 120 bp, Artificial Sequence
  ENSG00000100461_4 (sequence is synthesized)
gtcgacatggtagtgagtcgcgaagtcgggaccatcgtcgtgaggatcgtgtgcattacaggagtcctccacttgccactggttataggtatggacacagtaagagtcctcatttcagag

SEQ ID NO: 115720 - DNA, 120 bp, Artificial Sequence
  ENSG00000100461_5 (sequence is synthesized)
agaagagcccagtcagggagccagttgataatctgagtcctgaggagcgtgatgcccgcacagttttctgtatgcagttagctgcccgaattcggcctcgagatctggaggactttttct

SEQ ID NO: 115721 - DNA, 120 bp, Artificial Sequence
  ENSG00000100461_6 (sequence is synthesized)
ctgctgtaggcaaggttcgcgatgtacgtatcatctcagatcggaactcacgtcgttctaagggcattgcctacgtggaattctgtgaaatccagtctgtgccactggccattgggctga

SEQ ID NO: 115722 - DNA, 120 bp, Artificial Sequence
  ENSG00000100461_7 (sequence is synthesized)
ctgggcagcggttgctgggagtgcctatcattgtacaggcttcacaggcagagaaaaaccgactggcagccatggccaacaacctgcaaaagggcaatggtggaccaatgcgcctctatg

SEQ ID NO: 115723 - DNA, 120 bp, Artificial Sequence
  ENSG00000100461_8 (sequence is synthesized)
tgggttccctgcacttcaatatcactgaagacatgctccggggcatctttgagccctttggtaaaattgataatattgtcctgatgaaggactcagatacaggccgctctaaaggttatg

SEQ ID NO: 115724 - DNA, 120 bp, Artificial Sequence
  ENSG00000100461_9 (sequence is synthesized)
gtttcatcacgttctctgattctgagtgtgcccggcgggccctggaacagttgaatgggtttgagcttgctggtcgacctatgagggttggccatgtgactgagcgactggatggtggca

SEQ ID NO: 115725 - DNA, 120 bp, Artificial Sequence
  ENSG00000100461_10 (sequence is synthesized)
cagacatcacttttcctgatggggaccaggagctggatctgggatcagcaggtggacgttttcagctcatggcaaaactggcagaaggcgctggaatccaactgccaagcactgctgctg

SEQ ID NO: 115726 - DNA, 120 bp, Artificial Sequence
  ENSG00000100461_11 (sequence is synthesized)
ctgctgctgccgccgccgcccaggctgctgccttgcaactgaatggagcagttcccttgggggccctgaatccagcagctctgactgctctgagtccagccctgaaccttgcctcccagt

SEQ ID NO: 115727 - DNA, 120 bp, Artificial Sequence
  ENSG00000100461_12 (sequence is synthesized)
gtttccagctctccagcctctttaccccccagaccatgtaaatcagtggcacagtatactgcctccttgtgcctctggatcctgccacttcacatctactcttccatggccccatttctc

SEQ ID NO: 115728 - DNA, 120 bp, Artificial Sequence
  ENSG00000100461_13 (sequence is synthesized)
cattttgtggaccaagccatcctgagggcatggacattgtctctgaggaaattggggccacccttaagataccaagaaaagctcctgcccatggtcccactggaaatggactctgctgag

SEQ ID NO: 115729 - DNA, 120 bp, Artificial Sequence
  ENSG00000100461_14 (sequence is synthesized)
caaagccaccagttgaagagaacagaatccacacctgcattgaatacctgtttctccatgtgtatcgtctctgagattaccttcttgccctttccaacaccttagtgattcctcaatttc

SEQ ID NO: 115730 - DNA, 120 bp, Artificial Sequence
  ENSG00000100461_15 (sequence is synthesized)
tcccccattgggaaggccatagggcatactgaaggaactgacctctctccttttcctgtacctttaacctttagtctgtcaaggaaaacccttaggacctctgaatcaagaggactgagt

SEQ ID NO: 115731 - DNA, 120 bp, Artificial Sequence
  ENSG00000100461_16 (sequence is synthesized)
ttgtgggtgaaccttgaaggtgctctttctgctacaagggccctgggagatagcatggacgtgcattgagaagccagcctcagaccttagcttgaagcagcttgaggccagacctactgt

SEQ ID NO: 115732 - DNA, 120 bp, Artificial Sequence
  ENSG00000100461_17 (sequence is synthesized)
agcctcagcatcttgctaggaggcatggaagtgatctatcctgccaggaggcctcagagtgatctgtcctgccaggaggtgtgagagtgatctgtcctgtgaggcatttaggggctttca

SEQ ID NO: 115733 - DNA, 120 bp, Artificial Sequence
  ENSG00000100461_18 (sequence is synthesized)
ggaatttagtaaaaggtggagtatgcctttccagtatcttccatcttcctttgtatacttgtccttcctcccatttcctccctttggcccgaggtaggaggatggagggaggctgctact

SEQ ID NO: 115734 - DNA, 120 bp, Artificial Sequence
  ENSG00000100461_19 (sequence is synthesized)
ctaccacttcctgtgtgcctctactgtggcctcaaccctggcaattatagctactcccatcccttacctgggcatgtgtgagcccttctcactggattttatacccttgtgtctgtgtac

SEQ ID NO: 115735 - DNA, 120 bp, Artificial Sequence
  ENSG00000100461_20 (sequence is synthesized)
ataaatatatatacatatatatatacataaaaactttgtacaaaaggcaagcctcctccttgtggcagctgttgcccatttgtgtgtggtctttgttgtgtgtctgacaacttctcatta

SEQ ID NO: 115736 - DNA, 120 bp, Artificial Sequence
  ENSG00000100461_21 (sequence is synthesized)
gcccaacttatgatgtttctagggatataaaacattagtaacatcattgtgtttatttatttaaccacctttagaaagaaaaatgaaaactcacacctgggtggggttcccattctgtat

SEQ ID NO: 115737 - DNA, 120 bp, Artificial Sequence
  ENSG00000100461_22 (sequence is synthesized)
ctgcattacactgttgatctatggttgtcttctccatctatcttcatcctaactatctccatcccagctacccactggacagaattacccaaacagccaagttgcagcaccaggacagac

SEQ ID NO: 115738 - DNA, 120 bp, Artificial Sequence
  ENSG00000100461_23 (sequence is synthesized)
ttagacttaacaggctccttctctgtgcctaatgacagatctttccagcagatggcactatgacagtactgcattctacacttgtttttttctagtggggcggggcggggaggggggggg

SEQ ID NO: 115739 - DNA, 120 bp, Artificial Sequence
  ENSG00000100461_24 (sequence is synthesized)
gttgtgatcttgaagagttaagtaccagagctaagctgagctttcttaactctattggcctttgtacctgcctttgaccctctttgtagtagcgatcccaatccaatatccaaaggggtt

SEQ ID NO: 115740 - DNA, 120 bp, Artificial Sequence
  ENSG00000100461_25 (sequence is synthesized)
tgggtcttgtataacagcagggttctcctgacctgatgtctactgttgttcctctgtcagtcccctcaactcctgctttccatgtggctctgcctgggataacacaggcctgggaccagt

SEQ ID NO: 115741 - DNA, 120 bp, Artificial Sequence
  ENSG00000100461_26 (sequence is synthesized)
gaattgtagggaactgagtattccagaaatacctctgtgaaagggaaggtgcacctaccactgccttaataataagggggtgggagagaggctgtctcacccagcttagggaccaaatga

SEQ ID NO: 115742 - DNA, 120 bp, Artificial Sequence
  ENSG00000100461_27 (sequence is synthesized)
gaaggcctgaattcaggggcagggctctgtggggctccttttttgatctctatggcaacaaaatgctaagactttcttatgctaaaaatatggataattgctgttaggttttaatttgtc

SEQ ID NO: 115743 - DNA, 120 bp, Artificial Sequence
  ENSG00000100461_28 (sequence is synthesized)
agctctcagacttctaagccagtgatgttagcctctggggttgcttttaacacaaaatcatttaaatacttgaagcctgcttgagtcataaaaggccagtgggactctagctcctaagtc

SEQ ID NO: 115744 - DNA, 120 bp, Artificial Sequence
  ENSG00000100461_29 (sequence is synthesized)
gtcataaaaggccagtgggactctagctcctaagtctgtttgctgcttctgtaacaatagcacagactaatttgtaaagaaaagaggtgtaggctgggtgcactggctcacgcctgtaat

SEQ ID NO: 115745 - DNA, 67 bp, Artificial Sequence
  ENSG00000100461_30 (sequence is synthesized)
cgaggacagaaaagtgtatttctcacagttctggaggctgggaatttcaagagcatggtgcctgcat

SEQ ID NO: 115746 - DNA, 120 bp, Artificial Sequence
  ENSG00000100461_31 (sequence is synthesized)
gttctggaggctgggaatttcaagagcatggtgcctgcatcaggtgggggtcatcccatgtcagaagggcacaaggtagaaatgagtacatgagacaaagggaccatgggccaaacttgc

SEQ ID NO: 115747 - DNA, 120 bp, Artificial Sequence
  ENSG00000100461_32 (sequence is synthesized)
tttataacagccctctctcatgataacctgctgtgtgatagtgacattaatccactcatgagggctctgtccttgtgactcagtcacctcgtattaagccccatcttcaacactgttgca

SEQ ID NO: 115748 - DNA, 120 bp, Artificial Sequence
  ENSG00000100461_33 (sequence is synthesized)
ttgggagtcaaatttccaatgtgaacttttgggggacacattcaaaccacagcatttctgattcttccaggcctagatctcacatgatgttgctgttctcctggttaccacccccatccc

SEQ ID NO: 115749 - DNA, 120 bp, Artificial Sequence
  ENSG00000100461_34 (sequence is synthesized)
ttcccccatcttatcctagtttgctttctggaccgggggaaaagggaaggaggatgcactatttttaggtagaagctgctggctatgacccagcacccctacagttattgatttggcttc

SEQ ID NO: 115750 - DNA, 120 bp, Artificial Sequence
  ENSG00000100461_35 (sequence is synthesized)
taatgtatcttgagaagtgcagtgggtaccgtttttgttagtcatcctgaggccatgaactgggtcttctcatggctggcttggctccttcagactattataaatatccacaggccttgc

SEQ ID NO: 115751 - DNA, 120 bp, Artificial Sequence
  ENSG00000100461_36 (sequence is synthesized)
ctccctgccttcctctgcttggtttccttatgtttccatccctagctaccttggccttcctacactcggatccttccacctcagttctttcttgttcttagttcctcacatagcctcttg

SEQ ID NO: 115752 - DNA, 120 bp, Artificial Sequence
  ENSG00000100461_37 (sequence is synthesized)
ctgggagagagacaatgttggaagtaaggacgtatctaagacaatttccagtcttactccatataaggtgatggtatctagtgagtgacagttgctgtccgtgtgtgactcagtgccttc

SEQ ID NO: 115753 - DNA, 120 bp, Artificial Sequence
  ENSG00000100461_38 (sequence is synthesized)
ttgttactcatccctccatacgaggtggttagagtggagagaagcgggctgtgaacagactctgggcccagcttaaggtaaaagaaacttccctcaacatctacctgcacatggtggctg

SEQ ID NO: 115754 - DNA, 120 bp, Artificial Sequence
  ENSG00000100461_39 (sequence is synthesized)
gtggcgtaggggtgacattgtgatctagatcctttgccagcatagttagaatttccctaccagtcttcagttctagaaaagattctcacctgatttttgacttccagtctatgcttctgt

SEQ ID NO: 115755 - DNA, 120 bp, Artificial Sequence
  ENSG00000100461_40 (sequence is synthesized)
ctcttgacacaggaattctgcctgcttcctcagactcccaacaacccccagataggagttaccagtagaagcagaggcttgacctgtgaacttttagtcctggagcatatcatgaaggga

SEQ ID NO: 115756 - DNA, 120 bp, Artificial Sequence
  ENSG00000100461_41 (sequence is synthesized)
attgagtaaaaacctgaaggatggaattatatcacagtccctcttttccgtgtaatggaaaggctttagtgaaaatcaggcagcaacacttggacagtgaaaagagactctgaaaggtga

SEQ ID NO: 115757 - DNA, 120 bp, Artificial Sequence
  ENSG00000100461_42 (sequence is synthesized)
ggtgacaggaggtggcataatggtcattgttaacatttatgcaaggttggttgtaggttaggtgttctaatcgtgtattaagtcacaaaatcctcacaacaatcctctcaagtagtttat

SEQ ID NO: 115758 - DNA, 120 bp, Artificial Sequence
  ENSG00000100461_43 (sequence is synthesized)
tatctttactttgtaaacaaggaaacatatccaaataagttaaataattttccccataagcacaaagttagcaagttagggattccaatccaagtactctcgcttcagatcccttgatct

SEQ ID NO: 115759 - DNA, 120 bp, Artificial Sequence
  ENSG00000100461_44 (sequence is synthesized)
taaccttacctgcctctcagcaccaccatggaagacaaggccttggagtcagtgaggaagtgtcacttttcctatccctgtacccatagctctccgtagactcagaatttttccactgcc

SEQ ID NO: 115760 - DNA, 120 bp, Artificial Sequence
  ENSG00000100461_45 (sequence is synthesized)
atgtctttgcttatcttgagtgacagtgtttgtgggtgaaccttgaaggtgctctttctgctacaagggccctgggagatagcatgggcatgtgcattgagaagccagcctcagacctta

SEQ ID NO: 115761 - DNA, 120 bp, Artificial Sequence
  ENSG00000100461_46 (sequence is synthesized)
tcttgaagcagcttgaggccagacctactgtaggctcagcatcttgctaggaggcatgggagtgatctaacctgccagctatctctcttcctttcctccttctgctgatcaaagtcctgt

SEQ ID NO: 115762 - DNA, 120 bp, Artificial Sequence
  ENSG00000100461_47 (sequence is synthesized)
cctttaagaccctgaagctttcctaggtggagttgatctctcttttcagtattctttgtcctcttgtgggtcatcttactctacttttatttagtaaataaaataattgcaataaaaatt

SEQ ID NO: 115763 - DNA, 120 bp, Artificial Sequence
  ENSG00000100461_48 (sequence is synthesized)
attttattgaaaactccattacttgatggttacagcctgatgaggccagacttggatgtctttctcatgattgctttgccttgcacatattaaatgtctgtagaattgaatgaatgctgt

SEQ ID NO: 115764 - DNA, 120 bp, Artificial Sequence
  ENSG00000100461_49 (sequence is synthesized)
tcattaaagtgttaaagtcagcaccaggctttccaaaggctgccccttctaggctgcttttcccagcagcctcatccattccttcctcactccaccaggagagaagatgcagctttactc

SEQ ID NO: 115765 - DNA, 120 bp, Artificial Sequence
  ENSG00000100461_50 (sequence is synthesized)
tttctgatgttaccatggtagcctgtgatactttctttctaaagtgctgcttgccatccaccagagactgatgtttccatggcaaccaggtgaaggcaatagtcacgagctggatgcagg

SEQ ID NO: 115766 - DNA, 120 bp, Artificial Sequence
  ENSG00000100461_51 (sequence is synthesized)
aaaggaattccggtctgagaagctgcatatctgaatcttctagcttcagacatcctttcccctctctcataacttttgcgctttatatccaggactggtttgctctctggtgtgcccttg

SEQ ID NO: 115767 - DNA, 120 bp, Artificial Sequence
  ENSG00000100461_52 (sequence is synthesized)
gttgagagagctctgtgaaagtgaggtgaagcagaccaaccaacttagatcacgtgggaaggtgggtgcaaggaaagagctgagcaaagatcacttcaaaaagttggatgaagtctatta

SEQ ID NO: 115768 - DNA, 120 bp, Artificial Sequence
  ENSG00000100461_53 (sequence is synthesized)
gttgttcagatgatctgctctcaagagcccttaaggagttggctggagtttctggagagccattaagcagttatttttgagagcaatgggtagatggatgaggtgcctgaagactggaaa

SEQ ID NO: 115769 - DNA, 120 bp, Artificial Sequence
  ENSG00000100461_54 (sequence is synthesized)
gcagccagtcagtgccggattgtagaaaggagaaacaatgaccttggaaatcggagacccgtcaaacttgccaatgttccagaaaggatgggagtttcagtcagctttcaggcatcagga

SEQ ID NO: 115770 - DNA, 120 bp, Artificial Sequence
  ENSG00000100461_55 (sequence is synthesized)
agcctacttgcttagaattagtggtgctaagaattcgcctcctcaactcctgagcataagcaagctaggggacctccaccctgtagccgagtgtcacactctggaaccacacagcatggt

SEQ ID NO: 115771 - DNA, 120 bp, Artificial Sequence
  ENSG00000100461_56 (sequence is synthesized)
tcagatccctcttccctcacaaactagctgaataagcttgggtaggttacttcacttctctcacacttcatctgtaaaaaggaaatgataacacctatctcatagggatgttgtgagaat

SEQ ID NO: 115772 - DNA, 120 bp, Artificial Sequence
  ENSG00000100461_57 (sequence is synthesized)
tcattgagaaaggtttggaacttggctcattactgtcctcagtattttcactcctctggatgcctactcacttgattttctagctgacttcattctccccaactttagagctcaaggttt

SEQ ID NO: 115773 - DNA, 120 bp, Artificial Sequence
  ENSG00000100461_58 (sequence is synthesized)
atggggaaaagcaagggcagtgcaatggtgaaaataaatcttcatttttaaataaataaattgttcctgcactgaagccccaagcttacaaggtcttgggtcacacacaacctgcctagt

SEQ ID NO: 115774 - DNA, 120 bp, Artificial Sequence
  ENSG00000100461_59 (sequence is synthesized)
tttcaggaaaacagatcccactagcccaatctctttatgcttgaggctctgtccacatagttagattttaaccagatggtttcgaaaaatcaaaatgagcccccctcacaggtaccttca

SEQ ID NO: 115775 - DNA, 120 bp, Artificial Sequence
  ENSG00000100461_60 (sequence is synthesized)
aggtacctaacaccattagctttgtctggcaggggaaaaataccagggcactcagttttgttttgttttgagacagggtctggctctgttgcccatgctggagtacagtggtgccatcac

SEQ ID NO: 115776 - DNA, 120 bp, Artificial Sequence
  ENSG00000100461_61 (sequence is synthesized)
gccatcacagctcactgcagtctcaacctcctgagctcaaatgatcctcttgattagctggaactacaggtatgtgccactatgcccagctaagttttgtattttttgtagagatggggt

SEQ ID NO: 115777 - DNA, 78 bp, Artificial Sequence
  ENSG00000100461_62 (sequence is synthesized)
tccctcctactgcctgagagcaccctctgttaccaccctttccttagcgtctcagcctcccccaagcacctgtctttg

SEQ ID NO: 115778 - DNA, 120 bp, Artificial Sequence
  ENSG00000100461_63 (sequence is synthesized)
accctttccttagcgtctcagcctcccccaagcacctgtctttgttggtctccagagcctagccctacactggcattttcctttctgaataagtattttttttatttatttatttttatt

SEQ ID NO: 115779 - DNA, 69 bp, Artificial Sequence
  ENSG00000100461_64 (sequence is synthesized)
tgcactgggccttatttatttatttttaattaattaattaattttttttgagatggagtcttgctttgt

SEQ ID NO: 115780 - DNA, 61 bp, Artificial Sequence
  ENSG00000100461_65 (sequence is synthesized)
tagccaggatggtttcgatctcctgacctagtgatccgccttatttatgtatttttctgag

SEQ ID NO: 115781 - DNA, 75 bp, Artificial Sequence
  ENSG00000100461_66 (sequence is synthesized)
acaggcgtgagccactgcgcccggctgggccttatttatgtatttttctgagacagagtctcatggatctctgct

SEQ ID NO: 115782 - DNA, 81 bp, Artificial Sequence
  ENSG00000100461_67 (sequence is synthesized)
tgcccgacctgagtaagtattttaaatcagcacaggtcctctgcttaaagtcaagttgtaatttgaacacaaaaatggaaa

SEQ ID NO: 115783 - DNA, 120 bp, Artificial Sequence
  ENSG00000100461_68 (sequence is synthesized)
tgcttaaagtcaagttgtaatttgaacacaaaaatggaaaatcatgcagtaaaataccatcgtggagcttcaattgccaatctgtcccccaaccttccatcagatgacaaaacccaaaaa

SEQ ID NO: 115784 - DNA, 120 bp, Artificial Sequence
  ENSG00000100461_69 (sequence is synthesized)
agtgttacccgtgagtcctatggaaggcacgttggactttgtagaccataacttaaatttttatctccaaatggtgctgtgctttgagagtttagcaagctgctttgatgcctaaataaa

SEQ ID NO: 115785 - DNA, 120 bp, Artificial Sequence
  ENSG00000100461_70 (sequence is synthesized)
gggccaggacataggttgcaaaaggcattactacttccaccgcttctctgtataatgcttgagaaattacaaagatctttgctcttttatttagtcctcatgacttcgctataaggtagg

SEQ ID NO: 115786 - DNA, 120 bp, Artificial Sequence
  ENSG00000100461_71 (sequence is synthesized)
tattcttcattttagagttgggatagcatagctgagttcagcaaaccagacaggttaagagtgacttcatccacagacccccatccaggaaacatcctgagcactaattgaaaagcattc

SEQ ID NO: 115787 - DNA, 120 bp, Artificial Sequence
  ENSG00000100461_72 (sequence is synthesized)
aagggcttactgaatttgcattcacatctggagttttcaaggccactaagctgtggaaacttgacatcaatattcaaatagatgaaaagggaccttaagcatatccatcagggagtcacc

SEQ ID NO: 115788 - DNA, 120 bp, Artificial Sequence
  ENSG00000100461_73 (sequence is synthesized)
gagatgataaaggcctgagaagcagtatgctcttgtccggcatttgtgtcctttgacgactgcaccatccacccaaattttgctgccttctttataggaagggccttttcctcatgtggt

SEQ ID NO: 115789 - DNA, 120 bp, Artificial Sequence
  ENSG00000100461_74 (sequence is synthesized)
gggctgcccactgtttcttctctgtgcatttgctcatgtagtttgaccacaaggaatgcttttccttctttctctcaactatctatagcctacatatcctttaaggcccagtttctaaaa

SEQ ID NO: 115790 - DNA, 120 bp, Artificial Sequence
  ENSG00000100461_75 (sequence is synthesized)
tatgtcttccaaatttactgtttcttccattcagaattcctggagcacatgaggtagcccccagttagatagaatgtggtattgtttgctgctattttgcctgttttgtgctgtatcacc

SEQ ID NO: 115791 - DNA, 120 bp, Artificial Sequence
  ENSG00000100461_76 (sequence is synthesized)
tcatccatctccccagcttaattgcaagctatttgacgggcagaaattgtgtcttatttgtatttgttttccccattgggcccggcacactgattggcatattgcagatgtttagtactt

SEQ ID NO: 115792 - DNA, 120 bp, Artificial Sequence
  ENSG00000100461_77 (sequence is synthesized)
gagagaaacaaaatgtcttctagcatttgtggatgaaagattaaaatgtccaggaaaatttacttagattgatgtggattgaaactatattagattaataaaaagatgtgtgtgtgtgaa

SEQ ID NO: 115793 - DNA, 120 bp, Artificial Sequence
  ENSG00000100461_78 (sequence is synthesized)
aaacaacaaatgcactatgaaccctgcttgagggtgcttattataacacattgtgattggcaggatactcaggcacagaaagggttggtattcaaaatttactggtgtggtggctcatgc

SEQ ID NO: 115794 - DNA, 120 bp, Artificial Sequence
  ENSG00000100461_79 (sequence is synthesized)
ttctagcctttgattattctctttcctttggcttcccatttacctcttctttccacaggtaaatcagtggcacagtatactgcctccttgtgcctctggatcctgccacttcacatctac

SEQ ID NO: 115795 - DNA, 120 bp, Artificial Sequence
  ENSG00000100461_80 (sequence is synthesized)
caaaggaacggagagaaccgggacccccctgcggggacccggaactggccgggctcggtggctcatgtctgtaatcccagccctttgggaggaccaggcaggcggatcacctgaggtcag

SEQ ID NO: 115796 - DNA, 120 bp, Artificial Sequence
  ENSG00000100461_81 (sequence is synthesized)
aatgacccataaaccctggtgcctgaagcttggactagccttctaccccttgagatgagtgcattgcttgagatcttggctttgctcctacactctgtcagtggccctggtatgggggtg

SEQ ID NO: 115797 - DNA, 120 bp, Artificial Sequence
  ENSG00000100461_82 (sequence is synthesized)
ttcaggagttcacccagcttccctggtgctgcaacttggctctttgggtaatagtaaccaggctgcagctaaaaggttgggggtgtgagggaggttaggtatgggcttttaaagacatgc

SEQ ID NO: 115798 - DNA, 120 bp, Artificial Sequence
  ENSG00000100461_83 (sequence is synthesized)
tttatagaattgatgtttctcataacagggatgggaataggaaattatacttccctctggtgctaccccatttgaagcaatttctgcaccgagaaggatcagttattaacgtagcactat

SEQ ID NO: 115799 - DNA, 120 bp, Artificial Sequence
  ENSG00000100461_84 (sequence is synthesized)
ggggagaatagtgaggccacctaattatgggcaagcttcaccttttcctgacattccaacaaaatggttgccaattcctataactggttcttccagccccatgtgactccaggctgagaa

SEQ ID NO: 115800 - DNA, 120 bp, Artificial Sequence
  ENSG00000100461_85 (sequence is synthesized)
ctggctgccagccacaaagtctgatagaagcttgtattttctgggcttaaaccaggcagcatacactcccacagtgacccacagggcagagggcagtaggttgtattctgtcattggaat

SEQ ID NO: 115801 - DNA, 120 bp, Artificial Sequence
  ENSG00000100461_86 (sequence is synthesized)
tgctcacctcaaaaatatccagtaaaggcaagccatgtataacacctgcctaggaactgtcagtaccacatgccaggccctaaggcaggtaatgctgctagctagctaaacaagctagct

SEQ ID NO: 115802 - DNA, 120 bp, Artificial Sequence
  ENSG00000100461_87 (sequence is synthesized)
gtggtgttgacaattctgtggtggcaagtaacttttgtaaccttttctcgctctctgtgtgactgagatatggaaaggcttctgtggggcatttttgcccttgcattgttgccttttggg

SEQ ID NO: 115803 - DNA, 120 bp, Artificial Sequence
  ENSG00000100461_88 (sequence is synthesized)
tcaacaaccttgacacttaaacaaacagcagactgggaatcctctttgtaccagtgtgttgctgggtgctgctgataaaagggactagagagtaaaggccttctggtcagcaggtcactt

SEQ ID NO: 115804 - DNA, 120 bp, Artificial Sequence
  ENSG00000100461_89 (sequence is synthesized)
agtcaacagctcttgtgtgtatgtgggggtgtgggttctgccttgctgtcagcactagggtgtgttccctcttaagcctggaattaggagttccagattcctagtacttaactaaaattt

SEQ ID NO: 115805 - DNA, 120 bp, Artificial Sequence
  ENSG00000100461_90 (sequence is synthesized)
atgaataaaaggttatttgagccaaattacaggaatgtgtaatacttgagggttagctggagaacaatgaccaggtattgggagggctggtctcaacacatttcactcttcagggagcca

SEQ ID NO: 115806 - DNA, 64 bp, Artificial Sequence
  ENSG00000100461_91 (sequence is synthesized)
tagtgagctgacatggtgccactgcactctagcctcagtgacagagtgacagagtgggactccg

SEQ ID NO: 115807 - DNA, 78 bp, Artificial Sequence
  ENSG00000100461_92 (sequence is synthesized)
tactaggatagagaactgaattaaaagcccaggagccttgttcttagcttgtcttccatttgatatacccatttgtga

SEQ ID NO: 115808 - DNA, 120 bp, Artificial Sequence
  ENSG00000100461_93 (sequence is synthesized)
tgttcttagcttgtcttccatttgatatacccatttgtgaaataacttgtcaggctaggtttcctacaataataaaattttgcattgttagattcttaatggagctgaaagattgaaaag

SEQ ID NO: 115809 - DNA, 120 bp, Artificial Sequence
  ENSG00000100461_94 (sequence is synthesized)
tgactgccattgagtccattggaaaaggtccttttcagagaaccattttgaggtgatgggcctaggtcatattttctgggaaagaaaagtttgtacctcagtgagcatacaattttcctg

SEQ ID NO: 115810 - DNA, 120 bp, Artificial Sequence
  ENSG00000100461_95 (sequence is synthesized)
ggaacggagagaaccgggacccccctgcggggacccggaactgagtcttggtctgtcacccaacctggagtgcaatggtgccatctcggctggctgcaacttccgcctcccgggttcaag

SEQ ID NO: 115811 - DNA, 83 bp, Artificial Sequence
  ENSG00000100461_96 (sequence is synthesized)
gagctccactccccacaacatactcaaaggaacggagagaaccgggacccccctgcggggacccggaactgggtcacacattg

SEQ ID NO: 115812 - DNA, 79 bp, Artificial Sequence
  ENSG00000100461_97 (sequence is synthesized)
acatggcgaaaccctggttctacaaaaaatgcaaaaatgagctagatatggtcatgtgtgtctgtaatcctagccacac

SEQ ID NO: 115813 - DNA, 120 bp, Artificial Sequence
  ENSG00000100461_98 (sequence is synthesized)
gccactgcactccagcctgggtgacagcggaaaccctgtcttaaaaaaacaatgagatgaagtactggaatctggttttctcaccatggaagacccagcattggaccaatgagaataagg

SEQ ID NO: 115814 - DNA, 88 bp, Artificial Sequence
  ENSG00000100461_99 (sequence is synthesized)
gagctccactccccacaacatactcaaaggaacggagagaaccgggacccccctgcggggacccggaactcacagtggcgcgttctcg

SEQ ID NO: 115815 - DNA, 120 bp, Artificial Sequence
  ENSG00000100461_100 (sequence is synthesized)
agactctaggaactatccgagctccactccccacaacatactcaaaggaacggagagaaccgggacccccctgcggggacccggaactggatggaagaaaacatactctatgtggatgag

SEQ ID NO: 115816 - DNA, 120 bp, Artificial Sequence
  ENSG00000100461_101 (sequence is synthesized)
ccaatgagaataaggtttcaccttttgtttttctctattctttagttataggtatggacacagtaagagtcctcatttcagagagaagagcccagtcaggtgggttgataatgaacactg

SEQ ID NO: 115817 - DNA, 120 bp, Artificial Sequence
  ENSG00000100461_102 (sequence is synthesized)
gattacaggtgtgagccactgcgcccggactatccttgactgttccaagccacaaagtcgaactagttcagatctatagggtgtaaaaataaacctagagtaagtgacagctggtaaggt

SEQ ID NO: 115818 - DNA, 120 bp, Artificial Sequence
  ENSG00000100462_0 (sequence is synthesized)
agcgcgaggagaaagatggcggcgatggcggtcgggggtgctggtgggagccgcgtgtccagcgggagggacctgaattgcgtccccgaaatagctgacacactaggggctgtggccaag

SEQ ID NO: 115819 - DNA, 120 bp, Artificial Sequence
  ENSG00000100462_1 (sequence is synthesized)
caggggtttgatttcctctgcatgcctgtcttccatccgcgtttcaagagggagttcattcaggaacctgctaagaatcggcccggtccccagacacgatcagacctactgctgtcagga

SEQ ID NO: 115820 - DNA, 120 bp, Artificial Sequence
  ENSG00000100462_2 (sequence is synthesized)
agggactggaatacgctaattgtgggaaagctttctccatggattcgtccagactcaaaagtggagaagattcgcaggaactccgaggcggccatgttacaggagctgaattttggtgca

SEQ ID NO: 115821 - DNA, 120 bp, Artificial Sequence
  ENSG00000100462_3 (sequence is synthesized)
tatttgggtcttccagctttcctgctgccccttaatcaggaagataacaccaacctggccagagttttgaccaaccacatccacactggccatcactcttccatgttctggatgcgggta

SEQ ID NO: 115822 - DNA, 120 bp, Artificial Sequence
  ENSG00000100462_4 (sequence is synthesized)
cccttggtggcaccagaggacctgagagatgatataattgagaatgcaccaactacacacacagaggagtacagtggggaggagaaaacgtggatgtggtggcacaacttccggactttg

SEQ ID NO: 115823 - DNA, 120 bp, Artificial Sequence
  ENSG00000100462_5 (sequence is synthesized)
tgtgactatagtaagaggattgcagtggctcttgaaattggggctgacctcccatctaatcatgtcattgatcgctggcttggggagcccatcaaagcagccattctccccactagcatt

SEQ ID NO: 115824 - DNA, 120 bp, Artificial Sequence
  ENSG00000100462_6 (sequence is synthesized)
ttcctgaccaataagaagggatttcctgttctttctaagatgcaccagaggctcatcttccggctcctcaagttggaggtgcagttcatcatcacaggcaccaaccaccactcagagaag

SEQ ID NO: 115825 - DNA, 120 bp, Artificial Sequence
  ENSG00000100462_7 (sequence is synthesized)
gagttctgctcctacctccaatacctggaatacttaagccagaaccgtcctccacctaatgcctatgaactctttgccaagggctatgaagactatctgcagtccccgcttcagccactg

SEQ ID NO: 115826 - DNA, 120 bp, Artificial Sequence
  ENSG00000100462_8 (sequence is synthesized)
atggacaatctggaatctcagacatatgaagtgtttgaaaaggaccccatcaaatactctcagtaccagcaggccatctataaatgtctgctagaccgagtaccagaagaggagaaggat

SEQ ID NO: 115827 - DNA, 120 bp, Artificial Sequence
  ENSG00000100462_9 (sequence is synthesized)
ctgggagcaggacggggacccctggtgaacgcttccctgcgggcagccaagcaggccgaccggcggataaagctgtatgctgtggagaaaaacccaaatgccgtggtgacgctagagaac

SEQ ID NO: 115828 - DNA, 120 bp, Artificial Sequence
  ENSG00000100462_10 (sequence is synthesized)
tggcagtttgaagaatggggaagccaagtgaccgtagtctcatcagacatgagggaatgggtggctccagagaaagcagacatcattgtcagtgagcttctgggctcatttgctgacaat

SEQ ID NO: 115829 - DNA, 120 bp, Artificial Sequence
  ENSG00000100462_11 (sequence is synthesized)
gaattgtcgcctgagtgcctggatggagcccagcacttcctaaaagatgatggtgtgagcatccccggggagtacacttcctttctggctcccatctcttcctccaagctgtacaatgag

SEQ ID NO: 115830 - DNA, 120 bp, Artificial Sequence
  ENSG00000100462_12 (sequence is synthesized)
gtccgagcctgtagggagaaggaccgtgaccctgaggcccagtttgagatgccttatgtggtacggctgcacaacttccaccagctctctgcaccccagccctgtttcaccttcagccat

SEQ ID NO: 115831 - DNA, 120 bp, Artificial Sequence
  ENSG00000100462_13 (sequence is synthesized)
cccaacagagatcctatgattgacaacaaccgctattgcaccttggaatttcctgtggaggtgaacacagtactacatggctttgccggctactttgagactgtgctttatcaggacatc

SEQ ID NO: 115832 - DNA, 120 bp, Artificial Sequence
  ENSG00000100462_14 (sequence is synthesized)
actctgagtatccgtccagagactcactctcctgggatgttctcatggtttcccatcctcttccctattaagcagcccataacggtacgtgaaggccaaaccatctgtgtgcgtttctgg

SEQ ID NO: 115833 - DNA, 120 bp, Artificial Sequence
  ENSG00000100462_15 (sequence is synthesized)
cgatgcagcaattccaagaaggtgtggtatgagtgggctgtgacagcaccagtctgttctgctattcataaccccacaggccgctcatataccattggcctctagccctgcgtgccaagt

SEQ ID NO: 115834 - DNA, 120 bp, Artificial Sequence
  ENSG00000100462_16 (sequence is synthesized)
gtccagagccttggaagcagcttcaggttctgctcctgtagtacagaaggtgcagtacatctatgggctgtgattccccttgcccatcagagaggagcatttcaatctgctttcctgcct

SEQ ID NO: 115835 - DNA, 120 bp, Artificial Sequence
  ENSG00000100462_17 (sequence is synthesized)
tacatcaaggtgggcaagggattataattaattgcagggctcaagccaccaatctatgaagacctcaggccagggggtgaggaattagtgctggatttgaagctacgcactcagcctcaa

SEQ ID NO: 115836 - DNA, 120 bp, Artificial Sequence
  ENSG00000100462_18 (sequence is synthesized)
gaactccctggaatatccctgagaacatggggtttgaacggattttcagcctttttctgttcttgttttgatggttttgtgtaagaggaaatacaaataaagttatagccctttactgca

SEQ ID NO: 115837 - DNA, 120 bp, Artificial Sequence
  ENSG00000100462_19 (sequence is synthesized)
atttagatttatggggggcccagtgctcaatgaatggagatctttgtgtgattagagaagagaccctcttcagcataggcaaaagtcacagccatggagacctctgttttttcattattt

SEQ ID NO: 115838 - DNA, 120 bp, Artificial Sequence
  ENSG00000100462_20 (sequence is synthesized)
tgtccacacaggtatccgtccagagactcactctcctgggatgttctcatggtttcccatcctcttccctattaaggtaggaactgcttttaagactctctagttaagcagtaacctttg

SEQ ID NO: 115839 - DNA, 120 bp, Artificial Sequence
  ENSG00000100462_21 (sequence is synthesized)
tctgcatcaggctatcccatgtctatgtagaaaaaacctttgtctctcatttctactcttgattcccaaaactaaaaattgaacaagtaaagtgctgaaccttattcagtatttgtcttt

SEQ ID NO: 115840 - DNA, 120 bp, Artificial Sequence
  ENSG00000100462_22 (sequence is synthesized)
accatcccatatgccccttaattattagaggcaataacaacttctgctttatcggggccctcattctcctccttttctgacttggatatatttgttagtccctgggatatagataacttg

SEQ ID NO: 115841 - DNA, 120 bp, Artificial Sequence
  ENSG00000100462_23 (sequence is synthesized)
gaataagaatcaggaatttcatatatagtatacaattttgctacttcccctctgtctcagactggctttctcttaaagaagtaaacagattttgcgcaaaggagcaaggaagggtttctt

SEQ ID NO: 115842 - DNA, 120 bp, Artificial Sequence
  ENSG00000100473_0 (sequence is synthesized)
gcactcgggcgcagccgggtggatctcgagcaggtgtgagcagcctatcagtcaccatgtccgcagcctggatcccggctctcggcctcggtgtgtgtctgctgctgctgccggggcccg

SEQ ID NO: 115843 - DNA, 120 bp, Artificial Sequence
  ENSG00000100473_1 (sequence is synthesized)
cgggcagcgagggagccgctcccattgctatcacatgttttaccagaggcttggacatcaggaaagagaaagcagatgtcctctgcccagggggctgccctcttgaggaattctctgtgt

SEQ ID NO: 115844 - DNA, 120 bp, Artificial Sequence
  ENSG00000100473_2 (sequence is synthesized)
atgggaacatagtatatgcttctgtatcgagcatatgtggggctgctgtccacaggggagtaatcagcaactcagggggacctgtacgagtctatagcctacctggtcgagaaaactatt

SEQ ID NO: 115845 - DNA, 120 bp, Artificial Sequence
  ENSG00000100473_3 (sequence is synthesized)
cctcagtagatgccaatggcatccagtctcaaatgctttctagatggtctgcttctttcacagtaactaaaggcaaaagtagtacacaggaggccacaggacaagcagtgtccacagcac

SEQ ID NO: 115846 - DNA, 120 bp, Artificial Sequence
  ENSG00000100473_4 (sequence is synthesized)
atccaccaacaggtaaacgactaaagaaaacacccgagaagaaaactggcaataaagattgtaaagcagacattgcatttctgattgatggaagctttaatattgggcagcgccgattta

SEQ ID NO: 115847 - DNA, 120 bp, Artificial Sequence
  ENSG00000100473_5 (sequence is synthesized)
atttacagaagaattttgttggaaaagtggctctaatgttgggaattggaacagaaggaccacatgtgggccttgttcaagccagtgaacatcccaaaatagaattttacttgaaaaact

SEQ ID NO: 115848 - DNA, 120 bp, Artificial Sequence
  ENSG00000100473_6 (sequence is synthesized)
ttacatcagccaaagatgttttgtttgccataaaggaagtaggtttcagagggggtaattccaatacaggaaaagccttgaagcatactgctcagaaattcttcacggtagatgctggag

SEQ ID NO: 115849 - DNA, 120 bp, Artificial Sequence
  ENSG00000100473_7 (sequence is synthesized)
taagaaaagggatccccaaagtggtggtggtatttattgatggttggccttctgatgacatcgaggaagcaggcattgtggccagagagtttggtgtcaatgtatttatagtttctgtgg

SEQ ID NO: 115850 - DNA, 120 bp, Artificial Sequence
  ENSG00000100473_8 (sequence is synthesized)
ccaagcctatccctgaagaactggggatggttcaggatgtcacatttgttgacaaggctgtctgtcggaataatggcttcttctcttaccacatgcccaactggtttggcaccacaaaat

SEQ ID NO: 115851 - DNA, 120 bp, Artificial Sequence
  ENSG00000100473_9 (sequence is synthesized)
acgtaaagcctctggtacagaagctgtgcactcatgaacaaatgatgtgcagcaagacctgttataactcagtgaacattgcctttctaattgatggctccagcagtgttggagatagca

SEQ ID NO: 115852 - DNA, 120 bp, Artificial Sequence
  ENSG00000100473_10 (sequence is synthesized)
tgaatttgtttccaacatagccaagacttttgaaatctcggacattggtgccaagatagctgctgtacagtttacttatgatcagcgcacggagttcagtttcactgactatagcaccaa

SEQ ID NO: 115853 - DNA, 120 bp, Artificial Sequence
  ENSG00000100473_11 (sequence is synthesized)
agagaatgtcctagctgtcatcagaaacatccgctatatgagtggtggaacagctactggtgatgccatttccttcactgttagaaatgtgtttggccctataagggagagccccaacaa

SEQ ID NO: 115854 - DNA, 120 bp, Artificial Sequence
  ENSG00000100473_12 (sequence is synthesized)
gaacttcctagtaattgtcacagatgggcagtcctatgatgatgtccaaggccctgcagctgctgcacatgatgcaggaatcactatcttctctgttggtgtggcttgggcacctctgga

SEQ ID NO: 115855 - DNA, 120 bp, Artificial Sequence
  ENSG00000100473_13 (sequence is synthesized)
tgacctgaaagatatggcttctaaaccgaaggagtctcatgctttcttcacaagagagttcacaggattagaaccaattgtttctgatgtcatcagaggcatttgtagagatttcttaga

SEQ ID NO: 115856 - DNA, 120 bp, Artificial Sequence
  ENSG00000100473_14 (sequence is synthesized)
atcccagcaataatggtaacattttgacaactgaaagaaaaagtacaaggggatccagtgtgtaaattgtattctcataatactgaaatgctttagcatactagaatcagatacaaaact

SEQ ID NO: 115857 - DNA, 120 bp, Artificial Sequence
  ENSG00000100473_15 (sequence is synthesized)
attaagtatgtcaacagccatttaggcaaataagcactcctttaaagccgctgccttctggttacaatttacagtgtactttgttaaaaacactgctgaggcttcataatcatggctctt

SEQ ID NO: 115858 - DNA, 120 bp, Artificial Sequence
  ENSG00000100473_16 (sequence is synthesized)
agaaactcaggaaagaggagataatgtggattaaaaccttaagagttctaaccatgcctactaaatgtacagatatgcaaattccatagctcaataaaagaatctgatacttagaccaaa

SEQ ID NO: 115859 - DNA, 120 bp, Artificial Sequence
  ENSG00000100473_17 (sequence is synthesized)
agcaacattcgttctctaaccattctgtattgattatataagcaaaatgaaaagagaaacttaaatgaacacagctctttaacatggttcaggtacacatattttgacccaagtggatat

SEQ ID NO: 115860 - DNA, 120 bp, Artificial Sequence
  ENSG00000100473_18 (sequence is synthesized)
tttcttaaaaccaatcaataatagctagctattactgcagactataaaatctggatatagaaaggagacctgtatcaaactgcttttgtagtgtgttttcataacaacttatgactaaaa

SEQ ID NO: 115861 - DNA, 120 bp, Artificial Sequence
  ENSG00000100473_19 (sequence is synthesized)
atatcacactgaataagagagcaggattgccaggtatttttctatttctctccttaattttatatgtatatagatatatttggcttatattctaagtcacctaagtacttaaaagttaag

SEQ ID NO: 115862 - DNA, 120 bp, Artificial Sequence
  ENSG00000100473_20 (sequence is synthesized)
ttggtaaagtatttactgactgcttataaacatttaaagacaaagacatttcaaataactgcagaaaaaatattgtagtttgaatatttaagcaataaaactgctagtgagttattgtaa

SEQ ID NO: 115863 - DNA, 120 bp, Artificial Sequence
  ENSG00000100473_21 (sequence is synthesized)
atgcaaaataagtttaaaagggaatctgtggcattcaaccgataaacagaagatcactaagagatgaaaaaaagctactcttggagctcacttcccccaacaagagcaccacattcctaa

SEQ ID NO: 115864 - DNA, 120 bp, Artificial Sequence
  ENSG00000100473_22 (sequence is synthesized)
gcactcgggcgcagccgggtggatctcgagcaggtgcggagccccgggcggcgggcgcgggtgcgagggatccctgacgcctctgtccctgtttctttgtcgctcccagcctgtctgtcg

SEQ ID NO: 115865 - DNA, 120 bp, Artificial Sequence
  ENSG00000100473_23 (sequence is synthesized)
tcgttttggcgcccccgcctccccgcggtgcggggttgcacaccgatcctgggcttcgctcgatttgccgccgaggcgcctcccagacctagaggggcgctggcctggagcagcgggtcg

SEQ ID NO: 115866 - DNA, 120 bp, Artificial Sequence
  ENSG00000100473_24 (sequence is synthesized)
tctgtgtcctctctcctctgcgccgcgcccggggatccgaagggtgcggggctctgaggaggtgacgcgcggggcctcccgcaccctggccttgcccgcattctccctctctcccaggtg

SEQ ID NO: 115867 - DNA, 120 bp, Artificial Sequence
  ENSG00000100473_25 (sequence is synthesized)
cggggcccgcgggcagcgagggagccggtgagtgggggagctggggtgcgtccaggcggtcgcaggggctgagcaccagcgggtacaagcgggactcagatccagccccttgggcttcag

SEQ ID NO: 115868 - DNA, 120 bp, Artificial Sequence
  ENSG00000100473_26 (sequence is synthesized)
gtgtaacccctataatcagaagcactcgcggtctcactctacacgctagagagtttaaaaagtttgtaccacgtgtagaggtccgggtatgggtgtgtggtttggtgtattttccagtgt

SEQ ID NO: 115869 - DNA, 120 bp, Artificial Sequence
  ENSG00000100473_27 (sequence is synthesized)
aaaaggcaacgctttcctaagagctaccgtttgttttccttgaaagtaggaatgagggttaagtatccctcatggctgtatttctcccgctctacttaacaaaagtcagtgttcgcaact

SEQ ID NO: 115870 - DNA, 120 bp, Artificial Sequence
  ENSG00000100473_28 (sequence is synthesized)
aaccgataaacagaagatcactaagagatgaaaaaaagctactcttggagctcacttcccccaacaagagcaccacattcctaacccctaaggcagcacacagagtccaaaaaaaaaaaa

SEQ ID NO: 115871 - DNA, 120 bp, Artificial Sequence
  ENSG00000100473_29 (sequence is synthesized)
attccaatacagatataacattggagaagtatctctttgtaatgctaaaaagaagtgaaaatcaacagacttatctaatgaatgcagatgtggcagaaagaatgagtagcactaccgttg

SEQ ID NO: 115872 - DNA, 120 bp, Artificial Sequence
  ENSG00000100473_30 (sequence is synthesized)
aaaacccagaactttcacattagagttttatagtggctggggactatattaaattggaaaacaaccttgtggcttgccaaaatctggaatggtatggaagggtatataagtcaatagtca

SEQ ID NO: 115873 - DNA, 120 bp, Artificial Sequence
  ENSG00000100473_31 (sequence is synthesized)
taactagaagtgtagaaattagggaagtaaaacttaaatctcacactgtagtctccccaccactatgccccaagaagtcctaagaatgcttacaatattatctcctttttcttcagctcc

SEQ ID NO: 115874 - DNA, 120 bp, Artificial Sequence
  ENSG00000100478_0 (sequence is synthesized)
actaaaagccaaaatggctgccccgaggaggcccgcaccgcgtagccagtgaaggttggggagcaagcttatgcgggaaagagggagggggactccaggaaaagccgttgagaggaccat

SEQ ID NO: 115875 - DNA, 120 bp, Artificial Sequence
  ENSG00000100478_1 (sequence is synthesized)
cacaacctgagcagcacaggttccagttacagccatcccttgtcataacttttgaactgtatttggaaaaatactggccaggaaagaaaaatgataaaatttttcctcatggtgaataaa

SEQ ID NO: 115876 - DNA, 120 bp, Artificial Sequence
  ENSG00000100478_2 (sequence is synthesized)
caagggcagactcgactttctaagtactatgaacatgtggatattaataagcgtacacttctggaaacagaagtcataaagagctgtctctctcgatccaatgaacaatgctctttcatt

SEQ ID NO: 115877 - DNA, 120 bp, Artificial Sequence
  ENSG00000100478_3 (sequence is synthesized)
gaatataaggattttaagctgatatatcggcagtatgcagctctcttcattgtggttggagttaatgacactgagaacgagatggctatttatgaattcattcataactttgtggaagtt

SEQ ID NO: 115878 - DNA, 120 bp, Artificial Sequence
  ENSG00000100478_4 (sequence is synthesized)
ttagatgagtatttcagccgagtgagtgaattagatataatgtttaatttggataaagtacacatcattttggatgagatggtgttaaatggctgcattgtggaaactaacagggcaaga

SEQ ID NO: 115879 - DNA, 120 bp, Artificial Sequence
  ENSG00000100478_5 (sequence is synthesized)
attcttgcccctctactaattcttgataagatgtcagaaagctgaaaggaagtctcttcgagacaatatggatttatcagaaatgcgagtaccgtggaatacatctcaacatgttaaccc

SEQ ID NO: 115880 - DNA, 120 bp, Artificial Sequence
  ENSG00000100478_6 (sequence is synthesized)
agaagaatctggaagaccacaattacaaaatggggtatccttccaaagacattataaataggcattttccacagttcctaaaaagaaaacacaactgtactttaaaatatgtacaaagaa

SEQ ID NO: 115881 - DNA, 120 bp, Artificial Sequence
  ENSG00000100478_7 (sequence is synthesized)
aaaaatttctttaaactgagagagaagttttattttctaattgtaaacatatctgtcgcactttaaattctgttgagcacctaaggaacccttcttggtctatgcttcttttgcaaattg

SEQ ID NO: 115882 - DNA, 120 bp, Artificial Sequence
  ENSG00000100478_8 (sequence is synthesized)
aattcaggaatagcaggatggtagtgggaagaaagtatggcagttttccgtcagccaataaagttttaaaatttaaacacaaggcattttgagtaacgctgttttctgaaagctattttt

SEQ ID NO: 115883 - DNA, 120 bp, Artificial Sequence
  ENSG00000100478_9 (sequence is synthesized)
cgctgttttctgaaagctatttttttttttttgagacggagtctagtctagctgtgtcacctggcacattctcggctcactgcaacctccacttccggggttcaagcgattctcctgcct

SEQ ID NO: 115884 - DNA, 120 bp, Artificial Sequence
  ENSG00000100478_10 (sequence is synthesized)
gaacgctgggattacagatgagccacagtgcctgacttctgaaggctgtcttattcctttaaaaggcttagtaaaattaactttttaagaggtgtttttttgtttgtttttttgttttgt

SEQ ID NO: 115885 - DNA, 120 bp, Artificial Sequence
  ENSG00000100478_11 (sequence is synthesized)
cctgagtagctgcgactacaggcatgtagtccccaggagactgagctgtgattacagatgtgagccaccatgccctgcccggttttatgtaaagcccagctaatttttgtatttttagta

SEQ ID NO: 115886 - DNA, 120 bp, Artificial Sequence
  ENSG00000100478_12 (sequence is synthesized)
ttgtttttaagagaagcaggtcttgctgtgttgtccaggctggactgcagtggcttttcacaagcatgatcatgttgtactacaaccttgaaccttcctggcctggctctaaaagctttg

SEQ ID NO: 115887 - DNA, 120 bp, Artificial Sequence
  ENSG00000100478_13 (sequence is synthesized)
gcaacatagacctcatctctacaaaaaatgcaaaaatcagccgggtgtggtggcacatacctgtagtctcaactactcgggagtctgaggcagaagatttcttgagcccaggagttcgag

SEQ ID NO: 115888 - DNA, 120 bp, Artificial Sequence
  ENSG00000100478_14 (sequence is synthesized)
ggtgacagagtgaaaccctgtctcaaaaataaaaaagtccgagtgcggtggctcaggcctgtaatcccaacattttggggggccaagccaggaggattggttgagcccattagttcaaga

SEQ ID NO: 115889 - DNA, 86 bp, Artificial Sequence
  ENSG00000100478_15 (sequence is synthesized)
gagtgcggtggctcaggcctgtaatcccaacattttggggggccaagccaggaggattggttgagcccattatatctctacaaaaa

SEQ ID NO: 115890 - DNA, 120 bp, Artificial Sequence
  ENSG00000100478_16 (sequence is synthesized)
gtctctaaaaataagtaaataactaattaaaaagttagccagctgtggtggtgagcacctgtactcctaactactcaagaggctgagatgggagaattgatcaagcctaggagtttgagg

SEQ ID NO: 115891 - DNA, 120 bp, Artificial Sequence
  ENSG00000100478_17 (sequence is synthesized)
ctgcagtgaactatgatcacaacactgtactccaacctgggtaatggagtgaggccctgcctcaaaaacacaaaaacaaaacaaaaaaacttttataacatgtacctaacaaagatgcag

SEQ ID NO: 115892 - DNA, 120 bp, Artificial Sequence
  ENSG00000100478_18 (sequence is synthesized)
agttaaattttatttgccagtttgtaaaagcctttgatactcattttaagggcacttagtaattacaatgccattatgtaattaactctatagagaacattactttcaaataatggatgg

SEQ ID NO: 115893 - DNA, 120 bp, Artificial Sequence
  ENSG00000100478_19 (sequence is synthesized)
atggatggtcagacattaagacagccccagagagcccctacagctatcctttatcccgttttttgtttgttttttggagacagcatctccgtctcctaggctggagtgcagtggtgtgat

SEQ ID NO: 115894 - DNA, 88 bp, Artificial Sequence
  ENSG00000100478_20 (sequence is synthesized)
cgcaccccctccacccagctaatttttgtattttgttgtagagatagggtttcactatgttgcccagactggtctcgaattcctgcag

SEQ ID NO: 115895 - DNA, 120 bp, Artificial Sequence
  ENSG00000100478_21 (sequence is synthesized)
aatttttgtattttgttgtagagatagggtttcactatgttgcccagactggtctcgaattcctgcagtcacatgatccatctgccttcgccttccaaagtgttgggattacaggcctga

SEQ ID NO: 115896 - DNA, 120 bp, Artificial Sequence
  ENSG00000100478_22 (sequence is synthesized)
agtctttttatgccacattttaaaaggtttgcttattaataagcttactgttaatgaaatttagttcaaagtttaaaagtagaatgcagccaggcatggtggcttacgcctataatccca

SEQ ID NO: 115897 - DNA, 80 bp, Artificial Sequence
  ENSG00000100478_23 (sequence is synthesized)
attagccgggcatggtggcacgcgcctataatcccaactacttgggaggctgtggtattgagatcgagattgtgccactg

SEQ ID NO: 115898 - DNA, 120 bp, Artificial Sequence
  ENSG00000100478_24 (sequence is synthesized)
aaaaaaaaaaaaaaaaagtagaaagcaagaaagtgtctctgtacaggtaggcatgaaatgaatccttctcttcctcccctttactcctttaaccccttctcctgcaatgtcttgaagtaa

SEQ ID NO: 115899 - DNA, 120 bp, Artificial Sequence
  ENSG00000100478_25 (sequence is synthesized)
gtaaattactgtcattacagaagagcaatgcactgcatccccccaaaacctttctatatgcttttgctaccccgttaacagaagaatatacagaactgtcttaggcgaaagtatgtacag

SEQ ID NO: 115900 - DNA, 120 bp, Artificial Sequence
  ENSG00000100478_26 (sequence is synthesized)
tagtccctctcttatccactgtttcgcattctgtggtttgtgttactcatggtcaactgaggtcccaaaatattaaacagaaaattccagaaataaacaatgtataagttttaaactgca

SEQ ID NO: 115901 - DNA, 120 bp, Artificial Sequence
  ENSG00000100478_27 (sequence is synthesized)
gccgcagctaccggacacctgggctccgactctgacttttggaagcgaggcggccttaggcttcctggttatcagtttccttttagcaggccgtccccgggcgctgtttccttcccaggg

SEQ ID NO: 115902 - DNA, 120 bp, Artificial Sequence
  ENSG00000100478_28 (sequence is synthesized)
gtctctcacccgtgtcccggctttctgagctggttgttaacctggctggtcgctctggccgaccgcatcccgtctcggattcctgacgtttctttttcattctttgagtgtttcaggcag

SEQ ID NO: 115903 - DNA, 120 bp, Artificial Sequence
  ENSG00000100478_29 (sequence is synthesized)
tcccaagggtgggccctctttcccttcctgtcactcgctctgcctctggtttcttagaaccagtcagttctctgctggcaaatagccaagatcctccggctgtggttactgattcctcgt

SEQ ID NO: 115904 - DNA, 120 bp, Artificial Sequence
  ENSG00000100478_30 (sequence is synthesized)
ctctgtcttgagcctgggctttggtcccatttctatgcgctcggtcgcccgtcgtaacttattccactttgcgtcccctcttctttccttttctggaatgggttgtgggggggttgggag

SEQ ID NO: 115905 - DNA, 120 bp, Artificial Sequence
  ENSG00000100478_31 (sequence is synthesized)
agggggaggagcgattttttttttcttgggagaagaagaggtagtgaattcctttagatcttgacgatgatgggtagagggagagaagtttgaaggagactggctagactaacaatttga

SEQ ID NO: 115906 - DNA, 120 bp, Artificial Sequence
  ENSG00000100478_32 (sequence is synthesized)
aaatctcttcagtcgtttcataaatacagcatcgatcgtctggtttggtttttttatagataaagaaacggatgggggaaaggagatctagtggagagtactgtaaaaagaaaaattcag

SEQ ID NO: 115907 - DNA, 120 bp, Artificial Sequence
  ENSG00000100478_33 (sequence is synthesized)
cactggaagatgaccctacttctgtttgagggacgttttcagcagatgaaagaacaacaattggttcatggacatcagctcctgaaactatactgtgttccattacaatttctgatctcc

SEQ ID NO: 115908 - DNA, 120 bp, Artificial Sequence
  ENSG00000100478_34 (sequence is synthesized)
gttccgttttggtcgaacccaagctgatgtcgctgctactggccacgctacacacagaactgctgcttccttttctacttgaggagcctgcagcagcagatgtcttgtctggacagttgt

SEQ ID NO: 115909 - DNA, 120 bp, Artificial Sequence
  ENSG00000100478_35 (sequence is synthesized)
ttttcaccaagctgctccatgattgcgttgtgcctgaaacagtggatgaaacaggtttgggtgatgccactgtatcagggtcgtaccctggtgcaagcttgaggtcaaattttccttctg

SEQ ID NO: 115910 - DNA, 120 bp, Artificial Sequence
  ENSG00000100478_36 (sequence is synthesized)
cgcccatacggtaagagtttgagccaccagcatcccaggtgacatcaatccagcctggaaagggacaggagtttgtgagacccagcagaaagcagataggagcgtgtcagacagtagctc

SEQ ID NO: 115911 - DNA, 120 bp, Artificial Sequence
  ENSG00000100478_37 (sequence is synthesized)
cacaatatgggatcagcttttcatcagtgctgtccttttctgaatttctatagtcaatcaaggtctgcccactaaaatatatgtaaatttttggactcaattatttgacgatatgactag

SEQ ID NO: 115912 - DNA, 120 bp, Artificial Sequence
  ENSG00000100478_38 (sequence is synthesized)
ttttaaggacaagaaatatgtactctatacaaggtttccaggaaatgtttaaaattcttccttttatttcccttatttctgaactattcagtctatgacatttaaaagcaatgtaagggt

SEQ ID NO: 115913 - DNA, 120 bp, Artificial Sequence
  ENSG00000100478_39 (sequence is synthesized)
catgtttaaatctactgggttatatttcatttttaaaattatttgatttttagagatgaggtcttgcgttgcccatgctaatcttgaactcctgggcttaaacgatcctcccacctcagc

SEQ ID NO: 115914 - DNA, 120 bp, Artificial Sequence
  ENSG00000100478_40 (sequence is synthesized)
tgggattatagatgtgagccactgcacctggcttggttacttcttaaatggaagaactgtttaagaaattttaaaagattgatatacatggtaaaatactgccacttcagcaagtaaaca

SEQ ID NO: 115915 - DNA, 120 bp, Artificial Sequence
  ENSG00000100478_41 (sequence is synthesized)
agcaagtaaacagaatctaggtaaaagttttaaaactgctaaatataattatgtgtagtcaaattttttttctacaaaaacatgccagcttaccattaatttcttacaatttgggctaac

SEQ ID NO: 115916 - DNA, 120 bp, Artificial Sequence
  ENSG00000100478_42 (sequence is synthesized)
ctctcaaaatattcatatattgccatagaaattttagtcactagttcaaataaaacactaaagttagcatttcggttgtgttctcaaagttcagtggttccttggttctcttatattaaa

SEQ ID NO: 115917 - DNA, 120 bp, Artificial Sequence
  ENSG00000100478_43 (sequence is synthesized)
taattaagttcaataaatttgaataaacacagaaaattctaaaaaaaaatttaaagagcatactgaactcttttattagaactatctgctaaagctaataacatgtacagaattaacgag

SEQ ID NO: 115918 - DNA, 120 bp, Artificial Sequence
  ENSG00000100478_44 (sequence is synthesized)
agaattaacgagcataatgatattcaatctatatatttacttgtagtagaaaaatgatattctttttttaaaaaggtaattaacttccaaaagcaaaaaaaaaattgtctattaaaagca

SEQ ID NO: 115919 - DNA, 120 bp, Artificial Sequence
  ENSG00000100478_45 (sequence is synthesized)
ttttacaatcttattttagtgttataagctaactatttcagggaaaaacataagacataaaaaacatttttttagaagtataacaagcctttataaagttcttacccatacataaaaggg

SEQ ID NO: 115920 - DNA, 120 bp, Artificial Sequence
  ENSG00000100478_46 (sequence is synthesized)
gcccaagatcacatacacacccatccacacacccagatgctcacccacacttacaccaagttcatatgtttatgatagcactcagagggaaataatattgaattacctgtggggattatc

SEQ ID NO: 115921 - DNA, 120 bp, Artificial Sequence
  ENSG00000100478_47 (sequence is synthesized)
tgcatatgtgttctttgaaaggaaaagtgactgccccaaatctacataagtagcttagatgagatttttcaattgcctctatttttttctgtatgctgaaataatctctgaagaaccaac

SEQ ID NO: 115922 - DNA, 120 bp, Artificial Sequence
  ENSG00000100478_48 (sequence is synthesized)
atttaactatctcttctgctacacagaaatgtgtgagaaaaggaaaagtttcaaaaacatagcccaatctcaaataaaagtaacttttgtattatattaattggcccaaaaaacatactc

SEQ ID NO: 115923 - DNA, 79 bp, Artificial Sequence
  ENSG00000100478_49 (sequence is synthesized)
gtgagtgaattagatgtatcctttttcaatactgttttccacagtacttggcaaatgcactctggtccttatctgcgat

SEQ ID NO: 115924 - DNA, 120 bp, Artificial Sequence
  ENSG00000100478_50 (sequence is synthesized)
cccaagtagctgggactacaggaaccaattgatgaacttcccaaaatatgctcagccctggagccccagcagacttgcttttctccagacagttcatcattcaaaggagctgcctccacc

SEQ ID NO: 115925 - DNA, 120 bp, Artificial Sequence
  ENSG00000100478_51 (sequence is synthesized)
aggagctgcctccaccacccccatctactgaatagccaggggagggcaccaatgaacagcacagtatgggagacacaccaactactcttcaaatcagtgcgtacctgctctacgcgtgaa

SEQ ID NO: 115926 - DNA, 120 bp, Artificial Sequence
  ENSG00000100478_52 (sequence is synthesized)
ggtacagaaaacctccacggccttttcagtatttggtgcctttaaagaggcctaaggacttagtttatttgggctagactggaatgcagcagtactgccttcaggcctggacagccaggg

SEQ ID NO: 115927 - DNA, 120 bp, Artificial Sequence
  ENSG00000100478_53 (sequence is synthesized)
gctcctcgggccctgtgctctagaaggcccattctatgtctgcttcgccagcaccctttccccatcatggggcagatgcccaccagccctcactatctactgcttgaccatcctctgact

SEQ ID NO: 115928 - DNA, 120 bp, Artificial Sequence
  ENSG00000100478_54 (sequence is synthesized)
agcaagagcaggctggagtctctactttgtattcttgtgaggcacaaatataggctagaatccaggccccacaaatataggctagaatccggaatgttttcttgatttaaagacatcttt

SEQ ID NO: 115929 - DNA, 84 bp, Artificial Sequence
  ENSG00000100478_55 (sequence is synthesized)
accagcctgggcaacatagggagacccagtctctacaaaaaaatttaaaaagccaggcattggtggtgtgtgcctatagtccca

SEQ ID NO: 115930 - DNA, 120 bp, Artificial Sequence
  ENSG00000100478_56 (sequence is synthesized)
ctactgcactccaatctggcaacagagcgagaccttgtctttaaaaataaaaataaaaacatctttacaacattcctgtttgtattttataaactcaaaatctcaaagactgagcagttg

SEQ ID NO: 115931 - DNA, 120 bp, Artificial Sequence
  ENSG00000100478_57 (sequence is synthesized)
attctagagccctaaagctctggtgggttgtgtgaaaaaaccctgattcatgtcccttctattgcagttgagggtgggacataggaagggcatcaatgctgtgtgcactctctgtgactc

SEQ ID NO: 115932 - DNA, 120 bp, Artificial Sequence
  ENSG00000100478_58 (sequence is synthesized)
cgccagcatctgccatggtgcttcctggagaatgatggtgtgcaggcaacagtgatcagcaccaccatggtttgcagacaggcctcgatcaggcccactgtgggcatctacctctagttc

SEQ ID NO: 115933 - DNA, 120 bp, Artificial Sequence
  ENSG00000100478_59 (sequence is synthesized)
catcagcttcctaaaatctgaaatacttttagagatccggaaaccagaatagggtttctccaagtgggagataatgtcagcctgatttaatgagaaattgcaaaaatacttgttcaaact

SEQ ID NO: 115934 - DNA, 120 bp, Artificial Sequence
  ENSG00000100478_60 (sequence is synthesized)
gaggctataggaataccagccagaagaacaaacaaattcttcagggaagcatccagcactgaagtggcagcttctaaatgaactgaaattttctgcatgttctctcagaaagttacagtg

SEQ ID NO: 115935 - DNA, 120 bp, Artificial Sequence
  ENSG00000100478_61 (sequence is synthesized)
aaagttacagtgttaattaattaataaaatcattacaaaagaatttcttccgaggtatgatggagcatgtgatgacttcaggaatggcttgatttgtttgtttgtttgtttgtttgtttt

SEQ ID NO: 115936 - DNA, 120 bp, Artificial Sequence
  ENSG00000100478_62 (sequence is synthesized)
aaggggggtaagatgcctatcctagtccctctcttcgggctcttcatctcaagaggaacaaacaagagcaaactcagtgttgagaggccccaaaccggactctcccacagagaggtgctc

SEQ ID NO: 115937 - DNA, 78 bp, Artificial Sequence
  ENSG00000100478_63 (sequence is synthesized)
tacacctcccgggttaaaggatccgccaccacacccggtgctggtgcttgcactggaagatgaccctacttctgtttg

SEQ ID NO: 115938 - DNA, 120 bp, Artificial Sequence
  ENSG00000100478_64 (sequence is synthesized)
acagagttttaataagtaaaagttaaaacttaagtgatgccaaattttctttatctttccttctggtttatccaaagtgttacaagcctatacatgcctgagatctttataaagaactgg

SEQ ID NO: 115939 - DNA, 120 bp, Artificial Sequence
  ENSG00000100479_0 (sequence is synthesized)
aaatcgcaaatatggcgccggagcggctgcggagccgggcgctctccgccttcaagttgcggggcttgctgctccgtggtgaagctattaagtacctcacagaagctcttcagtctatca

SEQ ID NO: 115940 - DNA, 120 bp, Artificial Sequence
  ENSG00000100479_1 (sequence is synthesized)
gtgaattagagcttgaagataaactggaaaagataattaatgcagttgagaagcaacccttgtcatcaaacatgattgaacgatctgtggtggaagcagcagtccaggaatgcagtcagt

SEQ ID NO: 115941 - DNA, 120 bp, Artificial Sequence
  ENSG00000100479_2 (sequence is synthesized)
ctgttgatgaaactatagagcacgttttcaatatcataggagcatttgatattccacgctttgtgtacaattcagaaagaaaaaaatttcttcctctgttaatgaccaaccaccctgcac

SEQ ID NO: 115942 - DNA, 120 bp, Artificial Sequence
  ENSG00000100479_3 (sequence is synthesized)
caaatttatttggaacaccaagagataaagcagagatgtttcgtgagcgatataccattttgcaccagaggacccacaggcatgaattatttactcctccggtgataggttctcaccctg

SEQ ID NO: 115943 - DNA, 120 bp, Artificial Sequence
  ENSG00000100479_4 (sequence is synthesized)
atgaaagcggaagcaaattccagcttaaaacaatagaaaccttattgggtagtacaaccaaaatcggagatgcgattgttcttggaatgataacgcagttaaaagagggaaaattttttc

SEQ ID NO: 115944 - DNA, 120 bp, Artificial Sequence
  ENSG00000100479_5 (sequence is synthesized)
tggaagatcctactggaacagtccaactagaccttagtaaagctcagttccatagtggtttatacacagaggcatgctttgtcttagcagaaggttggtttgaagatcaagtgtttcatg

SEQ ID NO: 115945 - DNA, 120 bp, Artificial Sequence
  ENSG00000100479_6 (sequence is synthesized)
tcaatgcctttggatttccacccactgagccctctagtactactagggcatactatggaaatattaatttttttggaggtccttctaatacatctgtgaagacttctgcaaaactaaaac

SEQ ID NO: 115946 - DNA, 120 bp, Artificial Sequence
  ENSG00000100479_7 (sequence is synthesized)
agaataaagatgctatgtttgtgtttttatctgatgtttggttggaccaggtggaagtattggaaaaacttcgcataatgtttgctggttattcaccagcacctccaacctgctttattc

SEQ ID NO: 115947 - DNA, 120 bp, Artificial Sequence
  ENSG00000100479_8 (sequence is synthesized)
tgtgtggtaatttttcatctgcaccatatggaaaaaatcaagttcaagctttgaaagattccctaaaaactttggcagatataatatgtgaatacccagatattcaccaaagtagtcgtt

SEQ ID NO: 115948 - DNA, 120 bp, Artificial Sequence
  ENSG00000100479_9 (sequence is synthesized)
ttgtgtttgtacctggtccagaggatcctggatttggttccatcttaccaaggccaccacttgctgaaagcatcactaatgaattcagacaaagggtaccattttcagtttttactacta

SEQ ID NO: 115949 - DNA, 120 bp, Artificial Sequence
  ENSG00000100479_10 (sequence is synthesized)
atccttgcagaattcagtactgtacacaggaaattactgtcttccgtgaagacttagtaaataaaatgtgcagaaactgcgtccgttttcctagcagcaatttggctattcctaatcact

SEQ ID NO: 115950 - DNA, 120 bp, Artificial Sequence
  ENSG00000100479_11 (sequence is synthesized)
ttgtaaagactatcttatcccaaggacatctgactcccctacctctttatgtctgcccagtgtattgggcatatgactatgctttgagagtgtatcctgtgcccgatctacttgtcattg

SEQ ID NO: 115951 - DNA, 120 bp, Artificial Sequence
  ENSG00000100479_12 (sequence is synthesized)
cagacaaatatgatcctttcactacgacaaataccgaatgcctctgcataaaccctggctcttttccaagaagtggattttcattcaaagttttttatccttctaataagacagtagaag

SEQ ID NO: 115952 - DNA, 120 bp, Artificial Sequence
  ENSG00000100479_13 (sequence is synthesized)
atagcaaacttcaaggcttttgagattcttaaagatcatctgaagaaaattcatcagttttctgcttaactctatatcttatgtgattctgatattacaataaaattatggtaaacttta

SEQ ID NO: 115953 - DNA, 120 bp, Artificial Sequence
  ENSG00000100479_14 (sequence is synthesized)
aaaattcagtccatcagctatgctagccacaattcaagtgttcaattgggcagtgcagatatagaacttttctatcatgacattactagacagtgttggtctggagacttaatagttcat

SEQ ID NO: 115954 - DNA, 120 bp, Artificial Sequence
  ENSG00000100479_15 (sequence is synthesized)
tcctttcactacgacaaataccgaatgcctctgcataaaccctgtaagaatgtagttaatcttatatagtcattatttatcaagattagagtgcattttttaatttaaaaatatatattt

SEQ ID NO: 115955 - DNA, 120 bp, Artificial Sequence
  ENSG00000100479_16 (sequence is synthesized)
cagttaacttttttcctccttggaggtgttattgagcacttatttttaattattgtcttggaaaattattagtgatcaacgtttctacagtgattactgttgttatttctgtgtgtcttt

SEQ ID NO: 115956 - DNA, 120 bp, Artificial Sequence
  ENSG00000100479_17 (sequence is synthesized)
ttaaataatggctttctttgcaaacctcattattaaatgactcatctttactggtttttcctgggatttgaggttacagtgttgcttgtaccattcattactaacttttgctgcctaccc

SEQ ID NO: 115957 - DNA, 120 bp, Artificial Sequence
  ENSG00000100479_18 (sequence is synthesized)
agtttcccggcagcaaaggagcgcgaggtggtctccactttcagcctactcggtccggggttgcgaactgtaaggtctgagttgctgcggcgcaggcagcggagaccaagcagggatctt

SEQ ID NO: 115958 - DNA, 120 bp, Artificial Sequence
  ENSG00000100479_19 (sequence is synthesized)
ccctcaaacttcaaggcttttgagattcttaaagatcatctgaagaaaattcatcagttttctgcttaactctatatcttatgtgattctgatattacaataaaattatggtaaacttta

SEQ ID NO: 115959 - DNA, 120 bp, Artificial Sequence
  ENSG00000100479_20 (sequence is synthesized)
ggctcttttccaagaagtggattttcattcaaagttttttatccttctaataagacagtagaagatagatcaagaactgttttctgggggaaatctcaggccagctgtggaggtgagcta

SEQ ID NO: 115960 - DNA, 120 bp, Artificial Sequence
  ENSG00000100479_21 (sequence is synthesized)
actcttctgagagcaaacttcaaggcttttgagattcttaaagatcatctgaagaaaattcatcagttttctgcttaactctatatcttatgtgattctgatattacaataaaattatgg

SEQ ID NO: 115961 - DNA, 120 bp, Artificial Sequence
  ENSG00000100479_22 (sequence is synthesized)
ggctcttttccaagaagtggattttcattcaaagttttttatccttctaataagacagtagaagataggcatcctaacatgtgatttctcagataactgtattttgaaaaagttcccacc

SEQ ID NO: 115962 - DNA, 120 bp, Artificial Sequence
  ENSG00000100479_23 (sequence is synthesized)
ttgggaggccgagcaaacttcaaggcttttgagattcttaaagatcatctgaagaaaattcatcagttttctgcttaactctatatcttatgtgattctgatattacaataaaattatgg

SEQ ID NO: 115963 - DNA, 120 bp, Artificial Sequence
  ENSG00000100483_0 (sequence is synthesized)
gctttctgttgccgggcgcaatggcggatacgctggagtcctcgctggaggacccactgcggagctttgtgcgagttttggagaagcgggatggtacagtgctacgactacagcagtata

SEQ ID NO: 115964 - DNA, 120 bp, Artificial Sequence
  ENSG00000100483_1 (sequence is synthesized)
gctccggtggcgtgggttgcgttgtgtgggacgctgccattgtcctttctaaatacctggaaacgcccgagttttctggcgacggggcccacgcgctgagccggcggtcggtgctggagc

SEQ ID NO: 115965 - DNA, 120 bp, Artificial Sequence
  ENSG00000100483_2 (sequence is synthesized)
tgggttcgggcaccggggccgtggggctcatggctgctaccctcggggctgatgttgtagtcaccgatcttgaggaattgcaagacttgctgaagatgaatattaatatgaacaagcatc

SEQ ID NO: 115966 - DNA, 120 bp, Artificial Sequence
  ENSG00000100483_3 (sequence is synthesized)
ttgtcactggttctgttcaagccaaggtactgaaatggggggaagaaatagaaggctttccttctccacccgacttcatactgatggccgactgcatatactatgaagagtctttggagc

SEQ ID NO: 115967 - DNA, 120 bp, Artificial Sequence
  ENSG00000100483_4 (sequence is synthesized)
cattgctgaaaactctaaaagatatcagcggatttgaaacttgtattatatgttgttatgaacaacgaacaatggggaaaaatccagaaattgagaaaaaatattttgagctccttcagc

SEQ ID NO: 115968 - DNA, 120 bp, Artificial Sequence
  ENSG00000100483_5 (sequence is synthesized)
tagattttgactttgaaaaaattcctttggaaaaacatgatgaagagtatcgaagtgaagatattcatattatatacatcagaaagaaaaaatcgaaatttccatcgtgaagcctttaat

SEQ ID NO: 115969 - DNA, 120 bp, Artificial Sequence
  ENSG00000100483_6 (sequence is synthesized)
catcttacccaaggctctaacaacctgggtaaactaaagatgtgaatagagcatgtgaatacagcatgggaagattgtgttcacagatttttttttccggcacgtccttagagatccgat

SEQ ID NO: 115970 - DNA, 120 bp, Artificial Sequence
  ENSG00000100483_7 (sequence is synthesized)
cttagttcagcatcaagttcttcttaaatgttgggaatcagttattcaaataaaaattggtattgaggcgaggctgaaatctgccaaaaacagccaacatgatttgactggaccttttac

SEQ ID NO: 115971 - DNA, 120 bp, Artificial Sequence
  ENSG00000100483_8 (sequence is synthesized)
aggaagctagagataaatttctgaagagaactatctgctattatataataatgttttaaattcaaactagtaaattttagtttgtcttcagagtttaaaaggttttcattttgtacataa

SEQ ID NO: 115972 - DNA, 120 bp, Artificial Sequence
  ENSG00000100483_9 (sequence is synthesized)
atttgtattttccacttcatttcttttaaaatatctttaatactgaaatgttcttttaattttaaaaagaactgagatattgtcttgtatacttatattagccaaagttttcttttcctc

SEQ ID NO: 115973 - DNA, 120 bp, Artificial Sequence
  ENSG00000100483_10 (sequence is synthesized)
aagttttcttttcctccaccatacatatctatgtgatttaatcagtaaattgtactgtaatgagttgctaagaagacaaatcagaagattggaggaacaaaagatatctttacagatttt

SEQ ID NO: 115974 - DNA, 120 bp, Artificial Sequence
  ENSG00000100483_11 (sequence is synthesized)
tcatttgagcatggagtgagaatagaaagaccagtttcaggcttatgcacttacgtggctcatgcactttatgtatatgttccaggaaaatctggcttaaaaatactggtattgtttaca

SEQ ID NO: 115975 - DNA, 120 bp, Artificial Sequence
  ENSG00000100483_12 (sequence is synthesized)
tgaagcagtgaaaggtttttgaataactacaaatgtagttctatatgtatataccaaatgaatttctgttctgtgtctctctgttttatgttatgaagccattcgctcatatacaataat

SEQ ID NO: 115976 - DNA, 120 bp, Artificial Sequence
  ENSG00000100483_13 (sequence is synthesized)
ctgtcaaggactttaatcatacttgttccaaagagtagtaaccggatggaattctggtatttataggcattggtgctagatggtacattttatgtgttaaaataaacattgtttttgaga

SEQ ID NO: 115977 - DNA, 120 bp, Artificial Sequence
  ENSG00000100483_14 (sequence is synthesized)
ggggccgtggggctcatggctgctaccctcgggtaagagctggcgggcgggcgggatgtgggggcgccttcttgctggggaaatccggattacaggctttcccccctgtgcctacacctc

SEQ ID NO: 115978 - DNA, 120 bp, Artificial Sequence
  ENSG00000100483_15 (sequence is synthesized)
agtgatcacccaaacccttatatgggcacaaatctatcacattgtgagtgactccttttgagggtacatctatataggcctgcagttttgtctgctggaaggactactttggtttaatga

SEQ ID NO: 115979 - DNA, 80 bp, Artificial Sequence
  ENSG00000100485_0 (sequence is synthesized)
agaagcgggccagcgccgccgggaaaggaggtcgccgcccggggtcgcccgggcttgcgggtcgccgcgcttcctctgcg

SEQ ID NO: 115980 - DNA, 80 bp, Artificial Sequence
  ENSG00000100485_1 (sequence is synthesized)
ctcggcggaggaagccgaccccggggtctccgccagcccgccggcgccgcctccgagccgcctcggccgtagcctcggcc

SEQ ID NO: 115981 - DNA, 120 bp, Artificial Sequence
  ENSG00000100485_2 (sequence is synthesized)
gccaccggcccggcccgcgggctgcccccgatgcggaggcgctgtcgccggggccatgcagcaggcgccgcagccttacgagttcttcagcgaggagaacagtccgaaatggcggggact

SEQ ID NO: 115982 - DNA, 120 bp, Artificial Sequence
  ENSG00000100485_3 (sequence is synthesized)
gttggtctcggccctgcggaaggttcaggaacaagtgcatcccactctctcagctaatgaagagtctctctattatattgaagagctgatttttcagctgcttaataaattatgcatggc

SEQ ID NO: 115983 - DNA, 120 bp, Artificial Sequence
  ENSG00000100485_4 (sequence is synthesized)
ccagccaaggactgttcaagatgtagaggagcgagttcagaagacctttcctcacccaattgataaatgggccattgctgatgcacaatctgctatagaaaaacgaaaacgaagaaatcc

SEQ ID NO: 115984 - DNA, 120 bp, Artificial Sequence
  ENSG00000100485_5 (sequence is synthesized)
tcttttactgcctgtggacaaaatccatccttcgttgaaggaagtattagggtacaaagtggactaccatgtatccctatatattgtggctgtactagagtatatctcagctgatatttt

SEQ ID NO: 115985 - DNA, 120 bp, Artificial Sequence
  ENSG00000100485_6 (sequence is synthesized)
aaaattggctggtaattatgtttttaatatccggcattatgaaatatctcagcaggacattaaagtgtcaatgtgtgcggataaggttttgatggacatgtttgatcaggatgacatagg

SEQ ID NO: 115986 - DNA, 120 bp, Artificial Sequence
  ENSG00000100485_7 (sequence is synthesized)
tttggtttctctctgtgaagatgaacctagttcttctggtgaattaaactactatgatcttgtcagaactgaaatcgcagaagaaagacagtatctacgggaattaaatatgatcataaa

SEQ ID NO: 115987 - DNA, 120 bp, Artificial Sequence
  ENSG00000100485_8 (sequence is synthesized)
agtgtttcgagaagcctttctttctgatagaaagctgtttaaaccttctgatatcgaaaagatttttagtaacatttcagatatacatgaattgactgtgaaacttttaggtttgattga

SEQ ID NO: 115988 - DNA, 120 bp, Artificial Sequence
  ENSG00000100485_9 (sequence is synthesized)
agacacagttgaaatgactgatgaaagcagtcctcatcccttagctggcagctgttttgaagatttggcagaagagcaagcatttgatccttatgaaacattatcacaggacattctttc

SEQ ID NO: 115989 - DNA, 120 bp, Artificial Sequence
  ENSG00000100485_10 (sequence is synthesized)
accagagtttcatgaacatttcaataaattgatggccagacctgcagttgctctacactttcagtccattgctgatggttttaaagaggcagttcgttatgtccttccacgtcttatgct

SEQ ID NO: 115990 - DNA, 120 bp, Artificial Sequence
  ENSG00000100485_11 (sequence is synthesized)
ggtgccagtgtatcactgttggcactactttgagttactaaagcaattgaaagcatgtagtgaagaacaagaagacagagaatgtttgaaccaagctattactgctctcatgaatctcca

SEQ ID NO: 115991 - DNA, 120 bp, Artificial Sequence
  ENSG00000100485_12 (sequence is synthesized)
aggtagcatggaccgaatttacaagcagtattcacctagacgtcgacctggagatcctgtttgccctttttatagtcaccaattaagaagcaaacacctggctatcaaaaaaatgaatga

SEQ ID NO: 115992 - DNA, 120 bp, Artificial Sequence
  ENSG00000100485_13 (sequence is synthesized)
aattcagaaaaatatcgatggatgggaaggcaaagatattggacagtgttgtaatgaattcattatggagggaccattgacaagaatcggtgccaaacatgaacggcatatttttctgtt

SEQ ID NO: 115993 - DNA, 120 bp, Artificial Sequence
  ENSG00000100485_14 (sequence is synthesized)
tgatggcttaatgatcagttgtaaacctaatcatggccagactcggcttccaggttacagtagtgcagaatacaggttaaaagaaaaatttgtcatgaggaaaatacaaatttgtgataa

SEQ ID NO: 115994 - DNA, 120 bp, Artificial Sequence
  ENSG00000100485_15 (sequence is synthesized)
agaagatacttgtgagcacaagcatgcatttgaattagtatccaaagatgagaacagcataatatttgctgctaagtctgctgaagaaaaaaacaactggatggcagcccttatttctct

SEQ ID NO: 115995 - DNA, 120 bp, Artificial Sequence
  ENSG00000100485_16 (sequence is synthesized)
tcattatcgtagtactctagatcgaatgttagattcagtattattgaaagaagaaaatgagcaaccactgagattaccaagtcctgaagtatatcgttttgtagtaaaagactctgagga

SEQ ID NO: 115996 - DNA, 120 bp, Artificial Sequence
  ENSG00000100485_17 (sequence is synthesized)
aaacattgtttttgaagacaacttgcaaagtagaagtggcatccccattattaaaggaggaactgtagtgaaattaattgaaaggttaacatatcatatgtatgcagatcccaattttgt

SEQ ID NO: 115997 - DNA, 120 bp, Artificial Sequence
  ENSG00000100485_18 (sequence is synthesized)
tcgtacttttcttaccacatatcgttcattttgtaaaccacaggaattgctgagcttactgattgaacggtttgaaattccagagccagaacctactgacgcagacaaattggcaataga

SEQ ID NO: 115998 - DNA, 120 bp, Artificial Sequence
  ENSG00000100485_19 (sequence is synthesized)
gaaaggcgagcagccaatcagtgcagaccttaaaagatttcgcaaggaatatgtccaaccagtacaacttaggatcttaaatgtatttcggcattgggttgaacatcatttttatgactt

SEQ ID NO: 115999 - DNA, 120 bp, Artificial Sequence
  ENSG00000100485_20 (sequence is synthesized)
tgaaagagacttggaattgcttgaaagactagaatccttcatttcaagtgtaagagggaaagctatgaaaaaatgggtagagtcaattgctaagatcatcaggaggaagaagcaagctca

SEQ ID NO: 116000 - DNA, 120 bp, Artificial Sequence
  ENSG00000100485_21 (sequence is synthesized)
ggcaaacggagtaagccataatattacctttgaaagtccacctccaccaattgaatggcatatcagcaaaccaggacagtttgaaacatttgatctcatgacacttcatccaatagaaat

SEQ ID NO: 116001 - DNA, 120 bp, Artificial Sequence
  ENSG00000100485_22 (sequence is synthesized)
tttattaaaaatgattcgccataccacaaatctcaccctctggtttgaaaaatgcattgtggaagcagaaaattttgaagaacgggtggcagtactaagtagaattatagaaattctgca

SEQ ID NO: 116002 - DNA, 120 bp, Artificial Sequence
  ENSG00000100485_23 (sequence is synthesized)
agtttttcaagatttgaataatttcaatggcgtattggagatagtcagtgcagtaaattcagtgtcagtatacagactagaccatacctttgaggcactgcaggaaaggaaaaggaaaat

SEQ ID NO: 116003 - DNA, 120 bp, Artificial Sequence
  ENSG00000100485_24 (sequence is synthesized)
tttggacgaagctgtggaattaagtcaagatcactttaaaaaatacctagtaaaacttaagtcaatcaatccaccttgtgtgcctttttttggaatatatttaacaaatattctgaagac

SEQ ID NO: 116004 - DNA, 120 bp, Artificial Sequence
  ENSG00000100485_25 (sequence is synthesized)
cgaagaagggaataatgattttttaaaaaagaaagggaaagatttaatcaatttcagtaagaggaggaaagtagctgaaattactggagaaattcagcagtatcagaatcagccttactg

SEQ ID NO: 116005 - DNA, 120 bp, Artificial Sequence
  ENSG00000100485_26 (sequence is synthesized)
tttacggatagaaccagatatgaggagattctttgaaaaccttaaccccatgggaagtgcatctgaaaaagagtttacagattatttgttcaacaagtcactagaaattgaacctcgaaa

SEQ ID NO: 116006 - DNA, 120 bp, Artificial Sequence
  ENSG00000100485_27 (sequence is synthesized)
ctgcaaacagccacctcgatttcctaggaaatcaactttttccttaaaatctcctggaataaggcctaacacaggccgacatggctctacctcaggtactttacgaggtcacccaacacc

SEQ ID NO: 116007 - DNA, 120 bp, Artificial Sequence
  ENSG00000100485_28 (sequence is synthesized)
attagaaagagaaccatgtaaaataagctttagtcggattgctgaaactgagctggaatcaacagtgtcagcaccaacctctccaaatacaccatctactccaccagtatctgcttcttc

SEQ ID NO: 116008 - DNA, 120 bp, Artificial Sequence
  ENSG00000100485_29 (sequence is synthesized)
agaccttagtgtatttttagatgtggatctcaacagctcctgtggcagcaatagcatctttgctccagtgcttttgccacattcaaagtctttctttagttcatgtggtagtttacataa

SEQ ID NO: 116009 - DNA, 120 bp, Artificial Sequence
  ENSG00000100485_30 (sequence is synthesized)
actaagtgaagagcccctgattcctcctcctcttcctcctcgaaaaaagtttgatcatgatgcttcaaattccaagggaaatatgaaatctgatgatgatcctcctgctattccaccgag

SEQ ID NO: 116010 - DNA, 120 bp, Artificial Sequence
  ENSG00000100485_31 (sequence is synthesized)
acagcctcctcctccaaaggtaaaacccagagttcctgttcctactggtgcatttgatgggcctctgcatagtccacctccgccaccaccaagagatcctcttcctgatacccctccacc

SEQ ID NO: 116011 - DNA, 120 bp, Artificial Sequence
  ENSG00000100485_32 (sequence is synthesized)
agttccccttcggcctccagaacactttataaactgtccatttaatcttcagccacctccactggggcatcttcacagagattcagactggctcagagacattagtacgtgtccaaattc

SEQ ID NO: 116012 - DNA, 120 bp, Artificial Sequence
  ENSG00000100485_33 (sequence is synthesized)
gccaagcactcctcctagcacaccctctccaagggtaccgcgtcgatgctatgtgctcagttctagtcagaataatcttgctcatcctccagctccccctgttccaccaaggcagaattc

SEQ ID NO: 116013 - DNA, 120 bp, Artificial Sequence
  ENSG00000100485_34 (sequence is synthesized)
aagccctcatctgccaaaactgccaccaaagacttacaaacgggagctttcgcaccccccattgtacagactgcctttgctagaaaatgcagaaactccccaatgaccttagccatatgt

SEQ ID NO: 116014 - DNA, 120 bp, Artificial Sequence
  ENSG00000100485_35 (sequence is synthesized)
agtcattgacactggaatggtatttgtaaagttttttttttaatttattcaaaaaaagacatagtattttagtactttttacaaataatgctcttacaaaaatgctactgatcaaataag

SEQ ID NO: 116015 - DNA, 120 bp, Artificial Sequence
  ENSG00000100485_36 (sequence is synthesized)
cttttaagaattggaaaaataaaaatacaaaagtccttcaccattatcctcaggtgatcagtagcattgccttgtcttggatcctcagtgctgccaaaaggccagtataaagaatttata

SEQ ID NO: 116016 - DNA, 120 bp, Artificial Sequence
  ENSG00000100485_37 (sequence is synthesized)
tttgcactgtaaactctgcaaaaatatggtttaaagtgacatgattgcactgaaaagggatagtgcttttgtgaaatttttcaaatttgagtaatagatgcctttttaaggcagtgaatt

SEQ ID NO: 116017 - DNA, 120 bp, Artificial Sequence
  ENSG00000100485_38 (sequence is synthesized)
tacacaaatatgggaggggtatatggtgttactgatttttaaacctctttgaccatcttctagtttttacttctagtttttacatctaggagaattgtgaataacaccaactgttcttaa

SEQ ID NO: 116018 - DNA, 120 bp, Artificial Sequence
  ENSG00000100485_39 (sequence is synthesized)
actctttaatgccatgtcttaaatgccggtatttgctgctgaagacaaaaatgaaaagtaggatgaaaataatagaatggcactgtaagtgtttattattttgtcaaaatgtaaacaaag

SEQ ID NO: 116019 - DNA, 120 bp, Artificial Sequence
  ENSG00000100485_40 (sequence is synthesized)
actacataacccaatgatggagggaaaaagggcatgtatctcattcagatgtgccttttgtttttgcagactatgacgtctttagctaatgaattgcctattgttatggaaaacagttaa

SEQ ID NO: 116020 - DNA, 120 bp, Artificial Sequence
  ENSG00000100485_41 (sequence is synthesized)
tatgccatgtatgtacagttttgtttatattgtatatttaaagatactgctaataacctatataaatttaagtgacttgaggcctataatacaatctgctactttactaattcataaatt

SEQ ID NO: 116021 - DNA, 120 bp, Artificial Sequence
  ENSG00000100485_42 (sequence is synthesized)
caaaaaaaattctatggcataggaaccaactgccttgccttcaagacctagtaactttctctataaatctcgtgttaactgaaattttttttaaatatattttttagattggtaatattt

SEQ ID NO: 116022 - DNA, 120 bp, Artificial Sequence
  ENSG00000100485_43 (sequence is synthesized)
aaaccagcaaatacttaaagctttattaaacattttaatcagataagtgagtaaagcttttatttgccatttggatgccttcgttcaaagtgatagagtgttttgctgatagtgctgtag

SEQ ID NO: 116023 - DNA, 120 bp, Artificial Sequence
  ENSG00000100485_44 (sequence is synthesized)
cagcagttgtaaagtagccaaaagccacgttgtttatttactggtttgtggccttttactgtgctttgtatcagagttcttaacaagattaataaatcaccccagtcttaatttttaaaa

SEQ ID NO: 116024 - DNA, 120 bp, Artificial Sequence
  ENSG00000100485_45 (sequence is synthesized)
ggggccgagccgtttctcgttggctggcaatggggggctcacaattgcctgttgcattctgaaggacgtttctcaagttttttttttttgcctggtcccggaaggaaggttttgttatga

SEQ ID NO: 116025 - DNA, 120 bp, Artificial Sequence
  ENSG00000100485_46 (sequence is synthesized)
tcataaaactggatttcatgttgcagtcatttcgtcaggcaacttccgccgttgaccaatttgttgtcctcaggctggaatcgggcaagagaaagtcccgctggtatttagacagtttct

SEQ ID NO: 116026 - DNA, 120 bp, Artificial Sequence
  ENSG00000100485_47 (sequence is synthesized)
cacatatatatacacacacacacacattttatgtgtcagttttcaatatatagttaacacaaaagctctcagcttttaattcaaatatagggaatatttttaacttcacagcagttaagt

SEQ ID NO: 116027 - DNA, 120 bp, Artificial Sequence
  ENSG00000100485_48 (sequence is synthesized)
agttaagttaaactaaaagagttctttctcagtgaagctattcttaaataccctgaagaaattcaaatatttaaatatcctatgtttgcatcacatatctctggcatgtgatatgttatg

SEQ ID NO: 116028 - DNA, 120 bp, Artificial Sequence
  ENSG00000100485_49 (sequence is synthesized)
cttacgtatcaggatacctattttttattgtaagtaaaaattataaaatttcatgtgagctttcctgctgtcaaccttttttcacacttttttccttcatttccctttgcgatcatacag

SEQ ID NO: 116029 - DNA, 120 bp, Artificial Sequence
  ENSG00000100485_50 (sequence is synthesized)
taatcctggctttttttacaatttataatatttgtggaagttctagcccttttcccacttatctctcacaaaatatatagacatttgttagtttaattgcaataatttctaaaaatgtgt

SEQ ID NO: 116030 - DNA, 120 bp, Artificial Sequence
  ENSG00000100485_51 (sequence is synthesized)
ttgattgtagaagcttccagttaataaatactactgtgtgccggggattaccctaaatgctttatcttttttatctcattcttacaacatgattactattcctactttatatataaggaa

SEQ ID NO: 116031 - DNA, 120 bp, Artificial Sequence
  ENSG00000100485_52 (sequence is synthesized)
ggaaattgaaacctagcaaggtgaagtaatttgagctaagttatgtaaagggagtggcaggacaagattcagactcatgtctgactttctttgcgtgtgtgtgtgtgtgtgtgtgtgtac

SEQ ID NO: 116032 - DNA, 120 bp, Artificial Sequence
  ENSG00000100485_53 (sequence is synthesized)
cactaagcattgaaaattggaagcgccttctcttagccctctttactgtccaagtaaccaaagtattatcttcctccttccattggaaaccaagttatcttattaattatatgtaattta

SEQ ID NO: 116033 - DNA, 120 bp, Artificial Sequence
  ENSG00000100485_54 (sequence is synthesized)
aattttttttctctctaaatttcaagtttccttgattactgttgaccaataaattgtaattttggaactgagtatattagttatttatttcccaggataattgccacaaacaaatgcagt

SEQ ID NO: 116034 - DNA, 120 bp, Artificial Sequence
  ENSG00000100485_55 (sequence is synthesized)
tttagaagaatgatagtgctcccagctatatgtctttcactaaaacttttaacgtcattctttgtataagaagatgagattatttatgtatcagcaataaataagtaattcttttctact

SEQ ID NO: 116035 - DNA, 120 bp, Artificial Sequence
  ENSG00000100490_0 (sequence is synthesized)
gatccattttaagaagatttattcctctatgatggagaagtatgaaaaaattgggaaaattggagaaggatcctatggagttgttttcaaatgtagaaacagggacacgggtcagattgt

SEQ ID NO: 116036 - DNA, 120 bp, Artificial Sequence
  ENSG00000100490_1 (sequence is synthesized)
ggccatcaagaagtttctggaatcagaagatgaccctgtcataaagaaaattgcccttcgggaaatccgaatgctcaagcaactcaagcatcccaaccttgttaacctcctggaagtctt

SEQ ID NO: 116037 - DNA, 120 bp, Artificial Sequence
  ENSG00000100490_2 (sequence is synthesized)
caggaggaaacggaggcttcacctggtgtttgaatattgtgaccacacagttctccatgagttggacagataccaaagaggggtaccagaacatctcgtgaagagcataacttggcagac

SEQ ID NO: 116038 - DNA, 120 bp, Artificial Sequence
  ENSG00000100490_3 (sequence is synthesized)
actgcaagctgtaaatttttgccataaacacaattgcatacatagagacgtgaagccagaaaatatcctcatcacgaaacattccgtgattaagctttgtgactttggatttgctcggct

SEQ ID NO: 116039 - DNA, 120 bp, Artificial Sequence
  ENSG00000100490_4 (sequence is synthesized)
tttgactggaccgagtgactactatacagactacgtggctaccaggtggtaccgctcccctgagctgctggtgggggacacgcagtacggccccccggtggatgtttgggcaattggctg

SEQ ID NO: 116040 - DNA, 120 bp, Artificial Sequence
  ENSG00000100490_5 (sequence is synthesized)
tgtctttgctgagctgctgtcaggagtgcctctgtggccaggaaaatcggatgtggatcagctgtatctgattaggaagaccttgggggatctcattcctaggcaccagcaagtgtttag

SEQ ID NO: 116041 - DNA, 120 bp, Artificial Sequence
  ENSG00000100490_6 (sequence is synthesized)
cacgaatcagtacttcagtggagtgaaaattccagaccctgaagatatggaaccacttgaattaaaattcccaaacatctcttatcctgccctggggctcctaaagggctgtctccacat

SEQ ID NO: 116042 - DNA, 120 bp, Artificial Sequence
  ENSG00000100490_7 (sequence is synthesized)
aaccaacaaggaagaccctaagaaagagccgaaagcaccactgctttacagaaacatccaagttgcagtacctaccccagctaactggcagcagcatccttccagctttggataataaga

SEQ ID NO: 116043 - DNA, 120 bp, Artificial Sequence
  ENSG00000100490_8 (sequence is synthesized)
agtactactgtgataccaagaaacttaactaccgttttccaaacatttaaaggagctaggagacatgattttaaaaaaggaatcaatagatgctttgaagaaaataaaacttatacagtt

SEQ ID NO: 116044 - DNA, 120 bp, Artificial Sequence
  ENSG00000100490_9 (sequence is synthesized)
gattgaaaacaattacaatgttgaaaacacaccaggagaaaacataagcaagaaactgggaggccaactggcaagatatgaagggaaattccagatccagtcttccatgcttgatgatgg

SEQ ID NO: 116045 - DNA, 120 bp, Artificial Sequence
  ENSG00000100490_10 (sequence is synthesized)
tgtccagaaaagaaaaaacctgtttggagttgcacttgtatttcagtttatgtaagtagccgaacttatggacagaatatgaactgtcccatacctctggcaaaactagatgatatcaaa

SEQ ID NO: 116046 - DNA, 120 bp, Artificial Sequence
  ENSG00000100490_11 (sequence is synthesized)
aagatttatgcttcagttgtaccacatgccacacaagaaaaatgaaccacaaaatgcccatatatatttcctcggatctctgttgcctgagtcctatctcctgcctctcagattgtttca

SEQ ID NO: 116047 - DNA, 120 bp, Artificial Sequence
  ENSG00000100490_12 (sequence is synthesized)
gcatcatatttaagatagttctatttcttgaaatcaaaatgtttaaaatcccatttcctgcttgctctatttcttgatttttatattttaaaacattttgagggtaacacttaggttcaa

SEQ ID NO: 116048 - DNA, 120 bp, Artificial Sequence
  ENSG00000100490_13 (sequence is synthesized)
aatatttaaaagcatatgaattatcacaaaagcttggtaatttataatttaattatatgtttccacatttcatccttactttatcagtaaaggatacaccttagtcacttttgcaggcaa

SEQ ID NO: 116049 - DNA, 120 bp, Artificial Sequence
  ENSG00000100490_14 (sequence is synthesized)
acagcagaagactgccgtggaaccttccctactgtagaggaaagtgctgactttaagcaatttctgcagtcacgccttcctcttctttcctttctccctctcattcattcactgacgccg

SEQ ID NO: 116050 - DNA, 120 bp, Artificial Sequence
  ENSG00000100490_15 (sequence is synthesized)
cagcactgatcagcacagacacagaagatgcctccaagggaccaaagggaataaccgcggttctgaggaccgtgacaaacactcatcgttgggtggggctctagtgcagtccgttggtgc

SEQ ID NO: 116051 - DNA, 79 bp, Artificial Sequence
  ENSG00000100490_16 (sequence is synthesized)
actcatcgttgggtggggctctagtgcagtccgttggtgccaatattttataagcgacgttttcaaactatgtgaagat

SEQ ID NO: 116052 - DNA, 89 bp, Artificial Sequence
  ENSG00000100490_17 (sequence is synthesized)
gcgcgatctccgcgattctcctgcctcagtctcctgagttgctgggactacgggcgcccatcaccacacccggctaattttttgtatct

SEQ ID NO: 116053 - DNA, 120 bp, Artificial Sequence
  ENSG00000100490_18 (sequence is synthesized)
atttttcattactacttctagaaactatttatttaatatgtgagtgccatttaggaatgactggaaggaactaaaatcatgactggtgtgttttcctgccttttcccccttcttattgca

SEQ ID NO: 116054 - DNA, 120 bp, Artificial Sequence
  ENSG00000100490_19 (sequence is synthesized)
actgaagtttcatctttcaaagaagaaaaaaatgacattaataagttaatacaattttgaagaagtaagaagaaggaattttctgttcttttagggctgtctccacatggaccctactca

SEQ ID NO: 116055 - DNA, 120 bp, Artificial Sequence
  ENSG00000100490_20 (sequence is synthesized)
ccactgctttacagaaacatccaaggttataatttgaaatgatctcctacctgccacctggtacagagagttggaatctagacttgaggatggcagttgtggctttcagctccagcatcc

SEQ ID NO: 116056 - DNA, 120 bp, Artificial Sequence
  ENSG00000100490_21 (sequence is synthesized)
tcattccagcactaggagacaggtcataggatctatcaaccagggccccagggacatctgtctcctgaagccccctctccctgaatcctaaaggtgcccttgtcctgctgcttcctgatg

SEQ ID NO: 116057 - DNA, 120 bp, Artificial Sequence
  ENSG00000100490_22 (sequence is synthesized)
ccacacaggggccagggtttccagcctgcatgagcacaggtctcaacaaggtacatgagtatgagtccagctaaggagactttttgggctttggaaaatgaaatcagattttccccatgc

SEQ ID NO: 116058 - DNA, 120 bp, Artificial Sequence
  ENSG00000100490_23 (sequence is synthesized)
atttgaatttcagataaacaagcataacttttagtataagtacatcccaagtgcttcatgggatgtattatcctaaaaaaattatttgtttatctgaaattcaaatttaactgggtgtcc

SEQ ID NO: 116059 - DNA, 120 bp, Artificial Sequence
  ENSG00000100490_24 (sequence is synthesized)
tgtatttttctctgctaagaccggctaccctactttcattttcctttcactcttcttggctcttttgggccttttaggaatttgggatgattcaggctctgacaggcatggtactagatt

SEQ ID NO: 116060 - DNA, 120 bp, Artificial Sequence
  ENSG00000100490_25 (sequence is synthesized)
gagctgggcggaagaaggcgaggcgggagccaggcccgtccctgaccgccgcggcgccgtgagtcccgggcgggcaaggaggcgcgggccgtccctggccaacacgtggcaccgctccat

SEQ ID NO: 116061 - DNA, 120 bp, Artificial Sequence
  ENSG00000100490_26 (sequence is synthesized)
atctggaggtggggcatgctttagagacaggaaactgaacacatcctgaaatgaaagggagtgtgagccttctaggaagtgagagaaattcagtgggtccagaaggaagttataagtgtt

SEQ ID NO: 116062 - DNA, 83 bp, Artificial Sequence
  ENSG00000100490_27 (sequence is synthesized)
gagagaaattcagtgggtccagaaggaagttataagtgttggggctggagagcttggagtgccctcagttctaagatccaaac

SEQ ID NO: 116063 - DNA, 120 bp, Artificial Sequence
  ENSG00000100490_28 (sequence is synthesized)
ctgtatttttctctgctaagaccggctaccctactttcattttcctttcactcttcttggctcttttgggccttttaggaatttgggatgattcaggctctgacaggcatgtgcatacat

SEQ ID NO: 116064 - DNA, 120 bp, Artificial Sequence
  ENSG00000100490_29 (sequence is synthesized)
cagttctccatgagttggacagataccaaagaggtgaccacagcacagacttttcatatttcagaatgttaatttacatagccagagagagccaagaggacagacacctcccttcagaaa

SEQ ID NO: 116065 - DNA, 120 bp, Artificial Sequence
  ENSG00000100490_30 (sequence is synthesized)
gtcatcgatacagagaaattatgttttcaaaggagaaaacatttcgtatgttgatatttgatcttttgacagcttgcaagtgacacttcaattaaacttgttaatataagttactcatgg

SEQ ID NO: 116066 - DNA, 120 bp, Artificial Sequence
  ENSG00000100490_31 (sequence is synthesized)
atggagctgtccactgatactggctggaatcagaagagtaatttcccgccttgtgactctcgtgtctccaaagaagaagcccaactccctttcccaacacctagcagctacggtgcagac

SEQ ID NO: 116067 - DNA, 120 bp, Artificial Sequence
  ENSG00000100490_32 (sequence is synthesized)
tcctccaaccagacttacgcacacaagtctcagtctgaaagagagcagcacaaggaagtacgtgctgtcctgaaccattgttctggcttggatggtggagaggagtctggcctttgtggg

SEQ ID NO: 116068 - DNA, 120 bp, Artificial Sequence
  ENSG00000100490_33 (sequence is synthesized)
acaagtacccgcattgatgctggcactgggaacgggacggatgataaagtcactgatcagcacagacacagaagatgcctccaagggaccaaagggaataaccgcggttctgaggtgtgg

SEQ ID NO: 116069 - DNA, 120 bp, Artificial Sequence
  ENSG00000100490_34 (sequence is synthesized)
ggactgctgttgcagggaaatgtggaccgctcaggaggggctcctagcgcaggcgtcttgctccgcagacgcggttacagctgcgctttgcacggcctgcggaagtttgcaaatctagca

SEQ ID NO: 116070 - DNA, 120 bp, Artificial Sequence
  ENSG00000100490_35 (sequence is synthesized)
gaaatccgaatgctcaaggccccaagcccctatgctgctgaaccttctctctgtggaatgaaaatggtaagaagaggaaagaaagaatttctgccagcagtggcagaaaaagtagatgct

SEQ ID NO: 116071 - DNA, 120 bp, Artificial Sequence
  ENSG00000100490_36 (sequence is synthesized)
cctagcggagttggaggtcaaggacaggacagtgtcactgtgggatccctgggcagacgttctacctatggcagaaaacaagaaaaacaagtgagacaaagagaaggaatcatctactgc

SEQ ID NO: 116072 - DNA, 120 bp, Artificial Sequence
  ENSG00000100490_37 (sequence is synthesized)
tatgtggcagttttgcttcggatttactattttgaccagggttgtgttgccagggaggaagagcagtttcaggagcttgtgtttggccctttctgccatattggctcttacttcacaggt

SEQ ID NO: 116073 - DNA, 120 bp, Artificial Sequence
  ENSG00000100490_38 (sequence is synthesized)
catagaaccaatgtgaggccttacattttactactatcacggcccagccccttcaagacggctgctggtacctatgaggcaggtcttgtcattcttgagtgcagttatttcctcgcagag

SEQ ID NO: 116074 - DNA, 120 bp, Artificial Sequence
  ENSG00000100490_39 (sequence is synthesized)
caagaaccttattgccctactcaggcactgcaacaacctcatcctattataggtccgtgggccctagaaggaggtggggtagaatctaaggaggacaggcatccccctcctaaggaggca

SEQ ID NO: 116075 - DNA, 120 bp, Artificial Sequence
  ENSG00000100490_40 (sequence is synthesized)
cctgcatcatgtgagggatttttaaggtctgcagtgccgaagcaagcttacaccccattcaaaaccagccctgacaaaaggcttagtgactgtgttgctacacctccctgggctcctccc

SEQ ID NO: 116076 - DNA, 120 bp, Artificial Sequence
  ENSG00000100490_41 (sequence is synthesized)
ggaagtgctggaatcctggtatggatatttttatgcaatgatgcttttatttatggaaagtatattctcagaagtggagtgctatgggttcgtggtctccctggcttcaagagtgaagct

SEQ ID NO: 116077 - DNA, 82 bp, Artificial Sequence
  ENSG00000100490_42 (sequence is synthesized)
gctatgggttcgtggtctccctggcttcaagagtgaagctgcagccctttgccataagtgttacagcagtgcggacccaaag

SEQ ID NO: 116078 - DNA, 120 bp, Artificial Sequence
  ENSG00000100490_43 (sequence is synthesized)
cccaccagactcaggagcccagctggcctcacccagtggatcccacaccaggccacaggtggagctgcctgccagtcccatgccgtgcgcccgcactcctcagtccttgggtggtcgatg

SEQ ID NO: 116079 - DNA, 120 bp, Artificial Sequence
  ENSG00000100490_44 (sequence is synthesized)
ccttgggtggtcgatgggaccgggtgctgcggagcagggggcggttctgatcgtggaggctcggccgcgcaggagcccacgcaactcaagcatcccaaccttgttaacctcctggaagtc

SEQ ID NO: 116080 - DNA, 120 bp, Artificial Sequence
  ENSG00000100490_45 (sequence is synthesized)
ggtgagcacacagaggccttgtccaagaaaaagaaaaaaggaggagggggtcccttcctgaagttgagggcagcctcttgcaggatcaccctgtttaagaatgttggctgtgggctggaa

SEQ ID NO: 116081 - DNA, 120 bp, Artificial Sequence
  ENSG00000100490_46 (sequence is synthesized)
accacaggtgatttgagtctaaattctggagggggggccgcatctcgaggggtggctgcagctctcagagcacttgtgtgtgggacagagctgacatctagcgactctccccagaggtgc

SEQ ID NO: 116082 - DNA, 120 bp, Artificial Sequence
  ENSG00000100490_47 (sequence is synthesized)
cctgaagatatgtccctctgcctgtcagtaaccctgacagagggaggcctgcttgcttctggggctgtgaaacgctcacagatgggctccagcgtatcacaggcaaccagttggcctcat

SEQ ID NO: 116083 - DNA, 120 bp, Artificial Sequence
  ENSG00000100490_48 (sequence is synthesized)
ccagacattgttgctgagacagcagagctcgatgatatagcaatggcacgtcaaaccccagtgatgctcagattcaaccgacagaaagaacaagagaaatatttaagctatggagcatga

SEQ ID NO: 116084 - DNA, 80 bp, Artificial Sequence
  ENSG00000100503_0 (sequence is synthesized)
ccgagccgggagccgagcgcgctgggcgcggccgtcccgctgccgccgccaagcccggagtgcgccagcggccatggttc

SEQ ID NO: 116085 - DNA, 120 bp, Artificial Sequence
  ENSG00000100503_1 (sequence is synthesized)
ctggaggcgggctgccggctgtgcgggcgctccggagagaccgacagaaggtgagcactgtgggctatgggatggatgaggtggagcaggaccagcatgaggcccgactcaaggagctgt

SEQ ID NO: 116086 - DNA, 120 bp, Artificial Sequence
  ENSG00000100503_2 (sequence is synthesized)
ttgacagttttgacacgacgggcacagggtccctggggcaggaggaactcaccgacctttgccacatgttgagcttggaggaggtggccccagtgctgcagcagacattacttcaggaca

SEQ ID NO: 116087 - DNA, 120 bp, Artificial Sequence
  ENSG00000100503_3 (sequence is synthesized)
acctcttgggcagggtacattttgaccaatttaaagaagcattaatactcatcttgtccagaactctgtcaaatgaagaacactttcaagaaccagactgctcactagaagctcagccca

SEQ ID NO: 116088 - DNA, 120 bp, Artificial Sequence
  ENSG00000100503_4 (sequence is synthesized)
aatatgttagaggtgggaagcgttacggacgaaggtccttgcccgagttccaagagtccgtggaggagtttcctgaagtgacggtgattgagccactggatgaagaagcgcggccttcac

SEQ ID NO: 116089 - DNA, 120 bp, Artificial Sequence
  ENSG00000100503_5 (sequence is synthesized)
acatcccagccggtgactgcagtgagcactggaagacgcaacgcagtgaggagtatgaagcggaaggccagttaaggttttggaacccagatgacttgaatgcttcacagagtggatctt

SEQ ID NO: 116090 - DNA, 120 bp, Artificial Sequence
  ENSG00000100503_6 (sequence is synthesized)
cccctccccaagactggatagaagagaaactgcaagaagtttgtgaagatttggggatcacccgtgatggtcacctgaaccggaagaagctggtctccatctgtgagcagtatggtttac

SEQ ID NO: 116091 - DNA, 120 bp, Artificial Sequence
  ENSG00000100503_7 (sequence is synthesized)
agaatgtggatggagagatgctcgaggaagtattccataatcttgatcctgacggtacaatgagtgtagaagattttttctatggtttgtttaaaaatggaaaatctcttacaccatcag

SEQ ID NO: 116092 - DNA, 120 bp, Artificial Sequence
  ENSG00000100503_8 (sequence is synthesized)
catctactccatatagacaactaaaaaggcacctttccatgcagtctttcgatgagagtggacgacgtaccacaacctcatcagcaatgacaagtaccattggctttcgggtcttctcct

SEQ ID NO: 116093 - DNA, 120 bp, Artificial Sequence
  ENSG00000100503_9 (sequence is synthesized)
gcctggatgatgggatgggccatgcatctgtggagagaatactggacacctggcaggaagagggcattgagaacagccaggagatcctgaaggccttggatttcagcctcgatggaaaca

SEQ ID NO: 116094 - DNA, 120 bp, Artificial Sequence
  ENSG00000100503_10 (sequence is synthesized)
tcaatttgacagaattaacactggcccttgaaaatgaacttttggttaccaagaacagcattcaccaggcggctctggccagctttaaggctgaaatccggcatttgttggaacgagttg

SEQ ID NO: 116095 - DNA, 120 bp, Artificial Sequence
  ENSG00000100503_11 (sequence is synthesized)
atcaggtggtcagagaaaaagagaagctacggtcagatctggacaaggccgagaagctcaagtctttaatggcctcggaggtggatgatcaccatgcggccatagagcggcggaatgagt

SEQ ID NO: 116096 - DNA, 120 bp, Artificial Sequence
  ENSG00000100503_12 (sequence is synthesized)
acaacctcaggaaactggatgaagagtacaaggagcgaatagcagccttaaaaaatgaactccgaaaagagagagagcagatcctgcagcaggcaggcaagcagcgtttagaacttgaac

SEQ ID NO: 116097 - DNA, 120 bp, Artificial Sequence
  ENSG00000100503_13 (sequence is synthesized)
aggaaattgaaaaggcaaaaacagaagagaactatatccgggaccgccttgccctctctttaaaggaaaacagtcgtctggaaaatgagcttctagaaaatgcagagaagttggcagaat

SEQ ID NO: 116098 - DNA, 120 bp, Artificial Sequence
  ENSG00000100503_14 (sequence is synthesized)
atgagaatctgacaaacaaacttcagagaaatttggaaaatgtgttagcagaaaagtttggtgacctcgatcctagcagtgctgagttcttcctgcaagaagagagactgacacagatga

SEQ ID NO: 116099 - DNA, 120 bp, Artificial Sequence
  ENSG00000100503_15 (sequence is synthesized)
gaaatgaatatgagcggcagtgcagggtactacaagaccaagtagatgaactccagtctgagctggaagaatatcgtgcacaaggcagagtgctcaggcttccgttgaagaactcaccgt

SEQ ID NO: 116100 - DNA, 120 bp, Artificial Sequence
  ENSG00000100503_16 (sequence is synthesized)
cagaagaagttgaggctaacagcggtggcattgagcccgaacacgggctcggttctgaagaatgcaatccattgaatatgagcattgaggcagagctggtcattgaacagatgaaagaac

SEQ ID NO: 116101 - DNA, 120 bp, Artificial Sequence
  ENSG00000100503_17 (sequence is synthesized)
aacatcacagggacatatgttgcctcagactggagctcgaagataaagtgcgccattatgaaaagcagctggacgaaaccgtggtcagctgcaagaaggcacaggagaacatgaagcaaa

SEQ ID NO: 116102 - DNA, 120 bp, Artificial Sequence
  ENSG00000100503_18 (sequence is synthesized)
ggcatgagaacgaaacgcacaccttagaaaaacaaataagtgaccttaaaaatgaaattgctgaacttcaggggcaagcagcagtgctcaaggaggcacatcatgaggccacttgcaggc

SEQ ID NO: 116103 - DNA, 120 bp, Artificial Sequence
  ENSG00000100503_19 (sequence is synthesized)
atgaggaggagaaaaaacaactgcaagtgaagcttgaggaggaaaagactcacctgcaggagaagctgaggctgcaacatgagatggagctcaaggctagactgacacaggctcaagcaa

SEQ ID NO: 116104 - DNA, 120 bp, Artificial Sequence
  ENSG00000100503_20 (sequence is synthesized)
gctttgagcgggagagggaaggccttcagagtagcgcctggacagaagagaaggtgagaggcttgactcaggaactagagcagtttcaccaggagcagctgacaagcctggtggagaaac

SEQ ID NO: 116105 - DNA, 120 bp, Artificial Sequence
  ENSG00000100503_21 (sequence is synthesized)
acactcttgagaaagaggagttaagaaaagagctcttggaaaagcaccaaagggagcttcaggagggaagggaaaaaatggaaacagagtgtaatagaagaacctctcaaatagaagccc

SEQ ID NO: 116106 - DNA, 120 bp, Artificial Sequence
  ENSG00000100503_22 (sequence is synthesized)
agtttcagtctgattgtcagaaagtcactgagaggtgtgaaagcgctctgcaaagcctggaggggcgctaccgccaagagctgaaggacctccaggaacagcagcgtgaggagaaatccc

SEQ ID NO: 116107 - DNA, 120 bp, Artificial Sequence
  ENSG00000100503_23 (sequence is synthesized)
agtgggaatttgagaaggacgagctcacccaggagtgtgcggaagcccaggagctgctgaaagagactcttaagagagagaaaacaacttctctggtcctgacccaggagagagagatgc

SEQ ID NO: 116108 - DNA, 120 bp, Artificial Sequence
  ENSG00000100503_24 (sequence is synthesized)
tggagaaaacatacaaagaacatttgaacagcatggtcgtcgagagacagcagctactccaagacctggaagacctaagaaatgtatctgaaacccagcaaagcctgctgtctgaccaga

SEQ ID NO: 116109 - DNA, 120 bp, Artificial Sequence
  ENSG00000100503_25 (sequence is synthesized)
tacttgagctgaagagcagtcacaaaagggaactgagggagcgtgaggaggtcctgtgccaggcaggggcttcggagcagctggccagccagcggctggaaagactagaaatggaacatg

SEQ ID NO: 116110 - DNA, 120 bp, Artificial Sequence
  ENSG00000100503_26 (sequence is synthesized)
accaggaaaggcaggaaatgatgtccaagcttctagccatggagaacattcacaaagcgacctgtgagacagcagatcgagaaagagccgagatgagcacagaaatctccagacttcaga

SEQ ID NO: 116111 - DNA, 120 bp, Artificial Sequence
  ENSG00000100503_27 (sequence is synthesized)
gcagcaggcaacatctcctctctcaatgcttcagagtggttgccaggtgataggagaggaggaggtggaaggagatggagccctgtccctgcttcagcaaggggagcagctgttggaaga

SEQ ID NO: 116112 - DNA, 120 bp, Artificial Sequence
  ENSG00000100503_28 (sequence is synthesized)
aaatggggacgtcctcttaagcctgcagagagctcatgaacaggcagtgaaggaaaatgtgaaaatggctactgaaatttctagattgcaacagaggctacaaaagttagagccagggtt

SEQ ID NO: 116113 - DNA, 120 bp, Artificial Sequence
  ENSG00000100503_29 (sequence is synthesized)
agtaatgtcttcttgtttggatgagccagctactgagttttttggaaatactgcggaacaaacagagcagtttttacagcaaaaccgaacgaagcaagtagaaggtgtgaccaggcggca

SEQ ID NO: 116114 - DNA, 120 bp, Artificial Sequence
  ENSG00000100503_30 (sequence is synthesized)
tgtcctaagtgacctggaagatgatgaggtccgggacctgggaagtacagggacgagctctgttcagagacaggaagtcaaaatagaggagtctgaagcttcagtagagggtttttctga

SEQ ID NO: 116115 - DNA, 120 bp, Artificial Sequence
  ENSG00000100503_31 (sequence is synthesized)
gcttgaaaacagtgaagagaccaggactgaatcctgggagctgaagaatcagattagtcagcttcaggaacagctaatgatgttatgtgcggactgtgatcgagcttctgaaaagaaaca

SEQ ID NO: 116116 - DNA, 120 bp, Artificial Sequence
  ENSG00000100503_32 (sequence is synthesized)
ggacctactttttgatgtttctgtgctaaaaaagaaactgaagatgcttgagagaatccctgaggcttctcccaaatataagctgttgtatgaagatgtgagccgagaaaatgactgcct

SEQ ID NO: 116117 - DNA, 120 bp, Artificial Sequence
  ENSG00000100503_33 (sequence is synthesized)
tcaggaagagctgagaatgatggagacacgctacgatgaggcactagaaaataacaaagaactcactgcagaggttttcaggttgcaggatgagctgaagaaaatggaggaagtcactga

SEQ ID NO: 116118 - DNA, 120 bp, Artificial Sequence
  ENSG00000100503_34 (sequence is synthesized)
aacattcctcagcctggaaaagagttacgatgaggtcaaaatagaaaatgaggggctgaatgttctggttttgagacttcaaggcaagattgagaagcttcaggaaagcgtggtccagcg

SEQ ID NO: 116119 - DNA, 120 bp, Artificial Sequence
  ENSG00000100503_35 (sequence is synthesized)
gtgtgactgctgcttatgggaagccagtttagagaacctggaaatcgaacctgatggaaatatactccagctcaatcagacactggaagagtgtgtgcccagggttaggagtgtacatca

SEQ ID NO: 116120 - DNA, 120 bp, Artificial Sequence
  ENSG00000100503_36 (sequence is synthesized)
tgtcatagaggaatgtaagcaagaaaaccagtaccttgaggggaacacacagctcttggaaaaagtaaaagcacatgaaattgcctggttacatggaacaattcagacacatcaagaaag

SEQ ID NO: 116121 - DNA, 120 bp, Artificial Sequence
  ENSG00000100503_37 (sequence is synthesized)
gccaagagtacagaatcaagttatactggaggaaaacactactctcctaggctttcaagacaaacattttcagcatcaggccaccatagcagagttagaactggagaaaacaaagttaca

SEQ ID NO: 116122 - DNA, 120 bp, Artificial Sequence
  ENSG00000100503_38 (sequence is synthesized)
ggagctgactaggaagttgaaggagagagtcactattttagttaagcaaaaagatgtactttctcacggagaaaaggaggaagagctgaaggcaatgatgcatgacttgcagatcacgtg

SEQ ID NO: 116123 - DNA, 120 bp, Artificial Sequence
  ENSG00000100503_39 (sequence is synthesized)
cagtgagatgcagcaaaaagttgaacttctgagatatgaatctgaaaagcttcaacaggaaaattctattttgagaaatgaaattactactttaaatgaagaagatagcatttctaacct

SEQ ID NO: 116124 - DNA, 120 bp, Artificial Sequence
  ENSG00000100503_40 (sequence is synthesized)
gaaattagggacattaaatggatctcaggaagaaatgtggcaaaaaacggaaactgtaaaacaagaaaatgctgcagttcagaagatggttgaaaatttaaagaaacagatttcagaatt

SEQ ID NO: 116125 - DNA, 120 bp, Artificial Sequence
  ENSG00000100503_41 (sequence is synthesized)
aaaaatcaaaaaccaacaattggatttggaaaatacagaacttagccaaaagaactctcaaaaccaggaaaaactgcaagaacttaatcaacgtctaacagaaatgctatgccagaagga

SEQ ID NO: 116126 - DNA, 120 bp, Artificial Sequence
  ENSG00000100503_42 (sequence is synthesized)
aaaagagccaggaaacagtgcattggaggaacgggaacaagagaagtttaatctgaaagaagaactggaacgttgtaaagtgcagtcctccactttagtgtcttctctggaggcggagct

SEQ ID NO: 116127 - DNA, 120 bp, Artificial Sequence
  ENSG00000100503_43 (sequence is synthesized)
ctctgaagttaaaatacagacccatattgtgcaacaggaaaaccaccttctcaaagatgaactggagaaaatgaaacagctgcacagatgtcccgatctctctgacttccagcaaaaaat

SEQ ID NO: 116128 - DNA, 120 bp, Artificial Sequence
  ENSG00000100503_44 (sequence is synthesized)
ctctagtgttctaagctacaacgaaaaactgctgaaagaaaaggaagctctgagtgaggaattaaatagctgtgtcgataagttggcaaaatcaagtcttttagagcatagaattgcgac

SEQ ID NO: 116129 - DNA, 120 bp, Artificial Sequence
  ENSG00000100503_45 (sequence is synthesized)
gatgaagcaggaacagaaatcctgggaacatcagagtgcgagcttaaagtcacagctggtggcttctcaggaaaaggttcagaatttagaagacaccgtgcagaatgtaaacctgcaaat

SEQ ID NO: 116130 - DNA, 120 bp, Artificial Sequence
  ENSG00000100503_46 (sequence is synthesized)
gtcccggatgaaatctgacctacgagtgactcagcaggaaaaggaggctttaaaacaagaagtgatgtctttacataagcaacttcagaatgctggtggcaagagctgggccccagagat

SEQ ID NO: 116131 - DNA, 120 bp, Artificial Sequence
  ENSG00000100503_47 (sequence is synthesized)
agctactcatccatcagggctccataaccagcagaaaaggctgtcctgggacaagttggatcatctgatgaatgaggaacagcagctgctttggcaagagaatgagaggctccagaccat

SEQ ID NO: 116132 - DNA, 120 bp, Artificial Sequence
  ENSG00000100503_48 (sequence is synthesized)
ggtacagaacaccaaagccgaactcacgcactcccgggagaaggtccgtcagttggaatccaatcttcttcccaagcaccaaaaacatctaaacccatcaggtaccatgaatcccacaga

SEQ ID NO: 116133 - DNA, 120 bp, Artificial Sequence
  ENSG00000100503_49 (sequence is synthesized)
gcaagaaaaattgagcttaaagagagagtgtgatcagtttcagaaagaacaatctcctgctaacaggaaggtcagtcagatgaattcccttgaacaagaattagaaacaattcatttgga

SEQ ID NO: 116134 - DNA, 120 bp, Artificial Sequence
  ENSG00000100503_50 (sequence is synthesized)
aaatgaaggcctgaaaaagaaacaagtaaaactggatgagcagctcatggagatgcagcacctgaggtccactgcgacgcctagcccgtcccctcatgcttgggatttgcagctgctcca

SEQ ID NO: 116135 - DNA, 120 bp, Artificial Sequence
  ENSG00000100503_51 (sequence is synthesized)
gcagcaagcctgtccgatggtgcccagggagcagtttctgcagcttcaacgccagctgctgcaggcagaaaggataaaccagcacctgcaggaggaacttgaaaacaggacctccgaaac

SEQ ID NO: 116136 - DNA, 120 bp, Artificial Sequence
  ENSG00000100503_52 (sequence is synthesized)
caacacaccacagggaaaccaggaacaactggtaactgtcatggaggaacgaatgatagaagttgaacagaaactgaaactagtgaaaaggcttcttcaagagaaagtgaatcagctcaa

SEQ ID NO: 116137 - DNA, 120 bp, Artificial Sequence
  ENSG00000100503_53 (sequence is synthesized)
agaacaagtgagcctacccggtcatctctgttcacccacctcacattccagctttaactccagttttacatccctttattgccattaactcgttaacttatgttgtctaataaaggcaaa

SEQ ID NO: 116138 - DNA, 120 bp, Artificial Sequence
  ENSG00000100503_54 (sequence is synthesized)
ctctggaagtgactgaacagcgacagaaaacagcagagaagaaaaattacctcctggaggagaagattgccagcctcagtaatatagttaggaatctgacaccagcgccattgacttcta

SEQ ID NO: 116139 - DNA, 120 bp, Artificial Sequence
  ENSG00000100503_55 (sequence is synthesized)
cacctcctttgaggtcatagccaaaccaaagggtacactcatatttgtgcactttactgaaatagatgaacatttcagtaggttctcaacttaaaattaagcctaacctaaaactgccag

SEQ ID NO: 116140 - DNA, 120 bp, Artificial Sequence
  ENSG00000100503_56 (sequence is synthesized)
caacacaactggagtttccatttatcataattagtttttctaaatagacccttatgggagtttgaaaataaatactcacatatttcactacttaaattattcccaagatttgaatttatt

SEQ ID NO: 116141 - DNA, 120 bp, Artificial Sequence
  ENSG00000100503_57 (sequence is synthesized)
ttaaaattttaatagccaccaagaatgtggacatatgaaaattcaagaacctaaaaaataccagttttgaatgagtttttgtggttttggttttttttttaattattacaaatctatgtg

SEQ ID NO: 116142 - DNA, 120 bp, Artificial Sequence
  ENSG00000100503_58 (sequence is synthesized)
taaaatctagatatttgaagtttgagatctgatgagaatggttgttataaactttattttaaaaccaaatttaggtgttcttacatatttaaatactggaaagtcattataatagttttg

SEQ ID NO: 116143 - DNA, 120 bp, Artificial Sequence
  ENSG00000100503_59 (sequence is synthesized)
gttctttgaattggtagacaattagtagagtataattggttaggaggcagggcttattaagtggttattaaccgctgacatcagacaaacccaaatctgtagaattctaaccttctaaca

SEQ ID NO: 116144 - DNA, 120 bp, Artificial Sequence
  ENSG00000100503_60 (sequence is synthesized)
cctgtgacagtattaccactcttcttgtattatagatttagaactgatttactcaattgcactcttaactaatgttaaaagcttacttgctttaaacagccttttcttctttctcttaaa

SEQ ID NO: 116145 - DNA, 120 bp, Artificial Sequence
  ENSG00000100503_61 (sequence is synthesized)
agtttcatttggggagctggtcttctaagaaacggataaagccacataattaaagcagttgaactatagggaaagcactgaacaaaccactttggagtaaatagctactcttagaaaaga

SEQ ID NO: 116146 - DNA, 120 bp, Artificial Sequence
  ENSG00000100503_62 (sequence is synthesized)
gggataagcagaccatgtaggttttctgtctctcaaatcttagagttcataaatttacttgaggttgcctcaagaactcagggaacaatactgtaaactgtcttcctgaactactgtagg

SEQ ID NO: 116147 - DNA, 120 bp, Artificial Sequence
  ENSG00000100503_63 (sequence is synthesized)
gcctctctaagaatttgaaatgtataaaccatgtgacctcatttatttgtcttatatatttacagccatactagaatttttatttctacgtttttagtaaatttaatattctgggggaaa

SEQ ID NO: 116148 - DNA, 120 bp, Artificial Sequence
  ENSG00000100503_64 (sequence is synthesized)
aaaggccttgattttagggttaaaaacctgacttatagaagagtttatttaatataggtcaaaattttctgtgtttcttattccttctatacctcaaatctgattctaagaatttcttac

SEQ ID NO: 116149 - DNA, 120 bp, Artificial Sequence
  ENSG00000100503_65 (sequence is synthesized)
tgtgataatcattggcatgccacctgaggtcaaggagtgccaaataggactttccactcatgctcaagatcaaaactttatagaacagtcaacattttagattcggtaaccttttttttc

SEQ ID NO: 116150 - DNA, 120 bp, Artificial Sequence
  ENSG00000100503_66 (sequence is synthesized)
ttccaattataatctctgctagccacttccgccagcagttggtggaagacttactaggtgcagggcactttccaagttcatcacaacaacctgcttgttttcatgagacaataatccgaa

SEQ ID NO: 116151 - DNA, 120 bp, Artificial Sequence
  ENSG00000100503_67 (sequence is synthesized)
aagttcgctttgatatattcctggagggccaagcccatctatttacaaaaggtgaacagcaaaatcaagcactgctttatgggcaggaacacaagagaaagcaaactgcccaagaagtca

SEQ ID NO: 116152 - DNA, 120 bp, Artificial Sequence
  ENSG00000100503_68 (sequence is synthesized)
tcatgtcagaaactcaatctcaacaaaataatttccatcagggaacttcagggtttcttgggggcttatgagtctcaccggtcaacccaggaggcctcactacaagagccttgacaaggc

SEQ ID NO: 116153 - DNA, 120 bp, Artificial Sequence
  ENSG00000100503_69 (sequence is synthesized)
actgttttttgtgggactgggagttcacactgatgaagcaaacctttgaatttttgcacagctcttgtcagaaagccctgagttccccctggataaagagttaattttaatccttcccta

SEQ ID NO: 116154 - DNA, 120 bp, Artificial Sequence
  ENSG00000100503_70 (sequence is synthesized)
taattatacttcaaaatatttgacatctgctattatgccttctttagatctttcttctgtggtgcagacatttctagtaagtgtttgactacttgtatggcattagctttcacagaaaat

SEQ ID NO: 116155 - DNA, 120 bp, Artificial Sequence
  ENSG00000100503_71 (sequence is synthesized)
tgtttcacttaaaactgtggattggcctaggctaaggacaaaaataaactaagtacctgtagtgtatttatgtgatatgtgtcaagttactcaaagttattgctgttggaactgaacaat

SEQ ID NO: 116156 - DNA, 120 bp, Artificial Sequence
  ENSG00000100503_72 (sequence is synthesized)
aatatttcccagatagctggccttagcatgtgatcacggttgttgtatttttaatttttgtcttttacagtatgagaggtgtaggttaatttgtttatttcctataaatttgtatttatg

SEQ ID NO: 116157 - DNA, 120 bp, Artificial Sequence
  ENSG00000100503_73 (sequence is synthesized)
tgtatataaaatgtacaatgaatgtaaatatgactttctggaaagtttagactacatttagaatctctattcaaaatcaaaatgctgctcaaatgaatttaaccaacatctaggtgctta

SEQ ID NO: 116158 - DNA, 120 bp, Artificial Sequence
  ENSG00000100503_74 (sequence is synthesized)
atttctcattttatcccacttatgagattgggaaaaagatcaatatgagaaataccatacagataccttaaatgtatgcatttgtgcaacaatttttgagaaggtgagtggcaatttata

SEQ ID NO: 116159 - DNA, 120 bp, Artificial Sequence
  ENSG00000100503_75 (sequence is synthesized)
atttagttggcaatttataatagaacttatagcttttaaaagaccttttaaagacattaaatgtaaacttaaaaatgtttagatcttgtttcaaactttacaatagcattcttcaaaata

SEQ ID NO: 116160 - DNA, 120 bp, Artificial Sequence
  ENSG00000100503_76 (sequence is synthesized)
ttaagttatatattttataggcatttagttgcttattaaaagcactgattttcaaactttttgatttaagaacaattatttaagatcgtctcagaagatgggatcttcgtttcaagaaaa

SEQ ID NO: 116161 - DNA, 120 bp, Artificial Sequence
  ENSG00000100503_77 (sequence is synthesized)
gggaatcaagtttgcctttgagataatacgttacactaagaaaaggaaaatgtggatagtaaaacccacctctctcatcctattgtactctcttctgctttttagaagcctgcacttaag

SEQ ID NO: 116162 - DNA, 120 bp, Artificial Sequence
  ENSG00000100503_78 (sequence is synthesized)
cttagatttgtgaagggagagtagaaggggagaagtagaaccacagtgttttatttatttttctaaaactcttactaaatccagattttttaaactgttttaaatgtgaattcttcccag

SEQ ID NO: 116163 - DNA, 120 bp, Artificial Sequence
  ENSG00000100503_79 (sequence is synthesized)
aaatttcaatgcattgcatatttagccttcggcatatttttcatgaatagatcatgaagtcataggcttccaaggcataggaagagatcttgcaggtctagtattttaataatgcactat

SEQ ID NO: 116164 - DNA, 120 bp, Artificial Sequence
  ENSG00000100503_80 (sequence is synthesized)
tacccagggcagatattatgagaaactgtttcttctctaagggtttatggcagactttgcttttttaacatgtgagaaatgaattttttattttgtgatttatgtgatttcttttgctga

SEQ ID NO: 116165 - DNA, 120 bp, Artificial Sequence
  ENSG00000100503_81 (sequence is synthesized)
gtgaaggaaaggagaaattgttgctattgtcagcatcttaaaggtatttccagtcaaggcaaggctaagtgctttgtgatagtattaagcaagtcatgttttgaatggattacctgtagt

SEQ ID NO: 116166 - DNA, 120 bp, Artificial Sequence
  ENSG00000100503_82 (sequence is synthesized)
gactcattggaatgatataattatacaagtaatgccaaaaaccaagtcaaagcctaattaaccaaagcactcatttaaaaatcatcatgtttggacctatctggacctctcagcactgta

SEQ ID NO: 116167 - DNA, 120 bp, Artificial Sequence
  ENSG00000100503_83 (sequence is synthesized)
aaatagttttggttttgtggcatatgaatagctgtttaacaaatcaaagttagctttttgcttctcagcttttttgggcaatacaagttaagttcttaatggggagacattatcatggca

SEQ ID NO: 116168 - DNA, 120 bp, Artificial Sequence
  ENSG00000100503_84 (sequence is synthesized)
tgacttaagggaacattggtttgtgaaggaaaaacagattatctaaagccatctctatgtttctgttcagataaagattaatgagttctgtgtttatatcagctttgtatatttcatctt

SEQ ID NO: 116169 - DNA, 120 bp, Artificial Sequence
  ENSG00000100503_85 (sequence is synthesized)
agccattctatcctagaaagattttaatgtgagcttaagatgtaaataaataattttgcaaacatgccttttgttttctatataccctgaccttttaataaagtttcagtgtatttatca

SEQ ID NO: 116170 - DNA, 120 bp, Artificial Sequence
  ENSG00000100503_86 (sequence is synthesized)
tcctacagaaggattgggcacctgtgaaaactgggctgctattgatggcatttcttaccatggcagacagatgcacacacccacccatgcacacacaccacacacagagacataagctaa

SEQ ID NO: 116171 - DNA, 120 bp, Artificial Sequence
  ENSG00000100503_87 (sequence is synthesized)
gatatgttggaattaagtgctcttttaaattattttattatttttactgttaaacctttgcagtattatgtctcttatttatttatgtagaaatgacagatcttgtgaatcaaattcaca

SEQ ID NO: 116172 - DNA, 120 bp, Artificial Sequence
  ENSG00000100503_88 (sequence is synthesized)
aacatcagcttgttacaaatcattttatttataccctttaaagagtgtggatttaagattcttgaaaggatgtagtctatatattttctcattccatatgttgtaactatttttaaccaa

SEQ ID NO: 116173 - DNA, 120 bp, Artificial Sequence
  ENSG00000100503_89 (sequence is synthesized)
aggtactacttttatatatggaatttgaagaaaaccaggggtatttatactgttttgtataagatgtacaaatctttttgacaggaaatttttgatgaaacaataaaataaattttaagt

SEQ ID NO: 116174 - DNA, 120 bp, Artificial Sequence
  ENSG00000100503_90 (sequence is synthesized)
gtcatgtacacatttagagttcagtgtgataaagcagctcgaacacttggtttttgcctcaagatactgagcctggggtgctttccagtgcccagcagttgccatggttctttctgctgg

SEQ ID NO: 116175 - DNA, 120 bp, Artificial Sequence
  ENSG00000100503_91 (sequence is synthesized)
attccttgcacccaggcctgtctcgttctccagcatgtggagagtcgccagcctccctcatcccccatcttttcattttgcatattgccataatctaccaataaaggaggttcagtaaca

SEQ ID NO: 116176 - DNA, 120 bp, Artificial Sequence
  ENSG00000100503_92 (sequence is synthesized)
atgcgcgctgcagcccgcggcccccgagagccgcgcttttgtaagagctggccccttacatatggaaatgacgctcacgcgggtccccattcgcgtccttttgaaggacgcccgcccgga

SEQ ID NO: 116177 - DNA, 120 bp, Artificial Sequence
  ENSG00000100503_93 (sequence is synthesized)
atgggaggttgatagcgatcttccaagttaccttggatgtccattttactagaggtactcacaggtattaaattatgggttttcagaattttgctttatatcagggggatgatggtaaca

SEQ ID NO: 116178 - DNA, 120 bp, Artificial Sequence
  ENSG00000100503_94 (sequence is synthesized)
caggtaagattcttttgatttttcagtctgatcctttatctgatagggttacttttctgacatatgcaatccatgcagggctcaaaactctcatttcatgagaaatccatccttcctgtt

SEQ ID NO: 116179 - DNA, 120 bp, Artificial Sequence
  ENSG00000100503_95 (sequence is synthesized)
tttctttgtatcccaggctggatcaccacttgctgccacctcaaactcctgggctcaaaggattctcccacctcagccttccaggtagttgggactacaggcacacgccaccacactcag

SEQ ID NO: 116180 - DNA, 120 bp, Artificial Sequence
  ENSG00000100503_96 (sequence is synthesized)
ccaggtagttgggactacaggcacacgccaccacactcagctttttatttttggtagagatggggggtcttgccatcttgcctagactagtttgaaactcctgggctcaagcgatcctcc

SEQ ID NO: 116181 - DNA, 120 bp, Artificial Sequence
  ENSG00000100503_97 (sequence is synthesized)
caccatgcctagcctagaataggattctacaagtatatatttttatttgcaactaagagggtcctttacagtccaacatcataggctaaaacaatttctacaaaattcagtgaaaccatc

SEQ ID NO: 116182 - DNA, 120 bp, Artificial Sequence
  ENSG00000100503_98 (sequence is synthesized)
ctccagacatagttcatcattgtcctaaatataatttaacatcctgtaaatatacctactgtcctaggtttccactgagctactgacaagaaagctggatttagtaaagagaaacaaaca

SEQ ID NO: 116183 - DNA, 120 bp, Artificial Sequence
  ENSG00000100503_99 (sequence is synthesized)
gacttgaaagttcttttgtccttattcattcctgaacatgctagaggtgagaccacaagagtttgtgtagcagtaaaagatcattctcacaatacaggttcagaatttagaagacaccgt

SEQ ID NO: 116184 - DNA, 120 bp, Artificial Sequence
  ENSG00000100503_100 (sequence is synthesized)
acactttcaagaaccaggtaaggtcactcacttctcttctctgccttcccctttaaaagttgtccggggaagaatctggggaccttgaagcatgtatatgaaggattggggacatctgcc

SEQ ID NO: 116185 - DNA, 120 bp, Artificial Sequence
  ENSG00000100503_101 (sequence is synthesized)
aaataattggattgtttctaggcaataactcattcttggaatgagtagagtgaagctgaatggtaactgctttcatccttgtttccttgtacatggaaggatatgatttggggaaatttt

SEQ ID NO: 116186 - DNA, 120 bp, Artificial Sequence
  ENSG00000100503_102 (sequence is synthesized)
ttcctgaaggtagaagagtgaccagtctagagataattttacttagtcgtagtgagtggatcatgctctgctgtagacattatcacattacattataattatctgtctcctcctctcaag

SEQ ID NO: 116187 - DNA, 120 bp, Artificial Sequence
  ENSG00000100503_103 (sequence is synthesized)
tgataattccttgaggaccatgctgttcatttttgtatttccagtgcctagaagaatgcttagcatgtagtaagtattcaatgaatgtttcgaaataaaagacttaatattatacttcac

SEQ ID NO: 116188 - DNA, 120 bp, Artificial Sequence
  ENSG00000100503_104 (sequence is synthesized)
tgatttttttctaagcaccataggttgtaagacacattgttatttcatgtatctctaaaaacaaaaattgttgccaattgtaatgtaaaatgacattaattgtaaattctcatttcagag

SEQ ID NO: 116189 - DNA, 120 bp, Artificial Sequence
  ENSG00000100503_105 (sequence is synthesized)
tgtctaaatctggtgtgtgtaggggggaggtgtcttcaaatcaatgaaatatggtagatgtgtaaaggaaagtctaaaaactgtggaaatttatattacagtacagtctggttttatcaa

SEQ ID NO: 116190 - DNA, 120 bp, Artificial Sequence
  ENSG00000100503_106 (sequence is synthesized)
agaaacaagtaaaactggatgagcagctcatggagaactcagtggttggaagtagcagagaagggtgcagttctctgcctgagatagtgtgtgaagatgcagcacctgaggtccactgcg

SEQ ID NO: 116191 - DNA, 120 bp, Artificial Sequence
  ENSG00000100503_107 (sequence is synthesized)
gtgatttgattttctttcttcttaatggtacttctgttcacaaagtctcaaagataaaaggtaactttttttttagcccttttaaccaggagccttttgttaagtactttccgtgttttt

SEQ ID NO: 116192 - DNA, 120 bp, Artificial Sequence
  ENSG00000100503_108 (sequence is synthesized)
gtgtttttaacccccagattattgacatgagaaatactcttacaattgtgtttatttacagggccagatagtgttgttgttgttgttgttgtgttttttttttgttttttgttgtttgtt

SEQ ID NO: 116193 - DNA, 120 bp, Artificial Sequence
  ENSG00000100504_0 (sequence is synthesized)
ctgcccggcagcccagcgcctccggccgcacttccagctctctgcgcagcccgccgcgcagcccgccgccccagccatggcgaagcccctgacggaccaggagaagcggcggcagatcag

SEQ ID NO: 116194 - DNA, 120 bp, Artificial Sequence
  ENSG00000100504_1 (sequence is synthesized)
tcagcatccgcggcatcgtgggcgtggagaacgtggcagagctgaagaagagtttcaaccggcacctgcacttcacgctggtcaaggaccgcaacgtggccaccacccgcgactactact

SEQ ID NO: 116195 - DNA, 120 bp, Artificial Sequence
  ENSG00000100504_2 (sequence is synthesized)
tcgcgctggcgcacacggtgcgcgaccacctggtggggcgctggatccgcacgcagcagcactactacgacaagtgccccaagagggtatattacctctctctggaattttacatgggcc

SEQ ID NO: 116196 - DNA, 120 bp, Artificial Sequence
  ENSG00000100504_3 (sequence is synthesized)
gaacattacagaacaccatgatcaacctcggtctgcaaaatgcctgtgatgaggccatttaccagcttggattggatatagaagagttagaagaaattgaagaagatgctggacttggca

SEQ ID NO: 116197 - DNA, 120 bp, Artificial Sequence
  ENSG00000100504_4 (sequence is synthesized)
atggtggtcttgggagacttgctgcctgcttcttggattccatggcaaccctgggacttgcagcctatggatacggcattcggtatgaatatgggattttcaatcagaagatccgagatg

SEQ ID NO: 116198 - DNA, 120 bp, Artificial Sequence
  ENSG00000100504_5 (sequence is synthesized)
gatggcaggtagaagaagcagatgattggctcagatatggaaacccttgggagaagtcccgcccagaattcatgctgcctgtgcacttctatggaaaagtagaacacaccaacaccggga

SEQ ID NO: 116199 - DNA, 120 bp, Artificial Sequence
  ENSG00000100504_6 (sequence is synthesized)
ccaagtggattgacactcaagtggtcctggctctgccatatgacacccccgtgcccggctacatgaataacactgtcaacaccatgcgcctctggtctgctcgggcaccaaatgacttta

SEQ ID NO: 116200 - DNA, 120 bp, Artificial Sequence
  ENSG00000100504_7 (sequence is synthesized)
acctcagagactttaatgttggagactacattcaggctgtgctggaccgaaacctggccgagaacatctcccgggtcctctatcccaatgacaatttttttgaagggaaggagctaagat

SEQ ID NO: 116201 - DNA, 120 bp, Artificial Sequence
  ENSG00000100504_8 (sequence is synthesized)
tgaagcaggaatactttgtggtggctgcaaccttgcaagatatcatccgccgtttcaaagcctccaagtttggctccacccgtggtgcaggaactgtgtttgatgccttcccggatcagg

SEQ ID NO: 116202 - DNA, 120 bp, Artificial Sequence
  ENSG00000100504_9 (sequence is synthesized)
tggccatccagctgaatgacactcaccctgcactcgcgatccctgagctgatgaggatttttgtggatattgaaaaactgccctggtccaaggcatgggagctcacccagaagaccttcg

SEQ ID NO: 116203 - DNA, 120 bp, Artificial Sequence
  ENSG00000100504_10 (sequence is synthesized)
cctacaccaaccacacagtgctcccggaagccctggagcgctggcccgtggacctggtggagaagctgctccctcgacatttggaaatcatttatgagataaatcagaagcatttagata

SEQ ID NO: 116204 - DNA, 120 bp, Artificial Sequence
  ENSG00000100504_11 (sequence is synthesized)
gaaggatgtctctgatagaagaggaaggaagcaaaaggatcaacatggcccatctctgcattgtcggttcccatgctgtgaatggcgtggctaaaatccactcagacatcgtgaagacta

SEQ ID NO: 116205 - DNA, 120 bp, Artificial Sequence
  ENSG00000100504_12 (sequence is synthesized)
aagtattcaaggacttcagtgagctagaacctgacaagtttcagaataaaaccaatgggatcactccaaggcgctggctcctactctgcaacccaggacttgcagagctcatagcagaga

SEQ ID NO: 116206 - DNA, 120 bp, Artificial Sequence
  ENSG00000100504_13 (sequence is synthesized)
aaattggagaagactatgtgaaagacctgagccagctgacgaagctccacagcttcctgggtgatgatgtcttcctccgggaactcgccaaggtgaagcaggagaataagctgaagtttt

SEQ ID NO: 116207 - DNA, 120 bp, Artificial Sequence
  ENSG00000100504_14 (sequence is synthesized)
ctcagttcctggagacggagtacaaagtgaagatcaacccatcctccatgtttgatgtccaggtgaagaggatacatgagtacaagcgacagctcttgaactgtctgcatgtgatcacga

SEQ ID NO: 116208 - DNA, 120 bp, Artificial Sequence
  ENSG00000100504_15 (sequence is synthesized)
tgtacaaccgcattaagaaagaccctaagaagttattcgtgccaaggacagttatcattggtggtaaagctgccccaggatatcacatggccaaaatgatcataaagctgatcacttcag

SEQ ID NO: 116209 - DNA, 120 bp, Artificial Sequence
  ENSG00000100504_16 (sequence is synthesized)
tggcagatgtggtgaacaatgaccctatggttggaagcaagttgaaagtcatcttcttggagaactacagagtatctcttgctgaaaaagtcattccagccacagatctgtcagagcaga

SEQ ID NO: 116210 - DNA, 120 bp, Artificial Sequence
  ENSG00000100504_17 (sequence is synthesized)
tttccactgcaggcaccgaagcctcggggacaggcaatatgaagttcatgctaaatggggccctaactatcgggaccatggatggggccaatgtggaaatggcagaagaagctggggaag

SEQ ID NO: 116211 - DNA, 120 bp, Artificial Sequence
  ENSG00000100504_18 (sequence is synthesized)
agaacctgttcatctttggcatgaggatagatgatgtggctgctttggacaagaaagggtacgaggcaaaagaatactatgaggcacttccagagctgaagctggtcattgatcaaattg

SEQ ID NO: 116212 - DNA, 120 bp, Artificial Sequence
  ENSG00000100504_19 (sequence is synthesized)
acaatggctttttttctcccaagcagcctgacctcttcaaagatatcatcaacatgctattttatcatgacaggtttaaagtctttgcagactacgaagcctatgtcaagtgtcaagata

SEQ ID NO: 116213 - DNA, 120 bp, Artificial Sequence
  ENSG00000100504_20 (sequence is synthesized)
aagtgagtcagctgtacatgaatccaaaggcctggaacacaatggtactcaaaaacatagctgcctcggggaaattctccagtgaccgaacaattaaagaatatgcccaaaacatctgga

SEQ ID NO: 116214 - DNA, 120 bp, Artificial Sequence
  ENSG00000100504_21 (sequence is synthesized)
acgtggaaccttcagatctaaagatttctctatccaatgaatctaacaaagtcaatggaaattgaactctagaattgtctctagaaaacatagcttcttactgaacttgaacatttttac

SEQ ID NO: 116215 - DNA, 120 bp, Artificial Sequence
  ENSG00000100504_22 (sequence is synthesized)
aacattcactggtttttgttttgttagctaataatctataatagttgagtatctctgggaatggggagggaaattatatgtaatagagcttaaaaataaagtgtcaatttccaagggcta

SEQ ID NO: 116216 - DNA, 120 bp, Artificial Sequence
  ENSG00000100504_23 (sequence is synthesized)
ttgccaagatttataaagaaaaccagtttactatgattcattaaaatgtgggttttttaattaaatgcaaatatcagatccccatgtaatatcagatccccattaagcaatcaaaaaaaa

SEQ ID NO: 116217 - DNA, 120 bp, Artificial Sequence
  ENSG00000100504_24 (sequence is synthesized)
ctcgtatagccagcgttttgtatagtatttagtacagtagataatacattgactatgtagcatatagtggtgatattgagtatagggcatgtcgtgttttgaataatagaatatattttt

SEQ ID NO: 116218 - DNA, 120 bp, Artificial Sequence
  ENSG00000100504_25 (sequence is synthesized)
gtaaataaatctgttacttctcttagcgcagcccagtcattttggagacaaaggagctgaggccaagagaggagtgacttttataagggtcattttgcaaccagctttgtcagaaaattg

SEQ ID NO: 116219 - DNA, 120 bp, Artificial Sequence
  ENSG00000100504_26 (sequence is synthesized)
ttcttttttttttttttttttttttgccagaaaattgtcagttctatagtaaccagcatgcttacctctttggttttatattaaggtgttgatagcaaaattgaataatttgaaatgtca

SEQ ID NO: 116220 - DNA, 67 bp, Artificial Sequence
  ENSG00000100504_27 (sequence is synthesized)
tatattaaggtgttgatagcaaaattgaataatttgaaatgtcattcccgggcagatcacctgaggt

SEQ ID NO: 116221 - DNA, 76 bp, Artificial Sequence
  ENSG00000100504_28 (sequence is synthesized)
accagcctggccaacatggtgaatccctatctgtactaaaaatacgaaaattagccaggagtggtggcccatgcct

SEQ ID NO: 116222 - DNA, 120 bp, Artificial Sequence
  ENSG00000100504_29 (sequence is synthesized)
gtctgacactgatccattaatggaatgatgctactaaatgcagggttgcacttagggatgaggaaaggccttgttcaaatgtttaaaagtattttcttctatacaaaaaactcttgccta

SEQ ID NO: 116223 - DNA, 120 bp, Artificial Sequence
  ENSG00000100504_30 (sequence is synthesized)
gactcagtacagacaggaccactcagagaaacagtaagataagtccacgtatttacaatactctgaaaagcaaattgtccagagaggggaagagaactagctgttctttatcttcattag

SEQ ID NO: 116224 - DNA, 120 bp, Artificial Sequence
  ENSG00000100504_31 (sequence is synthesized)
aacttttgtcctttgatttgtattctctctctccattcagcctctgctatggtctgagtgtttgtgtctgcccaaaattcatatgctgaaagcctaaccccagaggtgatggtattagaa

SEQ ID NO: 116225 - DNA, 120 bp, Artificial Sequence
  ENSG00000100504_32 (sequence is synthesized)
aaaaaaaaaagataaacttttttgaatacaaataccatatcattccattccactgcatttatatcagggcaagggcacatggagagtcaacatagaaatactgtaaaggaccatcagtgt

SEQ ID NO: 116226 - DNA, 120 bp, Artificial Sequence
  ENSG00000100504_33 (sequence is synthesized)
ggatggtttcagtcactagattgtaccaggtcggggaggaaccacatgttcctctaataccctctgcagccctgagaccctcttctccatttaggcctcacacaatttaagttggtaatg

SEQ ID NO: 116227 - DNA, 120 bp, Artificial Sequence
  ENSG00000100505_0 (sequence is synthesized)
aaactacgggcactcagaaatagacaaactgttcttgcctcaaccgaaccaaaggcccagcgggcctcgaaaaagctcagccaggtgctttgggaggccgcgaggaggaagaaggatccg

SEQ ID NO: 116228 - DNA, 120 bp, Artificial Sequence
  ENSG00000100505_1 (sequence is synthesized)
tggaaggaagcacgttcacaccacggcactgaggcctctgggccgagctataatttaaagcatgaaacgaaggggtcatagattctgactaatgctgaccatttccatcggttacccagt

SEQ ID NO: 116229 - DNA, 120 bp, Artificial Sequence
  ENSG00000100505_2 (sequence is synthesized)
tgaatctcatgtcgacactaggaaatcgactttatacatgctctttaggaaacgagggacgcaggatgaaagaagccaagagtgtcgccagggcttgcgccagcgccgtcagactcccgg

SEQ ID NO: 116230 - DNA, 120 bp, Artificial Sequence
  ENSG00000100505_3 (sequence is synthesized)
gatgggggagctccagggcacggcgtcagcggattcacggagaaggagaaaagccccactgccgtgcagaagcctaggcccgggtgagacgcctgcgaaggctgccagcagcggaagaga

SEQ ID NO: 116231 - DNA, 120 bp, Artificial Sequence
  ENSG00000100505_4 (sequence is synthesized)
aggggcgtcctccgtgctgcgcagcactcgcccgcggtaggtgggcgcggagctcagagctgggagccaaacgcaaacgctggcgagaagccccagccccctccggcagcccactcgctg

SEQ ID NO: 116232 - DNA, 120 bp, Artificial Sequence
  ENSG00000100505_5 (sequence is synthesized)
cggggaggggtttctcacgcccccagctcctgggagactgcaccggaggtcggaagtaagccgggcgaggatgaatcatcccgcctaactcctccttcccggtcccctagcctccgcacg

SEQ ID NO: 116233 - DNA, 120 bp, Artificial Sequence
  ENSG00000100505_6 (sequence is synthesized)
ccggcccccttcagagatcttgcagccgcgagcgaagactgccctatcctcagactctaccgaaccccctgtggcctgcggagacgaggagacggacgggtctggtggccaatgagagct

SEQ ID NO: 116234 - DNA, 120 bp, Artificial Sequence
  ENSG00000100505_7 (sequence is synthesized)
tcgatctcttgccccccgcccaatgggccgctgctcatgggccggggcgggactaggagggcaggtaggggcggtccgggctggcgcgcggcgcggcggctacgcggctgcggctcacag

SEQ ID NO: 116235 - DNA, 120 bp, Artificial Sequence
  ENSG00000100505_8 (sequence is synthesized)
agctagcgcctctctgggtgtccgtgccagtgctgcgcgggaaggcaccaccaccacagccgccgccgctggccagggtgctggacaagacgggcccgtcggccacctcgccagctcagg

SEQ ID NO: 116236 - DNA, 120 bp, Artificial Sequence
  ENSG00000100505_9 (sequence is synthesized)
cacccgctgcagccgtcgctgtctcctcccagaccggtccccatggaggagatggaagaggagttgaaatgccccgtgtgcggctccttctatcgggagcccatcatcctgccctgctct

SEQ ID NO: 116237 - DNA, 120 bp, Artificial Sequence
  ENSG00000100505_10 (sequence is synthesized)
cacaatttgtgtcaggcgtgcgcccgcaacatcctggtgcagaccccagagtctgaatccccccagagccatcgggccgcgggctccggggtctccgactatgactatctggacctggac

SEQ ID NO: 116238 - DNA, 120 bp, Artificial Sequence
  ENSG00000100505_11 (sequence is synthesized)
aagatgagcctatacagcgaggcggacagcggctatggctcctacggggggttcgccagcgcccccactaccccgtgccagaagtcccccaacggcgtccgcgtgtttcccccggctatg

SEQ ID NO: 116239 - DNA, 120 bp, Artificial Sequence
  ENSG00000100505_12 (sequence is synthesized)
ccgccaccggccacccacttgtcaccggccctggccccggtgccccgcaactcctgtatcacctgcccccagtgtcaccgcagcctcatcctggatgaccgggggctccgcggcttcccc

SEQ ID NO: 116240 - DNA, 120 bp, Artificial Sequence
  ENSG00000100505_13 (sequence is synthesized)
aagaatcgcgtactggaaggggtaattgaccgctaccagcagagcaaagccgcggccctcaagtgccagctctgcgagaaggcgcccaaggaagccaccgtcatgtgcgaacagtgcgat

SEQ ID NO: 116241 - DNA, 120 bp, Artificial Sequence
  ENSG00000100505_14 (sequence is synthesized)
gtcttctactgcgatccgtgccgcctgcgctgccacccgccccgggggcccctagccaagcaccgcctggtgcccccggcccagggtcgtgtgagccggaggctgagcccacgcaaggtc

SEQ ID NO: 116242 - DNA, 120 bp, Artificial Sequence
  ENSG00000100505_15 (sequence is synthesized)
tccacctgcacagaccacgagctggagaaccacagcatgtactgcgtgcaatgcaagatgcccgtgtgctaccagtgcttggaggagggcaaacactccagccacgaagtcaaggctctg

SEQ ID NO: 116243 - DNA, 120 bp, Artificial Sequence
  ENSG00000100505_16 (sequence is synthesized)
ggggccatgtggaaactacataagagccagctctcccaggcgctgaacggactgtcagacagggccaaagaagccaaggagtttctggtacagctgcgcaacatggtccagcagatccag

SEQ ID NO: 116244 - DNA, 120 bp, Artificial Sequence
  ENSG00000100505_17 (sequence is synthesized)
gagaacagtgtggagtttgaagcctgtctggtggcccaatgtgatgccctcatcgatgccctcaacagaagaaaagcccagctgctggcccgcgtcaacaaggagcatgagcacaagctg

SEQ ID NO: 116245 - DNA, 120 bp, Artificial Sequence
  ENSG00000100505_18 (sequence is synthesized)
aaggtggttcgagatcagatctctcactgcacagtgaaattgcgccagaccacaggtctcatggagtactgcttggaggtgattaaggaaaatgatcctagtggttttttgcagatttct

SEQ ID NO: 116246 - DNA, 120 bp, Artificial Sequence
  ENSG00000100505_19 (sequence is synthesized)
gacgccctcataagaagagtgcacctgactgaggatcagtggggtaaaggcacactcactccaaggatgaccacggactttgacttgagtctggacaacagccctctgctgcaatccatc

SEQ ID NO: 116247 - DNA, 120 bp, Artificial Sequence
  ENSG00000100505_20 (sequence is synthesized)
caccagctggatttcgtgcaagtgaaagcttcctctccagtcccagcaacccctatcctacagctggaggaatgttgtacccacaacaacagcgctacgttgtcctggaaacagccacct

SEQ ID NO: 116248 - DNA, 120 bp, Artificial Sequence
  ENSG00000100505_21 (sequence is synthesized)
ctgtccacggtgcccgccgatggatacattctggagctggatgatggcaacggtggtcaattccgggaggtgtatgtggggaaggagacaatgtgcactgtggatggtcttcacttcaac

SEQ ID NO: 116249 - DNA, 120 bp, Artificial Sequence
  ENSG00000100505_22 (sequence is synthesized)
catacaacgctcgggtcaaggccttcaacaaaacaggagtcagcccgtacagcaagaccctggtcctccaaacgtctgaggtggcctggtttgctttcgaccctggctcggcgcactcgg

SEQ ID NO: 116250 - DNA, 120 bp, Artificial Sequence
  ENSG00000100505_23 (sequence is synthesized)
acatcatcctctccaatgacaacctgacagtgacctgtagtagctatgatgaccgggtggtgctagggaagactggcttctccaagggcatccactactgggagctcacggtagatcgct

SEQ ID NO: 116251 - DNA, 120 bp, Artificial Sequence
  ENSG00000100505_24 (sequence is synthesized)
atgacaaccaccctgatcctgcctttggtgtggctcgcatggacgtgatgaaggatgtgatgttaggaaaagacgacaaagcttgggcaatgtatgtggacaataaccggagctggttca

SEQ ID NO: 116252 - DNA, 120 bp, Artificial Sequence
  ENSG00000100505_25 (sequence is synthesized)
tgcacaacaactcgcacaccaacagaactgagggagggatcacaaaaggggccacaattggggtcctcctcgacttaaatagaaaaaacttgacattttttatcaacgatgaacaacaag

SEQ ID NO: 116253 - DNA, 120 bp, Artificial Sequence
  ENSG00000100505_26 (sequence is synthesized)
gtcccatagcatttgataacgtggagggcctcttcttccctgcggtcagcctgaacaggaacgtgcaggtcacgctgcacaccgggctcccagtccccgacttctactccagcagagcat

SEQ ID NO: 116254 - DNA, 120 bp, Artificial Sequence
  ENSG00000100505_27 (sequence is synthesized)
caatagcctaaggatgtgccgtggaggcgccagctgcctgttcttacctccgcctgcgagagccacagcaaggagctcagccagccgtggtggggtgcagagttggcaggagtgggagaa

SEQ ID NO: 116255 - DNA, 120 bp, Artificial Sequence
  ENSG00000100505_28 (sequence is synthesized)
ggaggagagaaaagctggtcctctgcagtctttacacccacagctctgcccttttccctttcaacctctcctccgctgtcatgcctgcttccgcttccatgtccaacaattctaaccaac

SEQ ID NO: 116256 - DNA, 120 bp, Artificial Sequence
  ENSG00000100505_29 (sequence is synthesized)
aaaggacctagacagcccaccaagtcacttggttcccactcccagattttgcttttatttaacttaattttttatgtaggtgagttatattttctttcttttctgatcaggttattggtg

SEQ ID NO: 116257 - DNA, 120 bp, Artificial Sequence
  ENSG00000100505_30 (sequence is synthesized)
acttactggactggcaccgccaggagaaaattctcctgctaactttttttcttaagctttctgtcaaacaatgaggttgtagggggaggtagggaagaatgagctgaatttgtagcatac

SEQ ID NO: 116258 - DNA, 120 bp, Artificial Sequence
  ENSG00000100505_31 (sequence is synthesized)
agcttacctgctagaatgttcttaccctcttacctctcctgtagcgttagctctgcagagctaagctttgggagaatgaatctatcactgagaagttttactactcattgaagcacaaaa

SEQ ID NO: 116259 - DNA, 120 bp, Artificial Sequence
  ENSG00000100505_32 (sequence is synthesized)
atatccgctacacaggttcacatcagggtaggatcgttaggatggctctataattaggataggccagaaccctggccactgtataaaattggaaagtctctaagacacaggcaaaccagg

SEQ ID NO: 116260 - DNA, 120 bp, Artificial Sequence
  ENSG00000100505_33 (sequence is synthesized)
ggacttaatgatttggttcgtttatttaataaaagcttttaattgagaacctactattgaccaggcactgttcaagacactagaacattatgttctagacactgtggggacacagtggtg

SEQ ID NO: 116261 - DNA, 120 bp, Artificial Sequence
  ENSG00000100505_34 (sequence is synthesized)
aacagacaggcatggtctctgcccttcggagcttatattccagtaggagaaaaagcaaaaataaaataattataaatggtcatatgtactagaaaggaaatgggcaagggtcaaagagac

SEQ ID NO: 116262 - DNA, 120 bp, Artificial Sequence
  ENSG00000100505_35 (sequence is synthesized)
tcatgggcaagatctttcaggcttcctagaatgatgctaaaaatccacacattctggccatagcaccagaaatgtaccaactcaatgccttttcagctgcactatttaattatggtacct

SEQ ID NO: 116263 - DNA, 120 bp, Artificial Sequence
  ENSG00000100505_36 (sequence is synthesized)
gctgccactcatcacagagcccttcttggtagaaatgatgtcagcattcttatttgctgatgctgctatgataccacgccttaaaaattgacagttgaaaaaaaaaagagtgaccagagg

SEQ ID NO: 116264 - DNA, 120 bp, Artificial Sequence
  ENSG00000100505_37 (sequence is synthesized)
gcaaaggacccattctcagtaatgggagatcttgagttgcagtccacagcattcacattctcaggataaacatgcttgtctccatatatactatctgtgcctgttatgaatgaaaaatcc

SEQ ID NO: 116265 - DNA, 120 bp, Artificial Sequence
  ENSG00000100505_38 (sequence is synthesized)
atccactctgctgccattcacagcctaattttctggagtagtccaaacaatgtttggaaaaacatgggactgtatgtcattactatgactgatagcagaataataatgcatcttacttct

SEQ ID NO: 116266 - DNA, 120 bp, Artificial Sequence
  ENSG00000100505_39 (sequence is synthesized)
atatagagatagacttacataggttacccttgaaattcattagtttgtcataaagttttaggaaaggtaggacccggaaagaagttctaattagttgtctaaatatttttcagtgagcca

SEQ ID NO: 116267 - DNA, 120 bp, Artificial Sequence
  ENSG00000100505_40 (sequence is synthesized)
agaaattcaccatgaaaaaacaagaataacaaatagaagggaagagataggatgggaaagctaacaaattaaagttttggcaaaaaggaatatatgtaaatagctaattatttacttttg

SEQ ID NO: 116268 - DNA, 120 bp, Artificial Sequence
  ENSG00000100505_41 (sequence is synthesized)
tgcttactttatttagattatttctatcagttacaatctttttctagttaagtgtacctaatttatggaatgggtgctatcctgtttatgtgtgtcttggtttttcttggctacagaaaa

SEQ ID NO: 116269 - DNA, 120 bp, Artificial Sequence
  ENSG00000100505_42 (sequence is synthesized)
actgttgcagggcaacactagtttgatatttgatttactctccaatgagactcaatggctgggccgtggtagactcatagttcctcttgttctttattaaattcatcctgctaattagat

SEQ ID NO: 116270 - DNA, 120 bp, Artificial Sequence
  ENSG00000100505_43 (sequence is synthesized)
ttctagtgacttgtaacatgtagtttacactgaattgcaattacagatgcatacaactactatactagaaaaaattgtcatttctgatgtgccaataaatgatttttatgagagaataaa

SEQ ID NO: 116271 - DNA, 120 bp, Artificial Sequence
  ENSG00000100505_44 (sequence is synthesized)
tactctaagttcttcttggtgctgagaatagaaaagacacagattcagaagaacagaccctcccttttccagtgccttcggaaagattgccgctccgtagaatgagtcctttctcctcca

SEQ ID NO: 116272 - DNA, 120 bp, Artificial Sequence
  ENSG00000100505_45 (sequence is synthesized)
cccttaatctacaacccagcttccccgggagatcctactttgatttccgatcctcaccccaccagctgagcttgcattcctctttacagtctctcaatgcaccgggatgcaattttgaga

SEQ ID NO: 116273 - DNA, 120 bp, Artificial Sequence
  ENSG00000100505_46 (sequence is synthesized)
tgttaccaaatagcaaagaccaaagtgcatgtgaggtgtctcacaggtttaataaatcagcaattacatctctcgagtgtgatatttataggtggcatttagaacttggggcgtaacaat

SEQ ID NO: 116274 - DNA, 120 bp, Artificial Sequence
  ENSG00000100505_47 (sequence is synthesized)
gcgtacaaagacatcattctatctgcacctaatgtccgaaattcctactgctccagcaaaatttctgacgtgttagtttcaggagtagcacgcaaactgtgttttttaagttatgcagac

SEQ ID NO: 116275 - DNA, 120 bp, Artificial Sequence
  ENSG00000100505_48 (sequence is synthesized)
tgtacattcaattctaaaagtattttatttaattaaaaggaaaccttccaattttctaccactaaaaatcgggaaagtgacaacaattgcctttgttgttcgaggtgtcctctggtcttg

SEQ ID NO: 116276 - DNA, 120 bp, Artificial Sequence
  ENSG00000100505_49 (sequence is synthesized)
ggtcctgatctgccgaaaattccctccctgcccccaggcacattggttttgtaaatgcctgagtgtggcaccctgtgggaaagatgaggctttgtatgaatgcattgttaaggcaggtct

SEQ ID NO: 116277 - DNA, 120 bp, Artificial Sequence
  ENSG00000100505_50 (sequence is synthesized)
ggaggtaaccccaccactgcccacattcctgaagtgtttccatgacttgctctgcattctgcacagagccgctgttcctctcctgcctttagagagcctatggtatgtggatgtgatcaa

SEQ ID NO: 116278 - DNA, 120 bp, Artificial Sequence
  ENSG00000100505_51 (sequence is synthesized)
accaaagattccacatcggcagttccaatggcttgggccggcggcttcctttgataacaatctaaataagctgcagttgaagaagctgaaaaatgaaggcctgaatgtgcccctggtgtg

SEQ ID NO: 116279 - DNA, 120 bp, Artificial Sequence
  ENSG00000100505_52 (sequence is synthesized)
taagacaaatgtatctaggctctagagcaggctcccattctccaccgatacacatcatgtgccagttttgcccagatgattctaaattactctgtagtacttgcttgttctgagggtggg

SEQ ID NO: 116280 - DNA, 120 bp, Artificial Sequence
  ENSG00000100505_53 (sequence is synthesized)
acctaggttctttccagtcgtggatttgtatgactgaatgtgtttcaaatgggtggtggggtgctagagctgtttagagagggcctgttggctgctcctggcttacccacttagactgcc

SEQ ID NO: 116281 - DNA, 120 bp, Artificial Sequence
  ENSG00000100505_54 (sequence is synthesized)
tccgtttcatacccaaagcggaggccgtcagcaccaggattgagacttcctgtgggcaccaaacaggaagagaccagcaacttcgcattacccgccattttcatctttgccagtcccttc

SEQ ID NO: 116282 - DNA, 120 bp, Artificial Sequence
  ENSG00000100505_55 (sequence is synthesized)
agtcttggctaggctaccgagagccaccatacaaggttcatctctagagaatttttgcttcttagctatactttaaatattttggtcatcaaagacaagtaatgtgtctcagatgagagg

SEQ ID NO: 116283 - DNA, 120 bp, Artificial Sequence
  ENSG00000100505_56 (sequence is synthesized)
cttgaatttgatggccagatataacctctgaggcttttaacattttcattttaagagtaagcaagacacatgaaattaaacctacaaggaggtatttgtggctggtgccaaagcattctg

SEQ ID NO: 116284 - DNA, 120 bp, Artificial Sequence
  ENSG00000100505_57 (sequence is synthesized)
acactttggggtgtcattttaatcaaagaaatcacccccccacctcaccgggattctccataacttccctctgcagaactaattatgttgattttgttcaagttcaagatgttagctaaa

SEQ ID NO: 116285 - DNA, 120 bp, Artificial Sequence
  ENSG00000100505_58 (sequence is synthesized)
agaactatggtggtgttttttttcccacttcccacaaacctcaacatgtgccagtcaccctaaaatgcttcacatggttaaaaacaagcacaattttgaatcctacagcaaggatgaaag

SEQ ID NO: 116286 - DNA, 120 bp, Artificial Sequence
  ENSG00000100505_59 (sequence is synthesized)
gcccctagccgtgaaaacagtgctttggggagcagttgtcagtctaagtgatgctattccaagagaaggatatgctgagggaaaatgcccacatgacctgttcccatttggagtacagtg

SEQ ID NO: 116287 - DNA, 120 bp, Artificial Sequence
  ENSG00000100505_60 (sequence is synthesized)
atgtggtagctacagcttcccccagaattatcattttagcaccttctctcagggatgacctatcagtttgagagcagttgcctcttttctcaaaataccatactaactgctaaagccctc

SEQ ID NO: 116288 - DNA, 120 bp, Artificial Sequence
  ENSG00000100505_61 (sequence is synthesized)
caagagtctttcctagatgcaacgcagaaggcccttgctggtgatggcctcatttcccatgtgtgtacaaggtggtttgattgaagagtgaagtgcatgcctgcagagcagagagaaatt

SEQ ID NO: 116289 - DNA, 120 bp, Artificial Sequence
  ENSG00000100505_62 (sequence is synthesized)
tgtagcaatgttgctaatatgtgttatcagatctgcgggaaaactatttctattcataatacatcatgggaatcatactattctggtaaaaatcagttattagcataacagcctgagcac

SEQ ID NO: 116290 - DNA, 120 bp, Artificial Sequence
  ENSG00000100505_63 (sequence is synthesized)
ttatgtctctcgtttcatcctgcaggaggatgtagcgcctcagtttattttaatgttcataagattatggtgtctaatttaataaattacaggattggaactgcgatccttggtaccaca

SEQ ID NO: 116291 - DNA, 120 bp, Artificial Sequence
  ENSG00000100505_64 (sequence is synthesized)
gtcacagaactgggggtcattttctagatgaaacaaacggaacaagttctcttccaacaaagaaactgtactgtagaaattaatttcctccatgaattttatatattgtgtacaaatata

SEQ ID NO: 116292 - DNA, 120 bp, Artificial Sequence
  ENSG00000100505_65 (sequence is synthesized)
aggtatgtatctgaatacaaagaaaagcctatcatcatatagatatcagtattctctgttactgcacagaagtaattttctcatgatgaaataaagttcacacacatactttctccataa

SEQ ID NO: 116293 - DNA, 120 bp, Artificial Sequence
  ENSG00000100505_66 (sequence is synthesized)
tgaatcggtcgtgtgtcctccgtctgcttctggtgcagagagtaccaactcccaggacgtgcccctgtctgccctggccctggacgcctccttcctgcatggcagcatgaaaacgctaca

SEQ ID NO: 116294 - DNA, 120 bp, Artificial Sequence
  ENSG00000100505_67 (sequence is synthesized)
caacgctcctcacccgcccaggagtatgttatggtgctgagcttgttgggtctgtcttaataacctgattcccttctgttgttcccagtggcctggtttgctttcgaccctggctcggcg

SEQ ID NO: 116295 - DNA, 120 bp, Artificial Sequence
  ENSG00000100505_68 (sequence is synthesized)
ctgcccctgaggttaaacagctgttgctggctaccggttcaaaggctgcccagggccgttcaatccaaccgaagagagggaagctgacagcgtaaggcccagaccaagatatgaaggaga

SEQ ID NO: 116296 - DNA, 120 bp, Artificial Sequence
  ENSG00000100505_69 (sequence is synthesized)
ggaggagagaaagggatcagcactggcaacttattttattccacgccaagcataagcaccttctttatacttggacgcagactagttaatagcacataggaaactagaattctcttcatg

SEQ ID NO: 116297 - DNA, 120 bp, Artificial Sequence
  ENSG00000100505_70 (sequence is synthesized)
gttggctaatgatcatctctgtagctctagtttcacctctaaatagaaacgaaagcctttaaccaactggcatgaaaacaaatagaatgacttaacaaagctcaggagtgcctgagaaga

SEQ ID NO: 116298 - DNA, 120 bp, Artificial Sequence
  ENSG00000100505_71 (sequence is synthesized)
ggtgagggtgtaagactgaagcattagtatcattatcagaaaatctgagcatcttctctgcactcttgtttggctctgttaggtcctaaggggtagaaaacatagtccctacctacaact

SEQ ID NO: 116299 - DNA, 120 bp, Artificial Sequence
  ENSG00000100505_72 (sequence is synthesized)
tagtcaattattatttattatagaataaaacaacagcttctcatttattcattcagcaaatatctatagaatgcctttaatgtgccaggcacagttataagtgtctgggatacatcagtg

SEQ ID NO: 116300 - DNA, 120 bp, Artificial Sequence
  ENSG00000100519_0 (sequence is synthesized)
atggccattcccggcatcccctatgagagacggcttctcatcatggcggaccctagagataaggcgcttcaggactaccgcaagaagttgcttgaacacaaggagatcgacggccgtctt

SEQ ID NO: 116301 - DNA, 120 bp, Artificial Sequence
  ENSG00000100519_1 (sequence is synthesized)
aaggagttaagggaacaattaaaagaacttaccaagcagtatgaaaagtctgaaaatgatctgaaggccctacagagtgttgggcagatcgtgggtgaagtgcttaaacagttaactgaa

SEQ ID NO: 116302 - DNA, 120 bp, Artificial Sequence
  ENSG00000100519_2 (sequence is synthesized)
gaaaaattcattgttaaagctaccaatggaccaagatatgttgtgggttgtcgtcgacagcttgacaaaagtaagctgaagccaggaacaagagttgctttggatatgactacactaact

SEQ ID NO: 116303 - DNA, 120 bp, Artificial Sequence
  ENSG00000100519_3 (sequence is synthesized)
atcatgagatatttgccgagagaggtggatccactggtttataacatgtctcatgaggaccctgggaatgtttcttattctgagattggagggctatcagaacagatccgggaattaaga

SEQ ID NO: 116304 - DNA, 120 bp, Artificial Sequence
  ENSG00000100519_4 (sequence is synthesized)
gaggtgatagaattacctcttacaaacccagagttatttcagcgtgtaggaataatacctccaaaaggctgtttgttatatggaccaccaggtacgggaaaaacactcttggcacgagcc

SEQ ID NO: 116305 - DNA, 120 bp, Artificial Sequence
  ENSG00000100519_5 (sequence is synthesized)
gttgctagccagctggactgcaatttcttaaaggttgtatctagttctattgtagacaagtacattggtgaaagtgctcgtttgatcagagaaatgtttaattatgctagagatcatcaa

SEQ ID NO: 116306 - DNA, 120 bp, Artificial Sequence
  ENSG00000100519_6 (sequence is synthesized)
gctattggtggtcgtcggttttctgagggtacttcagctgacagagagattcagagaacgttaatggagttactgaatcaaatggatggatttgatactctgcatagagttaaaatgatc

SEQ ID NO: 116307 - DNA, 120 bp, Artificial Sequence
  ENSG00000100519_7 (sequence is synthesized)
atggctacaaacagaccagatacactggatcctgctttgctgcgtccaggaagattagatagaaaaatacatattgatttgccaaatgaacaagcaagattagacatactgaaaatccat

SEQ ID NO: 116308 - DNA, 120 bp, Artificial Sequence
  ENSG00000100519_8 (sequence is synthesized)
gcaggtcccattacaaagcatggtgaaatagattatgaagcaattgtgaagctttcggatggctttaatggagcagatctgagaaatgtttgtactgaagcaggtatgttcgcaattcgt

SEQ ID NO: 116309 - DNA, 120 bp, Artificial Sequence
  ENSG00000100519_9 (sequence is synthesized)
gctgatcatgattttgtagtacaggaagacttcatgaaagcagtcagaaaagtggctgattctaagaagctggagtctaaattggactacaaacctgtgtaatttactgtaagatttttg

SEQ ID NO: 116310 - DNA, 120 bp, Artificial Sequence
  ENSG00000100519_10 (sequence is synthesized)
atggctgcatgacagatgttggcttattgtaaaaataaagttaaagaaaataatgtatgtattggtaatgatgtcattaaaagtatatgaataaaaatatgagtaacatcataaaaatta

SEQ ID NO: 116311 - DNA, 120 bp, Artificial Sequence
  ENSG00000100519_11 (sequence is synthesized)
gtaattcaacttttaagatacagaagaaatttgtatgtttgttaaagttgcatttattgcagcaagttacaaagggaaagtgttgaagcttttcatatttgctgcgtgagcattttgtaa

SEQ ID NO: 116312 - DNA, 120 bp, Artificial Sequence
  ENSG00000100519_12 (sequence is synthesized)
aatattgaaagtggtttgagatagtggtataagaaagcatttcttatgacttattttgtatcatttgttttcctcatctaaaaagttgaataaaatctgtttgattcagttctcctacat

SEQ ID NO: 116313 - DNA, 120 bp, Artificial Sequence
  ENSG00000100519_13 (sequence is synthesized)
cacatacttaatgttcataagatcatcttcttaaataaaacatggatgtgtgggtatgtctgtactcctcctttcagaaagtgtttacatattcttcatctactgtgattaagctcattg

SEQ ID NO: 116314 - DNA, 120 bp, Artificial Sequence
  ENSG00000100519_14 (sequence is synthesized)
ttggttaattgaaaatatacatgcacatccataactttttaaagagtatgattcaacgtaatatttgctaatatgtgactgggttttcttggtttatgtaagacgataggtccctgttga

SEQ ID NO: 116315 - DNA, 120 bp, Artificial Sequence
  ENSG00000100519_15 (sequence is synthesized)
ggatgtggaggtctggaccctcttccaggaaaaattctaacatacaattttgcgtatactataatttcaggaaatttattgtttcccaagctcatccaaggactctttaggtatgtatgg

SEQ ID NO: 116316 - DNA, 120 bp, Artificial Sequence
  ENSG00000100519_16 (sequence is synthesized)
atacctggctaagagtgtatgatgtaggggatgtaggagtgtcagaaatgttcaaaacatgatttctgttacctatacatgattcttatatcatctggcaataaaagctataacaaagta

SEQ ID NO: 116317 - DNA, 120 bp, Artificial Sequence
  ENSG00000100519_17 (sequence is synthesized)
tagagataaggcgcttcaggactaccgcaagaagttgcttgaacacaaggagatcgacggccgtcttaaggagtgtgagtgcacctttctttccatttaatcaagtgcctcgactcgctt

SEQ ID NO: 116318 - DNA, 120 bp, Artificial Sequence
  ENSG00000100519_18 (sequence is synthesized)
ctgcctctgacaaagcagaagcctttcgccgagcccggcaaccgagccttagagatgaccaggcctagggccagggacaaggcgctttgtcatccggccctgagcttgtggagcagcact

SEQ ID NO: 116319 - DNA, 120 bp, Artificial Sequence
  ENSG00000100519_19 (sequence is synthesized)
ttagtaaagaaacagtccacctctctctcacttttgaaatgcttattattttaatgacaataatgcagagagagagagtatttttgaatagacttaagttttccttcaactaatgtctcc

SEQ ID NO: 116320 - DNA, 120 bp, Artificial Sequence
  ENSG00000100519_20 (sequence is synthesized)
aacctaatgtgtaatgtgttcagcatgtgcctgtcatgtagcaaaggcatgagtgatggttgctgggttttggggctttaaatttaaagcattttaataaaaatctctaaggggaaaccg

SEQ ID NO: 116321 - DNA, 120 bp, Artificial Sequence
  ENSG00000100519_21 (sequence is synthesized)
tgcatttttctctactctcatgagcatttaacacattcttcccagaagctgtacatttcaaaataaatctgatgagcacacctttaaaatgcttccctttcctttccctaaaatgttcac

SEQ ID NO: 116322 - DNA, 120 bp, Artificial Sequence
  ENSG00000100519_22 (sequence is synthesized)
taagggatttttctataaatgctttggtagcaattcccaaagtcactgtaccattgctgcctcaagctttgtgtgttagtcatttcacattttacactgagattacacaaaggggcatgc

SEQ ID NO: 116323 - DNA, 120 bp, Artificial Sequence
  ENSG00000100519_23 (sequence is synthesized)
tttgttagcatagagtttataatctgatatttgtgttctctctggagggtaaaaatgagtgtttggcttctaaatattaaactctcgttagagtgttattccgtttttaagtgttgatgt

SEQ ID NO: 116324 - DNA, 120 bp, Artificial Sequence
  ENSG00000100519_24 (sequence is synthesized)
ttcactttaacaaaatgagaaatgttacaccaaaatcaagtctaactttgtcagcataattcttgctctttaattttcatcttaatgttttaagccacagactgttatgttctgttttct

SEQ ID NO: 116325 - DNA, 120 bp, Artificial Sequence
  ENSG00000100519_25 (sequence is synthesized)
tcctgtttttaaagtttcaggggtgtgtctaattcttcttggtgctggtttatttaacagaagtcttagtttttggatattaatattgtggaaagttaacagagctgatgtctagctgat

SEQ ID NO: 116326 - DNA, 120 bp, Artificial Sequence
  ENSG00000100519_26 (sequence is synthesized)
caaactcaaagtaagctcttcagtttaaattttcgatgtgggcataaatcaagtaaaggtctaatttttaaaactaatttccagtattttttctaaacagattatgaagcaattgtgaag

SEQ ID NO: 116327 - DNA, 120 bp, Artificial Sequence
  ENSG00000100519_27 (sequence is synthesized)
ttatggatgaaatagatgctattggtaagaataacacccttgttgaaagttttaggacttttttttaaatgtaaaagaacctttttccctctcttaatctgtaattgtgacttgtatgaa

SEQ ID NO: 116328 - DNA, 120 bp, Artificial Sequence
  ENSG00000100519_28 (sequence is synthesized)
ctttttccctctcttaatctgtaattgtgacttgtatgaagtagataccacaatgaatcagatgttagtttaaccaattttaataaataacctttcatggccgggtgtggtggctcatgc

SEQ ID NO: 116329 - DNA, 120 bp, Artificial Sequence
  ENSG00000100519_29 (sequence is synthesized)
aatggaccaagatatgttgtgggttgtcgtcgacagggctctgtggatgccgaaagttggcatttctaagatatttcaggttgcatgaggacaagactgtatttgaagactaaaaaacat

SEQ ID NO: 116330 - DNA, 120 bp, Artificial Sequence
  ENSG00000100519_30 (sequence is synthesized)
tagaaaagccgaagtatatataagttgagtatcccttatccaaaatgcttgagccagaaatgtgttttagattttggctttttttttttcaggttttagaatatttgtgttgtactggtt

SEQ ID NO: 116331 - DNA, 120 bp, Artificial Sequence
  ENSG00000100519_31 (sequence is synthesized)
aaaaaatttcacattgtggagcattttggattttcagattaagaatactcagcctgtatttcctatagatgtaaacattgaaatagcttcatattgatttctcctcttattttttcaagt

SEQ ID NO: 116332 - DNA, 120 bp, Artificial Sequence
  ENSG00000100519_32 (sequence is synthesized)
aacctcacttcttagccgttttttccttaattgttatattaatcctagtgttttgcctatcttcctaaatttgaagctctttgtaaaatcctgtgacaagtggtcagtaatttatatgat

SEQ ID NO: 116333 - DNA, 120 bp, Artificial Sequence
  ENSG00000100519_33 (sequence is synthesized)
ttgtaaaatcctgtgacaagtggtcagtaatttatatgattccgaaattgtattggcacgcagttttttaaactattaaaaagtaacttgggtcgggcggggtggctcatgcctgtaatc

SEQ ID NO: 116334 - DNA, 120 bp, Artificial Sequence
  ENSG00000100519_34 (sequence is synthesized)
tgacaaagcagtttcatgtaagttattgtctctaattcttgaggcaagcaggtggagcatttatgcccataactcacaaggatgatttgttcagacatagctagttattaacaaagcctg

SEQ ID NO: 116335 - DNA, 120 bp, Artificial Sequence
  ENSG00000100519_35 (sequence is synthesized)
aattcaaaccatgggctttgactcctggcattccgtactttctactgtattacattgtctcagtcagatctgttaatagccacttagaaataaaagtattttagaactggaaaacagaca

SEQ ID NO: 116336 - DNA, 120 bp, Artificial Sequence
  ENSG00000100519_36 (sequence is synthesized)
ggcatggtggctcactcctgtaatcctaatggttttggaggccgaggcagaaggaccgcttgaggccaggagtttgaggttgcagggagctatgatcatgtgactgcactccagtttggc

SEQ ID NO: 116337 - DNA, 120 bp, Artificial Sequence
  ENSG00000100519_37 (sequence is synthesized)
catgtgactgcactccagtttggcaagacgctgtttcaggggaaaaaaaaagaaaagggggataggaaattagggaagtgccaggaccaggcatgaggatatgtttttaaatgacaggga

SEQ ID NO: 116338 - DNA, 86 bp, Artificial Sequence
  ENSG00000100519_38 (sequence is synthesized)
ccaggaccaggcatgaggatatgtttttaaatgacagggaggattagcacagggaaggccttaccaagaaggtaatttatttttta

SEQ ID NO: 116339 - DNA, 89 bp, Artificial Sequence
  ENSG00000100519_39 (sequence is synthesized)
gcctcccaagttcaaatgatcctcacacacacaccaccaaccctggcttgtttttttgtagggatggggtttcaccatgttgcccaggc

SEQ ID NO: 116340 - DNA, 120 bp, Artificial Sequence
  ENSG00000100519_40 (sequence is synthesized)
ggctcaagcaatctgcccacctcggccacccaaagttctgggataacaggcgtgtgccactgcacccggcctggttgtttgtttgtttgttttttaaattgattcctgttaaatgctgac

SEQ ID NO: 116341 - DNA, 120 bp, Artificial Sequence
  ENSG00000100519_41 (sequence is synthesized)
atgctgacaataggtcagataaagagttctcagagtagacctttggatttaactatatggaggtcattggtaatcttgtcaaaagtagcttcttgggagtggtggaggtgaaagcctatt

SEQ ID NO: 116342 - DNA, 120 bp, Artificial Sequence
  ENSG00000100519_42 (sequence is synthesized)
tcagatgggtttcagagagattgggaggagaggcattgagtttagacatttcttttaagagttctacagagggggcagaagaagtagaaggggaatgccgatgaggagttggcagagttt

SEQ ID NO: 116343 - DNA, 120 bp, Artificial Sequence
  ENSG00000100519_43 (sequence is synthesized)
tctataagatggaagagtttatgacccccctgcccttttttttttttttttaataatgctactgggaatgacctaggagaaagagaaattggcaatgttctttccttgaagagggattgg

SEQ ID NO: 116344 - DNA, 120 bp, Artificial Sequence
  ENSG00000100519_44 (sequence is synthesized)
ccctatatatatgtgtacttttatgagactggaggaaaggcagagtacatagatgcttatgatgacaggttcttagatagtgcaggaacttgtggaagtgtttttttctgaatgcttctg

SEQ ID NO: 116345 - DNA, 120 bp, Artificial Sequence
  ENSG00000100519_45 (sequence is synthesized)
ttttctcagtgaagtagaatgcacgttcagaatgaagatagggaagtgttcttagagatttgaggacaaaggagaaggtataaagtcattatctatggaagtgagggattggactagggt

SEQ ID NO: 116346 - DNA, 120 bp, Artificial Sequence
  ENSG00000100519_46 (sequence is synthesized)
gcaggccagtaaaacatggcttgtgaaccaaattctgcctgccctgtgtttttggaaacacacaaagttttgttgtaacccaagcatgctcatttatctgttgtctatggctgctttcct

SEQ ID NO: 116347 - DNA, 120 bp, Artificial Sequence
  ENSG00000100519_47 (sequence is synthesized)
actggaatagctgagttgaatagttacaacagaaaccatatggcttgcaaagcatacagtatttactctctggccctttacataaaaagtttgctgacctccagactagggaaatctagt

SEQ ID NO: 116348 - DNA, 120 bp, Artificial Sequence
  ENSG00000100519_48 (sequence is synthesized)
tagctgattgttgaatttcactatcttcattgcccctgttagagagttttgagctggaaagaccgaactgaacaaaggatgtcaatgtataggtttcttccacaaatactgagctcttgc

SEQ ID NO: 116349 - DNA, 120 bp, Artificial Sequence
  ENSG00000100519_49 (sequence is synthesized)
tagatgccagatactgtgctagccttgggaattcttgctctcaggaagcttacaatgaacttaaacctgattaaagacaattcatgaatatatgtgtgatttcaaatagagaacgacatg

SEQ ID NO: 116350 - DNA, 120 bp, Artificial Sequence
  ENSG00000100519_50 (sequence is synthesized)
ccctatattgcctgaccaaacggtgcatcatcaaagttattcaaactgtagtagcctgtgctgtcttacttctcttcctattctgtatcagatccattgttgctaccccaatcctatagc

SEQ ID NO: 116351 - DNA, 120 bp, Artificial Sequence
  ENSG00000100519_51 (sequence is synthesized)
tctttgattcatgtctgttatgtgggtggatggagaactcactttattactgctaccatagatctgatacttcaccacttgaatcttgcacagaaaccagagaagctagctaatgcatgc

SEQ ID NO: 116352 - DNA, 120 bp, Artificial Sequence
  ENSG00000100519_52 (sequence is synthesized)
tgtagcatttaaaaattccatgtgatacaattatgtatgattacatttcagttttgctatactttatatttggcttgtatgattaaagtaaacaaagtaaattccattgttataattggt

SEQ ID NO: 116353 - DNA, 120 bp, Artificial Sequence
  ENSG00000100519_53 (sequence is synthesized)
tttgagtgttataggtttattcaaatccaagatttgattacagttttgataagagtcacagcttaacaggtatctggagttcacatgtgcatagctatttcactgtataaaaatagatta

SEQ ID NO: 116354 - DNA, 120 bp, Artificial Sequence
  ENSG00000100519_54 (sequence is synthesized)
tttttttactttctatttttcaattagttcttttatgttttttcttctagtcattgttaaagctaccaatggaccaagatatgttgtgggttgtcgtcgacaggtaatactttatatttg

SEQ ID NO: 116355 - DNA, 120 bp, Artificial Sequence
  ENSG00000100522_0 (sequence is synthesized)
agaggcgaggtggaggcgttggcgctgccacgtctgggccgcggttcccaactgtggcgcgggcggtggaggaggaggtggggctggcgctgaagccggatccggatccggtgctgtgca

SEQ ID NO: 116356 - DNA, 120 bp, Artificial Sequence
  ENSG00000100522_1 (sequence is synthesized)
cactggtgggggagagtccgacgcgcctggctaggagcgccgaccgcagggcctctacggaccttactagaaaaatgaaacctgatgaaactcctatgtttgacccaagtctactcaaag

SEQ ID NO: 116357 - DNA, 120 bp, Artificial Sequence
  ENSG00000100522_2 (sequence is synthesized)
aagtggactggagtcagaatacagctacattttctccagccatttccccaacacatcctggagaaggcttggttttgaggcctctttgtactgctgacttaaatagaggtttttttaagg

SEQ ID NO: 116358 - DNA, 120 bp, Artificial Sequence
  ENSG00000100522_3 (sequence is synthesized)
tattgggtcagctaacagagactggagttgtcagccctgaacaatttatgaaatcttttgagcatatgaagaaatctggggattattatgttacagttgtagaagatgtgactctaggac

SEQ ID NO: 116359 - DNA, 120 bp, Artificial Sequence
  ENSG00000100522_4 (sequence is synthesized)
agattgttgctacggcaactctgattatagaacataaattcatccattcctgtgctaagagaggaagagtagaagatgttgttgttagtgatgaatgcagaggaaagcagcttggcaaat

SEQ ID NO: 116360 - DNA, 120 bp, Artificial Sequence
  ENSG00000100522_5 (sequence is synthesized)
tgttattatcaacccttactttgctaagcaagaaactgaactgttacaagattacccttgaatgtctaccacaaaatgttggtttctataaaaagtttggatatactgtatctgaagaaa

SEQ ID NO: 116361 - DNA, 120 bp, Artificial Sequence
  ENSG00000100522_6 (sequence is synthesized)
actacatgtgtcggaggtttctaaagtaaaaatcttgtaagaaaattgtcaaaggggctaatgctacaaggctacactcttcctagagttgaaatattttgttgctgcagccgagtgacc

SEQ ID NO: 116362 - DNA, 120 bp, Artificial Sequence
  ENSG00000100522_7 (sequence is synthesized)
tccataaatactggactgaaaaaacattgtaatactacaagtataatgacatttagaagattactttgggctggtgggacatgctgtgaatttagattacaaatgaatattataaagggg

SEQ ID NO: 116363 - DNA, 120 bp, Artificial Sequence
  ENSG00000100522_8 (sequence is synthesized)
atgatttttaaccaaaggaatatatttttaacttgaatcttttcttgcattgtatttttctaaaagtttggcttcctttcttggtagtcaagagtatgggtaataaggagttatatgtct

SEQ ID NO: 116364 - DNA, 120 bp, Artificial Sequence
  ENSG00000100522_9 (sequence is synthesized)
gctatctgtgttgctcatttaaaaaaagtatacattgaataaggctgtttatcacatgcataaaattaaatatttttgtttcaaagaaacatctcaatacacttaggggtgtattgtttc

SEQ ID NO: 116365 - DNA, 120 bp, Artificial Sequence
  ENSG00000100522_10 (sequence is synthesized)
ccacatattaagtcagggtggataaattagttattataactaaacatagtatagtccaacattcgttgatcccaatacaggcaaacaacctggtcaaccttttgaagtagaagaaatgaa

SEQ ID NO: 116366 - DNA, 120 bp, Artificial Sequence
  ENSG00000100522_11 (sequence is synthesized)
aattacttgacaagattaaaagtaaaacaatttaaatgttttactgaaagtttatatagtatagtctatgtagataaaaagtaccacttgtcttttctgtgaattatgactattcatttg

SEQ ID NO: 116367 - DNA, 120 bp, Artificial Sequence
  ENSG00000100522_12 (sequence is synthesized)
ttaaaaatacctaagagcaattatagtgggacatctaaggtcctctgtaaacagtgaattagcaaacctcagcctatgtgtttctaccctgatttttttcttttcatgggtatctgaagc

SEQ ID NO: 116368 - DNA, 120 bp, Artificial Sequence
  ENSG00000100522_13 (sequence is synthesized)
ctctaagttttttcaaaaatggagtatcacaaaattgagtgaaacacaatacttaatgtattgtactagattgccaaattcataaaatgttaatggaagctttttgatgtgattataatg

SEQ ID NO: 116369 - DNA, 120 bp, Artificial Sequence
  ENSG00000100522_14 (sequence is synthesized)
gcactattctggtcattatcctattttgattttatttaattttttaaagttgaagaattaaatattttaatggttctaatcttttgcattccatgttgcattaaacctgtttatatgagt

SEQ ID NO: 116370 - DNA, 120 bp, Artificial Sequence
  ENSG00000100522_15 (sequence is synthesized)
agtcttctgttagaatcacatctgtgcttttcttgagtctgctgttgaactattagattaagtcataattcataaaattttagtttaatgtgctctttgtaaaatgaaattgtaaagaaa

SEQ ID NO: 116371 - DNA, 120 bp, Artificial Sequence
  ENSG00000100522_16 (sequence is synthesized)
cacaccacgtcatctggattttggatttccctccatgcagccagctatagttggctttccaaaacaacagaaatccttcaccaatagagtgcactacttacctgcttatagcctatacag

SEQ ID NO: 116372 - DNA, 120 bp, Artificial Sequence
  ENSG00000100522_17 (sequence is synthesized)
acgaactgatctgtccttcgtgaaacgcaacaaagctagttctgtcttttcagaagtcctacaaccttgacaaagagtagttttatcaggtaaatcctggtaattaaaaacgcatgtttt

SEQ ID NO: 116373 - DNA, 120 bp, Artificial Sequence
  ENSG00000100522_18 (sequence is synthesized)
cgacagagagagactccatctcaaaacaaaacaaaaaaaattagcctacttaaaggcacaactaaatgctttattacctttcttaccactgaacaatttgaggtaaaatcattcacaagg

SEQ ID NO: 116374 - DNA, 120 bp, Artificial Sequence
  ENSG00000100522_19 (sequence is synthesized)
accactgaacaatttgaggtaaaatcattcacaaggttggcacttcagtaaatccctttaaatagtgttcctaagatatctcttaaatcctcccataggaaatagaattacaggtaaggt

SEQ ID NO: 116375 - DNA, 120 bp, Artificial Sequence
  ENSG00000100522_20 (sequence is synthesized)
acaccatacaaaaattgtgtcattgaggacaatggtgatctgtaattttagttgagtatgtttatgatttttgaagccatatggtgagtaaatgtaaatatgaaaaaagtgctacataaa

SEQ ID NO: 116376 - DNA, 120 bp, Artificial Sequence
  ENSG00000100522_21 (sequence is synthesized)
acacttcttaaactttttttttttaaaaactgctccttgtggagcaggactaccccataggcagtgtacccacaatagatagccttttgttgttgttgttgttgagacaaggtctcgctg

SEQ ID NO: 116377 - DNA, 120 bp, Artificial Sequence
  ENSG00000100522_22 (sequence is synthesized)
ttgcccaggctagagcgcaggggcacaatcaccacacactgccgcttcaatctcctgggctcaaatgatccttccacctcagcctcccatgtggctgggactataggtgcatgccaccac

SEQ ID NO: 116378 - DNA, 80 bp, Artificial Sequence
  ENSG00000100522_23 (sequence is synthesized)
tcccatgtaaaaaaattttttgtgtggagtctatgttgcccaggctggtctcttaactcctaggctcaagtgatcctccc

SEQ ID NO: 116379 - DNA, 120 bp, Artificial Sequence
  ENSG00000100522_24 (sequence is synthesized)
agccactgcacctggcccacattttttaaagagacactgtcccactccatcacccaggctggagtccagtggtgtgatcatagctcactgcatcctccagttcctgggttcaagccatcc

SEQ ID NO: 116380 - DNA, 89 bp, Artificial Sequence
  ENSG00000100522_25 (sequence is synthesized)
cctccccagtagctggaactacaggtgtgtgccatcacacctggctttacatttttctgtggggtcttactatattgcccaagcctgcc

SEQ ID NO: 116381 - DNA, 120 bp, Artificial Sequence
  ENSG00000100522_26 (sequence is synthesized)
tcagcctccagagtatctgggattacatatgtcggctaccgtgtctggccgttcacatctttggccactatttgcttgtgaaaaggtataatgaggtggtacttatcatttttactgtgt

SEQ ID NO: 116382 - DNA, 120 bp, Artificial Sequence
  ENSG00000100522_27 (sequence is synthesized)
tttttactgtgtctcatgttttgtatatttttgtttcatcaactaagatgcactgtaacatctctgaaatctggatatattatcaatggtttatcatagttttgttagcaatacactgtc

SEQ ID NO: 116383 - DNA, 120 bp, Artificial Sequence
  ENSG00000100522_28 (sequence is synthesized)
ttttagtggtgcctaaaataatggtatagttgtgaggtgatcttagatttgatgaagcacagtatgcaggtaggcctaatgggggaagatggtaatataaaagcaagaagtatttttttt

SEQ ID NO: 116384 - DNA, 120 bp, Artificial Sequence
  ENSG00000100522_29 (sequence is synthesized)
ttgtaatgactgaaagctgttctgtggatgacctaccctttcctttaaacacgattctctcacttccaactccaaacttgctcaactaatccttaaaaataaacttgagctggaatttga

SEQ ID NO: 116385 - DNA, 120 bp, Artificial Sequence
  ENSG00000100523_0 (sequence is synthesized)
aacgcagctgcggcggctgcgggtctcgtgggggcggagcggtcgccgctgccgccgcagctcgggtcgggatttgaaagattagaaacttcgggtggagagggcggcggcgttgaatgt

SEQ ID NO: 116386 - DNA, 120 bp, Artificial Sequence
  ENSG00000100523_1 (sequence is synthesized)
gtggcggaagcgctgggggtcacggctccgcgcgccgccggacagccggcggcgtctccacagcatgaattacccgggccgcgggtccccacggagccccgagcataacggccgaggcgg

SEQ ID NO: 116387 - DNA, 120 bp, Artificial Sequence
  ENSG00000100523_2 (sequence is synthesized)
ggcggcgcctgggagctgggctcagacgcgaggccagcgttcggcggcggcgtctgctgcttcgagcacctgcccggcggggacccggacgacggcgacgtgcccctggccctgctgcgc

SEQ ID NO: 116388 - DNA, 120 bp, Artificial Sequence
  ENSG00000100523_3 (sequence is synthesized)
gcgcggggaacccgggctgcatttggcgccgggcaccgacgaccacaaccaccacctcgcgctggacccctgcctcagtgacgagaactatgacttcagctccgccgagtcgggctcctc

SEQ ID NO: 116389 - DNA, 120 bp, Artificial Sequence
  ENSG00000100523_4 (sequence is synthesized)
gctgcgctactacagcgagggtgagagcggcggcggcggcagctccttgtcgctgcacccgccgcagcagcctccgctggtcccgacgaactcggggggcggcggcgcgacaggagggtc

SEQ ID NO: 116390 - DNA, 120 bp, Artificial Sequence
  ENSG00000100523_5 (sequence is synthesized)
ccccggggaaaggaaacgtacccggcttggcggcccggcggcccggcaccgctatgaggtagtgacggagctgggcccggaggaggtacgctggttctacaaggaggacaagaagacctg

SEQ ID NO: 116391 - DNA, 120 bp, Artificial Sequence
  ENSG00000100523_6 (sequence is synthesized)
gaagcccttcatcggctacgactcgctccgcatcgagctcgccttccggaccctgctgcagaccacgggtgcccggccccagggcggggaccgggacggcgaccatgtgtgctcccccac

SEQ ID NO: 116392 - DNA, 120 bp, Artificial Sequence
  ENSG00000100523_7 (sequence is synthesized)
gggcccagcctccagttccggagaagatgacgatgaggaccgcgcctgcggcttctgccagagtacgacggggcacgagccggagatggtggagcttgtgaacatcgagcctgtgtgcgt

SEQ ID NO: 116393 - DNA, 120 bp, Artificial Sequence
  ENSG00000100523_8 (sequence is synthesized)
gcggggcggcctctacgaggtggatgtgacccaaggagagtgctacccggtgtactggaaccaggctgataaaataccagtaatgcgtggacagtggtttattgacggcacttggcagcc

SEQ ID NO: 116394 - DNA, 120 bp, Artificial Sequence
  ENSG00000100523_9 (sequence is synthesized)
tctagaagaggaagaaagtaatttaattgagcaagaacatctcaattgttttaggggccagcagatgcaggaaaatttcgatattgaagtgtcaaaatccatagatggaaaagatgctgt

SEQ ID NO: 116395 - DNA, 120 bp, Artificial Sequence
  ENSG00000100523_10 (sequence is synthesized)
tcatagtttcaagttgagtcgaaaccatgtggactggcacagtgtggatgaagtatatctttatagtgatgcaacaacatctaaaattgcaagaacagttacccaaaaactgggattttc

SEQ ID NO: 116396 - DNA, 120 bp, Artificial Sequence
  ENSG00000100523_11 (sequence is synthesized)
taaagcatcaagtagtggtaccagacttcatagaggttatgtagaagaagccacattagaagacaagccatcacagactacccatattgtatttgttgtgcatggcattgggcagaaaat

SEQ ID NO: 116397 - DNA, 120 bp, Artificial Sequence
  ENSG00000100523_12 (sequence is synthesized)
ggaccaaggaagaattatcaaaaatacagctatgatgagagaagctgcaagaaaaatagaagaaaggcatttttccaaccatgcaacacatgttgaatttctgcctgttgagtggcggtc

SEQ ID NO: 116398 - DNA, 120 bp, Artificial Sequence
  ENSG00000100523_13 (sequence is synthesized)
aaaacttactcttgatggagacactgttgattccattactcctgacaaagtacgaggtttaagggatatgctgaacagcagtgcaatggacataatgtattatactagtccactttatag

SEQ ID NO: 116399 - DNA, 120 bp, Artificial Sequence
  ENSG00000100523_14 (sequence is synthesized)
agatgaactagttaaaggccttcagcaagagctgaatcgattgtattcccttttctgttctcggaatccagactttgaagaaaaagggggtaaagtctcaatagtatcacattccttggg

SEQ ID NO: 116400 - DNA, 120 bp, Artificial Sequence
  ENSG00000100523_15 (sequence is synthesized)
atgtgtaattacttatgacataatgactggctggaatccagttcggctgtatgaacagttgctgcaaaaggaagaagagttgcctgatgaacgatggatgagctatgaagaacgacatct

SEQ ID NO: 116401 - DNA, 120 bp, Artificial Sequence
  ENSG00000100523_16 (sequence is synthesized)
tcttgatgaactctatataactaaacgacggctgaaggaaatagaagaacggcttcacggattgaaagcatcatctatgacacaaacacctgccttaaaatttaaggttgagaatttctt

SEQ ID NO: 116402 - DNA, 120 bp, Artificial Sequence
  ENSG00000100523_17 (sequence is synthesized)
ctgtatgggatccccattagcagttttcttggcgttgcgtggcatccgcccaggaaatactggaagtcaagaccatattttgcctagagagatttgtaaccggttactaaatatttttca

SEQ ID NO: 116403 - DNA, 120 bp, Artificial Sequence
  ENSG00000100523_18 (sequence is synthesized)
tcctacagatccagtggcttatagattagaaccattaatactgaaacactacagcaacatttcacctgtccagatccactggtacaatacttcaaatcctttaccttatgaacatatgaa

SEQ ID NO: 116404 - DNA, 120 bp, Artificial Sequence
  ENSG00000100523_19 (sequence is synthesized)
gccaagctttctcaacccagctaaagaacctacctcagtttcagagaatgaaggcatttcaaccataccaagccctgtgacctcaccagttttgtcccgccgacactatggagaatctat

SEQ ID NO: 116405 - DNA, 120 bp, Artificial Sequence
  ENSG00000100523_20 (sequence is synthesized)
aacaaatataggcaaagcaagcatattaggggctgctagcattggaaagggacttggaggaatgttgttctcaagatttggacgttcatctacaacacagtcatctgaaacatcaaaaga

SEQ ID NO: 116406 - DNA, 120 bp, Artificial Sequence
  ENSG00000100523_21 (sequence is synthesized)
ctcaatggaagatgagaagaagccagttgcctcaccttctgctaccaccgtagggacacagacccttccacatagcagttctggcttcctcgattctgcattggagttggatcacaggat

SEQ ID NO: 116407 - DNA, 120 bp, Artificial Sequence
  ENSG00000100523_22 (sequence is synthesized)
tgattttgaactcagagaaggccttgtggagagccgctattggtcagctgtcacgtcgcatactgcctattggtcatccttggatgttgccctttttcttttaaccttcatgtataaaca

SEQ ID NO: 116408 - DNA, 120 bp, Artificial Sequence
  ENSG00000100523_23 (sequence is synthesized)
ttttttccgttaaaatgtgtgtgtcaagatacggagatttcagggttaaagtatatttcagttttctttagggcaacatatatttgaatttaaaagcactttatttaaaaaaaaaagaag

SEQ ID NO: 116409 - DNA, 120 bp, Artificial Sequence
  ENSG00000100523_24 (sequence is synthesized)
ttttcagttctgaagaagtcatttacagtttgcatcattttaattatgagtctgacaaaaccttctccagagaatcaagcaagacctggatgtgaagaaggtttgggtaaactgcatgta

SEQ ID NO: 116410 - DNA, 120 bp, Artificial Sequence
  ENSG00000100523_25 (sequence is synthesized)
aaggctacaaatcacaatctgattcctcccaaatataaaggcatatggaacataatgtattaaccaaagtatgttataaatcaaaaatggtcaaggttcagcatattctatatgaagatc

SEQ ID NO: 116411 - DNA, 120 bp, Artificial Sequence
  ENSG00000100523_26 (sequence is synthesized)
acaaggtggtatcgttttagatttctatgaaggctttcatttgtacatccctttgaaaaaatataacagatttaaaatgttttgaatttaacttgtttagaaaaactaatgcttaaaaca

SEQ ID NO: 116412 - DNA, 120 bp, Artificial Sequence
  ENSG00000100523_27 (sequence is synthesized)
atatttgaactactgtatttataatttattacctctaattgctttatttcagtgtatgagacattactgttttaatgtttgctttgaacataatttaagaaccagatttattttctatag

SEQ ID NO: 116413 - DNA, 120 bp, Artificial Sequence
  ENSG00000100523_28 (sequence is synthesized)
tgataaacccttttttctcagaactccatctttgtactcttcagatgaatatatagacactgtggcatacattttttttcattaaaaacttatggcttcatacaacactagttcaatttt

SEQ ID NO: 116414 - DNA, 120 bp, Artificial Sequence
  ENSG00000100523_29 (sequence is synthesized)
ttaaataaactttttattatgttacatgtacttcagagaaagctaaagtttctctaaacttgacacggagtactccataatgggtacatttcattagctttattagaaaactagtaaatg

SEQ ID NO: 116415 - DNA, 120 bp, Artificial Sequence
  ENSG00000100523_30 (sequence is synthesized)
cttttgaataggtagtatgacagctattttaaatgtataaacatttgtgtgccaaacaacatatatgaagggatgtgatgccactaactagtgcacattgtttctcaatgtgccattgag

SEQ ID NO: 116416 - DNA, 120 bp, Artificial Sequence
  ENSG00000100523_31 (sequence is synthesized)
acacaaggcacagtaagtcaggattctgaggcattggaagggttttcttcagctgtaattgtttccacagtgcttttcatctgaggggctcaaagtttaagagtgcattcaataacccat

SEQ ID NO: 116417 - DNA, 120 bp, Artificial Sequence
  ENSG00000100523_32 (sequence is synthesized)
gtactagcttcttgaggtaagtaaataaatcttgttctcatgttacatgttaatacaccaaggcaccaaaacatttaaagtgccatgaattagattacatcagaaatcagaaaagcttgg

SEQ ID NO: 116418 - DNA, 85 bp, Artificial Sequence
  ENSG00000100523_33 (sequence is synthesized)
tgccatgaattagattacatcagaaatcagaaaagcttggattgagctagtcaccgtggtatgggaggatctcttgagcccagga

SEQ ID NO: 116419 - DNA, 72 bp, Artificial Sequence
  ENSG00000100523_34 (sequence is synthesized)
tgcgagcccagaagttcaaagctgcagtgagctctgatcacaccaatgcactccagcctgggtgacagagcc

SEQ ID NO: 116420 - DNA, 120 bp, Artificial Sequence
  ENSG00000100523_35 (sequence is synthesized)
cctgggtgacagagccagaccctgtctctaaaaaacaaaaaagaaaagcttgggttgaagccaggccatattcttttatatgctgttcaatgacttgattcacatgtgaccttttagtag

SEQ ID NO: 116421 - DNA, 120 bp, Artificial Sequence
  ENSG00000100523_36 (sequence is synthesized)
cacatgtgaccttttagtagtttgcaaacaataataacagaagttgcaattcataattcagagaaatgaccatgaagccggtgtttccctgcttgatttctatgttcttggattctcaca

SEQ ID NO: 116422 - DNA, 120 bp, Artificial Sequence
  ENSG00000100523_37 (sequence is synthesized)
caaaagaggagttacctagaggggatcagtagccatccctgttgcacacaaccctcacttctgagtggtttccactaggttccacttaaggtgctgtcttttcttaacttgcaaggaatt

SEQ ID NO: 116423 - DNA, 120 bp, Artificial Sequence
  ENSG00000100523_38 (sequence is synthesized)
gcttagcttcccaataatcattgtcaaactgggagcaaagttggtcagctgtatctctcacctcctcctttcttcataagatagtagaatctgtggcttacttgtaggttttacttagtg

SEQ ID NO: 116424 - DNA, 120 bp, Artificial Sequence
  ENSG00000100523_39 (sequence is synthesized)
cttcagtactgttggctgttttggccttttgctgaatttgcacaacaacataaagcacttctttttaatgtttaaaaaaaattccaaggctccatgaccaagtatgtgactcactaagaa

SEQ ID NO: 116425 - DNA, 120 bp, Artificial Sequence
  ENSG00000100523_40 (sequence is synthesized)
acccttgctataaaaggcttttgatgaaatcttagcaaagctaaattatctctaacttagagattcctatgaactcaggtcattttcatagcctgtttattttgtaggtctaatttagtt

SEQ ID NO: 116426 - DNA, 120 bp, Artificial Sequence
  ENSG00000100523_41 (sequence is synthesized)
ctcaggaaaattaaactcatgctatatgactgtatcgttaaaggtacttgagcgtatgttgctgtaggtggtatgacactcaaatgcataagaacttgaagggatttattcttaaccact

SEQ ID NO: 116427 - DNA, 120 bp, Artificial Sequence
  ENSG00000100523_42 (sequence is synthesized)
agaatatgaagagccctttttacctgagaagagtgaaattatgtcagaccttttaatttgatatcactgagtaaaaggtatgttcctatagccataggaatatgtctgcttccttttttt

SEQ ID NO: 116428 - DNA, 120 bp, Artificial Sequence
  ENSG00000100523_43 (sequence is synthesized)
catgttgagaaaacagtcaaatttaaccatttggagtttatttgaattcttggaaagagcaatattcaaaaccttttcaaaaataagatattctggactactggatggatgttttgtttt

SEQ ID NO: 116429 - DNA, 120 bp, Artificial Sequence
  ENSG00000100523_44 (sequence is synthesized)
cagttcatttttcatcagtagagatggtgatttcggttttgtagtatccttgtttctatgtctgtgcatgttaacattggatgtatttgtatatacttaattaatatacagactgtgtgt

SEQ ID NO: 116430 - DNA, 120 bp, Artificial Sequence
  ENSG00000100523_45 (sequence is synthesized)
cattctggcttgattagaagctaagtcagttactgagtaacattttgcaactttattccagcaagtactaaatcggccaaaaaaagttttgtttttgataccattaaaattttattctct

SEQ ID NO: 116431 - DNA, 120 bp, Artificial Sequence
  ENSG00000100523_46 (sequence is synthesized)
cttagattaaatcttgctttatttttactttaaaattagtcttgctaaggccttatgttagttcatactttcttttcaacagtaatcttgtttataatccagtgtttctgtgttttagga

SEQ ID NO: 116432 - DNA, 79 bp, Artificial Sequence
  ENSG00000100523_47 (sequence is synthesized)
gaagattacttgagcccaagagttgaaaaccaacctggacaacatggtgaaacccagactctacaaaaaatgcaaagat

SEQ ID NO: 116433 - DNA, 120 bp, Artificial Sequence
  ENSG00000100523_48 (sequence is synthesized)
acttgagcccaagagttgaaaaccaacctggacaacatggtgaaacccagactctacaaaaaatgcaaagattagctgggtgtgttggcagacgcctgtggtcccagctactcaggaggc

SEQ ID NO: 116434 - DNA, 85 bp, Artificial Sequence
  ENSG00000100523_49 (sequence is synthesized)
gaggtcaaggcttgggtgacagagctggacactgtatccaaaaaaaaaaagtatgtatttacacacacacacacacacacacaca

SEQ ID NO: 116435 - DNA, 120 bp, Artificial Sequence
  ENSG00000100523_50 (sequence is synthesized)
ctggatgttctaataactgctcttttgtatgtgaagcaagccttaggaatcttacgttttacttctttctgttaaacggcatctgttatcttttgaagtactcacactgaacatgcttca

SEQ ID NO: 116436 - DNA, 120 bp, Artificial Sequence
  ENSG00000100523_51 (sequence is synthesized)
tgctgaatactcacgctaaaggcctcagacatgtaaacattcatccttagtctcttttttctctgttttctcattgggagctgaagcatcctagtctgcagaaaatttaacacaccatat

SEQ ID NO: 116437 - DNA, 120 bp, Artificial Sequence
  ENSG00000100523_52 (sequence is synthesized)
gtaccgtatcacagctagtgcctctgttcattccagtgatagtacatgagccccttccagtggagtcagatcaagccaaaagattttcctgtaaagtctgtagtagaagacaaatttctt

SEQ ID NO: 116438 - DNA, 120 bp, Artificial Sequence
  ENSG00000100523_53 (sequence is synthesized)
tttgatccattagattggtatttctatcttctcagctaattaatgagtaaggcatgtggacaatcgagaaaactaatttgagtgtatgtattaaaattgctcttctaaaaacacgtaaaa

SEQ ID NO: 116439 - DNA, 120 bp, Artificial Sequence
  ENSG00000100523_54 (sequence is synthesized)
tattaaagatcaaggcagagcaaaaaagaacgtagcaatcatatactagaaaaagaaactaagttttgctaaactatgtttgggttagttgacctctgtagctattctaaagttttctat

SEQ ID NO: 116440 - DNA, 120 bp, Artificial Sequence
  ENSG00000100523_55 (sequence is synthesized)
cccttatctgtattccgctgtcattcctgtgcctcaagcctctgccaggaatctgatggtactctggctgaacttaaaacataagaatctcaaaggtctcatttagtaaatgttagtgct

SEQ ID NO: 116441 - DNA, 120 bp, Artificial Sequence
  ENSG00000100523_56 (sequence is synthesized)
aagttggtgacagcctgggttatatgctttctctttcagtcttcagtagatgcttgtgatagttttcaaagaactgtaaaatttccgggtctgtacagatttttagagatcatttaatcc

SEQ ID NO: 116442 - DNA, 120 bp, Artificial Sequence
  ENSG00000100523_57 (sequence is synthesized)
aaccctgttacagtatcatgtcagcatttaaatagcagtaaaggtcatgaaaagtgaagtgaaaggcagcaaactccatgaaaaactaaatacagtgacaactgagggaagtggtaaagt

SEQ ID NO: 116443 - DNA, 120 bp, Artificial Sequence
  ENSG00000100523_58 (sequence is synthesized)
aaaaaaatattaatgatggaattttaaagctggaaggggcatagagaccattcttttctcaataatattctgcaaatattaacaggtgtcatgtcagaaactaagtttaggaattgacaa

SEQ ID NO: 116444 - DNA, 120 bp, Artificial Sequence
  ENSG00000100523_59 (sequence is synthesized)
attcaaaaatctcccttacagcagggctttgagagcctttgctacactaaatgctctgtgaatctatctggtgctgcgtgggggcctccaaatttatttaaccatattttttaatttggc

SEQ ID NO: 116445 - DNA, 120 bp, Artificial Sequence
  ENSG00000100523_60 (sequence is synthesized)
atttacctagagaaatgctatcacatttaattccttcgttttacagtttcacctcctcatgtgattccttcattttgtaagtgaccgattccaccctatacaatcacatggccaatgaat

SEQ ID NO: 116446 - DNA, 120 bp, Artificial Sequence
  ENSG00000100523_61 (sequence is synthesized)
gacagtcagaattagaacctagtcccctgattcccaaccatgtcttataccagactgtttcccctaatcgataggaaactactcctaaagggcagaaactgcctctctttgtttttgtcc

SEQ ID NO: 116447 - DNA, 120 bp, Artificial Sequence
  ENSG00000100523_62 (sequence is synthesized)
cccaacctcccctccacacatacacctctgtaatctgatgctttaagctcagattaaagcatcagcaagctttaatctgacacatggccgtaggcttgagttagcagttggtcccttctt

SEQ ID NO: 116448 - DNA, 120 bp, Artificial Sequence
  ENSG00000100523_63 (sequence is synthesized)
tcttccagactctcataagagtaccctatcaggtctggacagacttccgtttatgcctcagattcaaaatacccaggaaaaagaagaagaaatacaaaacaacaaaaagaaaatcaagaa

SEQ ID NO: 116449 - DNA, 120 bp, Artificial Sequence
  ENSG00000100523_64 (sequence is synthesized)
aaaaataagatatccaggaaatattttgttagttttctattctggtgacaaatgcaaacttaaggaaacaagttgcacagtgttaactaatgtttaacattcctttccatagtgtttatg

SEQ ID NO: 116450 - DNA, 120 bp, Artificial Sequence
  ENSG00000100523_65 (sequence is synthesized)
tgggccttttatcaattcatgacaaataggtcacctccaaaactgttccaacataggttaactcagaaatttaaaatttaagtactatcctttttggagactatgagaagagtttttact

SEQ ID NO: 116451 - DNA, 120 bp, Artificial Sequence
  ENSG00000100523_66 (sequence is synthesized)
attgtgttttgttttgttttttggtgtgtgtgtgtatgtatgtgcattccccaaaaatagtccattggcagattgttagggtgaacttttcctctgcctttgtgtttgtataagggcggg

SEQ ID NO: 116452 - DNA, 120 bp, Artificial Sequence
  ENSG00000100523_67 (sequence is synthesized)
tgcatgcttagtattgtctgctaccttatggtttttcatttatatgtaacatggtacaacttgcttcctccccacccaacagttgtcaggatatgttggggaatattctttaggaagatt

SEQ ID NO: 116453 - DNA, 120 bp, Artificial Sequence
  ENSG00000100523_68 (sequence is synthesized)
acatctggtcttctgttggagtaagatgaaaaacaagtatgttaacacttgacctttactgctttctcctggaagacattgaatatctaggagcgtcactcataccttcccttgactgta

SEQ ID NO: 116454 - DNA, 120 bp, Artificial Sequence
  ENSG00000100523_69 (sequence is synthesized)
cccacacccactgcggtccctgcttgatctctcaaactttttgtttccctttgagcttcatgacaaaaaattataaccattttctggttctaaggctgccataatcccaactttgccagt

SEQ ID NO: 116455 - DNA, 120 bp, Artificial Sequence
  ENSG00000100523_70 (sequence is synthesized)
aagaagatggagaatttttgctcatagggacatttctcagaagcagctggcaccataactctcctgagacccttgtttcctttctttcagctcctatgacttcttatgttcactctctct

SEQ ID NO: 116456 - DNA, 120 bp, Artificial Sequence
  ENSG00000100523_71 (sequence is synthesized)
aacactactaaatgttgtcaatgactgcaatcacaactctttgaaggcaggctttttcttttcctttgttacctcttattttcaatagccaaagcaggttagttttctcagaatcttcag

SEQ ID NO: 116457 - DNA, 120 bp, Artificial Sequence
  ENSG00000100523_72 (sequence is synthesized)
ttttactgaagcatgcattatttctgttttctctctgcagtgatcagtttggatgacagaaactttaaacttttattctggcattgtccagttctgattttctcagctggaactggtgca

SEQ ID NO: 116458 - DNA, 120 bp, Artificial Sequence
  ENSG00000100523_73 (sequence is synthesized)
tgcacatttaataatttcaaagaagtgagaggtaaatgttttctcctgcattatactgtgtttctctagctgaattgatccgtttgttatcttgctcacccgaaacaagtagttgtgccc

SEQ ID NO: 116459 - DNA, 120 bp, Artificial Sequence
  ENSG00000100523_74 (sequence is synthesized)
tacagtgagcaacctcagactaggctgttctaagcattctggagaaaataatcctcatcatacagtttgtggtaactcttccaaaaagtttatgaaaattgaaagatctccctatgcatc

SEQ ID NO: 116460 - DNA, 120 bp, Artificial Sequence
  ENSG00000100523_75 (sequence is synthesized)
agctgtggctgccacattccgttctactaggaaggctagtggccacaactccctctagaacatcagaggataaagtacacttatatattagaaaagacaggcatattctgattatggttc

SEQ ID NO: 116461 - DNA, 120 bp, Artificial Sequence
  ENSG00000100523_76 (sequence is synthesized)
attcacaatttctcagtccagggttcagtcagtgaccatagctctgaggtcttcaggctaactccaagaacccgtgccagatagaaacctactcctactacctttccactcaccttccca

SEQ ID NO: 116462 - DNA, 120 bp, Artificial Sequence
  ENSG00000100523_77 (sequence is synthesized)
ttcccccacctttgctaccaaagtgactttaaaagtcgagttttaggtgtttgtttttttaacagtctaggaatttcagtgcaattccgtgaggtggtgctgaccttagatgagaaatac

SEQ ID NO: 116463 - DNA, 120 bp, Artificial Sequence
  ENSG00000100523_78 (sequence is synthesized)
gtggccaggctataaggactacatgtagaattgagatgggacagtgtacgtatggactgtgaggggaaagaaaaggtaaatgtgtgaaaggaaagagattggtgcatggtcatgacagtc

SEQ ID NO: 116464 - DNA, 120 bp, Artificial Sequence
  ENSG00000100523_79 (sequence is synthesized)
tgacagcttagacatttcagaggcattgtttatgagaaaggggatagggacacataggtctgatgacaaccaaagccctttgatgatgccatctgtcactcaaggctccccacagcctgc

SEQ ID NO: 116465 - DNA, 120 bp, Artificial Sequence
  ENSG00000100523_80 (sequence is synthesized)
ccaacctgactctcctgcctgcttctccactgcctaccttcaacaatcaaactatatttttgttacagcaaactacattccatttgcctttaaatgcttgcattttagttattgtactgg

SEQ ID NO: 116466 - DNA, 120 bp, Artificial Sequence
  ENSG00000100523_81 (sequence is synthesized)
ctacctgtttttgtctgcccagcatcctgtttcccctccttttggatcctctcctagccaattccatgtcttgaatcctttcctgctccttgttaaaattattttctgctttgtgtgagt

SEQ ID NO: 116467 - DNA, 120 bp, Artificial Sequence
  ENSG00000100523_82 (sequence is synthesized)
ccctgtaagcaccagcagctcaatcagcactgtctgtaccatggtcaagagatgagtacatgactcaggtcagaccttatttcccaccccataagccacaatgattagacaagaaatagg

SEQ ID NO: 116468 - DNA, 120 bp, Artificial Sequence
  ENSG00000100523_83 (sequence is synthesized)
cacagaaccctaactagatagggcagaagccttccataggattttatttgctggccctgaaatgcaggtagccttctatggctgttaaacacaatccagtggcacatggggtgatatgag

SEQ ID NO: 116469 - DNA, 120 bp, Artificial Sequence
  ENSG00000100523_84 (sequence is synthesized)
gatggagccatccatggcaaaactccaccctttcctgtgacatggattatgtgcatctgccatgaaaaggaagcatacacaagaaatgagccaagagttcctggagaactgaagcaagta

SEQ ID NO: 116470 - DNA, 120 bp, Artificial Sequence
  ENSG00000100523_85 (sequence is synthesized)
tcacctccagatcagttgtacttttatttgcttacactattctgaggtgggtctctgtctcttggatccaaaagagttcaaattaataatcatttgacaaaaaattacctccacattcct

SEQ ID NO: 116471 - DNA, 120 bp, Artificial Sequence
  ENSG00000100523_86 (sequence is synthesized)
aatgaagttgtctttgaagataatgtcttgtgatcccctggttgaagttaattactgcttgtgagcccccattaacaacgtgttcctttccccattgcttgcttgtatcagctttgctga

SEQ ID NO: 116472 - DNA, 120 bp, Artificial Sequence
  ENSG00000100523_87 (sequence is synthesized)
agatctattggctgtaggtgtgcagctttatttctgtgttctctattgtgttccattggtctacgtgtctgttattgtaccagtgccgtgctgttttggttactgtggtcttatagtttg

SEQ ID NO: 116473 - DNA, 120 bp, Artificial Sequence
  ENSG00000100523_88 (sequence is synthesized)
aagccacatctgtgtgatgctgctggctttgttctttctgctttgggttgctttggctattcaggctctttctttggttccatctgaattttagaatagttgttttctaattctgtgaaa

SEQ ID NO: 116474 - DNA, 120 bp, Artificial Sequence
  ENSG00000100523_89 (sequence is synthesized)
catctgaattttagaatagttgttttctaattctgtgaaaatgttccaacctctgtgaaaaatgaggttggtagtttgataggacagcattgattctgtaaattgctttgggcagtatgg

SEQ ID NO: 116475 - DNA, 74 bp, Artificial Sequence
  ENSG00000100523_90 (sequence is synthesized)
ttgattcttccaatccatgaacatggaatgtttttccattttttggtttcatccctgatttctttctgccgtgt

SEQ ID NO: 116476 - DNA, 120 bp, Artificial Sequence
  ENSG00000100523_91 (sequence is synthesized)
atggctattgtaaatggtattgggttcttgatttgctctcagcttgaacgttattggtgtatagaaatgctcctaatttttgtgcattgattttgtatcctgaaacttgactaaagttgt

SEQ ID NO: 116477 - DNA, 120 bp, Artificial Sequence
  ENSG00000100523_92 (sequence is synthesized)
ttatcagtctaggagcttttggcagagtcttcggggttttctaggtataaaatcatatcagcgaagagagctagtttgatttcttttcccagttggatgccttttatttatttctcttgc

SEQ ID NO: 116478 - DNA, 120 bp, Artificial Sequence
  ENSG00000100523_93 (sequence is synthesized)
ctgattgctctaagttgaatgggagcgatgagactgggcatcctcttcttattccagttctcagaaggaatagttccagcttttgctcatccagtatgatgtctgtgggttggttgtaga

SEQ ID NO: 116479 - DNA, 120 bp, Artificial Sequence
  ENSG00000100523_94 (sequence is synthesized)
tggctcttattattttgagatatgttcctttgatacctagtctgttgaggggttttatcatgagggatgttggattttatccgtattcaataaatggtgttgggataactggctagccct

SEQ ID NO: 116480 - DNA, 83 bp, Artificial Sequence
  ENSG00000100523_95 (sequence is synthesized)
ccgtattcaataaatggtgttgggataactggctagccctatgcagaagaatgaaactggaccccccacctttcaccgtatat

SEQ ID NO: 116481 - DNA, 120 bp, Artificial Sequence
  ENSG00000100523_96 (sequence is synthesized)
atacccttatcaacatcagccttggcaaagaacttttggctaagtccccaaaggcaattgcaacaaaacagaaattggcaagtggggacctaattaaagcactctgcacagcaaaagaca

SEQ ID NO: 116482 - DNA, 120 bp, Artificial Sequence
  ENSG00000100523_97 (sequence is synthesized)
ctatcaacagagtaaacagacaacatacagaattggagaaaatatttgcaaactagacatccaacaaagatctgacatccagaatcaataaggaacttaacaagcaaaaaacaaccccat

SEQ ID NO: 116483 - DNA, 71 bp, Artificial Sequence
  ENSG00000100523_98 (sequence is synthesized)
caaaaaacaaccccattaaaaaatcaacaaacgtgaaaaaatgctcatcactaatcatcagagaaatgcaa

SEQ ID NO: 116484 - DNA, 120 bp, Artificial Sequence
  ENSG00000100523_99 (sequence is synthesized)
gataccatctcacaccagttagaatggctattgtaaagaagtctaataacatgccagtaaggtttcagagaaaagagaacatttatacactgttgtgggaatgtaaattagttcagtcac

SEQ ID NO: 116485 - DNA, 120 bp, Artificial Sequence
  ENSG00000100523_100 (sequence is synthesized)
gagatttctcaaataacttaaaacagatctaccattcaacccagcatatgggtttatttcccaaaaggaaataaatccttctaccaaaaacacatatggtcatcacagtgctattcacag

SEQ ID NO: 116486 - DNA, 78 bp, Artificial Sequence
  ENSG00000100523_101 (sequence is synthesized)
aaggaaataaatccttctaccaaaaacacatatggtcatcacagtgctattcacagtagcaaagacagatcaacgtgg

SEQ ID NO: 116487 - DNA, 120 bp, Artificial Sequence
  ENSG00000100523_102 (sequence is synthesized)
tcatgtcctttgcagccagccacatggatacagctggaagccataatctaagcaaattaagaacagaaaaccaagtactgcatgttctaacaaatgggagctaaatattgagtacctcag

SEQ ID NO: 116488 - DNA, 120 bp, Artificial Sequence
  ENSG00000100523_103 (sequence is synthesized)
aatgggagctaaatattgagtacctcaggatgcaaaggtgggaacaacagacactgcagactggaacactgtgggtgaggagggcagaaggataggttgaaaaactacctattgggtact

SEQ ID NO: 116489 - DNA, 120 bp, Artificial Sequence
  ENSG00000100523_104 (sequence is synthesized)
tacctcaaacctcagcatcacacaatatacccttgtaacaaacttgcacatttacccactgtttctaaatgaaaagttgaaatattttttattaaaaaacacaaaagcaatatgtttctc

SEQ ID NO: 116490 - DNA, 120 bp, Artificial Sequence
  ENSG00000100523_105 (sequence is synthesized)
aagtatgtgagggatggtgtttggtcagggacaggatggagattgtgaagggagcacctgcacatgaatggcgcatttgggacaatagctggaaaagagacagggtagatatgcagtgct

SEQ ID NO: 116491 - DNA, 120 bp, Artificial Sequence
  ENSG00000100523_106 (sequence is synthesized)
aaggagtttggcctttatcctgcgagtaatgaggaaccaaacagtagaaggttctttatacttacatgtgattaatgacaatgcaaaagttgagctggagagttggaagcagaatatcag

SEQ ID NO: 116492 - DNA, 120 bp, Artificial Sequence
  ENSG00000100523_107 (sequence is synthesized)
atattctacaaaccaagtaagttgttgataaagtttagagtggtttgtaaatttgacataataattcaggaggtttagaattagaaaatttgatttttttaaacatttgattattctaga

SEQ ID NO: 116493 - DNA, 120 bp, Artificial Sequence
  ENSG00000100523_108 (sequence is synthesized)
atttaaaaattaactactataaatatctgaactatctcaatttttattttaatatgtatggtaagtgtcatgatattaacacagtttactataaatgtacagattgttacaatgcactcc

SEQ ID NO: 116494 - DNA, 120 bp, Artificial Sequence
  ENSG00000100523_109 (sequence is synthesized)
ctatttaatcttttttagtaattttttagttatcaaaggaaattgaacttaacccaaaaattccttgttgttatatcaagacaagtttcattaatatttcaatgttcttttcctgaagtt

SEQ ID NO: 116495 - DNA, 120 bp, Artificial Sequence
  ENSG00000100523_110 (sequence is synthesized)
atcagtagaagaaactgaaattaagttgctctgtcaaagctattgagggcttgaggtatatatgccttagacccagtgaagagtcagccacatcacccgggaaagcagttaattatcaaa

SEQ ID NO: 116496 - DNA, 120 bp, Artificial Sequence
  ENSG00000100523_111 (sequence is synthesized)
acacatagaagctgtatattagaggttaaaattatgatagttaagtaactcaatggtttaaaaagttgccattccctgtagcaggattaatcatttataaaataaagtccctatccatta

SEQ ID NO: 116497 - DNA, 120 bp, Artificial Sequence
  ENSG00000100523_112 (sequence is synthesized)
caggattaatgtgagggatagtgggccatcatctgcgtctttatactttagtaagctagcaagcatctaatatttatgaaattataaatacgtgtgtgtatataatctcataccccttct

SEQ ID NO: 116498 - DNA, 120 bp, Artificial Sequence
  ENSG00000100523_113 (sequence is synthesized)
aacttggggagggcagggaggtataaaatattaatactagctagtcaactctaagatctaaagtgtgccttaactttgaaagaaaaaaatgctttccttctgcttatatttttaagaata

SEQ ID NO: 116499 - DNA, 120 bp, Artificial Sequence
  ENSG00000100523_114 (sequence is synthesized)
atttccaggaaaatgcagttttactttctgcattgatgaattaatagaatattagtaattagggccttgtggcacaaggtcttaaccatcaagcataaaacaaatctctttagggtaagt

SEQ ID NO: 116500 - DNA, 120 bp, Artificial Sequence
  ENSG00000100523_115 (sequence is synthesized)
accccctgaagtttataaagtagatttttactaatgtgatcttctcagtctcaaaaatcgtgtaattattgctttagatctatgctgtatctggtcttgagactttaaaaactgctatac

SEQ ID NO: 116501 - DNA, 120 bp, Artificial Sequence
  ENSG00000100523_116 (sequence is synthesized)
caaagtcatcctacttctattcaaagcttagaaattttattggatctgctgaatggcttccaattctatcccagctacctagtgtaaagcagatattgaaaaaatgagtaaataaatgga

SEQ ID NO: 116502 - DNA, 120 bp, Artificial Sequence
  ENSG00000100523_117 (sequence is synthesized)
aaacacgaatacacttagtatatatttacttccaagagtctgaacttgaacattatttttaggtgtctagtaaaataaaactaaaacgtcaagtcctattttttcattgacacctataat

SEQ ID NO: 116503 - DNA, 120 bp, Artificial Sequence
  ENSG00000100523_118 (sequence is synthesized)
gaaatataaattctgaaactagctactccttttctgtaactatagcagggagaaaacttttctttctctagaaatttttaaacagattttatttgttacttagagtattgtgttcttact

SEQ ID NO: 116504 - DNA, 120 bp, Artificial Sequence
  ENSG00000100523_119 (sequence is synthesized)
gtgtctgctactctaaattgtaaaatgatggcattcattgccatccatccttagaaagttcaggtgtgacactcctagaggctgaataattcttccacagtcaactccactccaggatga

SEQ ID NO: 116505 - DNA, 120 bp, Artificial Sequence
  ENSG00000100523_120 (sequence is synthesized)
attattaatagggttgaacattcctacttgggccaacagcatttttaatttaattatatctgtgccagactctggacactgaaaattttataattgcaagtctggaaaattcttttttag

SEQ ID NO: 116506 - DNA, 120 bp, Artificial Sequence
  ENSG00000100523_121 (sequence is synthesized)
actttgatatttgcattaaatatattttaccttctataagagttctcatactatttctgacttgtttccttttctacttaatatcaaaaatgtgattgtgaaaatacaaaattctgtcgt

SEQ ID NO: 116507 - DNA, 120 bp, Artificial Sequence
  ENSG00000100523_122 (sequence is synthesized)
gacatgcagatgtcaagaaaactctaactgctgaagaaaattaatttcaaagaattttgtaaggtagcaggtaaaaagtcatggttctctgtaatgtcattaatgtgcaacagtagtgct

SEQ ID NO: 116508 - DNA, 120 bp, Artificial Sequence
  ENSG00000100523_123 (sequence is synthesized)
agtaaacatcagagtgagggagggagcaagaagagcagggtagggtttaaccccctagaaaaagggtaatgaaaacgtatgtatagaatctacaggctctgagggaataaaactttttta

SEQ ID NO: 116509 - DNA, 120 bp, Artificial Sequence
  ENSG00000100523_124 (sequence is synthesized)
ggttttttttttctgtttaacatagtaatttcaaaataatagagaaacccccagttttttcttccagaacagcagttagtagaggtgcatagctgtattgcatctttttattttgagagc

SEQ ID NO: 116510 - DNA, 120 bp, Artificial Sequence
  ENSG00000100523_125 (sequence is synthesized)
ttaacaaaatacatactatgtcattcttacacataaattctttgatagtccgaatggtaaaatagtcaacaagactcaatatgaggtaattatgagtcttacacatattcacatattaca

SEQ ID NO: 116511 - DNA, 120 bp, Artificial Sequence
  ENSG00000100523_126 (sequence is synthesized)
tacacatacttatatattatacatattacacatattcacctctagatatagatataactattaaaattggactattataataagattctgccttttaaatcctattcccaagatttgctt

SEQ ID NO: 116512 - DNA, 120 bp, Artificial Sequence
  ENSG00000100523_127 (sequence is synthesized)
aattatttggcttgcttcaataatgtaatctgtgtaatcgtcataatttctcgtcgttaagtgctgtcttggctatatcgtgcaaatcataaaacttttcttcattaaatcttctttctg

SEQ ID NO: 116513 - DNA, 120 bp, Artificial Sequence
  ENSG00000100523_128 (sequence is synthesized)
atattactagagcttatcaaaattttgggaatctgactttctctcatattcaaaatagacaattcatattctgtttttagtatgttttaagtatattaaatttagtgacagattcctttt

SEQ ID NO: 116514 - DNA, 120 bp, Artificial Sequence
  ENSG00000100523_129 (sequence is synthesized)
tgaaacttttattaagttgattgagttgacatgtgttcatcaaggaataattattatatatttagaatgatttgacaaaattaataaatatcttttatacttctaaaagcacaaaagctg

SEQ ID NO: 116515 - DNA, 120 bp, Artificial Sequence
  ENSG00000100523_130 (sequence is synthesized)
gctgttaaacctaaaatgtggcagttgaaatatagtgtcaaggaagatgaggactgaaagttttccattgtatttagtgatctggaggtcactggtgacttagatggattgatggggcag

SEQ ID NO: 116516 - DNA, 120 bp, Artificial Sequence
  ENSG00000100523_131 (sequence is synthesized)
aaaccagatcggcatgggttgaagcgtaagtagaaggtgaagcaatggaagcaatgagaatagacaactcctttttttttttcttcttttatttttaagatggggtctcactctgtctcc

SEQ ID NO: 116517 - DNA, 120 bp, Artificial Sequence
  ENSG00000100523_132 (sequence is synthesized)
ctggagtacagtggtgtgatcatagcacatcataacctggaactaattcctgggctcaagcaatcctccaaactcagcctcctcagtaactaggattacagggatgcatcactatgccca

SEQ ID NO: 116518 - DNA, 120 bp, Artificial Sequence
  ENSG00000100523_133 (sequence is synthesized)
cccagctaattttttttatttttttgtagaaacggagtctccttgtgttgtccaggctggtctcaaatttttgggcacaagccatcctctcgccttggtctcccaaagctctggggttac

SEQ ID NO: 116519 - DNA, 120 bp, Artificial Sequence
  ENSG00000100523_134 (sequence is synthesized)
aggcttgaaatacagtgcctggcctgacaactgtttagagaagtttgactaaatgaaagaaaagagagaatgatacctgggaaagatgtgagagcattatcaaaaaataaatgtaaaaag

SEQ ID NO: 116520 - DNA, 120 bp, Artificial Sequence
  ENSG00000100523_135 (sequence is synthesized)
attttaatttcatcaataagtgtgctttgaatatctttttatgtttattagttatatttattttgaattaccttccataactttaacttattttgctatttgaatggttgtctttacttt

SEQ ID NO: 116521 - DNA, 120 bp, Artificial Sequence
  ENSG00000100523_136 (sequence is synthesized)
ctttaacttattttgctatttgaatggttgtctttactttttaattagtaagctctctctgtatacttaagtaattatgtgttatattttgcatatttttttccagtttgccatttcttt

SEQ ID NO: 116522 - DNA, 120 bp, Artificial Sequence
  ENSG00000100523_137 (sequence is synthesized)
tttcctgatattttcttattataatatagaagctttaaatttttatatattcagtttgtccttctttccttccatttctttctctttatggtttctggctttggtgttgtgtccagttca

SEQ ID NO: 116523 - DNA, 120 bp, Artificial Sequence
  ENSG00000100523_138 (sequence is synthesized)
ctttatatcacagctgatcaatatataccttcttacagtttttatttcctcccccacagccagtgaaattttttcataatattccttttacttcttttttttcttttaacatattgtgga

SEQ ID NO: 116524 - DNA, 120 bp, Artificial Sequence
  ENSG00000100523_139 (sequence is synthesized)
gagcaagaagagcagggtagggtttaaccccctagaaaaagggtaatgaaaacgtatgtatagaatctacaggctctgaggaaatatcttcctttctttgacttaaaaaacagaattgta

SEQ ID NO: 116525 - DNA, 120 bp, Artificial Sequence
  ENSG00000100523_140 (sequence is synthesized)
actaaagagtgttggactaggaaaacattatgaagtggcatttgaaagtgaagtcttaaaaattataactttgtggtcttcaccaatattaacacattttccaactgtttttcatcttct

SEQ ID NO: 116526 - DNA, 120 bp, Artificial Sequence
  ENSG00000100523_141 (sequence is synthesized)
gtcagaatgtactacaaatctaatacaaatgtcccatggaatacaaaagattaagacatttactaactcaccagtccacatggatttcagctatttctgacttgttattgattagcttat

SEQ ID NO: 116527 - DNA, 86 bp, Artificial Sequence
  ENSG00000100523_142 (sequence is synthesized)
tggatttcagctatttctgacttgttattgattagcttattgtaatttaaattttaaaaatgcagtccaggccgggtgcggtggtg

SEQ ID NO: 116528 - DNA, 120 bp, Artificial Sequence
  ENSG00000100526_0 (sequence is synthesized)
accggtgagtcgccggcgctgcagagggaggcggcactggtctcgacgtggggcggccagcgatgaagccgcccagttcaatacaaacaagtgagtttgactcatcagatgaagagccta

SEQ ID NO: 116529 - DNA, 120 bp, Artificial Sequence
  ENSG00000100526_1 (sequence is synthesized)
ttgaagatgaacagactccaattcatatatcatggctatctttgtcacgagtgaattgttctcagtttctcggtttatgtgctcttccaggttgtaaatttaaagatgttagaagaaatg

SEQ ID NO: 116530 - DNA, 120 bp, Artificial Sequence
  ENSG00000100526_2 (sequence is synthesized)
tccaaaaagatacagaagaactaaagagctgtggtatacaagacatatttgttttctgcaccagaggggaactgtcaaaatatagagtcccaaaccttctggatctctaccagcaatgtg

SEQ ID NO: 116531 - DNA, 120 bp, Artificial Sequence
  ENSG00000100526_3 (sequence is synthesized)
aattatcacccatcatcatccaatcgcagatggagggactcctgacatagccagctgctgtgaaataatggaagagcttacaacctgccttaaaaattaccgaaaaaccttaatacactg

SEQ ID NO: 116532 - DNA, 120 bp, Artificial Sequence
  ENSG00000100526_4 (sequence is synthesized)
ctatggaggacttgggagatcttgtcttgtagctgcttgtctcctactatacctgtctgacacaatatcaccagagcaagccatagacagcctgcgagacctaagaggatccggggcaat

SEQ ID NO: 116533 - DNA, 120 bp, Artificial Sequence
  ENSG00000100526_5 (sequence is synthesized)
acagaccatcaagcaatacaattatcttcatgagtttcgggacaaattagctgcacatctatcatcaagagattcacaatcaagatctgtatcaagataaaggaattcaaatagcatata

SEQ ID NO: 116534 - DNA, 120 bp, Artificial Sequence
  ENSG00000100526_6 (sequence is synthesized)
tatgaccatgtctgaaatgtcagttctctagcataatttgtattgaaatgaaaccaccagtgttatcaacttgaatgtaaatgtacatgtgcagatattcctaaagttttattgacaaaa

SEQ ID NO: 116535 - DNA, 120 bp, Artificial Sequence
  ENSG00000100526_7 (sequence is synthesized)
tgtctaccagtgctgtctcactggttctgcctggacatttgcagccctttataaaattagtgaacaacactgcttgcctactgtattttgtagtttcttggggctattgtaacaaagtac

SEQ ID NO: 116536 - DNA, 120 bp, Artificial Sequence
  ENSG00000100526_8 (sequence is synthesized)
cacaaaccaggtagctgaaaacaacagaaatttcttctttcccatttctagaggatgtaagtccaaaattaagatgagagcagagccatgccctctgagactgaggagagtccttccatg

SEQ ID NO: 116537 - DNA, 120 bp, Artificial Sequence
  ENSG00000100526_9 (sequence is synthesized)
cctcttcctagcttctggtggtggccatcaatccatggcaggccttggcttgcagctgaatccctccagtctgcctctgtcatcacacacttcctcggatgtctgtgtctttgcatggtg

SEQ ID NO: 116538 - DNA, 120 bp, Artificial Sequence
  ENSG00000100526_10 (sequence is synthesized)
ttgtccttgtgtaaggacactagtcatctaggatgagggcctgctctaattcgtcttaacttgaatatacctgcaaagactcaaattctgaataaggtcccactcacaggtacaggataa

SEQ ID NO: 116539 - DNA, 120 bp, Artificial Sequence
  ENSG00000100526_11 (sequence is synthesized)
aatacaaacttggtacgttcttgggtagattcttggccaaaaaaaatctatggaagatcttgttatatcaccaaaacatttaataaagacagatgaatgactataatacaaaaaatggaa

SEQ ID NO: 116540 - DNA, 120 bp, Artificial Sequence
  ENSG00000100526_12 (sequence is synthesized)
ctcggccggggcaccggtgagtcgccggcgctgcagagggaggcggcactggtctcgacgtggggcggccagcgatgaagccgcccagttcaatacaaacaagttgtaaatttaaagatg

SEQ ID NO: 116541 - DNA, 120 bp, Artificial Sequence
  ENSG00000100526_13 (sequence is synthesized)
ttcatatatcatggctatctttgacaaattagctgcacatctatcatcaagagattcacaatcaagatctgtatcaagataaaggaattcaaatagcatatatatgaccatgtctgaaat

SEQ ID NO: 116542 - DNA, 120 bp, Artificial Sequence
  ENSG00000100526_14 (sequence is synthesized)
ctaggaaccagtcagcgattagaggccgagtcttcggccacccaaaggcggagtaagaaaccagaagcggatctgattggttgctggaagacgccgcgcccacctcacagaaggacgaac

SEQ ID NO: 116543 - DNA, 120 bp, Artificial Sequence
  ENSG00000100528_0 (sequence is synthesized)
ctttctccgctggcaacggcgccgctccccgctcctcctccccagccatggcgttcacgttcgcggccttctgctacatgctggcgctgctgctcactgccgcgctcatcttcttcgcca

SEQ ID NO: 116544 - DNA, 120 bp, Artificial Sequence
  ENSG00000100528_1 (sequence is synthesized)
tttggcacattatagcatttgatgagctgaagactgattacaagaatcctatagaccagtgtaataccctgaatccccttgtactcccagagtacctcatccacgctttcttctgtgtca

SEQ ID NO: 116545 - DNA, 120 bp, Artificial Sequence
  ENSG00000100528_2 (sequence is synthesized)
tgtttctttgtgcagcagagtggcttacactgggtctcaatatgcccctcttggcatatcatatttggaggtatatgagtagaccagtgatgagtggcccaggactctatgaccctacaa

SEQ ID NO: 116546 - DNA, 120 bp, Artificial Sequence
  ENSG00000100528_3 (sequence is synthesized)
ccatcatgaatgcagatattctagcatattgtcagaaggaaggatggtgcaaattagctttttatcttctagcatttttttactacctatatggcatgatctatgttttggtgagctctt

SEQ ID NO: 116547 - DNA, 120 bp, Artificial Sequence
  ENSG00000100528_4 (sequence is synthesized)
agaacaacacacagaagaattggtccagttaagtgcatgcaaaaagccaccaaatgaagggattctatccagcaagatcctgtccaagagtagcctgtggaatctgatcagttactttaa

SEQ ID NO: 116548 - DNA, 120 bp, Artificial Sequence
  ENSG00000100528_5 (sequence is synthesized)
aaaatgactccttattttttaaatgtttccacatttttgcttgtggaaagactgttttcatatgttatactcagataaagattttaaatggtattacgtataaattaatataaaatgatt

SEQ ID NO: 116549 - DNA, 120 bp, Artificial Sequence
  ENSG00000100528_6 (sequence is synthesized)
acctctggtgttgacaggtttgaacttgcacttcttaaggaacagccataatcctctgaatgatgcattaattactgactgtcctagtacattggaagcttttgtttataggaacttgta

SEQ ID NO: 116550 - DNA, 120 bp, Artificial Sequence
  ENSG00000100528_7 (sequence is synthesized)
gggctcattttggtttcattgaaacagtatctaattataaattagctgtagatatcaggtgcttctgatgaagtgaaaatgtatatctgactagtgggaaacttcatgggtttcctcatc

SEQ ID NO: 116551 - DNA, 120 bp, Artificial Sequence
  ENSG00000100528_8 (sequence is synthesized)
tgtcatgtcgatgattatatatggatacatttacaaaaataaaaagcgggaattttcccttcgcttgaatattatccctgtatattgcatgaatgagagatttcccatatttccatcaga

SEQ ID NO: 116552 - DNA, 120 bp, Artificial Sequence
  ENSG00000100528_9 (sequence is synthesized)
gtaataaatatacttgctttaattcttaagcataagtaaacatgatataaaaatatatgctgaattacttgtgaagaatgcatttaaagctattttaaatgtgtttttatttgtaagaca

SEQ ID NO: 116553 - DNA, 120 bp, Artificial Sequence
  ENSG00000100528_10 (sequence is synthesized)
ttacttattaagaaattggttattatgcttactgttctaatctggtggtaaaggtattcttaagaatttgcaggtactacagattttcaaaactgaatgagagaaaattgtataaccatc

SEQ ID NO: 116554 - DNA, 120 bp, Artificial Sequence
  ENSG00000100528_11 (sequence is synthesized)
ctgctgttcctttagtgcaatacaataaaactctgaaattaagactcactttcagtgcattgtttgagattaaaaatagtatttcttaaacttgcttaatccatgataaagacatgttgc

SEQ ID NO: 116555 - DNA, 120 bp, Artificial Sequence
  ENSG00000100528_12 (sequence is synthesized)
tgtcatttttaaaaagtgacgtactacattatgggttttctgaaaaataccatgcctagatctaaaaaggaaaatttttaaatgccgagcacattaacctcttttgtcatttgacaagat

SEQ ID NO: 116556 - DNA, 120 bp, Artificial Sequence
  ENSG00000100528_13 (sequence is synthesized)
tcataaacgtggatggcatagcatcatcatttctcttaccaattaagaaaaattatggtggcacttaaaatattttactttgatttttcctttttggaacagtcagttttaaggtaaaat

SEQ ID NO: 116557 - DNA, 120 bp, Artificial Sequence
  ENSG00000100528_14 (sequence is synthesized)
ggcttgtaaatttgagtttttgctgctgcttgtaaggcaggtaaattatggcttgcatgttttcataagcataaataaatcttgtgctttatttgggatgaggaagttaaggcagttgaa

SEQ ID NO: 116558 - DNA, 120 bp, Artificial Sequence
  ENSG00000100528_15 (sequence is synthesized)
aataaaataagtggtttggaagtttcttgagaagaggatcaaaagaaagagaaccaatatatagaaatttcacatgatcaaggaagtttatggatgcgtttgtggaaatcttactctatg

SEQ ID NO: 116559 - DNA, 120 bp, Artificial Sequence
  ENSG00000100528_16 (sequence is synthesized)
aacttgttggattagatgctgttttattctctactaagtgaaaagtgctttatttcagtgctttcccatggttgggagagagtagctgttaactattctgggtaatgggggtgagtatgt

SEQ ID NO: 116560 - DNA, 120 bp, Artificial Sequence
  ENSG00000100528_17 (sequence is synthesized)
tgaggaagagatttagaaccagaagagtgaagagactcaaactgttccataacaaggaaagctttaaagaccttgtatttcacagtctggagaactagagggatctgactcttggtcagt

SEQ ID NO: 116561 - DNA, 120 bp, Artificial Sequence
  ENSG00000100528_18 (sequence is synthesized)
tcatgtaacaaattatttattgagtacttgctgggctctcaagattcatgctttgagcacaggcagtcattcagtttccagtccacctgattacatcagcatgcacttagttttctttct

SEQ ID NO: 116562 - DNA, 120 bp, Artificial Sequence
  ENSG00000100528_19 (sequence is synthesized)
tgggtttcctggggctgttacttgagtattcctgtcaaaatattttcgtgaaccctgcctctcttagcaaacactacttcataagtgttaacaaacatccttttaataatctattccaga

SEQ ID NO: 116563 - DNA, 120 bp, Artificial Sequence
  ENSG00000100528_20 (sequence is synthesized)
atattctccaggagtaagtttactggttgggatttgtggaagccattttctcatgtttcccaaataagatatgtagtcttcagctgattcctcaaagatgattgacagggagtttcaccc

SEQ ID NO: 116564 - DNA, 120 bp, Artificial Sequence
  ENSG00000100528_21 (sequence is synthesized)
atctttgtggtagtttgtgagttcctaggcatgtaagtgattaaaagattgagtacctgctctcctaatatctacccacttttaccatgtcagtgttttatgaattagatcacttaccaa

SEQ ID NO: 116565 - DNA, 120 bp, Artificial Sequence
  ENSG00000100528_22 (sequence is synthesized)
gagaaagcagaaacgaaatacttgaatctgacaatatccgactggctcttttcattgctctggatttattttccacatcaatctctttggggtggccctagcctattattcctgtgggtt

SEQ ID NO: 116566 - DNA, 120 bp, Artificial Sequence
  ENSG00000100528_23 (sequence is synthesized)
cagctgaggcatggttagcctgggtttataattcagtttacgttaaacattccctgtgcagcaacagctgttcatttaggtactctttttttttttctccttattacagttacttttggt

SEQ ID NO: 116567 - DNA, 120 bp, Artificial Sequence
  ENSG00000100528_24 (sequence is synthesized)
attatgtgctttatctttaaaagctttctagctctaggaaattgttttccctgtttgtgtctattttattgcatcttgtgtaacactgtggttatatctataccaacaactttttgttgc

SEQ ID NO: 116568 - DNA, 120 bp, Artificial Sequence
  ENSG00000100528_25 (sequence is synthesized)
tatggataccacagattgtcctgaattaaaaccctaacataataaatgtctgtttagccgttactttactgagtaataatactatattgtggcagtatggccctttaatactaaggaggt

SEQ ID NO: 116569 - DNA, 120 bp, Artificial Sequence
  ENSG00000100528_26 (sequence is synthesized)
atggtgtagaaattatttgaacactcatatccaaatgttattaatgatgtttgacagttttctcaatgcttaatgatattcctcactcctcattccagggtagaggagggtttggtccca

SEQ ID NO: 116570 - DNA, 120 bp, Artificial Sequence
  ENSG00000100528_27 (sequence is synthesized)
ggctatggacaaactgctaatttgtttgaagtttgaattatttttcatgggaaagggaagtgataggaaatgaccaagaccatccacttttgacttgagtatggatcgagtataagtaat

SEQ ID NO: 116571 - DNA, 120 bp, Artificial Sequence
  ENSG00000100528_28 (sequence is synthesized)
agtttcctagcctcactgattgtaccatgaactgacagacctaccagtcaaattcatgtacccagataatggtctctcacatggcaacaaagtacacagcagtttgcagtatgtgtctct

SEQ ID NO: 116572 - DNA, 120 bp, Artificial Sequence
  ENSG00000100528_29 (sequence is synthesized)
tttaaagccagttcagtgttttcaccttgacgaccactcctgcaaacagttctcatagagctcttctctgctccccaaatcaatatattttgaagctatgtcaaatatttacatagaaag

SEQ ID NO: 116573 - DNA, 120 bp, Artificial Sequence
  ENSG00000100528_30 (sequence is synthesized)
gaaataaagttgtatgtgctttgaaaccagcaaaatcctttgtacaacacctctcttctccttctatgtttatgaatagagttcgtggaatattgccatagtgcaaataatgacttccgt

SEQ ID NO: 116574 - DNA, 120 bp, Artificial Sequence
  ENSG00000100528_31 (sequence is synthesized)
gtatcacttataccctgtaggggtgagctttcaccttaggtgtggttatatcctagcagtgtatcaagcccactcaaataatggtctatatttaaaagtatgtgtctagtttacttattt

SEQ ID NO: 116575 - DNA, 120 bp, Artificial Sequence
  ENSG00000100528_32 (sequence is synthesized)
atgtcatttaacatccataaatgtacatctctcagttgtatatcatgattgtaaatcagaaattttgatggcaaaaatattctaaaacaacattcttcaggggaaagaaaaacatggata

SEQ ID NO: 116576 - DNA, 120 bp, Artificial Sequence
  ENSG00000100528_33 (sequence is synthesized)
ccttatctagcattgctcataaaagtactcatgttcatcctttttggaaactattaatcatgctagccttagatcattttaagctcctttgctcaaaccaatcattgatgtgcagtatga

SEQ ID NO: 116577 - DNA, 120 bp, Artificial Sequence
  ENSG00000100528_34 (sequence is synthesized)
ccagcagctagtaagtctgtggtgctaccagtatagcttggaagatggttctgaattaatacctcagaatgatatcaaaagtaaaagagtggttctattgctaaatatattgactagctt

SEQ ID NO: 116578 - DNA, 120 bp, Artificial Sequence
  ENSG00000100528_35 (sequence is synthesized)
tcttataacaattttactttgaaattcaaagttccaaagctaaatgtctaaaagaagtaactgcagcttgttctgctgattttggaaaatagtattaaccatgtaagatctttggggttg

SEQ ID NO: 116579 - DNA, 120 bp, Artificial Sequence
  ENSG00000100528_36 (sequence is synthesized)
gagtgaaggtcttatctgcattaattttgttaatgcacattgtagatgtggagaacatcttgacctgcataaggattgcgtctcattttattgtgtagtgctttttcgaaatatttacat

SEQ ID NO: 116580 - DNA, 120 bp, Artificial Sequence
  ENSG00000100528_37 (sequence is synthesized)
ttctttggttcccatgttcatgtattctggagaagtaaaatttcttgattactgggcagaccctaaaactactaagagaaacataacatgtagttagctgtctgctcatggtttgttcaa

SEQ ID NO: 116581 - DNA, 120 bp, Artificial Sequence
  ENSG00000100528_38 (sequence is synthesized)
atctaagctaaccttaatggtgctgtgtccgctgtccacagaaaacgcccttaagtagccctaccttactccttagagcttattttgcttttgtatttaataaaagctgtcttaaatgtt

SEQ ID NO: 116582 - DNA, 120 bp, Artificial Sequence
  ENSG00000100528_39 (sequence is synthesized)
gctcctcctccccagccatggcgttcacgttcgcggccttctgctacatgctggcgctgctgctcactgccgcgctcatcttcttcgccatttggcacgataaagaggaatttggataaa

SEQ ID NO: 116583 - DNA, 120 bp, Artificial Sequence
  ENSG00000100528_40 (sequence is synthesized)
ggcgccgctccccgctcctcctccccagccatggcgttcacgttcgcggccttctgctacatgctggcgctgctgctcactgccgcgctcatcttcttcgccatttggcaccttgtactc

SEQ ID NO: 116584 - DNA, 120 bp, Artificial Sequence
  ENSG00000100528_41 (sequence is synthesized)
ttttactacctatatgggtaagttgaaaaggtaaaatgaaatatgctttcactttgctgctttaaaagtttgcaggcattatggttttcacacctcaaaatccatttgaagaataactta

SEQ ID NO: 116585 - DNA, 120 bp, Artificial Sequence
  ENSG00000100532_0 (sequence is synthesized)
gggctgggctgggctccgcggctggagccgggctctacccagagcaagaccctgatggctgcggtgtttctggtaacgctttatgaatactcgccgcttttctacatcgcggtggtcttt

SEQ ID NO: 116586 - DNA, 120 bp, Artificial Sequence
  ENSG00000100532_1 (sequence is synthesized)
acctgcttcatcgtgaccaccggcctggtattgggatggtttggttgggatgttccagtaattctgagaaattcagaagagacccagttcagcacaagagttttcaaaaagcaaatgaga

SEQ ID NO: 116587 - DNA, 120 bp, Artificial Sequence
  ENSG00000100532_2 (sequence is synthesized)
caagtcaagaatccttttggcttagagatcactaatccatcttcagcttcaattacaactggcataaccttgacaacagattgccttgaagatagcctccttacatgctactgggggtgc

SEQ ID NO: 116588 - DNA, 120 bp, Artificial Sequence
  ENSG00000100532_3 (sequence is synthesized)
agtgttcaaaaattatatgaagctctgcagaagcatgtttattgcttcagaataagcactccccaagcattagaagatgctctgtatagtgaatatctctatcaggaacagtattttatt

SEQ ID NO: 116589 - DNA, 120 bp, Artificial Sequence
  ENSG00000100532_4 (sequence is synthesized)
aaaaaggatagcaaagaagaaatatattgccagttaccaagagatactaaaattgaagactttggtacagtacccagatctcgctatccattggtagcgctattgaccttagctgatgag

SEQ ID NO: 116590 - DNA, 120 bp, Artificial Sequence
  ENSG00000100532_5 (sequence is synthesized)
gatgaccgggaaatttatgatattatttccatggtgtcagtgattcatattcctgataggacttataaactatcctgcagaatattgtatcaatatttactcttggctcaaggtcaattt

SEQ ID NO: 116591 - DNA, 120 bp, Artificial Sequence
  ENSG00000100532_6 (sequence is synthesized)
catgatcttaagcaacttttcatgtctgcaaataataatttcactccctccaacaattcctcttcagaagaaaaaaacacagacagaagtttgttggaaaaggtgggactctctgaaagt

SEQ ID NO: 116592 - DNA, 120 bp, Artificial Sequence
  ENSG00000100532_7 (sequence is synthesized)
gaagttgagccatcggaagagaacagcaaggactgtgttgtttgccagaatgggactgtgaactgggtactcttaccatgcagacacacatgcctgtgtgatggctgtgtgaagtatttt

SEQ ID NO: 116593 - DNA, 120 bp, Artificial Sequence
  ENSG00000100532_8 (sequence is synthesized)
gcactttgcagtcaaaaagagcaagataaagacaaaccgaagactctttgaagacatcgtaacactgaaaagtacactttctactaaagatgcagaaattgatgatcttggaattcatca

SEQ ID NO: 116594 - DNA, 120 bp, Artificial Sequence
  ENSG00000100532_9 (sequence is synthesized)
taacatggaatctacagtactgaccatcaatgaaaattatattttaacttcatatttgtatggtacttggatgataaaaattaattattcctttctgcttagtgaatgaatactggaatc

SEQ ID NO: 116595 - DNA, 120 bp, Artificial Sequence
  ENSG00000100532_10 (sequence is synthesized)
catctgtgttgatacataaaaattcattcaactcttgaaaagaatctaagagtttggccttttattagctagatttcctctcatgttaattagaaaaatcattctgaaaggcaatccatt

SEQ ID NO: 116596 - DNA, 120 bp, Artificial Sequence
  ENSG00000100532_11 (sequence is synthesized)
gaaaatttgaggaggttaaattcttaagatcactaaatgttttacctttgatgtaatcggagtgcaattaagaaaaaacttaattctacttaaagtaattgtgtgttccctagtttatac

SEQ ID NO: 116597 - DNA, 120 bp, Artificial Sequence
  ENSG00000100532_12 (sequence is synthesized)
aaaggagttggaatgagcttctttagatcttttcctgaaataacagcttttataaatatccatctgtttggtttctaatgtcccttattatagttacgtaaatacaggtcatagttttaa

SEQ ID NO: 116598 - DNA, 120 bp, Artificial Sequence
  ENSG00000100532_13 (sequence is synthesized)
atataggttcttaaatcataaatacaagatataattcttgactgttctccgtgtattataaaatgatactcatctataggaggcagatatataaaattcggataataagattttttggat

SEQ ID NO: 116599 - DNA, 120 bp, Artificial Sequence
  ENSG00000100532_14 (sequence is synthesized)
aattaaatttattaaattgatagtcaagtgtgattagattagcagaatgtgatctccagggaagatctgtgagacctttaatgccttaccttagatttctgcctgcacagcaaatccatc

SEQ ID NO: 116600 - DNA, 120 bp, Artificial Sequence
  ENSG00000100532_15 (sequence is synthesized)
cagaactgaggtgggaggtggaggttatagagctagaaaaatcactaaaagaaacaaataactatttttttctagtgtatttttattccaaataaaccctgtattcttctgaatagtaaa

SEQ ID NO: 116601 - DNA, 71 bp, Artificial Sequence
  ENSG00000100532_16 (sequence is synthesized)
gcataaccttgacaacagattgccttgaagatagcctccttacatgctactgggggtgcagtgttcaaaaa

SEQ ID NO: 116602 - DNA, 120 bp, Artificial Sequence
  ENSG00000100532_17 (sequence is synthesized)
gtatcctttcgtctgatatacccattagcactgaaaattagacttcttatggataaagtgttgctaacttattgatcattcttggtatactagaagcatgtttattgcttcagaataagc

SEQ ID NO: 116603 - DNA, 120 bp, Artificial Sequence
  ENSG00000100532_18 (sequence is synthesized)
actcctcaagcattagaagatgctctgtggagtgaatatctctatcaggaacagtatttgtatcctttcatctgatatacccattagcactgaaaattagacttcttatggataaagtgt

SEQ ID NO: 116604 - DNA, 120 bp, Artificial Sequence
  ENSG00000100532_19 (sequence is synthesized)
tgctaacttattgatcatttttggtatactagaagcatgtttattgcttcagaataagcactccccaagcattagaagatgctctgtggagtgaatatctctatcaggaacagtatttgt

SEQ ID NO: 116605 - DNA, 120 bp, Artificial Sequence
  ENSG00000100532_20 (sequence is synthesized)
actgaaaattagacttcttacggataaagtgttgctaacttattgatcatttttggtatactagaagcatgtttattgcttcagaataagcactcctcaagcattagaagatgctctgtg

SEQ ID NO: 116606 - DNA, 120 bp, Artificial Sequence
  ENSG00000100532_21 (sequence is synthesized)
atttccatggtgtcagtgattcatattcctgataggacttataaactatcctgcagaatattgtatcaatatttactcttggctcaaggtcaatttcatgatcttaagaagaaaaaaaca

SEQ ID NO: 116607 - DNA, 120 bp, Artificial Sequence
  ENSG00000100532_22 (sequence is synthesized)
acacaccccagtctttagagatagttgttgttttctgatttttcctccctgttttttattttctcttttttcttacacaaaagatagcacatactctatgctacatatgctgttttgtac

SEQ ID NO: 116608 - DNA, 120 bp, Artificial Sequence
  ENSG00000100532_23 (sequence is synthesized)
tttgctctttttcatttcagaaaatctggaaatcactgcacaccagtttgcagagattgtcttcactttttttttttttaatagctgcatggcactgcactgtgtgtatgctgtgcatat

SEQ ID NO: 116609 - DNA, 120 bp, Artificial Sequence
  ENSG00000100532_24 (sequence is synthesized)
tccatagttattctgccagtctcctgtgcttggacattcaggtggtttccagtattctgcagtaacaaataatcttatgctgaataattcatatatacatatcttaatattgttggaatt

SEQ ID NO: 116610 - DNA, 120 bp, Artificial Sequence
  ENSG00000100532_25 (sequence is synthesized)
gtatggttgaagtgtaaatgcatgttgttttgttagatattgccattggaattgtacctttttggaaaaaaacatttccaccaacaatatatgagagtgtatttccacagagtgtattga

SEQ ID NO: 116611 - DNA, 120 bp, Artificial Sequence
  ENSG00000100532_26 (sequence is synthesized)
caagcttctggatttttgttactttgatgagtgaataatggtgcagtattaattttaattaaacatcttttaatatggtcaaggctcatgtttatatctttttatgaattgtccgttcat

SEQ ID NO: 116612 - DNA, 120 bp, Artificial Sequence
  ENSG00000100532_27 (sequence is synthesized)
gtcttttgcccatttttctataggattttggccatttttcttcagtttttaaaagttcttcataaattaggaatattaacctttaatttgtgacacaccttgtgaatatttattctagtt

SEQ ID NO: 116613 - DNA, 120 bp, Artificial Sequence
  ENSG00000100532_28 (sequence is synthesized)
tgtcatgtgttttgactttgtttatggtgctttttatcatgtatatttttaattcttatatagtcaagtgtatttcctctgggttttgagttgtagttaatgtctttccttacactgaga

SEQ ID NO: 116614 - DNA, 120 bp, Artificial Sequence
  ENSG00000100532_29 (sequence is synthesized)
ctaaaatggaatttgttgattttcttctagtacttgtacagttttattttttacatttagatctcttatgtttctggagttgattcttatgtatggtatgaggaatgcatctaattatat

SEQ ID NO: 116615 - DNA, 120 bp, Artificial Sequence
  ENSG00000100532_30 (sequence is synthesized)
atttttccaatagctatccaattgtcccaatactgtttattaaaaaaactctttggtgatttgacatcacacctttattatatttttgtacataattacgtctgtttctggactgtttat

SEQ ID NO: 116616 - DNA, 120 bp, Artificial Sequence
  ENSG00000100532_31 (sequence is synthesized)
ccagtaccatactgttttaattttaaaggctttgtagtctgttttattatctgatggggctagtcgccctcataactctctcttttcagtatttttctagctgttcttttgtgttcattt

SEQ ID NO: 116617 - DNA, 120 bp, Artificial Sequence
  ENSG00000100532_32 (sequence is synthesized)
ttctatatgagaattttagagtcaatgcatgtagctctctaagcaaaagtgttttctctggtccctttacatccaagtttcttaaaagactgtttaatactgattttaattcctctccat

SEQ ID NO: 116618 - DNA, 120 bp, Artificial Sequence
  ENSG00000100532_33 (sequence is synthesized)
ttccttctttagtcctctcaaagattcctttgtccattgtgatagcattaaatttgtaaatttgagtacaattaaaataactctgccaaaaatatgtcagtaactgattcctctgcagtg

SEQ ID NO: 116619 - DNA, 120 bp, Artificial Sequence
  ENSG00000100532_34 (sequence is synthesized)
attatgatttaatcagattgacgtaaattttctaatttatcagccttttatttttgagaagcatttttctttttttttggcagaagacagtgtctagaagcagttgaaaagcatttttca

SEQ ID NO: 116620 - DNA, 120 bp, Artificial Sequence
  ENSG00000100532_35 (sequence is synthesized)
agcagggggcaccggagccggagggccgcgggccggaggacgtcggggattcggtgtccccgggtgcctagaactccgactttctctgggaggaaaacaaggtggacgctgcacctgcgt

SEQ ID NO: 116621 - DNA, 120 bp, Artificial Sequence
  ENSG00000100554_0 (sequence is synthesized)
acaaccagctgactcccgtagaggaagacactgtggaggccagttctggagctattgcagcctcggttgcccggccggggacccgagccgaaaagttatcgtcagaatgtcgggcaaaga

SEQ ID NO: 116622 - DNA, 120 bp, Artificial Sequence
  ENSG00000100554_1 (sequence is synthesized)
ccgaattgaaatctttccctcgcgaatggcacagaccatcatgaaggctcgtttaaagggagcacagacaggtcgaaacctcctgaagaaaaaatctgatgccttaactcttcgatttcg

SEQ ID NO: 116623 - DNA, 120 bp, Artificial Sequence
  ENSG00000100554_2 (sequence is synthesized)
acagatcctaaagaagataatagagactaaaatgttgatgggcgaagtgatgagagaagctgccttttcactagctgaagccaagttcacagcaggtgacttcagcactacagttatcca

SEQ ID NO: 116624 - DNA, 120 bp, Artificial Sequence
  ENSG00000100554_3 (sequence is synthesized)
aaatgtcaataaagcgcaagtgaagattcgagcgaagaaagataatgtagcaggtgttactttgccagtatttgaacattaccatgaaggaactgacagttatgaactgactggtttagc

SEQ ID NO: 116625 - DNA, 120 bp, Artificial Sequence
  ENSG00000100554_4 (sequence is synthesized)
cagaggtggggaacagttggctaaattaaagaggaattatgccaaagcagtggaactactggtggaactagcttctctgcagacttcttttgttactttggatgaagctattaagataac

SEQ ID NO: 116626 - DNA, 120 bp, Artificial Sequence
  ENSG00000100554_5 (sequence is synthesized)
caacaggcgtgtaaatgccattgaacatgtcatcattccccggattgaacgtactcttgcttatatcatcacagagctggatgagagagagcgagaagagttctataggttaaagaaaat

SEQ ID NO: 116627 - DNA, 120 bp, Artificial Sequence
  ENSG00000100554_6 (sequence is synthesized)
ggacttggagcaaaggagagcagctggagaggtgttggagcctgctaatcttctggctgaagagaaggacgaggatcttctatttgaataatctttcctgttctggttctttgagaaacc

SEQ ID NO: 116628 - DNA, 120 bp, Artificial Sequence
  ENSG00000100554_7 (sequence is synthesized)
ctaacactggcttcattttaattcacagtgtgtaggtttgatttgtgtggctatttattttttggcctaagaatttcactggttgtaaaatttacctagatgtctatttatgggattact

SEQ ID NO: 116629 - DNA, 120 bp, Artificial Sequence
  ENSG00000100554_8 (sequence is synthesized)
tttgcagaatcataatttagcaaccatttatcatggatgaaagagatctgtaaaacctgcccaggaacttacagaatttactttgcagaagcgttatcatactccatttacatctgtgtt

SEQ ID NO: 116630 - DNA, 120 bp, Artificial Sequence
  ENSG00000100554_9 (sequence is synthesized)
acacgtgatctgcttaccaagcatattaggaaatacctcttaggaagcattagcggtctcaggccaattactgtggagcagctttcattcctacccacttgcaaaccttggcgctgttgt

SEQ ID NO: 116631 - DNA, 120 bp, Artificial Sequence
  ENSG00000100554_10 (sequence is synthesized)
ctgagattgctgcagccattcttgttaccatggtacttctcaaactttgtgaaaacctgcacttttccttgcatgacaggttcctgtcttgtctgtcatgggagccattctgccaattta

SEQ ID NO: 116632 - DNA, 120 bp, Artificial Sequence
  ENSG00000100554_11 (sequence is synthesized)
aatgcgactgtggtataaacagtaaaatgatttaaaagtaagtcattccgtttttattaatttactgttaagtcatgttctcatgctcagatcagtagtgtcagccagagctttctctgc

SEQ ID NO: 116633 - DNA, 120 bp, Artificial Sequence
  ENSG00000100554_12 (sequence is synthesized)
agacatgtaggaagtgggtagctatttttcccactccatgtattagagttttacaaaaaggcttacttttgagacaactgttgcattttggggtactaataaatgattgccgatgagtta

SEQ ID NO: 116634 - DNA, 120 bp, Artificial Sequence
  ENSG00000100554_13 (sequence is synthesized)
tgataaaaacttgctttcatatatgaagatgaagcatttgagtggccacatcaggtgtctgaggtttttagtactgtttgatttggcatgagccatccatggggactcagtctttctcgc

SEQ ID NO: 116635 - DNA, 120 bp, Artificial Sequence
  ENSG00000100554_14 (sequence is synthesized)
atccatttccaggcatttttgacatgattagccatggaataatgtttagttctgaaattgtgacactgtctttattaatactgtattttaatcaagtgacatcacagtccaggtagtttt

SEQ ID NO: 116636 - DNA, 88 bp, Artificial Sequence
  ENSG00000100554_15 (sequence is synthesized)
aaacagagtctcactcattctgtagcccaggctagagtgcagtggcagcaacatcagttcactgcaacgtccgcctcctcaattcaag

SEQ ID NO: 116637 - DNA, 120 bp, Artificial Sequence
  ENSG00000100554_16 (sequence is synthesized)
tttgcagatgaggaaattgagactttgacaagtcaaagagcacagctggaatgcaagtcaaatatgtacaaggatatccacaacactgttcgcagctacaagctgaggtacaaggtgcct

SEQ ID NO: 116638 - DNA, 120 bp, Artificial Sequence
  ENSG00000100554_17 (sequence is synthesized)
caaaagcttgagagaagcagaaatagaatagaatcctgacctgtgaaaacaatgactctgcaataaggtatgcaatttccaaaccacagctactagaaaaggtacactttaccttaccac

SEQ ID NO: 116639 - DNA, 120 bp, Artificial Sequence
  ENSG00000100554_18 (sequence is synthesized)
gttgttgttattttaattaatttttttctttcaaaagtaaaaataccattataagtttaacaagtgtcaaatatcaaatagttcatttaataaaatccaaactctttaatcttgcctgca

SEQ ID NO: 116640 - DNA, 120 bp, Artificial Sequence
  ENSG00000100554_19 (sequence is synthesized)
tgtttatacagcaagatcttaatgtcctagtttcttccttctacttagaacaagttgattggctttacatgttaaaatcattaacaaccaggtttctaattactcaggataacttgactt

SEQ ID NO: 116641 - DNA, 120 bp, Artificial Sequence
  ENSG00000100554_20 (sequence is synthesized)
tgcaagactccatctcaaaaaaaaaaaagcactataatatctaagaaatttggtttgtgtttattagtaaatatgctagatcatcaaagatttaatctagaccttaaaatttgaggtttc

SEQ ID NO: 116642 - DNA, 120 bp, Artificial Sequence
  ENSG00000100554_21 (sequence is synthesized)
ctagaccttaaaatttgaggtttccgtaggctttattattatatgatacctaatgtttaactgatattttaagccatgtaaacaaagaatacttctgaatgtttcactaaatttcttgag

SEQ ID NO: 116643 - DNA, 120 bp, Artificial Sequence
  ENSG00000100554_22 (sequence is synthesized)
tttttttttttaacttaacctcactaggcctcaatattcagaatgtgaaacaggggagttggattggtgattgctgatatttttttccagctgtaaaataaaggcaatgggtccatttaa

SEQ ID NO: 116644 - DNA, 120 bp, Artificial Sequence
  ENSG00000100554_23 (sequence is synthesized)
agagtctgggtcctccgagaacaaggacgaatgtagatcatggaaggacctgaaaagtactgtttctcgctatcttagctttagctaagtaaccttcaaggcgcgagaaagacataggac

SEQ ID NO: 116645 - DNA, 120 bp, Artificial Sequence
  ENSG00000100554_24 (sequence is synthesized)
tccgattccttgcctctgaagaatgaatcctctttcaaagtttcagctaaccatgagatggcgctgtgaccaaagacgaaagcggaagtgaaaatgggtgtccctgctgcctcttagcaa

SEQ ID NO: 116646 - DNA, 120 bp, Artificial Sequence
  ENSG00000100554_25 (sequence is synthesized)
gtagcagcctgctgaactgtaaattctaccatctccactttgcagatgaggaaattgagactttgacaagtcaaagagcacagctggaatgcaagtcaagtatgatttgatttaatttga

SEQ ID NO: 116647 - DNA, 120 bp, Artificial Sequence
  ENSG00000100554_26 (sequence is synthesized)
ttccacatgtaggtaaattcaatgtaaagcaacaagccaaaggaccctagatttctcctgtggcttcttaaatacctggaatgtattggccttgttaaaatacttacaaaagtgcagatg

SEQ ID NO: 116648 - DNA, 120 bp, Artificial Sequence
  ENSG00000100554_27 (sequence is synthesized)
actttatagtttagcatttgttaaaaagaaatcaagaaaacaatggacacataatttgttgtgtggagtcagttatctgaaacataggagaagaatatagatcaggaataggaatggaaa

SEQ ID NO: 116649 - DNA, 120 bp, Artificial Sequence
  ENSG00000100554_28 (sequence is synthesized)
gctgaactgtggtgacaggtgtatatatgtaagaaactttttgtttgttggtgtatgatttatgacctttgggagatgtacagcagaaaaaaaggagaaatgaagactggagaaacaaaa

SEQ ID NO: 116650 - DNA, 71 bp, Artificial Sequence
  ENSG00000100554_29 (sequence is synthesized)
ctgaggctggaggatttcatgagaccaggagttagaggctgcagcaagctatgatcattaaggagtcgggc

SEQ ID NO: 116651 - DNA, 120 bp, Artificial Sequence
  ENSG00000100557_0 (sequence is synthesized)
tagaaggatgccatgaaggaaatgactgctttgtaaagcgagggtaaacttctgaaatgctttgattaaaataagctatattaaagaccccaaaaccacttccctcgcagctttcctctg

SEQ ID NO: 116652 - DNA, 120 bp, Artificial Sequence
  ENSG00000100557_1 (sequence is synthesized)
aatgtctttcacatgaaatgggcctgagtcactctaagactcaccttagggtgatcaaagtagcacctttgcaaaacaaagaggtagagactccctcggctggccgtgtggactttgcat

SEQ ID NO: 116653 - DNA, 120 bp, Artificial Sequence
  ENSG00000100557_2 (sequence is synthesized)
tcaatcagaatttggaagaaaagacttcatattcactggcaagactgcaggaccagaataaagccttggaagggcagctgccacctttacaagaaaactggtatggaagatattctacag

SEQ ID NO: 116654 - DNA, 120 bp, Artificial Sequence
  ENSG00000100557_3 (sequence is synthesized)
catccagagacatgtattttgacatcccactggaacacagagaaacaagtattattaaaaggcatccaccccaaagacttcaaaagcttgaacccattgacttgccacgagtaattactt

SEQ ID NO: 116655 - DNA, 120 bp, Artificial Sequence
  ENSG00000100557_4 (sequence is synthesized)
caggaagactcctgagccagcgagaagccaggacaatgcacaaagcaaagcaggtactagaaaagaaaatgcaaactccaatgtatacttctgagaacagacaatatttgcataagatgc

SEQ ID NO: 116656 - DNA, 120 bp, Artificial Sequence
  ENSG00000100557_5 (sequence is synthesized)
aagtgctggaaatgatccgtaaaagacaagaggcccaaatggagttaaagaaaagtcttcatggagaggcaagaattaataagcaaagtccaagggaccataaagccaagaaaacccttc

SEQ ID NO: 116657 - DNA, 120 bp, Artificial Sequence
  ENSG00000100557_6 (sequence is synthesized)
aaagcaccccaaggaatgatgaccatgaccttctaaccatgttgcctgatgaaatcttgaacagaggtcccggaaattcaaagaatacagaatttttgaaacatcaagcagtgaataact

SEQ ID NO: 116658 - DNA, 120 bp, Artificial Sequence
  ENSG00000100557_7 (sequence is synthesized)
actgtccctggaaaattggcaaaatggaaacatggcttcatgaacaagaggcccagggacagcttctctgggacagttccagctctgactcagatgagcaggggaaagatgagaagaagc

SEQ ID NO: 116659 - DNA, 120 bp, Artificial Sequence
  ENSG00000100557_8 (sequence is synthesized)
cacgagcactggtgaggaccaggacagagagaatcccacttttcgatgagttttttgatcaagaataagaatactattcattaacctagaaactgagtgctttgaaagcttgttttactc

SEQ ID NO: 116660 - DNA, 120 bp, Artificial Sequence
  ENSG00000100557_9 (sequence is synthesized)
tcaaaatcttccaaactgatatatgaattactttgaggacagcaaatcactttggtaaaaagaaatgatatctttagagtcttatgattaacaagtccgtcacatgtgctgttaactatt

SEQ ID NO: 116661 - DNA, 120 bp, Artificial Sequence
  ENSG00000100557_10 (sequence is synthesized)
gctgcataactaaatgcctcaaaacacaggggctaaccaagagccattttattgtctcactttcctgtgggttgctgagttcagctaggtggttcttctgctgttcccttttgaaatctt

SEQ ID NO: 116662 - DNA, 120 bp, Artificial Sequence
  ENSG00000100557_11 (sequence is synthesized)
tcatgtcattgaaattggactacatttggactactaagactggagtcatccagaggccccattaggacactgacacagggggaccttgccccctatccatgtagcctcagagcatctgca

SEQ ID NO: 116663 - DNA, 120 bp, Artificial Sequence
  ENSG00000100557_12 (sequence is synthesized)
aacagaagttgccagtcttcttaaaagctagtcatagaactgactttgcatcacttccaccatgttctgttggttaaagtcatagaccagcttggagttaatgcagaagaggactacaca

SEQ ID NO: 116664 - DNA, 120 bp, Artificial Sequence
  ENSG00000100557_13 (sequence is synthesized)
agggcatgagtgccaaagtgtggtcctttggggttcatctttgacatttgccacctcaccatgtttttaaaaagaaaattagattacataaaacaaatagatgggctggatgtggtggct

SEQ ID NO: 116665 - DNA, 120 bp, Artificial Sequence
  ENSG00000100557_14 (sequence is synthesized)
tagccagacatggtggcattcgtctgtaatcccagctacttgatgcgaaggctgaggcaaaagaattgcttgaacccaggagatagaggttgcaatgagccaagatcactccactgcact

SEQ ID NO: 116666 - DNA, 120 bp, Artificial Sequence
  ENSG00000100557_15 (sequence is synthesized)
ggcgacagaatgagactctgtctcaaaattaaaaaacaaaaaaccaaaaacaaatagatgaaaaagtagactggagacaaataaaagtgagtttctaaaggaaattcacagtaatgctgc

SEQ ID NO: 116667 - DNA, 120 bp, Artificial Sequence
  ENSG00000100557_16 (sequence is synthesized)
ctgcattaaacactaagctcacttaggtcactttctagtgagctaaccgtaacagagagcctacaggatacacgtgagataatgtcacgtgtagaagatcgttgtgaattaaagttcaaa

SEQ ID NO: 116668 - DNA, 120 bp, Artificial Sequence
  ENSG00000100557_17 (sequence is synthesized)
attaagacttcttagattatgatgtagattttagagctccttaaaacataaagcgaatcttataaatgttcaattctaaagttattccacttggaaaaattagcttttgggacaattttt

SEQ ID NO: 116669 - DNA, 120 bp, Artificial Sequence
  ENSG00000100557_18 (sequence is synthesized)
aagaacttttgtgtaaaatgcagctccatgtttagcataatctaaaaataatttcaagcaatccagaatcttccaagaatttattaaagctttaaaacaaagcaaaacaaaaagaccctt

SEQ ID NO: 116670 - DNA, 120 bp, Artificial Sequence
  ENSG00000100557_19 (sequence is synthesized)
ttgtgccttatatgggaagactccaaaaacagaaaaaaatagaggaaaacaccacttcaatttgacattcaatgcattcacatcagaaactaagaagataacaagcctgagatgtcaggt

SEQ ID NO: 116671 - DNA, 120 bp, Artificial Sequence
  ENSG00000100557_20 (sequence is synthesized)
gataaaaattcatgtttcttccaaggacagaaggctattagattgtcccaggccatatctattcccagttctttgtgagtagtcttcttactttttctgtggtaggtaagaagcatattt

SEQ ID NO: 116672 - DNA, 120 bp, Artificial Sequence
  ENSG00000100557_21 (sequence is synthesized)
ccaccaaaagaaagcatgcattgtttgactagccagctttctagaaaaaatgagatccttgagaggataaacaaatccaacctattcatggtgtcctcacttattgtggtcaatttggaa

SEQ ID NO: 116673 - DNA, 120 bp, Artificial Sequence
  ENSG00000100557_22 (sequence is synthesized)
ggcttaaaacacaaaaaatgggatggataactttgaacactaaaattagtggagccaaaggcacgtcttcaccattctgttatgtgacttaaaattcaatttcacgaaacccacttccac

SEQ ID NO: 116674 - DNA, 120 bp, Artificial Sequence
  ENSG00000100557_23 (sequence is synthesized)
aagcttaatgaactgtgagctacatgagggcataaaccatgtcttctttgtatggtatttctgcttcctagcaggacagctggcaaagagtttatcattaaatgtttgctgaattaatga

SEQ ID NO: 116675 - DNA, 74 bp, Artificial Sequence
  ENSG00000100557_24 (sequence is synthesized)
aggaatgatgaccatgaccttctaaccatgttgcctgatgaaatcttgaacagaggtcccgacagagtttcgct

SEQ ID NO: 116676 - DNA, 120 bp, Artificial Sequence
  ENSG00000100557_25 (sequence is synthesized)
atggcatgaggaatgctgactgctctaaacgttgaacttctagaagcttgaacccattgacttgccacgagtaattacttcaggaagactcctgagccagcgagaagccaggacaatgca

SEQ ID NO: 116677 - DNA, 120 bp, Artificial Sequence
  ENSG00000100557_26 (sequence is synthesized)
cagaggtcccgggcaaacccacagttgaaatttccaatattgttcacacacacagatcgctgtgccgtgggccaaatccccacatcagcaggactgacccaccgctgagagagctgcaga

SEQ ID NO: 116678 - DNA, 120 bp, Artificial Sequence
  ENSG00000100557_27 (sequence is synthesized)
cttggagaaacaagacgctcgatcaataagttaattaaataagaaaaggctgaataattgaaaatctacttggggcatctatttaacctatacttccaagtctcagaatgaaatatcctt

SEQ ID NO: 116679 - DNA, 120 bp, Artificial Sequence
  ENSG00000100557_28 (sequence is synthesized)
tgtagtcacataaacaatttttaccatttaaaccgtaccttaaaaaatatacacaaaacaaccaagaaaaaaacctcacctaaagttagacatttaagagtcatcacttgagagcacgcc

SEQ ID NO: 116680 - DNA, 120 bp, Artificial Sequence
  ENSG00000100557_29 (sequence is synthesized)
aaaacagtcatatgcttcagggatgtgtcactttgaatccattattttaatgtcagcttcaaaattctggtcttatctggccacctgcactctttctataaagaatcttgttttatttta

SEQ ID NO: 116681 - DNA, 120 bp, Artificial Sequence
  ENSG00000100558_0 (sequence is synthesized)
gcggactgcgcgggctgcgcgggtgccgaggagcgcgaggcgcggggaaggcgcacctggggtggccctggcgtgcgggcggcgacatggaggacggcgtgctcaaggagggcttcctgg

SEQ ID NO: 116682 - DNA, 120 bp, Artificial Sequence
  ENSG00000100558_1 (sequence is synthesized)
gctcaaggagggcttcctggtcaagaggggccacattgtccacaactggaaggcgcgatggttcatccttcggcagaacacgctggtgtactacaagcttgaggggggtcggagagtgac

SEQ ID NO: 116683 - DNA, 120 bp, Artificial Sequence
  ENSG00000100558_2 (sequence is synthesized)
ccctcccaagggccggatcctcctggatggctgcaccatcacctgcccctgcctggagtatgaaaaccgaccgctcctcattaagctgaagactcaaacatccacggagtacttcctgga

SEQ ID NO: 116684 - DNA, 120 bp, Artificial Sequence
  ENSG00000100558_3 (sequence is synthesized)
ggcctgttctcgagaggagcgggatgcctgggcctttgagatcaccggggctattcatgcagggcagccggggaaggtccagcagctgcacagcctgagaaactccttcaagctgccccc

SEQ ID NO: 116685 - DNA, 120 bp, Artificial Sequence
  ENSG00000100558_4 (sequence is synthesized)
gcacatcagcctgcatcgcattgtggacaagatgcacgatagcaacaccggaatccgttcaagccccaacatggagcagggaagcacctataaaaagaccttcctcggctcctccctggt

SEQ ID NO: 116686 - DNA, 120 bp, Artificial Sequence
  ENSG00000100558_5 (sequence is synthesized)
ggactggctcatctccaacagcttcacggccagccgtctggaggcggtgaccctggcctccatgctcatggaggagaacttcctcaggcctgtgggtgtccgaagcatgggagccattcg

SEQ ID NO: 116687 - DNA, 120 bp, Artificial Sequence
  ENSG00000100558_6 (sequence is synthesized)
aagataagccccaaggaagaaattagcctgagcactgtggagttaagtggcacggtggtgaaacaaggctacctggccaagcagggacacaagaggaaaaactggaaggtgcgtcgcttt

SEQ ID NO: 116688 - DNA, 120 bp, Artificial Sequence
  ENSG00000100558_7 (sequence is synthesized)
gttctaaggaaggatccagctttcctgcattactatgacccttccaaagaagagaacaggccagtgggtgggttttctcttcgtggttcactcgtgtctgctctggaagataatggcgtt

SEQ ID NO: 116689 - DNA, 120 bp, Artificial Sequence
  ENSG00000100558_8 (sequence is synthesized)
cccactggggttaaagggaatgtccagggaaacctcttcaaagtgattactaaggatgacacacactattacattcaggccagcagcaaggctgagcgagccgagtggattgaagctatc

SEQ ID NO: 116690 - DNA, 120 bp, Artificial Sequence
  ENSG00000100558_9 (sequence is synthesized)
aaaaagctaacatgacaaggacctgagggaaccaggattcctccctcctaccagatgacacagacaagagttcctggagaatgggagtgttaagacttttgacttctttgtaagttttgt

SEQ ID NO: 116691 - DNA, 120 bp, Artificial Sequence
  ENSG00000100558_10 (sequence is synthesized)
actgctttggagagtgaatgctgccaagagttcctcagattacaaacagcagtggtgccatttccttccccatcttcatgttacaaacctggaaaggctagaacagccattaggcgtcag

SEQ ID NO: 116692 - DNA, 120 bp, Artificial Sequence
  ENSG00000100558_11 (sequence is synthesized)
catcttgacttttccccagcatcacaaacagccatttcctcgggcaccaaagtaggttccctttgttggaacaattacactggccatgccataatgttgaataaaactctcttcttatga

SEQ ID NO: 116693 - DNA, 120 bp, Artificial Sequence
  ENSG00000100558_12 (sequence is synthesized)
gatttaaaaccagagaaatggccaaataggaactagaagggccacattgtccacaactggaaggcgcgatggttcatccttcggcagaacacgctggtgtactacaagcttgaggggggt

SEQ ID NO: 116694 - DNA, 120 bp, Artificial Sequence
  ENSG00000100564_0 (sequence is synthesized)
gagacggccagggccggcgagcgcagtgcagcgccgcgcggtgcgggcggccgagtgggggcgtcatggaggatgagcggagcttttcggatatctgcggcggccgcctggcgctgcagc

SEQ ID NO: 116695 - DNA, 120 bp, Artificial Sequence
  ENSG00000100564_1 (sequence is synthesized)
gccgctactactccccgtcctgccgggaattctgcctcagctgccctcggctctcgctgcgttcgctcaccgctgtcacctgcacggtgtggctggcggcctacggactcttcaccctct

SEQ ID NO: 116696 - DNA, 120 bp, Artificial Sequence
  ENSG00000100564_2 (sequence is synthesized)
gcgagaacagcatgatcctctctgctgccatcttcatcaccctcttaggtctgcttggttatctccattttgtgaagattgatcaggagactctgttaatcattgattcccttggcattc

SEQ ID NO: 116697 - DNA, 120 bp, Artificial Sequence
  ENSG00000100564_3 (sequence is synthesized)
agatgacttcatcttatgcttcaggcaaagaaagcactaccttcatagaaatgggcaaggtcaaggatattgtcatcaatgaggccatttacatgcagaaggtgatttactacctctgca

SEQ ID NO: 116698 - DNA, 120 bp, Artificial Sequence
  ENSG00000100564_4 (sequence is synthesized)
tcttattgaaagatccagtggaaccacatgggatatcccaagtagtacccgtcttccagagtgccaagccccggctggactgcttgattgaagtatacaggagctgccaggagatcctgg

SEQ ID NO: 116699 - DNA, 120 bp, Artificial Sequence
  ENSG00000100564_5 (sequence is synthesized)
gactcttaagccataggggctggttttccgtactccaaaccatcaggtggacacagtcctaggaaccattatggatgtagtgcatcttagagccatagagcaggtgactggaaatctaac

SEQ ID NO: 116700 - DNA, 120 bp, Artificial Sequence
  ENSG00000100564_6 (sequence is synthesized)
tcagtatatttccgtgtattatagtgttttccttgtaaggttttgcctactttaccaaaggaggggagaccttaagaattttgacacagtatgtcaaaagtaatgtcagcaaagaacact

SEQ ID NO: 116701 - DNA, 120 bp, Artificial Sequence
  ENSG00000100564_7 (sequence is synthesized)
ttcggaaattgctaagcatgttcaggtttactttgttgatgtttgtgaagcaaaacaatgggaaactgacatcagatgtcttgagaaagctatattttccaatagtaccccttgtgtaaa

SEQ ID NO: 116702 - DNA, 120 bp, Artificial Sequence
  ENSG00000100564_8 (sequence is synthesized)
gttacgaaaaaaacaagcccttcagtactggttagcaggaagaaatgtcctacaaaagacgagtctgtcaacctagtgcctgtgttctgtacagggcttatttatttactgttaataaac

SEQ ID NO: 116703 - DNA, 120 bp, Artificial Sequence
  ENSG00000100564_9 (sequence is synthesized)
agatcttccaaaacacacagttacctggttcacagatagctgctttttattgacaaacaagatcatagtatttcagtcatggtgtcaagcacattaatacttttctgttactcagcattt

SEQ ID NO: 116704 - DNA, 120 bp, Artificial Sequence
  ENSG00000100564_10 (sequence is synthesized)
ttttttatatcagttcaaaagctacttttgccaagaaggatgagacaaaaggccagacagaaattggactttggttttcagacatgggactctcatgttaacaaagaataaataagcaaa

SEQ ID NO: 116705 - DNA, 120 bp, Artificial Sequence
  ENSG00000100564_11 (sequence is synthesized)
ggaaccacatgggatatcccaagtagtacccgtcttccaggctgcatggtgcattcattctaagctggcaacccgaccctcctgcttcctgaacagaaccttacctgggccatcagggca

SEQ ID NO: 116706 - DNA, 120 bp, Artificial Sequence
  ENSG00000100564_12 (sequence is synthesized)
gccatctcaagagccaattccttgttgataggaaacctccctgccactatctctctactggtttgagaggcaaggagcagccgttctcggtccgtctcccctttgacttgactgcgaaag

SEQ ID NO: 116707 - DNA, 120 bp, Artificial Sequence
  ENSG00000100564_13 (sequence is synthesized)
tacagcctacaaagaagagaataagaaaccaggactcagcagggattccaaacagggatggggctttctctgggtctgttacctttatttccaaaaagataaagtactcttttcccacta

SEQ ID NO: 116708 - DNA, 120 bp, Artificial Sequence
  ENSG00000100564_14 (sequence is synthesized)
gggactacaggtgtgcaccatctcgcctggctaattttttttttttatttttagtagagatgaggtcttgccatgttgcctaggctgatcttgaactcctgagttcaagcaattctcctg

SEQ ID NO: 116709 - DNA, 120 bp, Artificial Sequence
  ENSG00000100564_15 (sequence is synthesized)
gccagcatacctggcctcatgcacattttaaagaacacaatcaaatatatagcaacttctgcctataaatcaccattcatctactttgactctgtcagtctactactgtacacttttttt

SEQ ID NO: 116710 - DNA, 120 bp, Artificial Sequence
  ENSG00000100564_16 (sequence is synthesized)
ttttagatagaggtaattgatcttacattgtacactattgtgtgtcttgctttgtaaataatttaatatgtatgtatcctacaaaggccattatatttattattttaaataattgtataa

SEQ ID NO: 116711 - DNA, 120 bp, Artificial Sequence
  ENSG00000100564_17 (sequence is synthesized)
ttgaaatatcagtttatttagccactcttgccagcttttaaaatcatgcctgggtttttttgttttgctcttacaaaaaaaaaaaaacacttatcagctggtgcagtggctcatgcctgt

SEQ ID NO: 116712 - DNA, 120 bp, Artificial Sequence
  ENSG00000100564_18 (sequence is synthesized)
actttgtcacctaggctggagtgcagtgacaatcaccactcattgcagcctccacctcccaggctcaagaaatcctcctgcctcagcctcctgagaacttgggactacagagtgccaagc

SEQ ID NO: 116713 - DNA, 120 bp, Artificial Sequence
  ENSG00000100564_19 (sequence is synthesized)
taaaaggtaagtattacaggcctctctggaggaggtagccagcccatgggatgttcccagatttaaactaaaaccgtaaaagtgagacttatatttaaaaggtaaatctctttattttta

SEQ ID NO: 116714 - DNA, 120 bp, Artificial Sequence
  ENSG00000100564_20 (sequence is synthesized)
aagagatgcagcaggttttcatggatagggaattagcatttcaactttatcttcaagaccaacttcaaaattatcactggcattttttccttctctttctatcttttttctttttttttt

SEQ ID NO: 116715 - DNA, 120 bp, Artificial Sequence
  ENSG00000100565_0 (sequence is synthesized)
gagtcacaaagtcacaggcgggtggggatcctttcaacagggctcccagcaatagagcagtcccactctcccagatgagctggagaagtagctacctctcccagacagagttggggtcaa

SEQ ID NO: 116716 - DNA, 120 bp, Artificial Sequence
  ENSG00000100565_1 (sequence is synthesized)
attcatgcacatccaattcccatcaaagcctactcttcccagggcttgctgggagggaaggataactgcaggctcccctgggatgcccccagatgagattgaaattgagccagtacgaca

SEQ ID NO: 116717 - DNA, 120 bp, Artificial Sequence
  ENSG00000100565_2 (sequence is synthesized)
gagcagcgataaaatgctctactgtgaggccgaatccccgccgactgttgaaaaagtgaaaccagcccgggagaattcggaaacagacctggagattgaagatgatgagaaatttttcac

SEQ ID NO: 116718 - DNA, 120 bp, Artificial Sequence
  ENSG00000100565_3 (sequence is synthesized)
cactggacaaaaggagctgtacctggaggcctgcaagctgatgggtgtagtgcctgtctcctacttcattcggaacatggaggagtcctacgtgaacctcaaccaccacggcctgggccc

SEQ ID NO: 116719 - DNA, 120 bp, Artificial Sequence
  ENSG00000100565_4 (sequence is synthesized)
caggggtaccaaggctattgctatagccctggtgtccaacatggctgttaccaaactggagctggaagacaattgcatcatggaggagggcgtcttgagcctggtggagatgctacaaga

SEQ ID NO: 116720 - DNA, 120 bp, Artificial Sequence
  ENSG00000100565_5 (sequence is synthesized)
gaactactacctccaggagatgaatatttccaacaatcaccttggtttggagggggccagaatcatctcagatttctttgagagaaacagttcttctatctggagccttgagctttcagg

SEQ ID NO: 116721 - DNA, 120 bp, Artificial Sequence
  ENSG00000100565_6 (sequence is synthesized)
caattctctgatgtaggaggggagcacctgggccagatgctggccatcaacgtggggctcacgtcactggatctgagctggaataacttccacacaaggggagctgtggccttgtgcaat

SEQ ID NO: 116722 - DNA, 120 bp, Artificial Sequence
  ENSG00000100565_7 (sequence is synthesized)
ggtctccggggtaatgtgaccctgacaaagctggatctctccatgaatggctttgggaatgaggtggctctggccctaggggaagtcctccgactcaaccgctgcctggtctacctggat

SEQ ID NO: 116723 - DNA, 120 bp, Artificial Sequence
  ENSG00000100565_8 (sequence is synthesized)
atcggtggcaatgacatcggcaatgaaggggcctccaaaatcagcaaaggactggaatccaatgaaagcctcagagttctgaagcttttcctgaatcccataaatatggatggggctatt

SEQ ID NO: 116724 - DNA, 120 bp, Artificial Sequence
  ENSG00000100565_9 (sequence is synthesized)
ttacttatcctggctatcaagaggaaccccaaatccaggatggaagagcttgatatttccaacgtgctggtgtccgagcagttcatgaaaacgttggacggagtgtatgccgttcacccg

SEQ ID NO: 116725 - DNA, 120 bp, Artificial Sequence
  ENSG00000100565_10 (sequence is synthesized)
cagctggacgtggtattcaaggcagtacaaggcctctctcccaagaaaaccatcttcttgttgacaaaccccatgaaactgatccagagctatgcagaccaacacaaaatcacgatcgtg

SEQ ID NO: 116726 - DNA, 120 bp, Artificial Sequence
  ENSG00000100565_11 (sequence is synthesized)
gacttcttcaagagcttgaaccccactgggacaatgaagatgtctgtggatgagttccagaaagtgatgatagagcaaaacaaggtccccctgaaccagtaccaggtcagggaggtgata

SEQ ID NO: 116727 - DNA, 120 bp, Artificial Sequence
  ENSG00000100565_12 (sequence is synthesized)
aagaagctcgatgagaagacaggcatggtgaacttcagtttcttgaacacgatgaagccatagcaacaagtctggtctagaaagaagtctcggcgagaggagtcctcgcaagtcggatgg

SEQ ID NO: 116728 - DNA, 120 bp, Artificial Sequence
  ENSG00000100565_13 (sequence is synthesized)
caggtgtgcttcttagggaagcagtcgagaggtggcaagaagttggcagctgccctcaagagggtcctggcaccatggacaatgacaagcctcttcagcctgagacagaagatgagattg

SEQ ID NO: 116729 - DNA, 120 bp, Artificial Sequence
  ENSG00000100565_14 (sequence is synthesized)
gcatttgggggcagtcagggcagcttctcctcagaaactggagaaatctggtttccaggagctgtcatctcactcctttccagagtctgccctgcggatggcctgtggaggaaatgtggc

SEQ ID NO: 116730 - DNA, 120 bp, Artificial Sequence
  ENSG00000100565_15 (sequence is synthesized)
agaaaggcctgctcgattttgcctggagtcctcctccgggctggcaggggagagcagctgcagcttcccacgcttgtcacctgcctcaggagcagtgccctcacgtcgtcttgttaaaag

SEQ ID NO: 116731 - DNA, 120 bp, Artificial Sequence
  ENSG00000100567_0 (sequence is synthesized)
actagtttgcggcatcctgtggtataggggaagcgctccgggcctggaatccctacgcgtccctttgggtttagcacgatgagctcaatcggcactgggtatgacctgtcagcctctaca

SEQ ID NO: 116732 - DNA, 120 bp, Artificial Sequence
  ENSG00000100567_1 (sequence is synthesized)
ttctctcctgacggaagagtttttcaagttgaatatgctatgaaggctgtggaaaatagtagtacagctattggaatcagatgcaaagatggtgttgtctttggggtagaaaaattagtc

SEQ ID NO: 116733 - DNA, 120 bp, Artificial Sequence
  ENSG00000100567_2 (sequence is synthesized)
ctttctaaactttatgaagaaggttccaacaaaagactttttaatgttgatcggcatgttggaatggcagtagcaggtttgttggcagatgctcgttctttagcagacatagcaagagaa

SEQ ID NO: 116734 - DNA, 120 bp, Artificial Sequence
  ENSG00000100567_3 (sequence is synthesized)
gctgcagtttcatgttagggtcttacagtgtgaatgacggtgcgcaactctacatgattgacccatcaggtgtttcatacggttattggggctgtgccatcggcaaagccaggcaagctg

SEQ ID NO: 116735 - DNA, 120 bp, Artificial Sequence
  ENSG00000100567_4 (sequence is synthesized)
caaagacggaaatagagaagcttcagatgaaagaaatgacctgccgtgatatcgttaaagaagttgcaaaaataatttacatagtacatgacgaagttaaggataaagcttttgaactag

SEQ ID NO: 116736 - DNA, 120 bp, Artificial Sequence
  ENSG00000100567_5 (sequence is synthesized)
aactcagctgggttggtgaattaactaatggaagacatgaaattgttccaaaagatataagagaagaagcagagaaatatgctaaggaatctctgaaggaagaagatgaatcagatgatg

SEQ ID NO: 116737 - DNA, 120 bp, Artificial Sequence
  ENSG00000100567_6 (sequence is synthesized)
ataatatgtaacatttactccagcatctattgtattttaaatttctactccagtccaatgtaactatttagccctggattatacatactgtccaattttcattaaatttttgtcttataa

SEQ ID NO: 116738 - DNA, 120 bp, Artificial Sequence
  ENSG00000100567_7 (sequence is synthesized)
accatccacaaaaatatttcatttgacctttgcatatatatattacattaatcctaagaagctgttttcctgtaaaataacttagtgtataatttttagaaggtaaatttaacattctaa

SEQ ID NO: 116739 - DNA, 120 bp, Artificial Sequence
  ENSG00000100567_8 (sequence is synthesized)
gaagcctcacgaaggaagaaaatgtttttaagcaatattttttagtagtaatgaataggatgggaaaaatagcttgacaaaataaactcctgttacaggttaaggacatataccattagg

SEQ ID NO: 116740 - DNA, 120 bp, Artificial Sequence
  ENSG00000100567_9 (sequence is synthesized)
gtcttaatttgttagctcccaacttctcaaatctcttaagtcctaataatagtaatcttaagattgcctctattgtaagaatgcttacaaactttataggttacaactaattatttcaat

SEQ ID NO: 116741 - DNA, 120 bp, Artificial Sequence
  ENSG00000100567_10 (sequence is synthesized)
acatgatccatgaagctggctcatttatataatctgctatttatttgggaaagatatgtttcactttttcaggtttattataaaagttcctataacaaggtaagaagagcagtattacaa

SEQ ID NO: 116742 - DNA, 120 bp, Artificial Sequence
  ENSG00000100567_11 (sequence is synthesized)
aacatttcaacaaccagcttaagaaaccctgaatagtttattacaggtatataaagtagaatactattaatatgtaacaggtatttggacagtaaacaataaaaaagtcaattaacctgg

SEQ ID NO: 116743 - DNA, 120 bp, Artificial Sequence
  ENSG00000100567_12 (sequence is synthesized)
taaaagtaagttgataacatattgaggaaccttttggacagtaatagaagtttattaataagctcttctgcttccctccatagcatcttgcagacagagtggccatgtatgtgcatgcat

SEQ ID NO: 116744 - DNA, 120 bp, Artificial Sequence
  ENSG00000100567_13 (sequence is synthesized)
atacactctacagtgctgttagaccttttggctgcaggtaagaaattttgtgaattattcaaaaggcagatctgtactatagatatttattatgttccccagcatcttagccttttacat

SEQ ID NO: 116745 - DNA, 69 bp, Artificial Sequence
  ENSG00000100567_14 (sequence is synthesized)
accaccacacctggctgatttttggacctcaagtgatccatccgccttggtctcccaaagtgttgggat

SEQ ID NO: 116746 - DNA, 120 bp, Artificial Sequence
  ENSG00000100567_15 (sequence is synthesized)
tacaggtgtgagccactgtgcccagccaagttatatctctaaagcaatgtgcaaaaataaactgaacttgggttgattaggtatattcaacatttgtcgggagagtagatgtttcatttt

SEQ ID NO: 116747 - DNA, 120 bp, Artificial Sequence
  ENSG00000100567_16 (sequence is synthesized)
tcgggagagtagatgtttcattttatttcagtccctgtgtaatttgtcttctctaatgttaaatactatgtagaatgtgtctgtgtaattttatagatacttttattatggatggacatt

SEQ ID NO: 116748 - DNA, 120 bp, Artificial Sequence
  ENSG00000100567_17 (sequence is synthesized)
ctgactttgggtctgtgaactacttcaatgtttggaggttaccaaaatcttacctttcccttttctattctagaatttacatagtacatgacgaagttaaggataaagcttttgaactag

SEQ ID NO: 116749 - DNA, 120 bp, Artificial Sequence
  ENSG00000100567_18 (sequence is synthesized)
catcttgcagacagagtggccatgtatgtgcatgcatatacactctacagtgctgttagaccttttggctgcagaatttacatagtacatgacgaagttaaggataaagcttttgaacta

SEQ ID NO: 116750 - DNA, 120 bp, Artificial Sequence
  ENSG00000100567_19 (sequence is synthesized)
tttacatacttaaaaatagaaactcgtcgataagtattagggcaatgattaaataaaacagtgtacatagaaactacttgaggctgggtgccatggctcaagcctgtaatcccagtactt

SEQ ID NO: 116751 - DNA, 120 bp, Artificial Sequence
  ENSG00000100567_20 (sequence is synthesized)
atccctcgcgcccaggagtatgagaccagcctggccaacgcagtgagaacctatctctacaaaaaaaatttaaaatttagccaggtgcagtatcacatgcctgtagtcacagctacttag

SEQ ID NO: 116752 - DNA, 120 bp, Artificial Sequence
  ENSG00000100567_21 (sequence is synthesized)
gagctgcttgagaggatcatttgagcccaggagttgaaggctggaatgagctgtggccataccactgtactctagctggcgcaatagagactctgcctctttaaaaaaaaaaaaaaaaaa

SEQ ID NO: 116753 - DNA, 120 bp, Artificial Sequence
  ENSG00000100567_22 (sequence is synthesized)
ttggtattttagtatttttgagccctttggcattcatcagaatgtgtttgactatatttttctatacttgcttttaaaagtcatttagcatcctttcactaggttatagaaacattagta

SEQ ID NO: 116754 - DNA, 120 bp, Artificial Sequence
  ENSG00000100567_23 (sequence is synthesized)
agcgctccgggcctggaatccctacgcgtccctttgggtttagcacgatgagctcaatcggcactggggcctgcgtctcaggtgaccgtgactcctgaagcttttcagcgcaggtgtagc

SEQ ID NO: 116755 - DNA, 120 bp, Artificial Sequence
  ENSG00000100567_24 (sequence is synthesized)
ccgaaagtggaaactcgtggggcttgaaatagtgtgttctcttgagaaccaccgaggcagtgagatttgggattccggggtctggagatcgtgctttttgtggactgcgtttgcagttcc

SEQ ID NO: 116756 - DNA, 120 bp, Artificial Sequence
  ENSG00000100567_25 (sequence is synthesized)
tagggtgctgctgattcacaggccttctctgtctttaagtgtgcagatcattgaccgctcagtttaagagtcactggaaatcctgtcggaacagaactaataaaaatggtctgaaaaaca

SEQ ID NO: 116757 - DNA, 120 bp, Artificial Sequence
  ENSG00000100568_0 (sequence is synthesized)
gcggctccggaagagcctcgtcctgggcggcggtggtgcggcggtcgccgttatggccactgggctgggcggctgaccgccgggctaggaaagggcccagggccccgaatctcggtggcc

SEQ ID NO: 116758 - DNA, 120 bp, Artificial Sequence
  ENSG00000100568_1 (sequence is synthesized)
gctgctccagcgcggcctgcgccatggcctcctccgccgcctcctcggagcatttcgagaagctgcacgagatcttccgcggcctccatgaagacctacaaggggtgcccgagcggctgc

SEQ ID NO: 116759 - DNA, 120 bp, Artificial Sequence
  ENSG00000100568_2 (sequence is synthesized)
tggggacggcggggaccgaagaaaagaagaaattgatcagggattttgatgaaaagcaacaggaagcaaatgaaacgctggcagagatggaggaggagctacgttatgcacccctgtctt

SEQ ID NO: 116760 - DNA, 120 bp, Artificial Sequence
  ENSG00000100568_3 (sequence is synthesized)
tccgaaaccccatgatgtctaagcttcgaaactaccggaaggaccttgctaaactccatcgggaggtgagaagcacacctttgacagccacacctggaggccgaggagacatgaaatatg

SEQ ID NO: 116761 - DNA, 120 bp, Artificial Sequence
  ENSG00000100568_4 (sequence is synthesized)
gcatatatgctgtagagaatgagcatatgaatcggctacagtctcaaagggcaatgcttctgcagggcactgaaagcctgaaccgggccacccaaagtattgaacgttctcatcggattg

SEQ ID NO: 116762 - DNA, 120 bp, Artificial Sequence
  ENSG00000100568_5 (sequence is synthesized)
ccacagagactgaccagattggctcagaaatcatagaagagctgggggaacaacgagaccagttagaacgtaccaagagtagactggtaaacacaagtgaaaacttgagcaaaagtcgga

SEQ ID NO: 116763 - DNA, 120 bp, Artificial Sequence
  ENSG00000100568_6 (sequence is synthesized)
agattctccgttcaatgtccagaaaagtgacaaccaacaagctgctgctttccattatcatcttactggagctcgccatcctgggaggcctggtttactacaaattctttcgcagccatt

SEQ ID NO: 116764 - DNA, 120 bp, Artificial Sequence
  ENSG00000100568_7 (sequence is synthesized)
gaacttctatagggaagggtttgtggaccagaactttgaccttgtgaatgcatgatgttagggatgtggatagaataagcatattgctgctgtgggctgacagttcaaggatgcactgta

SEQ ID NO: 116765 - DNA, 120 bp, Artificial Sequence
  ENSG00000100568_8 (sequence is synthesized)
tagccaggctgtgggaggagggaggaaagatgaaaaaccacttaaatgtgaaggaacaacagcaacaagaccagtatgatataccaaggtaataaatgctgtttatgacttctttaaatt

SEQ ID NO: 116766 - DNA, 120 bp, Artificial Sequence
  ENSG00000100568_9 (sequence is synthesized)
tacatagtactgtagcatattaataccctgtgaactgcaaaaaaccaaatacatttacagtagtattggtcaccaaaatagaggggaaactttacaattgtgagaatgtgtaaatgttct

SEQ ID NO: 116767 - DNA, 120 bp, Artificial Sequence
  ENSG00000100568_10 (sequence is synthesized)
cattaaggcagtattgacccagacaaccatttagtattcatctatcccctcaatgcctcataattctggaatgcctgttgtgaaacatgtcagtgcacagtgtctcctaaattctcacac

SEQ ID NO: 116768 - DNA, 120 bp, Artificial Sequence
  ENSG00000100568_11 (sequence is synthesized)
gtgcttgattttctgattcatctggtgaactgggagtaggaagttggtcatagacaatatgccctccttctcttgtctgaccaaagcttgaagcaatcacatctactgccaggttagctg

SEQ ID NO: 116769 - DNA, 120 bp, Artificial Sequence
  ENSG00000100568_12 (sequence is synthesized)
tagtcttcgcctcttcctctgaggtggccaactgaggattgacttcaacaagatccagtgctgatagcaaccctggaagaacaaagtgtgacaaaacctcaggttcccttgctgctactc

SEQ ID NO: 116770 - DNA, 120 bp, Artificial Sequence
  ENSG00000100568_13 (sequence is synthesized)
tcagtgagggtcatcccactgggacagggagaacaagccaaagtaaaaacaagagtccattttatagtagaaaatacctatttttaggaagccccttgcacctcatcctcttggccatga

SEQ ID NO: 116771 - DNA, 120 bp, Artificial Sequence
  ENSG00000100568_14 (sequence is synthesized)
atttaagttaaaacactgttgtgctatagtagattaaaagaaaccttttaagataatgaaataaaccatccctgttcaactaacataacaggcataattgtcaggcgttctggaaaagga

SEQ ID NO: 116772 - DNA, 120 bp, Artificial Sequence
  ENSG00000100568_15 (sequence is synthesized)
aaaggcttggtgttgggtgggggaggttttcatcctgcttgttggcaaaatgtatgccacctccagtatgactaggaaccttccagatgcctgcctggaaatgaatcaagtatgaaggca

SEQ ID NO: 116773 - DNA, 120 bp, Artificial Sequence
  ENSG00000100568_16 (sequence is synthesized)
gaggaaatctgccacttgcactagccaaactgcattcccacttttgaactctaatgtgttatctgtatctgttagagcaccacaccatatgccctgaaatgtagttattactgcaaactt

SEQ ID NO: 116774 - DNA, 120 bp, Artificial Sequence
  ENSG00000100568_17 (sequence is synthesized)
cattctcacccctgcaggcctgagctctggaggcaggttccacatctaacaacatctttttgtctcccagcagactgacccagtgtcttgtacttgatcaagagaaaattcagccatatg

SEQ ID NO: 116775 - DNA, 120 bp, Artificial Sequence
  ENSG00000100568_18 (sequence is synthesized)
ttaattattttatctggacttcagttaccttctgttaaggtttgagaacttgtgtcaaagttctcggtagtgttcctttggcctggagcaagtggaagggaagcttaaaccagaagaacc

SEQ ID NO: 116776 - DNA, 120 bp, Artificial Sequence
  ENSG00000100568_19 (sequence is synthesized)
tatccagacctgctactatgctcacccctctaaatgcctcacttctctatagaatttaactttttagttggttattctggatgaagggtgatctgaacaagctagtattcaggaatacaa

SEQ ID NO: 116777 - DNA, 120 bp, Artificial Sequence
  ENSG00000100568_20 (sequence is synthesized)
gtatctaagaatatttagggtggccataaagtctggaaacacaggcaaatgtacctaatggtttattgatattacactatagtacatgatgtgctgaatgccatcatgtccgttcagcat

SEQ ID NO: 116778 - DNA, 120 bp, Artificial Sequence
  ENSG00000100568_21 (sequence is synthesized)
tcctgatttgtctctgatttccactgactaaacctgcacctttagcatatcccagaagtggtcatcaaagtttgcactattagaaatatatacatgacttatgtttccagactattgcca

SEQ ID NO: 116779 - DNA, 90 bp, Artificial Sequence
  ENSG00000100568_22 (sequence is synthesized)
tagaaatatatacatgacttatgtttccagactattgccaccctataaattaagcaaactgctttatgtatctagttgacagcattataa

SEQ ID NO: 116780 - DNA, 120 bp, Artificial Sequence
  ENSG00000100568_23 (sequence is synthesized)
ttttttgtagaaacggggtcacactatgttgcccacgctggtcttgaacccctggggtcaagtaatcctcttgccttggcctcccagagtactgggattataggtatgaaccactgtgcc

SEQ ID NO: 116781 - DNA, 120 bp, Artificial Sequence
  ENSG00000100568_24 (sequence is synthesized)
tagccccatgagtgtcttttggagtaaaatattgtagcataggaacaaagagacaagccatgccatatataagtgctagaggttattaacccctgctctaagtggtgtttttaggaagca

SEQ ID NO: 116782 - DNA, 120 bp, Artificial Sequence
  ENSG00000100568_25 (sequence is synthesized)
aagcagagaattgaacccccaagttctctggccaataacctaaggaccactggcaacatctaagattgcagatctgagaattagaccagtactgcctgcctttttgtactgcctaaggtt

SEQ ID NO: 116783 - DNA, 120 bp, Artificial Sequence
  ENSG00000100568_26 (sequence is synthesized)
ctggcaggctgtggcgctaaggagaccatttctcaatgtgagtttctatcccagctagtcaagggttctctatagccctgaacctttcaatctggggtctctatctataccctagttcca

SEQ ID NO: 116784 - DNA, 120 bp, Artificial Sequence
  ENSG00000100568_27 (sequence is synthesized)
tcagatggttactgaagcagtatgatttggtagttctttaaattttggaatgaaaggtcatttgaagtagctttaaaaccagaagctttctgacagaaatggaaactgtttgcaaacaag

SEQ ID NO: 116785 - DNA, 120 bp, Artificial Sequence
  ENSG00000100568_28 (sequence is synthesized)
tatgagttttggaaaagtagccagtcttgataacgtagaattcatcttagtactctttccatcagccattctcatctaactgtatcccccttattagaaatcctttcaggctctagtaca

SEQ ID NO: 116786 - DNA, 120 bp, Artificial Sequence
  ENSG00000100568_29 (sequence is synthesized)
agacctaccctacataaaggacccaagatattgtccagtttgcagatttcttcaagagatcagctttagctccaaattcacaactcccaatgaaccaatctcttagagtgcaaattacag

SEQ ID NO: 116787 - DNA, 120 bp, Artificial Sequence
  ENSG00000100568_30 (sequence is synthesized)
ccttgcactcttatcttatcttgccttcttatcttaatctgcctttagataactcaaagaactgcatcagtttgacaatttattcttgtatttaattgtttaaatatacaattttttact

SEQ ID NO: 116788 - DNA, 120 bp, Artificial Sequence
  ENSG00000100568_31 (sequence is synthesized)
cattattaccttagtgtaatttggtaagagccatgtccaagcatgactctaaaggactatatcctttttattagcatggccatataatttttagctacaaaagtttaagcaaaaacaaac

SEQ ID NO: 116789 - DNA, 120 bp, Artificial Sequence
  ENSG00000100568_32 (sequence is synthesized)
tctgcaatgatgtggaatagcagaaaagatcctttgcaggcaagagactctagcatatttacctatgtagttaacaggctgcagacctggttgctacatacctgtattgtgtatttcctc

SEQ ID NO: 116790 - DNA, 120 bp, Artificial Sequence
  ENSG00000100568_33 (sequence is synthesized)
agcaatatacatgccttctcgataggttagtcccccgacaacaggagttcctgtggctggagccagtgtagggtcaaatgcatcaatatcaaaactcaaatggattggtctttgtctcct

SEQ ID NO: 116791 - DNA, 120 bp, Artificial Sequence
  ENSG00000100568_34 (sequence is synthesized)
aaaaaggaagaggataaaataatacttaaaataatacttaactggttgtccttggacactcatccttcttatggttgcaactccttgattttgttgctattagtcctagtactttgttaa

SEQ ID NO: 116792 - DNA, 120 bp, Artificial Sequence
  ENSG00000100568_35 (sequence is synthesized)
taaagctgttaatacatttccaggcttcctattcttggaagttactgagattggcaatattaacttcctacataccacttcatgatactgccatttgttctgcatacctcagacagacta

SEQ ID NO: 116793 - DNA, 120 bp, Artificial Sequence
  ENSG00000100568_36 (sequence is synthesized)
actccaatgtatatttctgccttacactgggtattagaacctcttatactaataactgtcaatagagagatttcttcacttctagatgagattgggctctcatctagagacaatttaatt

SEQ ID NO: 116794 - DNA, 120 bp, Artificial Sequence
  ENSG00000100568_37 (sequence is synthesized)
agacaatttaaattagtctaatttaaattggcttgatgtaagttatggttgctcttattctctgaacgtaacagcagctgaagtgaactctaattttaggtctgcagttttaacatcttc

SEQ ID NO: 116795 - DNA, 120 bp, Artificial Sequence
  ENSG00000100568_38 (sequence is synthesized)
catttctaacttcattatagccccagtgtccaaaggctgaagctaacaactaagtttcttaacagcttatgaaatgacatactaccagataacaattctgacattaatcacccagaagta

SEQ ID NO: 116796 - DNA, 120 bp, Artificial Sequence
  ENSG00000100568_39 (sequence is synthesized)
aagacttggtattgggaaaatgctcttaaaattaccatttgattagtattcatctgccatctttctacactgccaagatttgcttaatataaaactcagatgaaacaatcgtgaggctgg

SEQ ID NO: 116797 - DNA, 120 bp, Artificial Sequence
  ENSG00000100568_40 (sequence is synthesized)
gaagaatgggacagttgaaacaataaatgcttgtcatctcagaagataagcattaaagatggagataaagaaaaattcatgagacagaagatctaggcaatgatttagaggaaacctcct

SEQ ID NO: 116798 - DNA, 120 bp, Artificial Sequence
  ENSG00000100568_41 (sequence is synthesized)
cccaaaaaccccagaggaagaatatgacctgtgtttcaaattttgcctttctgaactatttaaaattatgtgtatgtttttgctttgtattttaaaagtaaagctgctgtcctcaagaaa

SEQ ID NO: 116799 - DNA, 120 bp, Artificial Sequence
  ENSG00000100568_42 (sequence is synthesized)
aaaagtgtttagtaagctataaagtacttctgtttttccattcattcattcagttcatatactcgaatgcctgctctgtgcttgctgggcactatgcaaggcattcagaatgaggggaac

SEQ ID NO: 116800 - DNA, 120 bp, Artificial Sequence
  ENSG00000100568_43 (sequence is synthesized)
atgccagacatggtccctgcctcatggagcatatggttatttacttggtgtagtccaaataaataagtagtttgattagtccaaactaggcatatttccaaatgagtgagggaagaacca

SEQ ID NO: 116801 - DNA, 120 bp, Artificial Sequence
  ENSG00000100568_44 (sequence is synthesized)
cggcctttccccaacccggacccggcacttctcgggttccgcgactgccgatcgccccggcgcggcaccgctccctcaggagtcgcctaggccgcgcagtctcccgacttctcgtcaggc

SEQ ID NO: 116802 - DNA, 120 bp, Artificial Sequence
  ENSG00000100568_45 (sequence is synthesized)
gattagtaatttttaggtattaaagatacactcaaccaaagggacagaatgggaaaggctgaaaggggaatgaataacgttctcatcgttcaagtcattgccggtgccacacccagagaa

SEQ ID NO: 116803 - DNA, 120 bp, Artificial Sequence
  ENSG00000100575_0 (sequence is synthesized)
aaggtagcacattgccgcacaagaccgctctacagtctcatccaagacttgaagagctcccgacttgtaatactacttgtgtttaccagggactgttgacactgcttcgcttccgaagac

SEQ ID NO: 116804 - DNA, 120 bp, Artificial Sequence
  ENSG00000100575_1 (sequence is synthesized)
cgttagggacgtgggattagatttcctcgcgttataacgaatcggcgtctaagggtttaagtgtcacttgacattactgctcccacgtgttctttcccatctggcggccgcggctcctgt

SEQ ID NO: 116805 - DNA, 120 bp, Artificial Sequence
  ENSG00000100575_2 (sequence is synthesized)
ccagaccctgaccctccctcccaaggctcaaccgtcccccaacaacccccagccttgtactgatgtcggatgcgagagcctgtgcttaagtaagaatcaggccttattggagacattcaa

SEQ ID NO: 116806 - DNA, 120 bp, Artificial Sequence
  ENSG00000100575_3 (sequence is synthesized)
gcaaaggttggacaactacttttccagaacagaaaggaaactcatgcatcagaaaaggtgactaataaaggtaccagaagaatatggctgcacaaataccagaatctgatcagataaaac

SEQ ID NO: 116807 - DNA, 120 bp, Artificial Sequence
  ENSG00000100575_4 (sequence is synthesized)
agtttaaggaatttctggggacctacaataaacttacagagacctgctttttggactgtgttaaagacttcacaacaagagaagtaaaacctgaagagaccacctgttcagaacattgct

SEQ ID NO: 116808 - DNA, 120 bp, Artificial Sequence
  ENSG00000100575_5 (sequence is synthesized)
tcatattcagcagaatgaagccctggcagccaaagcaggactccttggccaaccacgatagagaagtcctgatggatgaacttttgatgaaagattgccaacagctgctttattggaaat

SEQ ID NO: 116809 - DNA, 120 bp, Artificial Sequence
  ENSG00000100575_6 (sequence is synthesized)
gaggactcatctgatagaatcccctgaaagcagtagccaccatgttcaaccatctgtcatgactgtttggcaaatggaaaccgctggagaaacaaaattgctatttaccaggaataatca

SEQ ID NO: 116810 - DNA, 120 bp, Artificial Sequence
  ENSG00000100575_7 (sequence is synthesized)
caatagaaggtcttattgttcagtgaaataataagatgcaacatttgttgaggccttatgattcagcagcttggtcacttgattagaaaaataaaccattgtttcttcaattgtgactgt

SEQ ID NO: 116811 - DNA, 120 bp, Artificial Sequence
  ENSG00000100575_8 (sequence is synthesized)
taattttaaagcaacttatgtgttcgatcatgtatgagatagaaaaatttttattactcaaagtaaaataaatggaaatatcactgagcagttgtttatactgtatggtaccatagtatt

SEQ ID NO: 116812 - DNA, 120 bp, Artificial Sequence
  ENSG00000100575_9 (sequence is synthesized)
ctcactggactgtggatacgttgaaatgtttttcaatcaggatcatcctccaagcagtcctgttcattcatgtctgcctcaaattgctggtgaatacataaaatagttacttgctaatca

SEQ ID NO: 116813 - DNA, 120 bp, Artificial Sequence
  ENSG00000100575_10 (sequence is synthesized)
taatgatctgagaaattgggggtggtggcatacaattacatacacagatttataaaatacgagcagtgattccctaactcttcagttagactaaaaacatttgtttatagattgacaaac

SEQ ID NO: 116814 - DNA, 120 bp, Artificial Sequence
  ENSG00000100575_11 (sequence is synthesized)
gctctacagtctcatccaagacttgaagagctcccgacttgtaatactacttgtgtttaccagggactgttgacactgcttcgcttccgaagaccgttagggacgtgggattaggtgact

SEQ ID NO: 116815 - DNA, 120 bp, Artificial Sequence
  ENSG00000100575_12 (sequence is synthesized)
taaaacctgaagagcagaatgaagccctggcagccaaagcaggactccttggccaaccacgatagagaagtcctgatggatgaacttttgatgaaagattgccaacagctgctttattgg

SEQ ID NO: 116816 - DNA, 120 bp, Artificial Sequence
  ENSG00000100575_13 (sequence is synthesized)
ctttcccatctggcggccgcggctcctgtccagaccctgaccctccctcccaaggctcaaccgtcccccaacaacccccagccttgtactgatgtcggatgcgagagcctgtgcttaatt

SEQ ID NO: 116817 - DNA, 120 bp, Artificial Sequence
  ENSG00000100577_0 (sequence is synthesized)
ctagtccagcccctcgctttacccggacgaaagacacgggcctgattcgtcgagtctcactgagccttagtcgtcggcaggtcccaggcgcgaagtttctcggcctggaggagggggtcg

SEQ ID NO: 116818 - DNA, 120 bp, Artificial Sequence
  ENSG00000100577_1 (sequence is synthesized)
cgcgaagtgccagatgcaggcggggaagcccatcctctattcctatttccgaagctcctgctcatggagagttcgaattgctctggccttgaaaggcatcgactacgagacggtgcccat

SEQ ID NO: 116819 - DNA, 120 bp, Artificial Sequence
  ENSG00000100577_2 (sequence is synthesized)
caatctcataaaggatgggggccaacagttttctaaggacttccaggcactgaatcctatgaagcaggtgccaaccctgaagattgatggaatcaccattcaccagtcactggccatcat

SEQ ID NO: 116820 - DNA, 120 bp, Artificial Sequence
  ENSG00000100577_3 (sequence is synthesized)
tgagtatctagaggagatgcgtcccactccgcgacttctgcctcaggacccaaagaagagggccagcgtgcgtatgatttctgacctcatcgctggtggcatccagcccctgcagaacct

SEQ ID NO: 116821 - DNA, 120 bp, Artificial Sequence
  ENSG00000100577_4 (sequence is synthesized)
atatactgtgtaggagacgaggtgaccatggctgatctgtgcttggtgcctcaggtggcaaatgctgaaagattcaaggtggatctcaccccctaccctaccatcagctccatcaacaag

SEQ ID NO: 116822 - DNA, 120 bp, Artificial Sequence
  ENSG00000100577_5 (sequence is synthesized)
aggctgctggtcttggaggccttccaggtgtctcacccctgccggcagccagatacacccactgagctgagggcctagctcccaaatcctgccccgttggcacagggccacaggagcaga

SEQ ID NO: 116823 - DNA, 120 bp, Artificial Sequence
  ENSG00000100577_6 (sequence is synthesized)
agctgggtgggctgaagaggcctggaaacgagagtcttaattgaggagatgggagactcgaactctagccctggatctgccttcctgctgaaacttgttccacctcagtcccctcatctg

SEQ ID NO: 116824 - DNA, 120 bp, Artificial Sequence
  ENSG00000100577_7 (sequence is synthesized)
tcacacgcatgtggggtggagtagggagatgcggggagcagggtgggcaggaatactgttatctatgtgacggggcagtcgtgaggctgagatgagaatgcggattaaaatgcctggcgt

SEQ ID NO: 116825 - DNA, 120 bp, Artificial Sequence
  ENSG00000100577_8 (sequence is synthesized)
gctcaccgtaacaccacggggaaggctgtgtgccttttctcatccgcttttgttgtgtgtgactccaaagaatgcccgcgctgaaatttggcgtgaattaaactgaagcccaggcctcta

SEQ ID NO: 116826 - DNA, 120 bp, Artificial Sequence
  ENSG00000100577_9 (sequence is synthesized)
tttaggaaaataagggaagattcaagcacatggagaaccaagttctgcatgataaggtccaaaaaggcttatagggcttgagctgagcagaagcaggggggaagaggtgtagtgatggtg

SEQ ID NO: 116827 - DNA, 120 bp, Artificial Sequence
  ENSG00000100577_10 (sequence is synthesized)
acccttgcacacctgacacactcttacactcacacattggctgtgagctgcccagtgtgggggcgggggtgtcaagggagggagggggattctcagggcctctgacctggaccatgtgaa

SEQ ID NO: 116828 - DNA, 120 bp, Artificial Sequence
  ENSG00000100577_11 (sequence is synthesized)
agaagggggtgaagatcgcaatctcagaattcagccccccagcgggtcccccgctgcgttccgagaagctctagtttccaaggacgcatgtacaggtgcttggggtggggaaagggccag

SEQ ID NO: 116829 - DNA, 120 bp, Artificial Sequence
  ENSG00000100577_12 (sequence is synthesized)
acatttcctgggaggctgagggtcaccacgataccatgacagagtctggcaaggtatggaaggcactctcaggctagctgcccctttgggggcctcttggacctcaggagctcaaaccag

SEQ ID NO: 116830 - DNA, 120 bp, Artificial Sequence
  ENSG00000100577_13 (sequence is synthesized)
cataattttggagccaagggacctcatgagcctctcagagagcttggagtctgccctgatttgcacagatgcaggcctgagagaggaggcctggcaggacaggaagaaatggttgactcc

SEQ ID NO: 116831 - DNA, 120 bp, Artificial Sequence
  ENSG00000100577_14 (sequence is synthesized)
acaactaagtattaaaaacagttcatctgtgccagcttctactctgaatgaggaaatagccccagaaaggtggagtgacttaggagtcccacaggtaggtcataacaaagtggggactaa

SEQ ID NO: 116832 - DNA, 120 bp, Artificial Sequence
  ENSG00000100577_15 (sequence is synthesized)
gtcagaatccctgcatgcctatgccctctacccgcatgtcgctttaacaaaggatgttggagcagacagacatctccattttataatgaggaaacagagggaaaatggctccaggggtgc

SEQ ID NO: 116833 - DNA, 120 bp, Artificial Sequence
  ENSG00000100577_16 (sequence is synthesized)
caagatggagccaggctggaaatctctggaagccggtcttgtggacctccctcatcccagccccaccctctttcacactccctctcctcacaagggaccatgcaagggagaagtgaggga

SEQ ID NO: 116834 - DNA, 120 bp, Artificial Sequence
  ENSG00000100577_17 (sequence is synthesized)
gacaggcctcgagttgtgggcacacctgccacagccatggccgcgtcctgtgtcacatgaatagggattcttgcacatctctgacagaatcacgtggctttttgaggccactggggcagc

SEQ ID NO: 116835 - DNA, 120 bp, Artificial Sequence
  ENSG00000100577_18 (sequence is synthesized)
ctgcaaaggtggctgctgggatggctacctccctccaacctcagggcccttggttgaaggaaggggctcatggagcctgggggagaagggatagacatccagccaggggcagatgggaag

SEQ ID NO: 116836 - DNA, 120 bp, Artificial Sequence
  ENSG00000100577_19 (sequence is synthesized)
tgaacttccctgagggggtttggcgaaggggtagcccccacccagctgtcagcgcaatcacagattttctttgggctgcacagaacctgtctgtcctgaagcaagtgggagaggagatgc

SEQ ID NO: 116837 - DNA, 120 bp, Artificial Sequence
  ENSG00000100577_20 (sequence is synthesized)
agctgacctgggcccagaacgccatcacttgtggctttaacggtgagtcctcacctctgtgagctgccccacagtggcctcttagaggtatggccctcgcacacaggggcctgggtatct

SEQ ID NO: 116838 - DNA, 120 bp, Artificial Sequence
  ENSG00000100577_21 (sequence is synthesized)
gaaccagcctcccaggctgctttgggcctgacagttgcatggatgagggcaggactggggaggcaatgggctgggtgggcatccagaccttagctccagcacttctgggaacctcggtcc

SEQ ID NO: 116839 - DNA, 120 bp, Artificial Sequence
  ENSG00000100577_22 (sequence is synthesized)
ctgagcccacagcccttcatagctggatggcccaacttcagcttcactgcctactccagctgggaaaccaaggccagcacagcgccagccatcagagtgagagctgtcaccgtggccagt

SEQ ID NO: 116840 - DNA, 120 bp, Artificial Sequence
  ENSG00000100577_23 (sequence is synthesized)
acagcagctcatccctaacagctctctcgagacctggctgccacattctcaccagcagccatgcccagtctgtcactcagttgggcgcccatttcataactatggaggccaaggcccaga

SEQ ID NO: 116841 - DNA, 120 bp, Artificial Sequence
  ENSG00000100577_24 (sequence is synthesized)
aagctttgtgtcccctccctgcgcccagaataagatgtttatgtggcctccccacagccctggagcagatcctacagagcacagcgggcatatactgtgtaggagacgaggtaagctgtc

SEQ ID NO: 116842 - DNA, 120 bp, Artificial Sequence
  ENSG00000100577_25 (sequence is synthesized)
cccagacctccccaggcccagccacagtggctgcctccctcatgctgacctccctcaagctcagagcttcctgagaaggcgtctgcagggggatctctgtgccatggggcactcctcagc

SEQ ID NO: 116843 - DNA, 120 bp, Artificial Sequence
  ENSG00000100577_26 (sequence is synthesized)
tcactcccactaaaccgtcttaagagggagttactcaaggtagaagactggctgtgagaggatgaggcgggccagcatcagttgagggattgtgctagatgatgtctgcgcagtcaaggc

SEQ ID NO: 116844 - DNA, 120 bp, Artificial Sequence
  ENSG00000100577_27 (sequence is synthesized)
aatccatcttctctggccctctcaacccacagagttggttgtcagggcaactggagcatggcctgggagggcacttcagctccgggggacagactcatgcaggcctagggcagacaagaa

SEQ ID NO: 116845 - DNA, 120 bp, Artificial Sequence
  ENSG00000100577_28 (sequence is synthesized)
ttggaggtgggatgggtgaaagagccgaagcagattgttggtacccccagtagagtcgcagtggacacacccagtccagccactgactctggggtatgcaccctgatgggaacccaccgg

SEQ ID NO: 116846 - DNA, 120 bp, Artificial Sequence
  ENSG00000100577_29 (sequence is synthesized)
cagtcagtgagtgcagggcctgggggagggccctcatgagagcagtgccctgaatgagagcgcctgacatctcttcctcgcctgtgtacagtcaaggtgcctagcacataggagaggctc

SEQ ID NO: 116847 - DNA, 120 bp, Artificial Sequence
  ENSG00000100577_30 (sequence is synthesized)
aggtaaggaaagggagttgcatctccaaataaggaagatccagttgtggccacccaattcctcctcttcgaaagacactttctgcccatcacctgctttctgtgccaggaccatctttac

SEQ ID NO: 116848 - DNA, 120 bp, Artificial Sequence
  ENSG00000100577_31 (sequence is synthesized)
agcaaccagcatcccccggctcctagaacccccatccctgcatggcatctccaccccggaaacacagggtgagggtgggaggaagggggttgttttttcccttgggactgacacttctcc

SEQ ID NO: 116849 - DNA, 120 bp, Artificial Sequence
  ENSG00000100577_32 (sequence is synthesized)
caacactgctctccaaagccccttggcaaccatgtttaaagcagggtcacaaaatccacatgcccctggtaactggcaggggaacagctggcccttctcagttcttattttatttgaact

SEQ ID NO: 116850 - DNA, 120 bp, Artificial Sequence
  ENSG00000100577_33 (sequence is synthesized)
tgtcttgtggactatcactgcaggaggctgctggctctcccttgtgggacaaggtggcaaggtgtgcagtagcaggaggcctgggaagggcccaggtccagactgtgtaccctagcctgg

SEQ ID NO: 116851 - DNA, 120 bp, Artificial Sequence
  ENSG00000100577_34 (sequence is synthesized)
gctctccagtgcctgaccctgggagggtgggtggctagtgggtccccaccccatactgggccctctggatggctgactagggtaggagctgccttggtggccacggtgtgagatgcaggg

SEQ ID NO: 116852 - DNA, 120 bp, Artificial Sequence
  ENSG00000100577_35 (sequence is synthesized)
ccgggagggttgggccagaggaggcggtcctggtagggagtgcgtagcagggtggagtcgctgtccggtcgcgcttcacttctgctccgccctccctgctccccataacagacccctccc

SEQ ID NO: 116853 - DNA, 120 bp, Artificial Sequence
  ENSG00000100577_36 (sequence is synthesized)
tccactaaggcttccaaacgtcgccccaagcctcccaatttctcgcagcccttcatgctcttctcttggccctagcaggagtggtcaccagcagtccctgtcccttggcaccaggagtcc

SEQ ID NO: 116854 - DNA, 120 bp, Artificial Sequence
  ENSG00000100577_37 (sequence is synthesized)
ctccacaaaaggtaccttcaggacaggctgggactgctgggcttgggaaccatcttggaagggcctaggttcccacttacacccttgccatctagcagactgagttggtagtacagggat

SEQ ID NO: 116855 - DNA, 120 bp, Artificial Sequence
  ENSG00000100577_38 (sequence is synthesized)
ggcaatagcaagttcagagagcagcttaatatgctaggggtggcagaggggagagggagctttggtgaaatgtctatagtcagaggggtagtaaacagggcatctgagaagttctttcaa

SEQ ID NO: 116856 - DNA, 120 bp, Artificial Sequence
  ENSG00000100577_39 (sequence is synthesized)
gttctcccctatccatagggatacacatgttttggtgggaagattcatgagtgctaatcactggcgagtctttcctgggttccactttgaaatgctggctcccgaagaagtaccagagaa

SEQ ID NO: 116857 - DNA, 120 bp, Artificial Sequence
  ENSG00000100577_40 (sequence is synthesized)
attaactttgagccccttaaaccttggagtagagatcgcacacccagctgcccccaagggcccaaaggtaacaaaaatgagaaaagtgggccagatatgggccatggcagacctgagagc

SEQ ID NO: 116858 - DNA, 120 bp, Artificial Sequence
  ENSG00000100577_41 (sequence is synthesized)
gcatacgctggttgatgggggccattagtctgttcccatcaattgctgctatttaggaacccaaatctgtctccagatttttttaaagaaaaaaaacaaacaggtgttgtatataaaata

SEQ ID NO: 116859 - DNA, 71 bp, Artificial Sequence
  ENSG00000100577_42 (sequence is synthesized)
tttttattttattttaggcagtgacacgatcttggctcactgtatcctccgcctcctgggttcaagcaatt

SEQ ID NO: 116860 - DNA, 90 bp, Artificial Sequence
  ENSG00000100577_43 (sequence is synthesized)
actagaatgaaatgtcctgatttttaaacattggcaactacttgaaacattttaaactactgtgttgagcaaacagaaattctgagggcc

SEQ ID NO: 116861 - DNA, 120 bp, Artificial Sequence
  ENSG00000100577_44 (sequence is synthesized)
tttaaactactgtgttgagcaaacagaaattctgagggccagatagggccccagtgagctgccagcttttgacctcacctttggggtgagtgagcatatctgccagctgtttttatgggg

SEQ ID NO: 116862 - DNA, 120 bp, Artificial Sequence
  ENSG00000100577_45 (sequence is synthesized)
acagccgagagcccggaggactgctgggaggtggggttgaaggagatatgtaccaaagcgtcaaaaaattagaattccttgtcttgctgcattgctagaggatgccctgccatcatttta

SEQ ID NO: 116863 - DNA, 120 bp, Artificial Sequence
  ENSG00000100577_46 (sequence is synthesized)
gggcaacctttgttttacaaatgagggagccgaagatttaaaaaggcagaggtttgtccaaggtcatgcagagctggttcctgcaccaggtccagactccagatgccagctcccagcccg

SEQ ID NO: 116864 - DNA, 120 bp, Artificial Sequence
  ENSG00000100577_47 (sequence is synthesized)
ctccaccactcaaaatactgcatcaaaaccaggccacgctctgttggggggacaccaaacctggccccagcaggagcgtaagaaacttcctgcgagttggaaaaaaatgccttttttttt

SEQ ID NO: 116865 - DNA, 88 bp, Artificial Sequence
  ENSG00000100577_48 (sequence is synthesized)
tttgagacgcagtctcgcttgacctccacctctcaggttcaagctattctcttacctcaacctcctgagtagctgagattacaggcac

SEQ ID NO: 116866 - DNA, 120 bp, Artificial Sequence
  ENSG00000100577_49 (sequence is synthesized)
aggcgtgagccactgtgcctggccagaaatgccctttctgaccagagtcaaagttcccccaatgcctgggtagcccagcttccccattggctcctgaaatccacccctttaggtttcctt

SEQ ID NO: 116867 - DNA, 120 bp, Artificial Sequence
  ENSG00000100577_50 (sequence is synthesized)
tcctatttccgaagctcctgctcatggagagttcgaattggtaagagatgtgcctcctccaggatgagtgctggagtggggtggactggggcggataagcccgggtgcaaagctggcctg

SEQ ID NO: 116868 - DNA, 120 bp, Artificial Sequence
  ENSG00000100577_51 (sequence is synthesized)
tctgtgctgagtgcttttgtgtgcctgattccatttaaacctcagcaaccctaggagggaggtactattattactgtccccattgtatagaggaggaagctgaggcacaaaaaacaggca

SEQ ID NO: 116869 - DNA, 120 bp, Artificial Sequence
  ENSG00000100577_52 (sequence is synthesized)
acattcagtaacttgcccaagatctttcagttactaagaggcagaactggaatttgaaccaggtagtctggctccagaggcccattaagttacttgcccagggccacacagttagcaaat

SEQ ID NO: 116870 - DNA, 120 bp, Artificial Sequence
  ENSG00000100577_53 (sequence is synthesized)
gactgtgatgaaatttgaacccaagaagcttgcctccagagtgtggaggcaaagccatcctccgtgacccctcctccatcccatagtcacttggtatttgctgggatcagtaagcaagag

SEQ ID NO: 116871 - DNA, 120 bp, Artificial Sequence
  ENSG00000100577_54 (sequence is synthesized)
cactgggtgccaggagaaactttcctccaagaagatgaacccatccctgggcgccagtacctctgccctggctgagccagaagccggagcaatataggtgctgtctgtacggcctgtgtg

SEQ ID NO: 116872 - DNA, 120 bp, Artificial Sequence
  ENSG00000100577_55 (sequence is synthesized)
ctttggccttccctcctccaggtgtctcctccagccccaaacactgtcactccccagactggagctgaccaacactaggaggagcctggtattgcccaggctctccacaccatgacatgt

SEQ ID NO: 116873 - DNA, 120 bp, Artificial Sequence
  ENSG00000100577_56 (sequence is synthesized)
ctggtcctcctcccctcattcctttgcccttccctgagattggccatcaccatacttgaatgcccaagtgtgtgtaatacacacatgcatgcacacgcacgcagtcttctccactagtgt

SEQ ID NO: 116874 - DNA, 120 bp, Artificial Sequence
  ENSG00000100577_57 (sequence is synthesized)
tgacccacccaagttttttttaccctcagcttgccaggggaaattatcaaaagggatggagaggaaatctggtgactggagtcacggcaaatgctctgaggccaccaaagagcctgatgc

SEQ ID NO: 116875 - DNA, 120 bp, Artificial Sequence
  ENSG00000100577_58 (sequence is synthesized)
ctgtctagaatctctagtaaacagccctgagaacagagagaatagattggaagagattcttctccaacagaacaagagtgccatctgtctgtgtgtgctgtgtgtggccacctgagctcc

SEQ ID NO: 116876 - DNA, 120 bp, Artificial Sequence
  ENSG00000100577_59 (sequence is synthesized)
ttcccttggcccttagttgccttcttgagggagtaattgcatgtcttcaaccaagacactggtcaccactgtttaaggccctgggggggcagagttaaacacaacacagccttgctgaac

SEQ ID NO: 116877 - DNA, 120 bp, Artificial Sequence
  ENSG00000100577_60 (sequence is synthesized)
tccaggagcccacagagtgccagggcatacacctttatcaccatccagggggcatgagggccccattgggggggtccagatcttgaggtctctaagagttcaggggtgagtgaggcagag

SEQ ID NO: 116878 - DNA, 120 bp, Artificial Sequence
  ENSG00000100577_61 (sequence is synthesized)
catcgtgcatctggggtagggagcacgtggtgacaaggaaagctgagagaaggggatagtgccacggtgagccttgaccacccagaagtgttagagaagcctccccctctttggccttaa

SEQ ID NO: 116879 - DNA, 120 bp, Artificial Sequence
  ENSG00000100577_62 (sequence is synthesized)
tgtcaccttagaagggctctttcctttaagagtacggcgagaggctgttctttgactccgctatgtgcggtctctcctagctctggccttgaaaggcatcgactacgagacggtgcccat

SEQ ID NO: 116880 - DNA, 120 bp, Artificial Sequence
  ENSG00000100578_0 (sequence is synthesized)
aatttacctaatcccacgtccctaacggtcttcggaagcgaagcagtgtcaacagtccctggtaaacacaagtagtattacaagtcgggagctcttcaagtcttggatgagactgtagag

SEQ ID NO: 116881 - DNA, 120 bp, Artificial Sequence
  ENSG00000100578_1 (sequence is synthesized)
cggtcttgtgcggcaatgtgctaccttaaaataaataaataaataaacccctgttatgtccggagtttgtttccacccggagaggaatggaagagcaccagagagcgcttagctttctgg

SEQ ID NO: 116882 - DNA, 120 bp, Artificial Sequence
  ENSG00000100578_2 (sequence is synthesized)
ttggatgttttggtgtgggacttgttttgtgaccaacaatatgaaaggctctgaggtcagcttggagaagaaaaaaaagattaagatgccagtgaagagacttcgtgaggtagtttctca

SEQ ID NO: 116883 - DNA, 120 bp, Artificial Sequence
  ENSG00000100578_3 (sequence is synthesized)
aaatcatggagatcatttggttttgctgaaagatgagttgccctgtgttcctccggcattgtctgcaaataaacgtcttcctgttggaacggggactagtttgaatggaacatcacgtgg

SEQ ID NO: 116884 - DNA, 120 bp, Artificial Sequence
  ENSG00000100578_4 (sequence is synthesized)
ttcatcagacttaacttctgctagaaattgttaccagcctctattagaaaatcccatggtgtcagaaagtgatttttctaaagacgttgcagtgcaagtgttgcctttggataaaataga

SEQ ID NO: 116885 - DNA, 120 bp, Artificial Sequence
  ENSG00000100578_5 (sequence is synthesized)
agagaacaacaagcaaaaagcaaatgacatcttcatttctcagtatacaatgggacagaaagatgctctaagaacagttttaaagcaaaatgtctcactttgtctcacaggctggagtga

SEQ ID NO: 116886 - DNA, 90 bp, Artificial Sequence
  ENSG00000100578_6 (sequence is synthesized)
taaagcaaaatgtctcactttgtctcacaggctggagtgatcacagtggggtgatcacaactcactgcagtctctacctcctcaggctca

SEQ ID NO: 116887 - DNA, 120 bp, Artificial Sequence
  ENSG00000100578_7 (sequence is synthesized)
agtaaaggtacatctgttagaagatgcaggcatagagaaggatgctgttactcaggagactagaatttcacccagtggaattgattcagctacaaccgtggctgcagcaactgctgctgc

SEQ ID NO: 116888 - DNA, 120 bp, Artificial Sequence
  ENSG00000100578_8 (sequence is synthesized)
cattgcaaccgcagctccgttgataaaggtgcagagtgatttggaagcaaaagtcaattctgttacagaattacttagtaaattacaggagactgataaacacctgcaacgtgttacaga

SEQ ID NO: 116889 - DNA, 120 bp, Artificial Sequence
  ENSG00000100578_9 (sequence is synthesized)
gcagcaaacaagcattcagaggaaacaagagaaattacattgtcatgatcacgaaaagcaaatgaatgtgtttatggagcagcacataaggcatcttgaaaagttacaacaacaacaaat

SEQ ID NO: 116890 - DNA, 120 bp, Artificial Sequence
  ENSG00000100578_10 (sequence is synthesized)
agatattcagactcattttattagtgctgcactcaagactagtagttttcagcctgttagtatgccctcctccagagcagtggaaaagtattccgtaaaaccagaacaccctaatcttgg

SEQ ID NO: 116891 - DNA, 120 bp, Artificial Sequence
  ENSG00000100578_11 (sequence is synthesized)
tagctgtaatccatctttatataacacatttgcttccaaacaagcacctttaaaagaagttgaagatacgagttttgataaacagaaatctcctttggagacaccagcacctcgcagatt

SEQ ID NO: 116892 - DNA, 120 bp, Artificial Sequence
  ENSG00000100578_12 (sequence is synthesized)
tgctcctgtacctgtttcaagggatgatgaactatcaaagagggaaaatcttttggaagaaaaagaaaatatggaagtgtcgtgtcacagaggaaatgtaagactattggaacaaatttt

SEQ ID NO: 116893 - DNA, 120 bp, Artificial Sequence
  ENSG00000100578_13 (sequence is synthesized)
gaataataatgattctttgacaagaaaaagtgaatcatcaaacaccacctcactaactaggtcaaaaataggatggactcctgagaaaacaaacagatttccttcctgtgaagagctaga

SEQ ID NO: 116894 - DNA, 120 bp, Artificial Sequence
  ENSG00000100578_14 (sequence is synthesized)
aacaactaaagtgactatgcagaagtctgatgatgttcttcatgaccttggccaaaaagagaaagaaacaaatagcatggtccagccaaaagaatctctgagtatgttgaagcttccaga

SEQ ID NO: 116895 - DNA, 120 bp, Artificial Sequence
  ENSG00000100578_15 (sequence is synthesized)
tcttccacagaattctgttaagcttcaaacaaccaatacaacaagatctgtattgaaagatgctgagaagattttgagaggagtacaaaacaataaaaaagtacttgaagaaaacctgga

SEQ ID NO: 116896 - DNA, 120 bp, Artificial Sequence
  ENSG00000100578_16 (sequence is synthesized)
agctattattcgtgcaaaagatggagctgccatgtattcgcttatcaatgctttatctaccaacagagagatgtcagagaaaattaggatcagaaagacagtggatgaatggattaaaac

SEQ ID NO: 116897 - DNA, 120 bp, Artificial Sequence
  ENSG00000100578_17 (sequence is synthesized)
tatttctgcagaaattcaggatgaactgtcaagaacagattatgaacaaaaaagatttgatcagaagaatcagagaaccaagaaaggtcagaatatgactaaagatattagaaccaacac

SEQ ID NO: 116898 - DNA, 120 bp, Artificial Sequence
  ENSG00000100578_18 (sequence is synthesized)
acaagataaaactgtcaacaaatctgtaattccaagaaaacattctcaaaagcaaatagaagagcattttagaaatctacctatgaggggcatgcctgcttcaagtttacagaaagagag

SEQ ID NO: 116899 - DNA, 120 bp, Artificial Sequence
  ENSG00000100578_19 (sequence is synthesized)
aaaggaagggcttttgaaagcaaccacagtaatacaagatgaagattatatgttacaagtctatggaaagccagtttatcagggccatcgaagcactcttaaaaaaggaccatatctcag

SEQ ID NO: 116900 - DNA, 120 bp, Artificial Sequence
  ENSG00000100578_20 (sequence is synthesized)
atttaattctccatctcctaagtccagaccacagagaccaaaagtaatagaacgagttaaaggcactaaggtaaagtcaataagaacacagactgacttctatgcaacaaaacctaagaa

SEQ ID NO: 116901 - DNA, 120 bp, Artificial Sequence
  ENSG00000100578_21 (sequence is synthesized)
cccaagtagagaaatgcctactttttcaggtacattggaaggtcatctgattcctatggcaattcttttaggacaaacccaaagtaatagtgataccatgccacctgctggagtgattgt

SEQ ID NO: 116902 - DNA, 120 bp, Artificial Sequence
  ENSG00000100578_22 (sequence is synthesized)
cagcaagccacaccctgtaactgtgactacttctattcctccatcatctcgaaaagtagaaactggagtaaagaaacctaacatagccattgtagaaatgaagtcagaaaaaaaggatcc

SEQ ID NO: 116903 - DNA, 120 bp, Artificial Sequence
  ENSG00000100578_23 (sequence is synthesized)
tcctcagcttactgtgcaggtattacccagtgtagatattgacagcatttcaaatagtagtgctgatgtcctttcacctctgtctagccccaaagaagcatctcttcctcctgtgcaaac

SEQ ID NO: 116904 - DNA, 120 bp, Artificial Sequence
  ENSG00000100578_24 (sequence is synthesized)
ttggataaagactccagaaattatgaaggtagatgaagaagaggtgaagtttccaggaactaactttgatgaaataatcgatgtcatacaggaagaagaaaaatgtgatgaaattccaga

SEQ ID NO: 116905 - DNA, 120 bp, Artificial Sequence
  ENSG00000100578_25 (sequence is synthesized)
ctctgaaccaattctggagtttaacagaagtgttaaagctgattctacaaaatataatggtcctccatttccgccagttgcttctacttttcagcccactgctgatattctggataaagt

SEQ ID NO: 116906 - DNA, 120 bp, Artificial Sequence
  ENSG00000100578_26 (sequence is synthesized)
aattgagagaaaagaaacactggaaaatagcttaattcaatgggtagagcaagaaataatgtcaagaattatctctgggctctttccagtccagcaacagattgcacctagtatcagtgt

SEQ ID NO: 116907 - DNA, 120 bp, Artificial Sequence
  ENSG00000100578_27 (sequence is synthesized)
ttcagtcagtgagacaagtgaaccactgacttctgacattgtggaaggaacaagcagtggcgccctccagctttttgttgatgctggtgttcctgtgaactcaaatgtgattaaacattt

SEQ ID NO: 116908 - DNA, 120 bp, Artificial Sequence
  ENSG00000100578_28 (sequence is synthesized)
tgttaacgaagctcttgctgagaccattgctgtcatgctgggtgacagagaagcaaagaagcaaggtcctgttgctacaggtgtttctggggatgcttcaacaaatgaaacatatttgcc

SEQ ID NO: 116909 - DNA, 120 bp, Artificial Sequence
  ENSG00000100578_29 (sequence is synthesized)
ggcaagagtgtgcaccccactgcctaccccacagcctacgcctccttgctcaccttcatcacctgctaaggagtgtgttttggtaaagactccagattcttctccctgtgattcggatca

SEQ ID NO: 116910 - DNA, 120 bp, Artificial Sequence
  ENSG00000100578_30 (sequence is synthesized)
tgatatggcttttcctgtgaaagaaatatgtgctgaaaaaggagatgatatgcctgccatcatgcttgttaatactccaacagttacccctactactacacctcctccagcggcggcagt

SEQ ID NO: 116911 - DNA, 120 bp, Artificial Sequence
  ENSG00000100578_31 (sequence is synthesized)
ttttaccccaactttgtcagatatttccattgataaattgaaggtatcaagcccagagcttcccaagccatggggtgatggagacctgccactggaagaagagaaccctaactcacctca

SEQ ID NO: 116912 - DNA, 120 bp, Artificial Sequence
  ENSG00000100578_32 (sequence is synthesized)
agaagaacttcatccaagagctattgtaatgtctgtggctaaggatgaagaaccagagagtatggatttccctgctcagcctccacctccagagccagttccctttatgccatttcctgc

SEQ ID NO: 116913 - DNA, 120 bp, Artificial Sequence
  ENSG00000100578_33 (sequence is synthesized)
cggcaccaaggccccttccccctcacagatgccaggttctgattcatcaacactggagagcacattgagtgttactgtcactgaaactgaaactttagataaacccatctctgaaggaga

SEQ ID NO: 116914 - DNA, 120 bp, Artificial Sequence
  ENSG00000100578_34 (sequence is synthesized)
gattttatttagctgtggtcaaaaattggcccccaagattttagaagatataggactgtacctgacaaaccttaatgatagcttatccagcactctgcatgatgccgttgaaatggagga

SEQ ID NO: 116915 - DNA, 120 bp, Artificial Sequence
  ENSG00000100578_35 (sequence is synthesized)
tgatcctcctagtgaagggcaagtgattaggatgtcccataaaaaatttcatgcagatgcaattctttcttttgctaaacaaaaccaggagtcagcagtttcccagcaagcagtctatca

SEQ ID NO: 116916 - DNA, 120 bp, Artificial Sequence
  ENSG00000100578_36 (sequence is synthesized)
ttcagaggacttggaaaacagtgtgggtgaacttagtgaaggacaaagaccccagctaacagcggcagcagagaacatcttaatgggacattctctctatatgcagccacctgtcactaa

SEQ ID NO: 116917 - DNA, 120 bp, Artificial Sequence
  ENSG00000100578_37 (sequence is synthesized)
tacacagtctttggatcaacaatgtgatcctaaaccattatctcggcaatttgacacagtttcaggtagtatttatgaagattcatgtgctagtcatggtccaatgagtttgggagaatt

SEQ ID NO: 116918 - DNA, 120 bp, Artificial Sequence
  ENSG00000100578_38 (sequence is synthesized)
ggagttggagccaaattctaagctggttcttcccacaacacttctgacagcacaagaaaatgatgttaatttaccagtagccgctgaagatttttcccagtaccaactaaagcaaaatca

SEQ ID NO: 116919 - DNA, 120 bp, Artificial Sequence
  ENSG00000100578_39 (sequence is synthesized)
ggatgttaagcaagttgaacacaaaccatcacaaagttacctacgtgttagaaataaatctgatattgcaccttcacagcaacaagtttcaccaggtgatatggatcggacacaaattga

SEQ ID NO: 116920 - DNA, 120 bp, Artificial Sequence
  ENSG00000100578_40 (sequence is synthesized)
gcttaatccgtacctcacatgtgtattttcaggtttgggggtacatgtgaagaaggtttcctgtataggtaaactcgggctgtggaggtttgtcatacagattatttcatcacccaggtg

SEQ ID NO: 116921 - DNA, 120 bp, Artificial Sequence
  ENSG00000100578_41 (sequence is synthesized)
ggaaagcagtgccactctccgcttcacagatgccccctgccaagatgtcagtgatgctgccgtcagtgaacctcgaggactgctctcagtctctgagtctcagcacaatgcaggaggaca

SEQ ID NO: 116922 - DNA, 120 bp, Artificial Sequence
  ENSG00000100578_42 (sequence is synthesized)
tggagtcttcgggggcagataccttctgaacgggaagagacagccagcacagtgtttatgccactggttttaaagtcattttaccttggcttaaaaccctctctcagactgtttggtttt

SEQ ID NO: 116923 - DNA, 120 bp, Artificial Sequence
  ENSG00000100578_43 (sequence is synthesized)
ttgtttcttagaatcctgagatagcatagagtagtgaaagggcatggcttttgacatctaggcatttaatctataggtgtaattatctgtatgtatttataaaattatgtagctcaaggt

SEQ ID NO: 116924 - DNA, 120 bp, Artificial Sequence
  ENSG00000100578_44 (sequence is synthesized)
tattcattctaacatttttataacagcaaatagaaaaaatcaaatgtctatcaataatagactggttttaaagtgatggtacatcagtacaatggaatactatgtattacaaaaaaaaat

SEQ ID NO: 116925 - DNA, 120 bp, Artificial Sequence
  ENSG00000100578_45 (sequence is synthesized)
ttaaaaagtttattgatatggaataatctttgagatgcactgttaaagtgaaaaaagccatgtgcaaaatagtgtgtgaactatgcagttgttgaaattatttaaaatggggtggggagg

SEQ ID NO: 116926 - DNA, 120 bp, Artificial Sequence
  ENSG00000100578_46 (sequence is synthesized)
gagtagaattgttggctgggtgataggagaggctaagtgataggaatcaaggataatcgtggttactatgtatttgaacttcagttgtgatagaaaaaaatcatcagtgagattaatttt

SEQ ID NO: 116927 - DNA, 120 bp, Artificial Sequence
  ENSG00000100578_47 (sequence is synthesized)
tatatgccttatgtataccatataaacctttataaacctgtgaaacatgtaactctattaccttttgcaacataaatacataaaattaaaggaaaataaaaagcattgcttcgtaatcag

SEQ ID NO: 116928 - DNA, 120 bp, Artificial Sequence
  ENSG00000100578_48 (sequence is synthesized)
cgccttcttatcagctgtttcagattaatgggtttaatacttatttttgcagaataatggacatcagtgattgtgtgtggagatgggggtgggtagtgcccagcacagtgcttgatacca

SEQ ID NO: 116929 - DNA, 120 bp, Artificial Sequence
  ENSG00000100578_49 (sequence is synthesized)
tgtaagtgctcaataaatggtgttgttcttattatcttgagggatttcagtactgtatagtagagggcataagcacatgaaaagaaaggcagcctagcactagtgaaaaaaatttacctc

SEQ ID NO: 116930 - DNA, 120 bp, Artificial Sequence
  ENSG00000100578_50 (sequence is synthesized)
ccagaaaaatcattttctgtcacaactgaatttcaaacacacagtaattacagtcatccttgactttttcagcatttttgtaggttgctaagtggatctcagcactggcagcacattaga

SEQ ID NO: 116931 - DNA, 120 bp, Artificial Sequence
  ENSG00000100578_51 (sequence is synthesized)
acctctgggagctttaaaaaatactaatgcctgggccttgtaccaagggatttcaatttaattgatcttggatggggtccagcattggtattaaaaaaaaaaaaagaccttttcaggtaa

SEQ ID NO: 116932 - DNA, 120 bp, Artificial Sequence
  ENSG00000100578_52 (sequence is synthesized)
ttttaatgggcactcaaggctgagaattactgaagagcaatttagaattccttaaacttctagtaggagccattgcctggggattttttttctcactgaacatagaagctgcaagagtct

SEQ ID NO: 116933 - DNA, 120 bp, Artificial Sequence
  ENSG00000100578_53 (sequence is synthesized)
atggaaactcagaaatgtgtcagccttccacatgcacttcctcacagcttctctcaggtatttggttactggaatgttttaggtttcactttagaacccgttttctttgatatggccctt

SEQ ID NO: 116934 - DNA, 120 bp, Artificial Sequence
  ENSG00000100578_54 (sequence is synthesized)
tggacagttctgcttataacagtttcctttaaacaagtggaagaaaaattctgctctgtggattttaatttgtttttgatattcatctacaagactctgggcaaggtgaaagctggagaa

SEQ ID NO: 116935 - DNA, 120 bp, Artificial Sequence
  ENSG00000100578_55 (sequence is synthesized)
atgttgcttagtgctgcttcattttaaacatgacaccccaccccccaaccttggtttctggttttcatagttttttctgccttggaaggatttcagcaaaatcttgttttagttaaagca

SEQ ID NO: 116936 - DNA, 120 bp, Artificial Sequence
  ENSG00000100578_56 (sequence is synthesized)
ttttttatttaaaggtgttggtagatttttcctcctaaccatagaaagcctgccttttctaactttagggtagaagtgtaatctttgatttattctactccctgtgcacgtgagcttttc

SEQ ID NO: 116937 - DNA, 89 bp, Artificial Sequence
  ENSG00000100578_57 (sequence is synthesized)
atctttgatttattctactccctgtgcacgtgagcttttcttttaaaaaaaattagtgtccattcgacggtttcgttgcccaggctgga

SEQ ID NO: 116938 - DNA, 70 bp, Artificial Sequence
  ENSG00000100578_58 (sequence is synthesized)
catctagtattttgttttataggattatttctgttcatggttactcctgtacacattcctctgccaacca

SEQ ID NO: 116939 - DNA, 120 bp, Artificial Sequence
  ENSG00000100578_59 (sequence is synthesized)
ctgttcatggttactcctgtacacattcctctgccaaccacttcagattcttttggaataagacgatgtacgtaaaaacaaactaaatggaacttttgattttataagctttaaaatttt

SEQ ID NO: 116940 - DNA, 120 bp, Artificial Sequence
  ENSG00000100578_60 (sequence is synthesized)
tattttatattaaattttacaatttccaacttccggaataaactatttatgagacatgctattaagagactatcaagatcaaggctgttactattgctgggctgtgactggacacggtgg

SEQ ID NO: 116941 - DNA, 120 bp, Artificial Sequence
  ENSG00000100578_61 (sequence is synthesized)
tggtcatggttgcacacacctgtagccccagctactcaagagggtgaggtgagaggatcgcttgagcccaggatgtcaagactgcagtgagccgtggttgtgccactgcactccagcctg

SEQ ID NO: 116942 - DNA, 120 bp, Artificial Sequence
  ENSG00000100578_62 (sequence is synthesized)
ggtgacagaatgagaccgtgtctcaaaaaaaaaaaaaaaaaaattgctgagctatcatgccttaacactaggtaacgtgtttaaaatgttcctttctgctgggtgcgggtggctcacacc

SEQ ID NO: 116943 - DNA, 120 bp, Artificial Sequence
  ENSG00000100578_63 (sequence is synthesized)
gctgttgtcagattacacccacgacggtgcgggtctcgggcgttctggagatacgtaggggtgaatttatgtttccgacgattgcatctggaggggtgtgtaagactctgtggctgaaga

SEQ ID NO: 116944 - DNA, 120 bp, Artificial Sequence
  ENSG00000100578_64 (sequence is synthesized)
aagctattacgcttcttatgtgggtcattattttaaaaatagcatttcgcttttatttgcttgactgcctcttctcaacaaattttaagcccgccactacatgtgtttggttttgcccta

SEQ ID NO: 116945 - DNA, 120 bp, Artificial Sequence
  ENSG00000100578_65 (sequence is synthesized)
ccagctctggggttggggagtgcactgttatggttattgttgctcctgtggccattctcttgtcatccccactttcacattttggcgtggtgtattaatagactgagtgggattaatggg

SEQ ID NO: 116946 - DNA, 120 bp, Artificial Sequence
  ENSG00000100578_66 (sequence is synthesized)
taaatatgactttatagtcagctctaatcctggattcaatatcagaatttagattttcagctttgtggatgttcgacattttaaaaacagttattgcaaagaggtgaaaattttgttctg

SEQ ID NO: 116947 - DNA, 86 bp, Artificial Sequence
  ENSG00000100578_67 (sequence is synthesized)
atattctggataaagtaattgagagaaaagaaacactggaaaatagcttaattcaatgacagggtctcactctattgcctaggctg

SEQ ID NO: 116948 - DNA, 120 bp, Artificial Sequence
  ENSG00000100578_68 (sequence is synthesized)
tagaagtcagagtgccaaaataattctctggagctctcaggactttgggtgaccttgaaggaattcaatcctctcatacatagaaaccttgaagataatgaaggaaattcaccttatcac

SEQ ID NO: 116949 - DNA, 120 bp, Artificial Sequence
  ENSG00000100578_69 (sequence is synthesized)
aggggaattaaaaccacatcttttctagcagataaatgcttccaagaatactagaaccccaaattttggctatttcagggggaagtatcatgtatttcacttgaaatgtgtagtagttta

SEQ ID NO: 116950 - DNA, 120 bp, Artificial Sequence
  ENSG00000100578_70 (sequence is synthesized)
atatatgtctataaagaaaggagcagtagcagctgttttaatgatcatccattaaaaattaactgaagaatggtaggacacagattccagcaccatattgctaggaacttagtaaagtac

SEQ ID NO: 116951 - DNA, 120 bp, Artificial Sequence
  ENSG00000100578_71 (sequence is synthesized)
ttagtttttttccaccttgattattactttcagattttaatataaaagagaggaattcattgttctgacaaatggtatctttggagcctttaagagtaaaaccttttaatttggtattga

SEQ ID NO: 116952 - DNA, 120 bp, Artificial Sequence
  ENSG00000100578_72 (sequence is synthesized)
atttattgggtctatctttgaccacgtgataccacttacctgattctatgtactgattaatgtatctaacagttttatagtgaaagtactttttaaaaaagtatttgaatggtcatttct

SEQ ID NO: 116953 - DNA, 120 bp, Artificial Sequence
  ENSG00000100578_73 (sequence is synthesized)
atttttccccctttgctgtacaagttaatttttactcatcttttgctgtacaaattaactttcatcaatacaaataagaggctagttttaagtcaatttatttgtcatgagcccaggaac

SEQ ID NO: 116954 - DNA, 120 bp, Artificial Sequence
  ENSG00000100578_74 (sequence is synthesized)
tttgtcatgagcccaggaacaattaaattctataaagtaatgtattaaaatagtacactttaaaaattattttccttctttttttctctttaaattttaagaccatcataataaattatc

SEQ ID NO: 116955 - DNA, 120 bp, Artificial Sequence
  ENSG00000100578_75 (sequence is synthesized)
atatactactatcagtcaatggggaaaaaataagtcatatgttttatggtaaaatgctgtaatagattggattgtcaaatttgcttgaaaaaaatcacagcagtttttagtttttcttat

SEQ ID NO: 116956 - DNA, 120 bp, Artificial Sequence
  ENSG00000100578_76 (sequence is synthesized)
ttgtagattacacgttactcagaaaataagtatcaaagtgctaaaagtaataggtgtaattgctgttatttgtcaaaatcagtttacatttttgtgggaaatacagaatcacaaatattt

SEQ ID NO: 116957 - DNA, 120 bp, Artificial Sequence
  ENSG00000100578_77 (sequence is synthesized)
ctttctggcattatgtcctgagttaaattctagaaaatttagcaccttttatactcatatagctgtgacaataactttaaatatgtgaacattaggaaattcaaagcttatatattctta

SEQ ID NO: 116958 - DNA, 120 bp, Artificial Sequence
  ENSG00000100578_78 (sequence is synthesized)
gaagctaattttgaccacgtgcgcaaattatttttcttttttagtagaatggtgcattttttgcctttgtatttgaaatttagctaaattacaatagctatcagaactacaattgacctt

SEQ ID NO: 116959 - DNA, 120 bp, Artificial Sequence
  ENSG00000100578_79 (sequence is synthesized)
agtaatttcaaaaccatagttataagggttttaagttgatttttaaaaatcttaagatatgatagggatttcaaaactatgtgtgtgtatctctgatagggaggggttggggcacagact

SEQ ID NO: 116960 - DNA, 120 bp, Artificial Sequence
  ENSG00000100578_80 (sequence is synthesized)
aataagtgtgccaaaaatctgtgaatccaaatgtgtaacaagtgttgtctgaataaatgtccacaaatccatgctattattggttaacaaaaaataaattcactttgaaatgttgctgaa

SEQ ID NO: 116961 - DNA, 120 bp, Artificial Sequence
  ENSG00000100578_81 (sequence is synthesized)
tgtttttatgtaataatacaatagtttgatacttgtctgaatattgaacaaatatgagaattctttactttttatacatcccactgctctctaggtttttgttttcttttgttttctctc

SEQ ID NO: 116962 - DNA, 120 bp, Artificial Sequence
  ENSG00000100578_82 (sequence is synthesized)
atttagtccatttacatgaagaatcggtattgtatttgactatgttagttctttttaccagtaaacactatttctagtggattttttaaactcttagctggtgtctttcctttacccttg

SEQ ID NO: 116963 - DNA, 120 bp, Artificial Sequence
  ENSG00000100578_83 (sequence is synthesized)
ccttttagttcttgttcaattgaataccaaggtctttttatctgtatataggtctgtttgacattacaatatgttaaagacagggattatggctgtatttaatatgctttgtaaagcaca

SEQ ID NO: 116964 - DNA, 120 bp, Artificial Sequence
  ENSG00000100578_84 (sequence is synthesized)
ttatttagtgcgtggtggtgctgaccaagtataacttaaaagcaattgcctctcatattacatactgtgatatggatgaccatatcatagttctttatcaaactcgtgtggttaccttta

SEQ ID NO: 116965 - DNA, 120 bp, Artificial Sequence
  ENSG00000100578_85 (sequence is synthesized)
attccacagtcagcgttcaagcattttgatgttgtctctatgtttctacaaggctgttggccttgtgttttgtttgccatcttgcttcttagtcatttacattttctataacctaaaatc

SEQ ID NO: 116966 - DNA, 120 bp, Artificial Sequence
  ENSG00000100578_86 (sequence is synthesized)
tgaaatttggcagtagaaattaagatctcttctgtttaaaaactttctgcccacaattctggaagaagtattagaaatattttgagaagtggaatttttcttttttgcttttataactgt

SEQ ID NO: 116967 - DNA, 120 bp, Artificial Sequence
  ENSG00000100578_87 (sequence is synthesized)
gatttttatttaattttcaaataatatttaattgagcaaatgcatattattgaatgccggtataattgcgaatgtaactatgcatttggtgttttgggaaggacctaaatgaggaagtgc

SEQ ID NO: 116968 - DNA, 120 bp, Artificial Sequence
  ENSG00000100578_88 (sequence is synthesized)
tcaagatagtaagattatgccacttaaggtttaggttttcactcttccatttgttgtctgttcccctcttgctccaagttttcagaactttgtcctcctgaccctttttttttttaacct

SEQ ID NO: 116969 - DNA, 120 bp, Artificial Sequence
  ENSG00000100578_89 (sequence is synthesized)
caccatagtacgttaatattaatgtactatggaaaatacctataaaactcttcttctggtgatttaagaattaatcatgatagtatatcgatatgggcagataaatgtttctaagataat

SEQ ID NO: 116970 - DNA, 120 bp, Artificial Sequence
  ENSG00000100578_90 (sequence is synthesized)
gtcagaatttacttcatgttcttctactgagttctcatttatgaactgtccttcgcagtcaatgatagtttctttaatgtttttaaaaatcaatcatttttggcattacaaatgaatttc

SEQ ID NO: 116971 - DNA, 120 bp, Artificial Sequence
  ENSG00000100578_91 (sequence is synthesized)
attttcttgaggatgttgtatgtaatgaaataattatttttctcagctgataggaaaatgtctctggtaagatgttagctggtagaaggaagttttatgtggaaagggtttacaacagtt

SEQ ID NO: 116972 - DNA, 120 bp, Artificial Sequence
  ENSG00000100578_92 (sequence is synthesized)
ggatttaatacatttgaaatgttttacatttaattttacatctaatacaaaaggtaggagagcagacctataccagccttgactaaaacaaataaataccagtgggctataaagagaaca

SEQ ID NO: 116973 - DNA, 120 bp, Artificial Sequence
  ENSG00000100578_93 (sequence is synthesized)
ttttaaatacaggcgaagtctttcactctataattggtacatatctttatactagaaaatttcttgaatgaatatgattgccttggcaaatataatcagttatgacttttttccccatag

SEQ ID NO: 116974 - DNA, 120 bp, Artificial Sequence
  ENSG00000100578_94 (sequence is synthesized)
tgctaagacagtagatcttaaatgttctcatcacataaaaagataattatgtgaagtgatgggtatgctaatagcttgactataatcgttttacaatgtatacatatatcaaaatatcac

SEQ ID NO: 116975 - DNA, 120 bp, Artificial Sequence
  ENSG00000100578_95 (sequence is synthesized)
actgtaaatatatacaattttttttcaattatacctcagtaaagtgggataaaaaatagtcacaaagtgtacatcaatagtgctgtaattcttacaattctttttttttttttttttttt

SEQ ID NO: 116976 - DNA, 120 bp, Artificial Sequence
  ENSG00000100578_96 (sequence is synthesized)
gagttcttatttcactgatgggatcaactattctgtctgagaatttggagacggggtctcactatgttggctaggctgatctccaacttctgaccgcaagtgatcctcctgcctcagcct

SEQ ID NO: 116977 - DNA, 120 bp, Artificial Sequence
  ENSG00000100578_97 (sequence is synthesized)
agacaccaaaatattttttcttgatgtgtcatagtagtatccctaatctgagttgaggaaagtatacctattttcagataggggcttgcaaaatttctttattaaaagggattttaataa

SEQ ID NO: 116978 - DNA, 120 bp, Artificial Sequence
  ENSG00000100578_98 (sequence is synthesized)
gaaagtgctgtggccctagagagatggataaaacaaagcatctgctctcccgggataaaaagaagaaaggccattttgtgaagagatgaagactgagcggttgtggccgccttgccgacc

SEQ ID NO: 116979 - DNA, 120 bp, Artificial Sequence
  ENSG00000100578_99 (sequence is synthesized)
ttgagcagcagttggcttctccacatagtacccgggaataggagtctcagaatcgaatctcttctgcctgctcacttctgtgagatttttttgatcttcagctacatttttggctttgtg

SEQ ID NO: 116980 - DNA, 78 bp, Artificial Sequence
  ENSG00000100578_100 (sequence is synthesized)
cctgtcactaatacacagtctttggatcaacaatgtgatcctaaaccattatctcggcaatttgacacagtttcacac

SEQ ID NO: 116981 - DNA, 120 bp, Artificial Sequence
  ENSG00000100578_101 (sequence is synthesized)
tctcctgacctcgtgatccgccctccatggcctcccaaagtgctggaattacagagacgaggtctcattttgttacccagactggagtgcagtgatgcgatctcagctcagtgcaacctc

SEQ ID NO: 116982 - DNA, 120 bp, Artificial Sequence
  ENSG00000100578_102 (sequence is synthesized)
aagcctcatcatccaacacagtggccagcaacgttgccgacaagacggatcctcactccatgaactcccgtgtgttcattgggaatctcaacactcttgtgctccagaaatctgatgtgg

SEQ ID NO: 116983 - DNA, 120 bp, Artificial Sequence
  ENSG00000100578_103 (sequence is synthesized)
aggcagtcttttcaaagtattgcaaaattgtgggctgctctgttcataagggctttgcctttgtttagtatgttaatgagagaaatgcccgggccgctgtaggtggagatgtacagctcc

SEQ ID NO: 116984 - DNA, 120 bp, Artificial Sequence
  ENSG00000100578_104 (sequence is synthesized)
tcttttgacttggaccatgactttcaacgggattattatgataggatgtacagttacccagcacatgttcctcctcctcctattgctcgggctgtagtgccctcgaaatgtcagcatgta

SEQ ID NO: 116985 - DNA, 120 bp, Artificial Sequence
  ENSG00000100578_105 (sequence is synthesized)
tcaggaaacatgaaggggaaaaagtggcttcaattctaagagaggacagcggggatcttccaagtctggaaagttgaaaggagatgaccttcaggccattaagaaggaattgacccagat

SEQ ID NO: 116986 - DNA, 120 bp, Artificial Sequence
  ENSG00000100578_106 (sequence is synthesized)
aaaacaaaaagtggattctctcttagaaaacctagaagaaaattgaaaaggaacaggggaaacaagcagtagagatgaaggatgataagtcggaagaggagcagagcagtagttccatga

SEQ ID NO: 116987 - DNA, 120 bp, Artificial Sequence
  ENSG00000100578_107 (sequence is synthesized)
agaaagatgagactaatgtgaaggtggagtcggagcggggtgcagatgactttgctgaggaggacctactagatgatgatgacaatgaagatgggggatgaccagctggagttgatcaag

SEQ ID NO: 116988 - DNA, 120 bp, Artificial Sequence
  ENSG00000100578_108 (sequence is synthesized)
gatgatgaaaaagaggctgaagaaggagaggatgacagagacagcaccaatggcgaagataactcttaagcacatagtggggtttagaaatcttatcccatcatttctttacgtaggtgc

SEQ ID NO: 116989 - DNA, 120 bp, Artificial Sequence
  ENSG00000100578_109 (sequence is synthesized)
ttgtctaagatcaaatttttcaccagatcctctcccatggtatcttcagcacatgctcactgttctcccaatccttgtccttcccatgttcattaattcatagtgccctgcgcctagttc

SEQ ID NO: 116990 - DNA, 120 bp, Artificial Sequence
  ENSG00000100578_110 (sequence is synthesized)
atgagacggtaagcaagtagagaagtcaagatgacttcaacattttgagactgagagaaaaatgttattcttagtagaaatggggaaatatcaaagaggaagctcaaagcatgcctgttt

SEQ ID NO: 116991 - DNA, 77 bp, Artificial Sequence
  ENSG00000100578_111 (sequence is synthesized)
cagtgctgggattacagtgtctcactttgtctcacaggctggagtgatcacagtggggtgatcacaactcactgcag

SEQ ID NO: 116992 - DNA, 120 bp, Artificial Sequence
  ENSG00000100578_112 (sequence is synthesized)
tatttcctattgatagtcattaaaattcagctgtttaacttccttctttacattcaggccactagatcaaacttctgtttacctggttttatgagaataacggtgggagtgcatttggtt

SEQ ID NO: 116993 - DNA, 120 bp, Artificial Sequence
  ENSG00000100578_113 (sequence is synthesized)
tgtgttcttttagtgaataggaatgaatcatgattatttctatgcttaactgattttcttctgaaaaaataaatttttatgtagtttcaccaggtgatatggatcggacacaaattgagc

SEQ ID NO: 116994 - DNA, 89 bp, Artificial Sequence
  ENSG00000100578_114 (sequence is synthesized)
aaccatcacaaagttacctacgtgttagaaataaatctgatattgcaccttcacagcaacaagagacaaggtctcactctgttgtccaa

SEQ ID NO: 116995 - DNA, 120 bp, Artificial Sequence
  ENSG00000100578_115 (sequence is synthesized)
gagccaccgcacctggcaacataatgttttcaaggtccatccatattgtagcaggtatcattactttatttttttttgtagatgaataatattccattgtgcattcattcttaggttaat

SEQ ID NO: 116996 - DNA, 120 bp, Artificial Sequence
  ENSG00000100578_116 (sequence is synthesized)
ctgatattgcaccttcacagcaacaagttttgatcagcaggataaagaattgtaagaactgacaaacttgagaagcagttttcaagttgtgttgacctagttgtaggccgtgtttgctgt

SEQ ID NO: 116997 - DNA, 120 bp, Artificial Sequence
  ENSG00000100578_117 (sequence is synthesized)
tttaatcatcaactgcagagcacaatactcacccttccagtaaacctcgtaaatcaacaagtgagaattatgaagccacttacttgttataagaataaaagtggtcaactctgatactgt

SEQ ID NO: 116998 - DNA, 120 bp, Artificial Sequence
  ENSG00000100580_0 (sequence is synthesized)
actcgcggctggcagcggagagctccgtgcgcgggctgcagatgtctgacctgcaggcggctgaggggccgggctcctggagccccacagcccgcccagggtcggctggcggcgtcgggg

SEQ ID NO: 116999 - DNA, 120 bp, Artificial Sequence
  ENSG00000100580_1 (sequence is synthesized)
actgccagggagtggaggggagccaggcggccgcctcagagaatgaagatctagaaaacaaggatacctctttattggcttctgccaccgatccagaaccctgctcctcaccccacaggc

SEQ ID NO: 117000 - DNA, 120 bp, Artificial Sequence
  ENSG00000100580_2 (sequence is synthesized)
cacagatggtatctccagtgagtaaggatgccacggaagatctgcggaaagcaactggtcctttggaggctcaggccttggtgaaacaggatttgctgcctgcagaccaggcccaggtcc

SEQ ID NO: 117001 - DNA, 120 bp, Artificial Sequence
  ENSG00000100580_3 (sequence is synthesized)
tcaatgagatggctaagtatcaagttccacagaggtctggggacatcgttatgatccagtctgaacatacaggagctatagatgttctttcagctgatttggaatctgcagatcttctgg

SEQ ID NO: 117002 - DNA, 120 bp, Artificial Sequence
  ENSG00000100580_4 (sequence is synthesized)
gggaccacaggaaagtctccccacctctgatggctcctccatgcatctggacctttgccaaggtgaaggaattcaaaagcaagctgggcaaagagaagaacagccgtctggtggtgaagc

SEQ ID NO: 117003 - DNA, 120 bp, Artificial Sequence
  ENSG00000100580_5 (sequence is synthesized)
gtggtgaggtggtgaccatccgggtacctactcatccagaggggaagcgtgtctgctgggagtttgcgaccgatgactatgacattggctttggagtttattttgactggacccctgtaa

SEQ ID NO: 117004 - DNA, 120 bp, Artificial Sequence
  ENSG00000100580_6 (sequence is synthesized)
ctagcactgacataactgtgcaggtcagtgattccagtgacgatgaggatgaagaagaggaagaggaggaagagattgaagaacccgttccagctggagatgtggagagaggctccagga

SEQ ID NO: 117005 - DNA, 120 bp, Artificial Sequence
  ENSG00000100580_7 (sequence is synthesized)
gctccttgcggggtcgctatggggaggtcatgcctgtgtaccggcgggacagccaccgagacgtgcaggctggcagccatgactaccctggtgagggcatctacctgctcaagttcgaca

SEQ ID NO: 117006 - DNA, 120 bp, Artificial Sequence
  ENSG00000100580_8 (sequence is synthesized)
actcctactccctgctgcgcaacaagactctctacttccacatctactacaccagctgaaggactgctgggacaggggcaggctgtatttgctggctgaagcaggctgccagctggtgcc

SEQ ID NO: 117007 - DNA, 120 bp, Artificial Sequence
  ENSG00000100580_9 (sequence is synthesized)
tcttgtttgggataggcaagagccaaaggttcatggggggctgctgagcctcacaccctgtctggcatgcctgactgttggcccacgtagctttttccccttcttggcttctgcaggtgg

SEQ ID NO: 117008 - DNA, 120 bp, Artificial Sequence
  ENSG00000100580_10 (sequence is synthesized)
tggtgtagtgcccctgttctgtagtccctgactcatacccttcttgcttcagactccagcaaattccctcttgaaggcacctatggggcacaagcctaaaaggaagcagggcgatgtttt

SEQ ID NO: 117009 - DNA, 120 bp, Artificial Sequence
  ENSG00000100580_11 (sequence is synthesized)
ttaaaaatagattcatcttggcacaggtttatcattcagattgctgccctctcctctcccacagcccttattgccagtgcatttagtggcacccactctcttcagttgttgaggtgccag

SEQ ID NO: 117010 - DNA, 120 bp, Artificial Sequence
  ENSG00000100580_12 (sequence is synthesized)
aagagggaaaagcacattgcccatgaaggagccccatcttttggttggagaaagctctatccagcctgtcaccactgccatattcctgcctgctggttattcttggtctctgcatagctg

SEQ ID NO: 117011 - DNA, 120 bp, Artificial Sequence
  ENSG00000100580_13 (sequence is synthesized)
ggagaccacactgcctttggagggctattactattcctgatggtagacaccccctcctttctctttcctaagtctatgtttttgccattacagcaagaacattcatgcaatctcaagtga

SEQ ID NO: 117012 - DNA, 120 bp, Artificial Sequence
  ENSG00000100580_14 (sequence is synthesized)
tgatcaatgtaacctaagatcttgtgggaagaaaaactgcccccattatttcctattccaagagctggtttcccttactatgggcactggcagtcaaagtggagagagtggaaattaggt

SEQ ID NO: 117013 - DNA, 120 bp, Artificial Sequence
  ENSG00000100580_15 (sequence is synthesized)
actgaattgatgtcagaacccacatatttgaaagtcgtgttacttttttttttttttttggtataatcaaagaaggaatggtatcatctgacagagaagatgaaaaacaaaaaacactcc

SEQ ID NO: 117014 - DNA, 120 bp, Artificial Sequence
  ENSG00000100580_16 (sequence is synthesized)
agagtccccaccgcttttttttgtctttagagtaggagtgctgtttagaaatgttgctttggaatcaaatgcagtgaaacccaatcaggtttccaaagtttctgcatttagctttcttgc

SEQ ID NO: 117015 - DNA, 120 bp, Artificial Sequence
  ENSG00000100580_17 (sequence is synthesized)
attgagggcttaaagcttttggtgttcaaagtcccttagtttaggtgataatgaagcttcactattgctgctgattgtatttgttctttacctgaccaaagcttgcatttccctggtgac

SEQ ID NO: 117016 - DNA, 120 bp, Artificial Sequence
  ENSG00000100580_18 (sequence is synthesized)
agcatttcctactgtgtcacccctgaggctcaggagtgccacagagtgcaggtagtgctgcagccagtggtcaccagagcaccagctgctgggcccccaggcggaggaggagacggaggt

SEQ ID NO: 117017 - DNA, 120 bp, Artificial Sequence
  ENSG00000100580_19 (sequence is synthesized)
gagatgggacctcagcagtctctgtgtttgtacctccctgtctcttactcctcgtgttatgtctgttactgcctacgaattctgaagaataattagatttatttattactgtatttattt

SEQ ID NO: 117018 - DNA, 120 bp, Artificial Sequence
  ENSG00000100580_20 (sequence is synthesized)
ttttagcacatttcattttgcctttgaaacagtttccatctgtttctcagaaggcttcccatctgttctgagccactgaagccccctcttttatggagttaaagatgatatttttaggag

SEQ ID NO: 117019 - DNA, 120 bp, Artificial Sequence
  ENSG00000100580_21 (sequence is synthesized)
aatttgggaagcgatgatgttttatttctgtaggtcagtcctgtgacggctttgcgaggagtatggcccttcagagatggatgatgccaccttactccatgtttggggtacagtccagca

SEQ ID NO: 117020 - DNA, 120 bp, Artificial Sequence
  ENSG00000100580_22 (sequence is synthesized)
ctccccatgaaaaattctaagttgtgagggaatctgcccatttgctggagattgagtgcagaggaattccctaaccaatcagagatatcccgtgattccaggatttcagagtcctttgtc

SEQ ID NO: 117021 - DNA, 120 bp, Artificial Sequence
  ENSG00000100580_23 (sequence is synthesized)
tcctctgaggtgtcaccttctttgtgatgtttcctttgactcattgttagattcctcacaccaagggtctatccctacagtagcataactcaaggaacgggactcttcccagtgggtccc

SEQ ID NO: 117022 - DNA, 120 bp, Artificial Sequence
  ENSG00000100580_24 (sequence is synthesized)
tagtagcatctacatcacatcaaagggcaatatatcctgcacctgctcttcccctcggagcaaagccccaagtgggataggatgttggggactgccagagcattcccattctctgagcag

SEQ ID NO: 117023 - DNA, 120 bp, Artificial Sequence
  ENSG00000100580_25 (sequence is synthesized)
catcatacctccattattttatatttgcaaatgtgttttgtagaggattacactggccaacatttatatacctttaaagaaattattttagtgactgtctgttgaggcagtgaagagctg

SEQ ID NO: 117024 - DNA, 120 bp, Artificial Sequence
  ENSG00000100580_26 (sequence is synthesized)
atttgctgtgtgtcatcccattggatagctgagtgaccgctcttgcatcattgaagttgaatcatgccttagctaactgaatataatctttgtaaaataattttctactgagctgttttc

SEQ ID NO: 117025 - DNA, 120 bp, Artificial Sequence
  ENSG00000100580_27 (sequence is synthesized)
tagtcagctaaagccttgcttatttttcctgtttattattaacttctgcctttctctcaaattgaaacagtcaggccatacacagcaagctcccaaggataacacttgttattatttatt

SEQ ID NO: 117026 - DNA, 120 bp, Artificial Sequence
  ENSG00000100580_28 (sequence is synthesized)
ttcaccatgagattctctgcttattttctttggaatcctagttctgttgcatcagggaagcctaagggacttgttcccctcacctctgtgtgcctcttagggtctggtcacttttgaagt

SEQ ID NO: 117027 - DNA, 120 bp, Artificial Sequence
  ENSG00000100580_29 (sequence is synthesized)
cctgggcatggttacatttcattcatactggtttttcaccaactgtcagggtttctgtgttccattagcacaaaatagctaaaagaagatattttcactgtctaattcactattttcatg

SEQ ID NO: 117028 - DNA, 120 bp, Artificial Sequence
  ENSG00000100580_30 (sequence is synthesized)
ttacatttctgaaataattgaactttaggggcaagatactacttactgaagcacaggtaattactgagaacccacagcccagcaaattctaagagacagtcatttcctcagcccctccca

SEQ ID NO: 117029 - DNA, 120 bp, Artificial Sequence
  ENSG00000100580_31 (sequence is synthesized)
gtccaaatttatagacccaaacaatgaaatgaaaaccgtttgctttgatcctcaccctgttctctagagcacaaacaaatagtaacaaacaattgaaagaaagtgcttcatagtaggaga

SEQ ID NO: 117030 - DNA, 120 bp, Artificial Sequence
  ENSG00000100580_32 (sequence is synthesized)
tagaaaggaagacatatttaaagtattgatttcttttcccccagtgttttattgtgaaaaaatttcagcaaacagcttaaaagaaatataaatatattgtaaaccaaaaagtatctgaga

SEQ ID NO: 117031 - DNA, 120 bp, Artificial Sequence
  ENSG00000100580_33 (sequence is synthesized)
caggtctcaatacatttagaggtttattttgccaaggttcagagcccatgatggggcctcaggaggttcttagaacatgtgcccgaggtagtcgggttacagttttatacatttgaggga

SEQ ID NO: 117032 - DNA, 120 bp, Artificial Sequence
  ENSG00000100580_34 (sequence is synthesized)
gacagaaggtccaggcaaagccataaatcaatacatgtaaggtatacactggtttggcctggaaaggcaggacatcttgaagatgggggtttccaggtcagaggtagatcaaagagttcc

SEQ ID NO: 117033 - DNA, 120 bp, Artificial Sequence
  ENSG00000100580_35 (sequence is synthesized)
agagttcctgactggcagttggttgagagagttaaactttacctgaaaagatgaagtcagcttaagttaaagtaagggaggcttggcttaagtcatgtagatgaagcctccaggtagcag

SEQ ID NO: 117034 - DNA, 120 bp, Artificial Sequence
  ENSG00000100580_36 (sequence is synthesized)
gagaacagatgatgaatttttctttttaggccttaaaaggtgtcagactctccagaaaagacctaataagagaaggagattctctacagaatgcagtttcccccacaagagacagctttg

SEQ ID NO: 117035 - DNA, 120 bp, Artificial Sequence
  ENSG00000100580_37 (sequence is synthesized)
tagggccatttcaaaatacgtcaaataaatatattggggggtaaatttcctttggggcctgctgtcatgtgatgctataccagagtcaggttgggatttggtattttattgccacaaagg

SEQ ID NO: 117036 - DNA, 120 bp, Artificial Sequence
  ENSG00000100580_38 (sequence is synthesized)
ttttaatgttaatgctggtcagttgtatttaaattccaaagggaagagggtaatatgaggcaccctgtaatctgaccataatatgaggcaccctgtcttcccatcatggactagtttttc

SEQ ID NO: 117037 - DNA, 120 bp, Artificial Sequence
  ENSG00000100580_39 (sequence is synthesized)
ctgtcttcccatcatggactagtttttcaggttcctttgagatcccctgggccaagacaggggtccattcagccggttgggggatttagaatttatttttggtttgctgtatatatatgt

SEQ ID NO: 117038 - DNA, 120 bp, Artificial Sequence
  ENSG00000100580_40 (sequence is synthesized)
atacacacactccccgcataaatgtaaaaattttaaactaccaattcctaggcaaagatgattctaacattctgttccttttgacaagtgtccaattagagaatgctgagaatgtcccct

SEQ ID NO: 117039 - DNA, 120 bp, Artificial Sequence
  ENSG00000100580_41 (sequence is synthesized)
gcatatcggctctgttggagagcccctgatttttagcagacctgtttcattcaacatgggttacccaggaggtggtcttcataaaaatgtttcttggaggccaggcgccgtggcccacgc

SEQ ID NO: 117040 - DNA, 62 bp, Artificial Sequence
  ENSG00000100580_42 (sequence is synthesized)
tggaggcagaagcagggagaatttcttgagcccaggaggcagaggttgcagcgagccgagat

SEQ ID NO: 117041 - DNA, 120 bp, Artificial Sequence
  ENSG00000100580_43 (sequence is synthesized)
caagattccgtctcaaaaaaaaaaaaattgtttcttggtctccatctttcaagaaaatacatctgtgctgtattttccccttccctcaggccatgatctctgctgttttccttactaact

SEQ ID NO: 117042 - DNA, 120 bp, Artificial Sequence
  ENSG00000100580_44 (sequence is synthesized)
tactaactggcatgtcagtacaagagtgattgtgaagctgctccggaagggctttatgctaacctctgttgcttgatgacatgtcctcaggactctgatattaaaactcaatccttagat

SEQ ID NO: 117043 - DNA, 120 bp, Artificial Sequence
  ENSG00000100580_45 (sequence is synthesized)
aacaggtagctttatcatggaagtaggtagcaatttggaattagaccattcttagttatttttttcttaatgaattgatacatgcactttaaaaaatatttttgttattttgggaagaaa

SEQ ID NO: 117044 - DNA, 120 bp, Artificial Sequence
  ENSG00000100580_46 (sequence is synthesized)
aactcagacttttaaaaaagtgtatattgtcccattataatatgtatatggaagagtgaaatctgaacgctgtcttatattaagcagtagaattaggtattatcataaaaagtcttaatc

SEQ ID NO: 117045 - DNA, 120 bp, Artificial Sequence
  ENSG00000100580_47 (sequence is synthesized)
tgtagggaatatgagtttatgtttatgagtcctgctcagtccctctttgagagaattagttgaaacccagactctaaagtctgcttttatatttgtttgttaagaccacttatctgcaga

SEQ ID NO: 117046 - DNA, 120 bp, Artificial Sequence
  ENSG00000100580_48 (sequence is synthesized)
aggttgccttttaaccccagtggttctaaggtgtggaattgagtgaccctaatatttacataagagacttgttttagtggagcataagggaggggcataagttacaccgttttgtgctgc

SEQ ID NO: 117047 - DNA, 120 bp, Artificial Sequence
  ENSG00000100580_49 (sequence is synthesized)
ttgagaactgtcttttaaaattgatcacaacgagggaaaacaaaataaaattagggggcaaagggtaggagtatggggggaggggagagcaaacctatcgaatatatcttagaattttgc

SEQ ID NO: 117048 - DNA, 120 bp, Artificial Sequence
  ENSG00000100580_50 (sequence is synthesized)
tcagaaatcactgctgcctctcaagtgttgcattgtccctgcctaaaccaagaaggctaaacaaagcccctcctgtttgaattcttaaggtaagaaatttctaagctaagaaaacactat

SEQ ID NO: 117049 - DNA, 120 bp, Artificial Sequence
  ENSG00000100580_51 (sequence is synthesized)
tgcctaaaaccaatgatagtggagctcatttacaaataggcatgcctcacacacacagtccaaaggcaagacactggctttgaaattaggctcatgatgtgattcctattatatgtacct

SEQ ID NO: 117050 - DNA, 120 bp, Artificial Sequence
  ENSG00000100580_52 (sequence is synthesized)
gatttttttaggccccaggtatgtggaccagagttaatgtcatgactcttcaaagatatgatgaaaagttgccctagaaatctagagatgcatgtttatttaattccatagtttaaaaaa

SEQ ID NO: 117051 - DNA, 120 bp, Artificial Sequence
  ENSG00000100580_53 (sequence is synthesized)
aaatttaagcaggtagttgtggcttatctgggggcaaaataatatatgtgaaattgcttccagaggacaaagtatattttctaaagtcctgaaataggatcatgaacccttctgaagttt

SEQ ID NO: 117052 - DNA, 120 bp, Artificial Sequence
  ENSG00000100580_54 (sequence is synthesized)
tggtttgaaatattatagtatatgatattaccaaagagcccttaattcagagtttaaggggctctcttcctgaactctcttcatcactcagggttgaatgtgtaatgttccttgctattg

SEQ ID NO: 117053 - DNA, 120 bp, Artificial Sequence
  ENSG00000100580_55 (sequence is synthesized)
attgttattgttgattcttaggatcaggccaagaatcatctggaaaacattatcttaattccgtctctcatatcctaaacagtacattttactaagaaattccatatgaaaaactccact

SEQ ID NO: 117054 - DNA, 120 bp, Artificial Sequence
  ENSG00000100580_56 (sequence is synthesized)
catgtctcctgagattatcctgtaagtgaagtagctttcatttaaccaagctaaattatttccatttagccatgttaaagagaagccaagtctagagaaagcaatcctgtaacccatgaa

SEQ ID NO: 117055 - DNA, 120 bp, Artificial Sequence
  ENSG00000100580_57 (sequence is synthesized)
tctggtgtacccattttcccttaacgtaacgggaagtgttttgaaattcccagaagagagctgttttgtaatcaaagtgatggattataagaaagccagactttggaaaaggataattgg

SEQ ID NO: 117056 - DNA, 120 bp, Artificial Sequence
  ENSG00000100580_58 (sequence is synthesized)
aataaagggaggtgcttgaagattttccaaactactttatgtcatttagcttctattttctgaagggctttctttggtgccatgtactcagatcagtcagttgactgaaagatgatcatg

SEQ ID NO: 117057 - DNA, 120 bp, Artificial Sequence
  ENSG00000100580_59 (sequence is synthesized)
ttttcttcgtaaagatttaagcaattggcaactacaaagacattattttcttactgttctatatcatgtactgttgctgacattacaaaaagggtctggaagggaaaccgtgtcactgtt

SEQ ID NO: 117058 - DNA, 120 bp, Artificial Sequence
  ENSG00000100580_60 (sequence is synthesized)
ttatcttttttctttaaaatacaaaagtatcccaactaatcatttattatggtcagcttgttttacatgtcccctatcatgagaaatgctatcaacatctgtgatttctaagagtcttac

SEQ ID NO: 117059 - DNA, 120 bp, Artificial Sequence
  ENSG00000100580_61 (sequence is synthesized)
caaattgttactttaattcttgtgtcctgctgagtggtttttcttttaaaataccatttttatcaccctgtggcactgggtgtgttactgcgattacactgatgattctgagctgtgctt

SEQ ID NO: 117060 - DNA, 120 bp, Artificial Sequence
  ENSG00000100580_62 (sequence is synthesized)
cttcaagtagctcagttcttgcgttttatattaggtaacagttttgtgatgcttttgtgcattctttgtcatctcttctgagttttcgaatctgtcataaataaactttttcactatgca

SEQ ID NO: 117061 - DNA, 120 bp, Artificial Sequence
  ENSG00000100583_0 (sequence is synthesized)
acagccgagcgcagcctgcaggccggaagaagcggcgcggcggccgcttgaaaagctagctgacccaggggcggccacaggagctctggcccgctgaggctggcgatgaggccgcaggga

SEQ ID NO: 117062 - DNA, 120 bp, Artificial Sequence
  ENSG00000100583_1 (sequence is synthesized)
gggttactgcgtgcttgtgacagacgatttttaaagtcagggcttgaaagaacaaacaaaacctggggaagagtcaggaagacactgccggaaatcgtggtatccatagagacgctatcg

SEQ ID NO: 117063 - DNA, 120 bp, Artificial Sequence
  ENSG00000100583_2 (sequence is synthesized)
gaagttggggttgctaggaagccgcggcgcgtctgctaagctgcaaatggctgaagtcccggaggattatgattccggcccagatgaagatggagagctggagcctgagaggcctgaact

SEQ ID NO: 117064 - DNA, 120 bp, Artificial Sequence
  ENSG00000100583_3 (sequence is synthesized)
gcctggacttcataaattgtatgaaaatgccgaaccagacaccatggcaaaggcagactcgaagctaccagcagagatttaccaagagccacagccagagaccgaggaagaggacttcaa

SEQ ID NO: 117065 - DNA, 120 bp, Artificial Sequence
  ENSG00000100583_4 (sequence is synthesized)
agagggggagccagacagtgctaagaacgtgcagctgaaacctggcgggacgtcccaggaaggaattgccaaggagtccaagagagacgtaccaagcgaaactgaaccagggatacacca

SEQ ID NO: 117066 - DNA, 120 bp, Artificial Sequence
  ENSG00000100583_5 (sequence is synthesized)
agaggtaaagtcggaaacatccagagagatgggagagtttttcaaagatttggaggcccctatggatgaaacgcataaagagtcagacctagagccaccagaggaggctaaaccaaatgt

SEQ ID NO: 117067 - DNA, 120 bp, Artificial Sequence
  ENSG00000100583_6 (sequence is synthesized)
tacagaggatgtgttcctagagtcagctatggaaacagatccagatccagtgccaccaacggaaaccatgtctgaggtttcgggggccacagtcagagagagaaatttagaattactaga

SEQ ID NO: 117068 - DNA, 120 bp, Artificial Sequence
  ENSG00000100583_7 (sequence is synthesized)
ggaggagactgaaccgggggttccagaggaatcacttagagtgcaacatgaagagacaggtctagagcctccagagcagaccaaacaagattttccaagtgagaaactaggagaatcact

SEQ ID NO: 117069 - DNA, 120 bp, Artificial Sequence
  ENSG00000100583_8 (sequence is synthesized)
tgaagagacagatcttcagccaccaaagatgaccaaaccagagactccagaggagacacaaagagagtcaactgagaagaaaaggacagagccacccgagcaggctagactggaatttct

SEQ ID NO: 117070 - DNA, 120 bp, Artificial Sequence
  ENSG00000100583_9 (sequence is synthesized)
ggagaaggaaccaagaaagtctagtgaggaggcaggtctagagcctccagaagagactcaaccagaggttccagaggagatgcaaagaaaggcaactgaggagaaagggacagaactacc

SEQ ID NO: 117071 - DNA, 120 bp, Artificial Sequence
  ENSG00000100583_10 (sequence is synthesized)
ctactgatgagaacgttcctgagccactagaagagatcaaattagagtttcctgaggaagaatcaagaaaaacaaatgaggaaacaattctagaacaatcagaaatgatgaaaccagaaa

SEQ ID NO: 117072 - DNA, 120 bp, Artificial Sequence
  ENSG00000100583_11 (sequence is synthesized)
gtccagaagagataagaaagtcaaatgagaaaaaaaatccacagccaccagaggagactggtccagtgctaccacaggagatcaacccacaagttgaagagaaaacacaaacaaagccaa

SEQ ID NO: 117073 - DNA, 120 bp, Artificial Sequence
  ENSG00000100583_12 (sequence is synthesized)
ctgagaaaattctagagttaccagatgaaaccaaaccaagggagacacatgtagaattttccaaggaagacaggccagaaccaataaagtctaagtattctgtaggaaacgatgagctag

SEQ ID NO: 117074 - DNA, 120 bp, Artificial Sequence
  ENSG00000100583_13 (sequence is synthesized)
agcaccgtgagcctaaaagaggaaagttgtcactaagtgacaaatttagaaaagaatattacgcattaggatctctcagagaaagtgaagaatcaattggtacacattatgagtttttgc

SEQ ID NO: 117075 - DNA, 120 bp, Artificial Sequence
  ENSG00000100583_14 (sequence is synthesized)
aaccactccaaaaattgcttaatgtcagtgaagaatgctcatactcagatccctcagagtctcagacagaattaagtgagttcgttcatgaaaaggaagttgtagatttgtcccaagagt

SEQ ID NO: 117076 - DNA, 120 bp, Artificial Sequence
  ENSG00000100583_15 (sequence is synthesized)
tgaaggaacgggtctctgaagatgacgaaacccagccagaaaaagggactgagttacaatttgagcatcttaattgggatccagaggaagttgcagagtggattagccagctaggcttcc

SEQ ID NO: 117077 - DNA, 120 bp, Artificial Sequence
  ENSG00000100583_16 (sequence is synthesized)
ctcaatacaaggagtgttttatcacaaacttcatcagtggccgaaaactcattcacgtcaactgctcaaacctccctcagatggggataacaaactttgaggacatgaaggcaatttctc

SEQ ID NO: 117078 - DNA, 120 bp, Artificial Sequence
  ENSG00000100583_17 (sequence is synthesized)
ggcatacgcaggagctcctggaaattgaagagccattattcaaacgctccatcagccttccctatagggatattatcggcttatatttagagcaaaaaggtcatactgggataaaatctg

SEQ ID NO: 117079 - DNA, 120 bp, Artificial Sequence
  ENSG00000100583_18 (sequence is synthesized)
attccttgactttatctgaatttgtcaaagcagcaggattacaggattatgctccagaaataactgcccctgaagagaatgaggaattaccttgcactgaaccataggggaaatccactt

SEQ ID NO: 117080 - DNA, 120 bp, Artificial Sequence
  ENSG00000100583_19 (sequence is synthesized)
aattaccttgcactgaaccataggggaaatccacttcacagagcttgaaagatcaaactaaattacttgagggaagaggtatggtcttttttggttttctttttctcctttttttttttt

SEQ ID NO: 117081 - DNA, 120 bp, Artificial Sequence
  ENSG00000100591_0 (sequence is synthesized)
agtagtttccaggcgctgccgggcggctggcactaagcggtcctgaggctgtggctacggctgctccggagctggtggcgccgcgataggagagccgatggccaagtggggtgagggaga

SEQ ID NO: 117082 - DNA, 120 bp, Artificial Sequence
  ENSG00000100591_1 (sequence is synthesized)
cccacgctggatcgtggaggagcgggcggacgccaccaacgtcaacaactggcactggacggagagagatgcttcaaattggtccacggataagctgaaaacactgttcctggcagtgca

SEQ ID NO: 117083 - DNA, 120 bp, Artificial Sequence
  ENSG00000100591_2 (sequence is synthesized)
ggttcaaaatgaagaaggcaagtgtgaggtgacggaagtgagtaagcttgatggagaggcatccattaacaatcgcaaagggaaacttatcttcttttatgaatggagcgtcaaactaaa

SEQ ID NO: 117084 - DNA, 120 bp, Artificial Sequence
  ENSG00000100591_3 (sequence is synthesized)
ctggacaggtacttctaagtcaggagtacaatacaaaggacatgtggagatccccaatttgtctgatgaaaacagcgtggatgaagtggagattagtgtgagccttgccaaagatgagcc

SEQ ID NO: 117085 - DNA, 120 bp, Artificial Sequence
  ENSG00000100591_4 (sequence is synthesized)
tgacacaaatctcgtggccttaatgaaggaagaaggggtgaaacttctaagagaagcaatgggaatttacatcagcaccctcaaaacagagttcacccagggcatgatcttacctacaat

SEQ ID NO: 117086 - DNA, 120 bp, Artificial Sequence
  ENSG00000100591_5 (sequence is synthesized)
acccagtggggcagccagcactgaaaactgaggagcgcaaggctaagcctgctccttcaaaaacccaggccagacctgttggagtcaaaatccccacttgtaagatcactcttaaggaaa

SEQ ID NO: 117087 - DNA, 120 bp, Artificial Sequence
  ENSG00000100591_6 (sequence is synthesized)
ccttcctgacgtcaccagaggagctctatagagtgtttaccacccaagagctggtgcaggcctttacccatgctcctgcaacattagaagcagacagaggtggaaagttccacatggtag

SEQ ID NO: 117088 - DNA, 120 bp, Artificial Sequence
  ENSG00000100591_7 (sequence is synthesized)
atggcaacgtctctggggaatttactgatctggtccctgagaaacatattgtgatgaagtggaggtttaaatcttggccagagggacactttgccaccatcaccttgaccttcatcgaca

SEQ ID NO: 117089 - DNA, 120 bp, Artificial Sequence
  ENSG00000100591_8 (sequence is synthesized)
agaacggagagactgagctgtgcatggaaggtcgaggcatccctgctcctgaggaagagcggacgcgacagggctggcagcggtactactttgagggcattaaacagacctttggctatg

SEQ ID NO: 117090 - DNA, 120 bp, Artificial Sequence
  ENSG00000100591_9 (sequence is synthesized)
gcgcacgcttattttagggccagcggcaggggactccagcctgctggacacttcagtccagctctctcctgactggggcttgcgactcacaggattgcatcgtcccagctgctaacttgg

SEQ ID NO: 117091 - DNA, 120 bp, Artificial Sequence
  ENSG00000100591_10 (sequence is synthesized)
ggccggggcccctcccttccacatataccttgggtttgtgcatgttttctgctgggtgggttcagagggcaatttctcttttatgtgtacatatgctaaataaacataatttaaaaaaca

SEQ ID NO: 117092 - DNA, 120 bp, Artificial Sequence
  ENSG00000100591_11 (sequence is synthesized)
gccagaggggtctcactgtcactcaggctagagtgcagtggcataatcacagcaaactgcagccttaacctcccagacccaaacgatcctcctgcttcagcttcccaatgctgggattac

SEQ ID NO: 117093 - DNA, 120 bp, Artificial Sequence
  ENSG00000100591_12 (sequence is synthesized)
ccaccacgcccagccaggttgccccagtcttaaactcagatggaaacctagatatgaaacctccgtcccctctgcctttcccaggacactttgccaccatcaccttgaccttcatcgaca

SEQ ID NO: 117094 - DNA, 120 bp, Artificial Sequence
  ENSG00000100591_13 (sequence is synthesized)
tgaaaacagcgtggatgaagtggagctggtgcaggcctttacccatgctcctgcaacattagaagcagacagaggtggaaagttccacatggtagatggcaacgtctctggggaatttac

SEQ ID NO: 117095 - DNA, 120 bp, Artificial Sequence
  ENSG00000100591_14 (sequence is synthesized)
ttctttgttttcctatgggtgaggaatggttgtatgagcagttgggtttcgggacgctttttggggagaacccgatggagtctgaaggatctctaaatcaggcggaacccacggacggag

SEQ ID NO: 117096 - DNA, 120 bp, Artificial Sequence
  ENSG00000100591_15 (sequence is synthesized)
tcagcaccctcaaaacaggtatcccttgagtagttctgtatgccttaaggaggtagtttccacctgttagactctggttaagggcctggacagtcctttctttggcaaatgggtaaagat

SEQ ID NO: 117097 - DNA, 120 bp, Artificial Sequence
  ENSG00000100591_16 (sequence is synthesized)
ttggggggagggggcttatttcatcttaaagtcagtccataagctcggagtaagggaaagatctggagctgtgttgcctaataatgatggttgagcattttagatgtggctagaccaaac

SEQ ID NO: 117098 - DNA, 87 bp, Artificial Sequence
  ENSG00000100591_17 (sequence is synthesized)
ataatgatggttgagcattttagatgtggctagaccaaactgaaatgtactgtgatggcctgttggatgctgaggtgggctgattgc

SEQ ID NO: 117099 - DNA, 120 bp, Artificial Sequence
  ENSG00000100591_18 (sequence is synthesized)
ctgttaagtagctggagagaacagttttgaggagttacagaccttgaagggagaaggcagatgttgctgctttggagtcctatgtaaagcagtatcgagtcctggaatttctttgccatt

SEQ ID NO: 117100 - DNA, 120 bp, Artificial Sequence
  ENSG00000100591_19 (sequence is synthesized)
gtgggatgctaaatggatttcctgtgtctgggtctcataagtcccatccatgaagtggccgggccactgcatctttgggccttggtctttgttgggacacctacgatgatatttcttcag

SEQ ID NO: 117101 - DNA, 120 bp, Artificial Sequence
  ENSG00000100591_20 (sequence is synthesized)
actagctacatgtatcttgtgagtgatttaaaaggaggaaggagaggatttttttggtcttgatctttgtgcactgtcttcagtgtgaatcttaacagattaaaccactgcgctaatgaa

SEQ ID NO: 117102 - DNA, 120 bp, Artificial Sequence
  ENSG00000100591_21 (sequence is synthesized)
ccctagactcaggttattgcctctggtcagatgagtgacatttctctttttctgaactctataggtaaaatgtaaggctttaatctctttgttaataaaacattttgtttttcaaaaaaa

SEQ ID NO: 117103 - DNA, 120 bp, Artificial Sequence
  ENSG00000100592_0 (sequence is synthesized)
aagaaatagaacagaattcagccatggccccaagaaagagaggtggacgaggtatttcattcatcttttgctgtttccgaaataatgatcacccagaaatcacgtatcggctgcgaaatg

SEQ ID NO: 117104 - DNA, 120 bp, Artificial Sequence
  ENSG00000100592_1 (sequence is synthesized)
atagcaactttgcgcttcagaccatggaaccagcattgcccatgccccctgtggaggagctggatgtcatgttcagtgaactggtggatgaactggacctcacagacaaacacagagaag

SEQ ID NO: 117105 - DNA, 120 bp, Artificial Sequence
  ENSG00000100592_2 (sequence is synthesized)
ccatgtttgcacttccagctgagaaaaaatggcaaatatactgtagcaagaaaaaggaccaggaagaaaacaagggagctacaagttggcctgaattctacattgatcagctcaattcca

SEQ ID NO: 117106 - DNA, 120 bp, Artificial Sequence
  ENSG00000100592_3 (sequence is synthesized)
tggctgctagaaaatctctgctggctttagagaaggaagaagaagaagaaagaagtaaaactatagagagtttaaagacagcactgaggacaaaaccaatgaggtttgtaaccagattca

SEQ ID NO: 117107 - DNA, 120 bp, Artificial Sequence
  ENSG00000100592_4 (sequence is synthesized)
tcgacttggatggcctatcatgtatcctcaactttctaaagaccatggactacgagacctcagagtctcgaatacatacttctctcattggctgtataaaggcgttaatgaacaactctc

SEQ ID NO: 117108 - DNA, 120 bp, Artificial Sequence
  ENSG00000100592_5 (sequence is synthesized)
aaggccgggctcacgtcctggctcattctgagagtattaatgtaattgctcagagtctgagcacagagaacattaaaacgaaggtggccgtgctggaaatcttgggcgccgtgtgcctgg

SEQ ID NO: 117109 - DNA, 120 bp, Artificial Sequence
  ENSG00000100592_6 (sequence is synthesized)
ttcccgggggccacaagaaggttctgcaggccatgctgcactaccagaagtatgccagcgaaaggacccgctttcagacattaattaacgacttggataaaagcactgggcggtatcgag

SEQ ID NO: 117110 - DNA, 120 bp, Artificial Sequence
  ENSG00000100592_7 (sequence is synthesized)
atgaagtgagtctcaagactgccatcatgtccttcattaatgcagtgctcagccaaggtgcaggagtggagagtttggactttagacttcatcttcgctatgaatttctgatgttaggaa

SEQ ID NO: 117111 - DNA, 120 bp, Artificial Sequence
  ENSG00000100592_8 (sequence is synthesized)
ttcaacctgtaatagataaattaagggaacacgaaaattcaacattagataggcatttagacttttttgaaatgctccgaaatgaagatgaactagaatttgccaaaagatttgaactgg

SEQ ID NO: 117112 - DNA, 120 bp, Artificial Sequence
  ENSG00000100592_9 (sequence is synthesized)
ttcacatagacacaaaaagtgcaactcagatgtttgagctgaccaggaagaggctgacacatagtgaagcttacccgcatttcatgtccatcctgcaccactgcctccaaatgccttaca

SEQ ID NO: 117113 - DNA, 120 bp, Artificial Sequence
  ENSG00000100592_10 (sequence is synthesized)
agaggagtggcaacactgttcagtactggctactactagatagaattatacagcagatagttatccagaatgacaaaggacaggaccctgactccacacctttggaaaactttaatatta

SEQ ID NO: 117114 - DNA, 120 bp, Artificial Sequence
  ENSG00000100592_11 (sequence is synthesized)
agaatgtcgtacgaatgttggttaatgaaaatgaagttaagcagtggaaagaacaagcggaaaaaatgagaaaagagcacaatgagctacaacagaaactggaaaagaaagaacgagaat

SEQ ID NO: 117115 - DNA, 120 bp, Artificial Sequence
  ENSG00000100592_12 (sequence is synthesized)
gtgatgctaagactcaagagaaggaagagatgatgcagaccttaaataaaatgaaagagaaacttgaaaaggagactactgagcataagcaagtcaagcagcaggtggcggacctcacag

SEQ ID NO: 117116 - DNA, 120 bp, Artificial Sequence
  ENSG00000100592_13 (sequence is synthesized)
cacagctccatgagctcagcaggagggccgtctgtgcttcaatcccaggtggaccctcgcctggagcaccaggagggccctttccttcctctgtgcctggatctctccttcctcccccac

SEQ ID NO: 117117 - DNA, 120 bp, Artificial Sequence
  ENSG00000100592_14 (sequence is synthesized)
cacccccacctctaccaggtgggatgcttccccctccaccgcctcccctccctccaggtggccctcctcctcccccagggcctcctcccttaggggcaatcatgccacctcctggtgctc

SEQ ID NO: 117118 - DNA, 120 bp, Artificial Sequence
  ENSG00000100592_15 (sequence is synthesized)
caatgggcctagcactgaagaagaaaagcattcctcagcccacaaatgccctgaaatccttcaactggtctaaactgcccgagaacaaactggaaggaacagtatggaccgaaattgatg

SEQ ID NO: 117119 - DNA, 120 bp, Artificial Sequence
  ENSG00000100592_16 (sequence is synthesized)
atacaaaagtcttcaaaattctagatcttgaagacctggaaagaaccttctctgcctatcaaagacagcaggatttctttgtgaacagtaactccaagcagaaagaagcagatgccattg

SEQ ID NO: 117120 - DNA, 120 bp, Artificial Sequence
  ENSG00000100592_17 (sequence is synthesized)
atgacactctgagttccaaacttaaagttaaagagctttcggtgattgatggtcggagagctcagaattgcaacatccttctatcgaggttgaaattatccaatgacgaaatcaaacggg

SEQ ID NO: 117121 - DNA, 120 bp, Artificial Sequence
  ENSG00000100592_18 (sequence is synthesized)
caattctaacaatggacgaacaggaagatctgcccaaggacatgttggaacagctcttgaaatttgttcctgaaaaaagtgacattgacctattggaggaacataaacacgaactggatc

SEQ ID NO: 117122 - DNA, 120 bp, Artificial Sequence
  ENSG00000100592_19 (sequence is synthesized)
ggatggccaaggctgataggttcctttttgagatgagccgaattaatcactatcagcaaaggttgcaatcgctgtacttcaaaaagaagtttgcagagcgtgtggcagaagtgaaaccta

SEQ ID NO: 117123 - DNA, 120 bp, Artificial Sequence
  ENSG00000100592_20 (sequence is synthesized)
aagtggaagcaattcgttctggctcagaagaggtgtttaggagtggtgccctcaagcagttgctggaggtggttttggcatttggaaattatatgaataaaggtcaaagagggaatgcat

SEQ ID NO: 117124 - DNA, 120 bp, Artificial Sequence
  ENSG00000100592_21 (sequence is synthesized)
atggattcaagatatctagcctaaacaaaattgctgacacaaaatccagcatcgacaaaaacattacccttttgcactatctcatcactattgtggaaaataagtaccccagtgttctca

SEQ ID NO: 117125 - DNA, 120 bp, Artificial Sequence
  ENSG00000100592_22 (sequence is synthesized)
atctaaatgaagaattgcgagatattcctcaagctgcgaaagtaaacatgactgagctggacaaagaaataagtaccttgagaagtggcttgaaagcagtagagacagagctggaatatc

SEQ ID NO: 117126 - DNA, 120 bp, Artificial Sequence
  ENSG00000100592_23 (sequence is synthesized)
agaagtctcagcccccacagcccggagataagtttgtgtctgttgtcagccagttcatcacagtagccagcttcagcttctctgatgttgaagaccttctagcagaagctaaagacctgt

SEQ ID NO: 117127 - DNA, 120 bp, Artificial Sequence
  ENSG00000100592_24 (sequence is synthesized)
accagatgagttctttggcatttttgatcaatttcttcaagctgtgtcagaagccaaacaagaaaacgaaaatatgagaaagaaaaaggaggaagaagaacgtcgagctcgcatggaagc

SEQ ID NO: 117128 - DNA, 120 bp, Artificial Sequence
  ENSG00000100592_25 (sequence is synthesized)
tcagctcaaagaacaacgtgaaagggaacgtaaaatgagaaaagctaaagagaatagtgaagaaagcggagagtttgatgaccttgtttcagctttacgctcaggagaagtgtttgacaa

SEQ ID NO: 117129 - DNA, 120 bp, Artificial Sequence
  ENSG00000100592_26 (sequence is synthesized)
agacctttctaaattgaaacggaatcgcaaacgtattaccaaccagatgactgacagcagcagagagagaccaatcacaaaacttaatttctaattttccatgaatacttttttttagaa

SEQ ID NO: 117130 - DNA, 120 bp, Artificial Sequence
  ENSG00000100592_27 (sequence is synthesized)
agctcattagcagccctctaaagtgactagaacgtttcattacactgccttgcaatccaaacagtggcaattttttccttcatctgtgagtgaatgtgtgaacgtgtgtatgtaaatgta

SEQ ID NO: 117131 - DNA, 120 bp, Artificial Sequence
  ENSG00000100592_28 (sequence is synthesized)
tgtgtgtatatattaaaaaatgtatatagatgtctgagtgttgtctggagacctatacgtatggttaaaaagatttatgttaatgtatgtgctccaaaacctttcgtgtatgcattcaca

SEQ ID NO: 117132 - DNA, 120 bp, Artificial Sequence
  ENSG00000100592_29 (sequence is synthesized)
ttgagtgtggctcattttctttccccgaacgccatgactgttcagaagcacaatactatctcctgaaagagataagagacattccctagattcaaaggcaaaacagaagaaacaaacaaa

SEQ ID NO: 117133 - DNA, 120 bp, Artificial Sequence
  ENSG00000100592_30 (sequence is synthesized)
caaacaaaaaaagcttgcaaaatattttatggtttccaagcttgatatcctttaaaattattttcattgatggaactggagttgttggaaaaacatagatttaaaatgatttttgatagc

SEQ ID NO: 117134 - DNA, 120 bp, Artificial Sequence
  ENSG00000100592_31 (sequence is synthesized)
tgacattgtgatgttgatgtatcacatcagtaataggaccagctttgaatttctgacattggtgtggggatacagtctgtaaatgtttattgagaacatcttgcacacaatttgaattat

SEQ ID NO: 117135 - DNA, 120 bp, Artificial Sequence
  ENSG00000100592_32 (sequence is synthesized)
gtagaatgtcaatcaagtttttgtatatttaaaagttggacatcaattttttcccctgatttcatcaagttatctctgccaagtgctcttgataatttcttcagatttttggaaaaaaac

SEQ ID NO: 117136 - DNA, 120 bp, Artificial Sequence
  ENSG00000100592_33 (sequence is synthesized)
actatataaatgcaatccatgctttttttaaagaacaacattgccagagtatgcttgttctaacaatatagatatataaaccttaaaaataataaaatatctcacccaagacttaaagga

SEQ ID NO: 117137 - DNA, 120 bp, Artificial Sequence
  ENSG00000100592_34 (sequence is synthesized)
aaaaaaaaaaaaaaaaaaaattaatggggtgcctttttgttatagtttctattttctgttttgtaggacaagctgcattttctgtaaatataggtctggactaaaggatacataaagaat

SEQ ID NO: 117138 - DNA, 120 bp, Artificial Sequence
  ENSG00000100592_35 (sequence is synthesized)
tataggtctggactaaaggatacataaagaatgcacaaaatgtcaacatcagcagagatgcccagatctatttatctctaagtatatttgaagtgattgctgtttatatgttgtcatttt

SEQ ID NO: 117139 - DNA, 120 bp, Artificial Sequence
  ENSG00000100592_36 (sequence is synthesized)
aaaattgtgtgtcagtaaagctacctgtaaaatttcagtccaaaaaaataaagctctcagggagacatgaataaaatcaatgaacattagaaaataaaatatagatgcttaccattaacc

SEQ ID NO: 117140 - DNA, 69 bp, Artificial Sequence
  ENSG00000100592_37 (sequence is synthesized)
aggacatttatttgtagttgggggctaacgttttctcttttctttctattgatcctgttgtggttgggt

SEQ ID NO: 117141 - DNA, 120 bp, Artificial Sequence
  ENSG00000100592_38 (sequence is synthesized)
gttttctcttttctttctattgatcctgttgtggttgggtttcctgtggagagagtagtttgtcctgttgcactagaacattatttactcactaaattgagtttttcagtcaattaacaa

SEQ ID NO: 117142 - DNA, 120 bp, Artificial Sequence
  ENSG00000100592_39 (sequence is synthesized)
atatttattaagttcctactatgtaccaggcatagtagggctacaatggtaagcaagacagagtccctgcccccaaagagcttatattctaatggggatattaagggatgaatagaatac

SEQ ID NO: 117143 - DNA, 120 bp, Artificial Sequence
  ENSG00000100592_40 (sequence is synthesized)
caatgtgtgcactgtacaggaatcatactatttaaaaataatttgtataaactataatgcttagcacagatggcgagttatctgtgctatgtgaaagctgtgaaatagtgctctaagagt

SEQ ID NO: 117144 - DNA, 120 bp, Artificial Sequence
  ENSG00000100592_41 (sequence is synthesized)
tgtcaagagctgtggttttacatcttttcctcattgcaaatttagtgactttctacacactatatggaaataaatgactagcaaataaaacagtcataaatacaaagcagaggttgcact

SEQ ID NO: 117145 - DNA, 120 bp, Artificial Sequence
  ENSG00000100592_42 (sequence is synthesized)
cccccaatcccgagttaacccaggtctgcaataacaccatgttaaaggtgcagatagagacttggctcaaaaaggcttggagatgaggaagattggaatataatgatggttttgtctgtt

SEQ ID NO: 117146 - DNA, 120 bp, Artificial Sequence
  ENSG00000100592_43 (sequence is synthesized)
ccttaactaaagtgcctctatgtatattcttttctatttgtagcaggataaatttggtctggctcagttttggaactgtattttgaaaatggctttgtcttacagtttaaggaatagaca

SEQ ID NO: 117147 - DNA, 120 bp, Artificial Sequence
  ENSG00000100592_44 (sequence is synthesized)
ggtggagggaaagtcacataaaggagcaagtttgtgtagctgtccctcttgccccttttaatcatcctcctttgatatggccatcctggtgggcctcctttgccatttccatttttggtt

SEQ ID NO: 117148 - DNA, 85 bp, Artificial Sequence
  ENSG00000100592_45 (sequence is synthesized)
ccatcctggtgggcctcctttgccatttccatttttggtttctttccctgaaaactgtgtgcaggtaattccatgtgccattgct

SEQ ID NO: 117149 - DNA, 120 bp, Artificial Sequence
  ENSG00000100592_46 (sequence is synthesized)
tgggtgtgtattttaaactttttttgtttttttaaattaatgccaaaaagaaaatgcataatttgtaaacttaattatatgtcttatatcttattagcttagtagttggaaccacttagt

SEQ ID NO: 117150 - DNA, 120 bp, Artificial Sequence
  ENSG00000100592_47 (sequence is synthesized)
ctttaggtgcaagactgttgttagatagtactgagaaaaaaaaagtatgtgttatgagactgtacatgtttttttaaaaatagcaatatgcaataaagagatgaattcattgggtgtaca

SEQ ID NO: 117151 - DNA, 120 bp, Artificial Sequence
  ENSG00000100592_48 (sequence is synthesized)
ctgagaaaaaatggcaaatatactgtagcaagaaaaaggtaagattttcattgtgattatggttaactggaaaataatcattgattccatttgctcttccatttcaccactagaattgga

SEQ ID NO: 117152 - DNA, 120 bp, Artificial Sequence
  ENSG00000100592_49 (sequence is synthesized)
cagctctttgtaatatgaaaaccagattgaatgtgttatgttgtggctgtggtgctacatgtagccagtgtcaattccctggatgttgtttttgtcagtacttcattgggctcttttcca

SEQ ID NO: 117153 - DNA, 120 bp, Artificial Sequence
  ENSG00000100592_50 (sequence is synthesized)
gttaatgcaggtaatatagcattattgtgggttctaccatttgagcatataaatcatatgcagatattaactattcatatatttatgtagtttaaatgaaaataatttgaatgtttaata

SEQ ID NO: 117154 - DNA, 120 bp, Artificial Sequence
  ENSG00000100592_51 (sequence is synthesized)
atacactgcatcacactttttataggagaggggctatagaagcctcccctacccttggaggtgacgtagtattgtaagaaaatagtgggggcagagcttcgcctggccaaatatatatgt

SEQ ID NO: 117155 - DNA, 120 bp, Artificial Sequence
  ENSG00000100592_52 (sequence is synthesized)
gttctaattgtgctttacacaaattaattatattgtttgaaggtatcaaagatgaatatttatgaaattatacattaatgaaacactttcaaatgcctttcccgtccccacactgaacac

SEQ ID NO: 117156 - DNA, 120 bp, Artificial Sequence
  ENSG00000100592_53 (sequence is synthesized)
agatacactcactttccaagctaaagtactggaatcatggcaatttcttccaatcagtgccagctccataattgatgagttttcacttccgttatttcatttgagtgtagtgatgatgtg

SEQ ID NO: 117157 - DNA, 120 bp, Artificial Sequence
  ENSG00000100592_54 (sequence is synthesized)
gatgttgccctcttacaaaaaaaaaaaaaaaaatcaataaactgaggcccagagcaacatgccatggttaagaaccaaatcagtggtagagctgagtcagaactgataaactgtgatgac

SEQ ID NO: 117158 - DNA, 120 bp, Artificial Sequence
  ENSG00000100592_55 (sequence is synthesized)
tacgctcctgcttgtgaagatctctgccaatgcaagaaaataagggagaatccagtttaagtcaattggtatacaacatagttattaccaagactctggagtcaggcaggcctgagttca

SEQ ID NO: 117159 - DNA, 120 bp, Artificial Sequence
  ENSG00000100592_56 (sequence is synthesized)
aattctggctctgtcactggtcagcactacttcagggcaagtaatatagccctccaaaccttaatttatatgtttgtataatgggaatagtgatccctcactcatagggatgttgtgaac

SEQ ID NO: 117160 - DNA, 120 bp, Artificial Sequence
  ENSG00000100592_57 (sequence is synthesized)
tttaaataagaatgtgcatctggcaatgattaaattaaccattaacattagatttgaatcatctgcgttcattgctgtgataatggaaatatggataattaacaagagactaattcccct

SEQ ID NO: 117161 - DNA, 120 bp, Artificial Sequence
  ENSG00000100592_58 (sequence is synthesized)
acaggcctgttcacaaaaaccaatatggtatggacaagagaaaaatggtacattatggtgccaaatgctacagccaaaattctactacccatatcccacagtttaagaagtaaatagact

SEQ ID NO: 117162 - DNA, 120 bp, Artificial Sequence
  ENSG00000100592_59 (sequence is synthesized)
tggctgagagggaaagaaaaaaatcaaggcaccacaattctaagcatggaatattgacaagcagagtctcttgttttcactcacaaacccttaaaattcagtttgcccccattatttgtt

SEQ ID NO: 117163 - DNA, 120 bp, Artificial Sequence
  ENSG00000100592_60 (sequence is synthesized)
taacttctattaattttatccaaatgcaaatctgcttgctttctaaagcctgaaagagaaatcacatagatcaagtacttagattgttggtaaattgctatttgcaaatatgcgtgtgca

SEQ ID NO: 117164 - DNA, 120 bp, Artificial Sequence
  ENSG00000100592_61 (sequence is synthesized)
catgggcatggctttggcatggtgggaggaagggcaggggcactagagtataacaaaatgttttagaacaagttttgatgtgtttgccattctgatttattaaatttaaggcatgtgaaa

SEQ ID NO: 117165 - DNA, 120 bp, Artificial Sequence
  ENSG00000100592_62 (sequence is synthesized)
aaaatactgttgtctttctttgagatctgagcatggaagggaattttaaacatttaaattaaaataggatggacttccaagcgtgaaatatttaaacccatcttatatttaatatgtgta

SEQ ID NO: 117166 - DNA, 120 bp, Artificial Sequence
  ENSG00000100592_63 (sequence is synthesized)
aaaaggaggacttatttggcaaaagttctagggcagtggtgaacaaaatgcagtctgttggcttctgggtgggaccctggacctgatttccagaattaaggaacacccttaatttatatt

SEQ ID NO: 117167 - DNA, 120 bp, Artificial Sequence
  ENSG00000100592_64 (sequence is synthesized)
tgggaagtctctggtccagagaaagtcagcctgcactgcactttttttcctcttagccacgtgccctccacagtgcttcagcatgctactgaccaggtgtagcccatggaggagctcaca

SEQ ID NO: 117168 - DNA, 120 bp, Artificial Sequence
  ENSG00000100592_65 (sequence is synthesized)
gaggagagggtgatgtcacctgcgagttagtaacctacgagcggctgtgaaggaaactgtttaaccggatcccattgtacccagagtgcagagccgcctttccagcatgcaggggctgct

SEQ ID NO: 117169 - DNA, 120 bp, Artificial Sequence
  ENSG00000100592_66 (sequence is synthesized)
atcctggcattggtggggagccagagaaggagaagaggagaggatgtgaatgagttggtttggtttgacatggacttttccttttcagtgaaatggcccccattcacctttatgtctgca

SEQ ID NO: 117170 - DNA, 120 bp, Artificial Sequence
  ENSG00000100592_67 (sequence is synthesized)
ccctcactgtcagcactaaacctgtggagaaggaagagttagaagagggtagtattactacatccaagtgctttgcttgtgctttaagtgggtggagggatttagaccttcagttcttca

SEQ ID NO: 117171 - DNA, 120 bp, Artificial Sequence
  ENSG00000100592_68 (sequence is synthesized)
aatatgtggcagtactgcatcttaagttgcccttcctaatttgtctccatcccagtccttagtctatacattatgctaaataattccttcatttacttcacacctattgggattccctaa

SEQ ID NO: 117172 - DNA, 120 bp, Artificial Sequence
  ENSG00000100592_69 (sequence is synthesized)
tgctcccctacccccacaccgaatgtacagtattaacgtatttttaaaaaattagtcatactttccatcctgtcattgatcctttggtgaaagacattattacttcagtacagcatcatt

SEQ ID NO: 117173 - DNA, 120 bp, Artificial Sequence
  ENSG00000100592_70 (sequence is synthesized)
atttagcctaatgataggattagaataataactgctgtgggaatctttttataggtactatcatattttagaatcaaatatactgaaatgaaggatgcatctagtgcaggacccattcat

SEQ ID NO: 117174 - DNA, 120 bp, Artificial Sequence
  ENSG00000100592_71 (sequence is synthesized)
caagagatgtaagtacattcttcagcttagcttttcaagcatcaagtagtgtttctattctgtatttcagaagatattatggcatagtttaaaggggtgctagcataggacttaggaaga

SEQ ID NO: 117175 - DNA, 120 bp, Artificial Sequence
  ENSG00000100592_72 (sequence is synthesized)
ctttttttcaaatcactgctttgattttatcttcataattgtaaaaaatcatgttatttttctgttcctgttttctgaaggaaaaaaacatcttcttctaggtttgatataatgtttcag

SEQ ID NO: 117176 - DNA, 120 bp, Artificial Sequence
  ENSG00000100592_73 (sequence is synthesized)
tgagaacagcacacagtgggagtggcccagtgcctggcctttaaacatgcttaataaatgttacatgaatactgtatcctgctttgatcaccactggcattttgtaatggaattagttct

SEQ ID NO: 117177 - DNA, 120 bp, Artificial Sequence
  ENSG00000100592_74 (sequence is synthesized)
cacctaggtattaagcccagcatccattcgctgttcttcctgatactctccccaatccaccatccccctgcctcctgccacatgccccagtgtgtgttgtttccccccatgtgtccatgt

SEQ ID NO: 117178 - DNA, 77 bp, Artificial Sequence
  ENSG00000100592_75 (sequence is synthesized)
tgtgttgtttctagtgagaacacctggtgtttggttttctgttcatgcattagtttgctgaggataacggcttccag

SEQ ID NO: 117179 - DNA, 120 bp, Artificial Sequence
  ENSG00000100592_76 (sequence is synthesized)
gcttccagctccatccatgttcctgtaaaggacatgatctcatttgtaatggagttagttctaaatggaccatttatattgttcaacagacactagagaatactattcattttgcatgat

SEQ ID NO: 117180 - DNA, 120 bp, Artificial Sequence
  ENSG00000100592_77 (sequence is synthesized)
tctttggtcaaggacatactgtaagctgcgttagtgttctccttggttaatatctgaactgaccatgtcactccaactcttatagaccagaattcatttataaagcagaaagataagcca

SEQ ID NO: 117181 - DNA, 120 bp, Artificial Sequence
  ENSG00000100592_78 (sequence is synthesized)
atatgagagaggttatgaagctgatgtttgatttctggtctcctgcgtggagcgatgggcctattgccaaccagagttggtcgggaaaaaggaaagatgactcctaccagtgtacttacg

SEQ ID NO: 117182 - DNA, 120 bp, Artificial Sequence
  ENSG00000100592_79 (sequence is synthesized)
ctttatgatcttgaatattttcagtgtttaaggaatctcttccttctttgatctccactgcatgaagaactctgttgcaggtgttaacaaggaagtttgaaatagaaagccagaacctgc

SEQ ID NO: 117183 - DNA, 120 bp, Artificial Sequence
  ENSG00000100592_80 (sequence is synthesized)
cccccaaagatctgacagtagtagaaggagatccattatgaagaaggtataatggcaacaaaagaataatcacaaattacctgtgtgtgtaatatgtgttgtgtggtgtgggtcaaggag

SEQ ID NO: 117184 - DNA, 120 bp, Artificial Sequence
  ENSG00000100592_81 (sequence is synthesized)
atgaggaaggtggttagggaagactttatggaggaagtgagctgtcaacaggaattgaaggtgagaagaaaagttggggggaatccatgttaatgactgtctcagtcatcttaaactagg

SEQ ID NO: 117185 - DNA, 120 bp, Artificial Sequence
  ENSG00000100592_82 (sequence is synthesized)
ttatgctgtgatagcaaaaccccagtggttgcaacagcagaggcttattgcttgctgtgctgtgtgtctactgtgggtctgctatagttctgctccttcctgtcttctgtcctataccca

SEQ ID NO: 117186 - DNA, 120 bp, Artificial Sequence
  ENSG00000100592_83 (sequence is synthesized)
ggaagggtggaggaggaaaggcaaacctggcaaaccattcataggctctaagcttatgcttggaaataacaggtgtcacttgtgcccacatttcattggccagtgcagatcacatggcca

SEQ ID NO: 117187 - DNA, 120 bp, Artificial Sequence
  ENSG00000100592_84 (sequence is synthesized)
cacctgagtttgcatataaggaggcatccttcttctgtagagactggtaccacaagtcatgtggccaaggctgaggtcatggggcaggcagatgacacatagtcctcttctagggagggg

SEQ ID NO: 117188 - DNA, 120 bp, Artificial Sequence
  ENSG00000100592_85 (sequence is synthesized)
cagtgaatcatctaccaagacagcaatcaagaagggcaataatgatgcattgacaggcagggtttcccacttaaaatgttttaaaactgaaagtctcttgttcaagttggtgtttggatt

SEQ ID NO: 117189 - DNA, 120 bp, Artificial Sequence
  ENSG00000100593_0 (sequence is synthesized)
agagcagcctcggaaccgagacgatgcgtgcgctccgcgaccgagccgggctcctcctctgcgtgctgctgctggcggcgctgctggaggcggcgctagggctccccgtgaagaagccgc

SEQ ID NO: 117190 - DNA, 120 bp, Artificial Sequence
  ENSG00000100593_1 (sequence is synthesized)
ggctccgcggaccacggcctgggagcctcacgaggctcgcagaggtctcagcctccccagatcctaggcctctgaaggaagaggaggaggcaccactgctccccagaacccacctgcagg

SEQ ID NO: 117191 - DNA, 120 bp, Artificial Sequence
  ENSG00000100593_2 (sequence is synthesized)
cagagccacaccaacatggatgctggactgtcactgagccagcagccatgaccccaggcaacgccacccctcccaggaccccagaggttactccgttgcggctggagctgcagaagctgc

SEQ ID NO: 117192 - DNA, 120 bp, Artificial Sequence
  ENSG00000100593_3 (sequence is synthesized)
cgggattggccaacacaaccttgagtacccctaaccctgatacccaggcttcagcctccccagatcctaggcctctgagggaagaggaggaggcacgactgctccccagaacccacctgc

SEQ ID NO: 117193 - DNA, 120 bp, Artificial Sequence
  ENSG00000100593_4 (sequence is synthesized)
aggcagagctacaccaacatggatgttggactgtcactgagccagcagccctgaccccagggaatgccacgcctcccaggacccaggaggttactcccttgctgctggagctgcagaagc

SEQ ID NO: 117194 - DNA, 120 bp, Artificial Sequence
  ENSG00000100593_5 (sequence is synthesized)
tgccagaattggtccacgcaaccttgagtacccctaaccctgataaccaggtgaccatcaaggtggtggaggacccccaggccgaggtgtcgatagacctgttggctgagcccagcaatc

SEQ ID NO: 117195 - DNA, 120 bp, Artificial Sequence
  ENSG00000100593_6 (sequence is synthesized)
ccccgccccaggatacccttagctggctgcccgccctctggtccttcctctggggagactacaaaggagaggaaaaagacagggccccaggggagaagggggaggaaaaggaggaagacg

SEQ ID NO: 117196 - DNA, 120 bp, Artificial Sequence
  ENSG00000100593_7 (sequence is synthesized)
aggactatccttcagaggatatcgagggtgaggatcaagaggacaaagaggaagatgaggaagagcaggcgctctggttcaatggaactacagacaactgggaccagggctggctggccc

SEQ ID NO: 117197 - DNA, 120 bp, Artificial Sequence
  ENSG00000100593_8 (sequence is synthesized)
ccggggattgggtcttcaaggattctgtcagctacgactatgagcctcagaaggagtggagtccctggtctccctgcagtgggaactgcagcactggcaagcagcagaggactcggccct

SEQ ID NO: 117198 - DNA, 120 bp, Artificial Sequence
  ENSG00000100593_9 (sequence is synthesized)
gtggctatggctgcactgccaccgagacccgtacctgtgacctgccctcctgtcctggcactgaggacaaggacaccttgggcctccccagtgaggagtggaagctcctggcccgcaatg

SEQ ID NO: 117199 - DNA, 120 bp, Artificial Sequence
  ENSG00000100593_10 (sequence is synthesized)
ctacggacatgcatgatcaagatgtggacagctgtgagaagtggctgaactgcaagagcgacttcctaatcaagtatctgagccagatgctgcgggacctgcccagctgcccgtgtgcct

SEQ ID NO: 117200 - DNA, 120 bp, Artificial Sequence
  ENSG00000100593_11 (sequence is synthesized)
acccactggaggccatggacagccctgtgagcctacaggacgagcaccagggccgcagcttccggtggagggatgccagtggccctcgcgagcgcctggacatctaccagcccacggcgc

SEQ ID NO: 117201 - DNA, 120 bp, Artificial Sequence
  ENSG00000100593_12 (sequence is synthesized)
gctatgacgaggacagccggctgctgacccgtggcaagggcgccggcatgcccaacctcatcagcaccgacttctcacctaagctgcacttcaagttcgacacgacgccctggatcctgt

SEQ ID NO: 117202 - DNA, 120 bp, Artificial Sequence
  ENSG00000100593_13 (sequence is synthesized)
gcaagggggactggagccgcctccacgctgtgctccctcccaacaacggccgagcctgcaccgacaaccccctggaggaggagtacctagcacagttgcaggaggccaaggagtactagt

SEQ ID NO: 117203 - DNA, 120 bp, Artificial Sequence
  ENSG00000100593_14 (sequence is synthesized)
gacggggttgctgaacagacactgcagggagagggcaggcggctgctgctgttgcacgggagaactttcctcacccgcccctgcccagacagggtgaggaaagggctcccccagtgaggt

SEQ ID NO: 117204 - DNA, 120 bp, Artificial Sequence
  ENSG00000100593_15 (sequence is synthesized)
tggtccgaggctgtgtgccctctgccagcgaccccgaagcagatatctcagtggggttagtgagaaggttgaagggtatgtagggcccagggtgggtgtccctgggagccctggaaatgt

SEQ ID NO: 117205 - DNA, 120 bp, Artificial Sequence
  ENSG00000100593_16 (sequence is synthesized)
gcatatgtgcatgtgtctgccggggcctccctctgctgcctgctgggaccctggccactcatttttctcctccttgggagctgggctcttctgccctggctctgcacataagtgttagcc

SEQ ID NO: 117206 - DNA, 120 bp, Artificial Sequence
  ENSG00000100593_17 (sequence is synthesized)
agcagctccagaaaaatcccgattcccgggatctgccacgagtcactcctactccaccctgatggccagcagaggaagggccactcttctcatgggcacagccatcctttgccggggggg

SEQ ID NO: 117207 - DNA, 120 bp, Artificial Sequence
  ENSG00000100593_18 (sequence is synthesized)
gcatccagcctgggtggccacccctccttatctctgggtggtgcacatgcccttctttccccactccctgccacgagccactgcacaggaggctatctgtagccccaagctgcctttctg

SEQ ID NO: 117208 - DNA, 120 bp, Artificial Sequence
  ENSG00000100593_19 (sequence is synthesized)
ttggacaccaactttagtcttgggctgcaagccagcccagctgaggcgaagtggactccaggcagggaatgggttgcccaattctggtccctttcctttgctcagccccctctgttctgc

SEQ ID NO: 117209 - DNA, 120 bp, Artificial Sequence
  ENSG00000100593_20 (sequence is synthesized)
tgattgtagggatgtgcagggctgggagttggcactccccccgagtggggaggtgacagcttgtcacagtagccaggcttgggtgggttcagcactagctcgggacggtgtgtcacacgt

SEQ ID NO: 117210 - DNA, 120 bp, Artificial Sequence
  ENSG00000100593_21 (sequence is synthesized)
ctatagtaaaccagttctctgggaggggaaaaaagccctgatttattgcatttgggcagcttctgtggtgtaaattctcccagcagtgtcccatgtcatgctgccagcatcactgaatgc

SEQ ID NO: 117211 - DNA, 120 bp, Artificial Sequence
  ENSG00000100593_22 (sequence is synthesized)
actgaactcagagttgggaagagatgcacataatcgctctcccggcacacctcatgcctcttccctgcctccccattcccctggctgcacttccttgccttctatggggttgaaatattg

SEQ ID NO: 117212 - DNA, 120 bp, Artificial Sequence
  ENSG00000100593_23 (sequence is synthesized)
aagtctcaactgtctctgttcacaagagccaccaaaagttaggggacttcagtcctagcccccagatggccgccctgaagctctctgggctcctcagcaataaagcactttattttcaaa

SEQ ID NO: 117213 - DNA, 120 bp, Artificial Sequence
  ENSG00000100593_24 (sequence is synthesized)
cgaggctcgcagaggtgagtggcggcggcaccgggctgcggagcgcgctgtcggtcccacctccccagcccgccggctccagccgtgcggggagcgggaccgggacacacacaggcagcg

SEQ ID NO: 117214 - DNA, 120 bp, Artificial Sequence
  ENSG00000100593_25 (sequence is synthesized)
accccccgatggagagaggggccggggccggccggaagctcccggacaccgggcgttgcccaggtgcgccggacttcggggcttccactcctcgcgcgtgaccgcgagccgggctgccgc

SEQ ID NO: 117215 - DNA, 120 bp, Artificial Sequence
  ENSG00000100593_26 (sequence is synthesized)
ggaccagccgggtgacaagtttgacttctgtgcggagtgaggtggccgacactccacggtggccgggcttcctcgccctgagcggacctcgcctgcagccccctttccaggtctcagcct

SEQ ID NO: 117216 - DNA, 120 bp, Artificial Sequence
  ENSG00000100593_27 (sequence is synthesized)
tctgcgaattaggagtccccaggtgattctaatgcacctccaggccgtaagctgtgattcttgtgccctaagaggccaggaaggttagccaaaaatgtcagccaagagaagacagctggt

SEQ ID NO: 117217 - DNA, 120 bp, Artificial Sequence
  ENSG00000100593_28 (sequence is synthesized)
ttgaaggaaaggttgggcctctcacctctgaccctgaccccatcatccctcgtctctttggaatgcagctctaagacctccttcactggccggcctggcctgtctcctgcaggtgaccat

SEQ ID NO: 117218 - DNA, 120 bp, Artificial Sequence
  ENSG00000100593_29 (sequence is synthesized)
ggctccgcggaccacggcctgggagcctcacgaggctcgcagagccccctttccaggtgcgcgctagctcggagaggagtcccgccggtgcgaggaatctggcgctttgcggagtggcgg

SEQ ID NO: 117219 - DNA, 120 bp, Artificial Sequence
  ENSG00000100593_30 (sequence is synthesized)
ggccagcagccctgcagacacccggagaggagcggggctgacaaggtgggctcaggataccctatatcctggattccgtggagggtggggctgctgtgtggggtcagagggcaggctccc

SEQ ID NO: 117220 - DNA, 120 bp, Artificial Sequence
  ENSG00000100593_31 (sequence is synthesized)
catgctctccctgtggtgtagggggcagaggacctgcccctctactttctagctgtgggccttgggcaagtcttttgactctttgagcctttgttctctagaccatggcaagagacaaac

SEQ ID NO: 117221 - DNA, 120 bp, Artificial Sequence
  ENSG00000100593_32 (sequence is synthesized)
agcaccaacccagcagggctatgtgagcaccagtgagtgggaaatgctttgtaggctacaagggattccaggaatctaaggaggcctcctggaaaagacctgcaggtctgatcccctaaa

SEQ ID NO: 117222 - DNA, 120 bp, Artificial Sequence
  ENSG00000100593_33 (sequence is synthesized)
gaaggggttcagtatggaatggagtaggctggtggcatgggggacagccacctgaagggctttataggagaggaaattagagcagctggcagaattctagtttcaggctccactgcctgg

SEQ ID NO: 117223 - DNA, 120 bp, Artificial Sequence
  ENSG00000100596_0 (sequence is synthesized)
gcgtggccttggccgagaccggtcctctgcggagagggccccgccctctgtgaaggcccgcccgggaattggcggcggcgctgcagccatttccggtttcggggaggtgggtggggtgcg

SEQ ID NO: 117224 - DNA, 120 bp, Artificial Sequence
  ENSG00000100596_1 (sequence is synthesized)
gagcgggacttggagcagccgccgccgctgccaccgcctacagagcctgccttgcgcctggtgctgccaggaagatgcggccggagcccggaggctgctgctgccgccgcacggtgcggg

SEQ ID NO: 117225 - DNA, 120 bp, Artificial Sequence
  ENSG00000100596_2 (sequence is synthesized)
cgaatggctgcgtggcgaacggggaagtacggaacgggtacgtgaggagcagcgctgcagccgcagccgcagccgccgccggccagatccatcatgttacacaaaatggaggactatata

SEQ ID NO: 117226 - DNA, 120 bp, Artificial Sequence
  ENSG00000100596_3 (sequence is synthesized)
aaagaccgtttaatgaagcttttgaagaaacaccaatgctggttgctgtgctcacgtatgtggggtatggcgtactcaccctctttggatatcttcgagatttcttgaggtattggagaa

SEQ ID NO: 117227 - DNA, 120 bp, Artificial Sequence
  ENSG00000100596_4 (sequence is synthesized)
ttgaaaagtgtcaccatgcaacagaaagagaagaacaaaaggactttgtgtcattgtatcaagattttgaaaacttttatacaaggaatctgtacatgaggataagagacaactggaatc

SEQ ID NO: 117228 - DNA, 120 bp, Artificial Sequence
  ENSG00000100596_5 (sequence is synthesized)
ggccaatctgtagtgtgcctggagccagggtggacatcatggagagacagtctcatgattataactggtccttcaagtatacagggaatataataaagggtgttataaacatgggttcct

SEQ ID NO: 117229 - DNA, 120 bp, Artificial Sequence
  ENSG00000100596_6 (sequence is synthesized)
acaactatcttggatttgcacggaatactggatcatgtcaagaagcagccgccaaagtccttgaggagtatggagctggagtgtgcagtactcggcaggaaattggaaacctggacaagc

SEQ ID NO: 117230 - DNA, 120 bp, Artificial Sequence
  ENSG00000100596_7 (sequence is synthesized)
atgaagaactagaggagcttgtagcaaggttcttaggagtagaagctgctatggcgtatggcatgggatttgcaacgaattcaatgaacattcctgctcttgttggcaaaggttgcctga

SEQ ID NO: 117231 - DNA, 120 bp, Artificial Sequence
  ENSG00000100596_8 (sequence is synthesized)
ttctgagtgatgaactgaatcatgcatcactggttctgggagccagactgtcaggagcaaccattagaatcttcaaacacaacaatatgcaaagcctagagaagctattgaaagatgcca

SEQ ID NO: 117232 - DNA, 120 bp, Artificial Sequence
  ENSG00000100596_9 (sequence is synthesized)
ttgtttatggtcagcctcggacacgaaggccctggaagaaaattctcatccttgtggaaggaatatatagcatggagggatctattgttcgtcttcctgaagtgattgccctcaagaaga

SEQ ID NO: 117233 - DNA, 120 bp, Artificial Sequence
  ENSG00000100596_10 (sequence is synthesized)
aatacaaggcatacttgtatctggatgaggctcacagcattggcgccctgggccccacaggccggggtgtggtggagtactttggcctggatcccgaggatgtggatgttatgatgggaa

SEQ ID NO: 117234 - DNA, 120 bp, Artificial Sequence
  ENSG00000100596_11 (sequence is synthesized)
cgttcacaaagagttttggtgcttctggaggatatattggaggcaagaaggagctgatagactacctgcgaacacattctcatagtgcagtgtatgccacgtcattgtcacctcctgtag

SEQ ID NO: 117235 - DNA, 120 bp, Artificial Sequence
  ENSG00000100596_12 (sequence is synthesized)
tggagcagatcatcacctccatgaagtgcatcatggggcaggatggcaccagccttggtaaagagtgtgtacaacagttagctgaaaacaccaggtatttcaggagacgcctgaaagaga

SEQ ID NO: 117236 - DNA, 120 bp, Artificial Sequence
  ENSG00000100596_13 (sequence is synthesized)
tgggcttcatcatctatggaaatgaagactctccagtagtgcctttgatgctctacatgcctgccaaaattggcgcctttggacgggagatgctgaagcggaacatcggtgtcgttgtgg

SEQ ID NO: 117237 - DNA, 120 bp, Artificial Sequence
  ENSG00000100596_14 (sequence is synthesized)
ttggatttcctgccaccccaattattgagtccagagccaggttttgcctgtcagcagctcataccaaagaaatacttgatactgctttaaaggagatagatgaagttggggacctattgc

SEQ ID NO: 117238 - DNA, 120 bp, Artificial Sequence
  ENSG00000100596_15 (sequence is synthesized)
agctgaagtattcccgtcatcggttggtacctctactggacaggccctttgacgagacgacgtatgaagaaacagaagactgagcctttttggtgctccctcagaggaactctccctcac

SEQ ID NO: 117239 - DNA, 120 bp, Artificial Sequence
  ENSG00000100596_16 (sequence is synthesized)
ccaggacagcctgtggcctttgtgagccagttccaggaaccacacttctgtggccatctcacgtgaaagacattgcctcagctactgaaggtggccacctccactctaaatgacattttg

SEQ ID NO: 117240 - DNA, 120 bp, Artificial Sequence
  ENSG00000100596_17 (sequence is synthesized)
taaatagtaaaaaactgcttctaatccttcctttgctaaatctcacctttaaaaacgaaggtgactcactttgctttttcagtccattaaaaaaacattttattttgcaaccattctact

SEQ ID NO: 117241 - DNA, 120 bp, Artificial Sequence
  ENSG00000100596_18 (sequence is synthesized)
tgtgaaatcacgctgaccctagcctgtctctggctaaccacacaggccattcccctctcccagcaccttgcagacttgggcccatcaagagctactgctggccctggctccgcagcctgg

SEQ ID NO: 117242 - DNA, 120 bp, Artificial Sequence
  ENSG00000100596_19 (sequence is synthesized)
atacttacctggccctcctccctagggagcaagtgccttccacttacttcccatccaggtctcagaggtctcaaggccaaccttggaatccttatttaaccattcaagtaatcaacggaa

SEQ ID NO: 117243 - DNA, 120 bp, Artificial Sequence
  ENSG00000100596_20 (sequence is synthesized)
gttttcaccctttaatcttaagtttagccttttaagaaaaacagtaagcgatgactgctgaaaggctcattgtgtaatctcccaagggtttggtcttattccattttcttctggtcacca

SEQ ID NO: 117244 - DNA, 120 bp, Artificial Sequence
  ENSG00000100596_21 (sequence is synthesized)
gatgatttcttcctttaccatcaaatacttcttcataatggtcacagtctgaggatgtgcgcaaattctggttcttcccaagctctaaccgtaacacgtcccaccccctttttaaagcac

SEQ ID NO: 117245 - DNA, 120 bp, Artificial Sequence
  ENSG00000100596_22 (sequence is synthesized)
ttactgttttcagagcacccatatcccaccctggtgagaaggccactctcacatctgagtgttgggtacaaagctgctccgtagagtgatgtgcactcctggtgggtgaggggcaggggc

SEQ ID NO: 117246 - DNA, 120 bp, Artificial Sequence
  ENSG00000100596_23 (sequence is synthesized)
agtggcagtgtgcaaagaattgattactccttgcagagcctgtggcttgcatttcctactgctttctacgtttgaaaattatgacagtctctggctaggtctgggtccagattaggattt

SEQ ID NO: 117247 - DNA, 120 bp, Artificial Sequence
  ENSG00000100596_24 (sequence is synthesized)
aaactgataaaggaaactgttggtaaatcctctgctcagaaagcatttatcatgttcctatttaaggattaggtttattaatttaggcctcttagaagctaacccacttaaatattactc

SEQ ID NO: 117248 - DNA, 120 bp, Artificial Sequence
  ENSG00000100596_25 (sequence is synthesized)
ttctgaatgctagttctcttttattcttgatgtcctaagtcaattgaatctggcatctggggctagggtctgcctgtctacatattttttatttttttctgagaaattctgaacacatag

SEQ ID NO: 117249 - DNA, 120 bp, Artificial Sequence
  ENSG00000100596_26 (sequence is synthesized)
atctctttcctaaactgacattttctattttgactgttttcatactataaccaggtaaagggacttctttcagagagctttatactgcctgaccaaagaacaaatctgaaaatcaccatt

SEQ ID NO: 117250 - DNA, 120 bp, Artificial Sequence
  ENSG00000100596_27 (sequence is synthesized)
ttaaagttattttttcagttgaaccaaagtttaagtgaagaggacttttggcatattatacccaggatcagtttgtctttttgtatccatcaagtattacaggagaaggattgggaacag

SEQ ID NO: 117251 - DNA, 78 bp, Artificial Sequence
  ENSG00000100596_28 (sequence is synthesized)
ttgtatccatcaagtattacaggagaaggattgggaacagaatggaaaaacagtgtatgaaagtcatgttacaggccg

SEQ ID NO: 117252 - DNA, 120 bp, Artificial Sequence
  ENSG00000100596_29 (sequence is synthesized)
actgcactctagcctgggtgacagagcaaaactgtgtctcaaaaaaaaaagtcatgttacacatttaagtttttgaaattgctccttttatcggtaaagattctcaatccaaattctcct

SEQ ID NO: 117253 - DNA, 120 bp, Artificial Sequence
  ENSG00000100596_30 (sequence is synthesized)
cttttatcggtaaagattctcaatccaaattctcctgggtgtgttgtcatcagctgtgatatgtttgtgcacattacgtatagcagaggatgtaagcaatattattgtttgtgaagtttt

SEQ ID NO: 117254 - DNA, 120 bp, Artificial Sequence
  ENSG00000100596_31 (sequence is synthesized)
gtttttaatgtcttgagtatgagttatgtttagtcactgtcagcatctgagaactttaataagcccttgagatattccaaagttttattttacttttttaaagaacagaaaaagatgaat

SEQ ID NO: 117255 - DNA, 120 bp, Artificial Sequence
  ENSG00000100596_32 (sequence is synthesized)
gaaagaaccaaggagagatgcagagactatatttagcatgtataggttaaagtaagaaggaggttgtggtaactaaataggagtcctataaaatcaaatacattgtcaaccttttctgca

SEQ ID NO: 117256 - DNA, 120 bp, Artificial Sequence
  ENSG00000100596_33 (sequence is synthesized)
cctaccatagaatcccactggaataccacatagcttttgcactgcagttactatttactaatgtaaacgtagggtttgtaaaagtcacaaacttataagcaatgaacttacctgctagtc

SEQ ID NO: 117257 - DNA, 120 bp, Artificial Sequence
  ENSG00000100596_34 (sequence is synthesized)
tttttattttggcttgcatgaagtcactgcaaattcaaatgtcagtaccggcatttaaaatatatctatatcactttgttggtacaaagttatttcaagataagtgtaattttgttacaa

SEQ ID NO: 117258 - DNA, 120 bp, Artificial Sequence
  ENSG00000100596_35 (sequence is synthesized)
gtttattttgaagagacaaatctcctgtgatctatgcaggacctctgtactttctaaagaacaaaatgttatgtagacattatacatggttggttgtctcttcttgaaactgtaatgtaa

SEQ ID NO: 117259 - DNA, 120 bp, Artificial Sequence
  ENSG00000100596_36 (sequence is synthesized)
atctagggtccagtcatatcctaggtatcatcatttatccaagtacttggaggaatacaagtatatataaatacagtcattgagaataagtcgatttgaggcatacaagagtagtttctt

SEQ ID NO: 117260 - DNA, 120 bp, Artificial Sequence
  ENSG00000100596_37 (sequence is synthesized)
acacagtttaacacggcctgattcaagactctgataggattcaaacagataccggttaaccatgactaccaaaactgatcatctgagtcgattgatagaggtgtgactagtccttagcac

SEQ ID NO: 117261 - DNA, 120 bp, Artificial Sequence
  ENSG00000100596_38 (sequence is synthesized)
tttttctcattcctctttttattcagcattgctgttacctatttcaggtttataagacctctttcagcagatcacatcagaagccaggaaatgcatagctaggagatgtcaaaagcccat

SEQ ID NO: 117262 - DNA, 120 bp, Artificial Sequence
  ENSG00000100596_39 (sequence is synthesized)
atgaggagtggaccaagcagcagtggcggtttctcctcgcatctttttttttttaagctttaacttagcaggggcatggactttatagcactttttcaactttttgctttgctttggata

SEQ ID NO: 117263 - DNA, 120 bp, Artificial Sequence
  ENSG00000100596_40 (sequence is synthesized)
agaaatccttacctttaaaaaaagcttctagtctccataacccccaaagtactgcttatttgtttgaagaatccagccatcgtagtgctttagtcactatcgtaaacattcatgataggg

SEQ ID NO: 117264 - DNA, 120 bp, Artificial Sequence
  ENSG00000100596_41 (sequence is synthesized)
caaggattttaaaacaggattcttgcttctgtagtcatcaaggtgaacagaagcatcctacacaaccactaagggctctatgtttgtgtcatgcctcttcaaacaccaaggagttgaaca

SEQ ID NO: 117265 - DNA, 120 bp, Artificial Sequence
  ENSG00000100596_42 (sequence is synthesized)
tgcttccagtgatttgtctccgtaatgccttcttcctttatttggcctttctttctttctgtaccttcaagttcttgatttttaaaattccaactctagagaaaaccaatatatggtggt

SEQ ID NO: 117266 - DNA, 120 bp, Artificial Sequence
  ENSG00000100596_43 (sequence is synthesized)
gctgggctttgaagatagcatatcagacgccttggttctgtttgtacacttagccttacatttcaggaggaggcttttcattaggggcttaagctagctcctttggcttttaaaaaaaat

SEQ ID NO: 117267 - DNA, 120 bp, Artificial Sequence
  ENSG00000100596_44 (sequence is synthesized)
tttttttcaaatttcttcattacctaagggagcctgcatctaaatttctcaactagttcagcctagctgaattttctagtgtgttatacactttgcttccttcttattggtgaaaaccag

SEQ ID NO: 117268 - DNA, 120 bp, Artificial Sequence
  ENSG00000100596_45 (sequence is synthesized)
ggggatgagtggcttccatggagagatttcctgatttctcagggaggaaaaaagtgatgacatttaccactacttttatgtttttcccctttttccaaattgataaggatttctggttcc

SEQ ID NO: 117269 - DNA, 120 bp, Artificial Sequence
  ENSG00000100596_46 (sequence is synthesized)
tagtgatccgggattgggcaacagtgcagaactgccagtcatgccgtaggccgtgaagaaagaatgtgagtaactgttgttttgcaaggatttgtagggttatgggcagttgttgtttga

SEQ ID NO: 117270 - DNA, 120 bp, Artificial Sequence
  ENSG00000100596_47 (sequence is synthesized)
agcattgctatgacctaattcccaaggtatctttcctctcttggtgttctaggtaagccaatgagctttaatctctacttgctataaccgtgtgcttagaaaaagaggtgagagtagtgg

SEQ ID NO: 117271 - DNA, 120 bp, Artificial Sequence
  ENSG00000100596_48 (sequence is synthesized)
ttttccttcaaactgtccacattcatgaagattatgaattgttaggacagccagggcaagatagaccctgtctctacaaaaatttttttctaaattaaccgggcatggtggtgcctgcct

SEQ ID NO: 117272 - DNA, 64 bp, Artificial Sequence
  ENSG00000100596_49 (sequence is synthesized)
aatttttttctaaattaaccgggcatggtggtgcctgcctgtagtcccacctgtcctgcactcc

SEQ ID NO: 117273 - DNA, 120 bp, Artificial Sequence
  ENSG00000100596_50 (sequence is synthesized)
ggaaaaaaaattgttaggagctgggtgcggatgcagcctgcaatcccagctacttgagaggctgaggccggaggattgcttaaacccaagaatttgagcgtagcctgggcaacacagcaa

SEQ ID NO: 117274 - DNA, 120 bp, Artificial Sequence
  ENSG00000100596_51 (sequence is synthesized)
gaccccatctaagaaaaaaatgttttttaaatcagcttagcccaaaggggttgtgaatggggaggtataaaaagcaaagattattttttggctactaagccaagaacttacagggatttt

SEQ ID NO: 117275 - DNA, 120 bp, Artificial Sequence
  ENSG00000100596_52 (sequence is synthesized)
ttttttcagtcccagaacctacagataccctgctacttgcttcacgtggatgctcagtgcccagcagccatcttaatacattaaaccagtttaaaaaataccttccatgtggagaaaaac

SEQ ID NO: 117276 - DNA, 120 bp, Artificial Sequence
  ENSG00000100596_53 (sequence is synthesized)
aaaaaataccttccatgtggagaaaaacatgtctttttctcgcctcaactttatccacatgaaatatgtgcccatggctgggcgcagtggctcacctgtaatcccaacactttgggaggc

SEQ ID NO: 117277 - DNA, 61 bp, Artificial Sequence
  ENSG00000100596_54 (sequence is synthesized)
tcaggaggctgaggcacaggaattgcttgaacccaagaggcagaggatgcaatgagccaag

SEQ ID NO: 117278 - DNA, 78 bp, Artificial Sequence
  ENSG00000100596_55 (sequence is synthesized)
gcctgtaatcccagctacgtcaggaggctgaggcacaggaattgcttgaacccaagaggcagaggaacagagggagac

SEQ ID NO: 117279 - DNA, 120 bp, Artificial Sequence
  ENSG00000100596_56 (sequence is synthesized)
tagccattgccatgtgcccagccagagagccaaattagagggctggcttccctatcacacagaataaatgctagtgctagccaatgatccctttgcttttaatgtatagaaaatactgtt

SEQ ID NO: 117280 - DNA, 120 bp, Artificial Sequence
  ENSG00000100596_57 (sequence is synthesized)
gttccttttgtcatttccagtgacatctgttttctaagcagctcttttctagggaggaaaccaaaggggctaggttaagaccctaatagaaatgttttttctaatctctggtgagtctgg

SEQ ID NO: 117281 - DNA, 120 bp, Artificial Sequence
  ENSG00000100596_58 (sequence is synthesized)
aagtgtcacattcacagtccacccttgggagtggcttggtggagctggggacaaggttttgtttactacatagtgcacatgataaatggccttaaactgtgattctttctggtaggataa

SEQ ID NO: 117282 - DNA, 120 bp, Artificial Sequence
  ENSG00000100596_59 (sequence is synthesized)
gttataataaactgaccctaaagaatgcaatggcttttaaactgcagttactgtgttcttaatgaagcaatacccaaagctctgttcttttggagcacttgaggggagcttgaatgaaag

SEQ ID NO: 117283 - DNA, 120 bp, Artificial Sequence
  ENSG00000100596_60 (sequence is synthesized)
gtgcagataagagcagtaccttgatcttatgctttctgagtgtcctgccttgttgccatctgcatggatgagtgaatgcttctatgcacgaggagactcaagccaactcagagtctgctt

SEQ ID NO: 117284 - DNA, 120 bp, Artificial Sequence
  ENSG00000100596_61 (sequence is synthesized)
tttccaacgctcttcccaggtttcttttgcaaagcttggtcatttggcccaggtcttcctggaaagtggagtacatgtcactgactagggtggcgtggtgtctttacccttaacattaag

SEQ ID NO: 117285 - DNA, 120 bp, Artificial Sequence
  ENSG00000100596_62 (sequence is synthesized)
tcttgttacctcagtgatgtgaagccaatggttggaattataaaaagcatccttgctggttcttcacaggacactggaacccaccctgtcaattcagctagcatgtccacacagtcttga

SEQ ID NO: 117286 - DNA, 120 bp, Artificial Sequence
  ENSG00000100596_63 (sequence is synthesized)
tgatccctctctgtaacaggcagctaacattaagagaagggggaaagagaagaagagagcaatagcttatgggagagctgagatcttacttcgttgacccatatttttcccctgaccaag

SEQ ID NO: 117287 - DNA, 120 bp, Artificial Sequence
  ENSG00000100596_64 (sequence is synthesized)
ttacctgtaaactggaatttgcaaggggatgctgtgatgataacccctttctattgctgtaatgttcatataacctgggaaactgagagaaggggatgtgtaaataaaagcttaaacatt

SEQ ID NO: 117288 - DNA, 120 bp, Artificial Sequence
  ENSG00000100596_65 (sequence is synthesized)
ttagtaatgtgttaaaatgtcactctctcttaccctgtttcccttttttgccagatgatgatttttttatttttattttgtactttactggatgactgtgaagcgatgagtattgggttg

SEQ ID NO: 117289 - DNA, 120 bp, Artificial Sequence
  ENSG00000100596_66 (sequence is synthesized)
gggtaggtgtgttgattttgagagtgcatgttaagaactgaaggggaactacttgagatgacttaagaagcatcccatgcaaatatcttgttttgccctaataaaatattcagaaagata

SEQ ID NO: 117290 - DNA, 120 bp, Artificial Sequence
  ENSG00000100596_67 (sequence is synthesized)
ttataaattgagtattctctcaaaataggagtagcagctgaggatacaatatgattggtttccttacatattcttcattgttgagctttttaagatatatctttctattacatttgatac

SEQ ID NO: 117291 - DNA, 120 bp, Artificial Sequence
  ENSG00000100596_68 (sequence is synthesized)
tgcccttggacacaaatatatcatgagtgaacatggagacaggaagcaaaaaagttgtgccagctgtggggtactacaaagcattgtatttttcaatttttaaactatgaagttgccttt

SEQ ID NO: 117292 - DNA, 120 bp, Artificial Sequence
  ENSG00000100596_69 (sequence is synthesized)
aaatcatacggtgaattttgatgcaggagctgatagactacctgcgaacacattctcatagtgcagtgtatgccacgtcattgtcacctcctgtagtggagcagatcatcacctccatga

SEQ ID NO: 117293 - DNA, 120 bp, Artificial Sequence
  ENSG00000100596_70 (sequence is synthesized)
catagtgcagtgtatgccacgtcattgtcacctcctgtagtggagcagatcatcacctccatgaagtgcatcatggggcaggatggcaccagccttggattattttgttttctctcaccg

SEQ ID NO: 117294 - DNA, 120 bp, Artificial Sequence
  ENSG00000100596_71 (sequence is synthesized)
caattcaaggtggcaataattcacctattttgccctgcttttttctgcccaactctaattatgtcctttgctatctgaggcatggtttctgaatgagaaatatatctctgcatttccgga

SEQ ID NO: 117295 - DNA, 120 bp, Artificial Sequence
  ENSG00000100596_72 (sequence is synthesized)
tcatcgtttctctcctttatcccctgtatttagtcaccagtgcctatggatcatgcttccttaatatctttgaacctgtctacttctccatatctcattgttatttacttgacttagatt

SEQ ID NO: 117296 - DNA, 120 bp, Artificial Sequence
  ENSG00000100596_73 (sequence is synthesized)
tctgtccactttcacctggttttaatagccagccagtcataatagtagaggaatcagtcaagcaaaaatgctttggaagaattaaataagcaatgctgaacatcaggaattgtagatatc

SEQ ID NO: 117297 - DNA, 120 bp, Artificial Sequence
  ENSG00000100596_74 (sequence is synthesized)
cgtacagagagttccagtaaaattttatgagtccacgaccccttttctaagcagtctggtccatgttggtctcatacctcatatgcaggattcattcattcattaaatatttgtttcata

SEQ ID NO: 117298 - DNA, 120 bp, Artificial Sequence
  ENSG00000100599_0 (sequence is synthesized)
cctggcccttccagagggccagagccagggacatgcgggcgcccgggactccgcgttccgcgcggcccggcgcctgagcgcctccgttccccgtcccggagctgccggcggcatgatccg

SEQ ID NO: 117299 - DNA, 120 bp, Artificial Sequence
  ENSG00000100599_1 (sequence is synthesized)
cctccgttccccgtcccggagctgccggcggcatgatccgacacgccggggcgcccgcgcgcggggaccccacgggtccggttccagttgttggcaaaggagaggaagaggaagaggaag

SEQ ID NO: 117300 - DNA, 120 bp, Artificial Sequence
  ENSG00000100599_2 (sequence is synthesized)
atggcatgcggctttgtctgccagccaacccgaaaaactgccttcctcaccgccggggcatcagcatcctggagaagctcatcaaaacatgcccggtgtggctgcagctgagtctgggcc

SEQ ID NO: 117301 - DNA, 120 bp, Artificial Sequence
  ENSG00000100599_3 (sequence is synthesized)
aggcagaggtggccaggatcctgcaccgggtggtggctgggatgttcctggttcgccgggacagcagctcgaagcagctggtgctctgtgtccactttccttctctgaacgaaagctcgg

SEQ ID NO: 117302 - DNA, 120 bp, Artificial Sequence
  ENSG00000100599_4 (sequence is synthesized)
ccgaggtgctcgaatacaccattaaggaagaaaagtcgatattgtacctggaaggctcggctcttgtgtttgaggacatcttcagattgattgcgttctactgtgtcagtagagacttac

SEQ ID NO: 117303 - DNA, 120 bp, Artificial Sequence
  ENSG00000100599_5 (sequence is synthesized)
tgcccttcacactgcggctaccccaggccatccttgaggccagcagcttcacggaccttgagaccatcgccaacctgggtctgggtttctgggactcctcgctgaatcctccacaagaaa

SEQ ID NO: 117304 - DNA, 120 bp, Artificial Sequence
  ENSG00000100599_6 (sequence is synthesized)
gagggaagccagcagagcccccaagagaccgggcccccggattccccctagtctccagcctcaggcccacagcccatgacgcaaactgtgcctgtgaaatcgagctgtcggtaggaaatg

SEQ ID NO: 117305 - DNA, 120 bp, Artificial Sequence
  ENSG00000100599_7 (sequence is synthesized)
accgcctgtggtttgtgaatcctattttcatcgaggactgcagcagcgccctgcccaccgaccagccacctcttggaaattgccctgcacgccctttgccgcccacctctgatgccacct

SEQ ID NO: 117306 - DNA, 120 bp, Artificial Sequence
  ENSG00000100599_8 (sequence is synthesized)
cacctccaggtgggccccacgccgcccaccaccccctcccccagtgctgcccctgcagccctgcagcccagcccagccccctgtgctccctgctcttgcccccgcccctgcctgtccttt

SEQ ID NO: 117307 - DNA, 120 bp, Artificial Sequence
  ENSG00000100599_9 (sequence is synthesized)
ctttgcccacctctcccccagtgcctgccccccacgtcacaccccatgccccaggtcccccagaccatccgaaccagccgcccatgatgacctgcgagagactcccatgccccactgcag

SEQ ID NO: 117308 - DNA, 120 bp, Artificial Sequence
  ENSG00000100599_10 (sequence is synthesized)
gcctgggccccctcagggaggaagcgatgaagccaggggcagcctccagtcccttgcagcaggtccccgccccgccactgcctgcgaagaagaaccttcccactgcccctcccagacgcc

SEQ ID NO: 117309 - DNA, 120 bp, Artificial Sequence
  ENSG00000100599_11 (sequence is synthesized)
gcgtttccgagagggtgtccttagaagaccaaagtccggggatggcggcagagggggaccagctcagcctgcctccccaagggacctcagacggccctgaggacacgccccgggagagca

SEQ ID NO: 117310 - DNA, 120 bp, Artificial Sequence
  ENSG00000100599_12 (sequence is synthesized)
cggagcaaggccaggacacagaggtgaaagccagcgatcctcacagcatgccagagctgcccaggacagccaaacaacccccagtcccgccccccaggaaaaaacggatctctcgacaac

SEQ ID NO: 117311 - DNA, 120 bp, Artificial Sequence
  ENSG00000100599_13 (sequence is synthesized)
tggcctcgaccctcccagctcccttagagaacgctgagctctgcacacaggcgatggccttggagacacccacgccgggtccacccagagagggccaaagccctgcttctcaggctggga

SEQ ID NO: 117312 - DNA, 120 bp, Artificial Sequence
  ENSG00000100599_14 (sequence is synthesized)
ctcagcaccctcctgcccaggccactgcccattcccagagctctccagagttcaagggctccctggcctccctctcagacagcttgggggtgtctgtcatggccaccgaccaggactcct

SEQ ID NO: 117313 - DNA, 120 bp, Artificial Sequence
  ENSG00000100599_15 (sequence is synthesized)
actccaccagcagcacggaggaggagctggagcagttcagcagccccagcgtgaagaagaagccctccatgatcctgggcaaggctcggcaccggctgagctttgccagtttcagcagca

SEQ ID NO: 117314 - DNA, 120 bp, Artificial Sequence
  ENSG00000100599_16 (sequence is synthesized)
tcctctccaacaaccgcaagctgtacaagaaggtggtggagctggcgcaggacaagggctcgtactttggcagcctggtgcaggactacaaggtgtacagcctggagatgatggcgcgcc

SEQ ID NO: 117315 - DNA, 120 bp, Artificial Sequence
  ENSG00000100599_17 (sequence is synthesized)
agacctccagcacggagatgctgcaggagattcgcaccatgatgacccagctcaagagctacctgctgcagagcaccgagctcaaggccctggtggaccccgccctgcactccgaggagg

SEQ ID NO: 117316 - DNA, 120 bp, Artificial Sequence
  ENSG00000100599_18 (sequence is synthesized)
agctcgaagcaattgtagagtctgccttgtacaaatgtgtcctgaagcccctgaaggaagccatcaactcatgcctgcatcagatccacagcaaggatggttcgctgcagcagctcaagg

SEQ ID NO: 117317 - DNA, 120 bp, Artificial Sequence
  ENSG00000100599_19 (sequence is synthesized)
agaaccagttagtgatcctggccaccaccaccactgacctaggtgtgaccaccagcgtgccggaggtgcccatgatggagaagatcctgcagaagttcaccagcatgcacaaggcctact

SEQ ID NO: 117318 - DNA, 120 bp, Artificial Sequence
  ENSG00000100599_20 (sequence is synthesized)
cacctgagaagaagatctccatcctgctcaagacctgcaaactcatctacgactccatggccctcggcaacccagggaagccctatggggcggatgacttcctgcctgtgctcatgtatg

SEQ ID NO: 117319 - DNA, 120 bp, Artificial Sequence
  ENSG00000100599_21 (sequence is synthesized)
tgctggcccgcagcaacctcacggagatgcttctcaatgtggagtacatgatggagctcatggaccccgccctgcagctgggggagggttcctactatctgaccaccacctacggggccc

SEQ ID NO: 117320 - DNA, 120 bp, Artificial Sequence
  ENSG00000100599_22 (sequence is synthesized)
tggagcacatcaagagctacgacaagatcacggtgacccggcagctgagtgtggaggtgcaggactccatccaccgctgggagcgccggcgtactctcaacaaggcccgggcctcccgct

SEQ ID NO: 117321 - DNA, 120 bp, Artificial Sequence
  ENSG00000100599_23 (sequence is synthesized)
cctccgtacaggacttcatctgcgtgtcgtacctggagcccgagcagcaggcgcggacgctggcgtcgcgggcggacacccaggcccaggcgctgtgcgcgcagtgcgcggagaagttcg

SEQ ID NO: 117322 - DNA, 120 bp, Artificial Sequence
  ENSG00000100599_24 (sequence is synthesized)
cggtggagcggccgcaggcgcaccggctgttcgtgctggtggacgggcgctgcttccagctggcggacgacgcgctgccgcactgcatcaagggctacctgctgcgcagcgagcccaagc

SEQ ID NO: 117323 - DNA, 120 bp, Artificial Sequence
  ENSG00000100599_25 (sequence is synthesized)
gcgacttccactttgtctaccggcccctggacggtggtggcggcggcggcggcgggagcccgccctgcctggtggtgcgggagcccaacttcctgtgaggccctcccggggcgcctcccc

SEQ ID NO: 117324 - DNA, 120 bp, Artificial Sequence
  ENSG00000100599_26 (sequence is synthesized)
tcacccccaggcgcacgtctggccccgcctctggctgcgcactcccgaccgcgacgtccacgcagcagagggacatgggccattccatgacgtgcccaggccaacgtcgcaggacagttg

SEQ ID NO: 117325 - DNA, 120 bp, Artificial Sequence
  ENSG00000100599_27 (sequence is synthesized)
tgaaaataacatgacgctcgtccaaggccacttcctgagggcaagtcctaatagccctgagacaccgagacggcatgttcttcattagacggaaagggaaactgaggctcaggagagagg

SEQ ID NO: 117326 - DNA, 120 bp, Artificial Sequence
  ENSG00000100599_28 (sequence is synthesized)
cgctccaggccgctgcagccaacaaaccggcgccctcttcacacgtagctcctcaggccattccccatgagtcccccacacccaccccatcctcggtctttgcaaagaagggcccgagct

SEQ ID NO: 117327 - DNA, 120 bp, Artificial Sequence
  ENSG00000100599_29 (sequence is synthesized)
tagtttccccaggactggcctaggaaggagcaccggccacagctgctccccgtgccactcagggtggacccagcatctcaggagcacctcagggtgtcggttaagagacaggcctccacc

SEQ ID NO: 117328 - DNA, 120 bp, Artificial Sequence
  ENSG00000100599_30 (sequence is synthesized)
cctgcaccagagcctgctcttagctcccggtgcccccagaccccgcagctctgtgcccggcaagaagcagctagacacacgccagggcgccaagcacggccagctccgcggacccatgga

SEQ ID NO: 117329 - DNA, 120 bp, Artificial Sequence
  ENSG00000100599_31 (sequence is synthesized)
caagcccagccccgcctcagggaaaacagggcctttccctacaggacacgccccagagctgtggcagattgcaggagccatcgtgtggggagaatttaataaaagcccttttgaaaatga

SEQ ID NO: 117330 - DNA, 120 bp, Artificial Sequence
  ENSG00000100599_32 (sequence is synthesized)
caggggacttcacagggaagccccagagggaggggtgtggcccagaggatgcagagagagggcacaggcccctctgggaaccacagaggatgtgttggctctgaggctttctcacactat

SEQ ID NO: 117331 - DNA, 120 bp, Artificial Sequence
  ENSG00000100599_33 (sequence is synthesized)
ctgataagagcccctcccttccacacctgcccctctggctcacggcctgtctctcagcttcctgtatcatcagcttcaaggacagcctggagtcctgcgtggaccaggcctcccattgca

SEQ ID NO: 117332 - DNA, 120 bp, Artificial Sequence
  ENSG00000100599_34 (sequence is synthesized)
ggggttctagaagaaacttcctgtaggggcagcaacaggggctgatcccccttcatgggaggtagcttgtgattactaagcagctgctgggtggagcgggtgtctgctaaccaccctgag

SEQ ID NO: 117333 - DNA, 120 bp, Artificial Sequence
  ENSG00000100599_35 (sequence is synthesized)
aactgcctgtttattcagaactggttttgggtcagtaagaatttaaaaatacactttggtgccataagtcaatgacttaagctacgggaccttgacaagggctggtttaaaatggggtgg

SEQ ID NO: 117334 - DNA, 120 bp, Artificial Sequence
  ENSG00000100599_36 (sequence is synthesized)
aaccctcacacccacttgcaagtatctgccacacccaagatggcagggtgaagccggagaggagtttctcagggaggaaggggaggtgaggggccagggcgctggcctcaccggcttctc

SEQ ID NO: 117335 - DNA, 120 bp, Artificial Sequence
  ENSG00000100599_37 (sequence is synthesized)
attttccccagagatgacctagtgtgatccacttcctcttgtctttttttgttcattactgggtcggttatttaaactctctgtatctcagttcacttatcaataaaatgataaataata

SEQ ID NO: 117336 - DNA, 120 bp, Artificial Sequence
  ENSG00000100599_38 (sequence is synthesized)
gggcccggtggggccatgtcccagacaccatccctgctgcctgctggctaaggagccgtgacatcacctggctgctccagccgcccagccctgccttaggggagcagtgagactccccac

SEQ ID NO: 117337 - DNA, 120 bp, Artificial Sequence
  ENSG00000100599_39 (sequence is synthesized)
accagaggaagggcccccagcccctgctgccagtgtgtgtccaggacttgggtgcgtctagaaacatatcagcaggcattggtgttctccctgggcaagcaggaagggtgcaggaggaat

SEQ ID NO: 117338 - DNA, 120 bp, Artificial Sequence
  ENSG00000100599_40 (sequence is synthesized)
gagacacacccatcattccttagcccctcctaggacccagcaccctgcaggggctggagatggggacttgtcatcccagtccctgctttaaggagcccacaggctcatctacagccttgc

SEQ ID NO: 117339 - DNA, 120 bp, Artificial Sequence
  ENSG00000100599_41 (sequence is synthesized)
tccttagtccctggacaaatgcagcagctgccaagggtctgcgtaacccccaccaacccagtggcccacccctccccatacctctctctatacagactcagtattcaaaccagtcccgcc

SEQ ID NO: 117340 - DNA, 120 bp, Artificial Sequence
  ENSG00000100599_42 (sequence is synthesized)
cctccccaactccatcaccccacccacccccaggctgcatcaaatccagctgcccccagttccccaaacatgcccagcccagttcactggctgctcaaccgctgccctcactggtcaatc

SEQ ID NO: 117341 - DNA, 120 bp, Artificial Sequence
  ENSG00000100599_43 (sequence is synthesized)
tccccttcttcactggctgtcactgcccatcctttaagacgactcagtttctccaacagcccctcctctgagaagccttccctgatacacacacacaccgtttcacacaggctgggtggg

SEQ ID NO: 117342 - DNA, 120 bp, Artificial Sequence
  ENSG00000100599_44 (sequence is synthesized)
gggcgccaagcccagggcctgggacagagcaggactgggtgtgtaaaaaagggtgagagttggactagtgagccaggcacatccagagctgtgagcagctatgcagactcactcctctga

SEQ ID NO: 117343 - DNA, 120 bp, Artificial Sequence
  ENSG00000100599_45 (sequence is synthesized)
cacccagagcagaccagtcctgagccacactcctggctttcaagatggtgcatctataataagcagagcccaggcctgggagacaggaggcttgagttctggccccagccctgtactagc

SEQ ID NO: 117344 - DNA, 120 bp, Artificial Sequence
  ENSG00000100599_46 (sequence is synthesized)
ttgctgtgtgaccctcagcaatccctgccccactctgggactcagttttcctgcccacacaggctgactatggctaatcaatttaataactgactctctggggagaaaacaaaagctctg

SEQ ID NO: 117345 - DNA, 120 bp, Artificial Sequence
  ENSG00000100599_47 (sequence is synthesized)
attttagcttctgtccatttccatggtgtgagtcctccatggccaacttcaacttggcatcactgaatgtggagttggaaagaagtgtatgcagtcggctctccctggcgggtgtgagcc

SEQ ID NO: 117346 - DNA, 120 bp, Artificial Sequence
  ENSG00000100599_48 (sequence is synthesized)
agctccagcacacctctgttcccatcccctcccaacaccccggactcccacagactgtagggacatggacactcttggtccaagcctggcccaggcatcccgtacttcctgcttctacct

SEQ ID NO: 117347 - DNA, 120 bp, Artificial Sequence
  ENSG00000100599_49 (sequence is synthesized)
taggggttcctgatgctgagccaggcagagtatggatgaaacggaccacccactgtttgggagacggaagcttcggaggggggtcccctcagcaccacatctgggatctggggagggcac

SEQ ID NO: 117348 - DNA, 120 bp, Artificial Sequence
  ENSG00000100599_50 (sequence is synthesized)
caccctctgccccctcccagtgcctcctccgcacaccatgccttggggggtgggcacccttccctggggaggggaagcccagagctggacagtcactagcaggtggatagtgccctggga

SEQ ID NO: 117349 - DNA, 120 bp, Artificial Sequence
  ENSG00000100599_51 (sequence is synthesized)
ggcctaatggaggacaaggagccctgaggcagccactaagacggagggagtgggccgggcttttcccctcctggaagaaatgggcggtccccgtgaagctcttgacaggagcccggcctc

SEQ ID NO: 117350 - DNA, 120 bp, Artificial Sequence
  ENSG00000100599_52 (sequence is synthesized)
gcctaagccctagccaccagttgccatcacggtctccgccgagccgggatcctcagccgcttcccgcgcaggcctgctgttcccaatccggccacaagggggcagccccgcgcgcagcct

SEQ ID NO: 117351 - DNA, 120 bp, Artificial Sequence
  ENSG00000100599_53 (sequence is synthesized)
ctctgcctgcagccctgagccccggggaaggcgaggccgctccgggccggagcttccagcgcctgctcgcccatttatgggaggcgggcgctatccccactttacagccggggctcgacg

SEQ ID NO: 117352 - DNA, 120 bp, Artificial Sequence
  ENSG00000100599_54 (sequence is synthesized)
aatcaaggccacacaggcagtgggagcaaaggcaaagcccggcaggtgtggggctgggtccctaggggtggaggacggcgggcgggcgccctgctcgtgctgcgagtgcccagccccagc

SEQ ID NO: 117353 - DNA, 120 bp, Artificial Sequence
  ENSG00000100599_55 (sequence is synthesized)
ccgcaggcgtcgcctcgccttgcccgccctgctcatgccgggccttccccacccgactgcgcccagcctccttcacccggtcccctcccgctttaccaatccctgccccacgcagctcct

SEQ ID NO: 117354 - DNA, 120 bp, Artificial Sequence
  ENSG00000100599_56 (sequence is synthesized)
cagagccccagggctcttgcagccctaaggggctggactgtgttgcccgcccgcactatgggatgcccgggcgggctcgcacctcccttcttatctgtgctgccctccgtgcccagcatt

SEQ ID NO: 117355 - DNA, 120 bp, Artificial Sequence
  ENSG00000100599_57 (sequence is synthesized)
gcgcctggggtgcagggaactcacctggagggagggagggagggaatgaatgaatgaatgaatgatggggagcctgtggaccagcagccaggggacgcgccggctcctctttgcagggac

SEQ ID NO: 117356 - DNA, 120 bp, Artificial Sequence
  ENSG00000100599_58 (sequence is synthesized)
tccgagacgcgccttaattcatctcccagaactgtcggcccagctgggaagccaggcagggagggggacgggccccccgcaggctcgcggcagagacgggaaaggcgcaggtgccggact

SEQ ID NO: 117357 - DNA, 120 bp, Artificial Sequence
  ENSG00000100599_59 (sequence is synthesized)
cgcagacagcttggcgcccgccacccgctatccatccagggaggggcctgggccgggagagggcgcctgaggagacagggccccgccgtgaccacaggcccctcgcgtctccgcaggact

SEQ ID NO: 117358 - DNA, 120 bp, Artificial Sequence
  ENSG00000100599_60 (sequence is synthesized)
gcctccaacactggagttgggccaggaaaaaaatacatcatgagataatttaactccaagaactttattgtaaaacttcagtggtgaatttcttttaaaaaaaatagatcttgaatcata

SEQ ID NO: 117359 - DNA, 120 bp, Artificial Sequence
  ENSG00000100599_61 (sequence is synthesized)
tcagtagagacttactgcccttcacactgcggctaccccaggccatccttgaggccagcagcttcacggaccttgagaccatcgccaacctgggtctgggcgatgttcctcctggaagaa

SEQ ID NO: 117360 - DNA, 120 bp, Artificial Sequence
  ENSG00000100599_62 (sequence is synthesized)
ctgcattcctttctggcacagacaagaccttctctcctgggagagtttgatctcaggcacgaggaggaagtggagaagggaggtttccatttgggaagccaacagcagttcagattcatc

SEQ ID NO: 117361 - DNA, 120 bp, Artificial Sequence
  ENSG00000100599_63 (sequence is synthesized)
tatcagcacttacttcctagagaacaggatttaaatggaagctgagtgtgttgcagcttaggagctgaagggatccgtgcagacctggtgtccccgagtgctgaaagacataaagccagg

SEQ ID NO: 117362 - DNA, 120 bp, Artificial Sequence
  ENSG00000100599_64 (sequence is synthesized)
gccaaggaaaggttcactttacagtcatctgaatggctggagacccagggcgcaaggagcacatcctatcaaaggccagagaccttggccctggcatgggcaggcttgggccctgccaac

SEQ ID NO: 117363 - DNA, 120 bp, Artificial Sequence
  ENSG00000100599_65 (sequence is synthesized)
cttcatgtgaaatagtgataataaatatggaaagagcagcgtttgtcaagggccctgacacaccaggcattgtgcctggcatgtcacacattgttctaggaagggactttggtggcaaag

SEQ ID NO: 117364 - DNA, 120 bp, Artificial Sequence
  ENSG00000100599_66 (sequence is synthesized)
aagtgaaactcactcaaactagcatcaaaaagagacttagagaaaggacgccagggaccctctgagaaatggagacggagggttagctgggctttgtgggccattgcagctgctcggtca

SEQ ID NO: 117365 - DNA, 120 bp, Artificial Sequence
  ENSG00000100599_67 (sequence is synthesized)
cacgtgccagccccttgctccctgcacatggcctccttgctgactcaggttcctactcccctgctcccccgactagcggggctctgactcagctcgcagccccacctgaccactgttctt

SEQ ID NO: 117366 - DNA, 120 bp, Artificial Sequence
  ENSG00000100599_68 (sequence is synthesized)
cagcagagtttgtgaaaggcagcagaatcccgctccccatgcttgccttcgggaccctcactggagcagaaccattgcttagagcgtgagaaggagaagcgagtgtccgtcaacatgctg

SEQ ID NO: 117367 - DNA, 120 bp, Artificial Sequence
  ENSG00000100600_0 (sequence is synthesized)
aatcacagcagtgccgacgtcgtgggtgtttggtgtgaggctgcgagccgccgcgagttctcacggtcccgccggcgccaccaccgcggtcactcaccgccgccgccgccaccactgcca

SEQ ID NO: 117368 - DNA, 120 bp, Artificial Sequence
  ENSG00000100600_1 (sequence is synthesized)
ccacggtcgcctgccacaggtgtctgcaattgaactccaaggtgcagaatggtttggaaagtagctgtattcctcagtgtggccctgggcattggtgccgttcctatagatgatcctgaa

SEQ ID NO: 117369 - DNA, 120 bp, Artificial Sequence
  ENSG00000100600_2 (sequence is synthesized)
gatggaggcaagcactgggtggtgatcgtggcaggttcaaatggctggtataattataggcaccaggcagacgcgtgccatgcctaccagatcattcaccgcaatgggattcctgacgaa

SEQ ID NO: 117370 - DNA, 120 bp, Artificial Sequence
  ENSG00000100600_3 (sequence is synthesized)
cagatcgttgtgatgatgtacgatgacattgcttactctgaagacaatcccactccaggaattgtgatcaacaggcccaatggcacagatgtctatcagggagtcccgaaggactacact

SEQ ID NO: 117371 - DNA, 120 bp, Artificial Sequence
  ENSG00000100600_4 (sequence is synthesized)
ggagaggatgttaccccacaaaatttccttgctgtgttgagaggcgatgcagaagcagtgaagggcataggatccggcaaagtcctgaagagtggcccccaggatcacgtgttcatttac

SEQ ID NO: 117372 - DNA, 120 bp, Artificial Sequence
  ENSG00000100600_5 (sequence is synthesized)
ttcactgaccatggatctactggaatactggtttttcccaatgaagatcttcatgtaaaggacctgaatgagaccatccattacatgtacaaacacaaaatgtaccgaaagatggtgttc

SEQ ID NO: 117373 - DNA, 120 bp, Artificial Sequence
  ENSG00000100600_6 (sequence is synthesized)
tacattgaagcctgtgagtctgggtccatgatgaaccacctgccggataacatcaatgtttatgcaactactgctgccaaccccagagagtcgtcctacgcctgttactatgatgagaag

SEQ ID NO: 117374 - DNA, 120 bp, Artificial Sequence
  ENSG00000100600_7 (sequence is synthesized)
aggtccacgtacctgggggactggtacagcgtcaactggatggaagattcggacgtggaagatctgactaaagagaccctgcacaagcagtaccacctggtaaaatcgcacaccaacacc

SEQ ID NO: 117375 - DNA, 120 bp, Artificial Sequence
  ENSG00000100600_8 (sequence is synthesized)
ggtatgaaacgcaaagccagttctcccgtccccctacctccagtcacacaccttgacctcacccccagccctgatgtgcctctcaccatcatgaaaaggaaactgatgaacaccaatgat

SEQ ID NO: 117376 - DNA, 120 bp, Artificial Sequence
  ENSG00000100600_9 (sequence is synthesized)
ctggaggagtccaggcagctcacggaggagatccagcggcatctggatgccaggcacctcattgagaagtcagtgcgtaagatcgtctccttgctggcagcgtccgaggctgaggtggag

SEQ ID NO: 117377 - DNA, 120 bp, Artificial Sequence
  ENSG00000100600_10 (sequence is synthesized)
cagctcctgtccgagagagccccgctcacggggcacagctgctacccagaggccctgctgcacttccggacccactgcttcaactggcactcccccacgtacgagtatgcgttgagacat

SEQ ID NO: 117378 - DNA, 120 bp, Artificial Sequence
  ENSG00000100600_11 (sequence is synthesized)
ttgtacgtgctggtcaacctttgtgagaagccgtatccgcttcacaggataaaattgtccatggaccacgtgtgccttggtcactactgaagagctgcctcctggaagcttttccaagtg

SEQ ID NO: 117379 - DNA, 120 bp, Artificial Sequence
  ENSG00000100600_12 (sequence is synthesized)
tgagcgccccaccgactgtgtgctgatcagagactggagaggtggagtgagaagtctccgctgctcgggccctcctggggagcccccgctccagggctcgctccaggaccttcttcacaa

SEQ ID NO: 117380 - DNA, 120 bp, Artificial Sequence
  ENSG00000100600_13 (sequence is synthesized)
gatgacttgctcgctgttacctgcttccccagtcttttctgaaaaactacaaattagggtgggaaaagctctgtattgagaagggtcatatttgctttctaggaggtttgttgttttgcc

SEQ ID NO: 117381 - DNA, 120 bp, Artificial Sequence
  ENSG00000100600_14 (sequence is synthesized)
tgttagttttgaggagcaggaagctcatgggggcttctgtagcccctctcaaaaggagtctttattctgagaatttgaagctgaaacctctttaaatcttcagaatgattttattgaaga

SEQ ID NO: 117382 - DNA, 120 bp, Artificial Sequence
  ENSG00000100600_15 (sequence is synthesized)
gggccgcaagccccaaatggaaaactgtttttagaaaatatgatgatttttgattgcttttgtatttaattctgcaggtgttcaagtcttaaaaaataaagatttataacagaacccaaa

SEQ ID NO: 117383 - DNA, 90 bp, Artificial Sequence
  ENSG00000100600_16 (sequence is synthesized)
ataagattacaggtgtgagcccccgtgcctggccttcaggatgattttattttaaacccctagaaagcagagagtaggatcaaaaccttt

SEQ ID NO: 117384 - DNA, 120 bp, Artificial Sequence
  ENSG00000100600_17 (sequence is synthesized)
tttaaacccctagaaagcagagagtaggatcaaaacctttaggtttggaaggctctttacagatttcattgtctaactagctgctttgcttggctttgatggtcttctgtgtctaaccca

SEQ ID NO: 117385 - DNA, 120 bp, Artificial Sequence
  ENSG00000100600_18 (sequence is synthesized)
aggctctccccatgaccagaatccagaagctgaattcatattgtcccctggcagtcacattggttgtacgaccttatagaaggttccatccaggctgagaaacagtgggctcatttcaga

SEQ ID NO: 117386 - DNA, 87 bp, Artificial Sequence
  ENSG00000100600_19 (sequence is synthesized)
ccaccgcggtcactcaccgccgccgccgccaccactgccaccacggtcgcctgccacagttttgagccagagtctcactctgccacc

SEQ ID NO: 117387 - DNA, 120 bp, Artificial Sequence
  ENSG00000100600_20 (sequence is synthesized)
atcccactccaggaattgtgatcaacaggcccaatggcacagatgtctatcagggagtcccgaaggactacactggagaggatgttaccccacaaaatttccttgctgtgttgagaggtg

SEQ ID NO: 117388 - DNA, 120 bp, Artificial Sequence
  ENSG00000100600_21 (sequence is synthesized)
ttctcacggtcccgccggcgccaccaccgcggtcactcaccgccgccgccgccaccactgccaccacggtcgcctgccacagacagaggacagaggtctcgctctctcacccaggccgga

SEQ ID NO: 117389 - DNA, 120 bp, Artificial Sequence
  ENSG00000100600_22 (sequence is synthesized)
ccgctcagccccttgagtagctgggaccacaggtgtctgcaattgaactccaaggtgcagaatggtttggaaagtagctgtattcctcagtgtggccctgggcattggtgccgttcctat

SEQ ID NO: 117390 - DNA, 120 bp, Artificial Sequence
  ENSG00000100600_23 (sequence is synthesized)
aaaccctggcatgtgtgcctctttcctgagggatcgtccataaatatcaccagattatctaaaggttgggaaaggatccatgaaccaaaatagggcaagagccactggtcaagatgcttc

SEQ ID NO: 117391 - DNA, 120 bp, Artificial Sequence
  ENSG00000100600_24 (sequence is synthesized)
caatggcttgggacccccgtatagagaattgaaacaggtgttgttctgtgcccctagcctgtttacctgtgagaaattacagagtggagagttttgttctgacttaggacaggtgcttag

SEQ ID NO: 117392 - DNA, 120 bp, Artificial Sequence
  ENSG00000100600_25 (sequence is synthesized)
ggctgttgtttcagtggcttctcttggtggcccatttctgcactgaattcaccttatgatccagggcccctcattattaataaaatgttcctatcacttaaactcctcgttccttgtctg

SEQ ID NO: 117393 - DNA, 120 bp, Artificial Sequence
  ENSG00000100600_26 (sequence is synthesized)
gggatcatagcacagggatgtcccactgccagcggagcccctgaggcaggtgtgaatctgaatccctgtgcccagattgcagggccaccagccctgtgctctgatcacagatcagcccag

SEQ ID NO: 117394 - DNA, 120 bp, Artificial Sequence
  ENSG00000100600_27 (sequence is synthesized)
taatcttttttttgttaaggacactggcattctgaaaacaattccagacactgttaatattaaatagaaaagacttgaaaagccattgacggacctgttaggctggctgtaacataggtg

SEQ ID NO: 117395 - DNA, 120 bp, Artificial Sequence
  ENSG00000100600_28 (sequence is synthesized)
tgttagcgaggatgtggggaaatcagaaccctcatatgttgccaggaggattataagatggtgtagccattttggaaaacagtttggtcattcctcagaagttttgatagggccatctta

SEQ ID NO: 117396 - DNA, 120 bp, Artificial Sequence
  ENSG00000100601_0 (sequence is synthesized)
agagggtataggccgcgagatggggaagatggcagcggccgtgggctctgtggcgactctggcgactgagcccggggaggacgcctttcggaaacttttccgcttctaccgtcagagccg

SEQ ID NO: 117397 - DNA, 120 bp, Artificial Sequence
  ENSG00000100601_1 (sequence is synthesized)
gcccgggaccgcagacctggaaggggtcatcgacttctcggcggcccacgcagcccgtggcaagggtcctggtgcccaaaaggtgatcaaatctcagctaaatgtgtcttctgtcagtga

SEQ ID NO: 117398 - DNA, 120 bp, Artificial Sequence
  ENSG00000100601_2 (sequence is synthesized)
gcagaatgcatatagagcaggtcttcagcccgtcagcaagtggcaagcctatggactcaaaggctatcctgggtttatttttatcccaaaccccttcctcccaggttaccagtggcactg

SEQ ID NO: 117399 - DNA, 120 bp, Artificial Sequence
  ENSG00000100601_3 (sequence is synthesized)
ggtgaaacagtgccttaagttatattcccagaaacctaatgtatgtaacctggacaaacacatgtctaaagaagagacccaagatctgtgggaacagagcaaagagttcctgaggtataa

SEQ ID NO: 117400 - DNA, 120 bp, Artificial Sequence
  ENSG00000100601_4 (sequence is synthesized)
agaagcgactaaacggagaccccgaagtttactggagaaactgcgttgggtgaccgtaggctaccattataactgggacagtaagaaatactcagcagatcattacacacctttcccttc

SEQ ID NO: 117401 - DNA, 120 bp, Artificial Sequence
  ENSG00000100601_5 (sequence is synthesized)
tgacctgggtttcctctcagagcaagtagccgctgcctgtggatttgaggatttccgagctgaagcagggatcctgaattactaccgcctggactccacactgggaatccacgtagacag

SEQ ID NO: 117402 - DNA, 120 bp, Artificial Sequence
  ENSG00000100601_6 (sequence is synthesized)
atctgagctagatcactccaaacccttgctgtcattcagctttggacagtccgccatctttctcctgggtggtcttcaaagggatgaggcccccacggccatgtttatgcacagtggtga

SEQ ID NO: 117403 - DNA, 120 bp, Artificial Sequence
  ENSG00000100601_7 (sequence is synthesized)
catcatgataatgtcgggtttcagccgcctcttgaaccacgcagtccctcgtgtccttccaaatccagaaggggaaggcctgcctcactgcctagaggcacctctccctgctgtcctccc

SEQ ID NO: 117404 - DNA, 120 bp, Artificial Sequence
  ENSG00000100601_8 (sequence is synthesized)
gagagattcaatggtagagccttgttctatggaggactggcaggtgtgtgccagctacttgaagaccgctcgtgttaacatgactgtccgacaggtcctggccacagaccagaatttccc

SEQ ID NO: 117405 - DNA, 120 bp, Artificial Sequence
  ENSG00000100601_9 (sequence is synthesized)
tctagaacccatcgaggatgaaaaaagagacatcagtacagaaggtttctgccatctggatgaccagaatagcgaagtaaaacgggccaggataaaccctgacagctgagacttggagat

SEQ ID NO: 117406 - DNA, 120 bp, Artificial Sequence
  ENSG00000100601_10 (sequence is synthesized)
acaagccaaaaacagagacagggaagaactcattgttgatcacactgttgccttggaacccacgcagaagtaaactcagccactttgctcagagaagtgtttgacatggtctgttcctag

SEQ ID NO: 117407 - DNA, 120 bp, Artificial Sequence
  ENSG00000100601_11 (sequence is synthesized)
ttacatgttggctgtaatgtatgttgagaagtcagtccaaggaggtatgttcttccacaacagccttctcagcctctgctatttcctttgaggaaggtagaagtgagtttccatgtttgc

SEQ ID NO: 117408 - DNA, 120 bp, Artificial Sequence
  ENSG00000100601_12 (sequence is synthesized)
agagtatttaaatacctcagattttattaatgagaaatacagtacccctccctccactccatctggtaatttatggtaaaattgtggttctgtgaaccagctattagtctcatcttctta

SEQ ID NO: 117409 - DNA, 120 bp, Artificial Sequence
  ENSG00000100601_13 (sequence is synthesized)
actccctcaggcatcatcaaattctttgatcttctcttccacctctctggctctcatggaagaatcctttacacatgaaaacaatggaactggaaaatcttgtcttttagaaaagaaatt

SEQ ID NO: 117410 - DNA, 120 bp, Artificial Sequence
  ENSG00000100601_14 (sequence is synthesized)
aatcacaactatctctcttgcctaaaagataaatataggtaaacccaaggaaaggggaatttagtttctctacatgtcatttcggtctccaaactccctgttggctttttaatgcaattt

SEQ ID NO: 117411 - DNA, 120 bp, Artificial Sequence
  ENSG00000100601_15 (sequence is synthesized)
taattgttggaataaaaaagtcccaagggtgttttgttactgttttctccatgaataaactcacttgattttaaattaaagatctatatctgtctttggggtttagtctatctgggatta

SEQ ID NO: 117412 - DNA, 120 bp, Artificial Sequence
  ENSG00000100601_16 (sequence is synthesized)
aggtttttttttctgtttttctttgctgtattgttcatgctattgaagccctctagctgtttctgccctacaccattctgctgtgccctaagtattctttgtggctgtctcacagaagag

SEQ ID NO: 117413 - DNA, 120 bp, Artificial Sequence
  ENSG00000100601_17 (sequence is synthesized)
agaacatttcttaatattccagtcactgctgttattgtctgagggtaggcagcttggaaaaatgtaggcaacaccaagttttaatctttatacccccaacaatttgactgactatatcat

SEQ ID NO: 117414 - DNA, 120 bp, Artificial Sequence
  ENSG00000100601_18 (sequence is synthesized)
ggtccaggttactttacatttctctggacctcggtttcctcatcataaaatgaagatactgtagactaccatcttcctaaagggatattggtatttgaaagagaattaagtgctcctttc

SEQ ID NO: 117415 - DNA, 120 bp, Artificial Sequence
  ENSG00000100601_19 (sequence is synthesized)
tacaaacatgatgtgccaaaattgttttattataagggctctttgaaacatcctaacttccttgtgtggaggactggctggaagcccatttggtacctactgtttgcaatgcatgttatt

SEQ ID NO: 117416 - DNA, 120 bp, Artificial Sequence
  ENSG00000100601_20 (sequence is synthesized)
aagtttacatgtctcctctgtcctgctctgccccttttttaaattactggcattgaatattgagttcatatggtaatagcagggtttttaaatgaataaaaattatggatttatctctta

SEQ ID NO: 117417 - DNA, 120 bp, Artificial Sequence
  ENSG00000100601_21 (sequence is synthesized)
caacaggagcagtgaggaaaatcctgtccatgagcttttagtagtgtcttcttcgcaactgagagcaggggaaaggaagatcgtggttaagtaaaattagtccaagagaacctactgcta

SEQ ID NO: 117418 - DNA, 120 bp, Artificial Sequence
  ENSG00000100601_22 (sequence is synthesized)
ttaaaccagcctgtgttttcaagtaattttttttccttctgatatatgactctgcagaaatcccagctgtcttttaagatagctcagatgaatctctgtaataaatcatcctgtaaacaa

SEQ ID NO: 117419 - DNA, 120 bp, Artificial Sequence
  ENSG00000100603_0 (sequence is synthesized)
cctcatcatctggaaagacccgcccagcggtgctgtcgctcgcgctggaagaagcggaagaagatggcgctcaccagctttttacctgcacctactcagctatctcaggaccagcttgag

SEQ ID NO: 117420 - DNA, 120 bp, Artificial Sequence
  ENSG00000100603_1 (sequence is synthesized)
gctgaagaaaaggcaagatcccagagatcacggcagacctcactggtctcctcccgaagagaacctcccccgtacggataccggaaaggctggatacctcggttattagaggattttgga

SEQ ID NO: 117421 - DNA, 120 bp, Artificial Sequence
  ENSG00000100603_2 (sequence is synthesized)
gatggaggtgcttttccagagatccatgtggcccagtatccactggatatgggacgaaagaaaaaaatgtcgaatgcgctggccattcaggtggattctgaaggaaaaattaaatatgat

SEQ ID NO: 117422 - DNA, 120 bp, Artificial Sequence
  ENSG00000100603_3 (sequence is synthesized)
gcaattgctcgacaaggacagtcaaaagacaaggtcatttatagcaaatacactgacctggttccaaaggaggttatgaatgcagatgatccagacctgcaaaggcccgatgaagaagct

SEQ ID NO: 117423 - DNA, 120 bp, Artificial Sequence
  ENSG00000100603_4 (sequence is synthesized)
attaaagagataacagaaaagacaagagtagccttagaaaaatctgtatcacagaaggtcgccgcagccatgccagttcgagcagctgacaaattggctcctgctcagtatatccgatac

SEQ ID NO: 117424 - DNA, 120 bp, Artificial Sequence
  ENSG00000100603_5 (sequence is synthesized)
acaccatctcagcaaggagtggcattcaactctggagctaaacagagggttattcggatggtagaaatgcagaaagatccaatggagcctccaaggttcaagattaataagaaaattccc

SEQ ID NO: 117425 - DNA, 120 bp, Artificial Sequence
  ENSG00000100603_6 (sequence is synthesized)
cggggaccaccttctcctcctgcgcctgtcatgcattctcctagccgaaagatgactgtaaaggaacaacaagagtggaagattcctccttgtatttctaactggaaaaatgcaaagggt

SEQ ID NO: 117426 - DNA, 120 bp, Artificial Sequence
  ENSG00000100603_7 (sequence is synthesized)
tatacaattccattagacaaacgtctggctgctgatggaagaggactacagacagtacacataaatgaaaatttcgccaaattggcagaagccctctacattgctgatcggaaggctcgt

SEQ ID NO: 117427 - DNA, 120 bp, Artificial Sequence
  ENSG00000100603_8 (sequence is synthesized)
gaagctgtggaaatgcgtgcccaagtagagagaaaaatggctcagaaagaaaaggaaaaacatgaagagaaacttagagaaatggcccagaaagccagggagagaagagctgggatcaaa

SEQ ID NO: 117428 - DNA, 120 bp, Artificial Sequence
  ENSG00000100603_9 (sequence is synthesized)
catgtggaaaaagaggatggggaggcacgtgagagggatgaaatccggcatgacaggcgaaaagagagacagcatgaccggaatctttccagggcagctcctgataagaggtcgaaactt

SEQ ID NO: 117429 - DNA, 120 bp, Artificial Sequence
  ENSG00000100603_10 (sequence is synthesized)
cagagaaatgaaaatcgggatatcagtgaagttattgctctcggtgttcctaatcctcggacttccaatgaagttcagtatgaccaaaggctcttcaaccaatccaagggtatggacagt

SEQ ID NO: 117430 - DNA, 120 bp, Artificial Sequence
  ENSG00000100603_11 (sequence is synthesized)
ggatttgcaggtggagaagatgaaatttataatgtttatgatcaagcctggagaggtggtaaagatatggcccagagtatttataggcccagtaaaaatctggacaaggacatgtatggt

SEQ ID NO: 117431 - DNA, 120 bp, Artificial Sequence
  ENSG00000100603_12 (sequence is synthesized)
gatgacctagaagccagaataaagaccaacagatttgttcccgacaaggagttttctggttcagaccgtagacagagaggccgagaaggaccagtgcagtttgaggaagatccttttggt

SEQ ID NO: 117432 - DNA, 120 bp, Artificial Sequence
  ENSG00000100603_13 (sequence is synthesized)
ttggacaagtttttggaagaagccaaacagcatggtggctctaaaagaccctcagatagcagccgccccaaggaacacgagcatgaaggcaagaagaggaggaaggaataggcacaggtc

SEQ ID NO: 117433 - DNA, 120 bp, Artificial Sequence
  ENSG00000100603_14 (sequence is synthesized)
tctccaaagtgaatgaactcttacccataaccctaatgatgcaagtcatatgggggaacactttgtaaatggtcaggataaaaaccaaatctgggtgccagatcccagcactacttttta

SEQ ID NO: 117434 - DNA, 120 bp, Artificial Sequence
  ENSG00000100603_15 (sequence is synthesized)
ttactggagaaatgggggggatagaaaattctactttgaattatttagttttttttaaagagtgggttgtgtttgtgcttctcccacctttcagcatttatagaacatgctgccccacat

SEQ ID NO: 117435 - DNA, 120 bp, Artificial Sequence
  ENSG00000100603_16 (sequence is synthesized)
acaaagtcaagaccacttacttttatgtgacactagtagtttggggttaatgttttgtgtaagaacagctgcatatgagtaaagttaccccaaccacagtgaggaggaagatgttcacat

SEQ ID NO: 117436 - DNA, 120 bp, Artificial Sequence
  ENSG00000100603_17 (sequence is synthesized)
actggaactgtcctgccaaataaattttgcccctattgtgctctgttttaatttggagtgggcaaagtaacctcttgcttggtgcaactatttgtttcaaataaaaacatttagacaaaa

SEQ ID NO: 117437 - DNA, 120 bp, Artificial Sequence
  ENSG00000100603_18 (sequence is synthesized)
cattactgaattgaattttgcttggtgaacaaaatatatcttattttagaaaatctttttcctactgcatataaagtaggtacatataaacaaaatttagatacatcagatatagtgtag

SEQ ID NO: 117438 - DNA, 120 bp, Artificial Sequence
  ENSG00000100604_0 (sequence is synthesized)
gccaccgctcctgccactgcagtgctcgagccccgtgcaggggagcttgcgggaggatcgaccgacagacggacgcacgccgaggcactgcgcccccagccccgcgccggtgccaccgca

SEQ ID NO: 117439 - DNA, 120 bp, Artificial Sequence
  ENSG00000100604_1 (sequence is synthesized)
cagtccagccgcccctcgcccggtgcctaggtgcccggccccacaccgccagctgctcggcgcccgggtccgccatgcgctccgccgctgtcctggctcttctgctctgcgccgggcaag

SEQ ID NO: 117440 - DNA, 120 bp, Artificial Sequence
  ENSG00000100604_2 (sequence is synthesized)
ctctgcgccgggcaagtcactgcgctccctgtgaacagccctatgaataaaggggataccgaggtgatgaaatgcatcgttgaggtcatctccgacacactttccaagcccagccccatg

SEQ ID NO: 117441 - DNA, 120 bp, Artificial Sequence
  ENSG00000100604_3 (sequence is synthesized)
cctgtcagccaggaatgttttgagacactccgaggagatgaacggatcctttccattctgagacatcagaatttactgaaggagctccaagacctcgctctccaaggcgccaaggagagg

SEQ ID NO: 117442 - DNA, 120 bp, Artificial Sequence
  ENSG00000100604_4 (sequence is synthesized)
gcacatcagcagaagaaacacagcggttttgaagatgaactctcagaggttcttgagaaccagagcagccaggccgagctgaaagaggcggtggaagagccatcatccaaggatgttatg

SEQ ID NO: 117443 - DNA, 120 bp, Artificial Sequence
  ENSG00000100604_5 (sequence is synthesized)
gagaaaagagaggattccaaggaggcagagaaaagtggtgaagccacagacggagccaggccccaggccctcccggagcccatgcaggagtccaaggctgaggggaacaatcaggcccct

SEQ ID NO: 117444 - DNA, 120 bp, Artificial Sequence
  ENSG00000100604_6 (sequence is synthesized)
ggggaggaagaggaggaggaggaggaggccaccaacacccaccctccagccagcctccccagccagaaatacccaggcccacaggccgagggggacagtgagggcctctctcagggtctg

SEQ ID NO: 117445 - DNA, 120 bp, Artificial Sequence
  ENSG00000100604_7 (sequence is synthesized)
gtggacagagagaagggcctgagtgcagagccagggtggcaggcaaagagagaagaggaggaggaggaggaggaggaggctgaggctggagaggaggctgtccccgaggaagaaggcccc

SEQ ID NO: 117446 - DNA, 120 bp, Artificial Sequence
  ENSG00000100604_8 (sequence is synthesized)
ggaggctctggctgtggatggagctgggaagcctggggctgaggaggctcaggaccccgaagggaagggagaacaggagcactcccagcagaaagaggaggaggaggagatggcagtggt

SEQ ID NO: 117447 - DNA, 120 bp, Artificial Sequence
  ENSG00000100604_9 (sequence is synthesized)
cccgcaaggcctcttccggggtgggaagagcggagagctggagcaggaggaggagcggctctccaaggagtgggaggactccaaacgctggagcaagatggaccagctggccaaggagct

SEQ ID NO: 117448 - DNA, 120 bp, Artificial Sequence
  ENSG00000100604_10 (sequence is synthesized)
gacggctgagaagcggctggaggggcaggaggaggaggaggacaaccgggacagttccatgaagctctccttccgggcccgggcctacggcttcaggggccctgggccgcagctgcgacg

SEQ ID NO: 117449 - DNA, 120 bp, Artificial Sequence
  ENSG00000100604_11 (sequence is synthesized)
aggctggaggccatcctcccgggaggacagccttgaggcgggcctgcccctccaggtccgaggctaccccgaggagaagaaagaggaggagggcagcgcaaaccgcagaccagaggacca

SEQ ID NO: 117450 - DNA, 120 bp, Artificial Sequence
  ENSG00000100604_12 (sequence is synthesized)
ggagctggagagcctgtcggccattgaagcagagctggagaaagtggcccaccagctgcaggcactacggcggggctgagacaccggctggcagggctggccccagggcaccctgtggcc

SEQ ID NO: 117451 - DNA, 120 bp, Artificial Sequence
  ENSG00000100604_13 (sequence is synthesized)
ctggctctgctgtccccttggcaggtcctggccagatggcccggatgctgcttccggtagggaggcagcctccagcctgcccaagcccaggccaccctatcgccccctacgcgccttgtc

SEQ ID NO: 117452 - DNA, 120 bp, Artificial Sequence
  ENSG00000100604_14 (sequence is synthesized)
tcctactcctgactcctacctgccctggaacatcctttgcagggcagccccacaactttaaacattgacgattccttctctgaacacaggcagctttctagaagtttcccttcctccatc

SEQ ID NO: 117453 - DNA, 120 bp, Artificial Sequence
  ENSG00000100604_15 (sequence is synthesized)
ctatccactgggcacaactgcaataacttctgaccttttggtgaaagctgagaactcctgactgtaacatattctgtatgaactttatctaaagaaaaataaatctgttctgggctcttt

SEQ ID NO: 117454 - DNA, 120 bp, Artificial Sequence
  ENSG00000100604_16 (sequence is synthesized)
gggtgtttggagacagtaacctacatcctatttccaaacagggtagagccagggaaggtctttgtctcctctgggcagtccagaaggacttcctggaggacctgacctttgggcatcttc

SEQ ID NO: 117455 - DNA, 120 bp, Artificial Sequence
  ENSG00000100604_17 (sequence is synthesized)
acgatcagagcacttttgtaagacatcattttagtgccctgaggcagttttctcatgtttagagaaatagcacttggggatgagaaggtaccaggtaccattccctacaccccattctca

SEQ ID NO: 117456 - DNA, 120 bp, Artificial Sequence
  ENSG00000100604_18 (sequence is synthesized)
gttggagtggctgacacatggtaagcactgtgttaagggttttctattatcattgctatcactgtctggctaagaaagcagagctgtgtccctgagccagggatcatggactcccaaaga

SEQ ID NO: 117457 - DNA, 120 bp, Artificial Sequence
  ENSG00000100604_19 (sequence is synthesized)
caaaagcaaataccctctgtcctcactagaaattcaccctagagcctccagggactgagccccatgctcaaaccagccccaacctgcccctgcactgtgttcccaggtgatgaaatgcat

SEQ ID NO: 117458 - DNA, 120 bp, Artificial Sequence
  ENSG00000100604_20 (sequence is synthesized)
gcagggggcagccgcacccagacacactgcccctgccccactgaggggacagggcccccccgccgaagtctggggatggagagatgctcagaccgggggctctcagggtgggagaacacc

SEQ ID NO: 117459 - DNA, 120 bp, Artificial Sequence
  ENSG00000100604_21 (sequence is synthesized)
ccagctcacagggggcacccagcaaagctggctgggagatgggaggagctcaggtcagcctgtggcagcgggggaggcgctgagtggggacgttgtccagaaggcagtagggtgccctgg

SEQ ID NO: 117460 - DNA, 120 bp, Artificial Sequence
  ENSG00000100604_22 (sequence is synthesized)
aaaaaccatgcggtgggtctgaccgtgtcccctcctggcccccaggcagcccaggcacagcctcctcccaggctcaggccctgcctctggcccatgagggtaacggggcagggcaggggc

SEQ ID NO: 117461 - DNA, 120 bp, Artificial Sequence
  ENSG00000100604_23 (sequence is synthesized)
ctggggtgaggatgaggggaagaggcaggctccagctaacccacccctctgagccgagagggtcttgcaaagcctggcatcaagaaggtttttcccgctaagcgtcatcactgtggagag

SEQ ID NO: 117462 - DNA, 80 bp, Artificial Sequence
  ENSG00000100605_0 (sequence is synthesized)
gggcaggggcggcgagtgcgcgggcgctcgccgccgcccttctcggcgggcagcgcgcgaggaccaggccgaggaggaag

SEQ ID NO: 117463 - DNA, 120 bp, Artificial Sequence
  ENSG00000100605_1 (sequence is synthesized)
gggactgcgcgccccagctccgatccccgttccgcgtccccgccgccgggaggaggtgcccactcgctcgcggcgcgcgccggccgccagactcggcctgtgggcgatttcctccggacc

SEQ ID NO: 117464 - DNA, 120 bp, Artificial Sequence
  ENSG00000100605_2 (sequence is synthesized)
agactcggcctgtgggcgatttcctccggacccaggctccccgcccgaggaggaagatgcagacctttctgaaagggaagagagttggctactggctgagcgagaagaaaatcaagaagc

SEQ ID NO: 117465 - DNA, 120 bp, Artificial Sequence
  ENSG00000100605_3 (sequence is synthesized)
tgaatttccaggccttcgccgagctgtgcaggaagcgagggatggaggttgtgcagctgaaccttagccggccgatcgaggagcagggccccctggacgtcatcatccacaagctgactg

SEQ ID NO: 117466 - DNA, 120 bp, Artificial Sequence
  ENSG00000100605_4 (sequence is synthesized)
acgtcatccttgaagccgaccagaatgatagccagtccctggagctggtgcacaggttccaggagtacatcgatgcccaccctgagaccatcgtcctggacccgctccctgccatcagaa

SEQ ID NO: 117467 - DNA, 120 bp, Artificial Sequence
  ENSG00000100605_5 (sequence is synthesized)
ccctgcttgaccgctccaagtcctatgagctcatccggaagattgaggcctacatggaagacgacaggatctgctcgccacccttcatggagctcacgagcctgtgcggggatgacacca

SEQ ID NO: 117468 - DNA, 120 bp, Artificial Sequence
  ENSG00000100605_6 (sequence is synthesized)
tgcggctgctggagaagaacggcttgactttcccattcatttgcaaaaccagagtggctcatggcaccaactctcacgagatggctatcgtgttcaaccaggagggcctgaacgccatcc

SEQ ID NO: 117469 - DNA, 120 bp, Artificial Sequence
  ENSG00000100605_7 (sequence is synthesized)
agccaccctgcgtggtccagaatttcatcaaccacaacgccgtcctgtacaaggtgttcgtggttggcgagtcctacaccgtggtccagaggccctcactcaagaacttctccgcaggca

SEQ ID NO: 117470 - DNA, 120 bp, Artificial Sequence
  ENSG00000100605_8 (sequence is synthesized)
catcagaccgtgagtccatcttcttcaacagccacaacgtgtcaaagccggagtcgtcatcggtcctgacggagctggacaagatcgagggcgtgttcgagcggccgagcgacgaggtca

SEQ ID NO: 117471 - DNA, 120 bp, Artificial Sequence
  ENSG00000100605_9 (sequence is synthesized)
tccgggagctctcccgggccctgcggcaggcactgggcgtgtcactcttcggcatcgacatcatcatcaacaaccagacagggcagcacgccgtcattgacatcaatgccttcccaggct

SEQ ID NO: 117472 - DNA, 120 bp, Artificial Sequence
  ENSG00000100605_10 (sequence is synthesized)
acgagggcgtgagcgagttcttcacagacctcctgaaccacatcgccactgtcctgcagggccagagcacagccatggcagccacaggggacgtggccctgctgaggcacagcaagcttc

SEQ ID NO: 117473 - DNA, 120 bp, Artificial Sequence
  ENSG00000100605_11 (sequence is synthesized)
caagcttctggccgagccggcgggcggcctggtgggcgagcggacatgcagcgccagccccggctgctgcggcagcatgatgggccaggacgcgccctggaaggctgaggccgacgcggg

SEQ ID NO: 117474 - DNA, 120 bp, Artificial Sequence
  ENSG00000100605_12 (sequence is synthesized)
ccaagctgccgcaccagagactcggctgcaacgccggcgtgtcgcccagcttccagcagcattgtgtggcctccctggccaccaaggcctcctcccagtagccacggagccgggacccag

SEQ ID NO: 117475 - DNA, 120 bp, Artificial Sequence
  ENSG00000100605_13 (sequence is synthesized)
aggggcagcgcagggcgcagagcacacccgctgggccagcagctcccaacggcgatgctactactaagaatccccagtgatctgattcttctgttttttaatttttaacctgattctctg

SEQ ID NO: 117476 - DNA, 120 bp, Artificial Sequence
  ENSG00000100605_14 (sequence is synthesized)
atgtcatgatctaaatgaggggtagtgggggatggaagagagtaccaggtggtccaccgttggggagtggggccgtccgcctgctctctactgtgcagacctcctaactgagtttacaca

SEQ ID NO: 117477 - DNA, 120 bp, Artificial Sequence
  ENSG00000100605_15 (sequence is synthesized)
cgcttgtgtttgcaacactaggtctggatgggaggtgaggggtgtgcgtatggctgccatgccagtgtctgtgcacatccctgtctgttggtctccatggccactgtggaccgggaccct

SEQ ID NO: 117478 - DNA, 120 bp, Artificial Sequence
  ENSG00000100605_16 (sequence is synthesized)
tgggggaagcctgcccatgtcgggctgtgggaggctgatcggtgcatgtgagagtggcttcccttctgcctgactccccactccctgacctgccccttccttgtttttcctcctactggt

SEQ ID NO: 117479 - DNA, 120 bp, Artificial Sequence
  ENSG00000100605_17 (sequence is synthesized)
ctccaccaaggctttgttagcccccaccctgcctggtgtgcagctaacccctccctccccacagccagaggaggccacagacccctcaggggagttccgcgctggggtctgggctgtgct

SEQ ID NO: 117480 - DNA, 120 bp, Artificial Sequence
  ENSG00000100605_18 (sequence is synthesized)
ccctcactaaagggaaggaaaggaagctgggcgtcctctgggccccccaacacacgtcccatttagccctgcacagcggtctccttcccctaagccagcactgctgctccctggagcccg

SEQ ID NO: 117481 - DNA, 120 bp, Artificial Sequence
  ENSG00000100605_19 (sequence is synthesized)
ggaaggaggctgcctggctggaggcccgagccgatggcgcctgtgctgaggatttgtgctgtgatttgggcaaatcattccaggtctttgggcctccacccccttgtctctagtggacat

SEQ ID NO: 117482 - DNA, 120 bp, Artificial Sequence
  ENSG00000100605_20 (sequence is synthesized)
ttgagatcagagagcaccacagggctggctttgtgccctaacccctgggatgcagcctgcctttccataaagtcacctaggtgaggataggcgcgggagcctcggcatgacaccatggag

SEQ ID NO: 117483 - DNA, 120 bp, Artificial Sequence
  ENSG00000100605_21 (sequence is synthesized)
atcggggccctcttcccagtgggttcactccttttcacacctgctgggtccctcctcacccagcaggcctggtccacctctcattgcaagccccaagcactgagccagcaggtgccaggg

SEQ ID NO: 117484 - DNA, 120 bp, Artificial Sequence
  ENSG00000100605_22 (sequence is synthesized)
agccacccgccccccatcgcttctgcacacctcagactcaccccatcaccttggcagcaaagcactggctctgccgtctgacccctgatccaggcagccccctctgcagagaaaagggtt

SEQ ID NO: 117485 - DNA, 120 bp, Artificial Sequence
  ENSG00000100605_23 (sequence is synthesized)
ggggagaagcctctgcagtcctggaagatgtggggtgctgggtgagaggcatcagcccccacaagtatgtttttgtgtcttaagatagcagtttactttgaaaaagtgaaaaaggcttcc

SEQ ID NO: 117486 - DNA, 120 bp, Artificial Sequence
  ENSG00000100605_24 (sequence is synthesized)
gggctgtcctctgcccagtgagatggaggacgctagagaaagtgctgagtgtcccgagagaggcccccgagccagtgcatggaggtccttcggcctggctcagctgggctgcaggatgcc

SEQ ID NO: 117487 - DNA, 120 bp, Artificial Sequence
  ENSG00000100605_25 (sequence is synthesized)
gaaactgaggacccaacaactaaccacgtttacacgacttgagttttgaaccccgattaatgtctgtacgtcacctttcctagttctgaccctgagccctggggaacaggaaagcgtggc

SEQ ID NO: 117488 - DNA, 120 bp, Artificial Sequence
  ENSG00000100605_26 (sequence is synthesized)
tggcctcttgcactgctttgtctccaaaataaactactgaaatcaaaccgcatttcacacgtgtttacacatgttgctcaagtttgttatgtcatactcccagtccttaaaagacgttta

SEQ ID NO: 117489 - DNA, 120 bp, Artificial Sequence
  ENSG00000100605_27 (sequence is synthesized)
ataaaacagctttaccttttaaaaataaaatttcaatcccagtctgcctcaggtacgggtgggggtgtgcagcgtgactcctggctgtgttcctgtaccgtttgtggcctccggggtctt

SEQ ID NO: 117490 - DNA, 120 bp, Artificial Sequence
  ENSG00000100605_28 (sequence is synthesized)
gcgcgtccagggcccagataccgagtaactgccatgtggtgtcgtggtggcgtccataggcctccgtggtggggcgggggcggggctgtgggtgtgcagggcagctgcattttccaagag

SEQ ID NO: 117491 - DNA, 120 bp, Artificial Sequence
  ENSG00000100605_29 (sequence is synthesized)
tggagatggaggatggagatttgcttcgtaaaggcctgggagctacatgggaggtagggaggggccagccacacccagggctggggggccggtggactctgcccagtgaagccaggggag

SEQ ID NO: 117492 - DNA, 120 bp, Artificial Sequence
  ENSG00000100605_30 (sequence is synthesized)
tgtcagcaatgaggggcctggacagcgacgcgggacccgcacctgggagcggcagagatggagcccagctcgctaaacgtaccctaagggtgcacgctgaccatctttgatccctggaca

SEQ ID NO: 117493 - DNA, 120 bp, Artificial Sequence
  ENSG00000100605_31 (sequence is synthesized)
gtgtccatagagttgtctccccttcggtcacattgtccctggccttggagtttctgcctcagggaaagacccactaaaaccacccgggctctggcggcctcctcttctccagagcatggt

SEQ ID NO: 117494 - DNA, 120 bp, Artificial Sequence
  ENSG00000100605_32 (sequence is synthesized)
ggcgctgcctcctgagcagagtcactgagagtgtctgggtccaaggaagggacccacttagcaaaggttgttgtgtggtgctgtgcaggcacggcgcctggagttggccccgccagcatc

SEQ ID NO: 117495 - DNA, 120 bp, Artificial Sequence
  ENSG00000100605_33 (sequence is synthesized)
ggggtggcttggggctctggttcctaagcttctgcttctgagttggtcagcacgttggctctgcgccctgcagtgcctgtcttgatggtggtccctggatgtgctgaagggctccaggag

SEQ ID NO: 117496 - DNA, 120 bp, Artificial Sequence
  ENSG00000100605_34 (sequence is synthesized)
caaggggccagaccacactttggctgagtccttgggtagtttcagagggtcacctgcacagtctgcattgagcaccctggggctgaggccgtgggtcaagttctgcctgacagtgctttg

SEQ ID NO: 117497 - DNA, 120 bp, Artificial Sequence
  ENSG00000100605_35 (sequence is synthesized)
attatatggtgatgtgattctgcaaacataaccccccaactgagtgccagctgctgggtgtccccaccccaagagccaaggggaggccaccctggaactggtgctttgcccttggtgtca

SEQ ID NO: 117498 - DNA, 120 bp, Artificial Sequence
  ENSG00000100605_36 (sequence is synthesized)
tggaggtgtctgggtccacacgtggtgggtgggctgggcctgcagtcacccagcatggccggcgggattggacccagctgcaacctggcaggttccatggggcttcctgtgcctgggcct

SEQ ID NO: 117499 - DNA, 120 bp, Artificial Sequence
  ENSG00000100605_37 (sequence is synthesized)
gcctgtgtctcatgcctgtcaataaaggagaaagcaacctgggaaaaacattcctctctgtacccaggggactgccaagtgtgctttatagaaggctggaagaccgactgaagtaggaag

SEQ ID NO: 117500 - DNA, 120 bp, Artificial Sequence
  ENSG00000100605_38 (sequence is synthesized)
ctgtcacatgtttgagccaactgagcaaagcagctgttgcctgccagacagccaccccaagaccaagggagccagcctgtcgtttgtccttctagcctggaagaccagttcttggctctt

SEQ ID NO: 117501 - DNA, 120 bp, Artificial Sequence
  ENSG00000100605_39 (sequence is synthesized)
gggcactcacattggccactggccacaactgctgaatggcttcactaatgtccctggggtctgtatctgccctctcttctattccctagaaactctggccgggcatggcggctcacgcct

SEQ ID NO: 117502 - DNA, 120 bp, Artificial Sequence
  ENSG00000100605_40 (sequence is synthesized)
aaaaaacaaacaaacaaacaaacaaactctgatcattcacccggtgggatccccggcagctccttctccttcccgagctgtggctcatgggccattggattcagagaccttgagctgggt

SEQ ID NO: 117503 - DNA, 120 bp, Artificial Sequence
  ENSG00000100605_41 (sequence is synthesized)
cttgagctgggtgctggctgccctaaaggagcacgacccctccagcctggtgaccgggaggcagagaagtgcagctgtccttgacaaaggcccagcctctgctgcctcaggccagcctgg

SEQ ID NO: 117504 - DNA, 120 bp, Artificial Sequence
  ENSG00000100605_42 (sequence is synthesized)
ccacaccccgatgccacagtcatctgccccgcccaggcataagcctgactcaggtgatacaggcgaggcttctcccatgggtcctccccttgtgagaaagggtctgtgctgtgtaccttc

SEQ ID NO: 117505 - DNA, 120 bp, Artificial Sequence
  ENSG00000100605_43 (sequence is synthesized)
tctctgcacagccattgtcagtgtggtttggagtgagtgagcctcccgcactgctcaggggagagctggtgagcatgactccatggcctcctgctggttggggtcttcttctgattctca

SEQ ID NO: 117506 - DNA, 120 bp, Artificial Sequence
  ENSG00000100605_44 (sequence is synthesized)
cccgcaggagcacccagacccccccttttcagaaatgattacattttcccttcaagagtcatctgtgacctggtggtgtggagggactgtcccctcctgcagcctggccgacccccttcc

SEQ ID NO: 117507 - DNA, 120 bp, Artificial Sequence
  ENSG00000100605_45 (sequence is synthesized)
tccagggctgtgtggaatcacctctcagaagctcactctgaaaagccactcacagggatttcaccaggatgttgctgttcctgccgacacctgggctttgtgacaaatgctgtttgcttc

SEQ ID NO: 117508 - DNA, 120 bp, Artificial Sequence
  ENSG00000100605_46 (sequence is synthesized)
aagctgttcacaagcaacttcaccagaatcccaagctggttcgtacttaatttgtgtacatacatatgcataatatacatgaccatgtatgagatacagacaccatggcttctgtccatt

SEQ ID NO: 117509 - DNA, 120 bp, Artificial Sequence
  ENSG00000100605_47 (sequence is synthesized)
ggctcattcgcctggtcgcatgttcactccatgaggttaggacactgcgggtggctttgggatgggtggtttcagggacaaggtgtcgctatgatctctgtatttgctaactagtcttgt

SEQ ID NO: 117510 - DNA, 120 bp, Artificial Sequence
  ENSG00000100605_48 (sequence is synthesized)
tttgatttctaacggtctagtggagtacagttaatgttgtgtttatttctgtaactgtaggggtggagtataaacctaacttttggaaacatgaagaaataaacaatagcgccagccgtt

SEQ ID NO: 117511 - DNA, 120 bp, Artificial Sequence
  ENSG00000100605_49 (sequence is synthesized)
agtgcgcgggcgctcgccgccgcccttctcggcgggcagcgcgcgaggaccaggccgaggaggaagtggcggcggcggcggcgggctccccgcccgaggaggaagatgcagacctttctg

SEQ ID NO: 117512 - DNA, 120 bp, Artificial Sequence
  ENSG00000100605_50 (sequence is synthesized)
cacacacacacacatacacacacacacatgcacgcgcacacacgcacgcacaccaagctgagctgcctgttggtgtgtcctcctgaggctgggacttgctggtctctgaggagcacgtgg

SEQ ID NO: 117513 - DNA, 120 bp, Artificial Sequence
  ENSG00000100605_51 (sequence is synthesized)
ctacgcctaggagggcccctgggtgttcacccacccccccggggggccccatcctgggccagggtccgcttcctcgagggaaggggcgaattcctggaaggtctccttccgggcgcagtt

SEQ ID NO: 117514 - DNA, 120 bp, Artificial Sequence
  ENSG00000100605_52 (sequence is synthesized)
gcaatggattgccttgggggtgctgaaccctgctgggggtacagagacgtttccgaaactcagcggctcggtcgcccccaaaggccaggcggaacacacgcccacaccgcggctcccttc

SEQ ID NO: 117515 - DNA, 120 bp, Artificial Sequence
  ENSG00000100605_53 (sequence is synthesized)
ggggtgggggccgggggaacagccagggcattgtcgccgagccgggaggctctgtgtgttccgtggctttcccagctctctgacagtcacaagcactgaggtttggggcttccacccctt

SEQ ID NO: 117516 - DNA, 120 bp, Artificial Sequence
  ENSG00000100612_0 (sequence is synthesized)
gcaatccaagactgcttagggttcggaattacaaaaccaaattccctgctaaggctaaagttgatctgaacaaaagtaagggcaaggcaaagagaatagacattagacagggacctgaaa

SEQ ID NO: 117517 - DNA, 120 bp, Artificial Sequence
  ENSG00000100612_1 (sequence is synthesized)
ggatccagaaatgggactttacatcccacagaggaaacagacacagggtttcctcatgttgcccaggctggtctcggacacttgaattcaagcaatctgccggccccgccgggtgtgccg

SEQ ID NO: 117518 - DNA, 120 bp, Artificial Sequence
  ENSG00000100612_2 (sequence is synthesized)
aattcaagcaatctgccggccccgccgggtgtgccgcatgagggcgcgggccgcccaaggaccgcgagtggggccgcgagtgctgagcccggcgcgcccgagccgctcctcctcccggcc

SEQ ID NO: 117519 - DNA, 120 bp, Artificial Sequence
  ENSG00000100612_3 (sequence is synthesized)
gctggccgaaggggtggcgctgcgatcccgcagggcagcgacgcgactctggtgcgggccgtcttcttccccccgagctgggcgtgcgcggccgcaatgaactgggagctgctgctgtgg

SEQ ID NO: 117520 - DNA, 120 bp, Artificial Sequence
  ENSG00000100612_4 (sequence is synthesized)
ctgctggtgctgtgcgcgctgctcctgctcttggtgcagctgctgcgcttcctgagggctgacggcgacctgacgctactatgggccgagtggcagggacgacgcccagaatgggagctg

SEQ ID NO: 117521 - DNA, 120 bp, Artificial Sequence
  ENSG00000100612_5 (sequence is synthesized)
actgatatggtggtgtgggtgactggagcctcgagtggaattggtgaggagctggcttaccagttgtctaaactaggagtttctcttgtgctgtcagccagaagagtgcatgagctggaa

SEQ ID NO: 117522 - DNA, 120 bp, Artificial Sequence
  ENSG00000100612_6 (sequence is synthesized)
agggtgaaaagaagatgcctagagaatggcaatttaaaagaaaaagatatacttgttttgccccttgacctgaccgacactggttcccatgaagcggctaccaaagctgttctccaggag

SEQ ID NO: 117523 - DNA, 120 bp, Artificial Sequence
  ENSG00000100612_7 (sequence is synthesized)
tttggtagaatcgacattctggtcaacaatggtggaatgtcccagcgttctctgtgcatggataccagcttggatgtctacagaaagctaatagagcttaactacttagggacggtgtcc

SEQ ID NO: 117524 - DNA, 120 bp, Artificial Sequence
  ENSG00000100612_8 (sequence is synthesized)
ttgacaaaatgtgttctgcctcacatgatcgagaggaagcaaggaaagattgttactgtgaatagcatcctgggtatcatatctgtacctctttccattggatactgtgctagcaagcat

SEQ ID NO: 117525 - DNA, 120 bp, Artificial Sequence
  ENSG00000100612_9 (sequence is synthesized)
acatacccaggtataatagtttctaacatttgcccaggacctgtgcaatcaaatattgtggagaattccctagctggagaagtcacaaagactataggcaataatggagaccagtcccac

SEQ ID NO: 117526 - DNA, 120 bp, Artificial Sequence
  ENSG00000100612_10 (sequence is synthesized)
aagatgacaaccagtcgttgtgtgcggctgatgttaatcagcatggccaatgatttgaaagaagtttggatctcagaacaacctttcttgttagtaacatatttgtggcaatacatgcca

SEQ ID NO: 117527 - DNA, 120 bp, Artificial Sequence
  ENSG00000100612_11 (sequence is synthesized)
acctgggcctggtggataaccaacaagatggggaagaaaaggattgagaactttaagagtggtgtggatgcagactcttcttattttaaaatctttaagacaaaacatgactgaaaagag

SEQ ID NO: 117528 - DNA, 120 bp, Artificial Sequence
  ENSG00000100612_12 (sequence is synthesized)
cacctgtacttttcaagccactggagggagaaatggaaaacatgaaaacagcaatcttcttatgcttctgaataatcaaagactaatttgtgattttactttttaatagatatgactttg

SEQ ID NO: 117529 - DNA, 120 bp, Artificial Sequence
  ENSG00000100612_13 (sequence is synthesized)
cttccaacatggaatgaaataaaaaataaataataaaagattgccatgaatcttgcaaaaaaggtattaactcatactatattcttggataaaataaccttttaaaatactttagcacat

SEQ ID NO: 117530 - DNA, 120 bp, Artificial Sequence
  ENSG00000100612_14 (sequence is synthesized)
atgcttaaaatctaagttaacagatttgtcttagtccatttgtgctgctataacaaaataccacagatttggtaatttataaacaacagaaatctgtttttcctggctcttgaggctggg

SEQ ID NO: 117531 - DNA, 120 bp, Artificial Sequence
  ENSG00000100612_15 (sequence is synthesized)
aattccaagaccaatgcaccagcagaattagtgtctggtgaaggctgatctctgcttccaagatggcacctcattgctgcatcctccacagtggaggaatgtatgtcctcacatggtgga

SEQ ID NO: 117532 - DNA, 120 bp, Artificial Sequence
  ENSG00000100612_16 (sequence is synthesized)
agggacagaagggaaagaggagcaaaatgctttcaaaagagcatttaatctcattcattactcagtcacctcttaaaggccacatcctttaatactgttgctttggggattaagtttcga

SEQ ID NO: 117533 - DNA, 120 bp, Artificial Sequence
  ENSG00000100612_17 (sequence is synthesized)
catgaattttggaggggacaaaaacatccaaaccatagcaacataaatgtatagaatatttcacacaaagcagagtgctgggtaatgaccagatataaagaagtatttgaaatgacctta

SEQ ID NO: 117534 - DNA, 120 bp, Artificial Sequence
  ENSG00000100612_18 (sequence is synthesized)
cctccaagatgcttatactcttagaaaagttgacaggtacagatggctgtaatttgaagcagcaggtaggattcattgcacctattattcattaaacacctgttgtatgtcttctactgt

SEQ ID NO: 117535 - DNA, 77 bp, Artificial Sequence
  ENSG00000100612_19 (sequence is synthesized)
accaatttctaagtttcttaatagtatgtaccaatcttgcaggaaggtacagaattttccagtgtttaaaaaacttt

SEQ ID NO: 117536 - DNA, 79 bp, Artificial Sequence
  ENSG00000100612_20 (sequence is synthesized)
cgaggaggcgcgggtgatagagcgagactctatttcaaaatcaaaaaacctttctaaccctccaccaatctcatgatat

SEQ ID NO: 117537 - DNA, 120 bp, Artificial Sequence
  ENSG00000100612_21 (sequence is synthesized)
atgcactctaactgggtccctctgaggcttgtgaatggaaaaccctcttgctttcaaatgcttgaaaacaagaaagatgctactattgatgcctcaaatacatacacagggtttcctcat

SEQ ID NO: 117538 - DNA, 120 bp, Artificial Sequence
  ENSG00000100612_22 (sequence is synthesized)
tcaaactcaactctgatagaactgacttaaatgtgtatatgggggatatggccatcactgtgtgaggtccttggaactggaagtgatgtggggagacagagagacccaaggagacttttg

SEQ ID NO: 117539 - DNA, 120 bp, Artificial Sequence
  ENSG00000100612_23 (sequence is synthesized)
gtagaggacacccccagtagatgctaaaaaagacttgatccacacatgcctctaacttgttgaacaaataaatatgtatcaagcactgcattgtgccatgtactacaacagaccctgggg

SEQ ID NO: 117540 - DNA, 120 bp, Artificial Sequence
  ENSG00000100612_24 (sequence is synthesized)
caaactcaaatacagttttgggacttttagagaggagtgagatttccccccggctccaaatgttctacatgcttcatctcagttcctctcctttttgccttaattggctgccctcgcctt

SEQ ID NO: 117541 - DNA, 120 bp, Artificial Sequence
  ENSG00000100614_0 (sequence is synthesized)
agaggcggcggcggcggcggtggcggcgctagggacgggagcgcgcgcgggagctagagagcagtggtctcggcgctcgtccggcccgcagcttcgggtcctcaggcggctgttgctccg

SEQ ID NO: 117542 - DNA, 120 bp, Artificial Sequence
  ENSG00000100614_1 (sequence is synthesized)
gaacgggtggttggggaggggggggtggggggactctagacagctgaggcgcgaaagcgatgagtcctcggctcttcctcctccttctccgggacccgctctctgcctccctctccaacg

SEQ ID NO: 117543 - DNA, 120 bp, Artificial Sequence
  ENSG00000100614_2 (sequence is synthesized)
ctccaacgcccggatgatctgagccgcgagggcgccgacagccgggggcccggacgcagcccggctcctcccctcctccgccccttccccagcctgacctggcccgccgctgcagcggtg

SEQ ID NO: 117544 - DNA, 120 bp, Artificial Sequence
  ENSG00000100614_3 (sequence is synthesized)
cccggctgccgccgtcgccgccgcggtgaccccctccccggctgccgccgccgccgcctcggccgaccagggacctgcccgcctgcggctgctccggacctagaggatcaagacataatg

SEQ ID NO: 117545 - DNA, 120 bp, Artificial Sequence
  ENSG00000100614_4 (sequence is synthesized)
ggagcatttttagacaagccaaagatggaaaagcataatgcccaggggcagggtaatgggttgcgatatgggctaagcagcatgcaaggctggcgtgttgaaatggaggatgcacatacg

SEQ ID NO: 117546 - DNA, 120 bp, Artificial Sequence
  ENSG00000100614_5 (sequence is synthesized)
gctgtgatcggtttgccaagtggacttgaatcgtggtcattctttgctgtgtatgatgggcatgctggttctcaggttgccaaatactgctgtgagcatttgttagatcacatcaccaat

SEQ ID NO: 117547 - DNA, 120 bp, Artificial Sequence
  ENSG00000100614_6 (sequence is synthesized)
aaccaggattttaaagggtctgcaggagcaccttctgtggaaaatgtaaagaatggaatcagaacaggttttctggagattgatgaacacatgagagttatgtcagagaagaaacatggt

SEQ ID NO: 117548 - DNA, 120 bp, Artificial Sequence
  ENSG00000100614_7 (sequence is synthesized)
gcagatagaagtgggtcaacagctgtaggtgtcttaatttctccccaacatacttatttcattaactgtggagactcaagaggtttactttgtaggaacaggaaagttcatttcttcaca

SEQ ID NO: 117549 - DNA, 120 bp, Artificial Sequence
  ENSG00000100614_8 (sequence is synthesized)
caagatcacaaaccaagtaatccgctggagaaagaacgaattcagaatgcaggtggctctgtaatgattcagcgtgtgaatggctctctggctgtatcgagggcccttggggattttgat

SEQ ID NO: 117550 - DNA, 120 bp, Artificial Sequence
  ENSG00000100614_9 (sequence is synthesized)
tacaaatgtgtccatggaaaaggtcctactgagcagcttgtctcaccagagcctgaagtccatgatattgaaagatctgaagaagatgatcagttcattatccttgcatgtgatggtatc

SEQ ID NO: 117551 - DNA, 120 bp, Artificial Sequence
  ENSG00000100614_10 (sequence is synthesized)
tgggatgttatgggaaatgaagagctctgtgattttgtaagatccagacttgaagtcactgatgaccttgagaaagtttgcaatgaagtagtcgacacctgtttgtataagggaagtcga

SEQ ID NO: 117552 - DNA, 120 bp, Artificial Sequence
  ENSG00000100614_11 (sequence is synthesized)
gacaacatgagtgtgattttgatctgttttccaaatgcacccaaagtatcgccagaagcagtgaagaaggaggcagagttggacaagtacctggaatgcagagtagaagaaatcataaag

SEQ ID NO: 117553 - DNA, 120 bp, Artificial Sequence
  ENSG00000100614_12 (sequence is synthesized)
aagcagggggaaggcgtccccgacttagtccatgtgatgcgcacattagcgagtgagaacatccccagcctcccaccagggggtgaattggcaagcaagaggaatgttattgaagccgtt

SEQ ID NO: 117554 - DNA, 120 bp, Artificial Sequence
  ENSG00000100614_13 (sequence is synthesized)
tacaatagactgaatccttacaaaaatgacgacactgactctacatcaacagatgatatgtggtaaaactgctcatctagccatggagtttaccttcacctccaaaggagagtacagctc

SEQ ID NO: 117555 - DNA, 120 bp, Artificial Sequence
  ENSG00000100614_14 (sequence is synthesized)
aactttgttgaaacttttaacatccatcctcaactttaaggaaggggatatgacatgggtgagaatgattacatcagagaacttcagcagtacaacagctagcccagaactgattttttt

SEQ ID NO: 117556 - DNA, 120 bp, Artificial Sequence
  ENSG00000100614_15 (sequence is synthesized)
ttttttttttgtaaatttgagacttatgtaagcgtgatttcaaaccataattcgtgttgtaaatcagactccagcaatttttgttgtatgattttgtttttttgtaaagtgtaattgtcc

SEQ ID NO: 117557 - DNA, 120 bp, Artificial Sequence
  ENSG00000100614_16 (sequence is synthesized)
ttgtacaaaatgctcatatttaattatgaactgctttaaatcactatcaaagttacaagaaatgtttggcttattgtgtgatgcaacagatatatagccctttcaagtcatgttgtgttt

SEQ ID NO: 117558 - DNA, 120 bp, Artificial Sequence
  ENSG00000100614_17 (sequence is synthesized)
ggacttggggttggaacagggagagcagcagccatgtcagctacacgctcaaatgtgcagatgattatggaaaataacctcaaaatcttacaaagctgaacatccaaggagttattgaaa

SEQ ID NO: 117559 - DNA, 120 bp, Artificial Sequence
  ENSG00000100614_18 (sequence is synthesized)
actatcttaaatgttcttggtaggggagttggcattgttgataaagccagtcccttcatttaactgtctttcaggatgttccttcgttgtttccatgagtattgcaggtaataatacagt

SEQ ID NO: 117560 - DNA, 120 bp, Artificial Sequence
  ENSG00000100614_19 (sequence is synthesized)
gtattcataagaatctcaatcttggggctaaatgccttgtttctttgcacctcttttcaagtccttacatttaattactaattgataagcagcagcttcctacatatagtaggaaactgc

SEQ ID NO: 117561 - DNA, 120 bp, Artificial Sequence
  ENSG00000100614_20 (sequence is synthesized)
cacatttttgctatcatgattggctgggcctgctgctgttcctagtaagatattctgaattccattttatcaataaagcttgatttaacaaacaagaaacttaatcatgtatgtgtaatt

SEQ ID NO: 117562 - DNA, 120 bp, Artificial Sequence
  ENSG00000100614_21 (sequence is synthesized)
cctcttttaccctggccttttaaaacactgtgccgttgtaatgagacgtttctcatagggaaagatgttagtctcttttaattggacaacactgtcactcaaggcatagatgaaactttc

SEQ ID NO: 117563 - DNA, 120 bp, Artificial Sequence
  ENSG00000100614_22 (sequence is synthesized)
cttccattagaaagactaaaagatttaattcttggttgtaccttaatctattttttaaataggtttctttcaggctgcttatttttcattaagatgtgtatcagcttggatttgcctact

SEQ ID NO: 117564 - DNA, 120 bp, Artificial Sequence
  ENSG00000100614_23 (sequence is synthesized)
gtttaattaaaatatttattgtcaaagtttgacaatctaacactctatggtaggggtgtgtgtgtgtgtgtttgtgagtgtgtgtttgcctgtgatttttaattggcccatgtctttaga

SEQ ID NO: 117565 - DNA, 120 bp, Artificial Sequence
  ENSG00000100614_24 (sequence is synthesized)
atccaagtggttaagatgtatttgtgatttgaaatatagcatgttgataatatttagctgttggcctttacaaataactttcaaagcttaaggaattgtagatataaaaataacctaatt

SEQ ID NO: 117566 - DNA, 120 bp, Artificial Sequence
  ENSG00000100614_25 (sequence is synthesized)
taatttaggcttaaattcctctgattaagcatgtgaaagtaagttttaaaatctgtcgcattgaaaagattactgttccgtgcccttctgtatttttgtctctttaggttgaatattgta

SEQ ID NO: 117567 - DNA, 120 bp, Artificial Sequence
  ENSG00000100614_26 (sequence is synthesized)
tttatcaccatgtaatcattcagtaggcagattcccactagaaaactgttgaaatgtaagactaaaatacaacattgaatacaaaatcaaaattttgtgtataaaaaccagtatagtcca

SEQ ID NO: 117568 - DNA, 120 bp, Artificial Sequence
  ENSG00000100614_27 (sequence is synthesized)
ttttgttatatttgttttttccctaacttggaaatatacatatttgtatatatagccttaaaattaatgtaaagttaggggagtagtggggaaagtaatgtgaaatgtctcagatttaag

SEQ ID NO: 117569 - DNA, 120 bp, Artificial Sequence
  ENSG00000100614_28 (sequence is synthesized)
tagttaaataccagcaaaatcttttcattatccctcttattttgtgaggtgattaaatgtaacttaattgtatttaatttatatcttattccagcatgaatgaggaaaaactgaagtact

SEQ ID NO: 117570 - DNA, 120 bp, Artificial Sequence
  ENSG00000100614_29 (sequence is synthesized)
atttatatttagaaattcatatcagttgaaattacagaaccaattccatacttacaataaatacttaatgtctaaatctgtggtagagtgcgaagtatgataatgttctaagttatggct

SEQ ID NO: 117571 - DNA, 120 bp, Artificial Sequence
  ENSG00000100614_30 (sequence is synthesized)
ttgcaagcatctaaatgtgcatttaatgaataccagtgcttctagtatagactaattaccagacatactggtactgaaagctaaatccctattataacaaaccagttccttaatatttta

SEQ ID NO: 117572 - DNA, 120 bp, Artificial Sequence
  ENSG00000100614_31 (sequence is synthesized)
agtagactgacaactttagttccagaaattgcaaaactttgaactggactgtgtaatcttttgagatgcaaaacttaagtcacaagtagagtatgtgatggaaagctgtatttcaaacca

SEQ ID NO: 117573 - DNA, 120 bp, Artificial Sequence
  ENSG00000100614_32 (sequence is synthesized)
taacagcatatttagagccttttttttttgagtctttaaacaagagaaaattaaaatattcctgtcaaaattattagtattgaaattaggcttggacacgagagagaaccgtatttgagt

SEQ ID NO: 117574 - DNA, 120 bp, Artificial Sequence
  ENSG00000100614_33 (sequence is synthesized)
gatgtgagaagactaaatcttttccacatgagtcagcactgccatactaataatttttttactataaaaatacaggaaggaagtatacattataacagcagactgtgtgtgttcctgatt

SEQ ID NO: 117575 - DNA, 120 bp, Artificial Sequence
  ENSG00000100614_34 (sequence is synthesized)
attcttgtaccacttaaattcttcacccccatcccctttttttgtgctaattagcatctcagggcaatgcctcaaaaatgtttgatgtgttctgttctttggagggaaaaagttcttatg

SEQ ID NO: 117576 - DNA, 120 bp, Artificial Sequence
  ENSG00000100614_35 (sequence is synthesized)
tgatgataatatagtactcaaaatatacttttatcatttaaatgtcttatttgctgctatgaataggaaataacattttgtatagcaggctctgttttaccctaacattaaaaaatttca

SEQ ID NO: 117577 - DNA, 120 bp, Artificial Sequence
  ENSG00000100614_36 (sequence is synthesized)
ctgatctttctttcattaacagggtagaatctcctaatttccactttcttgggaatatacttttatagacaatagaagcagttctcaatattagcatatactttaaaaaatcaaagtgat

SEQ ID NO: 117578 - DNA, 120 bp, Artificial Sequence
  ENSG00000100614_37 (sequence is synthesized)
aacttaattcagctttggaagtatctcaaacatatttttactttatagtgcattaacttgcttctagagtacttaatgcaactgctctagccacttaattttttatactaatctcaacat

SEQ ID NO: 117579 - DNA, 120 bp, Artificial Sequence
  ENSG00000100614_38 (sequence is synthesized)
taagaaatttggattaagtaataaattagttatgtaattcaagtaatctgaattacagcagtacttttagtgatcattcataggactatatattaacccagctaataactcagttttttt

SEQ ID NO: 117580 - DNA, 120 bp, Artificial Sequence
  ENSG00000100614_39 (sequence is synthesized)
acaaaatgtttcgagtattattggtaaaacactgttctaggctaagcacattgggactgtaaagaaatgagtagatccttggcttcaagtttacatctggacaatttataatctagtgta

SEQ ID NO: 117581 - DNA, 120 bp, Artificial Sequence
  ENSG00000100614_40 (sequence is synthesized)
tgttagtattataactggatcactcatcaaaaaatatatatatatatctattgcccacctgctatctaccaggtacttagctgatcaaggcaggcccctgccctaaagaccttgtttata

SEQ ID NO: 117582 - DNA, 120 bp, Artificial Sequence
  ENSG00000100614_41 (sequence is synthesized)
cttcctttactcacctgaaaactgttctccagtttattttcttctctctaaagttaaagagtaattcagaagaaaattttgcttagcataagaataaaattggactgaagaggcttaagc

SEQ ID NO: 117583 - DNA, 120 bp, Artificial Sequence
  ENSG00000100614_42 (sequence is synthesized)
ccattcagtatccttgattgcatttatccaacggcctttattcttcctgctgacagcagtaactcagaggaataggtagtagatttctgaaaattatccagccatggaaatgtaggtggg

SEQ ID NO: 117584 - DNA, 120 bp, Artificial Sequence
  ENSG00000100614_43 (sequence is synthesized)
gtttgagtttaaggcatttaaaaatgtaaatatctctagctaaatttatcttaagtagaactctgtgtttttgtaacacactgccagtgttaatatcaaattttagccaaattattacta

SEQ ID NO: 117585 - DNA, 120 bp, Artificial Sequence
  ENSG00000100614_44 (sequence is synthesized)
tgtgttttaatattttaaaataatttcactgcccatctttactggacaaactcatttggagttcaacttgtgatttctgaaagaactgatgaaattgggtactgctttttttctccattt

SEQ ID NO: 117586 - DNA, 120 bp, Artificial Sequence
  ENSG00000100614_45 (sequence is synthesized)
ttcgttttgttttaattttgaatttcatggtatatacttttagttcaaactcagctgtttgtacagtattgtattaggatttggtattagaaaagatgtgtaaatatcttagtatataat

SEQ ID NO: 117587 - DNA, 120 bp, Artificial Sequence
  ENSG00000100614_46 (sequence is synthesized)
tgtttctcatttgaggtttttcttctaagggaccttaaagagttttatatacttttgctcacagaaactgctggtgagattaccattttttgagtatctagtcttctagtttttctttta

SEQ ID NO: 117588 - DNA, 120 bp, Artificial Sequence
  ENSG00000100614_47 (sequence is synthesized)
ggcattaggaagccttctttagagttcaaaattttagaagcctaatttgctcttacttccttcaattatgtgccatgtgttttggtttgtatatgttttaaattgtatatttccttggaa

SEQ ID NO: 117589 - DNA, 120 bp, Artificial Sequence
  ENSG00000100614_48 (sequence is synthesized)
tatgcttgaaatatttaagaatacattttcaaaatgtataatactgtattgttttgttgatcagaataataagtctcagttaaatgtttgttattactgatagtcaaaatgctcaataga

SEQ ID NO: 117590 - DNA, 120 bp, Artificial Sequence
  ENSG00000100614_49 (sequence is synthesized)
aatgatgagaggcattggttccaattcattgtcaaatgaacgttttctaattttgttcacagattctttccctttcgattgttctgtatgttaagatagtggcttctgctctcactgttt

SEQ ID NO: 117591 - DNA, 120 bp, Artificial Sequence
  ENSG00000100614_50 (sequence is synthesized)
tcctatttatattactagcaggtaggagtgctaattagaaaaacttagatggtattgaaattacagttgacaacttatatttttatgagatggagaaaaaagattaagttgatataacaa

SEQ ID NO: 117592 - DNA, 120 bp, Artificial Sequence
  ENSG00000100614_51 (sequence is synthesized)
caaagtggactttttttcttccttatcctgcacgaaatattgcccttgtttcctctactttcctcttggtgttttctctttttttcaaacagaaacaggccaattccattttcttgagca

SEQ ID NO: 117593 - DNA, 120 bp, Artificial Sequence
  ENSG00000100614_52 (sequence is synthesized)
agaaagcttagtgtgttacttcatcaaggccagctaatactgtgttaaaccgggctgaaaatgagaaaacttgggagatggaggaatggggaaatggcagtgggataggtagggaaggat

SEQ ID NO: 117594 - DNA, 120 bp, Artificial Sequence
  ENSG00000100614_53 (sequence is synthesized)
tactcttaattgttttaaaagccataggaaagtcttccttgtacgtggctgtaaatttataagaactattgtgtcacataaaccaacaagaatgaacctttgctgcttcagataatttga

SEQ ID NO: 117595 - DNA, 120 bp, Artificial Sequence
  ENSG00000100614_54 (sequence is synthesized)
tttttccagcaaggaaattaataagttactgattcttcagcatagaaacaactgagaagaattaatgcaatgtttcttcactagaaaacccaacccttcatttcttttcattgctccaaa

SEQ ID NO: 117596 - DNA, 120 bp, Artificial Sequence
  ENSG00000100614_55 (sequence is synthesized)
acccagttttcaactaatggttttctcattaaactaaatgtttagaaaagttgtttagagtttttctttttcttttacatagtcctcctgatccagtataagactatttagtaacgtgca

SEQ ID NO: 117597 - DNA, 120 bp, Artificial Sequence
  ENSG00000100614_56 (sequence is synthesized)
tttgtatggtactatctaaagtaagttagattgatgtaagagatcgggtagctgcggaacaaaattagttatatcctaattaggtacagtgaatgacacaaaatcattttagcaatgctt

SEQ ID NO: 117598 - DNA, 120 bp, Artificial Sequence
  ENSG00000100614_57 (sequence is synthesized)
cttaaccttttggggtcacaggcgttttgagactgatgaatcctagggacttatttacccaggaaaatgcgtatataacatacatatctccctaaagtttacaatattgtagtggttcat

SEQ ID NO: 117599 - DNA, 120 bp, Artificial Sequence
  ENSG00000100614_58 (sequence is synthesized)
gggccccctggttaagagcccattctaaagtacaatagggcatcatcccttttcctgcaaagcccaaaagtatatttctagggcatgaaaataacttgagtctattttaaggaattgttt

SEQ ID NO: 117600 - DNA, 120 bp, Artificial Sequence
  ENSG00000100614_59 (sequence is synthesized)
cactctagaggtagataggggacctggctagaatctgacattaaaatatactttttaaaaaatattatatttggggtggggaaagtgattaaaaggtgaaaaaaaaacatagtattcaga

SEQ ID NO: 117601 - DNA, 120 bp, Artificial Sequence
  ENSG00000100614_60 (sequence is synthesized)
agttttggaggttaatgtctttctctaagatttgccactttagaaattcaacagaaaagaggtaaaacagaaatggaatgtatctggaacatttttggcctccatagtgcagatatacta

SEQ ID NO: 117602 - DNA, 120 bp, Artificial Sequence
  ENSG00000100614_61 (sequence is synthesized)
tattaacaagtaatacatttatttacctgtcagatctccaggttttaagattttgagctttctagtattaggattcattaaatgttcaattcatttcatattctaaggaattaggttatt

SEQ ID NO: 117603 - DNA, 120 bp, Artificial Sequence
  ENSG00000100614_62 (sequence is synthesized)
tacttactaattcaggatgttaaaataacatccaagtcggacaaccaccaccaatgcacacagttaatgagatttctaaaatataataagtacaatgtaacaaacgtatagaattttgca

SEQ ID NO: 117604 - DNA, 120 bp, Artificial Sequence
  ENSG00000100614_63 (sequence is synthesized)
tttgttgccaaaattagatgtttaatgacagcttatttaattcccatttgtgggacttctggaacatagaaaccattatcttacctggttatcccttgactaaatagcatatctgcagga

SEQ ID NO: 117605 - DNA, 120 bp, Artificial Sequence
  ENSG00000100614_64 (sequence is synthesized)
aaatatcttgtttgtagtgatatgccccaatagtgattgatttcactcttgaaatgagttatatcacttaatttgtataaatgttatgagtggagagacatgtacatgttaaaagcatgt

SEQ ID NO: 117606 - DNA, 120 bp, Artificial Sequence
  ENSG00000100614_65 (sequence is synthesized)
tgcattatatattcattttttaaactctataaatgttaagaataatataattgcagaaatatttttcttaaatacaatgtgtaacaaaattctccgtagcaactcacccactttgcagtt

SEQ ID NO: 117607 - DNA, 120 bp, Artificial Sequence
  ENSG00000100614_66 (sequence is synthesized)
tatgtgatccacacttttaaagaaattccataaatgtatattttgtattatgtattatttcctggtccaaagaaaatatgtgaattcagttctaactttaagaatgtactgtttgttttc

SEQ ID NO: 117608 - DNA, 120 bp, Artificial Sequence
  ENSG00000100614_67 (sequence is synthesized)
aagttcattgaaaaattgcattcagcctgcgaatggttgcagattgtatgttagatgaaaagtagaaataatttctagtttggaaaactggtgccactaaataaacaggcaattacataa

SEQ ID NO: 117609 - DNA, 120 bp, Artificial Sequence
  ENSG00000100614_68 (sequence is synthesized)
ggccagggtagggggcacaccctctccctgaatgaaattcatttaggggcactgtctgctcgcatgttctgttctgggagaaaatgggtagcagaagctacaatttgtactaagctaatg

SEQ ID NO: 117610 - DNA, 120 bp, Artificial Sequence
  ENSG00000100614_69 (sequence is synthesized)
aaaagagagaaaagaagaatggggaagagaagggcaaagaaggcaaaaagagaagagaagaaaaagggaggagagagaaggagaaatgagaaaagaggaaaccaaatgaagaggatgtgt

SEQ ID NO: 117611 - DNA, 120 bp, Artificial Sequence
  ENSG00000100614_70 (sequence is synthesized)
ttatttgccaagagtttcagagctattaacagaagcctaatacatgttcttggactttgcagaaataatttgttgatccatgcggtttcattgctactgcggaaaacctagaggatcaag

SEQ ID NO: 117612 - DNA, 120 bp, Artificial Sequence
  ENSG00000100614_71 (sequence is synthesized)
ttaaataaacttggagccttttcttgaaagacagctggctgtggagagccttctaccaactgcagttttagatacgttttgaaaatttcatcacctgagacctagaggatcaagacataa

SEQ ID NO: 117613 - DNA, 120 bp, Artificial Sequence
  ENSG00000100614_72 (sequence is synthesized)
ttaacaaaaaataagtagctttattaaagaaaaatcttcaacacaatcaaactttaacattttagcttttagatttttatgtgtctttgacagctagtgtctagtgtatgaaagtggaaa

SEQ ID NO: 117614 - DNA, 120 bp, Artificial Sequence
  ENSG00000100614_73 (sequence is synthesized)
aggacatttctgtagtagctgttaagatgtatgcagttgtcctatcacagttatattagaaataacaactagtgtggaaagtaacccacattctgttcaggatacttttgttttaaaagg

SEQ ID NO: 117615 - DNA, 120 bp, Artificial Sequence
  ENSG00000100614_74 (sequence is synthesized)
ctaaaatgtttgtgtgctttaaaattcttaatgaattcactggcatgagtaattttatgccgggaaaatctgatttgtggtctatttaattacaaagagattgtgatggtgataatttga

SEQ ID NO: 117616 - DNA, 120 bp, Artificial Sequence
  ENSG00000100614_75 (sequence is synthesized)
ataccatctttctatgaaaagctgtgtatattaattttaatctctagggccttttttcaataacttgaaaatcacagcctcatcattagcaactttatatacacagctttaaaaaatttg

SEQ ID NO: 117617 - DNA, 120 bp, Artificial Sequence
  ENSG00000100614_76 (sequence is synthesized)
ctttaaactgtttcagagcttcttccctaagccataaactgtctcacctaaacaagatagacctcaataaaagacataatatttctccacctggcagaaaagtaactgccaagtaagatt

SEQ ID NO: 117618 - DNA, 120 bp, Artificial Sequence
  ENSG00000100614_77 (sequence is synthesized)
aagaaataagttgagcatttctggagtatatttctcataattctgcagagacttccagtttattgcatatatgcagtaaagtgtatatattatgcagtttctctaagtggaaaaacttga

SEQ ID NO: 117619 - DNA, 120 bp, Artificial Sequence
  ENSG00000100614_78 (sequence is synthesized)
gtagaaaaaaaacaagaaaaaaattttaaaaatagcgttaaaatgcattttaggctcctaatgtcgttaatttgcacgttaaagacctctaatcgcatgcaagcattgacctaccacacc

SEQ ID NO: 117620 - DNA, 120 bp, Artificial Sequence
  ENSG00000100614_79 (sequence is synthesized)
tacatcccactgtgcctgcattattgaaattactactcactttaattttttttcccctttttactgtttgataccaatcataatcagtctgatactagaatcatgattggttttgttctt

SEQ ID NO: 117621 - DNA, 120 bp, Artificial Sequence
  ENSG00000100614_80 (sequence is synthesized)
tagtactgtctagagctactattttgtttttattgctgtccgccacttgatagtcatacatctagtatgtgtttgtactatttagtattgcattcattggacgtactattcaacgaattt

SEQ ID NO: 117622 - DNA, 120 bp, Artificial Sequence
  ENSG00000100614_81 (sequence is synthesized)
gtctccttactgttaccaagggtcttggaatttttatattttaaattaatcattcaatataagttatttataggtatagtacaattttaaaatatttagaatgctacaatcattggttca

SEQ ID NO: 117623 - DNA, 120 bp, Artificial Sequence
  ENSG00000100614_82 (sequence is synthesized)
aactattgattcatgggaaaatttaaattcataagaataatatgtatagggataagttgatatttaatgtattggcactttaacttgggcagacatgttttcttattggtttaaagaagt

SEQ ID NO: 117624 - DNA, 120 bp, Artificial Sequence
  ENSG00000100614_83 (sequence is synthesized)
aataagtattttaatatttttactatgaaatgggatccaattttagaaatgaattgctacttttctctttagtgtgtacactttaagttttagatggaattatgaaatattcactttacg

SEQ ID NO: 117625 - DNA, 120 bp, Artificial Sequence
  ENSG00000100614_84 (sequence is synthesized)
ttattttgttacaataataagttttatatttcttattatcaagcaagagttgccacctggacagagtttacattgatactcaatatttttgatatgttaaagtgttattatacttgtacc

SEQ ID NO: 117626 - DNA, 120 bp, Artificial Sequence
  ENSG00000100614_85 (sequence is synthesized)
attcaattggagattgtcataaattaaatatggtattttttactcagatttgatgagactgcaactagagaataaatattacattaaaattgctgctattttaaaacatagaatgtaact

SEQ ID NO: 117627 - DNA, 120 bp, Artificial Sequence
  ENSG00000100614_86 (sequence is synthesized)
gtttgtattgtaaaagttgtgtgtcctcagtgaaaaatactgccttcagcttccaaagcaggcacctgaatgcctttttcttttctctctctcttctttctttaaatacatgccttcact

SEQ ID NO: 117628 - DNA, 120 bp, Artificial Sequence
  ENSG00000100614_87 (sequence is synthesized)
agattgctgtgacctactaaacctcattttatttgcttggaacatttttggcttctctgtccacaccatagaaaaggacaaaggccttccagctctccttttctcttatttgttcccttc

SEQ ID NO: 117629 - DNA, 120 bp, Artificial Sequence
  ENSG00000100614_88 (sequence is synthesized)
taaatacttgactctctgggggtgtgaaaagattcagctcataatttatactactattaattttgtggtccttctaagccaatttaaaattatacttttgtgtatatattttcaaaatct

SEQ ID NO: 117630 - DNA, 120 bp, Artificial Sequence
  ENSG00000100614_89 (sequence is synthesized)
ttgctactgactaccttagctttaaagttgctaatttggagatgactgatagaatccctgaaacttggtggaggggagtggaaaggagcagaatgtgtttgtgtatatgtatgtgaaaca

SEQ ID NO: 117631 - DNA, 120 bp, Artificial Sequence
  ENSG00000100614_90 (sequence is synthesized)
tggatcttctatatataaatattctttagaaaaagcgttcagtctttttacaattctaagtaaaacgtataggtcaacagaaattaaaggaatatttcttaaaattcatttatttttctt

SEQ ID NO: 117632 - DNA, 120 bp, Artificial Sequence
  ENSG00000100614_91 (sequence is synthesized)
ttttgaaagcagacagaagcaaggctagtatagtatgaatggtcaggtagtttaaatgcgttgtcccacgtggaacaggagatattaactgtttttaaagctttacattatttttttaca

SEQ ID NO: 117633 - DNA, 120 bp, Artificial Sequence
  ENSG00000100614_92 (sequence is synthesized)
agaatttgttttcctgtaattttcttcacagttaaaatatcctaatttatattttaacaaaagagatgtaagatacatcaaatatagatgattcaaggtaatgttttttagacctgaaac

SEQ ID NO: 117634 - DNA, 120 bp, Artificial Sequence
  ENSG00000100614_93 (sequence is synthesized)
tattgattcaatttatcatcagtgtttatttctattgtatctagttatctatccaaataattgtattggcttagcggagactgtatgttaagtgtattagttttagattgtgaaattgtg

SEQ ID NO: 117635 - DNA, 120 bp, Artificial Sequence
  ENSG00000100614_94 (sequence is synthesized)
cagtttaggtaaacatcaaatccctttatttttgtacagcagatttccagcattagaaccatgtagaacaaatatactagatgttaaagattacacaataaaggaacttggcaaaccaaa

SEQ ID NO: 117636 - DNA, 120 bp, Artificial Sequence
  ENSG00000100614_95 (sequence is synthesized)
ccttctaccaactgcagttttagatacgttttgaaaatttcatcacctgagggataagagttggtgtccttgttcttttttctttcctgggaattgttctagtactgagatttcctcttt

SEQ ID NO: 117637 - DNA, 120 bp, Artificial Sequence
  ENSG00000100614_96 (sequence is synthesized)
ggcttgaagtttctggtcttcactctagcactaattgaaaaaaaaaaaatttgttttccgagaactgttactttcctccatattttcaaatttattaacagagaattgtacagagtgatt

SEQ ID NO: 117638 - DNA, 120 bp, Artificial Sequence
  ENSG00000100614_97 (sequence is synthesized)
cgcctgcggctgctccggtactttgttttgaaaagttcagatcaactgataatactagtgctgtgatgagactcagcttgtactcaagaacagatttatgactagcttatagttggctgc

SEQ ID NO: 117639 - DNA, 120 bp, Artificial Sequence
  ENSG00000100625_0 (sequence is synthesized)
gccatatagtatgcagcaaccggaggagtcacgttgggggaacggcagaaagcagctatccgtttacactactttgctctaacagctatcttaatggtgactgcgtggccggggggaaac

SEQ ID NO: 117640 - DNA, 120 bp, Artificial Sequence
  ENSG00000100625_1 (sequence is synthesized)
ctgatcggccagatacagccgaaaccaggagggagggagtgggctttccggagggggagaggagggagggagacgaaggaggaggagtaagagaggaggaaagaaagaggaaaagagtgc

SEQ ID NO: 117641 - DNA, 120 bp, Artificial Sequence
  ENSG00000100625_2 (sequence is synthesized)
gagggagtgagggagggaggaaaataaacaacaaaaaatgtcctcttcctcccccaccgggcagatcgcaagtgcggcggacatcaagcaagagaatgggatggaaagcgcctcggaagg

SEQ ID NO: 117642 - DNA, 120 bp, Artificial Sequence
  ENSG00000100625_3 (sequence is synthesized)
gaggcgcaccgagaagtggcggggggcgcggcggtagggctgagccccccggctccagccccttttcccctggagccgggggacgccgcgaccgctgccgccagggtgagcggagaggaa

SEQ ID NO: 117643 - DNA, 120 bp, Artificial Sequence
  ENSG00000100625_4 (sequence is synthesized)
ggaaggggcagtggcggcggcggcggccggagcggcggcggatcaggtacaactccactcggaacttctgggcaggcaccaccacgccgccgccgccgccgcgcagaccccgctggcctt

SEQ ID NO: 117644 - DNA, 120 bp, Artificial Sequence
  ENSG00000100625_5 (sequence is synthesized)
ctcgcccgaccacgtcgcctgcgtgtgcgaggcactgcagcaggggggcaacctggaccgcctggcccggttcctgtggtccctgccccagagcgacctgctacgtggcaacgagagcct

SEQ ID NO: 117645 - DNA, 120 bp, Artificial Sequence
  ENSG00000100625_6 (sequence is synthesized)
gctgaaggcgcgggcgctcgtggccttccaccagggcatctaccccgagctctacagcatcctcgagagccacagcttcgagtcggccaaccacccgctgctgcagcagctctggtacaa

SEQ ID NO: 117646 - DNA, 120 bp, Artificial Sequence
  ENSG00000100625_7 (sequence is synthesized)
ggcgcgctacaccgaggccgagcgagcccgcggccggccgctgggagccgtagacaagtaccggctgcgcaggaaattccccctgccccgcaccatctgggacggcgaggagacggtgta

SEQ ID NO: 117647 - DNA, 120 bp, Artificial Sequence
  ENSG00000100625_8 (sequence is synthesized)
ttgtttcaaggagaagtcgcgcaacgcgctcaaggagctctacaagcagaatcgctacccttcgcccgccgagaagcggcacctggccaagatcaccggcctctccctcacccaggtcag

SEQ ID NO: 117648 - DNA, 120 bp, Artificial Sequence
  ENSG00000100625_9 (sequence is synthesized)
caactggttcaagaaccgccggcagcgcgacaggaacccctccgagacccagtccaaaagtgagtcagatggcaaccccagcactgaagatgaatccagcaagggacatgaggatttatc

SEQ ID NO: 117649 - DNA, 120 bp, Artificial Sequence
  ENSG00000100625_10 (sequence is synthesized)
tcctcacccactctccagttcatctgatggcatcaccaacctcagcctttccagtcatatggagccagtatatatgcaacaaattggaaatgctaagatatcattaagctcttctggagt

SEQ ID NO: 117650 - DNA, 120 bp, Artificial Sequence
  ENSG00000100625_11 (sequence is synthesized)
tctgttgaatggaagcttggtacctgcaagtacttcacctgtcttccttaatggaaattcttttattcagggacccagtggagttatccttaatggattaaatgtgggaaatacacaggc

SEQ ID NO: 117651 - DNA, 120 bp, Artificial Sequence
  ENSG00000100625_12 (sequence is synthesized)
agtggcattgaacccaccaaaaatgtcatcaaacattgtgagcaatggtatatccatgactgacatactggggtctacttcccaggacgtgaaggaattcaaagtcctccagagttctgc

SEQ ID NO: 117652 - DNA, 120 bp, Artificial Sequence
  ENSG00000100625_13 (sequence is synthesized)
taactcagcaaccaccacgtcctacagccccagtgtccctgtctcattcccaggcctgatacccagcactgaggtgaaaagagaaggcattcaaacagtggcttcccaagatggagggtc

SEQ ID NO: 117653 - DNA, 120 bp, Artificial Sequence
  ENSG00000100625_14 (sequence is synthesized)
tgtagtgacttttactacaccagtgcaaattaaccagtatggcattgtccagatccccaattccggagcaaacagccagttccttaatgggagcattggattctctccactgcagctgcc

SEQ ID NO: 117654 - DNA, 120 bp, Artificial Sequence
  ENSG00000100625_15 (sequence is synthesized)
ccctgtgtcagtggcagcttcacaaggtaatatctcagtaagctcaagcacttcagatggaagcacatttacaagtgagtctaccacagtccagcaaggaaaggttttcttgagctctct

SEQ ID NO: 117655 - DNA, 120 bp, Artificial Sequence
  ENSG00000100625_16 (sequence is synthesized)
tgctcccagtgcagtggtatacacggttcctaatacaggccagactataggatctgtgaaacaggaaggcttggaaaggagcctggtattttctcagttgatgcctgtcaatcagaatgc

SEQ ID NO: 117656 - DNA, 120 bp, Artificial Sequence
  ENSG00000100625_17 (sequence is synthesized)
acaagtaaatgcaaacctgtcttctgaaaacatctcggggagtggcctgcatccactggcctcctcattagttaatgtatctccaactcacaatttttctctcagtccctctacactact

SEQ ID NO: 117657 - DNA, 120 bp, Artificial Sequence
  ENSG00000100625_18 (sequence is synthesized)
aaatcccactgagctaaaccgcgacattgccgatagccaaccaatgtctgcaccggtggcaagcaaatctactgtgacatctgtcagcaacactaactatgcaactcttcagaactgctc

SEQ ID NO: 117658 - DNA, 120 bp, Artificial Sequence
  ENSG00000100625_19 (sequence is synthesized)
ccttattactggtcaagacctattgtcagtccctatgactcaggctgcccttggggaaatagttcctacagctgaagatcaggtaggtcacccctccccagcagtacatcaggattttgt

SEQ ID NO: 117659 - DNA, 120 bp, Artificial Sequence
  ENSG00000100625_20 (sequence is synthesized)
ccaagaacatcgtttggttctgcaatcggtagctaacatgaaagagaatttcttatcaaattctgagagcaaagcaacaagtagcttaatgatgctggactctaaatccaagtatgtctt

SEQ ID NO: 117660 - DNA, 120 bp, Artificial Sequence
  ENSG00000100625_21 (sequence is synthesized)
agatggcatggttgatactgtctgtgaagacctggaaacagacaaaaaagagcttgccaagctccagactgtccagctggatgaagatatgcaagacttatgaactttatttcctcctca

SEQ ID NO: 117661 - DNA, 120 bp, Artificial Sequence
  ENSG00000100625_22 (sequence is synthesized)
cctctttttggcatcagcggcaaatcttttcatgaagccccaaggacacaaaacattttcccatttaaaggaaaacactctagttttgcaagtatatgcatacaagagactttagattga

SEQ ID NO: 117662 - DNA, 120 bp, Artificial Sequence
  ENSG00000100625_23 (sequence is synthesized)
tctgcatgaagatcacagttaagtatacaggagtagaactgcattattgcagcctttttgttcacttataaatttctcttttaaatagatggagacaaaggacaaggtgaaatgtatcaa

SEQ ID NO: 117663 - DNA, 120 bp, Artificial Sequence
  ENSG00000100625_24 (sequence is synthesized)
gtcaaagtgaatcatttagttgactctataattctaaggtcaaaatggaacttgatagttttttaaattaaaaaatgtatacacctaacatagaaaattaaagatagctgcagaccatta

SEQ ID NO: 117664 - DNA, 120 bp, Artificial Sequence
  ENSG00000100625_25 (sequence is synthesized)
gaaataatacaattgtttttgtttacttttactccatgggcattgaaaaggttaagaaacataaatggtacatatttttaaagttaagtagcatgcatatatatatgcacacacacctct

SEQ ID NO: 117665 - DNA, 120 bp, Artificial Sequence
  ENSG00000100625_26 (sequence is synthesized)
ttttcagcattttttgagaaagtcttgggtctcaaacacatttgtctcaacacatttccaaatgtgatttctaatagctcagtgtggctgagaaagtgcggaactccactaaaaactctg

SEQ ID NO: 117666 - DNA, 120 bp, Artificial Sequence
  ENSG00000100625_27 (sequence is synthesized)
taaatgtaaatatatcagttctataagcaggatttgagtaattacagtgaattttatttttaatgtatatgtttctcttcaggcgctatgaactgaaaaatatgttttcttactgtttaa

SEQ ID NO: 117667 - DNA, 120 bp, Artificial Sequence
  ENSG00000100625_28 (sequence is synthesized)
tttatttttattgtttgaacaggaagtgaacatagtcgtttccaacaaagttttactttttgtaggattttaaaaataatgatttttaccaggaatctattaaggtcaatattaataaca

SEQ ID NO: 117668 - DNA, 120 bp, Artificial Sequence
  ENSG00000100625_29 (sequence is synthesized)
ctgaaacaggaaatctaactcccaatattggaattttggtactttttttcacatccttgttctttatttagcaactctgattcatttaaatatgttttttatagaattctatgtgccttt

SEQ ID NO: 117669 - DNA, 120 bp, Artificial Sequence
  ENSG00000100625_30 (sequence is synthesized)
ttacctcgtggcctttttattggtagtaaggtacagaagtgtcaacagaagcactgatggttcttttctactatctaacagggttaatttcaccacaaaattgctttaaatctgaagaac

SEQ ID NO: 117670 - DNA, 120 bp, Artificial Sequence
  ENSG00000100625_31 (sequence is synthesized)
gaacttaagtttcactaaataatatatatgacatttatcacacaaatggataaacaactaattattgttgatacttttcattacaaggaaaataagttataaataccatgtcaaattgat

SEQ ID NO: 117671 - DNA, 120 bp, Artificial Sequence
  ENSG00000100625_32 (sequence is synthesized)
caggctatgaaaaccattttaaaggaaagaaaatatgtaaattctattgagcaaaattctgtcctgttgaaacttagttctaaaggttttgaatcagttgttacactctgacacatgact

SEQ ID NO: 117672 - DNA, 120 bp, Artificial Sequence
  ENSG00000100625_33 (sequence is synthesized)
gttgtttgcactatattatcatgtcttctttaaaagtaaatatttttggtttctgtaagaagcttgtttaataatgttgtaagccgtggctatagttttatcaagactctgaacacaaga

SEQ ID NO: 117673 - DNA, 120 bp, Artificial Sequence
  ENSG00000100625_34 (sequence is synthesized)
tgtaacaatgcaaataaatttatgtagtgagtaaagttgctctctagtctctgaaaagcaaaaaaagtgagaaaataatttcttcagagataacttcaagttgttgaacataaaggtgtt

SEQ ID NO: 117674 - DNA, 83 bp, Artificial Sequence
  ENSG00000100625_35 (sequence is synthesized)
atcttgcttttttttttatgatcagaacaaagggcccactctagttctctacatgtcaatcaatcaagcatgttgaataaggg

SEQ ID NO: 117675 - DNA, 120 bp, Artificial Sequence
  ENSG00000100625_36 (sequence is synthesized)
gttctctacatgtcaatcaatcaagcatgttgaataagggacatagaggatttaacttttgttatcataaatggaacttgcaggcatatatcaagaaccctatgaagaattcctctccca

SEQ ID NO: 117676 - DNA, 120 bp, Artificial Sequence
  ENSG00000100625_37 (sequence is synthesized)
tcattttgataaagaactacatcatttttgatagaattggtgaatgttcctaaactgctgaagctacatgttttttgttttgttttacaaagtcaggtgtttgagagttcttttccactc

SEQ ID NO: 117677 - DNA, 120 bp, Artificial Sequence
  ENSG00000100625_38 (sequence is synthesized)
tactactactcatagagcttgttttttctttgggtgtgtgctgatcctgttactgagattaattacatggctctgcagtgtagtttacataaaaatgatgttttccacttgattgctgca

SEQ ID NO: 117678 - DNA, 120 bp, Artificial Sequence
  ENSG00000100625_39 (sequence is synthesized)
gatatcaagagtttgttattttcaaatacccatccaacaagagagatggggaggtttttagttatatatgctatatatatatatataactggaaatgttttatatgttttccgaaaatac

SEQ ID NO: 117679 - DNA, 120 bp, Artificial Sequence
  ENSG00000100625_40 (sequence is synthesized)
aataagcctctcttttattcagtgttcttcctcttttctcccttatgaaaaagaaaagatagcacaaaacttaagacttacctaggaaacccattcatattcccaccatgatgtaattat

SEQ ID NO: 117680 - DNA, 120 bp, Artificial Sequence
  ENSG00000100625_41 (sequence is synthesized)
aaccctacaattacttcaggtagctacacaatataccaggtaagaatcaatgcacagtataaagaacttattgttcttttctattctttcagttgaataagggccagttggtatgcagcc

SEQ ID NO: 117681 - DNA, 120 bp, Artificial Sequence
  ENSG00000100625_42 (sequence is synthesized)
catgtatatgtgaatggagtaagataaaccccatgatctccttgcacagaattgcaaatgtcttttgccataccaagggccagactcagaacccttggagtcatgtggcagaatttccct

SEQ ID NO: 117682 - DNA, 120 bp, Artificial Sequence
  ENSG00000100625_43 (sequence is synthesized)
cttacataaaccaatgcttgaaaatgctgcaaatgaccctctaatgatccctgaagatcaaaacaggggtaaatgactccctgcaaaacccaacccatgctgctggctgtgggatttttg

SEQ ID NO: 117683 - DNA, 120 bp, Artificial Sequence
  ENSG00000100625_44 (sequence is synthesized)
gtgtaagcctatctatgcactctatcagccagaatttggcatttagctcttagttaaatctagtaaaggacagtctattgtttaaagagaaggtgcatttgttcctcaatcaagcaagag

SEQ ID NO: 117684 - DNA, 120 bp, Artificial Sequence
  ENSG00000100625_45 (sequence is synthesized)
cacctgtgttgtactgctttatatctcatgtatatttatagtaatgaaaagactttttaaattgtacacgtttcagtgcctttcttgtgttatgaaaggcaggtagatattatagccata

SEQ ID NO: 117685 - DNA, 120 bp, Artificial Sequence
  ENSG00000100625_46 (sequence is synthesized)
ggtaaaaatccatagttaaattgcacactgaccttaaatctctctgtgtatgcccttgtatcttgcatgttaaaagttggattattgggcatgtgtggcagcctgccctgctacatgcta

SEQ ID NO: 117686 - DNA, 120 bp, Artificial Sequence
  ENSG00000100625_47 (sequence is synthesized)
gacaagtgtgctttagtacatagccacaagttcttcattctttaaaatgttttgacagatcatctcataataaaaataattcaggaaaactatggggaaatagttacatttcacaaaaga

SEQ ID NO: 117687 - DNA, 120 bp, Artificial Sequence
  ENSG00000100625_48 (sequence is synthesized)
tattttaaactctttgtaaaacttagataatagagcctagcagttactttgtatctaattgatacattttatgttaatttaccaccatacattttattaatcaaaattgtatagcatgtg

SEQ ID NO: 117688 - DNA, 120 bp, Artificial Sequence
  ENSG00000100625_49 (sequence is synthesized)
actcttttggctttcagagttctcaaaaatattattttgttgcatgtactgtatgtttagaggcaaccaattatatactcaatatggttttactgtgccttacacaaagagaaactctat

SEQ ID NO: 117689 - DNA, 120 bp, Artificial Sequence
  ENSG00000100625_50 (sequence is synthesized)
acagaatgtatatcatggggtggggtaacagagtctttactgcactgttaggtgatggcacacagagcatgtcccagaacatttctgtgcttaattacccaaccaaagagatctgaagta

SEQ ID NO: 117690 - DNA, 120 bp, Artificial Sequence
  ENSG00000100625_51 (sequence is synthesized)
tgtatgtcgtactgtaatgggggtttatgcctggacaattaagtgttttatttgttttctgaaatgatgtgaacttatttttctaaacactatgctaaataaactttatatttatacata

SEQ ID NO: 117691 - DNA, 120 bp, Artificial Sequence
  ENSG00000100625_52 (sequence is synthesized)
atatagtatgcagcaaccggaggagtcacgttgggggaacggcagaaagcagctatccgtttacactactttgctctaacagctatcttaatgatcgcaagtgcggcggacatcaagcaa

SEQ ID NO: 117692 - DNA, 120 bp, Artificial Sequence
  ENSG00000100625_53 (sequence is synthesized)
cttcccggctttcttttcctccaagtgctcgcaaacatggcgcttaccttccccaccagcctggtccggctgcccacctctccccgccccctacctcgctccccggccggcagagggcac

SEQ ID NO: 117693 - DNA, 120 bp, Artificial Sequence
  ENSG00000100625_54 (sequence is synthesized)
tggatggtgtttgttaaataggcccctttggcttcctttggattcaaaggcgactgcacataactgttcttgggttgaaagtgccttttcctacaacaaggacagccactttgttgaatg

SEQ ID NO: 117694 - DNA, 120 bp, Artificial Sequence
  ENSG00000100626_0 (sequence is synthesized)
cgcttctctcccagtgcgcagtggcctggtgggtcagccggcggcggctggagcgcggggccggccctgcgcacgaatgaatgggcgcccgggggacgcgcgcgctcggggctgaagggc

SEQ ID NO: 117695 - DNA, 120 bp, Artificial Sequence
  ENSG00000100626_1 (sequence is synthesized)
tgaagggcattaggaccgtgaggatcgctccgcgatcctgtctctccctatcacccccccgcccccccacctctctcctttttctgctctgcaggactgagcagctaggcgcgagcgaaa

SEQ ID NO: 117696 - DNA, 120 bp, Artificial Sequence
  ENSG00000100626_2 (sequence is synthesized)
acaaacagctggggctgcgagcgcccccgccccggccccgagagcacgccggcccagtcccccacctggggcgcccgtctgcccaccatgaggaagatccgcgccaatgccatcgccatc

SEQ ID NO: 117697 - DNA, 120 bp, Artificial Sequence
  ENSG00000100626_3 (sequence is synthesized)
ctgaccgtagcctggatcctgggcactttctactacttatggcaggacaaccgagcccacgcagcatcctccggcggccggggcgcgcagagggcaggcaggaggtcggagcagctccgc

SEQ ID NO: 117698 - DNA, 120 bp, Artificial Sequence
  ENSG00000100626_4 (sequence is synthesized)
gaggaccgcaccatcccgctcattgtgacaggaactccctcgaaaggctttgatgagaaggcctacctgtcggccaagcagctgaaggctggagaggacccctacagacagcacgccttc

SEQ ID NO: 117699 - DNA, 120 bp, Artificial Sequence
  ENSG00000100626_5 (sequence is synthesized)
aaccagctggagagtgacaagctgagcccagaccggcccatccgggacacccgccattacagctgcccatctgtgtcctactcctcggacctgccagccaccagcgtcatcatcaccttc

SEQ ID NO: 117700 - DNA, 120 bp, Artificial Sequence
  ENSG00000100626_6 (sequence is synthesized)
cacaatgaggcccgttccaccctgctgcgcacagtgaagagtgtcctgaaccgaactcctgccaacttgatccaggagatcattttagtggatgacttcagctcagatccggaagactgt

SEQ ID NO: 117701 - DNA, 120 bp, Artificial Sequence
  ENSG00000100626_7 (sequence is synthesized)
ctactcctgaccaggatccccaaggtcaagtgcctgcgcaatgatcggcgggaagggctgatccggtcccgagtgcgtggggcggacgtggctgcagctaccgttctcacctttctggat

SEQ ID NO: 117702 - DNA, 120 bp, Artificial Sequence
  ENSG00000100626_8 (sequence is synthesized)
agccactgcgaagtgaacaccgagtggctgccgcccatgctgcagcgggtgaaggaggaccacacccgcgtggtgagtcccatcattgatgtcatcagtctggataattttgcctacctt

SEQ ID NO: 117703 - DNA, 120 bp, Artificial Sequence
  ENSG00000100626_9 (sequence is synthesized)
gcagcatctgctgaccttcgtggagggttcgactggagcctgcatttcaagtgggagcagatccctcttgagcagaagatgacccggacagaccccaccaggcccataaggacgcctgtc

SEQ ID NO: 117704 - DNA, 120 bp, Artificial Sequence
  ENSG00000100626_10 (sequence is synthesized)
atagctggaggaatcttcgtgatcgacaagtcctggtttaaccacttgggaaagtatgatgcccagatggacatctgggggggagagaattttgagctctccttcagggtgtggatgtgt

SEQ ID NO: 117705 - DNA, 120 bp, Artificial Sequence
  ENSG00000100626_11 (sequence is synthesized)
ggtggcagtctggagatcgtcccctgcagccgggtgggccatgtcttcaggaaacggcacccctacaacttccctgagggtaatgccctcacctacatcaggaatactaagcgcactgca

SEQ ID NO: 117706 - DNA, 120 bp, Artificial Sequence
  ENSG00000100626_12 (sequence is synthesized)
gaagtgtggatggatgaatacaagcaatactactatgaggcccggccctcggccatcgggaaggccttcggcagtgtggctacgcggatagagcagaggaagaagatgaactgcaagtcc

SEQ ID NO: 117707 - DNA, 120 bp, Artificial Sequence
  ENSG00000100626_13 (sequence is synthesized)
ttccgctggtacctggagaacgtctacccagagctcacggtccccgtgaaggaagcactccccggcatcattaagcagggggtgaactgcttagaatctcagggccagaacacagctggt

SEQ ID NO: 117708 - DNA, 120 bp, Artificial Sequence
  ENSG00000100626_14 (sequence is synthesized)
gacttcctgcttggaatggggatctgcagagggtctgccaagaacccgcagcccgcccaggcatggctgttcagtgaccacctcatccagcagcaggggaagtgcctggctgccacctcc

SEQ ID NO: 117709 - DNA, 120 bp, Artificial Sequence
  ENSG00000100626_15 (sequence is synthesized)
accttaatgtcctcccctggatccccagtcatactgcagatgtgcaaccctagagaaggcaagcagaaatggaggagaaaaggatctttcatccagcattcagtcagtggcctctgcctg

SEQ ID NO: 117710 - DNA, 120 bp, Artificial Sequence
  ENSG00000100626_16 (sequence is synthesized)
gagacaaagcctgcccagctggtgaccagcaagtgtcaggctgacgcccaggcccagcagtggcagctgttgccacacacatgacggagggattttcttgaagggtcagctattgcactg

SEQ ID NO: 117711 - DNA, 120 bp, Artificial Sequence
  ENSG00000100626_17 (sequence is synthesized)
tgctgggaggctggctgtggctcctgtttgtgaagagaactcccagttccttttcacagccgctgagaacacatccacacatctaccccacggccttgtcttggaactgctcctgctatc

SEQ ID NO: 117712 - DNA, 120 bp, Artificial Sequence
  ENSG00000100626_18 (sequence is synthesized)
cccacaccctgcttcctcaccccactggctcttgggcaaatgactgttggtaccaggaccctgggggtctcccctacaaagcagaccagcctggggcagatatacctaccacaggagccc

SEQ ID NO: 117713 - DNA, 120 bp, Artificial Sequence
  ENSG00000100626_19 (sequence is synthesized)
cctgtctttcataggccaaggatccacatacccatagagttcatggattctagagggtctaggaatctcttgaaattgtccctaaaatactgcatgtgtgtgcatacatgcattttcctg

SEQ ID NO: 117714 - DNA, 120 bp, Artificial Sequence
  ENSG00000100626_20 (sequence is synthesized)
gggaaaaagtccatggcttctaaaagaggtccctgatccccaaagggcctgaacctctgctctggattgaagccactgtctgcccaagctgccaccccctaatcttcctccctggcgtgc

SEQ ID NO: 117715 - DNA, 120 bp, Artificial Sequence
  ENSG00000100626_21 (sequence is synthesized)
tcaaactgccatcgcctgctccctccacacggcccttggggtcagcagccaagtgtctgtggtccgcagcacctgctctggagggctctccagcagtttcgcctcctgactctcaccagc

SEQ ID NO: 117716 - DNA, 120 bp, Artificial Sequence
  ENSG00000100626_22 (sequence is synthesized)
gtcctctcggcagcactcccgtgcccaagtgcacccctctggacttgccagcgcaggccccttcgctcccagggccatgctttgcctgtcctctgtcgtgatgtttcttccgcagccagg

SEQ ID NO: 117717 - DNA, 120 bp, Artificial Sequence
  ENSG00000100626_23 (sequence is synthesized)
gcaaaggcctctccccagaggatggactagaaggcctgggccacactcgggcatggacctttggggctggggagccggggctgcgcctgttgaatgtaagaggactgctgaccagagggc

SEQ ID NO: 117718 - DNA, 120 bp, Artificial Sequence
  ENSG00000100626_24 (sequence is synthesized)
cttcaagagggtctctctgtcctttgctgtggtcagatcaggctctgcacttatcagccggtcctttgtggcaacgcagccctgttctgtttttgcttttcctcttcttgaccaaagcat

SEQ ID NO: 117719 - DNA, 120 bp, Artificial Sequence
  ENSG00000100626_25 (sequence is synthesized)
gtgccactagctgtccttgaggacctcgtctttatgaaacacacacctggaataaaaccacttcttacatgtccacatgcaccagcgccttcctttctgcctccaggcctagcccttcag

SEQ ID NO: 117720 - DNA, 120 bp, Artificial Sequence
  ENSG00000100626_26 (sequence is synthesized)
cacaccctcccccgcctcgtggggaaagtccgggcctcctttctgtaaaagtgaaactgaacatgctcaagtctagccctgtcctgcacctggtagcttgctcgtcggcctccatgccct

SEQ ID NO: 117721 - DNA, 120 bp, Artificial Sequence
  ENSG00000100626_27 (sequence is synthesized)
gtggtgccccaggaactcctgactgctctggtgggggccaacaggtggccctactgcaagggcaggccttggaccaaaaccaggaatcagcacaggtcaggtggagcccaggctcctgtg

SEQ ID NO: 117722 - DNA, 120 bp, Artificial Sequence
  ENSG00000100626_28 (sequence is synthesized)
gcctcattatgggattctacttggggcttagaaatggaaagcaaattgcttctccaaataggtattgccctgccgccgtgcttgcctttagccagccctctctccttccctgtgagccag

SEQ ID NO: 117723 - DNA, 120 bp, Artificial Sequence
  ENSG00000100626_29 (sequence is synthesized)
gcctgtcccctcggagctgccctcccctgctctaccacacaagaaggcagtggtacaaattcaggcaggacatacttcctgggtaaaaacagcaaaataattctgaaaagagtcttacca

SEQ ID NO: 117724 - DNA, 120 bp, Artificial Sequence
  ENSG00000100626_30 (sequence is synthesized)
gaccagctttgcttgattgggtagcagatgctctgcctaatgttcccatggaaaccaatggaaaacccccaccatgtctgtgatcagaagctgaacctacccaggtaaaaataaacgctg

SEQ ID NO: 117725 - DNA, 120 bp, Artificial Sequence
  ENSG00000100626_31 (sequence is synthesized)
cttcaacatacatatgaactgcagctggcaggccagcacaccactagcctctcctggacgcaaccatttctgccctcagccccactttgccgtggggctgctgatctggagttacccaga

SEQ ID NO: 117726 - DNA, 120 bp, Artificial Sequence
  ENSG00000100626_32 (sequence is synthesized)
acttctgacccctgggcctgaggagcctggagcaaagccctagctggctgcagagaatacaccttggctacaatgtccagcttggtctgggcttaggagcaagtcactgtaaaagacctt

SEQ ID NO: 117727 - DNA, 120 bp, Artificial Sequence
  ENSG00000100626_33 (sequence is synthesized)
ggctgcagcctccattcccccatccacccctccgtcctctcagggagcacagcccaccacccaccgcctactcagggctccctcctggcgcgctgagccccatttccactctccatctat

SEQ ID NO: 117728 - DNA, 120 bp, Artificial Sequence
  ENSG00000100626_34 (sequence is synthesized)
tttcaccctcagccttggagggctctggtgcttgcttctcctgagtcaggctctctcctcttgcttgctctcctccaaacctacctctcccaaagcccattttctgtgccacccagtttt

SEQ ID NO: 117729 - DNA, 120 bp, Artificial Sequence
  ENSG00000100626_35 (sequence is synthesized)
ttccctaggagataaggctgtcagcctttagccaggccctggaggaatcagcaaaagccccaggctgggtattaacagttacgtcactggcaggagagtcccccgaaagcctatgggcag

SEQ ID NO: 117730 - DNA, 120 bp, Artificial Sequence
  ENSG00000100626_36 (sequence is synthesized)
ggcagcagaagggacttctgcaccagggccagactcccatttgtacagcagggagctgttcctgaggatccctgggcctctgtgacttggcttcagtttttacaagggctgttccccctg

SEQ ID NO: 117731 - DNA, 120 bp, Artificial Sequence
  ENSG00000100626_37 (sequence is synthesized)
gcccctcaggaaggctgtctccatctgcagttgggagaaataacctggacaatatgactgtcgtcccagggttccagcaccccaaggcctgcgggggatgtctcccagcactgcatgggg

SEQ ID NO: 117732 - DNA, 120 bp, Artificial Sequence
  ENSG00000100626_38 (sequence is synthesized)
tgtggtccttctcccaccagggaacaggaaaggaaacctggaagggaaaggctggcatttataacgtctgtaatttcattgccaacaatgttctcagtgtgtttggtatttgtgtgtccc

SEQ ID NO: 117733 - DNA, 120 bp, Artificial Sequence
  ENSG00000100626_39 (sequence is synthesized)
tgtgatggtctgagtcagtgctcctccagaaggagggggcaacccagccagcttctctaatgggaagaggtcttcactgccaggcacttaggaaagacctggagatggatcaggggaggg

SEQ ID NO: 117734 - DNA, 120 bp, Artificial Sequence
  ENSG00000100626_40 (sequence is synthesized)
cctactctcctgggcttgcagctgggctgtctgagtagccgacctggactgaggctccagagccatctgaggacaatttctcctgcttaattcagccctgtgaagcgtggagaagagtgt

SEQ ID NO: 117735 - DNA, 86 bp, Artificial Sequence
  ENSG00000100626_41 (sequence is synthesized)
tcctgcttaattcagccctgtgaagcgtggagaagagtgtactaggggtgcggactcttgggtctttaagacccattcaatattca

SEQ ID NO: 117736 - DNA, 120 bp, Artificial Sequence
  ENSG00000100626_42 (sequence is synthesized)
accagcctgggcaacatagcgagaccctatctctataaataaaaattcaaatcaacttcaaaaaatacccattcagctggatccctcactactctgccatttgccagctgtgagctcttt

SEQ ID NO: 117737 - DNA, 120 bp, Artificial Sequence
  ENSG00000100626_43 (sequence is synthesized)
tacaggcgtgagccactgcgcctgactgagctcttgaataagttatttcatctctcagccttgatttctttacctgttaaatggggtactcatagccgtaaaggatttttttgtgaagcc

SEQ ID NO: 117738 - DNA, 120 bp, Artificial Sequence
  ENSG00000100626_44 (sequence is synthesized)
ggtactcatagccgtaaaggatttttttgtgaagcctgatcgcaaagcatctggccctttccaaatgcttaatcaatatgtcattactattattaataaacattttctgagtgcctgcta

SEQ ID NO: 117739 - DNA, 120 bp, Artificial Sequence
  ENSG00000100626_45 (sequence is synthesized)
acacacatgacggtagccctggggcctcctgtaccttttgcatgagacttcgggaccggaagggggttagggtgggggagtgcaaagtgggctgttcccatctcctcacatttctgccag

SEQ ID NO: 117740 - DNA, 120 bp, Artificial Sequence
  ENSG00000100626_46 (sequence is synthesized)
gaccatcagcaaatacccaccatgacacacgttctccaaagcttgttctaggagggcgcaggcgggcacgccccgatgccctcagtgctgtcctggccttgccccgggagaggagatggt

SEQ ID NO: 117741 - DNA, 120 bp, Artificial Sequence
  ENSG00000100626_47 (sequence is synthesized)
actgagtaggtgcccctggccctttgtcctctcccttggcgcttcttggggctgggacaatagtgtgtggtctctcccttgttgcccggagaaagcaaggacagaagcccacacaggggt

SEQ ID NO: 117742 - DNA, 120 bp, Artificial Sequence
  ENSG00000100626_48 (sequence is synthesized)
cttttgggtcatgaggcccagctgtgcaggcaggcagggccaggggaaattgggcagcatggatggagaggctgaaggctgggaagagggaaggggagaggggcagcctgcaggggtagc

SEQ ID NO: 117743 - DNA, 120 bp, Artificial Sequence
  ENSG00000100626_49 (sequence is synthesized)
tgaagaacaggaaggaggtgagaagcccggtgacctgtcagagatgccaagcccagggtggcactgggttgggtggggacggatggtgtcttggcagcaaaggatgggtaatttgcaaat

SEQ ID NO: 117744 - DNA, 120 bp, Artificial Sequence
  ENSG00000100626_50 (sequence is synthesized)
gaacatggatagaagagcagcaaagcaccaaaagaacaaggtctcttacccaggacacagtcccttccacactttaccagccccagggtctgagcccgacgctgcctcttccggtcctgt

SEQ ID NO: 117745 - DNA, 120 bp, Artificial Sequence
  ENSG00000100626_51 (sequence is synthesized)
gcctgtgggtgcccacattcttagcaagaggctgcagagggatctttaggggaagattcgggcgtagtttattaaacagactccacttctatttggccatgtgtcaggctgagacctctc

SEQ ID NO: 117746 - DNA, 120 bp, Artificial Sequence
  ENSG00000100626_52 (sequence is synthesized)
tctcgggcattaatgaacagctagtgccctgtccctgccgccaggacccactgaaaggacgggtagccacacacatccctgagtagtcccagcctcatttgtcatttttgactcctgctt

SEQ ID NO: 117747 - DNA, 120 bp, Artificial Sequence
  ENSG00000100626_53 (sequence is synthesized)
tctcaaaggtttttgcctctgtcaatacagcatcatgggtggttggaaagaagggaacttcccttctggaccaagaacagcccctaagtcattagggttcaacctcacccttattcccct

SEQ ID NO: 117748 - DNA, 120 bp, Artificial Sequence
  ENSG00000100626_54 (sequence is synthesized)
gttgctgggagctggcgggcacagtggatttcctgtttgggatctggactcccagtatatggacccagccattagttagattggttcgactggagcctgcatttcaagtgggagcagatc

SEQ ID NO: 117749 - DNA, 120 bp, Artificial Sequence
  ENSG00000100626_55 (sequence is synthesized)
cctcttgagcagaagatgacccggacagaccccaccaggcccataagctcacgtgttgcgtcttccctctccttgctcccaggacgcctgtcatagctggaggaatcttcgtgatcgaca

SEQ ID NO: 117750 - DNA, 120 bp, Artificial Sequence
  ENSG00000100626_56 (sequence is synthesized)
gtcgaaaggtgtcagatggtgagatggcttctagactgggctctgcccactaattagctgtgtggccttgggagaatcatccggcctctcttgctgcccttctttccgatgaaataatgc

SEQ ID NO: 117751 - DNA, 120 bp, Artificial Sequence
  ENSG00000100626_57 (sequence is synthesized)
tgacgatgatatttcagggttgtccaggggtcaatgaggcgggatagagggaagcatcgtgaaatctgggagccccaggccagcgaaaaatgtggaagggccgtacccgcactctcctag

SEQ ID NO: 117752 - DNA, 120 bp, Artificial Sequence
  ENSG00000100626_58 (sequence is synthesized)
tcgcgctcttcgaatgtcaagtgcaccagcttccaatccctcctctgggcgggcccggtctggctaatctcagctgcagattccagtacaaactcaggactctcccccgcccagccgccc

SEQ ID NO: 117753 - DNA, 120 bp, Artificial Sequence
  ENSG00000100626_59 (sequence is synthesized)
atgttccatcctcacagacactttgggggcaacttcccctgcagttgcccaagccaagtagtcagcaggagcttcatggctgttagctggagcggaaggctggctgcctggttgccacag

SEQ ID NO: 117754 - DNA, 120 bp, Artificial Sequence
  ENSG00000100626_60 (sequence is synthesized)
gaggcccagcagcccgaggggccatgcctcagggtggcagaccttggcaggagagcccctgattgactcaaataagcccttcagagcgaggatctgtggggagggggagcaaagtctaca

SEQ ID NO: 117755 - DNA, 120 bp, Artificial Sequence
  ENSG00000100626_61 (sequence is synthesized)
tctaggtcaagccaattattctgcccatgaggaaatacttctttgggtaattatttgtttaatgccatcctgccaggctgtgagctccatgaaggcagggaccacttgtcttgttaacac

SEQ ID NO: 117756 - DNA, 120 bp, Artificial Sequence
  ENSG00000100626_62 (sequence is synthesized)
tgtatccctagctcctgacaaccaccacagttcaaataagtgttagcttttactgacagtctgtgctagaagtttgaaatagatcatctcatctaatcctcccagccacccagtgacgtg

SEQ ID NO: 117757 - DNA, 120 bp, Artificial Sequence
  ENSG00000100626_63 (sequence is synthesized)
ggttctagtactacctccattttataagtgagtaagctgaggctcgctgaatctaaagaatatatgtcagatcacacagctgagaaggggtggagctgggattcaaacccaggtcagtga

SEQ ID NO: 117758 - DNA, 120 bp, Artificial Sequence
  ENSG00000100626_64 (sequence is synthesized)
cttctaggcccacagtcttaacccagcacatagtagatgttcaataagtatttcttgactgttggcagactagggaaactgagctccagacacagtgatgtccaagctggcatgaccagc

SEQ ID NO: 117759 - DNA, 120 bp, Artificial Sequence
  ENSG00000100626_65 (sequence is synthesized)
ctcacgtgagcactgctttttccattgatccgacactctcacccacactgtcaccactaatcctgggagacaggtcagggtcaaggaagaaagtgatgcacagagaggtggagtcacttg

SEQ ID NO: 117760 - DNA, 120 bp, Artificial Sequence
  ENSG00000100626_66 (sequence is synthesized)
ctcagggtacacagcaaccagtgacagtggatttccagaatccagccagctctcttctgtgctactcccttcctgtcttggagggctccctcaccacccagggaatgggacccaaggccc

SEQ ID NO: 117761 - DNA, 120 bp, Artificial Sequence
  ENSG00000100626_67 (sequence is synthesized)
agaggctgctccagcacttcccctgctcaccctcctcagaagccctccctgtgcctgccactggctagcctgcctcagtcggtgcaagcagtgaggagggtgcctgggtctctgatttgg

SEQ ID NO: 117762 - DNA, 120 bp, Artificial Sequence
  ENSG00000100626_68 (sequence is synthesized)
cctgcatggttttcctcctacccctttttctttgcttgggtcagcacgttttttaaaggatgaacagcagtttgctgtgccattctggaaagcagccacagcctctccctccggcctgtg

SEQ ID NO: 117763 - DNA, 120 bp, Artificial Sequence
  ENSG00000100626_69 (sequence is synthesized)
cacttgctggacctgtgggacactttaagcgcttttggatggtggggggatgcagcccaccctcggccctgccctgcagtggggctggtgcagtgtctcctgcacctagagcacccacct

SEQ ID NO: 117764 - DNA, 120 bp, Artificial Sequence
  ENSG00000100626_70 (sequence is synthesized)
ctctgagggcaaatccttgagcccacgcccaccccctcccactgaggaattatctccgagcaaagcctccactcaattgcccctctggggctgaatcacacatttccccctttgtgctga

SEQ ID NO: 117765 - DNA, 120 bp, Artificial Sequence
  ENSG00000100626_71 (sequence is synthesized)
cccagcctacggggtgtgtaggtatctccttggccccattcattctgcccctgcaagtcctgccaggctcccgatggcattctgggtgcctgtgcccctcttctcccaggaggacaggat

SEQ ID NO: 117766 - DNA, 120 bp, Artificial Sequence
  ENSG00000100626_72 (sequence is synthesized)
gagccagctatcccactgccaatgccttctggaatccgggccgtccttcttggtcccctgctggtcctatttccaaggctagctgggtttcctgtatccgagaggctcctgtgcctcaga

SEQ ID NO: 117767 - DNA, 120 bp, Artificial Sequence
  ENSG00000100626_73 (sequence is synthesized)
cctggtgtgatggagtcagcaggccccagctcagtcttccctccccctcccttcactcagtctcctcacttataaaataaggggctccctcccctgcttacctcacaaggaatccgcaag

SEQ ID NO: 117768 - DNA, 120 bp, Artificial Sequence
  ENSG00000100626_74 (sequence is synthesized)
aaccaagatgtggagatgggacagtgggtgatgtgacattgtttctcagacaagcccagaattgagtggcctggagagtcaagaagccctgagattgtgcctaatagcactgataagaag

SEQ ID NO: 117769 - DNA, 120 bp, Artificial Sequence
  ENSG00000100626_75 (sequence is synthesized)
tagcactgataagaagtgagaatcccgctgtttggggagcacttcctaatgattgggtgattcagtcattcgttcatcttaaaacaaaatgacggctgggtgcagtggctcatgcctgta

SEQ ID NO: 117770 - DNA, 120 bp, Artificial Sequence
  ENSG00000100626_76 (sequence is synthesized)
caaacaaaatgtcactgggtgcctaccttgtgccagagaatgtacagatcatgttggccacaaggatgaacggacatggtccttgacccccagggaatttgcactttagtggaagagaaa

SEQ ID NO: 117771 - DNA, 120 bp, Artificial Sequence
  ENSG00000100626_77 (sequence is synthesized)
gaagggagtaagacactatattacagaaggctagatgctgaggtagctccaagcaccacgactccctggggtgaggatggccatactctctccagctgggcattgctggaggtttggcct

SEQ ID NO: 117772 - DNA, 120 bp, Artificial Sequence
  ENSG00000100626_78 (sequence is synthesized)
acatgaggtaaatgtcaaggactagaagagcatgaagaaacaggaggggggatccaaaggcccttgacctttaggctctctgcgggggccatgtgggcccagagaggctgggtctcagcc

SEQ ID NO: 117773 - DNA, 120 bp, Artificial Sequence
  ENSG00000100626_79 (sequence is synthesized)
ctacccatcacgtccttgcattcccactgggagcccaggctccgcccctgccttccaccctgtgtgcacatccccccgcagccctagccctatccctgcagctgggtgggctcatctctc

SEQ ID NO: 117774 - DNA, 120 bp, Artificial Sequence
  ENSG00000100626_80 (sequence is synthesized)
tcccctcagctgctccctgtccaccaactgccctcagagccctctgggcttcctccacatggtcacaagcactcctgcctctaatcgaagacacggtgaatgagagaagatggaagaggg

SEQ ID NO: 117775 - DNA, 120 bp, Artificial Sequence
  ENSG00000100626_81 (sequence is synthesized)
gaggtggttgcaatgggaggcaaataggagagaaacccaaactagacctatcttactattattcttccctgagccttgaaacctgggtctctgcctctcatcccttctcataaatgttcc

SEQ ID NO: 117776 - DNA, 120 bp, Artificial Sequence
  ENSG00000100626_82 (sequence is synthesized)
aagcaacactccatcctccacccaggcacttccgtaatgttctacaggagcaactcttctcccccttgtcaaacccggggtcggggaggcaccaggaggtgaaggcactgaccaggagcc

SEQ ID NO: 117777 - DNA, 120 bp, Artificial Sequence
  ENSG00000100626_83 (sequence is synthesized)
cctgcatgactctgtgatgcgagacctccagtctcccaccaccctgctggccccacacttcatccctacaaagaaggcagcttcccactagggggtgtagattactggcctcacaggtca

SEQ ID NO: 117778 - DNA, 120 bp, Artificial Sequence
  ENSG00000100626_84 (sequence is synthesized)
gaagcttaggaagaataaatcttgtttacagaaataaaagatttacctaggccaggactgacaagctcaagtgcctacagggagctggtgggaaaaccccaataggagaaaagtcgggac

SEQ ID NO: 117779 - DNA, 120 bp, Artificial Sequence
  ENSG00000100626_85 (sequence is synthesized)
caggcaggaactatggtgacctgcagaacaagagccccatctaaggcagagggcaaatcctcagccccagcaactgatgccatgtaagaaactgggtccaataactacatagaagctgga

SEQ ID NO: 117780 - DNA, 120 bp, Artificial Sequence
  ENSG00000100626_86 (sequence is synthesized)
aatgcagatttgcacgtggcaaccaagctaaattgtaaataaacacaggggacttctgctttgcctcctcctctgatctggacaggaacttctgcaaactacagaaaagcaagagccctg

SEQ ID NO: 117781 - DNA, 120 bp, Artificial Sequence
  ENSG00000100626_87 (sequence is synthesized)
ctgggaagggcagggcttaaagctggtgttagaggcaggatgggggcagcctcttacataggaacacacagcctgatttaaatgaggggcatgactgggcatggtagctcatgcctgtaa

SEQ ID NO: 117782 - DNA, 120 bp, Artificial Sequence
  ENSG00000100626_88 (sequence is synthesized)
tcccagtgctttggaaggccaagacaggtggatcacttgaggtgagacgttctagctagaccagcctgggcaacatagcaagacccaggctctgcacttatcagccggtcctttgtggca

SEQ ID NO: 117783 - DNA, 120 bp, Artificial Sequence
  ENSG00000100626_89 (sequence is synthesized)
aggactctcccccgcccagccgcccctacacaaggactcgccgaacacaccttgaatcccgcgccagagcgcagcccggaactgcagctcgcggcgcgggcccaggtcgggggtcgcgcg

SEQ ID NO: 117784 - DNA, 120 bp, Artificial Sequence
  ENSG00000100628_0 (sequence is synthesized)
gaactgcctggcagagcagccagaagcttggggccagggcagaaggaaaactcggggagcatgttctgaattaagacactttcaagaaaatcctttgtattacccctgaattgtaccctt

SEQ ID NO: 117785 - DNA, 120 bp, Artificial Sequence
  ENSG00000100628_1 (sequence is synthesized)
gtttcagagcctaacagggttttctgatttgctgttccctcctccccactgggtgtctgttctggaggccagggtgagaggtggaggaggatggccacgcagatcagcactcggggcagc

SEQ ID NO: 117786 - DNA, 120 bp, Artificial Sequence
  ENSG00000100628_2 (sequence is synthesized)
cagtgtaccattgggcaggaggagtacagcctgtacagcagcctgagcgaggatgaactggtgcagatggccatcgagcagagcctagcggacaagacaaggggcccaaccactgctgag

SEQ ID NO: 117787 - DNA, 120 bp, Artificial Sequence
  ENSG00000100628_3 (sequence is synthesized)
gccaccgcgtctgcatgtaccaaccgccaacctgcccatttctacccatggaccaggtccactgcacctcctgagagttcgccggcccgggccccaatgggcttgttccaaggggtcatg

SEQ ID NO: 117788 - DNA, 120 bp, Artificial Sequence
  ENSG00000100628_4 (sequence is synthesized)
cagaaatacagcagcagcttgttcaagacctcccagctggcgcctgcggaccccttgataaaggccatcaaggatggcgatgaagaggccttgaagaccatgatcaaggaagggaagaat

SEQ ID NO: 117789 - DNA, 120 bp, Artificial Sequence
  ENSG00000100628_5 (sequence is synthesized)
ctcgcagagcccaacaaggagggctggctgccgctgcacgaggccgcatactatggccaggtgggctgcctgaaagtcctgcagcgagcgtacccagggaccatcgaccagcgcaccctg

SEQ ID NO: 117790 - DNA, 120 bp, Artificial Sequence
  ENSG00000100628_6 (sequence is synthesized)
caggaggaaacagccgtttacttggcaacgtgcaggggccacctggactgtctcctgtcactgctccaagcaggggcagagccggacatctccaacaaatcccgagagacaccgctctac

SEQ ID NO: 117791 - DNA, 120 bp, Artificial Sequence
  ENSG00000100628_7 (sequence is synthesized)
aaagcctgcgagcgcaagaacgcggaggccgtgaagattctggtgcagcacaatgcagacaccaaccaccgctgcaaccgcggctggaccgctctgcacgagtctgtgtctcgcaatgac

SEQ ID NO: 117792 - DNA, 120 bp, Artificial Sequence
  ENSG00000100628_8 (sequence is synthesized)
ctggaggtcatgcagatcctggtgagcggaggagccaaggtggaatccaagaacgcctacggcatcacccccttgttcgtggccgcccagagtggacagttggaggccttgaggttctta

SEQ ID NO: 117793 - DNA, 120 bp, Artificial Sequence
  ENSG00000100628_9 (sequence is synthesized)
gccaagtacggtgctgacatcaacacgcaggccagcgacaacgcgtctgccctctacgaggcctgcaagaatgagcatgaggaggtggtggagtttctgctgtcacagggtgccgacgcc

SEQ ID NO: 117794 - DNA, 120 bp, Artificial Sequence
  ENSG00000100628_10 (sequence is synthesized)
ccagccgcacgcgcatacgccgtagcggcgtcagtccgctgcacctggcggccgagcgcaaccacgacgaggtgctggaggcgctgctgagcgcgcgcttcgacgtgaacacgccgctgg

SEQ ID NO: 117795 - DNA, 120 bp, Artificial Sequence
  ENSG00000100628_11 (sequence is synthesized)
cccccgagcgcgcgcgcctctacgaagaccggcgcagctccgcgctgtacttcgcggtggtcaacaacaacgtgtacgccaccgagctgctgctgcaacacggcgccgaccccaaccgcg

SEQ ID NO: 117796 - DNA, 120 bp, Artificial Sequence
  ENSG00000100628_12 (sequence is synthesized)
acgtcatcagccccttgctcgtggccatccgccacggctgcctgcgcacaatgcagctgctgctggaccacggcgcgaacatcgacgcctatatcgccacgcaccccaccgccttccccg

SEQ ID NO: 117797 - DNA, 120 bp, Artificial Sequence
  ENSG00000100628_13 (sequence is synthesized)
ccaccatcatgttcgccatgaagtgcctgtcgctgctcaagttcctcatggacctgggctgcgacggcgagccctgcttctcatgcctctacggcaacggcccgcacccgccggccccgc

SEQ ID NO: 117798 - DNA, 120 bp, Artificial Sequence
  ENSG00000100628_14 (sequence is synthesized)
agccctccagcaggttcaacgacgcgcccgcggccgacaaggagcccagcgtggtgcagttctgtgagttcgtatctgccccagaggtgagccgctgggcggggcccatcatcgatgtcc

SEQ ID NO: 117799 - DNA, 120 bp, Artificial Sequence
  ENSG00000100628_15 (sequence is synthesized)
tcctggactacgtgggcaacgtgcagctctgctcgcggctgaaggaacacatcgacagctttgaggactgggccgtcatcaaggagaaggcagaacctccaagacctctggctcaccttt

SEQ ID NO: 117800 - DNA, 120 bp, Artificial Sequence
  ENSG00000100628_16 (sequence is synthesized)
gccgactgcgggttcgaaaggccattgggaaataccgtataaaactcctagacaccttgccgctcccaggcaggctgattagatacctgaaatacgagaacacccagtaactggggccac

SEQ ID NO: 117801 - DNA, 120 bp, Artificial Sequence
  ENSG00000100628_17 (sequence is synthesized)
ggggagagaggagtagcccctcagactcttcttactaagtctcaggacgtcggtgttcccaactccaaggggacctggtgacagacgaggctgcaggctgcctccctctcagcctggaca

SEQ ID NO: 117802 - DNA, 120 bp, Artificial Sequence
  ENSG00000100628_18 (sequence is synthesized)
gctaccaggatctcactgggtctcagggcccagagctttggccagagcagagaacagaatgtgtcaaggagaagaatcatttgtttacaaactgatgagcagatcccagaccttctctac

SEQ ID NO: 117803 - DNA, 120 bp, Artificial Sequence
  ENSG00000100628_19 (sequence is synthesized)
cttcaggaatggcagaaacctctattcctggggccagggcagagcttgaggtgttctggggaaggtggtgctcagagccttccctgtgcccctccacttgttctggaaaactcaccactt

SEQ ID NO: 117804 - DNA, 120 bp, Artificial Sequence
  ENSG00000100628_20 (sequence is synthesized)
gacttcagagctttctctccaaagactaagatgaagacgtggcccaaggtagggggtagggggagcctgggtcttggagggctttgttaagtattaatataataaatgttacacatgtga

SEQ ID NO: 117805 - DNA, 120 bp, Artificial Sequence
  ENSG00000100628_21 (sequence is synthesized)
attcgatgcacccggaggaacggaaggcaggattgcagcttcctcagtgcaacctccaaacaggaaatctgagatgtataacatcttatagtttggcttgtcaacgttggtcatgcggtg

SEQ ID NO: 117806 - DNA, 120 bp, Artificial Sequence
  ENSG00000100628_22 (sequence is synthesized)
agagcccatcctagcccaacatggcgtgggtgtcctgggaatgaggcctgcctccagcctcaccttctccatctgggaaatgggactattgatgcagaagcctccccaaaagtggatctg

SEQ ID NO: 117807 - DNA, 120 bp, Artificial Sequence
  ENSG00000100628_23 (sequence is synthesized)
aaaagatttccagccagccctgcaggtgaggaggggctatggaggattccccctgccctgcctgagccttcccgctctgctgcctggagttaaagcctccagaaccccctgtgtcttctg

SEQ ID NO: 117808 - DNA, 120 bp, Artificial Sequence
  ENSG00000100628_24 (sequence is synthesized)
acacagcagctgtgtccagcacacagaggacccggccatctgctttggttcagagccctgtgtctgtcagtcagtctctccctggctctccctccatcctcattcctgcctgaagccatg

SEQ ID NO: 117809 - DNA, 120 bp, Artificial Sequence
  ENSG00000100628_25 (sequence is synthesized)
gctgggctctgacggtggcaagaggtgggaaagggactaggggaagggctgccgctcctggggcttcatgttctttgcccacaatcatcttgggagaagggcaggcaaggctgtcacttt

SEQ ID NO: 117810 - DNA, 120 bp, Artificial Sequence
  ENSG00000100628_26 (sequence is synthesized)
tccccttttgtcctcaggatctcgtggctccactggggtcccaggacagcaagatagggacagctcagccctggagtcagaggagggcacacaccctggttcccctattctgactgtatg

SEQ ID NO: 117811 - DNA, 120 bp, Artificial Sequence
  ENSG00000100628_27 (sequence is synthesized)
actgggcaagccccttaatctctcagagtcttgactcttctcatctgcaaaatgggaatgatgagccttgctttaggggttattgtaaagattaaacccaatcgcacttgtaaagccttt

SEQ ID NO: 117812 - DNA, 120 bp, Artificial Sequence
  ENSG00000100628_28 (sequence is synthesized)
aggagcctcctggcacacggtgggctctgggatctggctgtccctgtccgtcctcccccagagagagcagggtctggctccaaacttcgccactaggctctactgcctcctgcagggagg

SEQ ID NO: 117813 - DNA, 120 bp, Artificial Sequence
  ENSG00000100628_29 (sequence is synthesized)
aggttggacattcattgggtttgggggccttccaggcaattcctccaaataactgagctggcaatgggcaacagcgcttagcctgaaataaattagtgggagcttcttgaaaccctagtg

SEQ ID NO: 117814 - DNA, 120 bp, Artificial Sequence
  ENSG00000100628_30 (sequence is synthesized)
cagtctggctgaggtttttaagaactcagacttcggaggccaagggttctgggtctgaagcccagctctgccccttactggctatgtgactttgggagggtggctgaagctctctgagct

SEQ ID NO: 117815 - DNA, 120 bp, Artificial Sequence
  ENSG00000100628_31 (sequence is synthesized)
tcagtttccttatctgtaaagcggagacggcagccgacccaccctgcccagtggggtgagaatggttgacccgcggcgccccctgccggtgggatccgcgtcgcagcccgcggtcagggc

SEQ ID NO: 117816 - DNA, 120 bp, Artificial Sequence
  ENSG00000100628_32 (sequence is synthesized)
gaccagccgagcctggcgcccgagctctcctgctggcggggccggccctacccgtccacaccccgaccctcccctcacccgcgcccgcccctcgacccggcaggatcgtgcagatgctgc

SEQ ID NO: 117817 - DNA, 120 bp, Artificial Sequence
  ENSG00000100628_33 (sequence is synthesized)
agctggggtccctttggagacactccaggaaaaggggggcacatacccccactgggcttttcctgatgctgacaggggctgctctggctgttcctaagtggaactcgtcaaggtggcagt

SEQ ID NO: 117818 - DNA, 120 bp, Artificial Sequence
  ENSG00000100628_34 (sequence is synthesized)
gacggtgctgatggggacctcaggacttatctgatcagtttcccatcgtccttgctgggtctgttgcttcaccggcatctgtgctctgacaccattaataaccacagagtctgagagtca

SEQ ID NO: 117819 - DNA, 120 bp, Artificial Sequence
  ENSG00000100628_35 (sequence is synthesized)
aggttactatagtgtctgctcctacccctgggacaagatcccctaatgagctggcaggtgggcgtggggggcacaggtacagcttggcttctcagctttgctcccctatcctctgctttg

SEQ ID NO: 117820 - DNA, 120 bp, Artificial Sequence
  ENSG00000100628_36 (sequence is synthesized)
ccatgaatctctcatccagccccgcagggatctgcctggccagcagtgagcctgagcccctttcatcctgggacctgccgaccacggctcacatcctcctgggtgaagaatgtcaccttg

SEQ ID NO: 117821 - DNA, 120 bp, Artificial Sequence
  ENSG00000100628_37 (sequence is synthesized)
cttcctatctgcctctttcgtggttggctggggagggggaccggggggtggggtgaggttaacctcattgttgtcttatatggtcatttaaatctcccagggcttcctccaagggccaaa

SEQ ID NO: 117822 - DNA, 120 bp, Artificial Sequence
  ENSG00000100629_0 (sequence is synthesized)
gtggtttggggaaagtgtaggggcaaccaaagatcatcggcttgactaggccctttgccctgaacctcatgaagaaatgataggaggcagacatatgtgcctaaaaagagcgttgagctc

SEQ ID NO: 117823 - DNA, 120 bp, Artificial Sequence
  ENSG00000100629_1 (sequence is synthesized)
agagaagagcaactcggagttttgggggtgtgctttgatttgtgtacatcaatggcagaatcatccagcgaatcagatcacttccgctgtcgtgaccgattgagtccatgggctgccaga

SEQ ID NO: 117824 - DNA, 120 bp, Artificial Sequence
  ENSG00000100629_2 (sequence is synthesized)
tcaacgcacaggggaactcgaagtcttcctacagtagaagttaccgagaaggtcaacactataacaagtactttacaggataccagtcggaacctgcgacaagtggaccagatgcttgga

SEQ ID NO: 117825 - DNA, 120 bp, Artificial Sequence
  ENSG00000100629_3 (sequence is synthesized)
cgataccgagaatacagtaatggacaggcgggtgcgatagaacatttaaaagaaagcttggaacaatcaatcgaccaactccggagtcaacgtttattgagaaactcaggagggagaagt

SEQ ID NO: 117826 - DNA, 120 bp, Artificial Sequence
  ENSG00000100629_4 (sequence is synthesized)
atttctgttacaagtttgagtgcaagtgaccttgatggtggcactgggtcagagctccatcattttccacctacctcacctctcaaggactatggggatccacagggtattaaacgaatg

SEQ ID NO: 117827 - DNA, 120 bp, Artificial Sequence
  ENSG00000100629_5 (sequence is synthesized)
agatcaagaactggtgtccggtttgttcaagagactgatgatatgactcagcttcatggttttcatcagtctcttcgagacctcagcagtgaacaaattcgccttggagatgatttcaac

SEQ ID NO: 117828 - DNA, 120 bp, Artificial Sequence
  ENSG00000100629_6 (sequence is synthesized)
agggagctttccagaaggagccggtcagatgccgaaacaaaaagggctttggaagaattgactgaaaaacttaatgaagcccagaaacaagaagtggtttcagatcgggtggagcggcgg

SEQ ID NO: 117829 - DNA, 120 bp, Artificial Sequence
  ENSG00000100629_7 (sequence is synthesized)
cttcaggaactggagagagagatgcgcacagaaagggagctggtggaaagacgccaggatcaactgggactcatgtccctgcagctacaggaggcactaaagaaacaagaagctaaagca

SEQ ID NO: 117830 - DNA, 120 bp, Artificial Sequence
  ENSG00000100629_8 (sequence is synthesized)
gatgagcatgagggggcaataaaaaataagctaagacaaactgaaactgagaagaatcaacttgaacaggaattggagctatctcgaaggttattgaatcaatcagaaggcagccgagaa

SEQ ID NO: 117831 - DNA, 120 bp, Artificial Sequence
  ENSG00000100629_9 (sequence is synthesized)
acacttttgcatcaggtagaagaactgcgtacacaacttacgaaagcagaaggtgatcgaaagggtttacagcatcaagtatctcagatttccaagcaacagtcaaactatcaggatgaa

SEQ ID NO: 117832 - DNA, 120 bp, Artificial Sequence
  ENSG00000100629_10 (sequence is synthesized)
caaggggaggactggagatttaggagaggggttgagcgggaaaaacaggacctggagaagcaaatgtcagatttgagagtgcagctgaacttcagcgcaatggcatctgagttagaggaa

SEQ ID NO: 117833 - DNA, 120 bp, Artificial Sequence
  ENSG00000100629_11 (sequence is synthesized)
gtgaaacggtgcatggagagaaaagacaaggagaaagcacatttggcatcacaagtagagaatttaacacgtgaactggagaatggggaaaaacagcaactgcagatgttggatcgactt

SEQ ID NO: 117834 - DNA, 120 bp, Artificial Sequence
  ENSG00000100629_12 (sequence is synthesized)
aaggagatccagaatcactttgacacatgtgaggccgagcgtaagcatgctgaccttcagatctcagagctgactcgccatgcggaggatgcaaccaagcaggctgagcggtacctcagt

SEQ ID NO: 117835 - DNA, 120 bp, Artificial Sequence
  ENSG00000100629_13 (sequence is synthesized)
gagctccagcagtcagaggctctgaaagaggaggcggagaagaggagggaagacctgaaactgaaagctcaagaatccattaggcagtggaagcttaagcataagaagttagaacgagcg

SEQ ID NO: 117836 - DNA, 120 bp, Artificial Sequence
  ENSG00000100629_14 (sequence is synthesized)
ttggagaaacaatctgaaactgttgatgaactgacaggcaagaataatcagattttaaaagaaaaggatgaattgaaaacccagctgtatgcagcattacaacaaatagagaatcttcga

SEQ ID NO: 117837 - DNA, 120 bp, Artificial Sequence
  ENSG00000100629_15 (sequence is synthesized)
aaggaattgaatgatgtcctaacaaagcgtgcccttcaggaggaggagcttcactccaaggaggagaaattacgtgatattaagtctcatcaagctgaccttgaattggaagttaagaat

SEQ ID NO: 117838 - DNA, 120 bp, Artificial Sequence
  ENSG00000100629_16 (sequence is synthesized)
tccctggataccatccatagactggagagcgaattgaaaaagcagagtaagatccaaagccagatgaaagttgagaaagctcacttggaggaagaaattgcagagctcaagaagagccag

SEQ ID NO: 117839 - DNA, 120 bp, Artificial Sequence
  ENSG00000100629_17 (sequence is synthesized)
gcccaggacaaagctaaacttcttgagatgcaagagtccatcaaggacctgagtgccatccgagcagatcttgctaataaattggctgaggaagagagagccaagaaagcagtgcttaag

SEQ ID NO: 117840 - DNA, 120 bp, Artificial Sequence
  ENSG00000100629_18 (sequence is synthesized)
caggcaaaatccagggatgaagaaacagctacaatcatcacacagttaaagctggaacgagatgtgcaccagagggagctgaaagatctcacatcatcattgcagagtgtgaaaacaaaa

SEQ ID NO: 117841 - DNA, 120 bp, Artificial Sequence
  ENSG00000100629_19 (sequence is synthesized)
cacgaacagaatatccaggagcttatgaagcactttaagaaagaaaagagtgaggctgagaatcatatcaggactctgaaggctgaaagtttagaagagaagaatatggctaaaattcat

SEQ ID NO: 117842 - DNA, 120 bp, Artificial Sequence
  ENSG00000100629_20 (sequence is synthesized)
cgtggtcagctggagaagttgaaatcacagtgtgacagactgacagaggaattaacccagaatgaaaatgagaacaaaaaactgaagctaaaatatcaatgtttgaaggatcaactagaa

SEQ ID NO: 117843 - DNA, 120 bp, Artificial Sequence
  ENSG00000100629_21 (sequence is synthesized)
gaaagggaaaaacatataagcattgaagaggagcacttaaggaggatggaagaggccagattgcagctcaaggatcaacttctttgcttggagactgaacaggaatccattcttggtgtg

SEQ ID NO: 117844 - DNA, 120 bp, Artificial Sequence
  ENSG00000100629_22 (sequence is synthesized)
ataggaaaggaaattgatgcagcttgtaaaacattctccaaggactcagtggagaaattaaaagttttttcatctggtcctgatatacattatgacccacatcgctggttagcagaaagc

SEQ ID NO: 117845 - DNA, 120 bp, Artificial Sequence
  ENSG00000100629_23 (sequence is synthesized)
aagactaaacttcagtggctctgtgaggaactgaaagagagagaaaacagagagaaaaatctgcgacaccagctgatgctctgcagacaacaactcaggaatttgactgaaaacaaggaa

SEQ ID NO: 117846 - DNA, 120 bp, Artificial Sequence
  ENSG00000100629_24 (sequence is synthesized)
tctgagttgcagtgtctctttcaacagatagaaaggcaggagcagcttctggatgaaatacatcgtgagaagagagatctactggaagagacccaaagaaaagatgaagaaatgggatct

SEQ ID NO: 117847 - DNA, 120 bp, Artificial Sequence
  ENSG00000100629_25 (sequence is synthesized)
ctgcaggaccgtgtaattgcattagaaacgagtacccaagtggccttggaccatctggagtctgtgcctgagaaactgagcctactagaagatttcaaagacttcagagattcctgcagt

SEQ ID NO: 117848 - DNA, 120 bp, Artificial Sequence
  ENSG00000100629_26 (sequence is synthesized)
tcatctgagagaactgatggaagatattccaaatacagggttcgcagaaattctcttcagcatcaccaagatgacaccaagtacagaaccaaaagtttcaaaggtgacagaacctttctg

SEQ ID NO: 117849 - DNA, 120 bp, Artificial Sequence
  ENSG00000100629_27 (sequence is synthesized)
gaaggttcccacactcgtgggttagatcactcatcctcttggcaggatcacagtcgcttcctgtctagtccaagattttcatacgtgaactcatttaccaaaagaactgttgctccagat

SEQ ID NO: 117850 - DNA, 120 bp, Artificial Sequence
  ENSG00000100629_28 (sequence is synthesized)
tcagcttcaaacaaggaagatgccacaatgaatggaacaagttcacaacccaaaaaagaggaatatgggagctaaaaaagcaaatgtaatttgttattttacatgagtatgttacaaata

SEQ ID NO: 117851 - DNA, 120 bp, Artificial Sequence
  ENSG00000100629_29 (sequence is synthesized)
ataacatctctattcttacagcaatttggcccagattatctaacagacatacctgcagctttggctctttggtattgccaaacattgacaaaagtgacaatactgttggtccttgtgaat

SEQ ID NO: 117852 - DNA, 120 bp, Artificial Sequence
  ENSG00000100629_30 (sequence is synthesized)
ggtaaaccaatccaaataatatcagatcatgaatgatgtgcagctaatttatttgcaacttatactagcacagaaagaatgatattttttcactttgtattttcctttttcaagtgtggt

SEQ ID NO: 117853 - DNA, 120 bp, Artificial Sequence
  ENSG00000100629_31 (sequence is synthesized)
cagtcacattttcccaaccaaaatttggatttctaattgaggccttttaaaaattactggctaaaaagaaggaaaatgagtttcccttgaggcaaaagttgccagcactttagattcagg

SEQ ID NO: 117854 - DNA, 120 bp, Artificial Sequence
  ENSG00000100629_32 (sequence is synthesized)
gagcatttatatacaactgattttttgaaaaattttctccctaataaattatcatgtgttataacatgtggagatgtgcatatataacattagacagtccactttataaatgctcaggac

SEQ ID NO: 117855 - DNA, 120 bp, Artificial Sequence
  ENSG00000100629_33 (sequence is synthesized)
ttttatatctatcatcttaacagtccacaactgcataccgtagctgaaaattatttccaatcatccatttttaatagcaataaagaattcataaatgatatctgaactgtagagcactgt

SEQ ID NO: 117856 - DNA, 120 bp, Artificial Sequence
  ENSG00000100629_34 (sequence is synthesized)
aaagaattcatagcacaatttatttatttgtctttttgtggccaaatatcctactgtgatcacttcagtcatatcctggaccgtctttggtttactgtgactaaaatcatagcaccaaac

SEQ ID NO: 117857 - DNA, 120 bp, Artificial Sequence
  ENSG00000100629_35 (sequence is synthesized)
tcctttgtccatgagatttatatataatcttgtataatttggtcctatctgcttctaccatcccaacttttttcatcaaagtgtctaagaacgtattccctttacacgctgatctcctag

SEQ ID NO: 117858 - DNA, 120 bp, Artificial Sequence
  ENSG00000100629_36 (sequence is synthesized)
tggagaaggatttatattaaatgctaagtaatagtaaactttcaggaactgaatcctattgggtcatggattctgcatagacaagggcaataaagcaatacctttgtaatatgcattaca

SEQ ID NO: 117859 - DNA, 120 bp, Artificial Sequence
  ENSG00000100629_37 (sequence is synthesized)
agttcaagttgccatagctgcgagtctggggagagcacagtcggttgagtcgctgcgtttggtcagttgcaccttctgggtcactggtagccgcgggagccgggtggggcctaggcgatg

SEQ ID NO: 117860 - DNA, 120 bp, Artificial Sequence
  ENSG00000100629_38 (sequence is synthesized)
gcacatcaatagaaaatgtcttttaaatttggttcaagatttggattgtaaagataatgaaatattgacatactctttacaaagccctctacatgtttaataaagacttacttgaaattg

SEQ ID NO: 117861 - DNA, 120 bp, Artificial Sequence
  ENSG00000100629_39 (sequence is synthesized)
agcagcctctgcagtgtttgtgtaagggcacttgtgaaagaaaatattttccttgatatattaaatagactttcaattctgtggaaatggagaataaaaatccagagtttgtgcctacca

SEQ ID NO: 117862 - DNA, 120 bp, Artificial Sequence
  ENSG00000100629_40 (sequence is synthesized)
tttcatacgtgaactagggtgttttaaatagcatttccaggaaaggaaggctggaaggctgctgtcaaccacactacactgcttaaatctcgtggagccatgatggtgcatcaggttttg

SEQ ID NO: 117863 - DNA, 120 bp, Artificial Sequence
  ENSG00000100629_41 (sequence is synthesized)
ctatgcctatcttctctgcaacccaagagagggaacaaagagcagccaggtgggattagatgctgggggcttaagcaataactgactccattttctgtttctacactccagccagtgcca

SEQ ID NO: 117864 - DNA, 120 bp, Artificial Sequence
  ENSG00000100629_42 (sequence is synthesized)
agtgattttttaaaaatttaaatacttttctgccctatcaaatacagggtatacactactgaaagaacgctctgctagtaaaaagtgtttattgattcaagcagaaaaaaggggggaaaa

SEQ ID NO: 117865 - DNA, 120 bp, Artificial Sequence
  ENSG00000100629_43 (sequence is synthesized)
aactgtgggtgtcagatgaagctgaagggaagtatccaggaagagagggaggaatggggagcttttcttttgagtgtcctattaaaatgtgtgagtggaagttgggggtggatttcatga

SEQ ID NO: 117866 - DNA, 120 bp, Artificial Sequence
  ENSG00000100629_44 (sequence is synthesized)
gtaaatatggaattttgccaccaaattctttcctccagagctaatattctcatgggatgttaatattaatacaaggaaaaaggccctgggtgaagaaaaattattttccccttcaggggc

SEQ ID NO: 117867 - DNA, 120 bp, Artificial Sequence
  ENSG00000100629_45 (sequence is synthesized)
agagttctctcaggacgacagtgaggttaaagagttccagaaaatgctagtagaactttaagcacgctatcattaacagacagaaaaacagactacaacctactggattcattttggaaa

SEQ ID NO: 117868 - DNA, 120 bp, Artificial Sequence
  ENSG00000100629_46 (sequence is synthesized)
gtagaaaaaaggaatctggtaaaatcagccaaagcaaggacctttccccctccttagaactcgctaagctttccatggtgtgtgggccttttagttccactcattattcaggcctaattc

SEQ ID NO: 117869 - DNA, 120 bp, Artificial Sequence
  ENSG00000100629_47 (sequence is synthesized)
aggtcatcaaaatagaaatgcatgggacaggtgactgacatgactgcatcgtggtttagatgtatagataacacggggaggtgctttacattttaagactttgttcataattcttttatt

SEQ ID NO: 117870 - DNA, 120 bp, Artificial Sequence
  ENSG00000100629_48 (sequence is synthesized)
tatggtttctctgaatcattcttttggaacattctaaaagagccagaggaaaaaaatggaactttttctcaagggacttgacttagtggatagctaaatgtccagtttcaaaagcttatc

SEQ ID NO: 117871 - DNA, 120 bp, Artificial Sequence
  ENSG00000100629_49 (sequence is synthesized)
cttttgaaatgcttttatacttataaaagcccaaagaaaccttaatatgggccacataactataatgtaatttttccaaggtaggaaaggcagtaatactgtactattagaatatatgga

SEQ ID NO: 117872 - DNA, 120 bp, Artificial Sequence
  ENSG00000100629_50 (sequence is synthesized)
ttttcataagagcagctgttgtttcactaaggtttacattattttaggtcctagttttctgtttggaggtgtattaatgagttccttggttaatttattcccattctctatatttctgat

SEQ ID NO: 117873 - DNA, 120 bp, Artificial Sequence
  ENSG00000100629_51 (sequence is synthesized)
tcttaattgtatgatgtggtttatattcattgttttgacgtgataggaatgccaacaatgtgcctttggttttcttatgcttaaaaaataaaaaaataaataaacattaaatgtaaaatc

SEQ ID NO: 117874 - DNA, 120 bp, Artificial Sequence
  ENSG00000100629_52 (sequence is synthesized)
ccgagctgtgattcagtcctgaggctcacccaagtggaggtcttaaagccatttccaaagatgcttgattaactactaaaggttacttcccacctcctccttctaacagactatgccagg

SEQ ID NO: 117875 - DNA, 120 bp, Artificial Sequence
  ENSG00000100629_53 (sequence is synthesized)
actctgcccattcatcaggatcatcatcaagacatccaattaaatcagggcctatagtatagttcttctgtttggcttgaaggacagaagtagtatttgattataaaagttgcaaatgtc

SEQ ID NO: 117876 - DNA, 120 bp, Artificial Sequence
  ENSG00000100629_54 (sequence is synthesized)
acacttcaaatgttctgaaaaacattaaaaatatttttgaagtagatattgaatacatttaatttttggagaaatatgacccacacataacttcatgcagattggatgatagtacatgta

SEQ ID NO: 117877 - DNA, 120 bp, Artificial Sequence
  ENSG00000100629_55 (sequence is synthesized)
gttgtcaaggattttatagtacatgctttgaaatatattgaagggtctttgttgttatattgtttttttttttttctcaaactctgtagaccacattagagctttacctgacaaaaactt

SEQ ID NO: 117878 - DNA, 120 bp, Artificial Sequence
  ENSG00000100629_56 (sequence is synthesized)
agatttaattgtctgctgccaaagaatcaaaacaaatacataaattcgctatgtgatacactttaggttaggtatcctgtcctagcgtaatagattttcacatgttttatgaaataccct

SEQ ID NO: 117879 - DNA, 120 bp, Artificial Sequence
  ENSG00000100629_57 (sequence is synthesized)
gtgatgcttgttaagaccaggtgaattttagtcttggcatgcaggtagatatgaatggctagcttaaagcttatgacagtttgtcttaattaatcttacttacacttttgtatagcactg

SEQ ID NO: 117880 - DNA, 120 bp, Artificial Sequence
  ENSG00000100629_58 (sequence is synthesized)
aaatcctttctacctccttattcagagaaggaaggatcttctcatgcacagaggcaacaaatggcaactttctgagtcctcatctataaaatgagcataataacatcacctacttaattg

SEQ ID NO: 117881 - DNA, 120 bp, Artificial Sequence
  ENSG00000100629_59 (sequence is synthesized)
gatttggtgaggattcactgggtgagttcatgcaaagcgctgagaacaggaccccccgcccccgtaagtaaacacaatataattgttagctttacatgttttacttctctcatatgcttt

SEQ ID NO: 117882 - DNA, 120 bp, Artificial Sequence
  ENSG00000100629_60 (sequence is synthesized)
ggagactaccattttgttttacccacactttttatcaggtttctcttttcgatctcagaataactttattcttcaggacatactacctccctctccattattctcaagggcagatcctcc

SEQ ID NO: 117883 - DNA, 120 bp, Artificial Sequence
  ENSG00000100629_61 (sequence is synthesized)
ttgccactgtctttatgtctttttcttgtgattcagtgccttccctcagactattctcatcagcatcatgtcatcacctagaaagcacctagttgaacattctcttttacccagaaggaa

SEQ ID NO: 117884 - DNA, 120 bp, Artificial Sequence
  ENSG00000100629_62 (sequence is synthesized)
agtcatattcgaaatattttaattttatctcatggaattgcttaatgaaattttaatataaagatgtgttattttatgaactccagtgtgagcattgataatataaagttatattaatga

SEQ ID NO: 117885 - DNA, 120 bp, Artificial Sequence
  ENSG00000100629_63 (sequence is synthesized)
ctgatttacttatatgtagaaattcctatgggttcatttctctttcattcaggaccccaaagccaggaacctggatgattttcctttattattttacagagaaatcctttactattttta

SEQ ID NO: 117886 - DNA, 120 bp, Artificial Sequence
  ENSG00000100629_64 (sequence is synthesized)
aatttgaaaatatttttgttctaatagcaattgaaccctttctacagacagaagggaccttttttgtttgagagaacagtgaattattatttattttgcgggtgaaactggcagaatgca

SEQ ID NO: 117887 - DNA, 120 bp, Artificial Sequence
  ENSG00000100629_65 (sequence is synthesized)
tagtgaaaaggtgttaccaataattcttctttggaaccataaaggttttcagacctctagttgttctgcatgaggtggaattgcaatgcctccattaatttagagttgtgtagcaatcat

SEQ ID NO: 117888 - DNA, 120 bp, Artificial Sequence
  ENSG00000100629_66 (sequence is synthesized)
ggatgatatggtaaccgtgaatggagtataactaggcagctaccatttcctgcttttatctagcatagatgaggtaattatcagtatatattaaaaatcaaaggaaaagacctcataaaa

SEQ ID NO: 117889 - DNA, 120 bp, Artificial Sequence
  ENSG00000100629_67 (sequence is synthesized)
ggaaatggtttaattgaaattacaattatgcaaattagattaaacatggatgacacatttggaaatagatatgtatcaatcctccctgtatctgtttttgtaagtgaagttgtgttctaa

SEQ ID NO: 117890 - DNA, 120 bp, Artificial Sequence
  ENSG00000100629_68 (sequence is synthesized)
tttcaagtatttccaaaattaaaatgaaaggtagaaaattagtgttaaaagcacctaattttatataacccaaaggaaatatttaatgttactcatctgtgtttctctttcatcttgtca

SEQ ID NO: 117891 - DNA, 120 bp, Artificial Sequence
  ENSG00000100629_69 (sequence is synthesized)
aatctacagtttgaactgcttcttacagtggtgcatctgatttttagtatgtggattctgagagtattaatcaattttttataatgtttggtttccttatgttttctatttcagagtacc

SEQ ID NO: 117892 - DNA, 120 bp, Artificial Sequence
  ENSG00000100629_70 (sequence is synthesized)
caggagcagcttctggatgaaatacatcgtgagaagagaggtgtgtgttagttgttctttcatttttctttgtttatatttatggaatcctaatcctaggattggaaaaaaacctacttc

SEQ ID NO: 117893 - DNA, 120 bp, Artificial Sequence
  ENSG00000100629_71 (sequence is synthesized)
tgttgcatcccctttggactatttccaagcccatctccttttcttgtctttgtcttcttatctttcttcatttctgggacgagaagagaaaattcttcagccacagcattcctcctgtgt

SEQ ID NO: 117894 - DNA, 120 bp, Artificial Sequence
  ENSG00000100629_72 (sequence is synthesized)
atatgataactgcatttactggctgtgtgcaggaattaattgataagacatactgcttctgtcttagtaaaatgctgatgtttacatttacttcagtaaaatacgtcttagttcattcaa

SEQ ID NO: 117895 - DNA, 120 bp, Artificial Sequence
  ENSG00000100629_73 (sequence is synthesized)
agcgctgagaacaggaccccccgcccccgttagcattgtcagctgcttcttgaacacaggtgaagatggtcacctctctatggcggcctcagctcttacccgtacatcaagactattcta

SEQ ID NO: 117896 - DNA, 120 bp, Artificial Sequence
  ENSG00000100629_74 (sequence is synthesized)
gcaaccaattgggagcttgagtgcccattttaaattctcaaaggataaagagcctgattggcccaaattgtctcaggtgtctctctactccttgtctaatcagccatggtgagacaggta

SEQ ID NO: 117897 - DNA, 120 bp, Artificial Sequence
  ENSG00000100632_0 (sequence is synthesized)
gttgtagttaagctcgtgtaacggcggcggtgtcggcagctgctgtagcgaagagagtttggcgcgatgtctcacaccattttgctggtacagcctaccaagaggccagaaggcagaact

SEQ ID NO: 117898 - DNA, 120 bp, Artificial Sequence
  ENSG00000100632_1 (sequence is synthesized)
tatgctgactacgaatctgtgaatgaatgcatggaaggtgtttgtaaaatgtatgaagaacatctgaaaagaatgaatcccaacagtccctctatcacatatgacatcagtcagttgttt

SEQ ID NO: 117899 - DNA, 120 bp, Artificial Sequence
  ENSG00000100632_2 (sequence is synthesized)
gatttcatcgatgatctggcagacctcagctgcctggtttaccgagctgatacccagacataccagccttataacaaagactggattaaagagaagatctacgtgctccttcgtcggcag

SEQ ID NO: 117900 - DNA, 120 bp, Artificial Sequence
  ENSG00000100632_3 (sequence is synthesized)
tacagcgtgctgtagtggaagttttgtatcatagtaatcctgtttccactttgttatactctagccaagattgactgtattagatgaaatgtgaggatcttgttcaatcggaaacccccg

SEQ ID NO: 117901 - DNA, 120 bp, Artificial Sequence
  ENSG00000100632_4 (sequence is synthesized)
tttctttctctttctttttttttttttacttaaacatttttatgatgatttagatggaagttgttcttcgtcacttaatgttggttccagtccttcaactgttcatatctactttataac

SEQ ID NO: 117902 - DNA, 120 bp, Artificial Sequence
  ENSG00000100632_5 (sequence is synthesized)
ctactttataacattcacatactaacccttcttcaagatggggtggggggtggaaatgcagtttagccatgtcctcaagataaagtcttggtaaaaataaataaatgtcctttagttata

SEQ ID NO: 117903 - DNA, 120 bp, Artificial Sequence
  ENSG00000100632_6 (sequence is synthesized)
atggtattgggagctaattatgtgcctgatactgatctttgcatttgcatagtgtatagtaattaatatttctcttacagaaataagagattggcaacataaagccaaaggcacagaaaa

SEQ ID NO: 117904 - DNA, 120 bp, Artificial Sequence
  ENSG00000100632_7 (sequence is synthesized)
aaataactttgctaattgatatagttagtatccagaaaggatcctaattcagaagttccatgtgcctcttctttgttccttatacctaattttttttttcctttacagtctttgtcttaa

SEQ ID NO: 117905 - DNA, 120 bp, Artificial Sequence
  ENSG00000100632_8 (sequence is synthesized)
aggccagaaggcagaacttatgctgactacgaatctgtgaatgaatgcatggaagttaccgagctgatacccagacataccagccttataacaaagactggattaaagagaagatctacg

SEQ ID NO: 117906 - DNA, 120 bp, Artificial Sequence
  ENSG00000100644_0 (sequence is synthesized)
agtgcacagtgctgcctcgtctgaggggacaggaggatcaccctcttcgtcgcttcggccagtgtgtcgggctgggccctgacaagccacctgaggagaggctcggagccgggcccggac

SEQ ID NO: 117907 - DNA, 120 bp, Artificial Sequence
  ENSG00000100644_1 (sequence is synthesized)
cccggcgattgccgcccgcttctctctagtctcacgaggggtttcccgcctcgcacccccacctctggacttgcctttccttctcttctccgcgtgtggagggagccagcgcttaggccg

SEQ ID NO: 117908 - DNA, 120 bp, Artificial Sequence
  ENSG00000100644_2 (sequence is synthesized)
gagcgagcctgggggccgcccgccgtgaagacatcgcggggaccgattcaccatggagggcgccggcggcgcgaacgacaagaaaaagataagttctgaacgtcgaaaagaaaagtctcg

SEQ ID NO: 117909 - DNA, 120 bp, Artificial Sequence
  ENSG00000100644_3 (sequence is synthesized)
agatgcagccagatctcggcgaagtaaagaatctgaagttttttatgagcttgctcatcagttgccacttccacataatgtgagttcgcatcttgataaggcctctgtgatgaggcttac

SEQ ID NO: 117910 - DNA, 120 bp, Artificial Sequence
  ENSG00000100644_4 (sequence is synthesized)
catcagctatttgcgtgtgaggaaacttctggatgctggtgatttggatattgaagatgacatgaaagcacagatgaattgcttttatttgaaagccttggatggttttgttatggttct

SEQ ID NO: 117911 - DNA, 120 bp, Artificial Sequence
  ENSG00000100644_5 (sequence is synthesized)
cacagatgatggtgacatgatttacatttctgataatgtgaacaaatacatgggattaactcagtttgaactaactggacacagtgtgtttgattttactcatccatgtgaccatgagga

SEQ ID NO: 117912 - DNA, 120 bp, Artificial Sequence
  ENSG00000100644_6 (sequence is synthesized)
aatgagagaaatgcttacacacagaaatggccttgtgaaaaagggtaaagaacaaaacacacagcgaagcttttttctcagaatgaagtgtaccctaactagccgaggaagaactatgaa

SEQ ID NO: 117913 - DNA, 120 bp, Artificial Sequence
  ENSG00000100644_7 (sequence is synthesized)
cataaagtctgcaacatggaaggtattgcactgcacaggccacattcacgtatatgataccaacagtaaccaacctcagtgtgggtataagaaaccacctatgacctgcttggtgctgat

SEQ ID NO: 117914 - DNA, 120 bp, Artificial Sequence
  ENSG00000100644_8 (sequence is synthesized)
ttgtgaacccattcctcacccatcaaatattgaaattcctttagatagcaagactttcctcagtcgacacagcctggatatgaaattttcttattgtgatgaaagaattaccgaattgat

SEQ ID NO: 117915 - DNA, 120 bp, Artificial Sequence
  ENSG00000100644_9 (sequence is synthesized)
gggatatgagccagaagaacttttaggccgctcaatttatgaatattatcatgctttggactctgatcatctgaccaaaactcatcatgatatgtttactaaaggacaagtcaccacagg

SEQ ID NO: 117916 - DNA, 120 bp, Artificial Sequence
  ENSG00000100644_10 (sequence is synthesized)
acagtacaggatgcttgccaaaagaggtggatatgtctgggttgaaactcaagcaactgtcatatataacaccaagaattctcaaccacagtgcattgtatgtgtgaattacgttgtgag

SEQ ID NO: 117917 - DNA, 120 bp, Artificial Sequence
  ENSG00000100644_11 (sequence is synthesized)
tggtattattcagcacgacttgattttctcccttcaacaaacagaatgtgtccttaaaccggttgaatcttcagatatgaaaatgactcagctattcaccaaagttgaatcagaagatac

SEQ ID NO: 117918 - DNA, 120 bp, Artificial Sequence
  ENSG00000100644_12 (sequence is synthesized)
aagtagcctctttgacaaacttaagaaggaacctgatgctttaactttgctggccccagccgctggagacacaatcatatctttagattttggcagcaacgacacagaaactgatgacca

SEQ ID NO: 117919 - DNA, 120 bp, Artificial Sequence
  ENSG00000100644_13 (sequence is synthesized)
gcaacttgaggaagtaccattatataatgatgtaatgctcccctcacccaacgaaaaattacagaatataaatttggcaatgtctccattacccaccgctgaaacgccaaagccacttcg

SEQ ID NO: 117920 - DNA, 120 bp, Artificial Sequence
  ENSG00000100644_14 (sequence is synthesized)
aagtagtgctgaccctgcactcaatcaagaagttgcattaaaattagaaccaaatccagagtcactggaactttcttttaccatgccccagattcaggatcagacacctagtccttccga

SEQ ID NO: 117921 - DNA, 120 bp, Artificial Sequence
  ENSG00000100644_15 (sequence is synthesized)
tggaagcactagacaaagttcacctgagcctaatagtcccagtgaatattgtttttatgtggatagtgatatggtcaatgaattcaagttggaattggtagaaaaactttttgctgaaga

SEQ ID NO: 117922 - DNA, 120 bp, Artificial Sequence
  ENSG00000100644_16 (sequence is synthesized)
cagttgtcaccattagaaagcagttccgcaagccctgaaagcgcaagtcctcaaagcacagttacagtattccagcagactcaaatacaagaacctactgctaatgccaccactaccact

SEQ ID NO: 117923 - DNA, 120 bp, Artificial Sequence
  ENSG00000100644_17 (sequence is synthesized)
gccaccactgatgaattaaaaacagtgacaaaagaccgtatggaagacattaaaatattgattgcatctccatctcctacccacatacataaagaaactactagtgccacatcatcacca

SEQ ID NO: 117924 - DNA, 120 bp, Artificial Sequence
  ENSG00000100644_18 (sequence is synthesized)
tatagagatactcaaagtcggacagcctcaccaaacagagcaggaaaaggagtcatagaacagacagaaaaatctcatccaagaagccctaacgtgttatctgtcgctttgagtcaaaga

SEQ ID NO: 117925 - DNA, 120 bp, Artificial Sequence
  ENSG00000100644_19 (sequence is synthesized)
actacagttcctgaggaagaactaaatccaaagatactagctttgcagaatgctcagagaaagcgaaaaatggaacatgatggttcactttttcaagcagtaggaattggaacattatta

SEQ ID NO: 117926 - DNA, 120 bp, Artificial Sequence
  ENSG00000100644_20 (sequence is synthesized)
cagcagccagacgatcatgcagctactacatcactttcttggaaacgtgtaaaaggatgcaaatctagtgaacagaatggaatggagcaaaagacaattattttaataccctctgattta

SEQ ID NO: 117927 - DNA, 120 bp, Artificial Sequence
  ENSG00000100644_21 (sequence is synthesized)
gcatgtagactgctggggcaatcaatggatgaaagtggattaccacagctgaccagttatgattgtgaagttaatgctcctatacaaggcagcagaaacctactgcagggtgaagaatta

SEQ ID NO: 117928 - DNA, 120 bp, Artificial Sequence
  ENSG00000100644_22 (sequence is synthesized)
ctcagagctttggatcaagttaactgagctttttcttaatttcattcctttttttggacactggtggctcattacctaaagcagtctatttatattttctacatctaattttagaagcct

SEQ ID NO: 117929 - DNA, 120 bp, Artificial Sequence
  ENSG00000100644_23 (sequence is synthesized)
ggctacaatactgcacaaacttggttagttcaattttgatcccctttctacttaatttacattaatgctcttttttagtatgttctttaatgctggatcacagacagctcattttctcag

SEQ ID NO: 117930 - DNA, 120 bp, Artificial Sequence
  ENSG00000100644_24 (sequence is synthesized)
ttttttggtatttaaaccattgcattgcagtagcatcattttaaaaaatgcacctttttatttatttatttttggctagggagtttatccctttttcgaattatttttaagaagatgcca

SEQ ID NO: 117931 - DNA, 120 bp, Artificial Sequence
  ENSG00000100644_25 (sequence is synthesized)
atataatttttgtaagaaggcagtaacctttcatcatgatcataggcagttgaaaaatttttacaccttttttttcacattttacataaataataatgctttgccagcagtacgtggtag

SEQ ID NO: 117932 - DNA, 120 bp, Artificial Sequence
  ENSG00000100644_26 (sequence is synthesized)
ccacaattgcacaatatattttcttaaaaaataccagcagttactcatggaatatattctgcgtttataaaactagtttttaagaagaaattttttttggcctatgaaattgttaaacct

SEQ ID NO: 117933 - DNA, 120 bp, Artificial Sequence
  ENSG00000100644_27 (sequence is synthesized)
ggaacatgacattgttaatcatataataatgattcttaaatgctgtatggtttattatttaaatgggtaaagccatttacataatatagaaagatatgcatatatctagaaggtatgtgg

SEQ ID NO: 117934 - DNA, 120 bp, Artificial Sequence
  ENSG00000100644_28 (sequence is synthesized)
catttatttggataaaattctcaattcagagaaatcatctgatgtttctatagtcactttgccagctcaaaagaaaacaataccctatgtagttgtggaagtttatgctaatattgtgta

SEQ ID NO: 117935 - DNA, 120 bp, Artificial Sequence
  ENSG00000100644_29 (sequence is synthesized)
actgatattaaacctaaatgttctgcctaccctgttggtataaagatattttgagcagactgtaaacaagaaaaaaaaaatcatgcattcttagcaaaattgcctagtatgttaatttgc

SEQ ID NO: 117936 - DNA, 120 bp, Artificial Sequence
  ENSG00000100644_30 (sequence is synthesized)
tcaaaatacaatgtttgattttatgcactttgtcgctattaacatcctttttttcatgtagatttcaataattgagtaattttagaagcattattttaggaatatatagttgtcacagta

SEQ ID NO: 117937 - DNA, 120 bp, Artificial Sequence
  ENSG00000100644_31 (sequence is synthesized)
aatatcttgttttttctatgtacattgtacaaatttttcattccttttgctctttgtggttggatctaacactaactgtattgttttgttacatcaaataaacatcttctgtggaccagg

SEQ ID NO: 117938 - DNA, 120 bp, Artificial Sequence
  ENSG00000100644_32 (sequence is synthesized)
atttgaaaacttggcaaccttggattggatggattcatatttcttagtatagaagttcttgatataactgaaaaattaagttaaacacttaataagtggtggttactcagcacttttaga

SEQ ID NO: 117939 - DNA, 120 bp, Artificial Sequence
  ENSG00000100644_33 (sequence is synthesized)
tgctgtttataatagatgaccttttctaactaatttacagttttttgaaagataactgagaggttgagggacggagattttcttcaagcaattttttttttcattttaaatgagctccca

SEQ ID NO: 117940 - DNA, 120 bp, Artificial Sequence
  ENSG00000100644_34 (sequence is synthesized)
atgtcggagtttggaaaacaaatttgtctttttaaaagaaggtctaggaaactcaaaacctgaagaattggaagaaatcagaatagaaaatggtaggataagttctgaacgtcgaaaaga

SEQ ID NO: 117941 - DNA, 120 bp, Artificial Sequence
  ENSG00000100644_35 (sequence is synthesized)
ttatatttctgtgtatttgactaagcttactggcttcaatgattaactgttatcccaaatatggattatctttcagccaactcagggaatcacagctactgagtagtgtgtgtcagatct

SEQ ID NO: 117942 - DNA, 120 bp, Artificial Sequence
  ENSG00000100644_36 (sequence is synthesized)
cttgggtgtgctggagtgagtaaaaggggaatgaattactgtgttcatgctgagacttaattgaacgggtattcagttgatctaggtgatgggcactttgttacttttattgtaacaaat

SEQ ID NO: 117943 - DNA, 120 bp, Artificial Sequence
  ENSG00000100647_0 (sequence is synthesized)
agtgacgcgggcgctgcagccgtcgctaccgccgcgttctattctccgaagccggcgaccgccccacctcctccctccctcccgcccgcttcctctgcccacagcgccggccagagcgag

SEQ ID NO: 117944 - DNA, 120 bp, Artificial Sequence
  ENSG00000100647_1 (sequence is synthesized)
ctagacaagggcacgcggggcctcgcctagacccgagaagactgcgggcgcgcgcaagcggcggcgtggaagctgtgagcgcccccatcccggaggtctccgccggctcccgggtgaatc

SEQ ID NO: 117945 - DNA, 120 bp, Artificial Sequence
  ENSG00000100647_2 (sequence is synthesized)
agctcccggccgactttaggattcttctggattttaaattttttctttttaaaaaaacttggacggataaaagatgtgccatggcaggatagcaccaaagagcacctcagtgtttgccgt

SEQ ID NO: 117946 - DNA, 120 bp, Artificial Sequence
  ENSG00000100647_3 (sequence is synthesized)
ggcctccgtgggacatggagtgttccttccgctagtgatcctttgcaccctgcttggagacggacttgcttccgtgtgccccctaccaccggagccagagaatggtggctacatctgcca

SEQ ID NO: 117947 - DNA, 120 bp, Artificial Sequence
  ENSG00000100647_4 (sequence is synthesized)
cccccggccctgcagagaccccctgacagcaggcagtgtcatcgaatacctgtgtgctgaaggctacatgttgaagggcgattacaaatacctgacgtgtaagaatggcgagtggaaacc

SEQ ID NO: 117948 - DNA, 120 bp, Artificial Sequence
  ENSG00000100647_5 (sequence is synthesized)
agccatggagattagctgccgtctcaacgaggataaagacacccacacatcacttggggtccccacgctgtctatagtggcttctactgccagctccgtggcgctcattctcctcctcgt

SEQ ID NO: 117949 - DNA, 120 bp, Artificial Sequence
  ENSG00000100647_6 (sequence is synthesized)
ggtgctgtttgtgctgctgcagccaaagctgaagtctttccatcatagcaggcgtgaccagggggtatctggggaccaggtctccatcatggtggatggagtccaggttgcactaccatc

SEQ ID NO: 117950 - DNA, 120 bp, Artificial Sequence
  ENSG00000100647_7 (sequence is synthesized)
atacgaggaggctgtatatggcagttctggtcactgtgtgccacctgctgaccccagagtacagattgtgctgtcagaagggtctgggcccagtgggaggagcgtgccaagggagcaaca

SEQ ID NO: 117951 - DNA, 120 bp, Artificial Sequence
  ENSG00000100647_8 (sequence is synthesized)
gctgccggaccaaggggcctgctcctctgcaggtggagaagatgaggccccaggccagtctggactatgtgaagcctggggctctcgggcctcagagactgtgatggtgcatcaggcaac

SEQ ID NO: 117952 - DNA, 120 bp, Artificial Sequence
  ENSG00000100647_9 (sequence is synthesized)
cacctcttcctgggtggccggctcagggaaccgccaactggcacacaaagaaactgcagattcagagaacagtgacatacaaagccttttatccctcacgtcagaggagtacacagatga

SEQ ID NO: 117953 - DNA, 120 bp, Artificial Sequence
  ENSG00000100647_10 (sequence is synthesized)
tattccactgttgaaagaagcatgagggcagcggccagcctttcctctctgcgaggttctctcagcccttcctccctctccctgtgggattgagcaccctgtactctccagccaccttac

SEQ ID NO: 117954 - DNA, 120 bp, Artificial Sequence
  ENSG00000100647_11 (sequence is synthesized)
ctggatacctgagctgccacctgtgtatctgtgtatctctgagggccctataggcccaccttgctggaaactcaaggaagattctcgccatctgcctgttggacagctggaggagctggc

SEQ ID NO: 117955 - DNA, 120 bp, Artificial Sequence
  ENSG00000100647_12 (sequence is synthesized)
tctttgcctggccccgccttcccatctgtcagagacatatttgaatgtgctggatcaaaccctcccttttcctaagcctctgggtcccctccagccagctctttggcggcagcccccacc

SEQ ID NO: 117956 - DNA, 120 bp, Artificial Sequence
  ENSG00000100647_13 (sequence is synthesized)
agctcctgtgggcctgagtgctgctgtgtttacttgtgcctttcccccaccctgtccagtttccctgtcatgcagacttgttgctgtccacaagccttagtggctgcactgctgccccct

SEQ ID NO: 117957 - DNA, 120 bp, Artificial Sequence
  ENSG00000100647_14 (sequence is synthesized)
gccacacagggggccgggcctgggtctgtcctgtttcctttgagggttgcccctactgccctttgcaggaacagatccaggtgtgagagctcttgagtcaagagtggcagaagtggctct

SEQ ID NO: 117958 - DNA, 120 bp, Artificial Sequence
  ENSG00000100647_15 (sequence is synthesized)
aattggggtgagagtgtagtccctgggcttgccctgggttgaccctggtggcatatttccttggctgaggatggaagatttggagaatcatgtccatgctggcccaggacccagccatct

SEQ ID NO: 117959 - DNA, 120 bp, Artificial Sequence
  ENSG00000100647_16 (sequence is synthesized)
ggcccaaaggcacaagctcctggccctgttgagttgagagtttccaagaagcatccagaagatcccaagggagagaaggaaaatggctgataatgattgtcttcctaatatgcaagttct

SEQ ID NO: 117960 - DNA, 120 bp, Artificial Sequence
  ENSG00000100647_17 (sequence is synthesized)
cacttcctacttccagcatcggccttcctggccttgtcttttttttgtttccctggagtataatgggaagttgcatgctgcctcctgggttttatcccagatagctctggctttcttgct

SEQ ID NO: 117961 - DNA, 120 bp, Artificial Sequence
  ENSG00000100647_18 (sequence is synthesized)
gcccacaggggcctggggcaggaaggagacttgctgagatgccatggagtgcccatctggtcactggcagtctgggcaggttgcccctttctgggtttgtggtgacggaggggaggccga

SEQ ID NO: 117962 - DNA, 120 bp, Artificial Sequence
  ENSG00000100647_19 (sequence is synthesized)
gaggcacagaccaagtccccgggtggctgcaggcagctccagcccggtcctgaggatcctcctcaccatggtcacgtgccttagtaactgtgcccaggaagtggcctgctgcttgctgtg

SEQ ID NO: 117963 - DNA, 120 bp, Artificial Sequence
  ENSG00000100647_20 (sequence is synthesized)
ctgctgcttttcctacttctgcccttccctgccacccctcgcatgtcacagctgacaagcaattccttgtcttccctggccccctgggggaagggctgagaaacagtccgtgtgcacccc

SEQ ID NO: 117964 - DNA, 120 bp, Artificial Sequence
  ENSG00000100647_21 (sequence is synthesized)
aaccttaatggcctgaggtgggcagaggggtgtggagcagcctggagtacagggccctgggggaggagcccactgatgaggggcgctctcccatagccatgtgttgaatgctaactaggc

SEQ ID NO: 117965 - DNA, 120 bp, Artificial Sequence
  ENSG00000100647_22 (sequence is synthesized)
cttcgaagcggaccctgtgctgcatgtctgctcctcccctgagcctgtctgcttgggggtggtaaaaataaaaatcccagtttattttcagtaccttacctaacagggttggctccaggc

SEQ ID NO: 117966 - DNA, 120 bp, Artificial Sequence
  ENSG00000100647_23 (sequence is synthesized)
gtgggtggcctagaagatgaggggagtggtcttctcccagccttttaccctcttgcctcctgcctccgcgcttacacacgcactttaccacccggtcattccctggcctcttgctgccac

SEQ ID NO: 117967 - DNA, 120 bp, Artificial Sequence
  ENSG00000100647_24 (sequence is synthesized)
ttgtagtcttccttccttcctctcagggtaagggcagtgcctgctgtgcctgttggccactcccacacttcccctcccccaggagccctcatctgctgtgctgagtccaggaaagcatag

SEQ ID NO: 117968 - DNA, 120 bp, Artificial Sequence
  ENSG00000100647_25 (sequence is synthesized)
ttaggtagggagctggttggagaaggtgctagaactagaaggcagatgagactagcatgggcccacctggagggctgtccctaatggccccagtcgccttacctcacccacagcagtgcc

SEQ ID NO: 117969 - DNA, 120 bp, Artificial Sequence
  ENSG00000100647_26 (sequence is synthesized)
cttgtcttcctccaaaacagaaagcagtgacaaaagggggaggggtggtaatctgaagtctcactgctgagccttcagcttttatttttcactgtttcaaaacccgcattctattctaga

SEQ ID NO: 117970 - DNA, 120 bp, Artificial Sequence
  ENSG00000100647_27 (sequence is synthesized)
atggtttttaaaatggaagatcttacctttttctatcttgttactctggggttttgtccccctaagagattgcactttttgtttggggtttattcagctgcatagatgaccagcttgatc

SEQ ID NO: 117971 - DNA, 120 bp, Artificial Sequence
  ENSG00000100647_28 (sequence is synthesized)
cctggtgaaatgaaaagccttccttctcctgaagcctctttccgccctgccctccactaacaacactgaggagcacaagcccaggcttgcccacctggtaggaaaggaagaaattagaac

SEQ ID NO: 117972 - DNA, 120 bp, Artificial Sequence
  ENSG00000100647_29 (sequence is synthesized)
aatgggagccttggctcccctctcgtctcctcccctccttcttgtcactggctttgatgaggcccacttcccagaggctcctgggcctgtgagtgcaggagctcattctcccctcactgc

SEQ ID NO: 117973 - DNA, 120 bp, Artificial Sequence
  ENSG00000100647_30 (sequence is synthesized)
tgaagtctgtgacagcttcttcctccagttatgtctttcttccaaagcaatttcttaaccatcagccatgtgctgctatttctagggcttctgggctttgtcccttactgagagattagg

SEQ ID NO: 117974 - DNA, 120 bp, Artificial Sequence
  ENSG00000100647_31 (sequence is synthesized)
gactccacagctgccttgaggtagggcctggctgagagacaagggtagcagcaggtggcaggctgttaaaagacaggctgcctgaggagcctggagcaggtggaaacaggtggaagaaac

SEQ ID NO: 117975 - DNA, 120 bp, Artificial Sequence
  ENSG00000100647_32 (sequence is synthesized)
cggccacagccctgctttaccgggctcacctctagggcattccagcaagaggctgatgcaggagaatggccagcaccaaaggacatttaaaagagtttttgggtttttttgtttgtttgt

SEQ ID NO: 117976 - DNA, 120 bp, Artificial Sequence
  ENSG00000100647_33 (sequence is synthesized)
ggtgtttgtttttttttttttttttttggcacacttgagctgactcagtgcaggtttaatatcctggtgacttgcagtcacattctaatgactttcaagggccagaatatggtgaaaatc

SEQ ID NO: 117977 - DNA, 120 bp, Artificial Sequence
  ENSG00000100647_34 (sequence is synthesized)
aatcacttaaaatatccgtcccttccatgccttagtttagcaggtaggctctatcttttgccatttctgtattttatgtgctgtgttcccgtttcactgggtatgaactgtgaaatcgac

SEQ ID NO: 117978 - DNA, 120 bp, Artificial Sequence
  ENSG00000100647_35 (sequence is synthesized)
tgaatcctggccactttatgagtttgtttggttttataaggcatttcaatgtacattctataaatacaagcactccatttgcaaacagatcttaagctaatattttctttcccattcatc

SEQ ID NO: 117979 - DNA, 120 bp, Artificial Sequence
  ENSG00000100647_36 (sequence is synthesized)
ttgccctccccctcctcccgccagctttaaagttcagtggagaagccagatggcaattcagacaaaggtatactcttcctgcttcatgggtggtggcacgggaatagatagcccttagcc

SEQ ID NO: 117980 - DNA, 120 bp, Artificial Sequence
  ENSG00000100647_37 (sequence is synthesized)
ctttccctcccagtcccagctgagccctcagaccacttgcttcccacataacaatgtcgcctccatttccgaggaacatccttgcgtagagaatgaaatatgctgcaatcatttctgcat

SEQ ID NO: 117981 - DNA, 120 bp, Artificial Sequence
  ENSG00000100647_38 (sequence is synthesized)
ccttactcctcacccccaaagaaaaaaaaaaggcctagcagggaagcagcatgcaggcttcacagcttaatgccaaggacagcgagtgaggctgggagcttctcttgggcctgctgggtc

SEQ ID NO: 117982 - DNA, 120 bp, Artificial Sequence
  ENSG00000100647_39 (sequence is synthesized)
tgtcagctctcggaatagggacagtccttactggtgccccaaggtgggacttggagaatattttgcttggcatatgtttggtctgaatggtgtagttgctggttccctagagaggaaaag

SEQ ID NO: 117983 - DNA, 120 bp, Artificial Sequence
  ENSG00000100647_40 (sequence is synthesized)
gtggcaggcccagctttgctgggaaatggctcttaatttccagttgaaaccctagtagaattgtgaatgaaaacctcaaggttgagcccctctgccaagcagcagagctagtagaagggg

SEQ ID NO: 117984 - DNA, 120 bp, Artificial Sequence
  ENSG00000100647_41 (sequence is synthesized)
atgcaggggcaaagcactcagttgccaagcaaggaggagagatgtacgtgggctgtgtggcagtccccacaccctgccctggcttcttcaggttatcgcaccactatggaatcctttgca

SEQ ID NO: 117985 - DNA, 120 bp, Artificial Sequence
  ENSG00000100647_42 (sequence is synthesized)
gaatggtactcatataatggtttaaaacaacacattcataattgactctgtgcaggatgtcactcaatcagtttgggtttgctttattttattttatatatatattttttggtatcctgt

SEQ ID NO: 117986 - DNA, 120 bp, Artificial Sequence
  ENSG00000100647_43 (sequence is synthesized)
acattgcagtgggtgtgaagatagtattttaatatttgtacaaagtttaatttaattttaattgttctatgtatataactgcatttctaaataattaaaaaaaagttcttatgaaggcaa

SEQ ID NO: 117987 - DNA, 120 bp, Artificial Sequence
  ENSG00000100647_44 (sequence is synthesized)
ctcccggttttttttggcctggaaaccagcagggtgcctccatttgctctctcatcctctggttcttacttgagtgtggaagtcgctccactggtggaccttgcagtggcactgagctgg

SEQ ID NO: 117988 - DNA, 120 bp, Artificial Sequence
  ENSG00000100647_45 (sequence is synthesized)
gtcacttcagccgtgaaaggccaactgtactactgtcaaggcttgggacagttaagcgtccgtgaaggtactggatacagcgacagcaggaagtgcagcagtgagaactgaaactaattt

SEQ ID NO: 117989 - DNA, 120 bp, Artificial Sequence
  ENSG00000100647_46 (sequence is synthesized)
ctctttgctgtggtgcagcccagccccagttgatgctctgcagcctcccttccttgggtcttcatgtctttgtggaagatacttgaggttgctggtgcatgtcctattgcatttcattga

SEQ ID NO: 117990 - DNA, 120 bp, Artificial Sequence
  ENSG00000100650_0 (sequence is synthesized)
gacgtaggacgcgccctccattttgtggagcgccagagctgctaagtgcgtcagttgtggagtggcgtagacgagttaagtcctggtctgcgtggaggtcgacgactccgtcgcagacta

SEQ ID NO: 117991 - DNA, 120 bp, Artificial Sequence
  ENSG00000100650_1 (sequence is synthesized)
cggacctgtctgggtctcagccgccaaagaccccgtccggtaggtgagtggctcactttgagggcaagccttctcggatcgaggcttcttcatggccgctcagatcgtgagcggccgggg

SEQ ID NO: 117992 - DNA, 120 bp, Artificial Sequence
  ENSG00000100650_2 (sequence is synthesized)
ctgctctctttgcggaggatggcgtctaatgagcgcagttgattcgaggaagtactagccggacatcatgagtggctgtcgggtattcatcgggagactaaatccagcggccagggagaa

SEQ ID NO: 117993 - DNA, 120 bp, Artificial Sequence
  ENSG00000100650_3 (sequence is synthesized)
ggacgtggaaagattcttcaagggatatggacggataagagatattgatctgaaaagaggctttggttttgtggaatttgaggatccaagggatgcagatgatgctgtgtatgagcttga

SEQ ID NO: 117994 - DNA, 120 bp, Artificial Sequence
  ENSG00000100650_4 (sequence is synthesized)
tggaaaagaactctgtagtgaaagggttactattgaacatgctagggctcggtcacgaggtggaagaggtagaggacgatactctgaccgttttagtagtcgcagacctcgaaatgatag

SEQ ID NO: 117995 - DNA, 120 bp, Artificial Sequence
  ENSG00000100650_5 (sequence is synthesized)
acgaaatgctccacctgtaagaacagaaaatcgtcttatagttgagaatttatcctcaagagtcagctggcaggatctcaaagatttcatgagacaagctggggaagtaacgtttgcgga

SEQ ID NO: 117996 - DNA, 120 bp, Artificial Sequence
  ENSG00000100650_6 (sequence is synthesized)
ttctggaaaggaaataaatgggagaaaaataaaattaattgaaggcagcaaaaggcacagtaggtcaagaagcaggtctcgatcccggaccagaagttcctctaggtctcgtagccgatc

SEQ ID NO: 117997 - DNA, 120 bp, Artificial Sequence
  ENSG00000100650_7 (sequence is synthesized)
ccgttcccgtagtcgcaaatcttacagccggtcaagaagcaggagcaggagccggagccggagcaagtcccgttctgttagtaggtctcccgtgcctgagaagagccagaaacgtggttc

SEQ ID NO: 117998 - DNA, 120 bp, Artificial Sequence
  ENSG00000100650_8 (sequence is synthesized)
ttcaagtagatctaagtctccagcatctgtggatcgccagaggtcccggtcccgatcaaggtccagatcagttgacagtggcaattaaactgtaaataacttgccctgggggcctttttt

SEQ ID NO: 117999 - DNA, 120 bp, Artificial Sequence
  ENSG00000100650_9 (sequence is synthesized)
taaaaaacaaaaaccacaaaaattcccaaaccatacttgctaaaaattctggtaagtatgtgcttttctgtgggggtgggatttggaaggggggttgggttgggctggatatctttgtag

SEQ ID NO: 118000 - DNA, 120 bp, Artificial Sequence
  ENSG00000100650_10 (sequence is synthesized)
atgtggaccaccaaggggttgttgaaaactaattgtattaaatgtcttttgataagccttctgctcacatttttgtgaatgtctgaagtatatagtttgtgtatattgacagagctcttt

SEQ ID NO: 118001 - DNA, 120 bp, Artificial Sequence
  ENSG00000100650_11 (sequence is synthesized)
actaaagcaaatttaatttttttgtactagaaaaaaatttgaacattttagttcttggttataaaaatgttaattcagaattagtttaatgccttaattaaactaattaatagctttgga

SEQ ID NO: 118002 - DNA, 120 bp, Artificial Sequence
  ENSG00000100650_12 (sequence is synthesized)
tggacacttaaaagagctctaaatttgcttgtacataaaggcttaatttgttttccttgttagggtcaagggtgtcctccactctttaacagctgctggacagacacattagagcagctg

SEQ ID NO: 118003 - DNA, 120 bp, Artificial Sequence
  ENSG00000100650_13 (sequence is synthesized)
gccggaggaagcgccacgggcggctcagacctgaggccgcaagggcgcgccgggcgggcagggcggagggtccgatttcctccctctgaacggaaaaaaagccactttccctgggaagaa

SEQ ID NO: 118004 - DNA, 120 bp, Artificial Sequence
  ENSG00000100650_14 (sequence is synthesized)
ctcgaagaagttggatgtctgatcttcaccttggatttgtggtctcggcccgcgggcgactcaccccacccaccaggatcccacgaagccgggccggctcagcccgctggcgccatctag

SEQ ID NO: 118005 - DNA, 120 bp, Artificial Sequence
  ENSG00000100650_15 (sequence is synthesized)
tgtcgaatgaggaggcggccctctgcggctggaggggacgcttgggcgtgtgaaatctgaacggagaggattaaccaaataccatttggacttaaaagcagcttgaggccgggcgcggtg

SEQ ID NO: 118006 - DNA, 120 bp, Artificial Sequence
  ENSG00000100650_16 (sequence is synthesized)
agcaagactgtctcaaaaaaaacaacaaaaaacagcttgaaacctcttccagccactctcccagagtgacggacatgcagaaatctgtattccagcctcaattcaagacagccttctagc

SEQ ID NO: 118007 - DNA, 120 bp, Artificial Sequence
  ENSG00000100650_17 (sequence is synthesized)
tgcagtcccattttcaacatttcatcagtgaaaatcctttcatttaaaaaatacttcagtgccttagtcttctcaccacaacaaaaccacacagctgtggcatggttgaaaaaagaactc

SEQ ID NO: 118008 - DNA, 120 bp, Artificial Sequence
  ENSG00000100650_18 (sequence is synthesized)
gaacatctaggagctccctgctttgagggcaaatttaaattgcaagcagcaagagctaaggaaaggccaggtatttctgcaaagctaagtttctcctaattagtaatcttctgggtgtct

SEQ ID NO: 118009 - DNA, 120 bp, Artificial Sequence
  ENSG00000100650_19 (sequence is synthesized)
aagaaaaactttagatacaagaagggttgccacttttctcaggagactcttctgggagagatgatgatgaaccgaacgccaaggacttagcaggggcgaacgacgtcaacagatgtccct

SEQ ID NO: 118010 - DNA, 120 bp, Artificial Sequence
  ENSG00000100650_20 (sequence is synthesized)
ccagactccggcaccagccggccgagcccaaacgagttctcgcccccgaccccacccaccgcgggagcagggttcggtcactcgcagtgtcagagaggcccacatcctcctaaatttccg

SEQ ID NO: 118011 - DNA, 120 bp, Artificial Sequence
  ENSG00000100650_21 (sequence is synthesized)
ctcaatagtagcaatagcaaaagtgaacatagaaacgacttacctagactgctgtgtgcaatgtgtgagactacaggatgtatatactttaaaagtggctgttttccattttagggtggt

SEQ ID NO: 118012 - DNA, 120 bp, Artificial Sequence
  ENSG00000100650_22 (sequence is synthesized)
aattcccaaaccatacttgctaaaaattctgggtcaagggtgtcctccactctttaacagctgctggacagacacattagagcagctgtttgttattgataataaaatattataaaacta

SEQ ID NO: 118013 - DNA, 120 bp, Artificial Sequence
  ENSG00000100650_23 (sequence is synthesized)
atgtgaagggtggatggctgcattgaacaattattgtaggggtagcatttaagattcaggagtcattagcagtgatgattttgggtcctgccgtataatctgttcttctattcccacgtt

SEQ ID NO: 118014 - DNA, 120 bp, Artificial Sequence
  ENSG00000100650_24 (sequence is synthesized)
agccagttgttcttgatgaatctatatgagtcatagaacacaaatctattgacggaagtcattagaatggcttgtgatatctgatggcttgaacttgcccacagttgaacacaagtgctg

SEQ ID NO: 118015 - DNA, 120 bp, Artificial Sequence
  ENSG00000100650_25 (sequence is synthesized)
gaaatacagttttgagttattttgatgtggctttttaaaaaagttaatgggtagctaatgttgtattgttttattaaaagtagttttaaattaatggatttaatggaattgtaattttaa

SEQ ID NO: 118016 - DNA, 120 bp, Artificial Sequence
  ENSG00000100650_26 (sequence is synthesized)
acatttaattaaatgtaatttgggggatattttgaactttaatattagtgatcaaatgtaaatgttttgaggatatttttcttgttttttaaaatcaatttttaaccaaatattaaaccc

SEQ ID NO: 118017 - DNA, 120 bp, Artificial Sequence
  ENSG00000100650_27 (sequence is synthesized)
tttatttgccagcctgtctgtgtcgttggccttatgacgaggagtgcctgtgggttatcctaatcgttgtcttggtcactcttggttgggcctggttgactttgccagtcagctcctaca

SEQ ID NO: 118018 - DNA, 120 bp, Artificial Sequence
  ENSG00000100650_28 (sequence is synthesized)
gtgatcagttggccacctctagatctgtgtttgccggtctagacgttatcggtgcacttccttgaagtgccaggttgcagcgatcccagagcgttgataacgtgatctgatccctaagtt

SEQ ID NO: 118019 - DNA, 120 bp, Artificial Sequence
  ENSG00000100650_29 (sequence is synthesized)
gagacctgtcttcctgtaacgcttccgaataagaggtccggtcgaaaagagttgaaagatacgaaattaggtggtcgttggaatcctgatcgcagtaaagtggtccttggtaactgctcg

SEQ ID NO: 118020 - DNA, 120 bp, Artificial Sequence
  ENSG00000100650_30 (sequence is synthesized)
gctgtgcgattaaaggcttccatcgattgggtagtgtccttcaagtgggtggcgaagagccagtcgggcatatgtcatgaaggtttctccgaccgattaatggtttgctgcttgactagc

SEQ ID NO: 118021 - DNA, 120 bp, Artificial Sequence
  ENSG00000100650_31 (sequence is synthesized)
ctagggaaataataataaaggtaaagtaaacttttttaatgacatatggggcacaaaataactggtgtcttgtaaatgttctgtttttttaaataaaacttctctactttagtctttact

SEQ ID NO: 118022 - DNA, 120 bp, Artificial Sequence
  ENSG00000100650_32 (sequence is synthesized)
ttttttgtttgtttttttttcttttgtactgagctcagcatagactaatactaccttaatgttaaaatctgaatttcttttagcattttgcttaaaagcaatatgctatttgcttattcc

SEQ ID NO: 118023 - DNA, 120 bp, Artificial Sequence
  ENSG00000100650_33 (sequence is synthesized)
tgcttaaaagcaatatgctatttgcttattccgtgccctgacatagataatttttgaattctgatagaatacaagtgtggtaaatgccatgtttgtactttatctaacatcttctctttc

SEQ ID NO: 118024 - DNA, 120 bp, Artificial Sequence
  ENSG00000100650_34 (sequence is synthesized)
agtagtcttgttttttttatatcatgtgattgtttgtgtgtcccctttcctcttctttgcttaacacaattatcttgtgttaaggatctcaaagatttcatgagacaagctggggaagta

SEQ ID NO: 118025 - DNA, 120 bp, Artificial Sequence
  ENSG00000100650_35 (sequence is synthesized)
tgaaaagaggctttggttttgtggtaagtatttagaactgggtgaattatctgctaagtaggtagagttttgataagcagttgttttcgatcttgagtccgggtggaatatttgccttca

SEQ ID NO: 118026 - DNA, 120 bp, Artificial Sequence
  ENSG00000100650_36 (sequence is synthesized)
gaaaatgttacccagccttatgtctgaattttattgaggctgaaaacaactttaacttgccggctcactggaaccccactcccagtggctccttgattaggtttgactgtatggcagtgt

SEQ ID NO: 118027 - DNA, 120 bp, Artificial Sequence
  ENSG00000100650_37 (sequence is synthesized)
cgttaagatactcttcccattctgtctcctgatttcagtgctcttaatgtgttgtagaatactcttctaaagccaatgttaagagtcttatgcttacattttaggaatttgaggatccaa

SEQ ID NO: 118028 - DNA, 120 bp, Artificial Sequence
  ENSG00000100650_38 (sequence is synthesized)
gcgtagacgagttaagtcctggtctgcgtggaggtcgacgactccgtcgcagactacggacctgtctgggtctcagccgccaaagaccccgtccggaagtactagccggacatcatgagt

SEQ ID NO: 118029 - DNA, 120 bp, Artificial Sequence
  ENSG00000100650_39 (sequence is synthesized)
taactagataaccctgggacatagagcagactgggtctgctggcatatttttctaagtagatttatgtagcttaagtgtgtaacggagatttttcttccctttttgtagggttactattg

SEQ ID NO: 118030 - DNA, 120 bp, Artificial Sequence
  ENSG00000100650_40 (sequence is synthesized)
attgggctggctttgcggagggcgcgggcggctccgcccgcacttctcggcctttcctaactgcggcagatgggagggggccggagagcccggagagtgtgcggctgcgcagttggaaag

SEQ ID NO: 118031 - DNA, 120 bp, Artificial Sequence
  ENSG00000100650_41 (sequence is synthesized)
gtggcagtgggcgttgcggttgctgcggtctgggcccagtagcggaccgtgttgggagggagctgggttttcattttgtctgcaggtaacctggcctcattagaggctctgttggcaatc

SEQ ID NO: 118032 - DNA, 120 bp, Artificial Sequence
  ENSG00000100652_0 (sequence is synthesized)
gattaaagaaggcatccagcaagaactgcacaagaaacggagtcagccggagaacaaggagtggtcttccactgcctcacaggaggatggaggcccacaacgcgtctgccccattcaact

SEQ ID NO: 118033 - DNA, 120 bp, Artificial Sequence
  ENSG00000100652_1 (sequence is synthesized)
tcaccctgccacccaactttggcaagcgccccacagacctggcactgagcgtcatcctggtgttcatgttgttcttcatcatgctctcgctgggctgcaccatggagttcagcaagatca

SEQ ID NO: 118034 - DNA, 120 bp, Artificial Sequence
  ENSG00000100652_2 (sequence is synthesized)
aggctcacttatggaagcctaaagggctggccatcgccctggtggcacagtatggcatcatgcccctcacggcctttgtgctgggcaaggtcttccggctgaagaacattgaggcactgg

SEQ ID NO: 118035 - DNA, 120 bp, Artificial Sequence
  ENSG00000100652_3 (sequence is synthesized)
ccatcttggtctgtggctgctcacctggagggaacctgtccaatgtcttcagtctggccatgaagggggacatgaacctcagcattgtgatgaccacctgctccaccttctgtgcccttg

SEQ ID NO: 118036 - DNA, 120 bp, Artificial Sequence
  ENSG00000100652_4 (sequence is synthesized)
gcatgatgcctctcctcctgtacatctactccagggggatctatgatggggacctgaaggacaaggtgccctataaaggcatcgtgatatcactggtcctggttctcattccttgcacca

SEQ ID NO: 118037 - DNA, 120 bp, Artificial Sequence
  ENSG00000100652_5 (sequence is synthesized)
tagggatcgtcctcaaatccaaacggccacaatacatgcgctatgtcatcaagggagggatgatcatcattctcttgtgcagtgtggccgtcacagttctctctgccatcaatgtgggga

SEQ ID NO: 118038 - DNA, 120 bp, Artificial Sequence
  ENSG00000100652_6 (sequence is synthesized)
agagcatcatgtttgccatgacaccactcttgattgccacctcctccctgatgccttttattggctttctgctgggttatgttctctctgctctcttctgcctcaatggacggtgcagac

SEQ ID NO: 118039 - DNA, 120 bp, Artificial Sequence
  ENSG00000100652_7 (sequence is synthesized)
gcactgtcagcatggagactggatgccaaaatgtccaactctgttccaccatcctcaatgtggcctttccacctgaagtcattggaccacttttcttctttcccctcctctacatgattt

SEQ ID NO: 118040 - DNA, 120 bp, Artificial Sequence
  ENSG00000100652_8 (sequence is synthesized)
gatctacacagctgccacaactgaagaaacaattccaggagctctgggaaatggcacctacaaaggggaggactgctccccttgcacagcctagcccttcccctggtggcctggattctg

SEQ ID NO: 118041 - DNA, 120 bp, Artificial Sequence
  ENSG00000100652_9 (sequence is synthesized)
gtcccaaagcaattctgaaagccagtgtggtaaactagagagagcagcaaaaacaccagtcttgcctgagtctttctccagcatttccagtacatctatcagaatcatcaagtcttggcc

SEQ ID NO: 118042 - DNA, 120 bp, Artificial Sequence
  ENSG00000100652_10 (sequence is synthesized)
gggaacacagacagggtgtctacccaagaagcctcacctatccccaacttagaatttgctacttattttaaagacttgttcagtgactgtaaactctatgaaaccagaaaccgaatctgc

SEQ ID NO: 118043 - DNA, 120 bp, Artificial Sequence
  ENSG00000100652_11 (sequence is synthesized)
ctcttgctgggatctctaaaagtgtctgataagcatcttaaagtcactcaattcctgaactaatcaatatatatgtttaacccattactcaaatacccaaatcccattccaagttttgtg

SEQ ID NO: 118044 - DNA, 120 bp, Artificial Sequence
  ENSG00000100652_12 (sequence is synthesized)
acccaaaagagaaataaatgctcacaagtgctgtagaattaaacttcagaagttctaacctaaaaagttcagatcctattccttcccttttgacattattgggatgatgctcccgaaaag

SEQ ID NO: 118045 - DNA, 120 bp, Artificial Sequence
  ENSG00000100652_13 (sequence is synthesized)
tcaaatttgacatcaagtatgcaaaagtgaacacagtaagatgcaatcaggcaaaacaaactcaaaaaatagctaatgaaatgaaaaaactgggcgaatgcatcatgttagtagaggagg

SEQ ID NO: 118046 - DNA, 120 bp, Artificial Sequence
  ENSG00000100652_14 (sequence is synthesized)
aaaacttttgacaaggaaaaaccaggaaacaaacacatacattaacacaatgttacctcactaataatctcttttttaagttcagtaggtatttggttttaacacaaggcgcccccaaaa

SEQ ID NO: 118047 - DNA, 120 bp, Artificial Sequence
  ENSG00000100652_15 (sequence is synthesized)
ctgggtacagcaaactactgccaaaatgagtcgtttcccaattcaaagaaaaatgttcaaatacctagaattcacaaatttcaaattgtctctaataaaatttaaacattttgcatatca

SEQ ID NO: 118048 - DNA, 120 bp, Artificial Sequence
  ENSG00000100664_0 (sequence is synthesized)
agtcagagcgagaacattccagaggtcgcccagctccggcgctgacgggtgtggaccgcggacgtcgctgggacagcccctccccgctgctcggcggcggcacctggcccggccgctcct

SEQ ID NO: 118049 - DNA, 120 bp, Artificial Sequence
  ENSG00000100664_1 (sequence is synthesized)
cgctgcgcttcgcctccgcctcctcggactcggactcgggtttatatcgcgcctcacttcatcccagtcccgggcgagcagcgttgggtttatgtctttatttgacgaaaacgagctgtt

SEQ ID NO: 118050 - DNA, 120 bp, Artificial Sequence
  ENSG00000100664_2 (sequence is synthesized)
gcgcagccattggtacctgtattggggaaacatagcatacaagcaagaagcttacagcctcagtggcgaaaattttttcatgtcagagaccgagaactcttgcagtcgtttatgtcatcc

SEQ ID NO: 118051 - DNA, 120 bp, Artificial Sequence
  ENSG00000100664_3 (sequence is synthesized)
cttcttctccagacagaagataccaaaaagttgcaatcaaagatctcttcatcttattgataaagccactaataagccaaaatgtctgtcaatgtcaaccgcagcgtgtcagaccagttc

SEQ ID NO: 118052 - DNA, 120 bp, Artificial Sequence
  ENSG00000100664_4 (sequence is synthesized)
tatcgctacaagatgccccgtctgattgccaaggttgagggcaaaggcaatggaatcaagacagttatagtcaacatggttgacgttgcaaaggcgcttaatcggcctccaacgtatccc

SEQ ID NO: 118053 - DNA, 120 bp, Artificial Sequence
  ENSG00000100664_5 (sequence is synthesized)
accaaatattttggttgtgagctgggagcacagacccagtttgatgttaagaatgaccgttacattgtcaatggatctcatgaggcgaataagctgcaagacatgttggatggattcatt

SEQ ID NO: 118054 - DNA, 120 bp, Artificial Sequence
  ENSG00000100664_6 (sequence is synthesized)
aaaaaatttgttctctgtcctgaatgtgagaatcctgaaacagatttgcatgtcaatccaaagaagcaaacaataggtaattcttgtaaagcctgtggctatcgaggcatgcttgacaca

SEQ ID NO: 118055 - DNA, 120 bp, Artificial Sequence
  ENSG00000100664_7 (sequence is synthesized)
catcataaactctgcacattcattctcaaaaacccacctgagaatagtgacagtggtacaggaaagaaagaaaaagaaaagaaaaacagaaagggcaaagacaaggaaaatggctccgta

SEQ ID NO: 118056 - DNA, 120 bp, Artificial Sequence
  ENSG00000100664_8 (sequence is synthesized)
tccagcagtgagacaccaccaccaccaccaccaccaaatgaaattaatcctcctccacatacaatggaagaagaggaggatgatgactggggagaagatacaactgaggaagctcaaagg

SEQ ID NO: 118057 - DNA, 120 bp, Artificial Sequence
  ENSG00000100664_9 (sequence is synthesized)
cgtcgaatggatgaaatcagtgaccatgcaaaagttctgacactcagtgatgatttggaaagaacaattgaggagagggtcaatatcctctttgattttgttaagaaaaagaaagaagag

SEQ ID NO: 118058 - DNA, 120 bp, Artificial Sequence
  ENSG00000100664_10 (sequence is synthesized)
ggtgttattgattcatctgacaaagaaatcgttgctgaagcagaaagactggatgtaaaagccatgggccctcttgttctaactgaagttctttttaatgagaagattagagaacagatt

SEQ ID NO: 118059 - DNA, 120 bp, Artificial Sequence
  ENSG00000100664_11 (sequence is synthesized)
aagaaatacaggcgccatttcctacgattttgtcacaacaacaaaaaagcccaacggtaccttcttcatggtttggagtgtgtggtagcaatgcatcaagctcagcttatctccaagatt

SEQ ID NO: 118060 - DNA, 120 bp, Artificial Sequence
  ENSG00000100664_12 (sequence is synthesized)
ccacatatcttgaaggagatgtacgatgcagaccttttagaagaagaggtcatcatcagctggtcggaaaaggcctctaagaaatatgtctccaaagaacttgccaaagagattcgtgtc

SEQ ID NO: 118061 - DNA, 120 bp, Artificial Sequence
  ENSG00000100664_13 (sequence is synthesized)
aaagcagaaccatttataaaatggttgaaggaggcagaggaagaatcttctggtggcgaagaagaagatgaagatgagaacattgaggtggtgtattcgaaggctgccagtgtaccgaaa

SEQ ID NO: 118062 - DNA, 120 bp, Artificial Sequence
  ENSG00000100664_14 (sequence is synthesized)
gttgagactgtaaagtcagacaacaaggatgacgacatcgatattgatgccatttaaagggatggatgcaacctagcttaacagtataatgctgcaaattttcctccattatcagccaga

SEQ ID NO: 118063 - DNA, 120 bp, Artificial Sequence
  ENSG00000100664_15 (sequence is synthesized)
agtgcaacatgtatgtgcaaaagctaaaatggcttaacatcatgctacactttacactaaaaatctattactgtgagtggtctgttattaagcccaatgagacatctagggagtccatac

SEQ ID NO: 118064 - DNA, 120 bp, Artificial Sequence
  ENSG00000100664_16 (sequence is synthesized)
acatcagtgagcagatgtagtttgcttatttatagcatgtttctttttgaaaaactagtggtggacacatttggatcacatttatacagttataaaaataaaggtttgattttggtcgtt

SEQ ID NO: 118065 - DNA, 120 bp, Artificial Sequence
  ENSG00000100664_17 (sequence is synthesized)
cttcagatgtttggctctgaatgacttaagctgaagtaactggctccttactttaaatgttctgccatcatttcacctgatgagcattcttggagcctgccagatattgttaggtcctgg

SEQ ID NO: 118066 - DNA, 120 bp, Artificial Sequence
  ENSG00000100664_18 (sequence is synthesized)
ggctgcaaagaggtcctcaacaggatgtaaagcaaacttaattgtaattaatttattcagcccattaagaaagtactaaagttttatctctgtagttcctcaaattggcatctggtaatg

SEQ ID NO: 118067 - DNA, 120 bp, Artificial Sequence
  ENSG00000100664_19 (sequence is synthesized)
tacattgtgaggtagactgataatgaaatgacagtgtaacatcttaaccaagaagtaaatatgacctcagtgtcctataaataatgtaagagcaggatttgaaacttggagagctgtttt

SEQ ID NO: 118068 - DNA, 120 bp, Artificial Sequence
  ENSG00000100664_20 (sequence is synthesized)
ctcatttcatgtacacttgccccaaattgtctttgaagtcgtgtgcattgcacgttggatgagccagggaaattattacattaacaagcattttgtgtgtacgtagtagttactttgtac

SEQ ID NO: 118069 - DNA, 120 bp, Artificial Sequence
  ENSG00000100664_21 (sequence is synthesized)
tgagagaacttgctttggggtgcaattaataaactgattttatttgggagaaacaaggaagggtgcacttaactagcaacctaagcatgatttttcagcttttgcccttagggtttaaat

SEQ ID NO: 118070 - DNA, 120 bp, Artificial Sequence
  ENSG00000100664_22 (sequence is synthesized)
tacaattccaaaatgttagacatactgtattttttcgttcagtgtggctttaattttcccctcttgcagtttgttctgtaatgccttttacatttggacacatagtttatgctttttaga

SEQ ID NO: 118071 - DNA, 120 bp, Artificial Sequence
  ENSG00000100664_23 (sequence is synthesized)
ttttttcttccagaatgtcttatttaaaaagaaagctaaaagcatacttctaagtcagagcctctattttggtgtaagacttgggatattttttacttcacattgaatatagccaggcac

SEQ ID NO: 118072 - DNA, 120 bp, Artificial Sequence
  ENSG00000100664_24 (sequence is synthesized)
ccaagaagtctgatggccacctgagtgcaggtgacaaggacctgacagagcccatgcagggctttagatttggacacacaagagttgataacttcctcatgaactccttgcctgatctaa

SEQ ID NO: 118073 - DNA, 120 bp, Artificial Sequence
  ENSG00000100664_25 (sequence is synthesized)
actcatattatgggttctgactgtttgagtaatcatcttcaaggttaaacctcttggcagttacccttttcacaaagtgcacagtgggaatcgagaatcgatagggttaattttggagca

SEQ ID NO: 118074 - DNA, 120 bp, Artificial Sequence
  ENSG00000100664_26 (sequence is synthesized)
gtggcttataccattcacctctgtttttttgtgattatttcacagataatgagaccttaataacaaataggcgtaaaaaaattttcacattgaaatgatagaaacatttgatgtaataaa

SEQ ID NO: 118075 - DNA, 120 bp, Artificial Sequence
  ENSG00000100664_27 (sequence is synthesized)
acttggttggcttgatattttaaggaattgaaacctagcaatcttattggagagacaagaattggtctccagctgcctttgatcaagattcgggtgcaagtggagcaggagccatatacc

SEQ ID NO: 118076 - DNA, 120 bp, Artificial Sequence
  ENSG00000100664_28 (sequence is synthesized)
tggagggaatgtgctttgtcacaccaaagaggatttttttttcttcaaacttgtatgttgcctaggtttcaaattctttgccgcaaggctgatctgctttcattaactggaattctgtag

SEQ ID NO: 118077 - DNA, 120 bp, Artificial Sequence
  ENSG00000100664_29 (sequence is synthesized)
gagatactggtgacctaagctaagttgcactcagcatactcagtgtcaagctaatgaggttctattataaaggttctacttttaatctgagggaaaacatgttcagggcttctagaacac

SEQ ID NO: 118078 - DNA, 120 bp, Artificial Sequence
  ENSG00000100664_30 (sequence is synthesized)
taaaaaatttggcttaaaccagtgttcagtctggtgccaaacttcgaatggaatacaaattcacataatctgaactttgttcacaggttatcctaatagagtaattcttcactttgctct

SEQ ID NO: 118079 - DNA, 120 bp, Artificial Sequence
  ENSG00000100664_31 (sequence is synthesized)
attgaactgtcttaaggatttgtttaaacagctaagttacttgattaaaataatgataaaattgtattttgtctttgctttaatattaaagttaacaagttttcattttataatgagatc

SEQ ID NO: 118080 - DNA, 120 bp, Artificial Sequence
  ENSG00000100664_32 (sequence is synthesized)
aaagcattggaatctgccctgttttgtagccgttgctttggatttgtgttggatgtatcctgcagttacacttgccagccccactcacaaaagttgttcatttcattgggtcactggctt

SEQ ID NO: 118081 - DNA, 120 bp, Artificial Sequence
  ENSG00000100664_33 (sequence is synthesized)
tatttgctagtcttgtctgtgaactgagcatctgcctcagttttattacttgaaatcttggcaggtgcttaatagggaacatacatacagctatgtaactgtgaataattgtatatatct

SEQ ID NO: 118082 - DNA, 120 bp, Artificial Sequence
  ENSG00000100664_34 (sequence is synthesized)
ctagttaagaatgagggaatggggaggtttgctttctaaacaagtgcattctgaaattgacttaaaaatttttagtgtgggtcctaaagtttagagatgggcaaggaggtctctaatcca

SEQ ID NO: 118083 - DNA, 120 bp, Artificial Sequence
  ENSG00000100664_35 (sequence is synthesized)
ccgcttcccgcttgagaagggaggggtatcaaaattgagccccaagctgtttgttccagtgtaccaagcactgactttatgcctttggcctggagatggcagaagtgaaagctggccatc

SEQ ID NO: 118084 - DNA, 120 bp, Artificial Sequence
  ENSG00000100664_36 (sequence is synthesized)
tgcaaaaagcagataagtgagtttgaaccttttgcattttgttagctcagtcagtcctcatcgtggtcctgaggcataggtactgttgtaccaaggtcacttatctaacaaaataaccct

SEQ ID NO: 118085 - DNA, 120 bp, Artificial Sequence
  ENSG00000100664_37 (sequence is synthesized)
tcatgtattttaaatttatttgacaagtctgcagacaatccttatctaaccagctattttcttaattgctacagcttgacctaccagtattccggagtaaccagcaaatgcaaagttgac

SEQ ID NO: 118086 - DNA, 120 bp, Artificial Sequence
  ENSG00000100664_38 (sequence is synthesized)
cttgttcctgcatcatctttttgatggttcaaatttcagcctccctgactactacaaagccagagcagtcttagtaccagaaacagtgttgcactttcgttgcatgtgctgtgtgacccc

SEQ ID NO: 118087 - DNA, 120 bp, Artificial Sequence
  ENSG00000100664_39 (sequence is synthesized)
aaggggacagggagtcactttggtcatctctgtccccagtacagatcttgattcatagtgacattccataagtggggtgacagcaaatgacttgcaggtagtctcattgtaggtttgtgc

SEQ ID NO: 118088 - DNA, 120 bp, Artificial Sequence
  ENSG00000100664_40 (sequence is synthesized)
accagagtgaccctgtgagcctttgttaataggttgggagctcagggtgtttatgtccacctgtctggtctagccaaacagtttttttctgggaatcaaatttctgtggtttttatggcc

SEQ ID NO: 118089 - DNA, 120 bp, Artificial Sequence
  ENSG00000100664_41 (sequence is synthesized)
agaaattttaaggacttgtgtgtgctgggatatgagaatagaagctacagagttcttttcttgggacctagactgggaggtgcaatgtcaggacctccaggtgaatggtaggatctgagt

SEQ ID NO: 118090 - DNA, 120 bp, Artificial Sequence
  ENSG00000100664_42 (sequence is synthesized)
tgaccctgcagttcggttatgcagtcaattatttctttttaagaggaggaggattcacttgggtgttgggatcaaatttggattctgtcccaggccttactgtaaaactaggggattgcc

SEQ ID NO: 118091 - DNA, 120 bp, Artificial Sequence
  ENSG00000100664_43 (sequence is synthesized)
tttccatatctgctgggggtggagacccttatgtgcagcactcaatcccactggaagcctaatgctgcagtcagaagcaatgcctggctggggcagtaggggaaattccacccaattttg

SEQ ID NO: 118092 - DNA, 120 bp, Artificial Sequence
  ENSG00000100664_44 (sequence is synthesized)
ctatgagcctaaaacctctttaaaaacggtcagttaactaaaaaataaaaatcaagtctttaggagagtagaaaacacaattaactaaaaagcagggacatctgaaagagacgtattaag

SEQ ID NO: 118093 - DNA, 120 bp, Artificial Sequence
  ENSG00000100664_45 (sequence is synthesized)
ttaacatttttaaaaatccaaatgaaagtaaatggaataaatgtatcaggtaaaggacaagttgtaagcttggatttttaggtctagcaatacactgtttacaagagcatcacctaaaat

SEQ ID NO: 118094 - DNA, 120 bp, Artificial Sequence
  ENSG00000100664_46 (sequence is synthesized)
gtgacaaaagatgttgaaaggatgaaaaaaggtatagtagacatacactaaccaaaaatgtagctctttgaatctcagaaaaaagtagattttaataaagtgtgaaagttgtcaatcaaa

SEQ ID NO: 118095 - DNA, 80 bp, Artificial Sequence
  ENSG00000100664_47 (sequence is synthesized)
gggggcggcccgatcccggcacccctcggccgtgtgtcgcttcccggctgtgcaccctccggggccgccggctctcgggg

SEQ ID NO: 118096 - DNA, 120 bp, Artificial Sequence
  ENSG00000100664_48 (sequence is synthesized)
cccctccttcgcggagctgcccggttcgccagcccccgcggaaacgcctcggagcgcggtagccatggggaccagggcgaaggttaaccgagtatttgaatagcgaggaaaagggaggcc

SEQ ID NO: 118097 - DNA, 120 bp, Artificial Sequence
  ENSG00000100664_49 (sequence is synthesized)
agccatggttgccgaagcaacgattagttgtagagaacagttccctaggttgcccttaaaaatgaagacgaacgggggtgtgcctgagaagtttgcttatccaggcggggtgggcggcgg

SEQ ID NO: 118098 - DNA, 120 bp, Artificial Sequence
  ENSG00000100664_50 (sequence is synthesized)
agagggctcgggttcgttcttcagcacttccaggatggccgcagaggcaaacctgctgattgccctcggtctgatggaatctcacggcggctgaggcagcacagcttgtgttttcttgtc

SEQ ID NO: 118099 - DNA, 120 bp, Artificial Sequence
  ENSG00000100664_51 (sequence is synthesized)
aggcatttccctaccagtcacagcttagtcgaaatggaggcctttttatgttcccgcagattgtactgtgttacatgagaatggctgtttgcatgtgatctcagatgctttttaaggtgg

SEQ ID NO: 118100 - DNA, 89 bp, Artificial Sequence
  ENSG00000100664_52 (sequence is synthesized)
gcctggccaacatagtgaaacccgtctactaaaaacacaaaaactagcttagcacggtagctgaggcatgagcgtcgcttgaaccttgg

SEQ ID NO: 118101 - DNA, 72 bp, Artificial Sequence
  ENSG00000100664_53 (sequence is synthesized)
cgactctgtctcaaaaaaacaatataaggaaccttttagtccttgtactatattttatcaaatctaagacat

SEQ ID NO: 118102 - DNA, 120 bp, Artificial Sequence
  ENSG00000100664_54 (sequence is synthesized)
cttttagtccttgtactatattttatcaaatctaagacatctttcaaaagtgtattgttaattaccattaaaggtgaaaaataggctgccaattaaactgtgccatatcaattaagacat

SEQ ID NO: 118103 - DNA, 120 bp, Artificial Sequence
  ENSG00000100664_55 (sequence is synthesized)
tctgagtatctgaaagtgccatacctaggcccttacaaagtaacagggatgtttatgcattgacctttttgaacaactatggtatgggccatgcacttgcagacactcttatttgggtaa

SEQ ID NO: 118104 - DNA, 120 bp, Artificial Sequence
  ENSG00000100664_56 (sequence is synthesized)
aaatttgttctctgtcctgaatgtgagaatcctgaaacagatttggtaagtgcttttgtggttgtcgaaagaaaaagccatatacctgcttctgtgataccgctaagtcaccttcctgag

SEQ ID NO: 118105 - DNA, 120 bp, Artificial Sequence
  ENSG00000100664_57 (sequence is synthesized)
tgtgaaaaaagttttctttgcatgtgaagctgtctgtggtttagatgtcctctgattagatattttcatgttatattatggataacatttgttatttttttggcagcatgtcaatccaaa

SEQ ID NO: 118106 - DNA, 120 bp, Artificial Sequence
  ENSG00000100664_58 (sequence is synthesized)
ctcgcgaccgccctgggcggtcactggcgagtcacggactcgttccgccagcggccaatccaccccgagtccgaaacagaagacgtccctgggatgaaagacccaggcctggggcttaag

SEQ ID NO: 118107 - DNA, 68 bp, Artificial Sequence
  ENSG00000100664_59 (sequence is synthesized)
tggtgttcgtacaaatgtgagtgagtagccagagatctagttaactgtaacgatccaaactccttttt

SEQ ID NO: 118108 - DNA, 120 bp, Artificial Sequence
  ENSG00000100664_60 (sequence is synthesized)
agtcagagcgagaacattccagaggtgagtccggtgaaggggcggccccctgcccggtgcttcccgccccctcgacccctcgggccgctggctggcggggaaggtgcactccccgaccgc

SEQ ID NO: 118109 - DNA, 120 bp, Artificial Sequence
  ENSG00000100664_61 (sequence is synthesized)
tgtgaagcctcttaggtagcattgtgtgtgctgtgtggtttttctgaggggatccataggaaaataagggcagggttttaaacgttaatgatgggcaatgaggtaatgtaagttatgggg

SEQ ID NO: 118110 - DNA, 120 bp, Artificial Sequence
  ENSG00000100665_0 (sequence is synthesized)
agagctgagacagccacccagggggtccactccaggacagactgtgccgtgagtaaccccctgagacaatggagacgagagactctagagggagggtgaccaactgttccactttgccca

SEQ ID NO: 118111 - DNA, 120 bp, Artificial Sequence
  ENSG00000100665_1 (sequence is synthesized)
agactgataattcttctgggatatattttcagtgctaaaaccaggaaagtcccaggcaagctgggacactttgtcactcttgctagaggcctgagagtgcagaggatgcatcttatcgac

SEQ ID NO: 118112 - DNA, 120 bp, Artificial Sequence
  ENSG00000100665_2 (sequence is synthesized)
tacctgctcctcctgctggttggactactggccctttctcatggccagctgcacgttgagcatgatggtgagagttgcagtaacagctcccaccagcagattctggagacaggtgagggc

SEQ ID NO: 118113 - DNA, 120 bp, Artificial Sequence
  ENSG00000100665_3 (sequence is synthesized)
tcccccagcctcaagatagcccctgccaatgctgactttgccttccgcttctactacctgatcgcttcggagaccccggggaagaacatctttttctccccgctgagcatctcggcggcc

SEQ ID NO: 118114 - DNA, 120 bp, Artificial Sequence
  ENSG00000100665_4 (sequence is synthesized)
tacgccatgctttccctgggggcctgctcacacagccgcagccagatccttgagggcctgggcttcaacctcaccgagctgtctgagtccgatgtccataggggcttccagcacctcctg

SEQ ID NO: 118115 - DNA, 120 bp, Artificial Sequence
  ENSG00000100665_5 (sequence is synthesized)
cacactctcaacctccccggccatgggctggaaacacgcgtgggcagtgctctgttcctgagccacaacctgaagttccttgcaaaattcctgaatgacaccatggccgtctatgaggct

SEQ ID NO: 118116 - DNA, 120 bp, Artificial Sequence
  ENSG00000100665_6 (sequence is synthesized)
aaactcttccacaccaacttctacgacactgtgggcacaatccagcttatcaacgaccacgtcaagaaggaaactcgagggaagattgtggatttggtcagtgagctcaagaaggacgtc

SEQ ID NO: 118117 - DNA, 120 bp, Artificial Sequence
  ENSG00000100665_7 (sequence is synthesized)
agtccgggtgcccatgatgctgcaggaccaggagcatcactggtatcttcatgacagatacttgccctgctcggtgctacggatggattacaaaggagacgcaaccgtgtttttcattct

SEQ ID NO: 118118 - DNA, 120 bp, Artificial Sequence
  ENSG00000100665_8 (sequence is synthesized)
ccctaaccaaggcaaaatgagggagattgaagaggttctgactccagagatgctaatgaggtggaacaacttgttgcggaagaggaatttttacaagaagctagagttgcatcttcccaa

SEQ ID NO: 118119 - DNA, 120 bp, Artificial Sequence
  ENSG00000100665_9 (sequence is synthesized)
gttctccatttctggctcctatgtattagatcagattttgcccaggctgggcttcacggatctgttctccaagtgggctgacttatccggcatcaccaaacagcaaaaactggaggcatc

SEQ ID NO: 118120 - DNA, 120 bp, Artificial Sequence
  ENSG00000100665_10 (sequence is synthesized)
caaaagtttccacaaggccaccttggacgtggatgaggctggcaccgaggctgcagcagccaccagcttcgcgatcaaattcttctctgcccagaccaatcgccacatcctgcgattcaa

SEQ ID NO: 118121 - DNA, 120 bp, Artificial Sequence
  ENSG00000100665_11 (sequence is synthesized)
ccggcccttccttgtggtgatcttttccaccagcacccagagtgtcctctttctgggcaaggtcgtcgaccccacgaaaccatagccctcccagggctgctcatctgttccaagcaggag

SEQ ID NO: 118122 - DNA, 120 bp, Artificial Sequence
  ENSG00000100665_12 (sequence is synthesized)
gatgtggcaggggagggctgggagtgagtagctctgtgtttagagttggggacaaggatgacaccgaaggtccaggagtccaggacagcaggtgctggccggtggggagcggggaggggc

SEQ ID NO: 118123 - DNA, 120 bp, Artificial Sequence
  ENSG00000100665_13 (sequence is synthesized)
actgagatgggcagggcctggacattccacaccctggtgctgtgcagcctctggcagagcatccgacctcttggagcaagtttctgcctctggaaagggggcgggcccttttcacaacag

SEQ ID NO: 118124 - DNA, 120 bp, Artificial Sequence
  ENSG00000100665_14 (sequence is synthesized)
ccgacttagggtccatgggcactggtgggtgactatgcccggagacccagaaaagcctcccccagggacacacagctggtacagggcggcactgactgagggccaaggtcttctggctgc

SEQ ID NO: 118125 - DNA, 120 bp, Artificial Sequence
  ENSG00000100678_0 (sequence is synthesized)
cggcgctgtctcccagctgatagggtgacgttccgtttggaggcttggagattggctttttgatttggcttcttccggcagcttaatgggcaaagctctccgctcgcccagaaaccagcc

SEQ ID NO: 118126 - DNA, 120 bp, Artificial Sequence
  ENSG00000100678_1 (sequence is synthesized)
tctccgcgcgtcccctctgcgcgcggcgaggccgagacgtctcccgcggtgacagcgtgcaaggcggagacccggcgcgctcccagcccagggaaagcccaggcgacgcgaccgcaagcc

SEQ ID NO: 118127 - DNA, 120 bp, Artificial Sequence
  ENSG00000100678_2 (sequence is synthesized)
cgagcccaggtccctcggagccgccagggcgcgccgggctgcttgccttcctgccccttcctgcaggaatcccccgccgcccgcggccgggactccgggcctctcccgggcgtagattcc

SEQ ID NO: 118128 - DNA, 120 bp, Artificial Sequence
  ENSG00000100678_3 (sequence is synthesized)
agtcaccgctctgggtcggggtttccctctttctgaaatccgtgcggaaggacccctcccggggcccctcgccctggccccagacaccctccctcccagaccccgcgctccagatgcgct

SEQ ID NO: 118129 - DNA, 120 bp, Artificial Sequence
  ENSG00000100678_4 (sequence is synthesized)
ctccctcccagaccccgcgctccagatgcgctgccccgcagctccctgacagctgcgagcccacgaaccccggcgggagggcggcggcggcggactgacatgccccggacgcggctgcgg

SEQ ID NO: 118130 - DNA, 120 bp, Artificial Sequence
  ENSG00000100678_5 (sequence is synthesized)
tgcgaccggtgaggcgccgggcggcgggggcatcgcgtaccttcctcacccccctcccttgcccactccgctcgggaggccgagaggaaacggtctctggcctatcaggaggacaactgg

SEQ ID NO: 118131 - DNA, 120 bp, Artificial Sequence
  ENSG00000100678_6 (sequence is synthesized)
tgctgcaatagaagccagtggctaagtctcgtgtatggcgtggttaaggttgcagcctctcacctctgccttcctccattttgggctggttacctttgtgctcttcctgaatggtcttcg

SEQ ID NO: 118132 - DNA, 120 bp, Artificial Sequence
  ENSG00000100678_7 (sequence is synthesized)
agcagaggctggtggctcaggggacgtgccaagcacagggcagaacaatgagtcctgttcagggtcatcggactgcaaggagggtgtcatcctgccaatctggtacccggagaacccttc

SEQ ID NO: 118133 - DNA, 120 bp, Artificial Sequence
  ENSG00000100678_8 (sequence is synthesized)
ccttggggacaagattgccagggtcattgtctattttgtggccctgatatacatgttccttggggtgtccatcattgctgaccgcttcatggcatctattgaagtcatcacctctcaaga

SEQ ID NO: 118134 - DNA, 120 bp, Artificial Sequence
  ENSG00000100678_9 (sequence is synthesized)
gagggaggtgacaattaagaaacccaatggagaaaccagcacaaccactattcgggtctggaatgaaactgtctccaacctgacccttatggccctgggttcctctgctcctgagatact

SEQ ID NO: 118135 - DNA, 120 bp, Artificial Sequence
  ENSG00000100678_10 (sequence is synthesized)
cctctctttaattgaggtgtgtggtcatgggttcattgctggtgatctgggaccttctaccattgtagggagtgcagccttcaacatgttcatcatcattggcatctgtgtctacgtgat

SEQ ID NO: 118136 - DNA, 120 bp, Artificial Sequence
  ENSG00000100678_11 (sequence is synthesized)
cccagacggagagactcgcaagatcaagcatctacgagtcttcttcatcaccgctgcttggagtatctttgcctacatctggctctatatgattctggcagtcttctcccctggtgtggt

SEQ ID NO: 118137 - DNA, 120 bp, Artificial Sequence
  ENSG00000100678_12 (sequence is synthesized)
ccaggtttgggaaggcctcctcactctcttcttctttccagtgtgtgtccttctggcctgggtggcagataaacgactgctcttctacaaatacatgcacaaaaagtaccgcacagacaa

SEQ ID NO: 118138 - DNA, 120 bp, Artificial Sequence
  ENSG00000100678_13 (sequence is synthesized)
acaccgaggaattatcatagagacagagggtgaccaccctaagggcattgagatggatgggaaaatgatgaattcccattttctagatgggaacctggtgcccctggaagggaaggaagt

SEQ ID NO: 118139 - DNA, 120 bp, Artificial Sequence
  ENSG00000100678_14 (sequence is synthesized)
ggatgagtcccgcagagagatgatccggattctcaaggatctgaagcaaaaacacccagagaaggacttagatcagctggtggagatggccaattactatgctctttcccaccaacagaa

SEQ ID NO: 118140 - DNA, 120 bp, Artificial Sequence
  ENSG00000100678_15 (sequence is synthesized)
gagccgtgccttctaccgtatccaagccactcgtatgatgactggtgcaggcaatatcctgaagaaacatgcagcagaacaagccaagaaggcctccagcatgagcgaggtgcacaccga

SEQ ID NO: 118141 - DNA, 120 bp, Artificial Sequence
  ENSG00000100678_16 (sequence is synthesized)
tgagcctgaggactttatttccaaggtcttctttgacccatgttcttaccagtgcctggagaactgtggggctgtactcctgacagtggtgaggaaagggggagacatgtcaaagaccat

SEQ ID NO: 118142 - DNA, 120 bp, Artificial Sequence
  ENSG00000100678_17 (sequence is synthesized)
gtatgtggactacaaaacagaggatggttctgccaatgcaggggctgactatgagttcacagagggcacggtggttctgaagccaggagagacccagaaggagttctccgtgggcataat

SEQ ID NO: 118143 - DNA, 120 bp, Artificial Sequence
  ENSG00000100678_18 (sequence is synthesized)
tgatgacgacatttttgaggaggatgaacacttctttgtaaggttgagcaatgtccgcatagaggaggagcagccagaggaggggatgcctccagcaatattcaacagtcttcccttgcc

SEQ ID NO: 118144 - DNA, 120 bp, Artificial Sequence
  ENSG00000100678_19 (sequence is synthesized)
tcgggctgtcctagcctccccttgtgtggccacagttaccatcttggatgatgaccatgcaggcatcttcacttttgaatgtgatactattcatgtcagtgagagtattggtgttatgga

SEQ ID NO: 118145 - DNA, 120 bp, Artificial Sequence
  ENSG00000100678_20 (sequence is synthesized)
ggtcaaggttctgcggacatcaggtgcccggggtacagtcatcgtcccctttaggacagtagaagggacagccaagggtggcggtgaggactttgaagacacatatggggagttggaatt

SEQ ID NO: 118146 - DNA, 120 bp, Artificial Sequence
  ENSG00000100678_21 (sequence is synthesized)
catggtggatatgagttttcagaaagcgctcctgttatctccagacaggaagctgactatggaagaagaggaggccaagaggatagcagagatgggaaagccagtattgggtgaacaccc

SEQ ID NO: 118147 - DNA, 120 bp, Artificial Sequence
  ENSG00000100678_22 (sequence is synthesized)
caaactagaagtcatcattgaagagtcctatgagttcaagactacggtggacaaactgatcaagaagacaaacctggccttggttgtggggacccattcctggagggaccagttcatgga

SEQ ID NO: 118148 - DNA, 120 bp, Artificial Sequence
  ENSG00000100678_23 (sequence is synthesized)
ggccatcaccgtcagtgcagcaggggatgaggatgaggatgaatccggggaggagaggctgccctcctgctttgactacgtcatgcacttcctgactgtcttctggaaggtgctgtttgc

SEQ ID NO: 118149 - DNA, 120 bp, Artificial Sequence
  ENSG00000100678_24 (sequence is synthesized)
ctgtgtgccccccacagagtactgccacggctgggcctgcttcgccgtctccatcctcatcattggcatgctcaccgccatcattggggacctggcctcgcacttcggctgcaccattgg

SEQ ID NO: 118150 - DNA, 120 bp, Artificial Sequence
  ENSG00000100678_25 (sequence is synthesized)
tctcaaagattcagtcacagctgttgttttcgtggcatttggcacctctgtcccagatacgtttgccagcaaagctgctgccctccaggatgtatatgcagacgcctccattggcaacgt

SEQ ID NO: 118151 - DNA, 120 bp, Artificial Sequence
  ENSG00000100678_26 (sequence is synthesized)
gacgggcagcaacgccgtcaatgtcttcctgggcatcggcctggcctggtccgtggccgccatctactgggctctgcagggacaggagttccacgtgtcggccggcacactggccttctc

SEQ ID NO: 118152 - DNA, 120 bp, Artificial Sequence
  ENSG00000100678_27 (sequence is synthesized)
cgtcaccctcttcaccatctttgcatttgtctgcatcagcgtgctcttgtaccgaaggcggccgcacctgggaggggagcttggtggcccccgtggctgcaagctcgccacaacatggct

SEQ ID NO: 118153 - DNA, 120 bp, Artificial Sequence
  ENSG00000100678_28 (sequence is synthesized)
ctttgtgagcctgtggctcctctacatactctttgccacactagaggcctattgctacatcaaggggttctaagccacacaacagagcctccagcagggcaggcctaggacttctcctaa

SEQ ID NO: 118154 - DNA, 120 bp, Artificial Sequence
  ENSG00000100678_29 (sequence is synthesized)
gagaagggcacttccccaccagtgatctctcccgactgcactgccctggagaggcagcatcaggacctaagccccaggaacttcacccaacttaggccctggcaattaactgaaagggca

SEQ ID NO: 118155 - DNA, 120 bp, Artificial Sequence
  ENSG00000100678_30 (sequence is synthesized)
aagtcttaatcaatcaaacaatggaggaatcaccgactttacacagtatttaattgaatacaaacaagcaacagcaacaaatccacctccaccccatctccccctcatatccctgaccca

SEQ ID NO: 118156 - DNA, 120 bp, Artificial Sequence
  ENSG00000100678_31 (sequence is synthesized)
aagcaaaggtcagagcctttcgcctccttctattccatcttttgattattcctttgcctctcatttctttggaagcagggtttctcctctctgcccaattccatatgtccctattatctc

SEQ ID NO: 118157 - DNA, 120 bp, Artificial Sequence
  ENSG00000100678_32 (sequence is synthesized)
actcagctgacaagacgtgaaaatgagtcacattcatgtggctggggtggggttcttttttcattgtaatcattattgtggttgctttcgttttgccattaggttttgcttattattttg

SEQ ID NO: 118158 - DNA, 120 bp, Artificial Sequence
  ENSG00000100678_33 (sequence is synthesized)
ttttgtcttttttttctgaagtgagtgaaaaaggtgccacaaaggaattccaggtccgagccaacagagagaaacatgaatttttagacacatgctctcctgccacctcttggctccatc

SEQ ID NO: 118159 - DNA, 120 bp, Artificial Sequence
  ENSG00000100678_34 (sequence is synthesized)
aagatccagttccccatctcactgttttctctgagttcttgggaggagtgatggtgttggggtagaaataagctcactcacccacgcagggtactaaagatcttacaggagcttcaactg

SEQ ID NO: 118160 - DNA, 120 bp, Artificial Sequence
  ENSG00000100678_35 (sequence is synthesized)
gagcaggaggagctttttatgcttatgttgaatcaagtcagatacaaaaagcaattgtccctctttgcccaagcctttccaattctgtgtgtcttgttgtgtcagtgtccacttgtgtat

SEQ ID NO: 118161 - DNA, 120 bp, Artificial Sequence
  ENSG00000100678_36 (sequence is synthesized)
ccttctgcaggaagacccgccaaatagaagagatgggacaaaaataggaatggtgtgtgacgacaaagggctactggaagaacaaaagggatacaggccttcttgattatctttggcttt

SEQ ID NO: 118162 - DNA, 120 bp, Artificial Sequence
  ENSG00000100678_37 (sequence is synthesized)
gtacctgaggcaggagagaagagatgtccaaccagtgagatctttaagagaaaagtttgtattttaaatgtcaatgtgcctgagaaatgtcagcttcaccacgctcttgcttcctaatgc

SEQ ID NO: 118163 - DNA, 120 bp, Artificial Sequence
  ENSG00000100678_38 (sequence is synthesized)
tctatacaaagagggctgactatatttcttgaagtggtgtaaaaacttagagattttataagagaaccaggggctcccttcacctctcctggtccctcaggtcacatatgaaagcatttt

SEQ ID NO: 118164 - DNA, 120 bp, Artificial Sequence
  ENSG00000100678_39 (sequence is synthesized)
tacaagataggaactggaattcctcatttctcccatgttcctgcttgttcttaaacttcatgaagctatttttccagcctatggggtagttcttgctccagtaagaggaatcttagttgt

SEQ ID NO: 118165 - DNA, 120 bp, Artificial Sequence
  ENSG00000100678_40 (sequence is synthesized)
cataatcccttggagcctgggtttttggagaaagagatctccgtgccctacagaccttttctcaacgaatgtgggaaggacctggctttaaaacacgcacacaaacacacaaataaacag

SEQ ID NO: 118166 - DNA, 120 bp, Artificial Sequence
  ENSG00000100678_41 (sequence is synthesized)
acataagatgtcatcacgaaactgcccacggatctttaggctttctgcattgacataaatacattttctaagggggggggggaagaaattaaaaaacacctgttaattttaaacacattt

SEQ ID NO: 118167 - DNA, 120 bp, Artificial Sequence
  ENSG00000100678_42 (sequence is synthesized)
tttaagaaaaaaataattaaaaaagaaacagtgctcatgtcataagctatgttgacagttgccagtggaaatgttgggttggttcaaaaaaaaaataaaagctatactatatctctctac

SEQ ID NO: 118168 - DNA, 120 bp, Artificial Sequence
  ENSG00000100678_43 (sequence is synthesized)
gaaaaccataagggttaaaatagtagatgaggaggaatacgaaaggcaagagaatttcttcattgcccttggtgaaccgaaatggatggaacgtggaatatcaggttattcacttgtgga

SEQ ID NO: 118169 - DNA, 120 bp, Artificial Sequence
  ENSG00000100678_44 (sequence is synthesized)
gtggcccataggcccctctgcccttcgaggaggagagatatgctgctgggagcctcctagcaaatgaagcagtgaaatccacctgtttgtcaaaaaggggtgatcatactgcaattagtt

SEQ ID NO: 118170 - DNA, 120 bp, Artificial Sequence
  ENSG00000100678_45 (sequence is synthesized)
tgtgacaaagagcagcataaaactttccacacgaggacagagctaagagattcagcaacaacattcccaaaggattctctacaggccttctcagtgtgattggtcatttctcattgtctg

SEQ ID NO: 118171 - DNA, 120 bp, Artificial Sequence
  ENSG00000100678_46 (sequence is synthesized)
ctggggactctcctgcagagctgaccacttctgtgcctgcgctggtttggacacacctgatgctctaggggcagaactcctctccttcttcactgctggttctcttcgtcaccactcaat

SEQ ID NO: 118172 - DNA, 120 bp, Artificial Sequence
  ENSG00000100678_47 (sequence is synthesized)
cgaaaacctagggaatgacagctagaggcatccagacgataactggcagccaggagggtggataagtcaaaggaaggggtcaaggaaagaggggaaggaaagggaaccatcacttgctga

SEQ ID NO: 118173 - DNA, 120 bp, Artificial Sequence
  ENSG00000100678_48 (sequence is synthesized)
gcctgctgcctgtgctttctcatgtcacccgcacgacaacccaatgtgaatgttatcatctccaggtaactgctgaagaaacggaagctcaaagagatgtgacagacaggaagctgacta

SEQ ID NO: 118174 - DNA, 120 bp, Artificial Sequence
  ENSG00000100678_49 (sequence is synthesized)
aggaaaaccataagggttaaaatagtagatgaggaggaatacgaaaggcaagagaatttcttcattgcccttggtgaaccgaaatggatggaacgtggaatatcagatgtgacagacagg

SEQ ID NO: 118175 - DNA, 120 bp, Artificial Sequence
  ENSG00000100678_50 (sequence is synthesized)
agagtgagaggtgcttgaatttgcaaagaggattttacctggttcaaatgacccctggactccatctcattatcttccacaccatctcagatctgaacttaacagagcctctgcccttaa

SEQ ID NO: 118176 - DNA, 120 bp, Artificial Sequence
  ENSG00000100678_51 (sequence is synthesized)
agtgcacaaaagtcaatcaaagagatgaataatgacattagtaatgacagctaatatttcttgagcactttcaatgtgacagacaccatgtgtgttcagcaatttacacatttacatttt

SEQ ID NO: 118177 - DNA, 120 bp, Artificial Sequence
  ENSG00000100678_52 (sequence is synthesized)
ccccctgtaatgtttcccaaagccctattaaatagggtaagttattatccccacttcacagacaaagaaactgaggcccacagaggttaagctacatgcccaagtaagtggtccaatttc

SEQ ID NO: 118178 - DNA, 120 bp, Artificial Sequence
  ENSG00000100678_53 (sequence is synthesized)
ttaacctccacattatgtgagtagaccacaaacagtgaaattaaaagaatgtagatattgttctccttctatttacctctggcgatctctgagaggttaaagattagccagctcaaagat

SEQ ID NO: 118179 - DNA, 120 bp, Artificial Sequence
  ENSG00000100678_54 (sequence is synthesized)
atcaaaggagaaatgcccacatacattcttggcctcctctacttggaaggacactgtgagtacaaagtatctcctagcaggacagccaaaggaagttccacagcttttatctttttatag

SEQ ID NO: 118180 - DNA, 120 bp, Artificial Sequence
  ENSG00000100678_55 (sequence is synthesized)
gatgaattacatactctttctttttcttaggaacactcagagacaaacagaaaggagcggacattcctttactcattgaacaaatatttactgagcacctattatgcctgttacagtatt

SEQ ID NO: 118181 - DNA, 120 bp, Artificial Sequence
  ENSG00000100678_56 (sequence is synthesized)
gtgctagtttttgggactatagtgaaaggcaagatacacatgcttccttctccacgtggagtttataatctactgaaggaggcaactctcaactactgtaattaaagttatcttgttaaa

SEQ ID NO: 118182 - DNA, 120 bp, Artificial Sequence
  ENSG00000100678_57 (sequence is synthesized)
tcctaggaagaaaaagaaaaggtactgcatacggaaggaagttgggcctgaatgtaggagttagcaggtagacaggggctgcactagcccaggttctttacttaattcagttaggggctt

SEQ ID NO: 118183 - DNA, 120 bp, Artificial Sequence
  ENSG00000100678_58 (sequence is synthesized)
ccccagaaagaaacagagcacatcctcctgcagggaagttaggctgaatctcatcagacaggacttttctggctgggccaagggaaatctttcctgtaccaagcaaacatatccttcaag

SEQ ID NO: 118184 - DNA, 120 bp, Artificial Sequence
  ENSG00000100678_59 (sequence is synthesized)
agagtagctgaattcacatcaaattctaggaaaacctctttccaaaaccccagcgcaggccagcggtattatttgtccattagtgatgcaagagatttagctatcgtggaaatgcatcag

SEQ ID NO: 118185 - DNA, 120 bp, Artificial Sequence
  ENSG00000100678_60 (sequence is synthesized)
aaggttggaaattagatggatgatcccaggaaggcctgtggatgagatgccctgtgatctctgttctccaagccttgggggacctgaactatcagaggggagggaggaaatatgggggaa

SEQ ID NO: 118186 - DNA, 120 bp, Artificial Sequence
  ENSG00000100678_61 (sequence is synthesized)
agcatagaggtgggaagaaatatcagaggatcagaagcaaaaaacaacaataacaacagaaacaaaaacaaacaaacaaacaaaaaaacaaggccataggcaagaaagggtaagaggttt

SEQ ID NO: 118187 - DNA, 120 bp, Artificial Sequence
  ENSG00000100678_62 (sequence is synthesized)
tctctgggagatctaaaaaaaatggcaataatgaggtaagccaggcagatacctttgggcatctccaagtccttgcaattggccaagacaacagctaacaacatttgaggctttaagaag

SEQ ID NO: 118188 - DNA, 120 bp, Artificial Sequence
  ENSG00000100678_63 (sequence is synthesized)
gttaccctgtgatccactcatctgatttagtggctttggctgaagctctttggatatagttgaaggtatggaaagggtccttacatgaggactttagggtcaagtctcttgctaacatcc

SEQ ID NO: 118189 - DNA, 120 bp, Artificial Sequence
  ENSG00000100678_64 (sequence is synthesized)
tatgtgaccttgggtaaattctttgacccttatttttcttacctgtaaaataaaagaattgggctagatgtctctgacagtcctccctgtatctacaatctgtgccaagatctaaagtca

SEQ ID NO: 118190 - DNA, 120 bp, Artificial Sequence
  ENSG00000100678_65 (sequence is synthesized)
aacaccctgcaaggccctgtgatacatatataaaccacaaagacagagccccgtcttccttgagtccacagttcaccctgcatgtccccatcatggttccccaacatgtcctctgtcccc

SEQ ID NO: 118191 - DNA, 120 bp, Artificial Sequence
  ENSG00000100678_66 (sequence is synthesized)
aaaatccagcacctcacccagtgctcaatcagtaggcattgctcaataactgttggtggttcgtgaataaatgccccatatgacagttaaaatcaggcatctactccaagcagcttccca

SEQ ID NO: 118192 - DNA, 120 bp, Artificial Sequence
  ENSG00000100678_67 (sequence is synthesized)
gggtgtcaaggttccctggggagatattatgggatggcaaacttcccttactgaaaaagtagtcaaaggagaacaataagcccactcagtaaatatcagaactggaaagcccttcagaat

SEQ ID NO: 118193 - DNA, 120 bp, Artificial Sequence
  ENSG00000100678_68 (sequence is synthesized)
ctttcagatcactgcagatgaggaatgggaagcccagactagggatgtgacctacccagggccacacggcttgcttgcggcagaactaggagttaggagtggccccctagcccttgtctc

SEQ ID NO: 118194 - DNA, 120 bp, Artificial Sequence
  ENSG00000100678_69 (sequence is synthesized)
tcattcctgggttcagcccaccagctcaagctgctttttgggcatactggaagacaagccctgcacaccttagcctcctaccagttcccatgtgtctttgtccttttccagatacgtttg

SEQ ID NO: 118195 - DNA, 120 bp, Artificial Sequence
  ENSG00000100697_0 (sequence is synthesized)
cggaggcgcggcgcaggctgctgcaggcccaggtgaatggagtaacctgacagcggggacgaggcgacggcgagcgcgaggaaatggcggcgggggcggcggcgccgggcggctccggga

SEQ ID NO: 118196 - DNA, 120 bp, Artificial Sequence
  ENSG00000100697_1 (sequence is synthesized)
ggcctgggctgtgacgcgcgcgccggagcggggtccgatggttctcgaaggcccgcggcgccccgtgctgcagtaagctgtgctagaacaaaaatgcaatgaaagaaacactggatgaat

SEQ ID NO: 118197 - DNA, 120 bp, Artificial Sequence
  ENSG00000100697_2 (sequence is synthesized)
gaaaagccctgctttgcaacccctcagcatggcaggcctgcagctcatgacccctgcttcctcaccaatgggtcctttctttggactgccatggcaacaagaagcaattcatgataacat

SEQ ID NO: 118198 - DNA, 120 bp, Artificial Sequence
  ENSG00000100697_3 (sequence is synthesized)
ttatacgccaagaaaatatcaggttgaactgcttgaagcagctctggatcataataccatcgtctgtttaaacactggctcagggaagacatttattgcagtactactcactaaagagct

SEQ ID NO: 118199 - DNA, 120 bp, Artificial Sequence
  ENSG00000100697_4 (sequence is synthesized)
gtcctatcagatcaggggagacttcagcagaaatggaaaaaggacggtgttcttggtcaactctgcaaaccaggttgctcaacaagtgtcagctgtcagaactcattcagatctcaaggt

SEQ ID NO: 118200 - DNA, 120 bp, Artificial Sequence
  ENSG00000100697_5 (sequence is synthesized)
tggggaatactcaaacctagaagtaaatgcatcttggacaaaagagagatggaaccaagagtttactaagcaccaggttctcattatgacttgctatgtcgccttgaatgttttgaaaaa

SEQ ID NO: 118201 - DNA, 120 bp, Artificial Sequence
  ENSG00000100697_6 (sequence is synthesized)
tggttacttatcactgtcagacattaaccttttggtgtttgatgagtgtcatcttgcaatcctagaccacccctatcgagaaattatgaagctctgtgaaaattgtccatcatgtcctcg

SEQ ID NO: 118202 - DNA, 120 bp, Artificial Sequence
  ENSG00000100697_7 (sequence is synthesized)
cattttgggactaactgcttccattttaaatgggaaatgtgatccagaggaattggaagaaaagattcagaaactagagaaaattcttaagagtaatgctgaaactgcaactgacctggt

SEQ ID NO: 118203 - DNA, 120 bp, Artificial Sequence
  ENSG00000100697_8 (sequence is synthesized)
ggtcttagacaggtatacttctcagccatgtgagattgtggtggattgtggaccatttactgacagaagtgggctttatgaaagactgctgatggaattagaagaagcacttaattttat

SEQ ID NO: 118204 - DNA, 120 bp, Artificial Sequence
  ENSG00000100697_9 (sequence is synthesized)
caatgattgtaatatatctgtacattcaaaagaaagagattctactttaatttcgaaacagatactatcagactgtcgtgccgtattggtagttctgggaccctggtgtgcagataaagt

SEQ ID NO: 118205 - DNA, 120 bp, Artificial Sequence
  ENSG00000100697_10 (sequence is synthesized)
agctggaatgatggtaagagaactacagaaatacatcaaacatgagcaagaggagctgcacaggaaatttttattgtttacagacactttcctaaggaaaatacatgcactatgtgaaga

SEQ ID NO: 118206 - DNA, 120 bp, Artificial Sequence
  ENSG00000100697_11 (sequence is synthesized)
gcacttctcacctgcctcacttgacctgaaatttgtaactcctaaagtaatcaaactgctcgaaatcttacgcaaatataaaccatatgagcgacagcagtttgaaagcgttgagtggta

SEQ ID NO: 118207 - DNA, 120 bp, Artificial Sequence
  ENSG00000100697_12 (sequence is synthesized)
taataatagaaatcaggataattatgtgtcatggagtgattctgaggatgatgatgaggatgaagaaattgaagaaaaagagaagccagagacaaattttccttctccttttaccaacat

SEQ ID NO: 118208 - DNA, 120 bp, Artificial Sequence
  ENSG00000100697_13 (sequence is synthesized)
tttgtgcggaattatttttgtggaaagaagatacacagcagttgtcttaaacagattgataaaggaagctggcaaacaagatccagagctggcttatatcagtagcaatttcataactgg

SEQ ID NO: 118209 - DNA, 120 bp, Artificial Sequence
  ENSG00000100697_14 (sequence is synthesized)
acatggcattgggaagaatcagcctcgcaacaaacagatggaagcagaattcagaaaacaggaagaggtacttaggaaatttcgagcacatgagaccaacctgcttattgcaacaagtat

SEQ ID NO: 118210 - DNA, 120 bp, Artificial Sequence
  ENSG00000100697_15 (sequence is synthesized)
tgtagaagagggtgttgatataccaaaatgcaacttggtggttcgttttgatttgcccacagaatatcgatcctatgttcaatctaaaggaagagcaagggcacccatctctaattatat

SEQ ID NO: 118211 - DNA, 120 bp, Artificial Sequence
  ENSG00000100697_16 (sequence is synthesized)
aatgttagcggatacagacaaaataaaaagttttgaagaagaccttaaaacctacaaagctattgaaaagatcttgagaaacaagtgttccaagtcggttgatactggtgagactgacat

SEQ ID NO: 118212 - DNA, 120 bp, Artificial Sequence
  ENSG00000100697_17 (sequence is synthesized)
tgatcctgtcatggatgatgatgacgttttcccaccatatgtgttgaggcctgacgatggtggtccacgagtcacaatcaacacggccattggacacatcaatagatactgtgctagatt

SEQ ID NO: 118213 - DNA, 120 bp, Artificial Sequence
  ENSG00000100697_18 (sequence is synthesized)
accaagtgatccgtttactcatctagctcctaaatgcagaacccgagagttgcctgatggtacattttattcaactctttatctgccaattaactcacctcttcgagcctccattgttgg

SEQ ID NO: 118214 - DNA, 120 bp, Artificial Sequence
  ENSG00000100697_19 (sequence is synthesized)
tccaccaatgagctgtgtacgattggctgaaagagttgtagctctcatttgctgtgagaaactgcacaaaattggcgaactggatgaccatttgatgccagttgggaaagagactgttaa

SEQ ID NO: 118215 - DNA, 120 bp, Artificial Sequence
  ENSG00000100697_20 (sequence is synthesized)
atatgaagaggagcttgatttgcatgatgaagaagagaccagtgttccaggaagaccaggttccacgaaacgaaggcagtgctacccaaaagcaattccagagtgtttgagggatagtta

SEQ ID NO: 118216 - DNA, 120 bp, Artificial Sequence
  ENSG00000100697_21 (sequence is synthesized)
tcccagacctgatcagccctgttacctgtatgtgataggaatggttttaactacacctttacctgatgaactcaactttagaaggcggaagctctatcctcctgaagataccacaagatg

SEQ ID NO: 118217 - DNA, 120 bp, Artificial Sequence
  ENSG00000100697_22 (sequence is synthesized)
ctttggaatactgacggccaaacccatacctcagattccacactttcctgtgtacacacgctctggagaggttaccatatccattgagttgaagaagtctggtttcatgttgtctctaca

SEQ ID NO: 118218 - DNA, 120 bp, Artificial Sequence
  ENSG00000100697_23 (sequence is synthesized)
aatgcttgagttgattacaagacttcaccagtatatattctcacatattcttcggcttgaaaaacctgcactagaatttaaacctacagacgctgattcagcatactgtgttctacctct

SEQ ID NO: 118219 - DNA, 120 bp, Artificial Sequence
  ENSG00000100697_24 (sequence is synthesized)
taatgttgttaatgactccagcactttggatattgactttaaattcatggaagatattgagaagtctgaagctcgcataggcattcccagtacaaagtatacaaaagaaacaccctttgt

SEQ ID NO: 118220 - DNA, 120 bp, Artificial Sequence
  ENSG00000100697_25 (sequence is synthesized)
ttttaaattagaagattaccaagatgccgttatcattccaagatatcgcaattttgatcagcctcatcgattttatgtagctgatgtgtacactgatcttaccccactcagtaaatttcc

SEQ ID NO: 118221 - DNA, 120 bp, Artificial Sequence
  ENSG00000100697_26 (sequence is synthesized)
ttcccctgagtatgaaacttttgcagaatattataaaacaaagtacaaccttgacctaaccaatctcaaccagccactgctggatgtggaccacacatcttcaagacttaatcttttgac

SEQ ID NO: 118222 - DNA, 120 bp, Artificial Sequence
  ENSG00000100697_27 (sequence is synthesized)
acctcgacatttgaatcagaaggggaaagcgcttcctttaagcagtgctgagaagaggaaagccaaatgggaaagtctgcagaataaacagatactggttccagaactctgtgctataca

SEQ ID NO: 118223 - DNA, 120 bp, Artificial Sequence
  ENSG00000100697_28 (sequence is synthesized)
tccaattccagcatcactgtggagaaaagctgtttgtctccccagcatactttatcgccttcactgccttttgactgcagaggagctaagagcccagactgccagcgatgctggcgtggg

SEQ ID NO: 118224 - DNA, 120 bp, Artificial Sequence
  ENSG00000100697_29 (sequence is synthesized)
agtcagatcacttcctgcggattttagataccctaacttagacttcgggtggaaaaaatctattgacagcaaatctttcatctcaatttctaactcctcttcagctgaaaatgataatta

SEQ ID NO: 118225 - DNA, 120 bp, Artificial Sequence
  ENSG00000100697_30 (sequence is synthesized)
ctgtaagcacagcacaattgtccctgaaaatgctgcacatcaaggtgctaatagaacctcctctctagaaaatcatgaccaaatgtctgtgaactgcagaacgttgctcagcgagtcccc

SEQ ID NO: 118226 - DNA, 120 bp, Artificial Sequence
  ENSG00000100697_31 (sequence is synthesized)
tggtaagctccacgttgaagtttcagcagatcttacagcaattaatggtctttcttacaatcaaaatctcgccaatggcagttatgatttagctaacagagacttttgccaaggaaatca

SEQ ID NO: 118227 - DNA, 120 bp, Artificial Sequence
  ENSG00000100697_32 (sequence is synthesized)
gctaaattactacaagcaggaaatacccgtgcaaccaactacctcatattccattcagaatttatacagttacgagaaccagccccagcccagcgatgaatgtactctcctgagtaataa

SEQ ID NO: 118228 - DNA, 120 bp, Artificial Sequence
  ENSG00000100697_33 (sequence is synthesized)
ataccttgatggaaatgctaacaaatctacctcagatggaagtcctgtgatggccgtaatgcctggtacgacagacactattcaagtgctcaagggcaggatggattctgagcagagccc

SEQ ID NO: 118229 - DNA, 120 bp, Artificial Sequence
  ENSG00000100697_34 (sequence is synthesized)
ttctattgggtactcctcaaggactcttggccccaatcctggacttattcttcaggctttgactctgtcaaacgctagtgatggatttaacctggagcggcttgaaatgcttggcgactc

SEQ ID NO: 118230 - DNA, 120 bp, Artificial Sequence
  ENSG00000100697_35 (sequence is synthesized)
ctttttaaagcatgccatcaccacatatctattttgcacttaccctgatgcgcatgagggccgcctttcatatatgagaagcaaaaaggtcagcaactgtaatctgtatcgccttggaaa

SEQ ID NO: 118231 - DNA, 120 bp, Artificial Sequence
  ENSG00000100697_36 (sequence is synthesized)
aaagaagggactacccagccgcatggtggtgtcaatatttgatccccctgtgaattggcttcctcctggttatgtagtaaatcaagacaaaagcaacacagataaatgggaaaaagatga

SEQ ID NO: 118232 - DNA, 120 bp, Artificial Sequence
  ENSG00000100697_37 (sequence is synthesized)
aatgacaaaagactgcatgctggcgaatggcaaactggatgaggattacgaggaggaggatgaggaggaggagagcctgatgtggagggctccgaaggaagaggctgactatgaagatga

SEQ ID NO: 118233 - DNA, 120 bp, Artificial Sequence
  ENSG00000100697_38 (sequence is synthesized)
tttcctggagtatgatcaggaacatatcagatttatagataatatgttaatggggtcaggagcttttgtaaagaaaatctctctttctcctttttcaaccactgattctgcatatgaatg

SEQ ID NO: 118234 - DNA, 120 bp, Artificial Sequence
  ENSG00000100697_39 (sequence is synthesized)
gaaaatgcccaaaaaatcctccttaggtagtatgccattttcatcagattttgaggattttgactacagctcttgggatgcaatgtgctatctggatcctagcaaagctgttgaagaaga

SEQ ID NO: 118235 - DNA, 120 bp, Artificial Sequence
  ENSG00000100697_40 (sequence is synthesized)
tgactttgtggtggggttctggaatccatcagaagaaaactgtggtgttgacacgggaaagcagtccatttcttacgacttgcacactgagcagtgtattgctgacaaaagcatagcgga

SEQ ID NO: 118236 - DNA, 120 bp, Artificial Sequence
  ENSG00000100697_41 (sequence is synthesized)
ctgtgtggaagccctgctgggctgctatttaaccagctgtggggagagggctgctcagcttttcctctgttcactggggctgaaggtgctcccggtaattaaaaggactgatcgggaaaa

SEQ ID NO: 118237 - DNA, 120 bp, Artificial Sequence
  ENSG00000100697_42 (sequence is synthesized)
ccagttcacgctcttctgtattgaaagactcggaatatggttgtttgaagattccaccaagatgtatgtttgatcatccagatgcagataaaacactgaatcaccttatatcggggtttg

SEQ ID NO: 118238 - DNA, 120 bp, Artificial Sequence
  ENSG00000100697_43 (sequence is synthesized)
aaaattttgaaaagaaaatcaactacagattcaagaataaggcttaccttctccaggcttttacacatgcctcctaccactacaatactatcactgattgttaccagcgcttagaattcc

SEQ ID NO: 118239 - DNA, 120 bp, Artificial Sequence
  ENSG00000100697_44 (sequence is synthesized)
tgggagatgcgattttggactacctcataaccaagcacctttatgaagacccgcggcagcactccccgggggtcctgacagacctgcggtctgccctggtcaacaacaccatctttgcat

SEQ ID NO: 118240 - DNA, 120 bp, Artificial Sequence
  ENSG00000100697_45 (sequence is synthesized)
cgctggctgtaaagtacgactaccacaagtacttcaaagctgtctctcctgagctcttccatgtcattgatgactttgtgcagtttcagcttgagaagaatgaaatgcaaggaatggatt

SEQ ID NO: 118241 - DNA, 120 bp, Artificial Sequence
  ENSG00000100697_46 (sequence is synthesized)
ctgagcttaggagatctgaggaggatgaagagaaagaagaggatattgaagttccaaaggccatgggggatatttttgagtcgcttgctggtgccatttacatggatagtgggatgtcac

SEQ ID NO: 118242 - DNA, 120 bp, Artificial Sequence
  ENSG00000100697_47 (sequence is synthesized)
tggagacagtctggcaggtgtactatcccatgatgcggccactaatagaaaagttttctgcaaatgtaccccgttcccctgtgcgagaattgcttgaaatggaaccagaaactgccaaat

SEQ ID NO: 118243 - DNA, 120 bp, Artificial Sequence
  ENSG00000100697_48 (sequence is synthesized)
ttagcccggctgagagaacttacgacgggaaggtcagagtcactgtggaagtagtaggaaaggggaaatttaaaggtgttggtcgaagttacaggattgccaaatctgcagcagcaagaa

SEQ ID NO: 118244 - DNA, 120 bp, Artificial Sequence
  ENSG00000100697_49 (sequence is synthesized)
gagccctccgaagcctcaaagctaatcaacctcaggttcccaatagctgaaaccgctttttaaaattcaaaacaagaaacaaaacaaaaaaaattaaggggaaaattatttaaatcggaa

SEQ ID NO: 118245 - DNA, 120 bp, Artificial Sequence
  ENSG00000100697_50 (sequence is synthesized)
aggaagacttaaagttgttagtgagtggaatgaattgaaggcagaatttaaagtttggttgataacaggatagataacagaataaaacatttaacatatgtataaaattttggaactaat

SEQ ID NO: 118246 - DNA, 120 bp, Artificial Sequence
  ENSG00000100697_51 (sequence is synthesized)
tgtagttttagttttttgcgcaaacacaatcttatcttctttcctcacttctgctttgtttaaatcacaagagtgctttaatgatgacatttagcaagtgctcaaaataattgacaggtt

SEQ ID NO: 118247 - DNA, 120 bp, Artificial Sequence
  ENSG00000100697_52 (sequence is synthesized)
ttgtttttttttttttgagtttatgtcagctttgcttagtgttagaaggccatggagcttaaacctccagcagtccctaggatgatgtagattcttctccatctctccgtgtgtgcagta

SEQ ID NO: 118248 - DNA, 120 bp, Artificial Sequence
  ENSG00000100697_53 (sequence is synthesized)
gtgccagtcctgcagtagttgataagctgaatagaaagataaggttttcgagaggagaagtgcgccaatgttgtcttttctttccacgttatactgtgtaaggtgatgttcccggtcgct

SEQ ID NO: 118249 - DNA, 120 bp, Artificial Sequence
  ENSG00000100697_54 (sequence is synthesized)
gttgcacctgatagtaagggacagatttttaatgaacattggctggcatgttggtgaatcacattttagttttctgatgccacatagtcttgcataaaaaagggttcttgccttaaaagt

SEQ ID NO: 118250 - DNA, 120 bp, Artificial Sequence
  ENSG00000100697_55 (sequence is synthesized)
gaaaccttcatggatagtctttaatctctgatctttttggaacaaactgttttacattcctttcattttattatgcattagacgttgagacagcgtgatacttacaactcactagtatag

SEQ ID NO: 118251 - DNA, 120 bp, Artificial Sequence
  ENSG00000100697_56 (sequence is synthesized)
ttgtaacttattacaggatcatactaaaatttctgtcatatgtatactgaagacattttaaaaaccagaatatgtagtctacggatattttttatcataaaaatgatctttggctaaaca

SEQ ID NO: 118252 - DNA, 120 bp, Artificial Sequence
  ENSG00000100697_57 (sequence is synthesized)
ccccattttactaaagtcctcctgccaggtagttcccactgatggaaatgtttatggcaaataattttgccttctaggctgttgctctaacaaaataaaccttagacatatcacacctaa

SEQ ID NO: 118253 - DNA, 120 bp, Artificial Sequence
  ENSG00000100697_58 (sequence is synthesized)
aatatgctgcagattttataattgattggttacttatttaagaagcaaaacacagcacctttacccttagtctcctcacataaatttcttactatacttttcataatgttgcatgcatat

SEQ ID NO: 118254 - DNA, 120 bp, Artificial Sequence
  ENSG00000100697_59 (sequence is synthesized)
ttcacctaccaaagctgtgctgttaatgccgtgaaagtttaacgtttgcgataaactgccgtaattttgatacatctgtgatttaggtcattaatttagataaactagctcattatttcc

SEQ ID NO: 118255 - DNA, 120 bp, Artificial Sequence
  ENSG00000100697_60 (sequence is synthesized)
atctttggaaaaggaaaaaaaaaaaaacttctttaggcatttgcctaagtttctttaattagacttgtaggcactcttcacttaaatacctcagttcttcttttcttttgcatgcatttt

SEQ ID NO: 118256 - DNA, 120 bp, Artificial Sequence
  ENSG00000100697_61 (sequence is synthesized)
tcccctgtttggtgctatgtttatgtattatgcttgaaattttaatttttttttttttgcactgtaactataatacctcttaatttacctttttaaaagctgtgggtcagtcttgcactc

SEQ ID NO: 118257 - DNA, 120 bp, Artificial Sequence
  ENSG00000100697_62 (sequence is synthesized)
ccatcaacataccagtagaggtttgctgcaatttgccccgttaattatgcttgaagtttaagaaagctgagcagaggtgtctcatatttcccagcacatgattctgaacttgatgcttcg

SEQ ID NO: 118258 - DNA, 120 bp, Artificial Sequence
  ENSG00000100697_63 (sequence is synthesized)
tggaatgctgcatttatatgtaagtgacatttgaatactgtccttcctgctttatctgcatcatccacccacagagaaatgcctctgtgcgagtgcaccgacagaaaactgtcagctctg

SEQ ID NO: 118259 - DNA, 120 bp, Artificial Sequence
  ENSG00000100697_64 (sequence is synthesized)
ctttctaaggaaccctgagtgaggggggtattaagcttctccagtgttttttgttgtctccaatcttaaacttaaattgagatctaaattattaaacgagtttttgagcaaattaggtga

SEQ ID NO: 118260 - DNA, 120 bp, Artificial Sequence
  ENSG00000100697_65 (sequence is synthesized)
cttgttttaaaaatatttaattccgatttggaaccttagatgtctatttgattttttaaaaaaccttaatgtaagatatgaccagttaaaacaaagcaattcttgaattatataactgta

SEQ ID NO: 118261 - DNA, 120 bp, Artificial Sequence
  ENSG00000100697_66 (sequence is synthesized)
aaagtgtgcagttaacaaggctggatgtgaattttattctgagggtgatttgtgatcaagtttaatcacaaatctcttaatatttataaactacctgatgccaggagcttagggctttgc

SEQ ID NO: 118262 - DNA, 120 bp, Artificial Sequence
  ENSG00000100697_67 (sequence is synthesized)
attgtgtctaatacattgatcccagtgttacgggattctcttgattcctggcaccaaaatcagattgttttcacagttatgattcccagtgggagaaaaatgcctcaatatatttgtaac

SEQ ID NO: 118263 - DNA, 120 bp, Artificial Sequence
  ENSG00000100697_68 (sequence is synthesized)
cttaagaagagtatttttttgttaatactaagatgttcaaacttagacatgattaggtcatacattctcaggggttcaaatttccttctaccattcaaatgttttatcaacagcaaactt

SEQ ID NO: 118264 - DNA, 120 bp, Artificial Sequence
  ENSG00000100697_69 (sequence is synthesized)
cagccgtttcactttttgttggagaaaaatagtagattttaatttgactcacagtttgaagcattctgtgatcccctggttactgagttaaaaaataaaaaagtacgagttagacatatg

SEQ ID NO: 118265 - DNA, 120 bp, Artificial Sequence
  ENSG00000100697_70 (sequence is synthesized)
aaatggttatgaacgcttttgtgctgctgatttttaatgctgtaaagttttcctgtgtttagcttgttgaaatgttttgcatctgtcaattaaggaaaaaaaaaatcactctatgttgcc

SEQ ID NO: 118266 - DNA, 120 bp, Artificial Sequence
  ENSG00000100697_71 (sequence is synthesized)
ccactttagagccctgtgtgccaccctgtgttcctgtgattgcaatgtgagaccgaatgtaatatggaaaacctaccagtggggtgtggttgtgccctgagcacgtgtgtaaaggactgg

SEQ ID NO: 118267 - DNA, 120 bp, Artificial Sequence
  ENSG00000100697_72 (sequence is synthesized)
ggaggcgtgtcttgaaaaagcaactgcagaaattccttatgatgattgtgtgcaagttagttaacatgaaccttcatttgtaaattttttaaaatttcttttataatatgctttccgcag

SEQ ID NO: 118268 - DNA, 120 bp, Artificial Sequence
  ENSG00000100697_73 (sequence is synthesized)
tcctaactatgctgcgttttataatagctttttcccttctgttctgttcatgtagcacagataagcattgcacttggtaccatgctttacctcatttcaagaaaatatgcttaacagaga

SEQ ID NO: 118269 - DNA, 120 bp, Artificial Sequence
  ENSG00000100697_74 (sequence is synthesized)
ggaaaaaaatgtggtttggccttgctgctgttttgatttatggaatttgaaaaagataattataatgcctgcaatgtgtcatatactcgcacaacttaaataggtcatttttgtctgtgg

SEQ ID NO: 118270 - DNA, 120 bp, Artificial Sequence
  ENSG00000100697_75 (sequence is synthesized)
catttttactgtttgtgaaagtatgaaacagatttgttaactgaactcttaattatgtttttaaaatgtttgttatatttcttttcttttttcttttatattacgtgaagtgatgaaatt

SEQ ID NO: 118271 - DNA, 120 bp, Artificial Sequence
  ENSG00000100697_76 (sequence is synthesized)
tagaatgacctctaacactcctgtaattgtcttttaaaatactgatatttttatttgttaataatactttgccctcagaaagattctgataccctgccttgacaacatgaaacttgaggc

SEQ ID NO: 118272 - DNA, 120 bp, Artificial Sequence
  ENSG00000100697_77 (sequence is synthesized)
tgctttggttcatgaatccaggtgttcccccggcagtcggcttcttcagtcgctccctggaggcaggtgggcactgcagaggatcactggaatccagatcgagcgcagttcatgcacaag

SEQ ID NO: 118273 - DNA, 120 bp, Artificial Sequence
  ENSG00000100697_78 (sequence is synthesized)
gccccgttgatttaaaatattggatcttgctctgttagggtgtctaatccctttacacaagattgaagccaccaaactgagaccttgatacctttttttaactgcatctgaaattatgtt

SEQ ID NO: 118274 - DNA, 120 bp, Artificial Sequence
  ENSG00000100697_79 (sequence is synthesized)
aagagtctttaacccatttgcattatctgcagaagagaaactcatgtcatgtttattacctatatggttgttttaattacatttgaataattatatttttccaaccactgattacttttc

SEQ ID NO: 118275 - DNA, 120 bp, Artificial Sequence
  ENSG00000100697_80 (sequence is synthesized)
aggaatttaattatttccagataaatttctttattttatattgtacatgaaaagttttaaagatatgtttaagaccaagactattaaaatgatttttaaagttgttggagacgccaatag

SEQ ID NO: 118276 - DNA, 120 bp, Artificial Sequence
  ENSG00000100697_81 (sequence is synthesized)
caatatctaggaaatttgcattgagaccattgtattttccactagcagtgaaaatgatttttcacaactaacttgtaaatatattttaatcattacttctttttttctagtccattttta

SEQ ID NO: 118277 - DNA, 120 bp, Artificial Sequence
  ENSG00000100697_82 (sequence is synthesized)
tttggacatcaaccacagacaatttaaattttatagatgcactaagaattcactgcagcagcaggttacatagcaaaaatgcaaaggtgaacaggaagtaaatttctggcttttctgctg

SEQ ID NO: 118278 - DNA, 120 bp, Artificial Sequence
  ENSG00000100697_83 (sequence is synthesized)
taaatagtgaaggaaaattactaaaatcaagtaaaactaatgcatattatttgattgacaataaaatatttaccatcacatgctgcagctgttttttaaggaacatgatgtcattcattc

SEQ ID NO: 118279 - DNA, 120 bp, Artificial Sequence
  ENSG00000100697_84 (sequence is synthesized)
atacagtaatcatgctgcagaaatttgcagtctgcaccttatggatcacaattacctttagttgttttttttgtaataattgtagccaagtaaatctccaataaagttatcgtctgttca

SEQ ID NO: 118280 - DNA, 120 bp, Artificial Sequence
  ENSG00000100697_85 (sequence is synthesized)
ggaaactctgaaagaacttagaatcagcattttgagagcagaagcttgggcatgctgtgattttccaataaactgctatcacaatgtcaaaatgcagttcagacaagagcaacacagaga

SEQ ID NO: 118281 - DNA, 120 bp, Artificial Sequence
  ENSG00000100697_86 (sequence is synthesized)
gctggtttcatcctaaggctggatcttttcatgggtctgtgtagtgtaattgcagcagcaaatgggactaataatttcatgagtcatctttagagggaaagaaagacaactgcttctctt

SEQ ID NO: 118282 - DNA, 120 bp, Artificial Sequence
  ENSG00000100697_87 (sequence is synthesized)
aaatgtacatggaaaaaacattaacttaaaaacatcaaaggggaaaagttcacaaagatattgtaaactaatgattctgaaaaatatttacactgtggtgtgctgttgtcagatttctgt

SEQ ID NO: 118283 - DNA, 120 bp, Artificial Sequence
  ENSG00000100697_88 (sequence is synthesized)
ttgtaatctgattgacttctcttttttccttctgtttttatgaaataatgctgtaataaagactagacggcagccctgtctgtcgggggtatgcaattgcagtaagtcgtaacgcgtgtt

SEQ ID NO: 118284 - DNA, 120 bp, Artificial Sequence
  ENSG00000100697_89 (sequence is synthesized)
tcctttgtgtggtgtcagcttatacatgggactcctggcctgagagtgcacactaaatgctgattgacaatgataataaatacttctgacttctaattcaagctgtttggattttttaca

SEQ ID NO: 118285 - DNA, 120 bp, Artificial Sequence
  ENSG00000100697_90 (sequence is synthesized)
gtccgatggttctcgaaggcccgcggcgccccgtgctgcaggttacctagggtatgaattaatacagacttggaaactctgaaagaacttagaatcagcattttgagagttactactggg

SEQ ID NO: 118286 - DNA, 120 bp, Artificial Sequence
  ENSG00000100697_91 (sequence is synthesized)
gcgctggctgccggccagccgggcgctgcgcagtctccgcaggcgccggcgggaggggtcgaggcggaggcgcggcgcaggctgctgcaggcccagtaagctgtgctagaacaaaaatgc

SEQ ID NO: 118287 - DNA, 120 bp, Artificial Sequence
  ENSG00000100697_92 (sequence is synthesized)
taagtctttggtgtttttgtagtaccttgcagagagtacctatttaagtgaacaaatggcagtaaaaaggaatgggcaagagtaagaattctctataagtaccattacctgtgagttcaa

SEQ ID NO: 118288 - DNA, 120 bp, Artificial Sequence
  ENSG00000100697_93 (sequence is synthesized)
gaatctaacgttgtttccacagagagtagcagacaggcatttctgccttaagagattatgtgtcagctcttcctatttgctgttgttgccaaggactgggaactttgacagtaaatttgt

SEQ ID NO: 118289 - DNA, 120 bp, Artificial Sequence
  ENSG00000100697_94 (sequence is synthesized)
attttttttctgtcaatatgtgtgctttgttgttctgacctgaatgtcttacatgatgctttcaaagaacattaagttatttagagaattcagcagtatactttaaaatgtttggaaata

SEQ ID NO: 118290 - DNA, 120 bp, Artificial Sequence
  ENSG00000100697_95 (sequence is synthesized)
ggtaaggagcccacgaccagacttcatttctgggaaaatgagactttgtgttgatctcatcgtgttggccttgtaaaagtgatctatgcatgtacagtgttcatgcttaatattcaaggg

SEQ ID NO: 118291 - DNA, 120 bp, Artificial Sequence
  ENSG00000100697_96 (sequence is synthesized)
atggggcggggaacaaaaggaatagaaagaattcttttccttgttatttggggagcacgtattgctttataactttggttgttgggagtatggctatcatataccctcatcagtgtcatt

SEQ ID NO: 118292 - DNA, 120 bp, Artificial Sequence
  ENSG00000100697_97 (sequence is synthesized)
ttatatctgcctaattagagaaattttaaccttagtattttgatgtgttttccccattttatcctccgcaaatatctttctcttgcccattcagtgctgcttttggtttttgatttagtt

SEQ ID NO: 118293 - DNA, 120 bp, Artificial Sequence
  ENSG00000100697_98 (sequence is synthesized)
gtatattctggatgtatttccacagccttttattgttcttcctggacaaaaagacccctcctttagggtctttttaaagatggatagattaaaagattaaaagcaatgatttcacaagaa

SEQ ID NO: 118294 - DNA, 120 bp, Artificial Sequence
  ENSG00000100697_99 (sequence is synthesized)
aagagaggaaattcccttctgtggggcgaggaaatcctgctgacagtaaagccagtggtaggctttcacacagatatttgaatccctgaccctctgtttgaaggtaagctgtgctagaac

SEQ ID NO: 118295 - DNA, 120 bp, Artificial Sequence
  ENSG00000100711_0 (sequence is synthesized)
gcggggccgctggccgagaggctgaggcggcgtcatgtcctccgaggtgtccgcgcgccgcgacgccaagaagctggtgcgctccccgagcggcctgcgcatggtgcccgaacaccgcgc

SEQ ID NO: 118296 - DNA, 120 bp, Artificial Sequence
  ENSG00000100711_1 (sequence is synthesized)
cttcggaagcccgttcggcctggaggagccgcagtgggtcccggacaaggagtgtcggagatgtatgcagtgtgacgccaagtttgactttctcaccagaaagcaccactgtcgccgctg

SEQ ID NO: 118297 - DNA, 120 bp, Artificial Sequence
  ENSG00000100711_2 (sequence is synthesized)
cgggaagtgcttctgcgacaggtgctgcagccagaaggtgccgctgcggcgcatgtgctttgtggaccccgtgcggcagtgcgcggagtgcgccctcgtgtccctcaaggaggcggagtt

SEQ ID NO: 118298 - DNA, 120 bp, Artificial Sequence
  ENSG00000100711_3 (sequence is synthesized)
ctacgacaagcagctcaaagtgctcctgagcggagccaccttcctcgtcacgtttggaaactcagagaaacctgaaactatgacttgtcgtctttccaataaccagagatacttgtttct

SEQ ID NO: 118299 - DNA, 120 bp, Artificial Sequence
  ENSG00000100711_4 (sequence is synthesized)
ggatggagacagccactatgaaatcgaaattgtacacatttccaccgtgcagatcctcacagaaggcttccctcctggaggaggcaacgcacgggccacaggcatgttcctgcagtatac

SEQ ID NO: 118300 - DNA, 120 bp, Artificial Sequence
  ENSG00000100711_5 (sequence is synthesized)
caggaggcaggcggtggcgtggctagtggccatgcacaaggctgccaagctcctctatgaatctcgggaccagtaactctacgtggggctgagcttggagtacgtgtggtcaccaggact

SEQ ID NO: 118301 - DNA, 120 bp, Artificial Sequence
  ENSG00000100711_6 (sequence is synthesized)
gagtcgcttggaacagcagagcctgctccttgcgtaccacagggattaatcctgcttgtgctgggaaatgcaactcactcatgtatttggagaaacaggagtgttcacttatctagtgca

SEQ ID NO: 118302 - DNA, 120 bp, Artificial Sequence
  ENSG00000100711_7 (sequence is synthesized)
atatgttcacagtttattaatgctttaaacagcttcatgttttagaatttgtgtattgtcaatacttaattgggggtgggagagactgagctacactactgctaaactatttttagcata

SEQ ID NO: 118303 - DNA, 120 bp, Artificial Sequence
  ENSG00000100711_8 (sequence is synthesized)
atatataccatttttatgagttcgcaggtctactagaaggttctggcccatcaatattcatttcatttaattcttccacagaaccagtttgggcagtaggaactcaggcttctggtctgc

SEQ ID NO: 118304 - DNA, 120 bp, Artificial Sequence
  ENSG00000100711_9 (sequence is synthesized)
agtggagcctgttcgcctctaatagccagtttacagcacttgccttagcctgtttcacagacttgtccacttaccttgtcactaatttggggcttctgggctgtgagtgatcctttgata

SEQ ID NO: 118305 - DNA, 120 bp, Artificial Sequence
  ENSG00000100711_10 (sequence is synthesized)
cttcaccaaggggaacgtgggggctttgtgttttgtacttttcactcactatttcactttattaagatgactgtacagcaatttgtatataaagcttatgattaaaaactattttgaaca

SEQ ID NO: 118306 - DNA, 120 bp, Artificial Sequence
  ENSG00000100711_11 (sequence is synthesized)
caccgtgcagatcctcacagaaggcttccctcctggagaaaaagacattcacgcttacaccagcctccgggggagccagcctgcctctgaaggaggcaacgcacgggccacaggcatgtt

SEQ ID NO: 118307 - DNA, 120 bp, Artificial Sequence
  ENSG00000100711_12 (sequence is synthesized)
ccgaggcgcgagggcgtcctaagcagtgggacttgggtagttgaaagaaagctgaaaaacagccattttgatccatgattttgaaaaaagggcctcatttcccaggtgaggcggatcccc

SEQ ID NO: 118308 - DNA, 120 bp, Artificial Sequence
  ENSG00000100711_13 (sequence is synthesized)
aggcggatccccgctgcgtggtggggagcccaggggctggcgacaggaggtgcgcgtgtgcagcggccggcacaggggcctcgcgtttaggcgtggcccggggagtgccaggccagccgg

SEQ ID NO: 118309 - DNA, 120 bp, Artificial Sequence
  ENSG00000100711_14 (sequence is synthesized)
gcgtgggtgacaagaggagcatgcacttttgggatcaggcagctgccctgaggagtggggtctgctgggtttccaggacaatctgcctttcctctttcgcggggcgtgtatttactcagt

SEQ ID NO: 118310 - DNA, 120 bp, Artificial Sequence
  ENSG00000100711_15 (sequence is synthesized)
ggctttagaactcgccaggtgagtggagacttaaactgtaagacaacaaagggacatttgcctcagcatgtcataatgatttcctctgctctaaatgctctaacgtatcattcggtttat

SEQ ID NO: 118311 - DNA, 120 bp, Artificial Sequence
  ENSG00000100711_16 (sequence is synthesized)
tgttggattcaaaccaaggataaagccccaaatgcaataactgagatccccaaaaaggtctgaatggtggctcatcgggagccagcacttcagccctcctcctgcaggcgtctgtgcaga

SEQ ID NO: 118312 - DNA, 120 bp, Artificial Sequence
  ENSG00000100711_17 (sequence is synthesized)
ctaaacccctggtgcatttcctggtgagctttggcccatcctgggcctctccactaaactctgctgacggggagctcgcatcccgttatctgcaaactgtgctgacagatgcgtgtgccg

SEQ ID NO: 118313 - DNA, 120 bp, Artificial Sequence
  ENSG00000100711_18 (sequence is synthesized)
taacccatgttgctttccttccgttctctcaccggctcttggttgctccttctcgccactgcctgcccaccttcttgccatagaaaaagacattcacgcttacaccagcctccgggggag

SEQ ID NO: 118314 - DNA, 120 bp, Artificial Sequence
  ENSG00000100711_19 (sequence is synthesized)
ccagcctgcctctgaaggtcagcctcttcctcctcaccggggctccccgcatgcagcgggcccgttcctcccctcgccacctggcttctgtccacggggtggtccatgccaaggttcttt

SEQ ID NO: 118315 - DNA, 120 bp, Artificial Sequence
  ENSG00000100711_20 (sequence is synthesized)
gtgggtttataaagcataaatgaagataccgcagcagatgtactttctcagttctgtctcagcgggagggttacccagcaattgacagctctctgtcagtacctgccagccctgaacagg

SEQ ID NO: 118316 - DNA, 120 bp, Artificial Sequence
  ENSG00000100711_21 (sequence is synthesized)
ctgaggccagggggcgtgggggctcacctgcccttgggagcctctgccaacactgcccttccccccgaggcctgctgctccccagctcagtgtggcctcctgggacccctgactctcctg

SEQ ID NO: 118317 - DNA, 120 bp, Artificial Sequence
  ENSG00000100711_22 (sequence is synthesized)
gcacttctgtcagcctcctggatggtgaggtgagatgcccaggccagtgttctgtcctgagctcagggatgtgtgtggagccgggatggcatcaagctggttgccttgagcaggctgcaa

SEQ ID NO: 118318 - DNA, 120 bp, Artificial Sequence
  ENSG00000100711_23 (sequence is synthesized)
ggtatagatgcccaggtgcaaagggtagggtctggagaagcgggggtcaccccaggcacccctctctgcctgcctcctcctggggagcctgaggctcagatgaaggccagtgtttagggg

SEQ ID NO: 118319 - DNA, 120 bp, Artificial Sequence
  ENSG00000100711_24 (sequence is synthesized)
catcagatgaaggccagtgcctcaggaggccagggcaacacagcctcccggactgctctcccgggcagaccctccccagggcttctggcactgtgtcccccttgtggtggcttggggggt

SEQ ID NO: 118320 - DNA, 120 bp, Artificial Sequence
  ENSG00000100711_25 (sequence is synthesized)
gcagtgagccccgctctgcccagtctcagtagagcccttcagaccccagcaccctgtcttccggtgggggtggggacaataggaacagtcccctgacctgaaggcagccaaggggccgcc

SEQ ID NO: 118321 - DNA, 120 bp, Artificial Sequence
  ENSG00000100711_26 (sequence is synthesized)
tgccagcctgggccctgtagggcaggccacacactcattctttcaaggccagatagtaaacctttgccagccacgtgtgctgtggtgaaggcggaggcggctgcagaagacagggtgaca

SEQ ID NO: 118322 - DNA, 120 bp, Artificial Sequence
  ENSG00000100711_27 (sequence is synthesized)
gacggccatggctatgatccagtggtgctttatcaggcaaatgcaggcggtaggcagagccatggtcgccctgctctagagcctaggcaggacgttacactgacaggcaaggttccccag

SEQ ID NO: 118323 - DNA, 120 bp, Artificial Sequence
  ENSG00000100711_28 (sequence is synthesized)
ccagtgttgggggtgggggtgcgtgccctaaccacagaaccgggcttatgaaagtgtggttctagaggcccggcatggtggcccacgcctgtaaccccagcactttgggagactgaggcg

SEQ ID NO: 118324 - DNA, 120 bp, Artificial Sequence
  ENSG00000100711_29 (sequence is synthesized)
gagccgagatcgcaccactgctctctagcctgggcaacaagagcaaagactccgtctcggaaaaaaaaaatgtggttccggggcctcccaggggacagcgtgtcataggttgctcaggcc

SEQ ID NO: 118325 - DNA, 120 bp, Artificial Sequence
  ENSG00000100711_30 (sequence is synthesized)
tccaagcacggtcggtgggcctccgactgcagccttggtgcccactccaccaaccggcagaagagccggccctgagtgctgatggggggatgtgtgtctgatggaggggtctcctgagag

SEQ ID NO: 118326 - DNA, 120 bp, Artificial Sequence
  ENSG00000100711_31 (sequence is synthesized)
gtcagtgattgcctacgatggggcttccctcccaagtcatcaagttcatgggaggctgcatcccatgggtctctttcaacaccagccctgactgaagagctgctctcttcagcagtgtat

SEQ ID NO: 118327 - DNA, 120 bp, Artificial Sequence
  ENSG00000100711_32 (sequence is synthesized)
tgttggagcgagtgctggaattgagtcattgtcactggaacagctggtcaccgcccaaagacggggagcctgggtcccagagaccagtccccaacatgggtgctgggtctggggagatgg

SEQ ID NO: 118328 - DNA, 120 bp, Artificial Sequence
  ENSG00000100711_33 (sequence is synthesized)
cccgtgaccaggctggggtggcatttccctgacactgggcctttgtagtgacaatcccctctgtgctgacgccgcttctcaacggtgggatggctgaggcctctgactcctgggtgaggc

SEQ ID NO: 118329 - DNA, 120 bp, Artificial Sequence
  ENSG00000100711_34 (sequence is synthesized)
cagctgtgtccctgaccatctgcttggcctgtcagtggccagggcactctcgaggtggcctccactcttcccccagccctgggtgcaggtgggcacctctgcaggagccagtcttgtctg

SEQ ID NO: 118330 - DNA, 120 bp, Artificial Sequence
  ENSG00000100711_35 (sequence is synthesized)
gaggttctctgaaggcaggaacccccacaggccccagggcatagcagcgcctcaattagccgagagcaaggcctctcgtggtgatgtggctcttgttgtttgtcccgggccctggggcac

SEQ ID NO: 118331 - DNA, 120 bp, Artificial Sequence
  ENSG00000100711_36 (sequence is synthesized)
gagcaccagccctcactgccaggctactcttggagcagcacaaggttaggatgtgctggccaccgccttggggctggtggccgcctgggcactcagggcctcctttgggccgtcttacct

SEQ ID NO: 118332 - DNA, 120 bp, Artificial Sequence
  ENSG00000100711_37 (sequence is synthesized)
tggtttgtttcttgctgtttttactctgtcctctgtgcgtgcgtctcctactggtactcgtgggaagggttaggtggaaaagaagcaggccctgttctcacgtttgcttttgtgttccca

SEQ ID NO: 118333 - DNA, 120 bp, Artificial Sequence
  ENSG00000100711_38 (sequence is synthesized)
tggcgatgctgtgggctgtgcacggggcgttctgcttctctgacgttctctcgccctccctcccttccccgttttcttctggattcgtttagaagcggttatagagccttcccttctttt

SEQ ID NO: 118334 - DNA, 120 bp, Artificial Sequence
  ENSG00000100711_39 (sequence is synthesized)
agtttatgctcgccaggtaattcctggtctcgtttgggggccccctccttcccccagaagggaaaagggggctcttcgtggagcgaaggtcttctcttacatctcttttgaggattattg

SEQ ID NO: 118335 - DNA, 120 bp, Artificial Sequence
  ENSG00000100711_40 (sequence is synthesized)
tgcttagaacatggatgattcttggtcaatattcagccgagcccttaatcatcagaagccaaaagaccctccatctctcccaagaggacccctttgactcccaccgttccgtcgctggtt

SEQ ID NO: 118336 - DNA, 120 bp, Artificial Sequence
  ENSG00000100711_41 (sequence is synthesized)
cattgaacccacacctgtttctggttcaccacccgccaccgaggtctctgacagcgaggaccaaagcggggtgtgcttgtcacaccttgtttcatccttaccaaggaccccagagcacga

SEQ ID NO: 118337 - DNA, 120 bp, Artificial Sequence
  ENSG00000100711_42 (sequence is synthesized)
gggtcttgttctcatgaagctgagggaggcgaggcgtcctgggtcccgcagcccccaatgcgctgctgaagggcctgctggggagcgggtgggcagcaccgagggccagctttgaaaaag

SEQ ID NO: 118338 - DNA, 120 bp, Artificial Sequence
  ENSG00000100711_43 (sequence is synthesized)
gctgtaccggcttaccaaatccggggaccattttcgtggcaaaagtgtccctcactctgttaaaagaatgcatggtgacacagatttccttcagagccaggtctgaatgtcttccccttg

SEQ ID NO: 118339 - DNA, 120 bp, Artificial Sequence
  ENSG00000100711_44 (sequence is synthesized)
gactgaagtccctgctgttagagcgggggagccggcggcgatggcggcgtcctcgtgctgcgctcgtgccggcgtcagggtccccctgccatctggagtgagcaggaggcggccaggcca

SEQ ID NO: 118340 - DNA, 120 bp, Artificial Sequence
  ENSG00000100711_45 (sequence is synthesized)
ggccttcccagctgaggtttgggagttccgtgcctttggtgctgagggtgagcgtgttcacggtgacttcgtcccttggtcatgaggaggttcgagctaggaaccccctgcaagtggtca

SEQ ID NO: 118341 - DNA, 120 bp, Artificial Sequence
  ENSG00000100711_46 (sequence is synthesized)
acgcatccggcttgctgttctaagtggaggcggcaggcacagctgggacccacgcccctcagaagcaggctctgtggtggtcggagcaggcacctcaccaggccacgctccatttggggc

SEQ ID NO: 118342 - DNA, 120 bp, Artificial Sequence
  ENSG00000100711_47 (sequence is synthesized)
tgctgagaagctggctgtggccagtcctgaggtctctgcagccctcgggagcttggaggcccggctggtttttctaaggagttggccgggtggccatggctgcccacagtggggtgtgac

SEQ ID NO: 118343 - DNA, 120 bp, Artificial Sequence
  ENSG00000100711_48 (sequence is synthesized)
cttgggcttgtggcctcctcagtgagggcctcctggcaggggctgagagcccagcgtcagtggggggcttcagcatagaccaccacatgtgtgtctctgggtgcttggtaaatgcaccct

SEQ ID NO: 118344 - DNA, 120 bp, Artificial Sequence
  ENSG00000100711_49 (sequence is synthesized)
gtgcttcggtgacaagtttttttgtctagtcaagtgaagcagtggaaatgcagggagcatcttaaatctgttttatttctaactgatttcaattccacctttacccttaggccgaccaag

SEQ ID NO: 118345 - DNA, 120 bp, Artificial Sequence
  ENSG00000100711_50 (sequence is synthesized)
catctgaggtgccgggacagtaccaccttgccatggggcttcaggcctgctgtgaccccttggggaaagtgagccccatggccacctgcccagttcccaggtcttgtgctgtcagaattc

SEQ ID NO: 118346 - DNA, 120 bp, Artificial Sequence
  ENSG00000100711_51 (sequence is synthesized)
ctggtgggccctgagcccagtcaccttcctgtttctgtctacctttgtacattctgtgtgcatagaacactcttggccaacaaagtccagccttgtgagccctggcttgtgagtcttaca

SEQ ID NO: 118347 - DNA, 120 bp, Artificial Sequence
  ENSG00000100711_52 (sequence is synthesized)
gcttctctgtgcctgggtcctccagctgaggaagcatcttcagggcgtccccaggcctggcgcccgcccccgtggcacacaccggcctgcgtgtgcttcagctgcttccaggggttccct

SEQ ID NO: 118348 - DNA, 120 bp, Artificial Sequence
  ENSG00000100711_53 (sequence is synthesized)
cacaggcgggggtcagggcacgcacgccaggactccaagtaaactagaataataagctttatgtctcagatacctgggcttttgccggctggcgcgcagccccagaatcagcacctcccc

SEQ ID NO: 118349 - DNA, 120 bp, Artificial Sequence
  ENSG00000100711_54 (sequence is synthesized)
atgctcgcctcgtttgtgaagtgggtgctagcacagccttccctggtttaggggtttaggttggctcttgctgtggatttcctagtcccttcgtggcgttgctctttggttccagtaaca

SEQ ID NO: 118350 - DNA, 120 bp, Artificial Sequence
  ENSG00000100711_55 (sequence is synthesized)
ggaccagggctaaaaaggcgttgttaaggtgaactgctgttgggtccagtgtggagggacctgaagtgccaggatgcatgctctgctgcgagacagtcaaaccccaagcccacctcaggc

SEQ ID NO: 118351 - DNA, 120 bp, Artificial Sequence
  ENSG00000100711_56 (sequence is synthesized)
cccatggttacgctgggtgcatctcccgcaggcctgggagcagcctgcaccccaccgcattggctctggagcctgggcacaggcggccagtccaccgtcctgcgtcacaaccctgcctgc

SEQ ID NO: 118352 - DNA, 120 bp, Artificial Sequence
  ENSG00000100711_57 (sequence is synthesized)
ggtgcgtggggaggtggcagggcccagctttctcagcagcccgtggtcgtgccccagcgacgtggtgagtgaccaagctgcgttttaacgctttgtcgtgtctttcctagtgtcggagat

SEQ ID NO: 118353 - DNA, 120 bp, Artificial Sequence
  ENSG00000100711_58 (sequence is synthesized)
gtatgcagtgtgacgccaagtttgactttctcaccagaaaggtgagctgaggccgctgagtgggggtggtgggaagaggggaggggccccaacaggacagctgccgctgccccttctggc

SEQ ID NO: 118354 - DNA, 66 bp, Artificial Sequence
  ENSG00000100711_59 (sequence is synthesized)
gaggggccccaacaggacagctgccgctgccccttctggcaggggacggatgtcatcttatggctc

SEQ ID NO: 118355 - DNA, 76 bp, Artificial Sequence
  ENSG00000100711_60 (sequence is synthesized)
gttatggctcattttgagtgtcagccatgccctgtttccgtggaaagtgactgtgctgattctgccggacgctatg

SEQ ID NO: 118356 - DNA, 120 bp, Artificial Sequence
  ENSG00000100711_61 (sequence is synthesized)
tccgtggaaagtgactgtgctgattctgccggacgctatggggtgggggtgcagcttgcgaggcctgtgcacccacctgccccccgccccctctgccccctccgccccgtccccgtgccg

SEQ ID NO: 118357 - DNA, 120 bp, Artificial Sequence
  ENSG00000100714_0 (sequence is synthesized)
gtcctgcttggctgcggagggagtggaacctcgatattggtggtgtccatcgtgggcagcggactaataaaggccatggcgccagcagaaatcctgaacgggaaggagatctccgcgcaa

SEQ ID NO: 118358 - DNA, 120 bp, Artificial Sequence
  ENSG00000100714_1 (sequence is synthesized)
ataagggcgagactgaaaaatcaagtcactcagttgaaggagcaagtacctggtttcacaccacgcctggcaatattacaggttggcaacagagatgattccaatctttatataaatgtg

SEQ ID NO: 118359 - DNA, 120 bp, Artificial Sequence
  ENSG00000100714_2 (sequence is synthesized)
aagctgaaggctgctgaagagattgggatcaaagccactcacattaagttaccaagaacaaccacagaatctgaggtgatgaagtacattacatctttgaatgaagactctactgtacat

SEQ ID NO: 118360 - DNA, 120 bp, Artificial Sequence
  ENSG00000100714_3 (sequence is synthesized)
gggttcttagtgcagctacctttagattcagagaattccattaacactgaagaagtgatcaatgctattgcacccgagaaggatgtggatggattgactagcatcaatgctgggaaactt

SEQ ID NO: 118361 - DNA, 120 bp, Artificial Sequence
  ENSG00000100714_4 (sequence is synthesized)
gctagaggtgacctcaatgactgtttcattccttgtacgcctaagggatgcttggaactcatcaaagagacaggggtgccgattgccggaaggcatgctgtggtggttgggcgcagtaaa

SEQ ID NO: 118362 - DNA, 120 bp, Artificial Sequence
  ENSG00000100714_5 (sequence is synthesized)
atagttggggccccgatgcatgacttgcttctgtggaacaatgccacagtgaccacctgccactccaagactgcccatctggatgaggaggtaaataaaggtgacatcctggtggttgca

SEQ ID NO: 118363 - DNA, 120 bp, Artificial Sequence
  ENSG00000100714_6 (sequence is synthesized)
actggtcagcctgaaatggttaaaggggagtggatcaaacctggggcaatagtcatcgactgtggaatcaattatgtcccagatgataaaaaaccaaatgggagaaaagttgtgggtgat

SEQ ID NO: 118364 - DNA, 120 bp, Artificial Sequence
  ENSG00000100714_7 (sequence is synthesized)
gtggcatacgacgaggccaaagagagggcgagcttcatcactcctgttcctggcggcgtagggcccatgacagttgcaatgctcatgcagagcacagtagagagtgccaagcgtttcctg

SEQ ID NO: 118365 - DNA, 120 bp, Artificial Sequence
  ENSG00000100714_8 (sequence is synthesized)
gagaaatttaagccaggaaagtggatgattcagtataacaaccttaacctcaagacacctgttccaagtgacattgatatatcacgatcttgtaaaccgaagcccattggtaagctggct

SEQ ID NO: 118366 - DNA, 120 bp, Artificial Sequence
  ENSG00000100714_9 (sequence is synthesized)
cgagaaattggtctgctgtctgaagaggtagaattatatggtgaaacaaaggccaaagttctgctgtcagcactagaacgcctgaagcaccggcctgatgggaaatacgtggtggtgact

SEQ ID NO: 118367 - DNA, 120 bp, Artificial Sequence
  ENSG00000100714_10 (sequence is synthesized)
ggaataactccaacacccctgggagaagggaaaagcacaactacaatcgggctagtgcaagcccttggtgcccatctctaccagaatgtctttgcgtgtgtgcgacagccttctcagggc

SEQ ID NO: 118368 - DNA, 120 bp, Artificial Sequence
  ENSG00000100714_11 (sequence is synthesized)
cccacctttggaataaaaggtggcgctgcaggaggcggctactcccaggtcattcctatggaagagtttaatctccacctcacaggtgacatccatgccatcactgcagctaataacctc

SEQ ID NO: 118369 - DNA, 120 bp, Artificial Sequence
  ENSG00000100714_12 (sequence is synthesized)
gttgctgcggccattgatgctcggatatttcatgaactgacccagacagacaaggctctctttaatcgtttggtgccatcagtaaatggagtgagaaggttctctgacatccaaatccga

SEQ ID NO: 118370 - DNA, 120 bp, Artificial Sequence
  ENSG00000100714_13 (sequence is synthesized)
ctaccacactgacagatgaagagataaacagatttgcaagattggacattgatccagaaaccataacttggcaaagagtgttggataccaatgatagattcctgaggaagatcacgattg

SEQ ID NO: 118371 - DNA, 120 bp, Artificial Sequence
  ENSG00000100714_14 (sequence is synthesized)
gacaggctccaacggagaagggtcacacacggacggcccagtttgatatctctgtggccagtgaaattatggctgtcctggctctcaccacttctctagaagacatgagagagagactgg

SEQ ID NO: 118372 - DNA, 120 bp, Artificial Sequence
  ENSG00000100714_15 (sequence is synthesized)
gcaaaatggtggtggcatccagtaagaaaggagagcccgtcagtgccgaagatctgggggtgagtggtgcactgacagtgcttatgaaggacgcaatcaagcccaatctcatgcagacac

SEQ ID NO: 118373 - DNA, 120 bp, Artificial Sequence
  ENSG00000100714_16 (sequence is synthesized)
tggagggcactccagtgtttgtccatgctggcccgtttgccaacatcgcacatggcaattcctccatcattgcagaccggatcgcactcaagcttgttggcccagaagggtttgtagtga

SEQ ID NO: 118374 - DNA, 120 bp, Artificial Sequence
  ENSG00000100714_17 (sequence is synthesized)
cggaagcaggatttggagcagacattggaatggaaaagttttttaacatcaaatgccggtattccggcctctgcccccacgtggtggtgcttgttgccactgtcagggctctcaagatgc

SEQ ID NO: 118375 - DNA, 120 bp, Artificial Sequence
  ENSG00000100714_18 (sequence is synthesized)
acgggggcggccccacggtcactgctggactgcctcttcccaaggcttacatacaggagaacctggagctggttgaaaaaggcttcagtaacttgaagaaacaaattgaaaatgccagaa

SEQ ID NO: 118376 - DNA, 120 bp, Artificial Sequence
  ENSG00000100714_19 (sequence is synthesized)
tgtttggaattccagtagtagtggccgtgaatgcattcaagacggatacagagtctgagctggacctcatcagccgcctttccagagaacatggggcttttgatgccgtgaagtgcactc

SEQ ID NO: 118377 - DNA, 120 bp, Artificial Sequence
  ENSG00000100714_20 (sequence is synthesized)
actgggcagaagggggcaagggtgccttagccctggctcaggccgtccagagagcagcacaagcacccagcagcttccagctcctttatgacctcaagctcccagttgaggataaaatca

SEQ ID NO: 118378 - DNA, 120 bp, Artificial Sequence
  ENSG00000100714_21 (sequence is synthesized)
ggatcattgcacagaagatctatggagcagatgacattgaattacttcccgaagctcaacacaaagctgaagtctacacgaagcagggctttgggaatctccccatctgcatggctaaaa

SEQ ID NO: 118379 - DNA, 120 bp, Artificial Sequence
  ENSG00000100714_22 (sequence is synthesized)
cacacttgtctttgtctcacaacccagagcaaaaaggtgtccctacaggcttcattctgcccattcgcgacatccgcgccagcgttggggctggttttctgtaccccttagtaggaacga

SEQ ID NO: 118380 - DNA, 120 bp, Artificial Sequence
  ENSG00000100714_23 (sequence is synthesized)
tgagcacaatgcctggactccccacccggccctgtttttatgatattgatttggaccctgaaacagaacaggtgaatggattattctaaacagatcaccatccatcttcaagaagctact

SEQ ID NO: 118381 - DNA, 120 bp, Artificial Sequence
  ENSG00000100714_24 (sequence is synthesized)
ttgaaagtctggccagtgtctattcaggcccactgggagttaggaagtataagtaagccaagagaagtcagcccctgcccagaagatctgaaactaatagtaggagtttccccagaagtc

SEQ ID NO: 118382 - DNA, 120 bp, Artificial Sequence
  ENSG00000100714_25 (sequence is synthesized)
attttcagccttaattctcatcatgtataaattaacataaatcatgcatgtctgtttactttagtgacgttccacagaataaaaggaaacaagtttgccatcttggtgttgcaatatgaa

SEQ ID NO: 118383 - DNA, 120 bp, Artificial Sequence
  ENSG00000100714_26 (sequence is synthesized)
gaatggtccaattcaggtgaaagtatcaattggtccaagatggctaacatgggtaagcctagaatgtcaaatattggtttcagaaggttgggtttttttgctggtgggagttgatgctgc

SEQ ID NO: 118384 - DNA, 120 bp, Artificial Sequence
  ENSG00000100714_27 (sequence is synthesized)
tcatgcagacactggaggtgagcagagtgactcctgccttcttgaattggttttggacagtcagagcagagtggttataaagcacacttgcaaggcgcggtggctcacacctgtaatccc

SEQ ID NO: 118385 - DNA, 120 bp, Artificial Sequence
  ENSG00000100714_28 (sequence is synthesized)
ccttgaatcagcatttctccacctggcccatgtggaaatgaatgggttattgctgtgacccagggtgcagggtgccaaaaggcctgcagtgtgctgaggagttatattaaatgagtagat

SEQ ID NO: 118386 - DNA, 120 bp, Artificial Sequence
  ENSG00000100714_29 (sequence is synthesized)
agggaagatgtacctcacaaaatagaattgtcccacatagggtgtcaataagccactgccctagaccagtggttgattctcaacagctgattttgaccccggggacatttggcaatgtct

SEQ ID NO: 118387 - DNA, 120 bp, Artificial Sequence
  ENSG00000100714_30 (sequence is synthesized)
agagactttttttattattacaactggaggtggggagtgctactggaatctagtgggtagaaactggggatgctggctaaacatcctttaatgcacaggacagcccctacaacattatcc

SEQ ID NO: 118388 - DNA, 120 bp, Artificial Sequence
  ENSG00000100714_31 (sequence is synthesized)
cctctgcctgttctacccttgcgggacatctgaatgcttaattactgctgccttgagatctatttttttttttgagatgaagtcttgctgtgtccaatcttggctcactgcaacctctgc

SEQ ID NO: 118389 - DNA, 87 bp, Artificial Sequence
  ENSG00000100714_32 (sequence is synthesized)
atacgccatcacgcctagctaatttttttttttgagatggagtttcactcgtcgcccagactggagtacaatggcgtgatctcggct

SEQ ID NO: 118390 - DNA, 120 bp, Artificial Sequence
  ENSG00000100714_33 (sequence is synthesized)
caatgaattgaaatatttatatttcaacacatttttggaagaagcgcagcatggcttgtcacaggttgacagtgtaggggagaaaactgctgtccaataaactacagaggaaactacagg

SEQ ID NO: 118391 - DNA, 120 bp, Artificial Sequence
  ENSG00000100714_34 (sequence is synthesized)
tgctgcttctctcctcctccatcctctctcatacgactgatactgccaggtgttgttctgccttctcccttttaaaatggaagtgagtaggtgtgtggcattgagcactcctgacagctt

SEQ ID NO: 118392 - DNA, 120 bp, Artificial Sequence
  ENSG00000100714_35 (sequence is synthesized)
ttgcaataaatcccatgtgtcacctgtgtgtttttcccccggcattttttcctggaggtggagagccccaagtgaatatccttgcatagaaattgattaaaattgcttcttttttgtggc

SEQ ID NO: 118393 - DNA, 120 bp, Artificial Sequence
  ENSG00000100714_36 (sequence is synthesized)
catttcactgtatatctccttggtttaagaggtaccatattattcccttgtatatgaaagaaacaataagcgcatgattataagcggccttcatagggataaaatcatagctttttggtc

SEQ ID NO: 118394 - DNA, 120 bp, Artificial Sequence
  ENSG00000100714_37 (sequence is synthesized)
tgccgaagatctggtgggtacccagacacgccaggcttggcgacatatctgtgtctgttgtcctagggtctttcagcagttattaataacaaaatgtaatgctgtacttaagacattgca

SEQ ID NO: 118395 - DNA, 120 bp, Artificial Sequence
  ENSG00000100714_38 (sequence is synthesized)
attaattcatcaatttaatcctattttgctaattacaagataattatgaaatgtttaaaaagtacatcagagtgaataatagctggtatgctttagtaatagatcacaagttccagatga

SEQ ID NO: 118396 - DNA, 120 bp, Artificial Sequence
  ENSG00000100714_39 (sequence is synthesized)
tttgagtaacatcttcatcctgtgggcatctctaaaagtgggtgtatgacttcaatttgcagagaacatcaagagtaccattgctttatctttgttgctaggtagttcagctacactttg

SEQ ID NO: 118397 - DNA, 120 bp, Artificial Sequence
  ENSG00000100714_40 (sequence is synthesized)
tttggtatttatagaaatttctgcccagataccagagttacaaataactgagtactctgggaacgagcattgtcgtgctctaaaatagtctagaatggatttctcacatcagtcagcagc

SEQ ID NO: 118398 - DNA, 120 bp, Artificial Sequence
  ENSG00000100714_41 (sequence is synthesized)
tcagcagctgagcttgattaagatgcttgtttctagagttacatgtttttccagatattacatgtgaatgtcatttgtattctatctggcaactttggccaggcgtggtggctcatgcct

SEQ ID NO: 118399 - DNA, 120 bp, Artificial Sequence
  ENSG00000100714_42 (sequence is synthesized)
gcagacccttggggctgaagcagcaagttgcagtgtgcacttatatccctagacacatcctgttgaaactgcaaaaatatcaaacatgaaaatcctaacatctttctccagagacgaaaa

SEQ ID NO: 118400 - DNA, 120 bp, Artificial Sequence
  ENSG00000100714_43 (sequence is synthesized)
aagtggcttgcctatgaaaagaatgagaactagacttaacgcccgtcttactggcaataagaagcttttagacaatggaggagtgtcctgtaaggtcacagggaagatgactttcaacat

SEQ ID NO: 118401 - DNA, 120 bp, Artificial Sequence
  ENSG00000100714_44 (sequence is synthesized)
gtgctcacacctagccgaatctatctggatattttcagacgtgcaagggtttgccaccccacatctcttcctaagaagttatttagcaatgtacttagcaaaatgaggaattaaccaaga

SEQ ID NO: 118402 - DNA, 86 bp, Artificial Sequence
  ENSG00000100714_45 (sequence is synthesized)
agtagctggaactacaggcacatgccatcatatccagctaattttttatttcctggtttagaactcctggcctcaagtgatcctct

SEQ ID NO: 118403 - DNA, 120 bp, Artificial Sequence
  ENSG00000100714_46 (sequence is synthesized)
aaggctgggaaacaagcagagctctactctagtgtcataggctggagtgaaagctgcagttctccatagcatccactcaccgcactggaaaaaatgcaccaagggaccttctctcttctt

SEQ ID NO: 118404 - DNA, 120 bp, Artificial Sequence
  ENSG00000100714_47 (sequence is synthesized)
gattggctggaattacggccggattccggagtcctttccagctccctcttcggccgggtttcccgccgaatacaaaggcgcactgtgaactggctctttctttccgccaatcatttccgc

SEQ ID NO: 118405 - DNA, 120 bp, Artificial Sequence
  ENSG00000100714_48 (sequence is synthesized)
cagccattcatcaccgattttcttcatcttcccctccctcttccgtcccgcagtccccgacctgttagctctcggttagttaagggactcgggtccttccgaactgcgcatgcgccaccg

SEQ ID NO: 118406 - DNA, 120 bp, Artificial Sequence
  ENSG00000100714_49 (sequence is synthesized)
gctgaagatgcaagttgcagtgtgccctttatgatactgttgtgtttagagggaaatgtatgcatgcttgtgtatttctgagaggacacataattcaggggacctcctgagagggttggg

SEQ ID NO: 118407 - DNA, 120 bp, Artificial Sequence
  ENSG00000100714_50 (sequence is synthesized)
ttggaagttgatgacttaccttttaatcttatacctttctatattgttgaattttgtttttctaccctgaggaagtattgcttatacaagtttttgcctgaacttccttggaattcccat

SEQ ID NO: 118408 - DNA, 120 bp, Artificial Sequence
  ENSG00000100714_51 (sequence is synthesized)
ttctgtcacagctttagcactgtctatgtttagagtgctcaagaaggatggtcatgcagcattagccttaggtgagcctctattctgttggtgcagcaagtattcattgagtttcttcta

SEQ ID NO: 118409 - DNA, 120 bp, Artificial Sequence
  ENSG00000100714_52 (sequence is synthesized)
tggtgcagcaagtattcattgagtttcttctaaatgcctgggctccacccttccctacagactttttatttttatttttatttttttgagacagtgtctctgtcgcccaggctggagtgc

SEQ ID NO: 118410 - DNA, 67 bp, Artificial Sequence
  ENSG00000100714_53 (sequence is synthesized)
tggcccagactttctttttcctaaaacattaggttggtaaaaaccacaattacttttgcaccaacct

SEQ ID NO: 118411 - DNA, 87 bp, Artificial Sequence
  ENSG00000100714_54 (sequence is synthesized)
gactttctttttcctaaaacattaggttggtttttttttcctcctcttctggctgggcgtggaggtggctcatgcctgtaatcccag

SEQ ID NO: 118412 - DNA, 120 bp, Artificial Sequence
  ENSG00000100714_55 (sequence is synthesized)
agaggttgcagtgagccaggatcatgctgctgcactccagcctgggagacagagctagactctgtctaaaaaaataaatcaaatatttttccttctcttcttgttctttatcttctatct

SEQ ID NO: 118413 - DNA, 120 bp, Artificial Sequence
  ENSG00000100714_56 (sequence is synthesized)
ttgttctttatcttctatctctgttcttcctctcccatttgtttccttccctttttccccttgtctccctccactggatccttccagaggatgctgcatcccactggcgccagtgctaaa

SEQ ID NO: 118414 - DNA, 120 bp, Artificial Sequence
  ENSG00000100714_57 (sequence is synthesized)
cactgctgatgttggcaaagcagtatttttcccagtgaccttggttttattatttttaattccctaggtccatgtcaatgttgtaatacagtcaattttacagtccacagaaatgatagc

SEQ ID NO: 118415 - DNA, 120 bp, Artificial Sequence
  ENSG00000100714_58 (sequence is synthesized)
gctgccttgagaggcatatggcaaaggggtcacagtgcagagccccagctctatggcagagagcctcacccacctccctgcctccacatcctcaccatggaaataggagcactgttggta

SEQ ID NO: 118416 - DNA, 120 bp, Artificial Sequence
  ENSG00000100714_59 (sequence is synthesized)
cctacctcgtgagggcggttctggaattactcaaacacatcatctaagatgctttgtacagggcctggcacattgtaagcacttgtcagttcctgttgcacagcatcctccaggccctgt

SEQ ID NO: 118417 - DNA, 84 bp, Artificial Sequence
  ENSG00000100714_60 (sequence is synthesized)
ttttttccttttttttttttttttttggcagggggggtaggggggttgggacaagagtcgtgctcttttgcccaggctgcagtg

SEQ ID NO: 118418 - DNA, 120 bp, Artificial Sequence
  ENSG00000100714_61 (sequence is synthesized)
ctttctggtacatttcttaatgtcctgtgaaacttcacctggaatgggatttgctgggaattcattttgtagacaagggaaggatgcagtcttgtcagatatggtgacttaaggatcatc

SEQ ID NO: 118419 - DNA, 120 bp, Artificial Sequence
  ENSG00000100714_62 (sequence is synthesized)
ttaaaggatttaggtttcctaatatcgccaacagccacatgggtttaaatcctcaatactggtaggggctgggcatggtagctcacacctgtaatcccaccacactcagctgagttttga

SEQ ID NO: 118420 - DNA, 85 bp, Artificial Sequence
  ENSG00000100714_63 (sequence is synthesized)
gctcacacctgtaatcccaccacactcagctgagttttgaagttctgttttttgtagagatggggtctcactgtcttgtccaggc

SEQ ID NO: 118421 - DNA, 120 bp, Artificial Sequence
  ENSG00000100714_64 (sequence is synthesized)
aacaaaaccccaaaactcagctgagtgtgtggtgcacgcttgtagtcctagctccttgggagtctgatgtgagaggtttgcttgagcctaggagttcgaggccgcagtgagctatgactg

SEQ ID NO: 118422 - DNA, 120 bp, Artificial Sequence
  ENSG00000100714_65 (sequence is synthesized)
agccaccgcattccagcctgagcaacagagcaagaccctgtgtcaaaataaaaaagacctatagaagcattagtgcttggggtaactattagcatgtgctggcagagaaggtctagtgcc

SEQ ID NO: 118423 - DNA, 120 bp, Artificial Sequence
  ENSG00000100714_66 (sequence is synthesized)
tttaccttggtgctaagagtccctccagattagtggctttcccgtgccctttctcttctctgggctgctaatgccttccttccccttattagtaatattactgataaacaaattgtacat

SEQ ID NO: 118424 - DNA, 120 bp, Artificial Sequence
  ENSG00000100714_67 (sequence is synthesized)
tctctgatctcacttcagaggctgtttctgtgcactgaagatgtacacacagtcttaattcaaaagagatagcatttatgtgctgccacattaaacagattgcaacagtattactattga

SEQ ID NO: 118425 - DNA, 120 bp, Artificial Sequence
  ENSG00000100714_68 (sequence is synthesized)
gtttgtgttggctctgtgcaaccctcatggtgcccaggaacagatgaaaccaccagagacttggagcctcaggttcattcaatggtgtcccagggaacggggttggagggcttattccca

SEQ ID NO: 118426 - DNA, 120 bp, Artificial Sequence
  ENSG00000100714_69 (sequence is synthesized)
gaaggcctctgaaatgtaagagctattaacaaggagttataagtcatttttggtagctataggcccaggcaatgggtagagatcaagatgggataaatggtaagatcagtagagtattgc

SEQ ID NO: 118427 - DNA, 120 bp, Artificial Sequence
  ENSG00000100714_70 (sequence is synthesized)
tcagataaatatgtaagctattttactggcacactgtatctagtgatattaacatgataagctataggtaggataatttctcatcagattgcagaaatacatttatagcctatttcctgt

SEQ ID NO: 118428 - DNA, 120 bp, Artificial Sequence
  ENSG00000100714_71 (sequence is synthesized)
tatataatgaaaagctactaatggggtagtagacaatgatatgggtaatagcttaaacagccttcgttgtcacttacctgaattcaggaatgacaggtttctttcatgcatgaggtactg

SEQ ID NO: 118429 - DNA, 120 bp, Artificial Sequence
  ENSG00000100714_72 (sequence is synthesized)
acacacacacacacacacacacatatggcattgagttctagtcatatcctaaagaaaaactatggtgcgctatgttatttatagtactatactctgtgtgagtgactctgtgtgtatgtg

SEQ ID NO: 118430 - DNA, 120 bp, Artificial Sequence
  ENSG00000100714_73 (sequence is synthesized)
agtgactctgtgtgtatgtgtgttggtggaggtcagggatgacttgtttgtaatataccttaaggaagtctgtccgaatttgcccttcaaatactaaataaattcatctctcacctcaaa

SEQ ID NO: 118431 - DNA, 120 bp, Artificial Sequence
  ENSG00000100714_74 (sequence is synthesized)
cctccagctgcttcccactcagatctatccccgtgctctcgccttgccacgttcaccttctggcatggaactctgagcctcttccttcttacttgccagactccttagcctcacactaat

SEQ ID NO: 118432 - DNA, 120 bp, Artificial Sequence
  ENSG00000100714_75 (sequence is synthesized)
ttcagtgacctctgcagcctgtgatctcacttgcgcatggtgaatacctgtcttcaacttgtaaagtggaccactttcccttccctgcgcatgcctcgtttgccctttgtagttccctca

SEQ ID NO: 118433 - DNA, 120 bp, Artificial Sequence
  ENSG00000100714_76 (sequence is synthesized)
actactgtgtatccagcacaatgccaggccttgggctacacaactgaataaggttcaacttcaccttcaccttcagctgcttcctccccatctcctctctgtcatgtctgttattccttc

SEQ ID NO: 118434 - DNA, 120 bp, Artificial Sequence
  ENSG00000100714_77 (sequence is synthesized)
caaaccttgtttgatttccccttatcaagggatgatctttccttctctccctccctcctctcccatagaacatgtgtattgtatcttttgttgcatgtgtctcatgtacggcgtcctgtg

SEQ ID NO: 118435 - DNA, 120 bp, Artificial Sequence
  ENSG00000100714_78 (sequence is synthesized)
ctctcctgcctagatagctcctcaagggcagtggtcactgtggcgccacatccagcttcctgccatctgaccactggcactcatatctattgaattgtcgaagggagttatagctggaag

SEQ ID NO: 118436 - DNA, 120 bp, Artificial Sequence
  ENSG00000100714_79 (sequence is synthesized)
tcttttttctcccttcccatctcaagtttcagatgtagacgctgagctgccaggaacattagtcactgtcaagccttcaccgtttttaacctccctcccactctccctaccgtgctttta

SEQ ID NO: 118437 - DNA, 120 bp, Artificial Sequence
  ENSG00000100714_80 (sequence is synthesized)
agacagtagctcataattgatcactcattttcttgtagtgtaattatctaacaggcgataaagaaattgctctcctacaactcctcactttgaatacttgcgatatgacattcaagctca

SEQ ID NO: 118438 - DNA, 120 bp, Artificial Sequence
  ENSG00000100714_81 (sequence is synthesized)
tgccgaaaccatcaagcaaatgccaagtgagcagagttcactgcccagaagaaaattggaatcgggcctattatgattgctgtggatcataagctataaagcaggagctatatagctctt

SEQ ID NO: 118439 - DNA, 120 bp, Artificial Sequence
  ENSG00000100714_82 (sequence is synthesized)
gctgtggaccatcttggtgtcaaatcaagaatgatgccaggactactcatactgaataaaaaattctgtttcccagggacagtatgctcttcactgaatctaggatgagcccagttgata

SEQ ID NO: 118440 - DNA, 120 bp, Artificial Sequence
  ENSG00000100721_0 (sequence is synthesized)
gaccagcgagcggccttgagaggctctggctcttgcttcttaggcggcccgaggacgccatggccgagtgcccgacactcggggaggcagtcaccgaccacccggaccgcctgtgggcct

SEQ ID NO: 118441 - DNA, 120 bp, Artificial Sequence
  ENSG00000100721_1 (sequence is synthesized)
gggagaagttcgtgtatttggacgagaagcagcacgcctggctgcccttaaccatcgagataaaggataggttacagttacgggtgctcttgcgtcgggaagacgtcgtcctggggaggc

SEQ ID NO: 118442 - DNA, 120 bp, Artificial Sequence
  ENSG00000100721_2 (sequence is synthesized)
ctatgacccccacccagataggcccaagcctgctgcctatcatgtggcagctctaccctgatggacgataccgatcctcagactccagtttctggcgcttagtgtaccacatcaagattg

SEQ ID NO: 118443 - DNA, 120 bp, Artificial Sequence
  ENSG00000100721_3 (sequence is synthesized)
acggcgtggaggacatgcttctcgagctgctgccagatgactgatgtatggtcttggcagcacctgtctcctttcaccccagggcctgagcctggccagcctacaatggggatgttgtgt

SEQ ID NO: 118444 - DNA, 120 bp, Artificial Sequence
  ENSG00000100721_4 (sequence is synthesized)
ttctgttcaccttcgtttactatgcctgtgtcttctccaccacgctggggtctgggaggaatggacagacagaggatgagctctacccagggcctgcaggacctgcctgtagcccactct

SEQ ID NO: 118445 - DNA, 120 bp, Artificial Sequence
  ENSG00000100721_5 (sequence is synthesized)
ccaaggaggattccatttggcagagcttcttccaggtgcccagctatacctgtgcctcggcttttctcagctggatgatggtcttcagcctctttctgtcccttctgtccctcacagcac

SEQ ID NO: 118446 - DNA, 120 bp, Artificial Sequence
  ENSG00000100721_6 (sequence is synthesized)
tagtatttcatgttgcacacccactcagctccgtgaacttgtgagaacacagccgattcacctgagcaggacctctgaaaccctggaccagtggtctcacatggtgctacgcctgcatgt

SEQ ID NO: 118447 - DNA, 120 bp, Artificial Sequence
  ENSG00000100721_7 (sequence is synthesized)
aaacacgcctgcaaacgctgcctgccggtaaacacgcctgcaaacgctgcctgcccgtaaacacgcctgcaaacgctgcctgcccacacaggttcacgtgcagctcaaggaaaggcctga

SEQ ID NO: 118448 - DNA, 120 bp, Artificial Sequence
  ENSG00000100721_8 (sequence is synthesized)
aaggagcccttatctgtgctcaggactcagaagcctctgggtcagtggtccacatcccgggacgcagcaggaggccaggccggcgagccctgtggatgagccctcagaacccttggcttg

SEQ ID NO: 118449 - DNA, 120 bp, Artificial Sequence
  ENSG00000100721_9 (sequence is synthesized)
cccacgtggaaaagggatagaggttgggtttccccccttttatagatggtcacgcacctgggtgttacaaagttgtatgtggcatgaatactttttgtaatgattgattaaatgcaagat

SEQ ID NO: 118450 - DNA, 120 bp, Artificial Sequence
  ENSG00000100721_10 (sequence is synthesized)
agtttatctaacttcgtgcggaatcagcttctatccttgacttagattctggtggagagaagtgagaataggcagcccccaaataaaaaatattcatggatttatttattttcctttgga

SEQ ID NO: 118451 - DNA, 120 bp, Artificial Sequence
  ENSG00000100721_11 (sequence is synthesized)
ccccttctccatgaaggcagtgctaacccctccccgactgctgccatctgagggtccctagggatgggagaggcttcctggaggcactcatgtctcccttaccacttcgggagccaaggg

SEQ ID NO: 118452 - DNA, 120 bp, Artificial Sequence
  ENSG00000100721_12 (sequence is synthesized)
ctttgtaggcagccccctttatcgcagctgctcatatctataaagtacttcacaagtttcagctggcactttcatttaccattgcttttttttttttttgagatgagtctggctctgtgg

SEQ ID NO: 118453 - DNA, 88 bp, Artificial Sequence
  ENSG00000100721_13 (sequence is synthesized)
gcctgggagaagttcgtgtatttggacgagaagcagcacgcctggctgcccttaaccatcgagatacagggtctcgctctgtgagatc

SEQ ID NO: 118454 - DNA, 120 bp, Artificial Sequence
  ENSG00000100721_14 (sequence is synthesized)
gagccgctgcaacccgccagaaaaaagtgtgcctttcatggccctgtctgggtggctagacacgtgtgtgtgctggtggtcctggcccagccagagtccctgagaggagcatgcatggcc

SEQ ID NO: 118455 - DNA, 120 bp, Artificial Sequence
  ENSG00000100721_15 (sequence is synthesized)
ctggcaggagggattccggttttctgcgcctggagaagccctggcaagcggaacctgaaagtatgccctgtccttttcttctcctcagataaaggataggttacagttacgggtgctctt

SEQ ID NO: 118456 - DNA, 120 bp, Artificial Sequence
  ENSG00000100721_16 (sequence is synthesized)
gaaggctggtgggaggaggggcagtctccaagagcccctgaaatcctcacacctgggttcctacctgctgtttccagctaggggaaggcgcaggagtgaggaatggagggagtggagggc

SEQ ID NO: 118457 - DNA, 120 bp, Artificial Sequence
  ENSG00000100721_17 (sequence is synthesized)
atcaatgccttctctctctctctgcctctcagattgacggcgtggaggacatgcttctcgagctgctgccagatgactgatgtcttggcagcacctgtctcctttcaccccagggcctga

SEQ ID NO: 118458 - DNA, 120 bp, Artificial Sequence
  ENSG00000100722_0 (sequence is synthesized)
ggaggcggtggtgtcccggctgcggggtaggagtccgcggcagcctccgggtaagccaagcgccgcgcagtgctgagttcccgcacgccgcagagccatggagatcggcaccgagatcag

SEQ ID NO: 118459 - DNA, 120 bp, Artificial Sequence
  ENSG00000100722_1 (sequence is synthesized)
ccgcaagatccggagtgccattaaggggaaattacaagaattaggagcttatgttgatgaagaacttcctgattacattatggtgatggtggccaacaagaaaagtcaggaccaaatgac

SEQ ID NO: 118460 - DNA, 120 bp, Artificial Sequence
  ENSG00000100722_2 (sequence is synthesized)
agaggatctgtccctgtttctagggaacaacacaattcgattcaccgtatggcttcatggtgtattagataaacttcgctctgttacaactgaaccctctagtctgaagtcttctgatac

SEQ ID NO: 118461 - DNA, 120 bp, Artificial Sequence
  ENSG00000100722_3 (sequence is synthesized)
caacatctttgatagtaacgtgccttcaaacaagagcaatttcagtcggggagatgagaggaggcatgaagctgcagtgccaccacttgccattcctagcgcgagacctgaaaaaagaga

SEQ ID NO: 118462 - DNA, 120 bp, Artificial Sequence
  ENSG00000100722_4 (sequence is synthesized)
ttccagagtttctacaagttcgcaggagtcaaaaaccacaaatgtcagacagacttacgatgatggagctgcaacccgactaatgtcaacagtgaaacctttgagggagccagcaccctc

SEQ ID NO: 118463 - DNA, 120 bp, Artificial Sequence
  ENSG00000100722_5 (sequence is synthesized)
tgaagatgtgattgatattaagccagaaccagatgatctcattgacgaagacctcaactttgtgcaggagaatcccttatctcagaaaaaacctacagtgacacttacatatggttcttc

SEQ ID NO: 118464 - DNA, 120 bp, Artificial Sequence
  ENSG00000100722_6 (sequence is synthesized)
tcgcccttctattgaaatttatcgaccacctgcaagtagaaatgcagatagtggtgttcatttaaacaggttgcaatttcaacagcagcagaatagtattcatgctgccaagcagcttga

SEQ ID NO: 118465 - DNA, 120 bp, Artificial Sequence
  ENSG00000100722_7 (sequence is synthesized)
tatgcagagtagttgggtatatgaaacaggacgtttgtgtgaaccagaggtgcttaacagcttagaagaaacgtatagtccgttctttagaaacaactcggagaaaatgagtatggagga

SEQ ID NO: 118466 - DNA, 120 bp, Artificial Sequence
  ENSG00000100722_8 (sequence is synthesized)
tgaaaactttcggaagagaaagttgcctgtggtaagttcagttgttaaagtaaaaaaattcaatcatgatggagaagaggaggaagaagatgatgattacgggtctcgaacaggaagcat

SEQ ID NO: 118467 - DNA, 120 bp, Artificial Sequence
  ENSG00000100722_9 (sequence is synthesized)
ctccagcagtgtgtctgtgcctgcaaagcctgaaaggagaccttctcttccaccttctaaacaagctaacaagaatctgattttgaaggctatatctgaagctcaagaatccgtaacaaa

SEQ ID NO: 118468 - DNA, 120 bp, Artificial Sequence
  ENSG00000100722_10 (sequence is synthesized)
aacaactaactactctacagttccacagaaacagacacttccagttgctcccagaactcgaacttctcaagaagaattgctagcagaagtggtccagggacaaagtaggacccccagaat

SEQ ID NO: 118469 - DNA, 120 bp, Artificial Sequence
  ENSG00000100722_11 (sequence is synthesized)
aagtccccccattaaagaagaggaaacaaaaggagattctgtagaaaaaaatcaaggaactcaacagaggcaattattatcccgactgcaaatcgacccagtaatggcagaaactctgca

SEQ ID NO: 118470 - DNA, 120 bp, Artificial Sequence
  ENSG00000100722_12 (sequence is synthesized)
gatgagtcaagattactatgacatggaatccatggtccatgcagacacaagatcatttattctgaagaagccaaagctgtctgaggaagtagtagtggcaccaaaccaagagtcggggat

SEQ ID NO: 118471 - DNA, 120 bp, Artificial Sequence
  ENSG00000100722_13 (sequence is synthesized)
gaagactgcagattcccttcgggtactttcaggacaccttatgcagacacgagatcttgtacaaccagataaacctgcaagtcccaagtttatagtgacgctggatggtgtccccagccc

SEQ ID NO: 118472 - DNA, 120 bp, Artificial Sequence
  ENSG00000100722_14 (sequence is synthesized)
cccaggatacatgtcagatcaagaggaggacatgtgctttgaaggaatgaaacccgtaaaccaaactgcagcctcaaacaagggactcagaggtctcctccacccacagcagttgcactt

SEQ ID NO: 118473 - DNA, 120 bp, Artificial Sequence
  ENSG00000100722_15 (sequence is synthesized)
gctgagcaggcagcttgaggacccaaatggtagcttttctaacgctgagatgagtgaactgagtgtggcacagaaaccagaaaaacttttggagcgctgcaagtactggcctgcttgtaa

SEQ ID NO: 118474 - DNA, 120 bp, Artificial Sequence
  ENSG00000100722_16 (sequence is synthesized)
aaatggggatgagtgtgcctaccatcaccccatctcaccctgcaaagccttccccaattgtaaatttgctgaaaaatgtttgtttgttcacccaaattgtaaatatgatgcaaagtgtac

SEQ ID NO: 118475 - DNA, 120 bp, Artificial Sequence
  ENSG00000100722_17 (sequence is synthesized)
taaaccagattgtcccttcactcatgtgagtagaagaattccagtactgtctccaaaaccagcagttgcaccaccagcaccaccttccagtagtcagctctgccgttacttccctgcttg

SEQ ID NO: 118476 - DNA, 120 bp, Artificial Sequence
  ENSG00000100722_18 (sequence is synthesized)
taagaagatggaatgtcccttctatcatccaaaacattgtaggtttaacactcaatgtacaagaccggactgcacattctaccatcccaccattaatgtcccaccacgacatgccttgaa

SEQ ID NO: 118477 - DNA, 120 bp, Artificial Sequence
  ENSG00000100722_19 (sequence is synthesized)
atggattcgacctcaaaccagcgaatagcacccagtcctgcctggcagaagatcatgcagtttggaagttttcatgtactgatgaaagatactctacagaacttgtcaaatctttgaaac

SEQ ID NO: 118478 - DNA, 120 bp, Artificial Sequence
  ENSG00000100722_20 (sequence is synthesized)
ttggaatatattgctttcataatatgaagttttattgcctatctatctgaagtgtctaatttttcaagtttgtaagtttattatgtggttttaacattgggtgtttttgttttgttttta

SEQ ID NO: 118479 - DNA, 120 bp, Artificial Sequence
  ENSG00000100722_21 (sequence is synthesized)
ctatgaaaagacagcttaaggaagagctaaattctgttaaaatatttggggcatgtttgtgcactgctgttgtgaggatcagcatatgaaattgacatcatggttagtcatggtactgca

SEQ ID NO: 118480 - DNA, 120 bp, Artificial Sequence
  ENSG00000100722_22 (sequence is synthesized)
gcttagggggctacacggttgctgtgtgagtggagagatgcagtgaggcagttgtcattattctaaaaattgtactactttcacttttcccaaagattatataatgttcataatccacca

SEQ ID NO: 118481 - DNA, 120 bp, Artificial Sequence
  ENSG00000100722_23 (sequence is synthesized)
tgaaaacagcattggccaaaggtactgaggctgcttaaaatattcaattctgctttttaatttttaagtgaatttagtttgaaaagcatgattatacaggcctctcaggctgagtgctac

SEQ ID NO: 118482 - DNA, 120 bp, Artificial Sequence
  ENSG00000100722_24 (sequence is synthesized)
tttggtaaagttcccagttttcctgccttctgtgacaggatgaatgaggtgggtatggacagtggaggcagctggaatggcaagtgcagaaaataggaacagttctatacagtgctctca

SEQ ID NO: 118483 - DNA, 120 bp, Artificial Sequence
  ENSG00000100722_25 (sequence is synthesized)
tttactaataacataatgccttctaaataatttttttgggaaactacattatcacaaaattatacaaatttttttacaagtatttacatactgtatctgaaaacagactttaaagtcaca

SEQ ID NO: 118484 - DNA, 120 bp, Artificial Sequence
  ENSG00000100722_26 (sequence is synthesized)
aagtcacaagattataaatgtacatatatattctcacattctgaaaaataacattctcagaatccacagaaaatatacttagttactactgaagataatttttgaaatgtaaaaattaga

SEQ ID NO: 118485 - DNA, 120 bp, Artificial Sequence
  ENSG00000100722_27 (sequence is synthesized)
gtatattttaaatgacagaactataattacagagatcagatcagataggtaaactgcaagatagataggatgaaacttttggcctactgtattacttacagagtttttttgtgtgtggtt

SEQ ID NO: 118486 - DNA, 120 bp, Artificial Sequence
  ENSG00000100722_28 (sequence is synthesized)
tttaaaactgttaaggcaagaagtgtcaaatgctttagagttaaataacagatcactgatttcaaagacttggtgtatagtgttaaaaattaaagcttaaaaggtggttagaaaagtgga

SEQ ID NO: 118487 - DNA, 120 bp, Artificial Sequence
  ENSG00000100722_29 (sequence is synthesized)
ttaatgcaaaaggggtaataaagactgcaacattctcaggaccaaattaaactgctaaaaaaaaaaaaaaagttcattgacttgcttagtcgtatactcaaatgatgataaacctacatg

SEQ ID NO: 118488 - DNA, 120 bp, Artificial Sequence
  ENSG00000100722_30 (sequence is synthesized)
tgcaaaggctcacgtttaagattgtcaagccagcagtctactgttgtgttgccattgcttttccattgggagaagaaagaattaaccagtcattaaaccatttggtaagttgcactttgc

SEQ ID NO: 118489 - DNA, 120 bp, Artificial Sequence
  ENSG00000100722_31 (sequence is synthesized)
tgtgctgatcccacaggaaaggcttgaaacacgagaagcagcaaagacagagcacacaagtgcataaggctgttgtcttcggcttgggtgaaatgacagttcctcttcattctaaaggtt

SEQ ID NO: 118490 - DNA, 120 bp, Artificial Sequence
  ENSG00000100722_32 (sequence is synthesized)
tactccattgaatttaaggcatttgttcattccagtgttgagatgctttgcatctctgcagaagaaatttattttaaattgtttaaatatctggaaatacttttagctatcatttataaa

SEQ ID NO: 118491 - DNA, 120 bp, Artificial Sequence
  ENSG00000100722_33 (sequence is synthesized)
gatagttttgttctcagtttcactataaattatagaacaaatgggaaacaagggtttaatttagttcagccattttacaaggaaataataaaatactaaaatctgattgttttttgctat

SEQ ID NO: 118492 - DNA, 120 bp, Artificial Sequence
  ENSG00000100722_34 (sequence is synthesized)
ttaatagccactgcccagacacatatttaagagtttaatctttcagttgctatggcttatgaacaagctaaggttgaccataaaacatttgttggatgacgtggtttaaaatgatcacca

SEQ ID NO: 118493 - DNA, 120 bp, Artificial Sequence
  ENSG00000100722_35 (sequence is synthesized)
caaaaagggaccacaaaaaaaggaaggaaatgagcatggttggcgattggaagcaagggtaccagagggcacagtgtgctttggcatgcattttatacataaaatgaatggaacaaaagg

SEQ ID NO: 118494 - DNA, 120 bp, Artificial Sequence
  ENSG00000100722_36 (sequence is synthesized)
tgccagaagtcccaggttacacaatcaggagcttagatactgcacacaaaaataattatctgggttaaaaaagtaaacatagggcagattctatatggcctatcatgtttcttcaccttc

SEQ ID NO: 118495 - DNA, 120 bp, Artificial Sequence
  ENSG00000100722_37 (sequence is synthesized)
ccctcgttgctggctgatacagcgaggtggtcagctgatgactacttagtcaatatgacctttagtcgtgaaactgacagcagcagtgattaaggctgacttaatcaggttggccacttt

SEQ ID NO: 118496 - DNA, 120 bp, Artificial Sequence
  ENSG00000100722_38 (sequence is synthesized)
gaaggacagaaatgcagtggaaacagttttattctatgtagtttacatgcttaaggttacagagtttctacctgcactgtaatggaaatataatttctctgtagccaaaagctggcaaac

SEQ ID NO: 118497 - DNA, 120 bp, Artificial Sequence
  ENSG00000100722_39 (sequence is synthesized)
ttgacccagagggaaaatttaaaactgcagcaggctcaaatgtagagtatttttctttttatgggcaggttgttcagggatttttttcctcctttaatttattgactgactgtaaataca

SEQ ID NO: 118498 - DNA, 120 bp, Artificial Sequence
  ENSG00000100722_40 (sequence is synthesized)
tgagtagaaacttaatagtcatgtatttcaaaatttggcttaatttaggagaatccactgatgaacaagtaccaacttacgtttcaagcttcttagccccataatcagtccttcagccac

SEQ ID NO: 118499 - DNA, 120 bp, Artificial Sequence
  ENSG00000100722_41 (sequence is synthesized)
agctatttagagctttaaaactaccaggttcaatcactggttatgctttctgtgatgtaatttagtcatttctatttttagtattaaccaagtattagacacagaaaataggtattaaga

SEQ ID NO: 118500 - DNA, 120 bp, Artificial Sequence
  ENSG00000100722_42 (sequence is synthesized)
atcttcatatatcctgtcagaccaaatgggattccaggaacctaaagcgatctattatgctataaagataattaacacattaaaaactcatagggtcaatacagcatcttaaacctcaca

SEQ ID NO: 118501 - DNA, 120 bp, Artificial Sequence
  ENSG00000100722_43 (sequence is synthesized)
cttagaaaaatatatttttaaatagcagtctacataattttcaatcttcaggaaactacagataggctagacagcgaattcctgaatgatgagtagtgatctttggcagcatttaaagtg

SEQ ID NO: 118502 - DNA, 120 bp, Artificial Sequence
  ENSG00000100722_44 (sequence is synthesized)
aaaagaaataaggatctaagaattcagccctaatccactaaaaaaaggaattctaactgacaagtttttacaaatggagttgggctcattcattttggaaataaacctatggagtggcac

SEQ ID NO: 118503 - DNA, 120 bp, Artificial Sequence
  ENSG00000100722_45 (sequence is synthesized)
acatctaaacaaattttcccaatagaaaaaaggctataaaaattttattccaagagtgattaaattgtataatgttgtatatgtgaatttaacacttttgtttacatgttaaacaaatgt

SEQ ID NO: 118504 - DNA, 120 bp, Artificial Sequence
  ENSG00000100722_46 (sequence is synthesized)
gtatatattagactacattaaatatgcaattctttcttccagttaaatactgttgctccctaaaacccttacattgtacaccattgggaatgattgttcatcatactacttttccattag

SEQ ID NO: 118505 - DNA, 120 bp, Artificial Sequence
  ENSG00000100722_47 (sequence is synthesized)
tgaggctacagttatgttttaaatgtgcgattacagagatggcatctgaacataaactgatggctcgaaaatgaaaatggaaatgtagcagccatatactgctaactttggatctgttcc

SEQ ID NO: 118506 - DNA, 120 bp, Artificial Sequence
  ENSG00000100722_48 (sequence is synthesized)
tgaattcaaaactactaggagaaaagtgtcctttataaaaaaggaccttattaatgcctaaaaaacatcatattctctaggaaagcttgtgtctgtttccttagggaaaatgtttgcctt

SEQ ID NO: 118507 - DNA, 120 bp, Artificial Sequence
  ENSG00000100722_49 (sequence is synthesized)
ttaaaaactgtgatcctttaggatgatcatgactttccctttccttatggaaatgcaagaataaaatatttcattaaacaatgaaccttgaaaataaaatataaacattaagaaaccatt

SEQ ID NO: 118508 - DNA, 120 bp, Artificial Sequence
  ENSG00000100722_50 (sequence is synthesized)
ttgctaaaaagataatgaaaattatccaaattgggtttttgagttcttctgtaaagagtgctctaccctaaattttcccagcaggtctgccgaaatcacacacttcccaatacaggggga

SEQ ID NO: 118509 - DNA, 120 bp, Artificial Sequence
  ENSG00000100722_51 (sequence is synthesized)
cttggcctttaccatcaagtattcgatccttccttgaaatggcattatctggcagtgtatggattacggattatacccagtgcatatagcaaatattttgaacagatcagtctttcacta

SEQ ID NO: 118510 - DNA, 120 bp, Artificial Sequence
  ENSG00000100722_52 (sequence is synthesized)
ttttgatgattctgggcatttctccctgttacagtcttgggttagcaccacttgaccatgcagggttgggttttggtttttcttctctgtaattctggtctcaaagttaatttctgtagt

SEQ ID NO: 118511 - DNA, 120 bp, Artificial Sequence
  ENSG00000100722_53 (sequence is synthesized)
catctcagcatctctcagtgaggtgtatgtacacatttccagacaaataagctgcaatcagagaagaaaattgcagggagttaattatgtttttagattttcataacagtttaatatttt

SEQ ID NO: 118512 - DNA, 120 bp, Artificial Sequence
  ENSG00000100722_54 (sequence is synthesized)
tcagttgtgctttcaggttacatgtgtaatatttttcctctttaactccttttattctgtatttgcataaatatgagattctgaagagccatctggttatactaccttctactaatgttg

SEQ ID NO: 118513 - DNA, 120 bp, Artificial Sequence
  ENSG00000100722_55 (sequence is synthesized)
actagctgatttcataaaccaaagctgtaggagttgttgtattaagtctcttaactagtaacatagtctgctcttcatgggctgagaaagttactaacctgcagtcatcacctccagcac

SEQ ID NO: 118514 - DNA, 120 bp, Artificial Sequence
  ENSG00000100722_56 (sequence is synthesized)
taacaacatgtcgatcaccactggtaaatcgaatatttgtcacatggggcgaatgacccaagaaccttttgtgttttgcctaaaaaacaatgacagacaagctcagggcatttggtgcac

SEQ ID NO: 118515 - DNA, 120 bp, Artificial Sequence
  ENSG00000100722_57 (sequence is synthesized)
acagaagtcaaaggctcttattaggaactataatctctatgacaagagctgtggagagagtagggagttagcaccgcagccagtgattagaatgcttttcagcatgagtagtggatctgc

SEQ ID NO: 118516 - DNA, 120 bp, Artificial Sequence
  ENSG00000100722_58 (sequence is synthesized)
aaaaccaggctgtgtgggcagtcagatgtctccaggtactctgaccatttttctctaaggaaaagcatttgaaatttgataactgattataggtttggtgaaaagctaattacagctttt

SEQ ID NO: 118517 - DNA, 120 bp, Artificial Sequence
  ENSG00000100722_59 (sequence is synthesized)
gtaggatggttccaaagatggtattactcgagggagaggatttgtttctaatagcttttatttcaaagtaaatagatttagaaagtttggggaaaaatttagaaattaggacaaaacatt

SEQ ID NO: 118518 - DNA, 120 bp, Artificial Sequence
  ENSG00000100722_60 (sequence is synthesized)
ttaaatatatggggaaaagtgctgatgataagacatcaaaattaggagtaaactgataatagtaaacaaaacacaaacttacaaatttttctggacatgggaagtcaaataacttaacca

SEQ ID NO: 118519 - DNA, 120 bp, Artificial Sequence
  ENSG00000100722_61 (sequence is synthesized)
tgccaaagtcatctcctgtaacaagactgattcctgaatgagatacacaggcacagttgacatcagctttctcagcatgtctggaccagattcccaaaacctcatctcctagaatactag

SEQ ID NO: 118520 - DNA, 120 bp, Artificial Sequence
  ENSG00000100722_62 (sequence is synthesized)
agggaaggaacaaaagaaaactcatcatggcaagtgcgggcaggttgactatattcaaaaagtttcttggcaattaatctctaagtaccctatcatgttacttaaaatacaggaagtaaa

SEQ ID NO: 118521 - DNA, 120 bp, Artificial Sequence
  ENSG00000100722_63 (sequence is synthesized)
ttatggtaagttgtttggagacctgaatttcatcaggatatcaactcctgccttttaaaaatgacattttataatttgaagggtttctagattaatctttttaagattaaagtagtactt

SEQ ID NO: 118522 - DNA, 82 bp, Artificial Sequence
  ENSG00000100722_64 (sequence is synthesized)
gactgaaaactgatagaactatttttcaaattaaaagtgctacttggctgggtccagcagcacataccagtaatcccaacat

SEQ ID NO: 118523 - DNA, 71 bp, Artificial Sequence
  ENSG00000100722_65 (sequence is synthesized)
ctgaaaactgatagaactatttttcaaattaaaagtgctacttggctgggtccagcagcacataccaagag

SEQ ID NO: 118524 - DNA, 86 bp, Artificial Sequence
  ENSG00000100722_66 (sequence is synthesized)
tttgagaccagcctgggcaatattgtgagatccctatctctacaaaaataaaaatgacttatgacataggaattaaaaaaatttca

SEQ ID NO: 118525 - DNA, 120 bp, Artificial Sequence
  ENSG00000100722_67 (sequence is synthesized)
gctacatcagagattacaggcatgagccactatatgcctggctgatacaggaatttgatggcatttttcattggccaaaaaaatggatagtcatggttacctgtcatacagccaggaaat

SEQ ID NO: 118526 - DNA, 120 bp, Artificial Sequence
  ENSG00000100722_68 (sequence is synthesized)
ttgaacaaatttggaagctttgacttctaatagattcaagatagcattcctttagatagagaattaataacagttgcttaacagcacccaatacctttttgccagtcattaaatttagca

SEQ ID NO: 118527 - DNA, 120 bp, Artificial Sequence
  ENSG00000100722_69 (sequence is synthesized)
ttaagaaaaatatcagggtatctttaaagttaaaactttgatttccttaaaaaaaaaacttgataaatcatggaaactgataaaacatggaaatatattcaataaaaaggggtcccaaca

SEQ ID NO: 118528 - DNA, 120 bp, Artificial Sequence
  ENSG00000100722_70 (sequence is synthesized)
tgaacataccatttcaaaatatggtaacaaaaacttgaaactcaattactattccttattggaatggctctaacagttcagaaataggattttctaactggccttcaaagtcagttcttg

SEQ ID NO: 118529 - DNA, 120 bp, Artificial Sequence
  ENSG00000100722_71 (sequence is synthesized)
ccttgtgaatatataagtatttacctagtccatgtagcccaagtaattctgtcaatagcggcatgatccataagatgttttcctgaaggcacttcatagacatgccgtttatagcagcca

SEQ ID NO: 118530 - DNA, 120 bp, Artificial Sequence
  ENSG00000100722_72 (sequence is synthesized)
ctagagacctttttcatcagattaaaatgggacaagaattccattaggtgagagacaaaatccacagggggtttacagaatactagcatattgctacttgatttacatgtctaacattat

SEQ ID NO: 118531 - DNA, 120 bp, Artificial Sequence
  ENSG00000100722_73 (sequence is synthesized)
aggagaaaagctctgataagtgggggaggaaaggggagctgtaggtcagaaggtacaaagggaggagttgagaagctggagctctggagctcaggaactttaaatgcattcactaacacg

SEQ ID NO: 118532 - DNA, 120 bp, Artificial Sequence
  ENSG00000100722_74 (sequence is synthesized)
aaatgtaaaagcagaagaacttgccacctgggtatacagtattggtactgtacctggagataactgctatctgcagagaagtccatttgaatgacaaagcttggaatgtctttgcagtag

SEQ ID NO: 118533 - DNA, 120 bp, Artificial Sequence
  ENSG00000100722_75 (sequence is synthesized)
ctgattctgttaagagtggggcccagcgttaggtcataaaaatccactgagttctcactagaacctactgccagataccgggaatccggactaaatctgaatcaaaacaaaacgtaaaaa

SEQ ID NO: 118534 - DNA, 120 bp, Artificial Sequence
  ENSG00000100722_76 (sequence is synthesized)
gtattagaccacatgaagtattataaatacttaagatcagtgacttttcctttctagttcttaaaagtaacgtgtgataaggcctcaaatagatttacctgtcagacacaactgatcatg

SEQ ID NO: 118535 - DNA, 120 bp, Artificial Sequence
  ENSG00000100722_77 (sequence is synthesized)
tatactgagattgtctgggttacatgaaataaggaagctttatattttacttaaattttaaatatttccccaattgtcatctcccaattcctttaaaaacgtctaatggcttaaaaaaac

SEQ ID NO: 118536 - DNA, 85 bp, Artificial Sequence
  ENSG00000100722_78 (sequence is synthesized)
ctcccaattcctttaaaaacgtctaatggcttaaaaaaactttcttaggccaggccagcggaggcgggcagatcacctgaggtcg

SEQ ID NO: 118537 - DNA, 120 bp, Artificial Sequence
  ENSG00000100722_79 (sequence is synthesized)
ggcaacaagagcaaaactccaactcaaaacaaaacaaaacaaaatttaattttttaaatagaggcggggtctcactatggtcccaaactcctggcctcaagcaatccttcccccttggcc

SEQ ID NO: 118538 - DNA, 120 bp, Artificial Sequence
  ENSG00000100722_80 (sequence is synthesized)
tcaagcaatccttcccccttggcctcccaaggtactgggattacaggtgtgagccacaacacccagtcagaacatctcagcttttaaaagccattagcattacataattaataagctaac

SEQ ID NO: 118539 - DNA, 120 bp, Artificial Sequence
  ENSG00000100722_81 (sequence is synthesized)
aattcattaagatagttttcttccatctggaaaaaacgttgtcttaatattaagcaaagaacacagcccagcttaactaacctccagttattaaggtgaaatgacacaacttgaatcttg

SEQ ID NO: 118540 - DNA, 90 bp, Artificial Sequence
  ENSG00000100722_82 (sequence is synthesized)
aaggtgaaatgacacaacttgaatcttggaagaagaatgtctcccaggctggagtgcgatggcgcaacctccgcctcccgggttcaagcg

SEQ ID NO: 118541 - DNA, 120 bp, Artificial Sequence
  ENSG00000100722_83 (sequence is synthesized)
aggcatgagccaccgcgcccggcctgaagaacttatttaaaagacaaagtgaaatgctatttgcctagcaatctttggagtcatatgggacaattcagtctcttgaaatggcccatgagt

SEQ ID NO: 118542 - DNA, 120 bp, Artificial Sequence
  ENSG00000100722_84 (sequence is synthesized)
agtctcttgaaatggcccatgagtcttactgaggtacgatagagacatgtaaaagctaagggaagccactgttactattttatatattgaagttctgaggaaggtttcatttgtaaaagg

SEQ ID NO: 118543 - DNA, 120 bp, Artificial Sequence
  ENSG00000100722_85 (sequence is synthesized)
attttactgatgaaaagtgtacaagcttttgacagacctagattcaataatcttatctactgatcacacggaagtactccgtaaatggtagccactgttgaaaaatgcttaagcactgaa

SEQ ID NO: 118544 - DNA, 120 bp, Artificial Sequence
  ENSG00000100722_86 (sequence is synthesized)
aaacaaaggtttaagaaacatttaaattaatttggattctggaacatttaatcaataggtattgattaaattaatgaactacatattcccaaactgaggttactaagagaagatatgttt

SEQ ID NO: 118545 - DNA, 120 bp, Artificial Sequence
  ENSG00000100722_87 (sequence is synthesized)
gaaatcacaactttagttttccagggtgacaacttttgaagggcagatagctctcttgtattacagtgggagatacctcttggtgggatgaacttaatggacatggctaagtgttaacat

SEQ ID NO: 118546 - DNA, 120 bp, Artificial Sequence
  ENSG00000100722_88 (sequence is synthesized)
gaattcatcaaacattacctactagtacttgctattatagttggtgcccagtgggtttataatttagcaagaagaattaagtagtatacaaacagccatattttagcatacaatttataa

SEQ ID NO: 118547 - DNA, 120 bp, Artificial Sequence
  ENSG00000100722_89 (sequence is synthesized)
tacgggaaatgctacaggccctggggacctctttttgaaggcaaggctatggaaaattttacaaatggaagttaaatcaagtatatactagaaactctattccatttgttcactaacctg

SEQ ID NO: 118548 - DNA, 120 bp, Artificial Sequence
  ENSG00000100722_90 (sequence is synthesized)
atatcatggattgcacatctcctgtctctcttctttccccatatttttagagaactcactagtaaaatgataaattctccatttttcattccaatagccaccatgtccccttcagggctg

SEQ ID NO: 118549 - DNA, 120 bp, Artificial Sequence
  ENSG00000100722_91 (sequence is synthesized)
taacacacagtacgagcagcatgtcccaaattcactttgtttaacatcttctgcatttaaaaaaaaaaaaaaaaagagtcataggaaacattaagtgaagtacttctaaattataccagt

SEQ ID NO: 118550 - DNA, 120 bp, Artificial Sequence
  ENSG00000100722_92 (sequence is synthesized)
ttcccctcaaaatgctcaacagaattctggcagttctttaagtactagcaatttagaacttccaacttttctttttagaagttgtaacctcttttaaaaaaattatctgtacttacttta

SEQ ID NO: 118551 - DNA, 120 bp, Artificial Sequence
  ENSG00000100722_93 (sequence is synthesized)
tcagcaatatcccaaagtctcactgtcccatcttctgcagcagaaaggaaaaaatccctggaaggatgtgttgctagtccccagattggcccatccacatgaccgttaactaaaatatta

SEQ ID NO: 118552 - DNA, 120 bp, Artificial Sequence
  ENSG00000100722_94 (sequence is synthesized)
caagctgcatttttctctccaacttcgattatttcagcattccttgtcccaacaaggatcttgccctgaaacacaagcaggaccaatacagtgaatgtaatacaacagctgcttttcttc

SEQ ID NO: 118553 - DNA, 120 bp, Artificial Sequence
  ENSG00000100722_95 (sequence is synthesized)
ttcataatataaaaatgaccctattgacctgctttcagagaactttttgctttgagctaatctagtagcaaggcagtcattagctcatgcaaatttttctatgactacaggcacacatct

SEQ ID NO: 118554 - DNA, 120 bp, Artificial Sequence
  ENSG00000100722_96 (sequence is synthesized)
atctgtaagcacaatgggctagattacatattagagtccatgctacagaatagaacttttctgtggcagtacacctggattcttcaataatcaaagtttttatttgataatcttaggatt

SEQ ID NO: 118555 - DNA, 120 bp, Artificial Sequence
  ENSG00000100722_97 (sequence is synthesized)
tccaaactggggtcagtgcagtgggatataggaaaaaataatagaatttattttttagttaaaaagtaaaagcttaactacaatttaatatgcaggctgaagataatatccgtatgattt

SEQ ID NO: 118556 - DNA, 120 bp, Artificial Sequence
  ENSG00000100722_98 (sequence is synthesized)
ataaatacacttaataagtacaaacacgctcaaaaattttcataggagttgtagttttgaatttttattttgaaattgacacataattatacatatctatagggcatagggtaatacgca

SEQ ID NO: 118557 - DNA, 120 bp, Artificial Sequence
  ENSG00000100722_99 (sequence is synthesized)
taaccatcacctcagacatttatcatttctttgtgatggaaactttcaaaatcctctcttgtaaatacctgaaaatacataaatacgtgattcttaactatagtcatcctacagtactac

SEQ ID NO: 118558 - DNA, 120 bp, Artificial Sequence
  ENSG00000100722_100 (sequence is synthesized)
agaatactaaaacatactattcctatctggctgtgtaaacttgtatcctttaaccagtccttccctatccccctccccctcccccttgtccgcctccagtaaccactattctactctcca

SEQ ID NO: 118559 - DNA, 120 bp, Artificial Sequence
  ENSG00000100722_101 (sequence is synthesized)
cctctgtgggatcaacttttttagtttctgcacaggagtgagaacatgtatttatctttctgtgcctggcttatttcacttcacatcatgtcctccagtctcatccatgttgccaccaag

SEQ ID NO: 118560 - DNA, 120 bp, Artificial Sequence
  ENSG00000100722_102 (sequence is synthesized)
aatgacagaatttcattattttttatggctgagtagtatttcattgtttgtttactgcacgttttatctagggaatgtgtgtttttttaaaaaatggagacagctgtcctaatatgagtc

SEQ ID NO: 118561 - DNA, 120 bp, Artificial Sequence
  ENSG00000100722_103 (sequence is synthesized)
aactgccaagggctttcaattatgtctactagagttgttaaattggcagattctagaaaatattggaggtttacatacagtatttagacagaatagcttcctagcttatgcaccacactg

SEQ ID NO: 118562 - DNA, 120 bp, Artificial Sequence
  ENSG00000100722_104 (sequence is synthesized)
gtgctaactttggcaaagaaagcagcaaagacagagtaatgttggcaagcaaatccatcgttatgcattattaagtattgttcattaggctgcaaagggtgagggaatcacagtaataac

SEQ ID NO: 118563 - DNA, 120 bp, Artificial Sequence
  ENSG00000100722_105 (sequence is synthesized)
cactttctgttttctgctgcactgtatcagctcatggaacatcttactttgcctctgcacacagaacgaacacaatctgtggcttgtcctgtctcaagcctgaaggcacggcaccgcctc

SEQ ID NO: 118564 - DNA, 120 bp, Artificial Sequence
  ENSG00000100722_106 (sequence is synthesized)
agttcctgatcccacagtttaaccgctcctccttcttttgacctaagtaaataaccaagccagagtaagtgttcattattggctactataatttttattataaacaaataccaagttata

SEQ ID NO: 118565 - DNA, 120 bp, Artificial Sequence
  ENSG00000100722_107 (sequence is synthesized)
agcagaatcttttttttttaaaaaggccctgatatttataatttacctctaatattcttgtaaactttctatggcaatttgaggatatactatatctcagtcaaaataaacatccagttt

SEQ ID NO: 118566 - DNA, 120 bp, Artificial Sequence
  ENSG00000100722_108 (sequence is synthesized)
cagtgaattttattttgagaaatactctttttttctgacatgagcataattttatttagcctctacaatacattacaatacattatcctctctcataatacttttttttttttttttaag

SEQ ID NO: 118567 - DNA, 120 bp, Artificial Sequence
  ENSG00000100722_109 (sequence is synthesized)
cattatcctctctcataatacttttttttttttttttaagatgtagtctcgctctgtctcccaggcttgagtgcagtggcatgatctaggcttattgcaacctctgcctcccaggttcaa

SEQ ID NO: 118568 - DNA, 120 bp, Artificial Sequence
  ENSG00000100722_110 (sequence is synthesized)
aaagtgctgggattccaggtatgagccactgtgcctggcctcataatacttcttgattaggaagatgtaaaaaaacaattttattaaaaggataatggaaatgtaaggcaaaataataga

SEQ ID NO: 118569 - DNA, 120 bp, Artificial Sequence
  ENSG00000100722_111 (sequence is synthesized)
ggaaatgtaaggcaaaataatagaattacaaatgctatgctacagagttgatttatttatttttttgagacagagtgtcgctctgtcacctggcctggagtgcagtggtgtgatctcggc

SEQ ID NO: 118570 - DNA, 90 bp, Artificial Sequence
  ENSG00000100722_112 (sequence is synthesized)
tggcccagagcttatttttgaaggccaaaacagaagcatatttattccctatcaggtgttaaaatatctcactggaacagtttagcaggc

SEQ ID NO: 118571 - DNA, 120 bp, Artificial Sequence
  ENSG00000100722_113 (sequence is synthesized)
atcaggtgttaaaatatctcactggaacagtttagcaggcttctagtgagtgggggtgtgcaggagtaaatgacgtgggaaatacaagtgttggaggacgaaatagagcccatttatgga

SEQ ID NO: 118572 - DNA, 120 bp, Artificial Sequence
  ENSG00000100722_114 (sequence is synthesized)
ttttattcctggaagggctgaaaaatgtattccttccttttctgctagatgaattgcttgtctgaaagcatgcctatgtgcattcttcctttatgtaaaaggcacaaattctgcgcttgt

SEQ ID NO: 118573 - DNA, 120 bp, Artificial Sequence
  ENSG00000100722_115 (sequence is synthesized)
aaaaggcacaaattctgcgcttgtgtttaattaacatatgtgggttctttcaatcctgtattgaaatgtacttcttagtcaactatatgtcacatttttttttgtttttgtttttgtttt

SEQ ID NO: 118574 - DNA, 120 bp, Artificial Sequence
  ENSG00000100722_116 (sequence is synthesized)
gagccactgtgcctggcctacatgtcatgtttcaacatgcatatgactatgttggtgacaaatcaaatcataagtatctggttactgttgggagatttgaaaatcactcagaagagacct

SEQ ID NO: 118575 - DNA, 120 bp, Artificial Sequence
  ENSG00000100722_117 (sequence is synthesized)
cttctcaaattttgaggtcttgtataaaacagtttaaatttgcctcaagcaaaaggaaacaaggcagttctctctagttccctcatccttttctaaagcaacaatgtgcattctactcct

SEQ ID NO: 118576 - DNA, 120 bp, Artificial Sequence
  ENSG00000100722_118 (sequence is synthesized)
tagaatccattctgaacaaaaagagagcaggcagtcaaaatacaaccctggctccagattcccccatgggcctcctactcagcaaatcatacacaggcatacagacattaagaaaagtaa

SEQ ID NO: 118577 - DNA, 120 bp, Artificial Sequence
  ENSG00000100722_119 (sequence is synthesized)
ctcaacttgtaggacaactacctatccacacctcagaaaaagtatcaccccaacatgaaaaaaattggaagtgaattaagaccagaaatgagaatcaaatagaaggcacataaaaggtaa

SEQ ID NO: 118578 - DNA, 120 bp, Artificial Sequence
  ENSG00000100722_120 (sequence is synthesized)
taaaggagaagcatatgaggaggaaggtcggagaggacactctgtgtagcctagaaacaactagaataattaactgcaaacctcaggtaggtcacaaatgcataaatattctgtgaaaag

SEQ ID NO: 118579 - DNA, 120 bp, Artificial Sequence
  ENSG00000100722_121 (sequence is synthesized)
aaagaggactcacggcctttcctttcccccagtcacgataagtccatctcgcagggtggtgtacatggcaaacacaggcccgttgtgagctctcgccacgattctacacaatatgtgatc

SEQ ID NO: 118580 - DNA, 120 bp, Artificial Sequence
  ENSG00000100722_122 (sequence is synthesized)
tttccacacacagacatcaccactgatggtacctgtaaacgtcaagttattctgaaaaggagtgggggagggggagacaaactcatcaaaagttcaaatagagtttaaatagataatttt

SEQ ID NO: 118581 - DNA, 120 bp, Artificial Sequence
  ENSG00000100722_123 (sequence is synthesized)
ctatgtatgtgtaatgctgtctcacccttgatacaaagagcatgcatcgtgtagtggcagcagcactgaattcacgagtcaggaaacctgaacgggaggcttagctttgtcaggaccttt

SEQ ID NO: 118582 - DNA, 120 bp, Artificial Sequence
  ENSG00000100722_124 (sequence is synthesized)
cttttcctttccaagtctgttgcttattagctagaataaccttagacaattcttcccttccaattctaacatactataattctagggtttattttttatttttttgagacggagtttcgc

SEQ ID NO: 118583 - DNA, 120 bp, Artificial Sequence
  ENSG00000100722_125 (sequence is synthesized)
taggtgtgagccactgtgcccggcctgagccacggtgcctggcctggtcttatattaagaatacccaaaatgttcaactgaaatttgacatggcacaaacatttcaatagtctttttctc

SEQ ID NO: 118584 - DNA, 120 bp, Artificial Sequence
  ENSG00000100722_126 (sequence is synthesized)
aaaaatgtaagtgtacttaaatattctaaaattataacttttcctataagtattgcataatcacaaaaacaaaaaatgcacttagtttttcgatgcaccaaaggatttatacagcctagc

SEQ ID NO: 118585 - DNA, 120 bp, Artificial Sequence
  ENSG00000100722_127 (sequence is synthesized)
caatgcaggatattaaaggaaagagatgtggattggaagccacaggtccagatgagatggaataaagtgagaggagagcaggtctcctgaacacccttctgtcagggccaggaattgtgc

SEQ ID NO: 118586 - DNA, 120 bp, Artificial Sequence
  ENSG00000100722_128 (sequence is synthesized)
tatttccttctgtctcactacctccttcttccctcgaagtagagacactggcccagagcacttccagctgtatgataagcagtgtgttaaatgataaaaagcaaaggaaatcctaaaccc

SEQ ID NO: 118587 - DNA, 120 bp, Artificial Sequence
  ENSG00000100722_129 (sequence is synthesized)
tagtaccaccttaaatcatttgaaaatcatgtttcttgatttacctttctctctgacaaatttttaggactatgaagaactactaggaagacagaaattttaggatatttagggtgacaa

SEQ ID NO: 118588 - DNA, 120 bp, Artificial Sequence
  ENSG00000100722_130 (sequence is synthesized)
taggatatttagggtgacaattagaagattaaggaaggcttttgagtataacagtagtccaaggaatcaaatgttcatcagaatccttattatggtggctcatgcctgtaaacccagcac

SEQ ID NO: 118589 - DNA, 87 bp, Artificial Sequence
  ENSG00000100722_131 (sequence is synthesized)
catgcctgtaaacccagcactttgggaggtcaagatgggaggatcacatagcttaggagcttgagaccacctaggaaagaaaaatta

SEQ ID NO: 118590 - DNA, 120 bp, Artificial Sequence
  ENSG00000100722_132 (sequence is synthesized)
aggaggctgaggatcacttgaacctgggagatggaggctacagtgagctataatcgcaccattgcaccccagcccaggcgacagagtgagatactgtgtcaaaaaaaaaaaaaaatcctt

SEQ ID NO: 118591 - DNA, 120 bp, Artificial Sequence
  ENSG00000100722_133 (sequence is synthesized)
ttccccctctcattaacattcttttcactccctaatttctgaaagaactagatttttgaaagatgaaatatatgcttgaccagggcatgtaatgattagcagatcacagtatcatctcaa

SEQ ID NO: 118592 - DNA, 120 bp, Artificial Sequence
  ENSG00000100722_134 (sequence is synthesized)
caacattcatgtggctgatgatctaaggcaagagaatgtaaagtagtcaaagtcacactatgtgcattttaagagacatactgcaccaaatgcaatagcgagcatggtctgcatccgggc

SEQ ID NO: 118593 - DNA, 120 bp, Artificial Sequence
  ENSG00000100722_135 (sequence is synthesized)
atcttccagtgtgctcagtagcccttttttgctaagaagagctcttcctgccagggtccagaacttcacatgttttactcccactgagacaaactgggtatctgaatctggtcggaattc

SEQ ID NO: 118594 - DNA, 120 bp, Artificial Sequence
  ENSG00000100722_136 (sequence is synthesized)
tgccacaaaaatacgttgattgtgaccagctctgctggcaattttggcacctgacaagatacaacaaaattatctaggttattacaagaaccaagctaatcaacagcatcaaacaaatat

SEQ ID NO: 118595 - DNA, 120 bp, Artificial Sequence
  ENSG00000100722_137 (sequence is synthesized)
gtaaaatacatagttcaaaaaacaaaggcttagaagagaggccaatggcccctgctctactacctagcaatacatgatttacaattatttgtgtattgagtccttttcacttatcttcgc

SEQ ID NO: 118596 - DNA, 120 bp, Artificial Sequence
  ENSG00000100722_138 (sequence is synthesized)
tccattaacttttctttatataacgtaaatgttttgtctaaagtgtggtaggtaatattatcctgctgatctgccattatcattagaaatatacataattttcataagaatctccaaaac

SEQ ID NO: 118597 - DNA, 120 bp, Artificial Sequence
  ENSG00000100722_139 (sequence is synthesized)
caatcaaatcattaataataaatacatagtttcttgctggaagaaaatagcagtgaatcatttataatgctaataatggtttcattaatttatctgttttgtgaggttacagttccactg

SEQ ID NO: 118598 - DNA, 120 bp, Artificial Sequence
  ENSG00000100722_140 (sequence is synthesized)
ggcttttaaagtgaaatatacctacagtaccactgtgtacagtatattgcataggcctccactgaatgattgtttcaaccaccaactttaagacaaatattaaatacagaattcctacta

SEQ ID NO: 118599 - DNA, 120 bp, Artificial Sequence
  ENSG00000100722_141 (sequence is synthesized)
gggtttactggaagaggagctatacagatggtacttagaggatgtagggccctacgtattagggcttcttagttgtagcgaagagcaattggtctggtacgtttagctttttcacattta

SEQ ID NO: 118600 - DNA, 120 bp, Artificial Sequence
  ENSG00000100722_142 (sequence is synthesized)
gttttgaattctgactctagaaatgtacaaccccatcttttgaattacaggttttaagatgttatttgctcttaatacgtcttaaggtaacagccttgatcactgcttttactttcgatg

SEQ ID NO: 118601 - DNA, 120 bp, Artificial Sequence
  ENSG00000100722_143 (sequence is synthesized)
aaataacttaatgagctgtgaagaaaaaattatcagattttaagggagagaattttatgaaaatgtctttgaggttcctgtcacctttatgagaatgtcttcaaagtttccatcaccacc

SEQ ID NO: 118602 - DNA, 120 bp, Artificial Sequence
  ENSG00000100722_144 (sequence is synthesized)
tctaccaatttttcttccaccggagccagtggacttaggttccataacaagctcctcttgttcactgaatgagctagacaatatttcccaccttttaaggaaaatatcagctgatatcaa

SEQ ID NO: 118603 - DNA, 120 bp, Artificial Sequence
  ENSG00000100722_145 (sequence is synthesized)
tgaaattaaaggaatgaaagcagctattttgacagtggaagcaaatctttttgatctaaatgttagagtgtccaagaatgaagcaaaaatttcatctttggaggttaaaatgaatgaata

SEQ ID NO: 118604 - DNA, 120 bp, Artificial Sequence
  ENSG00000100722_146 (sequence is synthesized)
tgtgactgtaaatggaattgaacaaacaaaagatggtttcagaaataattttggcaggatcagttaatccaaccagtctttaaagagcaagtgtgcctatctgtagtattccgaagtatt

SEQ ID NO: 118605 - DNA, 120 bp, Artificial Sequence
  ENSG00000100722_147 (sequence is synthesized)
ttgactagtgaatatataaaccttaccattctaatttaaaaatggttttcactttcaaaaaaaacatcagtagactgcattaaaaatgggttttccaaacagattggagatcagtcctgg

SEQ ID NO: 118606 - DNA, 120 bp, Artificial Sequence
  ENSG00000100722_148 (sequence is synthesized)
tgcaacagacagtttgaagatcaagaagaagatactgaatcacagtcaagaactactgatgtaaaaataatcggcttccttagaaacgttgagaaaggaactcaacagaggcaattatta

SEQ ID NO: 118607 - DNA, 120 bp, Artificial Sequence
  ENSG00000100722_149 (sequence is synthesized)
ttttcctagagccgcctttctcacatgcacgtttgctctttttctctcagagtgccattaaggggaaattacaagaattaggagcttatgttgtatttgaaatacctgtggaatgaagag

SEQ ID NO: 118608 - DNA, 120 bp, Artificial Sequence
  ENSG00000100722_150 (sequence is synthesized)
aaaaaaattaaagctaagccatcttgtccaatgtaattccagtagagctctgcgactctaaagcttagagctacatctatattttcaagcacatcaactttaagaagaaagttttgagga

SEQ ID NO: 118609 - DNA, 120 bp, Artificial Sequence
  ENSG00000100722_151 (sequence is synthesized)
ctcctcccagcccccgcccgggggatccgaggtgcgcgcaccagcaaagtggcctcagccgctgcagagtccggtcttgttttcctagagccgcctttctcacatgcacgtttgctcttt

SEQ ID NO: 118610 - DNA, 120 bp, Artificial Sequence
  ENSG00000100722_152 (sequence is synthesized)
tgtttttgtttttctgtggacaagtttttagttttataactaaatggagtgacaattaccatggccctctccagagtagcgtatttcttgttcatgtatgtttgttgagaggcaagggtg

SEQ ID NO: 118611 - DNA, 120 bp, Artificial Sequence
  ENSG00000100722_153 (sequence is synthesized)
ggggggctttgtttgtgcctcggacctgtgagatactgaaatacctggggttccttaagaattctgtacgtttaagcagatgggtatatggtaactgccccagtttgtatgcattttggc

SEQ ID NO: 118612 - DNA, 120 bp, Artificial Sequence
  ENSG00000100722_154 (sequence is synthesized)
cacacgcagtatacacagattttgaggagttgagggaaaagttagttatgggtaatgaaaacattttggacttgggttaaatttttccttacaagctggctggctcaatgtaatgagctt

SEQ ID NO: 118613 - DNA, 120 bp, Artificial Sequence
  ENSG00000100722_155 (sequence is synthesized)
tatgagatggctttttggggcttcttttttttgccgggggtaggtcctatggatggaatcttcatttttaattcttttaaggaaatgatgtgggaataatacagctgtacatataaggag

SEQ ID NO: 118614 - DNA, 120 bp, Artificial Sequence
  ENSG00000100722_156 (sequence is synthesized)
agtatgggatgagtctttttgtatcacaaagccttgcatagaggatgtgtttattgtattaatgagttcactgcataaaatatataccttttttattaagtggtgtgatttttatcacaa

SEQ ID NO: 118615 - DNA, 120 bp, Artificial Sequence
  ENSG00000100722_157 (sequence is synthesized)
aagcttgtctttcttggtggcttggcttgagttaaaagcctgtgtttgtgttatcccaagctttggaataaatgattgtgtcctattttgatatatggtcttattttaaaatattctttt

SEQ ID NO: 118616 - DNA, 120 bp, Artificial Sequence
  ENSG00000100722_158 (sequence is synthesized)
tgttgctgttttttttgcatttctcaaaacaagtagtgatggggagtgtaaagagcccttatacacagaactaataatgcattgagaagattgaatatgaaatatgctttttttttgttt

SEQ ID NO: 118617 - DNA, 120 bp, Artificial Sequence
  ENSG00000100722_159 (sequence is synthesized)
cggagcgtggctgcggctgaagtagccgccgggaaatggaaggacaggcgcaggcccggctggagccaccaccgcggcgcacggcgccgctttggatccgctgcgggagagtgccattaa

SEQ ID NO: 118618 - DNA, 63 bp, Artificial Sequence
  ENSG00000100722_160 (sequence is synthesized)
ttcttctgatcctacatcctccacctcccgggttcaaagacagggtttcaccatattggccag

SEQ ID NO: 118619 - DNA, 120 bp, Artificial Sequence
  ENSG00000100722_161 (sequence is synthesized)
tgtttgatgttctgcagtttcactacgatgtgtctaggcgtggatttccttttatttttcctgtttggtataatgtatggaagcatcccatatatttgaaataaaatgcattatgaaata

SEQ ID NO: 118620 - DNA, 120 bp, Artificial Sequence
  ENSG00000100726_0 (sequence is synthesized)
gcagatgcgccctcccgcctggcgtcctccgcagattcgcgctgagaggcccgcggagacccgccccagaggctcaagaaaacccgcgggagcctcgcccggacccaggaactcgtgctc

SEQ ID NO: 118621 - DNA, 120 bp, Artificial Sequence
  ENSG00000100726_1 (sequence is synthesized)
gctcggggccaaccggctgggccgcgatcgcgtttcgtccggggccgcggcggccgtggggaatcggctgcagcgaatcggtggcgcgcggcgcctgagcgcgctgcagtcacccgggag

SEQ ID NO: 118622 - DNA, 120 bp, Artificial Sequence
  ENSG00000100726_2 (sequence is synthesized)
gtccaggtcgtcttcccgtgacgcccagatctgtcctgcaggatggagccagcaccctcagaggttcgactcgccgtccgggaagccattcatgccctctcgtcttcggaggatggcggc

SEQ ID NO: 118623 - DNA, 120 bp, Artificial Sequence
  ENSG00000100726_3 (sequence is synthesized)
cacatcttctgcaccctggagtccctgaagcggtatctcggtgagatggagcctccagcgctcccgagggagaaggaggagtttgcctcggcccacttctcgcctgtcctcagatgtctt

SEQ ID NO: 118624 - DNA, 120 bp, Artificial Sequence
  ENSG00000100726_4 (sequence is synthesized)
gccagcaggctgagcccagcctggctggagctgctgccccatggccgcctggaggagctgtgggccagcttcttcctggagggcccggcggaccaagccttcctggtgttgatggagacc

SEQ ID NO: 118625 - DNA, 120 bp, Artificial Sequence
  ENSG00000100726_5 (sequence is synthesized)
atcgagggtgctgcgggccccagcttccggctgatgaagatggcgcggctgctggccagattcctgcgcgagggccggctggcagtgctgatggaggcgcagtgtcggcagcagacgcag

SEQ ID NO: 118626 - DNA, 120 bp, Artificial Sequence
  ENSG00000100726_6 (sequence is synthesized)
cccggcttcatcctgctccgggagacgctgctgggcaaggtggtggccctgcccgatcacctgggcaaccgcctgcagcaggagaacttggccgagttcttcccccagaactacttccgc

SEQ ID NO: 118627 - DNA, 120 bp, Artificial Sequence
  ENSG00000100726_7 (sequence is synthesized)
ctgctcggcgaggaggtcgtccgggtgctgcaggcggttgtggactctctccaaggtggcctggattcctccgtgtccttcgtgtctcaggtccttgggaaagcctgtgtccacgggagg

SEQ ID NO: 118628 - DNA, 120 bp, Artificial Sequence
  ENSG00000100726_8 (sequence is synthesized)
cagcaggagatcctgggcgtgctggtaccccggctggcagcgctcacccagggcagctacctgcaccagcgcgtctgctggcgcctggtggagcaagtgccggaccgggccatggaggct

SEQ ID NO: 118629 - DNA, 120 bp, Artificial Sequence
  ENSG00000100726_9 (sequence is synthesized)
gtgctgaccgggctggtggaggccgcactggggcctgaggtcctttcgagactgctggggaacctggtggtgaagaacaagaaggcccagtttgtgatgacccagaagcttctgttctta

SEQ ID NO: 118630 - DNA, 120 bp, Artificial Sequence
  ENSG00000100726_10 (sequence is synthesized)
cagtcccggctcacgacgcccatgctgcagagcctgctgggccatctggccatggacagccagcggcgcccgctcctgctgcaggtgctgaaggagctgttggagacgtggggcagcagc

SEQ ID NO: 118631 - DNA, 120 bp, Artificial Sequence
  ENSG00000100726_11 (sequence is synthesized)
agtgccatccgccacactcccctgccgcagcagcgccacgtcagcaaggctgtcctcatctgcctggcgcaactcggggagccggaactgcgggacagccgggatgaactgctggccagc

SEQ ID NO: 118632 - DNA, 120 bp, Artificial Sequence
  ENSG00000100726_12 (sequence is synthesized)
atgatggcgggcgtgaagtgccgcctggacagtagcctgccccccgtgcgacgcctgggcatgatcgtggcagaggtcgttagtgcccggatccaccccgaggggcctcccctgaaattc

SEQ ID NO: 118633 - DNA, 120 bp, Artificial Sequence
  ENSG00000100726_13 (sequence is synthesized)
ggaggcgggcacgtccctcgttccagccacggcagagccccctgcagagacccccgcagagatcgtggatggcggcgtcccccaagcacagctggcgggctctgactcggacctggacag

SEQ ID NO: 118634 - DNA, 120 bp, Artificial Sequence
  ENSG00000100726_14 (sequence is synthesized)
cgatgatgagtttgtcccctacgacatgtcgggggacagagagctgaagagcagcaaggctcctgcctacgtccgggactgcgtggaagccctgaccacgtctgaggacatagagcgctg

SEQ ID NO: 118635 - DNA, 120 bp, Artificial Sequence
  ENSG00000100726_15 (sequence is synthesized)
ggaggcagccctgcgggcccttgagggcctggtctacaggagccccacagccactcgggaggtgagcgtggagctggccaaggtgcttctgcatctggaggagaagacctgtgtggtggg

SEQ ID NO: 118636 - DNA, 120 bp, Artificial Sequence
  ENSG00000100726_16 (sequence is synthesized)
atttgcagggctgcgccagagagccctggtggccgtcacggtcacagacccggccccggtggccgactatctgacctcacagttctatgccctcaactacagcctccggcagcgcatgga

SEQ ID NO: 118637 - DNA, 120 bp, Artificial Sequence
  ENSG00000100726_17 (sequence is synthesized)
catcctggatgtgctgactctggctgcccaggagctgtctaggcctgggtgcctcgggaggactccccaacctggctccccaagtcccaacaccccgtgcctgccagaggcagccgtctc

SEQ ID NO: 118638 - DNA, 120 bp, Artificial Sequence
  ENSG00000100726_18 (sequence is synthesized)
tcagcctggcagtgccgtggcgtctgactggcgggtggtggtggaggagcggatcagaagcaagacccagcggctctccaagggtggcccgaggcagggcccggcaggcagccccagcag

SEQ ID NO: 118639 - DNA, 120 bp, Artificial Sequence
  ENSG00000100726_19 (sequence is synthesized)
attcaactccgtggccggccacttcttcttccccctccttcagcgctttgacaggcctctggtgaccttcgacctcttgggagaagaccagctggttctcggaaggctggcgcacacctt

SEQ ID NO: 118640 - DNA, 120 bp, Artificial Sequence
  ENSG00000100726_20 (sequence is synthesized)
aggggccctgatgtgcctggctgttaacaccacggtggctgtggccatgggcaaggccctgctggaattcgtgtgggcccttcgcttccacatcgatgcctacgtgcgccaggggctgtt

SEQ ID NO: 118641 - DNA, 120 bp, Artificial Sequence
  ENSG00000100726_21 (sequence is synthesized)
gtcggccgtctcctccgtcctgctcagcctgcctgctgcgcgcctgctggaggacctgatggacgagctgctggaagcccggtcctggctggcggacgtggctgagaaagacccggacga

SEQ ID NO: 118642 - DNA, 120 bp, Artificial Sequence
  ENSG00000100726_22 (sequence is synthesized)
ggactgcaggacgctggcactgagggccctgctgcttctgcagagactcaagaacaggctcctcccacccgcgtctccctagtccctggaggcctccccaggaccaccctcgccgacagc

SEQ ID NO: 118643 - DNA, 120 bp, Artificial Sequence
  ENSG00000100726_23 (sequence is synthesized)
aaggcaggcggctgagcagcggcctggagcagcagagccaggctttgtagcgaggccaggtcttcggccgcatccggtacggagagtgcagatgcaggaaggcccggcctgccgctattt

SEQ ID NO: 118644 - DNA, 120 bp, Artificial Sequence
  ENSG00000100726_24 (sequence is synthesized)
atagtgcagccagtccgctaaaaatacactgggcctgggcactgcccgccgggacatggcagcctggacgtggggctggggctgtgggcgctgctggcggggttgactcttccagtgagg

SEQ ID NO: 118645 - DNA, 120 bp, Artificial Sequence
  ENSG00000100726_25 (sequence is synthesized)
gcagaaccaggctggcaggaggggaggacggtgtacctgctgctcagagcccccaaggctctcctctgagagccaccaagcaggacagagcagctcttgtcccaggtccctcgggctgag

SEQ ID NO: 118646 - DNA, 120 bp, Artificial Sequence
  ENSG00000100726_26 (sequence is synthesized)
cgccgtgtcaccaggagaatagtgctcacagcccaggcagggtgtgtggctcctggatgggctcgtggggcgggatgggacagggcacgggctctcagaaaataaactgctttattggaa

SEQ ID NO: 118647 - DNA, 120 bp, Artificial Sequence
  ENSG00000100726_27 (sequence is synthesized)
ggcatctgctccgatgctgggcttgtggcatggccggcagtgccgcccgcacgtgcccgacgccatcacctgctgggccctgctcgcctcctcctgcctcagccggcgctgcactggccc

SEQ ID NO: 118648 - DNA, 120 bp, Artificial Sequence
  ENSG00000100726_28 (sequence is synthesized)
cacgttcagggcgtgaggctctcgagatggcagagaagtgtggggcctgggttgtgctgcagcaggggtgggggtctcggcgttgggaactcctggcccaggtggacttgtgccagacag

SEQ ID NO: 118649 - DNA, 120 bp, Artificial Sequence
  ENSG00000100726_29 (sequence is synthesized)
ccctgcagggggagtaggcacccggaaatgtctgctcctacgatctcggtgcaggcaaggcggtgggcacgggaggaggggctgtgtggggctccctcggtctcccacggtggcccagga

SEQ ID NO: 118650 - DNA, 120 bp, Artificial Sequence
  ENSG00000100726_30 (sequence is synthesized)
gggactgcgtggctttaggatgaggctgcgctcggccctgggcgtgttctcatctcctggagcacggtgcccaccttccccaccttcccgcctaccaaggcgcggttgctgtgagctacg

SEQ ID NO: 118651 - DNA, 120 bp, Artificial Sequence
  ENSG00000100726_31 (sequence is synthesized)
gggaagtgacttttctccttgttcccagaacacaccttctcccaggctgggcgggcccccgggcccgtttctggggctttggctgacttgactcttgggaaatgttcttccctggagcag

SEQ ID NO: 118652 - DNA, 120 bp, Artificial Sequence
  ENSG00000100726_32 (sequence is synthesized)
gccaagaagttcgggctgggatctgagtgggtttgggtgtgaacagggtcgtgctttgctgtggctttttgtaagcctgtgttaaatggcagggagcgtcccgcaagattcctctgtggt

SEQ ID NO: 118653 - DNA, 80 bp, Artificial Sequence
  ENSG00000100731_0 (sequence is synthesized)
gcggcagtgggggcgctggcgggccgcgggtggcgggggccgggccgcggctccgggtgttaggagacaagatggcggcg

SEQ ID NO: 118654 - DNA, 120 bp, Artificial Sequence
  ENSG00000100731_1 (sequence is synthesized)
tggcggcggctctcagaaggccggtctcctcctctccgccgtcctccgccccgccgctcgccgcctcctcctctcgggtctcctcctcctcgtttgctgcctcctcctcctcctgcagca

SEQ ID NO: 118655 - DNA, 120 bp, Artificial Sequence
  ENSG00000100731_2 (sequence is synthesized)
agcagcaccagcgaccgccgaagcgccggctcgctcacccggagctccggaggtggatagacggggcagctgcaggctccggcgaccgaggccgagctggggccggggcggggacggcgg

SEQ ID NO: 118656 - DNA, 120 bp, Artificial Sequence
  ENSG00000100731_3 (sequence is synthesized)
ggcggcggcgacggcggcggcgccgggtggggatggggtcgcagacgctgcagatcctccgacagggggtgtgggccgcgctcagcgggggctggtactacgacccgcaccaggccacct

SEQ ID NO: 118657 - DNA, 120 bp, Artificial Sequence
  ENSG00000100731_4 (sequence is synthesized)
tcgtgaacgcgctgcacctctacctgtggctctttctgctgggcctgcccttcaccctctacatggcccttccttctaccatgattatagtagcagtttattgtcctgtgatagctgctg

SEQ ID NO: 118658 - DNA, 120 bp, Artificial Sequence
  ENSG00000100731_5 (sequence is synthesized)
ttttcattgttctgaagatggtcaactatcgactacacagagcacttgatgctggagaagttgtagataggactgcaaatgagttcacggatcagcgaaccaaagctgaacaaggcaact

SEQ ID NO: 118659 - DNA, 120 bp, Artificial Sequence
  ENSG00000100731_6 (sequence is synthesized)
gttcaaccaggagaaaagacagcaatggaccgagtgatcctggtggagggattgaaatgtctgagttcatccgagaggccacacccccagttggttgcagttccagaaattcttatgccg

SEQ ID NO: 118660 - DNA, 120 bp, Artificial Sequence
  ENSG00000100731_7 (sequence is synthesized)
gtctagatccaagcaaccagattggatctggttcctcgcgtcttggaacagcagcaactattaaaggagatacagacactgctaagacttctgatgatatcagtttaagtctgggccaaa

SEQ ID NO: 118661 - DNA, 120 bp, Artificial Sequence
  ENSG00000100731_8 (sequence is synthesized)
gttctagtctttgtaaggaaggaagtgaagaacaagatttggcagctgatcggaagctctttcgtcttgtctccaatgactccttcatctctattcagccttccttatcctcttgtggac

SEQ ID NO: 118662 - DNA, 120 bp, Artificial Sequence
  ENSG00000100731_9 (sequence is synthesized)
aggacttgccaagggacttcagtgacaaagtgaacctgccaagtcataaccaccaccaccatgttgatcagtctctgtccagcgcctgtgacacagaagtagcttctcttgtacctttac

SEQ ID NO: 118663 - DNA, 120 bp, Artificial Sequence
  ENSG00000100731_10 (sequence is synthesized)
actcacactcttatagaaaagaccaccggccgcgaggtgtaccacggacttctagctctgctgtggcttttccagacacttcactgaatgattttcccctttatcagcaaagacgtggat

SEQ ID NO: 118664 - DNA, 120 bp, Artificial Sequence
  ENSG00000100731_11 (sequence is synthesized)
tagatccagttagtgagttagaatcttccaagcctctttctggatccaaagaatccttggtggaaaattctggtttatctggggaatttcagcttgctggtgacttgaaaatcaatactt

SEQ ID NO: 118665 - DNA, 120 bp, Artificial Sequence
  ENSG00000100731_12 (sequence is synthesized)
ctcagccacccacaaaaagtgggaagagcaaacctttgaaagcagagaaaagcatggacagcttgaggagcctgagcacacggagtagtgggtcaacagaaagctactgcagtggaacgg

SEQ ID NO: 118666 - DNA, 120 bp, Artificial Sequence
  ENSG00000100731_13 (sequence is synthesized)
accgggacactaacagtactgtcagcagctataaaagtgagcagaccagctcaactcacatagagagcatcctgtcagagcatgaggagtctcctaaagcaggaacaaaaagtgggagga

SEQ ID NO: 118667 - DNA, 120 bp, Artificial Sequence
  ENSG00000100731_14 (sequence is synthesized)
agaaagagtgctgtgcaggcccagaggagaagaatagctgtgccagtgacaaaaggactagcagtgaaaagattgctatggaagcgagtaccaacagtggggttcacgaggccaaggacc

SEQ ID NO: 118668 - DNA, 120 bp, Artificial Sequence
  ENSG00000100731_15 (sequence is synthesized)
ccaccccctctgatgagatgcacaaccagagaggtctcagcacctctgcatctgaagaagccaataaaaatccccatgcaaatgaatttacttcccaaggggacagaccacctgggaaca

SEQ ID NO: 118669 - DNA, 120 bp, Artificial Sequence
  ENSG00000100731_16 (sequence is synthesized)
ctgcagaaaacaaagaagagaagagtgataagtcagctgtttctgtggattccaaagtgcgtaaagatgttggtggaaagcaaaaggaaggggatgttcgacctaaatcttctagcgtaa

SEQ ID NO: 118670 - DNA, 120 bp, Artificial Sequence
  ENSG00000100731_17 (sequence is synthesized)
tccatcggacagcttctgcccacaagtcaggcaggagacgcacaggaaaaaaacgggctagcagttttgattcaagccggcatagggactatgtttgctttcgaggtgtttctggtacca

SEQ ID NO: 118671 - DNA, 120 bp, Artificial Sequence
  ENSG00000100731_18 (sequence is synthesized)
agccacacagtgctatattttgtcatgacgaagactctagtgatcagagtgacttgagtagagcatcaagtgttcagtctgctcaccagttcagcagtgatagctcttctagcaccactt

SEQ ID NO: 118672 - DNA, 120 bp, Artificial Sequence
  ENSG00000100731_19 (sequence is synthesized)
ctcattcctgtcagtctcctgagggcagatacagtgctctaaagaccaaacacactcataaagaaaggggcacagactctgaacacacacacaaagctcatttggttcctgaaggaacca

SEQ ID NO: 118673 - DNA, 120 bp, Artificial Sequence
  ENSG00000100731_20 (sequence is synthesized)
gcaaaaagcgtgcaacacgacggacttctagcacaaatagtgccaagactcgtgcccgagtgttgagcctggacagtggcacagtagcatgtttgaatgactcaaacaggttaatggcac

SEQ ID NO: 118674 - DNA, 120 bp, Artificial Sequence
  ENSG00000100731_21 (sequence is synthesized)
ctgaaagtataaagcccttaaccacttcaaaatcagatcttgaggccaaagagggagaggtgctagatgagctatctttattaggacgggcttcccagttagagacagtcactcgatcta

SEQ ID NO: 118675 - DNA, 120 bp, Artificial Sequence
  ENSG00000100731_22 (sequence is synthesized)
ggaatagcttgccaaaccaggttgcatttcctgaaggggaagagcaagatgcagtcagtggagcagcacaagccagcgaggaggcagtgtcatttcgccgtgaacgcagcacatttaggc

SEQ ID NO: 118676 - DNA, 120 bp, Artificial Sequence
  ENSG00000100731_23 (sequence is synthesized)
gccaggcagtacggcgccggcacaatgcagggagtaaccctacccctcctacattgctcatcggatcacccctaagccttcaagatggtcagcaaggccagcagtccacagcccaggtca

SEQ ID NO: 118677 - DNA, 120 bp, Artificial Sequence
  ENSG00000100731_24 (sequence is synthesized)
aagtccagtcccgccccccttcccaggctgcagtgctcagtgctagtgcctccttgctggtgagaaatgggagtgtccacttagaagcatcacatgacaatgcatctgctgtaggcggta

SEQ ID NO: 118678 - DNA, 120 bp, Artificial Sequence
  ENSG00000100731_25 (sequence is synthesized)
gcagtttgcacgatgaacttggtaagttctcttctacgctgtatgagactggtggctgtgatatgtcacttgtgaattttgaaccagcagcaagaagagcatccaatatctgtgacacag

SEQ ID NO: 118679 - DNA, 120 bp, Artificial Sequence
  ENSG00000100731_26 (sequence is synthesized)
attctcatgtatccagttctacctcagttcgattttatccacatgatgtgctctctctcccacagattcgattgaatagactattgaccattgatacagatttgttggagcaacaggaca

SEQ ID NO: 118680 - DNA, 120 bp, Artificial Sequence
  ENSG00000100731_27 (sequence is synthesized)
ttgatctaagccctgacttggcagctacttacggcccaacagaagaagctgcccaaaaggttaaacactattatcgcttttggatcctaccccagctgtggattggcattaactttgaca

SEQ ID NO: 118681 - DNA, 120 bp, Artificial Sequence
  ENSG00000100731_28 (sequence is synthesized)
gactcacacttttggccctgtttgatagaaatcgtgagatcctggaaaatgtgttagctgtcatcctggctattctcgtggcctttttgggatctattcttctcatacaaggattcttca

SEQ ID NO: 118682 - DNA, 120 bp, Artificial Sequence
  ENSG00000100731_29 (sequence is synthesized)
gagatatctgggtcttccagttctgcctcgtcatagccagctgtcaatactcactgcttaagagtgttcaaccagattcttcttctcccagacatggtcataatcgtatcattgcctaca

SEQ ID NO: 118683 - DNA, 120 bp, Artificial Sequence
  ENSG00000100731_30 (sequence is synthesized)
gtagaccagtttatttctgcatatgttgcggtcttatttggctcttggattatggtagcagaaacctgactgcaaccaagttcaaattatatggaataactttcaccaatccactggtgt

SEQ ID NO: 118684 - DNA, 120 bp, Artificial Sequence
  ENSG00000100731_31 (sequence is synthesized)
ttatatcagccagggatttagttatagtgtttacactctgtttcccaatagtgtttttcattggtctcctgcctcaggtgaatacatttgtaatgtacctttgtgaacaattggatattc

SEQ ID NO: 118685 - DNA, 120 bp, Artificial Sequence
  ENSG00000100731_32 (sequence is synthesized)
atatttttggtggtaatgccactacaagcctgcttgcagcactttacagttttatctgtagcattgttgcagtagccttattgtatggattatgttatggggctttaaaggattcttggg

SEQ ID NO: 118686 - DNA, 120 bp, Artificial Sequence
  ENSG00000100731_33 (sequence is synthesized)
atggccagcatattccagtacttttctccattttttgtggtttattagtggcagtgtcttaccatctcagccgacaaagcagtgatccatctgtacttttctctttagtgcaatccaaga

SEQ ID NO: 118687 - DNA, 120 bp, Artificial Sequence
  ENSG00000100731_34 (sequence is synthesized)
tttttccaaaaacggaagagaaaaatccagaagaccctctatctgaagtaaaagatccactgcctgaaaaacttagaaattctgttagtgagcgattacagtctgacctggtagtatgca

SEQ ID NO: 118688 - DNA, 120 bp, Artificial Sequence
  ENSG00000100731_35 (sequence is synthesized)
ttgtaattggtgtgctgtattttgctattcatgtaagcacagtcttcacagtattgcagcctgccctcaagtatgtgttgtatacattggttggctttgtgggttttgtaacccattatg

SEQ ID NO: 118689 - DNA, 120 bp, Artificial Sequence
  ENSG00000100731_36 (sequence is synthesized)
tgctgcctcaagttagaaaacagctaccatggcactgtttctctcatcctctgctaaagacactagagtataatcagtatgaagttcgaaatgcagccactatgatgtggtttgagaaac

SEQ ID NO: 118690 - DNA, 120 bp, Artificial Sequence
  ENSG00000100731_37 (sequence is synthesized)
ttcatgtgtggcttctttttgtggagaagaatataatctatccattgattgttctcaatgaactgagcagcagtgcagagacaattgctagtccaaagaaactgaatacagaattaggtg

SEQ ID NO: 118691 - DNA, 120 bp, Artificial Sequence
  ENSG00000100731_38 (sequence is synthesized)
ctttaatgatcactgttgctggtttgaagttgctacgatcctcttttagcagccctacatatcagtatgttacagtcatctttactgtgctgtttttcaaatttgactatgaagcttttt

SEQ ID NO: 118692 - DNA, 120 bp, Artificial Sequence
  ENSG00000100731_39 (sequence is synthesized)
cagagaccatgctgttggatctcttctttatgtccatactcttcaacaagctttgggaactactttataaattgcagtttgtgtatacctatattgccccatggcagatcacatggggtt

SEQ ID NO: 118693 - DNA, 120 bp, Artificial Sequence
  ENSG00000100731_40 (sequence is synthesized)
ctgctttccatgcttttgctcagccttttgcagtgcctcattcagccatgctgtttattcaggctgctgtctcggccttcttctctactccactgaacccctttctgggaagtgcaatat

SEQ ID NO: 118694 - DNA, 120 bp, Artificial Sequence
  ENSG00000100731_41 (sequence is synthesized)
tcatcacttcatatgtccgacctgtgaaattctgggagagagactataacacaaaacgagtggatcattcaaataccagattggcttcccagcttgatagaaatccaggatcagatgaca

SEQ ID NO: 118695 - DNA, 120 bp, Artificial Sequence
  ENSG00000100731_42 (sequence is synthesized)
acaatctgaattccatcttttatgagcatttaactagatccctacagcacagcctctgtggtgatttgctactaggacggtggggaaactacagtacaggggactgtttcatccttgcct

SEQ ID NO: 118696 - DNA, 120 bp, Artificial Sequence
  ENSG00000100731_43 (sequence is synthesized)
ctgactatctcaatgcattagtacaccttatagagataggcaatggtctggtcacttttcagctgcggggacttgaattcagaggtacctactgtcaacaacgggaagtggaggccatta

SEQ ID NO: 118697 - DNA, 120 bp, Artificial Sequence
  ENSG00000100731_44 (sequence is synthesized)
ctgaaggtgtagaggaagatgaaggattttgctgttgtgaacctggccatattcctcacatgctttcatttaatgctgcatttagccagcgatggctagcttgggaagtgatagtcacaa

SEQ ID NO: 118698 - DNA, 120 bp, Artificial Sequence
  ENSG00000100731_45 (sequence is synthesized)
agtacattctggagggttatagcatcactgataacagtgctgcttctatgcttcaagtctttgatcttcggaaagtactcaccacttactatgtcaagggtatcatttattatgttacga

SEQ ID NO: 118699 - DNA, 120 bp, Artificial Sequence
  ENSG00000100731_46 (sequence is synthesized)
cctcgtctaagctagaggagtggctagctaatgagacaatgcaggaaggacttcgtctgtgtgctgatcgcaattatgtcgatgtggacccgacctttaatccaaacattgatgaagact

SEQ ID NO: 118700 - DNA, 120 bp, Artificial Sequence
  ENSG00000100731_47 (sequence is synthesized)
atgaccaccgactggcaggcatatctagggagagtttctgtgtgatttacctcaactggatagagtactgctcttcccgaagagcaaagcctgtggatgtggacaaagattcatccctag

SEQ ID NO: 118701 - DNA, 120 bp, Artificial Sequence
  ENSG00000100731_48 (sequence is synthesized)
tgactctctgttatggactctgtgttctgggacggagagctttggggactgcatcccatcatatgtccagtaatttagagtcattcctctatggattgcatgccctatttaaaggagatt

SEQ ID NO: 118702 - DNA, 120 bp, Artificial Sequence
  ENSG00000100731_49 (sequence is synthesized)
tccgtatttcttcaattcgagatgaatggatctttgctgacatggaattgctaagaaaagtagtagtccctgggatccgtatgtccattaaacttcatcaggatcattttacttctccag

SEQ ID NO: 118703 - DNA, 120 bp, Artificial Sequence
  ENSG00000100731_50 (sequence is synthesized)
atgaatatgatgaccctactgtgctctatgaagccatagtatctcatgagaagaacctcgtaatagcccatgaaggggaccctgcatggcggagtgcagtacttgccaactctccctcct

SEQ ID NO: 118704 - DNA, 120 bp, Artificial Sequence
  ENSG00000100731_51 (sequence is synthesized)
tgcttgctctgcggcatgtcatggatgatggcaccaatgaatataaaatcatcatgctcaacagacgctacctgagcttcagggtcattaaagtgaataaggaatgtgtccgaggtcttt

SEQ ID NO: 118705 - DNA, 120 bp, Artificial Sequence
  ENSG00000100731_52 (sequence is synthesized)
gggcagggcaacagcaggagcttgtttttctacgtaaccgtaacccagagagaggtagcatccaaaatgcaaagcaagccctgagaaacatgataaactcatcttgtgatcaacctattg

SEQ ID NO: 118706 - DNA, 120 bp, Artificial Sequence
  ENSG00000100731_53 (sequence is synthesized)
gacaacttcttactctgacagccacgaacagcttaaagacattcttgggggtcctatcagcttgggaaatatcaggaacttcatagtgtcaacctggcacaggcttaggaaaggttgcgg

SEQ ID NO: 118707 - DNA, 120 bp, Artificial Sequence
  ENSG00000100731_54 (sequence is synthesized)
agctggatgtaacagtggtggcaatattgaagattctgatactggaggtgggacttcctgcactggtaacaatgcaacaactgccaacaatccccacagcaacgtgacccagggaagcat

SEQ ID NO: 118708 - DNA, 120 bp, Artificial Sequence
  ENSG00000100731_55 (sequence is synthesized)
tggaaatcctgggcagggatcaggaactggactccacccacctgtcacatcttatcctccaacactaggcactagccacagctctcactctgtgcagtcgggcctggtcagacagtctcc

SEQ ID NO: 118709 - DNA, 120 bp, Artificial Sequence
  ENSG00000100731_56 (sequence is synthesized)
tgcccgggcctcagtagccagccagtcttcctactgctatagcagccggcattcatccctccggatgtccaccactgggtttgtgccttgtcggcgctcttctactagtcagatatcgct

SEQ ID NO: 118710 - DNA, 120 bp, Artificial Sequence
  ENSG00000100731_57 (sequence is synthesized)
tcgaaacttgccatcatccatccaatcccgactgtcgatggtgaaccaaatggaaccctcaggtcagagcggcctggcctgtgtgcagcacggcctgccttcctccagcagctccagcca

SEQ ID NO: 118711 - DNA, 120 bp, Artificial Sequence
  ENSG00000100731_58 (sequence is synthesized)
aagcatcccagcctgcaaacatcacactctcgtgggctttcttgcgacagagggaggtcagagcagtgccactgatgcacagccaggcaacaccttaagtcctgccaacaattcacactc

SEQ ID NO: 118712 - DNA, 120 bp, Artificial Sequence
  ENSG00000100731_59 (sequence is synthesized)
cagaaaggcagaagtgatttacagagtccaaattgtggatcccagtcaaattctggaagggatcaacctgtctaaaaggaaagagctacagtggcctgatgaaggaatccggttaaaagc

SEQ ID NO: 118713 - DNA, 120 bp, Artificial Sequence
  ENSG00000100731_60 (sequence is synthesized)
tgggagaaatagctggaaagactggagtccgcaggagggcatggaaggccatgtgattcaccgatgggtgccttgcagcagagatccaggtaccagatcccacatcgacaaggcagtgct

SEQ ID NO: 118714 - DNA, 120 bp, Artificial Sequence
  ENSG00000100731_61 (sequence is synthesized)
tctggtccagattgatgataaatatgtgactgtaattgaaactggggtactagaacttggggctgaagtgtgagccagtgtttattataaagacatttctttttccctctcaattccaag

SEQ ID NO: 118715 - DNA, 120 bp, Artificial Sequence
  ENSG00000100731_62 (sequence is synthesized)
gcattggaaaaagagaggaacaagcagaagatgcctgcaggtatcactttgatcctatgtgggagcgactgaaaatagaatgagcttggttaagcacctctcctttgcccttcaccctga

SEQ ID NO: 118716 - DNA, 120 bp, Artificial Sequence
  ENSG00000100731_63 (sequence is synthesized)
ctcctgtcactgtctccatccccaaataaagctgaaatatttttttaagttagctgccgagaaaacattttgcatgaaggataaagttctgttaaaatacatccttaaaaaaagtttttc

SEQ ID NO: 118717 - DNA, 120 bp, Artificial Sequence
  ENSG00000100731_64 (sequence is synthesized)
ctatgcattgcctatgctttaaatcaacaaactcttcatttctaaactatgatctcatatttttctaatttctttgccaaaaataattgccatgttttgtcatagaacatgaaattcatt

SEQ ID NO: 118718 - DNA, 120 bp, Artificial Sequence
  ENSG00000100731_65 (sequence is synthesized)
taccttgatttttaagaacagaccagtgtagaaatgttccttttgacttatagcagtataaaagtttaatgtacagtgaaagagactatgaacagacatagatttatcttattccttgag

SEQ ID NO: 118719 - DNA, 120 bp, Artificial Sequence
  ENSG00000100731_66 (sequence is synthesized)
cgctaaaaactttaataaaaaaaactgcactaattttttacagcaatgcactaaagtctgagatttctcagaacatttatttatatataaaaataaaataccattatttaaattgccttt

SEQ ID NO: 118720 - DNA, 120 bp, Artificial Sequence
  ENSG00000100731_67 (sequence is synthesized)
gggattagccccttccctttccttataaacacaggtagcaggaactgtgctgctcatttttctgttagtagtgtgtacttcatgccaggacattgggtattttctttaaagtgaatatag

SEQ ID NO: 118721 - DNA, 120 bp, Artificial Sequence
  ENSG00000100731_68 (sequence is synthesized)
aatctcaagatatacgtagcttcatcattgacatttcccagagccaatagtcagcggatcggtcttgtgaacaccactgccagctcctgtgtctacatctcagaggagcccatgtgctct

SEQ ID NO: 118722 - DNA, 120 bp, Artificial Sequence
  ENSG00000100731_69 (sequence is synthesized)
gcttctctccaccagagcaagctctgctgggcgtgcttctgggaagaaaacaattttctttaagaagaagatgaatgtccaggaatttaaagaaaggatcgattgccttttatttatgag

SEQ ID NO: 118723 - DNA, 120 bp, Artificial Sequence
  ENSG00000100731_70 (sequence is synthesized)
tttctagctcttgaagttattcacatgcagttcagttagtcaagtaaaattttttttcaaataaaagtatccaagtggtgcagttattattatatccctctttaataattttgcttttta

SEQ ID NO: 118724 - DNA, 120 bp, Artificial Sequence
  ENSG00000100731_71 (sequence is synthesized)
tttttcccctcttctttttctgttacttgaattttatttcctgtaatttatagtgtgtagctgtaaattgaaatatttataactgtgaaattgacttaattcatatgttgtctcataact

SEQ ID NO: 118725 - DNA, 120 bp, Artificial Sequence
  ENSG00000100731_72 (sequence is synthesized)
ttattttttttaaatgcatattcagggaaatatattactcatatttacaattgggcgatataggaacttcaatttagatttaatttgcaactcttagcattttttaaatccttgataaaa

SEQ ID NO: 118726 - DNA, 120 bp, Artificial Sequence
  ENSG00000100731_73 (sequence is synthesized)
ttttcccttttggtgtgaaactccaaagaaaattgtacatctcctctgagcatttaggagcagccatctttctaccccttgtgaataaatcattgaaagaaacaggtaaaattaatttta

SEQ ID NO: 118727 - DNA, 120 bp, Artificial Sequence
  ENSG00000100731_74 (sequence is synthesized)
atgatacattttgtttcacccagtatagtcaaagtattactatttcatcatatgtcactagccatatttcaagtactcaatagctacatgtacctagtggctactgtattagacagtaca

SEQ ID NO: 118728 - DNA, 120 bp, Artificial Sequence
  ENSG00000100731_75 (sequence is synthesized)
gatttaaagtatcttttgttgaggtgacagaagagagaagctgtttttcctaccaattctgatgtagatctcacattatagcataacattacagtagaaggaatgaaaactaagaaagta

SEQ ID NO: 118729 - DNA, 120 bp, Artificial Sequence
  ENSG00000100731_76 (sequence is synthesized)
aatagtgaacatacagaacttactgcatttccactttaaaacctatttattttccctttttctaattttaaacttttgtggtcattcagaacctaatgtgccttgtgttgacatttccat

SEQ ID NO: 118730 - DNA, 120 bp, Artificial Sequence
  ENSG00000100731_77 (sequence is synthesized)
agacttcacactttacaaaatttactgtttaaaaatacttgtcaaatgatttactgaacctttatacaaaagtaccctttctaaattgaccatttaaaaatgtatttttgtgataccgtc

SEQ ID NO: 118731 - DNA, 120 bp, Artificial Sequence
  ENSG00000100731_78 (sequence is synthesized)
attatgttctgcatttgcctcattttggcagatctacagtatgccattaaagtttagtgttgtttttggttttggagggtttttttctgaaactgaatttataatctatttctctgtata

SEQ ID NO: 118732 - DNA, 120 bp, Artificial Sequence
  ENSG00000100731_79 (sequence is synthesized)
cgtatatttttaaaatcttctgaaaggaactatgttccctgctgcttcttccctttctgaagtgaatatgatcttttcatggtcattgcctagataaaagtagagccttttcaatcttag

SEQ ID NO: 118733 - DNA, 120 bp, Artificial Sequence
  ENSG00000100731_80 (sequence is synthesized)
atggaagataattcattttcccacacagaaaaaaaatctgacctttacatgatttaatctgaagggctagaattttttaatttctagcccctcctccaaaaaaattttaaacacatcaca

SEQ ID NO: 118734 - DNA, 120 bp, Artificial Sequence
  ENSG00000100731_81 (sequence is synthesized)
tactctgaaaagtcagatttcaaatgcaagactagactttatatggaacatatatgttgggttttgattttgggtagcaattgacatatatttttctcaaaacaagttgaattttgttaa

SEQ ID NO: 118735 - DNA, 120 bp, Artificial Sequence
  ENSG00000100731_82 (sequence is synthesized)
catatataattctttagtgaatttataaattaggaaccctgagaagaagccctgttgtttttcttaagagtctaaaactgacaatcttttaaaaatcataatacttttctagtaattgca

SEQ ID NO: 118736 - DNA, 120 bp, Artificial Sequence
  ENSG00000100731_83 (sequence is synthesized)
tcagggaattggtgataattgaagaaagatccatttcttaagaataatttgatctaaattattatatggaaataaacatacttgtgttaactaaattgatcataaattcttgttcctgcc

SEQ ID NO: 118737 - DNA, 120 bp, Artificial Sequence
  ENSG00000100731_84 (sequence is synthesized)
tcacccctcaccccccagagaatagtgagtgactcgtttagattctctgctttttttcagttatgtacaagacttcagcatacattaatgtctttagtttataaatttgccaatgcttta

SEQ ID NO: 118738 - DNA, 120 bp, Artificial Sequence
  ENSG00000100731_85 (sequence is synthesized)
atttccataatttgaaagttaaaagatgtaactaaaatactagcttttttattcatttccttttggtggagttgtatgattgaaaactttgctttttcttgtttaattcttccgccaccc

SEQ ID NO: 118739 - DNA, 120 bp, Artificial Sequence
  ENSG00000100731_86 (sequence is synthesized)
cctcttttgagagaaaggtaatcgtggaatgagttataaattattgcctttttttcctttatttctttcattcagtggcaaaaaacattttataactcctaagtttttggttaatcttcc

SEQ ID NO: 118740 - DNA, 120 bp, Artificial Sequence
  ENSG00000100731_87 (sequence is synthesized)
aacttataccttggtgtgaactctctttttacaccattttcaacactggataaaactttaatgttgactttttgctaaagaactttaatttttccaagaatctagattaacataagatgt

SEQ ID NO: 118741 - DNA, 120 bp, Artificial Sequence
  ENSG00000100731_88 (sequence is synthesized)
tgatatttaaggaacttggaagagtaagtggtgaggctgtatgtatattttttaagagattaccttttaggaaattagtgaacaaacttaaccagtgttctgccttctttgactttgtta

SEQ ID NO: 118742 - DNA, 120 bp, Artificial Sequence
  ENSG00000100731_89 (sequence is synthesized)
ctggaggatgataatctatttctattagattcgaagtattttggaaaatatttcaagtatatctgaactacttataattcttaaaacagaagtagtcagacaatatttgtatcctaagtg

SEQ ID NO: 118743 - DNA, 120 bp, Artificial Sequence
  ENSG00000100731_90 (sequence is synthesized)
agatatggaaaattactctgtatactaaatgtcaggcaatgaaaatgtaagtttttgtgtagaaaacccattaagaagatgtgtttttctttctgaattagtttatttttccatcacata

SEQ ID NO: 118744 - DNA, 120 bp, Artificial Sequence
  ENSG00000100731_91 (sequence is synthesized)
ccaaaatataaaaatcagcctcacatttttcagcaagtttagcttatagccttgataaattcctctgtgcttctgagcagcatccttctgcctctgcttagcagctctgcatttggtgga

SEQ ID NO: 118745 - DNA, 120 bp, Artificial Sequence
  ENSG00000100731_92 (sequence is synthesized)
ttgctgttgtgagtcattcatccagcactgggccttttaagctgaagattcacccagtgtctaaagttgtccttttcttatagctagctttcaagcatctttcctcctaaataaatatgt

SEQ ID NO: 118746 - DNA, 120 bp, Artificial Sequence
  ENSG00000100731_93 (sequence is synthesized)
gacttgagaaaaaggtaataatgattttgtcagaattctttgaatttatatttactagctacttaaccataaactgctgtccagattgttaatttcatttatatttattttaattaattt

SEQ ID NO: 118747 - DNA, 120 bp, Artificial Sequence
  ENSG00000100731_94 (sequence is synthesized)
gtcatgaatatggacaaagccttttctggggtgtgtgtgtgtgtgtatgtttgttttttaagtcgtcattattcattcgtattctttttctgtgtaatgtaatcatataaagttactttg

SEQ ID NO: 118748 - DNA, 120 bp, Artificial Sequence
  ENSG00000100731_95 (sequence is synthesized)
gacagagacccagttaattttctcttttgataggatacatggtttagataaggtataaagtgtccctttttattctagaggcttttcctttaattcagagattagtggagataataacgt

SEQ ID NO: 118749 - DNA, 120 bp, Artificial Sequence
  ENSG00000100731_96 (sequence is synthesized)
cagtcaaggctaatgtggtacatggaacttgctaatggaggttggacattctgtttcagtcttacatggatattgtttcattggtgttgaggaagaaaaaaattagatactaccatgcat

SEQ ID NO: 118750 - DNA, 120 bp, Artificial Sequence
  ENSG00000100731_97 (sequence is synthesized)
tgggacagcataattctaatattacattgaatatggctttttaaaaataagtattaaaaagccaatcgttttctccatttatctatcttttttgtttgtttttaatttggttgattgata

SEQ ID NO: 118751 - DNA, 120 bp, Artificial Sequence
  ENSG00000100731_98 (sequence is synthesized)
tgcacccaggccgtcttatttttacttgttaaatgtctgtctaggaagaactgtgattggaaaggaattaattattatacaaataaatctggtaggatatgagtggagtaagtttgcttg

SEQ ID NO: 118752 - DNA, 120 bp, Artificial Sequence
  ENSG00000100731_99 (sequence is synthesized)
aaacagaagtatattttctactttgaatcacctcaccagagtcatctgtcaagaattatgtataacaatttatctttattgcctacatacaacatactttttctgaattaagataacttc

SEQ ID NO: 118753 - DNA, 120 bp, Artificial Sequence
  ENSG00000100731_100 (sequence is synthesized)
tatttgtgagttgaacttcattatctgccattttgtggaatcaaccttacattctttggtggaactagagctgattgtcaccacaaggttatatgacaactctgttctaagacttatacc

SEQ ID NO: 118754 - DNA, 120 bp, Artificial Sequence
  ENSG00000100731_101 (sequence is synthesized)
tattatatagggttataccttttttcttatgcctcagctctgtacctgacaatttatgattcagtggagccaagctagaaggaacaaaggtcatctaacactgtgatggggatgaattcc

SEQ ID NO: 118755 - DNA, 120 bp, Artificial Sequence
  ENSG00000100731_102 (sequence is synthesized)
tgagttttacctgcacaatgaggtggtgccccggaattcacaacagagtagtgatagagcataagatggctgctccagatgactcttgggtttagtgtacttgtgattgaacaagatttt

SEQ ID NO: 118756 - DNA, 120 bp, Artificial Sequence
  ENSG00000100731_103 (sequence is synthesized)
ttatctatgaagcttgattctacaaccaaaataatagaaatgggggggggggggggaatcatgtctgcttatgctttttaaaagcttatagtttaagtaaaagtaaaatgtaaaaactga

SEQ ID NO: 118757 - DNA, 120 bp, Artificial Sequence
  ENSG00000100731_104 (sequence is synthesized)
ttaaacctatacaagtctggcaatgagctctgcatgaggaaatggaaggaggaatattgaaaatgattctaggaaagtgaacgtaagaaaggaaaatgggttttccttttctgatcatgg

SEQ ID NO: 118758 - DNA, 120 bp, Artificial Sequence
  ENSG00000100731_105 (sequence is synthesized)
gctctggaaagtattcatggcctttaccagcattcagtataaaccagagataaggacatatgtacttacgtgtgtctgtgagtgtgtgtgtgtctgagtgttattctgaacagcttgtaa

SEQ ID NO: 118759 - DNA, 120 bp, Artificial Sequence
  ENSG00000100731_106 (sequence is synthesized)
atattgtagttgtttaaaatggaaaataaaagctgagttcttttggcaaatatattgcatcaaaaatacagtattgacagtggataaaacactgaggaaataaattttttttcattttgc

SEQ ID NO: 118760 - DNA, 120 bp, Artificial Sequence
  ENSG00000100731_107 (sequence is synthesized)
gaccagagttaatttgtagaatatgctgcatacaatttggcagaagtttataacaatttaatatgatatttaaggaaacattaacataaaatgttatggtgatagtagtaatacagagtt

SEQ ID NO: 118761 - DNA, 120 bp, Artificial Sequence
  ENSG00000100731_108 (sequence is synthesized)
gccaccttcgtgaacgcgctgcacctctacctgtggctctttctgctgggcctgcccttcaccctctacatggaccacgtggagataactgaatcatgggggtggttcccccatgctgtt

SEQ ID NO: 118762 - DNA, 120 bp, Artificial Sequence
  ENSG00000100731_109 (sequence is synthesized)
atcattgaggaaaaaggttatctgcctgaacagatctttaatgcaggtgaaagtgctctattctgcagcgggggttgggggtggggaagccacaaaggacatttttttagtaaggaagag

SEQ ID NO: 118763 - DNA, 120 bp, Artificial Sequence
  ENSG00000100731_110 (sequence is synthesized)
caccaagcaccaaaatttaaggcagggatgggtaagctaagtttactgttttgtgcaaatgcagagaggggtttatgatcgggactgtctttacctataaagccgctgacccctaagcct

SEQ ID NO: 118764 - DNA, 120 bp, Artificial Sequence
  ENSG00000100731_111 (sequence is synthesized)
tgaggggaaaagataaacaccaactgctattttgattgtacaacaagaaggcctagacaaagagaactcttcctggtttggttccaccaatgctttgtccctgaagtcaggaagtacctt

SEQ ID NO: 118765 - DNA, 120 bp, Artificial Sequence
  ENSG00000100731_112 (sequence is synthesized)
gccagtaaaggaccttcttttaaagttcttttgatattggacaatgcctgtggccacccagaacctcatgagttcaacactgaaggcatggaggtggtctgcttgcctccagataacatc

SEQ ID NO: 118766 - DNA, 120 bp, Artificial Sequence
  ENSG00000100731_113 (sequence is synthesized)
tctaattcagcctccagatcagggtacgataaagacctttaagactcattatacatggtactcaatggaaaggattgtcagtgctatggaagagaaccctgatagaacatcatgaaagtc

SEQ ID NO: 118767 - DNA, 120 bp, Artificial Sequence
  ENSG00000100731_114 (sequence is synthesized)
tagaaagattacaccattgaagatgcccttgttgttacagaaaaagccatgaaagccatcaaatacaaaataataaatttctgctggagaaaactccagatgttgcacatgacttcacag

SEQ ID NO: 118768 - DNA, 120 bp, Artificial Sequence
  ENSG00000100731_115 (sequence is synthesized)
gatttatgacagagctaatcaaggaaatcatgagattgtggatatggcaaaaaaaaaaaaagggtgatgaaggattacaaggtgtggctcttggacaaattcaagaggtattaagcacca

SEQ ID NO: 118769 - DNA, 120 bp, Artificial Sequence
  ENSG00000100731_116 (sequence is synthesized)
cactagaagtattaacagaagataacttgatggagatgagtgcttccaaaccagcgccacatgatgaggaagacaaggaagcagtgccagaaaacaagttgactttacacagtctggcag

SEQ ID NO: 118770 - DNA, 120 bp, Artificial Sequence
  ENSG00000100731_117 (sequence is synthesized)
agtgattgggattattcaagactgattttgacttcttttacagtatggacccttctgtgatatgggcactaaaactaaagcataaggtagaagaagaattggtactatatggaaacattc

SEQ ID NO: 118771 - DNA, 120 bp, Artificial Sequence
  ENSG00000100731_118 (sequence is synthesized)
ttaaagaaatgaaaaaggaaaaatgtcagaaaagtacaatgttttttggtaaagttaaaccaagtgtgcctgcttctcttccctctccttccacctcctccacctctgagactgcaagac

SEQ ID NO: 118772 - DNA, 120 bp, Artificial Sequence
  ENSG00000100731_119 (sequence is synthesized)
ggagtgtgtgtactttcatatgtttgccatatttaatgtttttaagcctagaactataaaagttaatttttttgttttttataatttaatgttgttaattgacaaataaaaatcataaat

SEQ ID NO: 118773 - DNA, 120 bp, Artificial Sequence
  ENSG00000100731_120 (sequence is synthesized)
taaagatgttgctatactgtcttctggcttgcattgtttctgatgagaagtctgctgtcattcttttctttgttcctctgaaaaaaatgcctgtggatgtggacaaagattcatccctag

SEQ ID NO: 118774 - DNA, 120 bp, Artificial Sequence
  ENSG00000100731_121 (sequence is synthesized)
tacctcagttcgattttatccacatgatgtggtaggtttttctttatttttacaacatgataaattttcagattaaatctgaaatatgtatttacatagatagctataaaagccataaaa

SEQ ID NO: 118775 - DNA, 120 bp, Artificial Sequence
  ENSG00000100731_122 (sequence is synthesized)
attgatgaagttacacaaaaattttttgaaaactatggcaaaatcactttgctgccctccagtggctctctttttctaagtcctttgataagaaacaaaagtacaaggttaagaaaccct

SEQ ID NO: 118776 - DNA, 120 bp, Artificial Sequence
  ENSG00000100731_123 (sequence is synthesized)
ggcatagagtattttaaaaagtgttttggaaagtatttgtcaatgcttagagatagaaatggctgtgttatatataggaagtaaattttctcaactatacccagatatgtgtttgaaaag

SEQ ID NO: 118777 - DNA, 120 bp, Artificial Sequence
  ENSG00000100731_124 (sequence is synthesized)
taaaaccctccctactttttggctatagtgtattcctggaaactgcataggaaagcaaacatgggaagatgattgttttattgttttctacttttaaatggtatgggaaccttgagatag

SEQ ID NO: 118778 - DNA, 120 bp, Artificial Sequence
  ENSG00000100731_125 (sequence is synthesized)
caaaatgctgcctagtactatgccaaatacagtcaacttttgatgctttctgaggaaaagaaaactggtaaactgatggatggatgagttgaagttaaatatagtatagtaatttgtata

SEQ ID NO: 118779 - DNA, 120 bp, Artificial Sequence
  ENSG00000100731_126 (sequence is synthesized)
gcctcaggtgagcagcttgccaaaacaaacaaacaaacaaacaaacaggggtgagggatttggaaatatagtaacaacaatgataagagactgtgggaagaaatgagagttgctgccatc

SEQ ID NO: 118780 - DNA, 120 bp, Artificial Sequence
  ENSG00000100731_127 (sequence is synthesized)
agatccaatgcagtggggctcagatttaacactgataatgaggttcaaagcttaaggagaaaagactataaatgtgagaagagaagccactaacgattcacagtaagtggttttagtaga

SEQ ID NO: 118781 - DNA, 120 bp, Artificial Sequence
  ENSG00000100731_128 (sequence is synthesized)
ttcgctagctatacagttataaaatcttaaggttttttcttaagcattccctgagaaaaatcttaagattttagacacttttctagtcaattatttacaataggtttattgattaattaa

SEQ ID NO: 118782 - DNA, 120 bp, Artificial Sequence
  ENSG00000100731_129 (sequence is synthesized)
acaataggtttattgattaattaactttgttttagttcacttcctattgtcaccttctatagtttctggtaatcataacatattcataaagagtaggctgggcgcagtggctcctgcctg

SEQ ID NO: 118783 - DNA, 120 bp, Artificial Sequence
  ENSG00000100731_130 (sequence is synthesized)
ggtagcagaaacctgactgcaaccaagttcaaattatatggaataactttcaccaatccactggtgtttatatcagccagggatttagttataggtgaatacatttgtaatgtacctttg

SEQ ID NO: 118784 - DNA, 120 bp, Artificial Sequence
  ENSG00000100731_131 (sequence is synthesized)
ttttccagttttcacttcaggcttgaaattagaaaaaaaaaagacattaagtgattgaagactgagaagcaattaatttgtggataggaaaaaatagtcaagtctgctactttagagaaa

SEQ ID NO: 118785 - DNA, 120 bp, Artificial Sequence
  ENSG00000100731_132 (sequence is synthesized)
gagccaggtataatgaagcagatgtttaagaagttataaaataatgtctgcaactaaaagttctagtgaatttacatggagcctacatatacttaagaggtattcataaaagatcatcta

SEQ ID NO: 118786 - DNA, 120 bp, Artificial Sequence
  ENSG00000100739_0 (sequence is synthesized)
agcacttcccagaagagaaaactcctccaaaagcagctctcactatcagaaaacccaactacagttgtgaacgccttcattttctgcctgaggtctcagtccgtcggcccagactgaagt

SEQ ID NO: 118787 - DNA, 120 bp, Artificial Sequence
  ENSG00000100739_1 (sequence is synthesized)
gcagtggcacaatcatagctcgctgcagcctcgaccttccaggcttaaacgattctcccacctcagcctctcgagttgctgggaccacaggtcactgtgcatggcatcatcctggccccc

SEQ ID NO: 118788 - DNA, 120 bp, Artificial Sequence
  ENSG00000100739_2 (sequence is synthesized)
tctagagctccaatcctccaaccagagccagctcttccctcaaaatgctacggcctgtgacaatgctccagaagcctgggacctgctgcacagagtgctgccaacatttatcatctccat

SEQ ID NO: 118789 - DNA, 120 bp, Artificial Sequence
  ENSG00000100739_3 (sequence is synthesized)
ctgtttcttcggcctcctagggaacctttttgtcctgttggtcttcctcctgccccggcggcaactgaacgtggcagaaatctacctggccaacctggcagcctctgatctggtgtttgt

SEQ ID NO: 118790 - DNA, 120 bp, Artificial Sequence
  ENSG00000100739_4 (sequence is synthesized)
cttgggcttgcccttctgggcagagaatatctggaaccagtttaactggcctttcggagccctcctctgccgtgtcatcaacggggtcatcaaggccaatttgttcatcagcatcttcct

SEQ ID NO: 118791 - DNA, 120 bp, Artificial Sequence
  ENSG00000100739_5 (sequence is synthesized)
tctgggttgtggggggcctcttgagcatccccacattcctgctgcgatccatccaagccgtcccagatctgaacatcaccgcctgcatcctgctcctcccccatgaggcctggcactttg

SEQ ID NO: 118792 - DNA, 120 bp, Artificial Sequence
  ENSG00000100739_6 (sequence is synthesized)
caaggattgtggagttaaatattctgggtttcctcctaccactggctgcgatcgtcttcttcaactaccacatcctggcctccctgcgaacgcgggaggaggtcagcaggacaaggtgcg

SEQ ID NO: 118793 - DNA, 120 bp, Artificial Sequence
  ENSG00000100739_7 (sequence is synthesized)
ggggccgcaaggatagcaagaccacagcgctgatcctcacgctcgtggttgccttcctggtctgctgggccccttaccacttctttgccttcctggaattcttattccaggtgcaagcag

SEQ ID NO: 118794 - DNA, 120 bp, Artificial Sequence
  ENSG00000100739_8 (sequence is synthesized)
tccgaggctgcttttgggaggacttcattgacctgggcctgcaattggccaacttctttgccttcactaacagctccctgaatccagtaatttatgtctttgtgggccggctcttcagga

SEQ ID NO: 118795 - DNA, 120 bp, Artificial Sequence
  ENSG00000100739_9 (sequence is synthesized)
ccaaggtctgggaactttataaacaatgcacccctaaaagtcttgctccaatatcttcatcccataggaaagaaatcttccaacttttctggcggaattaaaacagcattgaaccaagaa

SEQ ID NO: 118796 - DNA, 120 bp, Artificial Sequence
  ENSG00000100739_10 (sequence is synthesized)
actcccgtagattggggggtacctaatccctggacttgatgaatgttaccaaattaagggtcttgagatggggagatgatcctgaattatccaagtgggccctatataatcacaagggtc

SEQ ID NO: 118797 - DNA, 120 bp, Artificial Sequence
  ENSG00000100739_11 (sequence is synthesized)
cttataggagggaggcaggaggctcagagtcaggagatgtgactatggaagcagaggccagaggaattcaggacggccactacgagccaaggattgcaggcaccctctagaggctgtaaa

SEQ ID NO: 118798 - DNA, 120 bp, Artificial Sequence
  ENSG00000100739_12 (sequence is synthesized)
cccagggaaacagatttaggatttctggcctccagaactgttagaggatacatttgtgttttgttttgctttgtttgctttgctttgctttgcttttttgagatggggtctcgctctgtc

SEQ ID NO: 118799 - DNA, 120 bp, Artificial Sequence
  ENSG00000100739_13 (sequence is synthesized)
acactcgagaagaacgtgctggccggtgaaatcggacaacattgctcacgggatgtaattcaatggtagactgcagccacagcctgagaactcagacacctgatttatgagacgcacata

SEQ ID NO: 118800 - DNA, 120 bp, Artificial Sequence
  ENSG00000100739_14 (sequence is synthesized)
agtaacgtttaccgaagcccagcaaatggccccacagtgggagagaaactggcaaacccgtacagtagaattctgttgcccttctgtggggaaggccagttattcatttacagagggaga

SEQ ID NO: 118801 - DNA, 120 bp, Artificial Sequence
  ENSG00000100739_15 (sequence is synthesized)
aatttctgccttgactaaaaggatcgatgctgtgggaaaaggtaatatatctgagttcccatggatctggttgataggttcacctggcgtgttccatatggggccaggcccaggccacac

SEQ ID NO: 118802 - DNA, 120 bp, Artificial Sequence
  ENSG00000100739_16 (sequence is synthesized)
ctgtggtgctaacacctggggtggagggaggaattagcaaatagtcttccagcatccccagctccagcacccatgtgggcttccactctctccctgagaagggccaagtagaaagagaga

SEQ ID NO: 118803 - DNA, 120 bp, Artificial Sequence
  ENSG00000100744_0 (sequence is synthesized)
ggagcagttccggctccgagggggcggggcggaagaaggcggggagggagggggcggcaccgccggtcggctccagtcgcctccggaggaaggaagaagaggacgccgggcgcgcagaat

SEQ ID NO: 118804 - DNA, 120 bp, Artificial Sequence
  ENSG00000100744_1 (sequence is synthesized)
ggaaacagactgtaatcccatggagctaagcagtatgtcaggatttgaagaaggttcagagctgaacggttttgaaggaactgacatgaaagacatgaggctcgaagctgaagcagttgt

SEQ ID NO: 118805 - DNA, 120 bp, Artificial Sequence
  ENSG00000100744_2 (sequence is synthesized)
aaatgatgttctctttgctgttaacaacatgtttgtctcgaaaagcctgcggtgtgcggatgatgtggcctatatcaatgtggaaacaaaggaaagaaacagatattgcctagaactcac

SEQ ID NO: 118806 - DNA, 120 bp, Artificial Sequence
  ENSG00000100744_3 (sequence is synthesized)
tgaagcagggctcaaggtggtaggctatgcttttgaccaggtagatgatcatttacagactccctaccatgaaacagtctactccttgttggatacactcagccccgcctaccgagaagc

SEQ ID NO: 118807 - DNA, 120 bp, Artificial Sequence
  ENSG00000100744_4 (sequence is synthesized)
atttggaaacgcactgcttcaaagactggaagctttgaaaagagatggacagtcatgactacactttttcctttcagaggggctggtgctggtacagaatgttgatataaagcttaaaat

SEQ ID NO: 118808 - DNA, 120 bp, Artificial Sequence
  ENSG00000100744_5 (sequence is synthesized)
tcttgcatatggtcatagaaaatgcatctttggttttgtgtttttatcacttgcttccaacttaggcttttggctcagaagattattgaataatgatttgtcttagtttctgtttcagta

SEQ ID NO: 118809 - DNA, 120 bp, Artificial Sequence
  ENSG00000100744_6 (sequence is synthesized)
agggaattctgaggccgttgctatgataccatcattaagacattcacatgtcttcatataatatctcttcatttcaaatcctaatcactatttcatactattacagggctttgatgctgc

SEQ ID NO: 118810 - DNA, 120 bp, Artificial Sequence
  ENSG00000100744_7 (sequence is synthesized)
cagcactgtcttttacataggaaattctagatttgcacagtaatagaggaattagaagtacctaactatacactttgattcagcctgctaaatcaggggttcaatactagcttggacaaa

SEQ ID NO: 118811 - DNA, 120 bp, Artificial Sequence
  ENSG00000100744_8 (sequence is synthesized)
tattactaataatggattaataaagatgaattaattatatattacttaactagtattaaatgaaaaacagggactgaaatagttctgtattccgtgtttgcaacagccagccaactaagc

SEQ ID NO: 118812 - DNA, 120 bp, Artificial Sequence
  ENSG00000100744_9 (sequence is synthesized)
agaggataaaccgttagcaaatgaatgtaataattactcatttccaagatatctaagcacataagcaaatacaggaacagacttcattctttttcttaacaaaaaagcatcttcagtgtg

SEQ ID NO: 118813 - DNA, 120 bp, Artificial Sequence
  ENSG00000100744_10 (sequence is synthesized)
tgatttaaaagaaagaagattctggtttcctagaaaacaatattttggcctgtgttgattcttattctgaatgtgtgtttacataatgtacagtatatattcagaaagtatttttgcttc

SEQ ID NO: 118814 - DNA, 120 bp, Artificial Sequence
  ENSG00000100744_11 (sequence is synthesized)
aacgtttactttctatgatgtagtgctttggtattcctacagcaccccaccttccccaacagatgtacagtgttctgtctccattcgaaatctacaatgtaatatgagtgcattgtatgg

SEQ ID NO: 118815 - DNA, 120 bp, Artificial Sequence
  ENSG00000100744_12 (sequence is synthesized)
gtttgaaaccaaaggatgaatgaagcattcagagacttaatatttgaaaaaggaatagtcagtattttatattttattacaggtactgatatttataaatttaataaactgtaccatgct

SEQ ID NO: 118816 - DNA, 120 bp, Artificial Sequence
  ENSG00000100744_13 (sequence is synthesized)
gctgcatgttttcaagtacatgttgaacagtaaggattggggagttgttttttaatggtcacctaaagcagctgctatagaaatgttgaactaaaattttgcatctggtcataccttcat

SEQ ID NO: 118817 - DNA, 120 bp, Artificial Sequence
  ENSG00000100744_14 (sequence is synthesized)
gcatttatcatttgcagatatttttccatcattattaaaaaacaggaacttttaggctctgaagatcatgtggaccagagcaaattaaagttcagtttgtgtcacaattcattgccagac

SEQ ID NO: 118818 - DNA, 120 bp, Artificial Sequence
  ENSG00000100744_15 (sequence is synthesized)
ttcattggaatgctttgtttgatgatgtatgttcattctcagctttattttcagatgcttaactgggcaacgaagtctaacttcaggttgaactttctcatgtttaatctcaggctaaat

SEQ ID NO: 118819 - DNA, 120 bp, Artificial Sequence
  ENSG00000100744_16 (sequence is synthesized)
gtaaatgatatttgtaaagtttgaataaaattctgtttactcattttgagttagtatgaaaaaaagtgattgtatgtttaagaattgaaattgttcattttgtgataaatgattaattcc

SEQ ID NO: 118820 - DNA, 120 bp, Artificial Sequence
  ENSG00000100744_17 (sequence is synthesized)
agtcgcctccggaggaaggaagaagaggacgccgggcgcgcagctcggtgctgattatcacaactgtttggtgacctacttcactgacctgtgaggattccttcccttcaggtactggat

SEQ ID NO: 118821 - DNA, 80 bp, Artificial Sequence
  ENSG00000100744_18 (sequence is synthesized)
gaggggcggcccccgagaagggctaggggctcggggcgccggcgggccgtcaggccttccggatggggacgcgacgccat

SEQ ID NO: 118822 - DNA, 120 bp, Artificial Sequence
  ENSG00000100744_19 (sequence is synthesized)
ccatgcagctggctgggccgagaggggcggcaggctgcaggggccccgcgcccgtgttaagaggggtctgggggccggtctggccggcctggctctcccggctcccctcagacctcggcg

SEQ ID NO: 118823 - DNA, 120 bp, Artificial Sequence
  ENSG00000100744_20 (sequence is synthesized)
ggaaacgcacacttggggctccgccgtctccgctgggaggactggagcccttctcgagcatccccgcccgcacccgagcattgaccggtgcccattgtcagcaagttcttcggcccccgc

SEQ ID NO: 118824 - DNA, 120 bp, Artificial Sequence
  ENSG00000100744_21 (sequence is synthesized)
ctcattcaggtattgtttctgaggcagcttcttcgttgccgtttgcctggcggtttgcagagcgcttctcgcatacgctcgcttaatcctgggtgtgtcatagcaacgatcaggaaactt

SEQ ID NO: 118825 - DNA, 120 bp, Artificial Sequence
  ENSG00000100744_22 (sequence is synthesized)
gggttttcgaagcatctgtgggcaaaactgcattccttgagaaatgctaaaggctcctgaccccgccggaacctgggtgaagaacttgggctgttctggcagtctgcgcaatcgtatttc

SEQ ID NO: 118826 - DNA, 120 bp, Artificial Sequence
  ENSG00000100744_23 (sequence is synthesized)
tgccttttgggaggtaactcctgcagaggcggagccggctgttaagttaagtcaacctcgaaaggcctgggtgcgggtgttctatggcccagaagccagatgtccttcgttagaatcccg

SEQ ID NO: 118827 - DNA, 120 bp, Artificial Sequence
  ENSG00000100744_24 (sequence is synthesized)
gcactgacacctattagccgcccagccactttgagcggccactgccctccccgagcccacgttgcctcctttgccgagtgtgagcggattaaaatcttatgtgcatggatttgttgggaa

SEQ ID NO: 118828 - DNA, 120 bp, Artificial Sequence
  ENSG00000100744_25 (sequence is synthesized)
gattaaatgatatgagtagggcacgaacctgaacagagtcctgaaacatacagctgtttaatcacagtgaattaagacgaccagtttaaggagtgaaatgtttactgtctcggcaacttt

SEQ ID NO: 118829 - DNA, 120 bp, Artificial Sequence
  ENSG00000100744_26 (sequence is synthesized)
catgaatgccttggaaatacagcccaaaatattggtagatggagaaacatctggttcccctttccacaaccaccttttcgttttagaaccagggtactttgtatgcagttgcttggattg

SEQ ID NO: 118830 - DNA, 120 bp, Artificial Sequence
  ENSG00000100744_27 (sequence is synthesized)
ttgatttccctcattctttgtagactcatctcaagtattctcagtaacttagattcccttgctcttcattcagaaatatttgttaaggtccattaaatgaaagtcaccacagttgatcat

SEQ ID NO: 118831 - DNA, 120 bp, Artificial Sequence
  ENSG00000100744_28 (sequence is synthesized)
gtgaacagtgtcaagaatcaggccgaaccttcaaggagtttatgttctaaaacggaagcatggtggtacctgcttgtggaggctgaggcggaaggatcgcttgagcccaggactttgagg

SEQ ID NO: 118832 - DNA, 120 bp, Artificial Sequence
  ENSG00000100744_29 (sequence is synthesized)
aggatcgcttgagcccaggactttgaggctgcataattgcattgacgctatccatagagtgcctgcaatttcaaatatcagaaaggatcgtacgagctatgatcatgccactgcactcca

SEQ ID NO: 118833 - DNA, 120 bp, Artificial Sequence
  ENSG00000100744_30 (sequence is synthesized)
ctcaataaagtggaagtttgttcatttattcagtaaatatttattgattgccttctgtgtgccaagcactgttctaggtactgggattacagcagtgaacagataaatctcttccttcct

SEQ ID NO: 118834 - DNA, 120 bp, Artificial Sequence
  ENSG00000100744_31 (sequence is synthesized)
ggaacttacattttattgaagggaggagacatacaataaatgagtgaataatatgctttgtggtgataagggctgttggaaaaacgaaagcaatgtaaagggagtggagatggggaagag

SEQ ID NO: 118835 - DNA, 120 bp, Artificial Sequence
  ENSG00000100744_32 (sequence is synthesized)
tcttgatctttctgcatcatcaaggtcctaattgcaatgaattacactcttgcttaaaaaaaagctttataaatgtaaaactttctcatataaacatctttttatgtaatgatcattatt

SEQ ID NO: 118836 - DNA, 120 bp, Artificial Sequence
  ENSG00000100744_33 (sequence is synthesized)
gtttgatattcatgatgtcaagagatttatagtagtcatttctaaatcttcaaaactatgtaaaaaagaaagggctcattttgtatgtataagaccaaatataatcttgagcagtatact

SEQ ID NO: 118837 - DNA, 120 bp, Artificial Sequence
  ENSG00000100744_34 (sequence is synthesized)
gattatttttggaataaggtaaaatttggaaagccaaattttttttcctatataataagtcaatttgagctttcagttacccaacagattgctccagcaataattggtaattttataatt

SEQ ID NO: 118838 - DNA, 120 bp, Artificial Sequence
  ENSG00000100744_35 (sequence is synthesized)
aacttctgttgtttgtagcgagtgactaattctgtaaagtgctgtgagagacgagataaagagtctttaaaacattattaattgaaataggattggaggaatacattatacatttgctat

SEQ ID NO: 118839 - DNA, 120 bp, Artificial Sequence
  ENSG00000100744_36 (sequence is synthesized)
agtcgcctccggaggaaggaagaagaggacgccgggcgcgcagcatcatgcttgggctagtggccccatctcaacatggctacttggaacagcttgagctgtgtgctgtgactgaactaa

SEQ ID NO: 118840 - DNA, 120 bp, Artificial Sequence
  ENSG00000100749_0 (sequence is synthesized)
gttacgagtcggcgaaagcggcgggaagttcgtactgggcagaacgcgacgggtctgcggcttaggtgaaaatgcctcgtgtaaaagcagctcaagctggaagacagagctctgcaaaga

SEQ ID NO: 118841 - DNA, 120 bp, Artificial Sequence
  ENSG00000100749_1 (sequence is synthesized)
gacatcttgcagaacaatttgcagttggagagataataactgacatggcaaaaaaggaatggaaagtaggattacccattggccaaggaggctttggctgtatatatcttgctgatatga

SEQ ID NO: 118842 - DNA, 120 bp, Artificial Sequence
  ENSG00000100749_2 (sequence is synthesized)
attcttcagagtcagttggcagtgatgcaccttgtgttgtaaaagtggaacccagtgacaatggacctctttttactgaattaaagttctaccaacgagctgcaaaaccagagcaaattc

SEQ ID NO: 118843 - DNA, 120 bp, Artificial Sequence
  ENSG00000100749_3 (sequence is synthesized)
agaaatggattcgtacccgtaagctgaagtacctgggtgttcctaagtattgggggtctggtctacatgacaaaaatggaaaaagttacaggtttatgataatggatcgctttgggagtg

SEQ ID NO: 118844 - DNA, 120 bp, Artificial Sequence
  ENSG00000100749_4 (sequence is synthesized)
accttcagaaaatatatgaagcaaatgccaaaaggttttctcggaaaactgtcttgcagctaagcttaagaattctggatattctggaatatattcacgagcatgagtatgtgcatggag

SEQ ID NO: 118845 - DNA, 120 bp, Artificial Sequence
  ENSG00000100749_5 (sequence is synthesized)
atatcaaggcctcaaatcttcttctgaactacaagaatcctgaccaggtgtacttggtagattatggccttgcttatcggtactgcccagaaggagttcataaagaatacaaagaagacc

SEQ ID NO: 118846 - DNA, 120 bp, Artificial Sequence
  ENSG00000100749_6 (sequence is synthesized)
gatccaatggcttactggccatcttccttgggaggataatttgaaagatcctaaatatgttagagattccaaaattagatacagagaaaatattgcaagtttgatggacaaatgttttcc

SEQ ID NO: 118847 - DNA, 120 bp, Artificial Sequence
  ENSG00000100749_7 (sequence is synthesized)
tgagaaaaacaaaccaggtgaaattgccaaatacatggaaacagtgaaattactagactacactgaaaaacctctttatgaaaatttacgtgacattcttttgcaaggactaaaagctat

SEQ ID NO: 118848 - DNA, 120 bp, Artificial Sequence
  ENSG00000100749_8 (sequence is synthesized)
aggaagtaaggatgatggcaaattggacctcagtgttgtggagaatggaggtttgaaagcaaaaacaataacaaagaagcgaaagaaagaaattgaagaaagcaaggaacctggtgttga

SEQ ID NO: 118849 - DNA, 120 bp, Artificial Sequence
  ENSG00000100749_9 (sequence is synthesized)
agatacggaatggtcaaacacacagacagaggaggccatacagacccgttcaagaaccagaaagagagtccagaagtaattcagatgctgtgaaccagatttccttttctttgttttctt

SEQ ID NO: 118850 - DNA, 120 bp, Artificial Sequence
  ENSG00000100749_10 (sequence is synthesized)
ttgacttttttctccttttctatttgaactgttttattttcctgtgagtcttgcgaggtggaagtaatgattaaatactcatgtgttcagaaaacataaactttttttataaaaatattt

SEQ ID NO: 118851 - DNA, 120 bp, Artificial Sequence
  ENSG00000100749_11 (sequence is synthesized)
tgtacaattcattaaaggctaatttatgaaatttgaaaatcttcaggttatactccttaagttatcccaaagccgtgtgtttgtgatgttttggagtacatatatatgaaaattattatg

SEQ ID NO: 118852 - DNA, 120 bp, Artificial Sequence
  ENSG00000100749_12 (sequence is synthesized)
acacgcacttttctaatcattgtacatttctcagagtggataaaaatgtttgacaaagtcctcacttttaaggaaatgcaaagcttaaaataaaactctcttttgtttgatgcaaacaca

SEQ ID NO: 118853 - DNA, 120 bp, Artificial Sequence
  ENSG00000100749_13 (sequence is synthesized)
acggggttgcctggtgattatggaataagcagcggacttacagacactcagcgtccaggcgcaccaggccaccacatcccagacatgagtacctgtgcaaaatgcattcattcctccatc

SEQ ID NO: 118854 - DNA, 120 bp, Artificial Sequence
  ENSG00000100749_14 (sequence is synthesized)
cctccatcttggacgagtttactgagcacctgtgatgtgccaggcactaggggtgctgcagcggaagagctaagcattgagggtttgtttgtttgttttttgttttttgagacagagttt

SEQ ID NO: 118855 - DNA, 120 bp, Artificial Sequence
  ENSG00000100749_15 (sequence is synthesized)
acacacacactcacccacctccaagtttgctggaaccttgggattgaatttgactctgtagaccaatttggggagcactgacatctttatactgttgagtcttccagtccacttatatgg

SEQ ID NO: 118856 - DNA, 120 bp, Artificial Sequence
  ENSG00000100749_16 (sequence is synthesized)
agtatagcagtagttcaatgaagaacaataacagattgcatggcaattaaggcaaacattttttgtaatacagaaaatgtgtagagggttgtagaaaaataaatatttatatatttctta

SEQ ID NO: 118857 - DNA, 120 bp, Artificial Sequence
  ENSG00000100749_17 (sequence is synthesized)
cacactgaaggcgagaggttttgaagtagtccctctctttttcccgctgctgtcttcctttcgctactgtcttttttcctcctttcccctgtcttgttcattttgttattaggaagtgag

SEQ ID NO: 118858 - DNA, 120 bp, Artificial Sequence
  ENSG00000100749_18 (sequence is synthesized)
gaagcgaaagaaagaaattgaagaaagcaaggaacctggtgttgaagatacggaatggtcaaacacacagacagaggaggccatacagacccgaagtgaggagtcccaaggagcaataca

SEQ ID NO: 118859 - DNA, 120 bp, Artificial Sequence
  ENSG00000100749_19 (sequence is synthesized)
aattgtatgtgagctatgttcttcttgtttttaaaaaattgttttgagtacagtaaaggctagtttatgttgaagcttggtcctctgctggctggtgttaggtactgcattaacttattc

SEQ ID NO: 118860 - DNA, 120 bp, Artificial Sequence
  ENSG00000100764_0 (sequence is synthesized)
ggtggaggaacttccggcagcggcagctcaagtggccaaggcaagatgggtcaaagtcagagtggtggtcatggtcctggaggtggcaagaaggatgacaaggacaagaaaaagaaatat

SEQ ID NO: 118861 - DNA, 120 bp, Artificial Sequence
  ENSG00000100764_1 (sequence is synthesized)
gaacctcctgtaccaactagagtggggaaaaagaagaagaaaacaaagggaccagatgctgccagcaaactgccactggtgacacctcacactcagtgccggttaaaattactgaagtta

SEQ ID NO: 118862 - DNA, 120 bp, Artificial Sequence
  ENSG00000100764_2 (sequence is synthesized)
gagagaattaaagactatcttctcatggaggaagaattcattagaaatcaggaacaaatgaaaccattagaagaaaagcaagaggaggaaagatcaaaagtggatgatctgagggggacc

SEQ ID NO: 118863 - DNA, 120 bp, Artificial Sequence
  ENSG00000100764_3 (sequence is synthesized)
ccgatgtcagtaggaaccttggaagagatcattgatgacaatcatgccatcgtgtctacatctgtgggctcagaacactacgtcagcattctttcatttgtagacaaggatctgctggaa

SEQ ID NO: 118864 - DNA, 120 bp, Artificial Sequence
  ENSG00000100764_4 (sequence is synthesized)
cctggctgctcggtcctgctcaaccacaaggtgcatgccgtgataggggtgctgatggatgacacggatcccctggtcacagtgatgaaggtagaaaaggccccccaggagacctatgca

SEQ ID NO: 118865 - DNA, 120 bp, Artificial Sequence
  ENSG00000100764_5 (sequence is synthesized)
gatattggggggttggacaaccaaattcaggaaattaaggaatctgtggagcttcctctcacccatcctgaatattatgaagagatgggtataaagcctcctaagggggtcattctctat

SEQ ID NO: 118866 - DNA, 120 bp, Artificial Sequence
  ENSG00000100764_6 (sequence is synthesized)
ggtccacctggcacaggtaaaaccttgttagccaaagcagtagcaaaccaaacctcagccactttcttgagagtggttggctctgaacttattcagaagtacctaggtgatgggcccaaa

SEQ ID NO: 118867 - DNA, 120 bp, Artificial Sequence
  ENSG00000100764_7 (sequence is synthesized)
ctcgtacgggaattgttccgagttgctgaagaacatgcaccgtccatcgtgtttattgatgaaattgacgccattgggacaaaaagatatgactccaattctggtggtgagagagaaatt

SEQ ID NO: 118868 - DNA, 120 bp, Artificial Sequence
  ENSG00000100764_8 (sequence is synthesized)
cagcgaacaatgttggaactgctgaaccagttggatggatttgattctaggggagatgtgaaagttatcatggccacaaaccgaatagaaactttggatccagcacttatcagaccaggc

SEQ ID NO: 118869 - DNA, 120 bp, Artificial Sequence
  ENSG00000100764_9 (sequence is synthesized)
cgcattgacaggaagattgagttccccctgcctgatgaaaagacgaagaagcgcatctttcagattcacacaagcaggatgacgctggctgatgatgtaaccctggacgacctgatcatg

SEQ ID NO: 118870 - DNA, 120 bp, Artificial Sequence
  ENSG00000100764_10 (sequence is synthesized)
gctaaagatgacctctctggtgctgacatcaaggcaatctgtacagaagctggtctgatggccttaagagaacgtagaatgaaagtaacaaatgaagacttcaaaaaatctaaagaaaat

SEQ ID NO: 118871 - DNA, 120 bp, Artificial Sequence
  ENSG00000100764_11 (sequence is synthesized)
gttctttataagaaacaggaaggcacccctgaggggctgtatctctaatgaaccatggctgtcatcaggaaaatggttgggagatttctcaatccctgaaagggatgaggttgggggagt

SEQ ID NO: 118872 - DNA, 120 bp, Artificial Sequence
  ENSG00000100764_12 (sequence is synthesized)
tgcccagaggaatccctgttcccactgatttttattagcaaaacatcctgtgtcttttggagtacgatgtgtaagtgcccattgggtggcctgttggtcactgtgcagcagtctgcttcc

SEQ ID NO: 118873 - DNA, 120 bp, Artificial Sequence
  ENSG00000100764_13 (sequence is synthesized)
caataaagcgtgctctttcacaaacacttcctgtttctgcagtctccacacacacctaccgctcaacagcagcctgtgggtggacccagctacagggaagcctttggacaggaactcagg

SEQ ID NO: 118874 - DNA, 120 bp, Artificial Sequence
  ENSG00000100764_14 (sequence is synthesized)
ctgcggtcccaaggagtgtggacctcactatgcgttcgccacatcacacccccagagctggcgttcaacggtaattacagtgggaaatggtcactaccacagagccagggatattcgttg

SEQ ID NO: 118875 - DNA, 120 bp, Artificial Sequence
  ENSG00000100764_15 (sequence is synthesized)
tttaaataataaaggctgcgttaatgtggctattgcttccaaaggaagtacagctttcctttttggaagttttgtggaccatgcatgttcttagcactctgagggcagaaaataactact

SEQ ID NO: 118876 - DNA, 120 bp, Artificial Sequence
  ENSG00000100764_16 (sequence is synthesized)
ggtgttcccaagagactgaggattcctagagatatcttgaaagcccttctgagcccttgggctcagaaatctcatccctttcaaggtgttcagaaacatgtcagaacttccccttccctt

SEQ ID NO: 118877 - DNA, 120 bp, Artificial Sequence
  ENSG00000100764_17 (sequence is synthesized)
tctccgtctatttccgtcatttctctttctgaacaaatcaggcctaaagctattaagtgggacagatcaaggtaagcgttcccttgacaggtggcctggtgtgggttgtagggcccacac

SEQ ID NO: 118878 - DNA, 84 bp, Artificial Sequence
  ENSG00000100764_18 (sequence is synthesized)
cacaattttatctcagttctgtaggtcagaagtccaacacgagtgtctccaggctaaagtcttgctgttggcaggaccgttccc

SEQ ID NO: 118879 - DNA, 120 bp, Artificial Sequence
  ENSG00000100764_19 (sequence is synthesized)
gtctccaggctaaagtcttgctgttggcaggaccgttccctctggcgtctctaagggagaatccgtttccttgctgaggattattgttggcagaatttaatttcttggagttgtgggcca

SEQ ID NO: 118880 - DNA, 120 bp, Artificial Sequence
  ENSG00000100764_20 (sequence is synthesized)
gctgaggtcagcatttccttgctggctgccagctgaggcctttgccagtctgtgaaggccaccctccctcctgactcgtggcacttcattttccaccagcagcagcaggcccagtccctc

SEQ ID NO: 118881 - DNA, 120 bp, Artificial Sequence
  ENSG00000100764_21 (sequence is synthesized)
tctcccaccgacccttctttctgcctgccttttctattcttatggatccttgtgattgcattggacccatgcagatgatccaggataatttccctgttttaaagtttacaatcttcttaa

SEQ ID NO: 118882 - DNA, 120 bp, Artificial Sequence
  ENSG00000100764_22 (sequence is synthesized)
tttttatctgcaaagttccttttgccatgtaacattcacacgttccagggcttagggtgtggccatctttaggggcgccactctgcctaccacagaggacatccacacgtgggggtggcc

SEQ ID NO: 118883 - DNA, 120 bp, Artificial Sequence
  ENSG00000100764_23 (sequence is synthesized)
cagtgcagggtaaggacggggtgcttgtggggagggcgggtgtcagcccaagtagggtgtggagctgtccatgtggaggaacaccacagcacggggactcagcatgggcagggtgaggct

SEQ ID NO: 118884 - DNA, 120 bp, Artificial Sequence
  ENSG00000100764_24 (sequence is synthesized)
ggcatccgtgtggggtgtatgtgcagggctggggtggtccgatagggggagtcagtgtgggcagcctgatgtgcagtatgagagcccaagtgggtgaggaaggcatctgcagggacgggg

SEQ ID NO: 118885 - DNA, 120 bp, Artificial Sequence
  ENSG00000100764_25 (sequence is synthesized)
tggtggcaggggagggaggctgcttatgtatggaggcagtcaggcaggtaaacaggacagtgggagccaggtttctctgaggagttagacacagaaagaagaaaacaagaacgacctctg

SEQ ID NO: 118886 - DNA, 120 bp, Artificial Sequence
  ENSG00000100764_26 (sequence is synthesized)
tccactgggagcacctgggaacagtgacaccccaactgcagtgagcacccctagacccagacctttgctgctaaaagtattattctccactaaaaggagtgagggctgattccggggcta

SEQ ID NO: 118887 - DNA, 120 bp, Artificial Sequence
  ENSG00000100764_27 (sequence is synthesized)
ggcagggaaaggacaggatgaacccaaagtctgttttgccagaaagcaagggagtgctcaaggaatgataaggacatgtcctaaggacaccgaagcctatgtgaaggggcttccactggc

SEQ ID NO: 118888 - DNA, 120 bp, Artificial Sequence
  ENSG00000100764_28 (sequence is synthesized)
gtgaaggggcttccactggccaaactcgggacaatctgagcatcctaacaaacagttactattaatggaatacagtatagccctttaaatagggaactacacacacacacacacacacac

SEQ ID NO: 118889 - DNA, 120 bp, Artificial Sequence
  ENSG00000100764_29 (sequence is synthesized)
acacacacaccccaatacatatgaattgatctgaaagtttgctgaggaaggggtatttacagattttgagagtctgccacaaaacactgttcagttagaaagggaaagtcacactggaga

SEQ ID NO: 118890 - DNA, 120 bp, Artificial Sequence
  ENSG00000100764_30 (sequence is synthesized)
tgcccagcagacaccgtcttcaccaagtggtcaaatgcacatcatcagtaatgggcactttgaaagtacgtgccacccaagagtgtcagtgctgtcacactcctgccaaagatgcttagc

SEQ ID NO: 118891 - DNA, 120 bp, Artificial Sequence
  ENSG00000100764_31 (sequence is synthesized)
ctgaatccagtgctgaggaaacaccaggcaaacacaaactgaggaacattctacaaattcagaacacttcaaaagtatccacgtcttggaagtcaaaaagcttccaatcagaaggagacc

SEQ ID NO: 118892 - DNA, 120 bp, Artificial Sequence
  ENSG00000100764_32 (sequence is synthesized)
aaagagatgacaaccaagtgcagctcctgctcctgaactggatccttttcctagaggacatgactgggcctgaggacctgctaggagtactgcgtccatgctgacttcctgttcagtgtc

SEQ ID NO: 118893 - DNA, 120 bp, Artificial Sequence
  ENSG00000100764_33 (sequence is synthesized)
tgtatcgtgggcgggtagcagactctcagcaactgactcacacggttcaggaaacaaaattctttgtaacgcacttgcatcttttcctaagtttgagattaaaaaaaacaaaaaacccca

SEQ ID NO: 118894 - DNA, 120 bp, Artificial Sequence
  ENSG00000100764_34 (sequence is synthesized)
gaaaagcaagaggtaagttgaaaagttactatcattttcttttttacaaattgaattctataaaattgtcaacaaataaatgaaattcaagtagctgaacctgtccaggctttcatgagt

SEQ ID NO: 118895 - DNA, 120 bp, Artificial Sequence
  ENSG00000100764_35 (sequence is synthesized)
attattagctgccttttacaagcatcggctgctttgtaaatctagcgaactatcaggatcatctactttgaggtctagtctgcttttttcccttggcattttcatatgtaggaggaaaga

SEQ ID NO: 118896 - DNA, 120 bp, Artificial Sequence
  ENSG00000100764_36 (sequence is synthesized)
tgaaacagaaatatcagcaagtagagcagtattggaaatgatgtttgagctcttccctgagatcagtgggaggaactgcctctcccttggaagggcatgccacagcagctctcactgtgg

SEQ ID NO: 118897 - DNA, 120 bp, Artificial Sequence
  ENSG00000100764_37 (sequence is synthesized)
cgttcatcaagagctggtcctgtctcagctgtctgagctggcagcaagcccacccagtagctacttttctggagcagtaggcactgcatgcctggagctcaggaacacttcgtgtatctc

SEQ ID NO: 118898 - DNA, 120 bp, Artificial Sequence
  ENSG00000100764_38 (sequence is synthesized)
cttagggccaaagctaggattcccagacccttttttccagcactgatggtttcctaggagtttactttggctctacagccctgggttggatgggtcaggttaatgtatgcaactttgaag

SEQ ID NO: 118899 - DNA, 120 bp, Artificial Sequence
  ENSG00000100764_39 (sequence is synthesized)
gggcccaagacagactcaaccagagaaaaaaatgagatttatttcattactggaatgaagcaattcttcgtacaggtaattatagttcgcagcttttcaggggaaactgggtcaaggttg

SEQ ID NO: 118900 - DNA, 120 bp, Artificial Sequence
  ENSG00000100764_40 (sequence is synthesized)
gaaaataaccaagtaaaaagtattttctgacgttatcataagttcagcaaaatagctaaggataatccaaacatgttagtagatttttctaaatgtcctcttatctacttaggagaatgg

SEQ ID NO: 118901 - DNA, 120 bp, Artificial Sequence
  ENSG00000100764_41 (sequence is synthesized)
aatgtcgtgacacttgaattggtgccatgccttagcatgagggcccgcctgtttttggtgtccatttaaggtggtaatgatacgagtttttaagttaaaatggcacttaaggtgtctttt

SEQ ID NO: 118902 - DNA, 120 bp, Artificial Sequence
  ENSG00000100764_42 (sequence is synthesized)
taaaatgatacataaaaaagcaaatactgcagtgaaacttaggataatttacaaaaaaataggtcctcttgagatgagggttaaaacagagcatgatatggtctgtgcaccttggccctt

SEQ ID NO: 118903 - DNA, 120 bp, Artificial Sequence
  ENSG00000100764_43 (sequence is synthesized)
tgaattccagtcttatgtcttgtcttttcttttccataacattccctttttagcctcaagaacttgctgctttttctggaagaaataattcatgtgatggtaggatttgtcctttttaca

SEQ ID NO: 118904 - DNA, 120 bp, Artificial Sequence
  ENSG00000100764_44 (sequence is synthesized)
ttcaggtagcatcagaagaaacagtgatttgtttgctgtcttttgtaatgtttttaacacaataggtctgcccagtttcactcaggaattgctcctttcatttatttctgaaggtaccaa

SEQ ID NO: 118905 - DNA, 120 bp, Artificial Sequence
  ENSG00000100764_45 (sequence is synthesized)
agcagagagagtttcttttaaatgaagagaattcaaatgtagaaatctacaaactacaaaaatatatgtttactttttaaaatttagacatccttcccacagaattctgtccgactgaaa

SEQ ID NO: 118906 - DNA, 120 bp, Artificial Sequence
  ENSG00000100764_46 (sequence is synthesized)
gctcggtcctgctcaaccacaaggtgaggtgatagtctttttcagaaagcccacggaagtgctttctcttctcacttaggttcatcttcctgtcccgtggaagtagatcaccaaagcact

SEQ ID NO: 118907 - DNA, 120 bp, Artificial Sequence
  ENSG00000100767_0 (sequence is synthesized)
gcgttccttgcggcccggccgacctcgcgggcttgggcctgggcgggcaccgacggagcggccctggctgcagcctcccggcgccagcgaagacaggctgagatgcggctgctcctgctc

SEQ ID NO: 118908 - DNA, 120 bp, Artificial Sequence
  ENSG00000100767_1 (sequence is synthesized)
gtgccgctgctgctggctccagcgcccgggtcctcggctcccaaggtgaggcggcagagtgacacctggggaccctggagccagtggagcccctgcagccggacctgtggagggggtgtc

SEQ ID NO: 118909 - DNA, 120 bp, Artificial Sequence
  ENSG00000100767_2 (sequence is synthesized)
agcttccgggagcgcccctgctactcccagaggagagatggaggctccagctgcgtgggccccgcccggagccaccgctcttgtcgcacggagagctgccccgacggcgcccgggacttc

SEQ ID NO: 118910 - DNA, 120 bp, Artificial Sequence
  ENSG00000100767_3 (sequence is synthesized)
cgggccgagcagtgcgcggagttcgacggagcggagttccaggggcggcggtatcggtggctgccctactacagcgccccaaacaagtgtgaactgaactgcattcccaagggggagaac

SEQ ID NO: 118911 - DNA, 120 bp, Artificial Sequence
  ENSG00000100767_4 (sequence is synthesized)
ttctactacaagcacagggaggctgtggttgatgggacgccctgcgagcctggcaagagggatgtctgtgtggatggcagctgccgggttgtcggctgtgatcacgagctggactcgtcc

SEQ ID NO: 118912 - DNA, 120 bp, Artificial Sequence
  ENSG00000100767_5 (sequence is synthesized)
aagcaggaggacaagtgtctgcggtgtgggggtgacggcacgacctgctaccccgtcgcaggcacctttgacgctaatgacctcagccgagctgtgaagaatgttcgtggggaatactac

SEQ ID NO: 118913 - DNA, 120 bp, Artificial Sequence
  ENSG00000100767_6 (sequence is synthesized)
ctcaatgggcactggaccatcgaggcggcccgggccctgccagcagccagcaccatcctgcattacgagcggggtgctgagggggacctggcccctgagcgactccatgcccggggcccc

SEQ ID NO: 118914 - DNA, 120 bp, Artificial Sequence
  ENSG00000100767_7 (sequence is synthesized)
acctcggagcccctggtcatcgagctcatcagccaggagcccaaccccggtgtgcactatgagtaccacctgcccctgcgccgccccagccccggcttcagctggagccacggctcatgg

SEQ ID NO: 118915 - DNA, 120 bp, Artificial Sequence
  ENSG00000100767_8 (sequence is synthesized)
agtgactgcagcgcggagtgtggcggaggtcaccagtcccgcctggtgttctgcaccatcgaccatgaggcctaccccgaccacatgtgccagcgccagccacggccagctgaccggcgt

SEQ ID NO: 118916 - DNA, 120 bp, Artificial Sequence
  ENSG00000100767_9 (sequence is synthesized)
tcctgcaatcttcacccttgcccggagaccaagcgctggaaggcagggccatgggcaccctgctcagcctcctgtggaggaggctcccagtcccgctccgtgtactgcatctcgtctgac

SEQ ID NO: 118917 - DNA, 120 bp, Artificial Sequence
  ENSG00000100767_10 (sequence is synthesized)
ggggccggcatccaggaggccgtggaggaggctgagtgtgccgggctgcctgggaagccccctgccattcaggcctgtaacctgcagcgctgtgcagcctggagcccggagccctgggga

SEQ ID NO: 118918 - DNA, 120 bp, Artificial Sequence
  ENSG00000100767_11 (sequence is synthesized)
gagtgttctgtcagttgtggcgttggcgtccggaagcggagcgttacttgccggggtgaaaggggttctttgctccataccgcagcgtgctccttggaagaccggccacctctgactgag

SEQ ID NO: 118919 - DNA, 120 bp, Artificial Sequence
  ENSG00000100767_12 (sequence is synthesized)
ccctgtgtgcatgaggactgccccctcctcagtgaccaggcctggcatgttggcacctggggtctatgctccaagagctgcagctcgggcactcggaggcgacaggtcatctgtgccatt

SEQ ID NO: 118920 - DNA, 120 bp, Artificial Sequence
  ENSG00000100767_13 (sequence is synthesized)
gggccgcccagccactgcgggagcctgcagcactccaagcctgtggatgtggagccttgtaacacgcagccctgtcatctcccccaggaggtccccagcatgcaggatgtgcacacccct

SEQ ID NO: 118921 - DNA, 120 bp, Artificial Sequence
  ENSG00000100767_14 (sequence is synthesized)
gccagcaacccctggatgccgttgggccctcaggagtcccctgcctcagactccagaggccagtggtgggcagcccaggaacacccctcagccaggggtgaccacaggggagaacgaggt

SEQ ID NO: 118922 - DNA, 120 bp, Artificial Sequence
  ENSG00000100767_15 (sequence is synthesized)
gaccccaggggcgaccaaggcacccacctgtcagccctgggccccgctccctctctgcagcagcccccataccagcaacccctgcggtcgggctcagggccccacgactgcagacacagt

SEQ ID NO: 118923 - DNA, 120 bp, Artificial Sequence
  ENSG00000100767_16 (sequence is synthesized)
cctcacgggtgctgccccgatggccacacggcatctctcgggcctcagtggcaaggctgccctggggccccctgtcagcagagcaggtacgggtgctgccctgacagggtatctgtcgct

SEQ ID NO: 118924 - DNA, 120 bp, Artificial Sequence
  ENSG00000100767_17 (sequence is synthesized)
gaggggccccatcacgctggctgcacaaagtcgtatggtggtgacagcaccgggggcatgcccaggtcaagggcagtggcttctacagtccacaacacccaccagccccaggcccagcag

SEQ ID NO: 118925 - DNA, 120 bp, Artificial Sequence
  ENSG00000100767_18 (sequence is synthesized)
aatgagcccagtgagtgccggggctcccagtttggctgttgctatgacaacgtggccactgcagccggtcctcttggggaaggctgtgtgggccagcccagccatgcctaccccgtgcgg

SEQ ID NO: 118926 - DNA, 120 bp, Artificial Sequence
  ENSG00000100767_19 (sequence is synthesized)
tgcctgctgcccagtgcccatggctcttgcgcagactgggctgcccgctggtacttcgttgcctctgtgggccaatgtaaccgcttctggtatggcggctgccatggcaatgccaataac

SEQ ID NO: 118927 - DNA, 120 bp, Artificial Sequence
  ENSG00000100767_20 (sequence is synthesized)
tttgcctcggagcaagagtgcatgagcagctgccagggatctctccatgggccccgtcgtccccagcctggggcttctggaaggagcacccacacggatggtggcggcagcagtcctgca

SEQ ID NO: 118928 - DNA, 120 bp, Artificial Sequence
  ENSG00000100767_21 (sequence is synthesized)
ggcgagcaggaacccagccagcacaggacaggggccgcggtgcagagaaagccctggccttctggtggtctctggcggcaagaccaacagcctgggccaggggaggccccccacacccag

SEQ ID NO: 118929 - DNA, 120 bp, Artificial Sequence
  ENSG00000100767_22 (sequence is synthesized)
gcctttggagaatggccatgggggcaggagcttgggtccagggcccctggactgggtggagatgccggatcaccagcgccacccttccacagctcctcctacaggattagcttggcaggt

SEQ ID NO: 118930 - DNA, 120 bp, Artificial Sequence
  ENSG00000100767_23 (sequence is synthesized)
gtggagccctcgttggtgcaggcagccctggggcagttggtgcggctctcctgctcagacgacactgccccggaatcccaggctgcctggcagaaagatggccagcccatctcctctgac

SEQ ID NO: 118931 - DNA, 120 bp, Artificial Sequence
  ENSG00000100767_24 (sequence is synthesized)
tggcagcacccggccaggccgcgactcccagaagatccaacttcgcatcatagggggtgacatggccgtgctgtctgaggctgagctgagccgcttccctcagcccagggacccagctca

SEQ ID NO: 118932 - DNA, 120 bp, Artificial Sequence
  ENSG00000100767_25 (sequence is synthesized)
ggactttggccaagcgggggctgctgggcccctgggggccatcccctcttcacacccacagcctgcaaacaggctgcgtttggaccagaaccagccccgggtggtggatgccagtccagg

SEQ ID NO: 118933 - DNA, 120 bp, Artificial Sequence
  ENSG00000100767_26 (sequence is synthesized)
ccagcggatccggatgacctgccgtgccgaaggcttcccgcccccagccatcgagtggcagagagatgggcagcctgtctcttctcccagacaccagctgcagcctgatggctccctggt

SEQ ID NO: 118934 - DNA, 120 bp, Artificial Sequence
  ENSG00000100767_27 (sequence is synthesized)
cattagccgagtggctgtagaagatggcggcttctacacctgtgtcgctttcaatgggcaggaccgagaccagcgatgggtccagctcagagttctgggggagctgacaatctcaggact

SEQ ID NO: 118935 - DNA, 120 bp, Artificial Sequence
  ENSG00000100767_28 (sequence is synthesized)
gccccctactgtgacagtgccagagggtgatacggccaggctattgtgtgtggtagcaggagaaagtgtgaacatcaggtggtccaggaacgggctacctgtgcaggctgatggccaccg

SEQ ID NO: 118936 - DNA, 120 bp, Artificial Sequence
  ENSG00000100767_29 (sequence is synthesized)
tgtccaccagtccccagatggcacgctgctcatttacaacttgcgggccagggatgagggctcctacacgtgcagtgcctaccaggggagccaggcagtcagccgcagcaccgaggtgaa

SEQ ID NO: 118937 - DNA, 120 bp, Artificial Sequence
  ENSG00000100767_30 (sequence is synthesized)
ggtggtctcaccagcacccaccgcccagcccagggaccctggcagggactgcgtcgaccagccagagctggccaactgtgatttgatcctgcaggcccagctttgtggcaatgagtatta

SEQ ID NO: 118938 - DNA, 120 bp, Artificial Sequence
  ENSG00000100767_31 (sequence is synthesized)
ctccagcttctgctgtgccagctgttcacgtttccagcctcacgctcagcccatctggcagtagggatgaaggctagttccagccccagtccaaaatagttcatagggctagggagaaag

SEQ ID NO: 118939 - DNA, 120 bp, Artificial Sequence
  ENSG00000100767_32 (sequence is synthesized)
gaagatggactcttggcttcctctctctggctggcaaagggagttatcttctggaatacattagctctttcaaaaacccacccagtgtttagcctcaacggcagccagttaccagcttct

SEQ ID NO: 118940 - DNA, 120 bp, Artificial Sequence
  ENSG00000100767_33 (sequence is synthesized)
ctctgtagccttcagcagtgtttgcatctctgacataaccacaggctgctgttttcaagaagagcaatctgtttggataagaaaaacctttactttacagcttccctttataatttgtta

SEQ ID NO: 118941 - DNA, 78 bp, Artificial Sequence
  ENSG00000100767_34 (sequence is synthesized)
ctcactgcaacctccgtctcctgggttcttgattctcctgtgtcagccttctgagtagctaggattacagatgcctat

SEQ ID NO: 118942 - DNA, 71 bp, Artificial Sequence
  ENSG00000100767_35 (sequence is synthesized)
caatgcattttttttattttttttttgagacagagtttcgcacttcttgcccaggctggagtacaatggtg

SEQ ID NO: 118943 - DNA, 120 bp, Artificial Sequence
  ENSG00000100767_36 (sequence is synthesized)
attagaggtgtgagccactgtgcccagcccatcaatgtgttttaaagctagctgtcagggttccacttaatttaaagctgggcagggagatgtgtaatgatttcaaagttaacacctgtt

SEQ ID NO: 118944 - DNA, 120 bp, Artificial Sequence
  ENSG00000100767_37 (sequence is synthesized)
tgttttctaaagggcatgccaagtcctgctgtatcagggaagtattctgtgctaaaatcagcgatggttcattgctctagtctctctcacccttctaggcagtgcatcagtcagctctaa

SEQ ID NO: 118945 - DNA, 120 bp, Artificial Sequence
  ENSG00000100767_38 (sequence is synthesized)
atctggtgcagagggttaacagcataacccttgttggcaaaatggaatagatgttaagacctcaaatagggatttgggatgaaacagctgcagttagcactgttatctgagcatgaaaga

SEQ ID NO: 118946 - DNA, 120 bp, Artificial Sequence
  ENSG00000100767_39 (sequence is synthesized)
actggaaacgctccttacgtcgagatgttggaccttgaagccctcctgaggccaacatgcaaatctggctgtgacggttcatctgacacctgtgtaaagctgaccagcctgctctgtaca

SEQ ID NO: 118947 - DNA, 120 bp, Artificial Sequence
  ENSG00000100767_40 (sequence is synthesized)
gtgacaatgaggagcccctctcttccttaagtaggaatctgtgaagcaaaatgtttgctgccaaagacaaatcagactgtcagtcattaaaaacagcattagcaggatgaggatagcaat

SEQ ID NO: 118948 - DNA, 120 bp, Artificial Sequence
  ENSG00000100767_41 (sequence is synthesized)
ggggaagggttgtgggcaatgcagtaacagggaaatggcttcagaaatggtttgagttggaagacaacattcttcatctctcaggacttctaattccttgatgctaaaagaagaggcatg

SEQ ID NO: 118949 - DNA, 120 bp, Artificial Sequence
  ENSG00000100767_42 (sequence is synthesized)
gattctatgagcttccaagtccctttccactttaaccttctacaaatctttcagaggactgcctagtagcaaaggttattcctggacacaggaaagacgggcattacagggaccaaagct

SEQ ID NO: 118950 - DNA, 120 bp, Artificial Sequence
  ENSG00000100767_43 (sequence is synthesized)
ctgaaaggtgacttttattaccaacacactggctggaaaagggacaaaccacatcacgggtgagtgatacttctcagtcttctctactcattcaacaaaggaaatgtgggctggggcaga

SEQ ID NO: 118951 - DNA, 120 bp, Artificial Sequence
  ENSG00000100767_44 (sequence is synthesized)
ggtcttttttcatttaatactggaaaaatattgaagagcatccatgttcacttatggctggttttgctatagaaattggaaaataaaggccacttttttgaaatccccagtttaattaaa

SEQ ID NO: 118952 - DNA, 120 bp, Artificial Sequence
  ENSG00000100767_45 (sequence is synthesized)
gtgttctctgcggtgcaccgaggcgcacccggctgtcctgttgcgggtctcctggtcacctgtgggccatagggagagacgcgcccacacactctcgcccgcgcccaggacagctgcggg

SEQ ID NO: 118953 - DNA, 120 bp, Artificial Sequence
  ENSG00000100767_46 (sequence is synthesized)
tgacgctaatgacctcagccgaggctacaaccagatcctcatagttcccatgggtgccaccagcatcctcatcgacgaggctgctgccagcaggaacttcctggctgtgaagaatgttcg

SEQ ID NO: 118954 - DNA, 120 bp, Artificial Sequence
  ENSG00000100767_47 (sequence is synthesized)
tcacccagtaacccaacctagaaaccttggtcattcttgatttctccctgtcctccacctgtttgctctcaaggggtgggaacggttggctctggaatggcctttgattacctcttccct

SEQ ID NO: 118955 - DNA, 120 bp, Artificial Sequence
  ENSG00000100767_48 (sequence is synthesized)
ggcagggaaggccaaaggtccaagggagccggcccagggagccctggccctgacctcccagaggctctagctctgtgggtgaaggctgctgtggcaccagccgggggcaggtctgcacag

SEQ ID NO: 118956 - DNA, 120 bp, Artificial Sequence
  ENSG00000100767_49 (sequence is synthesized)
tggacagactctggtggaagcatcctggatcccagggccaggtcaggcccccagacaggggtgtagacatgctttataagtggggaagggcctgcttcctgagtcggaggctgagaggat

SEQ ID NO: 118957 - DNA, 120 bp, Artificial Sequence
  ENSG00000100767_50 (sequence is synthesized)
agctaaacccctgaagtcagccggccctccctccccatccctaacttctgtttctcccgagagccctgcctggtgggccttgttgccatcattctacagatggagaagctggggcttcag

SEQ ID NO: 118958 - DNA, 120 bp, Artificial Sequence
  ENSG00000100767_51 (sequence is synthesized)
agacttgaggctactctgatgtctaatagacatctgtgcagatggtggctccggggttctccatcagatctcgccagtataccccggggcctgtctggctggaaaagtttattggcttcg

SEQ ID NO: 118959 - DNA, 120 bp, Artificial Sequence
  ENSG00000100767_52 (sequence is synthesized)
tgacctttggcaagtcacccaacttctccaagcctcagtttcttgacctgtaaaatggtggcattaccttctgccctgtatacctcacaggtgtgggttctggtcaagatgactcctggg

SEQ ID NO: 118960 - DNA, 120 bp, Artificial Sequence
  ENSG00000100767_53 (sequence is synthesized)
actggatcatattaatgaaggatttgggaaggttaaaaacaaaattaaaagcgttgtgttccacatgggtcgagcgtgtagtttagcccccacatgaacctggtgtgtgccgtccctccc

SEQ ID NO: 118961 - DNA, 120 bp, Artificial Sequence
  ENSG00000100767_54 (sequence is synthesized)
gacctctccccaccccttgggctttgcacctaccttgttgctgctacaagaacaggttgaggcagtgatgcttgggggagccgggggcaggttggggagggtagattcctgaatccatgg

SEQ ID NO: 118962 - DNA, 120 bp, Artificial Sequence
  ENSG00000100767_55 (sequence is synthesized)
gcttctggggctctgcctcccatagggaccctctagccccaaaagtgcctgtgacaggatgggccccaagctgtctgtcatggaacacactgcttagggtggttctggtcctggcgctca

SEQ ID NO: 118963 - DNA, 120 bp, Artificial Sequence
  ENSG00000100767_56 (sequence is synthesized)
gggatttttcttcgacttgatccttagaggtgcaacagattcatggagacggtcccttctcctggggatggggcggggatctgtgctctgcggggcctgctgcagggctttctgacccat

SEQ ID NO: 118964 - DNA, 120 bp, Artificial Sequence
  ENSG00000100784_0 (sequence is synthesized)
gcggtactagcggtgcccgccgaagggggaggaggcgaggagcgagccgtgcggccagagcgggaaagagactcgtctttgcgtccgagttctggagccgccgcaccccgactcctgggg

SEQ ID NO: 118965 - DNA, 120 bp, Artificial Sequence
  ENSG00000100784_1 (sequence is synthesized)
ccgcggcagcggctgcgaggggacgggcgtccgctgtctcctgggttcccctcgtagcgacccgcgggatcggaaaaaaaggagaagatggaggaggagggtggcagcagcggcggcgcc

SEQ ID NO: 118966 - DNA, 120 bp, Artificial Sequence
  ENSG00000100784_2 (sequence is synthesized)
gcggggaccagcgcggacggcggcgacggaggagagcagctcctcactgtcaagcacgagctgcggactgctaatttgacaggacatgctgagaaggtgggaatagaaaattttgagctc

SEQ ID NO: 118967 - DNA, 120 bp, Artificial Sequence
  ENSG00000100784_3 (sequence is synthesized)
ctgaaggtcctaggaactggagcttatggaaaagtatttctagttcgtaaaataagtggccatgatactggaaagctgtatgccatgaaagttttgaaaaaggcaacaatcgttcaaaag

SEQ ID NO: 118968 - DNA, 120 bp, Artificial Sequence
  ENSG00000100784_4 (sequence is synthesized)
gccaaaaccacagagcatacaaggacagaacgacaagtcctggaacacattaggcagtcgccatttttggtaacattacattatgctttccagacagaaaccaaacttcatctcatttta

SEQ ID NO: 118969 - DNA, 120 bp, Artificial Sequence
  ENSG00000100784_5 (sequence is synthesized)
gattatataaatggtggtgaactttttactcatctttctcaaagagagcgtttcacagagcatgaggtgcagatttatgttggagagattgtgcttgccctcgaacatctccacaagttg

SEQ ID NO: 118970 - DNA, 120 bp, Artificial Sequence
  ENSG00000100784_6 (sequence is synthesized)
gggattatatatcgtgatattaagcttgagaatattctacttgattctaatggccatgtggtgctgacagattttggtctgagtaaggagtttgtggctgatgaaactgaaagagcatat

SEQ ID NO: 118971 - DNA, 120 bp, Artificial Sequence
  ENSG00000100784_7 (sequence is synthesized)
tccttttgtggaactattgaatacatggcaccagatattgtcagagggggagattcaggacatgacaaggcagttgactggtggagtttgggtgttctaatgtatgaattactaactgga

SEQ ID NO: 118972 - DNA, 120 bp, Artificial Sequence
  ENSG00000100784_8 (sequence is synthesized)
gcatctcctttcactgttgatggagaaaaaaattcccaagctgagatatctaggagaatattaaaaagtgagcctccatatccccaagaaatgagtgctttagcgaaagacctaattcag

SEQ ID NO: 118973 - DNA, 120 bp, Artificial Sequence
  ENSG00000100784_9 (sequence is synthesized)
cgtcttttgatgaaagatcccaagaagagattgggatgtggtccacgtgatgcagatgaaatcaaagaacatctcttctttcagaaaataaattgggatgatttagccgccaaaaaagtg

SEQ ID NO: 118974 - DNA, 120 bp, Artificial Sequence
  ENSG00000100784_10 (sequence is synthesized)
cctgcaccatttaagccagtcattcgagatgaattagatgtgagtaactttgcagaagagttcacagaaatggatcccacttattctcccgcagccctgccccagagttctgagaagctg

SEQ ID NO: 118975 - DNA, 120 bp, Artificial Sequence
  ENSG00000100784_11 (sequence is synthesized)
tttcagggctattcctttgttgctccttccatcctattcaagcgtaatgcagctgtcatagaccctcttcagtttcacatgggagttgaacgtcctggagtgacaaatgttgccaggagt

SEQ ID NO: 118976 - DNA, 120 bp, Artificial Sequence
  ENSG00000100784_12 (sequence is synthesized)
gcaatgatgaaggactctccattctatcaacactatgacctagatttgaaggacaaacccctgggagaaggtagtttttcaatttgtcgaaagtgtgtgcataaaaaaagtaaccaagct

SEQ ID NO: 118977 - DNA, 120 bp, Artificial Sequence
  ENSG00000100784_13 (sequence is synthesized)
tttgcagtcaaaataatcagcaaaaggatggaagccaatactcaaaaggaaataacagctctgaaactctgtgaaggacaccccaatattgtgaagttgcatgaagtttttcatgatcag

SEQ ID NO: 118978 - DNA, 120 bp, Artificial Sequence
  ENSG00000100784_14 (sequence is synthesized)
cttcacacgtttctagtgatggaacttctgaatggaggagaactgtttgagcgcattaagaaaaagaagcacttcagtgagacggaagccagctacatcatgaggaagcttgtttcagct

SEQ ID NO: 118979 - DNA, 120 bp, Artificial Sequence
  ENSG00000100784_15 (sequence is synthesized)
gtaagccacatgcatgatgttggagtggtgcacagggatctgaaacctgagaatttattgttcaccgatgaaaatgacaatttggaaattaaaataattgattttggatttgcacggcta

SEQ ID NO: 118980 - DNA, 120 bp, Artificial Sequence
  ENSG00000100784_16 (sequence is synthesized)
aagccaccggataatcagcccctgaagactccatgcttcacccttcattatgccgccccagagctcttgaatcagaacggctacgatgagtcctgtgacctgtggagcttgggcgtcatt

SEQ ID NO: 118981 - DNA, 120 bp, Artificial Sequence
  ENSG00000100784_17 (sequence is synthesized)
ttgtacacaatgttgtcaggacaggttcccttccaatctcatgaccgaagtttgacgtgtaccagcgcggtggaaatcatgaagaaaattaaaaagggagatttctcctttgaaggagaa

SEQ ID NO: 118982 - DNA, 120 bp, Artificial Sequence
  ENSG00000100784_18 (sequence is synthesized)
gcctggaagaatgtatcccaagaggctaaagatttgatccaaggacttctcacagtagatccaaacaaaaggcttaaaatgtctggcttgaggtacaatgaatggctacaagatggaagt

SEQ ID NO: 118983 - DNA, 120 bp, Artificial Sequence
  ENSG00000100784_19 (sequence is synthesized)
cagctgtcctccaatcctctgatgactccggatattctaggatcttccggagctgccgtgcatacctgtgtgaaagcaaccttccacgcctttaacaaatacaagagagaggggttttgc

SEQ ID NO: 118984 - DNA, 120 bp, Artificial Sequence
  ENSG00000100784_20 (sequence is synthesized)
cttcagaatgttgataaggcccctttggctaagagaagaaaaatgaaaaagactagcaccagtaccgagacgcgcagcagttccagtgagagttcccattcttcttcctctcattctcac

SEQ ID NO: 118985 - DNA, 120 bp, Artificial Sequence
  ENSG00000100784_21 (sequence is synthesized)
ggtaaaactacacccaccaagacactgcagcccagcaatcctgccgacagcaataacccggagaccctcttccagttctcggactcagtagcttaggcatggtaggagtgtatcagtgat

SEQ ID NO: 118986 - DNA, 120 bp, Artificial Sequence
  ENSG00000100784_22 (sequence is synthesized)
ccattgcacctttattccctcagcatatgcctgaggcgatcttttatgcttttaaaaatgtttcccgttggtctcattggaatctgcctcctaatgatttttttcaggaaaacctgtttg

SEQ ID NO: 118987 - DNA, 120 bp, Artificial Sequence
  ENSG00000100784_23 (sequence is synthesized)
gttatcctcattcaaaagcactggacagagaatgttactgtgaatagagcacatattactctttttagcaacctagcatgatgccaacaagactattcttgaaagagcaaaggttcctgt

SEQ ID NO: 118988 - DNA, 120 bp, Artificial Sequence
  ENSG00000100784_24 (sequence is synthesized)
aaatttaattagggctagatttgagctgcttgtaagtcacaggttttccagatgtctgccaacaagaaatgactcatactgtgatgataccttttgctttgccttgtggacaatgtgggt

SEQ ID NO: 118989 - DNA, 120 bp, Artificial Sequence
  ENSG00000100784_25 (sequence is synthesized)
ttttgaaatttgcacccttcaaacaatgatttatcagagaaaggggtctgttttcaaaaaagattctgtaatgaattttatgtgtggcatatacttatttcttgagagaagattttaact

SEQ ID NO: 118990 - DNA, 120 bp, Artificial Sequence
  ENSG00000100784_26 (sequence is synthesized)
tattgtttttattttatggttacatatgatgataacctgctattattaaactttttctaaaaagtgaaaaaaaaaaaaaaagatataagaactcaaggtcccatactctgtattcgggat

SEQ ID NO: 118991 - DNA, 120 bp, Artificial Sequence
  ENSG00000100784_27 (sequence is synthesized)
ccatctgagatgcatgctaagctatgtgtatgtttttaattttgcactgctctttcctggcaatttgttttaatggttattgcagaatattaaggtacatgtctctctgttttaagtaat

SEQ ID NO: 118992 - DNA, 120 bp, Artificial Sequence
  ENSG00000100784_28 (sequence is synthesized)
attgcactttataaaaaagtatgaataaagcaaactattttataaagtgcactgtttaaagcatttgcactgtatttttgccatttattttcattttctactttaaatttgtcctcacat

SEQ ID NO: 118993 - DNA, 120 bp, Artificial Sequence
  ENSG00000100784_29 (sequence is synthesized)
tcctcttctactttgtatgcaacaagtagaatggggcatgttgtgtcatgtagtcagccacttatgcaccaatgtgaggaaaacctaaagggaaattaaactaaacactgtgcttcatat

SEQ ID NO: 118994 - DNA, 120 bp, Artificial Sequence
  ENSG00000100784_30 (sequence is synthesized)
ttgtacactgtgttgtactacagtgaggaatttcctcctgtagtcatatattatgtacataatattttagaatcatacctatgacttgtttggaaatttttctgttaaattttaaatcca

SEQ ID NO: 118995 - DNA, 120 bp, Artificial Sequence
  ENSG00000100784_31 (sequence is synthesized)
gaaagcatattttataaacttatgcagagcacttttattgctcaaaagttctgaattcatacagaaaacaagtactatgtgatgaaaacatttcattaaaagattgctgcatttaaaaat

SEQ ID NO: 118996 - DNA, 120 bp, Artificial Sequence
  ENSG00000100784_32 (sequence is synthesized)
aaaaaaaaaaaaaaaaaaaagaagtgatagggtttgtgtgttatattttcttttaaagccatcatgtgaaatgtcaggactgagaaaagtgatttttttgctttgtttacaggaatcatg

SEQ ID NO: 118997 - DNA, 120 bp, Artificial Sequence
  ENSG00000100784_33 (sequence is synthesized)
tttgctttgtttacaggaatcatgcttaaagagataatgcccaacatgtttattttatagtttttgttaatgataaccttttgagcattagtttggaatttggacatgatatttatttat

SEQ ID NO: 118998 - DNA, 120 bp, Artificial Sequence
  ENSG00000100784_34 (sequence is synthesized)
tcctttcttgaggttatagcagcattaatttcaaccagttatgaatactaaaaatattgcactctatgtaatagtagtatatttattactaaatcaatgtatatattaatagcacaggca

SEQ ID NO: 118999 - DNA, 120 bp, Artificial Sequence
  ENSG00000100784_35 (sequence is synthesized)
aaaaatggcaaatattaaaatattttcaaaatattatattatcctgttcacattttgtccacagtggttattgggaataatattttacactttttgctggcccaaatggctacataatat

SEQ ID NO: 119000 - DNA, 120 bp, Artificial Sequence
  ENSG00000100784_36 (sequence is synthesized)
tgagttaatgaaagttttctactcccagctttcagttattcctagtaattatgggaaattttgtgtgaattattaccaaactattgctaattcacaaaatgtgattccatcaggcacaga

SEQ ID NO: 119001 - DNA, 120 bp, Artificial Sequence
  ENSG00000100784_37 (sequence is synthesized)
tctctagtaatcaagaaaatgaccatatttataattatattggacatattgggaacatatttggctcttcaagccattttttaaactgtgcatcctggtagaaaatactagttataaagt

SEQ ID NO: 119002 - DNA, 120 bp, Artificial Sequence
  ENSG00000100784_38 (sequence is synthesized)
acaaactaaagggactatgttgctaatagaaaatgatccagaaaaatggtcagacagtatacagattgatgatgtgattgatttcattgtgaatattggaaattaatgggtttcattttc

SEQ ID NO: 119003 - DNA, 120 bp, Artificial Sequence
  ENSG00000100784_39 (sequence is synthesized)
atttatttcccttgcctcttcttgaggaggattcgacaggcgatgaaatgggtaaaaaggcagtcagactaacaggaagaaggaaagataggctagctgtcaactgatgagcctgcctga

SEQ ID NO: 119004 - DNA, 120 bp, Artificial Sequence
  ENSG00000100784_40 (sequence is synthesized)
ataatctcaaatgggcttttgaaaagaccttaacaaacactgttgcactcttgtcaaatatctttatctacaccctacttataagtaccaaaaagacagcatttgatgccaagtttgaag

SEQ ID NO: 119005 - DNA, 120 bp, Artificial Sequence
  ENSG00000100784_41 (sequence is synthesized)
cagttaggtcctatgcaggctgtgtattaacatacagtgaattgcactttaaaattcagaaagctttcatttggtcacatcaaaaataaacactacaaaatatataaaaagttaaatgat

SEQ ID NO: 119006 - DNA, 120 bp, Artificial Sequence
  ENSG00000100784_42 (sequence is synthesized)
aggactctttttttggtattaagagtaaaatagaagaagatctaagaaatacaaatacttacattatttctccttatgacattaactttgggactagagccacaccaccccctcccttct

SEQ ID NO: 119007 - DNA, 120 bp, Artificial Sequence
  ENSG00000100784_43 (sequence is synthesized)
tcacttactgattgtattgcatataattttcatgccaacataaatcctgattcatatattttgtaactgtatatgacaaattgagaggcaagaataagaaaaggaagataatagaggaaa

SEQ ID NO: 119008 - DNA, 120 bp, Artificial Sequence
  ENSG00000100784_44 (sequence is synthesized)
gatgttaagaaagaccagtttcttctaattactctgccagatcgtgtgtctgaaagaggttaattagcattttgaaattgattggctgagtgtggtggctcaggcctgtaatccttgtgc

SEQ ID NO: 119009 - DNA, 120 bp, Artificial Sequence
  ENSG00000100784_45 (sequence is synthesized)
tttgggagtataagactggagaatcacttgaaaccaggagttagagaccaacctgggcaacatagtgagacactgtctctccaaaaataaaaataaaaattagctgagcatggtggctca

SEQ ID NO: 119010 - DNA, 120 bp, Artificial Sequence
  ENSG00000100784_46 (sequence is synthesized)
aaattcattaattcttccaaacctttataaagtaagaaaccactgaattactagaatagaaagtcagtctcctgagttaatttccacattgttgtctgtcttggagtcacaggttcatta

SEQ ID NO: 119011 - DNA, 120 bp, Artificial Sequence
  ENSG00000100784_47 (sequence is synthesized)
cccaagaaaactgccttttaatttttttagattactgttgatttcttaagtatgtaaatgactaacttttaaatataaggtaagttattttaaagaaatctactaagatagaagtcactt

SEQ ID NO: 119012 - DNA, 120 bp, Artificial Sequence
  ENSG00000100784_48 (sequence is synthesized)
tttttaaagtaaggaaattccttttgtatctcagtttatgttctcaaatacactactttataaaagtatacaattgactggatacttattcaccttgcccccatttcaagcgcctgttat

SEQ ID NO: 119013 - DNA, 120 bp, Artificial Sequence
  ENSG00000100784_49 (sequence is synthesized)
tgtcatatttattaaaaacagggtacctcataatggtgaaaatttctaaattattgggtctatatgtgccttagactgcctgattactttggctgttctcccagtgactgataataatag

SEQ ID NO: 119014 - DNA, 120 bp, Artificial Sequence
  ENSG00000100784_50 (sequence is synthesized)
catgatttgagtgttcatgtgagaatacatctaatattccttaagatctaagtaaataagttaaattctgatatgccacttatgtcaaaataattgttatatagatgaattattactgta

SEQ ID NO: 119015 - DNA, 120 bp, Artificial Sequence
  ENSG00000100784_51 (sequence is synthesized)
acatcatgaagtatcttaaaattatatgacttttggcctctcaaatgtcttacatgataataccccaatttccagtctttaattgattgtatacctcacgtaagtgtctgtcatcacttg

SEQ ID NO: 119016 - DNA, 120 bp, Artificial Sequence
  ENSG00000100784_52 (sequence is synthesized)
atacctgtatctggcactaaaacaaatgtagccggctctaatgaaatttgaagtttggataggagacattgtaaaactcaagaatgggaaaaaaaaattttaacagaagtatgtatgaag

SEQ ID NO: 119017 - DNA, 120 bp, Artificial Sequence
  ENSG00000100784_53 (sequence is synthesized)
gaaatattttaagtataatctacccaaagaaaataactgctacagccaacattaaaggttttattccctgttttgttaagtaacttcactccaaattgtgacattctttagagaaaatat

SEQ ID NO: 119018 - DNA, 120 bp, Artificial Sequence
  ENSG00000100784_54 (sequence is synthesized)
tttccttaagagtagttatttacgtgttttattgggggagcatattttcaggggggcaacatcttgctaagaacatttgattagcctcacttctgtcctcaccttctatattgcttactt

SEQ ID NO: 119019 - DNA, 120 bp, Artificial Sequence
  ENSG00000100784_55 (sequence is synthesized)
ttcaagatatttcttctgagcccttttctttgtatgcccagctccctgttatgtaattaagtagttgattaccattccaaatgcttcccctacacaaggctgttgtccaccctgtttcat

SEQ ID NO: 119020 - DNA, 120 bp, Artificial Sequence
  ENSG00000100784_56 (sequence is synthesized)
gaatttgtgaattaagtaggtgcctaatattttcctactattagggtgaaaaggaataagaaactaaagtggcttccaaatgtttgtgtcttggtttcttcaccctagtgcaaaatagga

SEQ ID NO: 119021 - DNA, 120 bp, Artificial Sequence
  ENSG00000100784_57 (sequence is synthesized)
aatgtttattggcagtcatttcttttccattactccttttaaccacattacaaaaagctaggattttgtgtctagaaggagacttgtattaaaagacaagattcttagtagttattcatc

SEQ ID NO: 119022 - DNA, 120 bp, Artificial Sequence
  ENSG00000100784_58 (sequence is synthesized)
aggcttaagtttcctggtgtatttcttgtgggagaggtagaaggacattttgtagtagtattctaactattaatataatgctgcttgggttatcagaaagtattgaatacttcagataag

SEQ ID NO: 119023 - DNA, 120 bp, Artificial Sequence
  ENSG00000100784_59 (sequence is synthesized)
tcaagttagtatttagtatagcagctgttcttcagagcacaggaaactgggatagtatgtagtattatgctgtttccattattgtttctcattgcataacacttttaatttatatgttgg

SEQ ID NO: 119024 - DNA, 120 bp, Artificial Sequence
  ENSG00000100784_60 (sequence is synthesized)
tatacaatttgcccctttactaaaaaaaaaaatctagtttcattcttgttccttgccacattaagcagttttttcatttacgttttaaattttcttaatattagaagaaaaagaaaacag

SEQ ID NO: 119025 - DNA, 120 bp, Artificial Sequence
  ENSG00000100784_61 (sequence is synthesized)
aacaaaagagaaatgtcatgacttagaaaaggaaattttaagttttatggaatactgtagctttattttctgacatttctgcttatagatagattagaaaatccttgtttcttttgtttg

SEQ ID NO: 119026 - DNA, 120 bp, Artificial Sequence
  ENSG00000100784_62 (sequence is synthesized)
ctttgttttaaaatccagtaaggttgaggaacttgacattttaaaactgcagttttatttttaactacataagaggctggtcatgtgaaatgtgcactgctatgttggaatggatatgta

SEQ ID NO: 119027 - DNA, 120 bp, Artificial Sequence
  ENSG00000100784_63 (sequence is synthesized)
tgtgacaattaacctcattaaagctctgttgctgtggtaggcattcagttattcctaatagtttattttaggtactatactgctatcctatttgctgaaattataaatactagcaatgta

SEQ ID NO: 119028 - DNA, 120 bp, Artificial Sequence
  ENSG00000100784_64 (sequence is synthesized)
caataattctcattctttggctgaataaaaacagaaatttaaaggtgctgtgtcacataaacagttaatgcctcagtactaaagttttgaaaaatattcctaaaaacttcacaggcatga

SEQ ID NO: 119029 - DNA, 120 bp, Artificial Sequence
  ENSG00000100784_65 (sequence is synthesized)
atttttgaaaagaagaagaaaccacatatacacatagaggaatttttaaagactggcattttaaagtatagctggtaaaaatggtatgtatccttatgtgtagaatttaaacttcttgaa

SEQ ID NO: 119030 - DNA, 120 bp, Artificial Sequence
  ENSG00000100784_66 (sequence is synthesized)
aataatctaagctgcaacaatctatgtaactgctcttccacagttttacataaagataagaatttgtcttactaaaaggtaaatggaagattaaaaaagatgaaaaacattgtttttcct

SEQ ID NO: 119031 - DNA, 120 bp, Artificial Sequence
  ENSG00000100784_67 (sequence is synthesized)
ctattctatgtggacaattaaaagtatagccaagcctcagctcaaatgagttgcctttgtgtgagacagggtctcactctgtcaccctggccggagtgcagtggcgtgatcacagctcac

SEQ ID NO: 119032 - DNA, 82 bp, Artificial Sequence
  ENSG00000100784_68 (sequence is synthesized)
acctccacctcctgggctcaagcaatccttgtacctcagcctcctaagcagctgactaagtatttaatagctacaaggtatc

SEQ ID NO: 119033 - DNA, 120 bp, Artificial Sequence
  ENSG00000100784_69 (sequence is synthesized)
aactcctggcttcaagcaatcctcccgcctcagcctcccagctttgcccagccgtgagttgctttgtgagttgtcttccttaactgcatcagttcatcccatactccgtacatgcacttt

SEQ ID NO: 119034 - DNA, 120 bp, Artificial Sequence
  ENSG00000100784_70 (sequence is synthesized)
ttcatcccatactccgtacatgcactttttctcgtatttttctgcttttctatggtgtgtccacactcatttgtgtatttctacactggtatttcactacttattaagatatctgcatgt

SEQ ID NO: 119035 - DNA, 120 bp, Artificial Sequence
  ENSG00000100784_71 (sequence is synthesized)
ggacctacatttataaattgtaattccgttcagagaaataagaacttgattgggacagagctgggaaatgtttgtgatgaaaattattaggaataaggaaataatgatgctgtgtgagaa

SEQ ID NO: 119036 - DNA, 120 bp, Artificial Sequence
  ENSG00000100784_72 (sequence is synthesized)
agcaagtagacttaaattctgagatagaaacatctgcaatcaacatagagaaggctactttacaaaaatgttatttcagtgcccgtatggacaaatctctttaaaaggctttgtctactg

SEQ ID NO: 119037 - DNA, 120 bp, Artificial Sequence
  ENSG00000100784_73 (sequence is synthesized)
tgtacataaaggaacttataagcttcataaagtgcttatttttctctaggaagcccatgtgatagctctctcctctgttttcccactccttccccagcttttcctgctgcccactgctcc

SEQ ID NO: 119038 - DNA, 120 bp, Artificial Sequence
  ENSG00000100784_74 (sequence is synthesized)
aaacactgacatccagtggccagagaccagtccaaatggagcactaaaactacatatagatagtgatcatattgtttaaaatgttattgcaacatggtgtgtaaagtgcacaggtctgaa

SEQ ID NO: 119039 - DNA, 120 bp, Artificial Sequence
  ENSG00000100784_75 (sequence is synthesized)
atatacagctcaataaatgtttacatatatatgcgcccatataaccatcattcagatcaagatgaggctcccagtcagtcctcatacataaccaccactctgacctctgtcactgttgtt

SEQ ID NO: 119040 - DNA, 120 bp, Artificial Sequence
  ENSG00000100784_76 (sequence is synthesized)
gacattcctatacatggaattatccagtctataggtttttgtgtctggtttaatttgatcagcattatgtctgtgaaatgcatctatgttgttgcatgtagcaataacagtagtttgttc

SEQ ID NO: 119041 - DNA, 120 bp, Artificial Sequence
  ENSG00000100784_77 (sequence is synthesized)
tttttcgttgctctgtagtattccatcagataaatacatcacaatttatccattctcccactgatagacattttggttgtttgtaatttttagcttttgtgtttaaagcagccataagca

SEQ ID NO: 119042 - DNA, 120 bp, Artificial Sequence
  ENSG00000100784_78 (sequence is synthesized)
ttcttgtgcatatattttaatggacacgtacactcatttctcttgtgtgtccacttaaaagtgaaacagctggctgcagtgagccttgatcgcaccactacattccatcctgggcgatag

SEQ ID NO: 119043 - DNA, 120 bp, Artificial Sequence
  ENSG00000100784_79 (sequence is synthesized)
agtgagaccctgtctcaaaaaaacagacaaaaaaaaggagtgaaactactgagtcataagatgaatatatatttagctgtagaagatattaccaaatggttttcaacaatggttgtacca

SEQ ID NO: 119044 - DNA, 120 bp, Artificial Sequence
  ENSG00000100784_80 (sequence is synthesized)
atttacatacccaccaataatgtgtaagtgttctagttcttccacatcctcatcagtgcttggtaccatcagccctagtagtttagccactctgacaaatgtgtatatttgattgtggtt

SEQ ID NO: 119045 - DNA, 120 bp, Artificial Sequence
  ENSG00000100784_81 (sequence is synthesized)
ttaaccattctggtgattttgtatttcactgagattttaaggtgtattttcctgataagtagtgatgtgtggaacacctttttatatttttattagtcatttggctatcctcaattaagt

SEQ ID NO: 119046 - DNA, 120 bp, Artificial Sequence
  ENSG00000100784_82 (sequence is synthesized)
gcctgttcaagtcatttgttcatatttattgggttgtctttttttcttactgacttgcaggagtcttttatattttatggatatgagggtttttgtctgatattttaccataaatgtctt

SEQ ID NO: 119047 - DNA, 120 bp, Artificial Sequence
  ENSG00000100784_83 (sequence is synthesized)
ctctttagtttgcttttctactttctaagtgctttcctttgatgaccaaaaattttatgaagtccaatataccagtcttttatttaattgctaatacttttgcgtcgtatttaataaatg

SEQ ID NO: 119048 - DNA, 90 bp, Artificial Sequence
  ENSG00000100784_84 (sequence is synthesized)
tatttaattgctaatacttttgcgtcgtatttaataaatgttcacaccaaggttatgaagatattcttatattcttctaaaagctttatt

SEQ ID NO: 119049 - DNA, 79 bp, Artificial Sequence
  ENSG00000100784_85 (sequence is synthesized)
caaggtcatgccactacactctctaaaagctttattgttttaccatccacattaggtttacagtccatctactgctgat

SEQ ID NO: 119050 - DNA, 120 bp, Artificial Sequence
  ENSG00000100784_86 (sequence is synthesized)
ttaccatccacattaggtttacagtccatctactgctgatatttgtatatgatgtgaaatagtagccaaagtttatgtatttccatatgagtattaacttgacccagcacaatgtattga

SEQ ID NO: 119051 - DNA, 120 bp, Artificial Sequence
  ENSG00000100784_87 (sequence is synthesized)
aaagctgagttgtaatttttatgaagtcttcatatctggtagtgtaagacctctaacttttatctaatagttctaatagttttggctattcttaatcctttgcatttccatatacatttt

SEQ ID NO: 119052 - DNA, 120 bp, Artificial Sequence
  ENSG00000100784_88 (sequence is synthesized)
agaatcaccttgttagttttgggggcagaggatgttagggtttaattggtattgcattgaatgtataaatcaatttcaggagaaattatatcttaccaattttgagttttccaatgcatg

SEQ ID NO: 119053 - DNA, 120 bp, Artificial Sequence
  ENSG00000100784_89 (sequence is synthesized)
gacatggtatatccctctatttacttaggtatttaatttgtctcaccagtgttttatagatttacatgtagaggttagatttatatctaggtttttgacagttttactttattatcaaat

SEQ ID NO: 119054 - DNA, 120 bp, Artificial Sequence
  ENSG00000100784_90 (sequence is synthesized)
atagaaatatagtttttttggtatattaccctttcacttagaaaccttgttaaattcactttttaattctaatctgtatattattttagatttctttaagtctacagttatatcgtctgt

SEQ ID NO: 119055 - DNA, 120 bp, Artificial Sequence
  ENSG00000100784_91 (sequence is synthesized)
cagttatatcgtctgtaaataatgacagtttcatttctgccttttcaatttttatttttcttgccttattgagctgatcaggacctccaataacatgctaaatgaagtaatgacaatgga

SEQ ID NO: 119056 - DNA, 120 bp, Artificial Sequence
  ENSG00000100784_92 (sequence is synthesized)
ctccaataacatgctaaatgaagtaatgacaatggactccttaaacttcttcaactcagaataagaattcaatatttttctattctatatatatatatttttttcttttcttttcttttt

SEQ ID NO: 119057 - DNA, 63 bp, Artificial Sequence
  ENSG00000100784_93 (sequence is synthesized)
cgggtggctgggaccacaggcatgcaccaccaccctcagctaatttttgtattattagtagag

SEQ ID NO: 119058 - DNA, 63 bp, Artificial Sequence
  ENSG00000100784_94 (sequence is synthesized)
tgcctcagtctcccgggtggctgggaccacaggcatgcaccaccaccccctcgaattcctgac

SEQ ID NO: 119059 - DNA, 120 bp, Artificial Sequence
  ENSG00000100784_95 (sequence is synthesized)
tacaggcatgagccacctcacccagcccaatattatgttttatttaatttttttatagatatcatatagcagattgttttatttctaattttcagagagtttttactaaatgctttttct

SEQ ID NO: 119060 - DNA, 120 bp, Artificial Sequence
  ENSG00000100784_96 (sequence is synthesized)
gcctctgttgagataatcttgtatttttcttctttattcttcaattttcaaatgctgaaaatagaataaattccattttcatgatgtattgcccttttcatatatcaatggatatagttt

SEQ ID NO: 119061 - DNA, 120 bp, Artificial Sequence
  ENSG00000100784_97 (sequence is synthesized)
ttgcccttttcatatatcaatggatatagtttgctaatattttgcctaagatttttggatcataaggaggatagacctagactgggtgtggtatctcacacctgtaatcccaacactttg

SEQ ID NO: 119062 - DNA, 120 bp, Artificial Sequence
  ENSG00000100784_98 (sequence is synthesized)
gagttggagaccagcctgggcaacatagagagacctcatctctacaaaagattaattagccaaggatggtggtgcacacctgtagtaccaaatacctgggaggctgaggtgggagaatca

SEQ ID NO: 119063 - DNA, 120 bp, Artificial Sequence
  ENSG00000100784_99 (sequence is synthesized)
atcacttgagtccaggaagcagaagttgcagtgaaccaagattgtaccactgtactcccacctgggcaacagagcaggagcctagcattaaaaaaagaagaagaagaagaagaagaagga

SEQ ID NO: 119064 - DNA, 120 bp, Artificial Sequence
  ENSG00000100784_100 (sequence is synthesized)
gaggaggaggaggaggaagaagaaggacagacctgtaatttttctgtctttaatatttttgtcaagttttggtatcaagattattctggcctcataaaaaaaaagttggagatgtgttcc

SEQ ID NO: 119065 - DNA, 120 bp, Artificial Sequence
  ENSG00000100784_101 (sequence is synthesized)
ctttttttctacactctggaagagtttgcacctgatattattcctcctgtttaaaataattcaccattgaagccacttgaatgagaagttttctttgtgggaaagttgtcattaattgga

SEQ ID NO: 119066 - DNA, 120 bp, Artificial Sequence
  ENSG00000100784_102 (sequence is synthesized)
atatatcttgtctacttacagttaatgtaattattattggttttaagtctaccatcttacaatttcttttacatttttgtcctatatcctcttggttcctgtattgtgtcttcttttgat

SEQ ID NO: 119067 - DNA, 120 bp, Artificial Sequence
  ENSG00000100784_103 (sequence is synthesized)
aaaccaaatattttcttttgtccattgtttcctcctatgttagttcgttagtaatttttagaaattcatttagtaccttaaagattacagcttgtatctttgacttgctgccttaaattg

SEQ ID NO: 119068 - DNA, 120 bp, Artificial Sequence
  ENSG00000100784_104 (sequence is synthesized)
ttacagcttgtatctttgacttgctgccttaaattggtacattaccacttcccaacaatgcaggaattttatgacagtttaaatctgttttccccttttttttttttttttttgagatgg

SEQ ID NO: 119069 - DNA, 66 bp, Artificial Sequence
  ENSG00000100784_105 (sequence is synthesized)
tcccccttcttccttttatgttattgttgtcatgtattttacttctacattctatgtatgttttat

SEQ ID NO: 119070 - DNA, 120 bp, Artificial Sequence
  ENSG00000100784_106 (sequence is synthesized)
ttcttccttttatgttattgttgtcatgtattttacttctacattctatgtatgttttatctctatatatgtgttttagacttcataagacattatttttttttttttgagacagagtct

SEQ ID NO: 119071 - DNA, 66 bp, Artificial Sequence
  ENSG00000100784_107 (sequence is synthesized)
atttttattagtagtactactactatatattttaaagactctggctgggcactgtggctcacgcct

SEQ ID NO: 119072 - DNA, 120 bp, Artificial Sequence
  ENSG00000100784_108 (sequence is synthesized)
tctcaaaaaaaaaaaaaaaaaaatagactctatattgtttgtttgctcacatatttatgttttctggtgtttttctttccatcctgccttttttacttccatctgggattacttttcttc

SEQ ID NO: 119073 - DNA, 120 bp, Artificial Sequence
  ENSG00000100784_109 (sequence is synthesized)
ttacttccatctgggattacttttcttcatctggagaattctctttagtatttattttagtgccagtcttctgacaatgaattctctcagcttttgttttttgaaaccttctttcttttg

SEQ ID NO: 119074 - DNA, 120 bp, Artificial Sequence
  ENSG00000100784_110 (sequence is synthesized)
cctttatttttctgtatttttatttttttaagataaaattcatgtatcatgtaatatacccatctaatcattccattcagatacaattcaatgttacctttatttttgaaggatattttt

SEQ ID NO: 119075 - DNA, 81 bp, Artificial Sequence
  ENSG00000100784_111 (sequence is synthesized)
atacaattcaatgttacctttatttttgaaggatatttttgccttgtatgaaatactaggttcaccattttattttatttt

SEQ ID NO: 119076 - DNA, 80 bp, Artificial Sequence
  ENSG00000100784_112 (sequence is synthesized)
gcgcccagcctaggttcaccattttcaagatatcattccaatccttaagttctgtggaaaaagccattagttatatttcc

SEQ ID NO: 119077 - DNA, 120 bp, Artificial Sequence
  ENSG00000100784_113 (sequence is synthesized)
atccttaagttctgtggaaaaagccattagttatatttcctttgaaggtaatgtgtcttttttctgtggtcacttttaagattttctcttcgtctttgtttttattttttattatacttt

SEQ ID NO: 119078 - DNA, 120 bp, Artificial Sequence
  ENSG00000100784_114 (sequence is synthesized)
aatgatggtttccagcttcatccatcctaagattggtaaacttcctgaatctgttggttgatgtccttccttattagaattcttaaccagtcattcttcaaatagttttttccaatccgt

SEQ ID NO: 119079 - DNA, 120 bp, Artificial Sequence
  ENSG00000100784_115 (sequence is synthesized)
aatagttttttccaatccgttttctctctcccgttttctaggattgtgtgttatactatgttccatatgtctgttatagtcctttgtttgccatcttaatttctccctgtacttcaatct

SEQ ID NO: 119080 - DNA, 120 bp, Artificial Sequence
  ENSG00000100784_116 (sequence is synthesized)
gtatagtttttactgacctaattaacttatcctgttctgctgagcctaatcaattttaaatttagttgtatatcttatattttggattctaaaatatccatgacacttttttgtaggtgc

SEQ ID NO: 119081 - DNA, 120 bp, Artificial Sequence
  ENSG00000100784_117 (sequence is synthesized)
caagtctctgatcatatcttgtcttttcctctatattcttgaacacattaatcaaagtaattttaaaactcttgtctgagaaatccagtgtctgattactactactagttgtttgtttcc

SEQ ID NO: 119082 - DNA, 120 bp, Artificial Sequence
  ENSG00000100784_118 (sequence is synthesized)
attgtctgttgtcagtcatttggtgctgttttttagcatgccttataagtttggtgaaatgtcatacattgtgtgttaaatactgtaggggctttgaacgatgttatcttcctctaagat

SEQ ID NO: 119083 - DNA, 120 bp, Artificial Sequence
  ENSG00000100784_119 (sequence is synthesized)
ggttatgttttcttcttgcagtctgataaaatacaggcatatcactgtaatcctattgaaggttggttttagactttgttgggcttgtacatttcagttttgctcttactcctagcatat

SEQ ID NO: 119084 - DNA, 120 bp, Artificial Sequence
  ENSG00000100784_120 (sequence is synthesized)
ggcctctttgggctctcatctgaaaatctagggtgtttatcagggccacttcacctcggtgaccttgaattccaacctttccctcctcagtactaagagctgctcagctcgttagcctct

SEQ ID NO: 119085 - DNA, 120 bp, Artificial Sequence
  ENSG00000100784_121 (sequence is synthesized)
catctgctgctttttgctggatttcttgaagtctcaccttgttgcacaggagtctgcaattggcagacacctcaaggagatactgtaccagtatttcaggctcacttccctgaggtttct

SEQ ID NO: 119086 - DNA, 120 bp, Artificial Sequence
  ENSG00000100784_122 (sequence is synthesized)
tcgctctgggattttgccccttaagtcctagctactttcccaagctccaacttttgtctcttcaaccaagtgggattactgcttgctgctaggtatttatttccctgtgttgtgaatttg

SEQ ID NO: 119087 - DNA, 120 bp, Artificial Sequence
  ENSG00000100784_123 (sequence is synthesized)
cagtgccttgaagaagtaatcaaaatgaacacagagctcaccaaagtgtgcttcccttttttccctcctttcagctattttattgcagctcgtcaagttctccctgcattggtttgctcc

SEQ ID NO: 119088 - DNA, 120 bp, Artificial Sequence
  ENSG00000100784_124 (sequence is synthesized)
ctgttgcctataaaagatgttctacttaacccttttcctgtttgccccaagaatacttgccagcagcacttgctgctgcagtatttaccccaagataactttgccacgaactctcgcttt

SEQ ID NO: 119089 - DNA, 120 bp, Artificial Sequence
  ENSG00000100784_125 (sequence is synthesized)
tattattactttcgtttagctctagtatattgacttcagaaaaaaaggacatcgttctctttatagcattctgttcttagtagtggtatttccatttacaaagtataataattctcgatc

SEQ ID NO: 119090 - DNA, 120 bp, Artificial Sequence
  ENSG00000100784_126 (sequence is synthesized)
gctgaaaatgtcgaatcctagaaaatgtagcattcctacacgtgatgttaacatcattctcgaacagttcttggacagagatttatttaatgaattcgatttttctgaaatagatgattt

SEQ ID NO: 119091 - DNA, 85 bp, Artificial Sequence
  ENSG00000100784_127 (sequence is synthesized)
atttatttaatgaattcgatttttctgaaatagatgattttgatgattcagatgcttctgatactagatctgtttagaaataaca

SEQ ID NO: 119092 - DNA, 120 bp, Artificial Sequence
  ENSG00000100784_128 (sequence is synthesized)
cgtaaaattaaatgaatgctggcagtgagctgtactttttttttctaaaccggaaaagggttaatatagctttcatcgttgttttcagtaggagggctagtccaatcacaagctactcta

SEQ ID NO: 119093 - DNA, 120 bp, Artificial Sequence
  ENSG00000100784_129 (sequence is synthesized)
ttgtggccaaaagcaaaaatctggtggtaatcatttttaatcgccattgttgatttctccgcagtggcttctggcattgataacttggttgtcacatggtcatatgtgaaggcacccggt

SEQ ID NO: 119094 - DNA, 120 bp, Artificial Sequence
  ENSG00000100784_130 (sequence is synthesized)
ttattcatttgttcctttgtccattaaatagtttttgagcacttctttcaggccaggtattactctagacacaagcaatataacaatatttaagataagatctgtgtcactttggcactt

SEQ ID NO: 119095 - DNA, 120 bp, Artificial Sequence
  ENSG00000100784_131 (sequence is synthesized)
gcagcctgtttttatagaaaggctactaaatggttgccgagtcggacttgtggtaattaaaatagacttttcttgtgtgggggttgggagtgagaaaaaagagactggaatcttttagat

SEQ ID NO: 119096 - DNA, 120 bp, Artificial Sequence
  ENSG00000100784_132 (sequence is synthesized)
gattacatcttctttatataaatatttttagccttttgaaaaaactctgtagagcttaatgcagttcacagttcacccacactacatcaatatttggcctaccttttgcaagcccaattc

SEQ ID NO: 119097 - DNA, 120 bp, Artificial Sequence
  ENSG00000100784_133 (sequence is synthesized)
cctaactatgagtttctgtgttacataaaaatctcaccgggagcacaattatttgacaatttgagttgaaactccaggaactgatttatggagaacaaacttagctctgaaattatgtct

SEQ ID NO: 119098 - DNA, 120 bp, Artificial Sequence
  ENSG00000100784_134 (sequence is synthesized)
ctttatgaatatcgacatgaaatctgatgaagaatcatcctactgtggtttcccattttaacttctgtttttgaaaaacatttcagatgcaactaagcacttattaaatgcttcgtgata

SEQ ID NO: 119099 - DNA, 120 bp, Artificial Sequence
  ENSG00000100784_135 (sequence is synthesized)
ccaaaaaatggcttggtggtctttgtcttccagaatagcataaatttcagtgttaccaagataaaaatataatctgggcacatgtcactgttaaaatattatagtcagatcaaggattct

SEQ ID NO: 119100 - DNA, 120 bp, Artificial Sequence
  ENSG00000100784_136 (sequence is synthesized)
attcctgtctttgttattctttcccacttttgaaactttatccagtggatttttttttattacaaagacgtattccagagataacagtttgtacttctgattatgatccatgttcatgtg

SEQ ID NO: 119101 - DNA, 120 bp, Artificial Sequence
  ENSG00000100784_137 (sequence is synthesized)
atcaaaaggcagcaataataggacactgtcatatatggtagctccatagaaactaggctgcactgggaggacagattcgccatcttgagcacctgtggcttggtattctcgaaattgtag

SEQ ID NO: 119102 - DNA, 120 bp, Artificial Sequence
  ENSG00000100784_138 (sequence is synthesized)
cccctttggaatggctgaagaactaccagttaaaggtaaagaaaccagacacacaaggccacgtattgtatgattccacttacatgaaatgtccagaatgggcaaatccatagagacaga

SEQ ID NO: 119103 - DNA, 120 bp, Artificial Sequence
  ENSG00000100784_139 (sequence is synthesized)
aagattagtgtttttcaggggctggtgggagggggaaatagggagtgacaatgtatacaggtgatggggttttggggtgatcaaaatgttctggaattaggtagtggtaatggttgcaag

SEQ ID NO: 119104 - DNA, 120 bp, Artificial Sequence
  ENSG00000100784_140 (sequence is synthesized)
gttgcaagacattgtaaatgtagtaaaaaacaatgaatggtacacttaaaatgaattttatcttatattttaaaaaatcacacacaggccgtgcacagtggctcacgcctgtgatcccag

SEQ ID NO: 119105 - DNA, 62 bp, Artificial Sequence
  ENSG00000100784_141 (sequence is synthesized)
acagcctgaccaaaagggagaaactccatctctaataaaatacaaaaattagccgggcgtgg

SEQ ID NO: 119106 - DNA, 120 bp, Artificial Sequence
  ENSG00000100784_142 (sequence is synthesized)
aaaaaaaaaaaaaaaaaaaatcacgcatagctagaaaggctgtagctagtttgaggaagtcagtactaacacctggctattcagagaatgccatcctgcccccctttctttggcatcaac

SEQ ID NO: 119107 - DNA, 120 bp, Artificial Sequence
  ENSG00000100784_143 (sequence is synthesized)
tctgaagcatagttatgttatggttggaaaatcttttctaactagagattaagctcttggggacaaagtaaacttgcctcttacaggaaacaccaaagttccagcttaacagagaaaggg

SEQ ID NO: 119108 - DNA, 120 bp, Artificial Sequence
  ENSG00000100784_144 (sequence is synthesized)
aacctccttgggaatcatacttttcccattattgggtagtgctcggacagatgtcaaagtgctgtatgtttccatggtgatcatatccagcttatcattacttgtatctttgccctaaag

SEQ ID NO: 119109 - DNA, 88 bp, Artificial Sequence
  ENSG00000100784_145 (sequence is synthesized)
tcatatccagcttatcattacttgtatctttgccctaaagtttaatttcttactttgggactcattataataatgggagcaccggcct

SEQ ID NO: 119110 - DNA, 76 bp, Artificial Sequence
  ENSG00000100784_146 (sequence is synthesized)
acgccattgcactccagcctaataatgtaagtaccaggcctttgtttgagttcagtttttctttggtgagcacttt

SEQ ID NO: 119111 - DNA, 120 bp, Artificial Sequence
  ENSG00000100784_147 (sequence is synthesized)
ggcctttgtttgagttcagtttttctttggtgagcacttttctaaaatctctctcatcttacctatgttaactttgtctcagaagcaggctcatttgtgcagttagctgaaatatttatt

SEQ ID NO: 119112 - DNA, 120 bp, Artificial Sequence
  ENSG00000100784_148 (sequence is synthesized)
cagaaagtcatttatagcagttgtcttttcatcaaacataatacctttaaaatagcagaaaattaatgccattcatgattttgccattttactaagtagtcagaagctatgtctccctta

SEQ ID NO: 119113 - DNA, 120 bp, Artificial Sequence
  ENSG00000100784_149 (sequence is synthesized)
gccccatcatatacatttgaaatatctttatcctagataatctgtattcatttgaatgcaaaagttttatcaatatgagtgaacttatacatctttttattcgctgatggagatatcact

SEQ ID NO: 119114 - DNA, 120 bp, Artificial Sequence
  ENSG00000100784_150 (sequence is synthesized)
tgaaactttgttcctggcaaagcaaagagatgaaatgtattgaaaaaaatcgattagacttttaaaacttcaaaatacttttatagaaaatgtaaataagattgtttctaactgcagagt

SEQ ID NO: 119115 - DNA, 120 bp, Artificial Sequence
  ENSG00000100784_151 (sequence is synthesized)
gttttacataaaatctttatgtgaagaatttatattgcagtacaataaagtcagtgctttttatatgttttgaatggtaaacattttgaaggtattttttgaagtaactaggtattgaca

SEQ ID NO: 119116 - DNA, 120 bp, Artificial Sequence
  ENSG00000100784_152 (sequence is synthesized)
ttttttaataatatattttgaataaagcacacctaaaatgcatgaacttgtgtaagtatttggcatcattagtctagttgtacatatttttaaaaataagaatgggcttagaagataatg

SEQ ID NO: 119117 - DNA, 120 bp, Artificial Sequence
  ENSG00000100784_153 (sequence is synthesized)
tatttgtagtaagtatagtatattttttactgagtgagtctgatacgtcttttagatatttgagtaaagtctactgttaaagtattccagatttttaaattccagtgtccttgctgtgga

SEQ ID NO: 119118 - DNA, 120 bp, Artificial Sequence
  ENSG00000100784_154 (sequence is synthesized)
atctagtgttggctttctgatgtcagaataatcaaaccctgctcatatacacatccagaaaactttttctaatgatgatacatttagcaaaatcgcaagtctttaaaaattctagttaaa

SEQ ID NO: 119119 - DNA, 120 bp, Artificial Sequence
  ENSG00000100784_155 (sequence is synthesized)
tagacttacttgagacaagtgtacattgtgaaatctaaaataaaaatttgtgactatataatacataatcttcattatgtaggctatttctaaaaacttagtttctgtgctgatttcatg

SEQ ID NO: 119120 - DNA, 120 bp, Artificial Sequence
  ENSG00000100784_156 (sequence is synthesized)
ttaagtttttcaaacgttagcagattataatggctacagtaagttttgttctaaatctggtagccatttattattaaatgattaatgattaaacattaatcatttaataattacttagga

SEQ ID NO: 119121 - DNA, 120 bp, Artificial Sequence
  ENSG00000100784_157 (sequence is synthesized)
attataaattacaatgtcaaatcttcatacatcaggctccttgcactataattacttaaaattagtttgcatcaatagtctatataaacagatatcttagtttagaggaaaaaatattct

SEQ ID NO: 119122 - DNA, 120 bp, Artificial Sequence
  ENSG00000100784_158 (sequence is synthesized)
attttctaggtactttaatagtttggtcttgtgaaaattacataggtgtgtgtttatgtatgtgtatacacacatgtattgggggcttacaataccaaattaataagactgcccctcact

SEQ ID NO: 119123 - DNA, 120 bp, Artificial Sequence
  ENSG00000100784_159 (sequence is synthesized)
ccttaaatcgactatctgccctgccagtaatcccccacctgtactggtatatacagagttttctctggtacaaatgattaatcaagaaaaagggtgtgaaatatttgtgttcgtttcttt

SEQ ID NO: 119124 - DNA, 120 bp, Artificial Sequence
  ENSG00000100784_160 (sequence is synthesized)
ttaaatgaataatgggatacacataaactagtaacaccacattgatttcctaaagacctaatacagctttaagagggaataacattccagagctccaggattattttaatttagctttca

SEQ ID NO: 119125 - DNA, 120 bp, Artificial Sequence
  ENSG00000100784_161 (sequence is synthesized)
aacattccagagctccaggattattttaatttagctttcaagatggttacgattttgatttaatatagagacttcatagtgttaaattttagggtttttttttttttttttgtattttta

SEQ ID NO: 119126 - DNA, 82 bp, Artificial Sequence
  ENSG00000100784_162 (sequence is synthesized)
aaattttaggtatttaaaacatccattgatgctttgttttgtttttgggttttttttttattgttgttacttaagggatgca

SEQ ID NO: 119127 - DNA, 120 bp, Artificial Sequence
  ENSG00000100784_163 (sequence is synthesized)
ttttgggttttttttttattgttgttacttaagggatgcatcttatttatttggttgacttttatctagacatcataaatgtgatgcttacttttttattagccacttcattgttgatgt

SEQ ID NO: 119128 - DNA, 120 bp, Artificial Sequence
  ENSG00000100784_164 (sequence is synthesized)
cttaatgggagatcttagtttgatgaatctactctttgaaattttagtttgattagtcatttgtttctgctaggttttggcttttgttttgttttttgagtgataacctaagaagtttct

SEQ ID NO: 119129 - DNA, 120 bp, Artificial Sequence
  ENSG00000100784_165 (sequence is synthesized)
acagtggaaaatatcattatgacatcttcatcccttataaagttgtttcatttagaggaatttttcaaagcctatgttgagaaatgggcaaattaagtaaagcatcataacaattttttt

SEQ ID NO: 119130 - DNA, 120 bp, Artificial Sequence
  ENSG00000100784_166 (sequence is synthesized)
tatagtgaactcattttatttatagaacggcaaacacattcactctttttgctaacatccggggcttttttcattgtgactgctttgcacacttaaaaatgtttctcccaggccgggcac

SEQ ID NO: 119131 - DNA, 120 bp, Artificial Sequence
  ENSG00000100784_167 (sequence is synthesized)
gtctcaaaaaaaaaaaaaaaaaaaaagtttctcccagcaaaggctaactggaatttatttttgtttaaagacaaatacttttaatgtggataaaataaaagttggaagtatgcctttcat

SEQ ID NO: 119132 - DNA, 120 bp, Artificial Sequence
  ENSG00000100784_168 (sequence is synthesized)
aaataaaagttggaagtatgcctttcatgtggcaaactggaaattagtggttagtactccattgcagcattaaataccaattctttacaatagggtgcacatatcagatgctgtttttcc

SEQ ID NO: 119133 - DNA, 120 bp, Artificial Sequence
  ENSG00000100784_169 (sequence is synthesized)
cttaacctttgcacttttcattgaaaatgttttcaaatcaaatcttgttttattgggtttcacatgattggactaatacttacatatatgcttctttttaaggtatttagacattgacaa

SEQ ID NO: 119134 - DNA, 120 bp, Artificial Sequence
  ENSG00000100784_170 (sequence is synthesized)
aggtatttagacattgacaattagttatttccttatgagccatagctttgaaaaaccattttagaagaaatttccattttttaaacaaaagtgttgggaggccgaggcgggcagatcacg

SEQ ID NO: 119135 - DNA, 120 bp, Artificial Sequence
  ENSG00000100784_171 (sequence is synthesized)
cgataatttgtctttgctgtagatgaatgccacgtttttatatactaggactattactgaataatactgtttatttctttagatcaacgaatatattaaattctgtcttttttgttcaaa

SEQ ID NO: 119136 - DNA, 120 bp, Artificial Sequence
  ENSG00000100784_172 (sequence is synthesized)
taaacgctgtgagatgattgggaaggctgtgtgttgaagttagatgcaaagttggaccttgtacagtgagcctcttgtgagaactgagccatgaaagataaagcctgtcattcatgtctg

SEQ ID NO: 119137 - DNA, 120 bp, Artificial Sequence
  ENSG00000100784_173 (sequence is synthesized)
ccttggcctgtgcccagctttattagtaaaaaccattcagtttttactaatgatatctaccagtatctaaagagaaataccttcatcctctagaagaaaacaaggttacccaaagagctc

SEQ ID NO: 119138 - DNA, 120 bp, Artificial Sequence
  ENSG00000100784_174 (sequence is synthesized)
acttaattccttcctttttccctgaacccttggttttaagtgaagagtaaaatgtactagatatgacactctctctgagtattactgaggattttgtggaaaaggcagtttggtacttta

SEQ ID NO: 119139 - DNA, 120 bp, Artificial Sequence
  ENSG00000100784_175 (sequence is synthesized)
tttccagcttagctgcagacttggtgaccctgagcaaatcactcagcctccctttgcctccatttcttcatctgtaaaatggggttaacctgtgcctccctgtctcaccagcatactgag

SEQ ID NO: 119140 - DNA, 120 bp, Artificial Sequence
  ENSG00000100784_176 (sequence is synthesized)
ggatcgattaaagaggattaaaaaaatccataaggtacactgattccaaagatgggtagaatgatatttaataatgaagactttctgttatatagcaatttaattttaaaagtatcttta

SEQ ID NO: 119141 - DNA, 120 bp, Artificial Sequence
  ENSG00000100784_177 (sequence is synthesized)
gagactctgtctcaaaaaaaaaataaaataaaagtatctttacccacttctctgtagtgaatattgactagcattttgaagtaggaactaacaaagtataaaattaagtagattttttat

SEQ ID NO: 119142 - DNA, 120 bp, Artificial Sequence
  ENSG00000100784_178 (sequence is synthesized)
taacaaagtataaaattaagtagattttttatatttatgggtattgttctagtacaaatttatggtgtacactgtcggtctgagtgtgggtttaaaatatatcattgtgcttggctaatt

SEQ ID NO: 119143 - DNA, 120 bp, Artificial Sequence
  ENSG00000100784_179 (sequence is synthesized)
tgtagaatgtcttatttgaattgacttcatttatttcagaggaatgcatagatgatcagatcaaactgtcgtcatagcagtgttttcagcacatacgagaatcttagagtttaggagcct

SEQ ID NO: 119144 - DNA, 120 bp, Artificial Sequence
  ENSG00000100784_180 (sequence is synthesized)
tagagctcacccagtgcaatttcctgccggaagcagattccttcctggtgacctcaccaacaggtgcttgtgcagccttttcctgaaaactttttgggaaagtgggggctgctacctcac

SEQ ID NO: 119145 - DNA, 120 bp, Artificial Sequence
  ENSG00000100784_181 (sequence is synthesized)
tactttgatgtgtaccttttgttcaagaactttctaaaacttggagctaatcatgggttatttcagaagatgtaagcattttaagttttttattgaattccatccttatttaaaaggcct

SEQ ID NO: 119146 - DNA, 120 bp, Artificial Sequence
  ENSG00000100784_182 (sequence is synthesized)
ctgttttttttttttttttttgtatggtttcccacattgattaggttgttttcttcattttcttaatagattaaaaatactttcttctctttctatttgtgtcttcttccatttagtatt

SEQ ID NO: 119147 - DNA, 120 bp, Artificial Sequence
  ENSG00000100784_183 (sequence is synthesized)
tcttccatttagtatttatgggagggagcaagaagggaaaggatgtctatttttaaaattgactacaatcatgactgttcttcttgtcattctgtagcagctggatttattaccatctct

SEQ ID NO: 119148 - DNA, 120 bp, Artificial Sequence
  ENSG00000100784_184 (sequence is synthesized)
tatttaaaggtccttcagaacacgttgaagcagttcatttcaggtcaatggctggtaagcaatgtcaggacctctggggaaggagaagctgacgggatcccagaggaaagaattgaggtt

SEQ ID NO: 119149 - DNA, 120 bp, Artificial Sequence
  ENSG00000100784_185 (sequence is synthesized)
gtttgctcccttgtagaaagcccacagatcccttcccagactagaaaaaaagtgccagagtgtcctgaaactttccttctaaggcacatacttcaaagagactggggattcctttgtttt

SEQ ID NO: 119150 - DNA, 120 bp, Artificial Sequence
  ENSG00000100784_186 (sequence is synthesized)
cacatacttcaaagagactggggattcctttgttttaaatataggtggggtctcacagtgttgcccaggctgggctcaagcgatcctgccacctgggcctcccaaagtgatgggattaca

SEQ ID NO: 119151 - DNA, 120 bp, Artificial Sequence
  ENSG00000100784_187 (sequence is synthesized)
tgtggtgccagctgccaggtaagaaagctgtgagacaatgtgttgattttcctttactacgtcaggtttgaggacatcatctagcatcaacgggtaacgtcaccctttgttccatctttg

SEQ ID NO: 119152 - DNA, 120 bp, Artificial Sequence
  ENSG00000100784_188 (sequence is synthesized)
ggaaataatagtagtagcttgttactgttagctgacccctacattagcatcaataaagtaaatccctttaactttccttttggcctttcctttctctctctctgcctccccaccagcccc

SEQ ID NO: 119153 - DNA, 120 bp, Artificial Sequence
  ENSG00000100784_189 (sequence is synthesized)
gactctctcctgtgtgcgtacacatccacacacacctccatggtattccttctttctcccacctaagggaagctgtgcccgatcttgctgcagtccaggtcaccgtactgagatgagtca

SEQ ID NO: 119154 - DNA, 120 bp, Artificial Sequence
  ENSG00000100784_190 (sequence is synthesized)
gccacagactctaaacactagcagcgattagccgtatgtagccaccaagtgcactgttttagacaggtttacacagctctttgctgtccactcatatcagctgtgtagtagcccaaggca

SEQ ID NO: 119155 - DNA, 120 bp, Artificial Sequence
  ENSG00000100784_191 (sequence is synthesized)
gcctgtcaggcagaagaattaccaaccaaagtggatctattcataagataaaagatccggagtccgtgccctcttaaaaaacttttgtcttcagacatatgggtgcgtgttcatctctgg

SEQ ID NO: 119156 - DNA, 120 bp, Artificial Sequence
  ENSG00000100784_192 (sequence is synthesized)
ccaaaactttgtttccagtttcaaagggctggttgcgaaggtggccttgtaacctttctgttgccggctctgttagttgcctgataagcagtagctaattcatcctcctcagaatttgag

SEQ ID NO: 119157 - DNA, 120 bp, Artificial Sequence
  ENSG00000100784_193 (sequence is synthesized)
agtggcatctattagattcagaccaccaaggtgcctgcgcgggctctcctggttacgactgagtccccttttctcatctgtggggtgaacgcttctatttgcagaaatttgcttgcatct

SEQ ID NO: 119158 - DNA, 90 bp, Artificial Sequence
  ENSG00000100784_194 (sequence is synthesized)
actcttttcttttgttgatctttgccatcctctgcctggcttaatgaggttctttccctgcgtatttatgtcccaggagctcaccttccc

SEQ ID NO: 119159 - DNA, 120 bp, Artificial Sequence
  ENSG00000100784_195 (sequence is synthesized)
tctttccctgcgtatttatgtcccaggagctcaccttccccctaggtttttaagaaggaagcagaaaatgttacaaagtataagggattctatgaagtccatagataggatttgctttgg

SEQ ID NO: 119160 - DNA, 120 bp, Artificial Sequence
  ENSG00000100784_196 (sequence is synthesized)
gagtagatgatttcttcttattttggtgtaaacatcaatttggatggcaattagaatgtctttagcctctttaaaaagcccttctggggcaaacctttgcaagtcactcagctggcatgt

SEQ ID NO: 119161 - DNA, 120 bp, Artificial Sequence
  ENSG00000100784_197 (sequence is synthesized)
aatgagatttttatttgcatggctttttttttctaagtctctctagaagaacataaggacattctgaacatgcaaggaatacagttattctcacatcaaggatcaattttattttgtatc

SEQ ID NO: 119162 - DNA, 120 bp, Artificial Sequence
  ENSG00000100784_198 (sequence is synthesized)
ttcattttatgtcattttcctttattttattcacattaatctagcattaattccccccagagggaatgatatttttggttgctgccacctgtgttattaagtgacagcttttctttatct

SEQ ID NO: 119163 - DNA, 120 bp, Artificial Sequence
  ENSG00000100784_199 (sequence is synthesized)
gcttttctgaatttcatatttatatactttattgtagttttttaaaatctattctagctgggctagaatcttccaagtattaattcataatgaacttccctcttctggaattgtttagga

SEQ ID NO: 119164 - DNA, 120 bp, Artificial Sequence
  ENSG00000100784_200 (sequence is synthesized)
gggctaatgttccatgttcccttcgttgctatagatatgaagttatttcgatgttctttgagtgctttattatagcgataactggtactgcctttgattaaaggtgagctatatggagtt

SEQ ID NO: 119165 - DNA, 120 bp, Artificial Sequence
  ENSG00000100784_201 (sequence is synthesized)
aagcatttttatactagtaactatttattgagaattttcagaattctatagctacttgtctttaacagttataagaggcatgtatttttttttccttcatggtctggaagttagttttct

SEQ ID NO: 119166 - DNA, 120 bp, Artificial Sequence
  ENSG00000100784_202 (sequence is synthesized)
ctttgtttgggtagatcggaatgagttgttgagctgtgttgaaaacacacatgaatcaaaaaagcagatgtattgtagaaatgtgatgttttcatgtttcgggaatttgaccggaaagct

SEQ ID NO: 119167 - DNA, 120 bp, Artificial Sequence
  ENSG00000100784_203 (sequence is synthesized)
ttatgtatgggttttatttttaacaaagcagtaagggcttactttttaccaacttgtgtgtgtgtaaagatgtatttgttcaagctttaagaataaacctgtcaatgtacaaatgcctga

SEQ ID NO: 119168 - DNA, 120 bp, Artificial Sequence
  ENSG00000100784_204 (sequence is synthesized)
agttttccccagcccgggaatgagcggcgggcaccaggcatcggggccagcgcagccgccgaccgctgcccgtggcacgcacctccgaggatgtcgctgctcccccttcccgcacagcta

SEQ ID NO: 119169 - DNA, 120 bp, Artificial Sequence
  ENSG00000100784_205 (sequence is synthesized)
tgcatgatgttggagtggtgcacagggatctgaaacctgaggtataaaatcactggatctcttacgtaattcagtctagcaccattattaaagatctcccaaacatgggggaagtttctg

SEQ ID NO: 119170 - DNA, 120 bp, Artificial Sequence
  ENSG00000100784_206 (sequence is synthesized)
gggaggtttccttatttttttacttttcaaggctgttaaatagataattgaaaatacgtttctttgatgttttttcttttatatttcagtctaaaataaatttgtctttgtttatttttt

SEQ ID NO: 119171 - DNA, 120 bp, Artificial Sequence
  ENSG00000100784_207 (sequence is synthesized)
gccagctgatcatcttgaggttatatttgtaagtgtgagaaccttttatggaaaaaatactttatgcaacagttgtggactaaaaatagcaatggaaatttttatagcagaaaataatat

SEQ ID NO: 119172 - DNA, 120 bp, Artificial Sequence
  ENSG00000100784_208 (sequence is synthesized)
tagcagaaaataatatctcttacatataattttagagggttttttttccaaatgatgtattttgaaaacttattttttacatttgtaatcaaattggttagctcatgaataaaaatgtat

SEQ ID NO: 119173 - DNA, 120 bp, Artificial Sequence
  ENSG00000100784_209 (sequence is synthesized)
aagaacgttaagtcatgaaatggaaaagattgtgaacttttaaatggaggacaaatagaaataaataaacaacccatgagaatgcatgccatctgcagaaaagcaaaagagctattgcag

SEQ ID NO: 119174 - DNA, 120 bp, Artificial Sequence
  ENSG00000100784_210 (sequence is synthesized)
gggcaagatacagagaatattaaaaagtgagcctccatatccccaagaaatgagtgctttagcgaaagacctaattcagcgtcttttgatgaaagatcccaagaagagattgggatgtgg

SEQ ID NO: 119175 - DNA, 120 bp, Artificial Sequence
  ENSG00000100784_211 (sequence is synthesized)
ccacttccaaagaagatggaataaacagggaccagatttactttcctgcctgaaacaattttaacaatgggcaaaatatatgaaacaacagatttgaagacattggacatctggaagtga

SEQ ID NO: 119176 - DNA, 120 bp, Artificial Sequence
  ENSG00000100796_0 (sequence is synthesized)
cgcctgtcggcttctgacgtttaaaacagggggagcggaagggagccactggccgcggtggcagggccaggtataaggaaggaaaatatggcggcggcggcggcggcctgaggaggcggc

SEQ ID NO: 119177 - DNA, 120 bp, Artificial Sequence
  ENSG00000100796_1 (sequence is synthesized)
ggcggcgcgggaagctgcttcgcggagatcatggcggaggcgggagcagggcagtgacgggagccccgagttcctagcgctgcggggcgggaggctacgaagcgctgcgcggccccctcg

SEQ ID NO: 119178 - DNA, 80 bp, Artificial Sequence
  ENSG00000100796_2 (sequence is synthesized)
gggctgccgggcgccgggctcgccaggcctggacaatagcgccggggagccggaggcgaggaaaggcggcggcccagagc

SEQ ID NO: 119179 - DNA, 120 bp, Artificial Sequence
  ENSG00000100796_3 (sequence is synthesized)
ggggagccctccgctcgcgggcgccctcacgcctcgcccctcgcctctccagggcccctttcctgggcgtctactggcggggcccccgccccggttcccgggcggcacgatgaccgacac

SEQ ID NO: 119180 - DNA, 120 bp, Artificial Sequence
  ENSG00000100796_4 (sequence is synthesized)
ggttcccgggcggcacgatgaccgacacccggcggcgggtgaaggtgtacacgctcaacgaggaccggcagtgggacgaccggggcaccgggcatgtgtcgtctggctacgtggagcggc

SEQ ID NO: 119181 - DNA, 120 bp, Artificial Sequence
  ENSG00000100796_5 (sequence is synthesized)
tgaagggcatgtccctgcttgtcagggctgagagcgacggttctctacttttagagtcgaaaataaatcctaacactgcataccagaaacaacaggacactctgattgtgtggtctgaag

SEQ ID NO: 119182 - DNA, 120 bp, Artificial Sequence
  ENSG00000100796_6 (sequence is synthesized)
cagaaaattatgacttggcccttagctttcaagaaaaagctggatgtgatgaaatttgggagaaaatatgtcaggttcaaggaaaggacccttccgtggacatcactcaggaccttgtgg

SEQ ID NO: 119183 - DNA, 120 bp, Artificial Sequence
  ENSG00000100796_7 (sequence is synthesized)
atgaatctgaagaggagcgttttgatgatatgtcatcgccaggcttagaattgccatcttgtgaattaagtcgccttgaagaaattgcagaacttgtggcatcatctttaccttcacctc

SEQ ID NO: 119184 - DNA, 120 bp, Artificial Sequence
  ENSG00000100796_8 (sequence is synthesized)
ttcgtcgtgaaaaacttgcactggcactagaaaatgagggttatattaaaaagctcctggagctttttcatgtgtgtgaagatttggaaaatattgaaggactgcaccacttgtatgaaa

SEQ ID NO: 119185 - DNA, 120 bp, Artificial Sequence
  ENSG00000100796_9 (sequence is synthesized)
ttatcaaaggcatctttctcttgaatcgaactgctctttttgaagttatgttctctgaagaatgtataatggacgtcattggatgtttagaatatgatcctgctttatcacaaccacgaa

SEQ ID NO: 119186 - DNA, 120 bp, Artificial Sequence
  ENSG00000100796_10 (sequence is synthesized)
aacacagggaatttctaacaaaaacagccaagtttaaagaagtgattcccatatcagatcctgagctgaaacaaaaaattcatcagacatacagagttcagtatatacaagatatggttc

SEQ ID NO: 119187 - DNA, 120 bp, Artificial Sequence
  ENSG00000100796_11 (sequence is synthesized)
taccaactccttcggtctttgaagaaaacatgttatcaacacttcactcttttatctttttcaataaggtagagattgttggcatgttgcaggaagatgaaaaatttctgacagatttgt

SEQ ID NO: 119188 - DNA, 120 bp, Artificial Sequence
  ENSG00000100796_12 (sequence is synthesized)
ttgcacaactaacagatgaagcaacagatgaggaaaaaagacaggaattggttaactttttaaaagaattttgtgcgttttcccaaacgctacagcctcaaaacagagatgcttttttca

SEQ ID NO: 119189 - DNA, 120 bp, Artificial Sequence
  ENSG00000100796_13 (sequence is synthesized)
agactttgtcaaacatgggcatattaccagctttagaagtcatccttggcatggatgatacacaggtgcgaagtgctgctactgatatattctcatacttggttgaatataatccatcca

SEQ ID NO: 119190 - DNA, 120 bp, Artificial Sequence
  ENSG00000100796_14 (sequence is synthesized)
tggtacgagagtttgtcatgcaggaggcacaacagaatgatgatgatattttgctcatcaacctcattatagaacatatgatttgtgatacagatcctgaacttggaggagcagtccagc

SEQ ID NO: 119191 - DNA, 120 bp, Artificial Sequence
  ENSG00000100796_15 (sequence is synthesized)
ttatgggcctgcttcgaactttagttgacccagagaacatgctagccactgccaataaaacagaaaagactgaatttctgggtttcttctacaagcactgtatgcatgttctcactgctc

SEQ ID NO: 119192 - DNA, 120 bp, Artificial Sequence
  ENSG00000100796_16 (sequence is synthesized)
ctttactagcaaatacaacagaagacaaacctagtaaagatgattttcagactgcccaactattggcacttgtattggaattgttaacattttgtgtggagcaccatacctaccacataa

SEQ ID NO: 119193 - DNA, 120 bp, Artificial Sequence
  ENSG00000100796_17 (sequence is synthesized)
ccggagagtgctagttcttatggcctcgaagcatgctttcttggcattatgtgcccttcgttttaaaagaaagattattggattaaaagatgagttttacaaccgctacataatgaaaag

SEQ ID NO: 119194 - DNA, 120 bp, Artificial Sequence
  ENSG00000100796_18 (sequence is synthesized)
ttttttgtttgaaccagtagtgaaagcatttctcaacaatggatcccgctacaatctgatgaactctgccataatagagatgtttgaatttattagagtggaagatataaaatcattaac

SEQ ID NO: 119195 - DNA, 120 bp, Artificial Sequence
  ENSG00000100796_19 (sequence is synthesized)
tgctcatgtaattgaaaattactggaaagcactggaagatgtagattatgtacagacatttaaaggattaaaactgagatttgaacaacaaagagaaaggcaagataatcccaaacttga

SEQ ID NO: 119196 - DNA, 120 bp, Artificial Sequence
  ENSG00000100796_20 (sequence is synthesized)
cagtatgcgttccattttgaggaatcacagatatcgaagagatgccagaacactagaagatgaagaagagatgtggtttaacacagatgaagatgacatggaagatggagaagctgtagt

SEQ ID NO: 119197 - DNA, 120 bp, Artificial Sequence
  ENSG00000100796_21 (sequence is synthesized)
gtctccatctgacaaaactaaaaatgatgatgatattatggatccaataagtaaattcatggaaaggaagaaattaaaagaaagtgaggaaaaggaagtgcttctgaaaacaaacctttc

SEQ ID NO: 119198 - DNA, 120 bp, Artificial Sequence
  ENSG00000100796_22 (sequence is synthesized)
tggacggcagagcccaagtttcaagctttccctgtccagtggaacgaagactaacctcaccagccagtcatctacaacaaatctgcctggttctccgggatcacctggatccccaggatc

SEQ ID NO: 119199 - DNA, 120 bp, Artificial Sequence
  ENSG00000100796_23 (sequence is synthesized)
tccaggctctcctggatccgtacctaaaaatacatctcagacggcagctattactacaaagggaggcctcgtgggtctggtagattatcctgatgatgatgaagatgatgatgaggatga

SEQ ID NO: 119200 - DNA, 120 bp, Artificial Sequence
  ENSG00000100796_24 (sequence is synthesized)
agataaggaagatacgttaccattgtcaaagaaagcaaaatttgattcataataatggcaacggcctaggatcagtacctgttgaaaaaaactggttctccacccctcccccatacaaaa

SEQ ID NO: 119201 - DNA, 120 bp, Artificial Sequence
  ENSG00000100796_25 (sequence is synthesized)
tccacaacaaagcgcagtggtctcttgtgaatgactgacacagatcagcctcttacacttgacttctgctcatcaagtgccaattcaatggagcaggaggaggggatatcatatatttag

SEQ ID NO: 119202 - DNA, 120 bp, Artificial Sequence
  ENSG00000100796_26 (sequence is synthesized)
gggaaagacttaagcctttgagctctccagcttggaccacacattgcccttttctcagggaaggaaatggaaacaaaaagccaacagggcaggggttttgtaagtggaactctggattga

SEQ ID NO: 119203 - DNA, 120 bp, Artificial Sequence
  ENSG00000100796_27 (sequence is synthesized)
ctggtcagttgctacaatcagaatatgctttcttggaccatgtttgagactcagaagaatgggcctttctgccataattcttcactagtcaagaatgccagcagtttctttgtataaaga

SEQ ID NO: 119204 - DNA, 120 bp, Artificial Sequence
  ENSG00000100796_28 (sequence is synthesized)
gacctgcctttaaaatcatacattctgaacattttagtcaagctacaacaggtttggaaaacctctgtgggggaggggcgagtataaagttttcctcttttttaactgttccctttgccc

SEQ ID NO: 119205 - DNA, 120 bp, Artificial Sequence
  ENSG00000100796_29 (sequence is synthesized)
ttcaaactgcagatatttttttttttaagtggggacttctccctacttgattaaagattgagtggaattctagatgtggtcatttgtgtcataatttttttgttttattttgtttttgat

SEQ ID NO: 119206 - DNA, 120 bp, Artificial Sequence
  ENSG00000100796_30 (sequence is synthesized)
tttttttttcctcccctgagtgtatgcttagttgttgagtatatatatttgggaccattaaaactttttttgatgtaatataacctaacgttgtgctggtacctgttttaccatgtgtaa

SEQ ID NO: 119207 - DNA, 120 bp, Artificial Sequence
  ENSG00000100796_31 (sequence is synthesized)
tttttgttctacatcacagttcttaatttgtttagagttttatgaaagatggtatagtttttattgacaaaagcaaagtaatcttacaactatgtgcatacaaaagcaatactattttgt

SEQ ID NO: 119208 - DNA, 120 bp, Artificial Sequence
  ENSG00000100796_32 (sequence is synthesized)
gactaaatattttatattaaaatttacatcagcaactgtcttgagaattcagggaaatagaatggaatttaaaacttcaacagttttgttaaatctagaaacatgaaattagtattccaa

SEQ ID NO: 119209 - DNA, 120 bp, Artificial Sequence
  ENSG00000100796_33 (sequence is synthesized)
agagattctgaaatttcttttcttggggaaatgacggtacattaaatcaaaattgaggatggatgatttaaaaacatttgacttttgaataataaaaagaaaagtgaagagtaagagaaa

SEQ ID NO: 119210 - DNA, 120 bp, Artificial Sequence
  ENSG00000100796_34 (sequence is synthesized)
ctgcgtcccgcctcctccgctccctgcgctcccgccacctcggcaactccgcgcccgcctcccgcctccgtcggaagcctccgccgcagtaaggctcccggtctcgctgctgtctcttta

SEQ ID NO: 119211 - DNA, 120 bp, Artificial Sequence
  ENSG00000100796_35 (sequence is synthesized)
aatggtggggctacgagccgcccctgcagctgctccctgggtggccccgcgcgccgcttttgaggggcgaaccaagatggcggcggttttggctgtgtgaggaagacggaagagacggcg

SEQ ID NO: 119212 - DNA, 120 bp, Artificial Sequence
  ENSG00000100796_36 (sequence is synthesized)
ggcaatttaacgagccacttccatgatctccaaagaaaccaaaatacaaacacaatatttaatcttgccaaccgaagacgatgtgactgcatgaagtgcccttcgttttaaaagaaagat

SEQ ID NO: 119213 - DNA, 120 bp, Artificial Sequence
  ENSG00000100796_37 (sequence is synthesized)
gttttagtgttacctcatttggggaaatttaaaaaagaagtatgggggacgactattgacagtattctcatttttagtaaaagaaagtgaggaaaaggaagtgcttctgaaaacaaacct

SEQ ID NO: 119214 - DNA, 120 bp, Artificial Sequence
  ENSG00000100796_38 (sequence is synthesized)
caacagaatgatgatgtaagtaagaagttaacagagcaaaaaataaccagcaaggtaaatattatttgtactaatagtaagtatttatacataggaagctataactgtttttattattca

SEQ ID NO: 119215 - DNA, 120 bp, Artificial Sequence
  ENSG00000100796_39 (sequence is synthesized)
cttttaagatttaattgttgctgtttgggaaaagtgtagccataatatcagacagcttattgttcccctaaattggttcctgtctcagtttatcaatttgtcctacagcaactatttatg

SEQ ID NO: 119216 - DNA, 120 bp, Artificial Sequence
  ENSG00000100796_40 (sequence is synthesized)
attcatgtcagtttttttttgttttgttttgttttaattctgaagtcaacttgctatattgtgttttttaaatcatttagtcaatcaattcttgtatctggggaattaagagtaagttac

SEQ ID NO: 119217 - DNA, 120 bp, Artificial Sequence
  ENSG00000100796_41 (sequence is synthesized)
ctaggaaaacattgactttagggtagattctcaaaatcgccaagaatgaagaaatgtagcacagtcccttaaaatatgaagggtgctgtttctttactgcctagccatagagaacaagct

SEQ ID NO: 119218 - DNA, 120 bp, Artificial Sequence
  ENSG00000100796_42 (sequence is synthesized)
gttacgttgttcacaaacactcacgttagcatctgagatataccagattttaaagtagtagagaatatatcctggtaatgtgaagggtgcgcctggatcacatagtgcgtgacatgtgag

SEQ ID NO: 119219 - DNA, 120 bp, Artificial Sequence
  ENSG00000100796_43 (sequence is synthesized)
agcactaaatgtgtgtgctctcctttattttaaaataattgaaccaatgattctgattttttcctgcttcccccataacaatttggaagcaactttttacgtaagaatgagtaagaagga

SEQ ID NO: 119220 - DNA, 120 bp, Artificial Sequence
  ENSG00000100796_44 (sequence is synthesized)
cctgctctcaggtccttcttaagggaggaggggaataaagatcccctaaggaaaaaaaaaaaatctgtttagaattccagcctgtggtatttttacgaaataggaaaatagactgtctta

SEQ ID NO: 119221 - DNA, 120 bp, Artificial Sequence
  ENSG00000100796_45 (sequence is synthesized)
ctttttgaaaagatcctatttaatgtattgtgatgtcaaaaggaaatggaatgccatgtaactgctatgtttaagtttttatttttatagtgcaggataggtgcaaaaaagcaccagttt

SEQ ID NO: 119222 - DNA, 120 bp, Artificial Sequence
  ENSG00000100796_46 (sequence is synthesized)
gaactgttgtgtcatgtttttcttttataaaatattaacatcggcctcagcaacatagcaagaccctcctttagtacaaaattaatttttaaaacttagatatggtggcatgcacccata

SEQ ID NO: 119223 - DNA, 120 bp, Artificial Sequence
  ENSG00000100796_47 (sequence is synthesized)
gtcccagatactcaggaggatgagaaggaagagtctcttaagaccaggagtttgactctgcagtgagctatgattgctccactgcactccagtctgggtgacgaagccagaccccatctc

SEQ ID NO: 119224 - DNA, 120 bp, Artificial Sequence
  ENSG00000100802_0 (sequence is synthesized)
ctttttgcacacacacgaatacaaagagccatacgaccttcggatgccggaaggtccttctgaatcccttccctgttccttaggttgcactagtcgggggttccatgctggggggcagaa

SEQ ID NO: 119225 - DNA, 120 bp, Artificial Sequence
  ENSG00000100802_1 (sequence is synthesized)
ggaatgctctctaccgtctgaaaccgttcatcaggaaggccttgatttgtgatgtgctaggagagcacaggatctgcaaatagaaggcacctgtctcccttctgcaggccgaggagaggc

SEQ ID NO: 119226 - DNA, 120 bp, Artificial Sequence
  ENSG00000100802_2 (sequence is synthesized)
cgccatggactgtgtgcttcttcatggcttgtttactcttctttcacagaccctacagcttggggcctgggctcctctgaccatcctcattgagaaaggaaagtgagtccagagaagttg

SEQ ID NO: 119227 - DNA, 120 bp, Artificial Sequence
  ENSG00000100802_3 (sequence is synthesized)
atgcttcctacctgttggagcggcccagcagtgtaagcgtggttgttactgccccatccgccatgtccttcagtgccaccattctcttctcccctcccagtggcagcgaggccagatgct

SEQ ID NO: 119228 - DNA, 120 bp, Artificial Sequence
  ENSG00000100802_4 (sequence is synthesized)
gctgctgcgcctgtaagagtgagactaatggaggcaacacaggctcccagggtgggaatcctcctcccagcacccccatcacagtgactggacatggcttggctgttcagagctcagagc

SEQ ID NO: 119229 - DNA, 120 bp, Artificial Sequence
  ENSG00000100802_5 (sequence is synthesized)
agctcctgcatgttatctaccagcgggtcgataaggcagtgggtttggctgaagctgctctgggtcttgccagggccaacaatgagttgttaaaacgtctccaggaggaagtgggtgacc

SEQ ID NO: 119230 - DNA, 120 bp, Artificial Sequence
  ENSG00000100802_6 (sequence is synthesized)
tgaggcaagggaaagtgtccatccctgatgaagatggggaaagccgggcacatagttccccacctgaggagcctgggcctctcaaggaaagtcccggggaagcctttaaggctctgtctg

SEQ ID NO: 119231 - DNA, 120 bp, Artificial Sequence
  ENSG00000100802_7 (sequence is synthesized)
ccgtggaagaggagtgtgacagcgtgggcagcggcgtgcaggtggtgattgaggagctgcggcagctgggagcagcctcagtggggcctgggcctttgggcttcccagcaactcagaggg

SEQ ID NO: 119232 - DNA, 120 bp, Artificial Sequence
  ENSG00000100802_8 (sequence is synthesized)
acatgcggctcccagggtgcacgctggctgccagcgaggcggcccccctgctcaatcctctggtggatgattacgtggcctctgagggtgcagtacagcgagttctggtccctgcttatg

SEQ ID NO: 119233 - DNA, 120 bp, Artificial Sequence
  ENSG00000100802_9 (sequence is synthesized)
ccaagcaactctcaccagccacacaactggcaatccagcgggcaaccccagagacaggaccagaaaatggaaccaagctgccaccaccccgccctgaggacatgctcaatgccgctgctg

SEQ ID NO: 119234 - DNA, 120 bp, Artificial Sequence
  ENSG00000100802_10 (sequence is synthesized)
cgctggacagtgccttggaagagtcaggccctgggagcactggggagctgagacactctctagggctgaccgtttccccatgcaggaccagaggaagtgggcagaagaactccaggcgca

SEQ ID NO: 119235 - DNA, 120 bp, Artificial Sequence
  ENSG00000100802_11 (sequence is synthesized)
agcgggatcttgtactctctaaactggtccacaatgtgcataaccacatcaccaatgacaagagattcaatgggtctgaaagcatcaagtcctcttggaatatttcagtagtgaagtttc

SEQ ID NO: 119236 - DNA, 120 bp, Artificial Sequence
  ENSG00000100802_12 (sequence is synthesized)
ttctggaaaagctcaagcaagagctggtgaccagtccccacaattacactgataaggagctaaaaggagcctgtgtggcctacttccttactaagaggcgtgagtaccgcaactccctga

SEQ ID NO: 119237 - DNA, 120 bp, Artificial Sequence
  ENSG00000100802_13 (sequence is synthesized)
acccctttaaaggcctgaaggaaaaagaggagaagaaacttcgaagtcgccgatatcggctttttgccaaccgatccagtatcatgaggcattttggacctgaggaccaacgtctgtgga

SEQ ID NO: 119238 - DNA, 120 bp, Artificial Sequence
  ENSG00000100802_14 (sequence is synthesized)
atgatgtgacagaggaactgatgtcagatgaagaggacagtcttaacgagccaggtgtgtgggtggcccgccctccccgtttccgggcccagcgcctcacagagctctgctaccacctgg

SEQ ID NO: 119239 - DNA, 120 bp, Artificial Sequence
  ENSG00000100802_15 (sequence is synthesized)
atgctaactctaagcatggcaccaaagccaaccgtgtgtatgggcctccctcagacagactgccttctgctgaagcccagctccttccaccagaactttacaatcctaatttccaagaag

SEQ ID NO: 119240 - DNA, 120 bp, Artificial Sequence
  ENSG00000100802_16 (sequence is synthesized)
aggaagatgagggaggggatgagaatgcacctggctccccatcttttgaccaaccccacaaaacctgctgtcctgacttgaactcattcattgaaatcaaggtggaaaaggatgaataaa

SEQ ID NO: 119241 - DNA, 120 bp, Artificial Sequence
  ENSG00000100802_17 (sequence is synthesized)
atctacagccaagaataactctggcttccgccatgccccatgtctcagaaataggtggccatggggcttcacaaaataatgagatgctctgtgcagtctgagaaagcaaatttgcctctt

SEQ ID NO: 119242 - DNA, 120 bp, Artificial Sequence
  ENSG00000100802_18 (sequence is synthesized)
ttcttaacacagtctctactggggaagcagaacactggtgggataaaaacttatctagaaggggagaaactccctccactgtgaacagtaagccagaatatgcttattcctcagcataaa

SEQ ID NO: 119243 - DNA, 120 bp, Artificial Sequence
  ENSG00000100802_19 (sequence is synthesized)
cagtatctcggagaagcctgggatgagaaaatgaggaggatgggtccaagaaacatgaggccttcttgacatatgccctgtctctgagttgtttctgcccctgcccagttccacccaaag

SEQ ID NO: 119244 - DNA, 120 bp, Artificial Sequence
  ENSG00000100802_20 (sequence is synthesized)
ctctgaggaagcagcccaggttgtaccttttgcttccctgtgactacttgtcttgctctgcagtggaaaccgaacatgaccagtgcaggttaataccgccacctggtgggcagtttcagt

SEQ ID NO: 119245 - DNA, 120 bp, Artificial Sequence
  ENSG00000100802_21 (sequence is synthesized)
catgagcttgagtcttctgaccaagggaacacaagttctatcactattggggaattgggttcctgatataatagctattgtttattgaattacatgaggaaaattttactattcctatct

SEQ ID NO: 119246 - DNA, 120 bp, Artificial Sequence
  ENSG00000100802_22 (sequence is synthesized)
tacagatgaggaaattaaggcttaaagagttcccgtgtctcaccggcagcctctctctcactatgtgaccaagcaaaatacacagctttgtagctgtttcttggtcctgtcagccaagct

SEQ ID NO: 119247 - DNA, 120 bp, Artificial Sequence
  ENSG00000100802_23 (sequence is synthesized)
gtattttgaggaaggggtgtgcattttggatggattgaaaagcaaaaatggctttacatttattcagtcttataacaaacattgatcgctttactaggtgtcaggtactgtgctatggat

SEQ ID NO: 119248 - DNA, 120 bp, Artificial Sequence
  ENSG00000100802_24 (sequence is synthesized)
acattgttgataaggttggatgctgttcagagatttttttagtttagtcaggaagccaggcagtggagtaggcaatgaaatgaactgtgataagggtgaccatggtggagtgtagtgcac

SEQ ID NO: 119249 - DNA, 120 bp, Artificial Sequence
  ENSG00000100802_25 (sequence is synthesized)
tatggcaatatacagcaggggtagctaacctactcttgcagtctggaaaggcttcttctgagagggtgtaatgtctaaactggggaagagttaaccagaaggaaaggggaggctaagaga

SEQ ID NO: 119250 - DNA, 120 bp, Artificial Sequence
  ENSG00000100802_26 (sequence is synthesized)
gtgttccaaacagggaactgcaggtacaaaagtccaggggcaagagagagtacagacaaggtccagttctactgcagacttttggggaagggataatgctagaggagaggctggagagtg

SEQ ID NO: 119251 - DNA, 120 bp, Artificial Sequence
  ENSG00000100802_27 (sequence is synthesized)
agacagacctcataatacagagtacagacttcaacccaagggcagtgagaaatcattgaaagtttgttttagcagggaaataaaacgacaggttttgcctacaggcagtccccaactcaa

SEQ ID NO: 119252 - DNA, 120 bp, Artificial Sequence
  ENSG00000100802_28 (sequence is synthesized)
cgaatacaaagagccatacgaccttcggtttcaggtttagctgtgcctcccagtgactataatgacaaggaagctgtaaatgtatttgagttaagcttttgcgagaaaccctacagcttg

SEQ ID NO: 119253 - DNA, 120 bp, Artificial Sequence
  ENSG00000100802_29 (sequence is synthesized)
cggctcgggctccgcgagtcctcctttttgcacacacacgaatacaaagagccatacgaccttcgggtatcctttttccattttttttcctccttaatcttgtgtgtgttttcaaatttt

SEQ ID NO: 119254 - DNA, 120 bp, Artificial Sequence
  ENSG00000100802_30 (sequence is synthesized)
ctttttgcacacacacgaatacaaagagccatacgaccttcggttttaatttggtttaacctttagtttcaggtttagctgtgcctcccagtgactataatgacaaggaagctgtaaatg

SEQ ID NO: 119255 - DNA, 120 bp, Artificial Sequence
  ENSG00000100802_31 (sequence is synthesized)
gccccacgggtgatttctctgggctcctggctggaagattcaggacagctagtttccattacagaggctcatggcccagaccctacagcttggggcctgggctcctctgaccatcctcat

SEQ ID NO: 119256 - DNA, 120 bp, Artificial Sequence
  ENSG00000100802_32 (sequence is synthesized)
agttctgtctcccgcgcgcccgcctccgcctctgcctagctgagtcagcccgtgcggtagcgccaggcacacgcggtagaacatctgtagggctgcaaagctgcacctccgcgtcagttc

SEQ ID NO: 119257 - DNA, 120 bp, Artificial Sequence
  ENSG00000100802_33 (sequence is synthesized)
tcacggcgagcgccgccttcagcccaagttctcaaagctctcggggctacgtagtctaccctccccggtgacccggcgagatccctagccgctcctccggccgctctgctctccgcatcc

SEQ ID NO: 119258 - DNA, 120 bp, Artificial Sequence
  ENSG00000100802_34 (sequence is synthesized)
cctttttccattttttttcctccttaatcttaatgtcttactaccctatcagttaatcctatacattgctcaaggctcaactggaagcttttcttcttttcaggtttagctgtgcctccc

SEQ ID NO: 119259 - DNA, 120 bp, Artificial Sequence
  ENSG00000100802_35 (sequence is synthesized)
ctttttgcacacacacgaatacaaagagccatacgaccttcgggcaaagtgacagcatagctgttcaaacattcctgttgaattttggatccacccttaaggagcttgagaaatgaagat

SEQ ID NO: 119260 - DNA, 120 bp, Artificial Sequence
  ENSG00000100802_36 (sequence is synthesized)
acacacgaatacaaagagccatacgaccttcggtttcaggtttagctgtgcctcccagtgactataatgacaaggaagctgtaaatgtatttgagttaagcttttgcgagaaatgccgga

SEQ ID NO: 119261 - DNA, 120 bp, Artificial Sequence
  ENSG00000100804_0 (sequence is synthesized)
ctttctgcccacactagacatggcgcttgccagcgtgttggagagaccgctaccggtgaaccagcgcgggtttttcggacttgggggtcgtgcagatctgctggatctaggtccagggag

SEQ ID NO: 119262 - DNA, 120 bp, Artificial Sequence
  ENSG00000100804_1 (sequence is synthesized)
tctcagtgatggtctgagcctggccgcgccaggctggggtgtcccagaagagccaggaatcgaaatgcttcatggaacaaccaccctggccttcaagttccgccatggagtcatagttgc

SEQ ID NO: 119263 - DNA, 120 bp, Artificial Sequence
  ENSG00000100804_2 (sequence is synthesized)
agctgactccagggctacagcgggtgcttacattgcctcccagacggtgaagaaggtgatagagatcaacccatacctgctaggcaccatggctgggggcgcagcggattgcagcttctg

SEQ ID NO: 119264 - DNA, 120 bp, Artificial Sequence
  ENSG00000100804_3 (sequence is synthesized)
ggaacggctgttggctcggcaatgtcgaatctatgagcttcgaaataaggaacgcatctctgtagcagctgcctccaaactgcttgccaacatggtgtatcagtacaaaggcatggggct

SEQ ID NO: 119265 - DNA, 120 bp, Artificial Sequence
  ENSG00000100804_4 (sequence is synthesized)
ggccaccttctctgtaggttctggctctgtgtatgcatatggggtcatggatcggggctattcctatgacctggaagtggagcaggcctatgatctggcccgtcgagccatctaccaagc

SEQ ID NO: 119266 - DNA, 120 bp, Artificial Sequence
  ENSG00000100804_5 (sequence is synthesized)
cacctacagagatgcctactcaggaggtgcagtcaacctctaccacgtgcgggaggatggctggatccgagtctccagtgacaatgtggctgatctacatgagaagtatagtggctctac

SEQ ID NO: 119267 - DNA, 120 bp, Artificial Sequence
  ENSG00000100804_6 (sequence is synthesized)
cccctgaaagagggtggatgcagctgcttgtgtttcttggggtgactgtcattggtaatacggacacagtgacccatcctccatcctatttatagtggaagggccttcaattgtatcagt

SEQ ID NO: 119268 - DNA, 120 bp, Artificial Sequence
  ENSG00000100804_7 (sequence is synthesized)
acttttttttaagctctggcacattgacctctatgtgttaccagtcattaatgagctgctgcagaggtgactatttgttttactttcttggatgttaacattacactactcactactcaa

SEQ ID NO: 119269 - DNA, 120 bp, Artificial Sequence
  ENSG00000100804_8 (sequence is synthesized)
gcccgcgacttgcctggcctcccagcctgaccggagtttgcggtggccttggccaccaacccaggcggaggctgggtcctctcgttcggaccgcagcagttttgctgtctcattggccca

SEQ ID NO: 119270 - DNA, 120 bp, Artificial Sequence
  ENSG00000100804_9 (sequence is synthesized)
tctgtggctgggataagagaggccctggttgaaagaagctcaaaggcaagaatgttacttttgaattcccaaagtttcaattgtaaacaaaaatgactaaataaaatatcattcacagtt

SEQ ID NO: 119271 - DNA, 120 bp, Artificial Sequence
  ENSG00000100804_10 (sequence is synthesized)
ctgaagttctgtgcttgaaacctaagtcatttggaatgtacttgttttgtgggtgtgctgagaggatcggcaacatggcaaggcctctactacgtggacagtgaagggaaccggatttca

SEQ ID NO: 119272 - DNA, 120 bp, Artificial Sequence
  ENSG00000100804_11 (sequence is synthesized)
cttctcaaagatggccgacctcacttcccttacgcaacatggacgttttcagtcacttcctgtgattttgaggttattctgatccaggactacttgcatgaccaaagccaagatggcagt

SEQ ID NO: 119273 - DNA, 120 bp, Artificial Sequence
  ENSG00000100811_0 (sequence is synthesized)
cctcctcgcccgcccgcccgcagccgaggagccgaggccgccgcggccgtggcggcggagccctcagccatggcctcgggcgacaccctctacatcgccacggacggctcggagatgccg

SEQ ID NO: 119274 - DNA, 120 bp, Artificial Sequence
  ENSG00000100811_1 (sequence is synthesized)
tctacatcgccacggacggctcggagatgccggccgagatcgtggagctgcacgagatcgaggtggagaccatcccggtggagaccatcgagaccacagtggtgggcgaggaggaggagg

SEQ ID NO: 119275 - DNA, 120 bp, Artificial Sequence
  ENSG00000100811_2 (sequence is synthesized)
cagtggtgggcgaggaggaggaggaggacgacgacgacgaggacggcggcggtggcgaccacggcggcgggggcggccacgggcacgccggccaccaccaccaccaccatcaccaccacc

SEQ ID NO: 119276 - DNA, 120 bp, Artificial Sequence
  ENSG00000100811_3 (sequence is synthesized)
agccgctggtcaccgacgacccgacccaggtgcaccaccaccaggaggtgatcctggtgcagacgcgcgaggaggtggtgggcggcgacgactcggacgggctgcgcgccgaggacggct

SEQ ID NO: 119277 - DNA, 120 bp, Artificial Sequence
  ENSG00000100811_4 (sequence is synthesized)
tcgaggatcagattctcatcccggtgcccgcgccggccggcggcgacgacgactacattgaacaaacgctggtcaccgtggcggcggccggcaagagcggcggcggcggctcgtcgtcgt

SEQ ID NO: 119278 - DNA, 120 bp, Artificial Sequence
  ENSG00000100811_5 (sequence is synthesized)
cgggaggcggccgcgtcaagaagggcggcggcaagaagagcggcaagaagagttacctcagcggcggggccggcgcggcgggcggcggcggcgccgacccgggcaacaagaagtgggagc

SEQ ID NO: 119279 - DNA, 120 bp, Artificial Sequence
  ENSG00000100811_6 (sequence is synthesized)
agaagcaggtgcagatcaagaccctggagggcgagttctcggtcaccatgtggtcctcagatgaaaaaaaagatattgaccatgagacagtggttgaagaacagatcattggagagaact

SEQ ID NO: 119280 - DNA, 120 bp, Artificial Sequence
  ENSG00000100811_7 (sequence is synthesized)
cacctcctgattattcagaatatatgacaggaaagaaacttcctcctggaggaatacctggcattgacctctcagatcccaaacaactggcagaatttgctagaatgaagccaagaaaaa

SEQ ID NO: 119281 - DNA, 120 bp, Artificial Sequence
  ENSG00000100811_8 (sequence is synthesized)
ttaaagaagatgatgctccaagaacaatagcttgccctcataaaggctgcacaaagatgttcagggataactcggccatgagaaaacatctgcacacccacggtcccagagtccacgtct

SEQ ID NO: 119282 - DNA, 120 bp, Artificial Sequence
  ENSG00000100811_9 (sequence is synthesized)
gtgcagaatgtggcaaagcttttgttgagagttcaaaactaaaacgacaccaactggttcatactggagagaagccctttcagtgcacgttcgaaggctgtgggaaacgcttttcactgg

SEQ ID NO: 119283 - DNA, 120 bp, Artificial Sequence
  ENSG00000100811_10 (sequence is synthesized)
acttcaatttgcgcacacatgtgcgaatccataccggagacaggccctatgtgtgccccttcgatggttgtaataagaagtttgctcagtcaactaacctgaaatctcacatcttaacac

SEQ ID NO: 119284 - DNA, 120 bp, Artificial Sequence
  ENSG00000100811_11 (sequence is synthesized)
atgctaaggccaaaaacaaccagtgaaaagaagagagaagacccttctcgaccacgggaagcatcttccagaagtgtgattgggaataaatatgcctctcctttgtatattatttctagg

SEQ ID NO: 119285 - DNA, 120 bp, Artificial Sequence
  ENSG00000100811_12 (sequence is synthesized)
aagaattttaaaaatgaatcctacacacctaagggacatgttttgataaagtagtaaaaattaaaaaaaaaaaactttactaagatgacattgctaagatgctctatcttgctctgtaat

SEQ ID NO: 119286 - DNA, 120 bp, Artificial Sequence
  ENSG00000100811_13 (sequence is synthesized)
ctcgtttcaaaaacacagtgtttttgtaaagtgtggtcccaacaggaggacaattcatgaacttcgcatcaaaagacaattctttatacaacagtgctaaaaatgggacttcttttcaca

SEQ ID NO: 119287 - DNA, 120 bp, Artificial Sequence
  ENSG00000100811_14 (sequence is synthesized)
ttcttataaatatgaagctcacctgttgcttacaatttttttaattttgtattttccaagtgtgcatattgtacacttttttggggatatgcttagtaatgctacgtgtgatttttctgg

SEQ ID NO: 119288 - DNA, 120 bp, Artificial Sequence
  ENSG00000100811_15 (sequence is synthesized)
aggttgataactttgcttgcagtagattttctttaaaagaatgggcagttacatgcatacttcaaaagtattttcctgtaaaaaaaaaaaagttatataggttttgtttgctatcttaat

SEQ ID NO: 119289 - DNA, 120 bp, Artificial Sequence
  ENSG00000100811_16 (sequence is synthesized)
tttggttgtattctttgatgttaacacattttgtataattgtatcgtatagctgtattgaatcatgtagtatcaaatattagatgtgatttaatagtgttaatcaatttaaacccatttt

SEQ ID NO: 119290 - DNA, 120 bp, Artificial Sequence
  ENSG00000100811_17 (sequence is synthesized)
agtcactttttttttccaaaaaaatactgccagatgctgatgttcagtgtaatttctttgcctgttcagttacagaaagtggtgctcagttgtagaatgtattgtaccttttaacacctg

SEQ ID NO: 119291 - DNA, 120 bp, Artificial Sequence
  ENSG00000100811_18 (sequence is synthesized)
atgtgtacatcccatgtaacagaaagggcaacaataaaatagcaatcctaaagcaagaatatggcagaacaagatctgtaagcacagtcttattttcttttgttgtccagaatacttata

SEQ ID NO: 119292 - DNA, 120 bp, Artificial Sequence
  ENSG00000100811_19 (sequence is synthesized)
attcttgagcctcccagaaattggaagctaaataaagcaactcaagtttcctttattttgcactcaattacagtgattattgatgaaagcgatgcatggatattttaatacttcctacat

SEQ ID NO: 119293 - DNA, 120 bp, Artificial Sequence
  ENSG00000100811_20 (sequence is synthesized)
gtcctgacttctgaaagagagtaggtaacaggcatcccgagttcaggaactacctcagaacaccccaggccaggttggtcataggctgtgattttagcccccggcaagtgtgagtgaagc

SEQ ID NO: 119294 - DNA, 120 bp, Artificial Sequence
  ENSG00000100811_21 (sequence is synthesized)
atctgtaccaccgcgcaggctgagcgcctgcgcagggtaaggtgccacctggcagtggggcacacagagggaagaccaggcctgtccatcagccggctgccttcagaggcagctccagca

SEQ ID NO: 119295 - DNA, 120 bp, Artificial Sequence
  ENSG00000100811_22 (sequence is synthesized)
ggaccttggcttgtctgacaggaaatgcttgtggtcgttggttatttggtttgagagcccttgttcctccatctagtggagtccttattaaatgctagcaatgtggcaattgagtgccag

SEQ ID NO: 119296 - DNA, 120 bp, Artificial Sequence
  ENSG00000100811_23 (sequence is synthesized)
tagcttaatttcatgtttctaaatggacactgggtgcaaatcggcaaggtgattagattattagaaaattctgctcaatgagtacctctcacattgtaacctcttaaatgtacgattata

SEQ ID NO: 119297 - DNA, 120 bp, Artificial Sequence
  ENSG00000100811_24 (sequence is synthesized)
atgttggatcttaggtcaaataacagacttgagaatactttataaactgccatgatacagcaaaatctcatttattcaaagtgcaaacatactgtgtgtctttctgttttgtgtatgctt

SEQ ID NO: 119298 - DNA, 120 bp, Artificial Sequence
  ENSG00000100811_25 (sequence is synthesized)
gactgcaagataaatgacaaactagctaatatccgagatttatttacaaatggccagggaccccatcaggtgaaacacatagcccattgtcttagagcttctccatcggtcctgtacagg

SEQ ID NO: 119299 - DNA, 120 bp, Artificial Sequence
  ENSG00000100811_26 (sequence is synthesized)
aggattggtgacctactaacagtgaccctgtggctctgtggaattttgaagtgccttttgtgaatcatgaatgaaacatttaacttgagaccctttaaaaaattcatccagaatctgtta

SEQ ID NO: 119300 - DNA, 120 bp, Artificial Sequence
  ENSG00000100811_27 (sequence is synthesized)
gggtaagccaggctttgctgtatctggcagtcaggagagaggtcagcccatggtggaggtcttcagtgccgagggctcggatgagaacgtgtagttctttgacttggacctgggcagcgt

SEQ ID NO: 119301 - DNA, 120 bp, Artificial Sequence
  ENSG00000100811_28 (sequence is synthesized)
cttctatggatgcctgccttgtgagcacccacaccttccctccccactgtcgggttgagtagccccagcgtggctgtgttaggagtcctttgcccaacattgtgctgcactggagcctgg

SEQ ID NO: 119302 - DNA, 120 bp, Artificial Sequence
  ENSG00000100811_29 (sequence is synthesized)
ccctggcactgtcctcaggaccctgcccaagggcccaccgcagagcacacctatgctatggggagccctgctggcagccccgagagccatgccatggcctgcaggagccaggctcctgtg

SEQ ID NO: 119303 - DNA, 120 bp, Artificial Sequence
  ENSG00000100811_30 (sequence is synthesized)
tggatgaagtccctcttcctctgtgccttgatcccttgggggtgcctttggtcatctcttctgtcctttcctgtctctgaaatagtcatcactccccttgactctctctgttcacgtctt

SEQ ID NO: 119304 - DNA, 120 bp, Artificial Sequence
  ENSG00000100811_31 (sequence is synthesized)
ctcagtctgcagagttaacttctgtaaggagtttaatctggggttccaagaaaacaagttccttgttaacatagcactgactttgcaacaatagaaaactaacaaatgagcaacaatata

SEQ ID NO: 119305 - DNA, 120 bp, Artificial Sequence
  ENSG00000100811_32 (sequence is synthesized)
aagagtagaggtagttctcattgggtgtaacttcaacccattctgcttgtggttagaatttataattttgctaacgatgtaatttactaaggtttgaaatggtattctaacagtgagtcc

SEQ ID NO: 119306 - DNA, 120 bp, Artificial Sequence
  ENSG00000100811_33 (sequence is synthesized)
attgtcttgaggattaatctgatttataagtaatactgatagacatattttcgtacatctgagcagaaataaatgcatgtttctagcatatgtaatataaaaactccagaggataagttt

SEQ ID NO: 119307 - DNA, 120 bp, Artificial Sequence
  ENSG00000100811_34 (sequence is synthesized)
acacttaacaagatgttgttttctatttttgaatttcttattatttccccctttttggtagtggagttgagagggggagcatactatttgtataaagaactgtcaccccagagtgacatt

SEQ ID NO: 119308 - DNA, 120 bp, Artificial Sequence
  ENSG00000100811_35 (sequence is synthesized)
tattttccaagatgaccctgaactcatgctgttggtttcatatggtgtttgtgtgctttgcctagattcaaggcctgaggatttgaggaaaatcgggattttttttttcctatttggttt

SEQ ID NO: 119309 - DNA, 120 bp, Artificial Sequence
  ENSG00000100811_36 (sequence is synthesized)
tcatgtaaaagttctaaatgtcacttattttgctaaataagaccctttcacaggatagtgtgcgcaatacctgtccgtgtttccaagcagagttcaagttcatgtcttcacaagtagatg

SEQ ID NO: 119310 - DNA, 120 bp, Artificial Sequence
  ENSG00000100811_37 (sequence is synthesized)
agagtcacttccagtcgggggaagcccgcctgagcagtgttttgagagtgcgtacattggaggactgccccacgtccgtttgcactctgccttgcaaaacttactgtggagacgtgtccc

SEQ ID NO: 119311 - DNA, 120 bp, Artificial Sequence
  ENSG00000100811_38 (sequence is synthesized)
gagacgtgtcccagactggtctcagaccagagtttgtggcacaggaaaacctggccccctaaaaagaagttttggaattggaagcctgataatttcgggaggctgaggcaggagaacggc

SEQ ID NO: 119312 - DNA, 120 bp, Artificial Sequence
  ENSG00000100811_39 (sequence is synthesized)
acctccccccacccccgactataggcaaagagagttgatcacttccagggtctctgacttctgtgacctggaaatcagcctggcttgggaaattcatgttgttgatctttaattatttaa

SEQ ID NO: 119313 - DNA, 120 bp, Artificial Sequence
  ENSG00000100811_40 (sequence is synthesized)
ttattctttaataatccttctattttcttgacatctgacccccagcaagagtaaggatcccagaggtcaaaacagtggtgagagccaagctgctcacagacacccacttgatgccacagc

SEQ ID NO: 119314 - DNA, 120 bp, Artificial Sequence
  ENSG00000100811_41 (sequence is synthesized)
catgccatgaggcttcctcccagctgctctgctggcttgctgaagccagctctgagtcacagggttgccttggaccctcggctgtagggggcacctgtctggctccgggccctttgtcct

SEQ ID NO: 119315 - DNA, 120 bp, Artificial Sequence
  ENSG00000100811_42 (sequence is synthesized)
ggatacactgacagtaatgtgagcgcagcacttcagagttcaggcccagcaggtcctggcaagtgcattccacccgaacttttaacccaagcggtggggaaggaagccaaaactccaagc

SEQ ID NO: 119316 - DNA, 120 bp, Artificial Sequence
  ENSG00000100811_43 (sequence is synthesized)
tgcactttcttggggttctggccatgcacttcttagccttctctctgactttacaggacaaaaggtaccccacgccttcagaatcatgcttacctgcacggcagcatctgactggatggc

SEQ ID NO: 119317 - DNA, 120 bp, Artificial Sequence
  ENSG00000100811_44 (sequence is synthesized)
tggctaggtctcatccaccccaaattactgacccttgatttatgttgttactgctcaggttatgctcagatgccctggttgcctgaagatggtttaagtgcaggcccttcagacaagtca

SEQ ID NO: 119318 - DNA, 120 bp, Artificial Sequence
  ENSG00000100811_45 (sequence is synthesized)
cgtcaggcaagagagggctggcctctgacccacaagagggcagatttgtggccaagaggcttcctggcatccacccccaggcccaagggatcagtgtggtgccagagaggatctttaagc

SEQ ID NO: 119319 - DNA, 120 bp, Artificial Sequence
  ENSG00000100811_46 (sequence is synthesized)
tgggactgtactgaggcttgatgggaagtatgggcagcatgtacttgacacgttatcacccagtccccttgtaaaatctggaatggagcgtttaagctgagcgttagcatcaggtcagca

SEQ ID NO: 119320 - DNA, 120 bp, Artificial Sequence
  ENSG00000100811_47 (sequence is synthesized)
ggcaaagcaaacctcccacaaactgggtgccgtaaggtgggaggtgacacatggagagcttcgtcctggccgagcaggcacccagccccatgtcccccgccagcattctggatgtcagag

SEQ ID NO: 119321 - DNA, 120 bp, Artificial Sequence
  ENSG00000100811_48 (sequence is synthesized)
gagggtgcgtgtgatggcgtcacattcatctgaagcacactgattgattttccacaaggtggcaagtttgatcaaattgaccgcttttcatgagacacccagatgctgtaaaaaaaaaaa

SEQ ID NO: 119322 - DNA, 120 bp, Artificial Sequence
  ENSG00000100811_49 (sequence is synthesized)
acagcactgggatgtgttgaggagggggcagtttgctgtgctctgttctgtctgctgctctctctgggggccgcacaatgtccgcacacatcacggaggggagaaaggcatcagtaccaa

SEQ ID NO: 119323 - DNA, 120 bp, Artificial Sequence
  ENSG00000100811_50 (sequence is synthesized)
acggaacaacctcttttttctacattgtccatacccggacatgtgaggctctattatcaacaggtggtgagaaaaattatgtttttattcgctttctggtaacttctgtaggccctggct

SEQ ID NO: 119324 - DNA, 120 bp, Artificial Sequence
  ENSG00000100811_51 (sequence is synthesized)
caaggacttagcatttcgtctcatgtacatctttttcttaagtgttctttgccatttctggaattgtccttggtttttccttagctcataggtcatagatgcagaaatatagtatttaag

SEQ ID NO: 119325 - DNA, 120 bp, Artificial Sequence
  ENSG00000100811_52 (sequence is synthesized)
gcatccgcatccagcatcagatggctttgcatccagaaaaacattgataactcagtttgaagcaccaagcatgtgtaatatggctctatacaatataataaatgcataatgttaagcttt

SEQ ID NO: 119326 - DNA, 120 bp, Artificial Sequence
  ENSG00000100811_53 (sequence is synthesized)
tcccagtttggctactactagtagtgtgaccttgggcaagtctacttaaagacatctctaagcctcagtttcctcatctgtaaaactagggtttgcattgaatgatgactttttcagctg

SEQ ID NO: 119327 - DNA, 120 bp, Artificial Sequence
  ENSG00000100811_54 (sequence is synthesized)
tctgctttttgtcttaaatgatattaatgttctaccgtaatactaagtaaaattaaaatggggggttggggaggtggttttgttttaatatgtcagtaaaggctgttaaatggttgaatc

SEQ ID NO: 119328 - DNA, 80 bp, Artificial Sequence
  ENSG00000100811_55 (sequence is synthesized)
ttctcgtcaaagcagactttattggggcgacagggccgccccgcacgcgccagccgctccccgcgcggcccccgggccgc

SEQ ID NO: 119329 - DNA, 120 bp, Artificial Sequence
  ENSG00000100811_56 (sequence is synthesized)
cccgtggtgcccggggccgcgcggaccgctcaccggctcccaaggcagcggctgtagcggcgacgccccgttcccgagtgcggccccggcccgaggcggcgggttttgtggctgttgcac

SEQ ID NO: 119330 - DNA, 80 bp, Artificial Sequence
  ENSG00000100811_57 (sequence is synthesized)
cgctgacgtcacgcgccgcgggccagccagggcgcgtgcgagccgccccgcccccggtcccatcggccccaatccgggag

SEQ ID NO: 119331 - DNA, 120 bp, Artificial Sequence
  ENSG00000100811_58 (sequence is synthesized)
ggaggagcccggcgagtgggcggggccgcggaggccagcggacagatcgattggccgagaggagaatcgagagggcgaacgggcgagtggcagcgaggagccgaggccgccgcggccgtg

SEQ ID NO: 119332 - DNA, 120 bp, Artificial Sequence
  ENSG00000100811_59 (sequence is synthesized)
cctgtgagctgtctagtgacttgtgctgtccttctgtcatgctgtcttatcatttccccattcactccattactgggcaacaactgcagaagaaattgttgaggacatgcttctcgagcg

SEQ ID NO: 119333 - DNA, 120 bp, Artificial Sequence
  ENSG00000100811_60 (sequence is synthesized)
ccacacatccatctgcctttcccgccctgcactggtatcaatttgcctgcttcttccttttcctagtgtctcacaaaataaatttcttctgtagttgccattccttggagaccctcttgc

SEQ ID NO: 119334 - DNA, 120 bp, Artificial Sequence
  ENSG00000100811_61 (sequence is synthesized)
ttctttctctgtcaagaaggggaaagaggcaaagagagaagagggaacagtaggcgatggagaatgacagtccattgttgcagcacagaatatggggccaccaaaggtagtggtggacta

SEQ ID NO: 119335 - DNA, 120 bp, Artificial Sequence
  ENSG00000100811_62 (sequence is synthesized)
tctgaacactgcaagtgtaggtggtgtggtgatgaggcaggaggcgccagcccagagactcagggtcttattactccttggtgagaaacaaaacttctcctggggagtcgcttagaaggg

SEQ ID NO: 119336 - DNA, 120 bp, Artificial Sequence
  ENSG00000100811_63 (sequence is synthesized)
ttgccggggctctggacatccttgtctatactctgtggtactgggtacgcaatgtattggtgttgatggagtacactttatggcaggaggagaacaggattgaagagcatacctaaaact

SEQ ID NO: 119337 - DNA, 120 bp, Artificial Sequence
  ENSG00000100811_64 (sequence is synthesized)
caatttctacttcattcattacaggattgaagtaatttatttttggtagttaatagtataattactaactgataaagtttctagagtgtaagtataggtaatactttagcccataaataa

SEQ ID NO: 119338 - DNA, 120 bp, Artificial Sequence
  ENSG00000100811_65 (sequence is synthesized)
cagcagcactaggactctagcctgcatttaggaagacttgccattttgccaagtgttttaaacagttcgtgagggctctccttgggttttcggggttgtccaacctgcctgctgattcta

SEQ ID NO: 119339 - DNA, 120 bp, Artificial Sequence
  ENSG00000100811_66 (sequence is synthesized)
gactatatccacaaagttcacccagggcaggaatgaaaagtgtttggtaaaataaataggctgttctctagcaaagcagtgagctcctgactcccagggtctggtcagagttgctgagtg

SEQ ID NO: 119340 - DNA, 120 bp, Artificial Sequence
  ENSG00000100813_0 (sequence is synthesized)
cttttctctcgaagggcacccgaagattgtcacgagtccttagactccaactactgcggcagcttccaaatttcctgaaaaccctaagctgggccagcccggcagcccacgcacttccgg

SEQ ID NO: 119341 - DNA, 120 bp, Artificial Sequence
  ENSG00000100813_1 (sequence is synthesized)
cctcggacccgccccaaacacccaagcgccccagcgcctcatctctaggtccggaaataaacgaacatctccgattatggttataccagggtcgagggtttccgaatatattcgattcaa

SEQ ID NO: 119342 - DNA, 120 bp, Artificial Sequence
  ENSG00000100813_2 (sequence is synthesized)
agcttcggcaagacgaagaaaaccgagcctgaaagcagggcgagaaaaggggcgctgcagggcggatggaaagaattgattggtaacgatgtggagacggaaacatccgaggacatccgg

SEQ ID NO: 119343 - DNA, 120 bp, Artificial Sequence
  ENSG00000100813_3 (sequence is synthesized)
aggaacccggggagttctgagtggtaatcgaggggtagagtatggcagtgggcggggtcatctcggtacgttcgaagggcgttggcggaaattaccgaagatgcccgaagccgtcgggac

SEQ ID NO: 119344 - DNA, 120 bp, Artificial Sequence
  ENSG00000100813_4 (sequence is synthesized)
ggacccgagtacctcacgcaagatggcggagctggaggaggtgactctggacgggaagcctcttcaggcgctgcgggtgaccgacctgaaggccgcactggagcagcgaggcctagccaa

SEQ ID NO: 119345 - DNA, 120 bp, Artificial Sequence
  ENSG00000100813_5 (sequence is synthesized)
gagcgggcagaagagtgccctggtcaagcggctcaaaggggctctaatgctagaaaatttacagaaacactcaacaccccatgctgcattccagccaaattcccagattggtgaggaaat

SEQ ID NO: 119346 - DNA, 120 bp, Artificial Sequence
  ENSG00000100813_6 (sequence is synthesized)
gagccagaacagtttcataaaacagtatctggaaaagcagcaggagctacttaggcagcgtctggaacgtgaagctcgagaagctgcagaacttgaagaagcttcagctgagtcggagga

SEQ ID NO: 119347 - DNA, 120 bp, Artificial Sequence
  ENSG00000100813_7 (sequence is synthesized)
cgagatgatccatcctgagggagtggcttccctgctgcctcctgactttcagagcagcctggagagaccagagctggagctcagcagacattcgcccagaaaaagctcctcaatttctga

SEQ ID NO: 119348 - DNA, 120 bp, Artificial Sequence
  ENSG00000100813_8 (sequence is synthesized)
agagaaaggtgactctgatgatgagaaaccaaggaaaggagaaagacgatcatctagggtcagacaggcaagagcagctaaactgtctgagggcagccaacctgctgaggaggaagagga

SEQ ID NO: 119349 - DNA, 120 bp, Artificial Sequence
  ENSG00000100813_9 (sequence is synthesized)
tcaagaaacaccttccagaaacctaagggtcagagcagatcgaaatttgaaaacagaggaggaagaagaggaggaggaggaggaggaagaagatgatgaagaagaggaaggtgatgatga

SEQ ID NO: 119350 - DNA, 120 bp, Artificial Sequence
  ENSG00000100813_10 (sequence is synthesized)
gggacaaaaatctagggaggcaccaatcctgaaagagtttaaggaagaaggggaagagatacctagagtaaaaccagaggagatgatggatgagagacccaaaacaagatcccaggaaca

SEQ ID NO: 119351 - DNA, 120 bp, Artificial Sequence
  ENSG00000100813_11 (sequence is synthesized)
ggaggtgttagagagaggagggagatttacaagatcccaggaagaggctagaaaaagtcatctggccagacagcagcaggagaaggaaatgaaaacaacatctccccttgaggaggaaga

SEQ ID NO: 119352 - DNA, 120 bp, Artificial Sequence
  ENSG00000100813_12 (sequence is synthesized)
aagagaaataaaatcttcacaaggcttaaaggaaaaatcgaagtctccttcccctcctcgactgactgaagatcgaaagaaggcctcacttgtagcgctgccagagcaaactgccagcga

SEQ ID NO: 119353 - DNA, 120 bp, Artificial Sequence
  ENSG00000100813_13 (sequence is synthesized)
ggaggagactcctccacctttactaacaaaggaagcatcttctccaccacctcatccacagctccatagcgaagaagaaatagagcccatggaaggcccagcccccgctgtcctcattca

SEQ ID NO: 119354 - DNA, 120 bp, Artificial Sequence
  ENSG00000100813_14 (sequence is synthesized)
gttatctcctcctaatacagatgctgacaccagggagctattagtatctcagcatactgtccagttggtaggaggcctgtctcctttgtcaagtccttcagacaccaaagcagaatctcc

SEQ ID NO: 119355 - DNA, 120 bp, Artificial Sequence
  ENSG00000100813_15 (sequence is synthesized)
agcagagaaagtgccagaggagagtgtcctgcctctggttcagaaaagcacactggctgactactcagcccagaaggatcttgaacctgagtcagacagatctgctcagcccctccctct

SEQ ID NO: 119356 - DNA, 120 bp, Artificial Sequence
  ENSG00000100813_16 (sequence is synthesized)
aaaaattgaggaattagcactggccaaaggaatcactgaagaatgtctgaaacagccatctttggaacagaaggaaggcagaagagcttctcatacccttctcccaagccacagattgaa

SEQ ID NO: 119357 - DNA, 120 bp, Artificial Sequence
  ENSG00000100813_17 (sequence is synthesized)
acagtcagctgattcatcctctagccggtcctcctcatcttcctcctccagttctagatcaagatctcgctctcctgacagttcaggttctcggtctcattcaccgctcagatccaagca

SEQ ID NO: 119358 - DNA, 120 bp, Artificial Sequence
  ENSG00000100813_18 (sequence is synthesized)
gagagatgtagcccaggcacgtactcatgccaaccctcgtggtagacccaagatgggctccagatcaacatcagagtccagatcaaggtcacgttcacgttctcgttcagcatcaagcaa

SEQ ID NO: 119359 - DNA, 120 bp, Artificial Sequence
  ENSG00000100813_19 (sequence is synthesized)
cagcagaaaatctctgagccctggagtctccagggacagcagcaccagctatactgaaaccaaagatccctcttctggtcaggaggttgcaactccaccagtgccacaactgcaggtctg

SEQ ID NO: 119360 - DNA, 120 bp, Artificial Sequence
  ENSG00000100813_20 (sequence is synthesized)
gacttccacctcctcatcctctgtccaagcaaggcgtctgagtcagcctgaatcagctgaaaagcatgtgacccagaggttacagcctgagcgggggagcccaaagaagtgtgaagctga

SEQ ID NO: 119361 - DNA, 120 bp, Artificial Sequence
  ENSG00000100813_21 (sequence is synthesized)
agaggcagagccaccagctgccacacagccccaaacctcagagactcagacctctcatctgccagaatcagaaagaattcatcacactgttgaggagaaggaggaagtgaccatggacac

SEQ ID NO: 119362 - DNA, 120 bp, Artificial Sequence
  ENSG00000100813_22 (sequence is synthesized)
aagtgaaaacagacctgaaaatgatgttccagaacctcccatgcctattgcagaccaagtcagcaatgatgaccgcccggagggcagtgttgaagatgaggagaagaaagagagctcgct

SEQ ID NO: 119363 - DNA, 120 bp, Artificial Sequence
  ENSG00000100813_23 (sequence is synthesized)
gcccaaatcattcaagaggaagatctccgttgtctcagctaccaagggggtgccagctggaaacagtgacacagaggggggccagcctggtcggaaacgacgctggggagccagcacagc

SEQ ID NO: 119364 - DNA, 120 bp, Artificial Sequence
  ENSG00000100813_24 (sequence is synthesized)
caccacacagaagaaaccttccatcagtatcaccactgaatcactaaagagcctcatccccgacatcaaacccctggcggggcaggaggctgttgtggatcttcatgctgatgactctcg

SEQ ID NO: 119365 - DNA, 120 bp, Artificial Sequence
  ENSG00000100813_25 (sequence is synthesized)
catctctgaggatgagacagagcgtaatggcgatgatgggacccatgacaaggggctgaaaatatgccggacagtcactcaggtagtacctgcagagggccaggagaatgggcagaggga

SEQ ID NO: 119366 - DNA, 120 bp, Artificial Sequence
  ENSG00000100813_26 (sequence is synthesized)
agaagaggaagaagagaaggaacctgaagcagaacctcctgtacctccccaggtgtcagtagaggtggccttgcccccacctgcagagcatgaagtaaagaaagtgactttaggagatac

SEQ ID NO: 119367 - DNA, 120 bp, Artificial Sequence
  ENSG00000100813_27 (sequence is synthesized)
cttaactcgacgttccattagccagcagaagtccggagtttccattaccattgatgacccagtccgaactgcccaggtgccctccccaccccggggcaagattagcaacattgtccatat

SEQ ID NO: 119368 - DNA, 120 bp, Artificial Sequence
  ENSG00000100813_28 (sequence is synthesized)
ctccaatttggtccgtcctttcactttaggccagctaaaggagttgttggggcgcacaggaaccttggtggaagaggccttctggattgacaagatcaaatctcattgctttgtaacgta

SEQ ID NO: 119369 - DNA, 120 bp, Artificial Sequence
  ENSG00000100813_29 (sequence is synthesized)
ctcaacagtagaggaagctgttgccacccgcacagctctgcacggggtcaaatggccccagtccaatcccaaattcctttgtgctgactatgccgagcaagatgagctggattatcaccg

SEQ ID NO: 119370 - DNA, 120 bp, Artificial Sequence
  ENSG00000100813_30 (sequence is synthesized)
aggcctcttggtggaccgtccctctgaaactaagacagaggagcagggaataccacggcccctgcaccccccacccccacccccggtccagccaccacagcacccccgggcagagcagcg

SEQ ID NO: 119371 - DNA, 120 bp, Artificial Sequence
  ENSG00000100813_31 (sequence is synthesized)
ggagcaggaacgggcagtgcgggaacagtgggcagaacgggaacgggaaatggagcggcgggagcggactcgatcagagcgtgaatgggatcgggacaaagttcgagaagggccccgttc

SEQ ID NO: 119372 - DNA, 120 bp, Artificial Sequence
  ENSG00000100813_32 (sequence is synthesized)
ccgatcaaggtcccgtgaccgccgccgcaaggaacgtgcgaagtctaaagaaaagaagagtgagaagaaagagaaagcccaggaggaaccacctgccaagctgctggatgaccttttccg

SEQ ID NO: 119373 - DNA, 120 bp, Artificial Sequence
  ENSG00000100813_33 (sequence is synthesized)
aaagaccaaggcagctccctgcatctattggctcccactgactgacagccagatcgttcagaaagaggcagagcgggccgaacgggccaaggagcgggagaagcggcgaaaggagcaaga

SEQ ID NO: 119374 - DNA, 120 bp, Artificial Sequence
  ENSG00000100813_34 (sequence is synthesized)
agaagaagagcaaaaggagcgggagaaggaagccgagcgggaacggaaccgacagctggagcgagagaaacgtcgggagcacagtcgggagagggacagggagagagagagagaaaggga

SEQ ID NO: 119375 - DNA, 120 bp, Artificial Sequence
  ENSG00000100813_35 (sequence is synthesized)
gcgggacaggggggaccgagatcgggatagggaaagggaccgagaacgaggcagggaaagggatcgcagggacaccaagcgccacagcagaagccggagtcggagcacacctgtgcggga

SEQ ID NO: 119376 - DNA, 120 bp, Artificial Sequence
  ENSG00000100813_36 (sequence is synthesized)
ccggggtgggcgccgctagctgggaaaacactagagctgcaggtaccagccactcggccccagggggttatggccacagagggataggcacagtctccaccaccctggagccaagggtct

SEQ ID NO: 119377 - DNA, 120 bp, Artificial Sequence
  ENSG00000100813_37 (sequence is synthesized)
ttcacatcacctatccctacatacataccaaatggaaaagtggccatccttttccccccaaacacacccccttaacctatctcttgggacttagcccgaccctccctctcatttcccatt

SEQ ID NO: 119378 - DNA, 120 bp, Artificial Sequence
  ENSG00000100813_38 (sequence is synthesized)
aagtctgagaggcaagagctaggttaggcaaggaggtggttggccagagatggggaacagccaggtgccccagtcctctgatttttcctccatcctgcttaccacctccctgggtactta

SEQ ID NO: 119379 - DNA, 120 bp, Artificial Sequence
  ENSG00000100813_39 (sequence is synthesized)
cagccttctcttgggaacagccggggccaggactgggtcacctatgagctgaatcagcatctcctcctgagtcccagggcccctgcagttcccagtctcttctgtcctgcagcccttgcc

SEQ ID NO: 119380 - DNA, 120 bp, Artificial Sequence
  ENSG00000100813_40 (sequence is synthesized)
tctttcccacaggttccactttatatccaccttttccttttgttcaatttttatttttattttttttattattaaatgatgtggtctatggaaaaaaaaataaaaatctgacttagtttt

SEQ ID NO: 119381 - DNA, 120 bp, Artificial Sequence
  ENSG00000100813_41 (sequence is synthesized)
ggcaagatggctcccctgcatgtctccggctgatcgctgccgctccgccaatacaatagagccagccactaccagcagcctggccctcttcctccttctccagagagaccaatccagccg

SEQ ID NO: 119382 - DNA, 120 bp, Artificial Sequence
  ENSG00000100813_42 (sequence is synthesized)
ctacatctcaattttctctctctggatcgggtggctggggaggaggtggtgggatcttggaacaaggaaggtgtggttttttttctttattttttttaggattttttttgtttggttttt

SEQ ID NO: 119383 - DNA, 120 bp, Artificial Sequence
  ENSG00000100813_43 (sequence is synthesized)
ccctgaattctcagagcacctcatttggatcgctgaaagctttgaatgtttcctgcctttcattatattttttcgtatatcatatctttctcctacatattaagtaagctacttgagggc

SEQ ID NO: 119384 - DNA, 120 bp, Artificial Sequence
  ENSG00000100813_44 (sequence is synthesized)
cagatttgactctgtttaatctttgaatctccatgatgaggaggttagcctagcacagtactttgcagattataggtgctctgcacgtttagattaaggagtggctgcttggtataaaag

SEQ ID NO: 119385 - DNA, 120 bp, Artificial Sequence
  ENSG00000100813_45 (sequence is synthesized)
aaagggaaccgtgagagttacattgagggtgaaaagagccagtattgcttcctaccaaaagctgttcttgtggtcttcttgatagtgactttaggagataccttaactcgacgttccatt

SEQ ID NO: 119386 - DNA, 120 bp, Artificial Sequence
  ENSG00000100813_46 (sequence is synthesized)
gggtgggcaggaatggacctaggggaaagagtagagcactctagtgatccctcttacacggtgggttaacttaaaggagggatgaggcagggacttggatcagaatagggccaagggaga

SEQ ID NO: 119387 - DNA, 120 bp, Artificial Sequence
  ENSG00000100813_47 (sequence is synthesized)
aatgagggggaaaagctgttgccctgcagggttgttttgaggacttgcagaaggcctcacatacaacgtctcaattagtgctgggaagcaccaccactcttctcacattcttactgcaag

SEQ ID NO: 119388 - DNA, 120 bp, Artificial Sequence
  ENSG00000100813_48 (sequence is synthesized)
gttcctaaactctctgccctcccccaaaccttgaaactatactcctgtgacagcagctcgggaaatctaaagattgggtggtggtcttgccttctgctagaccctgaaagtctattttca

SEQ ID NO: 119389 - DNA, 120 bp, Artificial Sequence
  ENSG00000100813_49 (sequence is synthesized)
gggttaccttgttgaagttgccatccaaagttggttttccttgtttcctcgagttagcaaggaaggacctgggaggactagatgacccagtttggggcacagtttgtttggcttggtgtc

SEQ ID NO: 119390 - DNA, 120 bp, Artificial Sequence
  ENSG00000100813_50 (sequence is synthesized)
ctctcgactcagacggtgaaagagggggtatgaccaacatctttagggggctgagaggctactgaactcctcttccagcttatttctggttaagctaatacacaggtgtgatacggagta

SEQ ID NO: 119391 - DNA, 120 bp, Artificial Sequence
  ENSG00000100813_51 (sequence is synthesized)
gatgacttttccctgctctgatgtttagttttatttttttctctaacttgcattgattctgcttcgtttttgccgtttgccgcttctgttttggtctctgtctgtctctgtgtctctctc

SEQ ID NO: 119392 - DNA, 120 bp, Artificial Sequence
  ENSG00000100813_52 (sequence is synthesized)
tctctttctcttttttttcccctttttcttcttcatacagagctcgctgcccaaatcattcaagaggaagatctccgttgtctctaccaagggggtgccagctggaaacagtgacacaga

SEQ ID NO: 119393 - DNA, 120 bp, Artificial Sequence
  ENSG00000100813_53 (sequence is synthesized)
cctctggacccacccgctgctactgagctgcccaatcagagccaagtctgctatccaggtgtcttggccagaggggggcatgtatatgggctcctgtgatgggcccccttttgcctccct

SEQ ID NO: 119394 - DNA, 120 bp, Artificial Sequence
  ENSG00000100813_54 (sequence is synthesized)
aagagcttgtgccagtgctggggcgcctgcccacatgcccttgcccttttgaggactgtgggttgccttgtttgctacagactgttgggatccccatctagggcaccaagacctcctaaa

SEQ ID NO: 119395 - DNA, 120 bp, Artificial Sequence
  ENSG00000100813_55 (sequence is synthesized)
gtttgtgatcgcagtgccatgctgtaaaacactgagtgggaccctctacttaagctgtgacgactaggaaccgtgcagaggagtctagggtctgagcccctggggatttaatgctgatga

SEQ ID NO: 119396 - DNA, 120 bp, Artificial Sequence
  ENSG00000100813_56 (sequence is synthesized)
cagcccagcccatgtgtcaccacttgctcatcagatggactttcctttggtccctgttgtccatggtgaagggcagcatgttggttgctccaacttctcctccatccctggaggcaggga

SEQ ID NO: 119397 - DNA, 120 bp, Artificial Sequence
  ENSG00000100813_57 (sequence is synthesized)
ctcatttcatccacctgactggaaccactgtctcagctggagtccctgaggagatgccagccacaactctccgaagagaagtattctgaccttgctgctgaatgtctgccaggtcctggg

SEQ ID NO: 119398 - DNA, 120 bp, Artificial Sequence
  ENSG00000100813_58 (sequence is synthesized)
gtattcacctacccccaggctaccttcatcagaggctccatgatcccactcggtgagaggaccccctccccagttacaggcagaggagaaagggactctggagtcatcacctggattcca

SEQ ID NO: 119399 - DNA, 120 bp, Artificial Sequence
  ENSG00000100813_59 (sequence is synthesized)
agtattgggtggtgttattgctgcagcttgccactggtggacatagggtcctgcctgcctctcacgataaaaggcaaggatcattcctgctactcacaggccatctcatcagggactgca

SEQ ID NO: 119400 - DNA, 120 bp, Artificial Sequence
  ENSG00000100813_60 (sequence is synthesized)
agatgatgtcccttcagggccaggactgatgtctctgcccctttcccccctctatccctcgctgagcctggccaccgccagtgaactgtcttgacatcatggaaactgggcagcgtcccc

SEQ ID NO: 119401 - DNA, 120 bp, Artificial Sequence
  ENSG00000100813_61 (sequence is synthesized)
ccacacgtttccctcccgccccccctgcgcccctgggaggactctggcagtgccgtgctgactaccacgccgtgcgcccaccttttttgccaacccaaccccccaccaattgcacagcgc

SEQ ID NO: 119402 - DNA, 71 bp, Artificial Sequence
  ENSG00000100813_62 (sequence is synthesized)
ccaaatatgatttctttaagttaaccttttaccaaaactccagccagaggtaacctgtaggtattacggtt

SEQ ID NO: 119403 - DNA, 120 bp, Artificial Sequence
  ENSG00000100813_63 (sequence is synthesized)
ccaaaactccagccagaggtaacctgtaggtattacggtttgaactagcagaggtcctgagaccatctaactgttgggtctatttcttggggacagcagctaccaagggggtgccagctg

SEQ ID NO: 119404 - DNA, 120 bp, Artificial Sequence
  ENSG00000100813_64 (sequence is synthesized)
cactgtgtaagtgatatatctcgaccggggtataacagggaactatgagtgtgcgatagttcttcgctccctagggttctttgactaagcagtcctagtttccttttaaaacataaaggc

SEQ ID NO: 119405 - DNA, 120 bp, Artificial Sequence
  ENSG00000100813_65 (sequence is synthesized)
agagctttatctggacaaaggctagacttcagttactatgttgggagctgccacctttaaggtaacctgaaaagtggtcgtcagggcacaaggaaaactcacctgggatcatccagccaa

SEQ ID NO: 119406 - DNA, 120 bp, Artificial Sequence
  ENSG00000100813_66 (sequence is synthesized)
aatagtcaactcctttaagatttaggcaatagaagcttctgcttccacactcaaaaccatgtaagggaattgactccgggcatcttaatctttaactcatgtttacctaggaacccagtt

SEQ ID NO: 119407 - DNA, 120 bp, Artificial Sequence
  ENSG00000100813_67 (sequence is synthesized)
cctttccttgttggggaagtagtgcccagactctagacgtttgtaactaacgggaaagtctgataatggccctttatctaagatttatgttcagcttttcctgctgtcttcccaagcttc

SEQ ID NO: 119408 - DNA, 120 bp, Artificial Sequence
  ENSG00000100813_68 (sequence is synthesized)
tcctggtggtaactcctttagctttccctcctttttaaaagcctgatggagcccaacgccatctagtggacattggtggttctcaccagaccagccatgctgagaaatttttgttcctcc

SEQ ID NO: 119409 - DNA, 120 bp, Artificial Sequence
  ENSG00000100814_0 (sequence is synthesized)
acttcccaaggcgacttcctgtctctccactttctttccctctccgttttggtgggctgaaatgatcctagataattgatagatcctgtggttcaactggatttctagatagaagctgga

SEQ ID NO: 119410 - DNA, 120 bp, Artificial Sequence
  ENSG00000100814_1 (sequence is synthesized)
ttcatgtgatgccagaggagtaaaatttcaagagactgaaaccagatctgagtttcgctgttccagtctggacctctttggtgctgtaaatcctggatatactgtagatgagtactgcgt

SEQ ID NO: 119411 - DNA, 120 bp, Artificial Sequence
  ENSG00000100814_2 (sequence is synthesized)
ttttcttttatggcctctcttcagcttctggagacctcactatcctattatgtctttgtgtgaagacatgctgctttgtaattatcgaaagtgtcgcatcaaactctctggctatgcatg

SEQ ID NO: 119412 - DNA, 120 bp, Artificial Sequence
  ENSG00000100814_3 (sequence is synthesized)
ggtcactgcctgctctcacatcttctgtgatcagcatggcagtggtgagtttagtcgctcaccagctatctgtcctgcctgcaacagtaccctttctggaaagctagatattgtccgcac

SEQ ID NO: 119413 - DNA, 120 bp, Artificial Sequence
  ENSG00000100814_4 (sequence is synthesized)
agaactcagtccatcagaggaatataaagctatggtattggcaggactgcgaccagagatcgtgttggacattagctcccgagcgctggccttctggacatatcaggtacatcaggaacg

SEQ ID NO: 119414 - DNA, 120 bp, Artificial Sequence
  ENSG00000100814_5 (sequence is synthesized)
gaaaggggaggttacctccatgaagaaagtactagaagaatacaagaaaaagttcagtgacatctctgagaaacttatggagcgcaatcgtcagtatcaaaagctccaaggcctctatga

SEQ ID NO: 119415 - DNA, 120 bp, Artificial Sequence
  ENSG00000100814_6 (sequence is synthesized)
tagccttaggctacgaaacatcactattgctaaccatgaaggcacccttgaaccatccatgattgcacagtctggtgttcttggcttcccattaggtaacaactccaagtttcctttgga

SEQ ID NO: 119416 - DNA, 120 bp, Artificial Sequence
  ENSG00000100814_7 (sequence is synthesized)
taatacacctgttcgaaatcggggcgatggagatggagattttcagttcagaccattttttgcgggttctcccacagcacctgaacccagcaacagcttttttagttttgtctctccaag

SEQ ID NO: 119417 - DNA, 120 bp, Artificial Sequence
  ENSG00000100814_8 (sequence is synthesized)
tcgtgaattagagcagcagcaagtttctagcagggccttcaaagtaaaaagaatttgagccacgcatagtgtcacgcacctgtgatcccagctacttaggaggttgaggctgggaggatc

SEQ ID NO: 119418 - DNA, 62 bp, Artificial Sequence
  ENSG00000100814_9 (sequence is synthesized)
gatcacttgagcccaggagtctgaggctttagtgaaaaaaataaagataatttagctaactt

SEQ ID NO: 119419 - DNA, 120 bp, Artificial Sequence
  ENSG00000100814_10 (sequence is synthesized)
ctttccctctccgttttggtgggctggttgaagatgaaatccactgaggagggaagtccagcaccctgtgtgccagtccagaactggcccatctgtagaccccctgaaaatcatatgggc

SEQ ID NO: 119420 - DNA, 120 bp, Artificial Sequence
  ENSG00000100814_11 (sequence is synthesized)
ttggatttggatattctcaacagaaagggttaaaggctgatggtacctaaagcctggtacttgaattttgatcaagataagctgccttaagttctcttcattacacaaatgatcctagat

SEQ ID NO: 119421 - DNA, 120 bp, Artificial Sequence
  ENSG00000100814_12 (sequence is synthesized)
aatagactgtgcttcatgtgcacagtgcgtgtgttcttggaaaacgccggcttcattttgcttggcgggaaagatattatcatcctaatgctgttttgatttatatctccctgggtgagg

SEQ ID NO: 119422 - DNA, 75 bp, Artificial Sequence
  ENSG00000100814_13 (sequence is synthesized)
agggtttcaccgtgttggccacgctggtcgggaactcctgacctcaggcctctcttcagcttctggagacctcac

SEQ ID NO: 119423 - DNA, 120 bp, Artificial Sequence
  ENSG00000100814_14 (sequence is synthesized)
cctggcaggtcccaggatgcttcggggcaaccccacgcatgcgcgctctggcgtagttccctgaagcactcgctcgcagagaatcctggaatcttcgcttgtggagctgtggaggcaacg

SEQ ID NO: 119424 - DNA, 120 bp, Artificial Sequence
  ENSG00000100814_15 (sequence is synthesized)
ggtctgtttctctaaaacttgcccctcacgcagcttgtacagaagttagattggcgcttactcccagctggtggaagattcggaattagctgcgcctctgctgcgtgagagagggctcag

SEQ ID NO: 119425 - DNA, 120 bp, Artificial Sequence
  ENSG00000100814_16 (sequence is synthesized)
ctccagtctgggcaacaagagtgaaaaaaaaaaaggacacaatatcttggagttggaagggcccttatgagtactatatgagtgacctttctggcttctgggttattgttgaagatgaaa

SEQ ID NO: 119426 - DNA, 120 bp, Artificial Sequence
  ENSG00000100814_17 (sequence is synthesized)
gcatgtccttgaatgtattgttatatcttacatatacacttatacttcttaaggatgtttgtcatctgtcaagtaactttttattatatttttctgggtacatcaggaacgtctctatca

SEQ ID NO: 119427 - DNA, 120 bp, Artificial Sequence
  ENSG00000100814_18 (sequence is synthesized)
tttctttccctctccgttttggtgggctggtgagtgtgcgcttaattttgctctctaattgttttgaatttctcttccatttgagttatatacccaggtggcaggcctttatttcaagtc

SEQ ID NO: 119428 - DNA, 120 bp, Artificial Sequence
  ENSG00000100814_19 (sequence is synthesized)
ggcataggagtgtgtgtgagtcgcaaggagattaatttcggctgtgtggaggttgggagaaggcagtgaaatgctcttcctggcttgtttccacgtgggcctctgcagtactgggtttgc

SEQ ID NO: 119429 - DNA, 89 bp, Artificial Sequence
  ENSG00000100814_20 (sequence is synthesized)
ctagtctctaactcctgggttcaactgtgcttcacttggtacatcaggaacgtctctatcaagaatacaatttcagcaaggctgagggc

SEQ ID NO: 119430 - DNA, 120 bp, Artificial Sequence
  ENSG00000100814_21 (sequence is synthesized)
tgtattttaaaagtcactgccaaatccaagatccacctggattttaccctatgttatcttctgggagtttcatagttttgcattttatgtttaagtctgtgaaccattttgagtttattt

SEQ ID NO: 119431 - DNA, 120 bp, Artificial Sequence
  ENSG00000100814_22 (sequence is synthesized)
ttgtgaaaagtataagatctgtctagattcattgggtcctcaattttttgctggctattggccagaggctgttcttagttacttgtctcttgggccttcctgacatgactgcttgcttcc

SEQ ID NO: 119432 - DNA, 120 bp, Artificial Sequence
  ENSG00000100814_23 (sequence is synthesized)
tcaaagccagcaagggagtgtgtctcctagtaagacagaccttatagtcttaggtaatatacttatgaagtgacaacctgtcacattttctgtagtattctagtcacaggtcctgcccac

SEQ ID NO: 119433 - DNA, 120 bp, Artificial Sequence
  ENSG00000100815_0 (sequence is synthesized)
gatccgctgccgctttccgagcgagtgtcatggcggccggcgtcgagttggcaggagtaacccacggaactgaggaaagtcattagagctgagaaagaagtggcccaatctggacggtgg

SEQ ID NO: 119434 - DNA, 120 bp, Artificial Sequence
  ENSG00000100815_1 (sequence is synthesized)
gaattcgtgggaatgagcagaaggccctccgtaggtgactgtgtcactagaggcgggcccctggtaaaattccaggccaggcctctgcgtttctaggcagaacctggagtcggccttgcc

SEQ ID NO: 119435 - DNA, 120 bp, Artificial Sequence
  ENSG00000100815_2 (sequence is synthesized)
tgagaacccagctttgtgttatcgtatcctgtctcgcgaaggcaggcgttcaaggatatttggtcggatcgcccggcggcgctaaacgttttcttttttccgagcggaccgggtcgttct

SEQ ID NO: 119436 - DNA, 120 bp, Artificial Sequence
  ENSG00000100815_3 (sequence is synthesized)
ctaaactcgccgcgatgtcgtcctggcttgggggcctcggctccggattgggccagtctctgggtcaagtcgggggcagcctggcttccctcactggccagatatcaaactttacaaagg

SEQ ID NO: 119437 - DNA, 120 bp, Artificial Sequence
  ENSG00000100815_4 (sequence is synthesized)
atatgctgatggagggcacggaggaagtggaagcagaattacctgattctaggacaaaggaaattgaagccattcatgcaatcttgagatcagagaatgaaaggcttaagaaactttgta

SEQ ID NO: 119438 - DNA, 120 bp, Artificial Sequence
  ENSG00000100815_5 (sequence is synthesized)
ctgatctagaagagaaacatgaagcatcagagattcaaataaagcagcaatctacaagttaccgaaatcaacttcaacaaaaagaggtagaaatcagccatcttaaagccagacagattg

SEQ ID NO: 119439 - DNA, 120 bp, Artificial Sequence
  ENSG00000100815_6 (sequence is synthesized)
cactccaggatcagttgctgaaactgcagtcagctgctcagtcagtaccttcaggagctggtgtaccagcaaccactgcatcatcttcattcgcttatgggattagtcatcatccttcag

SEQ ID NO: 119440 - DNA, 120 bp, Artificial Sequence
  ENSG00000100815_7 (sequence is synthesized)
ctttccatgacgatgacatggactttggtgatataatttcatcccaacaagaaataaaccgactctcaaatgaagtttcaagacttgagtctgaagttggccattggaggcatattgctc

SEQ ID NO: 119441 - DNA, 120 bp, Artificial Sequence
  ENSG00000100815_8 (sequence is synthesized)
agacttccaaagcacaaggaacagataactctgatcaaagtgaaatatgtaaactacaaaatatcattaaggaactaaaacagaaccgaagtcaggaaattgatgaccatcaacatgaaa

SEQ ID NO: 119442 - DNA, 120 bp, Artificial Sequence
  ENSG00000100815_9 (sequence is synthesized)
tgtcagtactgcagaatgcacaccaacagaaattgacagaaataagtcgacgacatcgagaagaattaagtgactatgaagaacgaattgaagaacttgaaaatctgttacaacaaggtg

SEQ ID NO: 119443 - DNA, 120 bp, Artificial Sequence
  ENSG00000100815_10 (sequence is synthesized)
gctctggagttatagaaactgatctctctaaaatctatgagatgcaaaaaactattcaagttctacaaatagaaaaagtggagtctaccaaaaaaatggaacaacttgaggataaaataa

SEQ ID NO: 119444 - DNA, 120 bp, Artificial Sequence
  ENSG00000100815_11 (sequence is synthesized)
aagatataaataaaaaattatcttctgcagaaaatgacagagatattttgaggagagaacaagaacagctaaatgtggaaaagagacaaataatggaagaatgtgaaaacttgaaattgg

SEQ ID NO: 119445 - DNA, 120 bp, Artificial Sequence
  ENSG00000100815_12 (sequence is synthesized)
aatgtagtaaattgcagccttctgctgtgaagcaaagtgatactatgacagaaaaggaaagaattcttgcccagagtgcatcagtggaagaagtgttcagactacaacaagcactgtctg

SEQ ID NO: 119446 - DNA, 120 bp, Artificial Sequence
  ENSG00000100815_13 (sequence is synthesized)
atgccgaaaatgaaataatgagattgagtagtttaaaccaggataacagtcttgctgaagacaatctgaaacttaaaatgcgtatcgaagttttagaaaaagagaagtcattactgagtc

SEQ ID NO: 119447 - DNA, 120 bp, Artificial Sequence
  ENSG00000100815_14 (sequence is synthesized)
aagaaaaggaagaacttcagatgtcacttttaaaattgaacaatgaatatgaagtaattaaaagtacagctacaagagacataagtttggattcagaattacatgacttaagacttaatt

SEQ ID NO: 119448 - DNA, 120 bp, Artificial Sequence
  ENSG00000100815_15 (sequence is synthesized)
tggaggcaaaggaacaagaactcaatcagagtattagtgaaaaggaaacactgatagctgagatagaagaattggacagacagaatcaagaagctacaaagcacatgattttgataaaag

SEQ ID NO: 119449 - DNA, 120 bp, Artificial Sequence
  ENSG00000100815_16 (sequence is synthesized)
atcagctatcaaaacaacaaaatgaaggagatagcatcatcagtaaactgaaacaagatctaaatgatgaaaaaaagagagttcatcaacttgaagatgataaaatggacattactaaag

SEQ ID NO: 119450 - DNA, 120 bp, Artificial Sequence
  ENSG00000100815_17 (sequence is synthesized)
agttagatgtacagaaagaaaagctaattcaaagtgaagtggccctaaatgatttacatttaaccaagcagaaacttgaggacaaagtagaaaatttagtagatcagctaaataaatcac

SEQ ID NO: 119451 - DNA, 120 bp, Artificial Sequence
  ENSG00000100815_18 (sequence is synthesized)
aagaaagtaatgtaagcatccagaaggagaatttagaacttaaggagcatattagacaaaatgaggaggagctttctagaataaggaatgagttaatgcagtctctaaatcaagactcta

SEQ ID NO: 119452 - DNA, 120 bp, Artificial Sequence
  ENSG00000100815_19 (sequence is synthesized)
atagtaattttaaggataccttacttaaagaaagagaagctgaagttagaaacttaaagcaaaatctttcagaattagaacagctcaatgaaaatttaaagaaagttgcttttgatgtca

SEQ ID NO: 119453 - DNA, 120 bp, Artificial Sequence
  ENSG00000100815_20 (sequence is synthesized)
aaatggaaaatgaaaagttagttttagcatgtgaagatgtgaggcatcagttagaagaatgtcttgctggtaacaatcagctttctctggaaaaaaacactattgtggagactctaaaaa

SEQ ID NO: 119454 - DNA, 120 bp, Artificial Sequence
  ENSG00000100815_21 (sequence is synthesized)
tggaaaaaggagagatagaggcagaattgtgttgggctaaaaagaggctgttggaagaagcaaacaagtatgagaaaaccattgaagaactgtcaaatgcacgtaatttgaatacctctg

SEQ ID NO: 119455 - DNA, 120 bp, Artificial Sequence
  ENSG00000100815_22 (sequence is synthesized)
ccttacagctggaacatgagcatttaattaaactcaatcaaaagaaagacatggaaatagcagaactcaaaaagaatattgaacaaatggatactgaccataaagaaactaaggacgttt

SEQ ID NO: 119456 - DNA, 120 bp, Artificial Sequence
  ENSG00000100815_23 (sequence is synthesized)
tgtcatctagtttagaagagcagaagcagttgacacaacttataaacaagaaagaaatttttattgaaaagcttaaagaaagaagttcaaagctgcaggaggaattggataaatattctc

SEQ ID NO: 119457 - DNA, 120 bp, Artificial Sequence
  ENSG00000100815_24 (sequence is synthesized)
aggccttaagaaaaaatgaaattttaagacagaccatagaggaaaaagaccgaagtcttggatccatgaaagaggaaaataatcatctgcaagaagaattggaacgactcagggaagagc

SEQ ID NO: 119458 - DNA, 120 bp, Artificial Sequence
  ENSG00000100815_25 (sequence is synthesized)
agagtcgaaccgcacctgtggctgaccctaaaacccttgatagtgttactgaactagcatctgaggtatctcaactgaacacgatcaaggaacatcttgaagaggaaattaaacatcatc

SEQ ID NO: 119459 - DNA, 120 bp, Artificial Sequence
  ENSG00000100815_26 (sequence is synthesized)
aaaagataattgaagatcaaaaccagagtaagatgcaactacttcagtctttacaagagcaaaagaaggaaatggatgagtttagataccagcatgagcaaatgaacgccacacacaccc

SEQ ID NO: 119460 - DNA, 120 bp, Artificial Sequence
  ENSG00000100815_27 (sequence is synthesized)
agctctttttagagaaggatgaggaaattaagagtttgcaaaaaacaattgaacaaatcaaaacccagttgcatgaagaaagacaggacattcaaacagataactctgatatttttcaag

SEQ ID NO: 119461 - DNA, 120 bp, Artificial Sequence
  ENSG00000100815_28 (sequence is synthesized)
aaacaaaagttcagagccttaatatagaaaatggaagtgaaaagcatgatttatctaaagctgaaacggaaagattagtgaaaggaataaaagagcgagaactggagattaaacttctaa

SEQ ID NO: 119462 - DNA, 120 bp, Artificial Sequence
  ENSG00000100815_29 (sequence is synthesized)
atgaaaagaatatatctttaactaaacagattgatcagttgtccaaagatgaagttggtaaactaactcagattattcagcagaaagatttggagatacaagctcttcatgctagaattt

SEQ ID NO: 119463 - DNA, 120 bp, Artificial Sequence
  ENSG00000100815_30 (sequence is synthesized)
cttcaacttcccatactcaagatgttgtttaccttcaacagcaactgcaggcttatgctatggaaagagaaaaggtatttgctgttttgaatgagaagactagggaaaatagccatctaa

SEQ ID NO: 119464 - DNA, 120 bp, Artificial Sequence
  ENSG00000100815_31 (sequence is synthesized)
aaacagaatatcacaaaatgatggatattgttgctgccaaggaagcagctcttatcaaactgcaagatgaaaataaaaaattgtccactagatttgaaagtagtggccaagatatgttta

SEQ ID NO: 119465 - DNA, 120 bp, Artificial Sequence
  ENSG00000100815_32 (sequence is synthesized)
gagaaactattcagaatttatcacgtatcattcgagaaaaagacatcgaaatagatgcactaagtcagaaatgtcagactttattggcagttttacaaacatccagcactggtaatgagg

SEQ ID NO: 119466 - DNA, 120 bp, Artificial Sequence
  ENSG00000100815_33 (sequence is synthesized)
ctggaggtgttaatagtaatcaatttgaggagcttctacaggaacgtgacaagttaaaacagcaagtaaagaaaatggaagagtggaagcagcaggtgatgaccacagtacaaaatatgc

SEQ ID NO: 119467 - DNA, 120 bp, Artificial Sequence
  ENSG00000100815_34 (sequence is synthesized)
aacacgagtcagcccagcttcaggaagagcttcaccaacttcaagcacaggttttggttgacagtgataataattctaaattacaagtggactatactggcctgatccaaagttatgagc

SEQ ID NO: 119468 - DNA, 120 bp, Artificial Sequence
  ENSG00000100815_35 (sequence is synthesized)
agaatgaaaccaaactcaaaaattttgggcaggaattagcacaagttcagcacagcattgggcagctttgcaataccaaggatcttcttttaggaaaacttgatattatttcaccccagc

SEQ ID NO: 119469 - DNA, 120 bp, Artificial Sequence
  ENSG00000100815_36 (sequence is synthesized)
tgtcttctgcatcattgcttactccccagtctgcagagtgtcttagagcaagtaagtctgaagtattgagtgaatcttctgaattgcttcagcaagagttagaagagctaagaaaatcac

SEQ ID NO: 119470 - DNA, 120 bp, Artificial Sequence
  ENSG00000100815_37 (sequence is synthesized)
tacaggaaaaagatgcaacaattagaactctccaggaaaataaccacagattgtctgattcgattgctgccacctcagagctagaaagaaaagaacacgaacaaaccgattcagaaatca

SEQ ID NO: 119471 - DNA, 120 bp, Artificial Sequence
  ENSG00000100815_38 (sequence is synthesized)
agcagctaaaggagaaacaagatgttttgcaaaagttacttaaggaaaaagacctcttaatcaaagccaaaagtgatcaactactttcttccaatgaaaatttcactaacaaagtaaatg

SEQ ID NO: 119472 - DNA, 120 bp, Artificial Sequence
  ENSG00000100815_39 (sequence is synthesized)
aaaacgaacttttgaggcaggcagtaacaaacctgaaggagagaatattaattctagagatggacattggcaaactaaaaggagaaaatgaaaaaatagtggaaacatacaggggaaagg

SEQ ID NO: 119473 - DNA, 120 bp, Artificial Sequence
  ENSG00000100815_40 (sequence is synthesized)
aaacagaatatcaagcgttacaagagactaacatgaagttttctatgatgctgcgagaaaaagagtttgagtgccactcaatgaaggagaaggctcttgcttttgaacagctattgaaag

SEQ ID NO: 119474 - DNA, 120 bp, Artificial Sequence
  ENSG00000100815_41 (sequence is synthesized)
ttttaaatgcagttaaatcaatgcaggagaagacagttgtgtttcaacaggagagagaccaagtcatgttggccctgaaacaaaaacaaatggaaaatactgccctacagaatgaggttc

SEQ ID NO: 119475 - DNA, 120 bp, Artificial Sequence
  ENSG00000100815_42 (sequence is synthesized)
aacgtttacgtgacaaagaatttcgttcaaaccaagagctagagagattgcgtaatcatcttttagaatcagaagattcttatacccgtgaagctttggctgcagaagatagagaggcta

SEQ ID NO: 119476 - DNA, 120 bp, Artificial Sequence
  ENSG00000100815_43 (sequence is synthesized)
aactaagaaagaaagtcacagtattggaggaaaagctagtttcatcctctaatgcaatggaaaatgcaagccatcaagccagtgtgcaggtagagtcattgcaagaacagttgaatgtag

SEQ ID NO: 119477 - DNA, 120 bp, Artificial Sequence
  ENSG00000100815_44 (sequence is synthesized)
tttccaagcaaagggatgaaactgcgctgcagctttctgtctctcaggaacaagtaaagcagtatgctctgtcactggccaacctgcagatggtactagagcatttccaacaagaggaaa

SEQ ID NO: 119478 - DNA, 120 bp, Artificial Sequence
  ENSG00000100815_45 (sequence is synthesized)
aagctatgtattctgctgaactcgaaaagcaaaaacagcttatagctgaatggaagaaaaacgcagaaaatctggaaggaaaagtgatatcattacaggaatgtttggatgaagcaaatg

SEQ ID NO: 119479 - DNA, 120 bp, Artificial Sequence
  ENSG00000100815_46 (sequence is synthesized)
ctgcattggattcagcatcaagacttacagaacagttagatgtaaaagaagaacaaattgaagaacttaaaagacaaaatgagctccgacaagaaatgctggatgatgtacaaaagaaat

SEQ ID NO: 119480 - DNA, 120 bp, Artificial Sequence
  ENSG00000100815_47 (sequence is synthesized)
tgatgagcttagcaaacagctcagaaggaaaagtagacaaagtcctaatgagaaacctcttcattggtcatttccacacaccgaaaaatcagcgtcatgaagtgttacggttaatgggga

SEQ ID NO: 119481 - DNA, 120 bp, Artificial Sequence
  ENSG00000100815_48 (sequence is synthesized)
gcatcctgggcgtcagaagggaggagatggagcagttgtttcatgacgatcagggcggtgttaccaggtggatgactgggtggcttggaggaggatcaaaaagtgttcccaacacacctt

SEQ ID NO: 119482 - DNA, 120 bp, Artificial Sequence
  ENSG00000100815_49 (sequence is synthesized)
tgagaccaaatcagcaatctgtggttaatagttctttttcagaactttttgttaaatttctagaaacagaatctcatccatccattccaccaccaaagctttctgttcatgatatgaaac

SEQ ID NO: 119483 - DNA, 120 bp, Artificial Sequence
  ENSG00000100815_50 (sequence is synthesized)
ctctggattcaccaggaagaagaaaaagagatacaaatgcaccagaaagttttaaagatacagcagaatccaggtctggtagaagaacagatgtaaatccgtttttggctcctcgctcgg

SEQ ID NO: 119484 - DNA, 120 bp, Artificial Sequence
  ENSG00000100815_51 (sequence is synthesized)
cagctgtacctcttattaacccagctggacttggacctggtgggcccgggcatcttcttctgaaacccatctcagatgttttgcccacatttacacctttgccagcgttacctgacaaca

SEQ ID NO: 119485 - DNA, 120 bp, Artificial Sequence
  ENSG00000100815_52 (sequence is synthesized)
gtgctggggttgtgctgaaagaccttttaaagcaatagatgattctcaagccagagacaatctagcactttaaagaaaccatgaacactatatgtatgtactttatcacaaagtggcctt

SEQ ID NO: 119486 - DNA, 120 bp, Artificial Sequence
  ENSG00000100815_53 (sequence is synthesized)
tggggagaaagtcatgtatttgttcgcaattatgctttctctgaatttaataaaaatattcctaatgcttttagaaactgcaggtgtcaggagcaagtgtttgctatataatctgcttta

SEQ ID NO: 119487 - DNA, 120 bp, Artificial Sequence
  ENSG00000100815_54 (sequence is synthesized)
ttccttctgatttgacctaatttaagctaggaacatttaatttatcttttaccttaatttacaaaaatacagacagacaaaaatactagtagctatatggcagctttttatttccttttg

SEQ ID NO: 119488 - DNA, 120 bp, Artificial Sequence
  ENSG00000100815_55 (sequence is synthesized)
tgatttccaagctcatttaagctagagattgtggtttatcaagagagtgttttttttttttaaacgaagaataaaaaaatactagtagtggcttctctgcatagtgcagaaagttgattt

SEQ ID NO: 119489 - DNA, 120 bp, Artificial Sequence
  ENSG00000100815_56 (sequence is synthesized)
gaagcatatattgatcatctttagaggactttgtggagacaggccaacaagattgttgctggaaggtcataggttccctgaggtgaagtatgtatttggtcctgtgcaatattatcatgt

SEQ ID NO: 119490 - DNA, 120 bp, Artificial Sequence
  ENSG00000100815_57 (sequence is synthesized)
aggtgaagtatgtatttggtcctgtgcaatattatcatgtgtgtagattctttttttgtttgttttaaatagagatggggtctcactatgttgccaggctggcctcaaactcctgggctc

SEQ ID NO: 119491 - DNA, 120 bp, Artificial Sequence
  ENSG00000100815_58 (sequence is synthesized)
aaggcatgagccactgcgcctggccctgtgtgtaaattcatgtgactaccaccacaggcaagacacggaagacttccattacaagcatccccctgtgttgccctctcataatcattgcca

SEQ ID NO: 119492 - DNA, 120 bp, Artificial Sequence
  ENSG00000100815_59 (sequence is synthesized)
cctctctccctggccctctccttaatccctgacaaccacttactgttctccatctcagtcattttgttattttgagaatgttatataaatggaatcaatatataccctcttgagactggc

SEQ ID NO: 119493 - DNA, 120 bp, Artificial Sequence
  ENSG00000100815_60 (sequence is synthesized)
tttttttcactcagcataattcccttgagatccatccaaggctttggatgtatcactagtttgttcctttttattgttgagcatatagtgcagatatatcacttagttttaacagctaag

SEQ ID NO: 119494 - DNA, 120 bp, Artificial Sequence
  ENSG00000100815_61 (sequence is synthesized)
gtatctatttaaagataccatcttaaaactaaatgttacacaaattcatgcaactttcatataagcattaaaccatacagctgcatctacgtaagtataattagcaaaatcactgaacat

SEQ ID NO: 119495 - DNA, 120 bp, Artificial Sequence
  ENSG00000100815_62 (sequence is synthesized)
gccacttcctgcctccgtctgcggtgttgacatatgaggtacagcaatccgagagtcaactgttatcacggtggccactgagggcagtgaaatcactttgatagcaccagtacccagatg

SEQ ID NO: 119496 - DNA, 120 bp, Artificial Sequence
  ENSG00000100815_63 (sequence is synthesized)
tttgaaacttaagaaagtatttctttaatttttcataaacccatcataaaaaaaaaatcccgacttgaaacttaactgtatctggatgttcatatttttattagttgttgaagttgtaca

SEQ ID NO: 119497 - DNA, 120 bp, Artificial Sequence
  ENSG00000100815_64 (sequence is synthesized)
tttaaaaagatatttcttgcaaattttgtaaatttctatatgcttttaaaatagaaacatttgtataacaaggaaggatgaaaataaaacaaattcaaatatgtgaatagtcctggctga

SEQ ID NO: 119498 - DNA, 120 bp, Artificial Sequence
  ENSG00000100815_65 (sequence is synthesized)
ggccagaactaaatttggttatttgcaagttttactgtgattaactgtactttctaatgtatttggaagactggaagtcttaattccatgttgatgggtgaaacttgtttttctgaaaaa

SEQ ID NO: 119499 - DNA, 120 bp, Artificial Sequence
  ENSG00000100815_66 (sequence is synthesized)
tgaagtaactgaaaatgctgcttcagaatgtcttgtatctccttagataactaatttatattgccattctttatttactatactttaaaggaagttgtcatgcaagttctatattagaac

SEQ ID NO: 119500 - DNA, 120 bp, Artificial Sequence
  ENSG00000100815_67 (sequence is synthesized)
tgtcaaactgcctcttggtttttgcctattattatttctctgtgagttgttactccttggtttttatatgctcctaacaaagatactttcactgactatcctacattatttgctgcttgc

SEQ ID NO: 119501 - DNA, 120 bp, Artificial Sequence
  ENSG00000100815_68 (sequence is synthesized)
cattgaaatttcatttcagtgtggagaaatgaaatactagtttctaagttaaaaaagacacatggtcctttatttttaagaaatagaatatgtaaaaagttttctcttttaatttgaaaa

SEQ ID NO: 119502 - DNA, 120 bp, Artificial Sequence
  ENSG00000100815_69 (sequence is synthesized)
agagatgcatggttggtatttaagtagtatgtcatcatatttgaaatgccttttgtgacatttttgagtatttccttctctgaccaaaacaacttgtccgcctctcatcccatggtttaa

SEQ ID NO: 119503 - DNA, 120 bp, Artificial Sequence
  ENSG00000100815_70 (sequence is synthesized)
cgtaagtttaaaagctgttgtgggtggattgcatagctaaacatcacagagcatgatattaaatggctgctatttaaataaatatgtgaccttgtcctaaagctataatactggccgggc

SEQ ID NO: 119504 - DNA, 120 bp, Artificial Sequence
  ENSG00000100815_71 (sequence is synthesized)
aaaaaaaaaaaaaaaaaaagctatagtacctaatgttttcattgtgtcattgaaactatagctgactggtatgtatactaagtgttcgttgatctaaaccagatataagtcattgacttt

SEQ ID NO: 119505 - DNA, 120 bp, Artificial Sequence
  ENSG00000100815_72 (sequence is synthesized)
ttcgttgatctaaaccagatataagtcattgacttttctgaaacttagttgtgtcagagatgaaccacctgctcactgaaccgtcttagtaaccagtgatgaagcatataattctaatgt

SEQ ID NO: 119506 - DNA, 120 bp, Artificial Sequence
  ENSG00000100815_73 (sequence is synthesized)
tggcaataggacattgctaacagtgcgtttaactgcaatattttaactacagtaatttttctgtttatttctctatccactcagtagaatttgtggttgaattccaccttcgctgccata

SEQ ID NO: 119507 - DNA, 120 bp, Artificial Sequence
  ENSG00000100815_74 (sequence is synthesized)
gttttttaccacattcctaatggttttcaacctctatactgtagtagaaaattcatctaactactgaatttaattttagcataatactggatcaaattgtttgaattttcattcctgtca

SEQ ID NO: 119508 - DNA, 120 bp, Artificial Sequence
  ENSG00000100815_75 (sequence is synthesized)
tttttgatttttaaaaaatgaaacaaaactaaacaacaaaaccctaggaaaagaatggcttctttccaactagtcaattaaaacgtccagtatctccccaaataaagccttaggtttctt

SEQ ID NO: 119509 - DNA, 120 bp, Artificial Sequence
  ENSG00000100815_76 (sequence is synthesized)
ttaacctcttaatggttaattgaaaagagtacagaaactatcaaaatacttatccaatcaatggggggaaaagctatgtcttcagggacagtagagtgatgagaattttttagaaaacac

SEQ ID NO: 119510 - DNA, 120 bp, Artificial Sequence
  ENSG00000100815_77 (sequence is synthesized)
tattatccatcaaacttaaaagcatttggacctgatatttaaagataatgaagttttccacatattgaagtattcaagacatcttccatccacaaaaatttatctttaagttttgtaaat

SEQ ID NO: 119511 - DNA, 120 bp, Artificial Sequence
  ENSG00000100815_78 (sequence is synthesized)
atcaagtaagtatagatgatatttattttatatattcctatggaaaaaatgctactttaatgttctgacatttgtgattatttgccagtctttactttttaacttattaaaaagttaaat

SEQ ID NO: 119512 - DNA, 120 bp, Artificial Sequence
  ENSG00000100815_79 (sequence is synthesized)
acttattaaggtttctctatgtaaaacaatttaaattgtcttttgatttttagggaaatatctaaacgtgggaaatttccaacgcaaccttaatattaggttgtgttatttatagagcta

SEQ ID NO: 119513 - DNA, 120 bp, Artificial Sequence
  ENSG00000100815_80 (sequence is synthesized)
aagttaatgcatttttgaatttctcaggagcactgcaaggcaaaaaaatactccaaataaaaatgatatatgtaagttggcaatgtcttcagtcacaataaaaaaaatttttagcaaaca

SEQ ID NO: 119514 - DNA, 120 bp, Artificial Sequence
  ENSG00000100815_81 (sequence is synthesized)
agagttgcctttgtgtacacacctgctttcagccttctacatatgaacatatcaagtaaatgttggtgtacaaatatacatgatgaaagaatactgtcacatggccaggcatggtggctc

SEQ ID NO: 119515 - DNA, 120 bp, Artificial Sequence
  ENSG00000100823_0 (sequence is synthesized)
cttctttgtgctcgggttaggaggagctaggctgccatcgggccggtgcagatacggggttgctcttttgctcataagaggggcttcgctggcagtctgaacggcaagcttgagtcagga

SEQ ID NO: 119516 - DNA, 120 bp, Artificial Sequence
  ENSG00000100823_1 (sequence is synthesized)
cccttaattaagatcctcaattggctggagggcagatctcgcgagtagggcaacgcggtaaaaatattgcttcggtgggtgacgcggtacagctgcccaagggcgttcgtaacgggaatg

SEQ ID NO: 119517 - DNA, 120 bp, Artificial Sequence
  ENSG00000100823_2 (sequence is synthesized)
ccgaagcgtgggaaaaagggagcggtggcggaagacggggatgagctcaggacagagccagaggccaagaagagtaagacggccgcaaagaaaaatgacaaagaggcagcaggagagggc

SEQ ID NO: 119518 - DNA, 120 bp, Artificial Sequence
  ENSG00000100823_3 (sequence is synthesized)
ccagccctgtatgaggaccccccagatcagaaaacctcacccagtggcaaacctgccacactcaagatctgctcttggaatgtggatgggcttcgagcctggattaagaagaaaggatta

SEQ ID NO: 119519 - DNA, 120 bp, Artificial Sequence
  ENSG00000100823_4 (sequence is synthesized)
gattgggtaaaggaagaagccccagatatactgtgccttcaagagaccaaatgttcagagaacaaactaccagctgaacttcaggagctgcctggactctctcatcaatactggtcagct

SEQ ID NO: 119520 - DNA, 120 bp, Artificial Sequence
  ENSG00000100823_5 (sequence is synthesized)
ccttcggacaaggaagggtacagtggcgtgggcctgctttcccgccagtgcccactcaaagtttcttacggcataggcgatgaggagcatgatcaggaaggccgggtgattgtggctgaa

SEQ ID NO: 119521 - DNA, 120 bp, Artificial Sequence
  ENSG00000100823_6 (sequence is synthesized)
tgctggtaacagcatatgtacctaatgcaggccgaggtctggtacgactggagtaccggcagcgctgggatgaagcctttcgcaagttcctgaagggcctggcttcccgaaagccccttg

SEQ ID NO: 119522 - DNA, 120 bp, Artificial Sequence
  ENSG00000100823_7 (sequence is synthesized)
tgctgtgtggagacctcaatgtggcacatgaagaaattgaccttcgcaaccccaaggggaacaaaaagaatgctggcttcacgccacaagagcgccaaggcttcggggaattactgcagg

SEQ ID NO: 119523 - DNA, 120 bp, Artificial Sequence
  ENSG00000100823_8 (sequence is synthesized)
ctgtgccactggctgacagctttaggcacctctaccccaacacaccctatgcctacaccttttggacttatatgatgaatgctcgatccaagaatgttggttggcgccttgattactttt

SEQ ID NO: 119524 - DNA, 120 bp, Artificial Sequence
  ENSG00000100823_9 (sequence is synthesized)
tgttgtcccactctctgttacctgcattgtgtgacagcaagatccgttccaaggccctcggcagtgatcactgtcctatcaccctatacctagcactgtgacaccacccctaaatcactt

SEQ ID NO: 119525 - DNA, 120 bp, Artificial Sequence
  ENSG00000100823_10 (sequence is synthesized)
tgagcctgggaaataagccccctcaactaccattccttctttaaacactcttcagagaaatctgcattctatttctcatgtataaaactaggaatcctccaaccaggctcctgtgataga

SEQ ID NO: 119526 - DNA, 120 bp, Artificial Sequence
  ENSG00000100823_11 (sequence is synthesized)
gttcttttaagcccaagattttttatttgagggttttttgttttttaaaaaaaaattgaacaaagactactaatgactttgtttgaattatccacatgaaaataaagagccatagtttca

SEQ ID NO: 119527 - DNA, 120 bp, Artificial Sequence
  ENSG00000100823_12 (sequence is synthesized)
cttctttgtgctcgggttaggaggagctaggctgccatcgggccggtgcagatacggggttgctcttttgctcataagaggggcttcgctggcagtctgaacggcaacgcggtaaaaata

SEQ ID NO: 119528 - DNA, 120 bp, Artificial Sequence
  ENSG00000100823_13 (sequence is synthesized)
gcggtggcggaagacggggatgagctcaggacaggggtttgtgaagaagtcgcaggaaccgtaggctttcgttgggtctatagttaacgccggatcgcagttggaaaccaccagcttttt

SEQ ID NO: 119529 - DNA, 120 bp, Artificial Sequence
  ENSG00000100823_14 (sequence is synthesized)
cctcaattggctggagggcagatctcgcgagtagggtacaaggcactatgaaatgatctagtttcgtgggtgaggggctgaagggcctatgatgcacggaggcggggaaaggatttagag

SEQ ID NO: 119530 - DNA, 120 bp, Artificial Sequence
  ENSG00000100823_15 (sequence is synthesized)
ataacgtggtttgaaaggcgggacctggtgcggggacgctcttgggaggagtcttctccccagccttagctggtttcatgatttctttgcgtctgtaggcaacgcggtaaaaatattgct

SEQ ID NO: 119531 - DNA, 120 bp, Artificial Sequence
  ENSG00000100823_16 (sequence is synthesized)
agcccttcttcctagaagctgcggcgggggtgtttgtcattcccttgatgtacggtaagtacgggccgactcatttttgcaggggtttgtgaagaagtcgcaggaaccgtaggctttcgt

SEQ ID NO: 119532 - DNA, 120 bp, Artificial Sequence
  ENSG00000100823_17 (sequence is synthesized)
tgggtctatagttaacgccggatcgcagttggaaaccaccagctttttgtcagtatatattactcattttatagagccagaggccaagaagagtaagacggccgcaaagaaaaatgacaa

SEQ ID NO: 119533 - DNA, 120 bp, Artificial Sequence
  ENSG00000100823_18 (sequence is synthesized)
ggagctaggctgccatcgggccggtgcagatacggggttgctcttttgctcataagaggggcttcgctggcagtctgaacggcaagcttgaaagctgcggcgggggtgtttgtcattccc

SEQ ID NO: 119534 - DNA, 120 bp, Artificial Sequence
  ENSG00000100836_0 (sequence is synthesized)
cgggatttgagaatttggcgcagtgccccgccttagaggtggggccttatttgattgccaagtaatattccccaatggagtactagctcatggtgacgggcaggcagcttgactaatgag

SEQ ID NO: 119535 - DNA, 120 bp, Artificial Sequence
  ENSG00000100836_1 (sequence is synthesized)
cagcttgactaatgagtcctcggcgtggccggcgcagctctccaatcgccgggcggcgggccccagtctgagcggcgatggcggcggcggcggcggcggcagcagcagcgggggctgcgg

SEQ ID NO: 119536 - DNA, 120 bp, Artificial Sequence
  ENSG00000100836_2 (sequence is synthesized)
gggcggcggcgccatcttgtgcccggggccggtggggaggccggggagggggccccggggggcgcaggggactacgggaacggcctggagtctgaggaactggagcctgaggagctgctg

SEQ ID NO: 119537 - DNA, 120 bp, Artificial Sequence
  ENSG00000100836_3 (sequence is synthesized)
agtctgaggaactggagcctgaggagctgctgctggagcccgagccggagcccgagcccgaagaggagccgccccggccccgcgcccccccgggagctccgggccctgggcctggttcgg

SEQ ID NO: 119538 - DNA, 120 bp, Artificial Sequence
  ENSG00000100836_4 (sequence is synthesized)
ggagccgggactggtcgagggtgacccgggggacggcgccattgaggacccggagctggaagctatcaaagctcgagtcagggagatggaggaagaagctgagaagctaaaggagctaca

SEQ ID NO: 119539 - DNA, 120 bp, Artificial Sequence
  ENSG00000100836_5 (sequence is synthesized)
gaacgaggtagagaagcagatgaatatgagtccacctccaggcaatgctggcccggtgatcatgtccattgaggagaagatggaggctgatgcccgttccatctatgttggcaatgtgga

SEQ ID NO: 119540 - DNA, 120 bp, Artificial Sequence
  ENSG00000100836_6 (sequence is synthesized)
ctatggtgcaacagcagaagagctggaagctcactttcatggctgtggttcagtcaaccgtgttaccatactgtgtgacaaatttagtggccatcccaaagggtttgcgtatatagagtt

SEQ ID NO: 119541 - DNA, 120 bp, Artificial Sequence
  ENSG00000100836_7 (sequence is synthesized)
ctcagacaaagagtcagtgaggacttccttggccttagatgagtccctatttagaggaaggcaaatcaaggtgatcccaaaacgaaccaacagaccaggcatcagcacaacagaccgggg

SEQ ID NO: 119542 - DNA, 120 bp, Artificial Sequence
  ENSG00000100836_8 (sequence is synthesized)
gccccggggtcgcgtctacaggggccgggctagagcgacatcatggtattccccttactaaaaaaagtgtgtattaggaggagagagaggaaaaaaagaggaaagaaggaaaaaaaaaag

SEQ ID NO: 119543 - DNA, 120 bp, Artificial Sequence
  ENSG00000100836_9 (sequence is synthesized)
aattaaaaaaaaaaaaaagaaaaacagaagatgaccttgatggaaaaaaaatattttttaaaaaaaagatatactgtggaaggggggagaatcccataactaactgctgaggagggacct

SEQ ID NO: 119544 - DNA, 120 bp, Artificial Sequence
  ENSG00000100836_10 (sequence is synthesized)
gctttggggagtaggggaaggcccagggagtggggcagggggctgcttattcactctggggattcgccatggacacgtctcaactgcgcaagctgctgcccatgtttccctgccccactt

SEQ ID NO: 119545 - DNA, 120 bp, Artificial Sequence
  ENSG00000100836_11 (sequence is synthesized)
cacccccttgggggctgctcaagggtaggtgggcgtgggtggtaggaggtttttttttttacccagggctctggaaggacaccaaactgttctgcttgttaccttccctccgtcttctcc

SEQ ID NO: 119546 - DNA, 120 bp, Artificial Sequence
  ENSG00000100836_12 (sequence is synthesized)
tcgcctttcacagtcccctcctgcctgctcctgtccagccaggtctaccacccaccccacccctcttctccggctccctgcccctccagattgcctggtgatctattttgtttccttttg

SEQ ID NO: 119547 - DNA, 120 bp, Artificial Sequence
  ENSG00000100836_13 (sequence is synthesized)
tgtttctttttctgttttgagtgtctttctttgcaggtttctgtagccggaagatctccgttccgctcccagcggctccagtgtaaattccccttccccctggggaaatgcactaccttg

SEQ ID NO: 119548 - DNA, 90 bp, Artificial Sequence
  ENSG00000100836_14 (sequence is synthesized)
ccttttttcccttttatttggagggaatgggaggaagtgggaacagggaggtgggaggtggattttgtttatttttttagctcatttcca

SEQ ID NO: 119549 - DNA, 120 bp, Artificial Sequence
  ENSG00000100836_15 (sequence is synthesized)
gtgggaggtggattttgtttatttttttagctcatttccaggggtgggaatttttttttaatatgtgtcatgaataaagttgtttttgaaaataaaaattgtttggccttttgggtgtaa

SEQ ID NO: 119550 - DNA, 120 bp, Artificial Sequence
  ENSG00000100836_16 (sequence is synthesized)
ggacccggtgagggaaggagggcgagcgagcaggccggcggctggccggccgggtcactggaggcccagagctcgggcgagcgggtggcaggcggggggtggggttgggcggggaataac

SEQ ID NO: 119551 - DNA, 120 bp, Artificial Sequence
  ENSG00000100836_17 (sequence is synthesized)
gtggctggggccgggtcgggccggggatgggtcagcgatcactacaaggggcccgactggcttgattcgggcgtcacggttgcctagtgttgttctagagagggtagcttttcttttatc

SEQ ID NO: 119552 - DNA, 120 bp, Artificial Sequence
  ENSG00000100836_18 (sequence is synthesized)
acgaccctcgcatggggcgagggaaatggccgagcatggctgaggccgcgctctggccgagagcagggcacagcccctgcgttggttcctcttaagctgtcctccataccctccccactt

SEQ ID NO: 119553 - DNA, 120 bp, Artificial Sequence
  ENSG00000100836_19 (sequence is synthesized)
atagtcctgaaaggaacatctccgggatagatgtggttttgggtgtggagggagtgtgggaaggaggttaaaggtaatggaatgatcagtaatcagcaaaggctctgggtttggaaggaa

SEQ ID NO: 119554 - DNA, 120 bp, Artificial Sequence
  ENSG00000100836_20 (sequence is synthesized)
aagagattaattcctcaaattaccagatttcatgtgctttggtgtatgatggcccagaccaaaggctcgggagggttccttttgagacaggaatttgcctggtgcctgtgaaatttttct

SEQ ID NO: 119555 - DNA, 120 bp, Artificial Sequence
  ENSG00000100836_21 (sequence is synthesized)
ttaacagcaggccccggggtcgcgtctacaggtcaggatagatgggctgctcctctttcccccgcctcccgtgagccccgtatgcttcctcctctctggtctgaggaacctccctccccc

SEQ ID NO: 119556 - DNA, 120 bp, Artificial Sequence
  ENSG00000100836_22 (sequence is synthesized)
ttgtctcctgcctgtgcaggttgaggaaggtagttgcaggccaggccagaaggccagcctcatcatcttttctgcagtagaaattggtgataagggctgcatccctcccttggttcaaag

SEQ ID NO: 119557 - DNA, 120 bp, Artificial Sequence
  ENSG00000100836_23 (sequence is synthesized)
aggcttccacccccagccttttttttcttgggagttggtggcatttgaaggtgtttgcggacaaaactgggaggaacagggcctccaggcagtgaaagcactgcttggacatttgttact

SEQ ID NO: 119558 - DNA, 120 bp, Artificial Sequence
  ENSG00000100836_24 (sequence is synthesized)
tagatgggctgctcctctttcccccgcctcccgggccgggctagagcgacatcatggtattccccttactaaaaaaagtgtgtattaggaggagagagaggaaaaaaagaggaaagaagg

SEQ ID NO: 119559 - DNA, 120 bp, Artificial Sequence
  ENSG00000100836_25 (sequence is synthesized)
acagccttgtgggaggattttgagatacttattctttatttgagccagtcttgcaaggttaacttctcactgggcctagtgtggtgcccaggtttttgccttgcttcacttctgtctcta

SEQ ID NO: 119560 - DNA, 120 bp, Artificial Sequence
  ENSG00000100836_26 (sequence is synthesized)
catttaaatagacgggttaggcatataaaccttggcttttcataagctctacctgcctatccccaggagttagggaggatctatttgtgatggcctagggtttaagagctgtggaggact

SEQ ID NO: 119561 - DNA, 120 bp, Artificial Sequence
  ENSG00000100836_27 (sequence is synthesized)
gaaaactggataaaaagggggtccttttccttgcccctgtctctcactcagatgcgcttctttttcgccactgtttggcagttttctgttaagcccccctccccctgccccagttctcca

SEQ ID NO: 119562 - DNA, 120 bp, Artificial Sequence
  ENSG00000100836_28 (sequence is synthesized)
ggtgcgttactatttctgggatcatggggtcagttttaggacacttgaacacttcttttccccccttcccttcacagtaactggggcaggggcctacggggaggggcttgtactgaacta

SEQ ID NO: 119563 - DNA, 120 bp, Artificial Sequence
  ENSG00000100836_29 (sequence is synthesized)
agtctacgtctatctttctttgtagaggttgcgtgctcgcatttgaccttcaaatctaatagtttttcctccaattggagacgctttaggattctaagagaaagcaagctgcaaggggtt

SEQ ID NO: 119564 - DNA, 120 bp, Artificial Sequence
  ENSG00000100836_30 (sequence is synthesized)
tcccctttaatctagaaatgtggagtctcagcccacttaattttgctcactcttaaaagcatttcaaccaaagccattcattagggatttgatttggaggcaggagggattcctatactg

SEQ ID NO: 119565 - DNA, 120 bp, Artificial Sequence
  ENSG00000100842_0 (sequence is synthesized)
ctttctcctcctccaaccttggcggaggccacgactcaggcgccacagctgggggctagaggccgcggaccatggtgcggggcagccaccgctgaagtcagcaaaaccgagcctggcctg

SEQ ID NO: 119566 - DNA, 120 bp, Artificial Sequence
  ENSG00000100842_1 (sequence is synthesized)
aggcaggctgcgcgggaggccaaagccatggccattgccacgtcgacccagctggcccgggcactgtatgacaacaccgctgagtccccccaggagctgtccttccgccgaggggatgtc

SEQ ID NO: 119567 - DNA, 120 bp, Artificial Sequence
  ENSG00000100842_2 (sequence is synthesized)
ctacgggtcctgcagagagagggcgctggtggactggacggctggtgcctctgctccctacacggccagcagggcattgtgcccgccaacagggtgaagctcttgcctgctggcccagca

SEQ ID NO: 119568 - DNA, 120 bp, Artificial Sequence
  ENSG00000100842_3 (sequence is synthesized)
cccaagcccagcctctctcctgcgtccccagcccagcctggctcaccatatccagccccagatcacagcaatgaggaccaggaggtgtatgtggtgccgcccccagctcggccctgtcca

SEQ ID NO: 119569 - DNA, 120 bp, Artificial Sequence
  ENSG00000100842_4 (sequence is synthesized)
acctcaggacctccagctggaccttgcccaccctctcctgacctcatctacaaaatccccagagctagtgggacccagctggctgctcccagagatgccttggaggtctacgatgtgccc

SEQ ID NO: 119570 - DNA, 120 bp, Artificial Sequence
  ENSG00000100842_5 (sequence is synthesized)
cccaccgccctccgggtgccctccagtggcccctatgactgccctgcctccttttcccaccctctgacccgggttgccccgcagccccctggagaggatgatgctccctatgatgtgcct

SEQ ID NO: 119571 - DNA, 120 bp, Artificial Sequence
  ENSG00000100842_6 (sequence is synthesized)
ctgaccccaaagccacctgcagagctggaaccagatctggagtgggaaggaggccgggagccggggccccccatctatgctgccccctccaacctgaaacgagcgtcagccttactcaat

SEQ ID NO: 119572 - DNA, 120 bp, Artificial Sequence
  ENSG00000100842_7 (sequence is synthesized)
ttgtatgaagcacccgaggaactgctggcagacggggagggcgggggcactgatgaggggatctacgatgtgcctctgctggggccagaggctcccccttctccagagccccctggagcc

SEQ ID NO: 119573 - DNA, 120 bp, Artificial Sequence
  ENSG00000100842_8 (sequence is synthesized)
ttggcctcccatgaccaggacaccctggcccagcttctggccagaagccccccacccccacacaggccccggctcccctcagctgagagcctgtcccgccgccctctgcctgccctgcct

SEQ ID NO: 119574 - DNA, 120 bp, Artificial Sequence
  ENSG00000100842_9 (sequence is synthesized)
gtccctgaggcccccagcccctccccagtgccctctcctgccccaggccggaagggcagcatccaggaccggcctctgcccccacccccaccccgcctgcctggttatggaggccccaag

SEQ ID NO: 119575 - DNA, 120 bp, Artificial Sequence
  ENSG00000100842_10 (sequence is synthesized)
gtcgagggggatccagagggcagggagatggaggatgacccagcaggacaccacaatgagtacgagggcattccgatggccgaggagtatgactatgtccacctgaagggcatggacaaa

SEQ ID NO: 119576 - DNA, 120 bp, Artificial Sequence
  ENSG00000100842_11 (sequence is synthesized)
ggcccccggatcaggcctgcacaggggatcctgaactgcccgagagggggatgccggcgccgcaggaggccctgtccccaggggagccactggttgtgtccaccggagatctgcagctcc

SEQ ID NO: 119577 - DNA, 120 bp, Artificial Sequence
  ENSG00000100842_12 (sequence is synthesized)
tgtacttctatgctgggcaatgccagagccactactcagccctgcaggcagccgtggcagccctgatgtccagtacccaggctaatcagcccccgcgccttttcgtgccccacagcaaga

SEQ ID NO: 119578 - DNA, 120 bp, Artificial Sequence
  ENSG00000100842_13 (sequence is synthesized)
gggtggtggtggctgctcatcgcctggtgtttgttggggacaccctgggccggctggcagcctctgcccctctgagagcacaggtcagggctgcaggtacagcactgggccaggcattgc

SEQ ID NO: 119579 - DNA, 120 bp, Artificial Sequence
  ENSG00000100842_14 (sequence is synthesized)
gggccactgtgctggctgtcaagggagctgccctgggctacccatccagccctgccatccaagagatggtgcagtgtgtaacagaactggcagggcaggccctgcaattcactaccctgc

SEQ ID NO: 119580 - DNA, 120 bp, Artificial Sequence
  ENSG00000100842_15 (sequence is synthesized)
tcactagcctggctccatgaaggtcctttggcacagctctgctcctcccctgcctgccaaagcccccctttaggccttgggtggctggaaggctttgttaagggactaggagaaatgggg

SEQ ID NO: 119581 - DNA, 120 bp, Artificial Sequence
  ENSG00000100842_16 (sequence is synthesized)
gtatctttcccctttcctgccctttctgctcatctcaacctctcacagaggtgtcttctccccctaacctacagctttttgtacaagccattttgtgtaaattatttatatttaatatta

SEQ ID NO: 119582 - DNA, 120 bp, Artificial Sequence
  ENSG00000100842_17 (sequence is synthesized)
ttccctgctttgtcaggagcaggtactaggctctggggcagtgaggaactagatccttctctcctcagcctagggtggaggtcactgcactaccacccacctctggaagactggctgtga

SEQ ID NO: 119583 - DNA, 120 bp, Artificial Sequence
  ENSG00000100842_18 (sequence is synthesized)
aaagtcaggtggcagaaacctggggccacatagagcctctctcttttcctgtttcttggctctagaagatcagcactgcactgttagctgagagtgcgggcaagacataaactgtccaga

SEQ ID NO: 119584 - DNA, 120 bp, Artificial Sequence
  ENSG00000100842_19 (sequence is synthesized)
gtttgaaggttctcggaaagaccggagggcttctccccacagaaggcggagagagctggggctcagacatgggtgtgcaccttaataaaccctgctgtctgcctccctgactctgcttct

SEQ ID NO: 119585 - DNA, 120 bp, Artificial Sequence
  ENSG00000100842_20 (sequence is synthesized)
tgggagcatggtgagcagccctggtgctcagcagccatacctatgggacacacactacgaaaaggatgcctttagggtttgggggagattttactcctttcttcaacaactattcactgg

SEQ ID NO: 119586 - DNA, 120 bp, Artificial Sequence
  ENSG00000100842_21 (sequence is synthesized)
acaagttctctgctcccatgacgcgccaggcacagttctgcaagtatattgtgaatgtattgttctagtgggatacacaaataagtcagttaaaatacataaataaaaacataaacctgc

SEQ ID NO: 119587 - DNA, 120 bp, Artificial Sequence
  ENSG00000100842_22 (sequence is synthesized)
cgggcgcgctgagtgagtgcgcgcgtgaaaaccgccgcaccgccgggggtgcgagtgtctgggccgaagcggccactccagcgacccagccccacggccacgctctcgggggcctttggc

SEQ ID NO: 119588 - DNA, 120 bp, Artificial Sequence
  ENSG00000100842_23 (sequence is synthesized)
tccaggcaacttggggcaagcgtctcagttctcgctctcccttcctcccagcggggtcgccgcagaccccagccctgggagcaccgctctgcagcgcggccggcgggtggagacggttgg

SEQ ID NO: 119589 - DNA, 120 bp, Artificial Sequence
  ENSG00000100842_24 (sequence is synthesized)
cccctaaactcgctcgtccagcccaaccgccccggcggcttctcccagccctcgaggctctcctgagcggcctggagaggcgtcgagcgcagcccagcgcccgcctgctcacccgccccg

SEQ ID NO: 119590 - DNA, 80 bp, Artificial Sequence
  ENSG00000100842_25 (sequence is synthesized)
gcccgggaagggaattttcggatcctgcgagcccggggcgcccccgcggcctagggcgggcagctcccggggcctggccg

SEQ ID NO: 119591 - DNA, 120 bp, Artificial Sequence
  ENSG00000100852_0 (sequence is synthesized)
gaggaagagaggcgagcggagagtggaggaggaggcggcggcggcgggagcggtccccaggaatgtcgctgccgccgccaccgccggggccgctgccgttgaggaggagacggaggagac

SEQ ID NO: 119592 - DNA, 120 bp, Artificial Sequence
  ENSG00000100852_1 (sequence is synthesized)
cgacgttgttaggaagatgatccctatgatcttgaagatgtttctgcacagaaatgagggaaatacaaagaaccaaatacagttctgaaatttgggatctgtattttgagatgattttat

SEQ ID NO: 119593 - DNA, 120 bp, Artificial Sequence
  ENSG00000100852_2 (sequence is synthesized)
tttcagaatgagaagcatatctggttacctttatgaatgtagagacatgagaagagagttatgatggcaaaaaacaaagagcctcgtcccccatcctataccatcagtatagttggactc

SEQ ID NO: 119594 - DNA, 120 bp, Artificial Sequence
  ENSG00000100852_3 (sequence is synthesized)
tctgggactgaaaaagacaaaggtaactgtggagttggaaagtcttgtttgtgcaatagatttgtacgctcaaaagcagatgaatattatccagagcatacttctgtgcttagcaccatt

SEQ ID NO: 119595 - DNA, 120 bp, Artificial Sequence
  ENSG00000100852_4 (sequence is synthesized)
gactttggaggacgagtagtaaacaatgatcactttttgtactggggtgacataatacaaaatagtgaagatggagtagaatgcaaaattcatgtcattgaacaaacagagttcattgat

SEQ ID NO: 119596 - DNA, 120 bp, Artificial Sequence
  ENSG00000100852_5 (sequence is synthesized)
gaccagactttcttgcctcatcggagtacgaatttgcaaccatatataaaacgtgcagctgcatctaaattgcagtcagcagaaaaactaatgtacatttgcactgatcagctaggctta

SEQ ID NO: 119597 - DNA, 120 bp, Artificial Sequence
  ENSG00000100852_6 (sequence is synthesized)
gaacaagactttgaacagaagcaaatgcctgaagggaagctcaacgtagatggatttttattatgcattgatgtaagtcaaggatgcaataggaagtttgatgatcaacttaaatttgtg

SEQ ID NO: 119598 - DNA, 120 bp, Artificial Sequence
  ENSG00000100852_7 (sequence is synthesized)
aataacctttttgtccagttatcaaaatcaaaaaaacctgtaataatagcagcaactaaatgtgatgaatgcgtggatcattatcttagagaagttcaggcatttgcttcaaataaaaag

SEQ ID NO: 119599 - DNA, 120 bp, Artificial Sequence
  ENSG00000100852_8 (sequence is synthesized)
aaccttcttgtagtggaaacatcagcacgatttaatgtcaacattgaaacatgttttactgcactggtacaaatgttggataaaactcgtagcaagcctaaaattattccctatttggat

SEQ ID NO: 119600 - DNA, 120 bp, Artificial Sequence
  ENSG00000100852_9 (sequence is synthesized)
gcttataaaacacagagacaacttgttgtcacagcaacagataagtttgaaaaacttgtgcagactgtgagagattatcatgcaacttggaaaactgttagtaataaattaaaaaatcat

SEQ ID NO: 119601 - DNA, 120 bp, Artificial Sequence
  ENSG00000100852_10 (sequence is synthesized)
cctgattatgaagaatacatcaacttagagggaacaagaaaggccagaaatacattctcaaaacatatagaacaacttaaacaggaacatataagaaaaaggagagaagagtatataaat

SEQ ID NO: 119602 - DNA, 120 bp, Artificial Sequence
  ENSG00000100852_11 (sequence is synthesized)
actttaccaagagcttttaacactcttttgccaaatctagaagagattgaacatttgaattggtcagaagctttgaagttaatggaaaagagagcagatttccagttatgttttgtggtg

SEQ ID NO: 119603 - DNA, 120 bp, Artificial Sequence
  ENSG00000100852_12 (sequence is synthesized)
ctagaaaaaactccttgggatgaaactgaccatatagacaaaattaatgataggcggattccatttgacctcctgagcactttagaagctgaaaaagtctatcagaaccatgtacagcat

SEQ ID NO: 119604 - DNA, 120 bp, Artificial Sequence
  ENSG00000100852_13 (sequence is synthesized)
ctgatatccgagaagaggagggtggaaatgaaggaaaaattcaaaaagactttggaaaaaattcaattcatttcaccagggcagccatgggaggaagttatgtgctttgttatggaggat

SEQ ID NO: 119605 - DNA, 120 bp, Artificial Sequence
  ENSG00000100852_14 (sequence is synthesized)
gaagcctacaaatatatcactgaggctgatagcaaagaggtatatggtaggcatcagcgagaaatagttgaaaaagccaaagaagagtttcaagaaatgctttttgagcattctgaactt

SEQ ID NO: 119606 - DNA, 120 bp, Artificial Sequence
  ENSG00000100852_15 (sequence is synthesized)
ttttatgatttagatcttaatgcaacacctagttcagataaaatgagtgaaattcatacagttctgagtgaagaacctagatataaagctttacagaaacttgcacctgatagggaatcc

SEQ ID NO: 119607 - DNA, 120 bp, Artificial Sequence
  ENSG00000100852_16 (sequence is synthesized)
cttctacttaagcatataggatttgtttatcatcccactaaagaaacatgtcttagtggccaaaattgtacagacattaaagtggagcagttacttgctagtagtcttttacagttggat

SEQ ID NO: 119608 - DNA, 120 bp, Artificial Sequence
  ENSG00000100852_17 (sequence is synthesized)
catggccgcttaagattatatcacgatagtaccaatatagataaagttaacctttttattttagggaaggatggccttgcccaagaactagcaaatgagataaggacacaatccactgat

SEQ ID NO: 119609 - DNA, 120 bp, Artificial Sequence
  ENSG00000100852_18 (sequence is synthesized)
gatgagtatgccttagatggaaaaatttatgaacttgatcttcggccggttgatgccaaatcgccttactttttgagtcagttatggactgccgcctttaaaccacatgggtgcttctgt

SEQ ID NO: 119610 - DNA, 120 bp, Artificial Sequence
  ENSG00000100852_19 (sequence is synthesized)
gtatttaattccattgagtcattgagttttattggggaatttattgggaaaataagaactgaagcttctcagatcagaaaagataaatacatggctaatcttccatttacattaattctg

SEQ ID NO: 119611 - DNA, 120 bp, Artificial Sequence
  ENSG00000100852_20 (sequence is synthesized)
gctaatcagagagattccattagtaagaatctaccaattctcaggcaccaagggcagcagttggcaaacaagttgcaatgtccttttgtagatgtacctgctggtacatatcctcgtaaa

SEQ ID NO: 119612 - DNA, 120 bp, Artificial Sequence
  ENSG00000100852_21 (sequence is synthesized)
tttaatgaaacccaaataaagcaagctctcagaggagtattggaatcagttaaacacaatttggatgtggtgagcccaattcctgccaataaggacttatcagaagctgacttgagaatt

SEQ ID NO: 119613 - DNA, 120 bp, Artificial Sequence
  ENSG00000100852_22 (sequence is synthesized)
gtcatgtgcgccatgtgtggagatccatttagtgtggatcttattctttcacccttccttgattctcattcttgcagtgctgctcaagctggacagaataattccctaatgcttgataaa

SEQ ID NO: 119614 - DNA, 120 bp, Artificial Sequence
  ENSG00000100852_23 (sequence is synthesized)
atcattggtgaaaaaaggaggcgaatacagatcacaatattatcataccactcttcaattggagtaagaaaagatgaactagttcatgggtatatattagtttactctgcaaaacggaaa

SEQ ID NO: 119615 - DNA, 120 bp, Artificial Sequence
  ENSG00000100852_24 (sequence is synthesized)
gcttcgatgggaatgcttcgagcatttctatcagaagttcaagacaccattcctgtacagctggtggcagttactgacagccaagcagatttttttgaaaatgaggctatcaaagagtta

SEQ ID NO: 119616 - DNA, 120 bp, Artificial Sequence
  ENSG00000100852_25 (sequence is synthesized)
atgactgaaggagaacacattgcaactgagatcactgctaaatttacagcactgtattctttatctcagtatcatcggcaaactgaggtctttactctgttttttagtgatgttctagag

SEQ ID NO: 119617 - DNA, 120 bp, Artificial Sequence
  ENSG00000100852_26 (sequence is synthesized)
aaaaaaaatatgatagaaaattcttatttgtctgataatacaagggaatcaacccatcaaagtgaagatgtttttctaccatctcccagagactgttttccctataataactaccctgat

SEQ ID NO: 119618 - DNA, 120 bp, Artificial Sequence
  ENSG00000100852_27 (sequence is synthesized)
tcagatgatgacacagaagcaccacctccttatagtccaattggggatgatgtacagttgcttccaacacctagtgaccgttccagatatagattagatttggaaggaaatgagtatcct

SEQ ID NO: 119619 - DNA, 120 bp, Artificial Sequence
  ENSG00000100852_28 (sequence is synthesized)
attcatagtaccccaaactgtcatgaccatgaacgcaaccataaagtgcctccacctattaaacctaaaccagttgtacctaagacaaatgtgaaaaaactcgatccaaaccttttaaaa

SEQ ID NO: 119620 - DNA, 120 bp, Artificial Sequence
  ENSG00000100852_29 (sequence is synthesized)
acaattgaagctggtattggtaaaaatccaagaaagcagacttcccgggtgcctttggcacatcctgaagatatggatccttcagataactatgcggaacccattgatacaattttcaaa

SEQ ID NO: 119621 - DNA, 120 bp, Artificial Sequence
  ENSG00000100852_30 (sequence is synthesized)
cagaagggctattctgatgagatttatgttgtcccagatgatagtcaaaatcgtattaaaattcgaaactcatttgtaaataacacccaaggagatgaagaaaatgggttttctgataga

SEQ ID NO: 119622 - DNA, 120 bp, Artificial Sequence
  ENSG00000100852_31 (sequence is synthesized)
acctcaaaaagtcatggggaacggaggccttcaaaatacaaatataaatctaaaaccttgtttagtaaagccaagtcatactatagaagaacacattcagatgccagtgatgatgaggct

SEQ ID NO: 119623 - DNA, 120 bp, Artificial Sequence
  ENSG00000100852_32 (sequence is synthesized)
ttcaccacttctaaaacaaaaagaaaaggaagacatcgtggaagtgaagaagatccacttctttctcctgttgaaacttggaaaggtggtattgataatcctgcaatcacttctgaccag

SEQ ID NO: 119624 - DNA, 120 bp, Artificial Sequence
  ENSG00000100852_33 (sequence is synthesized)
gagttagatgataagaagatgaagaagaaaacccacaaagtgaaagaagataaaaagcagaaaaagaaaactaagaacttcaatccaccaacacgtagaaattgggaaagtaattacttt

SEQ ID NO: 119625 - DNA, 120 bp, Artificial Sequence
  ENSG00000100852_34 (sequence is synthesized)
gggatgcccctccaggatctggttacagctgagaagcccataccactatttgttgagaaatgtgtggaatttattgaagatacagggttatgtaccgaaggactctaccgtgtcagcggg

SEQ ID NO: 119626 - DNA, 120 bp, Artificial Sequence
  ENSG00000100852_35 (sequence is synthesized)
aataaaactgaccaagacaatattcaaaagcagtttgatcaagatcataatatcaatctagtgtcaatggaagtaacagtaaatgctgtagctggagcccttaaagctttctttgcagat

SEQ ID NO: 119627 - DNA, 120 bp, Artificial Sequence
  ENSG00000100852_36 (sequence is synthesized)
ctgccagatcctttaattccatattctcttcatccagaactattggaagcagcaaaaatcccggataaaacagaacgtcttcatgccttgaaagaaattgttaagaaatttcatcctgta

SEQ ID NO: 119628 - DNA, 120 bp, Artificial Sequence
  ENSG00000100852_37 (sequence is synthesized)
aactatgatgtattcagatacgtgataacacatctaaacagggttagtcagcaacataaaatcaacctaatgacagcagacaacttatccatctgtttttggccaaccttgatgagacct

SEQ ID NO: 119629 - DNA, 120 bp, Artificial Sequence
  ENSG00000100852_38 (sequence is synthesized)
gattttgaaaatcgagagtttctgtctactactaagattcatcaatctgttgttgaaacattcattcagcagtgtcagtttttcttttacaatggagaaattgtagaaacgacaaacatt

SEQ ID NO: 119630 - DNA, 120 bp, Artificial Sequence
  ENSG00000100852_39 (sequence is synthesized)
atcctcttggtattatatgagtaggaagtgattgcaaacaggctggatttggacaaaaagcaaatctagacatgcatgtttcagggttcagtagtatacttcatgtttcatacagataat

SEQ ID NO: 119631 - DNA, 120 bp, Artificial Sequence
  ENSG00000100852_40 (sequence is synthesized)
tcacattcaaaattacattttctctttgaactagatggtattccttattcacttacattacaaatctaagaccatgtgataagcatgactggagaggtttaatttttataaacaaaaata

SEQ ID NO: 119632 - DNA, 120 bp, Artificial Sequence
  ENSG00000100852_41 (sequence is synthesized)
gctataaagtacaaagctgctgctgcatgcaaccttattgcaatcagtatatcattcctgtggcaatttctgtcaccttatattgtgaataaaatttttctatagaaattaaatgattta

SEQ ID NO: 119633 - DNA, 120 bp, Artificial Sequence
  ENSG00000100852_42 (sequence is synthesized)
aaaactcacctatatgaaacatttaatgcttttcagcctgctttctggctgattttgttatttgatgtgctaatttgggcaacttaatttacattctggcagtcggtgtagataactaaa

SEQ ID NO: 119634 - DNA, 120 bp, Artificial Sequence
  ENSG00000100852_43 (sequence is synthesized)
agcccagttaagtattttataatttcaggctactgaggccatgcttgggatgttgtttgaaagaaagaaaaaatacacttgacatatttcacatttctgtaccttcatctttacttccaa

SEQ ID NO: 119635 - DNA, 120 bp, Artificial Sequence
  ENSG00000100852_44 (sequence is synthesized)
gtaaacccgtggatgatttgatgagggataaatgaacctatttcttttacacacataccaaggacatgcttgtggctaaagtgagttgataatgttgtgcaaaggatagttgtcaccaac

SEQ ID NO: 119636 - DNA, 120 bp, Artificial Sequence
  ENSG00000100852_45 (sequence is synthesized)
tcatttctttatggtccataatgaaataaaaattttgtatactgttaattctgtaaacagatgcatgttcaaaagatctatgatggtcttgtaatcttaatctaatatattttagatatt

SEQ ID NO: 119637 - DNA, 120 bp, Artificial Sequence
  ENSG00000100852_46 (sequence is synthesized)
ttaattttttccctcttggggaacacatttagtatagtgtagaaaatacttccatgacattttcatataaggttatataacttttcatacataaacatgaaatttgttgtagaaaattct

SEQ ID NO: 119638 - DNA, 120 bp, Artificial Sequence
  ENSG00000100852_47 (sequence is synthesized)
ttaaaccaaacatttaaatctaggacttcaatttaatttgttccttgaatctatttttatgtggcccttaaaaaatatccaaaaaacccattgctaatatagcaataaaaatactttggg

SEQ ID NO: 119639 - DNA, 120 bp, Artificial Sequence
  ENSG00000100852_48 (sequence is synthesized)
tactgacagactctttggagtgtttatattacaaatttgtattcatattcttttctgtgatgtgttgtactaaaatccaaaatggcttttgcaccatttttaagccaattttttcctttg

SEQ ID NO: 119640 - DNA, 120 bp, Artificial Sequence
  ENSG00000100852_49 (sequence is synthesized)
atgttggtaccagaattactataagtgactgctgcttttgggggtaaacattttgttagtgaagataaaaccagaacactaaattatggataaaattttcagaataggtggcacaggtaa

SEQ ID NO: 119641 - DNA, 120 bp, Artificial Sequence
  ENSG00000100852_50 (sequence is synthesized)
aggttatattttgtgtagtaaagaaaaaaattatttggtcaatgttatcttaattcatactacaatttaagattatcttatgtgtattatagtaaatagatgattttcagattcaaggct

SEQ ID NO: 119642 - DNA, 120 bp, Artificial Sequence
  ENSG00000100852_51 (sequence is synthesized)
tcaaggctcctaagagtttgatttgctctgttttttcctaaaataaatattgtctctcccaactgttaagttctaggtattgtacttccaattttaacttcagaaccaagatgttggcat

SEQ ID NO: 119643 - DNA, 120 bp, Artificial Sequence
  ENSG00000100852_52 (sequence is synthesized)
gaaccaggctgctgttgaagtacatgtatattataaattatcttatttgtgttatactcttacatgttatcttttctaagaaaacaaagtccctattattcctattgcaaagcacacagg

SEQ ID NO: 119644 - DNA, 120 bp, Artificial Sequence
  ENSG00000100852_53 (sequence is synthesized)
caggaattaagaaagtacagtaatttttaaaaaaaaatccggtaaatgtagtattcttaacctgttctatattacttatacctattgtctatatagctttaatttatagttgtcagttta

SEQ ID NO: 119645 - DNA, 120 bp, Artificial Sequence
  ENSG00000100852_54 (sequence is synthesized)
ttggcatgtctggcaaagaaaattaaactttaagagttttataaactgtttctaggttgctaaagaatttatttttctactatatatggtatagacaaagcatcaaactatgtacaggaa

SEQ ID NO: 119646 - DNA, 120 bp, Artificial Sequence
  ENSG00000100852_55 (sequence is synthesized)
aaaagcctgactatttctatttggaagtaggctgaaaagagaattttcaaaactgttcgtgtcttcagttcattctgtcataactttgctattgtaatatgtgaataccagtttatttaa

SEQ ID NO: 119647 - DNA, 120 bp, Artificial Sequence
  ENSG00000100852_56 (sequence is synthesized)
gctgttctcttttatactgtattaatttaatgttcatctgcgtttagtaccatttttgttattaaaactggcatttaccgtttttcacattaacccaccttgcaccttcccccaaactta

SEQ ID NO: 119648 - DNA, 120 bp, Artificial Sequence
  ENSG00000100852_57 (sequence is synthesized)
tctccacttttctatgcattctatcattgatttgacacacttcatagtgagtcatttaaatactctacgtttggttcaattaaccagtaggttacagttattgaaaattaaagtacagtt

SEQ ID NO: 119649 - DNA, 120 bp, Artificial Sequence
  ENSG00000100852_58 (sequence is synthesized)
taaagctcagtctgttacactgaattgattgtgtttgtttttgccaagggtttagatatgcttttaaatattagaaacatctaagaacagaataacataattaaacttttttctggtaag

SEQ ID NO: 119650 - DNA, 120 bp, Artificial Sequence
  ENSG00000100852_59 (sequence is synthesized)
ttactggaaggtttcactgtttagggacctatcatatgagacttcttaaaggattaaaagaataggatagtctcataattgtgagtaaacatcaaggcattatattttacaatactgaat

SEQ ID NO: 119651 - DNA, 120 bp, Artificial Sequence
  ENSG00000100852_60 (sequence is synthesized)
aaaatttcatctacacacatgttgccattgtttcatttaaggttcagtgcttatagttaactacaatattggacctaacaggatctagattagcaatataaagaagcatagtggtactct

SEQ ID NO: 119652 - DNA, 120 bp, Artificial Sequence
  ENSG00000100852_61 (sequence is synthesized)
gtttcacactttcagtagatttattagaagtcaaattctattcaacagacacttattaggatatacaactaatttaagaataaaattccaggcacaatatattttttttaaatggtattt

SEQ ID NO: 119653 - DNA, 120 bp, Artificial Sequence
  ENSG00000100852_62 (sequence is synthesized)
gttagtagtgcttcttccccttaacatttacagtgtaaatactgcaggtaaccgcaatctaagttagccaaaaagcagctttttttcccatactgtatgtaaataatgtagacctgggtt

SEQ ID NO: 119654 - DNA, 120 bp, Artificial Sequence
  ENSG00000100852_63 (sequence is synthesized)
tttttgtttatttgggtttgtttttttttttgaggtactggaatctaattaatatctcttaggtatcaacaaaagggaacaattggaatgagaatttaggccttagcttccatggtgatt

SEQ ID NO: 119655 - DNA, 120 bp, Artificial Sequence
  ENSG00000100852_64 (sequence is synthesized)
tttagttttttatacagtaataattgtgatgctatttgtcaactggatataaatacacatataattttaaaaagtcaaaagtgcttttgtttctttgtttaatgtaatttttgtgcttca

SEQ ID NO: 119656 - DNA, 120 bp, Artificial Sequence
  ENSG00000100852_65 (sequence is synthesized)
cctacaggatgctgcagtaaattaaatatcagtgaagcttctgatgtataaagaatgctatgaataaaacattaagaagctgtgtaattttaagttatagttgcctctatttttaccatt

SEQ ID NO: 119657 - DNA, 120 bp, Artificial Sequence
  ENSG00000100852_66 (sequence is synthesized)
tcattggtaaaaattagctaatttttttcaagtgaaatgaaaaataaaaatataaatttatcaatatgatggaaatcttattaaggagatgtattattgaattttcactgtacctgaaaa

SEQ ID NO: 119658 - DNA, 120 bp, Artificial Sequence
  ENSG00000100852_67 (sequence is synthesized)
ggagattcaaaattttttctggggatgtatataggtgaaaatttgattttttaaattatcaggaaaacaagataatgcacagatttctaagactaagatcttacctggatgtgatttttg

SEQ ID NO: 119659 - DNA, 120 bp, Artificial Sequence
  ENSG00000100852_68 (sequence is synthesized)
agctgtggctagacattctttagagccactggaaatattttgaaaactattctagttatagcagagctgctaatattaacgaatatatttgtgtcttcatggtttgtgactattaggcca

SEQ ID NO: 119660 - DNA, 120 bp, Artificial Sequence
  ENSG00000100852_69 (sequence is synthesized)
aattttgtggtatatgttgtcagtctggatctggtgaggtctgttcaacatgaatctttgtgttatcttgaatttagtagtttcaaggtacttaaattcttaacagtttctaatttgttt

SEQ ID NO: 119661 - DNA, 120 bp, Artificial Sequence
  ENSG00000100852_70 (sequence is synthesized)
caatacatatgggacatggttgatttttttactgtattagaactcttggaagttcttagccttttcaggttatgaaatacctgaaagtaaaattttctaagatttaataagggaagatac

SEQ ID NO: 119662 - DNA, 120 bp, Artificial Sequence
  ENSG00000100852_71 (sequence is synthesized)
tattcaaatcattttcttaggatagcatctttacatacaatgagaggattgtacaagcattaatctcatattccaacatccagttacttgatgtgatccaagtaccctggtctttttgaa

SEQ ID NO: 119663 - DNA, 120 bp, Artificial Sequence
  ENSG00000100852_72 (sequence is synthesized)
gcagttaaaatctaattaattaactttgggagtcttcactattcaattgatcctcatcattgtcctatttgcatgactccattttttcctccactatatgagttttctttgtcaggggga

SEQ ID NO: 119664 - DNA, 120 bp, Artificial Sequence
  ENSG00000100852_73 (sequence is synthesized)
gaggagtgggaagagtcacagaatctcatattcacatcttaattaaattgtgtgaaattagtcttttgtggaaattctgtaggcagtatgattttgaaaagctaaccaatgataattagc

SEQ ID NO: 119665 - DNA, 120 bp, Artificial Sequence
  ENSG00000100852_74 (sequence is synthesized)
attttagttaatactaaatgcataaaattataacccttgaaattaatttggtgctggcagttctggtttagtcatttttaccagtagttagtagtattaagacctgcagtatatgcactt

SEQ ID NO: 119666 - DNA, 120 bp, Artificial Sequence
  ENSG00000100852_75 (sequence is synthesized)
tttgagtagctgtcaaataattgtagttgagaaacaacttgtttattctcacaattcagattttctattcagttttgtctcaaatagtaagttattgtgaacaatttaataacggccctc

SEQ ID NO: 119667 - DNA, 120 bp, Artificial Sequence
  ENSG00000100852_76 (sequence is synthesized)
cctcctgttctagtttgcctaatattttagttaagatttagtgttttaacctatttttttaagtttattttttgtattagattttatttgaataagttatgtgggtttagtaattgacct

SEQ ID NO: 119668 - DNA, 120 bp, Artificial Sequence
  ENSG00000100852_77 (sequence is synthesized)
attcattgcttcactaattcatccagattagttttaagtgtgtatatgtatttgctcaccagatcattttcttgggaccttgaactgtgaatgttttgtcctaaccatttaatattttct

SEQ ID NO: 119669 - DNA, 120 bp, Artificial Sequence
  ENSG00000100852_78 (sequence is synthesized)
aggtacttgctgcaagttcttgaactattttaccagctttaactttggggctcttagtttcttttctccagattcttgttattttattttatccaaataaatatttaggtgttctaagaa

SEQ ID NO: 119670 - DNA, 120 bp, Artificial Sequence
  ENSG00000100852_79 (sequence is synthesized)
aaagctagttgagagagcatactctggtttttcatctctcacagtagtcaaagaagttacatatacaattagaatttgttgtttctgttgccagaaactcaatacaatttgtcacatcag

SEQ ID NO: 119671 - DNA, 88 bp, Artificial Sequence
  ENSG00000100852_80 (sequence is synthesized)
gtttctgttgccagaaactcaatacaatttgtcacatcaggaaaggttttttgttgttattgttgttgtttttgagacggaatttcac

SEQ ID NO: 119672 - DNA, 61 bp, Artificial Sequence
  ENSG00000100852_81 (sequence is synthesized)
ccaagtagctggaattacaggctttgtgctggtgtcgaactcccaacctcaggtgatccgc

SEQ ID NO: 119673 - DNA, 79 bp, Artificial Sequence
  ENSG00000100852_82 (sequence is synthesized)
ggaaaagttttttacatacgaattaaagatgcttctttatgcaaatttttaaaccccaggtttgaagtaggataaaagg

SEQ ID NO: 119674 - DNA, 120 bp, Artificial Sequence
  ENSG00000100852_83 (sequence is synthesized)
tgcaaatttttaaaccccaggtttgaagtaggataaaaggtaacattaaatctgagatcatttctagctctggaattctgtgattgtaatgagttttgatttctaaatgttttttccttt

SEQ ID NO: 119675 - DNA, 120 bp, Artificial Sequence
  ENSG00000100852_84 (sequence is synthesized)
actttcacagaacgtactgaatcaggggcctgcatccccgtgccgtgccgagccgacggagaaatggactcctcttctcgctcctgtggagtttcgtcttctggtacggtggtttgctct

SEQ ID NO: 119676 - DNA, 120 bp, Artificial Sequence
  ENSG00000100852_85 (sequence is synthesized)
tgagttacgaccagaaaccggaacagaaggaaagggagaagcaggggaggttcggggacgacggcgctccgggcagtaaggcagtagcttccaaagcgtggaggatgggactgaggagga

SEQ ID NO: 119677 - DNA, 120 bp, Artificial Sequence
  ENSG00000100852_86 (sequence is synthesized)
agagaaatccgtcagcgcgagggagcccgagtggccgccattactgagcccggcgcggcggcgggcgctggggaaggggggagggacgggccgccgctggtggcggggagggagggaggg

SEQ ID NO: 119678 - DNA, 120 bp, Artificial Sequence
  ENSG00000100852_87 (sequence is synthesized)
agcgttattagaaatgcaagagagctggaggctcggggtgtagctgaggttgaaaggtgcacggaacagaaaaagaaaactaagaacttcaatccaccaacacgtagaaattgggaaagt

SEQ ID NO: 119679 - DNA, 120 bp, Artificial Sequence
  ENSG00000100865_0 (sequence is synthesized)
ggggcttcgcgtctccttctacggatatctgtggaccttatggaagcaaagactcttggaactgtaacgcccagaaaacctgtcttatctgtcagtgcaagaaaaattaaggacaatgcg

SEQ ID NO: 119680 - DNA, 120 bp, Artificial Sequence
  ENSG00000100865_1 (sequence is synthesized)
gctgattggcacaatttaatcctgaagtgggaaaccctcaatgatgcaggttttaccactgcaaataatattgccaacttgaaaatcagtttattgaataaagacaagatagaactagac

SEQ ID NO: 119681 - DNA, 120 bp, Artificial Sequence
  ENSG00000100865_2 (sequence is synthesized)
agcagcagcccagcctcgaaggaaaatgaagaaaaggtgtgtctggaatataacgaggaactggagaagctgtgtgaggaactgcaggccaccttggatgggttgaccaaaatacaggtg

SEQ ID NO: 119682 - DNA, 120 bp, Artificial Sequence
  ENSG00000100865_3 (sequence is synthesized)
ctatgaggtttcgcataagctcttggagatgtacaggaaggagctgctcctgaagcgcacggtggccaaggagcttgcccacaccggggatcccgacctcaccctgagctacctgtccat

SEQ ID NO: 119683 - DNA, 120 bp, Artificial Sequence
  ENSG00000100865_4 (sequence is synthesized)
gtggctgcaccagccctatgtggagagcgacagcaggctgcatctggagagcatgctgctggagacaggccaccgagctctctgacgtcctgagacggctgcggacactggctccttcca

SEQ ID NO: 119684 - DNA, 120 bp, Artificial Sequence
  ENSG00000100865_5 (sequence is synthesized)
cgtctcaccaggcagacagtctgcctaggacccagtgccgcaggcctggatcagaccccaggatcagaccttggggtcttctggccagagcttgtcaccagccccatggcctctccaggc

SEQ ID NO: 119685 - DNA, 120 bp, Artificial Sequence
  ENSG00000100865_6 (sequence is synthesized)
gtgctcatgcccacaacccgcggccagccccacgtggtgctgctcagccttctctgcccctcctgggaatctgtcattcgtgggtgcttcagagtaaaatcaatgagtttctgagcagaa

SEQ ID NO: 119686 - DNA, 62 bp, Artificial Sequence
  ENSG00000100865_7 (sequence is synthesized)
tttgggaggccgaggtgggcggatcactttaggttcggaattcaagcacgcgccgccacacc

SEQ ID NO: 119687 - DNA, 120 bp, Artificial Sequence
  ENSG00000100865_8 (sequence is synthesized)
tggcattacttgttacatggtttctacatctgcgtttgcctttttgtaagttctctgatcccaaactgtttatattctgtgggactgtgtatagagtgatacttaataaacagcagtttt

SEQ ID NO: 119688 - DNA, 120 bp, Artificial Sequence
  ENSG00000100865_9 (sequence is synthesized)
agttttttggtttttatgagataggctcttaccatgtggcccaagtagtgtcaaactcctgaggtcaagtgatcctccctacttagtctcctcagagactacagtcatgcactgcccagc

SEQ ID NO: 119689 - DNA, 120 bp, Artificial Sequence
  ENSG00000100865_10 (sequence is synthesized)
caccgttcttcctaagctgggctaacatttcactgtggtctgtgtttgctgtgggaagaagccaccgatgttgaaataccaaaatacaggtgaaaatggaaaagctgtcttcaactacca

SEQ ID NO: 119690 - DNA, 120 bp, Artificial Sequence
  ENSG00000100865_11 (sequence is synthesized)
aacactcccaggcagccgcggcttgctcccctgctggccatttccagcctgctagaaaacccacctttttgttcctaccgaccgtggctttgagatcaagtgagggtaggaaatgcccct

SEQ ID NO: 119691 - DNA, 120 bp, Artificial Sequence
  ENSG00000100865_12 (sequence is synthesized)
ggtcactaaaagggctgtaggaaaggctggctctctgagaatacagctgccctccagggcaggacctggaaggagcacagcgccagggcgacacatggtcacaagcccagctctgtccct

SEQ ID NO: 119692 - DNA, 120 bp, Artificial Sequence
  ENSG00000100865_13 (sequence is synthesized)
gagcagcgtgctctctgcttggggtctctcctgaccgtctctgcaaggcgtggggagagacctgctgctccctttgaatgctttcttccacatgtggacaaatggcccttcccttccttc

SEQ ID NO: 119693 - DNA, 120 bp, Artificial Sequence
  ENSG00000100865_14 (sequence is synthesized)
cccgtaacacagcccacggaaatattgaagacatgccactaagtgactttccaagtgggacatcaaagaactgggcttctaccctgagcagcatcttgctgtggacctcaagtaagtcac

SEQ ID NO: 119694 - DNA, 120 bp, Artificial Sequence
  ENSG00000100865_15 (sequence is synthesized)
tgagcagcatcttgctgtggacctcaagtaagtcaccccatcatttatgcctcaccttcctcatctgtaaaatgtgaggagagccaggcaccgtggcgcacgcctgtagtcccagctact

SEQ ID NO: 119695 - DNA, 62 bp, Artificial Sequence
  ENSG00000100865_16 (sequence is synthesized)
tgggagttaactcatctctaaaaaaaaaaatcaggccggggccgggcacagtggctcacgcc

SEQ ID NO: 119696 - DNA, 60 bp, Artificial Sequence
  ENSG00000100865_17 (sequence is synthesized)
gtcagcctggcgacagcaagactccatctcaaaaaaaaacaatcaggcccagtgcagtgg

SEQ ID NO: 119697 - DNA, 80 bp, Artificial Sequence
  ENSG00000100865_18 (sequence is synthesized)
gctgaggcgcgccatggagataccccgtctctactaaaaatacaaaatgatccaggtgtgatggcacatgcctgtaatcc

SEQ ID NO: 119698 - DNA, 120 bp, Artificial Sequence
  ENSG00000100865_19 (sequence is synthesized)
tcgcgccactgcactccagcttgggctacagagtaagacttggtctcaaaaataattaaattaatttaatttaatttaatttaaaaaatcatgcaagtagaaatgactttttcccccttc

SEQ ID NO: 119699 - DNA, 120 bp, Artificial Sequence
  ENSG00000100865_20 (sequence is synthesized)
gtagaaatgactttttcccccttctatcaataaaatgctgcccagaatgactagcttattttctttttaattgaacccaaaagaagcttctagtatggagcaagtctggtggaaaagcag

SEQ ID NO: 119700 - DNA, 120 bp, Artificial Sequence
  ENSG00000100865_21 (sequence is synthesized)
catatctcccaggagagaagggaaacggagcagggccaatcatcaggtgacagtgcagtgctactcatcaccatcatgaaaaactcatgagcgtcagacgcgccacagggattcctgatc

SEQ ID NO: 119701 - DNA, 120 bp, Artificial Sequence
  ENSG00000100865_22 (sequence is synthesized)
aggtaatatctgctattattatgacaagctccatagaaaaatgtagacagcagggcagaaagacattattctttataaataaaaggttcatctgtgcaatattcacattagaaaaatata

SEQ ID NO: 119702 - DNA, 120 bp, Artificial Sequence
  ENSG00000100865_23 (sequence is synthesized)
cattgcttgccatagaccttctctggataaaatcagacgaatctaggatctgactccacttcactgtgagggctctggctccacggtgacgaccgactccacagcttctagaggaactcc

SEQ ID NO: 119703 - DNA, 120 bp, Artificial Sequence
  ENSG00000100865_24 (sequence is synthesized)
ttctagcgggcccatccgcaggcacgcccctctgcatcagtcactgtgacaatgtcctcctcctgagacactattgtacctggaggggacaagataagcccatcggaagtctgaataaaa

SEQ ID NO: 119704 - DNA, 120 bp, Artificial Sequence
  ENSG00000100865_25 (sequence is synthesized)
atctgcttctgtccctgagacagtaactcatggctcccattggaaatttcaaaagccatggcttcgccgacagcaaccacgctctccagttctctctggccagagtgcacctccatccca

SEQ ID NO: 119705 - DNA, 120 bp, Artificial Sequence
  ENSG00000100865_26 (sequence is synthesized)
caggggaaccggttcaagtcccccgaaaggcttctgagacacccttcagtcaatagtgatccatgtgggccaggctgaggccctggcttgggcacagtcctgtaggcacagtccactgcc

SEQ ID NO: 119706 - DNA, 120 bp, Artificial Sequence
  ENSG00000100865_27 (sequence is synthesized)
acgctatccacagacaaaattttctcaagcggaggggctgccacctctgtaggcaggacgctggtggggctgggctgctggtggttcaggtggaagtcacaaaccttgccgaggtgtcct

SEQ ID NO: 119707 - DNA, 120 bp, Artificial Sequence
  ENSG00000100865_28 (sequence is synthesized)
gcctctgcatgtccaggccccccaggcggcagggactctgctccaccaccagatgacaaagggctgcagaaacccgggctcctcaggctgtcccaggtgtcctggtctgaagagtgttcc

SEQ ID NO: 119708 - DNA, 120 bp, Artificial Sequence
  ENSG00000100865_29 (sequence is synthesized)
aaagcattctctccaggaaacgctgccacctgtgcctgggtcagcctcctaggctctcctgactgagcataaacaggcagcccactgacatcccgggatgagagagcagcacctatagac

SEQ ID NO: 119709 - DNA, 120 bp, Artificial Sequence
  ENSG00000100865_30 (sequence is synthesized)
cccctcctggcttctaagttagccagtgcctgaagctgcgggcccgcctggaacacgctcccattgccaccagaaaccgtcgttgtatggctttcttcagaacggggagagacagtcaca

SEQ ID NO: 119710 - DNA, 120 bp, Artificial Sequence
  ENSG00000100865_31 (sequence is synthesized)
tttactggaggggaaaaacctaaacattttgggaaacaggtgaacatggcgtgtactgtgtcatggcccactcactgcactcaccacccaaaaccagctaggccaagtcacctgccctgc

SEQ ID NO: 119711 - DNA, 120 bp, Artificial Sequence
  ENSG00000100865_32 (sequence is synthesized)
agaaaagtcaaagcatcgatgctccttgctccttgggattggtagcaattttaaaaaatacgtccctattctctattcacaaagacagattttgtattaaaaatatgctctaagagccaa

SEQ ID NO: 119712 - DNA, 120 bp, Artificial Sequence
  ENSG00000100865_33 (sequence is synthesized)
ctgggcaacagaagtaagacttggtctcaaaaataattaaattaatttaatttaatttaatttaaaaaatcatgcaagtagaaatgactttttcccccttctatcaataaaatgctgccc

SEQ ID NO: 119713 - DNA, 120 bp, Artificial Sequence
  ENSG00000100865_34 (sequence is synthesized)
ggatgggttggtaagacataaagacgcaggccacttgtggtcactgtcactgaatccgatggacgtatttggggtttgcttgaccattggccatcacttactccttctcagtctcctctg

SEQ ID NO: 119714 - DNA, 120 bp, Artificial Sequence
  ENSG00000100865_35 (sequence is synthesized)
atgttctcttcctctgcctgctgcgtaaaccttaatgttccccaagatgctgtcttagacactcactcctcctgtgcgtcatccggggaaatgtcacccactttcagggctcatcacata

SEQ ID NO: 119715 - DNA, 120 bp, Artificial Sequence
  ENSG00000100865_36 (sequence is synthesized)
agcctagcccgcaggcccctcgcagcctctgcgagctgctcgggagacagttttgccgagcctccgttttttcacatgtgcagtgacagatgaacgggacgatatacgcaaatgagtgtc

SEQ ID NO: 119716 - DNA, 88 bp, Artificial Sequence
  ENSG00000100867_0 (sequence is synthesized)
gccggcagcagcaacctgctctggttgtcttcatgataaatcttgctgctgctcactcgttgggtccgtgccacctttaagagctgta

SEQ ID NO: 119717 - DNA, 120 bp, Artificial Sequence
  ENSG00000100867_1 (sequence is synthesized)
tgtaacactcaccgcgaaggtctgcaacttcactcctggggccagcaagaccacgaatgcaccgagaggaatgaacaactctggacacaccatctttaagaaccgtaatactcaccgcaa

SEQ ID NO: 119718 - DNA, 120 bp, Artificial Sequence
  ENSG00000100867_2 (sequence is synthesized)
gtaatactcaccgcaagggtctgcaacttcattcttgaagtcagtgaggccaagaacccatcaattccgtacacattttggtgactttgaagagactgtcacctatcaccaagtggtgag

SEQ ID NO: 119719 - DNA, 120 bp, Artificial Sequence
  ENSG00000100867_3 (sequence is synthesized)
actattgccaagcagtgagactattgccaagtggtgagaccatcaccaagcggtgagactatcacctatcgccaagtggcctgattcagcaggaagcatctcagacaccaaccactatgc

SEQ ID NO: 119720 - DNA, 120 bp, Artificial Sequence
  ENSG00000100867_4 (sequence is synthesized)
tgtcagcagttgcccggggctaccagggctggtttcatccctgtgctaggctttctgtgaggatgagcagcaccgggatagacaggaagggcgtcctggctaaccgggtagccgtggtca

SEQ ID NO: 119721 - DNA, 120 bp, Artificial Sequence
  ENSG00000100867_5 (sequence is synthesized)
cggggtccaccagtgggatcggctttgccatcgcccgacgtctggcccgggacggggcccacgtggtcatcagcagccggaagcagcagaacgtggaccgggccatggccaagctgcagg

SEQ ID NO: 119722 - DNA, 120 bp, Artificial Sequence
  ENSG00000100867_6 (sequence is synthesized)
gggaggggctgagtgtggcgggcattgtgtgccacgtggggaaggctgaggaccgggagcagctggtggccaaggccctggagcactgtgggggcgtcgacttcctggtgtgcagcgcag

SEQ ID NO: 119723 - DNA, 120 bp, Artificial Sequence
  ENSG00000100867_7 (sequence is synthesized)
tctggggaccagtgagcagatctgggacaagatcctaagtgtgaacgtgaagtccccagccctgctgctgagccagttgctgccctacatggagaacaggaggggtgctgtcatcctggt

SEQ ID NO: 119724 - DNA, 120 bp, Artificial Sequence
  ENSG00000100867_8 (sequence is synthesized)
ctcttccattgcagcttataatccagtagtggcgctgggtgtctacaatgtcagcaagacagcgctgctgggtctcactagaacactggcattggagctggcccccaaggacatccgggt

SEQ ID NO: 119725 - DNA, 120 bp, Artificial Sequence
  ENSG00000100867_9 (sequence is synthesized)
aaactgcgtggttccaggaattatcaaaactgacttcagcaaagtgtttcatgggaatgagtctctctggaagaacttcaaggaacatcatcagctgcagaggattggggagtcagagga

SEQ ID NO: 119726 - DNA, 120 bp, Artificial Sequence
  ENSG00000100867_10 (sequence is synthesized)
ctgtgcaggaatcgtgtccttcctgtgctctccagatgccagctacgtcaacggggagaacattgcggtggcaggctactccactcggctctgagaggagtgggggcggctgcgtagctg

SEQ ID NO: 119727 - DNA, 120 bp, Artificial Sequence
  ENSG00000100867_11 (sequence is synthesized)
tggtcccaggcccaggagcctgagggggtgtctaggtgatcatttggatctggaggcagagtctgccattctgccagactagcaatttgggggcttactcatgctaggcttgaggaagaa

SEQ ID NO: 119728 - DNA, 120 bp, Artificial Sequence
  ENSG00000100867_12 (sequence is synthesized)
gaaaaacgcttcggcattctccttaggacttatctgcttgtagatttggctgatccaattaacatgtggggttcttggtgtgggtctggggagctgaaggattttatggagctggtgctt

SEQ ID NO: 119729 - DNA, 120 bp, Artificial Sequence
  ENSG00000100867_13 (sequence is synthesized)
tggaggaatcttaagggaaaggagtagaagctcaggcctttgaaggatttcagctcctcctctctgtaatttgtgctttaagcattttttttcctaaaataaactcaaatttatcctcaa

SEQ ID NO: 119730 - DNA, 120 bp, Artificial Sequence
  ENSG00000100867_14 (sequence is synthesized)
gagtctattgcaagagcagacccctccctgtcatctggccattgtttttgctgaaatctggagtccacatggccctggagggtgcaagtagccctgctgcatccaccttgttccccatgg

SEQ ID NO: 119731 - DNA, 120 bp, Artificial Sequence
  ENSG00000100867_15 (sequence is synthesized)
accagtgagcagatctgggacaagggacctcagggtggtacccacttctgacatctggaccacttcttgcagtcattgggggtcatcccccacactggtaacctgtcatcaaatgggcca

SEQ ID NO: 119732 - DNA, 120 bp, Artificial Sequence
  ENSG00000100867_16 (sequence is synthesized)
cagcaacattcagcttaagtatttctccttcccacatccaagggattgagtgggagtgagattggggggtggaaaaaacagtgaacagtcctggtgagttgcagatgtggtctcattccc

SEQ ID NO: 119733 - DNA, 120 bp, Artificial Sequence
  ENSG00000100867_17 (sequence is synthesized)
tagagatgcaggatgcagctgacctgaatcaggacagatccctgcaggagggactcctggtgccatgtcagtcccacctggcactgccctagctcccaggctccgcctctgcatctttcc

SEQ ID NO: 119734 - DNA, 120 bp, Artificial Sequence
  ENSG00000100867_18 (sequence is synthesized)
ttgctacttcctctttcacttctcccccgttcccagacccaccagacagagcttccagagtgtcaggacatgtgtgacttagcccagattcagactttagtcacaagcaggatcagcata

SEQ ID NO: 119735 - DNA, 120 bp, Artificial Sequence
  ENSG00000100867_19 (sequence is synthesized)
gacatctagctcccagcatggcaattctctgttgtgtctccctgtttgtattggctgcaggaaagctcagagccaagtctgcgataagctggtgtgtgtaggcccttacagcctgcattt

SEQ ID NO: 119736 - DNA, 120 bp, Artificial Sequence
  ENSG00000100867_20 (sequence is synthesized)
ttatgaccaaataatagaataaatgctcagtccttatcacatgctgtgaactgtaggcaccaacctcactcttgctttttcttatttttctacactgatttttccttttctccatttctt

SEQ ID NO: 119737 - DNA, 120 bp, Artificial Sequence
  ENSG00000100867_21 (sequence is synthesized)
cattgtgagtatgccttaaattctatggggacaaggtaagaggacaagcaaatgaaagctcagagagacaaaaaaggctcttccagaaatctcccttgcttctagcacctgcttcccctc

SEQ ID NO: 119738 - DNA, 120 bp, Artificial Sequence
  ENSG00000100867_22 (sequence is synthesized)
agaaatctcccttgcttctagcacctgcttcccctccatcaggctgtcttcagtctttctccagaggcctctgcttacagtgtgttgttgttttctttttaagagacagggtctcactct

SEQ ID NO: 119739 - DNA, 73 bp, Artificial Sequence
  ENSG00000100867_23 (sequence is synthesized)
tgggctttgcaccaccacaccaggccaattatttaaaaatcttgtagagacaaggtctcactatgttgctcag

SEQ ID NO: 119740 - DNA, 80 bp, Artificial Sequence
  ENSG00000100867_24 (sequence is synthesized)
cttgagtacatgacccactgcccccagtccccattttctttaaaaggcctgaacatttccttcctcgtgtcagtcctgaa

SEQ ID NO: 119741 - DNA, 120 bp, Artificial Sequence
  ENSG00000100867_25 (sequence is synthesized)
taaaaggcctgaacatttccttcctcgtgtcagtcctgaacaattcacattttcagggctctgctcacaggcctgtgacttagcctgcctgcctatgaaaccattagcaaattggaaata

SEQ ID NO: 119742 - DNA, 120 bp, Artificial Sequence
  ENSG00000100867_26 (sequence is synthesized)
cctcttgcaccagtcagaagggggattggtttctcttatatgcacatacattgggtctactgcacaaattacagggctccaagtgtcttatgagagcaggacttgggctgaccatgtctc

SEQ ID NO: 119743 - DNA, 120 bp, Artificial Sequence
  ENSG00000100867_27 (sequence is synthesized)
ctgtaacactcaccacgaaggtctgcaacttcactcctgaggccagtgagaccacaaaccctccagaaggaatgaacaactccagacgcactgcctttaagagctgtaacactcactgcg

SEQ ID NO: 119744 - DNA, 86 bp, Artificial Sequence
  ENSG00000100867_28 (sequence is synthesized)
taacccaccaggaggaatgaacaactccggacgggaggaatgaacaactccggatgggaggaatgaacaactccggacacaccatc

SEQ ID NO: 119745 - DNA, 82 bp, Artificial Sequence
  ENSG00000100867_29 (sequence is synthesized)
accaggaggaatgaacaactccggacgggaggaatgaacaactccggatgggaggaatgaacttgcgagggtccgtggcttc

SEQ ID NO: 119746 - DNA, 120 bp, Artificial Sequence
  ENSG00000100867_30 (sequence is synthesized)
acacagaagcagttaattaataactggtataattatttgttggtgcctggcatctcatttaactgggaagctgcatggttggggtccagggctgagtctgtcgtttactaaggtgtcccc

SEQ ID NO: 119747 - DNA, 120 bp, Artificial Sequence
  ENSG00000100867_31 (sequence is synthesized)
gcctctactgcccagtgcttgacacattgccagtgctcaatgtttgctatgcaatggatggaaaaatcacccttgtctaatgaatgttgagtctcacattttaatttgtgaataatttcc

SEQ ID NO: 119748 - DNA, 120 bp, Artificial Sequence
  ENSG00000100867_32 (sequence is synthesized)
ccagttttatagcttaggagttttcatggattgctttcctgacctgaggttcacatgtttgaaatttaccctaaccagcctgactctctgccactttctgttgctggccttgtctgtctg

SEQ ID NO: 119749 - DNA, 120 bp, Artificial Sequence
  ENSG00000100867_33 (sequence is synthesized)
tcaaccctctggtagggagcactctggggaccagtgagcagatctgggacaaggtgagaggcctcccctggggaggcggctgagggcccgattccagctctgcactgggctccagcatgc

SEQ ID NO: 119750 - DNA, 120 bp, Artificial Sequence
  ENSG00000100867_34 (sequence is synthesized)
ctgtgcccaccaagactctgtttccctccagaggttatgggagaagcaggccctgggtggtagtcctgcctggccagctgtctcccaaaatgtgcccggatgctactttctggcttgttg

SEQ ID NO: 119751 - DNA, 120 bp, Artificial Sequence
  ENSG00000100867_35 (sequence is synthesized)
gttcttaaatctggcccccacactttctgctttgttttctcttctcatcactttttcatttaatcattcagcaggtatttattgctgtctgccaggcaccactattccaggctctaggga

SEQ ID NO: 119752 - DNA, 120 bp, Artificial Sequence
  ENSG00000100867_36 (sequence is synthesized)
tacagctgtgaatggttagtcagagtctctctgtaagagtcaaacatttttgtatggtacacccttttgtaggggaagatacggatactgtgtttttctttggtgacctgtgcctgtagc

SEQ ID NO: 119753 - DNA, 120 bp, Artificial Sequence
  ENSG00000100867_37 (sequence is synthesized)
ggagactgtctctcctagaagggggctcctcactgagtcccacacaaacttgccgacaggaccagatccagccatcagcattccgggggcttagacatcccagcctgctgtaagtccatt

SEQ ID NO: 119754 - DNA, 120 bp, Artificial Sequence
  ENSG00000100867_38 (sequence is synthesized)
caaggattctgctaccttgtccacaagggaccgggagagaccttgtaaaatgccttgaagctcatcttgggcctagttgttccccagtgacttctgttcccttcactctcatgttttgtt

SEQ ID NO: 119755 - DNA, 120 bp, Artificial Sequence
  ENSG00000100867_39 (sequence is synthesized)
ttctgttctctctgccagaatgcgtcgtgatgaatctcattctttctgctattgtgagcattcaccactctgccctaagcactgggtcaaagtgtttcctgccttctggccttagagtgt

SEQ ID NO: 119756 - DNA, 120 bp, Artificial Sequence
  ENSG00000100867_40 (sequence is synthesized)
tctgccttccctagatcctgcactctcacttgccaacatcatcttcaggctggcccctcccttctatctgcccttggctgggtgcccttggctacatcctcagagatgatctgaaatttg

SEQ ID NO: 119757 - DNA, 120 bp, Artificial Sequence
  ENSG00000100867_41 (sequence is synthesized)
agctccctgcagcccctgctgagcagcttccccaggctctttagctatgttgttaatgcctccaaaggatcatttgtgattttatagctgggattttattgctgacagtctcctaaccct

SEQ ID NO: 119758 - DNA, 120 bp, Artificial Sequence
  ENSG00000100867_42 (sequence is synthesized)
cctgaatcattttgctgtttagtgtctcagttcacaggatcatgactctttttctcgaaactgttgcagtcctccctcctgaagctgagggcagatgccaacaatctgaccttactttct

SEQ ID NO: 119759 - DNA, 120 bp, Artificial Sequence
  ENSG00000100867_43 (sequence is synthesized)
ctgattctcccctgttctccaaggacttggccttcagtgagcaattctgtaccactggacagaaatcattgatgactcgtccccgatcacatctgccatcacctcagaggtgaaattgtc

SEQ ID NO: 119760 - DNA, 120 bp, Artificial Sequence
  ENSG00000100867_44 (sequence is synthesized)
acaaaatgagtttagaatttaccagatgctctgctttcaactaaatgtgttttccgtaggtgtcctgtaaggagaattccttaccactcatcttattcttgagccagttttgaggccatc

SEQ ID NO: 119761 - DNA, 120 bp, Artificial Sequence
  ENSG00000100867_45 (sequence is synthesized)
cctctgatctgttaaactaccaaaaccacatcacctccatccttctccagcgactccagcgtgcgccctctttcaggctcatggatagttctctgctcagaactacttggcacactgagc

SEQ ID NO: 119762 - DNA, 120 bp, Artificial Sequence
  ENSG00000100867_46 (sequence is synthesized)
tactctctcttactttctaatggggcagttttcttcatcaagggagggagtctcaccttttctttggcttggtttttgttcctgagtccaggaggggtcttacctcagcccctcactcag

SEQ ID NO: 119763 - DNA, 120 bp, Artificial Sequence
  ENSG00000100867_47 (sequence is synthesized)
cctgatgcacatggagtattggacagatatcctgtgggctggttggggtctgttttgaccaggaaacccttacagctaacctaatcctcaattccttcttattagggacctcagggtggt

SEQ ID NO: 119764 - DNA, 120 bp, Artificial Sequence
  ENSG00000100867_48 (sequence is synthesized)
agatagaatctgcagtgcctgaaatccagcctgctgcttactcacatcctcatactcagctgcagactgcctgacagaagggctgccaaactgcactccagacagacaggtgcacagcca

SEQ ID NO: 119765 - DNA, 120 bp, Artificial Sequence
  ENSG00000100867_49 (sequence is synthesized)
acgtgaagtccccagccctgctgctgagccagttgctgccctacatggagaacaggtatggcagggcgggggtggggaccagtcggagttggggacctgaggtgggcacagaaatacagt

SEQ ID NO: 119766 - DNA, 120 bp, Artificial Sequence
  ENSG00000100867_50 (sequence is synthesized)
cggtagcacagccagtagtgggtagaggacagaagaggtctgggatctccacatccctcatcttcttgtcctgcctccccatctgtgtggctgccattcccaattccagtggctgcagga

SEQ ID NO: 119767 - DNA, 120 bp, Artificial Sequence
  ENSG00000100867_51 (sequence is synthesized)
tgagagtagtattccaggggcccaggcatagcctccttggccttgacatcagcaggtttgggacaaggctatgctttaactccttgaccttgtgggctggtcattgtcaccttacctgct

SEQ ID NO: 119768 - DNA, 120 bp, Artificial Sequence
  ENSG00000100867_52 (sequence is synthesized)
ctctgttcttaccaacttaaaaccaatgacagggttagccccattcctctccataggaaaaagcctgtcccagacctctcctcatgcctgcgcttggtctccagggaccctgcctgtgtt

SEQ ID NO: 119769 - DNA, 120 bp, Artificial Sequence
  ENSG00000100867_53 (sequence is synthesized)
ccaggtcctgcagatctgactgtacccctcacagacacacccttaggaactggccaggggctgtcttcagtagaaggaaagttcctgactgtcacttctggtctcccttaccccatctgc

SEQ ID NO: 119770 - DNA, 120 bp, Artificial Sequence
  ENSG00000100867_54 (sequence is synthesized)
tccttagaggttgctcattgataggcactcaccatcagccttgggtgcctcttcacaaagcccaccctgccctctccttcaagcacctggcaagagaggaagcagaagataagggttctg

SEQ ID NO: 119771 - DNA, 120 bp, Artificial Sequence
  ENSG00000100867_55 (sequence is synthesized)
agcatggacatcgtatttatgagaaataggcatggaatcctagctctgccgtgtattggctggtactaaacctttctgagcctcagttttctgaactctgagatggggacagtaatagga

SEQ ID NO: 119772 - DNA, 120 bp, Artificial Sequence
  ENSG00000100867_56 (sequence is synthesized)
cctgtgttgcttctgtgagggttgcatcatttaatgaactcatgatagtgtcaccatcagtggtaagctcttagcttcagcttctcttatgtttgtcttgtctcaggaggggtgctgtca

SEQ ID NO: 119773 - DNA, 120 bp, Artificial Sequence
  ENSG00000100867_57 (sequence is synthesized)
tcctggtctcttccattgcagcttataatccagtagtggtaagtgcttggtccttgtgctcctgagtggtatagggtgaggggcaactttgttcttttcctcagagccttacagacaaag

SEQ ID NO: 119774 - DNA, 120 bp, Artificial Sequence
  ENSG00000100867_58 (sequence is synthesized)
tcttccatctcccagtctggctcagtgggaacccttcccagtgaataagggatcaaggggtgactgaatccttaggtcagcatgcctatgactgaggtcctcattgttctctgaactcag

SEQ ID NO: 119775 - DNA, 120 bp, Artificial Sequence
  ENSG00000100867_59 (sequence is synthesized)
ccatggtgcagtccatccatcctgaaaagatgctccttcttttgagaagggcaaagctgccctaggtgttctgcctggtggccttcccggggccctgcccatcttgttttagtagcactg

SEQ ID NO: 119776 - DNA, 120 bp, Artificial Sequence
  ENSG00000100883_0 (sequence is synthesized)
attgggcggaaggttcgctggcactccgttggtcttccagctggtgggagttgacgacgtggtgctgggcgttgggaccctactttatctagttcgggaagttgggttgtggggtcatac

SEQ ID NO: 119777 - DNA, 120 bp, Artificial Sequence
  ENSG00000100883_1 (sequence is synthesized)
ctgtctgtctgctcccagctttcttgggtttcttccgacggcgtggggcctcgctaaggaattcccggcccctcagggccacggctttagcggtgtcttttgcgagttcttcgtaagtac

SEQ ID NO: 119778 - DNA, 120 bp, Artificial Sequence
  ENSG00000100883_2 (sequence is synthesized)
atcttaaagctgtcaagatggttctagcagaccttggaagaaaaataacatcagcattacgctcgttgagcaatgccaccattatcaatgaagaggtattgaatgctatgctaaaagaag

SEQ ID NO: 119779 - DNA, 120 bp, Artificial Sequence
  ENSG00000100883_3 (sequence is synthesized)
tctgtaccgctttgttggaagcagatgttaatattaaactagtgaagcaactaagagaaaatgttaagtctgctattgatcttgaagagatggcatctggtcttaacaaaagaaaaatga

SEQ ID NO: 119780 - DNA, 120 bp, Artificial Sequence
  ENSG00000100883_4 (sequence is synthesized)
ttcagcatgctgtatttaaagaacttgtgaagcttgtagaccctggagttaaggcatggacacccactaaaggaaaacaaaatgtgattatgtttgttggattgcaagggagtggtaaaa

SEQ ID NO: 119781 - DNA, 120 bp, Artificial Sequence
  ENSG00000100883_5 (sequence is synthesized)
caacaacatgttcaaagctagcatattattaccagaggaaaggttggaagacctgtttaatatgtgcagacacattcagagcaggggcttttgaccaactaaaacagaatgctaccaaag

SEQ ID NO: 119782 - DNA, 120 bp, Artificial Sequence
  ENSG00000100883_6 (sequence is synthesized)
caagaattccattttatggaagctatacagaaatggatcctgtcatcattgcttctgaaggagtagagaaatttaaaaatgaaaattttgaaattattattgttgatacaagtggccgcc

SEQ ID NO: 119783 - DNA, 120 bp, Artificial Sequence
  ENSG00000100883_7 (sequence is synthesized)
acaaacaagaagactctttgtttgaagaaatgcttcaagttgctaatgctatacaacctgataacattgtttatgtgatggatgcctccattgggcaggcttgtgaagcccaggctaagg

SEQ ID NO: 119784 - DNA, 120 bp, Artificial Sequence
  ENSG00000100883_8 (sequence is synthesized)
cttttaaagataaagtagatgtagcctcagtaatagtgacaaaacttgatggccatgcaaaaggaggtggtgcactcagtgcagtcgctgccacaaaaagtccgattattttcattggta

SEQ ID NO: 119785 - DNA, 120 bp, Artificial Sequence
  ENSG00000100883_9 (sequence is synthesized)
ctttcaaaacacagccttttattagcaaacttcttggtatgggcgacattgaaggactgatagataaagtcaacgagttgaagttggatgacaatgaagcacttatagagaagttgaaac

SEQ ID NO: 119786 - DNA, 120 bp, Artificial Sequence
  ENSG00000100883_10 (sequence is synthesized)
atggtcagtttacgttgcgagacatgtatgagcaatttcaaaatatcatgaaaatgggccccttcagtcagatcttggggatgatccctggttttgggacagattttatgagcaaaggaa

SEQ ID NO: 119787 - DNA, 120 bp, Artificial Sequence
  ENSG00000100883_11 (sequence is synthesized)
atgaacaggagtcaatggcaaggctaaagaaattaatgacaataatggatagtatgaatgatcaagaactagacagtacggatggtgccaaagtttttagtaaacaaccaggaagaatcc

SEQ ID NO: 119788 - DNA, 120 bp, Artificial Sequence
  ENSG00000100883_12 (sequence is synthesized)
aaagagtagcaagaggatcgggtgtatcaacaagagatgttcaagaacttttgacacaatataccaagtttgcacagatggtaaaaaagatgggaggtatcaaaggacttttcaaaggtg

SEQ ID NO: 119789 - DNA, 120 bp, Artificial Sequence
  ENSG00000100883_13 (sequence is synthesized)
gcgacatgtctaagaatgtgagccagtcacagatggcaaaattgaaccaacaaatggccaaaatgatggatcctagggttcttcatcacatgggtggtatggcaggacttcagtcaatga

SEQ ID NO: 119790 - DNA, 120 bp, Artificial Sequence
  ENSG00000100883_14 (sequence is synthesized)
tgaggcagtttcaacagggtgctgctggcaacatgaaaggcatgatgggattcaataatatgtaaagaaaatgccttaatataaactgactcagttgaatacctaatttgctgagacctc

SEQ ID NO: 119791 - DNA, 120 bp, Artificial Sequence
  ENSG00000100883_15 (sequence is synthesized)
agcgtttcccttctttttgcgaattggggggaaagtgtatttttcttgcttatcatgcactctttccttttcttctcgcccgcttttcccctccttttctttttccttccttctttcctc

SEQ ID NO: 119792 - DNA, 120 bp, Artificial Sequence
  ENSG00000100883_16 (sequence is synthesized)
cctttaatataagggagaaatacatggtttttgtggaaatcattatatgtttgctttagattttcttctgttttcaccatcataacacttaagttaaatcatgatgtaaaattttagtac

SEQ ID NO: 119793 - DNA, 120 bp, Artificial Sequence
  ENSG00000100883_17 (sequence is synthesized)
ttaaaggtttttaattatctcgaaggccaagcattgcatttgtaaacagtcctggtcagtagttaaataatgtttcaattaaagtgctgtaaaataaacttcaaagtggttataagttaa

SEQ ID NO: 119794 - DNA, 120 bp, Artificial Sequence
  ENSG00000100883_18 (sequence is synthesized)
gagatccaagacgcaactcccaccgccaggcggtcgcctcagaagggagccgcgtagaaggaacgcggcggtgtgccccggaagcggaagtagattctcctatagaaaggctggactacg

SEQ ID NO: 119795 - DNA, 120 bp, Artificial Sequence
  ENSG00000100883_19 (sequence is synthesized)
aagcaactaagagaaaatgttaagtaagttaaatcaatcaggtaaaacacaggcacagtttagtttagtttactggaaagaggtgctaactggaagtgtttgctgtatcaggaatcattt

SEQ ID NO: 119796 - DNA, 120 bp, Artificial Sequence
  ENSG00000100883_20 (sequence is synthesized)
ctgctctgcaccactggaaaagtgctgtgttggagctcatatgttgggcgagagcatgtgtagtacgtttccataatgatggttcaaagaataaactacatgtgattttcatttaattac

SEQ ID NO: 119797 - DNA, 120 bp, Artificial Sequence
  ENSG00000100883_21 (sequence is synthesized)
agtcacacctctatctctcatctttccgctcttagctgggagtgctccgcctagtcacttttcttaaggtggctcgtcgaggcctgacttcttccccgaaatcacgtccctagacagcct

SEQ ID NO: 119798 - DNA, 120 bp, Artificial Sequence
  ENSG00000100883_22 (sequence is synthesized)
cctattttaccactaactttactcctgcagttattcagcggtaggaaactgaaaccaaaaaccagtgtaagcaagtaaacatctaaactgtttcaggagccgcgtagaaggaacgcggcg

SEQ ID NO: 119799 - DNA, 120 bp, Artificial Sequence
  ENSG00000100883_23 (sequence is synthesized)
tgaaatatatatgattgtatattgtcactagcattgggaagatggcttattcataatccctgtatttatatgtattttgatgtagacttaatacttgtagataaaagcctaaaagtggat

SEQ ID NO: 119800 - DNA, 120 bp, Artificial Sequence
  ENSG00000100883_24 (sequence is synthesized)
atcactcccagtaccaccatggtgaaggatataaactgaaacatctgaatcttatttcttaaatgaagaatattaatttaaggatcaataattattttgtataatgggtatggcataaga

SEQ ID NO: 119801 - DNA, 120 bp, Artificial Sequence
  ENSG00000100883_25 (sequence is synthesized)
gacaagatggggagaaatttagcctgaaagattatttttaggtagatttgtaatagcttgaaagctcttactcaaagggttatgattattggattgccttcatcgttgagagaaatgtct

SEQ ID NO: 119802 - DNA, 120 bp, Artificial Sequence
  ENSG00000100883_26 (sequence is synthesized)
agtataatacttctccaaatgagttacaaggaaagaacactagttcttcatgatgttcatagagttaacttaaaaggagaactctgagtcaaatgtggtggaatgctagtttttaaagag

SEQ ID NO: 119803 - DNA, 120 bp, Artificial Sequence
  ENSG00000100883_27 (sequence is synthesized)
agagcaagactccatctcaaaataaataaaaaataaaacactgggtacaattttgctaatagtggcttattcacagatataaataaagtattagcataaatcgtagccttaaaaaagcct

SEQ ID NO: 119804 - DNA, 120 bp, Artificial Sequence
  ENSG00000100883_28 (sequence is synthesized)
aaaagccttttatatgtccttttatatagaattttacatggtcttcaaaaaatagtatgtaattgagaaaaagattagaagggaatatgtagaaatagaaagaattatgttagagtgata

SEQ ID NO: 119805 - DNA, 120 bp, Artificial Sequence
  ENSG00000100884_0 (sequence is synthesized)
agtccttcagcagatgccctcatgtgaccaggatatgaggttgggtgtccttaagcaattatgtccatttcctgtgtctccttataaaatggtggctagggaactggacatcattctcaa

SEQ ID NO: 119806 - DNA, 120 bp, Artificial Sequence
  ENSG00000100884_1 (sequence is synthesized)
agctatgacgttcagcaaggtatgtgatggcttttaaggagcacgggaagatcacatcctgctgtattccgggccccataaatagcagcagagccggagctggagccggcgccagcggct

SEQ ID NO: 119807 - DNA, 120 bp, Artificial Sequence
  ENSG00000100884_2 (sequence is synthesized)
ggagcagcaagggagtcagggccagggccagagagccggagagaggagcccccgaccgagagcccagtgacatgtcggaccctgagatgggatgggtgcctgagcccccaaccatgacgc

SEQ ID NO: 119808 - DNA, 120 bp, Artificial Sequence
  ENSG00000100884_3 (sequence is synthesized)
tgggggcctctcgggtggagctgcgggtgtcctgccatggcctcctggaccgggacacactcaccaaaccccacccctgcgtgctgctcaagctctactctgatgagcagtgggtggagg

SEQ ID NO: 119809 - DNA, 120 bp, Artificial Sequence
  ENSG00000100884_4 (sequence is synthesized)
tagagcgcacagaggtgcttcgctcctgttccagccctgtcttctcccgggtgctggcccttgagtatttttttgaggagaagcagcccctgcagttccacgtgttcgatgccgaggacg

SEQ ID NO: 119810 - DNA, 120 bp, Artificial Sequence
  ENSG00000100884_5 (sequence is synthesized)
gagccaccagcccccgaaatgataccttcctcggctctacggagtgcaccttgggccagattgtgtcacaaaccaaggtcactaagccattattgctgaagaatgggaagactgcgggca

SEQ ID NO: 119811 - DNA, 120 bp, Artificial Sequence
  ENSG00000100884_6 (sequence is synthesized)
agtccaccatcacgatcgtggccgaggaggtatcaggcacaaacgactatgtgcaactcaccttcagagcctacaagctggacaacaaggatctgttcagcaagtctgaccctttcatgg

SEQ ID NO: 119812 - DNA, 120 bp, Artificial Sequence
  ENSG00000100884_7 (sequence is synthesized)
aaatctataagaccaacgaggaccaaagtgatcagctggtctggagaactgaggtggtgaagaacaacctgaaccccagctgggagccgttccgcctgtccctgcattccctatgcagct

SEQ ID NO: 119813 - DNA, 120 bp, Artificial Sequence
  ENSG00000100884_8 (sequence is synthesized)
gtgatgttcaccgacctctcaagttcctggtgtatgactatgactccagtgggaagcatgacttcatcggcgagttcaccagcactttccaggagatgcaggaagggacggcaaaccctg

SEQ ID NO: 119814 - DNA, 120 bp, Artificial Sequence
  ENSG00000100884_9 (sequence is synthesized)
tagtgctggcccagtgcacggtggagaaggtgcacaccttcctggattacatcatgggtggctgccagatcagcttcacggtggccattgacttcaccgcctccaatggggacccgagga

SEQ ID NO: 119815 - DNA, 120 bp, Artificial Sequence
  ENSG00000100884_10 (sequence is synthesized)
gcagccagtccctgcactgcctcagtccccgacagcccaaccactacctgcaggccctgcgtgcagtgggaggcatctgccaggactatgacagtgataagcggttcccagcttttggct

SEQ ID NO: 119816 - DNA, 120 bp, Artificial Sequence
  ENSG00000100884_11 (sequence is synthesized)
ttggggctcgaatcccccccaacttcgaggtgtcccatgactttgctatcaactttgacccggaaaatcctgaatgtgaagagatctcaggggtcatcgcctcctaccgtcgttgcctgc

SEQ ID NO: 119817 - DNA, 120 bp, Artificial Sequence
  ENSG00000100884_12 (sequence is synthesized)
cccagatccagctctacggccccaccaatgtggcccccatcatcaaccgtgtggctgagccggcccagcgggagcagagcaccggccaagccacgaagtactcggtgctgctggtgctca

SEQ ID NO: 119818 - DNA, 120 bp, Artificial Sequence
  ENSG00000100884_13 (sequence is synthesized)
ctgacggtgtggtgagcgacatggctgagactcgcactgctatcgtgcgtgcctcccgcctgcccatgtccatcatcatcgtaggcgtgggcaatgctgacttctctgacatgcggctgc

SEQ ID NO: 119819 - DNA, 120 bp, Artificial Sequence
  ENSG00000100884_14 (sequence is synthesized)
tggatggcgacgacggccccttgcgctgcccccgaggggtgcctgcagcccgagacattgtccagttcgtgcccttccgagacttcaaggatgctgccccctctgcactcgccaagtgtg

SEQ ID NO: 119820 - DNA, 120 bp, Artificial Sequence
  ENSG00000100884_15 (sequence is synthesized)
tcctggctgaggtgccacggcaggtggtggagtactacgccagccagggcatcagccctggggctcccaggccctgcacactggctacgactcccagccctagcccgtgactgcctccct

SEQ ID NO: 119821 - DNA, 120 bp, Artificial Sequence
  ENSG00000100884_16 (sequence is synthesized)
ccggaccgacactccctcagcctctcagtgcctgtcctgaccctcgtgactccagtgaccaatgcctccacctcttggaccaggtgtgccccctgggttctggacgtgagtggtgggtcc

SEQ ID NO: 119822 - DNA, 120 bp, Artificial Sequence
  ENSG00000100884_17 (sequence is synthesized)
tgctcctatctctccaaaccccatacccttcaatgctgtggcccctcagtgacttccttgggtgatcctgactttctagccattaataaagagaactgctcctagcacctcagcctctaa

SEQ ID NO: 119823 - DNA, 120 bp, Artificial Sequence
  ENSG00000100884_18 (sequence is synthesized)
cagtgagtttatgtactggcgcctgtgtgtgtcaagatatgtgtgagcctgtgagtcgtgggtgcatgtgtcgccatcatttctctgtttgaatgtgtatgtgcatgccactgcaatgtg

SEQ ID NO: 119824 - DNA, 120 bp, Artificial Sequence
  ENSG00000100884_19 (sequence is synthesized)
gagctcagggacggtagtgctggcccagtgcacggtaaatttcacttcctgcttcaagccttgccccagcccctgcccctaccacactctcaggttcaacccttcccttgtttcaaagac

SEQ ID NO: 119825 - DNA, 120 bp, Artificial Sequence
  ENSG00000100884_20 (sequence is synthesized)
cagtttctctgcttctgggaactggaaaccacccccaactgcaacccaaaaaactctggctcccccatgttccccacagaagccctacccaagctccctcctcaaaggaccaccccatcc

SEQ ID NO: 119826 - DNA, 120 bp, Artificial Sequence
  ENSG00000100884_21 (sequence is synthesized)
gagggaggggctgagtccatagtgaaaggaaggagcccagaatctccactgccccaacttgggctgctcatgagccttcgcattgtcagcttatgcacccccacatcattatgtggctac

SEQ ID NO: 119827 - DNA, 120 bp, Artificial Sequence
  ENSG00000100884_22 (sequence is synthesized)
ctgtagcctccccaccactcatcttagtcctccctacagatcccagctctggcctaggcaatctggtggctctcatggttgcagcatgaccttcttcccacccccacccaggtggccatt

SEQ ID NO: 119828 - DNA, 120 bp, Artificial Sequence
  ENSG00000100884_23 (sequence is synthesized)
gacaggtaggagagagtggggcgggagggaacaggcagggaggccttgcccaacggattccacagctttttcttctccccagtgataagcggttcccagcttttggctttggggctcgaa

SEQ ID NO: 119829 - DNA, 120 bp, Artificial Sequence
  ENSG00000100884_24 (sequence is synthesized)
tcccccccaacttcgaggtaggctagatgcgagggaaagaaggagatggggggcgtgtcagtcaggcagaaaaggcaggccctcactgctcccgccttgccctcacaggtgtcccatgac

SEQ ID NO: 119830 - DNA, 120 bp, Artificial Sequence
  ENSG00000100884_25 (sequence is synthesized)
tgcccttccgagacttcaaggatgtgagtcccccgggccccttccggctgaaggactcctcagcttctcatccccccaaatctgaccttcgtcttccaccatttgatgtcctgctaagga

SEQ ID NO: 119831 - DNA, 120 bp, Artificial Sequence
  ENSG00000100884_26 (sequence is synthesized)
cgcgggagcccagctggccaccctgaagccccacttctccctcagatgaccctgcctcccctactcttcctctcacccctaaccacatcactgtccccaccctaggctgccccctctgca

SEQ ID NO: 119832 - DNA, 120 bp, Artificial Sequence
  ENSG00000100884_27 (sequence is synthesized)
gtcagggccagggccagagagccggagagaggagcccccgaccgagagcccaggtgagcccacccttcctccccagcccagccccagcccagcccagcttggcccagtctccataacaac

SEQ ID NO: 119833 - DNA, 120 bp, Artificial Sequence
  ENSG00000100884_28 (sequence is synthesized)
atctcctggagcccgcagagagatcccagccctgcccaatcccttcaccaccacaagcccctgcctatctcggggacccccaagaactgggagacttgtggctggaaggcagagaccccc

SEQ ID NO: 119834 - DNA, 120 bp, Artificial Sequence
  ENSG00000100884_29 (sequence is synthesized)
ctcccccagcccagaccctccctcacatatccagaaaggcacacactgtggggaggtagatacccagccagagaaaggtcccacttctgagggaggtacaggaactgtcacaccctcctg

SEQ ID NO: 119835 - DNA, 120 bp, Artificial Sequence
  ENSG00000100884_30 (sequence is synthesized)
gaaacggacacacgacatggggggacagacacggagggtggggcactcagacacaccaatgcacactcactcggggaagcatgacatgggatcagacagcctcaccctgagatctgtaca

SEQ ID NO: 119836 - DNA, 120 bp, Artificial Sequence
  ENSG00000100884_31 (sequence is synthesized)
gacacagatagatggactgaccggccatgaactctggccggcatacccctgcctgcttcagcccgaggcttggtaccactgctgggggaaggtggcatgcgtgcatcccacgggcagcat

SEQ ID NO: 119837 - DNA, 120 bp, Artificial Sequence
  ENSG00000100884_32 (sequence is synthesized)
ggagggagccacgactccccaaaaatcctgtcgctaagagacggtgccagtgctgccaagaagtgtgaaaacaggggaggtggggagggatgtgaggcttgtcacagttagagctcctgc

SEQ ID NO: 119838 - DNA, 120 bp, Artificial Sequence
  ENSG00000100884_33 (sequence is synthesized)
caggagcctgaaggagctttcagcagagccctggtcctgcctcccagcccaccaccactccttttccatcagctagccagaaggggaatgggggtagggagtggatagggatagcccagc

SEQ ID NO: 119839 - DNA, 120 bp, Artificial Sequence
  ENSG00000100884_34 (sequence is synthesized)
aggggactttccaacctgtctcctgcccactgcagactccacttctgagacccatcctcttcagaactccagaggcctctccaccccctgccccacccccttgccctagtttagctccct

SEQ ID NO: 119840 - DNA, 120 bp, Artificial Sequence
  ENSG00000100884_35 (sequence is synthesized)
cgtgccaagactgagtgcagcgctggcacaacaccagtcgggaaatagcagaaggtgctgaggcggcagaaagtgtagatcaatcgatggcctaggagccaagactgccaggaacatccc

SEQ ID NO: 119841 - DNA, 120 bp, Artificial Sequence
  ENSG00000100884_36 (sequence is synthesized)
caccccaatccttcagccctctccagccccatccacgcatacctaggccagcagcacagggcttctgagcaggagtgggaggctcaggtcctctgccctcccctgctcagaactctggtg

SEQ ID NO: 119842 - DNA, 120 bp, Artificial Sequence
  ENSG00000100884_37 (sequence is synthesized)
aagctgaggaagcaggaggtccgtgaggccccagggtctagggaaggaggttaaggggtggggcccagggaccctagaggatagacccctctgctggcaggtgttccctttccagagtcc

SEQ ID NO: 119843 - DNA, 120 bp, Artificial Sequence
  ENSG00000100884_38 (sequence is synthesized)
gtccaggtattcaatgcccctgcatggacacctatggtgacatcatgcccaggaccacccccacctaagggaaaggggatggggtggcccttgtggtaaggttaggggagtcctgccact

SEQ ID NO: 119844 - DNA, 120 bp, Artificial Sequence
  ENSG00000100884_39 (sequence is synthesized)
tcccctgtcactcctaggcctcccactcaagacagatcccaggagcccaggcctgctctcttcccagtgggagcccatcccccaccctccttgcagctctcaccaacctcaagggccctt

SEQ ID NO: 119845 - DNA, 120 bp, Artificial Sequence
  ENSG00000100884_40 (sequence is synthesized)
gttggtgcctggggctatggggatgaagggagggagagtaaagtaagaagacacagacaggagctgaccagccacctggtgcctctccaaggtggtgaagaacaacctgaaccccagctg

SEQ ID NO: 119846 - DNA, 120 bp, Artificial Sequence
  ENSG00000100884_41 (sequence is synthesized)
accataggtgataggaagtggagagggtggaaagcacctgggctcagctgaaggacggaaccatgggggtcttgctctgggaggctctgctggaagggagaaagaggggtcacctgatgg

SEQ ID NO: 119847 - DNA, 120 bp, Artificial Sequence
  ENSG00000100884_42 (sequence is synthesized)
tcctgaatgtgaaggtaaaaggggagattttcacctgccccgcctccccgcagacacactccacacaggagcacagactccactccccagggcccagcttcctgtcccttccacccatcc

SEQ ID NO: 119848 - DNA, 120 bp, Artificial Sequence
  ENSG00000100884_43 (sequence is synthesized)
caggcctgtctttatcaggtgaggcttccagggccgaggcccagcatctgcacccaactctccctgccaagggaccatccaactctcccactgcttaatgaaggaactcgaggggagggc

SEQ ID NO: 119849 - DNA, 120 bp, Artificial Sequence
  ENSG00000100884_44 (sequence is synthesized)
agtcctcagacctggaagcatttccttgctttaaggagtgtcaggagggggccctgctcatttctgccagcttcacaacttctcttcactcacagagatctcaggggtcatcgcctccta

SEQ ID NO: 119850 - DNA, 120 bp, Artificial Sequence
  ENSG00000100884_45 (sequence is synthesized)
atgtccatttcctgtgtctccttataaaatggtggctagggaactggacatcattctcaaagctatgacgttcagcaaggccccataaatagcagcagagccggagctggagccggcgcc

SEQ ID NO: 119851 - DNA, 120 bp, Artificial Sequence
  ENSG00000100884_46 (sequence is synthesized)
actgtgtctgtgggggtcctgcctctaagccacccccagcctgccctcctcccccggttctgtggctccctcccaggctgtggccctgccccttccctcttctccctcccaatccatcca

SEQ ID NO: 119852 - DNA, 120 bp, Artificial Sequence
  ENSG00000100884_47 (sequence is synthesized)
agatatccttagctagtgtaacaatgttgaaagtgatgtgagaaggggccccataaatagcagcagagccggagctggagccggcgccagcggctggagcagcaagggagtcagggccag

SEQ ID NO: 119853 - DNA, 120 bp, Artificial Sequence
  ENSG00000100884_48 (sequence is synthesized)
ggccagagagccggagagaggagcccccgaccgagagcccaggtgttccctttccagagtccaggccacctgctctgtccccacagtgacatgtcggaccctgagatgggatgggtgcct

SEQ ID NO: 119854 - DNA, 120 bp, Artificial Sequence
  ENSG00000100884_49 (sequence is synthesized)
gctgtattccgggttagtttgagtgagtacatgtgtgacaaggacagcccagtgttcctgtatatgtgactgcagatatccttagctagtgtaacaatgttgaaagtgatgtgagaaggg

SEQ ID NO: 119855 - DNA, 120 bp, Artificial Sequence
  ENSG00000100888_0 (sequence is synthesized)
ggtgctggagagacagggagaggggcgaaccggccccccacagccactgcaggagttccaccatcttcctctgaagacgtagccatcttgctccatgaagggtgaatcgaaacgcatcac

SEQ ID NO: 119856 - DNA, 120 bp, Artificial Sequence
  ENSG00000100888_1 (sequence is synthesized)
cctggtcctccagcagccacagtctggaggtccccaaggacatcggcatgttgtgctagggagtctaccaggcaagatagtgttacagggcaaccagctggcagccctgactcaagccaa

SEQ ID NO: 119857 - DNA, 120 bp, Artificial Sequence
  ENSG00000100888_2 (sequence is synthesized)
gaatgcccaagggcagcctgccaaggtagtaactatccagctgcaggtgcagcagccacagcaaaaaatccagattgtaccacaaccaccatcatcgcagccacagccccagcagccacc

SEQ ID NO: 119858 - DNA, 120 bp, Artificial Sequence
  ENSG00000100888_3 (sequence is synthesized)
ctccacccagccagtgactctgtcctctgtacagcaggctcagataatgggaccaggacaaagcccaggacaaagactttcagtaccagtcaaggtggtactgcagccacaggctggctc

SEQ ID NO: 119859 - DNA, 120 bp, Artificial Sequence
  ENSG00000100888_4 (sequence is synthesized)
ttcccaaggggcctcttctgggctctctgtagttaaagttctgagtgccagtgaagtggcagctttgtcatcaccagcaagctctgctcctcattcggggggaaagacaggaatggagga

SEQ ID NO: 119860 - DNA, 120 bp, Artificial Sequence
  ENSG00000100888_5 (sequence is synthesized)
aaaccgcagattggaacaccagaagaagcaagagaaagcaaatcggattgtagcagaggccattgcgagagcccgtgcccgcggtgagcagaacatacctcgagtcttaaatgaggacga

SEQ ID NO: 119861 - DNA, 120 bp, Artificial Sequence
  ENSG00000100888_6 (sequence is synthesized)
gttgcccagcgttcggccagaggaggaaggcgagaagaaacgcaggaagaagagtgctggggagaggctgaaagaggagaagccaaagaagagtaaaacatctggtgcctccaaaacaaa

SEQ ID NO: 119862 - DNA, 120 bp, Artificial Sequence
  ENSG00000100888_7 (sequence is synthesized)
gggcaagagcaagctcaacaccatcactcctgtagtgggtaagaagagaaaacgtaatacctcatctgataattcagatgtggaagtcatgcctgcacagtcacctcgagaagatgaaga

SEQ ID NO: 119863 - DNA, 120 bp, Artificial Sequence
  ENSG00000100888_8 (sequence is synthesized)
aagcagcattcagaagagacgctcaaaccgccaagttaagcgaaaaaaatatacagaggacctggatataaagatcacagatgatgaagaagaagaagaggtggatgtaactggtccaat

SEQ ID NO: 119864 - DNA, 120 bp, Artificial Sequence
  ENSG00000100888_9 (sequence is synthesized)
aaaacctgagcctatcctccctgaaccagtgcaagaaccagatggcgagactttgccttccatgcagttctttgtggagaatcccagtgaagaagatgcagccattgtagacaaagtgct

SEQ ID NO: 119865 - DNA, 120 bp, Artificial Sequence
  ENSG00000100888_10 (sequence is synthesized)
ttctatgcggattgtgaagaaggagctcccttctggacaatatactgaagcagaagaattctttgtcaagtacaagaactactcctatctgcattgtgaatgggctactatctcccaact

SEQ ID NO: 119866 - DNA, 120 bp, Artificial Sequence
  ENSG00000100888_11 (sequence is synthesized)
agagaaggataagaggatacatcaaaaattaaagcgcttcaaaaccaaaatggctcagatgagacacttcttccatgaggatgaagagccctttaatccagactacgtagaggtggatag

SEQ ID NO: 119867 - DNA, 120 bp, Artificial Sequence
  ENSG00000100888_12 (sequence is synthesized)
gatattggatgagtctcacagtattgacaaggacaatggggagcccgttatttactacctggtgaaatggtgctctctgccctatgaggatagcacatgggagctaaaagaagatgttga

SEQ ID NO: 119868 - DNA, 120 bp, Artificial Sequence
  ENSG00000100888_13 (sequence is synthesized)
tgagggcaagattcgagaatttaaacggattcagtcaaggcacccagaactcaaaagggtgaatcgtccgcaggcaagtgcctggaagaaattggagctatcacatgaatataaaaacag

SEQ ID NO: 119869 - DNA, 120 bp, Artificial Sequence
  ENSG00000100888_14 (sequence is synthesized)
aaaccagctacgggaatatcagttggaaggggttaattggctgctctttaattggtataacaggcagaactgcatcctggctgatgagatgggattgggcaaaactattcagtccattgc

SEQ ID NO: 119870 - DNA, 120 bp, Artificial Sequence
  ENSG00000100888_15 (sequence is synthesized)
cttcttgcaggaagtatataatgtgggcatccatggtcccttcttggtcattgccccactgtccacaattactaactgggagcgagaatttaatacatggacagaaatgaacactattgt

SEQ ID NO: 119871 - DNA, 120 bp, Artificial Sequence
  ENSG00000100888_16 (sequence is synthesized)
gtaccatggcagtctggccagcaggcagatgattcaacagtatgaaatgtactgcaaagattcacggggacgcctcatcccaggcgcatacaagtttgacgctctgatcaccacttttga

SEQ ID NO: 119872 - DNA, 120 bp, Artificial Sequence
  ENSG00000100888_17 (sequence is synthesized)
gatgattttgtcagattgtcctgagcttcgtgaaattgaatggcgttgtgttatcattgatgaagcccatcgactgaaaaaccgtaattgcaagctgcttgatagtctcaagcacatgga

SEQ ID NO: 119873 - DNA, 120 bp, Artificial Sequence
  ENSG00000100888_18 (sequence is synthesized)
cctggaacacaaggtgctactcacaggaacaccattgcaaaatactgtagaagaactgtttagcttgcttcatttcttggaaccgtcacaatttccctcagaatcagagtttctcaagga

SEQ ID NO: 119874 - DNA, 120 bp, Artificial Sequence
  ENSG00000100888_19 (sequence is synthesized)
ctttggggatctcaagacagaggaacaggttcaaaagctacaggccattcttaagccaatgatgctgagaagactcaaagaggatgttgaaaaaaacttggcacccaaacaggaaacaat

SEQ ID NO: 119875 - DNA, 120 bp, Artificial Sequence
  ENSG00000100888_20 (sequence is synthesized)
tattgaagtagagctgactaatatccagaagaaatactatcgggctattttggagaagaatttctccttcctttccaaaggggcaggtcataccaacatgcctaatctacttaacacaat

SEQ ID NO: 119876 - DNA, 120 bp, Artificial Sequence
  ENSG00000100888_21 (sequence is synthesized)
gatggagttgcgcaagtgctgcaaccacccatatctcatcaatggtgctgaagaaaaaatcctaacagaattccgtgaagcttgccatattatacctcatgactttcacctgcaggccat

SEQ ID NO: 119877 - DNA, 120 bp, Artificial Sequence
  ENSG00000100888_22 (sequence is synthesized)
ggttcgttcagccggcaaactggttcttattgacaagttgcttccaaagcttaaagctggtggccataaagttctgatcttctctcagatggtgcgctgcctagacatcctagaggatta

SEQ ID NO: 119878 - DNA, 120 bp, Artificial Sequence
  ENSG00000100888_23 (sequence is synthesized)
tttaatccagaggaggtacttatatgaacgtattgatgggcgagttagaggcaaccttcgacaggctgccattgaccgcttcagcaagcctgactcagaccgctttgtcttcttactgtg

SEQ ID NO: 119879 - DNA, 120 bp, Artificial Sequence
  ENSG00000100888_24 (sequence is synthesized)
tacccgggctggtggacttggtattaatcttacagctgctgatacctgcatcatctttgattcagactggaatccacaaaatgacctgcaggcccaggcacgatgtcatcgaattgggca

SEQ ID NO: 119880 - DNA, 120 bp, Artificial Sequence
  ENSG00000100888_25 (sequence is synthesized)
gagcaaagctgtgaaggtgtaccgcctcatcactcgtaattcctacgagagagagatgtttgataaggccagcctcaagttggggttggataaggctgtgcttcaatccatgagtggtcg

SEQ ID NO: 119881 - DNA, 120 bp, Artificial Sequence
  ENSG00000100888_26 (sequence is synthesized)
ggatggcaacattactggaatccaacagttctctaagaaggagattgaagatcttttaagaaaaggagcatatgcagccatcatggaggaagatgatgaaggctccaagttttgtgaaga

SEQ ID NO: 119882 - DNA, 120 bp, Artificial Sequence
  ENSG00000100888_27 (sequence is synthesized)
ggacattgaccagatcttgttaagacgaactacaaccatcaccattgaatctgaaggaaaaggttccacctttgctaaggcaagctttgttgcttctgaaaacaggacagatatttcttt

SEQ ID NO: 119883 - DNA, 120 bp, Artificial Sequence
  ENSG00000100888_28 (sequence is synthesized)
ggatgaccccaacttttggcaaaagtgggccaaaaaggctgacctagacatggatctgctcaacagcaagaataatttggtaattgacacacctagagtacgaaaacaaacgcgccactt

SEQ ID NO: 119884 - DNA, 120 bp, Artificial Sequence
  ENSG00000100888_29 (sequence is synthesized)
tagcactctgaaagatgatgacctggtggaattctctgatttggaaagtgaggatgatgagcggccacgctcccgcagacatgaccgtcatcatgcctatgggcgcactgactgctttcg

SEQ ID NO: 119885 - DNA, 120 bp, Artificial Sequence
  ENSG00000100888_30 (sequence is synthesized)
ttgtcgggccattctcgtgtactgtcttctacactaccgtggggatgaaaatattaaaggcttcatctgggacttgattagcccagctgaaaatggcaagacaaaagaattgcagaatca

SEQ ID NO: 119886 - DNA, 120 bp, Artificial Sequence
  ENSG00000100888_31 (sequence is synthesized)
ttcaggtctatctatccctgtgcctcgtggacgcaaaggaaaaaaagtaaagtcacaaagcacttttgatatccataaggcagattggatccggaaatataaccctgacactttgttcca

SEQ ID NO: 119887 - DNA, 120 bp, Artificial Sequence
  ENSG00000100888_32 (sequence is synthesized)
agatgaaagttataagaagcacttgaaacatcagtgtaacaaggtactgttgcgggtacgaatgctatactacctgaggcaggaggttattggagaccaagcagaaaaggtgttaggggg

SEQ ID NO: 119888 - DNA, 120 bp, Artificial Sequence
  ENSG00000100888_33 (sequence is synthesized)
tgcgattgccagtgagattgacatatggttcccagtagtggatcaactggaggttccaacaacttggtgggacagtgaggctgacaagtcgctgctcattggagtctttaaacatggcta

SEQ ID NO: 119889 - DNA, 120 bp, Artificial Sequence
  ENSG00000100888_34 (sequence is synthesized)
tgagaaatataataccatgagggcagacccagccttatgtttcctagaaaaggctggccgaccagatgacaaagcaattgcagcagaacatcgagtgttggataacttctctgacatagt

SEQ ID NO: 119890 - DNA, 120 bp, Artificial Sequence
  ENSG00000100888_35 (sequence is synthesized)
agaaggggttgactttgataaagattgtgaagatcctgaatataaaccactccaaggtcccccaaaggaccaagatgatgagggtgatcccttgatgatgatggatgaggagatctcagt

SEQ ID NO: 119891 - DNA, 120 bp, Artificial Sequence
  ENSG00000100888_36 (sequence is synthesized)
gattgatggagatgaagcccaggtgacccaacagccaggccatttattctggcctccgggctctgccctaacagctaggcttcggcgtctagtaacagcgtatcagcgcagctacaagag

SEQ ID NO: 119892 - DNA, 120 bp, Artificial Sequence
  ENSG00000100888_37 (sequence is synthesized)
agaacaaatgaagatagaggctgcagaacgtggggaccggcgaaggcggcgttgtgaagcagccttcaagctgaaagaaattgcacggcgggagaaacaacaacgatggacaaggcgtga

SEQ ID NO: 119893 - DNA, 120 bp, Artificial Sequence
  ENSG00000100888_38 (sequence is synthesized)
acaaactgatttttatcgagtggtgtctacgtttggtgtggaatatgaccctgacaccatgcagttccattgggatcgcttccgcacttttgctcgactagacaaaaagacagatgaaag

SEQ ID NO: 119894 - DNA, 120 bp, Artificial Sequence
  ENSG00000100888_39 (sequence is synthesized)
ccttaccaagtacttccatggctttgtggccatgtgccgccaagtatgccgccttcccccagcagctggagatgaaccccccgaccctaacctgttcattgagcccatcactgaggagag

SEQ ID NO: 119895 - DNA, 120 bp, Artificial Sequence
  ENSG00000100888_40 (sequence is synthesized)
agcctcacggactctctaccgtatagaattgcttcggcgcttacgggaacaagttttatgccacccccttttggaagatcggctggcattgtgtcagcctcctggtcctgaattgcccaa

SEQ ID NO: 119896 - DNA, 120 bp, Artificial Sequence
  ENSG00000100888_41 (sequence is synthesized)
atggtgggagcctgttcggcatgatggggagcttctaagaggggcagcccgccatggggtgagccaaacagactgcaacatcatgcaggacccagacttctcttttctggctgcccgtat

SEQ ID NO: 119897 - DNA, 120 bp, Artificial Sequence
  ENSG00000100888_42 (sequence is synthesized)
gaattatatgcagaaccatcaagcaggagcaccagctccatccttgtcacgctgctctactccactgctgcaccagcagtatacctcacgcactgcctcaccactgcccctgcgcccaga

SEQ ID NO: 119898 - DNA, 120 bp, Artificial Sequence
  ENSG00000100888_43 (sequence is synthesized)
tgctcctgttgaaaagtcacccgaggagacagctacccaggtccccagtctggagagtctgactttaaagctagagcacgaggtggtggccaggagccgaccaaccccacaagactatga

SEQ ID NO: 119899 - DNA, 120 bp, Artificial Sequence
  ENSG00000100888_44 (sequence is synthesized)
gatgcgagtatccccctctgatactacccctctggtttcccggagtgttccaccagtcaaactggaggatgaggatgattcggactctgagctggacttgagcaagctgtcaccatcttc

SEQ ID NO: 119900 - DNA, 120 bp, Artificial Sequence
  ENSG00000100888_45 (sequence is synthesized)
ttcttcttcctcatcctcatccagctccagctccagcactgatgagagtgaggatgagaaggaagagaagctaactgaccagtcccgctcaaagctctatgatgaagagagtctcctgtc

SEQ ID NO: 119901 - DNA, 120 bp, Artificial Sequence
  ENSG00000100888_46 (sequence is synthesized)
cctcactatgtcccaagatggattcccaaatgaagatggagaacaaatgacccctgagcttctgctactgcaggaaagacaaagagcctctgagtggcccaaggatcgtgtcctgataaa

SEQ ID NO: 119902 - DNA, 120 bp, Artificial Sequence
  ENSG00000100888_47 (sequence is synthesized)
ccgtattgacctcgtctgccaggctgtactctcagggaagtggccttctagccgtaggagccaggaaatggtaacaggaggaattttggggccaggcaaccacttgctagacagtccctc

SEQ ID NO: 119903 - DNA, 120 bp, Artificial Sequence
  ENSG00000100888_48 (sequence is synthesized)
attgactcctggagaatatggtgactctccagtccccacaccacgaagtagtagtgcagcttccatggcagaggaggaagcatctgcagtcagcacagcggcagcccagttcaccaaact

SEQ ID NO: 119904 - DNA, 120 bp, Artificial Sequence
  ENSG00000100888_49 (sequence is synthesized)
tcgccgaggcatggatgaaaaggagtttacagttcaaatcaaagatgaggaaggattgaagttaacattccagaagcacaagttgatggcgaatggagtaatgggagatggacatccact

SEQ ID NO: 119905 - DNA, 120 bp, Artificial Sequence
  ENSG00000100888_50 (sequence is synthesized)
gtttcataagaagaaggggaacagaaagaagctagtagagctggaggtggagtgcatggaagagcctaatcaccttgatgtggacctggagacccggatccctgtcatcaataaggtgga

SEQ ID NO: 119906 - DNA, 120 bp, Artificial Sequence
  ENSG00000100888_51 (sequence is synthesized)
tggtactttgctggtgggtgaggatgcccctcgccgggctgaactggagatgtggttacagggtcatccagagtttgctgttgatccccgatttctagcgtatatggaggatcgcagaaa

SEQ ID NO: 119907 - DNA, 120 bp, Artificial Sequence
  ENSG00000100888_52 (sequence is synthesized)
acagaagtggcaaagatgtaaaaaaaataataaggcagaattgaactgtttgggaatggaaccagtacagacagctaactctagaaatgggaaaaagggtcatcacactgaaacggtgtt

SEQ ID NO: 119908 - DNA, 120 bp, Artificial Sequence
  ENSG00000100888_53 (sequence is synthesized)
caaccgggttttgccagggcctattgcaccagagagcagcaagaagcgggcccgtaggatgcgaccagacctttctaagatgatggccctcatgcagggtggaagcactgggtctctatc

SEQ ID NO: 119909 - DNA, 120 bp, Artificial Sequence
  ENSG00000100888_54 (sequence is synthesized)
tctgcataacacgttccaacacagcagtagtggcctacagtctgtgtcatctttgggtcacagcagtgccacttctgcatctttgccttttatgccatttgtgatgggtggtgcaccatc

SEQ ID NO: 119910 - DNA, 120 bp, Artificial Sequence
  ENSG00000100888_55 (sequence is synthesized)
atcccctcatgtagactccagcaccatgcttcatcaccaccaccaccacccccacccccaccatcaccaccatcaccatccaggcttgagagcccctggctacccctcttcaccagtgac

SEQ ID NO: 119911 - DNA, 120 bp, Artificial Sequence
  ENSG00000100888_56 (sequence is synthesized)
taccgcctctggtactaccttgcggttgccaccactgcaacctgaggaggatgacgatgaggatgaagaagatgatgatgacttatctcagggctatgatagctcagaaagggacttctc

SEQ ID NO: 119912 - DNA, 120 bp, Artificial Sequence
  ENSG00000100888_57 (sequence is synthesized)
actcattgatgatcctatgatgccagctaactcagactccagtgaagatgctgatgactgaagccccagcatgggccccattgcttgggcggctgctgtattttcatttactctggccct

SEQ ID NO: 119913 - DNA, 120 bp, Artificial Sequence
  ENSG00000100888_58 (sequence is synthesized)
tggactatggaaacgtgggaggggcaggggagatgtggggaagtccaggactccaggaggtgaaaaggaaaaaaaaaaaaaaatgtacctgattgctcccaattatgagaggattgggtg

SEQ ID NO: 119914 - DNA, 120 bp, Artificial Sequence
  ENSG00000100888_59 (sequence is synthesized)
ggcaggggaactcctaaaataatacatgaccacttcctcatttctggggaaggaaaggagactagagcagctggtgtgctcacccctccctagtcacctccattaaccacagactatgta

SEQ ID NO: 119915 - DNA, 120 bp, Artificial Sequence
  ENSG00000100888_60 (sequence is synthesized)
gcgctggccctagcctctggcagagcctgttcctggccgaactgtggatacagctggagggtcaggaactgttaccttctttccccttggcattaataaatttaagttaatccttttcca

SEQ ID NO: 119916 - DNA, 120 bp, Artificial Sequence
  ENSG00000100888_61 (sequence is synthesized)
gccagtaccccccctccccttccctccctagaccttggagaagtaccctccattactttcccaagatggcagaccccatcatggatctgttcgatgacccaaatttatttggcctggact

SEQ ID NO: 119917 - DNA, 120 bp, Artificial Sequence
  ENSG00000100888_62 (sequence is synthesized)
ctctgactgatgacagctttaaccaggtcacacaagaccccattgaggaagcccttggactgccaagctctctggactccttggatcagatgaaccaggatggtggaggtggtgatgtgg

SEQ ID NO: 119918 - DNA, 120 bp, Artificial Sequence
  ENSG00000100888_63 (sequence is synthesized)
ggaattcatcagcaagtgaactggtccctccaccagaggaaacagctcccacagaactttccaaagaatccacagctccagctccagaatccataaccttgcatgattataccactcagc

SEQ ID NO: 119919 - DNA, 120 bp, Artificial Sequence
  ENSG00000100888_64 (sequence is synthesized)
ctgccagccaggagcagccagcccaacctgtcttacagacatcgacgccaacatcaggacttttgcaagtctccaagagccaggagatcctgagccaagggaatcctttcatgggtgtct

SEQ ID NO: 119920 - DNA, 120 bp, Artificial Sequence
  ENSG00000100888_65 (sequence is synthesized)
ctgccacagctgtctcctccagtagtgctggagggcagccacctcagtcagcccctaagattgttatccttaaggccccaccaagctcctcagtcactggtgcccatgtggcacaaattc

SEQ ID NO: 119921 - DNA, 120 bp, Artificial Sequence
  ENSG00000100888_66 (sequence is synthesized)
aggcccaaggtatcaccagcacagctcagcccctggtggcaggcacagccaatggtggaaaagtcacttttaccaaagtgctaaccggcacaccccttcgaccaggtgtttccattgtct

SEQ ID NO: 119922 - DNA, 120 bp, Artificial Sequence
  ENSG00000100888_67 (sequence is synthesized)
ctggtaatacagtgttggccgccaaggtccctgggaaccaggctgctgttcagcgcattgtccagcccagccgaccagtaaagcagctggtcctccagccagttaagggttcagctcctg

SEQ ID NO: 119923 - DNA, 120 bp, Artificial Sequence
  ENSG00000100888_68 (sequence is synthesized)
caggttaggttgcgcaggaggagggggaactggtgctggagagacagggagaggggcgaaccggccccccacagccactgcaggagttccaccatcttcctctgaagacgtagccatctt

SEQ ID NO: 119924 - DNA, 120 bp, Artificial Sequence
  ENSG00000100888_69 (sequence is synthesized)
agccaatgatggcgcggggcgggcaggagcatcaggttaggttgcgcaggaggagggggaactggtgctggagagacagggagaggggcgaaccggccccccacagccactgcagttacc

SEQ ID NO: 119925 - DNA, 120 bp, Artificial Sequence
  ENSG00000100888_70 (sequence is synthesized)
agaaatcttccgcctctgctgtatggaccttactggcaccaaccccggcagtatgagcaggagttccaccatcttcctctgaagacgtagccatcttgctccatgaaggtcaggacaatc

SEQ ID NO: 119926 - DNA, 120 bp, Artificial Sequence
  ENSG00000100888_71 (sequence is synthesized)
ggcgagggctggccatgctccgccggaaggcgccttgttctcggagagggtgagttgaaacgctgcctggaaaggaagtaccaggacttgcacaggagttccaccatcttcctctgaaga

SEQ ID NO: 119927 - DNA, 120 bp, Artificial Sequence
  ENSG00000100888_72 (sequence is synthesized)
gtgctggagagacagggagaggggcgaaccggccccccacagccactgcaggtaaagccacctctctcctccactggggtgaggcacagctcgttttctccttcagggcttgtcgggcct

SEQ ID NO: 119928 - DNA, 120 bp, Artificial Sequence
  ENSG00000100888_73 (sequence is synthesized)
ctcggcctgcagcttccgccctaacattgctcctatcccgggcatccacaccccccaccccccgcatcttcccgtcttggccatccccaccctggagggcacccccgctagctccttacc

SEQ ID NO: 119929 - DNA, 120 bp, Artificial Sequence
  ENSG00000100888_74 (sequence is synthesized)
aacctcacttgcatgcagtaatcattaactctcaggtaggtctcctgtgtagacattttcattgatatttgtctgtgtcttttcccccttggctctgtaattcttactcattacagagta

SEQ ID NO: 119930 - DNA, 120 bp, Artificial Sequence
  ENSG00000100888_75 (sequence is synthesized)
cctctcactacctcttctgggcctttttttttttttttttttgcgtctactttcaatttttgtgttttcagatattctaaaacacattaaaaaataaccagttttcttgtgttcttctga

SEQ ID NO: 119931 - DNA, 120 bp, Artificial Sequence
  ENSG00000100888_76 (sequence is synthesized)
ggcgagggctggccatgctccgccggaaggcgccttgttctcggagagggtgagttgaaacgctgcctggaaaggaagtaccaggacttgcacagaataaacagcggagcgccccaaaca

SEQ ID NO: 119932 - DNA, 120 bp, Artificial Sequence
  ENSG00000100888_77 (sequence is synthesized)
ctacagatcgtttcatctccatgcttttctgagtttgtcgactcagtcaaggattctcagcctaggttagcatatgctgaagtcatctggtgtggggcacattacatatcgaaagagttc

SEQ ID NO: 119933 - DNA, 120 bp, Artificial Sequence
  ENSG00000100888_78 (sequence is synthesized)
gtctatacacatttctttggcttttctaaactgggcgtaggcctaaataaggtggatggacctggccagtgtcttttttctgttgttgttgttgttttcttcttcttgagacagagtctt

SEQ ID NO: 119934 - DNA, 60 bp, Artificial Sequence
  ENSG00000100888_79 (sequence is synthesized)
agacagagtcttgctctctcacccaggcctgaccctctgcctcccggtttcaaacgatta

SEQ ID NO: 119935 - DNA, 61 bp, Artificial Sequence
  ENSG00000100888_80 (sequence is synthesized)
cacgcccagctaatttttgtattattttagtaaagaccaggtttcaccacctggtcagtgt

SEQ ID NO: 119936 - DNA, 90 bp, Artificial Sequence
  ENSG00000100888_81 (sequence is synthesized)
tcaagtgatctgcctgccttggcctcccactggtcagtgtctttaaatttttttttttaggcaaagagcatattactataaaaatagtga

SEQ ID NO: 119937 - DNA, 67 bp, Artificial Sequence
  ENSG00000100888_82 (sequence is synthesized)
tattacaggcataagccactgtaccaagcctccttcccagttttttatcatgagctggaagtgttgc

SEQ ID NO: 119938 - DNA, 120 bp, Artificial Sequence
  ENSG00000100888_83 (sequence is synthesized)
gcctccttcccagttttttatcatgagctggaagtgttgcttaaattacttaattagaaaatgtttaattcagccacttgaaagaataaggtaaataaaaaatatatatggaaaacattt

SEQ ID NO: 119939 - DNA, 120 bp, Artificial Sequence
  ENSG00000100888_84 (sequence is synthesized)
ccaggaaatatcattaaataaaaaagtaagtggcagaatagtacatacagtagattctgtttattaaaacaaaaaaaacttcagaactaagacaaaaaagcaaaaaatggaaacaaaatc

SEQ ID NO: 119940 - DNA, 120 bp, Artificial Sequence
  ENSG00000100888_85 (sequence is synthesized)
ttcttgcatttttgcactaacgggttgcttctagtgtgaattatattgcaccctgcagcctgagaatccagttttgatttcccagagcttcttgccactagtggacaggtttttctcagt

SEQ ID NO: 119941 - DNA, 120 bp, Artificial Sequence
  ENSG00000100888_86 (sequence is synthesized)
ggattcttggcctttcataaagcagttaagcaaattgatatatggtcagtacatagcataatcacattgtttgacagataatctccttatcatcttttggtctgatttttcatgaaaatt

SEQ ID NO: 119942 - DNA, 120 bp, Artificial Sequence
  ENSG00000100888_87 (sequence is synthesized)
ttatttatttatttatttatttttgaaatagagtctaactgtgttacccaggctaaagtgcagtggctattcatagatatgatcgtagcacactatgaacttctgggcttgagctattct

SEQ ID NO: 119943 - DNA, 120 bp, Artificial Sequence
  ENSG00000100888_88 (sequence is synthesized)
cctcagcctcctgagtatctgggactaccattgtgcaccactgcgcctggcttttctctatcttaatattaacccgtaatgctatgttcacaggctttatttaatgagcacctttggatg

SEQ ID NO: 119944 - DNA, 120 bp, Artificial Sequence
  ENSG00000100888_89 (sequence is synthesized)
gctatgttcacaggctttatttaatgagcacctttggatgtcagatatattgctaaggtgtagttgtgagagatgatggaggaaagttagctagaaaacaggaactgctttactggtgct

SEQ ID NO: 119945 - DNA, 120 bp, Artificial Sequence
  ENSG00000100888_90 (sequence is synthesized)
tattattgaagtaccagactagttccttaatctctgagttattaatatattcagagattattggtatgaagttctgcaatgtgtggttaaaattaaaaagttcattcttttacaaataag

SEQ ID NO: 119946 - DNA, 120 bp, Artificial Sequence
  ENSG00000100888_91 (sequence is synthesized)
ggactagtgactaatttatttcttttttcttagctcccttctggacaatatactgaagcagaagaattctttgtcaagtacaagaactagtacgtgatctgtgcaaaaagcttgtcaccc

SEQ ID NO: 119947 - DNA, 120 bp, Artificial Sequence
  ENSG00000100888_92 (sequence is synthesized)
caaattccacagggtggtaaaaagttctcctgggtatcctgggtgggaatgtgtcccttttttatagtcttgtagcccaggttgctgtttttaatggggaaaaatggctattcagagaga

SEQ ID NO: 119948 - DNA, 120 bp, Artificial Sequence
  ENSG00000100888_93 (sequence is synthesized)
aattcaggaattgacatgactcttattatttccttgtaggtaagtggggtgagggtggttcctgataaaatgtcatgtgattctctttaccttagtttagcactaagatcttgctactca

SEQ ID NO: 119949 - DNA, 120 bp, Artificial Sequence
  ENSG00000100888_94 (sequence is synthesized)
aaatatggcccatggatcagcagaattagcattacttgggtgctttttaaaaatgtgggctttcaagcacatcccataccaggtggtttgtatacaaattagagtttcagaagcactgac

SEQ ID NO: 119950 - DNA, 120 bp, Artificial Sequence
  ENSG00000100888_95 (sequence is synthesized)
ctaagagactgtctcccaatttaagcctgtatttgttatgtctgcttctgactaatcccaaaatttcagacagtagcctgccaccttcttttacttgcaccatgactggatttttccatc

SEQ ID NO: 119951 - DNA, 120 bp, Artificial Sequence
  ENSG00000100888_96 (sequence is synthesized)
ccccttagctcctatctgcattgtgaatgggctactatctcccaactagagaaggataagaggatacatcaaaaattaaagcgcttcaaaaccaaaatggctcagatgagacacttcttc

SEQ ID NO: 119952 - DNA, 120 bp, Artificial Sequence
  ENSG00000100888_97 (sequence is synthesized)
catgaggtaattaggaataggtattgcctgtcatttctttcacagaagcacaaattactggggttgtcagccttggctgattcttcaaaatacttgtaattggtttctatatatgggtgt

SEQ ID NO: 119953 - DNA, 120 bp, Artificial Sequence
  ENSG00000100888_98 (sequence is synthesized)
aaactttcaattttggtcattgacttcccttacttaactgcccttgcattgttttgttaggtttaaatatggttcatttattagttataggatattttgaaactgatttcctcaatgcac

SEQ ID NO: 119954 - DNA, 120 bp, Artificial Sequence
  ENSG00000100888_99 (sequence is synthesized)
atgaagtattttcaaaactgatgatacactgactgctggtccacttgaggcattctttgtctttctttagctattgatggtttctgtagacctattattaagagagaacatttgttttct

SEQ ID NO: 119955 - DNA, 120 bp, Artificial Sequence
  ENSG00000100888_100 (sequence is synthesized)
caaatttctaatccagtgtgattagaaatagggataaaggagctttaatttccaatatccaggtttacccctaaacactggagcaagatgagtgaagaaatatgcctgttatatttgcgg

SEQ ID NO: 119956 - DNA, 120 bp, Artificial Sequence
  ENSG00000100888_101 (sequence is synthesized)
cgttcatccttgataagagtagttttggttgtatgttgcaagtagaagaaaaagtggaatggatggacaagtgaaagagatgaaggaatggaaatagcatgtgtttaaacccttgaaaaa

SEQ ID NO: 119957 - DNA, 120 bp, Artificial Sequence
  ENSG00000100888_102 (sequence is synthesized)
cttgaaatatattggttaatttataatacaaaatggaaaatgaattataccatttgagaatagaaaatattaatggaaaggactgtaatgccagtagggggagatcagggataactttat

SEQ ID NO: 119958 - DNA, 120 bp, Artificial Sequence
  ENSG00000100888_103 (sequence is synthesized)
ggaggagctggacactgaaagatattatttgactaataaattcctgacttctattatctttgagtcgttaataggaactgacctttcaggttctactttcttgttcttttagttgattgt

SEQ ID NO: 119959 - DNA, 120 bp, Artificial Sequence
  ENSG00000100888_104 (sequence is synthesized)
ttccaagtttttgtggggatatatttctttagaagtttttcttgatcccttggtgccatagaaggacacacacaagaaagtgatttcagagtgccaacttccccccctttccctccccgc

SEQ ID NO: 119960 - DNA, 120 bp, Artificial Sequence
  ENSG00000100888_105 (sequence is synthesized)
tccatcctattgggtggatctccttctctagggtgatcccttgatgatgatggatgaggagatctcagtgattgatggagatgaaggtaaacttctaggtcaactagtataattctgtgt

SEQ ID NO: 119961 - DNA, 120 bp, Artificial Sequence
  ENSG00000100888_106 (sequence is synthesized)
ggggtggtgggttggggaattattcactgaattctgtcctatcctgggatttctaagagctttgcctttgggtgggttaaaatactagtattgcctctactacccttgctatacttccta

SEQ ID NO: 119962 - DNA, 69 bp, Artificial Sequence
  ENSG00000100888_107 (sequence is synthesized)
aaaaacacagagaccggaatctctaggatttaattatgtttttatgctggggatggtggctcatgccta

SEQ ID NO: 119963 - DNA, 120 bp, Artificial Sequence
  ENSG00000100888_108 (sequence is synthesized)
cagagcaagactgtgtctcaaaaaaaaaatgtttttaaaacataattgctgattttgcaccacttaaaaaaaaaagtcagctttacctctgcatttgtttttctctaggcaagctttgtt

SEQ ID NO: 119964 - DNA, 120 bp, Artificial Sequence
  ENSG00000100888_109 (sequence is synthesized)
tgcatctccatcctgatagatactcttggtttgcctttcaaattgggggctatgatcaaagaagggataatgtgaaaaaatatttgccttggagggagtttgttctgtttattctgttac

SEQ ID NO: 119965 - DNA, 120 bp, Artificial Sequence
  ENSG00000100888_110 (sequence is synthesized)
catgttttttaagatctttgtttcacaccttttcagagacatgattctgagggacaggggactgtcatttctcagaaaaatgttaatatagttttctgttttttagttggggacgatggc

SEQ ID NO: 119966 - DNA, 120 bp, Artificial Sequence
  ENSG00000100888_111 (sequence is synthesized)
ggaagattggtttgcttatttcattttatgctatctttgggatacctgataatttaaatctatatatcaggtctttaatcttatacttgacactagtgggaggaaatagggtagatgcat

SEQ ID NO: 119967 - DNA, 120 bp, Artificial Sequence
  ENSG00000100888_112 (sequence is synthesized)
gagtatttaaattaatggatacaggaagatacctataataacctttgcaaggattctcactttaatttcctgcatttctgtgctgactctgccctcttatacctttagtgagattgacat

SEQ ID NO: 119968 - DNA, 120 bp, Artificial Sequence
  ENSG00000100888_113 (sequence is synthesized)
atggttcccagtagtggatcaactggaggttccaacaacttggtgggacagtgaggctgacaagtcgctgctcattggagtctttaaacatggtacgtatcttctcctattctactcctt

SEQ ID NO: 119969 - DNA, 120 bp, Artificial Sequence
  ENSG00000100888_114 (sequence is synthesized)
tccgactgaagatttatgttcacggatggaacatttagcaaaatgctcctgagaaataactcagttatctgattgatcttcaataaatttgagtaggaaagtagttcttaaatatccaga

SEQ ID NO: 119970 - DNA, 120 bp, Artificial Sequence
  ENSG00000100888_115 (sequence is synthesized)
gcagagcagttagttcctataaatagatgttcaagaagggccagatggataggtaaatctcaaggtagggagcctcccatctgttctctaatcactgttagcagtgtgttaccgcactgt

SEQ ID NO: 119971 - DNA, 120 bp, Artificial Sequence
  ENSG00000100888_116 (sequence is synthesized)
atgctatggtaagttagggtcccatgaatcagggcaggtaatataccccaactattgttaataataatcacacttaatttatatgactttcctctggatgtgcactagcataacaattgc

SEQ ID NO: 119972 - DNA, 120 bp, Artificial Sequence
  ENSG00000100888_117 (sequence is synthesized)
ccacctgcagggtggactctttctggatgttacagtctgaaagagtacggccatcctccaactgtttgttcacaaatatcagatgctgctggtcaggtgggatgccctccttgtcgtgga

SEQ ID NO: 119973 - DNA, 120 bp, Artificial Sequence
  ENSG00000100888_118 (sequence is synthesized)
tcttggctttgacattttcactggtgtcactcggctggacctcaagggtgatggttttgcctgtgagggtctttacagagatctgcatctctatgtcagcttggctgcctcactaaagag

SEQ ID NO: 119974 - DNA, 120 bp, Artificial Sequence
  ENSG00000100888_119 (sequence is synthesized)
aaagagctgaaaatcttctgtttttctacatgtcccatttgtctaaatgttcagcagtctctctgatataggtatgaggcagcagtttttgagtgaaataaaagtagagtataagaaggg

SEQ ID NO: 119975 - DNA, 120 bp, Artificial Sequence
  ENSG00000100888_120 (sequence is synthesized)
agactgactagccaaaacaaaaatgcagtgggggtaagaatatttccttactcttatagcagttttgcctaatgccaaatcccaggcactaaaaacagtaagcgttaactttcagccaag

SEQ ID NO: 119976 - DNA, 120 bp, Artificial Sequence
  ENSG00000100888_121 (sequence is synthesized)
tgactttgtgaattagaatgtcttttttttaaaagaatacttttttttctataaaataaaagtaatggcacttaatctacatcttttttgagacgtttaatgggataaataaaattgcag

SEQ ID NO: 119977 - DNA, 68 bp, Artificial Sequence
  ENSG00000100888_122 (sequence is synthesized)
atcttttttgagacgtttaatgggataaataaaattgcaggtgtgcagatcaggagattgagactatc

SEQ ID NO: 119978 - DNA, 120 bp, Artificial Sequence
  ENSG00000100888_123 (sequence is synthesized)
aaaaataaataaataaataaaaataaataaaactgcaggcaaggcatggtggcttacacctggaatcccaacactttgggagcctaaggctatcagtcactagttaaaaactcttcatga

SEQ ID NO: 119979 - DNA, 120 bp, Artificial Sequence
  ENSG00000100888_124 (sequence is synthesized)
taaggctatcagtcactagttaaaaactcttcatgattctaaattgctataaaaatgttaaatatagtaataaacccagtagttgtccaagataacattctaactttgttttccattatg

SEQ ID NO: 119980 - DNA, 120 bp, Artificial Sequence
  ENSG00000100888_125 (sequence is synthesized)
gtatttgttcttttaaaactctaacttgtgccgtgaaataactctagccttgactgaacccaatgggattcttaattgtaattatactcaaaagtgatagatccttagcaaaaataggac

SEQ ID NO: 119981 - DNA, 120 bp, Artificial Sequence
  ENSG00000100888_126 (sequence is synthesized)
cagcagaaaggactccataaactgcataaaccacatgttgccataagatacatctgagggtgaaaatgaatgtcacttgtaaatggcttatttgatgttctatttggtttggtttacaac

SEQ ID NO: 119982 - DNA, 120 bp, Artificial Sequence
  ENSG00000100888_127 (sequence is synthesized)
actcttctgtacagctacagtagctgagaggataactggtctcttgaaagataacagccagcagctctcatacgttgcttctgtggaagagccttaggcgctttcagccctggtttatca

SEQ ID NO: 119983 - DNA, 120 bp, Artificial Sequence
  ENSG00000100888_128 (sequence is synthesized)
tctcccaatggtacctgacacataaaggtacttattttgcctgaaaacatgtcccaatgatgagttgccatgctaatactgagccaccaggtagggcagtgttgccctggtttgggtgcc

SEQ ID NO: 119984 - DNA, 120 bp, Artificial Sequence
  ENSG00000100888_129 (sequence is synthesized)
agtgagtttaacaaaacttctcacatgaagatctgaggggcatgtgaaacagttggcttaatgaatacctccccattccatcatgactgagaaatttctctttgacgatcacaccctcag

SEQ ID NO: 119985 - DNA, 120 bp, Artificial Sequence
  ENSG00000100888_130 (sequence is synthesized)
tttgcctagtgtaggaccctcaaaggaaattgggttatttattcattgcaaatcgtttatgccacctgtctgctcagaagaacacagtaataaaaacaaaaaagcgtgaaccatacaaat

SEQ ID NO: 119986 - DNA, 120 bp, Artificial Sequence
  ENSG00000100888_131 (sequence is synthesized)
gaaataataaaaagtaaatagttgggtaggaggaagaattacataataaaagtcaagaaaaaggaactgtgttgatcaaagtgtttcaaattcaagcaattacgaatggtacattgtcaa

SEQ ID NO: 119987 - DNA, 120 bp, Artificial Sequence
  ENSG00000100888_132 (sequence is synthesized)
tttcttataattatttgtattccattggatgctataccagactgacccaaagttttgcacctggcctgccattcctgtaaacacgaaattaaatactaggccaggcactgtggctcatgc

SEQ ID NO: 119988 - DNA, 83 bp, Artificial Sequence
  ENSG00000100888_133 (sequence is synthesized)
gcactacagtgggtggatcacaaggtcatcagttcgagaccagcatggcaaataaggtgaaaccccgtctgtactaaaaatac

SEQ ID NO: 119989 - DNA, 120 bp, Artificial Sequence
  ENSG00000100888_134 (sequence is synthesized)
aagatgtaagcttagttctgggattatttttatttgttttctattgaaacaatttcttcctacatactctattttttttaaagatagtatcttttaacattttttttttcccatggtgaa

SEQ ID NO: 119990 - DNA, 120 bp, Artificial Sequence
  ENSG00000100888_135 (sequence is synthesized)
ttcctccttcccattaccaccaatcaagcctagtatcgctgtgcttgttttgcctcttctaaggtacattcagtaaaaaagcattgtaagctaggactctgttggctttggtttcttttc

SEQ ID NO: 119991 - DNA, 120 bp, Artificial Sequence
  ENSG00000100888_136 (sequence is synthesized)
tagtacctgtgtttactttccggatgattctccttggggacaatggatgcattgactcaaccaacctaatttggggtgcggactgaggaatgggagggaaatggttctccttttaaaaaa

SEQ ID NO: 119992 - DNA, 76 bp, Artificial Sequence
  ENSG00000100888_137 (sequence is synthesized)
gactgaggaatgggagggaaatggttctccttttaaaaaagagactctaagcctgggcaacatgatgaaatggcat

SEQ ID NO: 119993 - DNA, 120 bp, Artificial Sequence
  ENSG00000100888_138 (sequence is synthesized)
ggggaggtgaattttggtttcatagagggcccagcaactctttgagagagtgagcacatgagagctttctctgggaaagcctatttaaattccatctttggtttttatcagttagtgtga

SEQ ID NO: 119994 - DNA, 120 bp, Artificial Sequence
  ENSG00000100888_139 (sequence is synthesized)
cagccacatacttagtacttgctggttggaagcagttaatgttaacatattttttgagctcttactacacatttacattgtacctagctggtgctaaataaggcaaacacagtccctgtc

SEQ ID NO: 119995 - DNA, 120 bp, Artificial Sequence
  ENSG00000100888_140 (sequence is synthesized)
cttacagagctcaccgtctgccaggaaagacagatattaagcaagagttcacaataattgtgtgatacaaagttttatgagaagtatgggatgctatgggaacaaagaaacatctttgaa

SEQ ID NO: 119996 - DNA, 120 bp, Artificial Sequence
  ENSG00000100888_141 (sequence is synthesized)
gaattatctttatatttgcaagacttgtaaaagctatttatatctttcttttattcttattactaagattgtccccctcctactttgctcagtgaaagtgttagtttctagcgtaagaag

SEQ ID NO: 119997 - DNA, 120 bp, Artificial Sequence
  ENSG00000100888_142 (sequence is synthesized)
gtagaggctctagcatctgaataaagggccaaaagagttggtgggggtgggggcgcagcattgagataattaggactagccaggcacaatgtctctcacctgtgatcccagctactcagg

SEQ ID NO: 119998 - DNA, 120 bp, Artificial Sequence
  ENSG00000100888_143 (sequence is synthesized)
accagcctgggcaacatagtgagacccttgtctctaaaaaaagtaggactagtgggaagaagctacaaggaggcagatttcaattcaatataaggaattttgtattattaggtttccaaa

SEQ ID NO: 119999 - DNA, 120 bp, Artificial Sequence
  ENSG00000100888_144 (sequence is synthesized)
caattcaatataaggaattttgtattattaggtttccaaaaatgaactgctgcattagaagatagccttccatcaggagtttttaaaacatagcttgatacctactgagcagaagcatta

SEQ ID NO: 120000 - DNA, 86 bp, Artificial Sequence
  ENSG00000100888_145 (sequence is synthesized)
ttttaaaacatagcttgatacctactgagcagaagcattatagaaaagattctatcaggacagctgataggcttgaggccaggagt

SEQ ID NO: 120001 - DNA, 120 bp, Artificial Sequence
  ENSG00000100888_146 (sequence is synthesized)
tgggcatggtggcatgcacctatagtaccagctactcaggaggctgaagcgggaggatcacttgagcctaggagttctgggctgtggtgtgctatgccaatcaggtgtctgcactaagtt

SEQ ID NO: 120002 - DNA, 120 bp, Artificial Sequence
  ENSG00000100888_147 (sequence is synthesized)
tcaggtgtctgcactaagtttgacatcaatatggtgacctcccaggagcaagggaccaccaggttgcctaaggagggatgaattggcccaggttggaaacggagcagggcagcactccct

SEQ ID NO: 120003 - DNA, 120 bp, Artificial Sequence
  ENSG00000100888_148 (sequence is synthesized)
tgctgatcagcagtagtgttgtgcctgtgaatagccactgcactctagcctgggcaatacagcgagaccctgtctaaaaataacaaaaaagattgcatcaagacagataggatgatgaac

SEQ ID NO: 120004 - DNA, 120 bp, Artificial Sequence
  ENSG00000100888_149 (sequence is synthesized)
aaagtgagttgtactgtgtcttctgacctgtagtttttatgattctagcatgaagaaaactggtgtaaatatttcagagtataccattctttaatgttgtactcttgcaatttcctttct

SEQ ID NO: 120005 - DNA, 120 bp, Artificial Sequence
  ENSG00000100888_150 (sequence is synthesized)
actgtgatgggacgtgcaagagtaagctcaagtgagtactccttgctattgggatggtacatttgagggcagagcaaacatctggtacctccaaaacaaagggcaagagcaagctcaagt

SEQ ID NO: 120006 - DNA, 120 bp, Artificial Sequence
  ENSG00000100888_151 (sequence is synthesized)
gagtgctccttactactgtgatgggacgtgcaagagtaagctcaagtgagtactccttgctattgggatgggacatttgagggcagagcaaacatctggtacctccaaaacaaagggcaa

SEQ ID NO: 120007 - DNA, 120 bp, Artificial Sequence
  ENSG00000100888_152 (sequence is synthesized)
gagcaagctcaagtgagtgctccttgctactgtgatgggacgtgcaagagtaagctcaagtgagtgctccttgctattgtgatgggacgtgcaagagtaagctcgagtgctccttgctat

SEQ ID NO: 120008 - DNA, 120 bp, Artificial Sequence
  ENSG00000100888_153 (sequence is synthesized)
tgtgatgggacgtgcaagagtaagctcaagtgagtgctccttgctattgtgatgggacgtgcaagagcaagctcaagtgagtgctccttgctattgtgatgggacgtgcaagagtaagct

SEQ ID NO: 120009 - DNA, 120 bp, Artificial Sequence
  ENSG00000100888_154 (sequence is synthesized)
caagtgagtgctccttgctactgggatgggacgggcaagagcaagctcaagtgagtgctccttgctattgggatgggacgggcaagagcaagctcaagattgagtactccttgctattgt

SEQ ID NO: 120010 - DNA, 120 bp, Artificial Sequence
  ENSG00000100888_155 (sequence is synthesized)
gatgggacatttgagggcagagcactcatttctaagaagcattgaggaacttatgtgtatttaccagctacatagttcaaggtgatctattatagaaaataataaggcctttcttttttc

SEQ ID NO: 120011 - DNA, 120 bp, Artificial Sequence
  ENSG00000100888_156 (sequence is synthesized)
tgtcctaatgcttataggatttgttaaatggaaaactgaaattagcatattttaagaggaaaacacgaaggcacaggaaagatagttactgtgctgggagttacctttaaaagctgtgac

SEQ ID NO: 120012 - DNA, 120 bp, Artificial Sequence
  ENSG00000100888_157 (sequence is synthesized)
tctgcattcatatatttgtcctgattttgtattactgtagtgtgaaagagatttctcactacctcctaccacccacatcagtaaaaagagaactactggagacatagctgtcctgttctt

SEQ ID NO: 120013 - DNA, 120 bp, Artificial Sequence
  ENSG00000100888_158 (sequence is synthesized)
gcatctcttctgtgaattggagatttcagcatctaccattagctttaagcagtgttgacagaaaagtgatggcttgccacataattcttgtcataattgagtgtcctctctttcccttcc

SEQ ID NO: 120014 - DNA, 120 bp, Artificial Sequence
  ENSG00000100888_159 (sequence is synthesized)
atgtcctgtatcttctcctttcttactagcttttactccctgggattcttaaggctttgtggtgtaattataataatgctttgtatttgtaccggatttttcagcttttaaaagacagtt

SEQ ID NO: 120015 - DNA, 120 bp, Artificial Sequence
  ENSG00000100888_160 (sequence is synthesized)
ttatgtttcttatttgagcctcagtaactgtcaggacaggtattatctctctaatgtttacaaataatgaaactaatgctcttgtagtgacagaagtggaactgcaataagtgttctaat

SEQ ID NO: 120016 - DNA, 120 bp, Artificial Sequence
  ENSG00000100888_161 (sequence is synthesized)
tcttaatctggtatttattctcctatcttgtgctaccttccttcaggtatttgtgaacacagtaataacaaggatttgtcaaatatggtataagggtcagtcagtggtttacaaacccta

SEQ ID NO: 120017 - DNA, 120 bp, Artificial Sequence
  ENSG00000100888_162 (sequence is synthesized)
atatcttctttttttcaaacaccatatttagtagctgtgtgtcctattgactgaagatctaaaaacttctgtctggaagttttgtatgtgatggtttagattaattatgtttttttactc

SEQ ID NO: 120018 - DNA, 120 bp, Artificial Sequence
  ENSG00000100889_0 (sequence is synthesized)
gtggctcgcttcgccgcgctccctccttccccgccttccatacctccccggctccgctcggttcctggccaccccgcagcccctgcccaggtgccatggccgcattgtaccgccctggcc

SEQ ID NO: 120019 - DNA, 120 bp, Artificial Sequence
  ENSG00000100889_1 (sequence is synthesized)
tgcggcttaactggcatgggctgagccccttgggctggccatcatgccgtagcatccagaccctgcgagtgcttagtggagatctgggccagcttcccactggcattcgagattttgtag

SEQ ID NO: 120020 - DNA, 120 bp, Artificial Sequence
  ENSG00000100889_2 (sequence is synthesized)
agcacagtgcccgcctgtgccaaccagagggcatccacatctgtgatggaactgaggctgagaatactgccacactgaccctgctggagcagcagggcctcatccgaaagctccccaagt

SEQ ID NO: 120021 - DNA, 120 bp, Artificial Sequence
  ENSG00000100889_3 (sequence is synthesized)
acaataactgctggctggcccgcacagaccccaaggatgtggcacgagtagagagcaagacggtgattgtaactccttctcagcgggacacggtaccactcccgcctggtggggcccgtg

SEQ ID NO: 120022 - DNA, 120 bp, Artificial Sequence
  ENSG00000100889_4 (sequence is synthesized)
ggcagctgggcaactggatgtccccagctgatttccagcgagctgtggatgagaggtttccaggctgcatgcagggccgcaccatgtatgtgcttccattcagcatgggtcctgtgggct

SEQ ID NO: 120023 - DNA, 120 bp, Artificial Sequence
  ENSG00000100889_5 (sequence is synthesized)
ccccgctgtcccgcatcggggtgcagctcactgactcagcctatgtggtggcaagcatgcgtattatgacccgactggggacacctgtgcttcaggccctgggagatggtgactttgtca

SEQ ID NO: 120024 - DNA, 120 bp, Artificial Sequence
  ENSG00000100889_6 (sequence is synthesized)
agtgtctgcactccgtgggccagcccctgacaggacaaggggagccagtgagccagtggccgtgcaacccagagaaaaccctgattggccacgtgcccgaccagcgggagatcatctcct

SEQ ID NO: 120025 - DNA, 120 bp, Artificial Sequence
  ENSG00000100889_7 (sequence is synthesized)
tcggcagcggctatggtggcaactccctgctgggcaagaagtgctttgccctacgcatcgcctctcggctggcccgggatgagggctggctggcagagcacatgctgatcctgggcatca

SEQ ID NO: 120026 - DNA, 120 bp, Artificial Sequence
  ENSG00000100889_8 (sequence is synthesized)
ccagccctgcagggaagaagcgctatgtggcagccgccttccctagtgcctgtggcaagaccaacctggctatgatgcggcctgcactgccaggctggaaagtggagtgtgtgggggatg

SEQ ID NO: 120027 - DNA, 120 bp, Artificial Sequence
  ENSG00000100889_9 (sequence is synthesized)
tgacagtgaaggtcgactccgggccatcaaccctgagaacggcttctttggggttgcccctggtacctctgccaccaccaatcccaacgccatggctacaatccagagtaacactatttt

SEQ ID NO: 120028 - DNA, 120 bp, Artificial Sequence
  ENSG00000100889_10 (sequence is synthesized)
taccaatgtggctgagaccagtgatggtggcgtgtactgggagggcattgaccagcctcttccacctggtgttactgtgacctcctggctgggcaaaccctggaaacctggtgacaagga

SEQ ID NO: 120029 - DNA, 120 bp, Artificial Sequence
  ENSG00000100889_11 (sequence is synthesized)
gccctgtgcacatcccaactctcgattttgtgccccggctcgccagtgccccatcatggacccagcctgggaggccccagagggtgtccccattgacgccatcatctttggtggccgcag

SEQ ID NO: 120030 - DNA, 120 bp, Artificial Sequence
  ENSG00000100889_12 (sequence is synthesized)
acccaaaggggtacccctggtatacgaggccttcaactggcgtcatggggtgtttgtgggcagcgccatgcgctctgagtccactgctgcagcagaacacaaagggaagatcatcatgca

SEQ ID NO: 120031 - DNA, 120 bp, Artificial Sequence
  ENSG00000100889_13 (sequence is synthesized)
cgacccatttgccatgcggcccttttttggctacaacttcgggcactacctggaacactggctgagcatggaagggcgcaagggggcccagctgccccgtatcttccatgtcaactggtt

SEQ ID NO: 120032 - DNA, 120 bp, Artificial Sequence
  ENSG00000100889_14 (sequence is synthesized)
ccggcgtgacgaggcagggcacttcctgtggccaggctttggggagaatgctcgggtgctagactggatctgccggcggttagagggggaggacagtgcccgagagacacccattgggct

SEQ ID NO: 120033 - DNA, 120 bp, Artificial Sequence
  ENSG00000100889_15 (sequence is synthesized)
ggtgccaaaggaaggagccttggatctcagcggcctcagagctatagacaccactcagctgttctccctccccaaggacttctgggaacaggaggttcgtgacattcggagctacctgac

SEQ ID NO: 120034 - DNA, 120 bp, Artificial Sequence
  ENSG00000100889_16 (sequence is synthesized)
agagcaggtcaaccaggatctgcccaaagaggtgttggctgagcttgaggccctggagagacgtgtgcacaaaatgtgacctgaggccctagtctagcaagaggacatagcaccctcatc

SEQ ID NO: 120035 - DNA, 120 bp, Artificial Sequence
  ENSG00000100889_17 (sequence is synthesized)
tgggaatagggaaggcaccttgcagaaaatatgagcaatttgatattaactaacatcttcaatgtgccatagaccttcccacaaagactgtccaataataagagatgcttatctatttta

SEQ ID NO: 120036 - DNA, 120 bp, Artificial Sequence
  ENSG00000100889_18 (sequence is synthesized)
ctaggcggaggcgggcaggggcgactgctgtgggtccagcctcccgcgccgcgcgtctcttgggagggcagccggccggtgctcctcgtttccgcctgcacctccccttctctgcctcgc

SEQ ID NO: 120037 - DNA, 120 bp, Artificial Sequence
  ENSG00000100889_19 (sequence is synthesized)
tcgcctctgaccgcgcgatctctatctgccactctcagaacttcctctctctcctcgctcctctctgctgagccaggtctccgcatatcctcctttccttcccagatacctccctcggac

SEQ ID NO: 120038 - DNA, 120 bp, Artificial Sequence
  ENSG00000100889_20 (sequence is synthesized)
cagggtaaccagggcaggggcacagtggcaagggcacggaagatgtgaacaggtttggaacccttcatccaggggatgccttcctccacaggccgcaccatgtatgtgcttccattcagc

SEQ ID NO: 120039 - DNA, 120 bp, Artificial Sequence
  ENSG00000100889_21 (sequence is synthesized)
gaggtttgacagtgaaggtgagggactctcagatcatactcttggttctggctcttgtcagagcctcggggtctcctctctagtgttcacaatgactttgtcagtgagaaagtttcctga

SEQ ID NO: 120040 - DNA, 120 bp, Artificial Sequence
  ENSG00000100889_22 (sequence is synthesized)
acacccaaccctgctccattcctctggcagcccagccacccgagagacagcctttcctcatcagatcttgggtccatctcaggacaggggtgggtggagcaggaccttctttggtcttac

SEQ ID NO: 120041 - DNA, 120 bp, Artificial Sequence
  ENSG00000100889_23 (sequence is synthesized)
agggtacttcgagaggcagcagggccctggggacaaggcttttgtcccagagtcggaagtgacccacatctgtcgcacagcccgttccacttgggcagcccttgtgggtggtctctgaag

SEQ ID NO: 120042 - DNA, 120 bp, Artificial Sequence
  ENSG00000100889_24 (sequence is synthesized)
cggcggctgggctgacctggagcctggagccccggggccgagggagctggcctgccagcggggcggaggaaagctagtgccagccctaccaggttccgcccccgcgcctgcccccctcct

SEQ ID NO: 120043 - DNA, 120 bp, Artificial Sequence
  ENSG00000100889_25 (sequence is synthesized)
gaagtcatgaacgtttgcagtttccagtcccaggcaaaatctcagttcatgtcccaactccaccagtcactggttttgtgatctggctaagttgctcaacttccctaagctttagtttcc

SEQ ID NO: 120044 - DNA, 120 bp, Artificial Sequence
  ENSG00000100889_26 (sequence is synthesized)
acatcagttgaatgagggtagttgtgatagtacctatctcatgagattgttggaggattaaatagtgcataaaaagggtttatcacactgacaaatacacagtaaattctcaataataaa

SEQ ID NO: 120045 - DNA, 120 bp, Artificial Sequence
  ENSG00000100889_27 (sequence is synthesized)
gcaggggttggggcggcggctgggctgacctggagcctggagccccggggccgagggagctggcctgccagcggggcggaggaaagctagtgccagccctaccagatacctccctcggac

SEQ ID NO: 120046 - DNA, 120 bp, Artificial Sequence
  ENSG00000100889_28 (sequence is synthesized)
gattacaggtgtgagctaccacgcctattatactttctaatgaaaaaatgaaaccacatcgtttttgcatctattacatgtcaccagaagaaatgattatctttatttttttaacttgac

SEQ ID NO: 120047 - DNA, 120 bp, Artificial Sequence
  ENSG00000100889_29 (sequence is synthesized)
ctttatttttttaacttgacaatgtagtttgcacaatttcctatggtataaaaatagaaggctacaacaaacctataccaggaataggtaccttaaaaaaaaattgaagactacaacacc

SEQ ID NO: 120048 - DNA, 120 bp, Artificial Sequence
  ENSG00000100890_0 (sequence is synthesized)
agtttccgccgcgtttatggccgcgttaagtctgagtgccgctttgagttgttgaatgaagtgaacttcatttgtcagcgttcggttcatgaactggaatgtaagaggcaccagaggatt

SEQ ID NO: 120049 - DNA, 120 bp, Artificial Sequence
  ENSG00000100890_1 (sequence is synthesized)
cctgctctgtcccctggtttgcggcttgcgacgttggacatccccggattgttgtttaatagagaaaactcacctgccttcttgcttttaagtagccccaaaagcagaaccttgatttgt

SEQ ID NO: 120050 - DNA, 120 bp, Artificial Sequence
  ENSG00000100890_2 (sequence is synthesized)
ctgtaaggaagaaacacaaaccttttaaaaagttccacttcgactctgcaccgccgacccccaatctctttaattttgccatagaagaggggttttttcaacatctctctcactatctgg

SEQ ID NO: 120051 - DNA, 120 bp, Artificial Sequence
  ENSG00000100890_3 (sequence is synthesized)
tgctgatctcactgcataatgactttctatttgtttggtattcgaagctttccgaagctttggaagagcccataccttgggctaggcccagggcactcttatgtctcgctgtttctggca

SEQ ID NO: 120052 - DNA, 120 bp, Artificial Sequence
  ENSG00000100890_4 (sequence is synthesized)
gaccgctgtggcatcaggaaccagcagaggttgttttctcttaaaacaatgtctccacagaataccaaagcaacgaatctgattgccaaggccagatatctcaggaaagatgagggcagt

SEQ ID NO: 120053 - DNA, 120 bp, Artificial Sequence
  ENSG00000100890_5 (sequence is synthesized)
aataagcaagtttattctgttcctcatttttttttagctggagcagctaaggagagatcacagatgaattctcaaactgaagatcatgccttggcacctgtgaggaacactattcaactc

SEQ ID NO: 120054 - DNA, 120 bp, Artificial Sequence
  ENSG00000100890_6 (sequence is synthesized)
ccaacacaacctttgaattcagaggagtgggataaacttaaggaagatttaaaagaaaacaccggaaagaccagtttcgaaagttggatcatttcacagatggctggctgtcatagctct

SEQ ID NO: 120055 - DNA, 120 bp, Artificial Sequence
  ENSG00000100890_7 (sequence is synthesized)
atagatgtggctaaatctctgctggcatgggtagcagccaaaaataatggtattgtaagttacgatttactggtcaagtatttgtatctctgtgtctttcatatgcagacatctgaagtt

SEQ ID NO: 120056 - DNA, 120 bp, Artificial Sequence
  ENSG00000100890_8 (sequence is synthesized)
attgatgtctttgaaattatgaaagccagatataagactttagaacctagaggttacagtcttctcatccggggattgatccattcagacagatggagagaagcattgttgctgttagag

SEQ ID NO: 120057 - DNA, 120 bp, Artificial Sequence
  ENSG00000100890_9 (sequence is synthesized)
gacatcaaaaaagttataactccttcaaaaaagaactataatgactgtatccagggagctctccttcatcaagatgtaaacacagcttggaatttatatcaggaattgctaggtcatgat

SEQ ID NO: 120058 - DNA, 120 bp, Artificial Sequence
  ENSG00000100890_10 (sequence is synthesized)
attgttcctatgttggaaactttaaaagctttctttgattttggaaaagacataaaggatgataactattcaaataaactactagatattctttcatatctaagaaataatcagctgtat

SEQ ID NO: 120059 - DNA, 120 bp, Artificial Sequence
  ENSG00000100890_11 (sequence is synthesized)
ccaggggagtcatttgcacacagtataaaaacatggtttgagagtgttcctggaaaacaatggaaaggacaattcaccacagtccgaaaaagtggccagtgttcgggctgtggaaaaacc

SEQ ID NO: 120060 - DNA, 120 bp, Artificial Sequence
  ENSG00000100890_12 (sequence is synthesized)
atagagtctattcagctgagtccagaagaatatgaatgtcttaagggaaaaatcatgagggatgtgatagatggaggtgaccagtacagaaagacaacacctcaggaacttaagagattt

SEQ ID NO: 120061 - DNA, 120 bp, Artificial Sequence
  ENSG00000100890_13 (sequence is synthesized)
gagaacttcataaaatctcgtcctccttttgatgttgtcattgatggtctcaatgttgccaaaatgtttcctaaagttcgtgaatctcaacttctcttgaatgtcgtctctcaactagcc

SEQ ID NO: 120062 - DNA, 120 bp, Artificial Sequence
  ENSG00000100890_14 (sequence is synthesized)
aaacggaatctgcgactgctggtcctaggccggaagcacatgctaagacggagttcccagtggagtcgggatgagatggaagaggtgcaaaagcaagccagctgtttttttgctgatgac

SEQ ID NO: 120063 - DNA, 120 bp, Artificial Sequence
  ENSG00000100890_15 (sequence is synthesized)
atctcggaggatgatccattccttctgtatgccacactgcactccgggaatcactgcaggtttatcacaagagacctgatgcgggaccacaaggcctgtctgcctgatgccaagacccaa

SEQ ID NO: 120064 - DNA, 120 bp, Artificial Sequence
  ENSG00000100890_16 (sequence is synthesized)
cgcctgttttttaagtggcagcagggacatcagctggcaattgtaaataggtttccaggatcaaaactaacctttcagcgtattctcagctatgacacagtggtgcaaacaactggagac

SEQ ID NO: 120065 - DNA, 120 bp, Artificial Sequence
  ENSG00000100890_17 (sequence is synthesized)
tcgtggcacataccatatgatgaagacttggtagaaagatgttcctgtgaagtaccaaccaaatggctttgcctccaccaaaagacatagagattcttacctctatgctaagtttgtgtt

SEQ ID NO: 120066 - DNA, 120 bp, Artificial Sequence
  ENSG00000100890_18 (sequence is synthesized)
tgggtaccctctaggttggcatcagaggctcttgagctggtgtttgtttagggcattgcctctgtcctgaagataaaaggattctattaacagcattgacattgattttttaatgaaatg

SEQ ID NO: 120067 - DNA, 120 bp, Artificial Sequence
  ENSG00000100890_19 (sequence is synthesized)
agatatatcttttcataaccagctgcgtttttttcccctaacatttgtttttggaggcttatcaagagttggagaacttagtgtagagcaaaacctgcatttctcctactgggccagcta

SEQ ID NO: 120068 - DNA, 120 bp, Artificial Sequence
  ENSG00000100890_20 (sequence is synthesized)
ttccacttagcttgggtgactaatagtgcttttggtatccattttttgctacttctgaccttgccttccaggcctaccaatagcagaatcaatccatctgtccctgagatactcatgttg

SEQ ID NO: 120069 - DNA, 120 bp, Artificial Sequence
  ENSG00000100890_21 (sequence is synthesized)
tttcaaatgcctcctcccatttctggcatagtctcattctctgtatgttatgccctatccacatggaatcatttatcgtcctctgtaataaactggccaagatactaaaggcttactatt

SEQ ID NO: 120070 - DNA, 120 bp, Artificial Sequence
  ENSG00000100890_22 (sequence is synthesized)
catagcagtttttaattacttatcatccaattatttggattggagaagagggggcattcactcctctttttcttattttttttggaaatagagtctcaacttactctgtcgccagggctg

SEQ ID NO: 120071 - DNA, 120 bp, Artificial Sequence
  ENSG00000100890_23 (sequence is synthesized)
cctcaaactcccaggctcaagcaatcttcctacctcagccctcctgagtaattgggactacaggcatgtatcaccaggcttggctaatttttttttttttttttgtagagatggctgtct

SEQ ID NO: 120072 - DNA, 120 bp, Artificial Sequence
  ENSG00000100890_24 (sequence is synthesized)
ttttttttttttttttgtagagatggctgtctcactctgttgacaagactagtctccaacccctggcctcagtcgatccccagcaatttgggagattgaagcgagagaatcacttgagtc

SEQ ID NO: 120073 - DNA, 120 bp, Artificial Sequence
  ENSG00000100890_25 (sequence is synthesized)
ccaggcatggtagtttgcacacatagtcccagctactttgggggctgaggtaggaggattgcttgagcctcagaggtcaaggctgcaatgagccaacgttgcaccactgcactctagcct

SEQ ID NO: 120074 - DNA, 120 bp, Artificial Sequence
  ENSG00000100890_26 (sequence is synthesized)
gggtgacagagcgagaccttgtctcaaaacaaaacaaagtgctggaattgcagacttgagccacagtgcccagcctcacttctctagactatgatggttttttcttcattctataatctc

SEQ ID NO: 120075 - DNA, 120 bp, Artificial Sequence
  ENSG00000100890_27 (sequence is synthesized)
ttttccaaattggttcaacattttgtgaacactattaatttcatcattcagtatatgtgggctttctaaaatatgccaatttttttccacttaatcaagtttgacttaatttaacaaagt

SEQ ID NO: 120076 - DNA, 120 bp, Artificial Sequence
  ENSG00000100890_28 (sequence is synthesized)
gattatattttaatagttacatttctgttttttccactcactagccagcttacagtttattagcccttgatttcagctgaaaatattcatgtctgcaccccttcatgatagttctttctt

SEQ ID NO: 120077 - DNA, 120 bp, Artificial Sequence
  ENSG00000100890_29 (sequence is synthesized)
tacgtatacatactgtattcaatatgcaagaacaggcaaaaactactctattgtgataaaaatcagaatagtaattgcctgaggaaagggatatgagagaacttgagagaactttctcgg

SEQ ID NO: 120078 - DNA, 120 bp, Artificial Sequence
  ENSG00000100890_30 (sequence is synthesized)
tcggggtgatggaaagtttcttatattgatttgggtaatagtaacatagctatatgtatatattagttaaaattcctcacactaaacattttaaattgatatatttacatttatgacaat

SEQ ID NO: 120079 - DNA, 120 bp, Artificial Sequence
  ENSG00000100890_31 (sequence is synthesized)
ctcaaagtaagttagggtaagaaaagataattacttacatgaaataaacaatgacctcttttatatcaaaccatatacatgtgtataattagggtatgtattatgcacagagaaacaatt

SEQ ID NO: 120080 - DNA, 120 bp, Artificial Sequence
  ENSG00000100890_32 (sequence is synthesized)
taggaaaatccaaggaggggacgttttatcttcttacctatttactgaatgcaacattactgcacaccaagacaaaagagctctccaggaaaacattggatatattgagagcattaaaag

SEQ ID NO: 120081 - DNA, 120 bp, Artificial Sequence
  ENSG00000100890_33 (sequence is synthesized)
atactgcaaaagctctaataaattcagtctgcttattttccaaatttcataaactacatacttaggaaactgtgctttcagtgagctaaacttctttttttaagtaactatcatagtttt

SEQ ID NO: 120082 - DNA, 120 bp, Artificial Sequence
  ENSG00000100890_34 (sequence is synthesized)
aagaaaaacattttaagaagacaaaaagtatttattaagcccatctaaaaggctaatgcaaattcccaaaaaaggagcacatagagatagaggaggaggccgaagtggtggctcatacct

SEQ ID NO: 120083 - DNA, 84 bp, Artificial Sequence
  ENSG00000100890_35 (sequence is synthesized)
gaggaggccgaagtggtggctcatacctgttaatttaggcccagagttggagaccaacctgggcaacatagcaagaccctgtct

SEQ ID NO: 120084 - DNA, 120 bp, Artificial Sequence
  ENSG00000100890_36 (sequence is synthesized)
agctacaagaagaaaactagaactttagagcaggagtaaccttagagcatgtaaagtccattttggagatgaggaacagacccaggaagatgacctggcttccctgaatcccacggctag

SEQ ID NO: 120085 - DNA, 120 bp, Artificial Sequence
  ENSG00000100890_37 (sequence is synthesized)
ttagtgcagacatttcagccataacccagctcttctaattcccaaatactctttcttctactggcacatagagatgggggaggagtcagggcatggtggcccacacctacagttccagca

SEQ ID NO: 120086 - DNA, 120 bp, Artificial Sequence
  ENSG00000100890_38 (sequence is synthesized)
acagttccagcactttgggaggccaaatgggagaattgcttgaagccaggagttggagaccagcctaggcaacacagggagacccgtgtcgacaaaaaatttaaaaattagctgggcatg

SEQ ID NO: 120087 - DNA, 80 bp, Artificial Sequence
  ENSG00000100890_39 (sequence is synthesized)
tgaggtgggaggatcacttgagccccagaggtcaaggctacagtgagctatgatcatgctactgggagggaggtaagaat

SEQ ID NO: 120088 - DNA, 120 bp, Artificial Sequence
  ENSG00000100890_40 (sequence is synthesized)
tctcaaagggagggaggtaagaatgagaagaaggaacaggggtgtacctcttttaagggcccaagtatcctgaatggctcagcagtatagaacattgtggtagagaaattacattttaaa

SEQ ID NO: 120089 - DNA, 120 bp, Artificial Sequence
  ENSG00000100890_41 (sequence is synthesized)
ataactctaatactgtttagaaacaaaaccctaacttctgcttgagataaactgaagtgcatctgtcccttgtccaggagtggggaaccattgtagggttgctcagcataagtcatactg

SEQ ID NO: 120090 - DNA, 120 bp, Artificial Sequence
  ENSG00000100890_42 (sequence is synthesized)
ccacggtgaccttgaggagtgcagggattccctgaaggaagcagctggtaccagacacttaggctgcccatttgtgttctgatcatttgagtgaaaaaaaggtacctgtcaagcaagctc

SEQ ID NO: 120091 - DNA, 120 bp, Artificial Sequence
  ENSG00000100890_43 (sequence is synthesized)
ctggacaccacaagaaggaggaattattttaaaagctgtactcttaaattgttagtatctttaaaatcagttgtgaacaatgaaggatttgaaagagcattgactttgccacttaaaagt

SEQ ID NO: 120092 - DNA, 120 bp, Artificial Sequence
  ENSG00000100890_44 (sequence is synthesized)
atttctaaaatactttgtgcttcccccttgcattctgaatttatacacttttcctcctgctgttctcagacccagtggaaagaaaatctcaaggaagaaggctgagtttattctctcagg

SEQ ID NO: 120093 - DNA, 120 bp, Artificial Sequence
  ENSG00000100890_45 (sequence is synthesized)
gctctgttgggtctacctcatctgaggtggcttattcttcataggaaattaatttttcttctcaagtatgcacttaaatataattactgcttccttggtcctctagcagatttctcactt

SEQ ID NO: 120094 - DNA, 120 bp, Artificial Sequence
  ENSG00000100890_46 (sequence is synthesized)
ccttggtcctctagcagatttctcacttttatttatttttttttttgagacagagtcttgatcttttttcatctaggctggagtgcaatggtttgatctcagttcactgcaacctctgcc

SEQ ID NO: 120095 - DNA, 69 bp, Artificial Sequence
  ENSG00000100890_47 (sequence is synthesized)
tcctgggttcaagcaattctcatgcctctgcctctcgggcagctggaattacaggcatgcgccatgccc

SEQ ID NO: 120096 - DNA, 120 bp, Artificial Sequence
  ENSG00000100890_48 (sequence is synthesized)
aagtgctgggattacaggtgtgagtcaccccgcacagcctgaaatgaggcatctctatctatagtccagcagccctacaggaggcaggaggggagcaagaataagaaaggaaatttgtaa

SEQ ID NO: 120097 - DNA, 120 bp, Artificial Sequence
  ENSG00000100890_49 (sequence is synthesized)
aagaataagaaaggaaatttgtaaaaggcacttaggagtgagcagaaaggaaataggaccagcttttacctgcccagtcctggccagtgacaagcagtctgcttgagtctgtgctaaata

SEQ ID NO: 120098 - DNA, 120 bp, Artificial Sequence
  ENSG00000100890_50 (sequence is synthesized)
aacaaaggaagttccatttagagctctacagaggggaagccatagaaattaacaggatgaaaatacaagagacaggaacacagatgaataaatgtaataaaatttgagaaataatcttta

SEQ ID NO: 120099 - DNA, 120 bp, Artificial Sequence
  ENSG00000100890_51 (sequence is synthesized)
ttcctgagtcgttggcgcagctgactcgccacctcctccctcctcgtccccccaccggaggagttttgcggtctgtagagagctatgcagggtgagggcccctagacttcggctttcgcc

SEQ ID NO: 120100 - DNA, 120 bp, Artificial Sequence
  ENSG00000100890_52 (sequence is synthesized)
actgtagtttccgccgcgtttatggccgcgttaagtctgagtgccgctttgagttgttgaatgaagtgaacttcatttgtcagcgttcgctggagcagctaaggagagatcacagatgaa

SEQ ID NO: 120101 - DNA, 120 bp, Artificial Sequence
  ENSG00000100890_53 (sequence is synthesized)
tttccgccgcgtttatggccgcgttaagtctgagtgccgctttgagttgttgaatgaagtgaacttcatttgtcagcgttcggtacgcagtctaggcagcgcccttcctgtacctctctt

SEQ ID NO: 120102 - DNA, 120 bp, Artificial Sequence
  ENSG00000100890_54 (sequence is synthesized)
acctctaggagtttagggccgggccatcccaacgggctgcccctcccaaaactcactgtttggacaggtgttgggcgtcgctaggcgccgacgaagaacttctttccagtccatggccga

SEQ ID NO: 120103 - DNA, 120 bp, Artificial Sequence
  ENSG00000100890_55 (sequence is synthesized)
cttccgcgcagcagcttctgcatttgctgtttcctacctgctccacccctaccagctcaggcgtcagcaccgccaggccccgtaaaggttcatgaactggaatgtaagaggcaccagagg

SEQ ID NO: 120104 - DNA, 120 bp, Artificial Sequence
  ENSG00000100890_56 (sequence is synthesized)
tagctcactgtaacctcaaactcctggcctcaagtgatcctctcgcttcagtctcctcagtagctaaaaccacagtggccagtgttcgggctgtggaaaaaccatagagtctattcagct

SEQ ID NO: 120105 - DNA, 120 bp, Artificial Sequence
  ENSG00000100890_57 (sequence is synthesized)
gagttcattagttccggcttgagggaagcgccttctttcacaatttcttttcattgttcattgcggatatctggaagccttccaggtcccctgaatgtagtagacacttcagcagccgtc

SEQ ID NO: 120106 - DNA, 120 bp, Artificial Sequence
  ENSG00000100897_0 (sequence is synthesized)
tgacgtttgcagcccgccggccaggaagccgcgagatgcgtgacgagcgaagcgcgtgacggaggagcggttggccaacgcagtggcggcagtcggtgtaaacaaggcctcgcgccgctg

SEQ ID NO: 120107 - DNA, 120 bp, Artificial Sequence
  ENSG00000100897_1 (sequence is synthesized)
cgggtcctgcgaccgctcctggctggtgggtggtctcgcgtggggcggttaccgccggcttcagtgggaggtgcttctcggcttcctccccctcatggcgtacacacccccggcgcacca

SEQ ID NO: 120108 - DNA, 120 bp, Artificial Sequence
  ENSG00000100897_2 (sequence is synthesized)
cgtgggcgtgaggcgaggaaggaggggtgttaggccaaattctattttcattggctgtcactgctgccggcctttgtaagggggcgctctgattggtcgataaggtgggggcgtcgaggg

SEQ ID NO: 120109 - DNA, 120 bp, Artificial Sequence
  ENSG00000100897_3 (sequence is synthesized)
tctttgagtcctaaggcttctaattggttagatgagataagctagtgaagcgctttcttccgagagggatttcgattggtcggtcagagaggttacctggaaatccaacaccgcccaaca

SEQ ID NO: 120110 - DNA, 120 bp, Artificial Sequence
  ENSG00000100897_4 (sequence is synthesized)
cccctcccgctccccagtccggggacttcgataggattggagaaggtttgtgttcccgacgccttggtagttggcataggctaaagaaaagggatctcagccccgaggaagggtcaccct

SEQ ID NO: 120111 - DNA, 120 bp, Artificial Sequence
  ENSG00000100897_5 (sequence is synthesized)
cctagagatagctactaccccgtctcaggagaccctggtatttctagagcacgctttgctttcaccaaacccaaggaggtgacaggaggagcccccgcacaggacctaagaatgctgtga

SEQ ID NO: 120112 - DNA, 120 bp, Artificial Sequence
  ENSG00000100897_6 (sequence is synthesized)
ccagaagatgggatcgcggaacagcagcagtgcaggatccgggtccggagacccctccgagggcttgccccgaagaggggctggcctgcgtcggagtgaggaagaggaagaagaggatga

SEQ ID NO: 120113 - DNA, 120 bp, Artificial Sequence
  ENSG00000100897_7 (sequence is synthesized)
agatgtggatctggcccaggtactggcctatctcctccgcagaggccaagtgaggttggtgcagggaggaggtgcagcaaatttacaattcattcaggccctcttggactcagaggaaga

SEQ ID NO: 120114 - DNA, 120 bp, Artificial Sequence
  ENSG00000100897_8 (sequence is synthesized)
gaatgacagagcttgggatggtcgtcttggggatcgatacaacccacctgtggatgctacccctgacacccgggagctggaattcaatgagatcaagacacaagtggaactggccacagg

SEQ ID NO: 120115 - DNA, 120 bp, Artificial Sequence
  ENSG00000100897_9 (sequence is synthesized)
gcagctggggcttaggcgggccgcccagaagcacagctttcctcgaatgttgcaccagagagaacggggcctctgccatcggggaagcttctcccttggagaacagtctcgagtgatatc

SEQ ID NO: 120116 - DNA, 120 bp, Artificial Sequence
  ENSG00000100897_10 (sequence is synthesized)
tcacttcttgcccaatgatctgggcttcactgatagctactctcagaaggctttctgtggcatctacagcaaagatggtcaaatattcatgtctgcttgccaagaccagacaatccgact

SEQ ID NO: 120117 - DNA, 120 bp, Artificial Sequence
  ENSG00000100897_11 (sequence is synthesized)
ctatgactgccgatatggccgtttccgtaaattcaagagcatcaaggcccgcgacgtaggctggagcgtcttggatgtggccttcacccctgatgggaaccacttcctctactctagctg

SEQ ID NO: 120118 - DNA, 120 bp, Artificial Sequence
  ENSG00000100897_12 (sequence is synthesized)
gtctgattacattcatatctgcaatatctatggtgagggagatacacacactgccctggatctcaggccagatgagcgtcgctttgctgtcttctccattgctgtctcctcagatggacg

SEQ ID NO: 120119 - DNA, 120 bp, Artificial Sequence
  ENSG00000100897_13 (sequence is synthesized)
agaagtactaggaggggccaatgatggctgcctgtatgtctttgaccgagaacagaaccggcgcacccttcagattgagtcccatgaggatgatgtgaatgcagtggcctttgctgatat

SEQ ID NO: 120120 - DNA, 120 bp, Artificial Sequence
  ENSG00000100897_14 (sequence is synthesized)
aagctcccaaatcctgttctctgggggagatgatgccatctgcaaagtgtgggatcgacgcaccatgcgggaggatgaccccaagcctgtgggtgcactggctggacaccaggatggcat

SEQ ID NO: 120121 - DNA, 120 bp, Artificial Sequence
  ENSG00000100897_15 (sequence is synthesized)
caccttcattgacagcaagggtgatgcccggtatctgatctccaactctaaagaccagaccatcaaactctgggatatccgacgcttttccagccgggaaggcatggaagcttcacgcca

SEQ ID NO: 120122 - DNA, 120 bp, Artificial Sequence
  ENSG00000100897_16 (sequence is synthesized)
ggctgccacacagcaaaactgggactatcggtggcagcaagtgcccaaaaaagcctggcggaagctgaagctcccaggggacagctccttgatgacctaccggggccacggagtgctgca

SEQ ID NO: 120123 - DNA, 120 bp, Artificial Sequence
  ENSG00000100897_17 (sequence is synthesized)
aagtggccacattgtgaagaagctgaccaaccacaaggcctgtgtgcgtgacgtcagttggcacccctttgaagagaagattgtcagcagttcgtgggacgggaacctgcgtctgtggca

SEQ ID NO: 120124 - DNA, 120 bp, Artificial Sequence
  ENSG00000100897_18 (sequence is synthesized)
gtaccgccaggctgagtacttccaggatgacatgccagaatctgaggaatgtgccagcgcccctgccccagtgccccaatcctctacacccttttcctcaccccagtagatccaacctcc

SEQ ID NO: 120125 - DNA, 120 bp, Artificial Sequence
  ENSG00000100897_19 (sequence is synthesized)
agccccatatagggtgaacctcttgataagctctctgcctcctcctccctttctcccttgtggggaatgtttggaggaatcactggcatttgatggggaataacataagcctgggctctg

SEQ ID NO: 120126 - DNA, 120 bp, Artificial Sequence
  ENSG00000100897_20 (sequence is synthesized)
agcctcagctgagccctggaagattctccccatggggcagagtggtctccttacgtgctcacacccagtcagcttgggtccctatctctggccagagtttggcaggactgccattatctg

SEQ ID NO: 120127 - DNA, 120 bp, Artificial Sequence
  ENSG00000100897_21 (sequence is synthesized)
gggtgtggcctctgccagcaagagaagtgtcctgggtgtttttaatcatgtttgaatgttaggggttggatcctagagtagatgcctgaggccacatctgaacagacctgtcagccaggc

SEQ ID NO: 120128 - DNA, 120 bp, Artificial Sequence
  ENSG00000100897_22 (sequence is synthesized)
ctgccaggtcttcacgttgaggattcaactggccaatcacaggacaggtgtcctggcctttcttcctgaggtctctaggggaggggcatgggtaagggtgtttcctcagcaccctcctgg

SEQ ID NO: 120129 - DNA, 120 bp, Artificial Sequence
  ENSG00000100897_23 (sequence is synthesized)
ggtggggattatgtctgctgtcatgtctgggtctttagggtaggacaggctgtggtatgagaggcaggagtctccacaaggcttcatgtggccccttatagggcaggccctgccctctgg

SEQ ID NO: 120130 - DNA, 120 bp, Artificial Sequence
  ENSG00000100897_24 (sequence is synthesized)
gaaggtcccttcatgctggaggcacacagctttaaggaagtaggttgaagtaggactccttcgtcctctcactggctttggctccctcaataaactgtgtgggaacctggctcagtgtct

SEQ ID NO: 120131 - DNA, 120 bp, Artificial Sequence
  ENSG00000100897_25 (sequence is synthesized)
gtctctctctctcactctctgtttttcctatctgaggtctttcatctcctcacttcaggaaaacacagttcagcaaagtcttcagatgcgatcctgtgtaggagaaaatacccttctggt

SEQ ID NO: 120132 - DNA, 120 bp, Artificial Sequence
  ENSG00000100897_26 (sequence is synthesized)
gccccatgaaaaagggaaataccaaaaccatttgttcactgagccttgcaataggtgctcccttaccaatttcagaagcttccctgcaagtagatatcgagagagcacactttccattag

SEQ ID NO: 120133 - DNA, 120 bp, Artificial Sequence
  ENSG00000100897_27 (sequence is synthesized)
agcctggtaatacccatatcacctctgctctgaggctgggcctgcagctgtgtagtctttggaagaggtagcccctgaacgcagagcctaagagaagcaagtcggccctgacgccaggcc

SEQ ID NO: 120134 - DNA, 120 bp, Artificial Sequence
  ENSG00000100897_28 (sequence is synthesized)
ccagtgggcgcctcacactcagaacctcataccccagagcaaaccgatggtcagggagagggctagagctcacacccagctcggaatagatcttccctgatgacatttcatgccctctaa

SEQ ID NO: 120135 - DNA, 120 bp, Artificial Sequence
  ENSG00000100897_29 (sequence is synthesized)
ggcagtttttaaatgaaggtacacacatccaggggtgttcacaggctttcacagcaagggtacctatttcatggcaaaataggcagttttaaaagaataaacaagctaggtgtggtggct

SEQ ID NO: 120136 - DNA, 69 bp, Artificial Sequence
  ENSG00000100897_30 (sequence is synthesized)
ctctacaaaaaatacaaaaagtaataggtggatcacctgaagtcaggtgtttgagaccagcctggccaa

SEQ ID NO: 120137 - DNA, 67 bp, Artificial Sequence
  ENSG00000100897_31 (sequence is synthesized)
cagaggtgagctgagtgcagtgagccaagaccatgccattacactcaagcttgggcaacgagagcaa

SEQ ID NO: 120138 - DNA, 120 bp, Artificial Sequence
  ENSG00000100897_32 (sequence is synthesized)
tgagtgcagtgagccaagaccatgccattacactcaagcttgggcaacgagagcaaaactctgtctcaaaaaaaaaattagccagatgtggtgacgcatgcctgtagtcctagctactca

SEQ ID NO: 120139 - DNA, 72 bp, Artificial Sequence
  ENSG00000100897_33 (sequence is synthesized)
ctcaggaggctgaggtgggaggatcacctaaggccaggaggtcaaggctgcggtgagccgtgattgtgccaa

SEQ ID NO: 120140 - DNA, 120 bp, Artificial Sequence
  ENSG00000100897_34 (sequence is synthesized)
agttcccacttactcctccccagcaagagctaacagccctccttgggtgtgcactttctcctcccctcaggcacctcgcgcattctcccgcctacctatcaatcatcgtgctccgctgtc

SEQ ID NO: 120141 - DNA, 120 bp, Artificial Sequence
  ENSG00000100897_35 (sequence is synthesized)
agtggcggcagtcggtgtaaacaaggcctcgcgccgctgcgggtcctgcgaccgctcctggctggtgggtggtctcgcgtggggcggttaccgccggcttcagtgggaggaggtgacagg

SEQ ID NO: 120142 - DNA, 120 bp, Artificial Sequence
  ENSG00000100897_36 (sequence is synthesized)
gacttcgataggtgagtttggtgtagaaaacaaatctttcttcagttggtgagctagggtagcgcactacggttcactcttgctttctttgcttcacaggattggagaaggtttgtgttc

SEQ ID NO: 120143 - DNA, 120 bp, Artificial Sequence
  ENSG00000100897_37 (sequence is synthesized)
tacacagatggcactggcagctgcagagaacaaccagaccttctcccaaggtcaggatttacaagttgcttcaccccttgctctccatttccccagcacgagattggaggtgtcaagcct

SEQ ID NO: 120144 - DNA, 120 bp, Artificial Sequence
  ENSG00000100897_38 (sequence is synthesized)
gcaccaggcttccactgactctccagcctgggacctgaggtttccatgtgcctgtcccctctgagccaggatccctcactttgtcctgggaaaatcactcccaaagtgctccagtaccct

SEQ ID NO: 120145 - DNA, 120 bp, Artificial Sequence
  ENSG00000100897_39 (sequence is synthesized)
tgtcccctgtttgatctcttccctagcttcacttccactcttcttcccccatccctgaaagattcttgtttttcttgcttctcttagttcatatctgcaatatctatggtgagggagata

SEQ ID NO: 120146 - DNA, 120 bp, Artificial Sequence
  ENSG00000100897_40 (sequence is synthesized)
cacacactgccctggatctcaggtactggcttccctttctggtcagactcatcagaaacttctcaagggaagctctttgggagcaaacctcttgagttggaagttctgtttaggggaaaa

SEQ ID NO: 120147 - DNA, 120 bp, Artificial Sequence
  ENSG00000100897_41 (sequence is synthesized)
agtatactggtgggtctgtgtgcattcctgggagggaagcaccatcttgtcagccagaggactgggtaaaatagatggttgcaggatgatttctgggttctcactgagcatctgcattat

SEQ ID NO: 120148 - DNA, 120 bp, Artificial Sequence
  ENSG00000100897_42 (sequence is synthesized)
ggtgcatgttagccagacttcttttttcccctggggatgtgccttacaaccgttgtcagattttatgtagattaacaaaagctgaaggaagtccacttaacccagctccttcttgctttt

SEQ ID NO: 120149 - DNA, 120 bp, Artificial Sequence
  ENSG00000100897_43 (sequence is synthesized)
cagttcggtgaggttgcaagggttgagggtgctggcacatgtctggggcttggacttgggtgggggcagcacatcctgactgcttgccaccctctgccctgcagtgggacgggaacctgc

SEQ ID NO: 120150 - DNA, 120 bp, Artificial Sequence
  ENSG00000100897_44 (sequence is synthesized)
aatctttcttcagttggtgagctagggtagcgcactacggttcactcttgctttctttgcttcacaggattggagaaggaggtgacaggaggagcccccgcacaggacctaagaatgctg

SEQ ID NO: 120151 - DNA, 120 bp, Artificial Sequence
  ENSG00000100897_45 (sequence is synthesized)
tctcccccattcatagcactggccagcagttcatctacagtggctgctccactggcaaagtggttggtaaggattgtgtcagaacagggggcctcaggaagggcaggaatgactccttgc

SEQ ID NO: 120152 - DNA, 120 bp, Artificial Sequence
  ENSG00000100897_46 (sequence is synthesized)
cattccacctataacgactagtgaccaccttaaaaagcccagtgacagctacaggtaaaatcaaacttagcttggaggcttaaacagagaaatagaaaccattctatttttcagtgtttt

SEQ ID NO: 120153 - DNA, 120 bp, Artificial Sequence
  ENSG00000100897_47 (sequence is synthesized)
ttaagaaaaggaacatagaattctagacagtaaatataatagattgccaaaaatatagttggttctgtttttcagccagtcaagaaagaggttgcagatgaaaggtaggagggaacagag

SEQ ID NO: 120154 - DNA, 120 bp, Artificial Sequence
  ENSG00000100897_48 (sequence is synthesized)
acaaaatgacacaggaagatggtagcaagtagttaagggacatgcagtcgctaaagcagaaaagcatagaaagaaataagctggctgcagtggctcatgcctgtaaccccagggctttgg

SEQ ID NO: 120155 - DNA, 80 bp, Artificial Sequence
  ENSG00000100897_49 (sequence is synthesized)
gagtttgagaccagccagggcaacatggagaaaccttgtctctacaaaaaatggctggacagggtgggagaatcacctga

SEQ ID NO: 120156 - DNA, 120 bp, Artificial Sequence
  ENSG00000100897_50 (sequence is synthesized)
acttgggaggctagggtgggagaatcacctgagcccgagactgcagtgagccatgattgtgccaccgcacttcagcctgggtgacagagtgagaaactgtctcaaaaaaaaaaaaaaaaa

SEQ ID NO: 120157 - DNA, 120 bp, Artificial Sequence
  ENSG00000100897_51 (sequence is synthesized)
tttcgattggtcggtcagagaggttacctggaaatccaacaccgcccaacacccctcccgctccccagtccggggacttcgataggaggtgacaggaggagcccccgcacaggacctaag

SEQ ID NO: 120158 - DNA, 120 bp, Artificial Sequence
  ENSG00000100897_52 (sequence is synthesized)
gaaagacgcgtgtattagggaacgtctgcaaagaccgcggcggaaagccagggattgtcttaaaaaattgtcagaccggataaagggaggtctaaaaggggaccgtcccaagagcaaggc

SEQ ID NO: 120159 - DNA, 120 bp, Artificial Sequence
  ENSG00000100902_0 (sequence is synthesized)
ggaagcagtcgctgcaacttccgggaggtgcttgtgtgcctggtgcgggagctacggggcccagggattgtgtttaaagtagtgcttctaccaacatgtcccgtggttccagcgccggtt

SEQ ID NO: 120160 - DNA, 120 bp, Artificial Sequence
  ENSG00000100902_1 (sequence is synthesized)
ttgaccgccacattaccattttttcacccgagggtcggctctaccaagtagaatatgcttttaaggctattaaccagggtggccttacatcagtagctgtcagagggaaagactgtgcag

SEQ ID NO: 120161 - DNA, 120 bp, Artificial Sequence
  ENSG00000100902_2 (sequence is synthesized)
taattgtcacacagaagaaagtacctgacaaattattggattccagcacagtgactcacttattcaagataactgaaaacattggttgtgtgatgaccggaatgacagctgacagcagat

SEQ ID NO: 120162 - DNA, 120 bp, Artificial Sequence
  ENSG00000100902_3 (sequence is synthesized)
cccaggtacagagggcacgctatgaggcagctaactggaaatacaagtatggctatgagattcctgtggacatgctgtgtaaaagaattgccgatatttctcaggtctacacacagaatg

SEQ ID NO: 120163 - DNA, 120 bp, Artificial Sequence
  ENSG00000100902_4 (sequence is synthesized)
aggtatataagtgtgatcctgcaggttactactgtgggtttaaagccactgcagcgggagttaaacaaactgagtcaaccagcttccttgaaaaaaaagtgaagaagaaatttgattgga

SEQ ID NO: 120164 - DNA, 120 bp, Artificial Sequence
  ENSG00000100902_5 (sequence is synthesized)
catttgaacagacagtggaaactgcaattacatgcctgtctactgttctatcaattgatttcaaaccttcagaaatagaagttggagtagtgacagttgaaaatcctaaattcaggattc

SEQ ID NO: 120165 - DNA, 120 bp, Artificial Sequence
  ENSG00000100902_6 (sequence is synthesized)
ttacagaagcagagattgatgctcaccttgttgctctagcagagagagactaaacattgtcgttagtttaccagatccgtgatgccacttacctgtgtgtttggtaacaacaaaccaaca

SEQ ID NO: 120166 - DNA, 120 bp, Artificial Sequence
  ENSG00000100902_7 (sequence is synthesized)
tcatggaggtccctggattgaaaaaggagcctctcccactcctcctaccaccgaagtggttaggactctatataaataaaaacaaggcttttggaaaataattgcatcctgttgttttca

SEQ ID NO: 120167 - DNA, 120 bp, Artificial Sequence
  ENSG00000100902_8 (sequence is synthesized)
attatacagtttatttttatggttccatagtattgttttctccaagaagcagggcaaattaaaaacataattttttttataactacacagaaacctgtatgttttttaaaaaattatctt

SEQ ID NO: 120168 - DNA, 120 bp, Artificial Sequence
  ENSG00000100902_9 (sequence is synthesized)
gagggaaagactgtgcagtaattgtcacacagaagaaagtacctgtaagtaatactgcccaaatagttaataattgcagaatataagaatttttcagccaagtgcagtggctcacacctg

SEQ ID NO: 120169 - DNA, 120 bp, Artificial Sequence
  ENSG00000100902_10 (sequence is synthesized)
agtgtcctaggctgggagaatgggatggagcctccacctcatgaagtagcttcctttggaggtggctatggcaggtcttcggagagaatatgcttttaaggctattaaccagggtggcct

SEQ ID NO: 120170 - DNA, 120 bp, Artificial Sequence
  ENSG00000100902_11 (sequence is synthesized)
tgtggttaattccacacaggcactcgaagcctgctatataccagacactgctagtcctaggagatacaaatgtgaatgttacaccctcttctatactgaagctcacagcttagagtgaca

SEQ ID NO: 120171 - DNA, 120 bp, Artificial Sequence
  ENSG00000100902_12 (sequence is synthesized)
gatacgttaaacaaacggataaaaaaaattaaaagtgccaatttacaaatatctacagagttcaagacatctttgggaatctgatagaatgagtgactcaattctagagctgctcttgag

SEQ ID NO: 120172 - DNA, 120 bp, Artificial Sequence
  ENSG00000100902_13 (sequence is synthesized)
aaagaattgccgatatttctcaggtctacacacagaatgctgaaatgaggcctcttggttgttgtatgattttaattggtatagatgaagagcaaggccctcagactgcaattacatgcc

SEQ ID NO: 120173 - DNA, 120 bp, Artificial Sequence
  ENSG00000100902_14 (sequence is synthesized)
gtgtttaaagtagtgcttctaccaacatgtcccgtggttccagcgccggttttgaccgccacattaccattttttcacccgagggtcggctctaccaagtaggtgagtgaaccaggttcg

SEQ ID NO: 120174 - DNA, 120 bp, Artificial Sequence
  ENSG00000100902_15 (sequence is synthesized)
gttttcttaaaggaaaatacatatcctaaaattgatggccaaagtcatgattagcagcagctatgtgacaccaccaagaaagaggagatgtcattgtataaagctaaaacatttaattag

SEQ ID NO: 120175 - DNA, 120 bp, Artificial Sequence
  ENSG00000100902_16 (sequence is synthesized)
acagtgaggatctttgtataatttctatacaaagctattcctgaattacatcccaggattcaagttgtcaacttaataatgaaattgatatcatacagctgacataggaaaatttgagtt

SEQ ID NO: 120176 - DNA, 120 bp, Artificial Sequence
  ENSG00000100902_17 (sequence is synthesized)
gcttttattcacttaattccttatttcgtaatgtatttgaggtggctttcaacaaaacgcatataataggaaaatataaataaaaataggaaccagctgggcatggtggcacacacctgt

SEQ ID NO: 120177 - DNA, 120 bp, Artificial Sequence
  ENSG00000100902_18 (sequence is synthesized)
agtcccagctacttgagaggctgaagctggaggactgcttgagtctaggtgttcgaggccagtcctatttactgccaagaaattaaaaacaaaaattttagtagattttgggtgtaagtc

SEQ ID NO: 120178 - DNA, 120 bp, Artificial Sequence
  ENSG00000100902_19 (sequence is synthesized)
tggaattaaagccattctgaagatgctaacaacatgcttctgataagtgaccaaaaaaaaattaccatctaatgcttttacgtttggtttggaagtatgcttaaaggagataaaaagcta

SEQ ID NO: 120179 - DNA, 120 bp, Artificial Sequence
  ENSG00000100902_20 (sequence is synthesized)
gttcatgttcaggaagtactgggccctgtctaaatatttcttaaaggtttcttttattgcaattcataattaattacataaataaccacatccggtaaaaaaacacttaaggtggctcac

SEQ ID NO: 120180 - DNA, 120 bp, Artificial Sequence
  ENSG00000100902_21 (sequence is synthesized)
tgtaattccagctactcaggagactgagtcaggagactcgcttgaatccacgagcctgaggttgcagtgagccaggctggcgccactgcactccagactgagcgacagagtgagactctg

SEQ ID NO: 120181 - DNA, 120 bp, Artificial Sequence
  ENSG00000100902_22 (sequence is synthesized)
agtgagactctgcctcaaaaaacagaaacaaaacaaacaaacaacacttaaaacattcttaaatcgtttttactgtaaattccttgaagatgcagagagtatcattcatctttatccttt

SEQ ID NO: 120182 - DNA, 120 bp, Artificial Sequence
  ENSG00000100902_23 (sequence is synthesized)
tcccatttcaccccaagtgctaagtgaagtgtagtgcctgggtcatgaagccaataaacctttttgtataaatcatcctattttaattaatggacccctttattatttgacttggtagaa

SEQ ID NO: 120183 - DNA, 120 bp, Artificial Sequence
  ENSG00000100902_24 (sequence is synthesized)
aaaaatttctcatcattgggaggcaatacattagagttaagcagtctgttagtaacattgaactacctcattgaaacatggagctcctgattgactcatgatttgaataagctaggaatg

SEQ ID NO: 120184 - DNA, 120 bp, Artificial Sequence
  ENSG00000100902_25 (sequence is synthesized)
agaaaaccttggaatctctaaaaaatactatattttaacattaaatactttttttcagactgcaattacatgcctgtctactgttctatcaattgatttcaaaccttcagaaatagaagt

SEQ ID NO: 120185 - DNA, 120 bp, Artificial Sequence
  ENSG00000100902_26 (sequence is synthesized)
tggagtagtgacagttgaaaatcctaaattcaggtgagtgatattgtgggccacatgcagactagaaaggtggaggcgtgtgagtccatgtgtcctataacttgtgggggaaatcttttt

SEQ ID NO: 120186 - DNA, 120 bp, Artificial Sequence
  ENSG00000100902_27 (sequence is synthesized)
tctttaactgtcattatagtttttgtttgtgtgtttgtttttttccccagcacctgagatctgtttttaaaactttggactctatttaagagtcagatatgaaagcttttctccttattt

SEQ ID NO: 120187 - DNA, 120 bp, Artificial Sequence
  ENSG00000100902_28 (sequence is synthesized)
cagagtgattttatatctaacaccagagatgacataaagttaccttccttatgtaaggaaaaaaattagcataagtgttttcttttttttagtttaaggccaatacaaattcaattccca

SEQ ID NO: 120188 - DNA, 120 bp, Artificial Sequence
  ENSG00000100902_29 (sequence is synthesized)
aagtagtagtttgcaagtttttcagatagaactttggttatttagtggttatttaagtagaactttgaggagcaatatgagttactgatatatgtcagacccttatctagagatctttgg

SEQ ID NO: 120189 - DNA, 80 bp, Artificial Sequence
  ENSG00000100902_30 (sequence is synthesized)
gttactgatatatgtcagacccttatctagagatctttggaaagcccaaattttgaatacagctaattgacttgcagttg

SEQ ID NO: 120190 - DNA, 120 bp, Artificial Sequence
  ENSG00000100902_31 (sequence is synthesized)
atttaatcctcccagcagccctgtgaggcagttgatataccatggaccaggatgctcttatctttaatgaaaatactgcagttaaatcgacagatacaaggaactactgggaggcatttt

SEQ ID NO: 120191 - DNA, 120 bp, Artificial Sequence
  ENSG00000100902_32 (sequence is synthesized)
aactattatgtgtatctattcttagatcacaaccataaagacacatggtcttggttgtggtgtggggtacgggagtggtaaactaagcttaactagaccttgaagaggtttttcgtttgt

SEQ ID NO: 120192 - DNA, 120 bp, Artificial Sequence
  ENSG00000100902_33 (sequence is synthesized)
tcttttttttcctaatttgttcttttggttgcccacagataagtcatataaacatgacagattcagaaaaattcataggactttaaaaaaaaaaaaacagctgggtgctgtggcatgcat

SEQ ID NO: 120193 - DNA, 120 bp, Artificial Sequence
  ENSG00000100902_34 (sequence is synthesized)
ctgtagtctcagctcctcaggaggctgaggcaagaggatggcttgagccttggagttgaaagctgtagtgcgcaatgatagtgcctgtgaatagccactgcactctagcctgggtaacat

SEQ ID NO: 120194 - DNA, 120 bp, Artificial Sequence
  ENSG00000100902_35 (sequence is synthesized)
agtgagacctcatctgttaaaaaaacaaccgacaacaccaaaagcgaatctatcctagcttttcttcccgtaggaagaagtcttgtaacttgggttggggtaggggtgaggggtgggggc

SEQ ID NO: 120195 - DNA, 120 bp, Artificial Sequence
  ENSG00000100902_36 (sequence is synthesized)
agggatcaagttgcttttgaaaaaggtgccttttttttttttaagtaaaaatttcagcaagaataatcttaaaatctctctaaggaacctacaattagttcttgttttcttttctgtttg

SEQ ID NO: 120196 - DNA, 120 bp, Artificial Sequence
  ENSG00000100902_37 (sequence is synthesized)
gagaccttcctgccacctttaaaattgtatttgttattttttaaattggtaaggaatcaaaaatcttgtcttcaaaaaactttgtatcatttataaattctgtgatagtaaatatatgta

SEQ ID NO: 120197 - DNA, 120 bp, Artificial Sequence
  ENSG00000100902_38 (sequence is synthesized)
aataattacagtacatagcataagcatcaacaactatttaaactgcttgatattgccttcagttgcactaaaaaatgtccttttgacaaatttcactttttagaagtctagtagtaatag

SEQ ID NO: 120198 - DNA, 120 bp, Artificial Sequence
  ENSG00000100902_39 (sequence is synthesized)
agtctagtagtaataggtcacattaacaaggttgccaaacaattgcttcctttcgaggcaaacatcatttagaaaatacatgttcagggccacacatggtggctcacacctgtaatccca

SEQ ID NO: 120199 - DNA, 120 bp, Artificial Sequence
  ENSG00000100902_40 (sequence is synthesized)
aaaaaaaaaaagagaaaggaaatatatgttcaacatggagcactctctggctggtagactattcatagaattataactttattttcatgaacttctgaatctgaacactttaatatgctt

SEQ ID NO: 120200 - DNA, 120 bp, Artificial Sequence
  ENSG00000100902_41 (sequence is synthesized)
ctgaacactttaatatgcttaaaatttcttcatgaatttttatctttgagctgacataaatttcagttatactacatataaatgtattttgacggctgggcaaggtggctcacgcctgta

SEQ ID NO: 120201 - DNA, 120 bp, Artificial Sequence
  ENSG00000100902_42 (sequence is synthesized)
aaaataaatgcattttgacatagaagctaaatagaatactttatagtttagctttatttatgttattcaattgaaatattttctatcttagctgcaactaaagaattttattttcaagat

SEQ ID NO: 120202 - DNA, 120 bp, Artificial Sequence
  ENSG00000100902_43 (sequence is synthesized)
agatacaattctaaatctgatgtcaaagtaaacatttttgtgtataggtgaaggtggtataatatctgggaattccttcaaaataatctgagggaagataagtgtgtgtatagatttttt

SEQ ID NO: 120203 - DNA, 120 bp, Artificial Sequence
  ENSG00000100902_44 (sequence is synthesized)
aaagattggtttataaattgataattgttaaagtaggttgataggtatatgggagtttattatactatcccacttttacgtgtgtttgaaaaaattttttttaaatcgttgtttttttcc

SEQ ID NO: 120204 - DNA, 120 bp, Artificial Sequence
  ENSG00000100902_45 (sequence is synthesized)
ttgaaactttttacagaacatgtatacagaattatttaaataacacttgagttctgaacatgtggtttggaaaatacatagagtgggaaaatctttataataaatcagaactaaaggata

SEQ ID NO: 120205 - DNA, 80 bp, Artificial Sequence
  ENSG00000100906_0 (sequence is synthesized)
ggaagcagcgcgcagcccgcggcccagcgcacccgcagcagcgcccgcagctcgtccgcgccatgttccaggcggccgag

SEQ ID NO: 120206 - DNA, 120 bp, Artificial Sequence
  ENSG00000100906_1 (sequence is synthesized)
cgcccccaggagtgggccatggagggcccccgcgacgggctgaagaaggagcggctactggacgaccgccacgacagcggcctggactccatgaaagacgaggagtacgagcagatggtc

SEQ ID NO: 120207 - DNA, 120 bp, Artificial Sequence
  ENSG00000100906_2 (sequence is synthesized)
aaggagctgcaggagatccgcctcgagccgcaggaggtgccgcgcggctcggagccctggaagcagcagctcaccgaggacggggactcgttcctgcacttggccatcatccatgaagaa

SEQ ID NO: 120208 - DNA, 120 bp, Artificial Sequence
  ENSG00000100906_3 (sequence is synthesized)
aaggcactgaccatggaagtgatccgccaggtgaagggagacctggccttcctcaacttccagaacaacctgcagcagactccactccacttggctgtgatcaccaaccagccagaaatt

SEQ ID NO: 120209 - DNA, 120 bp, Artificial Sequence
  ENSG00000100906_4 (sequence is synthesized)
gctgaggcacttctgggagctggctgtgatcctgagctccgagactttcgaggaaatacccccctacaccttgcctgtgagcagggctgcctggccagcgtgggagtcctgactcagtcc

SEQ ID NO: 120210 - DNA, 120 bp, Artificial Sequence
  ENSG00000100906_5 (sequence is synthesized)
tgcaccaccccgcacctccactccatcctgaaggctaccaactacaatggccacacgtgtctacacttagcctctatccatggctacctgggcatcgtggagcttttggtgtccttgggt

SEQ ID NO: 120211 - DNA, 120 bp, Artificial Sequence
  ENSG00000100906_6 (sequence is synthesized)
ttacctaccagggctattctccctaccagctcacctggggccgcccaagcacccggatacagcagcagctgggccagctgacactagaaaaccttcagatgctgccagagagtgaggatg

SEQ ID NO: 120212 - DNA, 120 bp, Artificial Sequence
  ENSG00000100906_7 (sequence is synthesized)
aggagagctatgacacagagtcagagttcacggagttcacagaggacgagctgccctatgatgactgtgtgtttggaggccagcgtctgacgttatgagcgcaaaggggctgaaagaaca

SEQ ID NO: 120213 - DNA, 120 bp, Artificial Sequence
  ENSG00000100906_8 (sequence is synthesized)
tggacttgtatatttgtacaaaaaaaaagttttatttttctaaaaaaagaaaaaagaagaaaaaatttaaagggtgtacttatatccacactgcacactgcctggcccaaaacgtcttat

SEQ ID NO: 120214 - DNA, 120 bp, Artificial Sequence
  ENSG00000100906_9 (sequence is synthesized)
tgtggtaggatcagccctcattttgttgcttttgtgaactttttgtaggggacgagaaagatcattgaaattctgagaaaacttcttttaaacctcacctttgtggggtttttggagaag

SEQ ID NO: 120215 - DNA, 120 bp, Artificial Sequence
  ENSG00000100906_10 (sequence is synthesized)
gttatcaaaaatttcatggaaggaccacattttatatttattgtgcttcgagtgactgaccccagtggtatcctgtgacatgtaacagccaggagtgttaagcgttcagtgatgtggggt

SEQ ID NO: 120216 - DNA, 120 bp, Artificial Sequence
  ENSG00000100906_11 (sequence is synthesized)
gaaaagttactacctgtcaaggtttgtgttaccctcctgtaaatggtgtacataatgtattgttggtaattattttggtacttttatgatgtatatttattaaacagatttttacaaatg

SEQ ID NO: 120217 - DNA, 120 bp, Artificial Sequence
  ENSG00000100906_12 (sequence is synthesized)
cggggcggcagcggggacgcgaagtccccggttgcataaggcggggcgggagtttctggccgctggcgggcgccgagcagccgggaggggaagtacagggcgttccgagctggcgggagg

SEQ ID NO: 120218 - DNA, 120 bp, Artificial Sequence
  ENSG00000100906_13 (sequence is synthesized)
gcggggcggtctggccggcgcccgccggggccgcggggggaggggggcggaaagtccctgggcgcctgccaggaacactcagctcataataacctcgcggaaaacaccgcggcctcggcc

SEQ ID NO: 120219 - DNA, 120 bp, Artificial Sequence
  ENSG00000100906_14 (sequence is synthesized)
tccagaaaccccggccttgcgcaatcccccgcagcccgcgcctccctgggccccacgcggtgcactcaccacccctggggtttttccctctcttccccacaggttcctgcacttggccat

SEQ ID NO: 120220 - DNA, 120 bp, Artificial Sequence
  ENSG00000100906_15 (sequence is synthesized)
tgccctgccccaccccctcggagggcaggtgacgtggagaaggggcaggtgggccaacttaaggagtccaggcaagagcttaaactcctaacatttggaaggttgagaaaatatgtgtgc

SEQ ID NO: 120221 - DNA, 120 bp, Artificial Sequence
  ENSG00000100906_16 (sequence is synthesized)
ggacgtagctgatgtagcagagtcaccccagatcctttctgaattcagggccactgagcactatttaccctcaccttttacttcacatcagcccacatcctagagagtgaaggaaattcc

SEQ ID NO: 120222 - DNA, 120 bp, Artificial Sequence
  ENSG00000100908_0 (sequence is synthesized)
agagtcgcggccgccagctaggggcgcgggaaggcggggctcggatgcaatcgggacctcctcctggactgggccgggggcggactccgggacccagggcgccgggagccggcgggctac

SEQ ID NO: 120223 - DNA, 120 bp, Artificial Sequence
  ENSG00000100908_1 (sequence is synthesized)
ctgcgagtcgagttagcgttgtcgccgaaccgaagcctcgctcgccatgggggaggtggagatctcggccctggcctacgtgaagatgtgcctgcatgctgcccggtacccacacgccgc

SEQ ID NO: 120224 - DNA, 120 bp, Artificial Sequence
  ENSG00000100908_2 (sequence is synthesized)
agtcaacgggctgtttttggcgccagcgccgcggtctggagaatgcctgtgcctcaccgactgtgtgcccctcttccacagccacctggccctgtccgtcatgttggaggtcgccctcaa

SEQ ID NO: 120225 - DNA, 120 bp, Artificial Sequence
  ENSG00000100908_3 (sequence is synthesized)
gcagaattcttccctgatgcagtacttattatgttggataatcagaaactggtgcctcagcctcgtgtgcccccggtcatcgtcctggagaaccaaggtctccgctgggtccctaaggat

SEQ ID NO: 120226 - DNA, 120 bp, Artificial Sequence
  ENSG00000100908_4 (sequence is synthesized)
aagaacttagtgatgtggagggactgggaagagtcacggcagatggtgggagctctactggaagatcgggcccaccagcaccttgtggactttgactgccaccttgatgacatccggcag

SEQ ID NO: 120227 - DNA, 120 bp, Artificial Sequence
  ENSG00000100908_5 (sequence is synthesized)
gactggaccaaccagcggctcaacactcaaatcacccagtgggttggtcccactaatggaaatggaaatgcctgagccagggccagcggggcccggttccaataaagagacttgggctga

SEQ ID NO: 120228 - DNA, 120 bp, Artificial Sequence
  ENSG00000100908_6 (sequence is synthesized)
gtcgagttagcgttgtcgccgaaccgaagtgagagggcacggggaagggtcaaagagcgtgccgaagcgctggagggagcttcacggacgcgagctaggcaccggctcgcctaatccggt

SEQ ID NO: 120229 - DNA, 120 bp, Artificial Sequence
  ENSG00000100908_7 (sequence is synthesized)
acaggccggtctggtggtggctggttactaccatgccaatgcagctgtgaacgatcagagcactcaagcatcaagcagtcgtgcatcaagcatccagcaggcccgatccccgcaggccac

SEQ ID NO: 120230 - DNA, 120 bp, Artificial Sequence
  ENSG00000100908_8 (sequence is synthesized)
tatgagacctgggaggcccagctcaaatggatgggttttgcccacagttggctcctcactcctctgatcttccctctacacagccctgggcccctggccttgaaaattgctgggcgaatt

SEQ ID NO: 120231 - DNA, 120 bp, Artificial Sequence
  ENSG00000100908_9 (sequence is synthesized)
aatttatttaatactttaaacattgaggttgtttccagtgttttattacagacactgtcctatgattaccataaattctttataagtagaatttctgggtcagcatatgtatagtatgta

SEQ ID NO: 120232 - DNA, 120 bp, Artificial Sequence
  ENSG00000100908_10 (sequence is synthesized)
tacagtttcaatttggatggttatgccaaattaccttccaaaaagaccacctttggtttccactctcaccagcaatatctgagcacctgtctcccacagcactcaagcatcaagcagtcg

SEQ ID NO: 120233 - DNA, 120 bp, Artificial Sequence
  ENSG00000100908_11 (sequence is synthesized)
ggggaggtgaaaagcaagtagggtggggggacccttgaaactctcacttgcccatctttgtccactcagttggataatcagaaactggtgcctcagcctcgtgtgcccccggtcatcgtc

SEQ ID NO: 120234 - DNA, 120 bp, Artificial Sequence
  ENSG00000100908_12 (sequence is synthesized)
ctggagaaccaaggtctccgctgggtccctaaggataagaacttgtgagtaccccactccctctacctcttcttagaagcccaaggctcctgggtctcctctgtccttggccctgcccca

SEQ ID NO: 120235 - DNA, 120 bp, Artificial Sequence
  ENSG00000100911_0 (sequence is synthesized)
gagaccagagatctagcgactgaagcagcatggccaagccgtgtggggtgcgcctgagcggggaagcccgcaaacaggtggaggtcttcagacagaatcttttccaggaggctgaggaat

SEQ ID NO: 120236 - DNA, 120 bp, Artificial Sequence
  ENSG00000100911_1 (sequence is synthesized)
tcctctacagattcttgccacagaaaatcatatacctgaatcagctcttgcaagaggactccctcaatgtggctgacttgacttccctccgggccccactggacatccccatcccagacc

SEQ ID NO: 120237 - DNA, 120 bp, Artificial Sequence
  ENSG00000100911_2 (sequence is synthesized)
ctccacccaaggatgatgagatggaaacagataagcaggagaagaaagaagtccataagtgtggatttctccctgggaatgagaaagtcctgtccctgcttgccctggttaagccagaag

SEQ ID NO: 120238 - DNA, 120 bp, Artificial Sequence
  ENSG00000100911_3 (sequence is synthesized)
aaatgattttggggtagcaatccaggagaaggtgctggagagggtgaatgccgtcaagaccaaagtggaagctttccagacaaccatttccaagtacttctcagaacgtggggatgctgt

SEQ ID NO: 120239 - DNA, 120 bp, Artificial Sequence
  ENSG00000100911_4 (sequence is synthesized)
ggccaaggcctccaaggagactcatgtaatggattaccgggccttggtgcatgagcgagatgaggcagcctatggggagctcagggccatggtgctggacctgagggccttctatgctga

SEQ ID NO: 120240 - DNA, 120 bp, Artificial Sequence
  ENSG00000100911_5 (sequence is synthesized)
gctttatcatatcatcagcagcaacctggagaaaattgtcaacccaaagggtgaagaaaagccatctatgtactgaacccgggactagaaggaaaataaatgatctatatgttgtgtgga

SEQ ID NO: 120241 - DNA, 120 bp, Artificial Sequence
  ENSG00000100911_6 (sequence is synthesized)
ttttagctgggtgtgggacgaggaggtgtggaggaagaagtcctccttgtcttgtttgtgactttcccaatgtggagaatattaagctaaaagcattacctagaaaaactggtttgggct

SEQ ID NO: 120242 - DNA, 120 bp, Artificial Sequence
  ENSG00000100911_7 (sequence is synthesized)
tcaacaaccttgacccttttctctgctcagtcctttgggatcctatttcttggtgctaagaaggggttcattctcaagttaacctatttcctataaaaggaaaccagactcatgtcccag

SEQ ID NO: 120243 - DNA, 120 bp, Artificial Sequence
  ENSG00000100911_8 (sequence is synthesized)
cctctctagctaacaactggattcagcatgcagagaatagtttcaaatagtggattaggaacattaggatggcgtgaggcatgagcctaggttgggaggcagagtgcaagtgggatgtat

SEQ ID NO: 120244 - DNA, 120 bp, Artificial Sequence
  ENSG00000100911_9 (sequence is synthesized)
gcactcagggtgcaggacttggactataaacccaatggagaagatagcccttcaacctctgtgacttttctaaagctactttcccccctttttgccttagatggaaacagataagcagga

SEQ ID NO: 120245 - DNA, 120 bp, Artificial Sequence
  ENSG00000100911_10 (sequence is synthesized)
gaagaaagaaggtaagagagataagaggtgactagggaaggggtgatggcacactgactactggatgagaaagggcctgaatcccctctttctcacagtccataagtgtggatttctccc

SEQ ID NO: 120246 - DNA, 120 bp, Artificial Sequence
  ENSG00000100911_11 (sequence is synthesized)
ctgttaaatgggtacaataaatacatatctctgaaggttgctgtgatgattacatgaaataaatacatggcacagtacctggtatgtaataagtacccaattaaatataactttttttag

SEQ ID NO: 120247 - DNA, 120 bp, Artificial Sequence
  ENSG00000100911_12 (sequence is synthesized)
agcatttctttgggacccccagagctgggcagccctatcaggatgatgggagactttgggaagggtctgagggagtacatctccctgaacactcattcctgtggtattcccttgcttctg

SEQ ID NO: 120248 - DNA, 120 bp, Artificial Sequence
  ENSG00000100911_13 (sequence is synthesized)
ctagacttaaccctacttcccttaccaagccttcacccaaagtaaccccggaattattgatagctacctttaatctgacctttcttatgactctcccgacttctggcacttctcccgtct

SEQ ID NO: 120249 - DNA, 120 bp, Artificial Sequence
  ENSG00000100911_14 (sequence is synthesized)
tttgatgtggaggaaaaaaaccatggcttccaaagcaggaatatcacagtcctaaccttcgttctgccatttaccagcttgggcaagtcctttcattttcaggtcttcagtttcctcatt

SEQ ID NO: 120250 - DNA, 120 bp, Artificial Sequence
  ENSG00000100911_15 (sequence is synthesized)
gactctcaaagagaaatgcattctggtaagcctgggaaatgggggaagcagaaagagaagacacacaaggtgaggccctggactcctccgtagatacaagtccttcatacagagacctag

SEQ ID NO: 120251 - DNA, 120 bp, Artificial Sequence
  ENSG00000100911_16 (sequence is synthesized)
cccctttgttctcctcgttctgttagacctctcttatcacaacggtacccccaaaattagagactgtgcagtatccactctgtaacctcagaacctactgctgtattgggttcatagtag

SEQ ID NO: 120252 - DNA, 120 bp, Artificial Sequence
  ENSG00000100911_17 (sequence is synthesized)
aggtggtatgatatagtgagtgaattgttttaaaagattggaccctagagagagactgcttaggttcaaatcgtgattctatcagttacctagctggtagccttaagtaagtcacttaga

SEQ ID NO: 120253 - DNA, 120 bp, Artificial Sequence
  ENSG00000100911_18 (sequence is synthesized)
ctttctttttctagctggaccagtccggtacgctccgggcctcaccgaggaagtcccaccctgcaggggaaccgactctggccggccctaacccctctcgagcgagtcccgccccatctc

SEQ ID NO: 120254 - DNA, 120 bp, Artificial Sequence
  ENSG00000100911_19 (sequence is synthesized)
cggtctgtcctgaaggcagagggaagaccctcacccaacccctgcccgctctcttctaagagctgctagtccttctccaccccaggcgctccctctggctgcccctcccactcgctctga

SEQ ID NO: 120255 - DNA, 120 bp, Artificial Sequence
  ENSG00000100911_20 (sequence is synthesized)
tctctctccgtccgctacttgcggtcgagccttcttgggggagccccgccactgaataccccctttgccatactcccacctctcttaccccaaccctggacttccagttggccctagcta

SEQ ID NO: 120256 - DNA, 120 bp, Artificial Sequence
  ENSG00000100911_21 (sequence is synthesized)
taagccccgcccctctccgagggacagcccccgctccagtctccgcggtcccacttaccctagcccctccctcgggcagcccctggactgtgacccagccagcaccgcctctcctagtgg

SEQ ID NO: 120257 - DNA, 120 bp, Artificial Sequence
  ENSG00000100911_22 (sequence is synthesized)
caactggctgggaatggctgaggggctacctactgcttgcggcctgccagcgggaggaggggggcggaaagaagaaagggggcggggttgaggggggcgggcctggacctggggagtgaa

SEQ ID NO: 120258 - DNA, 120 bp, Artificial Sequence
  ENSG00000100911_23 (sequence is synthesized)
gctggacctgagggccttctatgtgagtgtggagtaaggctttaggggaggtggatgagtgggggcaggcaggggattggctaagaacctgactcttgcactctggccttctcccaggct

SEQ ID NO: 120259 - DNA, 120 bp, Artificial Sequence
  ENSG00000100916_0 (sequence is synthesized)
agagctcccatcgcagagcctgcgggttaggttgtgaggcccgggccgggggcggggaggagccaagggggcgagcaagctcggtggctgggtgggttggggcgttccgcgcgcccttca

SEQ ID NO: 120260 - DNA, 120 bp, Artificial Sequence
  ENSG00000100916_1 (sequence is synthesized)
ttgaagcggcggtggccgggctgggcgccggtagtggaaagcgacggcgcggctggaaaatgccagtccattcccgaggggataagaaggagaccaaccatcacgatgagatggaggtgg

SEQ ID NO: 120261 - DNA, 120 bp, Artificial Sequence
  ENSG00000100916_2 (sequence is synthesized)
actacgccgaaaatgaggggagcagctccgaggacgaggacactgagagctcgtcggtctccgaggatggagatagctcagaaatggatgatgaagactgtgaaagaagaagaatggaat

SEQ ID NO: 120262 - DNA, 120 bp, Artificial Sequence
  ENSG00000100916_3 (sequence is synthesized)
gtttggatgaaatgtccaatcttgaaaaacagtttaccgatctcaaagatcaactttataaagaacgattaagtcaggtggatgcaaaactacaagaagtcatagctggaaaagcaccag

SEQ ID NO: 120263 - DNA, 120 bp, Artificial Sequence
  ENSG00000100916_4 (sequence is synthesized)
aatacttggaaccgctggcaactttacaggaaaatatgcaaattcgtacaaaggtagcaggaatctatagagagctctgcttagaatctgtaaagaacaaatatgaatgtgaaattcaag

SEQ ID NO: 120264 - DNA, 120 bp, Artificial Sequence
  ENSG00000100916_5 (sequence is synthesized)
cttctcgccagcattgtgagagcgaaaagctgttgctatatgatacagtccagagtgaactagaggagaagataagaaggcttgaagaggataggcacagcattgatattacctcagagc

SEQ ID NO: 120265 - DNA, 120 bp, Artificial Sequence
  ENSG00000100916_6 (sequence is synthesized)
tgtggaatgatgagcttcagtcaagaaaaaagaggaaggatcctttcagtcctgacaaaaagaagccagttgttgtttcaggtccatatatagtttatatgctacaagatcttgatattc

SEQ ID NO: 120266 - DNA, 120 bp, Artificial Sequence
  ENSG00000100916_7 (sequence is synthesized)
ttgaagactggacaacaattaggaaggcaatggctacattggggccacacagagtgaaaacggaaccacctgtgaaactggaaaaacatctgcacagtgctagatctgaagagggaagac

SEQ ID NO: 120267 - DNA, 120 bp, Artificial Sequence
  ENSG00000100916_8 (sequence is synthesized)
tatattatgatggtgaatggtatatacgtggacaaacaatatgtattgataaaaaagatgaatgtcctacaagtgctgtaattacaacaattaaccatgatgaagtttggtttaagaggc

SEQ ID NO: 120268 - DNA, 120 bp, Artificial Sequence
  ENSG00000100916_9 (sequence is synthesized)
ctgatggaagcaaatctaagctttacatttcacagctacagaaaggaaaatattcaattaaacattcataatcatgatttaagtgttatctaaatttaccttattagtgttaccaaatgt

SEQ ID NO: 120269 - DNA, 120 bp, Artificial Sequence
  ENSG00000100916_10 (sequence is synthesized)
aacagtaataaaaattttatcacgatccttacgttgatttgcctcttaggtccgatgaccaataggtattctgtatatggtaggggtttctttctaaacatttttctttggttttaaaaa

SEQ ID NO: 120270 - DNA, 120 bp, Artificial Sequence
  ENSG00000100916_11 (sequence is synthesized)
aagttatgcaaatttgtcttatctttagtaaactatgactacatttatctgcaatttttaaaattttccatatctttgtcattcattgtgtgtttgtaaataaggccgatagaatgtttc

SEQ ID NO: 120271 - DNA, 120 bp, Artificial Sequence
  ENSG00000100916_12 (sequence is synthesized)
ctataaatggtttgtactagtacattagtgttaaaccagaactgaaatttaaacatatatatatatgaggatgtatatatggcatcatcagcttatttagaactgatggccataccttac

SEQ ID NO: 120272 - DNA, 120 bp, Artificial Sequence
  ENSG00000100916_13 (sequence is synthesized)
aatcttgttttacccaaaattaagctattggggttgaaagctaaaaggagcacttttgtagaatagcaacttttcttttcctctttcttgattgtatggtggggtggtgacctattttta

SEQ ID NO: 120273 - DNA, 120 bp, Artificial Sequence
  ENSG00000100916_14 (sequence is synthesized)
caaattatacctaatgagtaaaattagtgtaaagtgataacatgcttctacctgtatttctagtgaccctttagcggcaggtatttatacctggtatttatgatgcagtatataagtggt

SEQ ID NO: 120274 - DNA, 120 bp, Artificial Sequence
  ENSG00000100916_15 (sequence is synthesized)
gaacaataactgacagtattgtgcttgctgtacatgtctggtcttttgaaacagattttagtaagcattttccagaggtaaaactgtgtccttattctaattttattcctagggcaaagt

SEQ ID NO: 120275 - DNA, 120 bp, Artificial Sequence
  ENSG00000100916_16 (sequence is synthesized)
agacagggattatttccttgaatctatttccaaattaatatttttttctttggtatttctacactttaaggccatttggtgcaatttagaaagtgttggcctcccttccgctagccacat

SEQ ID NO: 120276 - DNA, 120 bp, Artificial Sequence
  ENSG00000100916_17 (sequence is synthesized)
tcaaaattaacttccaaaacctcaggaacagtacaaagaattgaaaccctcaatatggcagcacagccggctgtagtgtatatttagggtacaccaaatcaggtattcctggtggtcttg

SEQ ID NO: 120277 - DNA, 120 bp, Artificial Sequence
  ENSG00000100916_18 (sequence is synthesized)
tgcactttaatttctgttacaatgagttaagaggatgaggaagaaatctacttattaacacttactgcagaaatgtctgcattattccgtttgttttcttattattttacctctccaaac

SEQ ID NO: 120278 - DNA, 120 bp, Artificial Sequence
  ENSG00000100916_19 (sequence is synthesized)
atcttcctgtgcagatcactacttcatagttgccaaattttaaaacacttaactgctgaaattcagtgtcagcaaagtgatattacgttgttctgtttctaattaaccttagcaaatgta

SEQ ID NO: 120279 - DNA, 120 bp, Artificial Sequence
  ENSG00000100916_20 (sequence is synthesized)
cataatgtcaaaacccaatagtatttgacagtacttatgtatacaatgtttgataagcatttttaataagatttgtatttttaaatttagtatataataaaaagatgtgtttcagtgtga

SEQ ID NO: 120280 - DNA, 120 bp, Artificial Sequence
  ENSG00000100916_21 (sequence is synthesized)
gtacaaaggtagcagtctcagtggccaggaatttgggagcaacttagctggatggttctggctcagggaatcccaagaagttgcagtgaagatatcagccagggatgcagtcatctcaag

SEQ ID NO: 120281 - DNA, 120 bp, Artificial Sequence
  ENSG00000100916_22 (sequence is synthesized)
atcagggttgttatctacgtactaaagaactcttgaatcagtggttttatttcatcagtgaacaccgtgcctgaaattatgaggaattcttctggagtcattgcttcacgtaaaagtttc

SEQ ID NO: 120282 - DNA, 120 bp, Artificial Sequence
  ENSG00000100916_23 (sequence is synthesized)
aaaatttctgaatgtggtataattatttcagtgttcagctacattcttattgctaataatggatcagtaactcaaaaaagtatttatgcagtgttttttatgggctctgtcattctatag

SEQ ID NO: 120283 - DNA, 120 bp, Artificial Sequence
  ENSG00000100916_24 (sequence is synthesized)
atacaatgctgcatatgtgtaccctattggcgtcattatgaagtaattagtttgcgtgtgtgagttgtggcacaggactcaatgcttggcaagctgatattcatatattttgtcttattt

SEQ ID NO: 120284 - DNA, 120 bp, Artificial Sequence
  ENSG00000100916_25 (sequence is synthesized)
tagctcttagaatgagccagatatttgaaatatttgtggcacttttctttttaaaggtcaaaacatttaaaactatgtactttgagtatcatgaatttagttctacagataaagaacaaa

SEQ ID NO: 120285 - DNA, 120 bp, Artificial Sequence
  ENSG00000100916_26 (sequence is synthesized)
actgataattctcgaaagttttattaaagtcaatttatatttaagttatatgtatatctcctaaacattgtgaatctgtcttagtccaggatcttataacttttcgccagaactattgaa

SEQ ID NO: 120286 - DNA, 120 bp, Artificial Sequence
  ENSG00000100916_27 (sequence is synthesized)
gtattctttcaattggttcctgctgtggacagactaaatggctgtaggatgactccaattattctacccctggtggtctgccctgtgtaactccctcccctcaaatgtgtgccaagcctg

SEQ ID NO: 120287 - DNA, 120 bp, Artificial Sequence
  ENSG00000100916_28 (sequence is synthesized)
ggacttgcttctcacctacagaatatgacaaagatgaggagatttttcagatataattaaggttccaaatcagtttttgagttaattgaaagattatcctgggtgggccttacttgatca

SEQ ID NO: 120288 - DNA, 120 bp, Artificial Sequence
  ENSG00000100916_29 (sequence is synthesized)
tgttatttaagaaatatttttaggccttttttacatatgcatggattgatgttaattgttaatgttctgaccctttgttcttctgacagtgttttattaatataacagtttttgaactga

SEQ ID NO: 120289 - DNA, 120 bp, Artificial Sequence
  ENSG00000100916_30 (sequence is synthesized)
tcaagatgcagatcattttgtgcttcagttattttgatgaatgaatatatgtgatatgaacatagaaaatgtggactataggacagacctgaaatggatgatgaagactgtgaaagaaga

SEQ ID NO: 120290 - DNA, 120 bp, Artificial Sequence
  ENSG00000100918_0 (sequence is synthesized)
ctagtcctgcagtaggcggcccggggccacaccgcggccgcccaagccagtgcaaggcccaggggcctgacatcgctcccagcgctcgaggaccgaggcctgctgtggaggacaccgtgc

SEQ ID NO: 120291 - DNA, 120 bp, Artificial Sequence
  ENSG00000100918_1 (sequence is synthesized)
tccctcgggacctgctctggattccggcccggacgtccccttggagctctgcatctccaacctggaacccaacccagaagtctcaagtttgacgcatcacgtggcgtgcggatccactga

SEQ ID NO: 120292 - DNA, 120 bp, Artificial Sequence
  ENSG00000100918_2 (sequence is synthesized)
gggtccacagagaggggcgcccatctcctgcgtctcagttatcctggtaattgtgtatctgcccattgttcgttgcctcattaacttggctttctaggtgcacccaccttgccaccagag

SEQ ID NO: 120293 - DNA, 120 bp, Artificial Sequence
  ENSG00000100918_3 (sequence is synthesized)
aagtccaaatcctgacttctctccaaggtgttgggaattctgtgccctaaagaattccgactcagatccgaacggggatctggtggaatcgagggtgaaagaccagagggacaatgttct

SEQ ID NO: 120294 - DNA, 120 bp, Artificial Sequence
  ENSG00000100918_4 (sequence is synthesized)
actatcccaacgtgcttcagcgccacaccggctgctttgccaccatctggctggcggcgactcgcggcagccggttggtgaagcgcgaatacctgagggtgaatgtggtgaaaacctgcg

SEQ ID NO: 120295 - DNA, 120 bp, Artificial Sequence
  ENSG00000100918_5 (sequence is synthesized)
aggaaatcctcaattacgtgctggtacgagtgcaacccccgcagcccggcctgccgcggccccgcttctccctctatctctcagcccaacttcagatcggtgtgatccgcgtctattctc

SEQ ID NO: 120296 - DNA, 120 bp, Artificial Sequence
  ENSG00000100918_6 (sequence is synthesized)
aacaatgccagtacctcgtggaggacatccagcacatcttggagcgcctccaccgtgcccagctgcagatccgaatagatatggagactgagctacccagcctgctgcttcctaaccacc

SEQ ID NO: 120297 - DNA, 120 bp, Artificial Sequence
  ENSG00000100918_7 (sequence is synthesized)
tggccatgatggagaccctagaagatgctccagatcccttttttgggatgatgtctgtggatcccagacttcctagtcctttcgatatccctcagattcgacacctcttagaggctgcaa

SEQ ID NO: 120298 - DNA, 120 bp, Artificial Sequence
  ENSG00000100918_8 (sequence is synthesized)
tcccagagagagttgaagagatccctcctgaagttcctacagagcccagggagccagagaggattccggtcactgtgctgccacctgaggccatcacgatcctggaggcagagcccatac

SEQ ID NO: 120299 - DNA, 120 bp, Artificial Sequence
  ENSG00000100918_9 (sequence is synthesized)
ccagctcctgcagaggtggaaggaataggagaggcactgggtcctgaggagctgaggctgacaggctgggaacctggggccctactcatggaggtgacccccccggaggagctgcgtctg

SEQ ID NO: 120300 - DNA, 120 bp, Artificial Sequence
  ENSG00000100918_10 (sequence is synthesized)
ccagccccacccagcccagagaggaggcccccagtccccccacctcctcgccgccgccgtcgtcgccggttactgttctgggacaaggagactcagatctccccggagaaattccaggaa

SEQ ID NO: 120301 - DNA, 120 bp, Artificial Sequence
  ENSG00000100918_11 (sequence is synthesized)
caactgcaaaccagagcccactgctgggaatgtcctatggtgcagccgcccgagaggaccatcagaggccctgcggagttgttcagaaccccaactctctctggctggctaccccctgaa

SEQ ID NO: 120302 - DNA, 120 bp, Artificial Sequence
  ENSG00000100918_12 (sequence is synthesized)
ctactgggtctctggacccattgtgcccagccacccccaaaagccctcaggcgagagctgcctgaggaggcagccgctgaggaggaaaggagaaagattgaagttccaagtgagattgag

SEQ ID NO: 120303 - DNA, 120 bp, Artificial Sequence
  ENSG00000100918_13 (sequence is synthesized)
gtcccgagggaggccctggagcccagtgttccccttatggtgtctttagagatctccctagaggcagctgaagaggagaagtcccgcatcagcctcatcccaccagaagaacggtgggcc

SEQ ID NO: 120304 - DNA, 120 bp, Artificial Sequence
  ENSG00000100918_14 (sequence is synthesized)
tggcctgaggtggaggcgccagaagctcctgcattgcccgtggtgcctgaactccctgaggtgcccatggagatgcctttggtgctgcccccagagctcgagctgctctcactggaagca

SEQ ID NO: 120305 - DNA, 120 bp, Artificial Sequence
  ENSG00000100918_15 (sequence is synthesized)
gtgcacagggcagtggcactggagctgcaggctaacagggagcccgacttcagcagcctggtgtcacctctcagcccccgcaggatggctgcccgggtcttctacctgctcctggtgctc

SEQ ID NO: 120306 - DNA, 120 bp, Artificial Sequence
  ENSG00000100918_16 (sequence is synthesized)
tcagcgcaacagattcttcacgtgaaacaagaaaagccatatggtcgcctcctgatccagccggggcccagattccactgaggttagagtccatttacaaagctgccaggaaaccggcca

SEQ ID NO: 120307 - DNA, 120 bp, Artificial Sequence
  ENSG00000100918_17 (sequence is synthesized)
cttctagtaaaccacgtcgtgcctcactgggtcctgcttacctcatttctgaatgtgcatttccagccttcttgctctcagagctattgttcaagcagaaaacaagctgcttttattaca

SEQ ID NO: 120308 - DNA, 120 bp, Artificial Sequence
  ENSG00000100918_18 (sequence is synthesized)
actagaggcgagaaccggagcccattggtcggaacacctcacaatggaccccagcggcgcgcaaaatccttatgattggtttgctggctgcctcgggagaccctgttgccaggatacttg

SEQ ID NO: 120309 - DNA, 120 bp, Artificial Sequence
  ENSG00000100918_19 (sequence is synthesized)
ttgatgagggctagataactggggtgcgggttggggagggaggtgagaacaggaactgaggaaagaagaccagagggcgggtgagtttactgcaagctgatgtcaatgcaacaagaatta

SEQ ID NO: 120310 - DNA, 120 bp, Artificial Sequence
  ENSG00000100918_20 (sequence is synthesized)
ggcataaaaggagattaccgtgcattgttgaagaaggctgtgaaaagtgggaaagcagggggctgaagctgaaccctatcttttgtttccaatccctctccaaagattcgacacctctta

SEQ ID NO: 120311 - DNA, 120 bp, Artificial Sequence
  ENSG00000100918_21 (sequence is synthesized)
cccaggggcttttctgggagtacctggatactgctgcagacaagggctttatatcccaacttgctaaagggaggaccctgcagtttcttgccctggcatctgcaaggggtaaggggctta

SEQ ID NO: 120312 - DNA, 120 bp, Artificial Sequence
  ENSG00000100918_22 (sequence is synthesized)
tgggacagagccccttgggtgttgttgcagaggtgacccccccggaggagctgcgtctgccagccccacccagcccagaggtgagtagcctcccttctaatcctcctcctcctcctcttt

SEQ ID NO: 120313 - DNA, 120 bp, Artificial Sequence
  ENSG00000100918_23 (sequence is synthesized)
gccctcccccacaaggactgcctccccaagcccagggccactgctagcttacaggggtccttaatgcagatgataaaagatgcccctttctacgccccatcgtatctggcctacgcttcc

SEQ ID NO: 120314 - DNA, 120 bp, Artificial Sequence
  ENSG00000100918_24 (sequence is synthesized)
caagaactcctagaccaggtagggtgtcagtgctgggaagggtctcctcatttctcttgcccatttcccctcagggtggaaggaataggagaggcactgggtcctgaggagctgaggctg

SEQ ID NO: 120315 - DNA, 120 bp, Artificial Sequence
  ENSG00000100918_25 (sequence is synthesized)
aagggcggggcccgttggcgcgcgatggcggacgctgcccgggatcccagcctgacagctccccctccatccccattctcccaccttccccacccacttcaggctggcggcgactcgcgg

SEQ ID NO: 120316 - DNA, 120 bp, Artificial Sequence
  ENSG00000100918_26 (sequence is synthesized)
ccaggaacaactgcaaaccagagcccactgctgggaatgtcctatggtgcagccgcccgagaggaccatcagaggccctgcggagttgttcagaaccccaactctctgtaagaatggtgg

SEQ ID NO: 120317 - DNA, 120 bp, Artificial Sequence
  ENSG00000100918_27 (sequence is synthesized)
gctcaagtgcatggagaccccgcacaagccctctccaggttcctctaggggcgggtgtggggtcctgttagcagtccaccagaatgacaggaaaaggagtaatgggcagccttgccccta

SEQ ID NO: 120318 - DNA, 120 bp, Artificial Sequence
  ENSG00000100926_0 (sequence is synthesized)
accgcgccgctgtgggagagaccccagcaggagcccaaaggcagctacgggggcgcgaaggccgctggcgccgcctcggccagcccttcccgcgcggttccactgccttaaggatgacag

SEQ ID NO: 120319 - DNA, 120 bp, Artificial Sequence
  ENSG00000100926_1 (sequence is synthesized)
tcgtagggaaccctcgaagttggagctgccagtggttgccaatcctgatactgttgctgggcacaggccatgggccaggggtggaaggcgtgacacactacaaggccggcgaccctgtta

SEQ ID NO: 120320 - DNA, 120 bp, Artificial Sequence
  ENSG00000100926_2 (sequence is synthesized)
ttctgtatgtcaacaaagtgggaccctaccataaccctcaggaaacttaccactactatcagcttccagtctgctgccctgagaagatacgtcacaaaagccttagcctgggtgaagtgc

SEQ ID NO: 120321 - DNA, 120 bp, Artificial Sequence
  ENSG00000100926_3 (sequence is synthesized)
tggatggggaccgaatggctgagtctttgtatgagatccgctttcgggaaaacgtggagaagagaattctgtgccacatgcagctcagttctgcacaggtggagcagctgcgccaggcca

SEQ ID NO: 120322 - DNA, 120 bp, Artificial Sequence
  ENSG00000100926_4 (sequence is synthesized)
ttgaagaactgtactactttgaatttgtggtagatgacttgccaatccggggctttgtgggctacatggaggagagtggtttcctgccacacagccacaagataggactctggacccatt

SEQ ID NO: 120323 - DNA, 120 bp, Artificial Sequence
  ENSG00000100926_5 (sequence is synthesized)
tggacttccacctagaattccatggagaccgaattatatttgccaatgtttcagtgcgggacgtcaagccccacagcttggatgggttacgacctgacgagttcctaggccttacccaca

SEQ ID NO: 120324 - DNA, 120 bp, Artificial Sequence
  ENSG00000100926_6 (sequence is synthesized)
cttatagcgtgcgctggtctgagacttcagtggagcgtcggagtgacaggcgccgtggtgacgatggtggtttctttcctcgaacactggaaatccattggttgtccatcatcaactcca

SEQ ID NO: 120325 - DNA, 120 bp, Artificial Sequence
  ENSG00000100926_7 (sequence is synthesized)
tggtgcttgtgtttttactggtgggttttgtggctgtcattctaatgcgtgtgcttcggaatgacctggctcggtacaacttagatgaggagaccacctctgcaggttctggtgatgact

SEQ ID NO: 120326 - DNA, 120 bp, Artificial Sequence
  ENSG00000100926_8 (sequence is synthesized)
ttgaccagggtgacaatggctggaaaattatccatacagatgtcttccgcttccccccataccgtggtctgctctgtgctgtgcttggcgtgggtgcccagttcctggcccttggcactg

SEQ ID NO: 120327 - DNA, 120 bp, Artificial Sequence
  ENSG00000100926_9 (sequence is synthesized)
ccgtcatggggccattaactcagcagccatcttgttgtatgccctgacctgctgcatctctggctacgtgtccagccacttctaccggcagattggaggcgagcgttgggtgtggaacat

SEQ ID NO: 120328 - DNA, 120 bp, Artificial Sequence
  ENSG00000100926_10 (sequence is synthesized)
cattctcaccaccagtctcttctctgtgcctttcttcctgacgtggagtgtggtgaactcagtgcattgggccaatggttcgacacaggctctgccagccacaaccatcctgctgcttct

SEQ ID NO: 120329 - DNA, 120 bp, Artificial Sequence
  ENSG00000100926_11 (sequence is synthesized)
gacggtttggctgctggtgggctttcccctcactgtcattggaggcatctttgggaagaacaacgccagcccctttgatgcaccctgtcgcaccaagaacatcgcccgggagattccacc

SEQ ID NO: 120330 - DNA, 120 bp, Artificial Sequence
  ENSG00000100926_12 (sequence is synthesized)
ccagccctggtacaagtctactgtcatccacatgactgttggaggcttcctgcctttcagtgccatctctgtggagctgtactacatctttgccacagtatggggtcgggagcagtacac

SEQ ID NO: 120331 - DNA, 120 bp, Artificial Sequence
  ENSG00000100926_13 (sequence is synthesized)
tttgtacggcatcctcttctttgtcttcgccatcctgctgagtgtgggggcttgcatctccattgcactcacctacttccagttgtctggggaggattaccgctggtggtggcgatctgt

SEQ ID NO: 120332 - DNA, 120 bp, Artificial Sequence
  ENSG00000100926_14 (sequence is synthesized)
gctgagtgttggctccaccggcctcttcatcttcctctactcagttttctattatgcccggcgctccaacatgtctggggcagtacagacagtagagttcttcggctactccttactcac

SEQ ID NO: 120333 - DNA, 120 bp, Artificial Sequence
  ENSG00000100926_15 (sequence is synthesized)
tggttatgtcttcttcctcatgctgggcaccatctcctttttttcttccctaaagttcatccggtatatctatgttaacctcaagatggactgagttctgtatggcagaactattgctgt

SEQ ID NO: 120334 - DNA, 120 bp, Artificial Sequence
  ENSG00000100926_16 (sequence is synthesized)
tctctccctttcttcatgccctgttgaactctcctaccagcttctcttctgattgactgaattgtgtgatggcattgttgccttcccttttgccctttgggcattccttccccagagagg

SEQ ID NO: 120335 - DNA, 120 bp, Artificial Sequence
  ENSG00000100926_17 (sequence is synthesized)
gcctggaaattataaatctctatcacataaggattatatatttgaactttttaagttgcctttagttttggtcctgatttttctttttacaattaccaaaataaaatttattaagaaaaa

SEQ ID NO: 120336 - DNA, 120 bp, Artificial Sequence
  ENSG00000100926_18 (sequence is synthesized)
cgagcctcacggggtccccggagctgggccgggcctccagatggagaaggcgcaacggggagttcttgagtaagccagagcggtgtccagcgcggtgtagccgcagccgccgctgtcagg

SEQ ID NO: 120337 - DNA, 120 bp, Artificial Sequence
  ENSG00000100926_19 (sequence is synthesized)
ttggaggcttcctgcctttcaggtatcctccctttattccatggctattactgtcaggttcctgacctcaatttttcctgtccctactcatccagtaccctaacccaacccgttgatccc

SEQ ID NO: 120338 - DNA, 120 bp, Artificial Sequence
  ENSG00000100926_20 (sequence is synthesized)
tggttcagtggtaccattcagagatcattaaatggttcctcctatccccaagcaggactgagcttgaatgatatgagagtgtctcacttataaagctctccggagacatttcccccttca

SEQ ID NO: 120339 - DNA, 120 bp, Artificial Sequence
  ENSG00000100926_21 (sequence is synthesized)
ccttcctggtttctgactttaatgcctatggacatcatgtggggtttaaagcccatttgatgacccatttactttgttgaatacctctttgtgccaggcaaagaataaagtggaataaaa

SEQ ID NO: 120340 - DNA, 120 bp, Artificial Sequence
  ENSG00000100926_22 (sequence is synthesized)
aatcctagcactttgggagaccgaggccggaggatcacttgagcccaaaagtttgagacaagcctagacaacatagtgagaccctctctctataacaaaaaattagccgggcatggtggt

SEQ ID NO: 120341 - DNA, 87 bp, Artificial Sequence
  ENSG00000100926_23 (sequence is synthesized)
agccgggcatggtggttcccaggaggattgcttgagcctggggagccagggaggttgaggctacagtgagccatgattgcaccactg

SEQ ID NO: 120342 - DNA, 87 bp, Artificial Sequence
  ENSG00000100926_24 (sequence is synthesized)
ctgggcgaacacatcatagaacttgggatagagtcaggatgaggcttgaagggaaggaatattgtaaaagaaagaagaaaaccaaaa

SEQ ID NO: 120343 - DNA, 120 bp, Artificial Sequence
  ENSG00000100926_25 (sequence is synthesized)
cccaaaggcagctacgggggcgcgaaggccgctggcgccgcctcggccagcccttcccgcgcggtgaggaccccggggctgtggcgggaagggacccgaggtgcgagaccgagcggcgtt

SEQ ID NO: 120344 - DNA, 120 bp, Artificial Sequence
  ENSG00000100926_26 (sequence is synthesized)
gccatggaaacgggccagggcgcgtagtagaggccccgggccagacgggctgcgggtggggtgaaccccaggttgggaggatgagagagcagaggtggagcggggtctttgggatagaga

SEQ ID NO: 120345 - DNA, 120 bp, Artificial Sequence
  ENSG00000100926_27 (sequence is synthesized)
gacgtggggtagggtgaggcggggagggggccaatgggagcaagtggagccaggggacctcagttcgaggcacctgacctggggtttctgtaacctccctggtttctataacctcaggat

SEQ ID NO: 120346 - DNA, 120 bp, Artificial Sequence
  ENSG00000100926_28 (sequence is synthesized)
gacgtgtcctgggccgcgctgccgatcgccgggaggacccccgcctcgccgaagacgggcggggcaagccgagcctcacggggtccccggagctgggccgggcctccagatggagaaggc

SEQ ID NO: 120347 - DNA, 120 bp, Artificial Sequence
  ENSG00000100934_0 (sequence is synthesized)
gtggcagaggcggcgccagccatgttggccgggcggaggtcttcgctgaggcccggggcggggtggcgccacccctgattgcggtgccacggactgctcctgctgggcggagaggacaga

SEQ ID NO: 120348 - DNA, 120 bp, Artificial Sequence
  ENSG00000100934_1 (sequence is synthesized)
ttttgcaaagcggaggctgcgacgggtcctgcagggggacagtgaggaaagggccgcctcgtctccgctcctgggggaccgcagaaataagaatcaaactccacaatgacaacctatttg

SEQ ID NO: 120349 - DNA, 120 bp, Artificial Sequence
  ENSG00000100934_2 (sequence is synthesized)
gaattcattcaacaaaatgaagaacgagatggagtccgatttagttggaatgtttggccatcaagtcgactggaagctacaagaatggttgttcctgtggcagccctgtttacaccactg

SEQ ID NO: 120350 - DNA, 120 bp, Artificial Sequence
  ENSG00000100934_3 (sequence is synthesized)
aaagagagacctgacttaccacctattcaatatgaacctgttctgtgtagtaggaccacttgccgtgcagttttgaatcctttatgtcaagtggattatcgagcaaaactttgggcttgc

SEQ ID NO: 120351 - DNA, 120 bp, Artificial Sequence
  ENSG00000100934_4 (sequence is synthesized)
aacttttgttaccaaaggaatcagtttccacctagttatgctggtatatctgaactgaatcagcctgctgaacttttacctcagttttctagcattgaatatgtagttctgcgtggtcct

SEQ ID NO: 120352 - DNA, 120 bp, Artificial Sequence
  ENSG00000100934_5 (sequence is synthesized)
cagatgcctttgatattcctctatgtggttgatacttgcatggaagatgaagatttacaagccctgaaagaatccatgcagatgtcattaagtcttttaccacctacagctttggttgga

SEQ ID NO: 120353 - DNA, 120 bp, Artificial Sequence
  ENSG00000100934_6 (sequence is synthesized)
cttattacttttgggagaatggttcaggttcatgaacttggatgtgaaggcatttcaaaaagctatgtcttcagaggaacaaaagatttgtctgccaaacaactgcaggaaatgctgggg

SEQ ID NO: 120354 - DNA, 120 bp, Artificial Sequence
  ENSG00000100934_7 (sequence is synthesized)
ctctctaaagtaccacttactcaagcaacacgtggtcctcaggtacagcagccacctccttccaacagattcttacaaccagtacagaaaatagacatgaatctcacagatcttctggga

SEQ ID NO: 120355 - DNA, 120 bp, Artificial Sequence
  ENSG00000100934_8 (sequence is synthesized)
gaactccagcgagacccttggcctgtaccacagggaaagagacctttgcgttcctctggggtggcactttccatagctgtaggactgctggagtgtacttttcccaacactggtgctcgt

SEQ ID NO: 120356 - DNA, 120 bp, Artificial Sequence
  ENSG00000100934_9 (sequence is synthesized)
atcatgatgttcattggtggtcctgctactcaggggcctggaatggtggttggagatgagttgaagacacctataagatcgtggcatgacattgacaaagacaatgccaaatatgttaaa

SEQ ID NO: 120357 - DNA, 120 bp, Artificial Sequence
  ENSG00000100934_10 (sequence is synthesized)
aagggaactaagcattttgaagcattggctaatcgagctgctacaactggccatgttattgatatctatgcgtgtgcattagatcagacaggtctcctggagatgaaatgctgtcccaac

SEQ ID NO: 120358 - DNA, 120 bp, Artificial Sequence
  ENSG00000100934_11 (sequence is synthesized)
cttactggaggatacatggtaatgggtgattctttcaatacttccttattcaaacaaacttttcaaagagtctttaccaaagacatgcatggacagtttaaaatgggctttggtggtacg

SEQ ID NO: 120359 - DNA, 120 bp, Artificial Sequence
  ENSG00000100934_12 (sequence is synthesized)
ctagaaataaagacctcaagggaaataaagatttcaggagctattggaccctgtgtgtcactcaattctaaaggaccctgtgtgtctgaaaatgagataggaacaggtggcacatgtcag

SEQ ID NO: 120360 - DNA, 120 bp, Artificial Sequence
  ENSG00000100934_13 (sequence is synthesized)
tggaagatatgtggacttagtcccactacaaccttagccatatattttgaggttgtcaatcagcataatgctccaattcctcaaggagggcgtggtgcaatccagtttgtgactcagtat

SEQ ID NO: 120361 - DNA, 120 bp, Artificial Sequence
  ENSG00000100934_14 (sequence is synthesized)
cagcattcaagtgggcagagacgcatccgagtgaccaccattgctaggaactgggcagatgctcaaactcaaatccaaaacattgctgcatcttttgaccaggaggcagctgccattctt

SEQ ID NO: 120362 - DNA, 120 bp, Artificial Sequence
  ENSG00000100934_15 (sequence is synthesized)
atggcccggctagcaatatatagagcagaaacagaagaaggtccagatgtgcttaggtggctggacagacagctcattcgactgtgtcagaaatttggagaatatcataaagatgaccca

SEQ ID NO: 120363 - DNA, 120 bp, Artificial Sequence
  ENSG00000100934_16 (sequence is synthesized)
tccttcagattttcagaaactttctccctttatccacagtttatgtttcatttaagaagatcttctttcctgcaagtttttaacaatagtcctgatgagagttcatattatcgtcaccat

SEQ ID NO: 120364 - DNA, 120 bp, Artificial Sequence
  ENSG00000100934_17 (sequence is synthesized)
tttatgcgtcaagatctgacccagtctctaattatgattcagcctatcctgtatgcgtattcttttagtggaccaccagagccggttcttcttgatagcagtagcattcttgcagatcgt

SEQ ID NO: 120365 - DNA, 120 bp, Artificial Sequence
  ENSG00000100934_18 (sequence is synthesized)
attcttctcatggacacattcttccagattttgatttatcatggtgagaccatagcacagtggcggaagtcaggataccaggatatgcctgagtatgaaaatttccgccaccttctgcaa

SEQ ID NO: 120366 - DNA, 120 bp, Artificial Sequence
  ENSG00000100934_19 (sequence is synthesized)
gccccagtggatgatgcacaggaaattcttcactccagatttccaatgccaagatacattgacactgaacatggaggcagccaggcccgtttcctcctttcaaaagtcaacccttcacag

SEQ ID NO: 120367 - DNA, 120 bp, Artificial Sequence
  ENSG00000100934_20 (sequence is synthesized)
actcataataatatgtatgcctgggggcaggagtctggagcacctattcttacagatgatgttagtttacaagtgtttatggatcacttgaagaaacttgctgtgtccagtgctgcttga

SEQ ID NO: 120368 - DNA, 120 bp, Artificial Sequence
  ENSG00000100934_21 (sequence is synthesized)
agtgctaataatgttaaagacacttaagaagatgaaataatattcaaatttcattttttcctttttccatttatctgtggaaaccaacagatattgctctatattttttgtattagtatg

SEQ ID NO: 120369 - DNA, 120 bp, Artificial Sequence
  ENSG00000100934_22 (sequence is synthesized)
gtttgagacaacatatggaaaatgttcacatttgtagattaagctggaattataatgagagcaataagaacaaatttattttgcttaccacagtgttatagctggttctagaaatttgaa

SEQ ID NO: 120370 - DNA, 120 bp, Artificial Sequence
  ENSG00000100934_23 (sequence is synthesized)
gtctttataacttaattatgtttaataaaaaatagagtctgcctcgtactacagatgtaactcatttgtatattgcagacagacccaaagtggcactgaattttcttgctcaccttttaa

SEQ ID NO: 120371 - DNA, 120 bp, Artificial Sequence
  ENSG00000100934_24 (sequence is synthesized)
aaacttgttccttaattttagccagaaagcaaaaaaacaatagtaatgataaatgtgaacatttttgcttattcattgaatatttttctgtaattttcagcacttatgtatacacttttt

SEQ ID NO: 120372 - DNA, 120 bp, Artificial Sequence
  ENSG00000100934_25 (sequence is synthesized)
ctgtacttactaggttaaggcagatttatttttatgatttgtttaggaattatttgattttataatggtaattttcatgatgataatgtttttggttatttggaaagatagtttagagat

SEQ ID NO: 120373 - DNA, 120 bp, Artificial Sequence
  ENSG00000100934_26 (sequence is synthesized)
gaaaggtttttttgggtaacaatcccgcagctgacaaaaaatgtgaaatttccacaaaatatccaacttatgtgactaaacgcagtagtttttttaaaaggggagatagaaaataaatgg

SEQ ID NO: 120374 - DNA, 120 bp, Artificial Sequence
  ENSG00000100934_27 (sequence is synthesized)
ttttgttggagtgcattttagtaagcctttgcagtaaaatgacggttgtaactactaaaccaaatttagttttcacagcatggttttgttgttttccccttgtttttcagaggtaaattt

SEQ ID NO: 120375 - DNA, 120 bp, Artificial Sequence
  ENSG00000100934_28 (sequence is synthesized)
tgcattatatccttcagtattttaacactattttggcagtttacacattactttttgtttttccttcctttttgtgaaatgtattaagttgtggttcttattgaaacagtattatataat

SEQ ID NO: 120376 - DNA, 120 bp, Artificial Sequence
  ENSG00000100934_29 (sequence is synthesized)
gtttgcttaattatatcatgtgatgctcagttctattttgatttattcattagtattcacttttacctttaaagtttacttgtagcaaatatgtttacattgataaagccagatatgttt

SEQ ID NO: 120377 - DNA, 120 bp, Artificial Sequence
  ENSG00000100934_30 (sequence is synthesized)
tgacaatgaaatttacatatcaagtactgcaaataaaaggtggtgctatgatatatgcttaggaggacagttttaatgattgtacttgcatgaacacaatcatatgatggtaaagcagaa

SEQ ID NO: 120378 - DNA, 120 bp, Artificial Sequence
  ENSG00000100934_31 (sequence is synthesized)
acttaagaaaaaattgtttatgtgttatattcaattagcttaaataagttgctttgttatattttatttgaattgaactacgctaggcctaaatgccaataaaatatacttttcactgtt

SEQ ID NO: 120379 - DNA, 120 bp, Artificial Sequence
  ENSG00000100934_32 (sequence is synthesized)
ttaattacatggtgtttagagctacttacctatggattgattcaattgctttcacgtatcataagcttaggtagatagcttttagctaacattcatttgataagcatagtgttttaaaaa

SEQ ID NO: 120380 - DNA, 120 bp, Artificial Sequence
  ENSG00000100934_33 (sequence is synthesized)
atgtctgttctctacccagaagctagagttttatgaatgaaaatcagatgatgaacatcttccagtagtagcttcttattcttggaatgagaaatacaaactccttatcaagatctataa

SEQ ID NO: 120381 - DNA, 120 bp, Artificial Sequence
  ENSG00000100934_34 (sequence is synthesized)
cctcccaaagtgctgggattacagatagatgtgatttgtgattctcggaatcaaccagggtcctaagatgtcctggaggccgtctccatttctctcgaaataagaatcaaactccacaat

SEQ ID NO: 120382 - DNA, 120 bp, Artificial Sequence
  ENSG00000100934_35 (sequence is synthesized)
cagtctgttctctacccagaagctagagttttatgaatgaaaatcagatgatgaacatcttccagtagtagcttcttattcttggaatgagaaatacaaactccttatcaagatctataa

SEQ ID NO: 120383 - DNA, 120 bp, Artificial Sequence
  ENSG00000100934_36 (sequence is synthesized)
ataccaccatgccttactaatttttgtatttttagtagagttggtgcttcaccatgttagccaaggttggtcttgaacttctgaccttgtgatttgcccaccttgacctcccaaagtgct

SEQ ID NO: 120384 - DNA, 120 bp, Artificial Sequence
  ENSG00000100934_37 (sequence is synthesized)
cggcctcccaaaatactgggattacagctgtgattcactgcgcctggccacatcttccttttttcaataggcaagtgaatgcctgcagactgaattttttttctccattgaaacatgttt

SEQ ID NO: 120385 - DNA, 120 bp, Artificial Sequence
  ENSG00000100934_38 (sequence is synthesized)
attttctttccctatttagattaaatttccctattctttccctattattagttgaaaagagcctggcctttgctccccagatagtcctggattcaaatcttaaactcttctggttgtatg

SEQ ID NO: 120386 - DNA, 120 bp, Artificial Sequence
  ENSG00000100934_39 (sequence is synthesized)
atcctgggtttttgtctttgctgattgtgtcatccttcatagaaaggaataaactacctattttgccaggttattagtactaaatatgaaattctcaatatggtgtaaacccttatagag

SEQ ID NO: 120387 - DNA, 120 bp, Artificial Sequence
  ENSG00000100934_40 (sequence is synthesized)
ctttatagaaaaacctggatttaaaatcttgctttgttacttactgattgtgtaacctcagacaaattacttagtctttctgattgtcaattttcatttataaagtagaatttaagaaga

SEQ ID NO: 120388 - DNA, 120 bp, Artificial Sequence
  ENSG00000100934_41 (sequence is synthesized)
aatctatttcattattgttttgtgaggaaatagtatatataaaggttttagcatagaatatggaacatattaagttcttagtaaagagttgctgtttctgctaacagtataggaaatatt

SEQ ID NO: 120389 - DNA, 120 bp, Artificial Sequence
  ENSG00000100934_42 (sequence is synthesized)
gcaggattagttcactaattttatctttgtacatctttagacttcagttttctgttacacagttttataactccagtacttcatgactaagcatttctagattcaagaaaaatttagtat

SEQ ID NO: 120390 - DNA, 120 bp, Artificial Sequence
  ENSG00000100934_43 (sequence is synthesized)
aacattattttcatttgtctagagagaaattgtgcacatatctgaaattcaaaacaaaggtggcagttcgtagtttggttatgaattacattagaaaatcaagatgtatataggtacaaa

SEQ ID NO: 120391 - DNA, 120 bp, Artificial Sequence
  ENSG00000100934_44 (sequence is synthesized)
aggctgactaaaatacataaatagtacgtgaattctttcgggccagggatctgggcctactttgcctgcatcatattaccagcatctcaattgtgtctggcacatagtaagtttcagtaa

SEQ ID NO: 120392 - DNA, 120 bp, Artificial Sequence
  ENSG00000100934_45 (sequence is synthesized)
acatttgttgcactaagtgaaagaatgaacttttcacttttttcagagatgtgatttgtgattctcggaatcaaccagggtcctaagatgtcctggaggccgtctccatttctctcgagg

SEQ ID NO: 120393 - DNA, 120 bp, Artificial Sequence
  ENSG00000100934_46 (sequence is synthesized)
aaaacaaacaaacaaaacaaacaaacaaacaaatgaaaaaaaacccataaaacatccattgcagatgttaatgccaaaatactagtcatgtagaaaaatgcatatttaaaaaaagataca

SEQ ID NO: 120394 - DNA, 120 bp, Artificial Sequence
  ENSG00000100934_47 (sequence is synthesized)
ctgtgtgtctgaaaatgtaagttgtgtttattctaaaaagaaaatacaggaccaggaactgtggcttgcacctgtaatcccaggtacttgggaagctgaggcaggaggattgcttaagcc

SEQ ID NO: 120395 - DNA, 120 bp, Artificial Sequence
  ENSG00000100934_48 (sequence is synthesized)
aggcaacatagagagaccctgttcccctcctgttatccccccaaaaaagaaaaaaagacacagcgaacgcacaggacagcaccaataaaaacttggggtggcagcctatagcattccttt

SEQ ID NO: 120396 - DNA, 120 bp, Artificial Sequence
  ENSG00000100934_49 (sequence is synthesized)
caaaattcttatattgattgttttaggtagttcagctcccattggtatacctctattcatggttgctctttctgcatacccttttcccatccatccctaattaaaacttttgtactgtca

SEQ ID NO: 120397 - DNA, 120 bp, Artificial Sequence
  ENSG00000100934_50 (sequence is synthesized)
ttttttttgctttttctttgttttatggtgatttttactttttcaagtagcttgttaaaggagaaatcagaaatgcacatgattgttttatacagaggtataaagctataaaagaatgtg

SEQ ID NO: 120398 - DNA, 120 bp, Artificial Sequence
  ENSG00000100934_51 (sequence is synthesized)
taagaatattttctctactgaaattgtaacttttaaaaaattgaggtaaatggaataatggtctataatttttttagtttctaaagattattttctttggaaaaatctcaagatttttgg

SEQ ID NO: 120399 - DNA, 120 bp, Artificial Sequence
  ENSG00000100934_52 (sequence is synthesized)
tttgtgtgtttgtttgttgttaggtttgcagtgaggtgtacctgcttgccttctgattttaatagattgcttcataaagcagacagaaaggtaaggagataggtggggaaggtatcagtg

SEQ ID NO: 120400 - DNA, 120 bp, Artificial Sequence
  ENSG00000100934_53 (sequence is synthesized)
cttactttttgcattagcttttgagagcaaaacagtaagattattgactagttgcctaaacctggcactttccatcatcttctgtctctagcctagcttcctgaacagggccaggatggc

SEQ ID NO: 120401 - DNA, 120 bp, Artificial Sequence
  ENSG00000100934_54 (sequence is synthesized)
attgtggtggtatactagctttggttgaacaagaaaatgtgaacagcttggaaagtaatatacttttcttaaagccgtttatttactgttaaagtctatgaatatgacatttgtggtaac

SEQ ID NO: 120402 - DNA, 120 bp, Artificial Sequence
  ENSG00000100934_55 (sequence is synthesized)
ttacattttttcattgtcttcattctatcattccaattttctagaaaataaaattttatgtaataggaaaacactgtagtattatgaaaaggttttgtggcttttaggattttgaggata

SEQ ID NO: 120403 - DNA, 120 bp, Artificial Sequence
  ENSG00000100934_56 (sequence is synthesized)
catatacgttagatacatatacatacatacacagttgctttgagaccttcagaaggctaagttaggttccttaacatactctcataaaatacttcttacttctcttttgtaattcttata

SEQ ID NO: 120404 - DNA, 120 bp, Artificial Sequence
  ENSG00000100934_57 (sequence is synthesized)
agagttataataaattaattataagttgttattaatttgttttacatgctctttgaaggcagggactatgctttgtattccctagtgcctagtacggtattataaaataggtagcaaata

SEQ ID NO: 120405 - DNA, 120 bp, Artificial Sequence
  ENSG00000100934_58 (sequence is synthesized)
tcagtaactgttattcagaaatgataattactattagttttactgtatttatatgagagttatttcatattgagaatttgcaaagtacttctgcatgccttatctcatttgatcctcata

SEQ ID NO: 120406 - DNA, 120 bp, Artificial Sequence
  ENSG00000100934_59 (sequence is synthesized)
agaattctagtgttattttcatttaacagataataaaactgagatctaggttacttatggccaagggaacacagtaaatacaggagtgggatttgagtcctggtactccagggccagtgc

SEQ ID NO: 120407 - DNA, 120 bp, Artificial Sequence
  ENSG00000100934_60 (sequence is synthesized)
tcttcactgttaggttaaactgattccttagagagtagaaaaagattttgtatgatactaaatttcaaaagatgttactgtctatgtgcttccattatgagttaaaaatcttactggttc

SEQ ID NO: 120408 - DNA, 120 bp, Artificial Sequence
  ENSG00000100934_61 (sequence is synthesized)
aatgttggatcacttgtctcatagaatcacctgtggtttaagaaagcttaagggtcattattttaagcaaaagaacatacagattttcatggcttttgtttttatcattatttgggattt

SEQ ID NO: 120409 - DNA, 120 bp, Artificial Sequence
  ENSG00000100934_62 (sequence is synthesized)
tgaacttctgaccaagtgtttagtaatttcacaccaaccttgtcataattgttgcacacataatttttatatgctgagttttggactcaacaatgtatttgttattttggatgtatgatt

SEQ ID NO: 120410 - DNA, 120 bp, Artificial Sequence
  ENSG00000100934_63 (sequence is synthesized)
tggagagaagaggtgcatttattatttatttgtaacacttagtgacctatacatttcaaagtttaatcttttaaaaattaagttaataaaattaattttaccaacacatactaaataaaa

SEQ ID NO: 120411 - DNA, 120 bp, Artificial Sequence
  ENSG00000100934_64 (sequence is synthesized)
ttgattttgcatgatataattattcagctgatattgactgaaaccatttttgatggataatgttatttcttctttgcttttaaggcccgtttcctcctttcaaaagtcaacccttcacag

SEQ ID NO: 120412 - DNA, 120 bp, Artificial Sequence
  ENSG00000100938_0 (sequence is synthesized)
aaaggctcagggttgctcccgcgtttcggttcagtgacgtcgtaaattggaatgaggcatccagtttagcaacagcagagatgacgactctgcgattctgagagtccctggcgagcccgg

SEQ ID NO: 120413 - DNA, 120 bp, Artificial Sequence
  ENSG00000100938_1 (sequence is synthesized)
gctagcgaaaagtgggggcagaacgaactacatctcccatcgtgccaggaggcggtcccgcccgtttccccctgggagttgtagtctaaccccctcggatccaacagcaacctcagtgcg

SEQ ID NO: 120414 - DNA, 120 bp, Artificial Sequence
  ENSG00000100938_2 (sequence is synthesized)
tgaactctgttatccagaaggcctcgccctgccgccgccgaagctggaattcgtcggctagtagttctcgccggcaactagaggaacctgttggcgtggcccagaaggcttagcgggatt

SEQ ID NO: 120415 - DNA, 120 bp, Artificial Sequence
  ENSG00000100938_3 (sequence is synthesized)
gcacgaggttagttgctaagcaaggtggtctttggtcaactgccgcctggaccaaggcaacaggaaccctcagattcatcgctaccccgaggctaagcgccatgcctcatattgacaacg

SEQ ID NO: 120416 - DNA, 120 bp, Artificial Sequence
  ENSG00000100938_4 (sequence is synthesized)
atgtgaaactggacttcaaggatgtccttttgaggcccaaacgcagtacccttaagtctcgaagtgaggtggatctcacaagatccttttcatttcggaactcaaagcagacatactctg

SEQ ID NO: 120417 - DNA, 120 bp, Artificial Sequence
  ENSG00000100938_5 (sequence is synthesized)
gggttcccatcattgctgccaatatggatactgtgggcacctttgagatggccaaggttctctgtaagttctctctcttcactgctgtccataagcactatagcctcgttcagtggcaag

SEQ ID NO: 120418 - DNA, 120 bp, Artificial Sequence
  ENSG00000100938_6 (sequence is synthesized)
agtttgctggccagaatcctgactgtcttgagcatctggctgccagctcaggcacaggctcttctgactttgagcagctggaacagatcctggaagctattccccaggtgaagtatatat

SEQ ID NO: 120419 - DNA, 120 bp, Artificial Sequence
  ENSG00000100938_7 (sequence is synthesized)
gcctggatgtggcaaatggctactctgaacactttgttgaatttgtaaaagatgtacggaagcgcttcccccagcacaccatcatggcagggaatgtggtaacaggagagatggtagaag

SEQ ID NO: 120420 - DNA, 120 bp, Artificial Sequence
  ENSG00000100938_8 (sequence is synthesized)
tgtgtgtactactcggaagaaaactggagtggggtatccacagctcagcgcagtgatggagtgtgcagatgctgctcatggcctcaaaggccacatcatttcagatggaggttgcagctg

SEQ ID NO: 120421 - DNA, 120 bp, Artificial Sequence
  ENSG00000100938_9 (sequence is synthesized)
tcctggggatgtggccaaggcttttggggcaggagctgacttcgtgatgctgggtggcatgctggctgggcacagtgagtcaggtggtgagctcatcgagagggatggcaagaagtacaa

SEQ ID NO: 120422 - DNA, 120 bp, Artificial Sequence
  ENSG00000100938_10 (sequence is synthesized)
gctcttctatggaatgagttctgaaatggccatgaagaagtatgctgggggcgtggctgagtacagagcctcagagggaaagacagtggaagttccttttaaaggagatgtggaacatac

SEQ ID NO: 120423 - DNA, 120 bp, Artificial Sequence
  ENSG00000100938_11 (sequence is synthesized)
catccgagacatcctaggagggatccgctctacgtgtacctatgtgggagcagctaagctcaaagagttgagcaggagaactaccttcatccgagtcacccagcaggtgaatccaatctt

SEQ ID NO: 120424 - DNA, 120 bp, Artificial Sequence
  ENSG00000100938_12 (sequence is synthesized)
cagtgaggcgtgctagacctgagcagttctaccctcccaaggcaccagtactctaccatggggcatcccaagtggggtcctcacccatcccagctactgcagctctgtattactttgtca

SEQ ID NO: 120425 - DNA, 120 bp, Artificial Sequence
  ENSG00000100938_13 (sequence is synthesized)
tttcctgttgtctcactcctgagggctcctgcagtaactctgtacttctctatctgcacacacaaaatgcccaaggcactcactggggaggaagcaaggaagcaaacagtctgagaaaat

SEQ ID NO: 120426 - DNA, 120 bp, Artificial Sequence
  ENSG00000100938_14 (sequence is synthesized)
gatgcaagaaaatcaaatgggaatctggggacccaacacaacatcctgaagattattaaaaggaaaagatgctgattggtacataaatcttttacatggccttggtctagaggaggcagg

SEQ ID NO: 120427 - DNA, 120 bp, Artificial Sequence
  ENSG00000100938_15 (sequence is synthesized)
cttttagaatcatgttttgttaatccgcttcactaaattggaccttcacatatctaaaaagctctgaagtgtttgtatatttgaaatacctcaataaagagagagctcattgactgtaaa

SEQ ID NO: 120428 - DNA, 120 bp, Artificial Sequence
  ENSG00000100938_16 (sequence is synthesized)
agttatgaaccctccccgccccccgtcgccaacattccttcgttcccctaaatcagcctcttgccccattgctctttgcaggggtagaagaaggaagtgtagcgggccctcagattcatc

SEQ ID NO: 120429 - DNA, 120 bp, Artificial Sequence
  ENSG00000100938_17 (sequence is synthesized)
ttgcaggggtagaagaaggaagtgtagcggggtaaggaatgcaccgtcagggtctctcacaaccctttcccagctctcctccccaacaaacagtacctgggatggagccctagggtaatc

SEQ ID NO: 120430 - DNA, 120 bp, Artificial Sequence
  ENSG00000100938_18 (sequence is synthesized)
gcagccacgggatgggtcgaggtgacaggcttcagggaccacacttcggcctttgcccgaccttccacaacttaagcgaagagaggccaccagccgtaacagggcgttaaagcccagggg

SEQ ID NO: 120431 - DNA, 120 bp, Artificial Sequence
  ENSG00000100938_19 (sequence is synthesized)
ttctgggatgtgccccaaatgggatgtgtttttcttatatacaagttgttcactttgaaatggaagatgctgctcctgtcagtactattacctgcctctatacttgttgctgagaagttc

SEQ ID NO: 120432 - DNA, 120 bp, Artificial Sequence
  ENSG00000100938_20 (sequence is synthesized)
ataatgttggaaagtcatggtccatgcataccgtaacaatacatgacctcctgtttctggccctaaggatgctgtatttcaattgctctgtctcaggcagggaatgtggtaacaggagag

SEQ ID NO: 120433 - DNA, 120 bp, Artificial Sequence
  ENSG00000100938_21 (sequence is synthesized)
ctatacaagaggatgaatcacctctgagggtctagggtcaggctaagagaggctcaggaagtcattcagattctttcataatatgaattagtgactccgaagtctatggtatcatctggg

SEQ ID NO: 120434 - DNA, 120 bp, Artificial Sequence
  ENSG00000100938_22 (sequence is synthesized)
gcagccagcaggggacatctgagactccaagtgtgggccagggccatctgaccatctcctagattgctgcacagtgcagactcctgagccccagccatacctaaaaataggctctgagga

SEQ ID NO: 120435 - DNA, 120 bp, Artificial Sequence
  ENSG00000100938_23 (sequence is synthesized)
atgggacagcacatctgcatttttcattttgcacagcttcccaggagatcattactcccattaaagttggggatctttgctcttgggacacatgaaatgagtcttatttagctgggcaca

SEQ ID NO: 120436 - DNA, 120 bp, Artificial Sequence
  ENSG00000100938_24 (sequence is synthesized)
tgttggcgtggcccagaaggcttagcgggattgcacgaggttagttgctaagcaaggtggtctttggtcaactgccgcctggaccaaggcaacaggaagtggatctcacaagatcctttt

SEQ ID NO: 120437 - DNA, 120 bp, Artificial Sequence
  ENSG00000100938_25 (sequence is synthesized)
cgccctgccgccgccgaagctggaattcgtcggctagtagttctcgccggcaactagaggaacctgttggcgtggcccagaaggcttagcgggattgcacgagttctctctcttcactgc

SEQ ID NO: 120438 - DNA, 120 bp, Artificial Sequence
  ENSG00000100938_26 (sequence is synthesized)
ggatactgtgggcacctttgagatggccaaggttctctgtaaggtagggctttcctcatgccccatccctattggtgtccagttagcccagctgactgcagaggtgtttgcatccccacc

SEQ ID NO: 120439 - DNA, 120 bp, Artificial Sequence
  ENSG00000100938_27 (sequence is synthesized)
gtacaggtatgtgtggaggcccaggagcttagtaatagtatggaggcagaactcatggctgctgagagggggatggtacagttctcagagaagcatggtgaaccggggctcaatgctagg

SEQ ID NO: 120440 - DNA, 120 bp, Artificial Sequence
  ENSG00000100938_28 (sequence is synthesized)
gtctgtggaaaagtccctgggcttaaggaatccagaaggagaagataataaagtttttcctactttaagagcctcagagggaaagacagtggaagttccttttaaaggagatgtggaaca

SEQ ID NO: 120441 - DNA, 120 bp, Artificial Sequence
  ENSG00000100938_29 (sequence is synthesized)
agagaaacacaggctccatccagcttcttcatggttctttcatgtctgctgcctgtcccactgcaccagcagcttgtcaccttttaagtcagaagcagtgaatgtgctggcagatgaaat

SEQ ID NO: 120442 - DNA, 120 bp, Artificial Sequence
  ENSG00000100938_30 (sequence is synthesized)
ccaacccagatcactcagtactttggtgggaaatctgacaagtactagcttatggtaaaaagccctactagtatttgtagagagaagaaaggttgaactcaaatcccagctcaacctgag

SEQ ID NO: 120443 - DNA, 120 bp, Artificial Sequence
  ENSG00000100938_31 (sequence is synthesized)
ttctttgacttgtttcctccccaacttcaatcatgtcctccctcagatagaataggtctgtttctagaaaagagaccttaataaagttttctcccttttgatgcttctttgtcttctccc

SEQ ID NO: 120444 - DNA, 120 bp, Artificial Sequence
  ENSG00000100941_0 (sequence is synthesized)
agtctcaagcctgccgcagggagaagatggcggtcgccgtgagaactttgcaggaacagctggaaaaggccaaagagagtcttaagaacgtggatgagaacattcgcaagctcaccgggc

SEQ ID NO: 120445 - DNA, 120 bp, Artificial Sequence
  ENSG00000100941_1 (sequence is synthesized)
gggatccgaatgacgtgaggcccatccaagccagattgctggccctttctggtcctggtggaggtagaggacgtggtagtttattactgaggcgtggattctcagatagtggaggaggac

SEQ ID NO: 120446 - DNA, 120 bp, Artificial Sequence
  ENSG00000100941_2 (sequence is synthesized)
ccccagccaaacagagagaccttgaaggggcagtcagtaggctgggcggggagcgtcggaccagaagagaatcacgccaggaaagcgacccggaggatgatgatgttaaaaagccagcat

SEQ ID NO: 120447 - DNA, 120 bp, Artificial Sequence
  ENSG00000100941_3 (sequence is synthesized)
tgcagtcttcagttgtagctacctccaaagagcgcacacgtagagaccttatccaggatcaaaatatggatgaaaagggaaagcaaaggaaccggcgaatatttggcttgttgatgggta

SEQ ID NO: 120448 - DNA, 120 bp, Artificial Sequence
  ENSG00000100941_4 (sequence is synthesized)
cccttcaaaaatttaaacaagaatccactgttgctactgaaaggcaaaagcggcgccaggaaattgaacaaaaacttgaagttcaggcagaagaagagagaaagcaggttgaaaatgaaa

SEQ ID NO: 120449 - DNA, 120 bp, Artificial Sequence
  ENSG00000100941_5 (sequence is synthesized)
ggagagaactgtttgaagagaggcgtgctaaacagacagaactgcggcttttggaacagaaagttgagcttgcgcagctgcaagaagaatggaatgaacataatgccaaaataattaaat

SEQ ID NO: 120450 - DNA, 120 bp, Artificial Sequence
  ENSG00000100941_6 (sequence is synthesized)
atataagaactaagacaaagccccatttgttttatattcctggaagaatgtgtccagctacccaaaaactaatagaagagtcacagagaaaaatgaacgctttatttgaaggtagacgca

SEQ ID NO: 120451 - DNA, 120 bp, Artificial Sequence
  ENSG00000100941_7 (sequence is synthesized)
tcgaatttgcagaacaaataaataaaatggaggctaggcctagaagacaatcaatgaaggaaaaagagcatcaggtggtgcgtaatgaagaacagaaggcggaacaagaagagggtaagg

SEQ ID NO: 120452 - DNA, 120 bp, Artificial Sequence
  ENSG00000100941_8 (sequence is synthesized)
tggctcagcgagaggaagagttggaggagacaggtaatcagcacaatgatgtagaaatagaggaagcaggagaggaagaggaaaaggaaatagcgattgttcatagtgatgcagagaaag

SEQ ID NO: 120453 - DNA, 120 bp, Artificial Sequence
  ENSG00000100941_9 (sequence is synthesized)
aacaggaggaggaagaacaaaaacaggaaatggaggttaagatggaggaggaaactgaggtaagggaaagtgagaagcagcaggatagtcagcctgaagaagttatggatgtgctagaga

SEQ ID NO: 120454 - DNA, 120 bp, Artificial Sequence
  ENSG00000100941_10 (sequence is synthesized)
tggttgagaatgtcaaacatgtaattgctgaccaggaggtaatggaaactaatcgagttgaaagtgtagaaccttcagaaaatgaagctagcaaagaattggaaccagaaatggaatttg

SEQ ID NO: 120455 - DNA, 120 bp, Artificial Sequence
  ENSG00000100941_11 (sequence is synthesized)
aaattgagccagataaagaatgtaaaaccctttctcctgggaaagagaatgtcagtgctttagacatggaaaaggagtctgaggaaaaagaagaaaaagaatctgagccccaacctgagc

SEQ ID NO: 120456 - DNA, 120 bp, Artificial Sequence
  ENSG00000100941_12 (sequence is synthesized)
ctgtggctcaacctcagcctcagtctcagccccagcttcagcttcaatcccagtcccaaccagtactccagtcccagcctccctctcagcctgaggatttgtcattagctgttttacagc

SEQ ID NO: 120457 - DNA, 120 bp, Artificial Sequence
  ENSG00000100941_13 (sequence is synthesized)
caacaccccaagttactcaggagcaagggcatttactacctgagaggaaggattttcctgtagagtctgtaaaactcactgaggtaccagtagagccagtcttgacagtacatccagaga

SEQ ID NO: 120458 - DNA, 120 bp, Artificial Sequence
  ENSG00000100941_14 (sequence is synthesized)
gcaagagtagaagtcgaagcagtagcagtagcagttctagtagcagttcaaccagtagcagcagtggaagtagttccagcagtggaagtagtagcagtcgcagtagttccagtagcagct

SEQ ID NO: 120459 - DNA, 120 bp, Artificial Sequence
  ENSG00000100941_15 (sequence is synthesized)
ccagtacaagtggcagcagcagcagagatagtagcagtagcactagtagtagtagtgagagtagaagtcggagtaggggccggggacataatagagatagaaagcacagaaggagcgtgg

SEQ ID NO: 120460 - DNA, 120 bp, Artificial Sequence
  ENSG00000100941_16 (sequence is synthesized)
atcggaagagaagggatacttcaggactagaaagaagtcacaaatcttcaaaaggtggtagtagtagagatacaaaaggatcaaaggataagaattcccggtccgacagaaagaggtcta

SEQ ID NO: 120461 - DNA, 120 bp, Artificial Sequence
  ENSG00000100941_17 (sequence is synthesized)
tatcagagagtagtcgatcaggcaaaagatcttcaagaagtgaaagagaccgaaaatcagacaggaaagacaaaaggcgttaatggaagaagccaggctttcttagccattctttgcagc

SEQ ID NO: 120462 - DNA, 120 bp, Artificial Sequence
  ENSG00000100941_18 (sequence is synthesized)
agaagatttcttgataaaaaaggattacctttccttgtaaagaggatgctgccttaagaattgcatgttgtaaaaaatctttttggaaaatacagactgtttgtttaccagacattcttg

SEQ ID NO: 120463 - DNA, 120 bp, Artificial Sequence
  ENSG00000100941_19 (sequence is synthesized)
tactttttgcataattttgtaagagttatttatcaaaattatgtgaggttccaaaatatgtaaaaatgataataataaaaaaagattaacatcccttgtcatcttttttaaatatcctat

SEQ ID NO: 120464 - DNA, 120 bp, Artificial Sequence
  ENSG00000100941_20 (sequence is synthesized)
actcttcagtaagaatctgtatattttaataggcaaatctttaagtctgttcccttctaattctgtatcatacattgcttttgtagaaataaatgtgtgtttatttcattatttttggga

SEQ ID NO: 120465 - DNA, 120 bp, Artificial Sequence
  ENSG00000100941_21 (sequence is synthesized)
tgtcctcgttgacacttgtataataaatatcctctttatcattttcagcttttaacactagatactgcacgtgattagaatgtttttgaaggtttcctcgtttttatttgccttggacag

SEQ ID NO: 120466 - DNA, 120 bp, Artificial Sequence
  ENSG00000100941_22 (sequence is synthesized)
tttttagttgtcagagtcagagctttgcagctttgagggggaacagttctctttaaaatcatttgctattttctattctcccttgttattttaatctaagcattttcccccgtttctcat

SEQ ID NO: 120467 - DNA, 120 bp, Artificial Sequence
  ENSG00000100941_23 (sequence is synthesized)
attttaaccatatgttcggtagataactaaacagtatgatctggttggcattttcttcctgatgatgggagcgtcattcttttgtcttcatggttacttgtgtgatataacatacatctg

SEQ ID NO: 120468 - DNA, 120 bp, Artificial Sequence
  ENSG00000100941_24 (sequence is synthesized)
ttaaagaaaatcacttctttctaggggagggaggtagaaaagtatctttcaaacttggtttttgagtttgtgtcttgtcttaactttgtgttggctctaacttaaacatgctgatatgtg

SEQ ID NO: 120469 - DNA, 120 bp, Artificial Sequence
  ENSG00000100941_25 (sequence is synthesized)
ttttcaagaattttgtttaaggaagtattgtatggaagtccacaaaatgaaggaagttcatctaggttttaatatgtaagcaagataacacacaagtgtaccaagtgattattaactttg

SEQ ID NO: 120470 - DNA, 120 bp, Artificial Sequence
  ENSG00000100941_26 (sequence is synthesized)
ttgttttacaaatttgtatgaacttggagtatctgttggccattactatacatgtgcaaataaatgtggcttagacttgtgtgactgcttaagactagtacttgtattaactttctgatg

SEQ ID NO: 120471 - DNA, 120 bp, Artificial Sequence
  ENSG00000100941_27 (sequence is synthesized)
ctttatacaagagagcacttaaattgcatccttctttgagtttaacactgtagctttagccttgactttgaatattcattttgccttcccttgacaagtaaatggttacagtgaaaatgt

SEQ ID NO: 120472 - DNA, 120 bp, Artificial Sequence
  ENSG00000100941_28 (sequence is synthesized)
gaagaagtatttccagttagtttttgtgtgtatataactcacttgtgtaagtggatgtgttaaaagatctctttttaaaaatccttttattggagtaattattaaaacagtaaatgcata

SEQ ID NO: 120473 - DNA, 120 bp, Artificial Sequence
  ENSG00000100941_29 (sequence is synthesized)
aaatcaataacccagtgtttgtcgtctttgttttgtttaatgttgtaatagactagatttctgtataaatatagttatcctgaaaaactggaggttgaagaatatattaagtttaccaat

SEQ ID NO: 120474 - DNA, 120 bp, Artificial Sequence
  ENSG00000100941_30 (sequence is synthesized)
tttgagtgaacttaattcttataaagtaacactataaaagcattttggaatgaatgcccgtttaaggctactttagttggaaagatttttgaaagtttaaccatattctcttgtcaaatg

SEQ ID NO: 120475 - DNA, 120 bp, Artificial Sequence
  ENSG00000100941_31 (sequence is synthesized)
gaaataccatttatcttgtatttcaagtgttttatgttgaacattttaaatttcaggcgtggattctcagatagtggaggaggacccccagccaaacagagagaccttgaaggggcagtc

SEQ ID NO: 120476 - DNA, 120 bp, Artificial Sequence
  ENSG00000100941_32 (sequence is synthesized)
gcagccagcattgcagtcttcagttgtagctacctccaaagagcgcacacgtagagaccttatccaggatcaaaatatggatgaaaagggaaagcaaaggtatttccctgggggaaaaaa

SEQ ID NO: 120477 - DNA, 120 bp, Artificial Sequence
  ENSG00000100941_33 (sequence is synthesized)
tttttatcataattgaactgaaatcatatataccttttgttgtaactatttcaacacgtaagtattaaagcaggctacttaacttttagcaaaagcggcgccaggaaattgaacaaaaac

SEQ ID NO: 120478 - DNA, 120 bp, Artificial Sequence
  ENSG00000100949_0 (sequence is synthesized)
acacgcacgctacagtcgcccgtgcgcactcgtacacaccaggtggctaacaggtacgaggcgtttccggacagcgagcgcagagcccccgcgcacgcgcctccgagccggcctcttccg

SEQ ID NO: 120479 - DNA, 120 bp, Artificial Sequence
  ENSG00000100949_1 (sequence is synthesized)
ccgcaagtccctccccaagcctgcagagtgcgctgcgtttcgatgagccgggacgtggcgccgctctagccagcgcctgggctctgtggcgggcgccgcagctccgcgtcccccgcgcct

SEQ ID NO: 120480 - DNA, 120 bp, Artificial Sequence
  ENSG00000100949_2 (sequence is synthesized)
cctcccagcgcagacttcaagggctaccactggacccttcccctgtcttgaaccctgagccggcaccatgcacggacgcctgaaggtgaagacgtcagaagagcaggcggaggccaaaag

SEQ ID NO: 120481 - DNA, 120 bp, Artificial Sequence
  ENSG00000100949_3 (sequence is synthesized)
gctagagcgagagcagaagctgaagctataccagtcagccacccaggccgtattccagaagcgccaggctggtgagctggatgagtccgtgctggaactgacaagccagattctgggagc

SEQ ID NO: 120482 - DNA, 120 bp, Artificial Sequence
  ENSG00000100949_4 (sequence is synthesized)
caaccctgattttgccaccctctggaactgccgacgagaggtgctccagcagctggagactcagaagtctcctgaagagttggctgctctggtgaaggcagaactgggcttcctggagag

SEQ ID NO: 120483 - DNA, 120 bp, Artificial Sequence
  ENSG00000100949_5 (sequence is synthesized)
ctgcctgcgggtgaaccccaagtcttatggtacctggcaccaccgatgctggctgctaggccgcctgcctgagcccaactggacccgagagctggagctctgtgcccgtttcctggaggt

SEQ ID NO: 120484 - DNA, 120 bp, Artificial Sequence
  ENSG00000100949_6 (sequence is synthesized)
ggatgagcggaactttcactgctgggactatcggcggtttgtggccacacaggcagccgtgccccctgcagaagagctagccttcactgacagcctcatcacccgaaacttctccaacta

SEQ ID NO: 120485 - DNA, 120 bp, Artificial Sequence
  ENSG00000100949_7 (sequence is synthesized)
ctcttcctggcattaccgctcctgtctcttgccccagctgcacccccagccggattctggaccacaggggcgcctccctgaggatgtgctgctcaaagagctggagctggtgcagaatgc

SEQ ID NO: 120486 - DNA, 120 bp, Artificial Sequence
  ENSG00000100949_8 (sequence is synthesized)
gctcctaggccgagctgacccccaggatgcactgcgctgcctgcatgtgagccgggacgaggcctgtctgactgtctccttctctcggcccctcttagtgggctccaggatggagatctt

SEQ ID NO: 120487 - DNA, 120 bp, Artificial Sequence
  ENSG00000100949_9 (sequence is synthesized)
gctgctcatggttgatgattctcccctgattgtggagtggaggaccccagatggcaggaaccggcccagccatgtctggctctgtgacctgcctgctgcctccctcaacgaccagttgcc

SEQ ID NO: 120488 - DNA, 120 bp, Artificial Sequence
  ENSG00000100949_10 (sequence is synthesized)
ccaacatacatttcgcgtcatttggacagcaggcgatgtccagaaagaatgcgtgcttttaaaaggccgccaggagggctggtgccgggactccacgacagacgagcagctattcaggtg

SEQ ID NO: 120489 - DNA, 120 bp, Artificial Sequence
  ENSG00000100949_11 (sequence is synthesized)
tgagctgtcagtggagaagtccacagtgctgcagtctgagctggaatcctgtaaggagctgcaggagctggagcctgagaataaatggtgcctgcttaccatcatcctgctgatgcgggc

SEQ ID NO: 120490 - DNA, 120 bp, Artificial Sequence
  ENSG00000100949_12 (sequence is synthesized)
actggaccccctgctgtatgagaaggagaccctgcagtacttccagaccctcaaggccgtggaccccatgcgggcaacgtatctggatgacctgcgcagcaagttcttgctggagaatag

SEQ ID NO: 120491 - DNA, 120 bp, Artificial Sequence
  ENSG00000100949_13 (sequence is synthesized)
cgtgctcaagatggagtatgccgaggtgcgtgtgctgcacctggctcacaaggatctgacagtgctctgccatctggaacagctgctcttggtcacccatcttgacttgtcacacaatcg

SEQ ID NO: 120492 - DNA, 120 bp, Artificial Sequence
  ENSG00000100949_14 (sequence is synthesized)
cctccgaaccctgccacctgcactggctgccctgcgctgccttgaggtgctgcaggccagtgataatgccatagagtccctggacggcgtcaccaacctaccccggctgcaggagctgct

SEQ ID NO: 120493 - DNA, 120 bp, Artificial Sequence
  ENSG00000100949_15 (sequence is synthesized)
actgtgcaacaaccgcctccagcagcctgcagtgctccagcctcttgcctcctgccccaggctggtcctcctcaacctgcagggtaacccgctgtgccaagcggtgggcatcttggagca

SEQ ID NO: 120494 - DNA, 120 bp, Artificial Sequence
  ENSG00000100949_16 (sequence is synthesized)
actggctgaactgctgccttcagttagcagcgtcctcacctaagaggccctgccccctacccttgccctttaacttattgggactgaataaagaatggagaggccctctcaggctaccaa

SEQ ID NO: 120495 - DNA, 120 bp, Artificial Sequence
  ENSG00000100949_17 (sequence is synthesized)
ctgcagagtgcgctgcgtttcgatgagccgggacgtggcgccgctctagccagcgcctgggctctgtggcgggcgccgcagctccgcgtcccccgcgcctcctcccagcgcaggtgggtc

SEQ ID NO: 120496 - DNA, 120 bp, Artificial Sequence
  ENSG00000100949_18 (sequence is synthesized)
gggggcgggggtgcccgggagccgtgggacgggcgggtagcggcaacctttggggagcagagtggtccccaacgcccaggtgccccggctcgcgctctggcccgggcgaatcgggctata

SEQ ID NO: 120497 - DNA, 120 bp, Artificial Sequence
  ENSG00000100949_19 (sequence is synthesized)
gggctataggaagggccacacggatggaagtcctagtccgggtgctcacctcttgtggaacgtgcaaagcctgtcccaggacctctttacactctgggggtctctgcccaggcacgcttg

SEQ ID NO: 120498 - DNA, 120 bp, Artificial Sequence
  ENSG00000100949_20 (sequence is synthesized)
tctccctcagaagtctgcccatcctacaaggagatgtgcaggaccctccaccccgaacaggtaactgcgtgccttccacctccatcacgcagcctgaccctgtgagcccctctgtgctct

SEQ ID NO: 120499 - DNA, 120 bp, Artificial Sequence
  ENSG00000100949_21 (sequence is synthesized)
cccagccatgtctgggtatcccaggattggtggggcagaagttggggtctggggcagggctgggtgggacagtcaaaaaagtggttaggctggggcatttccttgacccagtactcccag

SEQ ID NO: 120500 - DNA, 120 bp, Artificial Sequence
  ENSG00000100949_22 (sequence is synthesized)
gcagagtgcgctgcgtttcgatgagccgggacgtggcgccgctctagccagcgcctgggctctgtggcgggcgccgcagctccgcgtcccccgcgcctcctcccagcgcagcacggacgc

SEQ ID NO: 120501 - DNA, 120 bp, Artificial Sequence
  ENSG00000100949_23 (sequence is synthesized)
acttctctcctcagacttcaagggctaccactggacccttcccctgtcttgaaccctgagccggcaccatgcgccaggctggtgagctggatgagtccgtgctggaactgacaagccaga

SEQ ID NO: 120502 - DNA, 120 bp, Artificial Sequence
  ENSG00000100949_24 (sequence is synthesized)
cctccgcaggcccgcgccctcacccccagtggcagtgccatggttgccccgtatgaacctagggctccacagtgtggggtttttgcaggtcagcttctgcaaggcaacctgcactcttcc

SEQ ID NO: 120503 - DNA, 120 bp, Artificial Sequence
  ENSG00000100949_25 (sequence is synthesized)
gagaagtccacagtgctgcagtctgagctggaatcctgtaaggagctgcaggagctggagcctgagaataaatgtgaggccccattccgtgagagtctgctcccagagcccgctgaggaa

SEQ ID NO: 120504 - DNA, 120 bp, Artificial Sequence
  ENSG00000100949_26 (sequence is synthesized)
acccctttccagtgtggccctgagaggacagcaggaaggcctcaggaggatgggagcagaggaggttccaagagaaaccctccttttccctgccctctcctcagggtgcctgcttaccat

SEQ ID NO: 120505 - DNA, 120 bp, Artificial Sequence
  ENSG00000100949_27 (sequence is synthesized)
cagcgcctgggctctgtggcgggcgccgcagctccgcgtcccccgcgcctcctcccagcgcaggcacgcttgctgcttccggacacagctgtgggcggagctagtaggggcggggctacg

SEQ ID NO: 120506 - DNA, 120 bp, Artificial Sequence
  ENSG00000100949_28 (sequence is synthesized)
acaaggagaggggctctggactctgggcatcaggcagccagggcaggaggctggggcctcaaggagctgtttcagtctagatactgggaatgttgaccagtgcttcagggctgtgggcct

SEQ ID NO: 120507 - DNA, 120 bp, Artificial Sequence
  ENSG00000100949_29 (sequence is synthesized)
aggactctgcagtgccacccttccagcccccatgcctgaccctgttcctgaacctgtcactcaggtttattgagcacctacttcatgcgtggctccaggggtgcttaagaatcagtccct

SEQ ID NO: 120508 - DNA, 120 bp, Artificial Sequence
  ENSG00000100949_30 (sequence is synthesized)
tcaaaggtttattgagcacctacttcatgcgtggctccaggggtgcttaagaatcagtccctggctgaaggaagcttaagtgtctgatggggaagataaaactgacatacgtagcccctg

SEQ ID NO: 120509 - DNA, 120 bp, Artificial Sequence
  ENSG00000100968_0 (sequence is synthesized)
ctataataacgagggggcttctggagggaggcggcagcgacggaggagggggcttctcagagaaagggagggagggagccacccgggtgaagatacagcagcctcctgaactcccccctc

SEQ ID NO: 120510 - DNA, 120 bp, Artificial Sequence
  ENSG00000100968_1 (sequence is synthesized)
ccacccaggccgggacctgggggctcctgccggatccatgggggcggccagctgcgaggatgaggagctggaatttaagctggtgttcggggaggaaaaggaggcccccccgctgggcgc

SEQ ID NO: 120511 - DNA, 120 bp, Artificial Sequence
  ENSG00000100968_2 (sequence is synthesized)
ggggggattgggggaagaactggactcagaggatgccccgccatgctgccgtctggccttgggagagccccctccctatggcgctgcacctatcggtattccccgacctccaccccctcg

SEQ ID NO: 120512 - DNA, 120 bp, Artificial Sequence
  ENSG00000100968_3 (sequence is synthesized)
gcctggcatgcattcgccaccgccgcgaccagccccctcacctggcacctgggagagccagcccgccaggtcggtgaggctgggaggaccaggagggggtgctgggggtgctgggggtgg

SEQ ID NO: 120513 - DNA, 120 bp, Artificial Sequence
  ENSG00000100968_4 (sequence is synthesized)
ccgtgttctcgagtgtcccagcatccgcatcacctccatctctcccacgccggagccgccagcagcgctggaggacaaccctgatgcctggggggacggctctcctagagattacccccc

SEQ ID NO: 120514 - DNA, 120 bp, Artificial Sequence
  ENSG00000100968_5 (sequence is synthesized)
accagaaggctttgggggctacagagaagcagggggccagggtgggggggccttcttcagcccaagccctggcagcagcagcctgtcctcgtggagcttcttctccgatgcctctgacga

SEQ ID NO: 120515 - DNA, 120 bp, Artificial Sequence
  ENSG00000100968_6 (sequence is synthesized)
ggcagccctgtatgcagcctgcgacgaggtggagtctgagctaaatgaggcggcctcccgctttggcctgggctccccgctgccctcgccccgggcctcccctcggccatggacccccga

SEQ ID NO: 120516 - DNA, 120 bp, Artificial Sequence
  ENSG00000100968_7 (sequence is synthesized)
agatccctggagcctgtatggtccaagccccggaggccgagggccagaggatagctggctactcctcagtgctcctgggcccaccccagcctccccgcggcctgcctctccatgtggcaa

SEQ ID NO: 120517 - DNA, 120 bp, Artificial Sequence
  ENSG00000100968_8 (sequence is synthesized)
gcggcgctattccagctcgggaaccccatcttcagcctccccagctctgtcccgccgtggcagcctgggggaagaggggtctgagccacctccaccacccccattgcctctggcccggga

SEQ ID NO: 120518 - DNA, 120 bp, Artificial Sequence
  ENSG00000100968_9 (sequence is synthesized)
cccgggctcccctggtccctttgactatgtgggggccccaccagctgagagcatccctcagaagacacggcggacttccagcgagcaggcagtggctctgcctcggtctgaggagcctgc

SEQ ID NO: 120519 - DNA, 120 bp, Artificial Sequence
  ENSG00000100968_10 (sequence is synthesized)
ctcatgcaatgggaagctgcccttgggagcagaggagtctgtggctcctccaggaggttcccggaaggaggtggctggcatggactacctggcagtgccctccccactcgcttggtccaa

SEQ ID NO: 120520 - DNA, 120 bp, Artificial Sequence
  ENSG00000100968_11 (sequence is synthesized)
ggcccggattgggggacacagccctatcttcaggacctctgccctacccccactggactggcctctgcccagccaatatgagcagctggagctgaggatcgaggtacagcctagagccca

SEQ ID NO: 120521 - DNA, 120 bp, Artificial Sequence
  ENSG00000100968_12 (sequence is synthesized)
ccaccgggcccactatgagacagaaggcagccgtggagctgtcaaagctgcccctggcggtcaccccgtagtcaagctcctaggctacagtgagaagccactgaccctacagatgttcat

SEQ ID NO: 120522 - DNA, 120 bp, Artificial Sequence
  ENSG00000100968_13 (sequence is synthesized)
cggcactgcagatgaaaggaacctgcggcctcatgccttctatcaggtgcaccgtatcacaggcaagatggtggccacggccagctatgaagccgtagtcagtggcaccaaggtgttgga

SEQ ID NO: 120523 - DNA, 120 bp, Artificial Sequence
  ENSG00000100968_14 (sequence is synthesized)
gatgactctgctgcctgagaacaacatggcggccaacattgactgcgcgggaatcctgaagcttcggaattcagacattgagcttcggaagggtgagacggacatcgggcgcaaaaacac

SEQ ID NO: 120524 - DNA, 120 bp, Artificial Sequence
  ENSG00000100968_15 (sequence is synthesized)
acgtgtacggctggtgttccgggtacacgtgccccagggcggcgggaaggtcgtctcagtacaggcagcatcggtgcccatcgagtgctcccagcgctcagcccaggagctgccccaggt

SEQ ID NO: 120525 - DNA, 120 bp, Artificial Sequence
  ENSG00000100968_16 (sequence is synthesized)
ggaggcctacagccccagtgcctgctctgtgagaggaggcgaggaactggtactgactggctccaacttcctgccagactccaaggtggtgttcattgagaggggtcctgatgggaagct

SEQ ID NO: 120526 - DNA, 120 bp, Artificial Sequence
  ENSG00000100968_17 (sequence is synthesized)
gcaatgggaggaggaggccacagtgaaccgactgcagagcaacgaggtgacgctgaccctgactgtccccgagtacagcaacaagagggtttcccggccagtccaggtctacttttatgt

SEQ ID NO: 120527 - DNA, 120 bp, Artificial Sequence
  ENSG00000100968_18 (sequence is synthesized)
ctccaatgggcggaggaaacgcagtcctacccagagtttcaggtttctgcctgtgatctgcaaagaggagcccctaccggactcatctctgcggggtttcccttcagcatcggcaacccc

SEQ ID NO: 120528 - DNA, 120 bp, Artificial Sequence
  ENSG00000100968_19 (sequence is synthesized)
tacctatcagaaggcttcggctatggcatgccccctctgtacccccagacggggcccccaccatcctacagaccgggcctgcggatgttccctgagactaggggtaccacaggttgtgcc

SEQ ID NO: 120529 - DNA, 120 bp, Artificial Sequence
  ENSG00000100968_20 (sequence is synthesized)
caaccacctgcagtttccttccttccccgccccttccctagtgacccgtatggagggcggggctcctctttctccctggggctgccattctctccgccagccccctttcggccgcctcct

SEQ ID NO: 120530 - DNA, 120 bp, Artificial Sequence
  ENSG00000100968_21 (sequence is synthesized)
cttcctgcatccccaccgcttgaaggccccttcccttcccagagtgatgtgcatcccctacctgctgagggatacaataaggtagggccaggctatggccctggggagggggctccggag

SEQ ID NO: 120531 - DNA, 120 bp, Artificial Sequence
  ENSG00000100968_22 (sequence is synthesized)
caggagaaatccaggggtggctacagcagcggcttccgagacagtgtccctatccagggtatcacgctggaggaagtgagtgagatcattggccgagacctgagtggcttccctgcacct

SEQ ID NO: 120532 - DNA, 120 bp, Artificial Sequence
  ENSG00000100968_23 (sequence is synthesized)
cctggagaagagcctcctgcctgaaccacgtgaactgtcatcacctggcaaccccagccccagcctcagccctgccccctttccctccttcctggagtggtggctacagaagcttggggc

SEQ ID NO: 120533 - DNA, 120 bp, Artificial Sequence
  ENSG00000100968_24 (sequence is synthesized)
caaccctggctcctctttccccagcttctgtctgtctcactgtcttccctcccctcccccagctgaggtgtggccctcaggcctggtgctgccttggagggctgggggaaggagtgtgtg

SEQ ID NO: 120534 - DNA, 120 bp, Artificial Sequence
  ENSG00000100968_25 (sequence is synthesized)
gaggagggaggagggtgaagactgaggctaggtgccagaatggactggagtgaaggcgtgtctagagtgtgggctggctgttgtgctggaaagctggggacaggttgatggtaataaact

SEQ ID NO: 120535 - DNA, 120 bp, Artificial Sequence
  ENSG00000100968_26 (sequence is synthesized)
gctcaatgaccagtgcttcaggctccagagctctttggagagatgggttggggcagcttactccagccctggcccaaggaggcccagaagttggaaagagatggaatgtggctgggaaca

SEQ ID NO: 120536 - DNA, 120 bp, Artificial Sequence
  ENSG00000100968_27 (sequence is synthesized)
ttgcatcccaaagagcttctcagtggaggaggctggggaaggcatgagggggctcagaggctccttgactgggaccaggattgggggccagggcttgagtaggcctctccactctcctcc

SEQ ID NO: 120537 - DNA, 120 bp, Artificial Sequence
  ENSG00000100968_28 (sequence is synthesized)
ttgggggtccagattccttaggagctttgggatgaggcccaggaggctgcatttttccaggtccttagtcttgccaccacacagatgattctgattcatagccaagatgaggacacactg

SEQ ID NO: 120538 - DNA, 120 bp, Artificial Sequence
  ENSG00000100968_29 (sequence is synthesized)
atgtagctgatctctcatttacagaggaggattctaaagttcagagagggaaaggggcttgcctgaggtcacgtagataatcagcagcacattgaacgctgcactcctgggctcctgtcc

SEQ ID NO: 120539 - DNA, 120 bp, Artificial Sequence
  ENSG00000100968_30 (sequence is synthesized)
ccagcccccattcagacacgctgactcaggaggtccaggcctctaaggcttctctccctggagtgagggtggaggtgagggagagctggcacaagccctccctctggatcctccactcct

SEQ ID NO: 120540 - DNA, 120 bp, Artificial Sequence
  ENSG00000100968_31 (sequence is synthesized)
ggggattatgaagatattctggaaagatttgtgcttcagaggtagactgcagaaagcaaacagtctacccagcagctctgaatgtcacctgccctggggcttacagcactatatgagttc

SEQ ID NO: 120541 - DNA, 120 bp, Artificial Sequence
  ENSG00000100968_32 (sequence is synthesized)
ctggcctatcctgcaaatatgcccatgctggccttctaaatagctggtacatccatcaccactgacgggcctggcctggaaacctggtttgtcccctgtcttgatggcctacgagaggcc

SEQ ID NO: 120542 - DNA, 120 bp, Artificial Sequence
  ENSG00000100968_33 (sequence is synthesized)
aagttccactgggctgggaaaagtcactttgtctgtcttgttcacctggagcctgacacaccgtaggtactgagtacaaatagcttgatttggctaggcttggctgcagggggacgtgcc

SEQ ID NO: 120543 - DNA, 120 bp, Artificial Sequence
  ENSG00000100968_34 (sequence is synthesized)
taaaagacattccgggcatttgcacttgggaaacttgcctcaccttcaggcttgtggggcctctctatgcccaatgagtccaggcagtcctagcaagtactcaggagagcaggggtgggt

SEQ ID NO: 120544 - DNA, 120 bp, Artificial Sequence
  ENSG00000100968_35 (sequence is synthesized)
gtgacagaggctggctctggattgggggacaacagaaccagagtaactcctcgcctgttgctgctttgcaatgaatttcctttacctttctggaacacaagctgctgtgaaccaaactga

SEQ ID NO: 120545 - DNA, 120 bp, Artificial Sequence
  ENSG00000100968_36 (sequence is synthesized)
tatcaagtgattagctcaccgggccttggttgcttttcaaagatccccttcagccccctgccagagtcactgccccataatcaccatgtcagaagggaccctagggcattcgtgtcctat

SEQ ID NO: 120546 - DNA, 120 bp, Artificial Sequence
  ENSG00000100968_37 (sequence is synthesized)
ttatcaatcttcagcaccacctctaagatctctgagagagggtggatcagcctctgtgtaaacaaaaagctgttaggacttgttgcctctcaaggtggactattctgttttctgccagga

SEQ ID NO: 120547 - DNA, 120 bp, Artificial Sequence
  ENSG00000100968_38 (sequence is synthesized)
cactgccattcatgcattgtcagatatttattaaacagcagcaaagtgccagccaatttgtcctggaggaattcatagcctcatggggcaaaagtaaataaacagcttattacaattcaa

SEQ ID NO: 120548 - DNA, 120 bp, Artificial Sequence
  ENSG00000100968_39 (sequence is synthesized)
gtaaacgtctgacctggggccgtcgcttaaccgtttagttgctgggatggggcggcgttgggggtgcggccctgaaccggagggatttagagactggagacgcggcctctaagagaggtt

SEQ ID NO: 120549 - DNA, 120 bp, Artificial Sequence
  ENSG00000100968_40 (sequence is synthesized)
gaaactgtgtgtgtgtgggagaaaatgataaccaccctcccatctctcctacccgccagcctcgccagtatctcccaccgagtcacgaatctcccatctaactccctctcacacaaccca

SEQ ID NO: 120550 - DNA, 120 bp, Artificial Sequence
  ENSG00000100968_41 (sequence is synthesized)
agtgtccctatccagggtatcacgctggaggaaggtgggtgtgggactgggggctgtgagtgtgagtgtgtgcaagagattgctctgcatgtttgctgagggctggagctgggcttttca

SEQ ID NO: 120551 - DNA, 120 bp, Artificial Sequence
  ENSG00000100968_42 (sequence is synthesized)
gagatcgggcatccctggtctctcagggccagttggaggttcccaggaggcatgttcttgatgcctgtggctgcctgaatccaattaactgaattctgaagagtgcatggggtaactgtc

SEQ ID NO: 120552 - DNA, 120 bp, Artificial Sequence
  ENSG00000100968_43 (sequence is synthesized)
tcagcctttctcctgtctctgcctctgtcctctgctccaaatcataaaatctcagagctagaagcactttcaagatcattccatccagcgcattcaatttgcaagtttaggcgttgagtt

SEQ ID NO: 120553 - DNA, 120 bp, Artificial Sequence
  ENSG00000100968_44 (sequence is synthesized)
ccagagagggatggtagcttgctgaggtcccagtcaagcacacttgccattgcctcagctttcccctaaacacggtgtctgtggtcagggttggtgaggaggagctttcctgttttgcct

SEQ ID NO: 120554 - DNA, 120 bp, Artificial Sequence
  ENSG00000100968_45 (sequence is synthesized)
ctccttcttcccattggctacacccatctctggccctgctgataccgattcccctgacatttcaggctaagccagcaggaaagggctaggacgggtgcctgggagcccacatggagggag

SEQ ID NO: 120555 - DNA, 120 bp, Artificial Sequence
  ENSG00000100968_46 (sequence is synthesized)
ttgggcaagatttgattcggagcaggtgtcaagacgtgttggggaaactgaggcccagtggaatagaagccagtagaggaggaatctagaggcctcctagattaagacctgcctggaatg

SEQ ID NO: 120556 - DNA, 120 bp, Artificial Sequence
  ENSG00000100968_47 (sequence is synthesized)
atgtgtgagtcgcccccagtccagcccagtgcctcaagaaacacgcctccaggcccagccccagctccagcccctctggacccacctctctcaccttaagacccactggatcgggtaccc

SEQ ID NO: 120557 - DNA, 120 bp, Artificial Sequence
  ENSG00000100968_48 (sequence is synthesized)
ttccagactacagttctagggaggaggctgccaacttcccgtggaggctaattcacggcccctctgggtggctgggacaagggcagcggcaaagcctggcctggatctacgcccatcaag

SEQ ID NO: 120558 - DNA, 120 bp, Artificial Sequence
  ENSG00000100968_49 (sequence is synthesized)
ggctgtgggcctagggacagttctcaaagcctctttggctcggactgctcccagaggcatccaggctggctaagcgttcttcatctttgggggtcctggaggaatggctgatggaggcgc

SEQ ID NO: 120559 - DNA, 120 bp, Artificial Sequence
  ENSG00000100968_50 (sequence is synthesized)
gaagagaggacagagggagggagggtgggggaggacgaggggcgcgtggttttcccatctcatccctggaggaggggctggagcatccccggcagccaatcagggacaggctgggggggg

SEQ ID NO: 120560 - DNA, 120 bp, Artificial Sequence
  ENSG00000100968_51 (sequence is synthesized)
tcggtcctaggatccaggggccagtgggcaaaggcctggcatgcctgcttcaatctcctccatcttcccaggtccaactctgcttttgtcttgtggctcagaaggtctctttgctgaggg

SEQ ID NO: 120561 - DNA, 120 bp, Artificial Sequence
  ENSG00000100968_52 (sequence is synthesized)
ctgtttaaccctctctctgctctgggagcggccccttacatggtgtatgtgactccatggatattactggtttatttgtgtgtctactgctgaggagggctccctcagagccctgtggca

SEQ ID NO: 120562 - DNA, 120 bp, Artificial Sequence
  ENSG00000100968_53 (sequence is synthesized)
gtgagcaaagaggccctgggccatgtctctgtctcttgcaactcttttgtctgtgtgtgtgtgtctgtctgcccattccctctgcagcgtcctgtgccctgtctgtcctgggtagctcta

SEQ ID NO: 120563 - DNA, 120 bp, Artificial Sequence
  ENSG00000100968_54 (sequence is synthesized)
tagaggactcagcttctttctattctagtttgcccctgccacagactctgtctctggggtggcccagagtgacactggaccctatctattcctggggtgccctgtgcccttgtttgggaa

SEQ ID NO: 120564 - DNA, 120 bp, Artificial Sequence
  ENSG00000100968_55 (sequence is synthesized)
tgagtacctgctggggaggggagggcaggcagggagagcttgggagtggcaggtgaaacatctctggcattgtcactaaactggccagtggagcctcagtttttttatttgtaaaatggg

SEQ ID NO: 120565 - DNA, 120 bp, Artificial Sequence
  ENSG00000100968_56 (sequence is synthesized)
acagacagactaccctttctattatactgtctgctttccatgtgggatgggtatgacagcaatctaaaatgttgaggatgctgaacaaatggaagcaatgcacattctgtctaataaaga

SEQ ID NO: 120566 - DNA, 120 bp, Artificial Sequence
  ENSG00000100968_57 (sequence is synthesized)
cctccgcccctagatggcgaggagagagggaggagccacctcccctcgtcaccacagccctgacgcccccctcccctctggccacggttgcgatggcaactggggctcctgccagcgccg

SEQ ID NO: 120567 - DNA, 120 bp, Artificial Sequence
  ENSG00000100968_58 (sequence is synthesized)
cagagctgggaagaagggagttttaggcttgttgtcatctttcacacctcaaggggctctgtcccctacttccccttgcttctggacttttggatttcttcatttctttgtccttttttt

SEQ ID NO: 120568 - DNA, 120 bp, Artificial Sequence
  ENSG00000100968_59 (sequence is synthesized)
tttttcccttcttttcacaagtgttaatgtacttctttatttcttctgtgctttcctttctctcagacccataccccctcctccctcacagatccagtacgggcctgactggggtctgag

SEQ ID NO: 120569 - DNA, 120 bp, Artificial Sequence
  ENSG00000100968_60 (sequence is synthesized)
gggacaccagcctcatgtctactctggaaaatggtggcccgccagatatgggggagggtttaggctgaggacaaaagtcactgggagttaagttttctctgtattgagttgggccagtct

SEQ ID NO: 120570 - DNA, 120 bp, Artificial Sequence
  ENSG00000100968_61 (sequence is synthesized)
ctttggaggctcttctgcctttgcccagcccactttgggctttattccaagaaaaacactgtgaactccaggccatgttttctccacaacgggtgcccagttccccaagggattcccttg

SEQ ID NO: 120571 - DNA, 120 bp, Artificial Sequence
  ENSG00000100968_62 (sequence is synthesized)
caggatatcctttatctttcaccattcccatcccatggtagactgaaaatctagggatgaataaaggatgagacggtggggatttcaatgaggtggccgctctctccctctgccagctcc

SEQ ID NO: 120572 - DNA, 120 bp, Artificial Sequence
  ENSG00000100968_63 (sequence is synthesized)
cgcttggtccaaggcccggattgggggacacagccctatcttcagtgtcttgctctgtcaccaagactggagtgcagtggtgtgatctcactcagcctcaacctcctgggctcaagcaat

SEQ ID NO: 120573 - DNA, 120 bp, Artificial Sequence
  ENSG00000100979_0 (sequence is synthesized)
gccagaccccgtcgcccggatcccctgagctgcccgccatcccacgtgaccgcgccgccccccagctccaccgctgagcccgctcgccatggccctcttcggggccctcttcctagcgct

SEQ ID NO: 120574 - DNA, 120 bp, Artificial Sequence
  ENSG00000100979_1 (sequence is synthesized)
gctggcaggcgcacatgcagagttcccaggctgcaagatccgcgtcacctccaaggcgctggagctggtgaagcaggaggggctgcgctttctggagcaagagctggagactatcaccat

SEQ ID NO: 120575 - DNA, 120 bp, Artificial Sequence
  ENSG00000100979_2 (sequence is synthesized)
tccggacctgcggggcaaagaaggccacttctactacaacatctctgaggtgaaggtcacagagctgcaactgacatcttccgagctcgatttccagccacagcaggagctgatgcttca

SEQ ID NO: 120576 - DNA, 120 bp, Artificial Sequence
  ENSG00000100979_3 (sequence is synthesized)
aatcaccaatgcctccttggggctgcgcttccggagacagctgctctactggttcttctatgatgggggctacatcaacgcctcagctgagggtgtgtccatccgcactggtctggagct

SEQ ID NO: 120577 - DNA, 120 bp, Artificial Sequence
  ENSG00000100979_4 (sequence is synthesized)
ctcccgggatcccgctggacggatgaaagtgtccaatgtctcctgccaggcctctgtctccagaatgcacgcggccttcgggggaaccttcaagaaggtgtatgattttctctccacgtt

SEQ ID NO: 120578 - DNA, 120 bp, Artificial Sequence
  ENSG00000100979_5 (sequence is synthesized)
catcacctcagggatgcgcttcctcctcaaccagcagatctgccctgtcctctaccacgcagggacggtcctgctcaactccctcctggacaccgtgcctgtgcgcagttctgtggacga

SEQ ID NO: 120579 - DNA, 120 bp, Artificial Sequence
  ENSG00000100979_6 (sequence is synthesized)
gcttgttggcattgactattccctcatgaaggatcctgtggcttccaccagcaacctggacatggacttccggggggccttcttccccctgactgagaggaactggagcctccccaaccg

SEQ ID NO: 120580 - DNA, 120 bp, Artificial Sequence
  ENSG00000100979_7 (sequence is synthesized)
tccgggcgggggccctgcagctgttgctggtgggggacaaggtgccccacgacctggacatgctgctgagggccacctactttgggagcattgtcctgctgagcccagcagtgattgact

SEQ ID NO: 120581 - DNA, 120 bp, Artificial Sequence
  ENSG00000100979_8 (sequence is synthesized)
ccccattgaagctggagctgcgggtcctggccccaccgcgctgcaccatcaagccctctggcaccaccatctctgtcactgctagcgtcaccattgccctggtcccaccagaccagcctg

SEQ ID NO: 120582 - DNA, 120 bp, Artificial Sequence
  ENSG00000100979_9 (sequence is synthesized)
aggtccagctgtccagcatgactatggacgcccgtctcagcgccaagatggctctccgggggaaggccctgcgcacgcagctggacctgcgcaggttccgaatctattccaaccattctg

SEQ ID NO: 120583 - DNA, 120 bp, Artificial Sequence
  ENSG00000100979_10 (sequence is synthesized)
cactggagtcgctggctctgatcccattacaggcccctctgaagaccatgctgcagattggggtgatgcccatgctcaatgagcggacctggcgtggggtgcagatcccactacctgagg

SEQ ID NO: 120584 - DNA, 120 bp, Artificial Sequence
  ENSG00000100979_11 (sequence is synthesized)
gcatcaactttgtgcatgaggtggtgacgaaccatgcgggattcctcaccatcggggctgatctccactttgccaaagggctgcgagaggtgattgagaagaaccggcctgctgatgtca

SEQ ID NO: 120585 - DNA, 120 bp, Artificial Sequence
  ENSG00000100979_12 (sequence is synthesized)
gggcgtccactgcccccacaccgtccacagcagctgtctgagccctcaatccccaagctggcagctgtcattcaggaccccaacccctctcagcccctcttttcccacattcatagcctg

SEQ ID NO: 120586 - DNA, 120 bp, Artificial Sequence
  ENSG00000100979_13 (sequence is synthesized)
tagtgccccctctaacccccagtgccacagagaagacgggatttgaagctgtacccaatttaattccataatcaatctatcaattacagtccgtccaccacctccctgtgggctgtcctg

SEQ ID NO: 120587 - DNA, 120 bp, Artificial Sequence
  ENSG00000100979_14 (sequence is synthesized)
agctctgttgggttcctgggatggaatcagtgcatcataaagggcattctttaagcagagaaggggccaggccaccccattcaggaactgctgcgggaataaagtgctaacttgccccca

SEQ ID NO: 120588 - DNA, 120 bp, Artificial Sequence
  ENSG00000100979_15 (sequence is synthesized)
agtccctcgccgagccgcgtggtgcactgaagccggcgtggggaggagagccgatgaaggagaacgctaacatgggggctccaggcagaatctctaatgggagagatttaggacctgagg

SEQ ID NO: 120589 - DNA, 120 bp, Artificial Sequence
  ENSG00000100979_16 (sequence is synthesized)
gagccgggagacccgggagcccacggtctggtcggccacctcctctcctccccgggcgcgaggcctaggagaccgcaagccaccctccaagaatgcgcgtgcagtcgttgccgtggcaac

SEQ ID NO: 120590 - DNA, 120 bp, Artificial Sequence
  ENSG00000100979_17 (sequence is synthesized)
gtgcaagcctgcatgggcccaccgctaaaggaaaggggaggttgttgggggtgtgggggctggtcccctggaggtccaaactcatcacgcggcggtagcacgagggaactgggaacgtcc

SEQ ID NO: 120591 - DNA, 120 bp, Artificial Sequence
  ENSG00000100979_18 (sequence is synthesized)
cctcccccgtgtcccaaatcctctgggagccagaacgcaagtcgcatcgcctctctgagcctcagtttccacatctgccatatggaggcaagattattggttccaagttccccgaagagt

SEQ ID NO: 120592 - DNA, 120 bp, Artificial Sequence
  ENSG00000100979_19 (sequence is synthesized)
tatctggagggtaacgatccaggctagttcccacttatggttggacgtccaaggaatgggtttaagcggctcagataactcctgcgaccccaccccacccccaggcccgctcgccatggc

SEQ ID NO: 120593 - DNA, 120 bp, Artificial Sequence
  ENSG00000100982_0 (sequence is synthesized)
gcggagtcccggcccgggacacaagatggcggcagcggcgctggggagggcgaggcggaggcggcaaaacgggcggtcgagcagaacgtgtagccgcgtcccctccagtccgctccgggc

SEQ ID NO: 120594 - DNA, 120 bp, Artificial Sequence
  ENSG00000100982_1 (sequence is synthesized)
agctgctgatgcaaggaatcccctgggctcccgtccactccactgctgaccagcccattcgcctgtgctgagtcttcctgcaggcctttccttgcctctgtgggaccctgtgggggtcca

SEQ ID NO: 120595 - DNA, 120 bp, Artificial Sequence
  ENSG00000100982_2 (sequence is synthesized)
tccggctggagaagaaaagcctctcatgctaacgttgcagaccccagagggtcctgtgtgggtgtggagatggccaatgagaatcacggcagcccccgggaggaagcgtccctgctgagt

SEQ ID NO: 120596 - DNA, 120 bp, Artificial Sequence
  ENSG00000100982_3 (sequence is synthesized)
cactccccaggtacctccaatcagagccagccctgttctccaaagccaatccgcctggttcaggacctcccagaggagctggtgcatgcaggctgggagaagtgctggagccggagggag

SEQ ID NO: 120597 - DNA, 120 bp, Artificial Sequence
  ENSG00000100982_4 (sequence is synthesized)
aatcgtccctactacttcaaccgattcaccaaccagtccctgtgggagatgcccgtgctggggcagcacgatgtgatttcggaccctttggggctgaatgcgaccccactgccccaagac

SEQ ID NO: 120598 - DNA, 120 bp, Artificial Sequence
  ENSG00000100982_5 (sequence is synthesized)
tcaagcttggtggaaactcccccggctgagaacaagcccagaaagcggcagctctcggaagagcagccaagcggcaatggtgtgaagaagcccaagattgaaatcccagtgacacccaca

SEQ ID NO: 120599 - DNA, 120 bp, Artificial Sequence
  ENSG00000100982_6 (sequence is synthesized)
ggccagtcggtgcccagctcccccagtatcccaggaaccccaacgctgaagatgtggggtacgtcccctgaagataaacagcaggcagctctcctacgacccactgaggtctactgggac

SEQ ID NO: 120600 - DNA, 120 bp, Artificial Sequence
  ENSG00000100982_7 (sequence is synthesized)
ctggacatccagaccaatgctgtcatcaagcaccgggggccttcagaggtgctgcccccgcatcccgaagtggaactgctccgctctcagctcatcctgaagcttcggcagcactatcgg

SEQ ID NO: 120601 - DNA, 120 bp, Artificial Sequence
  ENSG00000100982_8 (sequence is synthesized)
gagctgtgccagcagcgagagggcattgagcctccacgggagtctttcaaccgctggatgctggagcgcaaggtggtagacaaaggatctgaccccctgttgcccagcaactgtgaacca

SEQ ID NO: 120602 - DNA, 120 bp, Artificial Sequence
  ENSG00000100982_9 (sequence is synthesized)
gtcgtgtcaccttccatgtttcgtgaaatcatgaacgacattcctatcaggttatcccgaatcaagttccgggaggaagccaagcgcctgctctttaaatatgcggaggccgccaggcgg

SEQ ID NO: 120603 - DNA, 120 bp, Artificial Sequence
  ENSG00000100982_10 (sequence is synthesized)
ctcatcgagtccaggagtgcatcccctgacagtaggaaggtggtcaaatggaatgtggaagacacctttagctggcttcggaaggaccactcagcctccaaggaggactacatggatcgc

SEQ ID NO: 120604 - DNA, 120 bp, Artificial Sequence
  ENSG00000100982_11 (sequence is synthesized)
aggactccgtggaaggcatctgcagtaagatctaccacatctccctggagtacgtcaaacggatccgagagaagcaccttgccatcctcaaggaaaacaacatctcagaggaggtggagg

SEQ ID NO: 120605 - DNA, 120 bp, Artificial Sequence
  ENSG00000100982_12 (sequence is synthesized)
cccctgaggtggagccccgcctagtgtactgctacccagtccggctggctgtgtctgcaccgcccatgcccagcgtggagatgcacatggagaacaacgtggtctgcatccggtataagg

SEQ ID NO: 120606 - DNA, 120 bp, Artificial Sequence
  ENSG00000100982_13 (sequence is synthesized)
gagagatggtcaaggtcagccgcaactacttcagcaagctgtggctcctttaccgctacagctgcattgatgactctgcctttgagaggttcctgccccgggtctggtgtcttctccgac

SEQ ID NO: 120607 - DNA, 120 bp, Artificial Sequence
  ENSG00000100982_14 (sequence is synthesized)
ggtaccagatgatgttcggcgtgggcctctacgaggggactggcctgcagggatcgctgcctgtgcatgtctttgaggccctccaccgactctttggcgtcagcttcgagtgcttcgcct

SEQ ID NO: 120608 - DNA, 120 bp, Artificial Sequence
  ENSG00000100982_15 (sequence is synthesized)
cacccctcaactgctacttccgccagtactgttctgccttccccgacacagacggctactttggctcccgcgggccctgcctagactttgctccactgagtggttcatttgaggccaacc

SEQ ID NO: 120609 - DNA, 120 bp, Artificial Sequence
  ENSG00000100982_16 (sequence is synthesized)
ctcccttctgcgaggagctcatggatgccatggtctctcactttgagagactgcttgagagctcaccggagcccctgtccttcatcgtgttcatccctgagtggcgggaacccccaacac

SEQ ID NO: 120610 - DNA, 120 bp, Artificial Sequence
  ENSG00000100982_17 (sequence is synthesized)
cagcgctcacccgcatggagcagagccgcttcaaacgccaccagttgatcctgcctgcctttgagcatgagtaccgcagtggctcccagcacatctgcaagaaggaggaaatgcactaca

SEQ ID NO: 120611 - DNA, 120 bp, Artificial Sequence
  ENSG00000100982_18 (sequence is synthesized)
aggccgtccacaacacggctgtgctcttcctacagaacgaccctggctttgccaagtgggcgccgacgcctgaacggctgcaggagctgagtgctgcctaccggcagtcaggccgcagcc

SEQ ID NO: 120612 - DNA, 120 bp, Artificial Sequence
  ENSG00000100982_19 (sequence is synthesized)
acagctctggttcttcctcatcgtcctcctcggaggccaaggaccgggactcgggccgtgagcagggtcctagccgcgagcctcaccccacttaacatatcctgcggggaggaggagccc

SEQ ID NO: 120613 - DNA, 120 bp, Artificial Sequence
  ENSG00000100982_20 (sequence is synthesized)
caggggtgctagtctggactgctgggactcgggcccctggggcctcagagggaccccggctgccactgacatatgaagattatggttctgccagggctcccctccctgcctgtccccaag

SEQ ID NO: 120614 - DNA, 120 bp, Artificial Sequence
  ENSG00000100982_21 (sequence is synthesized)
tcctcacctcaaactccctccaagtcccatgtatataggtcctgatgccttcccaaccccgcccctcaccctgttgccaccttgtttcatttgtaaaaggaaatacagaaacccccccaa

SEQ ID NO: 120615 - DNA, 120 bp, Artificial Sequence
  ENSG00000100982_22 (sequence is synthesized)
cttgaaacctgtgtgctcagcccccaaggcatcaggaattcttcctgcccagagaatcaaggcagcttcatttttttcgtaccttggtcagtggttctcaacctttttgttatcaaggca

SEQ ID NO: 120616 - DNA, 120 bp, Artificial Sequence
  ENSG00000100982_23 (sequence is synthesized)
ctttttgttgtacatatgtcctgttgccccctgcatttttatctgccaaactgtactgatggagtaaccattgacttttcccttcctaaattaaggaagacgtctatgatggagtgtaca

SEQ ID NO: 120617 - DNA, 120 bp, Artificial Sequence
  ENSG00000100982_24 (sequence is synthesized)
ataaaatcagtgtcccaatgattcgtatgatgtcatcaacaaccaatcagagcttctgatcagcatgagataatcagtgtgaccacaatgagttgataaaatttcagcatgaaaagataa

SEQ ID NO: 120618 - DNA, 120 bp, Artificial Sequence
  ENSG00000100983_0 (sequence is synthesized)
gctctatgagctatgcatacccgtagctccccgccgaccccgatggtcccctcccctccttcccaaggtccatccgccagggtgcagccgacgcactcctaatgctaaggccgccctctc

SEQ ID NO: 120619 - DNA, 120 bp, Artificial Sequence
  ENSG00000100983_1 (sequence is synthesized)
atcgaccgccccttcctggcctcgactcagcgccaaaggtgttgggatggccaccaactgggggagcctcttgcaggataaacagcagctagaggagctggcacggcaggccgtggaccg

SEQ ID NO: 120620 - DNA, 120 bp, Artificial Sequence
  ENSG00000100983_2 (sequence is synthesized)
ggccctggctgagggagtattgctgaggacctcacaggagcccacttcctcggaggtggtgagctatgccccattcacgctcttcccctcactggtccccagtgccctgctggagcaagc

SEQ ID NO: 120621 - DNA, 120 bp, Artificial Sequence
  ENSG00000100983_3 (sequence is synthesized)
ctatgctgtgcagatggacttcaacctgctagtggatgctgtcagccagaacgctgccttcctggagcaaactctttccagcaccatcaaacaggatgactttaccgctcgtctctttga

SEQ ID NO: 120622 - DNA, 120 bp, Artificial Sequence
  ENSG00000100983_4 (sequence is synthesized)
catccacaagcaagtcctaaaagagggcattgcccagactgtgttcctgggcctgaatcgctcagactacatgttccagcgcagcgcagatggctccccagccctgaaacagatcgaaat

SEQ ID NO: 120623 - DNA, 120 bp, Artificial Sequence
  ENSG00000100983_5 (sequence is synthesized)
caacaccatctctgccagctttgggggcctggcctcccggaccccagctgtgcaccgacatgttctcagtgtcctgagtaagaccaaagaagctggcaagatcctctctaataatcccag

SEQ ID NO: 120624 - DNA, 120 bp, Artificial Sequence
  ENSG00000100983_6 (sequence is synthesized)
caagggactggccctgggaattgccaaagcctgggagctctacggctcacccaatgctctggtgctactgattgctcaagagaaggaaagaaacatatttgaccagcgtgccatagagaa

SEQ ID NO: 120625 - DNA, 120 bp, Artificial Sequence
  ENSG00000100983_7 (sequence is synthesized)
tgagctactggccaggaacatccatgtgatccgacgaacatttgaagatatctctgaaaaggggtctctggaccaagaccgaaggctgtttgtggatggccaggaaattgctgtggttta

SEQ ID NO: 120626 - DNA, 120 bp, Artificial Sequence
  ENSG00000100983_8 (sequence is synthesized)
ctcgtcagtacagtctacagaattgggaagcacgtctactgctggagaggtcacatgctgccaagtgcccagacattgccacccagctggctgggactaagaaggtgcagcaggagctaa

SEQ ID NO: 120627 - DNA, 120 bp, Artificial Sequence
  ENSG00000100983_9 (sequence is synthesized)
gcaggccgggcatgctggagatgttgctccctggccagcctgaggctgtggcccgcctccgcgccacctttgctggcctctactcactggatgtgggtgaagaaggggaccaggccatcg

SEQ ID NO: 120628 - DNA, 120 bp, Artificial Sequence
  ENSG00000100983_10 (sequence is synthesized)
ccgaggcccttgctgcccctagccggtttgtgctaaagccccagagagagggtggaggtaacaacctatatggggaggaaatggtacaggccctgaaacagctgaaggacagtgaggaga

SEQ ID NO: 120629 - DNA, 120 bp, Artificial Sequence
  ENSG00000100983_11 (sequence is synthesized)
gggcctcctacatcctcatggagaagatcgaacctgagccttttgagaattgcctgctacggcctggcagccctgcccgagtggtccagtgcatttcagagctgggcatctttggggtct

SEQ ID NO: 120630 - DNA, 120 bp, Artificial Sequence
  ENSG00000100983_12 (sequence is synthesized)
atgtcaggcaggaaaagacactcgtgatgaacaagcacgtggggcatctacttcgaaccaaagccatcgagcatgcagatggtggtgtggcagcgggagtggcagtcctggacaacccat

SEQ ID NO: 120631 - DNA, 120 bp, Artificial Sequence
  ENSG00000100983_13 (sequence is synthesized)
accctgtgtgagggcacaaccaggccacgggaccttctatcctctgtatttgtcattcctctcctagccctcctgaggggtatcctcctaaagacctccaaagtttttatggaagggtaa

SEQ ID NO: 120632 - DNA, 120 bp, Artificial Sequence
  ENSG00000100983_14 (sequence is synthesized)
atactggtaccttcccccagctttccatctgaggaccagaaaagttgtgtctcccttagatgagatctagacgcccccaaatccttgagatgtgggtatagctcagggtaagctgctctg

SEQ ID NO: 120633 - DNA, 120 bp, Artificial Sequence
  ENSG00000100983_15 (sequence is synthesized)
aggtaaaggtccatgaaccctgccccactcctgtcagcccctcatcagccttttcagcaggttccagtgcctgacttgggataggactgagtggtaggaggagggggagtggaggggcat

SEQ ID NO: 120634 - DNA, 120 bp, Artificial Sequence
  ENSG00000100983_16 (sequence is synthesized)
ggaggccgggagaccttgtggctgaaacccttcgtaggagcggggcaactagtgtctagtgagggggttgggctggcgcgcactgatcccagactttccggatcttctgcctttagatcg

SEQ ID NO: 120635 - DNA, 120 bp, Artificial Sequence
  ENSG00000100983_17 (sequence is synthesized)
ggccggtgtcggggcatgtaggccagtgagactggagccagttagagctacaacggggagcgattagggccaaactttgtccagggtggaagcgagcgggcccgtgaagtggggccagcc

SEQ ID NO: 120636 - DNA, 120 bp, Artificial Sequence
  ENSG00000100983_18 (sequence is synthesized)
tgggcagccgaccgtgtcgttgcctcggggcctttccaggcactggcctaagtcctggcgataaagtgcgaccgatttccttgtgggcgttttgaggctttcggtgatctgacccgtctg

SEQ ID NO: 120637 - DNA, 120 bp, Artificial Sequence
  ENSG00000100983_19 (sequence is synthesized)
tcattcattcttcattcattcatgtgatgaatgaatacagtactaagcgcggctaattactaggtagagaagtgatcaagacaaacactgttcctacggtacagggaaaagtgatgggct

SEQ ID NO: 120638 - DNA, 120 bp, Artificial Sequence
  ENSG00000100983_20 (sequence is synthesized)
gtagaatgtagaagcccggggcggagaacagggacagcttccggaacgaaatcgcgagcccagatcaggagtggtggcgagagttccaaagagaagacagcacgtgccaagtcctggaag

SEQ ID NO: 120639 - DNA, 120 bp, Artificial Sequence
  ENSG00000100983_21 (sequence is synthesized)
ggggacagaggccaacatatcctggtcactgaagacacctgactctgaatctgtttcacgcccagggaagagatgacagtggccggggctaggctacaaactctggaaatggagataaat

SEQ ID NO: 120640 - DNA, 120 bp, Artificial Sequence
  ENSG00000100983_22 (sequence is synthesized)
aaaggaattcaaagtactatatacttaggcagcaaaatccataggatttggggagagtgagatgtaggaaacaagtactcaaggcttgggtacctgggtggggttcatcagagaagaagc

SEQ ID NO: 120641 - DNA, 120 bp, Artificial Sequence
  ENSG00000100983_23 (sequence is synthesized)
gccctgatgagaagtcctttgcaaccgtgaaggaaactccaaatagcaccaagaggactcagaacacatggtttgacaacctaggactagaaggagactccagagaggcatagagactct

SEQ ID NO: 120642 - DNA, 120 bp, Artificial Sequence
  ENSG00000100983_24 (sequence is synthesized)
aaaatcctagcactttcttggtatagacagttacccaggtactgctcagctgggtccagggaaggtcctgggtttggggctgagtccaggtgatgtgtgtcccctgcctccatttctata

SEQ ID NO: 120643 - DNA, 120 bp, Artificial Sequence
  ENSG00000100983_25 (sequence is synthesized)
tgaagaatttggtccaggccctcagctcatgggaatctgcctctcactggtcctcactgggtttatcccagtgaccaattctaggatgaccagaagaatgattccactgggcttgggagt

SEQ ID NO: 120644 - DNA, 120 bp, Artificial Sequence
  ENSG00000100983_26 (sequence is synthesized)
gtttgctggtacctctaatctctgtgtagagttcatggtacctgtgtgctctgtggctaggtcctcagagtcagtccctgggcaggtactgtcagccttcagttttccccacagactgtg

SEQ ID NO: 120645 - DNA, 71 bp, Artificial Sequence
  ENSG00000100983_27 (sequence is synthesized)
gaggccccgccccctgagcctgggtagcggcgcgagggccgggagaaccgttcgcggaggaaaggcgaact

SEQ ID NO: 120646 - DNA, 120 bp, Artificial Sequence
  ENSG00000100983_28 (sequence is synthesized)
gggtcgcatcgaggccccgccccctgagcctgggtagcggcgcgagggccgggagaaccgttcgcggaggaaaggcgaactagtgttgggatggccaccaactgggggagcctcttgcag

SEQ ID NO: 120647 - DNA, 120 bp, Artificial Sequence
  ENSG00000100983_29 (sequence is synthesized)
aagcccctagctcctccccacagcattcaccatggcccactgtctggccccggccaggctgagggtcactcctttgcatcagggaccatatctcttttgccttattttttccagtaacta

SEQ ID NO: 120648 - DNA, 120 bp, Artificial Sequence
  ENSG00000100983_30 (sequence is synthesized)
aaattgatctctagaagtagaaaataaaaaggcagtgtcctggagtaatcaaatttaaatatggggtttgaagtgtgacttaggcaaattacttaaccgctctcagctgcagtttcttca

SEQ ID NO: 120649 - DNA, 120 bp, Artificial Sequence
  ENSG00000100983_31 (sequence is synthesized)
ggtttgttgggagtgtcatccagatagtagcatcctgcctgaaggaatttgtggctgttctccctcctgctcttcctctgatgctgctctgcataaccagctggacctaagcttcttgcc

SEQ ID NO: 120650 - DNA, 120 bp, Artificial Sequence
  ENSG00000100983_32 (sequence is synthesized)
aggggaacactggaaagagtcaggaatcctgggcttcggtgccagctctgccaatcactagctttattacctgtttctttatctattaaatgaggccaaggacccaagacctgcccacct

SEQ ID NO: 120651 - DNA, 120 bp, Artificial Sequence
  ENSG00000100983_33 (sequence is synthesized)
agtaaccaaatcaaaatcaaaaggcaaggaaactggagtgtgagctcctgatgcatggaagggcctgggcttgaacatcaaccagcaaggagcaggcttccatgtggtgagctatgcccc

SEQ ID NO: 120652 - DNA, 78 bp, Artificial Sequence
  ENSG00000100983_34 (sequence is synthesized)
cctcgcgagtgagccaccacacctggcccatggtgttgggatggccaccaactgggggagcctcttgcaggataaaca

SEQ ID NO: 120653 - DNA, 120 bp, Artificial Sequence
  ENSG00000100983_35 (sequence is synthesized)
ggattacaggtgttagccaccacacctggccaagaggtagacatttttagggaactgagcagctcagagcaggtttagacatggagagagatctagaaggcttagtgacttactagatga

SEQ ID NO: 120654 - DNA, 120 bp, Artificial Sequence
  ENSG00000100983_36 (sequence is synthesized)
ctagaaggcttagtgacttactagatgaccctgggcaagtccttgcttatctttggttttgctttcctgcttctaccataatggggtatttctctgggtttatttctgatgttctggtca

SEQ ID NO: 120655 - DNA, 120 bp, Artificial Sequence
  ENSG00000100983_37 (sequence is synthesized)
cgtgtgattctgcgtggaatgccagactagtagttgggttcctggggttattgatgaagatcaggtcaaggtgctacaggtggaccagtagtatcaaaggaaggacagcattgggtgggg

SEQ ID NO: 120656 - DNA, 120 bp, Artificial Sequence
  ENSG00000100983_38 (sequence is synthesized)
atccgattcttcttgtttcacagttagggaatctgtagctctgggaagggaaggaacttgccccagtcacatctgatattagtgcttctttctccaatgaagagcctttaggctgggagt

SEQ ID NO: 120657 - DNA, 120 bp, Artificial Sequence
  ENSG00000100983_39 (sequence is synthesized)
tccaacacttggtctttctgggaggttatggagcctagaaaaggcgtaatccacaatgagatttctaatccagaaaaaaagtcagaaagtgtacgtgtgtgtgtatgtgtgtgtgtgtgt

SEQ ID NO: 120658 - DNA, 120 bp, Artificial Sequence
  ENSG00000100983_40 (sequence is synthesized)
ctagcctctggggctcctggtctagttagagaacataccacaaaacaaaattaaataacatcagctctatgaggaaacacaggcagtctgctacacaaagttaactatcatttattgagt

SEQ ID NO: 120659 - DNA, 120 bp, Artificial Sequence
  ENSG00000100983_41 (sequence is synthesized)
atttagtatgtgccaggcattattctaaacactttggaatcactgactcctcaccacaacagagataaggaaaccgaagcccagagaggctaagtaacctacctgaggttatttaaatgg

SEQ ID NO: 120660 - DNA, 120 bp, Artificial Sequence
  ENSG00000100983_42 (sequence is synthesized)
taaaataattggcagagccaggatgtgaacccaaggaatttggctcctgagtccatgctctgaacatccatgctttttttcctctcccaagatactatataggacagctggaagaaagag

SEQ ID NO: 120661 - DNA, 120 bp, Artificial Sequence
  ENSG00000100983_43 (sequence is synthesized)
tagttcattatgattagatgattgagatggggggtggtatttgaactagaccttaaaagacaaatagggaaaaggaacagcatagcaaggacccaaaagtaggaaaaggcaaaaaaaaaa

SEQ ID NO: 120662 - DNA, 120 bp, Artificial Sequence
  ENSG00000100983_44 (sequence is synthesized)
atgtaatttatttgagatctgctgacatgagttgttggagcttgaagggaattaataatgtactgcagtgactcctatcccaggaaaacttgttaaaaatacaaagcctcggctgggtgt

SEQ ID NO: 120663 - DNA, 120 bp, Artificial Sequence
  ENSG00000100985_0 (sequence is synthesized)
agacacctctgccctcaccatgagcctctggcagcccctggtcctggtgctcctggtgctgggctgctgctttgctgcccccagacagcgccagtccacccttgtgctcttccctggaga

SEQ ID NO: 120664 - DNA, 120 bp, Artificial Sequence
  ENSG00000100985_1 (sequence is synthesized)
cctgagaaccaatctcaccgacaggcagctggcagaggaatacctgtaccgctatggttacactcgggtggcagagatgcgtggagagtcgaaatctctggggcctgcgctgctgcttct

SEQ ID NO: 120665 - DNA, 120 bp, Artificial Sequence
  ENSG00000100985_2 (sequence is synthesized)
ccagaagcaactgtccctgcccgagaccggtgagctggatagcgccacgctgaaggccatgcgaaccccacggtgcggggtcccagacctgggcagattccaaacctttgagggcgacct

SEQ ID NO: 120666 - DNA, 120 bp, Artificial Sequence
  ENSG00000100985_3 (sequence is synthesized)
caagtggcaccaccacaacatcacctattggatccaaaactactcggaagacttgccgcgggcggtgattgacgacgcctttgcccgcgccttcgcactgtggagcgcggtgacgccgct

SEQ ID NO: 120667 - DNA, 120 bp, Artificial Sequence
  ENSG00000100985_4 (sequence is synthesized)
caccttcactcgcgtgtacagccgggacgcagacatcgtcatccagtttggtgtcgcggagcacggagacgggtatcccttcgacgggaaggacgggctcctggcacacgcctttcctcc

SEQ ID NO: 120668 - DNA, 120 bp, Artificial Sequence
  ENSG00000100985_5 (sequence is synthesized)
tggccccggcattcagggagacgcccatttcgacgatgacgagttgtggtccctgggcaagggcgtcgtggttccaactcggtttggaaacgcagatggcgcggcctgccacttcccctt

SEQ ID NO: 120669 - DNA, 120 bp, Artificial Sequence
  ENSG00000100985_6 (sequence is synthesized)
catcttcgagggccgctcctactctgcctgcaccaccgacggtcgctccgacggcttgccctggtgcagtaccacggccaactacgacaccgacgaccggtttggcttctgccccagcga

SEQ ID NO: 120670 - DNA, 120 bp, Artificial Sequence
  ENSG00000100985_7 (sequence is synthesized)
gagactctacacccaggacggcaatgctgatgggaaaccctgccagtttccattcatcttccaaggccaatcctactccgcctgcaccacggacggtcgctccgacggctaccgctggtg

SEQ ID NO: 120671 - DNA, 120 bp, Artificial Sequence
  ENSG00000100985_8 (sequence is synthesized)
cgccaccaccgccaactacgaccgggacaagctcttcggcttctgcccgacccgagctgactcgacggtgatggggggcaactcggcgggggagctgtgcgtcttccccttcactttcct

SEQ ID NO: 120672 - DNA, 120 bp, Artificial Sequence
  ENSG00000100985_9 (sequence is synthesized)
gcgctaccacctcgaactttgacagcgacaagaagtggggcttctgcccggaccaaggatacagtttgttcctcgtggcggcgcatgagttcggccacgcgctgggcttagatcattcct

SEQ ID NO: 120673 - DNA, 120 bp, Artificial Sequence
  ENSG00000100985_10 (sequence is synthesized)
cagtgccggaggcgctcatgtaccctatgtaccgcttcactgaggggccccccttgcataaggacgacgtgaatggcatccggcacctctatggtcctcgccctgaacctgagccacggc

SEQ ID NO: 120674 - DNA, 120 bp, Artificial Sequence
  ENSG00000100985_11 (sequence is synthesized)
ctccaaccaccaccacaccgcagcccacggctcccccgacggtctgccccaccggaccccccactgtccacccctcagagcgccccacagctggccccacaggtcccccctcagctggcc

SEQ ID NO: 120675 - DNA, 120 bp, Artificial Sequence
  ENSG00000100985_12 (sequence is synthesized)
ccacaggtccccccactgctggcccttctacggccactactgtgcctttgagtccggtggacgatgcctgcaacgtgaacatcttcgacgccatcgcggagattgggaaccagctgtatt

SEQ ID NO: 120676 - DNA, 120 bp, Artificial Sequence
  ENSG00000100985_13 (sequence is synthesized)
tgttcaaggatgggaagtactggcgattctctgagggcagggggagccggccgcagggccccttccttatcgccgacaagtggcccgcgctgccccgcaagctggactcggtctttgagg

SEQ ID NO: 120677 - DNA, 120 bp, Artificial Sequence
  ENSG00000100985_14 (sequence is synthesized)
agcggctctccaagaagcttttcttcttctctgggcgccaggtgtgggtgtacacaggcgcgtcggtgctgggcccgaggcgtctggacaagctgggcctgggagccgacgtggcccagg

SEQ ID NO: 120678 - DNA, 120 bp, Artificial Sequence
  ENSG00000100985_15 (sequence is synthesized)
tgaccggggccctccggagtggcagggggaagatgctgctgttcagcgggcggcgcctctggaggttcgacgtgaaggcgcagatggtggatccccggagcgccagcgaggtggaccgga

SEQ ID NO: 120679 - DNA, 120 bp, Artificial Sequence
  ENSG00000100985_16 (sequence is synthesized)
tgttccccggggtgcctttggacacgcacgacgtcttccagtaccgagagaaagcctatttctgccaggaccgcttctactggcgcgtgagttcccggagtgagttgaaccaggtggacc

SEQ ID NO: 120680 - DNA, 120 bp, Artificial Sequence
  ENSG00000100985_17 (sequence is synthesized)
aagtgggctacgtgacctatgacatcctgcagtgccctgaggactagggctcccgtcctgctttggcagtgccatgtaaatccccactgggaccaaccctggggaaggagccagtttgcc

SEQ ID NO: 120681 - DNA, 120 bp, Artificial Sequence
  ENSG00000100985_18 (sequence is synthesized)
ggatacaaactggtattctgttctggaggaaagggaggagtggaggtgggctgggccctctcttctcacctttgttttttgttggagtgtttctaataaacttggattctctaaccttta

SEQ ID NO: 120682 - DNA, 120 bp, Artificial Sequence
  ENSG00000100987_0 (sequence is synthesized)
ggggtggggtggggtgggctggacagaagagaggaggagaaggaggtgactgaggggactgcagctgggtgggcggtaaccgaggggaggggaactggtggcgtccccatctcgcggggt

SEQ ID NO: 120683 - DNA, 120 bp, Artificial Sequence
  ENSG00000100987_1 (sequence is synthesized)
ccggaacggcgacgcgcccgcgcccagctgattggagcccttcaggcctcccgcgcccgaccggcagcccaatcctataaagcttcctctaagctgggccctccgcaaacgggatccaga

SEQ ID NO: 120684 - DNA, 120 bp, Artificial Sequence
  ENSG00000100987_2 (sequence is synthesized)
gaggctcgcgccttgcttgctaaggaaccatgaccggccgggactcgctttccgacgggcgcactagcagcagggcgctggtgcctggcggttcccctaggggctcgcgcccccggggct

SEQ ID NO: 120685 - DNA, 120 bp, Artificial Sequence
  ENSG00000100987_3 (sequence is synthesized)
tcgccatcacggacctgctgggcttggaggccgagctgccggcgcccgctggcccaggacagggatctggctgcgagggtccggcagtcgcgccgtgcccgggcccggggcttgacggct

SEQ ID NO: 120686 - DNA, 120 bp, Artificial Sequence
  ENSG00000100987_4 (sequence is synthesized)
ccagcctggcgcgtggggccctaccgctgggactcggcctcctctgtggcttcggcacgcagccgccggcggccgctcgagcaccctgcctgctcctagcggacgtgccgttcctgccgc

SEQ ID NO: 120687 - DNA, 120 bp, Artificial Sequence
  ENSG00000100987_5 (sequence is synthesized)
ccaggggccccgagcccgctgccccgctggctcccagccgtccgccgcctgcgctcggccgccagaagcgcagcgacagcgtctccacgtccgatgaggacagccagtctgaagacagga

SEQ ID NO: 120688 - DNA, 120 bp, Artificial Sequence
  ENSG00000100987_6 (sequence is synthesized)
atgacctaaaggcatcccccaccttgggcaagaggaagaagcggcggcacaggacagttttcactgctcaccagctggaagagttggagaaggcattcagcgaggcccactaccctgatg

SEQ ID NO: 120689 - DNA, 120 bp, Artificial Sequence
  ENSG00000100987_7 (sequence is synthesized)
tgtatgcccgagaaatgctggctgtgaaaactgagctccccgaagaccggatacaggtctggtttcaaaaccgcagggccaaatggcgcaagcgggagaagcgctggggcggcagcagcg

SEQ ID NO: 120690 - DNA, 120 bp, Artificial Sequence
  ENSG00000100987_8 (sequence is synthesized)
tgatggccgagtacgggctgtacggggccatggtgcgccactgcatcccgctgccagactccgtgctcaactccgccgagggcggcctgctgggctcctgcgcgccctggctcctgggga

SEQ ID NO: 120691 - DNA, 120 bp, Artificial Sequence
  ENSG00000100987_9 (sequence is synthesized)
ccaggaagtgaagataagttggcaggactctggggctctgaccacttcaaagaaggttctagccagagtgagtcaggatcacagagaggctcagataaagtgagccctgagaatggcttg

SEQ ID NO: 120692 - DNA, 120 bp, Artificial Sequence
  ENSG00000100987_10 (sequence is synthesized)
gaagatgtggctattgacctctccagctctgcccggcaggagaccaagaaagtgcaccctggggctggtgctcaaggaggctccaactccacggcactggaggggccccagccagggaag

SEQ ID NO: 120693 - DNA, 120 bp, Artificial Sequence
  ENSG00000100987_11 (sequence is synthesized)
gtgggagccacatgagacccacaggtcccactgtcaaaggctgaaaatgtgcatattcctcactggcattttccaaaagacaaaaattgtccaagacatatactctcagtttgattttct

SEQ ID NO: 120694 - DNA, 120 bp, Artificial Sequence
  ENSG00000100987_12 (sequence is synthesized)
tctgacaatgtcaagataaaatgcaatgccacttgctttaagaggacagatgagtgacctagggaaaattctatttcattctagaatggaaacggttccttaatggcactttaaccagtt

SEQ ID NO: 120695 - DNA, 120 bp, Artificial Sequence
  ENSG00000100987_13 (sequence is synthesized)
aacttggtgcaaaacttttgattctcttttgtagcttgagcagggaggatccgaagttcaaaaatgatttcactgctgggcatcatttgagatgtgtggttcaatgtactgtatagatga

SEQ ID NO: 120696 - DNA, 120 bp, Artificial Sequence
  ENSG00000100987_14 (sequence is synthesized)
ataggttaggtctgatgtcctcattctcaattaggaaatataaaattgtttaatatccagaagaatctgatatcatcatagtgaagactccatacagacacatgaatgaattatattgtc

SEQ ID NO: 120697 - DNA, 120 bp, Artificial Sequence
  ENSG00000100987_15 (sequence is synthesized)
tttaccttgaacttggccttggatatttcaattttcttgttagggagtaattttgtgttttcttgagtgtcacttgataggctatgcatattggaattcaaagaaacccatactctagtc

SEQ ID NO: 120698 - DNA, 120 bp, Artificial Sequence
  ENSG00000100987_16 (sequence is synthesized)
gtttctgcatttcctttaaaaatagcatgggatcatatttaaacaattgttggatagctggaaacagtgtttttaggtcagaccaggcttttggtctttcaaaatttgtgattgaaagca

SEQ ID NO: 120699 - DNA, 120 bp, Artificial Sequence
  ENSG00000100987_17 (sequence is synthesized)
ctttagtgacttggattttgtaaatctttcctttcctgcgtttcctttgccatttatttattctttaaaaataaacattttgtggtgtgtttacttttcaaggcactcctctattacaca

SEQ ID NO: 120700 - DNA, 120 bp, Artificial Sequence
  ENSG00000100987_18 (sequence is synthesized)
tggtgcaaacttctgctcctggaggctcccgttcactggactttgcaggagacacacaggctccccagaccccgtggtggtgcctgatgaccttcagctgaaccctgtaatgctgctaaa

SEQ ID NO: 120701 - DNA, 120 bp, Artificial Sequence
  ENSG00000100987_19 (sequence is synthesized)
attttcctgtgtcatccttgatgatcactgctaccagacttgccccctgcagggcaccccatgtgcaaggaattcaacaacctaggagttgaaagcattggtctcccaagttcagtgtgt

SEQ ID NO: 120702 - DNA, 120 bp, Artificial Sequence
  ENSG00000100987_20 (sequence is synthesized)
tcttttccgtatctattaccagctgatgagaataaacctgcagtcatgacagctaggtcctagtgacaggtgcagaaagctgctcttacagaaactcccctccttattaagaggctttgt

SEQ ID NO: 120703 - DNA, 120 bp, Artificial Sequence
  ENSG00000100987_21 (sequence is synthesized)
ctatcactcggaactgcttctactcaagattatctgttgaaagggaactgtccataccagggcattgttctgacttttctggacttcctcaacccaaaatgccttgaagaaaaaaaaaaa

SEQ ID NO: 120704 - DNA, 89 bp, Artificial Sequence
  ENSG00000100987_22 (sequence is synthesized)
cgcaacctctaactcctgggctgaagtgatcctcccacctcagtctcctatgttgctaggattacagcgtgagccactgccccagctac

SEQ ID NO: 120705 - DNA, 120 bp, Artificial Sequence
  ENSG00000100987_23 (sequence is synthesized)
atgttgctaggattacagcgtgagccactgccccagctactccaacttaagagttcccccaaggctggctgcccttctcctctccttccatcatgaatgacacatgggcatccccttcgg

SEQ ID NO: 120706 - DNA, 120 bp, Artificial Sequence
  ENSG00000100987_24 (sequence is synthesized)
ctagcatggctgacctgtgcctgcctgggtgctcagcttggcacccatgtgagtttgcagcctgaaattttaaatggaggagtttctgtgcttttctgccctgattcctcttactgaccc

SEQ ID NO: 120707 - DNA, 120 bp, Artificial Sequence
  ENSG00000100987_25 (sequence is synthesized)
tctaagtcaccagctgtggtcgtctcctctttgacccctgatctcaacccgggctttgaaatgtgtttgttcacataattgtccattacccatccttcctgtcattgcagaatctgttgt

SEQ ID NO: 120708 - DNA, 120 bp, Artificial Sequence
  ENSG00000100987_26 (sequence is synthesized)
ctcatactgacattttaagactttttttcactttcttctgttgaagatcacctactaagaagtacttcctccttttcattctttctttataagaattaattaaattttaattgacaaaaa

SEQ ID NO: 120709 - DNA, 120 bp, Artificial Sequence
  ENSG00000100987_27 (sequence is synthesized)
tatttccttcagaaatagcatgggatcatgctcgggagagaagatccgagccctgggacgccgcctccgctcctccaggcgcccctcttcactgtctcttctgtgtgccttctgcttctc

SEQ ID NO: 120710 - DNA, 120 bp, Artificial Sequence
  ENSG00000100987_28 (sequence is synthesized)
gaacgtgtcattcccacattcagtgagccaatcagcagtcccttctctatagccaacacgctccctttgcatagaaactgagggtcccttagctgaaggcaccacaagagcttgccccta

SEQ ID NO: 120711 - DNA, 120 bp, Artificial Sequence
  ENSG00000100987_29 (sequence is synthesized)
tgaccctcatgccttttttcattttattattatttagtatcaaatcattctttaaaatcacatgataatgtgtgctgcaactagaaactataaagatatgtcaatgaaaaaaaaaaaaaa

SEQ ID NO: 120712 - DNA, 120 bp, Artificial Sequence
  ENSG00000100991_0 (sequence is synthesized)
gcttcctgtttgtccgacgaggagacatggcggcggcgccggtagcggctgggtctggagccggccgagggagacggtcggcagccacagtggcggcttggggcggatggggcggccggc

SEQ ID NO: 120713 - DNA, 120 bp, Artificial Sequence
  ENSG00000100991_1 (sequence is synthesized)
cgcggcctggtaacattctgctgcagctgcggcagggccagctgaccggccggggcctggtccgggcggtgcagttcactgagacttttttgacggagagggacaaacaatccaagtgga

SEQ ID NO: 120714 - DNA, 120 bp, Artificial Sequence
  ENSG00000100991_2 (sequence is synthesized)
gtggaattcctcagctgctcctcaagctgcacaccaccagccacctccacagtgactttgttgagtgtcaaaacatcctcaaggaaatttctcctcttctctccatggaggctatggcat

SEQ ID NO: 120715 - DNA, 120 bp, Artificial Sequence
  ENSG00000100991_3 (sequence is synthesized)
ttgttactgaagagaggaaacttacccaagaaaccacttatccaaatacttacatttttgacttgtttggaggtgttgatcttcttgtagaaattcttatgaggcctacgatctctatcc

SEQ ID NO: 120716 - DNA, 120 bp, Artificial Sequence
  ENSG00000100991_4 (sequence is synthesized)
ggggacagaaactgaaaataagtgatgaaatgtccaaggactgcttgagtatcctgtataatacctgtgtctgtacagagggagttacaaagcgtttggcagaaaagaatgactttgtga

SEQ ID NO: 120717 - DNA, 120 bp, Artificial Sequence
  ENSG00000100991_5 (sequence is synthesized)
tcttcctgtttacattgatgacaagtaagaagacattcttacaaacagcaaccctcattgaagatattttgggtgttaaaaaggaaatgatccgactagatgaagtccccaatctgagtt

SEQ ID NO: 120718 - DNA, 120 bp, Artificial Sequence
  ENSG00000100991_6 (sequence is synthesized)
ccttagtatccaatttcgatcagcagcagctcgctaatttctgccggattctggctgtcaccatttcagagatggatacagggaatgatgacaagcacacgcttcttgccaaaaatgctc

SEQ ID NO: 120719 - DNA, 120 bp, Artificial Sequence
  ENSG00000100991_7 (sequence is synthesized)
aacagaagaagagcttgagtttggggccttctgcagctgaaatcaatcaagcggcccttctcagcattcctggctttgttgagcggctttgcaaactggcgactcgaaaggtgtcagagt

SEQ ID NO: 120720 - DNA, 120 bp, Artificial Sequence
  ENSG00000100991_8 (sequence is synthesized)
caacgggcacagccagcttccttcaggagttggaagagtggtacacatggctagacaatgctttggtgctagatgccctgatgcgagtggccaatgaggagtcagagcacaatcaagcct

SEQ ID NO: 120721 - DNA, 120 bp, Artificial Sequence
  ENSG00000100991_9 (sequence is synthesized)
ccattgtgttccctcctccaggggcttctgaggagaatggcctgcctcacacgtcagccagaacccagctgccccagtcaatgaagattatgcatgagatcatgtacaaactggaagtgc

SEQ ID NO: 120722 - DNA, 120 bp, Artificial Sequence
  ENSG00000100991_10 (sequence is synthesized)
tctatgtcctctgcgtgctgctgatggggcgtcagcgaaaccaggttcacagaatgattgcagagttcaagctgatccctggacttaataatttgtttgacaaactgatttggaggaagc

SEQ ID NO: 120723 - DNA, 120 bp, Artificial Sequence
  ENSG00000100991_11 (sequence is synthesized)
attcagcatctgcccttgtcctccatggtcacaaccagaactgtgactgtagcccggacatcaccttgaagatacagtttttgaggcttcttcagagcttcagtgaccaccacgagaaca

SEQ ID NO: 120724 - DNA, 120 bp, Artificial Sequence
  ENSG00000100991_12 (sequence is synthesized)
agtacttgttactcaacaaccaggagctgaatgaactcagtgccatctctctcaaggccaacatccctgaggtggaagctgtcctcaacaccgacaggagtttggtgtgtgatgggaaga

SEQ ID NO: 120725 - DNA, 120 bp, Artificial Sequence
  ENSG00000100991_13 (sequence is synthesized)
cagcagagtcgtctttcaggttttggcaagctcgggctgtggagagtttcctccgagggaccacctcctatgcagaccagatgttcctgctgaagcgaggcctcttggagcacatccttt

SEQ ID NO: 120726 - DNA, 120 bp, Artificial Sequence
  ENSG00000100991_14 (sequence is synthesized)
actgcattgtggacagcgagtgtaagtcaagggatgtgctccagagttactttgacctcctgggggagctgatgaagttcaacgttgatgcattcaagagattcaataaatatatcaaca

SEQ ID NO: 120727 - DNA, 120 bp, Artificial Sequence
  ENSG00000100991_15 (sequence is synthesized)
ccgatgcaaagttccaggtattcctgaagcagatcaacagctccctggtggactccaacatgctggtgcgctgtgtcactctgtccctggaccgatttgaaaaccaggtggatatgaaag

SEQ ID NO: 120728 - DNA, 120 bp, Artificial Sequence
  ENSG00000100991_16 (sequence is synthesized)
ttgccgaggtactgtctgaatgccgcctgctcgcctacatatcccaggtgcccacgcagatgtccttcctcttccgcctcatcaacatcatccacgtgcagacgctgacccaggagaacg

SEQ ID NO: 120729 - DNA, 120 bp, Artificial Sequence
  ENSG00000100991_17 (sequence is synthesized)
tcagctgcctcaacaccagcctggtgatcctgatgctggcccgacggaaagagcggctgcccctgtacctgcggctgctgcagcggatggagcacagcaagaagtaccccggcttcctgc

SEQ ID NO: 120730 - DNA, 120 bp, Artificial Sequence
  ENSG00000100991_18 (sequence is synthesized)
tcaacaacttccacaacctgctgcgcttctggcagcagcactacctgcacaaggacaaggacagcacctgcctagagaacagctcctgcatcagcttctcatactggaaggagacagtgt

SEQ ID NO: 120731 - DNA, 120 bp, Artificial Sequence
  ENSG00000100991_19 (sequence is synthesized)
ccatcctgttgaacccggaccggcagtcaccctctgctctcgttagctacattgaggagccctacatggacatagacagggacttcactgaggagtgaccttgggccaggcctcgggagg

SEQ ID NO: 120732 - DNA, 120 bp, Artificial Sequence
  ENSG00000100991_20 (sequence is synthesized)
ctgctgggccagtgtgggtgagcgtgggtacgatgccacacgccctgccctgttcccgttcctccctgctgctctctgcctgccccaggtctttgggtacaggcttggtgggagggaagt

SEQ ID NO: 120733 - DNA, 120 bp, Artificial Sequence
  ENSG00000100991_21 (sequence is synthesized)
cctagaagcccttggtccccctgggtctgagggccctaggtcatggagagcctcagtccccataatgaggacagggtaccatgcccacctttccttcagaaccctggggcccagggccac

SEQ ID NO: 120734 - DNA, 120 bp, Artificial Sequence
  ENSG00000100991_22 (sequence is synthesized)
ccagaggtaagaggacatttagcattagctctgtgtgagctcctgccggtttcttggctgtcagtcagtcccagagtggggaggaagatatgggtgacccccaccccccatctgtgagcc

SEQ ID NO: 120735 - DNA, 120 bp, Artificial Sequence
  ENSG00000100991_23 (sequence is synthesized)
aagcctcccttgtccctggcctttggacccaggcaaaggcttctgagccctgggcaggggtggtgggtaccagagaatgctgccttcccccaagcctgcccctctgcctcattttcctgt

SEQ ID NO: 120736 - DNA, 120 bp, Artificial Sequence
  ENSG00000100991_24 (sequence is synthesized)
agctcctctggttctgtttgctcattggccgctgtgttcatccaagggggttctcccagaagtgaggggcctttccctccatcccttggggcacggggcagctgtgcctgccctgcctct

SEQ ID NO: 120737 - DNA, 120 bp, Artificial Sequence
  ENSG00000100991_25 (sequence is synthesized)
gcctgaggcagccgctcctgcctgagcctggacatggggcccttccttgtgttgccaatttattaacagcaaataaaccaattaaatggagactattaaataactttattttaaaaatga

SEQ ID NO: 120738 - DNA, 120 bp, Artificial Sequence
  ENSG00000100994_0 (sequence is synthesized)
agagcagcggcgccagagcagctgcaccatcccggcgttcgcgtgtgccgccgctttcctcctccatctcttttcctccgcctccgccggcgcgatggcgaagccgctgacggacagcga

SEQ ID NO: 120739 - DNA, 120 bp, Artificial Sequence
  ENSG00000100994_1 (sequence is synthesized)
gaagcggaagcagatcagcgtgcgcggcctggcggggctaggcgacgtggccgaggtgcggaagagcttcaaccggcacttgcacttcacgctggtcaaggaccgcaatgtggccacgcc

SEQ ID NO: 120740 - DNA, 120 bp, Artificial Sequence
  ENSG00000100994_2 (sequence is synthesized)
ccgcgactacttcttcgcgctggcgcacacggtgcgcgaccacctcgtgggccgctggatccgcacgcagcagcactactacgagcgcgaccccaagcgcatttattatctttccctgga

SEQ ID NO: 120741 - DNA, 120 bp, Artificial Sequence
  ENSG00000100994_3 (sequence is synthesized)
attctacatgggtcgcacgctgcagaacacgatggtgaacctgggccttcagaatgcctgcgatgaagccatctatcagttggggttagacttggaggaactcgaggagatagaagaaga

SEQ ID NO: 120742 - DNA, 120 bp, Artificial Sequence
  ENSG00000100994_4 (sequence is synthesized)
tgctggccttgggaatggaggcctggggaggctggcagcgtgtttccttgactcaatggctaccttgggcctggcagcatacggctatggaatccgctatgaatttgggatttttaacca

SEQ ID NO: 120743 - DNA, 120 bp, Artificial Sequence
  ENSG00000100994_5 (sequence is synthesized)
gaagattgtcaatggctggcaggtagaggaggccgatgactggctgcgctacggcaacccctgggagaaagcgcggcctgagtatatgcttcccgtgcacttctacggacgcgtggagca

SEQ ID NO: 120744 - DNA, 120 bp, Artificial Sequence
  ENSG00000100994_6 (sequence is synthesized)
cacccccgacggcgtgaagtggctggacacacaggtggtgctggccatgccctacgacaccccagtgcccggctacaagaacaacaccgtcaacaccatgcggctgtggtccgccaaggc

SEQ ID NO: 120745 - DNA, 120 bp, Artificial Sequence
  ENSG00000100994_7 (sequence is synthesized)
tcccaacgacttcaagctgcaggacttcaacgtgggagactacatcgaggcggtcctggaccggaacttggctgagaacatctccagggtcctgtatccaaatgataacttctttgaggg

SEQ ID NO: 120746 - DNA, 120 bp, Artificial Sequence
  ENSG00000100994_8 (sequence is synthesized)
gaaggagctgcggctgaagcaggagtacttcgtggtggccgccacgctccaggacatcatccgccgcttcaagtcgtccaagttcggctgccgggaccctgtgagaacctgtttcgagac

SEQ ID NO: 120747 - DNA, 120 bp, Artificial Sequence
  ENSG00000100994_9 (sequence is synthesized)
gttcccagacaaggtggccatccagctgaacgacacccaccccgccctctccatccctgagctcatgcggatcctggtggacgtggagaaggtggactgggacaaggcctgggaaatcac

SEQ ID NO: 120748 - DNA, 120 bp, Artificial Sequence
  ENSG00000100994_10 (sequence is synthesized)
gaagaagacctgtgcatacaccaaccacactgtgctgcctgaggccttggagcgctggcccgtgtccatgtttgagaagctgctgccgcggcacctggagataatctatgccatcaacca

SEQ ID NO: 120749 - DNA, 120 bp, Artificial Sequence
  ENSG00000100994_11 (sequence is synthesized)
gcggcacctggaccacgtggccgcgctgtttcccggcgatgtggaccgcctgcgcaggatgtctgtgatcgaggagggggactgcaagcggatcaacatggcccacctgtgtgtgattgg

SEQ ID NO: 120750 - DNA, 120 bp, Artificial Sequence
  ENSG00000100994_12 (sequence is synthesized)
gtcccatgctgtcaatggtgtggcgaggatccactcggagatcgtgaaacagtcggtctttaaggatttttatgaactggagccagagaagttccagaataagaccaatggcatcacccc

SEQ ID NO: 120751 - DNA, 120 bp, Artificial Sequence
  ENSG00000100994_13 (sequence is synthesized)
ccgccggtggctgctgctgtgcaacccggggctggccgataccatcgtggagaaaattggggaggagttcctgactgacctgagccagctgaagaagctgctgccgctggtcagtgacga

SEQ ID NO: 120752 - DNA, 120 bp, Artificial Sequence
  ENSG00000100994_14 (sequence is synthesized)
ggtgttcatcagggacgtggccaaggtcaaacaggagaacaagctcaagttctcggccttcctggagaaggagtacaaggtgaagatcaacccctcctccatgttcgatgtgcatgtgaa

SEQ ID NO: 120753 - DNA, 120 bp, Artificial Sequence
  ENSG00000100994_15 (sequence is synthesized)
gaggatccacgagtacaagcggcagctgctcaactgcctgcacgtcgtcaccctgtacaatcgaatcaagagagacccggccaaggcttttgtgcccaggactgttatgattgggggcaa

SEQ ID NO: 120754 - DNA, 120 bp, Artificial Sequence
  ENSG00000100994_16 (sequence is synthesized)
ggcagcgcccggttaccacatggccaagctgatcatcaagttggtcacctccatcggcgacgtcgtcaatcatgacccagttgtgggtgacaggttgaaagtgatcttcctggagaacta

SEQ ID NO: 120755 - DNA, 120 bp, Artificial Sequence
  ENSG00000100994_17 (sequence is synthesized)
tgatctgtcgcagcagatctccactgcaggcaccgaggcctcaggcacaggcaacatgaagttcatgctcaacggggccctcaccatcggcaccatggacggcgccaacgtggagatggc

SEQ ID NO: 120756 - DNA, 120 bp, Artificial Sequence
  ENSG00000100994_18 (sequence is synthesized)
cgaggaggccggggccgagaacctcttcatcttcggcctgcgggtggaggatgtcgaggccttggaccggaaagggtacaatgccagggagtactacgaccacctgcccgagctgaagca

SEQ ID NO: 120757 - DNA, 120 bp, Artificial Sequence
  ENSG00000100994_19 (sequence is synthesized)
ggccgtggaccagatcagcagtggctttttttctcccaaggagccagactgcttcaaggacatcgtgaacatgctgatgcaccatgacaggttcaaggtgtttgcagactatgaagccta

SEQ ID NO: 120758 - DNA, 120 bp, Artificial Sequence
  ENSG00000100994_20 (sequence is synthesized)
catgcagtgccaggcacaggtggaccagctgtaccggaaccccaaggagtggaccaagaaggtcatcaggaacatcgcctgctcgggcaagttctccagtgaccggaccatcacggagta

SEQ ID NO: 120759 - DNA, 120 bp, Artificial Sequence
  ENSG00000100994_21 (sequence is synthesized)
tgcacgggagatctggggtgtggagccctccgacctgcagatcccgccccccaacatcccccgggactaggcacaccctgccttggcgggaccagcgggcatttgttttcttgctgactt

SEQ ID NO: 120760 - DNA, 120 bp, Artificial Sequence
  ENSG00000100994_22 (sequence is synthesized)
tgcacctccttttttccccaaacactttgccagccactggtggtccctgcttttctgagtaccatgtttccaggaggggccatgggggtcagggtggttttgagagagcagggtaaggaa

SEQ ID NO: 120761 - DNA, 120 bp, Artificial Sequence
  ENSG00000100994_23 (sequence is synthesized)
ggaatgtgctagaagtgctcctagtttcttgtaaaggaagccagagttgacagtacaaagggtcgtggccagccctgcagcttcagcacctgccccacccagagtgggagtcaggtggag

SEQ ID NO: 120762 - DNA, 120 bp, Artificial Sequence
  ENSG00000100994_24 (sequence is synthesized)
ccacctgctgggctcccccagaactttgcacacatcttgctatgtattagccgatgtctttagtgttgagcctctggattctggggtctgggccagtggccatagtgaagcctgggaatg

SEQ ID NO: 120763 - DNA, 120 bp, Artificial Sequence
  ENSG00000100994_25 (sequence is synthesized)
agtgttactgcagcatctgggctgccagccacagggaagggccaagccccatgtagccccagtcatcctgcccagccctgcctcctggccatgccgggaggggtcggatcctctaggcat

SEQ ID NO: 120764 - DNA, 120 bp, Artificial Sequence
  ENSG00000100994_26 (sequence is synthesized)
cgccttcacagccccctgccccctgccctctgtcctggctctgcacctggtatatgggtcatggacccagatggggctttccctttgtagccatccaatgggcattgtgtgggtgcttgg

SEQ ID NO: 120765 - DNA, 120 bp, Artificial Sequence
  ENSG00000100994_27 (sequence is synthesized)
aacccgggatgactgagggggacactggagtgggtgcttgtgtctgctgtctcagaggccttggtcaggatgaagttggctgacacagcttagcttggttttgcttattcaaaagagaaa

SEQ ID NO: 120766 - DNA, 120 bp, Artificial Sequence
  ENSG00000100994_28 (sequence is synthesized)
ataactacacatggaaatgaaactagctgaagccttttcttgttttagcaactgaaaattgtacttggtcacttttgtgcttgaggaggcccattttctgcctggcagggggcaggtctg

SEQ ID NO: 120767 - DNA, 120 bp, Artificial Sequence
  ENSG00000100994_29 (sequence is synthesized)
tgccctcccgctgactcctgctgtgtcctgaggtgcatttcctgttgtacacacaagggccaggctccattctccctccctttccaccagtgccacagcctcgtctggaaaaaggaccag

SEQ ID NO: 120768 - DNA, 120 bp, Artificial Sequence
  ENSG00000100994_30 (sequence is synthesized)
gggtcccggaggaacccatttgtgctctgcttggacagcaggcctggcactgggaggtgggggtgagcccctcacagccttgcccctccccaaggctggcaacctgcctcccattgccca

SEQ ID NO: 120769 - DNA, 120 bp, Artificial Sequence
  ENSG00000100994_31 (sequence is synthesized)
agagagagggcagggaacaggctactgtccttccctgtggaattgccgagaaatctagcaccttgcatgctggatctgggctgcggggaggctctttttctccctggcctccagtgccca

SEQ ID NO: 120770 - DNA, 120 bp, Artificial Sequence
  ENSG00000100994_32 (sequence is synthesized)
ccaggaggatctgcgcacggtgcacagcccaccagagcactacagccttttattgagtggggcaagtgctgggctgtggtcgtgccctgacagcatcttccccaggcagcggctctgtgg

SEQ ID NO: 120771 - DNA, 120 bp, Artificial Sequence
  ENSG00000100994_33 (sequence is synthesized)
aggaggccatactcccctagttggccactggggccaccaccctgaccaccactgtgcccctcattgttactgccttgtgagataaaaactgattaaacctttgtggctgtggttggctga

SEQ ID NO: 120772 - DNA, 120 bp, Artificial Sequence
  ENSG00000100994_34 (sequence is synthesized)
tagtgatgacatttctttaacagtcaaaggagcaggtgggattggctttagactgacttcacatctctgctcgagcaggtccctgctcaagggcctcgtaaccacccatggccactggct

SEQ ID NO: 120773 - DNA, 120 bp, Artificial Sequence
  ENSG00000100994_35 (sequence is synthesized)
gctgccctggaccgtgcaggccttgagctcccagggccatcctggggcaggggctgtgccaggcaccaacatggcttgttctccaaggtggcccacctggggcgctggctgctgactcct

SEQ ID NO: 120774 - DNA, 80 bp, Artificial Sequence
  ENSG00000100997_0 (sequence is synthesized)
gcagcggcctgggctgggatgtgaggagcggcgggttccgggctccgggctctgggtggcggcggctgtgagcggcggca

SEQ ID NO: 120775 - DNA, 120 bp, Artificial Sequence
  ENSG00000100997_1 (sequence is synthesized)
gtcggccgcgggatgaggaagcggaccgagcccgtcgccttggagcatgagcgctgcgccgccgcgggctcgtcctcctccggctcggccgccgcggcgctggacgccgactgccgcctg

SEQ ID NO: 120776 - DNA, 120 bp, Artificial Sequence
  ENSG00000100997_2 (sequence is synthesized)
aagcagaacctacgcctgacgggcccggcggcggctgagccgcgctgcgcagccgacgcgggaatgaagcgggcgctgggcaggcgaaagggcgtgtggttgcgcctgaggaagatactt

SEQ ID NO: 120777 - DNA, 120 bp, Artificial Sequence
  ENSG00000100997_3 (sequence is synthesized)
ttctgtgttttggggttgtacattgccattccatttctcatcaaactatgtcctggaatacaggccaaactgattttcttgaatttcgtaagagttccctatttcattgatttgaaaaaa

SEQ ID NO: 120778 - DNA, 120 bp, Artificial Sequence
  ENSG00000100997_4 (sequence is synthesized)
ccacaggatcaaggtttgaatcacacgtgtaactactacctgcagccagaggaagacgtgaccattggagtctggcacaccgtccctgcagtctggtggaagaacgcccaaggcaaagac

SEQ ID NO: 120779 - DNA, 120 bp, Artificial Sequence
  ENSG00000100997_5 (sequence is synthesized)
cagatgtggtatgaggatgccttggcttccagccaccctatcattctgtacctgcatgggaacgcaggtaccagaggaggcgaccaccgcgtggagctttacaaggtgctgagttccctt

SEQ ID NO: 120780 - DNA, 120 bp, Artificial Sequence
  ENSG00000100997_6 (sequence is synthesized)
ggttaccatgtggtcacctttgactacagaggttggggtgactcagtgggaacgccatctgagcggggcatgacctatgacgcactccacgtttttgactggatcaaagcaagaagtggt

SEQ ID NO: 120781 - DNA, 120 bp, Artificial Sequence
  ENSG00000100997_7 (sequence is synthesized)
gacaaccccgtgtacatctggggccactctctgggcactggcgtggcgacaaatctggtgcggcgcctctgtgagcgagagacgcctccagatgcccttatattggaatctccattcact

SEQ ID NO: 120782 - DNA, 120 bp, Artificial Sequence
  ENSG00000100997_8 (sequence is synthesized)
tatatcgatacttccctgggtttgactggttcttccttgatcctattacaagtagtggaattaaatttgcaaatgatgaaaacgtgaagcacatctcctgtcccctgctcatcctgcacg

SEQ ID NO: 120783 - DNA, 120 bp, Artificial Sequence
  ENSG00000100997_9 (sequence is synthesized)
ctgaggacgacccggtggtgcccttccagcttggcagaaagctctatagcatcgccgcaccagctcgaagcttccgagatttcaaagttcagtttgtgccctttcattcagaccttggct

SEQ ID NO: 120784 - DNA, 120 bp, Artificial Sequence
  ENSG00000100997_10 (sequence is synthesized)
acaggcacaaatacatttacaagagccctgagctgccacggatactgagggaattcctggggaagtcggagcctgagcaccagcactgagcctggccgtgggaaggaagcatgaagacct

SEQ ID NO: 120785 - DNA, 120 bp, Artificial Sequence
  ENSG00000100997_11 (sequence is synthesized)
ctgccctcctcccgttttcctccagtcagcagcccggtatcctgaagccccggggggccggcacctgcaatgctcaggagcccagctcgcacctggagagcacctcagatcccaggcggg

SEQ ID NO: 120786 - DNA, 120 bp, Artificial Sequence
  ENSG00000100997_12 (sequence is synthesized)
gaggcccctgcaggcctgcagtgcccggaggcctgagcatggctgtgtggaaagcgtgggtggcaggcatgtggctctccttgccgcccctcaacctgagatcttgttgggagacttaat

SEQ ID NO: 120787 - DNA, 120 bp, Artificial Sequence
  ENSG00000100997_13 (sequence is synthesized)
ggcagcaggcagccatcactgcctgcttgatgctgcactgagctggacagggggagtccgggcaggggactcttggggctcgggaccatgctgagctttttggcaccacccacagagaac

SEQ ID NO: 120788 - DNA, 120 bp, Artificial Sequence
  ENSG00000100997_14 (sequence is synthesized)
gtggggtccaggttctttctgcaccttcccagcacatgcagaatgactccagtggttccatcgtcccctcctgccctgtgtacctgcttgcctttctcagctgccccacctcccctgggc

SEQ ID NO: 120789 - DNA, 120 bp, Artificial Sequence
  ENSG00000100997_15 (sequence is synthesized)
tggcccactcacccacagtggaagtgcccgggatctgcacttcctcccctttcacctacctgtacacctaacctggccttagactgagctttatttaagaataaaatcgtggtggtggtc

SEQ ID NO: 120790 - DNA, 90 bp, Artificial Sequence
  ENSG00000100997_16 (sequence is synthesized)
aacaaaaaaaattgtgggccagggggcaagtaaagaactgtaacagaaagaaataagaaatctgaaaagattatagaagtaaagcaatat

SEQ ID NO: 120791 - DNA, 120 bp, Artificial Sequence
  ENSG00000100997_17 (sequence is synthesized)
gctggtgtgactgaagccaacaggtgacacggtcatcgaagagcagcagacaaaactaaaactaacccaaaggcagctgaaagtggagggcaggtgaattcccagccctcgccggattca

SEQ ID NO: 120792 - DNA, 120 bp, Artificial Sequence
  ENSG00000100997_18 (sequence is synthesized)
acttttgccaacggtgaagaactgccctgagctgcaaaccttacaaagtctgtaactctagataaaccataccatgtgctaactgcactgaaataaaacactaactacattataatgtca

SEQ ID NO: 120793 - DNA, 120 bp, Artificial Sequence
  ENSG00000100997_19 (sequence is synthesized)
cgggaggcctgaggaggccgctctttcctgatacgaggttacagctggggtctgatgtcaggtggggggcatggtggggtctgctttctctgctgtattcttctgcaagggcgaaagggc

SEQ ID NO: 120794 - DNA, 120 bp, Artificial Sequence
  ENSG00000100997_20 (sequence is synthesized)
ggcagccccacccccgctcccttccccaggcaccgcggcgggagcgccctgccctgccgctgaccccctgtgtcctgctccggccctctcgccaggcactcctggcctagccttgcaccc

SEQ ID NO: 120795 - DNA, 120 bp, Artificial Sequence
  ENSG00000100997_21 (sequence is synthesized)
cctctcgccaggcactcctggcctagccttgcaccccgaccctttcccggggaagccggggggacccttacgctgggggcttggcgccgcccgaagtcatgaccccgcgtgggagagcag

SEQ ID NO: 120796 - DNA, 120 bp, Artificial Sequence
  ENSG00000100997_22 (sequence is synthesized)
ggtagggggtggggagtccttggaagatccctggacgccaggcacagcagaggcgggaggcagaggggccggcgccagaccctgagagcgctggggcccactcggacctcctcctcctgc

SEQ ID NO: 120797 - DNA, 120 bp, Artificial Sequence
  ENSG00000100997_23 (sequence is synthesized)
tctgcatcaggccccacaccgagcgcccgggcgggcgcccctcgggctgggctgcgtgcgcggagccttactggcgccttgggccctcggcggctctccccgagtttcactgttgttgcc

SEQ ID NO: 120798 - DNA, 120 bp, Artificial Sequence
  ENSG00000100997_24 (sequence is synthesized)
caggctgaagctgtgaacatttttgaacaagtctttctgtggacataggctttcctttctcttgaggcacaaaattgcaaaccacttgatgccttacagtaaggcagagatctgtgcagg

SEQ ID NO: 120799 - DNA, 120 bp, Artificial Sequence
  ENSG00000100997_25 (sequence is synthesized)
cggatactgaggactgttcacatgatcatgcagggtgagccgcctccatgttgtaaaggatgtacagacccacacgggggggcacacacgctcacaggtggccatgtttgggaacactca

SEQ ID NO: 120800 - DNA, 120 bp, Artificial Sequence
  ENSG00000100997_26 (sequence is synthesized)
tccacacacctctcaagacgtacacagctcctcaaaagcctctttgtccccagctgcttcttgaagggacgtggtgctcctgactgccctgcactggcaggacatgggcgccagcccaga

SEQ ID NO: 120801 - DNA, 120 bp, Artificial Sequence
  ENSG00000100997_27 (sequence is synthesized)
agccagtgtgggtggaccaggctgggagtgggcaggcgggaaggcagcccctgcatgctgcatcacgggctgcgcaccagccacgtcaggctcaggaggccacctcatcctccctgcgtc

SEQ ID NO: 120802 - DNA, 120 bp, Artificial Sequence
  ENSG00000100997_28 (sequence is synthesized)
acctccaggctgcttcggaaggacatgggaggtctggtgtaaaggttggggcaggggcccactgatgctgtctccaagaatatgaaaaataagcagatagttcccagtcctcacacaggg

SEQ ID NO: 120803 - DNA, 120 bp, Artificial Sequence
  ENSG00000100997_29 (sequence is synthesized)
tgggaacgcaggtaccaggtcttcgtgtgtgagagaggcagccaggagccagcacagaggcagacccagcacggagacagggctgctgcggggccagggccgaggtcccgtgtggcacca

SEQ ID NO: 120804 - DNA, 120 bp, Artificial Sequence
  ENSG00000100997_30 (sequence is synthesized)
tttcttgaatttcggtccctgtgccccttcccagctggaggactttctgtgctagtgttgctccccagcactggatttctgtccacagaagactacactgccctgggggaccagcgtatc

SEQ ID NO: 120805 - DNA, 120 bp, Artificial Sequence
  ENSG00000100997_31 (sequence is synthesized)
gatgactcactgctgggctgctggaaagataattgcactccacctttgctggagactgggggagggacccttgggaggttgtaattttggggggcagagatggtagtgttttctgttatg

SEQ ID NO: 120806 - DNA, 120 bp, Artificial Sequence
  ENSG00000100997_32 (sequence is synthesized)
gaaacaagatgctaattagaccctaaggggaaacagcccctttccccttcctgggtcatggttgccttgaacccagaaatgccctccctgttctgggagcctccggactccactccctgt

SEQ ID NO: 120807 - DNA, 120 bp, Artificial Sequence
  ENSG00000101000_0 (sequence is synthesized)
acttctcttttccctagactgcagccagcggagcccgcagccggcccgagccaggaacccaggtccggagcctcaacttcaggatgttgacaacattgctgccgatactgctgctgtctg

SEQ ID NO: 120808 - DNA, 120 bp, Artificial Sequence
  ENSG00000101000_1 (sequence is synthesized)
gctgggccttttgtagccaagacgcctcagatggcctccaaagacttcatatgctccagatctcctacttccgcgacccctatcacgtgtggtaccagggcaacgcgtcgctggggggac

SEQ ID NO: 120809 - DNA, 120 bp, Artificial Sequence
  ENSG00000101000_2 (sequence is synthesized)
acctaacgcacgtgctggaaggcccagacaccaacaccacgatcattcagctgcagcccttgcaggagcccgagagctgggcgcgcacgcagagtggcctgcagtcctacctgctccagt

SEQ ID NO: 120810 - DNA, 120 bp, Artificial Sequence
  ENSG00000101000_3 (sequence is synthesized)
tccacggcctcgtgcgcctggtgcaccaggagcggaccttggcctttcctctgaccatccgctgcttcctgggctgtgagctgcctcccgagggctctagagcccatgtcttcttcgaag

SEQ ID NO: 120811 - DNA, 120 bp, Artificial Sequence
  ENSG00000101000_4 (sequence is synthesized)
tggctgtgaatgggagctcctttgtgagtttccggccggagagagccttgtggcaggcagacacccaggtcacctccggagtggtcaccttcaccctgcagcagctcaatgcctacaacc

SEQ ID NO: 120812 - DNA, 120 bp, Artificial Sequence
  ENSG00000101000_5 (sequence is synthesized)
gaggacacctgtgtgcagtatgtgcagaaacatatttccgcggaaaacacgaaagggagccaaacaagccgctcctacacttcgctggtcctgggcgtcctggtgggcagtttcatcatt

SEQ ID NO: 120813 - DNA, 120 bp, Artificial Sequence
  ENSG00000101000_6 (sequence is synthesized)
gctggtgtggctgtaggcatcttcctgtgcacaggtggacggcgatgttaattactctccagccccctcagaaggggctggattgatggaggctggcaagggaaagtttcagctcactgt

SEQ ID NO: 120814 - DNA, 120 bp, Artificial Sequence
  ENSG00000101000_7 (sequence is synthesized)
gaagccagactccccaactgaaacaccagaaggtttggagtgacagctcctttcttctcccacatctgcccactgaagatttgagggaggggagatggagaggagaggtggacaaagtac

SEQ ID NO: 120815 - DNA, 120 bp, Artificial Sequence
  ENSG00000101000_8 (sequence is synthesized)
ttggtttgctaagaacctaagaacgtgtatgctttgctgaattagtctgataagtgaatgtttatctatctttgtggaaaacagataatggagttggggcaggaagcctatggcccatcc

SEQ ID NO: 120816 - DNA, 120 bp, Artificial Sequence
  ENSG00000101000_9 (sequence is synthesized)
tccaaagacagacagaatcacctgaggcgttcaaaagatataaccaaataaacaagtcatccacaatcaaaatacaacattcaatacttccaggtgtgtcagacttgggatgggacgctg

SEQ ID NO: 120817 - DNA, 120 bp, Artificial Sequence
  ENSG00000101000_10 (sequence is synthesized)
atataatagggtagaaagaagtaacacgaagaagtggtggaaatgtaaaatccaagtcatatggcagtgatcaattattaatcaattaataatattaataaatttcttatatttaaggca

SEQ ID NO: 120818 - DNA, 120 bp, Artificial Sequence
  ENSG00000101000_11 (sequence is synthesized)
gcctacaaccgcactcggtatgaactgcgggaattcctggaggacacctgtgtgcagtatgtgcagaaacatatttccgcggaaaacacgaaagatctctactaagaatgtcactctggc

SEQ ID NO: 120819 - DNA, 120 bp, Artificial Sequence
  ENSG00000101003_0 (sequence is synthesized)
gttcggcgccaaagcgcggagcggaggccgaggcgagagcctggcgctgtaggactagaacgaaaggagtgaggcgccgagagcccagataccattttggcgtgagagctggtggttggc

SEQ ID NO: 120820 - DNA, 120 bp, Artificial Sequence
  ENSG00000101003_1 (sequence is synthesized)
aaggccgcgggagtgggaagcgtccgccatgttctgcgaaaaagccatggaactgatccgcgagctgcatcgcgcgcccgaagggcaactgcctgccttcaacgaggatggactcagaca

SEQ ID NO: 120821 - DNA, 120 bp, Artificial Sequence
  ENSG00000101003_2 (sequence is synthesized)
agttctggaggagatgaaagctttgtatgaacaaaaccagtctgatgtgaatgaagcaaagtcaggtggacgaagtgatttgataccaactatcaaatttcgacactgttctctgttaag

SEQ ID NO: 120822 - DNA, 120 bp, Artificial Sequence
  ENSG00000101003_3 (sequence is synthesized)
aaatcgacgctgcactgtagcatacctgtatgaccgcttgcttcggatcagagcactcagatgggaatatggtagcgtcttgccaaatgcattacgatttcacatggctgctgaagaaat

SEQ ID NO: 120823 - DNA, 120 bp, Artificial Sequence
  ENSG00000101003_4 (sequence is synthesized)
ggagtggtttaataattataaaagatctcttgctacttatatgaggtcactgggaggagatgaaggtttggacattacacaggatatgaaaccaccaaaaagcctatatattgaagtccg

SEQ ID NO: 120824 - DNA, 120 bp, Artificial Sequence
  ENSG00000101003_5 (sequence is synthesized)
gtgtctaaaagactatggagaatttgaagttgatgatggcacttcagtcctattaaaaaaaaatagccagcactttttacctcgatggaaatgtgagcagctgatcagacaaggagtcct

SEQ ID NO: 120825 - DNA, 120 bp, Artificial Sequence
  ENSG00000101003_6 (sequence is synthesized)
ggagcacatcctgtcatgaccatgcgccgaggcacttccaggcttcactcaactcatggactcctctgtactcactctctccaccactcccttcacctccctctttgattttagaagcta

SEQ ID NO: 120826 - DNA, 120 bp, Artificial Sequence
  ENSG00000101003_7 (sequence is synthesized)
tagacattgtttaagataactaagaatacttggctaagaagtataatttgctaactattaaggactttctttttttaatgttgtacactattcttcctactcttttttggttttggtttt

SEQ ID NO: 120827 - DNA, 120 bp, Artificial Sequence
  ENSG00000101003_8 (sequence is synthesized)
cccctactcctttttctaataagctgtatctgtaatcacagcattcctacagttgttacagtgtgttttttaaatgaaagtaaacatggttacatttgaatctcttaaataagcagtcac

SEQ ID NO: 120828 - DNA, 120 bp, Artificial Sequence
  ENSG00000101003_9 (sequence is synthesized)
ttggctggacaggaagaaggtagatcctgtgtgtcttgttttctggtcatgtgtattgtacaagctagagagctgaatttctgagatacacattttcaaatcacatgcaagtgaagatga

SEQ ID NO: 120829 - DNA, 120 bp, Artificial Sequence
  ENSG00000101003_10 (sequence is synthesized)
tggtctgtagaaattttcagtatatataatgtttaatgacatactaatttatcatctggctatttgggaaggaaggacacacatggattttgcacatttccaccatggtggctggtgtgg

SEQ ID NO: 120830 - DNA, 120 bp, Artificial Sequence
  ENSG00000101003_11 (sequence is synthesized)
cttgtggctatggggtgatcaccagtatcaccactttggaaggggacagtgaaattggggctagagaaggaactttgtacagttttccctgagattcagattgactgaaaagtcacatga

SEQ ID NO: 120831 - DNA, 120 bp, Artificial Sequence
  ENSG00000101003_12 (sequence is synthesized)
cgtttgttcttttatgctttgggtgttgcatccgagaaatcttttcccatcccaagatcacaattttttttcctttttacttctagaagtgttataattttaagctttatactttggtct

SEQ ID NO: 120832 - DNA, 120 bp, Artificial Sequence
  ENSG00000101003_13 (sequence is synthesized)
tttcaaactcctgacctcaagtgacccaccttggcctcccaaagttttgggattacaagtgtgggccaccgcggccagcctatgatccattttgaatgaattttttatatggtgcaaggt

SEQ ID NO: 120833 - DNA, 120 bp, Artificial Sequence
  ENSG00000101003_14 (sequence is synthesized)
atggtgcaaggtgtcaatccaccttcactttttcttgggaatatagatatccagctgtttcactaccattttttgaaaggactgccctttgctctatcacctttgcatttttgttaaaaa

SEQ ID NO: 120834 - DNA, 120 bp, Artificial Sequence
  ENSG00000101003_15 (sequence is synthesized)
gtagttgtcaatgtatatgtgggtttatttcaggactctgttttgttccattgacctgtttttctctcctgaatgccaataccatatttgtatgtagtgtatgtaattttctaataattc

SEQ ID NO: 120835 - DNA, 74 bp, Artificial Sequence
  ENSG00000101003_16 (sequence is synthesized)
tgttgaactcctgagctaaagcaatacacttgcctcgtcctccccatgtgctgggattacaggcgtgagccttg

SEQ ID NO: 120836 - DNA, 120 bp, Artificial Sequence
  ENSG00000101003_17 (sequence is synthesized)
tcgtcctccccatgtgctgggattacaggcgtgagccttggtgctggcccagtgtaccacatttctttttgagatttgttttggctatgttaagtcctttgcttttgatgtgaaatttgg

SEQ ID NO: 120837 - DNA, 120 bp, Artificial Sequence
  ENSG00000101003_18 (sequence is synthesized)
agtcctttgcttttgatgtgaaatttgggaacaggcagggtgtggtggcttatgcctgtaatcctagaactttgggaggcctagatgggtggatcacttgagctcaggagttccagacca

SEQ ID NO: 120838 - DNA, 82 bp, Artificial Sequence
  ENSG00000101003_19 (sequence is synthesized)
agttccagaccagcccgggcctatggcaaaactccgtctctacaaaaaatagacagttacacggcaggctgaggtgggagga

SEQ ID NO: 120839 - DNA, 120 bp, Artificial Sequence
  ENSG00000101003_20 (sequence is synthesized)
gtgacaaagtgagactctatctcaaaaagaaattaggatcaatttgtcaatttctacaacaacaacaacaaaaacccctgttgggcaccttgattgagattgcattgaatttatataaaa

SEQ ID NO: 120840 - DNA, 120 bp, Artificial Sequence
  ENSG00000101003_21 (sequence is synthesized)
agattgcattgaatttatataaaactgttgggagaattgacatcttaataatattgagtcttctggcctataaacaaggtctgtcttcctaggtattaatgttttgtcttctatttctct

SEQ ID NO: 120841 - DNA, 120 bp, Artificial Sequence
  ENSG00000101003_22 (sequence is synthesized)
taataatcttttgtagttttcagtgtacaggtctaccatgtcagcatttcatagttttgatgctaaatggtattttaaaatttcaaattctaaccacttgttgctagtaaatagaaatac

SEQ ID NO: 120842 - DNA, 120 bp, Artificial Sequence
  ENSG00000101003_23 (sequence is synthesized)
aattgatgttgaacttgtatccttcagccttgctaaactgtgagttctcatggtgtttttgtaaattacatcaacagtcatgtgttctatgaataaagagttttactccttcctttctaa

SEQ ID NO: 120843 - DNA, 120 bp, Artificial Sequence
  ENSG00000101003_24 (sequence is synthesized)
caaaaaacatgtgttttctgttttcttgagtatatatatacacctaggagtaaaattactgagtcatatggtaattctgtgtgtagcttttgaggaactgtcaagtttttgcccacaggg

SEQ ID NO: 120844 - DNA, 120 bp, Artificial Sequence
  ENSG00000101003_25 (sequence is synthesized)
ctataccgttttacattcccaccagcaatgtacgagggttccagtttctccgcatctcaccaacacttgttataaccatgctagtggggtgtgaaaggactattgctttttgctaaagta

SEQ ID NO: 120845 - DNA, 120 bp, Artificial Sequence
  ENSG00000101003_26 (sequence is synthesized)
tgaccctaaggatttggtgttcactttgttcatgccagggagcaaaagaatgtttcaggtcatgtggttcttgagcttattttcctaacaggcactttttacctcgatggaaatgtgagc

SEQ ID NO: 120846 - DNA, 120 bp, Artificial Sequence
  ENSG00000101003_27 (sequence is synthesized)
catgaccatgcgccgaggcacttccaggcttcactcaactcatggactcctctgctttgttatctttccacggtgctgtgacatttttctcctgcagaaaggagaagacatgccagcttt

SEQ ID NO: 120847 - DNA, 120 bp, Artificial Sequence
  ENSG00000101003_28 (sequence is synthesized)
gggatggcggctgccccgggaagagggaggaggctgagaacagaacaggctcccgccctccacagtgctgtggcaggatattattcttactagatatgttgatgggcacatgggtgtttc

SEQ ID NO: 120848 - DNA, 120 bp, Artificial Sequence
  ENSG00000101004_0 (sequence is synthesized)
gcggtacgggggtggtgccgcgctcctggccccgcgcgggcggacggcggaggcgcctcccagcctgctatgggatggatgaagaagagaaccactatgtctcgcagctcagggaagtct

SEQ ID NO: 120849 - DNA, 120 bp, Artificial Sequence
  ENSG00000101004_1 (sequence is synthesized)
acagcagctgcgacaccacggggactggctttctggaccgccaggagctgacccagctctgccttaagcttcacctggagcagcagctgcccgtcctcctgcagacgcttctcggaaacg

SEQ ID NO: 120850 - DNA, 120 bp, Artificial Sequence
  ENSG00000101004_2 (sequence is synthesized)
accatttcgccagggttaactttgaggaatttaaggaaggttttgtggctgtgttgtcttcaaatgctggtgttcgcccctcagatgaagacagtagttctttggaatcagctgcctcca

SEQ ID NO: 120851 - DNA, 120 bp, Artificial Sequence
  ENSG00000101004_3 (sequence is synthesized)
gtgccatccctccaaagtatgtgaatggttctaagtggtatggccgtcggagccggcctgagctatgtgacgctgccacagaagccagacgcgtgccggagcagcaaacccaggccagcc

SEQ ID NO: 120852 - DNA, 120 bp, Artificial Sequence
  ENSG00000101004_4 (sequence is synthesized)
tgaaaagtcacctctggcgctcagcgtctctggagagcgtggagagtcccaagtcagatgaagaggccgagagcactaaagaagctcagaatgaattatttgaagcacaaggacagctgc

SEQ ID NO: 120853 - DNA, 120 bp, Artificial Sequence
  ENSG00000101004_5 (sequence is synthesized)
agacctgggattctgaggactttgggagcccccagaagtcctgcagcccctcctttgacaccccagagagccagatccggggcgtgtgggaagagctgggggtgggcagcagcggacacc

SEQ ID NO: 120854 - DNA, 120 bp, Artificial Sequence
  ENSG00000101004_6 (sequence is synthesized)
tgagcgagcaggagctggctgtggtctgccagagcgtcgggctccagggactcgagaaagaggaactcgaagacctgtttaacaaactggatcaagacggagacggcaaagtgagtcttg

SEQ ID NO: 120855 - DNA, 120 bp, Artificial Sequence
  ENSG00000101004_7 (sequence is synthesized)
aggaattccagcttggcctcttcagtcatgagcccgcgctacttctagagtcttccactcgggttaaaccgagcaaggcttggtctcattaccaggtcccagaggagagcggctgccaca

SEQ ID NO: 120856 - DNA, 120 bp, Artificial Sequence
  ENSG00000101004_8 (sequence is synthesized)
ccaccacaacctcatccctcgtgtccctgtgctccagcctgcgcctcttctccagcattgacgatggttctggcttcgcttttcctgatcaggtcctggccatgtggacccaggagggga

SEQ ID NO: 120857 - DNA, 120 bp, Artificial Sequence
  ENSG00000101004_9 (sequence is synthesized)
ttcagaatggcagggagatcttgcagagcctggacttcagcgtggacgagaaggtgaaccttctggagctgacctgggcccttgacaacgagctcatgacagtggacagtgccgtccagc

SEQ ID NO: 120858 - DNA, 120 bp, Artificial Sequence
  ENSG00000101004_10 (sequence is synthesized)
aggcagccctggcctgctaccaccaggagctgagctaccagcaagggcaggtggagcagctggcaagggagcgtgacaaggcaaggcaggacctggagagggccgagaagaggaacctgg

SEQ ID NO: 120859 - DNA, 120 bp, Artificial Sequence
  ENSG00000101004_11 (sequence is synthesized)
agtttgtgaaagagatggacgactgccactccaccctggagcagctcacggagaagaaaatcaagcatctggagcaggggtaccgggaaaggctgagcctcctgcggtctgaggtggagg

SEQ ID NO: 120860 - DNA, 120 bp, Artificial Sequence
  ENSG00000101004_12 (sequence is synthesized)
cggagcgagagctgttctgggagcaggcccacaggcagagggccgcgctggagtgggacgtggggcgcctgcaggctgaggaggctggcctccgcgagaagctgaccctggccctgaagg

SEQ ID NO: 120861 - DNA, 120 bp, Artificial Sequence
  ENSG00000101004_13 (sequence is synthesized)
aaaacagtcgcctacagaaggagattgtggaagtggtggaaaagctttcggattcggagaggctggccctgaagctgcagaaggacctggagtttgtgctgaaggacaagctggagccac

SEQ ID NO: 120862 - DNA, 120 bp, Artificial Sequence
  ENSG00000101004_14 (sequence is synthesized)
agagtgcagagctcctggcccaggaggagcggttcgcagcagtcctgaaggaatacgagctcaagtgccgggacctgcaggaccgcaacgatgagctgcaagctgagctggaaggcctgt

SEQ ID NO: 120863 - DNA, 120 bp, Artificial Sequence
  ENSG00000101004_15 (sequence is synthesized)
caggcatttcattcctgggtaattctgctccagtgagtatagaaacggagctgatgatggagcaggtaaaggagcattaccaagacctcaggacccagctggagaccaaggtaaattact

SEQ ID NO: 120864 - DNA, 120 bp, Artificial Sequence
  ENSG00000101004_16 (sequence is synthesized)
acgaaagggaaattgcggcactgaaaaggaactttgagaaggagaggaaggacatggagcaggctcgcaggcgcgaggtcagcgtgctggagggtcagaaggccgacctggaggagctcc

SEQ ID NO: 120865 - DNA, 120 bp, Artificial Sequence
  ENSG00000101004_17 (sequence is synthesized)
acgagaagtctcaggaggtcatctggggcctgcaggagcagctgcaggacacagcccgcggccccgagcctgagcagatgggcctggcaccctgctgcacccaggcactgtgtggcctgg

SEQ ID NO: 120866 - DNA, 120 bp, Artificial Sequence
  ENSG00000101004_18 (sequence is synthesized)
ccctgcggcatcacagccacctgcagcagatcagactggagttccatagactttctgaagaaaacactttgttgaaaaacgatctgggaagggttcggcaagagcttgaagctgcagaaa

SEQ ID NO: 120867 - DNA, 120 bp, Artificial Sequence
  ENSG00000101004_19 (sequence is synthesized)
gtactcacgatgcacagaggaaggaaattgaggttttaaagaaagacaaggaaaaggcctgctctgagatggaggtgctcaacagacagaatcagaactacaaggatcaattatcccagc

SEQ ID NO: 120868 - DNA, 120 bp, Artificial Sequence
  ENSG00000101004_20 (sequence is synthesized)
tcaatgtcagggttcttcaactgggacaggaggcttctacccaccaggcccaaaacgaggagcatcgtgtgaccattcagatgttaacacagagcctggaggaggtggttcgcagtgggc

SEQ ID NO: 120869 - DNA, 120 bp, Artificial Sequence
  ENSG00000101004_21 (sequence is synthesized)
agcagcagagtgaccaaatccaaaaacttagagttgaacttgaatgcctgaatcaggaacatcagagcctgcagctgccatggtcagagctgacccagacccttgaggaaagtcaagacc

SEQ ID NO: 120870 - DNA, 120 bp, Artificial Sequence
  ENSG00000101004_22 (sequence is synthesized)
aggtgcagggagctcacctgaggctgaggcaggcccaggcccagcacttgcaggaggtccggctggtgccccaggaccgtgtggccgagctgcatcgcctgctcagccttcagggagagc

SEQ ID NO: 120871 - DNA, 120 bp, Artificial Sequence
  ENSG00000101004_23 (sequence is synthesized)
aggccaggaggcgcctggatgcacagcgggaagaacatgagaaacagctgaaagccacagaagagcgggtggaagaggcggagatgattctgaagaatatggaaatgctcctccaagaga

SEQ ID NO: 120872 - DNA, 120 bp, Artificial Sequence
  ENSG00000101004_24 (sequence is synthesized)
aagtggataagctgaaggagcagtttgaaaagaacacgaagtccgacctgctgctgaaggagctgtacgtggagaacgcccacctggtgagagcacttcaggccaccgaggagaagcagc

SEQ ID NO: 120873 - DNA, 120 bp, Artificial Sequence
  ENSG00000101004_25 (sequence is synthesized)
gaggcgccgagaaacaaagccgcctcttggaagaaaaagttcgcgctctcaacaaactcgtcagtaggattgcccccgcagccctctctgtgtaaagacagattattttctaggattcat

SEQ ID NO: 120874 - DNA, 120 bp, Artificial Sequence
  ENSG00000101004_26 (sequence is synthesized)
tcgaaagcacatcttttaaattaagccactgtgctgccttagattccgtgggtcatgagccatgagtcctgggacatctgaggattgggattctttgttcaccccgcagatagttaatga

SEQ ID NO: 120875 - DNA, 120 bp, Artificial Sequence
  ENSG00000101004_27 (sequence is synthesized)
atggtctgccctgggcaagatggaggtgggggctgggggaatatgcatgttgcagaagccggcgtttttattagcggtcctgagtaatttcccttggcaaaattcccagttttgccactc

SEQ ID NO: 120876 - DNA, 120 bp, Artificial Sequence
  ENSG00000101004_28 (sequence is synthesized)
tctggagccagatcctgggagctgtcagcaaggagcaggtaagtgagcagttatggacagcactttccatgtggtgcttccgaccctggctgtcagagtgaaatgtaaagtcagggctct

SEQ ID NO: 120877 - DNA, 120 bp, Artificial Sequence
  ENSG00000101004_29 (sequence is synthesized)
gtacagttttgccatttcactgttctgctttaagcttagcttattagaactcttggtggagggtgcgtacacacattccagaaaaggcttcactcgctgggaacgtcaacccagcgagaa

SEQ ID NO: 120878 - DNA, 120 bp, Artificial Sequence
  ENSG00000101004_30 (sequence is synthesized)
aggaggggaagccccttctccggggaccttatctgtggactcaggaatgatggtgtttattgcaaatgcacaatctttttcccattgaaatgtcatcacactggaaattgtactatatgt

SEQ ID NO: 120879 - DNA, 120 bp, Artificial Sequence
  ENSG00000101004_31 (sequence is synthesized)
ttccagccctggccccaccttcccttcagcagtccgtgttgtctgggtagtctgtggccagtgtagccctgttgcagagtgaggtctccgctgaaaggagaactggcgtggtcgttgttt

SEQ ID NO: 120880 - DNA, 120 bp, Artificial Sequence
  ENSG00000101004_32 (sequence is synthesized)
gaaaagaatcaggccccagcaaggttcactggaagctaacactggacgcagcagagtctgggtctgacaggaggtcagcgtcaccattttgagggtgatggacatgttttctgcactcta

SEQ ID NO: 120881 - DNA, 120 bp, Artificial Sequence
  ENSG00000101004_33 (sequence is synthesized)
gcactgtgtggaagcgctggctgacagcagcctggctgtccgaattccaaagaaatgggctccttctaaatattcaggtgctgctgcatactcgggagcacacgctttccttgcccttgc

SEQ ID NO: 120882 - DNA, 120 bp, Artificial Sequence
  ENSG00000101004_34 (sequence is synthesized)
gtccctgggagggggctgacccaaggcctgctgttgacaacaaggcccagagccaggaaaagagagtggagatgatgaagatgatgatgttgctgtgacctgaagggaggtggtctgctc

SEQ ID NO: 120883 - DNA, 120 bp, Artificial Sequence
  ENSG00000101004_35 (sequence is synthesized)
gcagatcaggagagaggctgaggcggagctgagtggagagctgtcggggctgggagccctgcccgctcgcagagacctgaccttggagctggaggagccgccgcagggacccctgccacg

SEQ ID NO: 120884 - DNA, 120 bp, Artificial Sequence
  ENSG00000101004_36 (sequence is synthesized)
gcgcccagatgtgcgtatcgttggccctcgaggaggaggagttggagcttgcccgcgggaagcgagtggacgggccctccctggaagcagagatgcaggccctgccgaaagatgggctgg

SEQ ID NO: 120885 - DNA, 120 bp, Artificial Sequence
  ENSG00000101004_37 (sequence is synthesized)
tggcaggaagtggccaggagggcacacgtggcctcctaccactgcgtccgggctgtggggagcggccactggcctggctggccccaggtgatggcagagagtctgaggaggcggcaggag

SEQ ID NO: 120886 - DNA, 120 bp, Artificial Sequence
  ENSG00000101004_38 (sequence is synthesized)
ccgggcctcgccgcaggcaagcccaggacacagaagctacgcagagcccggcccccgcccctgccccggcatcccacggcccctcagagaggtggtcacgcatgcagccctgtggagtgg

SEQ ID NO: 120887 - DNA, 120 bp, Artificial Sequence
  ENSG00000101004_39 (sequence is synthesized)
atggggatattgtcccaaaggagccagagcctttcggcgcgagcgcagcggggctggagcagcctggagcccgggagctgcctctgctgggaacagagagagacgcctcgcaaacccagc

SEQ ID NO: 120888 - DNA, 120 bp, Artificial Sequence
  ENSG00000101004_40 (sequence is synthesized)
cacggatgtgggagccacccctgaggccggccgcttcgtgcaggggacaggctgagaggctacaggccattcaggaagagcgagcacgaagctggagcaggggcacccaggagcaggcct

SEQ ID NO: 120889 - DNA, 120 bp, Artificial Sequence
  ENSG00000101004_41 (sequence is synthesized)
cggagcagcaggcccgggccgagggcgccctggagcctgggtgtcacaagcacagtgtggaggttgccaggagagggtccttgccatcccacctccagctcgcagacccgcagggttcct

SEQ ID NO: 120890 - DNA, 120 bp, Artificial Sequence
  ENSG00000101004_42 (sequence is synthesized)
ggcaggagcagcttgctgccccagaagagggggagaccaaaatagcgctggagagagagaaggatgacatggaaaccaaacttctacatctggaagacgtcgtccgggctctggagaaac

SEQ ID NO: 120891 - DNA, 120 bp, Artificial Sequence
  ENSG00000101004_43 (sequence is synthesized)
aaaaagtatagttttatatttgaaatgtatgcaaattatggccatatggctgattggaatgtactactgtaatataaaaagtcactgtatttgcaataaattcttttctattaaaattga

SEQ ID NO: 120892 - DNA, 120 bp, Artificial Sequence
  ENSG00000101004_44 (sequence is synthesized)
cttttagtctcatgtccaggctctgggtctccacacgcaggtggtccacagtaacgcaggagtgtctgctccagggagagcctctgcttgcggccatgcttgaccatggccttgccacac

SEQ ID NO: 120893 - DNA, 120 bp, Artificial Sequence
  ENSG00000101004_45 (sequence is synthesized)
tcctagacttagggttccctggctctcgttgccacctatcctgaaggccgcctctgtgtgtccagggaccatgcagggcattgttgtcttctgttgttcatgtttagctttcctgggcca

SEQ ID NO: 120894 - DNA, 90 bp, Artificial Sequence
  ENSG00000101004_46 (sequence is synthesized)
gtcacggctgcagtgaaccatgaatgtgccaccgcactccagccagggcaacagagcgagagcctgtcttggactacttaataaaaatat

SEQ ID NO: 120895 - DNA, 120 bp, Artificial Sequence
  ENSG00000101017_0 (sequence is synthesized)
agtggtcctgccgcctggtctcacctcgctatggttcgtctgcctctgcagtgcgtcctctggggctgcttgctgaccgctgtccatccagaaccacccactgcatgcagagaaaaacag

SEQ ID NO: 120896 - DNA, 120 bp, Artificial Sequence
  ENSG00000101017_1 (sequence is synthesized)
tacctaataaacagtcagtgctgttctttgtgccagccaggacagaaactggtgagtgactgcacagagttcactgaaacggaatgccttccttgcggtgaaagcgaattcctagacacc

SEQ ID NO: 120897 - DNA, 120 bp, Artificial Sequence
  ENSG00000101017_2 (sequence is synthesized)
tggaacagagagacacactgccaccagcacaaatactgcgaccccaacctagggcttcgggtccagcagaagggcacctcagaaacagacaccatctgcacctgtgaagaaggctggcac

SEQ ID NO: 120898 - DNA, 120 bp, Artificial Sequence
  ENSG00000101017_3 (sequence is synthesized)
tgtacgagtgaggcctgtgagagctgtgtcctgcaccgctcatgctcgcccggctttggggtcaagcagattgctacaggggtttctgataccatctgcgagccctgcccagtcggcttc

SEQ ID NO: 120899 - DNA, 120 bp, Artificial Sequence
  ENSG00000101017_4 (sequence is synthesized)
ttctccaatgtgtcatctgctttcgaaaaatgtcacccttggacaagctgtgagaccaaagacctggttgtgcaacaggcaggcacaaacaagactgatgttgtctgtggtccccaggat

SEQ ID NO: 120900 - DNA, 120 bp, Artificial Sequence
  ENSG00000101017_5 (sequence is synthesized)
cggctgagagccctggtggtgatccccatcatcttcgggatcctgtttgccatcctcttggtgctggtctttatcaaaaaggtggccaagaagccaaccaataaggccccccaccccaag

SEQ ID NO: 120901 - DNA, 120 bp, Artificial Sequence
  ENSG00000101017_6 (sequence is synthesized)
caggaaccccaggagatcaattttcccgacgatcttcctggctccaacactgctgctccagtgcaggagactttacatggatgccaaccggtcacccaggaggatggcaaagagagtcgc

SEQ ID NO: 120902 - DNA, 120 bp, Artificial Sequence
  ENSG00000101017_7 (sequence is synthesized)
ctcagtgcaggagagacagtgaggctgcacccacccaggagtgtggccacgtgggcaaacaggcagttggccagagagcctggtgctgctgctgctgtggcgtgagggtgaggggctggc

SEQ ID NO: 120903 - DNA, 120 bp, Artificial Sequence
  ENSG00000101017_8 (sequence is synthesized)
actgactgggcatagctccccgcttctgcctgcacccctgcagtttgagacaggagacctggcactggatgcagaaacagttcaccttgaagaacctctcacttcaccctggagcccatc

SEQ ID NO: 120904 - DNA, 120 bp, Artificial Sequence
  ENSG00000101017_9 (sequence is synthesized)
cagtctcccaacttgtattaaagacagaggcagaagtttggtggtggtggtgttggggtatggtttagtaatatccaccagaccttccgatccagcagtttggtgcccagagaggcatca

SEQ ID NO: 120905 - DNA, 120 bp, Artificial Sequence
  ENSG00000101017_10 (sequence is synthesized)
tggtggcttccctgcgcccaggaagccatatacacagatgcccattgcagcattgtttgtgatagtgaacaactggaagctgcttaactgtccatcagcaggagactggctaaataaaat

SEQ ID NO: 120906 - DNA, 120 bp, Artificial Sequence
  ENSG00000101017_11 (sequence is synthesized)
tagaatatatttatacaacagaatctcaaaaacactgttgagtaaggaaaaaaaggcatgctgctgaatgatgggtatggaactttttaaaaaagtacatgcttttatgtatgtatattg

SEQ ID NO: 120907 - DNA, 120 bp, Artificial Sequence
  ENSG00000101017_12 (sequence is synthesized)
cctatggatatatgtataaatacaatatgcatcatatattgatataacaagggttctggaagggtacacagaaaacccacagctcgaagagtggtgacgtctggggtggggaagaagggt

SEQ ID NO: 120908 - DNA, 120 bp, Artificial Sequence
  ENSG00000101017_13 (sequence is synthesized)
ctgggggagggttggttaaagggagatttggctttcccataatgcttcatcatttttcccaaaaggagagtgaattcacataatgcttatgtaattaaaaaatcatcaaacatgtaaaaa

SEQ ID NO: 120909 - DNA, 120 bp, Artificial Sequence
  ENSG00000101017_14 (sequence is synthesized)
ccacatttccccaaggaccgcggtttgaaccttctgatgtagatgagctctgacattggaagattctggagtctgacaagtcacagcaggttgagggtagggagaaactgcaggtgaggg

SEQ ID NO: 120910 - DNA, 120 bp, Artificial Sequence
  ENSG00000101017_15 (sequence is synthesized)
ctggggctgcttgctgaccgcttttgcagcctctgtcctggatgacttttacctttctgctgaagaagttgcaacggagatttcaagatcccttcaaattgcacaattctgtttttaggt

SEQ ID NO: 120911 - DNA, 120 bp, Artificial Sequence
  ENSG00000101017_16 (sequence is synthesized)
aggcagtttgggggtgtggtatcacagctctgccacttatcttgggagtctgggcaaatcacttcccctctcttagcctcagtttcttcatctgtaaaatgggatgataacagcacttcc

SEQ ID NO: 120912 - DNA, 120 bp, Artificial Sequence
  ENSG00000101017_17 (sequence is synthesized)
ttagtaggttttgattttagagtgagaaggttggcctacagtaaagatcagataatgtaaatcagtgaaaaaggtcaggggtaagaaaattacattctctttacctaacgctaaatgacc

SEQ ID NO: 120913 - DNA, 120 bp, Artificial Sequence
  ENSG00000101019_0 (sequence is synthesized)
attgaggaacatggcgttgctggtgcgagtccttaggaaccagactagcatttctcagtgggttccagtatgcagccgattgatacctgtgtctcctacccaaggacagggggacagggc

SEQ ID NO: 120914 - DNA, 120 bp, Artificial Sequence
  ENSG00000101019_1 (sequence is synthesized)
tctgtctcgcacttcccagtggccccagatgagccagtcccgagcatgtggtggatcagaacagattcctggaatagacatacagctgaataggaagtatcacaccacacgtaagctttc

SEQ ID NO: 120915 - DNA, 120 bp, Artificial Sequence
  ENSG00000101019_2 (sequence is synthesized)
tactaccaaagattccccacagcctgttgaggagaaggttggtgctttcacaaagataatagaagccatgggattcacgggacctttgaaatacagtaaatggaagattaagattgcggc

SEQ ID NO: 120916 - DNA, 120 bp, Artificial Sequence
  ENSG00000101019_3 (sequence is synthesized)
cctgcgcatgtatactagctgtgtggagaaaactgacttcgaggaattctttctaaggtgtcagatgcctgatacattcaattcatggtttcttataaccctactccacgtctggatgtg

SEQ ID NO: 120917 - DNA, 120 bp, Artificial Sequence
  ENSG00000101019_4 (sequence is synthesized)
tctagtccgaatgaagcaggaaggccggagtgggaagtacatgtgtcgtatcatagttcattttatgtgggaggatgttcagcagcgcggcagagtcatgggggttaatccctatatcct

SEQ ID NO: 120918 - DNA, 120 bp, Artificial Sequence
  ENSG00000101019_5 (sequence is synthesized)
gaagaagaacatgatcctcatgacaaatcatttctatgcagcgatcttgggatatgatgaggggatcctttcagatgatcatgggctggccgctgccctctggagaaccttcttcaaccg

SEQ ID NO: 120919 - DNA, 120 bp, Artificial Sequence
  ENSG00000101019_6 (sequence is synthesized)
gaaatgtgaagaccctcgacatcttgaattgctggtagagtatgtgaggaaacagatacagtacctggactccatgaacggggaggatctgcttctgacaggggaggtgagctggcgccc

SEQ ID NO: 120920 - DNA, 120 bp, Artificial Sequence
  ENSG00000101019_7 (sequence is synthesized)
tctagtggagaagaatcctcagagcatcctgaagccccattctccgacttacaacgacgagggactttgatgggctgggccctccgcacggcccgccagctggcttcgaggaacctccag

SEQ ID NO: 120921 - DNA, 120 bp, Artificial Sequence
  ENSG00000101019_8 (sequence is synthesized)
gagagaagtgcctgttggtccaggaccctgcagaaagtggcctgaactgacctctgaacagcatctgtcaaatacctggccccatttgtgttgagtttcctcttagtgtgcccaggagtc

SEQ ID NO: 120922 - DNA, 120 bp, Artificial Sequence
  ENSG00000101019_9 (sequence is synthesized)
ctccagcaactacatgtgactgatagcttttcccaaaggccaaggaagggatggtgtaggttcaaaagggaaaccccccagggcctgctgtggcctaggagcagattgtaatgctgccga

SEQ ID NO: 120923 - DNA, 120 bp, Artificial Sequence
  ENSG00000101019_10 (sequence is synthesized)
gtccggtcggtgaccacgcgttgtccctcggctttcagccatggggttgagttggccattaaaagaaacagagacttctctctgccatggcccttctttattccagggacttagaaactt

SEQ ID NO: 120924 - DNA, 120 bp, Artificial Sequence
  ENSG00000101019_11 (sequence is synthesized)
gcctgagatggtggacgcagtaatgagggcaccgcgcagctcagttagagacggagaaagggaagaggctgggatggtctctgctgctcttgcctctagttcatggagatgtgtctctgt

SEQ ID NO: 120925 - DNA, 120 bp, Artificial Sequence
  ENSG00000101019_12 (sequence is synthesized)
tcaggccaagatacagccagccaggcctgtcgtctgggacccaggaggcctctgatgaccaagggctttcacatcctaagtcatttggaaggaggccttgagaacaaagtcacctttgtc

SEQ ID NO: 120926 - DNA, 120 bp, Artificial Sequence
  ENSG00000101019_13 (sequence is synthesized)
actcccagtgaactgaatgaggaacatgctgtctcctgtcttggcctcccctttcatgagatactggggagaagagaacattcctcctggcttagttgtagcagacccagacctgtgccc

SEQ ID NO: 120927 - DNA, 120 bp, Artificial Sequence
  ENSG00000101019_14 (sequence is synthesized)
agctttggtcccccttcccaacttctgaagcacgtgctgcagagccaccttggtctgagcacctgaggaccagcccctcctccctcagtgcgggtcatctcttgggggattttcttaaag

SEQ ID NO: 120928 - DNA, 120 bp, Artificial Sequence
  ENSG00000101019_15 (sequence is synthesized)
tgaagaaagggggtggggaaccatattgcccctccctcccccatcaaacttccttcatttaacttgctataaaatgagtcatataaagaaactctatatgggtgaggtatatcccacttc

SEQ ID NO: 120929 - DNA, 120 bp, Artificial Sequence
  ENSG00000101019_16 (sequence is synthesized)
tgtgaaaacattacaaatcaaaccgcttctctcagtttatttaagatgcttttgttgcgagcggagctctagagtgaagcctcctgtgtgtgtgtgagataataacaccttgtaactcat

SEQ ID NO: 120930 - DNA, 120 bp, Artificial Sequence
  ENSG00000101019_17 (sequence is synthesized)
tacagctgggcactatttacataaaccagagctgagccaggcaggaatttgctgattaatttatttttaatggagtgaagtataccatgcaccaaaataaactttactgtgtgtacctaa

SEQ ID NO: 120931 - DNA, 120 bp, Artificial Sequence
  ENSG00000101019_18 (sequence is synthesized)
agatgcttgtcctggacaattccagagaagggtttgagtttggagttttatctgttgtaaaatggccctgcttttagatttctgtgaaatgctgcctaatatcaagtggcagttccgcta

SEQ ID NO: 120932 - DNA, 120 bp, Artificial Sequence
  ENSG00000101019_19 (sequence is synthesized)
aagtcactttttctgcctctgtggaaactaatactccacagatactttatgtgtttgtacacattatagtgatttgtcagtgtgaagtcatcctgtatggagatgggattgtaaagccca

SEQ ID NO: 120933 - DNA, 120 bp, Artificial Sequence
  ENSG00000101019_20 (sequence is synthesized)
aatcgtggtgataggagggatggatttggtgaatggagggaatcaaatgataatccagttaaggatactatacctttgacaccagttcaatatttgaaccagtccttctataaattagtt

SEQ ID NO: 120934 - DNA, 120 bp, Artificial Sequence
  ENSG00000101019_21 (sequence is synthesized)
ctgatgggaggccctggtatggggcctgcactgtcttcaggaactgaaactcaagctccttgatcactggcaacctagaagagtctggtaagatacctcctgaaaatgtacattagtaca

SEQ ID NO: 120935 - DNA, 120 bp, Artificial Sequence
  ENSG00000101019_22 (sequence is synthesized)
tttaataattaacctgagaaaggggaatatattatatatatatatatgtcacatgggatgtaatgacaatagaaaaatgaaaccaaaacactagaatatagctggttatacagatcatag

SEQ ID NO: 120936 - DNA, 120 bp, Artificial Sequence
  ENSG00000101019_23 (sequence is synthesized)
cactagaatatagctggttatacagatcatagtgtgtccggagttggttccttgtggtgggttcttggtctcgcgacttcaagaatgaagccgcagaccttcgctgtgagtgttacagct

SEQ ID NO: 120937 - DNA, 82 bp, Artificial Sequence
  ENSG00000101019_24 (sequence is synthesized)
ctgacttcaagaatgaagccgcagaccttcacagcaagtgttaccagctcttaaaggtgtgaagaccgaaagaacaaagctt

SEQ ID NO: 120938 - DNA, 87 bp, Artificial Sequence
  ENSG00000101019_25 (sequence is synthesized)
gagtgagcagcagcaagatttatggtgaagacgacctgagcgggttgccactgctggctagggtggccagcttttattcccttattt

SEQ ID NO: 120939 - DNA, 86 bp, Artificial Sequence
  ENSG00000101019_26 (sequence is synthesized)
atccactagtatcttcttttgtttatgttgtgtattttgtgtatctagatcacgttttagtagcttgtagttccctgttactggga

SEQ ID NO: 120940 - DNA, 120 bp, Artificial Sequence
  ENSG00000101019_27 (sequence is synthesized)
gaagcatttcattgcctcccagcttgggagcatccaaagtagaaccatgactgggtcatgaaatgggttaatttggtttctttcattacagggcaaagttctccctgtggactgagaaat

SEQ ID NO: 120941 - DNA, 120 bp, Artificial Sequence
  ENSG00000101019_28 (sequence is synthesized)
aaacatattataaaagttacatatgctcatagaatagaaatcaaagagtaaaaagtattgagtgtaaaaaacaagtgtcttttttccccccagtctaactccccagaagtaacctttttt

SEQ ID NO: 120942 - DNA, 120 bp, Artificial Sequence
  ENSG00000101019_29 (sequence is synthesized)
attttttatgttattttttcttaccttcaaggaaggagaaaagtaaccatttttgagttgatgcgtatccttcgcctgagagctatctttgtaatcatcctttttggttcctttttcatt

SEQ ID NO: 120943 - DNA, 120 bp, Artificial Sequence
  ENSG00000101019_30 (sequence is synthesized)
ttttgctttctttctgtcgtagctgctgtgtaatatagagaaaaaaagtattttttcagctctctcactcaattacaattacacagaaggtttctgtgacacatttgtgggagtttctcc

SEQ ID NO: 120944 - DNA, 120 bp, Artificial Sequence
  ENSG00000101019_31 (sequence is synthesized)
ccacacagcaaacaggcagtcaattctggagagaggtcaccaggtgggtgtcctctaacccaattcaattccaacattgtgtactcggagatagtgtcagatcccacaggttgagggctc

SEQ ID NO: 120945 - DNA, 120 bp, Artificial Sequence
  ENSG00000101019_32 (sequence is synthesized)
tgcccacaagactgcccccaacttgccacaccaattgcaagctccaggctgttttacctgtgcttctggccaaccgattataaattggggttccccacccctttctttggttcaattaat

SEQ ID NO: 120946 - DNA, 120 bp, Artificial Sequence
  ENSG00000101019_33 (sequence is synthesized)
ttgctggagcggctcacagaactcagggaaacacttattacattaccggtttattataaaggatattgcaagggatacagatgaagagatgcataggacaagatgggggaaggggtgagg

SEQ ID NO: 120947 - DNA, 120 bp, Artificial Sequence
  ENSG00000101019_34 (sequence is synthesized)
agattccatacctttcctggtgtgcagctgtccagaaacctccacctgttcagctatctggaagtgccccaaacccagtccttttaagggttttatggaagctgcattatgtaggcacaa

SEQ ID NO: 120948 - DNA, 120 bp, Artificial Sequence
  ENSG00000101019_35 (sequence is synthesized)
ctgattaaaccactggccattggaaatcagtcagcctctctgccctccttggaggttgggagatgggacagaaagtcctaaccttctaatcctcccttggtttttcagtgaccagcccct

SEQ ID NO: 120949 - DNA, 120 bp, Artificial Sequence
  ENSG00000101019_36 (sequence is synthesized)
accctgaagctacctaagtgcgccagccaccaatcattagcatacaaaatgacaccactttggaaaggccaaagattttaggagttgtatgccaggaagggagttgaagaccaactatat

SEQ ID NO: 120950 - DNA, 120 bp, Artificial Sequence
  ENSG00000101019_37 (sequence is synthesized)
atttcacaatatcacagctgcccagagtgagatcggcagcctttaaggtattcatccagctgaatgttcccacatgccctcaagtacttaccacccaactctgtagcagtgcacagtgga

SEQ ID NO: 120951 - DNA, 120 bp, Artificial Sequence
  ENSG00000101019_38 (sequence is synthesized)
cataaggtggtgttggcagtctcagtcctatttaatgatggccagagatacctcctggtcagccaaagccctggctgactgccaggcagttgcgcagtagctcttcctgtagtgaaactg

SEQ ID NO: 120952 - DNA, 120 bp, Artificial Sequence
  ENSG00000101019_39 (sequence is synthesized)
ttcttcttatcattgttgactaaactctgttggaagttgtctcactagccatatgagccacagctgtctctatcctgaatagcttaatgagccataggttgctgactcctggactgcagg

SEQ ID NO: 120953 - DNA, 120 bp, Artificial Sequence
  ENSG00000101019_40 (sequence is synthesized)
aaccttttagttgcctctcgccacagttgaatttccttctggacctccatctctcttcatcacagttgtcaacacttgagccttctcccatgttacttcttatgcagtgtcccttctact

SEQ ID NO: 120954 - DNA, 120 bp, Artificial Sequence
  ENSG00000101019_41 (sequence is synthesized)
taactgtaagttttataaaagcagaaaaccgtcttattcagttttttgcttatgcagtaaacattgaataattgtcaaatgaataaataattgtcaaataaatgaatatattgaatacca

SEQ ID NO: 120955 - DNA, 69 bp, Artificial Sequence
  ENSG00000101019_42 (sequence is synthesized)
aggtattcctaggaaccagactagcatttctcagtgggttccagtatgcagccgattgatacctgtgtc

SEQ ID NO: 120956 - DNA, 120 bp, Artificial Sequence
  ENSG00000101019_43 (sequence is synthesized)
ctggtagagtatgtgaggaaacaggtgagtgaccctttccctcccctcccaagtcctggcaacagtgggtcctcctcttgggctttcaggggatcatgagaggtggagttaccaaggacc

SEQ ID NO: 120957 - DNA, 120 bp, Artificial Sequence
  ENSG00000101019_44 (sequence is synthesized)
agcctgagagaattctgaccagatcacatcagcactagacgctgaagaaggagcgccttctgtatgtccaaccatgaactgggccagggagcgggaaatgggaagagagagagaaagagg

SEQ ID NO: 120958 - DNA, 120 bp, Artificial Sequence
  ENSG00000101019_45 (sequence is synthesized)
tactgcctgagtcccagctctgcatcacctaactggtggcttggcccctctggaccccctgttctccctctgggatcctttcagatgatcatgggctggccgctgccctctggagaacct

SEQ ID NO: 120959 - DNA, 120 bp, Artificial Sequence
  ENSG00000101019_46 (sequence is synthesized)
tctgtctcgcacttcccagggttaaagaaaaaaaatcattttcattccatgtgttccatttcttcttggaataaaccagaattgaagagtcagccctcttcctgctccctctcacccttt

SEQ ID NO: 120960 - DNA, 120 bp, Artificial Sequence
  ENSG00000101019_47 (sequence is synthesized)
acgacaaactcttttgagtggcccttaagatgtctcctaacctagtctcaacataactttcttgtgatcctgcctattcaccctccctgacaccctccctgcgccattttctttccagcc

SEQ ID NO: 120961 - DNA, 120 bp, Artificial Sequence
  ENSG00000101019_48 (sequence is synthesized)
tctgcacctttgcacaccttgctctgtctagaatgctctctctccctcctccccctcactctcctctgtcaaactcctcctcctccaagtttcacttaaatgttacctcctagagagccc

SEQ ID NO: 120962 - DNA, 120 bp, Artificial Sequence
  ENSG00000101019_49 (sequence is synthesized)
tctgtctcgcacttcccagacagggtcttgctcttgctgagtcgcccaggttgaagtgcagtggtgtgatgatagctccctgcagcctcgatcttctgggctcaatggccccagatgagc

SEQ ID NO: 120963 - DNA, 120 bp, Artificial Sequence
  ENSG00000101019_50 (sequence is synthesized)
gttgcctgggccaggcgcagtacggagtactgcctgagtcccagctctgcatcacctaactggtggcttggcccctctggaccccctgttctccctctgtatgtaataaaatgaagggat

SEQ ID NO: 120964 - DNA, 120 bp, Artificial Sequence
  ENSG00000101019_51 (sequence is synthesized)
tgggccagatacccttgtaagaccccttccacctctactgtgtgactgccccattttcctcttgtgcgtggagggcccttctgagctgattccatggttgctagcatgttcatagtatcc

SEQ ID NO: 120965 - DNA, 120 bp, Artificial Sequence
  ENSG00000101019_52 (sequence is synthesized)
ccaccgtctgtgtcctggctctgtggatccctcaggagaccactgctgtgctgtatgttccaggggatcctttcagatgatcatgggctggccgctgccctctggagaaccttcttcaac

SEQ ID NO: 120966 - DNA, 120 bp, Artificial Sequence
  ENSG00000101040_0 (sequence is synthesized)
atgcatccacagagcttggctgaagaggaaataaaaacagaacaggaggtggtagagggcatggatatctctactcgctccaaagatcctggctctgcagagagaacagcccagaaaaga

SEQ ID NO: 120967 - DNA, 120 bp, Artificial Sequence
  ENSG00000101040_1 (sequence is synthesized)
aagttccccagccctccacattcttccaatggccactcgccgcaggacacatcaacaagccccattaaaaagaaaaagaaacctggcttactgaacagtaacaataaggagcagtcagaa

SEQ ID NO: 120968 - DNA, 120 bp, Artificial Sequence
  ENSG00000101040_2 (sequence is synthesized)
ctaagacatggtccgttttactatatgaagcagccactcaccacagaccctgttgatgttgtaccgcaggatggacggaatgatttctactgctgggtttgtcaccgggaaggccaagtc

SEQ ID NO: 120969 - DNA, 120 bp, Artificial Sequence
  ENSG00000101040_3 (sequence is synthesized)
ctttgctgtgagctctgtccccgggtttatcacgctaagtgtctgagactgacatcggaaccagagggggactggttttgtcctgaatgtgagaaaattacagtagcagaatgcatcgag

SEQ ID NO: 120970 - DNA, 120 bp, Artificial Sequence
  ENSG00000101040_4 (sequence is synthesized)
acccagagtaaagccatgacaatgctcaccattgaacagttatcctacctgctcaagtttgccattcagaaaatgaaacagccagggacagatgcattccagaagcccgttccattggaa

SEQ ID NO: 120971 - DNA, 120 bp, Artificial Sequence
  ENSG00000101040_5 (sequence is synthesized)
cagcaccctgactatgcggaatacatcttccatccaatggacctttgtacattggaaaagaatgcgaaaaagaaaatgtatggctgcacagaagccttcctggctgatgcaaagtggatt

SEQ ID NO: 120972 - DNA, 120 bp, Artificial Sequence
  ENSG00000101040_6 (sequence is synthesized)
ttgcacaactgcatcatttataatgggggaaatcacaaattgacgcaaatagcgaaagtagtcatcaaaatctgtgaacatgagatgaatgaaatcgaagtatgtccagaatgttatcta

SEQ ID NO: 120973 - DNA, 120 bp, Artificial Sequence
  ENSG00000101040_7 (sequence is synthesized)
gctgcttgccaaaaacgagataactggttttgtgagccttgtagcaatccacatcctttggtctgggccaaactgaaggggtttccattctggcctgcaaaagctctaagggataaagac

SEQ ID NO: 120974 - DNA, 120 bp, Artificial Sequence
  ENSG00000101040_8 (sequence is synthesized)
gggcaggtcgatgcccgattctttggacaacatgacagggcctgggttccaataaataattgctacctcatgtctaaagaaattcctttttctgtgaaaaagactaagagcatcttcaac

SEQ ID NO: 120975 - DNA, 120 bp, Artificial Sequence
  ENSG00000101040_9 (sequence is synthesized)
agtgccatgcaagagatggaggtttacgtggagaacatccgcaggaagtttggggtttttaattactctccatttaggacaccctacacacccaacagccagtatcaaatgctgctcgat

SEQ ID NO: 120976 - DNA, 120 bp, Artificial Sequence
  ENSG00000101040_10 (sequence is synthesized)
cccaccaaccccagcgccggcactgccaagatagacaagcaggagaaggtcaagctcaactttgacatgacggcatcccccaagatcctgatgagcaagcctgtgctgagtgggggcaca

SEQ ID NO: 120977 - DNA, 120 bp, Artificial Sequence
  ENSG00000101040_11 (sequence is synthesized)
ggccgccggatttccttgtcggatatgccgcgctcccccatgagcacaaactcttctgtgcacacgggctccgacgtggagcaggatgctgagaagaaggccacgtcgagccacttcagt

SEQ ID NO: 120978 - DNA, 120 bp, Artificial Sequence
  ENSG00000101040_12 (sequence is synthesized)
gcgagcgaggagtccatggacttcctggataagagcacagcttcaccagcctccaccaagacgggacaagcagggagtttatccggcagcccaaagcccttctctcctcaactgtcagct

SEQ ID NO: 120979 - DNA, 120 bp, Artificial Sequence
  ENSG00000101040_13 (sequence is synthesized)
cctatcacgacgaaaacggacaaaacctccaccaccggcagcatcctgaatcttaacctggatcgaagcaaagctgagatggatttgaaggagctgagcgagtcggtccagcaacagtcc

SEQ ID NO: 120980 - DNA, 120 bp, Artificial Sequence
  ENSG00000101040_14 (sequence is synthesized)
caattaggcataaatgaaatctcggaagatgtctatacggccgtagagcacagcgattcggaggattctgagaagtcagatagtagcgatagtgagtatatcagtgatgatgagcagaag

SEQ ID NO: 120981 - DNA, 120 bp, Artificial Sequence
  ENSG00000101040_15 (sequence is synthesized)
tctaagaacgagccagaagacacagaggacaaagaaggttgtcagatggacaaagagccatctgctgttaaaaaaaagcccaagcctacaaacccagtggagattaaagaggagctgaaa

SEQ ID NO: 120982 - DNA, 120 bp, Artificial Sequence
  ENSG00000101040_16 (sequence is synthesized)
agcacgtcaccagccagcgagaaggcagaccctggagcagtcaaggacaaggccagccctgagcctgagaaggacttttccgaaaaggcaaaaccttcacctcaccccataaaggataaa

SEQ ID NO: 120983 - DNA, 120 bp, Artificial Sequence
  ENSG00000101040_17 (sequence is synthesized)
ctgaagggaaaagatgagacggattccccaacagtccatttgggcctggactctgattcagagagcgaacttgtcatagatttaggagaagaccattctgggcgggagggtcgaaaaaat

SEQ ID NO: 120984 - DNA, 120 bp, Artificial Sequence
  ENSG00000101040_18 (sequence is synthesized)
aagaaggaacccaaagaaccatctcccaaacaggatgttgtaggtaaaactccaccatccacgacggtgggcagccattctcccccggaaacaccggtgctcacccgctcttccgcccaa

SEQ ID NO: 120985 - DNA, 120 bp, Artificial Sequence
  ENSG00000101040_19 (sequence is synthesized)
acttccgcggctggcgccacagccaccaccagcacgtcctccacggtcaccgtcacggccccggcccccgccgccacaggaagcccagtgaaaaagcagaggccgcttttaccgaaggag

SEQ ID NO: 120986 - DNA, 120 bp, Artificial Sequence
  ENSG00000101040_20 (sequence is synthesized)
actgccccggccgtgcagcgggtcgtgtggaactcatcaactgtccagcagaaggagatcacacagagcccatccacgtccaccatcaccctggtgaccagcacacagtcatcgcccctg

SEQ ID NO: 120987 - DNA, 120 bp, Artificial Sequence
  ENSG00000101040_21 (sequence is synthesized)
gtcaccagctcggggtccatgagcacccttgtgtcctcagtcaacgctgacctgcccatcgccactgcctcagctgatgtcgccgctgatattgccaagtacactagcaaaatgatggat

SEQ ID NO: 120988 - DNA, 120 bp, Artificial Sequence
  ENSG00000101040_22 (sequence is synthesized)
gcaataaaaggaacaatgacagaaatatacaacgatctttctaaaaacactactggaagcacaatagctgagattcgcaggctgaggatcgagatagagaagctccagtggctgcaccag

SEQ ID NO: 120989 - DNA, 120 bp, Artificial Sequence
  ENSG00000101040_23 (sequence is synthesized)
caagagctctccgaaatgaaacacaacttagagctgaccatggcggagatgcggcagagcctggagcaggagcgggaccggctcatcgccgaggtgaagaagcagctggagttggagaag

SEQ ID NO: 120990 - DNA, 120 bp, Artificial Sequence
  ENSG00000101040_24 (sequence is synthesized)
cagcaggcggtggatgagaccaagaagaagcagtggtgcgccaactgcaagaaggaggccatcttttactgctgttggaacaccagctactgtgactacccctgccagcaagcccactgg

SEQ ID NO: 120991 - DNA, 120 bp, Artificial Sequence
  ENSG00000101040_25 (sequence is synthesized)
cctgagcacatgaagtcctgcacccagtcagctactgctcctcagcaggaagcggatgctgaggtgaacacagaaacactaaataagtcctcccaggggagctcctcgagcacacaatca

SEQ ID NO: 120992 - DNA, 120 bp, Artificial Sequence
  ENSG00000101040_26 (sequence is synthesized)
gcaccttcagaaacggccagcgcctccaaagagaaggagacgtcagctgagaaaagcaaggagagtggctcgacccttgacctttctggctccagagagacgccctcctccattctctta

SEQ ID NO: 120993 - DNA, 120 bp, Artificial Sequence
  ENSG00000101040_27 (sequence is synthesized)
ggctccaaccaaggctctgttagcaaaaggtgtgacaagcaacctgcctatgccccaaccaccacagaccaccagccgcaccccaactaccccgcccagaagtaccattcccggagtaat

SEQ ID NO: 120994 - DNA, 120 bp, Artificial Sequence
  ENSG00000101040_28 (sequence is synthesized)
aaatccagttggagcagcagtgatgagaagaggggatcgacacgttccgatcacaacaccagtaccagcacgaagagcctcctcccgaaagagtctcggctggacaccttctgggactag

SEQ ID NO: 120995 - DNA, 120 bp, Artificial Sequence
  ENSG00000101040_29 (sequence is synthesized)
cggctttacactccgatttgccggggcagccaatcggggatgagcttttattaggcggccagatcatcagccgaagtgccaaaccctttttctgtgagaactaggagcctgtcctccatg

SEQ ID NO: 120996 - DNA, 120 bp, Artificial Sequence
  ENSG00000101040_30 (sequence is synthesized)
ttttataagtattgacattacacagtgttaacaatgcatccacagagtcccaaatctgccagcctgttctctcttcctaactgtggaaaaatgagacggttgcttgaacatttgttggct

SEQ ID NO: 120997 - DNA, 120 bp, Artificial Sequence
  ENSG00000101040_31 (sequence is synthesized)
acaaaaccctcagttgagcctgagcccccggcgcgggggctgctacactacaggacacccagcatcggctttgactgcagactgttcacccacacgagccctgtgcttttggtgtaaata

SEQ ID NO: 120998 - DNA, 120 bp, Artificial Sequence
  ENSG00000101040_32 (sequence is synthesized)
atgtacaatttgtggatgtcattgaatctagaggactttcccctttttatatttgtattaactttaacttattaaaaaaaaaaaaagaaaaagaaaaacgatttaaaaaaaaaaaaaaaa

SEQ ID NO: 120999 - DNA, 120 bp, Artificial Sequence
  ENSG00000101040_33 (sequence is synthesized)
ggagtgtagaggaaataaaatcatgtctgtggctcatgacagcattccatattcagttgttgggttgtgttgttgttgttgtgtgtgtttttaataataccatgtaactgtttaaaaaaa

SEQ ID NO: 121000 - DNA, 120 bp, Artificial Sequence
  ENSG00000101040_34 (sequence is synthesized)
taagtttcaaacgtcctcccaaaagtggcacatgcagaagatgcagcgtcagcagcagcagcagcagcagcaaaaccagcagcagcagcctcagtcttcccaggggacgagatatcagac

SEQ ID NO: 121001 - DNA, 120 bp, Artificial Sequence
  ENSG00000101040_35 (sequence is synthesized)
ctcatccttggatacccaggggagggcgaaccgttttcgctcgtgtgtctgtacgcagcatgttgggatcgggagtttcggcacagactatcccatcaagccgttggctcctttcagcta

SEQ ID NO: 121002 - DNA, 120 bp, Artificial Sequence
  ENSG00000101040_36 (sequence is synthesized)
ctacgttaccacgttcctaaaacgcaagctctccggaccagacggacacagggagaagctagtttctttcatgtgattgaaatgatgactctactcctaaaagggaaaaaacaatatcct

SEQ ID NO: 121003 - DNA, 120 bp, Artificial Sequence
  ENSG00000101040_37 (sequence is synthesized)
tgtttacagaagagaaacaaacaagccccactcagctcagtcacaggagagaacacagaaagtcttaggatcatgaactctgaaaaaaagagaaaccttatctttgctttgtggttcctt

SEQ ID NO: 121004 - DNA, 120 bp, Artificial Sequence
  ENSG00000101040_38 (sequence is synthesized)
taaacacactcacacacacttggtcagagatgctgtgcttcttggaagcaaggactcaaaggcaaggtgcacgcagaggacgtttgagtctgggatgaagcatgtacgtattatttatat

SEQ ID NO: 121005 - DNA, 120 bp, Artificial Sequence
  ENSG00000101040_39 (sequence is synthesized)
gatggaatttcacgtttttatgtaagcatgaaacacaggcagtatgagagaaagcaaggcccgtcatgctgtccgtacactacgtatgctgtagagccattttgtatgttgtgtaaaaca

SEQ ID NO: 121006 - DNA, 120 bp, Artificial Sequence
  ENSG00000101040_40 (sequence is synthesized)
aaaagcattgatgaaaaagcaaaaggtgatgtatgtatatgagaaaattaattgtacgatatcattccagtacgttttgttgtacattttagtcttgtttactttctcttcattgttaag

SEQ ID NO: 121007 - DNA, 120 bp, Artificial Sequence
  ENSG00000101040_41 (sequence is synthesized)
aggatgcgaactgtacagtttccagctagttacccatattagagaagaaataagagagtattagaagaaaacaggagagaaagaacatttgtgaattgcagttgtcaaaaaaaaaaaata

SEQ ID NO: 121008 - DNA, 120 bp, Artificial Sequence
  ENSG00000101040_42 (sequence is synthesized)
gcctagctggccttatttgtgaagcataattgcttttagcatatggaagtattttttcacattttctttgtataaaatttgtattaaacttaaatatctttttgatggtggtgtttcttt

SEQ ID NO: 121009 - DNA, 120 bp, Artificial Sequence
  ENSG00000101040_43 (sequence is synthesized)
gtgactgagccagtagactcacactatatgcttttttgggtttgcccgttccttcccccacccccccagttttttcagatttctttacctttttttaattaaactgttttggaaaaatgc

SEQ ID NO: 121010 - DNA, 120 bp, Artificial Sequence
  ENSG00000101040_44 (sequence is synthesized)
gagaggccgctgaggatccggaagcaggaatgtctgctgtgggtgagcctctgttctcttttgaacaagagaggctaggccctctgagcagccgcactttctcaatggcagatcctggct

SEQ ID NO: 121011 - DNA, 120 bp, Artificial Sequence
  ENSG00000101040_45 (sequence is synthesized)
cctccccttctgttctccgtggcgcccgctcccattttgccacatcgacaggagaaagtcattgctcttttattttttttttttagttctcgtttgtttccgggccattgtatcttgaag

SEQ ID NO: 121012 - DNA, 120 bp, Artificial Sequence
  ENSG00000101040_46 (sequence is synthesized)
gccttgcacattccatttggcattatttttaaaaattgttttgctacttgcttttttactttcaaaaagttttttttgttcattttataaatgatacatgcatatattctccttaaaaag

SEQ ID NO: 121013 - DNA, 120 bp, Artificial Sequence
  ENSG00000101040_47 (sequence is synthesized)
ggggcagaaagttttacataaaagtctgttatcccgtttaccttccatttcattctcttcccttccacagtggccagtatcaaccgttgtaaaagcttttctatgcatgtatgcatgtat

SEQ ID NO: 121014 - DNA, 120 bp, Artificial Sequence
  ENSG00000101040_48 (sequence is synthesized)
atgtatatatacatatctgtatgtatatatgtgcgcatcatgtatatgatgccataaaattagtcctttttcccccctttttttcttttttaaaacataaaaatggtaccatacttgctt

SEQ ID NO: 121015 - DNA, 120 bp, Artificial Sequence
  ENSG00000101040_49 (sequence is synthesized)
ttttcccccacccatcagcatgttttggaggtccatccacatcagcacatacagccctgccttgttcttttggactgctgcatagtatttcatagtttatttaaagcattcctctactaa

SEQ ID NO: 121016 - DNA, 120 bp, Artificial Sequence
  ENSG00000101040_50 (sequence is synthesized)
tgggcatttaggttgctttcagttttttttctactgtgagcagtgctgcaatgaatatctttgtataaatttccttgtgcacatgagggaacctcttggagttattttggaaaaagtaca

SEQ ID NO: 121017 - DNA, 120 bp, Artificial Sequence
  ENSG00000101040_51 (sequence is synthesized)
gtgcgagaagttgatagcgaaggttaccttagtaactggagattcgtcacacacacaagatgagccagcctcaagaaccacttgctgaagttgcagaatcagaactcccaccagtcctgc

SEQ ID NO: 121018 - DNA, 120 bp, Artificial Sequence
  ENSG00000101040_52 (sequence is synthesized)
aggaggctccatctggagctgaaattaggccaaacacagtgctgatctgactggttggtaccagtttgcctggcttttgtgagcattgatgtagatctttctaccaggaaacctgcatct

SEQ ID NO: 121019 - DNA, 120 bp, Artificial Sequence
  ENSG00000101040_53 (sequence is synthesized)
agatcctcaaaggctgggttcttcaactgaaactcatagtgaatgcgcccctgtgaggggggctcatgagcagcagaatgtgaggttgaaaggtggccaggtcttgaattggcccccagt

SEQ ID NO: 121020 - DNA, 120 bp, Artificial Sequence
  ENSG00000101040_54 (sequence is synthesized)
gaaacccttcacagatggcgagggagtgggtcctgaagaattggccaggcaaaattgagagtacagttggattaatcttgctatttaaaaagttggtggggcaaagccgagtctaggata

SEQ ID NO: 121021 - DNA, 120 bp, Artificial Sequence
  ENSG00000101040_55 (sequence is synthesized)
tttgagattgggattgcggcttcctgtcttctgtcttcatatctcataagcaggagacttccccaggggagtttaattgctaccaagaagagggtcgggcgtggtggctcacacctgtaa

SEQ ID NO: 121022 - DNA, 120 bp, Artificial Sequence
  ENSG00000101040_56 (sequence is synthesized)
tttaggaaggtggctttgaaactcgcagggctgcttaaacaagagctacagctattgaacaaactgctaccattttagcttcaacacaggaatgaggcagtgttgccagacgccatttta

SEQ ID NO: 121023 - DNA, 120 bp, Artificial Sequence
  ENSG00000101049_0 (sequence is synthesized)
attcctgactgggaaggttgcttgacaagtcaggattgtgcctccagtcagaaggaccatgaagagagagaagagggcagagccgtgcatggggctgctccccaggacctgagcaggaac

SEQ ID NO: 121024 - DNA, 120 bp, Artificial Sequence
  ENSG00000101049_1 (sequence is synthesized)
ctggagttttcagagctgcctgatcattgctacagaatgaactctagcccagctgggaccccaagtccacagccctccagggccaatgggaacatcaacctggggccttcagccaaccca

SEQ ID NO: 121025 - DNA, 120 bp, Artificial Sequence
  ENSG00000101049_2 (sequence is synthesized)
aatgcccagcccacggacttcgacttcctcaaagtcatcggcaaagggaactacgggaaggtcctactggccaagcgcaagtctgatggggcgttctatgcagtgaaggtactacagaaa

SEQ ID NO: 121026 - DNA, 120 bp, Artificial Sequence
  ENSG00000101049_3 (sequence is synthesized)
aagtccatcttaaagaagaaagagcagagccacatcatggcagagcgcagtgtgcttctgaagaacgtgcggcaccccttcctcgtgggcctgcgctactccttccagacacctgagaag

SEQ ID NO: 121027 - DNA, 120 bp, Artificial Sequence
  ENSG00000101049_4 (sequence is synthesized)
ctctacttcgtgctcgactatgtcaacgggggagagctcttcttccacctgcagcgggagcgccggttcctggagccccgggccaggttctacgctgctgaggtggccagcgccattggc

SEQ ID NO: 121028 - DNA, 120 bp, Artificial Sequence
  ENSG00000101049_5 (sequence is synthesized)
tacctgcactccctcaacatcatttacagggatctgaaaccagagaacattctcttggactgccagggacacgtggtgctgacggattttggcctctgcaaggaaggtgtagagcctgaa

SEQ ID NO: 121029 - DNA, 120 bp, Artificial Sequence
  ENSG00000101049_6 (sequence is synthesized)
gacaccacatccacattctgtggtacccctgagtacttggcacctgaagtgcttcggaaagagccttatgatcgagcagtggactggtggtgcttgggggcagtcctctacgagatgctc

SEQ ID NO: 121030 - DNA, 120 bp, Artificial Sequence
  ENSG00000101049_7 (sequence is synthesized)
gatccccggaggccggacagtggccgcctgtgacctcctgcaaagccttctccacaaggaccagaggcagcggctgggctccaaagcagactttcttgagattaagaaccatgtattctt

SEQ ID NO: 121031 - DNA, 120 bp, Artificial Sequence
  ENSG00000101049_8 (sequence is synthesized)
cagccccataaactgggatgacctgtaccacaagaggctaactccacccttcaacccaaatgtgacaggacctgctgacttgaagcattttgacccagagttcacccaggaagctgtgtc

SEQ ID NO: 121032 - DNA, 120 bp, Artificial Sequence
  ENSG00000101049_9 (sequence is synthesized)
caagtccattggctgtacccctgacactgtggccagcagctctggggcctcaagtgcattcctgggattttcttatgcgccagaggatgatgacatcttggattgctagaagagaaggac

SEQ ID NO: 121033 - DNA, 120 bp, Artificial Sequence
  ENSG00000101049_10 (sequence is synthesized)
ctgtgaaactactgaggccagctggtattagtaaggaattaccttcagctgctaggaagagcgactcaaactaacaatggcttcaacgagaagcaggtttattttttccagcacataaaa

SEQ ID NO: 121034 - DNA, 120 bp, Artificial Sequence
  ENSG00000101049_11 (sequence is synthesized)
gaaaaataatgtttcggagtccaggactggcaggacaggtcatcagatactcagaggctgtatctctgccctgccaaccttgacaaatggcttccaatgttaggtttgctacaagatggt

SEQ ID NO: 121035 - DNA, 120 bp, Artificial Sequence
  ENSG00000101049_12 (sequence is synthesized)
tactggagctctagctgcctattttgtgtttagggaagggaaaatggaggaaaggggagaagagcaaagggcgcttttaaagagctttcccaaaagctccacccaatgacttctgcttcc

SEQ ID NO: 121036 - DNA, 120 bp, Artificial Sequence
  ENSG00000101049_13 (sequence is synthesized)
atctcactaaccacccacccctacctggaatggaggctgggagatgtggcttatttgctgggtacgtgactatccctaataacaaaggggttctgacactaagacattaggggagaatgt

SEQ ID NO: 121037 - DNA, 120 bp, Artificial Sequence
  ENSG00000101049_14 (sequence is synthesized)
tgggtaggcagccagcactcttttaccagagggcctcctggtgtttggattttgatctcaatgtgtaaaatgacagagatgtaacaagctcatagggtatcaatatctcttattgttcta

SEQ ID NO: 121038 - DNA, 120 bp, Artificial Sequence
  ENSG00000101049_15 (sequence is synthesized)
agctagccccctcgcggctgccgggagctgtgagctctgtgctggggccaggccggcaccaggcacagacacttaggcccttgttgggagaacagagagaggctctcttgtccactgcct

SEQ ID NO: 121039 - DNA, 120 bp, Artificial Sequence
  ENSG00000101049_16 (sequence is synthesized)
agcacaaggatatgccacatgtacttttacttacactcacattagtctccacactgccctgtgagagtactcccggggccttccgttcccaggacacggatagccagttgaatgcctttg

SEQ ID NO: 121040 - DNA, 120 bp, Artificial Sequence
  ENSG00000101049_17 (sequence is synthesized)
caaaaatagaaaaaggcatcccctccgggcagactaattagaaaaagcaccccttgaaacaaaaataaagttgccggataatacctttgaactagtgttgcggcttggtgagtggattac

SEQ ID NO: 121041 - DNA, 120 bp, Artificial Sequence
  ENSG00000101049_18 (sequence is synthesized)
agccatgagtgcagccccctttacccttttggctggtgcttttgtgtggtacacaccatgtaaattgcacaaagcagtcctggctgacctcttctacatccccaacccatggcaaagggc

SEQ ID NO: 121042 - DNA, 120 bp, Artificial Sequence
  ENSG00000101049_19 (sequence is synthesized)
cctgcagaaagcaggcctttgctgaatgactgatgcatgaacacacacacagccacagagcacacgtacagcagggtcagctcttggtcatcttcctccaagtgccttatttacagctgg

SEQ ID NO: 121043 - DNA, 120 bp, Artificial Sequence
  ENSG00000101049_20 (sequence is synthesized)
acagcattctagactctggatttccggggctgggggagcttgctatgcttgccaactctccttatctagatggaaaacttgggggtccaagaagctcagtcatttgtcctaggctacaca

SEQ ID NO: 121044 - DNA, 120 bp, Artificial Sequence
  ENSG00000101049_21 (sequence is synthesized)
gtcagttagagacagaactgggcctgactacaggtgcagctcttggataaacagccatgttgctgctcctttgtcttgagcaccaataaataactctggctgcagagacttttacagttt

SEQ ID NO: 121045 - DNA, 120 bp, Artificial Sequence
  ENSG00000101049_22 (sequence is synthesized)
gtgaagtgctctgtttcgcacagcacacccacatagggccaagccctttagagatattttatccttttctatttatagactttttcctgataataaaaatgacatatatccttataaaaa

SEQ ID NO: 121046 - DNA, 84 bp, Artificial Sequence
  ENSG00000101049_23 (sequence is synthesized)
tttttcctgataataaaaatgacatatatccttataaaaagtatgtaaaacactggccaggcacagtggctcacgactgtagta

SEQ ID NO: 121047 - DNA, 120 bp, Artificial Sequence
  ENSG00000101049_24 (sequence is synthesized)
accaagcccttcttgctccaacagctaggggttgtgtggacactaaatcctgatgaaatcctggtggacttggtcctttgttttgggtggggttggagtctcctcctccgaggtccaagt

SEQ ID NO: 121048 - DNA, 120 bp, Artificial Sequence
  ENSG00000101049_25 (sequence is synthesized)
gcccagcctttctgggctctccttctgcatctctggcaacctccatgaatagttctcctgccaggaccaccccccgcccaggtctccaactctcctcactaaatggctgagacacctcaa

SEQ ID NO: 121049 - DNA, 120 bp, Artificial Sequence
  ENSG00000101049_26 (sequence is synthesized)
atgggttcagactttatgccctgaaaagatccttccagccctggccatcttggacttctggagctaccctggctcacaggggtcttgttgccctgggtgtccccagttcttgaaaagaat

SEQ ID NO: 121050 - DNA, 120 bp, Artificial Sequence
  ENSG00000101049_27 (sequence is synthesized)
cagcctgggaggggccacaccctgaccatccccctttatcccttctgagatgtttgttaggaagtctgggtccaggggatatcatttcttgttccatccatgcaggggttgcttacctcg

SEQ ID NO: 121051 - DNA, 120 bp, Artificial Sequence
  ENSG00000101049_28 (sequence is synthesized)
ggtaggaaaccctcaggcggtggcaggtgcacaggtaggggaggatggagagggcagtggtgcctgaagccctggatgggcggagctgaccccccaacaccaactctctcatgcctgctc

SEQ ID NO: 121052 - DNA, 120 bp, Artificial Sequence
  ENSG00000101049_29 (sequence is synthesized)
tctcaataataaataaataaatacgaaaagtggtttgtttttttacaaatgtgtggttcatactcctgggtggccttattagcttttttggttgggagacaagggaaggaactttcttgg

SEQ ID NO: 121053 - DNA, 120 bp, Artificial Sequence
  ENSG00000101049_30 (sequence is synthesized)
atcagtgtgtgctggtgattttattgccttttcctcttaattcaatcccactctttcccttcctcaagtcttgttcacccagcctcctgccccaggaatcacggggaagaagtctgggag

SEQ ID NO: 121054 - DNA, 120 bp, Artificial Sequence
  ENSG00000101049_31 (sequence is synthesized)
accacagaaaaaacaccaatgacactgagctattagagatcaaaactgggtcaggaagagttcatgttaagctttcacatgtgctaagaacgctgaaagatacacactgatttccatctt

SEQ ID NO: 121055 - DNA, 120 bp, Artificial Sequence
  ENSG00000101049_32 (sequence is synthesized)
aatagtgccagataattgacaaatttgggacaagatgagggagaggtcaaaatccccctaacttcccaaagcaaaaaaacaggagtataatgatcagaaacgtaatagtagtgtcagaag

SEQ ID NO: 121056 - DNA, 120 bp, Artificial Sequence
  ENSG00000101049_33 (sequence is synthesized)
cacacaatcagctgtggacggtgaaacatataatggttctatctgttctgagattgtaaaagcacaattattttcatcaggataaaaaataaaaatgaaaaactatgctgttgaatggaa

SEQ ID NO: 121057 - DNA, 120 bp, Artificial Sequence
  ENSG00000101049_34 (sequence is synthesized)
ggattttaaaaagacagtgaagataatgtcgaacttataccctggagagagaaccatacatggaatactaggcagagatgaatggactttagaatgagacactccggagctggattcctg

SEQ ID NO: 121058 - DNA, 120 bp, Artificial Sequence
  ENSG00000101049_35 (sequence is synthesized)
acatatgctgatgtaaatgtacaaatgtggtcacactgacacatacatgcaatcatctacgcagactcatagaaaccgacacaaatacctgaaatacacagccacagacagacacacacg

SEQ ID NO: 121059 - DNA, 120 bp, Artificial Sequence
  ENSG00000101049_36 (sequence is synthesized)
gaagcactctatgcacaaaacactcacacagtacacaccatgctgcacataccctgacccaaacagtctaacaagccctgagggtctccagggctgccctggggctattgcccacccctc

SEQ ID NO: 121060 - DNA, 120 bp, Artificial Sequence
  ENSG00000101049_37 (sequence is synthesized)
ggcccacagggaggcttccctgggctggctctcggctgggagctgtccatcccacatgcccactgcatgccaagttctggaatgatctcacttcatcttacaatagacccattttgtagc

SEQ ID NO: 121061 - DNA, 120 bp, Artificial Sequence
  ENSG00000101052_0 (sequence is synthesized)
gcgtcctgggccacgcctcccggcgcaccgacgcgcctctccggttactaagcggccttggatacctggccgcgggatgctgggcggcgtcaggtgagcggtggtcgctgggcctcaggt

SEQ ID NO: 121062 - DNA, 120 bp, Artificial Sequence
  ENSG00000101052_1 (sequence is synthesized)
aaccatggagaaagagctgcggagcaccattcttttcaatgcctacaaaaaggagatatttaccaccaacaatggctacaaatccatgcagaaaaaacttcggagtaattggaagattca

SEQ ID NO: 121063 - DNA, 120 bp, Artificial Sequence
  ENSG00000101052_2 (sequence is synthesized)
gagcttaaaagatgaaatcacatctgagaagttaaatggagtgaaactgtggattacagctgggccaagggaaaaatttactgcagctgagtttgaaatcctgaagaaatatcttgacac

SEQ ID NO: 121064 - DNA, 120 bp, Artificial Sequence
  ENSG00000101052_3 (sequence is synthesized)
tggtggagatgtctttgtgatgctaggagaaggtggagaatccagatttgacaccaatattaactttttactagaagaatatggaatcatggttaataatgatgctgtggttagaaatgt

SEQ ID NO: 121065 - DNA, 120 bp, Artificial Sequence
  ENSG00000101052_4 (sequence is synthesized)
atatcacaaatatttccatcctaaagaagctctagtttccagtggagtcttgaacagggaaattagccgagctgcaggaaaggctgtgcctgggatcattgatgaggaaagcagtggaaa

SEQ ID NO: 121066 - DNA, 120 bp, Artificial Sequence
  ENSG00000101052_5 (sequence is synthesized)
caatgcccaggctctcacctttgtgtatccttttggtgccacattgagtgtcatgaaaccagcagtggcggttctgtctacaggttctgtctgcttcccacttaacagacccattttggc

SEQ ID NO: 121067 - DNA, 120 bp, Artificial Sequence
  ENSG00000101052_6 (sequence is synthesized)
tttctatcactcaaagaaccaaggtgggaagctggcagtgcttggttcatgtcacatgttcagtgatcaatatttggacaaagaagaaaacagcaaaatcatggatgttgttttccagtg

SEQ ID NO: 121068 - DNA, 120 bp, Artificial Sequence
  ENSG00000101052_7 (sequence is synthesized)
cctacacagccaccctatcaaagcggaatcgagagtgtctccaggagagtgatgagatcccaagggactttaccaccctcttcgacctgtccatcttccagctggataccacctccttcc

SEQ ID NO: 121069 - DNA, 120 bp, Artificial Sequence
  ENSG00000101052_8 (sequence is synthesized)
acagcgtcatcgaggctcacgagcagctaaatgtgaaacatgaaccactccagctcatccagcctcagtttgagacgccgctgccaacccttcagcctgcggtttttcctcccagtttcc

SEQ ID NO: 121070 - DNA, 120 bp, Artificial Sequence
  ENSG00000101052_9 (sequence is synthesized)
gggagttaccacctcctcctctggagctatttgatttagatgaaacgttctcctctgagaaggcacggctggctcagattaccaataagtgtactgaagaagacctggaattttatgtca

SEQ ID NO: 121071 - DNA, 120 bp, Artificial Sequence
  ENSG00000101052_10 (sequence is synthesized)
ggaagtgtggtgatattcttggagtaaccagtaaactaccaaaggaccaacaggatgccaaacatatccttgagcacgtcttcttccaagtggtggagttcaagaaattgaaccaggaac

SEQ ID NO: 121072 - DNA, 120 bp, Artificial Sequence
  ENSG00000101052_11 (sequence is synthesized)
atgacatcgatacaagtgaaacagcattccagaacaatttctgaagaccatgcctcttgaagctttttctgcctcctgattctctctttgtaaactattttcaaattgtttttcaactcc

SEQ ID NO: 121073 - DNA, 120 bp, Artificial Sequence
  ENSG00000101052_12 (sequence is synthesized)
ttatcaaaattgtttatacactctttcctccatgagctctggaaggtatatgcatcttctgtaatactcagataggtataagatttttcacaaaatccttatgtaagatacattccattt

SEQ ID NO: 121074 - DNA, 120 bp, Artificial Sequence
  ENSG00000101052_13 (sequence is synthesized)
ttaaaaattaaatgtatggttgcatctgtctttttataccctatgaaacagtcttgatttttttttctcaaccccagttctggatttgagtcttttatcaaagacataattaactctcaa

SEQ ID NO: 121075 - DNA, 120 bp, Artificial Sequence
  ENSG00000101052_14 (sequence is synthesized)
ccagcagtggcggttctgtctacaggttctgtctgcttcccacttaacagacccattttggctttctatcactcaaagacagggtttcccaggctggagtgcatggtgcagtcatagctc

SEQ ID NO: 121076 - DNA, 120 bp, Artificial Sequence
  ENSG00000101052_15 (sequence is synthesized)
gttgcattcagggaatgataatttgatttcctactgttgcacctgttctttctaatgtaggaatactagatctgaggaataggaaagccagtaccagtccagttttattctgattaggag

SEQ ID NO: 121077 - DNA, 120 bp, Artificial Sequence
  ENSG00000101052_16 (sequence is synthesized)
tgcttttattataaaagcagcacattagagagctctagggtttttcagtgttgaaatcctgtagtcacattactttaggaagaggtgagtgatcttaggaaatgtggaaacatgacaggg

SEQ ID NO: 121078 - DNA, 120 bp, Artificial Sequence
  ENSG00000101052_17 (sequence is synthesized)
atgaggaagatgtatcattttggagtcttctttttcaaaatgaaaagagcttttgtttctggttacaaaaataatcagaatttgaacagttcaagaggaaaaaagtagaagctctgcact

SEQ ID NO: 121079 - DNA, 120 bp, Artificial Sequence
  ENSG00000101052_18 (sequence is synthesized)
tattagaaacttttaaatgaaaaatgagtccagcttctcagtaccacttctcacagctcaaaaggaatacatgactgtcttaactcatctgtaagacagatggaacgaaggaatgatttg

SEQ ID NO: 121080 - DNA, 120 bp, Artificial Sequence
  ENSG00000101057_0 (sequence is synthesized)
gactgcagttcctgcgagcgaggagcgcgggacctgctgacacgctgacgccttcgagcgcggcccggggcccggagcggccggagcagcccgggtcctgaccccggcccggctcccgct

SEQ ID NO: 121081 - DNA, 120 bp, Artificial Sequence
  ENSG00000101057_1 (sequence is synthesized)
ccgggctctgccggcgggcgggcgagcgcggcgcggtccgggccggggggatgtctcggcggacgcgctgcgaggatctggatgagctgcactaccaggacacagattcagatgtgccgg

SEQ ID NO: 121082 - DNA, 120 bp, Artificial Sequence
  ENSG00000101057_2 (sequence is synthesized)
agcagagggatagcaagtgcaaggtcaaatggacccatgaggaggacgagcagctgagggccctggtgaggcagtttggacagcaggactggaagttcctggccagccacttccctaacc

SEQ ID NO: 121083 - DNA, 120 bp, Artificial Sequence
  ENSG00000101057_3 (sequence is synthesized)
gcactgaccagcaatgccagtacaggtggctgagagttttgaatccagaccttgtcaaggggccatggaccaaagaggaagaccaaaaagtcatcgagctggttaagaagtatggcacaa

SEQ ID NO: 121084 - DNA, 120 bp, Artificial Sequence
  ENSG00000101057_4 (sequence is synthesized)
agcagtggacactgattgccaagcacctgaagggccggctggggaagcagtgccgtgaacgctggcacaaccacctcaaccctgaggtgaagaagtcttgctggaccgaggaggaggacc

SEQ ID NO: 121085 - DNA, 120 bp, Artificial Sequence
  ENSG00000101057_5 (sequence is synthesized)
gcatcatctgcgaggcccacaaggtgctgggcaaccgctgggccgagatcgccaagatgttgccagggaggacagacaatgctgtgaagaatcactggaactctaccatcaaaaggaagg

SEQ ID NO: 121086 - DNA, 120 bp, Artificial Sequence
  ENSG00000101057_6 (sequence is synthesized)
tggacacaggaggcttcttgagcgagtccaaagactgcaagcccccagtgtacttgctgctggagctcgaggacaaggacggcctccagagtgcccagcccacggaaggccagggaagtc

SEQ ID NO: 121087 - DNA, 120 bp, Artificial Sequence
  ENSG00000101057_7 (sequence is synthesized)
ttctgaccaactggccctccgtccctcctaccataaaggaggaggaaaacagtgaggaggaacttgcagcagccaccacatcgaaggaacaggagcccatcggtacagatctggacgcag

SEQ ID NO: 121088 - DNA, 120 bp, Artificial Sequence
  ENSG00000101057_8 (sequence is synthesized)
tgcgaacaccagagcccttggaggaattcccgaagcgtgaggaccaggaaggctccccaccagaaacgagcctgccttacaagtgggtggtggaggcagctaacctcctcatccctgctg

SEQ ID NO: 121089 - DNA, 120 bp, Artificial Sequence
  ENSG00000101057_9 (sequence is synthesized)
tgggttctagcctctctgaagccctggacttgatcgagtcggaccctgatgcttggtgtgacctgagtaaatttgacctccctgaggaaccatctgcagaggacagtatcaacaacagcc

SEQ ID NO: 121090 - DNA, 120 bp, Artificial Sequence
  ENSG00000101057_10 (sequence is synthesized)
tagtgcagctgcaagcgtcacatcagcagcaagtcctgccaccccgccagccttccgccctggtgcccagtgtgaccgagtaccgcctggatggccacaccatctcagacctgagccgga

SEQ ID NO: 121091 - DNA, 120 bp, Artificial Sequence
  ENSG00000101057_11 (sequence is synthesized)
ccccagcactgaagtcgggggctctggcattggcacaccgccctctgtgctcaagcggcagaggaagaggcgtgtggctctgtcccctgtcactgagaatagcaccagtctgtccttcct

SEQ ID NO: 121092 - DNA, 120 bp, Artificial Sequence
  ENSG00000101057_12 (sequence is synthesized)
ggattcctgtaacagcctcacgcccaagagcacacctgttaagaccctgcccttctcgccctcccagtttctgaacttctggaacaaacaggacacattggagctggagagcccctcgct

SEQ ID NO: 121093 - DNA, 120 bp, Artificial Sequence
  ENSG00000101057_13 (sequence is synthesized)
gacatccaccccagtgtgcagccagaaggtggtggtcaccacaccactgcaccgggacaagacacccctgcaccagaaacatgctgcgtttgtaaccccagatcagaagtactccatgga

SEQ ID NO: 121094 - DNA, 120 bp, Artificial Sequence
  ENSG00000101057_14 (sequence is synthesized)
caacactccccacacgccaaccccgttcaagaacgccctggagaagtacggacccctgaagcccctgccacagaccccgcacctggaggaggacttgaaggaggtgctgcgttctgaggc

SEQ ID NO: 121095 - DNA, 120 bp, Artificial Sequence
  ENSG00000101057_15 (sequence is synthesized)
tggcatcgaactcatcatcgaggacgacatcaggcccgagaagcagaagaggaagcctgggctgcggcggagccccatcaagaaagtccggaagtctctggctcttgacattgtggatga

SEQ ID NO: 121096 - DNA, 120 bp, Artificial Sequence
  ENSG00000101057_16 (sequence is synthesized)
ggatgtgaagctgatgatgtccacactgcccaagtctctatccttgccgacaactgccccttcaaactcttccagcctcaccctgtcaggtatcaaagaagacaacagcttgctcaacca

SEQ ID NO: 121097 - DNA, 120 bp, Artificial Sequence
  ENSG00000101057_17 (sequence is synthesized)
gggcttcttgcaggccaagcccgagaaggcagcagtggcccagaagccccgaagccacttcacgacacctgcccctatgtccagtgcctggaagacggtggcctgcggggggaccaggga

SEQ ID NO: 121098 - DNA, 120 bp, Artificial Sequence
  ENSG00000101057_18 (sequence is synthesized)
ccagcttttcatgcaggagaaagcccggcagctcctgggccgcctgaagcccagccacacatctcggaccctcatcttgtcctgaggtgttgagggtgtcacgagcccattctcatgttt

SEQ ID NO: 121099 - DNA, 120 bp, Artificial Sequence
  ENSG00000101057_19 (sequence is synthesized)
acaggggttgtgggggcagagggggtctgtgaatctgagagtcattcaggtgacctcctgcagggagccttctgccaccagcccctccccagactctcaggtggaggcaacagggccatg

SEQ ID NO: 121100 - DNA, 120 bp, Artificial Sequence
  ENSG00000101057_20 (sequence is synthesized)
tgctgccctgttgccgagcccagctgtgggcggctcctggtgctaacaacaaagttccacttccaggtctgcctggttccctccccaaggccacagggagctccgtcagcttctcccaag

SEQ ID NO: 121101 - DNA, 120 bp, Artificial Sequence
  ENSG00000101057_21 (sequence is synthesized)
cccacgtcaggcctggcctcatctcagaccctgcttaggatgggggatgtggccaggggtgctcctgtgctcaccctctcttggtgcatttttttggaagaataaaattgcctctctctt

SEQ ID NO: 121102 - DNA, 120 bp, Artificial Sequence
  ENSG00000101074_0 (sequence is synthesized)
tgggcatctggaccagagctgcatctggaggtctttgccaagttcccaggaggcagcatcctctgggtcggcactgttggagaacgctcagggtctggtgctctcgtgcctgccccttcc

SEQ ID NO: 121103 - DNA, 120 bp, Artificial Sequence
  ENSG00000101074_1 (sequence is synthesized)
aggcagccggctctgattgcacaaggcagacctgtgactcctccatccagctatgcccctgctgcccagcaccgtgggcctggcaggcctgctcttctgggctggccaggcagtgaacgc

SEQ ID NO: 121104 - DNA, 120 bp, Artificial Sequence
  ENSG00000101074_2 (sequence is synthesized)
cttgataatgcctaatgctaccccagccccggcccagcccgagagcacggctatgcggctcctgagtggcctggaggtgcccaggtaccgccggaagcgccacatctctgtgagagacat

SEQ ID NO: 121105 - DNA, 120 bp, Artificial Sequence
  ENSG00000101074_3 (sequence is synthesized)
gaatgccttactggattatcacaaccacatccgggccagtgtgtacccacctgccgccaacatggaatacatggtctgggacaagcggctggccagggctgccgaagcctgggccaccca

SEQ ID NO: 121106 - DNA, 120 bp, Artificial Sequence
  ENSG00000101074_4 (sequence is synthesized)
gtgcatctgggcacatgggccttcacagctgatgagatacgtgggccagaacctctccatccattctggccagtaccggtccgtagtggatctcatgaagtcctggtctgaggagaagtg

SEQ ID NO: 121107 - DNA, 120 bp, Artificial Sequence
  ENSG00000101074_5 (sequence is synthesized)
acctgctcccattatacccagatggtgtgggcatcctccaatcggctgggctgtgccatccacacctgtagtagcatcagtgtctggggcaacacctggcatcgggcggcatacctggtc

SEQ ID NO: 121108 - DNA, 120 bp, Artificial Sequence
  ENSG00000101074_6 (sequence is synthesized)
tgcaactatgccattaagggcaactggattggcgagtccccgtacaagatgggaaagccgtgctcctcctgtccccccagttatcaaggcagctgcaatagcaacatgtgcttcaagggg

SEQ ID NO: 121109 - DNA, 120 bp, Artificial Sequence
  ENSG00000101074_7 (sequence is synthesized)
ctgaaatccaacaagttcacgtggttctgaattttctctgggctttggtgcgcctccagctgggcctgaccctccatgtcctgccctcaaaaaactgggtggagaaataattgtttcttt

SEQ ID NO: 121110 - DNA, 120 bp, Artificial Sequence
  ENSG00000101074_8 (sequence is synthesized)
aaaggatatgagttagaatcaccccctgttgaattttccctcctagatccccttcttaaatgtccaacatgggtcaaaagaaaatgacctccttgccttccttctttcctagttgcatct

SEQ ID NO: 121111 - DNA, 120 bp, Artificial Sequence
  ENSG00000101074_9 (sequence is synthesized)
ttcttttcttgggcctctgggaaagagccctgcatctttcattaattcggttctcagagaaccaaggctggaaggcatagaactggcaccttgggaccaggcataatggctcacacctat

SEQ ID NO: 121112 - DNA, 88 bp, Artificial Sequence
  ENSG00000101074_10 (sequence is synthesized)
aatcccagtattcctggagttggagaacagcctggaaagcctggcgataccccatctctatttagaaacaaacaaacaaacaaataaa

SEQ ID NO: 121113 - DNA, 120 bp, Artificial Sequence
  ENSG00000101076_0 (sequence is synthesized)
gggaggaggcagtgggagggcggagggcgggggccttcggggtgggcgcccagggtagggcaggtggccgcggcgtggaggcagggagaatgcgactctccaaaaccctcgtcgacatgg

SEQ ID NO: 121114 - DNA, 120 bp, Artificial Sequence
  ENSG00000101076_1 (sequence is synthesized)
acatggccgactacagtgctgcactggacccagcctacaccaccctggaatttgagaatgtgcaggtgttgacgatgggcaatgacacgtccccatcagaaggcaccaacctcaacgcgc

SEQ ID NO: 121115 - DNA, 120 bp, Artificial Sequence
  ENSG00000101076_2 (sequence is synthesized)
ccaacagcctgggtgtcagcgccctgtgtgccatctgcggggaccgggccacgggcaaacactacggtgcctcgagctgtgacggctgcaagggcttcttccggaggagcgtgcggaaga

SEQ ID NO: 121116 - DNA, 120 bp, Artificial Sequence
  ENSG00000101076_3 (sequence is synthesized)
accacatgtactcctgcagatttagccggcagtgcgtggtggacaaagacaagaggaaccagtgccgctactgcaggctcaagaaatgcttccgggctggcatgaagaaggaagccgtcc

SEQ ID NO: 121117 - DNA, 120 bp, Artificial Sequence
  ENSG00000101076_4 (sequence is synthesized)
agaatgagcgggaccggatcagcactcgaaggtcaagctatgaggacagcagcctgccctccatcaatgcgctcctgcaggcggaggtcctgtcccgacagatcacctcccccgtctccg

SEQ ID NO: 121118 - DNA, 120 bp, Artificial Sequence
  ENSG00000101076_5 (sequence is synthesized)
ggatcaacggcgacattcgggcgaagaagattgccagcatcgcagatgtgtgtgagtccatgaaggagcagctgctggttctcgttgagtgggccaagtacatcccagctttctgcgagc

SEQ ID NO: 121119 - DNA, 120 bp, Artificial Sequence
  ENSG00000101076_6 (sequence is synthesized)
tccccctggacgaccaggtggccctgctcagagcccatgctggcgagcacctgctgctcggagccaccaagagatccatggtgttcaaggacgtgctgctcctaggcaatgactacattg

SEQ ID NO: 121120 - DNA, 120 bp, Artificial Sequence
  ENSG00000101076_7 (sequence is synthesized)
tccctcggcactgcccggagctggcggagatgagccgggtgtccatacgcatccttgacgagctggtgctgcccttccaggagctgcagatcgatgacaatgagtatgcctacctcaaag

SEQ ID NO: 121121 - DNA, 120 bp, Artificial Sequence
  ENSG00000101076_8 (sequence is synthesized)
ccatcatcttctttgacccagatgccaaggggctgagcgatccagggaagatcaagcggctgcgttcccaggtgcaggtgagcttggaggactacatcaacgaccgccagtatgactcgc

SEQ ID NO: 121122 - DNA, 120 bp, Artificial Sequence
  ENSG00000101076_9 (sequence is synthesized)
gtggccgctttggagagctgctgctgctgctgcccaccttgcagagcatcacctggcagatgatcgagcagatccagttcatcaagctcttcggcatggccaagattgacaacctgttgc

SEQ ID NO: 121123 - DNA, 120 bp, Artificial Sequence
  ENSG00000101076_10 (sequence is synthesized)
aggagatgctgctgggagggtcccccagcgatgcaccccatgcccaccaccccctgcaccctcacctgatgcaggaacatatgggaaccaacgtcatcgttgccaacacaatgcccactc

SEQ ID NO: 121124 - DNA, 120 bp, Artificial Sequence
  ENSG00000101076_11 (sequence is synthesized)
acctcagcaacggacagatgtgtgagtggccccgacccaggggacaggcagccacccctgagaccccacagccctcaccgccaggtggctcagggtctgagccctataagctcctgccgg

SEQ ID NO: 121125 - DNA, 120 bp, Artificial Sequence
  ENSG00000101076_12 (sequence is synthesized)
gagccgtcgccacaatcgtcaagcccctctctgccatcccccagccgaccatcaccaagcaggaagttatctagcaagccgctggggcttgggggctccactggctccccccagccccct

SEQ ID NO: 121126 - DNA, 120 bp, Artificial Sequence
  ENSG00000101076_13 (sequence is synthesized)
aagagagcacctggtgatcacgtggtcacggcaaaggaagacgtgatgccaggaccagtcccagagcaggaatgggaaggatgaagggcccgagaacatggcctaagggccacatcccac

SEQ ID NO: 121127 - DNA, 120 bp, Artificial Sequence
  ENSG00000101076_14 (sequence is synthesized)
tgccacccttgacgccctgctctggataacaagactttgacttggggagacctctactgccttggacaacttttctcatgttgaagccactgccttcaccttcaccttcatccatgtcca

SEQ ID NO: 121128 - DNA, 120 bp, Artificial Sequence
  ENSG00000101076_15 (sequence is synthesized)
acccccgacttcatcccaaaggacagccgcctggagatgacttgaggccttacttaaacccagctcccttcttccctagcctggtgcttctcctctcctagcccctgtcatggtgtccag

SEQ ID NO: 121129 - DNA, 120 bp, Artificial Sequence
  ENSG00000101076_16 (sequence is synthesized)
acagagccctgtgaggctgggtccaattgtggcacttggggcaccttgctcctccttctgctgctgcccccacctctgctgcctccctctgctgtcaccttgctcagccatcccgtcttc

SEQ ID NO: 121130 - DNA, 120 bp, Artificial Sequence
  ENSG00000101076_17 (sequence is synthesized)
tccaacaccacctctccagaggccaaggaggccttggaaacgattcccccagtcattctgggaacatgttgtaagcactgactgggaccaggcaccaggcagggtctagaaggctgtggt

SEQ ID NO: 121131 - DNA, 120 bp, Artificial Sequence
  ENSG00000101076_18 (sequence is synthesized)
gagggaagacgcctttctcctccaacccaacctcatcctccttcttcagggacttgggtgggtacttgggtgaggatccctgaaggccttcaacccgagaaaacaaacccaggttggcga

SEQ ID NO: 121132 - DNA, 120 bp, Artificial Sequence
  ENSG00000101076_19 (sequence is synthesized)
ctgcaacaggaacttggagtggagaggaaaagcatcagaaagaggcagaccatccaccaggcctttgagaaagggtagaattctggctggtagagcaggtgagatgggacattccaaaga

SEQ ID NO: 121133 - DNA, 120 bp, Artificial Sequence
  ENSG00000101076_20 (sequence is synthesized)
acagcctgagccaaggcctagtggtagtaagaatctagcaagaattgaggaagaatggtgtgggagagggatgatgaagagagagagggcctgctggagagcatagggtctggaacacca

SEQ ID NO: 121134 - DNA, 120 bp, Artificial Sequence
  ENSG00000101076_21 (sequence is synthesized)
ggctgaggtcctgatcagcttcaaggagtatgcagggagctgggcttccagaaaatgaacacagcagttctgcagaggacgggaggctggaagctgggaggtcaggtggggtggatgata

SEQ ID NO: 121135 - DNA, 120 bp, Artificial Sequence
  ENSG00000101076_22 (sequence is synthesized)
taatgcgggtgagagtaatgaggcttggggctggagaggacaagatgggtaaaccctcacatcagagtgacatccaggaggaataagctcccagggcctgtctcaagctcttccttactc

SEQ ID NO: 121136 - DNA, 120 bp, Artificial Sequence
  ENSG00000101076_23 (sequence is synthesized)
ccaggcactgtcttaaggcatctgacatgcatcatctcatttaatcctcccttcctccctattaacctagagattgtttttgttttttattctcctcctccctccccgccctcacccgcc

SEQ ID NO: 121137 - DNA, 120 bp, Artificial Sequence
  ENSG00000101076_24 (sequence is synthesized)
ccactccctcctaacctagagattgttacagaagctgaaattgcgttctaagaggtgaagtgattttttttctgaaactcacacaactaggaagtggctgagtcaggacttgaacccagg

SEQ ID NO: 121138 - DNA, 120 bp, Artificial Sequence
  ENSG00000101076_25 (sequence is synthesized)
tctccctggatcagaacaggagctcttaactacagtggctgaatagcttctccaaaggctccctgtgttctcaccgtgatcaagttgaggggcttccggctcccttctacagcctcagaa

SEQ ID NO: 121139 - DNA, 120 bp, Artificial Sequence
  ENSG00000101076_26 (sequence is synthesized)
atcctgtttgctgataaatattaaggagaattcatgactcttgacagcttttctctcttcactccccaagtcaaggggaggggtggcaggggtctgtttcctggaagtcaggctcatctg

SEQ ID NO: 121140 - DNA, 120 bp, Artificial Sequence
  ENSG00000101076_27 (sequence is synthesized)
gcctgttggcatgggggtgggacagtgtgcacagtgtgggggcaggggagggctaagcaggcctgggtttgagggctgctccggagaccgtcactccaggtgcattctggaagcattaga

SEQ ID NO: 121141 - DNA, 120 bp, Artificial Sequence
  ENSG00000101076_28 (sequence is synthesized)
ccccaggatggagcgaccagcatgtcatccatgtggaatcttggtggctttgaggacattctggaaaatgccactgaccagtgtgaacaaaagggatgtgttatggggctggaggtgtga

SEQ ID NO: 121142 - DNA, 120 bp, Artificial Sequence
  ENSG00000101076_29 (sequence is synthesized)
ttaggtaggagggaaactgttggaccgactcctgccccctgctcaacactgacccctctgagtggttggaggcagtgccccagtgcccagaaatcccaccattagtgattgttttttatg

SEQ ID NO: 121143 - DNA, 120 bp, Artificial Sequence
  ENSG00000101076_30 (sequence is synthesized)
agaaagaggcgtggagaagtattggggcaatgtgtcagggaggaatcaccacatccctacggcagtcccagccaagcccccaatcccagcggagactgtgccctgctcagagctcccaag

SEQ ID NO: 121144 - DNA, 120 bp, Artificial Sequence
  ENSG00000101076_31 (sequence is synthesized)
ccttcccccaccacctcactcaagtgcccctgaaatccctgccagacggctcagcctggtctgcggtaaggcagggaggctggaaccatttctgggcattgtggtcattcccactgtgtt

SEQ ID NO: 121145 - DNA, 120 bp, Artificial Sequence
  ENSG00000101076_32 (sequence is synthesized)
cctccacctcctccctccagcgttgctcagacctctgtcttgggagaaaggttgagataagaatgtcccatggagtgccgtgggcaacagtggcccttcatgggaacaatctgttggagc

SEQ ID NO: 121146 - DNA, 120 bp, Artificial Sequence
  ENSG00000101076_33 (sequence is synthesized)
agggggtcagttctctgctgggaatctacccctttctggaggagaaacccattccaccttaataactttattgtaatgtgagaaacacaaaacaaagtttacttttttgactctaagctg

SEQ ID NO: 121147 - DNA, 120 bp, Artificial Sequence
  ENSG00000101076_34 (sequence is synthesized)
ttttttttttttttttttttggctacttgagttgtggtcctaaaacataaaatctgatggacaaacagagggttgctggggggacaagcgtgggcacaatttccccaccaagacaccctg

SEQ ID NO: 121148 - DNA, 120 bp, Artificial Sequence
  ENSG00000101076_35 (sequence is synthesized)
cgtgggcacaatttccccaccaagacaccctgatcttcaggcgggtctcaggagcttctaaaaatccgcatggctctcctgagagtggacagaggagaggagagggtcagaaatgaacgc

SEQ ID NO: 121149 - DNA, 120 bp, Artificial Sequence
  ENSG00000101076_36 (sequence is synthesized)
tcttctatttcttgtcattaccaagccaattacttttgccaaatttttctgtgatctgccctgattaagatgaattgtgaaatttacatcaagcaattatcaaagcgggctgggtcccat

SEQ ID NO: 121150 - DNA, 120 bp, Artificial Sequence
  ENSG00000101076_37 (sequence is synthesized)
cagaacgacccacatctttctgtgggtgtgaatgtcattaggtcttgcgctgacccctgagcccccatcactgccgcctgatggggcaaagaaacaaaaaacatttcttactcttctgtg

SEQ ID NO: 121151 - DNA, 120 bp, Artificial Sequence
  ENSG00000101076_38 (sequence is synthesized)
ttttaacaaaagtttataaaacaaaataaatggcgcatatgttttctaagtccttggataagtatcttttctttcaggtatcagaaataagactgaatcttctggttctacttgggggtt

SEQ ID NO: 121152 - DNA, 120 bp, Artificial Sequence
  ENSG00000101076_39 (sequence is synthesized)
aaaaaattttttttaaaggaagaatgagaatagttttatagttctttgtgatgtgcagaatgtttttgtgtccattataatttttcagtcttcacatcaagaggtaagcagttagacatg

SEQ ID NO: 121153 - DNA, 120 bp, Artificial Sequence
  ENSG00000101076_40 (sequence is synthesized)
attactcccactttccagatgaggagactgaggcttgggggaagtgacttctcttggaaggcagaggtggacatctaaccctggtctcttgattccaagtacttagtatatcgagagagt

SEQ ID NO: 121154 - DNA, 120 bp, Artificial Sequence
  ENSG00000101076_41 (sequence is synthesized)
gaaagttgatcccccttcttgaagaggggagtgatgaggggagagtgcaatggcaagatctggaagaatggcaagagggtccaagggtctgtcatcctccaccaaggttcaagacagaac

SEQ ID NO: 121155 - DNA, 120 bp, Artificial Sequence
  ENSG00000101076_42 (sequence is synthesized)
accaaggttcaagacagaaccttttgctgggtcacctcaatctgccagcaatggaagatgagtagctgtggggacatttcataaaagcaagtggtttttttgttttgttttgttttgttt

SEQ ID NO: 121156 - DNA, 120 bp, Artificial Sequence
  ENSG00000101076_43 (sequence is synthesized)
caaaaaatttaaaaattagccaggtatagtggtgtgtgcctatagtaccagctactctgaaggctgaggtgggaagattgcttcagcccaggagttcgaggatgcagtgagctatgaatg

SEQ ID NO: 121157 - DNA, 120 bp, Artificial Sequence
  ENSG00000101076_44 (sequence is synthesized)
caacactgcactacagcctggatgaaagaacaagactctgtctcaaaacataaataataagtaaaaagaataaaagcaagagatgcacttgagaatctccagccagatctgtagccactg

SEQ ID NO: 121158 - DNA, 120 bp, Artificial Sequence
  ENSG00000101076_45 (sequence is synthesized)
ggcttctctccaaggctaaactattacaggagggtggccttgtgtctcggtcaccacagaccacagcgttccattcactcggggttgtgctggagctggcttgtgagaactgactgttag

SEQ ID NO: 121159 - DNA, 120 bp, Artificial Sequence
  ENSG00000101076_46 (sequence is synthesized)
cttctcttcccaactccatgtttgccagtgccacactgatagcttgaaattggttattgccggagtgtttacaccacaaggactagcaaactctacaaatccgggcttttgttcctggag

SEQ ID NO: 121160 - DNA, 120 bp, Artificial Sequence
  ENSG00000101076_47 (sequence is synthesized)
agcccgttgttaacattcaccagcacaccacagcattcggcaatggctggaccatgggatgcctacatatggggacatcctccttggggatgagggtagagcagggcgatcctttcacct

SEQ ID NO: 121161 - DNA, 120 bp, Artificial Sequence
  ENSG00000101076_48 (sequence is synthesized)
cttccttaagggaggggacaaaagttctggtctgggaagcacacgttttgctgatcagcgtaaccttgggcaggtcactccaccactccgagcctcatctgtaaagtgggaatgatatct

SEQ ID NO: 121162 - DNA, 120 bp, Artificial Sequence
  ENSG00000101076_49 (sequence is synthesized)
ccctccagggcagatgtcaggattcaatggaatgagatcacagtaactgtgagagctcccgttacatgaggagtacaagtgaactcttcatgcgcccctttttagcgagaagttaaccat

SEQ ID NO: 121163 - DNA, 120 bp, Artificial Sequence
  ENSG00000101076_50 (sequence is synthesized)
taaactctccaggcttcagagcacccattcgctgtctacctgatccctagggccgctcccgccttcccctgtgccttccctccactagtcagcaccaggaaatgttttcgataacgttgc

SEQ ID NO: 121164 - DNA, 120 bp, Artificial Sequence
  ENSG00000101076_51 (sequence is synthesized)
aacggaggccttgttcatgctgccgccatcggggacaagcgcgggggggggggggtggaggccagaggagactatttcagtcctaaattgtgcttaataaacccatatcaaaaccataaa

SEQ ID NO: 121165 - DNA, 120 bp, Artificial Sequence
  ENSG00000101076_52 (sequence is synthesized)
atggtcagcgtgaacgcgcccctcggggctccagtggagagttcttacggtctgcagtttccatggagaccgcctcccaccatccctgaaatctcattgtgaccagtattaagggattaa

SEQ ID NO: 121166 - DNA, 120 bp, Artificial Sequence
  ENSG00000101076_53 (sequence is synthesized)
ctctgcccagcggccctcgcagggtctggggtgctgagaggggccagcaggagctccctcaaggatgaagaggttgtgcactgtgcgggaccccatagcagcaggaggaggatgtcggac

SEQ ID NO: 121167 - DNA, 120 bp, Artificial Sequence
  ENSG00000101076_54 (sequence is synthesized)
cactcaccgccttcctggtggacgggctcctggtggctgtgctgctgctgtgagcgggcccctgctcctccatgcccccagctctccggctgggtgggcttggccatggtcagcgtgaac

SEQ ID NO: 121168 - DNA, 120 bp, Artificial Sequence
  ENSG00000101076_55 (sequence is synthesized)
gggttggagtggggactccccaggagacaggcctcacacagtgagctcacccctcagctccttggcttccccactgtgccgctttgggcaagttgcttaacctgtctgtgcctcagtttc

SEQ ID NO: 121169 - DNA, 120 bp, Artificial Sequence
  ENSG00000101076_56 (sequence is synthesized)
ctcaccagaaaaatgggaacaaggcaatggtctatttgttcaggcaccgagaacctagcacgtgccagtcactgttctaagtgctggcaattcagcaaagaacaagatctttgccctcgg

SEQ ID NO: 121170 - DNA, 120 bp, Artificial Sequence
  ENSG00000101076_57 (sequence is synthesized)
ggaggctgtgtgtgtgtgagtatgtatggatgcgtggatatctgtgtatatgcccgtatgtgcgtgcatgtgtatataaagcctcacattttatgattttgaaataaacaggtaatatga

SEQ ID NO: 121171 - DNA, 120 bp, Artificial Sequence
  ENSG00000101079_0 (sequence is synthesized)
gccgccgccgctgctgctgcactgacggcgggtgcccgcgcctcagagttactgatttattcttgagattcctctactctcgttatctgacctcatggatgaacttcaggatgttcagct

SEQ ID NO: 121172 - DNA, 120 bp, Artificial Sequence
  ENSG00000101079_1 (sequence is synthesized)
cacagagatcaaaccacttctaaatgataagaatggtacaagaaacttccaggactttgactgtcaggaacatgatatagaaacaactcatggtgtggtccacgtcactataagaggctt

SEQ ID NO: 121173 - DNA, 120 bp, Artificial Sequence
  ENSG00000101079_2 (sequence is synthesized)
acccaaaggaaacagaccagttatactaacatatcatgacattggcctcaaccataaatcctgtttcaatgcattctttaactttgaggatatgcaagagatcacccagcactttgctgt

SEQ ID NO: 121174 - DNA, 120 bp, Artificial Sequence
  ENSG00000101079_3 (sequence is synthesized)
ctgtcatgtggatgccccaggccagcaggaaggtgcaccctctttcccaacagggtatcagtaccccacaatggatgagctggctgaaatgctgcctcctgttcttacccacctaagcct

SEQ ID NO: 121175 - DNA, 120 bp, Artificial Sequence
  ENSG00000101079_4 (sequence is synthesized)
gaaaagcatcattggaattggagttggagctggagcttacatcctcagcagatttgcactcaaccatccagagcttgtggaaggccttgtgctcattaatgttgacccttgcgctaaagg

SEQ ID NO: 121176 - DNA, 120 bp, Artificial Sequence
  ENSG00000101079_5 (sequence is synthesized)
ctggattgactgggcagcttccaaactctctggcctgacaaccaatgttgtggacattattttggctcatcactttgggcaggaagagttacaggccaacctggacctgatccaaaccta

SEQ ID NO: 121177 - DNA, 120 bp, Artificial Sequence
  ENSG00000101079_6 (sequence is synthesized)
cagaatgcatattgcccaagacatcaaccaagacaacctgcagctcttcttgaattcctacaatggacgcagagacctggagatcgaaagacccatactgggccaaaatgataacaaatc

SEQ ID NO: 121178 - DNA, 120 bp, Artificial Sequence
  ENSG00000101079_7 (sequence is synthesized)
aaaaacattaaagtgttctactttactggtggtaggggacaattcgcctgcagttgaggctgtggtcgaatgcaattcccgcctgaaccctataaatacaactttgctaaagatggcgga

SEQ ID NO: 121179 - DNA, 120 bp, Artificial Sequence
  ENSG00000101079_8 (sequence is synthesized)
ctgtgggggactgccccaggtagttcagcctgggaagctcaccgaggccttcaagtactttttgcagggaatgggctacataccatctgccagcatgactcggctcgcccgatcacgaac

SEQ ID NO: 121180 - DNA, 120 bp, Artificial Sequence
  ENSG00000101079_9 (sequence is synthesized)
ccactcaacctcgagtagcctcggctctggagaaagtcccttcagccggtctgtcaccagcaatcagtcagatggaactcaagaatcctgtgagtcccctgatgtcctggacagacacca

SEQ ID NO: 121181 - DNA, 120 bp, Artificial Sequence
  ENSG00000101079_10 (sequence is synthesized)
gaccatggaggtgtcctgctaagcagatgctcctcccctggaccattgcaagtccatccttcaaatgaccactccataatataacatttcatccagtaaactggcctctactatctttaa

SEQ ID NO: 121182 - DNA, 120 bp, Artificial Sequence
  ENSG00000101079_11 (sequence is synthesized)
ctcatgcatggccactgaacctctctctagtagcctggatttatcattctctctgcctgcccacccccttttttgtatagcccaagaaccacttccatgccatactgtaacattccaaca

SEQ ID NO: 121183 - DNA, 120 bp, Artificial Sequence
  ENSG00000101079_12 (sequence is synthesized)
actctgtgtgtgcgagcacgcgtgtctgtgtttgtgtgtgcatagttctgtggttttagacacgctttcttgtagtgcttctgcaaaaaacaaaaaagggacttattttgcattctcaat

SEQ ID NO: 121184 - DNA, 120 bp, Artificial Sequence
  ENSG00000101079_13 (sequence is synthesized)
ggtgtttttaagggaattaggcagaacagatttctaggttgggtaggccactgcattctcttttgtttgcaaattggtcaacaaaatttgcaaagtgatttcaggagagagcagctttga

SEQ ID NO: 121185 - DNA, 120 bp, Artificial Sequence
  ENSG00000101079_14 (sequence is synthesized)
ggaatgtggaaaatcataattgccgtctggaccattgattgattgtgaccagtagcagaagggtgcctgttacatagagaggctccttctgtccaaatgaatttctgtatactcttctat

SEQ ID NO: 121186 - DNA, 120 bp, Artificial Sequence
  ENSG00000101079_15 (sequence is synthesized)
aaataaaagggaggaatatattctgctggaagcccatgaaccatcgctgaggttctgatacaacatagagttttttccaaggagtgaatgtggtttaattactggactctcttagcacag

SEQ ID NO: 121187 - DNA, 120 bp, Artificial Sequence
  ENSG00000101079_16 (sequence is synthesized)
gaaggtggaaacaaaatgccaggcctctgctctgaagagcaaaactgctgtcgctgcagtatctgataccagacatccacatatccacaagaagtgcctcttaggtctgtgacagagagt

SEQ ID NO: 121188 - DNA, 120 bp, Artificial Sequence
  ENSG00000101079_17 (sequence is synthesized)
gtgtctccattcctcagttcccagaaaggggagaggtttggcctaaaaagcatgtagatgggggagaaatgggtggggggagaggaacagccattaacacagtatcatgtttaacaagta

SEQ ID NO: 121189 - DNA, 120 bp, Artificial Sequence
  ENSG00000101079_18 (sequence is synthesized)
attaacacagtatcatgtttaacaagtatagccttgatttcagtagatgtaatggaagccaaattaaattgatacagaacccatttctcagagtctttttttttttttgagacagagtct

SEQ ID NO: 121190 - DNA, 120 bp, Artificial Sequence
  ENSG00000101079_19 (sequence is synthesized)
attagaaagattgttaatcctatgaactcccttttgtaggagagaaagggccaatctgtaggggtagccctgtccaggtaaagttgttttcagcctcatgtctactgttaggtgagggag

SEQ ID NO: 121191 - DNA, 120 bp, Artificial Sequence
  ENSG00000101079_20 (sequence is synthesized)
tcacagccagacagagagtattgctggagggtgagagaattgtggagaccaactaccacatagcaagagcccagctcttgggagcattgagatgtaagctcagggttacacagttccaaa

SEQ ID NO: 121192 - DNA, 120 bp, Artificial Sequence
  ENSG00000101079_21 (sequence is synthesized)
tcttgggaaggggcttttcagacagactgtttgctttctgctgagataaggaatgcatcactctgccagagtatgactttttacagattattaaataaagctgcatatgtctcattgtta

SEQ ID NO: 121193 - DNA, 120 bp, Artificial Sequence
  ENSG00000101079_22 (sequence is synthesized)
attgtgtagtcacactctagaatgctggggtgggagatgagataactggatagagagcctgtaaaacagatgataattgactaagacaaaaaggtagcaacagcacgttactccctgcag

SEQ ID NO: 121194 - DNA, 120 bp, Artificial Sequence
  ENSG00000101079_23 (sequence is synthesized)
tggcctgacaactgaatcagctccttagccagggtctctgcacattcatcttcagatggagtttttttcaagctgttcattcacaaggtcacgaaaaatatgcatgccaatcaccatgga

SEQ ID NO: 121195 - DNA, 120 bp, Artificial Sequence
  ENSG00000101082_0 (sequence is synthesized)
agtcggagctagagctccaaggaccccacgcctgtgtctctgtgacagagctcaaagggccctgggccttccctccctggctcggctgtgcttgggagggttccccagtccagaatccct

SEQ ID NO: 121196 - DNA, 120 bp, Artificial Sequence
  ENSG00000101082_1 (sequence is synthesized)
aaggagcatggggcagctgatccatccctggtgtacaaactgctgactgcagacagatgctgagctacccaaaccaacacctagcctctccctgaagatcctcccaggctgagagagttc

SEQ ID NO: 121197 - DNA, 120 bp, Artificial Sequence
  ENSG00000101082_2 (sequence is synthesized)
tgggtgtcctaggaccaaggacactggcagacttccagaagggcccccaaagccctaacctgtccagccagagcatgcgtctcagcagagctgtcttcccaagcctttgatgacaaacca

SEQ ID NO: 121198 - DNA, 120 bp, Artificial Sequence
  ENSG00000101082_3 (sequence is synthesized)
atttccctcgatgatgtgcttctgagtgctctgctgaggaacaatgggaagtctgcccagcagaagaaaatctctgccaagcccaagcttgagttcctctgtccaaggccagggacctgt

SEQ ID NO: 121199 - DNA, 120 bp, Artificial Sequence
  ENSG00000101082_4 (sequence is synthesized)
gaccatggaagcagagagaagcaaggccacagccgtggccctgggcagtttcccggcaggtggcccggccgagctgtcgctgagactcggggagccattgaccatcgtctctgaggatgg

SEQ ID NO: 121200 - DNA, 120 bp, Artificial Sequence
  ENSG00000101082_5 (sequence is synthesized)
agactggtggacggtgctgtctgaagtctcaggcagagagtataacatccccagcgtccacgtggccaaagtctcccatgggtggctgtatgagggcctgagcagggagaaagcagagga

SEQ ID NO: 121201 - DNA, 120 bp, Artificial Sequence
  ENSG00000101082_6 (sequence is synthesized)
actgctgttgttacctgggaaccctggaggggccttcctcatccgggagagccagaccaggagaggctcttactctctgtcagtccgcctcagccgccctgcatcctgggaccggatcag

SEQ ID NO: 121202 - DNA, 120 bp, Artificial Sequence
  ENSG00000101082_7 (sequence is synthesized)
acactacaggatccactgccttgacaatggctggctgtacatctcaccgcgcctcaccttcccctcactccaggccctggtggaccattactctgagctggcggatgacatctgctgcct

SEQ ID NO: 121203 - DNA, 120 bp, Artificial Sequence
  ENSG00000101082_8 (sequence is synthesized)
actcaaggagccctgtgtcctgcagagggctggcccgctccctggcaaggatatacccctacctgtgactgtgcagaggacaccactcaactggaaagagctggacagctccctcctgtt

SEQ ID NO: 121204 - DNA, 120 bp, Artificial Sequence
  ENSG00000101082_9 (sequence is synthesized)
ttctgaagctgccacaggggaggagtctcttctcagtgagggtctccgggagtccctcagcttctacatcagcctgaatgacgaggctgtctctttggatgatgcctaggcccaaaggag

SEQ ID NO: 121205 - DNA, 120 bp, Artificial Sequence
  ENSG00000101082_10 (sequence is synthesized)
aggccaaaagggaaaccaaggctgcacacctagaaccccaattcagcctcctgggcaccccagaggcaaggctgtgcactcagggagggagggtgggacacagaggtgcatctagggtcc

SEQ ID NO: 121206 - DNA, 120 bp, Artificial Sequence
  ENSG00000101082_11 (sequence is synthesized)
gaaggtgggaccagggccagggttccaaaaagagaataagcctcctggggggtctgacctagttagttcttgagtttggggtttccagtaccatctggatgccctgcctgttgagcccca

SEQ ID NO: 121207 - DNA, 120 bp, Artificial Sequence
  ENSG00000101082_12 (sequence is synthesized)
ttctacatccccaccattaaccaggccccacccacaaggtagaaacaacccctagagtcaacgagaaagtcattttcagaaaatctacaagtctcgttgagaccaccaccatacctcaga

SEQ ID NO: 121208 - DNA, 120 bp, Artificial Sequence
  ENSG00000101082_13 (sequence is synthesized)
aggtaggactgtggcctagaagggaaaggaaagctgagatgatgtcttaccgtagcagcagatcttggatggtccaggctctatgtgacctccagagcaaagagaaagacttcggacagt

SEQ ID NO: 121209 - DNA, 120 bp, Artificial Sequence
  ENSG00000101082_14 (sequence is synthesized)
cggacagtctaggtcctcaaatgtcccccattgaggacaacagccccagctctttttcttttttttgagacggagtcttgccctgttgcccatgctggagtgcaatggcacgatctcagc

SEQ ID NO: 121210 - DNA, 120 bp, Artificial Sequence
  ENSG00000101082_15 (sequence is synthesized)
ttcattttgtggcttaccattccctagcacactggccttgccatcttgtggccgaataaaaaataacacctcttaagtctagcacactgcagtgaggccaggcacctcagtgctgggcag

SEQ ID NO: 121211 - DNA, 120 bp, Artificial Sequence
  ENSG00000101082_16 (sequence is synthesized)
gggcatcagaaggtgctaagccctctctccacaatgccaagacggagaccacagcctacaccaaatccagcccttgatttccctgctgcctccataaacagaaagaggtctgctggatcc

SEQ ID NO: 121212 - DNA, 120 bp, Artificial Sequence
  ENSG00000101082_17 (sequence is synthesized)
gctaagggatcagggagaggaagaaagagggatggggtgggaggcaccccctccagtgctcctactggttcccaagctacaggtggggtgggaaaggctttatcaggtatcatcaacagg

SEQ ID NO: 121213 - DNA, 120 bp, Artificial Sequence
  ENSG00000101082_18 (sequence is synthesized)
ttctcaattaaagatttgatttattcaagtatgtgaaaacattctacaatggaaactcttattagatgctgcatgtactgtgctatggaccacgcacatacagccatgctgtttcagaag

SEQ ID NO: 121214 - DNA, 120 bp, Artificial Sequence
  ENSG00000101082_19 (sequence is synthesized)
acttgaaatgccattgatagtttaaaaactctacacccgatggagaatcgaggaagacaatttaatgtttcatctgaatccagaggtgcatcaaattaaatgacagctccacttggcaaa

SEQ ID NO: 121215 - DNA, 120 bp, Artificial Sequence
  ENSG00000101084_0 (sequence is synthesized)
gtagagccggcggaaccgggtagcttggccaggttgtgaggaaccgcagcgcgccgcaggaccgggccgctgagcctgcagccgccccgcgccgtgacctgcgaccctagaccccgactc

SEQ ID NO: 121216 - DNA, 120 bp, Artificial Sequence
  ENSG00000101084_1 (sequence is synthesized)
cccgcgcgccccaggcccggcccgggcggcgcgacgggaggatgagcggcgggcggcggaaggaggagccgcctcagccgcagctggccaacggggccctcaaagtctccgtctggagta

SEQ ID NO: 121217 - DNA, 120 bp, Artificial Sequence
  ENSG00000101084_2 (sequence is synthesized)
ccgtctggagtaaggtgctgcggagcgacgcggcctgggaggataaggatgaatttttagatgtgatctactggttccgacagatcattgctgtggtcctgggtgtcatttggggagttt

SEQ ID NO: 121218 - DNA, 120 bp, Artificial Sequence
  ENSG00000101084_3 (sequence is synthesized)
tgccattacgagggttcttgggaatagcaggattctgcctgatcaatgcaggagtcctgtacctctacttcagcaattacctacagattgatgaggaagaatatggtggcacgtgggagc

SEQ ID NO: 121219 - DNA, 120 bp, Artificial Sequence
  ENSG00000101084_4 (sequence is synthesized)
atccagtccaaaggaccctcttgattacagcacaggaacttgatcgttggggaaccccagccccttggaacttggaagacccgtgtttcctggaccgcgaatcagtgtgttgggcatcag

SEQ ID NO: 121220 - DNA, 120 bp, Artificial Sequence
  ENSG00000101084_5 (sequence is synthesized)
tgttttctgcaagggttgtgacctgaaactttttaaaaaccacccacctttggggaagcatttctgaatttatccatcaccaaccatttcttcttggataccatcaagtaacagctatta

SEQ ID NO: 121221 - DNA, 120 bp, Artificial Sequence
  ENSG00000101084_6 (sequence is synthesized)
tttgccaagtggagctgtcatttaatttgatgcacctctggattcagatgaaacattaaattgtcttcctcgattctccatcgggtgtagagtttttaaactatcaatggcatttcaagt

SEQ ID NO: 121222 - DNA, 120 bp, Artificial Sequence
  ENSG00000101084_7 (sequence is synthesized)
cttctgaaacagcatggctgtatgtgcgtggtccatagcacagtacatgcagcatctaataagagtttccattgtagaatgttttcacatacttgaataaatcaaatctttaattgagaa

SEQ ID NO: 121223 - DNA, 120 bp, Artificial Sequence
  ENSG00000101084_8 (sequence is synthesized)
ttgggaatagcagggtaagtcttgggtatcttatattttcatggtatcatttctttttaaatagaggctttttttcctgttacaggaaaggccattgctgctctggagctgtgtgtgtgt

SEQ ID NO: 121224 - DNA, 120 bp, Artificial Sequence
  ENSG00000101084_9 (sequence is synthesized)
cagtggcactcctgggtctggtgcaccactcctcaggagcatctcaggtcaggcaggttaccttcctgccttcctgaaggctgggccagtccattcattcatgggtctaaagtgacctca

SEQ ID NO: 121225 - DNA, 120 bp, Artificial Sequence
  ENSG00000101084_10 (sequence is synthesized)
tgcaagaggctatgactacttgttcgtggcatgcactctagttctgctgtgacctttgtacctgtgcgagtttgggaagtaggaacttctgtatttgacgaccatttcccttgttcctgg

SEQ ID NO: 121226 - DNA, 120 bp, Artificial Sequence
  ENSG00000101096_0 (sequence is synthesized)
gctcagcttccccgggcgcgtccaggacccgctgcgccaggcgcgccgtccccggacccggcgtgcgtccctacgaggaaagggaccccgccgctcgagccgcctccgccagccccactg

SEQ ID NO: 121227 - DNA, 80 bp, Artificial Sequence
  ENSG00000101096_1 (sequence is synthesized)
ggaaagggaccccgccgctcgagccgcctccgccagccccactgcgaggggtcccagagccagccgcgcccgccctcgcc

SEQ ID NO: 121228 - DNA, 120 bp, Artificial Sequence
  ENSG00000101096_2 (sequence is synthesized)
gccccaacccgacggcggggacgccccaggccacgagcctgggggcagcccccaagacgagcttgacttctccatcctcttcgactatgagtatttgaatccgaacgaagaagagccgaa

SEQ ID NO: 121229 - DNA, 120 bp, Artificial Sequence
  ENSG00000101096_3 (sequence is synthesized)
tgcacataaggtcgccagcccaccctccggacccgcataccccgatgatgtcctggactatggcctcaagccatacagcccccttgctagtctctctggcgagccccccggccgattcgg

SEQ ID NO: 121230 - DNA, 120 bp, Artificial Sequence
  ENSG00000101096_4 (sequence is synthesized)
agagccggatagggtagggccgcagaagtttctgagcgcggccaagccagcaggggcctcgggcctgagccctcggatcgagatcactccgtcccacgaactgatccaggcagtggggcc

SEQ ID NO: 121231 - DNA, 120 bp, Artificial Sequence
  ENSG00000101096_5 (sequence is synthesized)
cctccgcatgagagacgcgggcctcctggtggagcagccgcccctggccggggtggccgccagcccgaggttcaccctgcccgtgcccggcttcgagggctaccgcgagccgctttgctt

SEQ ID NO: 121232 - DNA, 120 bp, Artificial Sequence
  ENSG00000101096_6 (sequence is synthesized)
gagccccgctagcagcggctcctctgccagcttcatttctgacaccttctccccctacacctcgccctgcgtctcgcccaataacggcgggcccgacgacctgtgtccgcagtttcaaaa

SEQ ID NO: 121233 - DNA, 120 bp, Artificial Sequence
  ENSG00000101096_7 (sequence is synthesized)
catccctgctcattattcccccagaacctcgccaataatgtcacctcgaaccagcctcgccgaggacagctgcctgggccgccactcgcccgtgccccgtccggcctcccgctcctcatc

SEQ ID NO: 121234 - DNA, 120 bp, Artificial Sequence
  ENSG00000101096_8 (sequence is synthesized)
gcctggtgccaagcggaggcattcgtgcgccgaggccttggttgccctgccgcccggagcctcaccccagcgctcccggagcccctcgccgcagccctcatctcacgtggcaccccagga

SEQ ID NO: 121235 - DNA, 120 bp, Artificial Sequence
  ENSG00000101096_9 (sequence is synthesized)
ccacggctccccggctgggtacccccctgtggctggctctgccgtgatcatggatgccctgaacagcctcgccacggactcgccttgtgggatcccccccaagatgtggaagaccagccc

SEQ ID NO: 121236 - DNA, 120 bp, Artificial Sequence
  ENSG00000101096_10 (sequence is synthesized)
tgacccctcgccggtgtctgccgccccatccaaggccggcctgcctcgccacatctacccggccgtggagttcctggggccctgcgagcagggcgagaggagaaactcggctccagaatc

SEQ ID NO: 121237 - DNA, 120 bp, Artificial Sequence
  ENSG00000101096_11 (sequence is synthesized)
catcctgctggttccgcccacttggcccaagccgctggtgcctgccattcccatctgcagcatcccagtgactgcatccctccctccacttgagtggccgctgtccagtcagtcaggctc

SEQ ID NO: 121238 - DNA, 120 bp, Artificial Sequence
  ENSG00000101096_12 (sequence is synthesized)
ttacgagctgcggatcgaggtgcagcccaagccacatcaccgggcccactatgagacagaaggcagccgaggggctgtcaaagctccaactggaggccaccctgtggttcagctccatgg

SEQ ID NO: 121239 - DNA, 120 bp, Artificial Sequence
  ENSG00000101096_13 (sequence is synthesized)
ctacatggaaaacaagcctctgggacttcagatcttcattgggacagctgatgagcggatccttaagccgcacgccttctaccaggtgcaccgaatcacggggaaaactgtcaccaccac

SEQ ID NO: 121240 - DNA, 120 bp, Artificial Sequence
  ENSG00000101096_14 (sequence is synthesized)
cagctatgagaagatagtgggcaacaccaaagtcctggagatacccttggagcccaaaaacaacatgagggcaaccatcgactgtgcggggatcttgaagcttagaaacgccgacattga

SEQ ID NO: 121241 - DNA, 120 bp, Artificial Sequence
  ENSG00000101096_15 (sequence is synthesized)
gctgcggaaaggcgagacggacattggaagaaagaacacgcgggtgagactggttttccgagttcacatcccagagtccagtggcagaatcgtctctttacagactgcatctaaccccat

SEQ ID NO: 121242 - DNA, 120 bp, Artificial Sequence
  ENSG00000101096_16 (sequence is synthesized)
cgagtgctcccagcgatctgctcacgagctgcccatggttgaaagacaagacacagacagctgcctggtctatggcggccagcaaatgatcctcacggggcagaactttacatccgagtc

SEQ ID NO: 121243 - DNA, 120 bp, Artificial Sequence
  ENSG00000101096_17 (sequence is synthesized)
caaagttgtgtttactgagaagaccacagatggacagcaaatttgggagatggaagccacggtggataaggacaagagccagcccaacatgctttttgttgagatccctgaatatcggaa

SEQ ID NO: 121244 - DNA, 120 bp, Artificial Sequence
  ENSG00000101096_18 (sequence is synthesized)
caagcatatccgcacacctgtaaaagtgaacttctacgtcatcaatgggaagagaaaacgaagtcagcctcagcactttacctaccacccagtcccagccatcaagacggagcccacgga

SEQ ID NO: 121245 - DNA, 120 bp, Artificial Sequence
  ENSG00000101096_19 (sequence is synthesized)
tgaatatgaccccactctgatctgcagccccacccatggaggcctggggagccagccttactacccccagcacccgatggtggccgagtccccctcctgcctcgtggccaccatggctcc

SEQ ID NO: 121246 - DNA, 120 bp, Artificial Sequence
  ENSG00000101096_20 (sequence is synthesized)
ctgccagcagttccgcacggggctctcatcccctgacgcccgctaccagcaacagaacccagcggccgtactctaccagcggagcaagagcctgagccccagcctgctgggctatcagca

SEQ ID NO: 121247 - DNA, 120 bp, Artificial Sequence
  ENSG00000101096_21 (sequence is synthesized)
gccggccctcatggccgccccgctgtcccttgcggacgctcaccgctctgtgctggtgcacgccggctcccagggccagagctcagccctgctccacccctctccgaccaaccagcaggc

SEQ ID NO: 121248 - DNA, 120 bp, Artificial Sequence
  ENSG00000101096_22 (sequence is synthesized)
ctcgcctgtgatccactactcacccaccaaccagcagctgcgctgcggaagccaccaggagttccagcacatcatgtactgcgagaatttcgcaccaggcaccaccagacctggcccgcc

SEQ ID NO: 121249 - DNA, 120 bp, Artificial Sequence
  ENSG00000101096_23 (sequence is synthesized)
cccggtcagtcaaggtcagaggctgagcccgggttcctaccccacagtcattcagcagcagaatgccacgagccaaagagccgccaaaaacggacccccggtcagtgaccaaaaggaagt

SEQ ID NO: 121250 - DNA, 120 bp, Artificial Sequence
  ENSG00000101096_24 (sequence is synthesized)
attacctgcgggggtgaccattaaacaggagcagaacttggaccagacctacttggatgatgttaatgaaattatcaggaaggagttttcaggacctcctgccagaaatcagacgtaaaa

SEQ ID NO: 121251 - DNA, 120 bp, Artificial Sequence
  ENSG00000101096_25 (sequence is synthesized)
gaagccattatagcaagacaccttctgtatctgacccctcggagccctccacagcccctcaccttctgtctcctttcatgttcatctcccagcccggagtccacacgcggatcaatgtat

SEQ ID NO: 121252 - DNA, 120 bp, Artificial Sequence
  ENSG00000101096_26 (sequence is synthesized)
gggcactaagcggactctcacttaaggagctcgccacctccctctaaacaccagagagaactcttcttttcggtttatgttttaaatcccagagagcatcctggttgatcttaatggtgt

SEQ ID NO: 121253 - DNA, 120 bp, Artificial Sequence
  ENSG00000101096_27 (sequence is synthesized)
tccgtccaaatagtaagcacctgctgaccaaaagcacattctacatgagacaggacactggaactctcctgagaacagagtgactggagcttggggggatggacgggggacagaagatgt

SEQ ID NO: 121254 - DNA, 120 bp, Artificial Sequence
  ENSG00000101096_28 (sequence is synthesized)
gggcactgtgattaaaccccagcccttgcgttcgtttttccaggtcacagatacagctcctgtaccttttgaaggcaaggagttctcagagcaaccaaaggaacgtgacccaagagccca

SEQ ID NO: 121255 - DNA, 120 bp, Artificial Sequence
  ENSG00000101096_29 (sequence is synthesized)
gcttacaggctgaagaaacccaaaaccctcgatagagacagaaactgaactgtcagtccttagagctcgcccagtccatgccacaactgggccacagctaaagctttatttttgaattct

SEQ ID NO: 121256 - DNA, 120 bp, Artificial Sequence
  ENSG00000101096_30 (sequence is synthesized)
cagggcacctagccctggagctgtcttggcgagctgttctttaacccctgcagcacgcagtcctgctaacacaatttccatagacttggggggctgacccaggctgcagagagcaagcac

SEQ ID NO: 121257 - DNA, 120 bp, Artificial Sequence
  ENSG00000101096_31 (sequence is synthesized)
ctgtctgctgcagctgtacaacctggatgctttgcaaggttccggcttgctttcttcctagcagccagagtgcttttccgtaaagcggtggagaatctcaagcatgtgcatttaattgag

SEQ ID NO: 121258 - DNA, 120 bp, Artificial Sequence
  ENSG00000101096_32 (sequence is synthesized)
gaatagcagaagggctaaagcaaccaagaaaagaagtgtgggtatttttgttaagtaaaacagcccaagtgcttctggaggtgggtttctaccaagatagaggaaaagggctgaattccc

SEQ ID NO: 121259 - DNA, 120 bp, Artificial Sequence
  ENSG00000101096_33 (sequence is synthesized)
tctaagtgggacagccgagctcaggatgtgcttcccagcttcactggttaatttgacctgaacctatttaaagatcccttctgcccctgaagacctatccgcactcaaattctaacatga

SEQ ID NO: 121260 - DNA, 120 bp, Artificial Sequence
  ENSG00000101096_34 (sequence is synthesized)
agaaatctactcgaatgcatcctttactttgaatgagctctattcggttgcatgttatatgtgatttccttcctcccaactgtttccactgagcgcacccagtctcccctagtcttcctc

SEQ ID NO: 121261 - DNA, 120 bp, Artificial Sequence
  ENSG00000101096_35 (sequence is synthesized)
tgtgggtgtgatttttgtgatttttacaaacaaaacccttgaagttcttggcagatgtgtttgtttctgtttgcatgtactgcagataccccaggacaagcgggggattcatttttcagc

SEQ ID NO: 121262 - DNA, 120 bp, Artificial Sequence
  ENSG00000101096_36 (sequence is synthesized)
cattcagttgtttcctcaataatccgcagcaaagtgaaaatattcttagcactcagactgtacttagagtgttttctcagtccagtctgtacagtctgtaggcagaaggcctcagaagaa

SEQ ID NO: 121263 - DNA, 120 bp, Artificial Sequence
  ENSG00000101096_37 (sequence is synthesized)
agtcatggccactcagtgcccactgtgggctttgtaagtcctggctctcccgtcaaggttacccagaggtaaaagcttcctgggagtggggccaggtgtgtttggcactccagatagaag

SEQ ID NO: 121264 - DNA, 120 bp, Artificial Sequence
  ENSG00000101096_38 (sequence is synthesized)
gcaaaatgctcagattcgggcctgtgcacttgtatgcaacctgtcggtcgatacctagcatttatttttccctgacaatgaacgacctttccctcacccaccctaagctcaaagagttta

SEQ ID NO: 121265 - DNA, 120 bp, Artificial Sequence
  ENSG00000101096_39 (sequence is synthesized)
gcaaaattctcttttaaataaacagaatgccagtaagaggttgacccctaccatggaacttctgggatgctaaatacttcctcatgaacaaaataagttccttattataagttccttata

SEQ ID NO: 121266 - DNA, 120 bp, Artificial Sequence
  ENSG00000101096_40 (sequence is synthesized)
ctagcagcttcacctaaagaattttctctccagcaatattgacttcactggggaaaagccaagagtgtgtggtgagtgatttgttctcactcgacctggctaggactggctaggagctgt

SEQ ID NO: 121267 - DNA, 120 bp, Artificial Sequence
  ENSG00000101096_41 (sequence is synthesized)
tttttgtacatgagggaatttgggctttcctcagttatctgaatgttttacccaagtgccttcctgctattgtagcaaagtagctcagcttccttgtccacagggtgaaaaaggactaat

SEQ ID NO: 121268 - DNA, 120 bp, Artificial Sequence
  ENSG00000101096_42 (sequence is synthesized)
gcattttccatcagttttctaactatgttagcaaaaacggcctcctggtagctcaacctcctgtacgcgtgtgtgtgtgtaatacacacacaaataaacccctctgtttttctaagacat

SEQ ID NO: 121269 - DNA, 120 bp, Artificial Sequence
  ENSG00000101096_43 (sequence is synthesized)
cttagctggatattataggaagcactttcataaacaactgtaacaaatcgcaaaggaaagagaaacaaaagcattagatttgagacataaacaggcaagagaaagtgtattaggaactga

SEQ ID NO: 121270 - DNA, 120 bp, Artificial Sequence
  ENSG00000101096_44 (sequence is synthesized)
cagctatcaaggaagttttgtcagttacaaatgctaggaggaaattttgccaagaaggatggctcatgaaatatttccagtacgggaagaggcaataagatcctctaagagaatgagaaa

SEQ ID NO: 121271 - DNA, 120 bp, Artificial Sequence
  ENSG00000101096_45 (sequence is synthesized)
gtaggggtgtctaaatggtaaagatgggtgtgttgcacgtgtgttagaaggatctcagttgagtgaaggtttgcactgctacatctaagttaatgtaaatatgtagcactctgacaggtc

SEQ ID NO: 121272 - DNA, 120 bp, Artificial Sequence
  ENSG00000101096_46 (sequence is synthesized)
taccgtgttgctgaatgtagtatatttccaaagtttgcaagtcttcctgtattgtacaaagatgctgctgcttgataatatgtatagcaatccagattagtatgttattaaattttattt

SEQ ID NO: 121273 - DNA, 120 bp, Artificial Sequence
  ENSG00000101096_47 (sequence is synthesized)
tcttacctgtatttttatgctttttacctgtcctcaaaatattacacccctgttggaattagatttatatttataaatggtcagaaatctttttaagtgtctctttttacacataggttg

SEQ ID NO: 121274 - DNA, 120 bp, Artificial Sequence
  ENSG00000101096_48 (sequence is synthesized)
atttttttttcttaagagaaatgatgtattcttgaaacatttgttactcattccaggaaacaaaaacccatataataaaacccccactcagagcctgttagtcacctctctagaagatgg

SEQ ID NO: 121275 - DNA, 120 bp, Artificial Sequence
  ENSG00000101096_49 (sequence is synthesized)
catctcaggagaaggaatggctttgtggaagaaggaatcacctttttcttgctcaagaattatgctgacttcagccctgagcctggatctggtcactgagaatcatcaagtgtctagatc

SEQ ID NO: 121276 - DNA, 120 bp, Artificial Sequence
  ENSG00000101096_50 (sequence is synthesized)
ctccccccaaaataactaatttagtaggtgattttgattttaaaaaattgacaccaaaaccctgcctgcattgtaatggaattcgaaaagaattcatgttcacagaactcaacgttcagg

SEQ ID NO: 121277 - DNA, 120 bp, Artificial Sequence
  ENSG00000101096_51 (sequence is synthesized)
ctaatatttacagaagggaccaaatctaaatcctggtagataactcctgtatgctttatccaaaggacacccacagttttccagcatagatataaccaaggatgaattgattccttcaaa

SEQ ID NO: 121278 - DNA, 120 bp, Artificial Sequence
  ENSG00000101096_52 (sequence is synthesized)
gaactgggaggcacggatattgcattttttgtttacatccagtagccaagacgcctcagtgagccagtcttgggcagaggctgtcacatttaggcagattggaagttggtatgttctaat

SEQ ID NO: 121279 - DNA, 120 bp, Artificial Sequence
  ENSG00000101096_53 (sequence is synthesized)
tctcactctggactacagtgaggctgaatttatcatgtcaaaaaaaaaaaaaaaaaaagacctttccaagtgctttctattgctcagaattgaaagaatgttttcatttcaagtttacaa

SEQ ID NO: 121280 - DNA, 120 bp, Artificial Sequence
  ENSG00000101096_54 (sequence is synthesized)
gaggcatggatggagttgtgacgttcttgacaagctgggctaacctttcccgaacttgtttcccggaggcaaggtgctcggtgacccagcgcatcttaaccttgggtctcctaggctcga

SEQ ID NO: 121281 - DNA, 120 bp, Artificial Sequence
  ENSG00000101096_55 (sequence is synthesized)
ggctagggcattacgtttcgtggaaccaaagcagccaattgcatagcaagtattttcctgcattccaattaaatgcttaagaaaaagcagcatcctataaaattgtgatcataaacatcc

SEQ ID NO: 121282 - DNA, 120 bp, Artificial Sequence
  ENSG00000101096_56 (sequence is synthesized)
atttccctcagcttttgtgagtgccttgacttacagccaacatcactgtttaactcagtctgtttaaaaacaaacttttctggtggttgataacagagagttgctccctgagccatcagg

SEQ ID NO: 121283 - DNA, 120 bp, Artificial Sequence
  ENSG00000101096_57 (sequence is synthesized)
gtcctgggagctggaagtgaaagggttattaacattctacctttatgcagctgttggctgaccagaataaactccctgctgagttcaagctttgaatggaatggatgcaaatgatgttgt

SEQ ID NO: 121284 - DNA, 120 bp, Artificial Sequence
  ENSG00000101096_58 (sequence is synthesized)
ttccattagagcaggtgctcacagcattctgattggcctgagcagaccgaggctatggctgttgggacaagcttagcatcctggacatcttgtcaaagaacctcactcacccctctggcc

SEQ ID NO: 121285 - DNA, 120 bp, Artificial Sequence
  ENSG00000101096_59 (sequence is synthesized)
tctacagccctcagaggagagaaaaccaattctccaacaaacaggtctctccaacatggtggtgctggcaggcttaggtttagaaaatcctgactgttaaaggcgtttgaatacatcaca

SEQ ID NO: 121286 - DNA, 120 bp, Artificial Sequence
  ENSG00000101096_60 (sequence is synthesized)
ttcctatgcaaatgtttttaatctccagtttaatgtagtttatttttcctatatgtaaagtatttttatacggcttgtatcatgatagtttagcaataaaacagttggaagcaacatcta

SEQ ID NO: 121287 - DNA, 120 bp, Artificial Sequence
  ENSG00000101096_61 (sequence is synthesized)
tgaccattaaacaggagcagaacttggaccagacctacttggatgatgagctgatagacacacaccttagctggatacaaaacatattatgaaacagaatgactgtgatctttgatccga

SEQ ID NO: 121288 - DNA, 120 bp, Artificial Sequence
  ENSG00000101096_62 (sequence is synthesized)
tctggagtaagccggatcgcggagccgcgccgactccgccgagccgggagccgggaggcgcgcagctcccgggtcgctccgaggctcctcggccagggcagccccgcgggcacgcggtag

SEQ ID NO: 121289 - DNA, 120 bp, Artificial Sequence
  ENSG00000101096_63 (sequence is synthesized)
agaagacggcgtcccctcggctgctggtcgatacaaacagatccccctttccaaacacgcgccaagtccccgtgccctccagatgcagagagaggctgcgttcagactggggcactgcca

SEQ ID NO: 121290 - DNA, 120 bp, Artificial Sequence
  ENSG00000101096_64 (sequence is synthesized)
gtgcagttttatgaatttccctgaccactgaggtgatatcactagtaagaaggaaactggggcccagtttagtatctgtagatgcctgaaggaagataacagttgagtagatctttaatg

SEQ ID NO: 121291 - DNA, 120 bp, Artificial Sequence
  ENSG00000101096_65 (sequence is synthesized)
aaattctgattttcctttgactgcagcagaaaccagcttaattttctctttgtagttggccatgatttgaaaccccatcacatacccacagcagcccttttgtccaccctgaacacgctc

SEQ ID NO: 121292 - DNA, 120 bp, Artificial Sequence
  ENSG00000101096_66 (sequence is synthesized)
taatgtaatgcactttgcacagagtccctcatctccatgattattaccctagtgttgggttaattctggcacaaatgctaagatgttgcagaattctggcttaaactagagccaaagggt

SEQ ID NO: 121293 - DNA, 120 bp, Artificial Sequence
  ENSG00000101096_67 (sequence is synthesized)
taagttccctcctgggcttggatgatatcggcatgagttggaagcgtaagagagatcaaaggtgatttttttttttcttctcaaaaatgattttgcaaatctttttcagagctgatagac

SEQ ID NO: 121294 - DNA, 120 bp, Artificial Sequence
  ENSG00000101098_0 (sequence is synthesized)
ccgccgccgccgccgccgcggccgaggcgcccggcgccggcgcgggcatggagcgctcgcagagccgcctcagtctgtccgcctccttcgaggcgctcgccatctacttcccgtgcatga

SEQ ID NO: 121295 - DNA, 120 bp, Artificial Sequence
  ENSG00000101098_1 (sequence is synthesized)
catctacttcccgtgcatgaactccttcgacgacgaggacgcaggggacagccggaggctgaagggggccatccagaggagcacggagacgggcctggcagtggagatgcccagccggac

SEQ ID NO: 121296 - DNA, 120 bp, Artificial Sequence
  ENSG00000101098_2 (sequence is synthesized)
actgcgccaggccagccacgagtccattgaggacagcatgaacagctatggctcagagggcaaccttaactatggaggagtttgcctggcgtcggacgcccagttcagtgacttcctggg

SEQ ID NO: 121297 - DNA, 120 bp, Artificial Sequence
  ENSG00000101098_3 (sequence is synthesized)
aagcatggggccggcacagtttgtgggccgccagaccctggccaccacacccatgggggatgtggagatcggtctgcaggagcggaacggtcagttggaggtggacattatccaggctcg

SEQ ID NO: 121298 - DNA, 120 bp, Artificial Sequence
  ENSG00000101098_4 (sequence is synthesized)
gggactgacagccaagccaggctccaagacactgccagcggcctacatcaaggcctacctgctagagaatggcatctgcattgccaagaagaagaccaaagtcgctcgcaagtcgctgga

SEQ ID NO: 121299 - DNA, 120 bp, Artificial Sequence
  ENSG00000101098_5 (sequence is synthesized)
cccactgtataaccaggtgctgctgtttcctgagagtccccagggcaaagtcctccaggtgatcgtgtgggggaactacgggcggatggagcggaagcagttcatgggtgtggctcgcgt

SEQ ID NO: 121300 - DNA, 120 bp, Artificial Sequence
  ENSG00000101098_6 (sequence is synthesized)
gctgctggaggagctggacttgaccaccctggccgtgggctggtacaagctcttccccacctcctccatggtggacccagccacaggccccctgctccggcaggcatcccagttgtccct

SEQ ID NO: 121301 - DNA, 120 bp, Artificial Sequence
  ENSG00000101098_7 (sequence is synthesized)
cgagagcaccgtggggccctgcggagaacgatcttagtgctggaatggggaggggctccccaagatggcctggagaccacccagccctgacctgggaccccaggcccaggggcacattga

SEQ ID NO: 121302 - DNA, 120 bp, Artificial Sequence
  ENSG00000101098_8 (sequence is synthesized)
acaggaggacggggctctcccccacagtggggaagcagaacggggagacctgcccccccttgggcccctcctcaccccttctttgcctcctacccccgagacctcccctctcccaacggg

SEQ ID NO: 121303 - DNA, 120 bp, Artificial Sequence
  ENSG00000101098_9 (sequence is synthesized)
attggctacacttttgacttggccggttcttgacctggtggatgtggctgcagtccagagaaaggaaagattgaggtggcagagcagaccactctcccttcccaaactgtccaacttctc

SEQ ID NO: 121304 - DNA, 120 bp, Artificial Sequence
  ENSG00000101098_10 (sequence is synthesized)
cccctttttgcctcctcggaagctcgctgcccagagccatgtccagaacccagccggccatctccatggtgccaattaccagcaagtgtctttcctgcggcaccgggttcaggcagctac

SEQ ID NO: 121305 - DNA, 120 bp, Artificial Sequence
  ENSG00000101098_11 (sequence is synthesized)
tcctgccccagagatgaaggggcagctttgcaaggatccggagccagctcccaggggcccagagccccccacttgaagaggagcttgagcttccctctgcctgcccgtggaaggagcttt

SEQ ID NO: 121306 - DNA, 120 bp, Artificial Sequence
  ENSG00000101098_12 (sequence is synthesized)
gccgcagcctgtccgagtccatccgtccgtcccctcctgcctgcccctcttctggtggctctaggaattggggttcagcagggaccaaaggaaaggaggaggtgccgggggcctggcaca

SEQ ID NO: 121307 - DNA, 120 bp, Artificial Sequence
  ENSG00000101098_13 (sequence is synthesized)
gacccctaggtgcctcgctccatgggattgcaacaagctagtttaggaaccgctggcggactagaaagaatgttgtcgtctgtgttccggtggaggagctgtggaacctgagtttccaga

SEQ ID NO: 121308 - DNA, 120 bp, Artificial Sequence
  ENSG00000101098_14 (sequence is synthesized)
accccaaccctagagagcatttgggggtgctgtattggagggggaggctaaggaaagttgggattgggactggtggtgccaagataagggtttctcaaattggagaacccctccttgttg

SEQ ID NO: 121309 - DNA, 120 bp, Artificial Sequence
  ENSG00000101098_15 (sequence is synthesized)
catgaggtcaatggtcatcctgtctacccaccctgcctccaggccagggggctggggaggcaaatagagcccccctattttagtctttttaaaaaaaacatcctatactaagggcagaac

SEQ ID NO: 121310 - DNA, 120 bp, Artificial Sequence
  ENSG00000101098_16 (sequence is synthesized)
ccactgccccggcctcaattaccttggctgaaggaaagatggcggtaggagagaaaagtgaagaggcgtgagtgtaagaactgggagattccttttccagcaggcctgggtagctgcctt

SEQ ID NO: 121311 - DNA, 120 bp, Artificial Sequence
  ENSG00000101098_17 (sequence is synthesized)
cccagcccagccctccctggggcctgcgggagcccttttgcatgcaagggaggatggaggctggcccctctttatagaagcacatttctgccacctcccctgggaggcacccagaagcct

SEQ ID NO: 121312 - DNA, 120 bp, Artificial Sequence
  ENSG00000101098_18 (sequence is synthesized)
gccactctttacctagtccctgctgtgtagggcgtagtccaggttagctaggtagagttagtgctccaagccctggggcctgttcttagctcatgcatagtccttacagagtcccaggac

SEQ ID NO: 121313 - DNA, 120 bp, Artificial Sequence
  ENSG00000101098_19 (sequence is synthesized)
cgggggtggagaggagcctcaagtacattccaggagaccactgtctcctcgctggcctgggcctagatggggcagcctggctcacaggaggccagcccctcctcctccgcccccttcctt

SEQ ID NO: 121314 - DNA, 120 bp, Artificial Sequence
  ENSG00000101098_20 (sequence is synthesized)
cccttgtccccgtagggttatagctggagctgcctgttatactcggctgttctgatttattattcttggtactgactttctttatgagggactcctaagggttgtaggaccttggcagag

SEQ ID NO: 121315 - DNA, 120 bp, Artificial Sequence
  ENSG00000101098_21 (sequence is synthesized)
acccaggctgcctttggtcccaccctgttcctggtcccggtcccggtcccagtcccaccaggcaactccttccacccggaaattcttcccttcccttagcctgtggaaaccctgggtatt

SEQ ID NO: 121316 - DNA, 120 bp, Artificial Sequence
  ENSG00000101098_22 (sequence is synthesized)
ctttaaagttctggtcaatgtatatcacctccacagagctgcttaccctgcactgggaaggggagatggagacgccccctttacccaggaggtcttcagagtttcctgggaccgcggtgg

SEQ ID NO: 121317 - DNA, 120 bp, Artificial Sequence
  ENSG00000101098_23 (sequence is synthesized)
gtggaatcccaaggctgggggtggaaggagcagggctctggagggattcgcattcaaggcacagaattggccccttgcctgtttgtttttctaaccagtgtgatttctctgctgttcgtt

SEQ ID NO: 121318 - DNA, 120 bp, Artificial Sequence
  ENSG00000101098_24 (sequence is synthesized)
tattacttaccattggaatattttgagccaggagagcgccttctctctccagccatcaccgctgtggttgttcaggggtagcttttcaaaaacagggcagagcctggctgtcccaaccag

SEQ ID NO: 121319 - DNA, 120 bp, Artificial Sequence
  ENSG00000101098_25 (sequence is synthesized)
ggggagcaggggcttggccctgacagcctgagcccttcccctggtgtctgcacagcctttataaagagagagagagctccgaagcaataacaacacctgggggtggtcagtgagggcccc

SEQ ID NO: 121320 - DNA, 120 bp, Artificial Sequence
  ENSG00000101098_26 (sequence is synthesized)
ctcaatgattttcttgtttgttctgtgaaatcccgctcacctcctggaggggtggagcagctgggggctggagccctgtttctttgtgtcatcgtgagcatgtgccccttcccaggggct

SEQ ID NO: 121321 - DNA, 120 bp, Artificial Sequence
  ENSG00000101098_27 (sequence is synthesized)
gtgaccattgggtgtgggaactacggtctgtcctcaccaagggatgggggtttggggaggagagtgacattttcatcattagcttcggagaagcttcaagcccatcctgtccccgctact

SEQ ID NO: 121322 - DNA, 120 bp, Artificial Sequence
  ENSG00000101098_28 (sequence is synthesized)
gcctggccccttgctgactcaggctgcactgtttgaagaggagcagagaggctggcactaggggccactggggggctggggtctccaggggatgactgttttcaatctctgggccaagat

SEQ ID NO: 121323 - DNA, 120 bp, Artificial Sequence
  ENSG00000101098_29 (sequence is synthesized)
cacatgcaggataccatgggaaggagccatctccactctccttctccagaacccccttgaagggcctttgggaccattagtccatttccattttacagacaaggaaatcaagacccagct

SEQ ID NO: 121324 - DNA, 120 bp, Artificial Sequence
  ENSG00000101098_30 (sequence is synthesized)
tgggggaaaagccacccctggagtcacctgtgtgttcagtggcacccccagcctgggtcccctcctcccaatagaggctgagccggagccagggcagtatgaggtggggctgccactgcc

SEQ ID NO: 121325 - DNA, 120 bp, Artificial Sequence
  ENSG00000101098_31 (sequence is synthesized)
catacctcctcctcccttctttctttgaagcctaatggccccccaaaagatgggcaggacaagctgtagcccatctgagaggttgggaaactgaggcccagaaacaggaagtgactcaca

SEQ ID NO: 121326 - DNA, 120 bp, Artificial Sequence
  ENSG00000101098_32 (sequence is synthesized)
caagacccctcagcaagggtgcaaagggggaagaactaggggctccattgttcttcaggcgacaggagaccgttgctccagtgcatgtctgctgggacaaggattcctggcctcgaagcc

SEQ ID NO: 121327 - DNA, 120 bp, Artificial Sequence
  ENSG00000101098_33 (sequence is synthesized)
ctgggctgcacagccctactgggctccacctctataaaccagtgacttctctgggcctgggtctgggggagagggttgccagggagactcagctctccttgggggctggcccagctgact

SEQ ID NO: 121328 - DNA, 120 bp, Artificial Sequence
  ENSG00000101098_34 (sequence is synthesized)
gagggtacacaggattgggtctagaccttgatgcctgggtggagggcccttgtaaggggccatagcctcttcaggaccaactggagggagagttaggaaacaccagctcctgcctggggc

SEQ ID NO: 121329 - DNA, 120 bp, Artificial Sequence
  ENSG00000101098_35 (sequence is synthesized)
agtgagggaatgggagcagctgtgggcgcctcatttcaggcaagtcctccccaaaccttcagatgcagtgagacctggccttcctgttgtgcttttcagactttgttttcagaatgcttt

SEQ ID NO: 121330 - DNA, 120 bp, Artificial Sequence
  ENSG00000101098_36 (sequence is synthesized)
tatctcgagtgtgcccttcggccctcacaagagcccctggggagtaggtggtggcctgtgccgtcatccccatttcaaagcagggagctgaggtcctgggaggggaaagtgcttgcctga

SEQ ID NO: 121331 - DNA, 120 bp, Artificial Sequence
  ENSG00000101098_37 (sequence is synthesized)
ggtcccactgtgttagtgggtgggcaggactggaactcggttctccaacagcccagagctcactcttttacacccagaggtggagcaggtggcttagggggtggttatgtacttcacaag

SEQ ID NO: 121332 - DNA, 120 bp, Artificial Sequence
  ENSG00000101098_38 (sequence is synthesized)
ccaattcccttcagccaggagctcctgggtgcatttccgtgtcagaaacagtaccgagtcccaccccctctggaggcacagctgttgcgtcaggcaaggtcacctgcatttatttattga

SEQ ID NO: 121333 - DNA, 120 bp, Artificial Sequence
  ENSG00000101098_39 (sequence is synthesized)
gcagcagtgctgtgtcaggcccagggaccgagcccctctccctgttcccctatggtgtctccgaggccctctgggagggccccacatctggagcagcacctcagagtggacagaaagcat

SEQ ID NO: 121334 - DNA, 120 bp, Artificial Sequence
  ENSG00000101098_40 (sequence is synthesized)
tagcgtccacgagctcacccgacgccgagcctgtgaggtgggctgatggtgcccgtctaacccagcgcttcagggaggtcagaatggagccgaacccagggctgtgagcatcacctctgg

SEQ ID NO: 121335 - DNA, 120 bp, Artificial Sequence
  ENSG00000101098_41 (sequence is synthesized)
agccctttcactttatgactgcttcctggacgggtggtgggaaggcaggagcctgggtccttaggctgggggcctctctccatccacccacctttccctcattccctctcttggagcagc

SEQ ID NO: 121336 - DNA, 120 bp, Artificial Sequence
  ENSG00000101098_42 (sequence is synthesized)
agccgcccaggcctttagggagggagggtttctggggcccttgggttggagtggggtcgcgttgcattgtgttcatgaccatgtagctcatgttgaaattaaagtttttggcttttctaa

SEQ ID NO: 121337 - DNA, 120 bp, Artificial Sequence
  ENSG00000101098_43 (sequence is synthesized)
atggagcgctcgcagagccgcctcagtctgtccgcctccttcgaggcgctcgccatctacttcccgtgcatgaactccttcgacgacgaggacgcagaaggggacagccggaggctgaag

SEQ ID NO: 121338 - DNA, 120 bp, Artificial Sequence
  ENSG00000101104_0 (sequence is synthesized)
atgaacgccagcggttctggctacccgcttgcctcgctttacgtgggcgatctgcaccccgacgtgaccgaggccatgctctatgagaagttctctcccgccggccccatcctgtccatc

SEQ ID NO: 121339 - DNA, 120 bp, Artificial Sequence
  ENSG00000101104_1 (sequence is synthesized)
cgcgtgtgccgcgatgtagccacccggcgctcgctgggctacgcctacatcaacttccagcagcccgcggacgcggagcgggcactggacacaatgaactttgagatgctcaaaggccag

SEQ ID NO: 121340 - DNA, 120 bp, Artificial Sequence
  ENSG00000101104_2 (sequence is synthesized)
cctattcgcatcatgtggtcccagcgagacccaggacttcgcaagtcaggtgtgggcaacatcttcatcaagaacctggaggactccattgacaacaaggctttatatgataccttctcc

SEQ ID NO: 121341 - DNA, 120 bp, Artificial Sequence
  ENSG00000101104_3 (sequence is synthesized)
acctttgggaacatcctctcttgcaaggtggcgtgtgacgagcatggctcccggggtttcggctttgtccattttgagacccatgaggccgcacagcaggccatcaacaccatgaatggg

SEQ ID NO: 121342 - DNA, 120 bp, Artificial Sequence
  ENSG00000101104_4 (sequence is synthesized)
atgctgctgaatgaccgcaaagtctttgtgggtcacttcaagtctcgacgggagcgggaggcggagctgggggcgcgggccctggagttcaccaacatctacgtgaagaacctcccggtg

SEQ ID NO: 121343 - DNA, 120 bp, Artificial Sequence
  ENSG00000101104_5 (sequence is synthesized)
gatgtggacgagcaaggcctgcaggacctcttctcccagtttgggaaaatgctgagtgtgaaggtgatgagggacaacagcggccactcgcggtgctttggctttgtcaactttgagaag

SEQ ID NO: 121344 - DNA, 120 bp, Artificial Sequence
  ENSG00000101104_6 (sequence is synthesized)
catgaggaagcccagaaggccgtggtccatatgaacgggaaggaggtgagcgggcggctgctgtacgcgggccgggcccaaaagcgcgtggagcggcagaatgaactgaagcgcaggttt

SEQ ID NO: 121345 - DNA, 120 bp, Artificial Sequence
  ENSG00000101104_7 (sequence is synthesized)
gtgaagaatctggacgactccattgatgacgacaaactgaggaaagagttctctccctatggagtaattaccagtgcgaaggtgatgacagagggtggccacagcaaggggtttggcttt

SEQ ID NO: 121346 - DNA, 120 bp, Artificial Sequence
  ENSG00000101104_8 (sequence is synthesized)
gtgtgtttttcctccccagaagaggcgacaaaggccgtgacagagatgaacgggcgcatcgtgggcaccaagccactctacgtggcactggcccagcgcaaagaggagcggaaggccatc

SEQ ID NO: 121347 - DNA, 120 bp, Artificial Sequence
  ENSG00000101104_9 (sequence is synthesized)
ttgaccaaccagtacatgcagcgcctctccaccatgcggaccctgagcaaccccctcctgggctcctttcagcagccctccagctacttcctgcctgccatgccccagcctccagcccag

SEQ ID NO: 121348 - DNA, 120 bp, Artificial Sequence
  ENSG00000101104_10 (sequence is synthesized)
gctgcatactatggctgtggcccagtgacacccacccagcctgcccccaggtggacatcccagccacctagaccttcctgtgcctcaatggtccggccaccagttgtgcctcggcgcccc

SEQ ID NO: 121349 - DNA, 120 bp, Artificial Sequence
  ENSG00000101104_11 (sequence is synthesized)
ccggcccacatcagcagtgtcaggcaggcctccacccaggtgccacgcacggtgcctcatacccagagagtagccaacattggtactcagaccacaggacccagtggggtaggatgctgt

SEQ ID NO: 121350 - DNA, 120 bp, Artificial Sequence
  ENSG00000101104_12 (sequence is synthesized)
acaccaggccggccgctcctgccgtgcaaatgttcctcagcagcacatagcacctatcgggtccaggagccggctgtgcacatcccaggacaggagcccctgaccgcgtccatgctggct

SEQ ID NO: 121351 - DNA, 120 bp, Artificial Sequence
  ENSG00000101104_13 (sequence is synthesized)
gcggcgcccctgcatgagcaaaagcagatgattggggagcgtctctacccccttatccatgatgtccacacccagctggctggcaagatcacgggcatgctgctggagattgacaactca

SEQ ID NO: 121352 - DNA, 120 bp, Artificial Sequence
  ENSG00000101104_14 (sequence is synthesized)
gagctgttgctcatgctggagtctccagaatccctccatgccaagatagacgaggcagtggccgtgctgcaggcacaccaggctatggagcagccgaaggcgtacatgcactgaaaccag

SEQ ID NO: 121353 - DNA, 120 bp, Artificial Sequence
  ENSG00000101104_15 (sequence is synthesized)
aacttatttcccaattagtctgtatctatacttgggctctgtatgtgaatgaaggttggtcacccatccagcctattaccttttgctttgtgtattaaaagtgctgcaaaatctgccttg

SEQ ID NO: 121354 - DNA, 120 bp, Artificial Sequence
  ENSG00000101104_16 (sequence is synthesized)
catgccaaggcccagagacggaaagtacaaagactagtaaaatacatccttgcccttaaggagctaagtacccaaaacctgtaatccatcttgagtcaccagagtacggttgctcagaaa

SEQ ID NO: 121355 - DNA, 120 bp, Artificial Sequence
  ENSG00000101104_17 (sequence is synthesized)
cagcagtggtgcggtggaaagggcatcaaccctgcgatccggacaagtcactccatccctctgatcatgcgtgcccacctaccacatgaggatatcacttcatagacttgctggaagggt

SEQ ID NO: 121356 - DNA, 120 bp, Artificial Sequence
  ENSG00000101104_18 (sequence is synthesized)
tcattgtgttagcctgttccctgagctctcttcgtgatcaagaagactgatcagataaatcaagagacttgcccaaaattacctaggaaatctgtagcagcagcagaaccaaactccggt

SEQ ID NO: 121357 - DNA, 120 bp, Artificial Sequence
  ENSG00000101104_19 (sequence is synthesized)
ccttgctaaatctagataccaggctagcttttctatggacccagaattaacccatacaaatgtacaagcttttccagaccagctggggtgagatgaatgaaaatggcagcaacatcaata

SEQ ID NO: 121358 - DNA, 120 bp, Artificial Sequence
  ENSG00000101104_20 (sequence is synthesized)
gaaaattcttgcaaagctgagaaggtgaaattcctctggctatattgttgaccaaaggccctcctctgtaagagtgaattgcacgctcacttgaaactatcttgagggactaaggtgtac

SEQ ID NO: 121359 - DNA, 120 bp, Artificial Sequence
  ENSG00000101104_21 (sequence is synthesized)
aatcctggtgcttatgcagtttggggctctaggtagacacgagctggctttgaaattgtagattcctacactccccctttctggagttctgggtctaagtgaattgactcctatttctgt

SEQ ID NO: 121360 - DNA, 120 bp, Artificial Sequence
  ENSG00000101104_22 (sequence is synthesized)
tgtgaatgttgtagtttcccttcccattctcttggtggccctggaagcttctaggcacagtgtgccaccctgattattcccaccactccatccaacttttctctctctgtggtgtctgca

SEQ ID NO: 121361 - DNA, 120 bp, Artificial Sequence
  ENSG00000101104_23 (sequence is synthesized)
cagatgattggcacctgttatcttgtcttaaaacgctggtcagactggatggtcctgagctttcttccactgctgctgtcctgtgactttgaggggagcgtctctacccccttatccatg

SEQ ID NO: 121362 - DNA, 120 bp, Artificial Sequence
  ENSG00000101104_24 (sequence is synthesized)
atgattgctggctggcaagatcacgggcatgctgctggagattgacaactcagagctgttgctcatgctggagtctccagaatccctccatgccaagatagacgaggcagtggccgtgct

SEQ ID NO: 121363 - DNA, 74 bp, Artificial Sequence
  ENSG00000101104_25 (sequence is synthesized)
ctgacctcaagtgatgtgcccttcggccctaaatttctttactatctacactattctaccctaagatgccaatg

SEQ ID NO: 121364 - DNA, 120 bp, Artificial Sequence
  ENSG00000101104_26 (sequence is synthesized)
ttctttactatctacactattctaccctaagatgccaatgtctactgagactctccaaaacaggcacagattatccagcatttccccagcttagatggtcatttttttgtgggatgcctg

SEQ ID NO: 121365 - DNA, 120 bp, Artificial Sequence
  ENSG00000101104_27 (sequence is synthesized)
ttaacatctcccctggatgttaatgttctgaggagcatggtttgggaaaggacctcgtgggacttacaggaagtagaaagatgtcacccattaaaggccaccacggtaagaacattcctc

SEQ ID NO: 121366 - DNA, 120 bp, Artificial Sequence
  ENSG00000101104_28 (sequence is synthesized)
tccttttagcagttgcttaagctgcacaagttggagtaagatgtcaccctttttatccaggtcattgggttagctgacagggagccaagattgaaatctaagatctttgccctgcaggat

SEQ ID NO: 121367 - DNA, 120 bp, Artificial Sequence
  ENSG00000101104_29 (sequence is synthesized)
tcagggctaatggacatcctgagatgggaggaaggagctttcattacagccttgtgggtcttgactcaccagtccctgcaggagccagtggagttcctgccatggtgtccctgaggaggt

SEQ ID NO: 121368 - DNA, 120 bp, Artificial Sequence
  ENSG00000101104_30 (sequence is synthesized)
gtagcttctcacctaccctgccgccaagcccctcagtctgggtcttcttttcccatgcagcctccagcccaggctgcatactatggctgtggcccagtgacacccacccagcctgccccc

SEQ ID NO: 121369 - DNA, 120 bp, Artificial Sequence
  ENSG00000101104_31 (sequence is synthesized)
aggtggacatcccagccacctagaccttcctgtgagtgacccagccccttccactctcagactggcctattggtgtgggccccgtgaggcagtcataacacagggatgaaacctggctct

SEQ ID NO: 121370 - DNA, 120 bp, Artificial Sequence
  ENSG00000101104_32 (sequence is synthesized)
gccacttcccaaggtgggtgacttcacttctctgagcctcagtttcctcttctgagcatgggcctgaatgagacgtgtgtaaagtaccaagcacagtggtgagccaatggaagacacgca

SEQ ID NO: 121371 - DNA, 120 bp, Artificial Sequence
  ENSG00000101104_33 (sequence is synthesized)
aaaagtgcagacaaaaaaaaaaaaaaaaagaatgaaatctggagaggatgtgaggagaggtctagcaaaatgattaaaaatttggacttagcatcaaagtcaaacagatccatattcaaa

SEQ ID NO: 121372 - DNA, 120 bp, Artificial Sequence
  ENSG00000101104_34 (sequence is synthesized)
ggccctggacacattgctgagatgggctgaccaccaataccaggcccagtcattaaaagtacctgatgttagaagatcaagtgttaaatgtcatagcctagaaggagcagttctgggaga

SEQ ID NO: 121373 - DNA, 120 bp, Artificial Sequence
  ENSG00000101104_35 (sequence is synthesized)
agaacccagatgtcctcagtgctccactccatacgagccctgggatgctggggtgtgagctaggccgtgcacaagccattagaaggtgttccacacaggggagcgtctctacccccttat

SEQ ID NO: 121374 - DNA, 120 bp, Artificial Sequence
  ENSG00000101104_36 (sequence is synthesized)
caaattccagctttgtcaccgacccccctactgggtgaccgtggccaagctggctctattctctaggcacctgttatcttgtcttaaaacgctggtcagactggatggtcctgagctttc

SEQ ID NO: 121375 - DNA, 120 bp, Artificial Sequence
  ENSG00000101104_37 (sequence is synthesized)
ttccactgctgctgtcctgtgactttgaggttgggagacagtccagatgtggggagatcaggggacaaagggaggagtaggggtatggtcttgggtttctgctgagaaatggcttgtagg

SEQ ID NO: 121376 - DNA, 120 bp, Artificial Sequence
  ENSG00000101104_38 (sequence is synthesized)
tggggggttaaagttcctcacacctctcctgaacgggaggaagctgctgttcaccagtttccagtgctcaatgcgggcaggtggggcatctgtgcgtttggtaaatacatgatgtttccc

SEQ ID NO: 121377 - DNA, 120 bp, Artificial Sequence
  ENSG00000101109_0 (sequence is synthesized)
aggaggtccgcgggaggatggagcagtgagcgggtctgggcggctgctggcagcgccatggagacggtacagctgaggaacccgccgcgccggcagctgaaaaagttggatgaagatagt

SEQ ID NO: 121378 - DNA, 120 bp, Artificial Sequence
  ENSG00000101109_1 (sequence is synthesized)
ttaaccaaacaaccagaagaagtatttgatgtcttagagaaacttggagaagggtcctatggcagcgtatacaaagctattcataaagagaccggccagattgttgctattaagcaagtt

SEQ ID NO: 121379 - DNA, 120 bp, Artificial Sequence
  ENSG00000101109_2 (sequence is synthesized)
cctgtggaatcagacctccaggagataatcaaagaaatctctataatgcagcaatgtgacagccctcatgtagtcaaatattatggcagttattttaagaacacagacttatggatcgtt

SEQ ID NO: 121380 - DNA, 120 bp, Artificial Sequence
  ENSG00000101109_3 (sequence is synthesized)
atggagtactgtggggctggttctgtatctgatatcattcgattacgaaataaaacgttaacagaagatgaaatagctacaatattacaatcaactcttaagggacttgaataccttcat

SEQ ID NO: 121381 - DNA, 120 bp, Artificial Sequence
  ENSG00000101109_4 (sequence is synthesized)
tttatgagaaaaatacaccgagatatcaaggcaggaaatattttgctaaatacagaaggacatgcaaaacttgcagattttggggtagcaggtcaacttacagataccatggccaagcgg

SEQ ID NO: 121382 - DNA, 120 bp, Artificial Sequence
  ENSG00000101109_5 (sequence is synthesized)
aatacagtgataggaacaccattttggatggctccagaagtgattcaggaaattggatacaactgtgtagcagacatctggtccctgggaataactgccatagaaatggctgaaggaaag

SEQ ID NO: 121383 - DNA, 120 bp, Artificial Sequence
  ENSG00000101109_6 (sequence is synthesized)
cccccttatgctgatatccatccaatgagggcaatcttcatgattcctacaaatcctcctcccacattccgaaaaccagagctatggtcagataactttacagattttgtgaaacagtgt

SEQ ID NO: 121384 - DNA, 120 bp, Artificial Sequence
  ENSG00000101109_7 (sequence is synthesized)
cttgtaaagagccctgagcagagggccacagccactcagctcctgcagcacccatttgtcaggagtgccaaaggagtgtcaatactgcgagacttaattaatgaagccatggatgtgaaa

SEQ ID NO: 121385 - DNA, 120 bp, Artificial Sequence
  ENSG00000101109_8 (sequence is synthesized)
ctgaaacgccaggaatcccagcagcgggaagtggaccaggacgatgaagaaaactcagaagaggatgaaatggattctggcacgatggttcgagcagtgggtgatgagatgggcactgtc

SEQ ID NO: 121386 - DNA, 120 bp, Artificial Sequence
  ENSG00000101109_9 (sequence is synthesized)
cgagtagccagcaccatgactgatggagccaatactatgattgagcacgatgacacgttgccatcacaactgggcaccatggtgatcaatgcagaggatgaggaagaggaaggaactatg

SEQ ID NO: 121387 - DNA, 120 bp, Artificial Sequence
  ENSG00000101109_10 (sequence is synthesized)
aaaagaagggatgagaccatgcagcctgcgaaaccatcctttcttgaatattttgaacaaaaagaaaaggaaaaccagatcaacagctttggcaagagtgtacctggtccactgaaaaat

SEQ ID NO: 121388 - DNA, 120 bp, Artificial Sequence
  ENSG00000101109_11 (sequence is synthesized)
tcttcagattggaaaataccacaggatggagactacgagtttcttaagagttggacagtggaggaccttcagaagaggctcttggccctggaccccatgatggagcaggagattgaagag

SEQ ID NO: 121389 - DNA, 120 bp, Artificial Sequence
  ENSG00000101109_12 (sequence is synthesized)
atccggcagaagtaccagtccaagcggcagcccatcctggatgccatagaggctaagaagagacggcaacaaaacttctgagcaaggccaggctgtgagggccccagctccacccaggct

SEQ ID NO: 121390 - DNA, 120 bp, Artificial Sequence
  ENSG00000101109_13 (sequence is synthesized)
ttgggtgaattctggatggcttgcctcatgtttgttagccagcacttctgctctgtcgtctctccacagcacctttgtgaactcaggaatgtgcgccagtgggaagggctctcttgacag

SEQ ID NO: 121391 - DNA, 120 bp, Artificial Sequence
  ENSG00000101109_14 (sequence is synthesized)
tcagcgtgccatcttgatgtgtgtatgtacattggtcaggtatattatctcaaaggatttatattggcgcttttaactcagagttttaaaccccaggaacagagactcctagttgagtga

SEQ ID NO: 121392 - DNA, 120 bp, Artificial Sequence
  ENSG00000101109_15 (sequence is synthesized)
tagctgggaaagttttacattgtctgtttttcttctcccaatagctttcaattgttctttctggaagacttttaaaaaaatataaatatgcatatatatatataaattataaatagattc

SEQ ID NO: 121393 - DNA, 120 bp, Artificial Sequence
  ENSG00000101109_16 (sequence is synthesized)
cccacgcagtgtggtggcatctctgtacaggtacagttttaaacggtttgcctcttttctgtaagattatggtactgtggaacatgagggcagaggacaccgggaggctgttagggggtc

SEQ ID NO: 121394 - DNA, 120 bp, Artificial Sequence
  ENSG00000101109_17 (sequence is synthesized)
actgaatcccaggagccaacctccccctttgcagggctgcatttaaaaattaggtttgggacagttcttgtaccgtggtttcagccttgtgtggtcatcactggcttctggagctattgg

SEQ ID NO: 121395 - DNA, 120 bp, Artificial Sequence
  ENSG00000101109_18 (sequence is synthesized)
tgatgtccaagggaaagctttgagagtttatgtttactctttgagtcccaggagaagcctggcaccctctttgcaaattggcctttgctctttcaatgcctttcatccatctccactctc

SEQ ID NO: 121396 - DNA, 120 bp, Artificial Sequence
  ENSG00000101109_19 (sequence is synthesized)
tcaactgcctaaagtcacagcacagatactgcccagtgccttaagaggagacatgatctctaccagggactctcagcaaacacgggactgtgttcagtccacaaaggaaaagcgtttttg

SEQ ID NO: 121397 - DNA, 120 bp, Artificial Sequence
  ENSG00000101109_20 (sequence is synthesized)
aagctctcattgttcatgtaaaaatcatacacgtggcatgttgctccacattccttacacacaggggtagaggggattgcttttgtgacccacgttcaaatatgtgactgttttcttttc

SEQ ID NO: 121398 - DNA, 120 bp, Artificial Sequence
  ENSG00000101109_21 (sequence is synthesized)
tcttttactgctaagcagcctggaaaggataaatgaatattagactaagatttgttttccaggaggctcaatctgaacacacagaatgtcagagctggaagggactatagagatcatctg

SEQ ID NO: 121399 - DNA, 120 bp, Artificial Sequence
  ENSG00000101109_22 (sequence is synthesized)
atctgatcctcttgtacggatgatcgcaaaactgaggtgtagagaggggaatggccaaaatcacaaagcaagttagcgttaagagctgagactagaattcagggtcctcactcccaggcc

SEQ ID NO: 121400 - DNA, 120 bp, Artificial Sequence
  ENSG00000101109_23 (sequence is synthesized)
accgaaccatgcagccccttctttgggggaagagacctgtgtcagtcttggttaattgttccagggaaccttgctaacagaaacttgctcttgccttggctcttcagtagatgacctggc

SEQ ID NO: 121401 - DNA, 120 bp, Artificial Sequence
  ENSG00000101109_24 (sequence is synthesized)
tgtaaagagattccctggacgagccagatcattcagtttcagcgagtccttgagctccacaacatctaccagatatagcagacaagcacccatggaggcaggtttcgggcctgaagcaga

SEQ ID NO: 121402 - DNA, 120 bp, Artificial Sequence
  ENSG00000101109_25 (sequence is synthesized)
tcagagggctttgcaaaagacagcatagagccatcttcctgcaactttacctctttccctcagatggggagccatgactgggttgcacctcaggatactgtaatttgactccataattgc

SEQ ID NO: 121403 - DNA, 120 bp, Artificial Sequence
  ENSG00000101109_26 (sequence is synthesized)
tcctgaaacctgggaatcaatggaaaggcagggaatgtgcctcttctgtggccagattctgttatttgcaattaaagcaagtttttaaaaaatgcaagaggcagttgttagtcttcaggg

SEQ ID NO: 121404 - DNA, 120 bp, Artificial Sequence
  ENSG00000101109_27 (sequence is synthesized)
cttggcaactgaaatagctatgtggcggatacggaaaacagaggacaatttgaggatcttgctggaataataaatgacagctaccatttgttgagcacctattatatatcaggcactgag

SEQ ID NO: 121405 - DNA, 120 bp, Artificial Sequence
  ENSG00000101109_28 (sequence is synthesized)
ctgggtaggctctaaacttcacaataaccctgtgacttaactactttatctccattttgtagttgaagaaataagttcagagagaaagattccttcccaaggtcatgcagctagtaaatg

SEQ ID NO: 121406 - DNA, 120 bp, Artificial Sequence
  ENSG00000101109_29 (sequence is synthesized)
atagaatcaggattcatagcatcactatagggggtcaatatttacacaaaaaaggaaagtcacaagcctgtttaaaatgaagtgaccaccttttcttgcatagactaaataactcgaact

SEQ ID NO: 121407 - DNA, 120 bp, Artificial Sequence
  ENSG00000101109_30 (sequence is synthesized)
ggcatttttaggttggaaagacagctgaattagtagttaagtctgatagccaagtaagttttaaaaaccaaagcatccaggatgcacacccctgcaccatttgctgtgcgaattaatagt

SEQ ID NO: 121408 - DNA, 120 bp, Artificial Sequence
  ENSG00000101109_31 (sequence is synthesized)
cccctgcaccatttgctgtgcgaattaatagttctgtctctctctctctttcttttttctttttattctttgagatggattttcgctcttgtcgcccaggctggagtacaatggcacgat

SEQ ID NO: 121409 - DNA, 80 bp, Artificial Sequence
  ENSG00000101109_32 (sequence is synthesized)
gcctcccgggttcaagcgattcttctgctgggattacagcatatgccaccatgcccagattcagtcaggctggtcttgaa

SEQ ID NO: 121410 - DNA, 120 bp, Artificial Sequence
  ENSG00000101109_33 (sequence is synthesized)
attacaggcatgagccaccgctcctggcctctctttcttttttaaacaaagaactttgcacttggccagagaggaggagaaagcccattttctcccttcctaagctagatccaaataaaa

SEQ ID NO: 121411 - DNA, 120 bp, Artificial Sequence
  ENSG00000101109_34 (sequence is synthesized)
ccattttctcccttcctaagctagatccaaataaaagaaagttcagttttcccccataactattcttgggtcatgaactttgatctggagtttgttttgtttcaggaatgtgtgcaccca

SEQ ID NO: 121412 - DNA, 120 bp, Artificial Sequence
  ENSG00000101109_35 (sequence is synthesized)
gcttgctgatccaacaaagtctattgcttaccagtctagcttgatgaagccttttggccagaagtcaatttgttttggatcagagaaatttcctgacaaggtatatttgttttctagtga

SEQ ID NO: 121413 - DNA, 120 bp, Artificial Sequence
  ENSG00000101109_36 (sequence is synthesized)
cagaaaggcaaaggaacaagtcctagttgttgttgttgttgttgaatactaaatttaagatatgtcagcttgctttcaatgagccttgggcttctgttattgcttgagcatttggaactc

SEQ ID NO: 121414 - DNA, 120 bp, Artificial Sequence
  ENSG00000101109_37 (sequence is synthesized)
actcgagcttccagagaaatttgaggtcctcgcttgttctctgccttcaagaaacaatgacctgattctgtctttaaaaaaaaaaatctcagaattctttttttgtttgtgttttttttt

SEQ ID NO: 121415 - DNA, 120 bp, Artificial Sequence
  ENSG00000101109_38 (sequence is synthesized)
tacaggcgtgagccaccttgcctggccaaaaatctcagaattctttaagactgttttaattgctccatcagtaattttgaagcactttcctttttttttttttttcccctttttgtccct

SEQ ID NO: 121416 - DNA, 120 bp, Artificial Sequence
  ENSG00000101109_39 (sequence is synthesized)
tcccctttttgtccctttccccaagccaccaattggatggatgaatgtttgacggggaagaggaagggtaggaggatgcatggatgagtggatgagtggatcgatggatgtattgataaa

SEQ ID NO: 121417 - DNA, 120 bp, Artificial Sequence
  ENSG00000101109_40 (sequence is synthesized)
tagatagaaccagtcatctgaagcaacttaagaattgtagccttgactccttgagactgtagatttcgatccaggaaacatttatttagcacctgccagatgccagaaatttataccatt

SEQ ID NO: 121418 - DNA, 120 bp, Artificial Sequence
  ENSG00000101109_41 (sequence is synthesized)
taaaactcagtaagtcttttaaatatcaggaaggagagaagcgacatcatgatacatcctatgggtattaaaaagccaatagaatattatgaataattttatgctaataaatttaacaac

SEQ ID NO: 121419 - DNA, 120 bp, Artificial Sequence
  ENSG00000101109_42 (sequence is synthesized)
taataaatttaacaacttcaacatcataaacaaattccttgaaaaataaaaagtaccaaaattcattcaagaagaaatagataccagcctgagcaacatggcaaaatcccatctctacaa

SEQ ID NO: 121420 - DNA, 73 bp, Artificial Sequence
  ENSG00000101109_43 (sequence is synthesized)
cttgatgcagtgagccatggtctcaccactgcactctagcctgggtgacagaatgagaccccgtctcaaaaaa

SEQ ID NO: 121421 - DNA, 120 bp, Artificial Sequence
  ENSG00000101109_44 (sequence is synthesized)
ctctagcctgggtgacagaatgagaccccgtctcaaaaaaaaagaagaagtagataatctgaatagccctatatctatagaaacttaatagtgctgggagatataggtattattatcctc

SEQ ID NO: 121422 - DNA, 120 bp, Artificial Sequence
  ENSG00000101109_45 (sequence is synthesized)
attttacagatgtgaaaattgaggctcagagaagtaaagtctattgctcaaggtcatgtggctagaatatggcagagccatgattcagatccaggtcttctgattcttattccagtgtcc

SEQ ID NO: 121423 - DNA, 120 bp, Artificial Sequence
  ENSG00000101109_46 (sequence is synthesized)
tttctagcataccatgttgcctctaaagattgcagctccttatttactagaaaattgttcctgcccaatctacatctccacctcaccccatcttttcttaagcactatgtttgtgttttt

SEQ ID NO: 121424 - DNA, 120 bp, Artificial Sequence
  ENSG00000101109_47 (sequence is synthesized)
atcagtattatattcattgtctttggaatacatgttcttgtttgtgtttggaaaaaaaatctcttttaccagcttgcactcggaccaacttggaaaaaaaaaagcttaaatgtttttgct

SEQ ID NO: 121425 - DNA, 120 bp, Artificial Sequence
  ENSG00000101109_48 (sequence is synthesized)
atgtacagtttaaaaatgtgaagtttgtagctttaactttttgtaagaaaatctaataacactggcttaagtgctgacttgaaatgctattttgtaaggtttggatgtaagtaatcaatt

SEQ ID NO: 121426 - DNA, 120 bp, Artificial Sequence
  ENSG00000101109_49 (sequence is synthesized)
gaggtcagcagtttgtatgagacatagcttcctccattgcccccactccttttttcttttttaagtttgagatgcttcctgtgtttttatgttagaattgttgttctccttcttttcttc

SEQ ID NO: 121427 - DNA, 120 bp, Artificial Sequence
  ENSG00000101109_50 (sequence is synthesized)
ttcctatacctcatcacgtttgttttaaataaactgtcctttggaccacaaacccttattaacgagaacctcaatatatagcctggataatggtgttgtgaacaatctttgtgacattga

SEQ ID NO: 121428 - DNA, 120 bp, Artificial Sequence
  ENSG00000101109_51 (sequence is synthesized)
gatgtcttagagaaacttggagaaggatttacaacgttaaacccaatcctggattacatgaaatggtttttttatgatttacctccttgtaaaaaacatgagtcatcgtctttttgtaag

SEQ ID NO: 121429 - DNA, 120 bp, Artificial Sequence
  ENSG00000101109_52 (sequence is synthesized)
tgtgctgtgaaaagacaagtccaagatgaatctgaagactgccagttgactggcatcattaaagatctatggatgtcttctgcaaggaatgtggaaatttccctatgaagatatcaccag

SEQ ID NO: 121430 - DNA, 120 bp, Artificial Sequence
  ENSG00000101109_53 (sequence is synthesized)
ggagaaaacaaagcttcagatctttcttcccatactatcaccttattgttcttctaaataataccagatttctggtatttcttggatttctgttattctgactgaatgaacctaagcaag

SEQ ID NO: 121431 - DNA, 120 bp, Artificial Sequence
  ENSG00000101109_54 (sequence is synthesized)
ttggaaaataccacaggatggagactacgagtttaaaactagccaagaacagcagtctggaaaagacatatgtatccaaaattgccagggaaacctgctgtgtagatacgctttctgaga

SEQ ID NO: 121432 - DNA, 76 bp, Artificial Sequence
  ENSG00000101109_55 (sequence is synthesized)
ctgtgctgtgaaaagacaagtccaagatgaatctgaagactgccagttgactggcatcattaaagagactaagtga

SEQ ID NO: 121433 - DNA, 120 bp, Artificial Sequence
  ENSG00000101109_56 (sequence is synthesized)
agcctcatttaactaggaatattttgaaggaagaccttcactgcacttcttttccaaacatgtgacacaatgctattctttttttttgagattaagtcttgctctgtcaccaggctggag

SEQ ID NO: 121434 - DNA, 120 bp, Artificial Sequence
  ENSG00000101109_57 (sequence is synthesized)
ggaattacagatgtgagccaccacgcctggccaatgctattcttaaattgttcgggaggatgaatggtttgtgaactctcactgacttgtatcttgtgaaatgagctatggctaaaaaaa

SEQ ID NO: 121435 - DNA, 120 bp, Artificial Sequence
  ENSG00000101109_58 (sequence is synthesized)
tggctaaaaaaactgttggattctggaggctgcaatcattctgtgttatgaggatcatatggatctgtggcagagtagagccaaagctccagaccaggatgagtggagagcacttgggaa

SEQ ID NO: 121436 - DNA, 120 bp, Artificial Sequence
  ENSG00000101109_59 (sequence is synthesized)
gtgttttcaagtggagcctagcaccttttttcttctacttaaagttgtacacattgactcatttgaatttttatcatagaatgataacaaaagcatcttgcccatggtttcataaaaaat

SEQ ID NO: 121437 - DNA, 120 bp, Artificial Sequence
  ENSG00000101109_60 (sequence is synthesized)
gagtgctattgttaagacttgtatctgattaatttggcctcagatactgtggtatttccatttttctacatagatccttgccttgcatggcttatgtaaaacacctacttctccattctc

SEQ ID NO: 121438 - DNA, 120 bp, Artificial Sequence
  ENSG00000101109_61 (sequence is synthesized)
tgctgtcagttgtaattcattgaatcatctcattttgttgtagggaatcaagttttaagggacttgcttgtgagtatgattgctgaaatcttctaaccaccccctatccctgccttcaga

SEQ ID NO: 121439 - DNA, 120 bp, Artificial Sequence
  ENSG00000101109_62 (sequence is synthesized)
ttactgtagatgcagtatatggaatcaggaatcttaacttcatgtgagctattggagttttccttgctatcaggatgcatagggaggtatgaagagtgttctggtcaagattgctgagtg

SEQ ID NO: 121440 - DNA, 120 bp, Artificial Sequence
  ENSG00000101109_63 (sequence is synthesized)
agtgtatgaagagaactttctaatatataagaataatgagtgaaaattattttaaatataaggatatatagacagctatggacaagggataggaaagaaatctaaataatcagcggagac

SEQ ID NO: 121441 - DNA, 120 bp, Artificial Sequence
  ENSG00000101109_64 (sequence is synthesized)
taaagcatgccttatccttgtcaggagattgcatttgagcttcctgcatgaagttgggggctggaactcggctctccatctgtgaactaaagctgaaataaatttgcctgaccacaacca

SEQ ID NO: 121442 - DNA, 120 bp, Artificial Sequence
  ENSG00000101109_65 (sequence is synthesized)
accaaacaaccagaagaagtatttgatgtcttagagaaacttggagaagggtgagtgtaaagaaactataggtaggtcattgggtcccagtctttttcctgccccagaagaagcagaagg

SEQ ID NO: 121443 - DNA, 120 bp, Artificial Sequence
  ENSG00000101109_66 (sequence is synthesized)
atatgaacctttcagcattgttctaggtggggtggaaggtaaatttacagcttgtgatgtccttcttcgctttactccaatccctattatagacagatttagtgattcctggtcttttta

SEQ ID NO: 121444 - DNA, 120 bp, Artificial Sequence
  ENSG00000101109_67 (sequence is synthesized)
aaactttttaatttgctgttcataatttctgattggtatgcaataactgtttcaatgaaaatcaatgtaatttagtattttaatatttgcacctttgtgaaatatagtaaataaattaag

SEQ ID NO: 121445 - DNA, 120 bp, Artificial Sequence
  ENSG00000101109_68 (sequence is synthesized)
cactatcaccaccttcacagctacttaggagatccacaatcctgggttgggagccagtggatttcctgaaacacagatttgttaatgcgtttataaaatactgatgaaatgatattagta

SEQ ID NO: 121446 - DNA, 120 bp, Artificial Sequence
  ENSG00000101109_69 (sequence is synthesized)
atgtgcagtgaccatcattgactttcatgatacaattaagtttacataatttttatacttttatatatcattttaattcaatcctgtgtatttattccttcttctgtaatgaccaggaaa

SEQ ID NO: 121447 - DNA, 120 bp, Artificial Sequence
  ENSG00000101109_70 (sequence is synthesized)
ttaaaatgttaatgacaccatttcttaagtttttcttgttaatttttgaataggcgatacaatcatatgattcaaaatttaaaaaaatattaagacgcatacaataaaaaaaaaaaaaaa

SEQ ID NO: 121448 - DNA, 120 bp, Artificial Sequence
  ENSG00000101115_0 (sequence is synthesized)
aattactgggacatgcgcgttccggccgaaggggggtaaatttcccaactccaggaatttgtggcggagagggcaaataactgcggctctcccggcgccccgatgctcgcaccatgtcga

SEQ ID NO: 121449 - DNA, 120 bp, Artificial Sequence
  ENSG00000101115_1 (sequence is synthesized)
ggcgcaagcaggcgaaaccccagcacatcaactcggaggaggaccagggcgagcagcagccgcagcagcagaccccggagtttgcagatgcggccccagcggcgcccgcggcgggggagc

SEQ ID NO: 121450 - DNA, 120 bp, Artificial Sequence
  ENSG00000101115_2 (sequence is synthesized)
tgggtgctccagtgaaccacccagggaatgacgaggtggcgagtgaggatgaagccacagtaaagcggcttcgtcgggaggagacgcacgtctgtgagaaatgctgtgcggagttcttca

SEQ ID NO: 121451 - DNA, 120 bp, Artificial Sequence
  ENSG00000101115_3 (sequence is synthesized)
gcatctctgagttcctggaacataagaaaaattgcactaaaaatccacctgtcctcatcatgaatgacagcgaggggcctgtgccttcagaagacttctccggagctgtactgagccacc

SEQ ID NO: 121452 - DNA, 120 bp, Artificial Sequence
  ENSG00000101115_4 (sequence is synthesized)
agcccaccagtcccggcagtaaggactgtcacagggagaatggcggcagctcagaggacatgaaggagaagccggatgcggagtctgtggtgtacctaaagacagagacagccctgccac

SEQ ID NO: 121453 - DNA, 120 bp, Artificial Sequence
  ENSG00000101115_5 (sequence is synthesized)
ccaccccccaggacataagctatttagccaaaggcaaagtggccaacactaatgtgaccttgcaggcactacggggcaccaaggtggcggtgaatcagcggagcgcggatgcactccctg

SEQ ID NO: 121454 - DNA, 120 bp, Artificial Sequence
  ENSG00000101115_6 (sequence is synthesized)
cccccgtgcctggtgccaacagcatcccgtgggtcctcgagcagatcttgtgtctgcagcagcagcagctacagcagatccagctcaccgagcagatccgcatccaggtgaacatgtggg

SEQ ID NO: 121455 - DNA, 120 bp, Artificial Sequence
  ENSG00000101115_7 (sequence is synthesized)
cctcccacgccctccactcaagcggggcaggggccgacactctgaagaccttgggcagccacatgtctcagcaggtttctgcagctgtggctttgctcagccagaaagctggaagccaag

SEQ ID NO: 121456 - DNA, 120 bp, Artificial Sequence
  ENSG00000101115_8 (sequence is synthesized)
gtctgtctctggatgccttgaaacaagccaagctacctcacgccaacatcccttctgccaccagctccctgtccccagggctggcacccttcactctgaagccggatgggacccgggtgc

SEQ ID NO: 121457 - DNA, 120 bp, Artificial Sequence
  ENSG00000101115_9 (sequence is synthesized)
tcccgaacgtcatgtcccgcctcccgagcgctttgcttcctcaggccccgggctcggtgctcttccagagccctttctccactgtggcgctagacacatccaagaaagggaaggggaagc

SEQ ID NO: 121458 - DNA, 120 bp, Artificial Sequence
  ENSG00000101115_10 (sequence is synthesized)
caccgaacatctccgcggtggatgtcaaacccaaagacgaggcggccctctacaagcacaagtgtaagtactgtagcaaggtttttgggactgatagctccttgcagatccacctccgct

SEQ ID NO: 121459 - DNA, 120 bp, Artificial Sequence
  ENSG00000101115_11 (sequence is synthesized)
cccacactggagagagacccttcgtgtgctctgtctgtggtcatcgcttcaccaccaagggcaacctcaaggtgcactttcaccgacatccccaggtgaaggcaaacccccagctgtttg

SEQ ID NO: 121460 - DNA, 120 bp, Artificial Sequence
  ENSG00000101115_12 (sequence is synthesized)
ccgagttccaggacaaagtggcggccggcaatggcatcccctatgcactctctgtacctgaccccatagatgaaccgagtctttctttagacagcaaacctgtccttgtaaccacctctg

SEQ ID NO: 121461 - DNA, 120 bp, Artificial Sequence
  ENSG00000101115_13 (sequence is synthesized)
tagggctacctcagaatctttcttcggggactaatcccaaggacctcacgggtggctccttgcccggtgacctgcagcctgggccttctccagaaagtgagggtggacccacactccctg

SEQ ID NO: 121462 - DNA, 120 bp, Artificial Sequence
  ENSG00000101115_14 (sequence is synthesized)
gggtgggaccaaactataattccccaagggctggtggcttccaagggagtgggacccctgagccagggtcagagaccctgaaattgcagcagttggtggagaacattgacaaggccacca

SEQ ID NO: 121463 - DNA, 120 bp, Artificial Sequence
  ENSG00000101115_15 (sequence is synthesized)
ctgatcccaacgaatgtctcatttgccaccgagtcttaagctgtcagagctccctcaagatgcattatcgcacccacaccggggagagaccgttccagtgtaagatctgtggccgagcct

SEQ ID NO: 121464 - DNA, 120 bp, Artificial Sequence
  ENSG00000101115_16 (sequence is synthesized)
tttctaccaaaggtaacctgaagacacaccttggggttcaccgaaccaacacatccattaagacgcagcattcgtgccccatctgccagaagaagttcactaatgccgtgatgctgcagc

SEQ ID NO: 121465 - DNA, 120 bp, Artificial Sequence
  ENSG00000101115_17 (sequence is synthesized)
aacatattcggatgcacatgggcggtcagattcccaacacgcccctgccagagaatccctgtgactttacgggttctgagccaatgaccgtgggtgagaacggcagcaccggcgctatct

SEQ ID NO: 121466 - DNA, 120 bp, Artificial Sequence
  ENSG00000101115_18 (sequence is synthesized)
gccatgatgatgtcatcgaaagcatcgatgtagaggaagtcagctcccaggaggctcccagcagctcctccaaggtccccacgcctcttcccagcatccactcggcatcacccacgctag

SEQ ID NO: 121467 - DNA, 120 bp, Artificial Sequence
  ENSG00000101115_19 (sequence is synthesized)
ggtttgccatgatggcttccttagatgccccagggaaagtgggtcctgccccttttaacctgcagcgccagggcagcagagaaaacggttccgtggagagcgatggcttgaccaacgact

SEQ ID NO: 121468 - DNA, 120 bp, Artificial Sequence
  ENSG00000101115_20 (sequence is synthesized)
catcctcgctgatgggagaccaggagtatcagagccgaagcccagatatcctggaaaccacatccttccaggcactctccccggccaatagtcaagccgaaagcatcaagtcaaagtctc

SEQ ID NO: 121469 - DNA, 120 bp, Artificial Sequence
  ENSG00000101115_21 (sequence is synthesized)
ggaaggtcggagcagtctcccttccacgtttatccgagccccgccgacctatgtcaaggttgaagttcctggcacatttgtgggaccctcgacattgtccccagggatgacccctttgtt

SEQ ID NO: 121470 - DNA, 120 bp, Artificial Sequence
  ENSG00000101115_22 (sequence is synthesized)
agcagcccagccacgccgacaggccaagcaacatggctgcacacggtgtgggaagaacttctcgtctgctagcgctcttcagatccacgagcggactcacactggagagaagccttttgt

SEQ ID NO: 121471 - DNA, 120 bp, Artificial Sequence
  ENSG00000101115_23 (sequence is synthesized)
gtgcaacatttgtgggcgagcttttaccaccaaaggcaacttaaaggttcactacatgacacacggggcgaacaataactcagcccgccgtggaaggaagttggccatcgagaacaccat

SEQ ID NO: 121472 - DNA, 120 bp, Artificial Sequence
  ENSG00000101115_24 (sequence is synthesized)
ggctctgttaggtacggacggaaaaagagtctcagaaatctttcccaaggaaatcctggccccttcagtgaatgtggaccctgttgtgtggaaccagtacaccagcatgctcaatggcgg

SEQ ID NO: 121473 - DNA, 120 bp, Artificial Sequence
  ENSG00000101115_25 (sequence is synthesized)
tctggccgtgaagaccaatgagatctctgtgatccagagtgggggggttcctaccctcccggtttccttgggggccacctccgttgtgaataacgccactgtctccaagatggatggctc

SEQ ID NO: 121474 - DNA, 120 bp, Artificial Sequence
  ENSG00000101115_26 (sequence is synthesized)
ccagtcgggtatcagtgcagatgtggaaaaaccaagtgctactgacggcgttcccaaacaccagtttcctcacttcctggaagaaaacaagattgcggtcagctaagggagaacttgcgt

SEQ ID NO: 121475 - DNA, 120 bp, Artificial Sequence
  ENSG00000101115_27 (sequence is synthesized)
ggaaggagcaatgcagacacagtgaaatctctagaatctgctttgttttgtaagaactcatctcctcctgttttctttttcttactgatatgcaaatgatgtttactacgttggttgtga

SEQ ID NO: 121476 - DNA, 120 bp, Artificial Sequence
  ENSG00000101115_28 (sequence is synthesized)
ccacaacctcaggcaagtgctacaatcacgattgttgctatgctgctttgcaaaaagttgaaaaaataaaaaaaaaatgcataccaaaacaaatacagactctttttttttgagatggag

SEQ ID NO: 121477 - DNA, 120 bp, Artificial Sequence
  ENSG00000101115_29 (sequence is synthesized)
gattacaggcatgagctaccacgcctggcactttttttttttttttctaattttggaaagaagcgggtcttgcaaagtagctttgttacttgtaacagacgtatacatagaacctttgta

SEQ ID NO: 121478 - DNA, 120 bp, Artificial Sequence
  ENSG00000101115_30 (sequence is synthesized)
caacctagagtgactttttccaaagactgttacctatttcaaggtagaatcgttggaacttactgaacaacagtggaaaagacaactacacagcctcattgaggggagatgggtactgta

SEQ ID NO: 121479 - DNA, 120 bp, Artificial Sequence
  ENSG00000101115_31 (sequence is synthesized)
tacttactggtaactggacacgggtaaaaggacaaggtctgtcatctctttagggacctgttttatatgccccaaccctgtccccatcttattgtttttttttgaatgtacttaaaaaag

SEQ ID NO: 121480 - DNA, 120 bp, Artificial Sequence
  ENSG00000101115_32 (sequence is synthesized)
gaacaacaaaaaactagggttgtagaattataaaactgcttcaaccttagaaccttaagtaggaggccctcaaatggacttacgttagtccttagggagtcaatgtgtgtgttgctgctt

SEQ ID NO: 121481 - DNA, 120 bp, Artificial Sequence
  ENSG00000101115_33 (sequence is synthesized)
atttaaatacagttcagttggagccccgagagtgccaatgttttccccacacctcttggatgccttcctcttcccaaatcccagaagaggtgggcacctgagcggggaatctcaggtgac

SEQ ID NO: 121482 - DNA, 120 bp, Artificial Sequence
  ENSG00000101115_34 (sequence is synthesized)
ttagtttgccagtgcctactctattgaagaactgggttttcatgctcgagaagaaactcgtggaagggcgtgtttcccatcacaggttcacatactgattgcttttgttgaatttccttg

SEQ ID NO: 121483 - DNA, 120 bp, Artificial Sequence
  ENSG00000101115_35 (sequence is synthesized)
gtgcgacttatgccaagtaattatgacgattttttgttttgttttgtttccttgctgaatatttcatgaaggctacgaagttagaacaggcacgtcctgggtgtgaaagctttaatttat

SEQ ID NO: 121484 - DNA, 120 bp, Artificial Sequence
  ENSG00000101115_36 (sequence is synthesized)
ctacctcatttattttttattttttgtagccatagtgtctattttcctattttaagaccgctgaagtattcccaggccctgtctaaagcctaagagttgatgtattggtgggaagaggtg

SEQ ID NO: 121485 - DNA, 120 bp, Artificial Sequence
  ENSG00000101115_37 (sequence is synthesized)
aacgttcaagatgattttgtgatgccttttttttttgtagtttcctttgtaaatgtgatattgagcaaacgaaacattgctcttggtttaacaagaaagaaagaaaaaaactctaatttc

SEQ ID NO: 121486 - DNA, 120 bp, Artificial Sequence
  ENSG00000101115_38 (sequence is synthesized)
tgggagaaaagtctttcccctctatgtggaaggtcctgacggaaatatgcatccaagacgattagccaaagtgttgtctcttcatcgttgcacctgactttaggattccgcccccctttt

SEQ ID NO: 121487 - DNA, 120 bp, Artificial Sequence
  ENSG00000101115_39 (sequence is synthesized)
ttttttttttttttttttttgccaagttgtgcctttccttctggaattgtaagtgaacacgataatagtacctgtttacactgtgaagtggatattgttacagaaaacacaccagtggct

SEQ ID NO: 121488 - DNA, 120 bp, Artificial Sequence
  ENSG00000101115_40 (sequence is synthesized)
ttctcactgttgagctaataatgccttgtgaatgtatgatctacggagaaacccctgtagttgtacctgctgatgctgtctgtctgttggaaaataaaatttgaatgtttttttttctca

SEQ ID NO: 121489 - DNA, 120 bp, Artificial Sequence
  ENSG00000101115_41 (sequence is synthesized)
gcgccgcctgccgatcttcgccctaacctttcggggcctgacctccagccatctttgatttccgacttcctaaaaataaccgcggcaagcccgaggttgcggtatttaccagtggtggcc

SEQ ID NO: 121490 - DNA, 120 bp, Artificial Sequence
  ENSG00000101115_42 (sequence is synthesized)
tggatgtagaagcactttttactgcacaagcaaacagagctgctgctgttttaagagtcaagtgggatgttgctggtggaggctacagaagaggcaagcttgtgtatacagcaaaggcaa

SEQ ID NO: 121491 - DNA, 120 bp, Artificial Sequence
  ENSG00000101115_43 (sequence is synthesized)
gctgctccattgatatcttgatgatggggtatacctgagaggacagcagggaggtgagaacaatgaagtagcttcgagagacttccaggcatcatgtgaaggaccccagcatctggctaa

SEQ ID NO: 121492 - DNA, 120 bp, Artificial Sequence
  ENSG00000101115_44 (sequence is synthesized)
gccaaaatttacttctttgctgctgtgaacatttctgaaaaaacaagaaaacctagatcattgtatgctcgtgtgaatgtcttgtgtggtttagatttataggcttagctgctgggtctg

SEQ ID NO: 121493 - DNA, 120 bp, Artificial Sequence
  ENSG00000101126_0 (sequence is synthesized)
aatattcttaactagtcaaactgagtcatgtgtactctgctctgctggaaaagtgactttctgtcttccatcaatcgtggcagaggcgtttccaagaggaggctgggcaggcaaaaacag

SEQ ID NO: 121494 - DNA, 120 bp, Artificial Sequence
  ENSG00000101126_1 (sequence is synthesized)
gtgtctaaaccctactgattgagggctggctatgtgtattctaagctggaagaaatggactgttgaaggggaagaagaaccatgtcttactcatctctctattcctagcacagttgagtg

SEQ ID NO: 121495 - DNA, 120 bp, Artificial Sequence
  ENSG00000101126_2 (sequence is synthesized)
gctaagtgcaagtgctctgaaaatgattgtctaacagatgaacaatatatagaaactatgttccaacttcctgtcaacaatcttggcagtttaagaaaagcccggaaaactgtgaaaaaa

SEQ ID NO: 121496 - DNA, 120 bp, Artificial Sequence
  ENSG00000101126_3 (sequence is synthesized)
atacttagtgacattgggttggaatactgtaaagaacatatagaagattttaaacaatttgaacctaatgacttttatttgaaaaacactacatgggaggatgtaggactgtgggaccca

SEQ ID NO: 121497 - DNA, 120 bp, Artificial Sequence
  ENSG00000101126_4 (sequence is synthesized)
tcacttacgaaaaaccaggactatcggacaaaacctttctgctgcagcgcttgtccattttcctcaaaattcttctctgcctacaaaagtcatttccgcaatgtccatagtgaagacttt

SEQ ID NO: 121498 - DNA, 120 bp, Artificial Sequence
  ENSG00000101126_5 (sequence is synthesized)
gaaaataggattctccttaattgcccctactgtaccttcaatgcagacaaaaagactttggaaacacacattaaaatatttcatgctccgaacgccagcgcaccaagtagcagcctcagc

SEQ ID NO: 121499 - DNA, 120 bp, Artificial Sequence
  ENSG00000101126_6 (sequence is synthesized)
actttcaaagataaaaacaaaaatgatggccttaaacctaagcaggctgacagtgtagagcaagctgtttattactgtaagaagtgcacttaccgagatcctctttatgaaatagttagg

SEQ ID NO: 121500 - DNA, 120 bp, Artificial Sequence
  ENSG00000101126_7 (sequence is synthesized)
aagcacatttacagggaacattttcagcatgtggcagcaccttacatagcaaaggcaggagaaaaatcactcaatggggcagtccccttaggctcgaatgcccgagaagagagtagtatt

SEQ ID NO: 121501 - DNA, 120 bp, Artificial Sequence
  ENSG00000101126_8 (sequence is synthesized)
cactgcaagcgatgccttttcatgccaaagtcctatgaagctttggtacagcatgtcatcgaagaccatgaacgtataggctatcaggtcactgccatgattgggcacacaaatgtagtg

SEQ ID NO: 121502 - DNA, 120 bp, Artificial Sequence
  ENSG00000101126_9 (sequence is synthesized)
gttccccgatccaaacccttgatgctaattgctcccaaacctcaagacaagaagagcatgggactcccaccaaggatcggttcccttgcttctggaaatgtccggtctttaccatcacag

SEQ ID NO: 121503 - DNA, 120 bp, Artificial Sequence
  ENSG00000101126_10 (sequence is synthesized)
cagatggtgaatcgactctcaataccaaagcctaacttaaattctacaggagtcaacatgatgtccagtgttcatctgcagcagaacaactatggagtcaaatctgtaggccagggttac

SEQ ID NO: 121504 - DNA, 120 bp, Artificial Sequence
  ENSG00000101126_11 (sequence is synthesized)
agtgttggtcagtcaatgagactgggtctaggtggcaacgcaccagtttccattcctcaacaatctcagtctgtaaagcagttacttccaagtggaaacggaaggtcttatgggcttggg

SEQ ID NO: 121505 - DNA, 120 bp, Artificial Sequence
  ENSG00000101126_12 (sequence is synthesized)
tcagagcagaggtcccaggcaccagcaagatactccctgcagtctgctaatgcctcttctctctcatcgggccagttaaagtctccttccctctctcagtcacaggcatccagagtgtta

SEQ ID NO: 121506 - DNA, 120 bp, Artificial Sequence
  ENSG00000101126_13 (sequence is synthesized)
ggtcagtccagttccaaacctgctgcagctgccacaggccctcccccaggtaacacttcctcaactcaaaagtggaaaatatgtacaatctgtaatgagctttttcctgaaaatgtctat

SEQ ID NO: 121507 - DNA, 120 bp, Artificial Sequence
  ENSG00000101126_14 (sequence is synthesized)
agtgtgcacttcgaaaaagaacataaagctgagaaagtcccagcagtagccaactacattatgaaaatacacaattttactagcaaatgcctctactgtaatcgctatttacccacagat

SEQ ID NO: 121508 - DNA, 120 bp, Artificial Sequence
  ENSG00000101126_15 (sequence is synthesized)
actctgctcaaccatatgttaattcatggtctgtcttgtccatattgccgttcaactttcaatgatgtggaaaagatggccgcacacatgcggatggttcacattgatgaagagatggga

SEQ ID NO: 121509 - DNA, 120 bp, Artificial Sequence
  ENSG00000101126_16 (sequence is synthesized)
cctaaaacagattctactttgagttttgatttgacattgcagcagggtagtcacactaacatccatctcctggtaactacatacaatctgagggatgccccagctgaatctgttgcttac

SEQ ID NO: 121510 - DNA, 120 bp, Artificial Sequence
  ENSG00000101126_17 (sequence is synthesized)
catgcccaaaataatcctccagttcctccaaagccacagccaaaggttcaggaaaaggcagatatccctgtaaaaagttcacctcaagctgcagtgccctataaaaaagatgttgggaaa

SEQ ID NO: 121511 - DNA, 120 bp, Artificial Sequence
  ENSG00000101126_18 (sequence is synthesized)
accctttgtcctctttgcttttcaatcctaaaaggacccatatctgatgcacttgcacatcacttacgagagaggcaccaagttattcagacggttcatccagttgagaaaaagctcacc

SEQ ID NO: 121512 - DNA, 120 bp, Artificial Sequence
  ENSG00000101126_19 (sequence is synthesized)
ggccaggataagacaaatgcaccctctcggcttaatcagtctccaagtctggcacctgtgaagcgcacttacgagcaaatggaatttcccttactgaaaaaacgaaagttagatgatgat

SEQ ID NO: 121513 - DNA, 120 bp, Artificial Sequence
  ENSG00000101126_20 (sequence is synthesized)
agtgattcacccagcttctttgaagagaagcctgaagagcctgttgttttagctttagaccccaagggtcatgaagatgattcctatgaagccaggaaaagctttctaacaaagtatttc

SEQ ID NO: 121514 - DNA, 120 bp, Artificial Sequence
  ENSG00000101126_21 (sequence is synthesized)
aacaaacagccctatcccaccaggagagaaattgagaagctagcagccagtttatggttatggaagagtgacatcgcttcccattttagtaacaaaaggaagaagtgtgtccgtgattgt

SEQ ID NO: 121515 - DNA, 120 bp, Artificial Sequence
  ENSG00000101126_22 (sequence is synthesized)
gaaaagtacaagcctggcgtgttgctggggtttaacatgaaagaattaaataaagtcaagcatgagatggattttgatgctgagtggctatttgaaaatcatgatgagaaggattccaga

SEQ ID NO: 121516 - DNA, 120 bp, Artificial Sequence
  ENSG00000101126_23 (sequence is synthesized)
gtcaatgctagtaagactgctgacaaaaagctcaaccttgggaaggaagatgacagttcctcagacagttttgaaaatttggaagaagaatccaatgaaagtggtagcccttttgaccct

SEQ ID NO: 121517 - DNA, 120 bp, Artificial Sequence
  ENSG00000101126_24 (sequence is synthesized)
gtttttgaagttgaacctaaaatctctaacgataacccagaggaacatgtactgaaggtaattcctgaggatgcttcagaatctgaggagaagctagaccaaaaagaggatggttcaaaa

SEQ ID NO: 121518 - DNA, 120 bp, Artificial Sequence
  ENSG00000101126_25 (sequence is synthesized)
tacgaaactattcatttgactgaggaaccaaccaaactaatgcacaatgcatctgatagtgaggttgaccaagacgatgttgttgagtggaaagacggtgcttctccatctgagagtggg

SEQ ID NO: 121519 - DNA, 120 bp, Artificial Sequence
  ENSG00000101126_26 (sequence is synthesized)
cctggatcccaacaagtgtcagactttgaggacaatacctgcgaaatgaaaccaggaacctggtctgacgagtcttcccaaagcgaagatgcaaggagcagtaagccagctgccaaaaaa

SEQ ID NO: 121520 - DNA, 120 bp, Artificial Sequence
  ENSG00000101126_27 (sequence is synthesized)
aaggctaccatgcaaggtgacagagagcagttgaaatggaagaatagttcctatggaaaagttgaagggttttggtctaaggaccagtcacagtggaagaatgcatctgagaatgatgag

SEQ ID NO: 121521 - DNA, 120 bp, Artificial Sequence
  ENSG00000101126_28 (sequence is synthesized)
cgcttatctaacccccagattgagtggcagaatagcacaattgacagtgaggatggggaacagtttgacaacatgactgatggagtagctgagcccatgcatggcagcttagccggagtt

SEQ ID NO: 121522 - DNA, 120 bp, Artificial Sequence
  ENSG00000101126_29 (sequence is synthesized)
aaactgagcagccaacaggcctaagtgccaggttccctggcgttggtgacatgctgcagcctggaactctgatatccagtgtgactgcaaagctgtcttctcactggtactgccttgtga

SEQ ID NO: 121523 - DNA, 120 bp, Artificial Sequence
  ENSG00000101126_30 (sequence is synthesized)
gtactggttggactgtggggcatgtggccgctgcagttccagtggttatttctaagtctatgacaggacaggctgttcttgcttcagaaccttctctgacagacacggtaactaaatgtg

SEQ ID NO: 121524 - DNA, 120 bp, Artificial Sequence
  ENSG00000101126_31 (sequence is synthesized)
aaaaaccaataagctggtgactcatgaatacacacgaggaaaagcagaggtttattttatctgccttttcaacatttctttccctctgtgaaatgattggtcagatgtctttgagaagtg

SEQ ID NO: 121525 - DNA, 120 bp, Artificial Sequence
  ENSG00000101126_32 (sequence is synthesized)
ttaaactaattcacatggtagtgtagggccaacatacaagctaccagtctaatgtgtatagtagactttgggaaaagcgattttttttcatgtattcattctgaatagttgaaatgtata

SEQ ID NO: 121526 - DNA, 120 bp, Artificial Sequence
  ENSG00000101126_33 (sequence is synthesized)
tttgtacagtcttttagacctattcaagtgatgctcatgatcctgttactgtgtgcccatcatagatttctttttttagtgttgcccttgctgtgtaataaacgctctatctagtttacc

SEQ ID NO: 121527 - DNA, 120 bp, Artificial Sequence
  ENSG00000101126_34 (sequence is synthesized)
tagcaaaagctcaaaactgcgctagtatggactttttggacagacttagtttttgcacataaccttgtacaatcttgcaacagaggccagccacgtaagatatatatctggactctcttg

SEQ ID NO: 121528 - DNA, 120 bp, Artificial Sequence
  ENSG00000101126_35 (sequence is synthesized)
tattataggatttttcttgttctgaatatccttgacattacagctgtcaaaaacaaaaactggtatttcagatctgttttctgaaatcttttaagctaaaatcacatgcaagaattgact

SEQ ID NO: 121529 - DNA, 120 bp, Artificial Sequence
  ENSG00000101126_36 (sequence is synthesized)
ttgcagctactaattttgacaccttttagatctgtataaaagtgtgttgtgttgaagcagcaaaccaatgagtgctgcattttggatatttagttttatctttagttcaacaccatcatg

SEQ ID NO: 121530 - DNA, 120 bp, Artificial Sequence
  ENSG00000101126_37 (sequence is synthesized)
gtggattcatttataccatctaatatatgacacactgttgtagtatgtataattttgtgatctttattttccctttgtattcattttaagcatctaaataaattgctgtattgtgcttaa

SEQ ID NO: 121531 - DNA, 120 bp, Artificial Sequence
  ENSG00000101126_38 (sequence is synthesized)
ggggttactctttgattttggtagatttcactctttctccttttattttccatttttttatagttaacgttgattttggattagaataataaatgaggcagcattttattacatttggat

SEQ ID NO: 121532 - DNA, 120 bp, Artificial Sequence
  ENSG00000101126_39 (sequence is synthesized)
tagttgacttgccatttacagatgatattggtattacagagtaacagcctttgttaattagaaaactggatttgcatatattaaattttaattcctggtgctttgtcttttgtttttgct

SEQ ID NO: 121533 - DNA, 120 bp, Artificial Sequence
  ENSG00000101126_40 (sequence is synthesized)
gttttgggttttagaactactttatatcctgcgaaattgtgttagatttggattattaaattgataaatttttaccatattatgggaagcatttctgatctcattagaaaccatacatat

SEQ ID NO: 121534 - DNA, 120 bp, Artificial Sequence
  ENSG00000101126_41 (sequence is synthesized)
tctcagctgcccaggttttactgattttattttctcattaaagacaaacttctgttttaaggaacttgggaaagttgatatgaatttctaatttaatgtattaggtcattaaaataattt

SEQ ID NO: 121535 - DNA, 120 bp, Artificial Sequence
  ENSG00000101126_42 (sequence is synthesized)
ttgagttcccttagacacatacaggcttttcatttttttcaaaagtaccctccttaaagtctgtaacagttaacatttttgagtacctttgcccaggtacgttgcaggcaggggtggagt

SEQ ID NO: 121536 - DNA, 120 bp, Artificial Sequence
  ENSG00000101126_43 (sequence is synthesized)
gtacgttgcaggcaggggtggagtgggggcatgcattggtcgagtcacatatcattactgtatttagtttggggagtatacagaaacttaaggtttttttgtttttgtttttgtttttgt

SEQ ID NO: 121537 - DNA, 120 bp, Artificial Sequence
  ENSG00000101126_44 (sequence is synthesized)
agtaggcaggacagttccaattcaacaaaaacctctttaccctggcactcaaaactgtaatgatgatgaactggtaagcatttttctgttttcagatgttcaacatcaaaatgagaaaag

SEQ ID NO: 121538 - DNA, 120 bp, Artificial Sequence
  ENSG00000101126_45 (sequence is synthesized)
cactaacacttgatttaaaaataattgattgctagtatttctctaattttcatcttgaagttcattactgaactgttgttaagtcttatcagaattatgccagattagactcatagtcaa

SEQ ID NO: 121539 - DNA, 120 bp, Artificial Sequence
  ENSG00000101126_46 (sequence is synthesized)
tcaaaatgtcctgttaaaaactgggaaaatcagagagtacttattttgcctgcctgctttaagtattcaaaatatagtagatatgtgctcggctcagtggctcacgcctataatcccagc

SEQ ID NO: 121540 - DNA, 120 bp, Artificial Sequence
  ENSG00000101126_47 (sequence is synthesized)
tggggtgccaaggcaggaggatggcttgagtccaggagtttgtgagcagccttggcaacatagtgagacctagtctctacaaaaaaattttaaaaattagttgggcatagtggcgcactc

SEQ ID NO: 121541 - DNA, 120 bp, Artificial Sequence
  ENSG00000101126_48 (sequence is synthesized)
gatcacttgagcccagaaggttgaggctatggtgaatcgtgagtgcactgcagtcaatgaaccatgagtgcactgcactccagcctgcgcgacagagtaagactctgtcttaagaaaagg

SEQ ID NO: 121542 - DNA, 120 bp, Artificial Sequence
  ENSG00000101126_49 (sequence is synthesized)
ctgcgcgacagagtaagactctgtcttaagaaaaggaaggaaggatggatggatggatatatcaagccatatgcacatgaaagcaggtgtgtgtctgtgtgtgtacacactagatgagga

SEQ ID NO: 121543 - DNA, 120 bp, Artificial Sequence
  ENSG00000101126_50 (sequence is synthesized)
tatctatgcaccttttttgtcagatgggtaggttttatgatcctatcatcagtggaattagtaaatattacaagttgtacgtgttttgactttgacttaaatttttttttccaatagaaa

SEQ ID NO: 121544 - DNA, 120 bp, Artificial Sequence
  ENSG00000101126_51 (sequence is synthesized)
agagatggcagccacagtcacagaggaaacttgtggaaaacccaagatctgtcatctgcaaatagaatgctttctcttgaggcacctggtacaaaatctgtttttctttttttttttttt

SEQ ID NO: 121545 - DNA, 120 bp, Artificial Sequence
  ENSG00000101126_52 (sequence is synthesized)
cccttgagtttttcagttcaccttttgttaaggagcagagcctgcatatatatgtaaatgtctcaatgataaaaaaaaaaatgtaaacatggattggcattaatttgcaagcagaatctt

SEQ ID NO: 121546 - DNA, 120 bp, Artificial Sequence
  ENSG00000101126_53 (sequence is synthesized)
aatagcctgatgggttttttgtttgttttttcttctagatgaagttaaacgttcgttttcaccttacgatgggaacaactgtagtgcaggcggctctgcctctatttgccactcttggcc

SEQ ID NO: 121547 - DNA, 120 bp, Artificial Sequence
  ENSG00000101126_54 (sequence is synthesized)
ctcttgctattaagggaaaggctttgaagagcacagcactgacagggctgtaaagatggaaggagctggtatttttaccatgcgtagattcccaagagaacttgtactaaaaagcagaaa

SEQ ID NO: 121548 - DNA, 120 bp, Artificial Sequence
  ENSG00000101126_55 (sequence is synthesized)
gttacaaggaagcagaattaggccaacatttccagcaattaaaacaatgatgggaaactccaatccatgaggaggctggtcagtcacctcaaggatagtggcctaaagaagtctgaagtg

SEQ ID NO: 121549 - DNA, 120 bp, Artificial Sequence
  ENSG00000101126_56 (sequence is synthesized)
gctgatgtccataacttctgagtctgtttccaaaagaaagactcttgttaatgctgttaccagagagtagagatttgaccagcctctccctaaaatgtaagcttctcaacaacagtacag

SEQ ID NO: 121550 - DNA, 120 bp, Artificial Sequence
  ENSG00000101126_57 (sequence is synthesized)
gaagaagtgcaagagtagactagaacctttaaggaatttggggctggaacggagctatgttgcatctgttgttatacaggtagattataagttctacatgcaccagccaaaacttaggac

SEQ ID NO: 121551 - DNA, 120 bp, Artificial Sequence
  ENSG00000101126_58 (sequence is synthesized)
aggatgtccccaaattaagatactacagattaccaaatcagaaataaccagctggatttaggccagctcacatttatttggaaattaccctccctgattaacaggcttctgagttgtacg

SEQ ID NO: 121552 - DNA, 120 bp, Artificial Sequence
  ENSG00000101126_59 (sequence is synthesized)
tggaggactaatgagacttgtacaagacaccacggggcttggggtccaggtcccagttggatatcggaacagacacagataagtgtgtttcctcattaaggtggtgagagtgtgcctttt

SEQ ID NO: 121553 - DNA, 120 bp, Artificial Sequence
  ENSG00000101126_60 (sequence is synthesized)
ggcattcagaaaagggtttagccaccctaagagttggaaataaagattcccaactggaaatgttgcagaatccctacaagtgtctcaataaaagccattttaaaagaatattgttgctac

SEQ ID NO: 121554 - DNA, 120 bp, Artificial Sequence
  ENSG00000101126_61 (sequence is synthesized)
tgtttgcttttcaaataatctggagatcgttggctatggcaacgtgctgccacctaattagagaatgcctgtaaatgtaggctgaacacttctaacatgagaaaacctaagtatcctaca

SEQ ID NO: 121555 - DNA, 80 bp, Artificial Sequence
  ENSG00000101126_62 (sequence is synthesized)
tctgctgaggggagacgcgggatcagccccctcccccgcccgttgccgccgccgcctccgccggcccggtctcccctccg

SEQ ID NO: 121556 - DNA, 120 bp, Artificial Sequence
  ENSG00000101126_63 (sequence is synthesized)
cccccggccgccgccatcttgtgccccctccccctcccgcaggcagcgctaagggggattttggcgtcttctcagacacagctccctctctcggtccccgctgctgaggagcgagaggag

SEQ ID NO: 121557 - DNA, 120 bp, Artificial Sequence
  ENSG00000101126_64 (sequence is synthesized)
gagaggagcgcggccgccgccgcccgcgccggtgaagccgcctctcccacaccctccgtctcctccctccgcccctcctttgtctgcaccgctcgacgacgccgccgccgcccgccgctc

SEQ ID NO: 121558 - DNA, 120 bp, Artificial Sequence
  ENSG00000101126_65 (sequence is synthesized)
gcccgccgccgccgccgctgtccggcccccgagcacgccggccccgcgcgcgcctcgaggccgagtcaaggtgtgagatgcacaatgcgaaacctaggccccagcttttacaccatgatg

SEQ ID NO: 121559 - DNA, 120 bp, Artificial Sequence
  ENSG00000101126_66 (sequence is synthesized)
cgcagggttgtactttttgtactgaactgataggtggcctagtggttatgccctgtactaccattttgaggatctggactccgtttcctgccttgctctttggaccacattgtcaattca

SEQ ID NO: 121560 - DNA, 120 bp, Artificial Sequence
  ENSG00000101126_67 (sequence is synthesized)
agtggttatgccctgtactaccattttgaggatctggactccgtttcctgccttgctctttggaccacattgtcaattcacaccggattttaaacaatttgaacctaatgacttttattt

SEQ ID NO: 121561 - DNA, 120 bp, Artificial Sequence
  ENSG00000101132_0 (sequence is synthesized)
agtccagtcccaagatggcggccaccatgaagaaggcggctgcagaagatgtcaatgttactttcgaagatcaacaaaagataaacaaatttgcacggaatacaagtagaatcacagagc

SEQ ID NO: 121562 - DNA, 120 bp, Artificial Sequence
  ENSG00000101132_1 (sequence is synthesized)
tgaaggaagaaatagaagtaaaaaagaaacaactccaaaacctagaagatgcttgtgatgacatcatgcttgcagatgatgattgcttaatgataccttatcaaattggtgatgtcttca

SEQ ID NO: 121563 - DNA, 120 bp, Artificial Sequence
  ENSG00000101132_2 (sequence is synthesized)
ttagccattctcaagaagaaacgcaagaaatgttagaagaagcaaagaaaaatttgcaagaagaaattgacgccttagaatccagagtggaatcaattcagcgagtgttagcagatttga

SEQ ID NO: 121564 - DNA, 120 bp, Artificial Sequence
  ENSG00000101132_3 (sequence is synthesized)
aagttcagttgtatgcaaaattcgggagcaacataaaccttgaagctgatgaaagttaaacattttataatactttttttatttgtttaataaacttgaatattgtttaaaatgataatt

SEQ ID NO: 121565 - DNA, 120 bp, Artificial Sequence
  ENSG00000101132_4 (sequence is synthesized)
ttccttcttcaaatgacatggaaagcaaaactttcttttttaaaaattttcatttatttaatggaaacttgcccattttcacatgtctgcttatttattttatatttttaaaagaagaca

SEQ ID NO: 121566 - DNA, 120 bp, Artificial Sequence
  ENSG00000101132_5 (sequence is synthesized)
atatcaagtctaggggcttcatgtcatgttattaaaatcagttaagcaatcttttatgtttctatattatttagaatatttgttgttgcaattttcacataagaaaatttaacagttgtg

SEQ ID NO: 121567 - DNA, 120 bp, Artificial Sequence
  ENSG00000101132_6 (sequence is synthesized)
tcatgttgtttctgtctgattttaattgctgtctaatgacggggaaagcacgatgaaaagatgtacaatcctgcatccttgcttatttcacaactaaagctttgtcatagacttcaaaat

SEQ ID NO: 121568 - DNA, 120 bp, Artificial Sequence
  ENSG00000101132_7 (sequence is synthesized)
attttatttaaatatatgttacatattatatttaaacatacatatttaacattttttacatatctatcaatatcagagatttgggtaaaagaatgggtaatgtttaaacatgtggaggca

SEQ ID NO: 121569 - DNA, 120 bp, Artificial Sequence
  ENSG00000101132_8 (sequence is synthesized)
catgtggaggcatgtggagctttatacaaacagggcagaaccacagaagaacgttttagaaaccaagagatgtgcagaaagaaatgtttagtgttttttcgttttaaattttagatttta

SEQ ID NO: 121570 - DNA, 120 bp, Artificial Sequence
  ENSG00000101132_9 (sequence is synthesized)
ttttagtgctttgtaattaattggggtttatattgataaagatgtggaagttaaacagctatgtatgtaaaagtaaggcttatttcttaaataaaggatgcatttcttcccactccccca

SEQ ID NO: 121571 - DNA, 88 bp, Artificial Sequence
  ENSG00000101132_10 (sequence is synthesized)
acacacagtagatgagaaggagccaggaaagaagatgatggaaaagtcaacggacaagagtcacccatggtaagatgtgcttacttcc

SEQ ID NO: 121572 - DNA, 120 bp, Artificial Sequence
  ENSG00000101132_11 (sequence is synthesized)
gggcgccggggctggggccgggagcctcgaaggacgcaggtccgcctcccgcgatgccgagggtgcccccggggagtctgaggaacctgcagccccggcctcgcccctgaggtgtgggaa

SEQ ID NO: 121573 - DNA, 120 bp, Artificial Sequence
  ENSG00000101132_12 (sequence is synthesized)
tcgcccctgaggtgtgggaagccgaaggtcccgttgagtgtggttggccttgactcgggcgttgcaccggcatgatcgcattagcctcactggttatgggtagctgctgctgggagcgtg

SEQ ID NO: 121574 - DNA, 120 bp, Artificial Sequence
  ENSG00000101132_13 (sequence is synthesized)
gttacgggtagagaaacttagacacagagcagttagaggccctaaagtgactcagctagtaagaagcagagctggagttcaaactcaggctgcagaagatgtcaatgttactttcgaaga

SEQ ID NO: 121575 - DNA, 120 bp, Artificial Sequence
  ENSG00000101134_0 (sequence is synthesized)
cttcttctcctccttctcggccgggaggaggcagggctggatccctcagccgccgccgctcctcctcctggcaggccggccgcggagtcagctgacgccggcgctccagcctcgcctccc

SEQ ID NO: 121576 - DNA, 120 bp, Artificial Sequence
  ENSG00000101134_1 (sequence is synthesized)
cgcgccgcgctctgcgctccccgaaagtggctgcaagccggccgcccactgtcagggttggggggacagagaaagtgatgtgcgccttctaaagcctcgcccagcgccgccgaagcagct

SEQ ID NO: 121577 - DNA, 120 bp, Artificial Sequence
  ENSG00000101134_2 (sequence is synthesized)
tcacctctccaactttctcccaccgactgcttgtcttgaccctgccctccaccctccccagagccacttcgggtgcgcgctcttgggtaaagggggggtcaccggctgtctgggatggct

SEQ ID NO: 121578 - DNA, 120 bp, Artificial Sequence
  ENSG00000101134_3 (sequence is synthesized)
tccaattttaatgacatagtgaagcaagggtacgtgaggatccggagcagacgcctcgggatttatcagcgatgctggttagtattcaagaaagcttcaagcaaaggtccaaaaagactg

SEQ ID NO: 121579 - DNA, 120 bp, Artificial Sequence
  ENSG00000101134_4 (sequence is synthesized)
gagaaattttctgatgaacgtgctgcatatttcaggtgttatcataaggttacagaactcaataatgtgaagaacgtagctcgattgccaaaaagcaccaagaaacatgccatagggatt

SEQ ID NO: 121580 - DNA, 120 bp, Artificial Sequence
  ENSG00000101134_5 (sequence is synthesized)
tatttcaatgacgatacctccaagacttttgcttgcgaatcagatcttgaggctgatgagtggtgcaaagtactccagatggagtgtgtaggaacacggatcaatgacatcagccttgga

SEQ ID NO: 121581 - DNA, 120 bp, Artificial Sequence
  ENSG00000101134_6 (sequence is synthesized)
gagcctgacttactggccactggggttgagagagaacagagtgagagattcaatgtgtatttgatgccatctcctaacttagatgtacatggcgaatgtgccttgcagattacatatgag

SEQ ID NO: 121582 - DNA, 120 bp, Artificial Sequence
  ENSG00000101134_7 (sequence is synthesized)
tatatctgtctttgggacgtccagaatcccagagtcaaactcatctcttggccgctaagcgccctgcggcggtatggacgtgatactacgtggttcacttttgaggcagggaggatgtgt

SEQ ID NO: 121583 - DNA, 120 bp, Artificial Sequence
  ENSG00000101134_8 (sequence is synthesized)
gccatctatcagaaagtccactctgctgccttggccatagccgagcagcacgagcgcttgctacagagtgtgaaaaactcgatgctccagatgaagatgagtgagcgggccgcctcgctg

SEQ ID NO: 121584 - DNA, 120 bp, Artificial Sequence
  ENSG00000101134_9 (sequence is synthesized)
agcaccatggtgcccctgcctcgcagcgcctactggcagcacatcacacggcagcacagcacgggacagctctaccgcttgcaagatgtttccagccctctgaagcttcatcgaacagag

SEQ ID NO: 121585 - DNA, 120 bp, Artificial Sequence
  ENSG00000101134_10 (sequence is synthesized)
acttttccagcctacagatctgagcactgacagtaactgccaagaattgttaacacacttgtgatgtgtcagccacagattcacccaggaggtcacagaatgacagcaagggaaatgacg

SEQ ID NO: 121586 - DNA, 120 bp, Artificial Sequence
  ENSG00000101134_11 (sequence is synthesized)
accaagagaagaagcttaaagtcctggctaattgtgtggtcattggaaaactctgcaatacaataattttctttattttctttttcttttttaaattcttagtgtaattgaaacgtgctc

SEQ ID NO: 121587 - DNA, 120 bp, Artificial Sequence
  ENSG00000101134_12 (sequence is synthesized)
tatagatattgactctgtgttccctcttttacagctggacagaaagaagtcaatgtcacgaaatgattttctattgtagatactttgtcccttgcacttctctgaatctgtccttttgtg

SEQ ID NO: 121588 - DNA, 120 bp, Artificial Sequence
  ENSG00000101134_13 (sequence is synthesized)
gattcttgtgattttccttccaagtgtttcagttgtatgacagtcagtattgacaataaaatggcttttaattatttgttatttgtttacaccctattcctcagttattattactgtggt

SEQ ID NO: 121589 - DNA, 120 bp, Artificial Sequence
  ENSG00000101134_14 (sequence is synthesized)
tctgattaactactggaaattatatttgattatatcaccaattagttaaatcagtgcttcgactcactcttatctgttctgttcaaaactatttgttcaaagaacccgttagtgttgttt

SEQ ID NO: 121590 - DNA, 120 bp, Artificial Sequence
  ENSG00000101134_15 (sequence is synthesized)
acagggttacagtttctctcacatgctttcctcacccctttacccccctttttgaaagcctttattttgttcggagtctcttcataaaacatttgaaaataaaagatcattcttcaccca

SEQ ID NO: 121591 - DNA, 120 bp, Artificial Sequence
  ENSG00000101134_16 (sequence is synthesized)
atttatcagcgatgctggttagtattcaagaaagcttcaagcaaaggtccaaaaagactggagaaattttctgatgaacgtgctgcatatttcaggtgttatcataagtctctgctatgg

SEQ ID NO: 121592 - DNA, 120 bp, Artificial Sequence
  ENSG00000101134_17 (sequence is synthesized)
ccccgagaggatgaggactggatctcattgtgtctcagacactgcctgatgcagaaagacactcattcaatgcttggggaatgtggggagagaagggaggggaagaagcagaaaacaggt

SEQ ID NO: 121593 - DNA, 120 bp, Artificial Sequence
  ENSG00000101134_18 (sequence is synthesized)
aacagtggacgaagaggaagttctaccgatttattgttttctttaagtttgatgactaaattttcttagtagtagtgagattttctcaataaaaatagtcattgtgtgttacaactcatt

SEQ ID NO: 121594 - DNA, 120 bp, Artificial Sequence
  ENSG00000101134_19 (sequence is synthesized)
tcggggtgctgatcctgagagccctccgcagtgaacaccctgcatgcagatctccttcttggaacctgttcctggaaaacccagtctccagcaacctgatatgtaactgcaaatctgcaa

SEQ ID NO: 121595 - DNA, 120 bp, Artificial Sequence
  ENSG00000101134_20 (sequence is synthesized)
ctctagaccaaccttctaaagagggatttaagacctttttcaagaatctggcttgattttttggcccatggttctccctttattttactcaatgttctcaaaactaaaatggctctttaa

SEQ ID NO: 121596 - DNA, 120 bp, Artificial Sequence
  ENSG00000101134_21 (sequence is synthesized)
tttgattttcgtaaaatggaaatttggtagatcatattttatttactatgttgttaaaatgccccaatctcctcagtagattcatacactgaaaaaaaaataaaaaagaaaataccttaa

SEQ ID NO: 121597 - DNA, 120 bp, Artificial Sequence
  ENSG00000101138_0 (sequence is synthesized)
agattgggcaggattcgcgcctccatttttccaggagagagcgggataccaagagaaccggaccagctgctggcagggaaactgtcttccttttctccaagatgtacagaaccaaagtgg

SEQ ID NO: 121598 - DNA, 120 bp, Artificial Sequence
  ENSG00000101138_1 (sequence is synthesized)
gcttgaaggaccgccagcagctctacaagctgatcattagccagctgctatatgacggctacatcagcatcgccaatggcctcatcaatgaaatcaagcctcagtctgtgtgtgcaccct

SEQ ID NO: 121599 - DNA, 120 bp, Artificial Sequence
  ENSG00000101138_2 (sequence is synthesized)
cggagcagctcctgcatctcatcaaactcggaatggaaaacgatgacaccgcagttcagtatgcaattggtcgttcagatactgttgcccctggcacagggattgacctggaatttgatg

SEQ ID NO: 121600 - DNA, 120 bp, Artificial Sequence
  ENSG00000101138_3 (sequence is synthesized)
cagatgttcagactatgtccccagaggcttctgagtacgaaacatgctatgtcacatcacataaaggaccatgccgtgtagctacctatagtagagatggacagttaatagctactgggt

SEQ ID NO: 121601 - DNA, 120 bp, Artificial Sequence
  ENSG00000101138_4 (sequence is synthesized)
ctgctgatgcttcgataaagatacttgacacagagaggatgttggccaaaagtgccatgccaatagaggtcatgatgaatgagaccgcacaacaaaatatggaaaaccacccagtgattc

SEQ ID NO: 121602 - DNA, 120 bp, Artificial Sequence
  ENSG00000101138_5 (sequence is synthesized)
gaactctttatgaccatgtggatgaagtcacgtgccttgctttccacccaacagaacagatcctggcttctggttcaagggattatactcttaaattatttgattattccaaaccatcag

SEQ ID NO: 121603 - DNA, 120 bp, Artificial Sequence
  ENSG00000101138_6 (sequence is synthesized)
caaaaagagccttcaaatacattcaggaagctgaaatgttacgttccatctcttttcatccttctggagactttatacttgtcggaactcagcatcctactcttcgcctttatgatatca

SEQ ID NO: 121604 - DNA, 120 bp, Artificial Sequence
  ENSG00000101138_7 (sequence is synthesized)
acacctttcaatgttttgtctcttgcaatcctcaagatcaacacaccgatgctatatgttccgttaattacaattctagtgccaatatgtacgtaactggaagcaaggacggctgcatca

SEQ ID NO: 121605 - DNA, 120 bp, Artificial Sequence
  ENSG00000101138_8 (sequence is synthesized)
aattatgggatggtgtttcaaatcgatgcatcacaacttttgagaaagcacatgacggtgctgaagtttgttctgccattttttccaaaaattctaaatacattctctcaagtggaaaag

SEQ ID NO: 121606 - DNA, 120 bp, Artificial Sequence
  ENSG00000101138_9 (sequence is synthesized)
actctgtagctaaactttgggaaatatcaacgggacgaacactggtcagatacacgggcgcgggtttaagtggacgccaggtgcaccggacacaggctgtgtttaaccacaccgaggact

SEQ ID NO: 121607 - DNA, 120 bp, Artificial Sequence
  ENSG00000101138_10 (sequence is synthesized)
atgtgttgctgcccgacgagaggacgatcagtctttgctgctgggactcgaggacagccgagcggagaaacctgctgtcgttggggcacaacaatattgtacgctgcatagtgcactccc

SEQ ID NO: 121608 - DNA, 120 bp, Artificial Sequence
  ENSG00000101138_11 (sequence is synthesized)
ccaccaaccccgggttcatgacgtgcagcgatgacttcagagcgcggttttggtaccggagatcgaccactgactgagccaccctctccgtagggttctttctcgaggactctaccctcc

SEQ ID NO: 121609 - DNA, 120 bp, Artificial Sequence
  ENSG00000101138_12 (sequence is synthesized)
tcccccacgtcctgtctcagctgcagtcgtaagtccgtgcaccatccttgacgttttgctgccacctctgtccacattcttcttggatttgtataaaagaatctttttttaccttgatgt

SEQ ID NO: 121610 - DNA, 120 bp, Artificial Sequence
  ENSG00000101138_13 (sequence is synthesized)
agaatcatggtggaaaaagttggaaacacagatctgtgcagttctacattcactgattattacagtgtgattttcatcggttttgtaagtacaggacttgccgtttcttttgatctcttg

SEQ ID NO: 121611 - DNA, 120 bp, Artificial Sequence
  ENSG00000101138_14 (sequence is synthesized)
attgaaggaggatagggcattaaagtgcttttgacatgaggaattttcatttggttcttctgtcaactttcttgcttattctgctgaaccctctgtgtatttcccttccaggtatatttg

SEQ ID NO: 121612 - DNA, 120 bp, Artificial Sequence
  ENSG00000101138_15 (sequence is synthesized)
aacagataagcaggcatgcagctctgagactcctgagttttatgccattatcaaaagcattttcaagaatccctcaattctatcctgaaatgatgttattctgataataaagctcagatc

SEQ ID NO: 121613 - DNA, 120 bp, Artificial Sequence
  ENSG00000101138_16 (sequence is synthesized)
cagtatctttcaacatactccctacattatccttcaatatctgcaatacttgtctttagtaactgtatttctggtaagattatgatttcatgagaaacaattgaaaatatatccgatcta

SEQ ID NO: 121614 - DNA, 120 bp, Artificial Sequence
  ENSG00000101138_17 (sequence is synthesized)
attaaattaggtcagcctgctattgctctcaggtgttgcctgtcttcacgaatgattagtatcgattgacctctttcttaggtggttttaagtcttcagttctcgtcagcatgaactaac

SEQ ID NO: 121615 - DNA, 120 bp, Artificial Sequence
  ENSG00000101138_18 (sequence is synthesized)
ttctcatcatggaggcacatagtaactgcattctcagaagatttatgcagttaaccaattgatacaagttttctttttcttgaatttttttttttttaattgaggcacagtcttgctctg

SEQ ID NO: 121616 - DNA, 120 bp, Artificial Sequence
  ENSG00000101138_19 (sequence is synthesized)
acaggcgtgagccaccgcgcccagccttcctgaagctttttagaacatgacagtacttctctggattcagcactagcagagtcagagaactctgaactccccttgtacaaacataaactt

SEQ ID NO: 121617 - DNA, 120 bp, Artificial Sequence
  ENSG00000101138_20 (sequence is synthesized)
gtacaaacataaactttgctttatatttatcccaaaaaacaaataccttatgatctgcataggagtacctagaaatataatctgggatcatttgataaaaatagtaaatagattgaagta

SEQ ID NO: 121618 - DNA, 120 bp, Artificial Sequence
  ENSG00000101138_21 (sequence is synthesized)
aaagtcattgctttatattataggaagttttgttttgttttgttttgtttgttttgtttttgagacggagtttcgctcttgtcccccaggctttagtgcaatggcgcgatctcggctcac

SEQ ID NO: 121619 - DNA, 90 bp, Artificial Sequence
  ENSG00000101138_22 (sequence is synthesized)
cccaggctttgcctccgccacctgggttcaaacgattctcctgcctcaggctcccgagtaactaggattacaggcgtgcgccaccatgcc

SEQ ID NO: 121620 - DNA, 60 bp, Artificial Sequence
  ENSG00000101138_23 (sequence is synthesized)
gcggccccatcatacgaagttactgaagttattgcgtaaacattctgttttagtcatcct

SEQ ID NO: 121621 - DNA, 120 bp, Artificial Sequence
  ENSG00000101138_24 (sequence is synthesized)
tactgaagttattgcgtaaacattctgttttagtcatccttgaggatcgttttaactccttgatctgtaaaactgtcttaagcatcttaacatgttacatcacagggttttagctcagat

SEQ ID NO: 121622 - DNA, 120 bp, Artificial Sequence
  ENSG00000101138_25 (sequence is synthesized)
ttccaaagagccatattttttgatgcatatttccagttgaattccagtgtgaatttccagttgtactttgcattctgattctttgatatttgaacttggccatctgtgggtgctactctc

SEQ ID NO: 121623 - DNA, 120 bp, Artificial Sequence
  ENSG00000101138_26 (sequence is synthesized)
gtaagactaaaaggcacctactaaatacgaacaaggataaccagttctaccaaaaacattaccaaccaaacctcccctgttcttttttcagactttccttttgctttcaacctcttaaac

SEQ ID NO: 121624 - DNA, 120 bp, Artificial Sequence
  ENSG00000101138_27 (sequence is synthesized)
tgtaaaggagagatttaatgtttccctattattctgctttgactcacatactaaaatgaccacatggcactccattgaatcttttcagttgttcacgaattaaaataatgcccatgtttt

SEQ ID NO: 121625 - DNA, 120 bp, Artificial Sequence
  ENSG00000101138_28 (sequence is synthesized)
acagtttttcgagtagtctcagcaatggatctgtagtttcaggacctgtttttaaaagatcaagatacttttatgtgtttcagaagtagctgttttttcattttttgtgggtttgttttt

SEQ ID NO: 121626 - DNA, 120 bp, Artificial Sequence
  ENSG00000101138_29 (sequence is synthesized)
tttgtgtttgtttggttggttggtttttggtttttttgctttttaaaggtcacagtgttgtgagcctggtgtaaatgccaggaatattatatggacttagtatctgcatctcgttaattg

SEQ ID NO: 121627 - DNA, 120 bp, Artificial Sequence
  ENSG00000101138_30 (sequence is synthesized)
taccacacaacactctgccattcaaataatgaatatctggtcaggatacgaacttataccctctgtgtgttttttttttttaagatacgtgatttctgaaataaactttatatacaatga

SEQ ID NO: 121628 - DNA, 120 bp, Artificial Sequence
  ENSG00000101138_31 (sequence is synthesized)
gtggcagtcccagccccagggtgctctccgcggtcggccatttatcggtgaagcaacagccccttgacgtcaagcttgacgcattggagataaagtccaaggaggtgaactaacctttga

SEQ ID NO: 121629 - DNA, 120 bp, Artificial Sequence
  ENSG00000101138_32 (sequence is synthesized)
gagcgggataccaagagaaccggaccagctggtactgggacacggggagagtagctggtgcggtcggctggggcatttagagaaaaccacagaaacgactggggcgagactggaagagtc

SEQ ID NO: 121630 - DNA, 120 bp, Artificial Sequence
  ENSG00000101138_33 (sequence is synthesized)
aacctttgaacgtgccagtaagtaagatggcgagaaaagcaagagagagtgggaccgatcgatagcgcagcggtcggcttggcgccctttcagcgtgcgcagtgaacgtgcgctcggagc

SEQ ID NO: 121631 - DNA, 120 bp, Artificial Sequence
  ENSG00000101138_34 (sequence is synthesized)
gaaatgactttgtctattggagcctaaccttccagcaacccatgtggcctcacagcgtggtgaactttgaatagcatgggcaaaatacacagttttgtaaagtgttaggtgtcacgcggc

SEQ ID NO: 121632 - DNA, 120 bp, Artificial Sequence
  ENSG00000101138_35 (sequence is synthesized)
agctcctgcatctcatcaaactcggtagattgtgaacacaaatccatacgtcccatggcaaggttttagatattttcatatggcagaatttttcaagattattcttgttttgtttcagta

SEQ ID NO: 121633 - DNA, 120 bp, Artificial Sequence
  ENSG00000101138_36 (sequence is synthesized)
cctagtatgagccgggtacttcagtaagtaagtagttcagcatgagttcaggaagtagctcagtaagtaaggggtaaagcaaagttcagattatgaagaccttaagctggttctggcctg

SEQ ID NO: 121634 - DNA, 120 bp, Artificial Sequence
  ENSG00000101144_0 (sequence is synthesized)
actctggcgctcccgaggcggcctcttgtgcgatccagggcgcacaaggctgggagagcgccccggggcccctgctatccgcgccggaggttggaagagggtgggttgccgccgcccgag

SEQ ID NO: 121635 - DNA, 120 bp, Artificial Sequence
  ENSG00000101144_1 (sequence is synthesized)
ggcgagagcgccagaggagcgggaagaaggagcgctcgcccgcccgcctgcctcctcgctgcctccccggcgttggctctctggactcctaggcttgctggctgctcctcccacccgcgc

SEQ ID NO: 121636 - DNA, 120 bp, Artificial Sequence
  ENSG00000101144_2 (sequence is synthesized)
ctcctcactcgccttttcgttcgccggggctgctttccaagccctgcggtgcgcccgggcgagtgcggggcgaggggcccggggccagcaccgagcagggggcgggggtccgggcagagc

SEQ ID NO: 121637 - DNA, 80 bp, Artificial Sequence
  ENSG00000101144_3 (sequence is synthesized)
gagcgcggccggccggggaggggccatgtctggcgcgggcgcagcggggcccgtctgcagcaagtgaccgagcggcgcgg

SEQ ID NO: 121638 - DNA, 120 bp, Artificial Sequence
  ENSG00000101144_4 (sequence is synthesized)
ccggagcccggagcccgggtagcgcgtagagccggcgcgatgcacgtgcgctcactgcgagctgcggcgccgcacagcttcgtggcgctctgggcacccctgttcctgctgcgctccgcc

SEQ ID NO: 121639 - DNA, 120 bp, Artificial Sequence
  ENSG00000101144_5 (sequence is synthesized)
ctggccgacttcagcctggacaacgaggtgcactcgagcttcatccaccggcgcctccgcagccaggagcggcgggagatgcagcgcgagatcctctccattttgggcttgccccaccgc

SEQ ID NO: 121640 - DNA, 120 bp, Artificial Sequence
  ENSG00000101144_6 (sequence is synthesized)
ccgcgcccgcacctccagggcaagcacaactcggcacccatgttcatgctggacctgtacaacgccatggcggtggaggagggcggcgggcccggcggccagggcttctcctacccctac

SEQ ID NO: 121641 - DNA, 120 bp, Artificial Sequence
  ENSG00000101144_7 (sequence is synthesized)
aaggccgtcttcagtacccagggcccccctctggccagcctgcaagatagccatttcctcaccgacgccgacatggtcatgagcttcgtcaacctcgtggaacatgacaaggaattcttc

SEQ ID NO: 121642 - DNA, 120 bp, Artificial Sequence
  ENSG00000101144_8 (sequence is synthesized)
cacccacgctaccaccatcgagagttccggtttgatctttccaagatcccagaaggggaagctgtcacggcagccgaattccggatctacaaggactacatccgggaacgcttcgacaat

SEQ ID NO: 121643 - DNA, 120 bp, Artificial Sequence
  ENSG00000101144_9 (sequence is synthesized)
gagacgttccggatcagcgtttatcaggtgctccaggagcacttgggcagggaatcggatctcttcctgctcgacagccgtaccctctgggcctcggaggagggctggctggtgtttgac

SEQ ID NO: 121644 - DNA, 120 bp, Artificial Sequence
  ENSG00000101144_10 (sequence is synthesized)
atcacagccaccagcaaccactgggtggtcaatccgcggcacaacctgggcctgcagctctcggtggagacgctggatgggcagagcatcaaccccaagttggcgggcctgattgggcgg

SEQ ID NO: 121645 - DNA, 120 bp, Artificial Sequence
  ENSG00000101144_11 (sequence is synthesized)
cacgggccccagaacaagcagcccttcatggtggctttcttcaaggccacggaggtccacttccgcagcatccggtccacggggagcaaacagcgcagccagaaccgctccaagacgccc

SEQ ID NO: 121646 - DNA, 120 bp, Artificial Sequence
  ENSG00000101144_12 (sequence is synthesized)
aagaaccaggaagccctgcggatggccaacgtggcagagaacagcagcagcgaccagaggcaggcctgtaagaagcacgagctgtatgtcagcttccgagacctgggctggcaggactgg

SEQ ID NO: 121647 - DNA, 120 bp, Artificial Sequence
  ENSG00000101144_13 (sequence is synthesized)
atcatcgcgcctgaaggctacgccgcctactactgtgagggggagtgtgccttccctctgaactcctacatgaacgccaccaaccacgccatcgtgcagacgctggtccacttcatcaac

SEQ ID NO: 121648 - DNA, 120 bp, Artificial Sequence
  ENSG00000101144_14 (sequence is synthesized)
ccggaaacggtgcccaagccctgctgtgcgcccacgcagctcaatgccatctccgtcctctacttcgatgacagctccaacgtcatcctgaagaaatacagaaacatggtggtccgggcc

SEQ ID NO: 121649 - DNA, 120 bp, Artificial Sequence
  ENSG00000101144_15 (sequence is synthesized)
tgtggctgccactagctcctccgagaattcagaccctttggggccaagtttttctggatcctccattgctcgccttggccaggaaccagcagaccaactgccttttgtgagaccttcccc

SEQ ID NO: 121650 - DNA, 120 bp, Artificial Sequence
  ENSG00000101144_16 (sequence is synthesized)
gatcagtttttcagtggcagcatccaatgaacaagatcctacaagctgtgcaggcaaaacctagcaggaaaaaaaaacaacgcataaagaaaaatggccgggccaggtcattggctggga

SEQ ID NO: 121651 - DNA, 120 bp, Artificial Sequence
  ENSG00000101144_17 (sequence is synthesized)
agtctcagccatgcacggactcgtttccagaggtaattatgagcgcctaccagccaggccacccagccgtgggaggaagggggcgtggcaaggggtgggcacattggtgtctgtgcgaaa

SEQ ID NO: 121652 - DNA, 120 bp, Artificial Sequence
  ENSG00000101144_18 (sequence is synthesized)
ggaaaattgacccggaagttcctgtaataaatgtcacaataaaacgaatgaatgaaaatggttaggacgttacagatatattttcctaaacaatttatccccatttctcggtttatcctg

SEQ ID NO: 121653 - DNA, 120 bp, Artificial Sequence
  ENSG00000101144_19 (sequence is synthesized)
atgcgtaaacagaagctgtgtcaagtggagggcggggaggtccctctccattccctacagttttcatcctgaggcttgcagaggcccagtgtttaccgaggtttgcccaaatccaagatc

SEQ ID NO: 121654 - DNA, 120 bp, Artificial Sequence
  ENSG00000101144_20 (sequence is synthesized)
tagtgggaggggaaagagcaaatgtctgctccgaggagggcggtgtgttgatctttggaggaaaaatatgttctgttgttcagctggatttgccgtggcagaaatgaaactaggtgtgtg

SEQ ID NO: 121655 - DNA, 120 bp, Artificial Sequence
  ENSG00000101144_21 (sequence is synthesized)
aaatacccgcagacatttgggattggcttttcacctcgccccagtggtagtaaatccatgtgaaattgcagaggggacaaggacagcaagtaggatggaacttgcaactcaaccctgttg

SEQ ID NO: 121656 - DNA, 68 bp, Artificial Sequence
  ENSG00000101144_22 (sequence is synthesized)
ggacagcaagtaggatggaacttgcaactcaaccctgttgttaagaagcaccaatgggccgggcacag

SEQ ID NO: 121657 - DNA, 120 bp, Artificial Sequence
  ENSG00000101144_23 (sequence is synthesized)
gtgagccaagatcgtcccactgcactccagcttgggtgacaaaacaagactccatctcaaaagaaaaaaaaaacagcaccaatgaagcctagttctccacgggagtggggtgagcaggag

SEQ ID NO: 121658 - DNA, 120 bp, Artificial Sequence
  ENSG00000101144_24 (sequence is synthesized)
cactgcacatcgccccagtggaccctctggtctttgtctgcagtggcattccaaggctgggccctggcaagggcacccgtggctgtctcttcatttgcagaccctgatcagaagtctctg

SEQ ID NO: 121659 - DNA, 120 bp, Artificial Sequence
  ENSG00000101144_25 (sequence is synthesized)
caaacaaatttgctccttgaattaagggggagatggcataataggaggtctgatgggtgcaggatgtgctggacttacattgcaaatagaagccttgttgagggtgacatcctaaccaag

SEQ ID NO: 121660 - DNA, 120 bp, Artificial Sequence
  ENSG00000101144_26 (sequence is synthesized)
tgtcccgatttggaggtggcatttctgacgtggctcttggtgtaagcctgccttgccttggctggtgagtcccataaatagtatgcactcagcctccggccacaaacacaaggcctaggg

SEQ ID NO: 121661 - DNA, 120 bp, Artificial Sequence
  ENSG00000101144_27 (sequence is synthesized)
gagggctagactgtctgcaaacgttttctgcatctgtaaagaaaacaaggtgatcgaaaactgtggccatgtggaacccggtcttgtgggggactgtttctccatcttgactcagacagt

SEQ ID NO: 121662 - DNA, 120 bp, Artificial Sequence
  ENSG00000101144_28 (sequence is synthesized)
tcctggaaacaccggggctctgtttttattttctttgatgtttttcttctttagtagcttgggctgcagcctccactctctagtcactggggaggagtattttttgttatgtttggtttc

SEQ ID NO: 121663 - DNA, 120 bp, Artificial Sequence
  ENSG00000101144_29 (sequence is synthesized)
atttgctggcagagctggggctttttgtgtgatccctcttggtgtgagttttctgacccaaccagcctctggttagcatcatttgtacatttaaacctgtaaatagttgttacaaagcaa

SEQ ID NO: 121664 - DNA, 120 bp, Artificial Sequence
  ENSG00000101144_30 (sequence is synthesized)
agagattatttatttccatccaaagctcttttgaacacccccccccctttaatccctcgttcaggacgatgagcttgctttccttcaacctgtttgttttcttatttaagactatttatt

SEQ ID NO: 121665 - DNA, 120 bp, Artificial Sequence
  ENSG00000101144_31 (sequence is synthesized)
aatggttggaccaatgtactcacagctgttgcgtcgagcagtccttagtgaaaattctgtataaatagacaaaatgaaaagggtttgaccttgcaataaaaggagacgtttggttctggc

SEQ ID NO: 121666 - DNA, 120 bp, Artificial Sequence
  ENSG00000101144_32 (sequence is synthesized)
attactacacctgcatttcacagaagaggagtgacgcgccccagcaagtggcagagccgagactcgccctctcgcccggctctgctctggaaacctcctgagtcctgctcctttgctcag

SEQ ID NO: 121667 - DNA, 120 bp, Artificial Sequence
  ENSG00000101144_33 (sequence is synthesized)
catagctcaccgcagctttgagccgtcttcccactcagtctactaagcttggactataggccaagactatagagtggtccttctttccattcttttgggaccatgagaggccacccatgt

SEQ ID NO: 121668 - DNA, 120 bp, Artificial Sequence
  ENSG00000101144_34 (sequence is synthesized)
ttcctgcccctgctgggccccctgctgctcagaaggcatggtctgaggcttccaccttgggtcgtgagcctggcgtggtggtttctggccagcatgggggttgggatgctgtggctcagg

SEQ ID NO: 121669 - DNA, 120 bp, Artificial Sequence
  ENSG00000101144_35 (sequence is synthesized)
cctgagtagatgtcagcccattgccatgtcatgacttttgggggccccttgcgccgttaaaaaaaaatcaaaaattgtactttatgactggtttggtataaagaggagtataatcttcga

SEQ ID NO: 121670 - DNA, 120 bp, Artificial Sequence
  ENSG00000101144_36 (sequence is synthesized)
ttatcctcattttctgaaccccaggcctgaggccaggccagctggggcctggcttccaggagctggacttgctcctgtctccattggtgcagactttggttccaggtgaagggaatcgga

SEQ ID NO: 121671 - DNA, 120 bp, Artificial Sequence
  ENSG00000101144_37 (sequence is synthesized)
ctgaggctgtggctccctggatgtggctgtcctgacagctgcccaaggcaagccagacaccttcactcagaggtacagagagactttttgcagcgcgtggatttaagggcagagcatcaa

SEQ ID NO: 121672 - DNA, 120 bp, Artificial Sequence
  ENSG00000101144_38 (sequence is synthesized)
ggatggccaacgtggcagccctcatctccatgtaagtcatgtgcactcacttatctatgacccgcctctcgttctggaaaagcccctgagtggcagggctttgctgtcttacacctggga

SEQ ID NO: 121673 - DNA, 120 bp, Artificial Sequence
  ENSG00000101144_39 (sequence is synthesized)
ctcatctcatgcctgcacaccaggaagcagcccctagcaatggctgaatgaatgagtgactccacaaggcatgcaggccgcgagggcagggcacccaggggcaagcgctcctgccccaaa

SEQ ID NO: 121674 - DNA, 120 bp, Artificial Sequence
  ENSG00000101144_40 (sequence is synthesized)
gcctggagcccaccagccccgccccagccttcagcaagttcacttcaccgaaagtctcaagtgtctcctcaggaatcacacatgtgattcggttataatcaattaaatgtaatttcgtta

SEQ ID NO: 121675 - DNA, 120 bp, Artificial Sequence
  ENSG00000101144_41 (sequence is synthesized)
tcaggtgctccaggagcacttgggcagcacaggtacctgctgcatgccatgcctgagggcatcgaccagaacgaaccagacacgagtccctgccctctggaagctcacgttccagcagag

SEQ ID NO: 121676 - DNA, 120 bp, Artificial Sequence
  ENSG00000101146_0 (sequence is synthesized)
cgcaggaagtggctccagggcgcacgcgcgttgtttccgcggtagtcagggcagtttctaccgcaggcttaaggaggcttcgggctcctgggatttctgtccgcgctcctggccctcgtc

SEQ ID NO: 121677 - DNA, 120 bp, Artificial Sequence
  ENSG00000101146_1 (sequence is synthesized)
cttcgcgccagagcaggttcaaaatgagcctgtttggaacaacctcaggttttggaaccagtgggaccagcatgtttggcagtgcaactacagacaatcacaatcccatgaaggatattg

SEQ ID NO: 121678 - DNA, 120 bp, Artificial Sequence
  ENSG00000101146_2 (sequence is synthesized)
aagtaacatcatctcctgatgatagcattggttgtctgtcttttagcccaccaaccttgccggggaactttcttattgcaggatcatgggctaatgatgttcgctgctgggaagttcaag

SEQ ID NO: 121679 - DNA, 120 bp, Artificial Sequence
  ENSG00000101146_3 (sequence is synthesized)
acagtggacagaccattccaaaagcccagcagatgcacactgggcctgtgcttgatgtctgctggagtgacgatgggagcaaagtgtttacggcatcgtgtgataaaactgccaaaatgt

SEQ ID NO: 121680 - DNA, 120 bp, Artificial Sequence
  ENSG00000101146_4 (sequence is synthesized)
gggacctcagcagtaaccaagcgatacagatcgcacagcatgatgctcctgttaaaaccatccattggatcaaagctccaaactacagctgtgtgatgactgggagctgggataagactt

SEQ ID NO: 121681 - DNA, 120 bp, Artificial Sequence
  ENSG00000101146_5 (sequence is synthesized)
taaagttttgggatactcgatcgtcaaatcctatgatggttttgcaactccctgaaaggtgttactgtgctgacgtgatataccccatggctgtggtggcaactgcagagaggggcctga

SEQ ID NO: 121682 - DNA, 120 bp, Artificial Sequence
  ENSG00000101146_6 (sequence is synthesized)
ttgtctatcagctagagaatcaaccttctgaattcaggaggatagaatctccactgaaacatcagcatcggtgtgtggctatttttaaagacaaacagaacaagcctactggttttgccc

SEQ ID NO: 121683 - DNA, 120 bp, Artificial Sequence
  ENSG00000101146_7 (sequence is synthesized)
tgggaagtatcgaggggagagttgctattcactatatcaaccccccgaaccccgccaaagataacttcacctttaaatgtcatcgatctaatggaaccaacacttcagctcctcaggaca

SEQ ID NO: 121684 - DNA, 120 bp, Artificial Sequence
  ENSG00000101146_8 (sequence is synthesized)
tttatgcggtaaatggaatcgcgttccatcctgttcatggcacccttgcaactgtgggatctgatggtagattcagcttctgggacaaagatgccagaacaaaactaaaaacttcggaac

SEQ ID NO: 121685 - DNA, 120 bp, Artificial Sequence
  ENSG00000101146_9 (sequence is synthesized)
gggacatgaattttataatccccagaaaaaaaattacattttcctgcgtaatgcagccgaagagctaaagcccaggaataagaagtagtggctggagactctggctcagccagagttgtt

SEQ ID NO: 121686 - DNA, 120 bp, Artificial Sequence
  ENSG00000101146_10 (sequence is synthesized)
tctctccactctgcctcatctctgtacgaatttgggtcccagccttgttgggttgtcagccatggacatggatttcaacccctggagaaaacgatgtcattgttcagcagctgagagccc

SEQ ID NO: 121687 - DNA, 120 bp, Artificial Sequence
  ENSG00000101146_11 (sequence is synthesized)
aggcgtccgcggcgacttgccgtctctccattccactgcctgttgcagagtttttctgtaactaagggggttgaggttattgtagacgttagattgcgggcaccgccagggattttgcag

SEQ ID NO: 121688 - DNA, 120 bp, Artificial Sequence
  ENSG00000101146_12 (sequence is synthesized)
cgcttcagtgtacgtgttagagaatattggaaaagcgtctgtgagccccgtgctgtattttgtaataaagtcttttgcagattgcttcccgagcttcctttgtccttttctccccttgcc

SEQ ID NO: 121689 - DNA, 120 bp, Artificial Sequence
  ENSG00000101146_13 (sequence is synthesized)
caccccgtaacctcaggaacatgcgtcctgcccagcatcagcgtggggttttgagttgagatttcagacaccctctgggaaatgcggcaaccttaggggaaagggagtccccagctgcgc

SEQ ID NO: 121690 - DNA, 120 bp, Artificial Sequence
  ENSG00000101146_14 (sequence is synthesized)
tcacttctgctgcgcggaacggcagcctctgtgagccctggtgggcagagtttgaatgtgtttttccttgcttccctcattcccatcttcaaaatccccagtgctttctggccttgctgc

SEQ ID NO: 121691 - DNA, 120 bp, Artificial Sequence
  ENSG00000101146_15 (sequence is synthesized)
tcagatttccgagtgactcaaatggggactgttacttgtgctgggtgacaggccatttgtgggtaacctcctaaggcccaagtgggtgacacttgcgtgactttcaagttagaacccaag

SEQ ID NO: 121692 - DNA, 120 bp, Artificial Sequence
  ENSG00000101146_16 (sequence is synthesized)
ccccctgcatgggaattgccctgaactcttacccaccccggtcccctgcatgggaattgccctgaaccctcagtagtggttgtttggctgttcttttgtattttgtgtaatttaaaattc

SEQ ID NO: 121693 - DNA, 120 bp, Artificial Sequence
  ENSG00000101146_17 (sequence is synthesized)
ctggttggtaagtattcaaaatgaaattcagctgggctgagaaaaagtgtgacttttgggtctgtcactgtatttctcacctgtgatctcaaatgcttcttaggcctttctgtttggact

SEQ ID NO: 121694 - DNA, 120 bp, Artificial Sequence
  ENSG00000101146_18 (sequence is synthesized)
aatgtgtgaagtctgacttgctgagtgtaaaattctagtatcgatagtgttgtaagatgtgtttgcctactcataaaaaacaatgaaaataaaattttctactggaagagaccacctgca

SEQ ID NO: 121695 - DNA, 120 bp, Artificial Sequence
  ENSG00000101146_19 (sequence is synthesized)
gcttcgttactgggccctggaagcgaggtcagagctggaaatggccttaggggtcacctagggcctaatccatcgtttctcttgtgggggaactgagcctctgggaagggtcacattgcg

SEQ ID NO: 121696 - DNA, 120 bp, Artificial Sequence
  ENSG00000101146_20 (sequence is synthesized)
ttaatgcagtgtgtgtcgcctctgtccctcccccttacacgtctggcgtctcgtcagatacatgtcagctcctgggagaagctttccctggccgctttgcagaagggcgtccccttttag

SEQ ID NO: 121697 - DNA, 120 bp, Artificial Sequence
  ENSG00000101146_21 (sequence is synthesized)
cctcttccacgtcaacctgctccatttctttcgtagcagttaccagtctctgaaactaagtctgtttctgtcttagcccgccaagtatttattgtatacgtatataggtgccaccgtaca

SEQ ID NO: 121698 - DNA, 120 bp, Artificial Sequence
  ENSG00000101146_22 (sequence is synthesized)
gtttccgcggtagtcagggcagtttctaccgcaggcttaaggaggcttcgggctcctgggatttctgtccgcgctcctggccctcgtccttcgcgccagagcaggttcgcaaactcctca

SEQ ID NO: 121699 - DNA, 120 bp, Artificial Sequence
  ENSG00000101146_23 (sequence is synthesized)
aactctatgacattggtcttggcagtaatttcttggatatgacaccaaaaagcacaggcaacaaaagcaaaaatggccaagtggaactgtgttaaactaacagctcttgcacagcagagg

SEQ ID NO: 121700 - DNA, 120 bp, Artificial Sequence
  ENSG00000101146_24 (sequence is synthesized)
gaaccatggaaaagagtgaaaaggcagcctgtggaatgggagaaaacatctggaggctatttctgacaagggattgatttccaaaatacgtaaggaacccctgcaactcaatagtgagaa

SEQ ID NO: 121701 - DNA, 120 bp, Artificial Sequence
  ENSG00000101146_25 (sequence is synthesized)
aactggtgacgtgaaaaatggaccaaagacttgaatagacatgtctccaaagaagacatacaaatacccagcaggtgtatggaaatgtgcttaacatcctaactatcaaggaaaggcaaa

SEQ ID NO: 121702 - DNA, 120 bp, Artificial Sequence
  ENSG00000101146_26 (sequence is synthesized)
caaaaaccacagtgagataccatctcctagctgatgggaccactgttaccagaaagcccaaagataacaagcgctggggagggtgtggggaacatggaacccttgtgcactgttgggggg

SEQ ID NO: 121703 - DNA, 120 bp, Artificial Sequence
  ENSG00000101146_27 (sequence is synthesized)
atgcaaaatgccacaaccgttacagaaaactggaggcctcaaaacatgaaaaacagaatcaccatacgatctagcagttccacttacaggtcttgattcaaaagaatcaaaatgggtatt

SEQ ID NO: 121704 - DNA, 120 bp, Artificial Sequence
  ENSG00000101146_28 (sequence is synthesized)
ttgaagagagacctgtactgctagtgttccttgcagcactgttcacaatagccaagtgaacagataaagaaaatgaagtgtatacctgcagtaggatgctgtgcgtgcagcctgaaagaa

SEQ ID NO: 121705 - DNA, 120 bp, Artificial Sequence
  ENSG00000101146_29 (sequence is synthesized)
ggaaatcctgccattcgtgacaacgtgggtgaccatgaaggagattatgcaaaatgaaataagccagacacagaaagaaactgcatggttccacttaaatgtgatatccagcatagactc

SEQ ID NO: 121706 - DNA, 120 bp, Artificial Sequence
  ENSG00000101146_30 (sequence is synthesized)
acagaagtaaagggtggaatggcggtcatcaggggattgggggagagggaaatggggagctacttaatcaatgggatgaaatttcattaaacaagatgagaatgttctagagatatgccg

SEQ ID NO: 121707 - DNA, 120 bp, Artificial Sequence
  ENSG00000101146_31 (sequence is synthesized)
tactacatggtacctgtagtcaacaataatgtagacttagaaatgtgttaagcggtggctctcatgttcactcttcttaccacagtaaaatcagcacttagaccttggccctggttcaag

SEQ ID NO: 121708 - DNA, 120 bp, Artificial Sequence
  ENSG00000101146_32 (sequence is synthesized)
gcgtcctccggagctgaggcaggggctcttgtaagcggcaccactggccttgccggaccccagcctaagcccttccctgcctccccatttccttttggttgaatccaaaaaaaacctggt

SEQ ID NO: 121709 - DNA, 120 bp, Artificial Sequence
  ENSG00000101146_33 (sequence is synthesized)
cccatctggcttcacttcctgccacccggtgctagcgccctggcctctccgttgttgagaactgattgccatcggcctttgcacagggccagtgcatgtggctcttggtgcaagtgacac

SEQ ID NO: 121710 - DNA, 120 bp, Artificial Sequence
  ENSG00000101146_34 (sequence is synthesized)
ccctggcattgtgcagttcctggtgtgccgcacagtagaccctgtgctgatgaccagccatggccttttctgtcatctaagaacttacagatgtttgtcagtttgctttactttttttct

SEQ ID NO: 121711 - DNA, 120 bp, Artificial Sequence
  ENSG00000101146_35 (sequence is synthesized)
tcgtactcacaaaagtaatggtctggcagtttttaaaaaggcaggggagcaaacagtacaggaatgaaagaggaggccgttttccttcgtacttaggaaacgtgcatcaccagcagctgt

SEQ ID NO: 121712 - DNA, 120 bp, Artificial Sequence
  ENSG00000101146_36 (sequence is synthesized)
aggctgcttctcccttcgtcttgcctggcccctgcctgggtcctgccaggcttcccctgaactcacacggaagctcagatgaccagcttaggcagggtggatggccctccaagctttggc

SEQ ID NO: 121713 - DNA, 120 bp, Artificial Sequence
  ENSG00000101146_37 (sequence is synthesized)
caggttgccacgactggaaggaggaagtggtaactccaaagttggcttctcctcggggtggtcggcttttctgcccaggaggctgggtagtggaatttctgggttcttctgtagaataga

SEQ ID NO: 121714 - DNA, 120 bp, Artificial Sequence
  ENSG00000101146_38 (sequence is synthesized)
gacctgcccttgggccctcacactcaacactgggcgaagtgcagcgtgttgcttgtctgtagcatggccactgcacccaccgtccccttcaccctgttaccctgtgagacgggtgcggca

SEQ ID NO: 121715 - DNA, 120 bp, Artificial Sequence
  ENSG00000101146_39 (sequence is synthesized)
gagcctgcatccctcctccagctggggaggcagaagcgcagaagcttcgggtgacctcctgaggggtgtctgcctagccagggacgtctccattccccacaggcagggccgctgtctgcc

SEQ ID NO: 121716 - DNA, 120 bp, Artificial Sequence
  ENSG00000101146_40 (sequence is synthesized)
tcgcagcccatggggctctgctggcgtgaacgcggccttgcagggtggcagagggagagcgagcagcgggggcgggggaggagcacagggtgtgcagttgggtcataaactcactgctta

SEQ ID NO: 121717 - DNA, 120 bp, Artificial Sequence
  ENSG00000101146_41 (sequence is synthesized)
gatggagttactaaggagttagaaagcaatgcttactgctgtatcatatttgagtgattttttctggttcttctaaaacctaaacatggggtaaaaatgacttaccttcacgttagtcat

SEQ ID NO: 121718 - DNA, 120 bp, Artificial Sequence
  ENSG00000101146_42 (sequence is synthesized)
gaaatcttatattatgctgtgattatgtctcttttttattttaactgtagcatcggtgtgtggctatttttaaagacaaacagaacaagcctactggttttgccctgggaagtatcgagg

SEQ ID NO: 121719 - DNA, 120 bp, Artificial Sequence
  ENSG00000101146_43 (sequence is synthesized)
ggagagttgctattcactatatcaaccccccgaacccgtaagtgtgactctgtcagcttgcagatttcactggactttttttaacaaaggaagacttacatgaacctttgtctttcagcg

SEQ ID NO: 121720 - DNA, 120 bp, Artificial Sequence
  ENSG00000101146_44 (sequence is synthesized)
gggatgctggggcgcgagcgggactgttgactaagcttcgttactgggccctggaagcgaggtgccaccgtacaggcagtacttctccaggcaagtagtattaaacaccagccgccctgg

SEQ ID NO: 121721 - DNA, 120 bp, Artificial Sequence
  ENSG00000101146_45 (sequence is synthesized)
tttcaatcacaatggaaacatatttgcatacgcttccagctacgactggtcaaaggtgagaactcccgggcctgctctgggtgctccaaggcagcagagccaggctctgggttcagaagg

SEQ ID NO: 121722 - DNA, 120 bp, Artificial Sequence
  ENSG00000101146_46 (sequence is synthesized)
cctaggcctgagttgtgactcttctcaggactcacgtgtgtccttgggcaggtcaccgtcccctccctgtaaggggaaattgcaggacttcctcaaatggttgtggggattcagtacagc

SEQ ID NO: 121723 - DNA, 120 bp, Artificial Sequence
  ENSG00000101146_47 (sequence is synthesized)
ctttggccagaacccagcacacaggaagtgctcggccagtgtgagccattacgggctgctctgttcctgggcacagaagcacaggcaagccgggggctgcactttatgaagggggtggca

SEQ ID NO: 121724 - DNA, 120 bp, Artificial Sequence
  ENSG00000101150_0 (sequence is synthesized)
ggcgagcttctcccggcgccgcccgctcggctcccatagcgcccgcgacagcggtccggacgccgcccgaacatggactccgccggccaagatatcaacctgaattctcctaacaaaggt

SEQ ID NO: 121725 - DNA, 120 bp, Artificial Sequence
  ENSG00000101150_1 (sequence is synthesized)
ctgctgtctgactccatgacggatgttcctgtcgacacaggtgtggctgcccggactcctgctgttgagggtctgacagaggctgaggaggaggagctcagggctgagcttaccaaggtg

SEQ ID NO: 121726 - DNA, 120 bp, Artificial Sequence
  ENSG00000101150_2 (sequence is synthesized)
gaagaggaaattgtcactctgcgccaggtcctggcagccaaggagaggcactgtggagagctcaagaggaggctgggcctctccaccctgggggagctgaaacagaacctgtccaggagc

SEQ ID NO: 121727 - DNA, 120 bp, Artificial Sequence
  ENSG00000101150_3 (sequence is synthesized)
tggcatgacgtgcaggtctctagcgcctacaagaagactcaggaaactctttcacaggcaggacagaagacttcagctgccctgtccacagtgggctctgccatcagcaggaagcttgga

SEQ ID NO: 121728 - DNA, 120 bp, Artificial Sequence
  ENSG00000101150_4 (sequence is synthesized)
gacatgagggctcatccattttcacactcctttagcagctactccatccgccactcaataagtatgccagccatgaggaactctgcgaccttcaagtcgtttgaggaccgagttgggacc

SEQ ID NO: 121729 - DNA, 120 bp, Artificial Sequence
  ENSG00000101150_5 (sequence is synthesized)
ataaagtctaaggttgtgggtgacagagagaacggcagtgacaacctcccttcctcagcggggagtggtgacaagcccctgtcggatcccgcacctttctaagcctgtggttgcttcacc

SEQ ID NO: 121730 - DNA, 120 bp, Artificial Sequence
  ENSG00000101150_6 (sequence is synthesized)
cgctgcagagcacacgcaacccagcctcagcatcacagccgcagctctgttcagcggagcagccagccagggcggatgagcagagccggccctgaggacagtcctgcccatccacgcgga

SEQ ID NO: 121731 - DNA, 120 bp, Artificial Sequence
  ENSG00000101150_7 (sequence is synthesized)
gatgtggctgccgcgtttgcatgaatttgaagaacacaggcttgtacacagatgttttacactcacgtttgtagatgaaacagatcactgtgctgtccttcctaggggtgcaggaagtgg

SEQ ID NO: 121732 - DNA, 120 bp, Artificial Sequence
  ENSG00000101150_8 (sequence is synthesized)
acagggcggagggtttgaaagaatattgagccaaagcccaggctccctttgggaatcatgttagcccatcagaatgttgaaggattgaagagttctaagcataaaataagtggcattttc

SEQ ID NO: 121733 - DNA, 120 bp, Artificial Sequence
  ENSG00000101150_9 (sequence is synthesized)
ccctgactcacagaaggaatgcaatcacccagcaagtcctacctgttacgcaattttttatctcaaaatgccgaacgagaaaactgtccattttctgagacccccagaaaggaaactgac

SEQ ID NO: 121734 - DNA, 120 bp, Artificial Sequence
  ENSG00000101150_10 (sequence is synthesized)
cctcagcagctgcctgattgttacgcgaatctagctttaacggaagcaaattcattattttttaaatgcagtggacttttcaaaaagtttaaattaggcaaagcagctttagcctcatag

SEQ ID NO: 121735 - DNA, 120 bp, Artificial Sequence
  ENSG00000101150_11 (sequence is synthesized)
aatattatttctttggactcaagctgaaatacaagccttacattgccttatgctttatttctttctaatttttatatgtatatagatgagggttccttaatggttgtgagcattgtgtgg

SEQ ID NO: 121736 - DNA, 120 bp, Artificial Sequence
  ENSG00000101150_12 (sequence is synthesized)
aattttacacctggcctgcgtggcagcctcttccagttgaggtgttttatgtcacgcacactccatcccagtgtacaaaacctgcttctcttctcaaccgtggcagctcccgctggctcc

SEQ ID NO: 121737 - DNA, 120 bp, Artificial Sequence
  ENSG00000101150_13 (sequence is synthesized)
tatgccctgccctaaagggctcttgagcctctgggaatgggaggggccaagagaaggaaaaccctgtctttagcaccctttaaaagaactgtgccccccttctcagtgctgcctttgcat

SEQ ID NO: 121738 - DNA, 120 bp, Artificial Sequence
  ENSG00000101150_14 (sequence is synthesized)
gggcctggcccggctcacattcgtcagtgactccaaccctcctgcttgctgtacttgggatgaaacgaccccacaggtcaggtggagggtggggcgtgggcatcagccaggattgccgtt

SEQ ID NO: 121739 - DNA, 120 bp, Artificial Sequence
  ENSG00000101150_15 (sequence is synthesized)
acagtctttttctcaggagctacaaagatctcttcctgttactaaatagtcgcaccccagcagcctctctcgcacaccggggccctgcatgtcagatggcgtggtctgcagggggagctc

SEQ ID NO: 121740 - DNA, 120 bp, Artificial Sequence
  ENSG00000101150_16 (sequence is synthesized)
tgtgccttagtggctcttggcaggacactgagggcctgcctgtggtgtgcccggctctgccactcccgggaggggaagggctgctcagctcaaggtgtcctgttcggtagagcaagtgtc

SEQ ID NO: 121741 - DNA, 120 bp, Artificial Sequence
  ENSG00000101150_17 (sequence is synthesized)
ctctgacagccgtgtccccggacagttcagacacccttggggatggcactccacacacgacagagatgcaggggccagggaagcccagcgctcggtgcccttcgtccagggttaaaatcg

SEQ ID NO: 121742 - DNA, 120 bp, Artificial Sequence
  ENSG00000101150_18 (sequence is synthesized)
gcctgtggggtgtggtgagaaggcaggttgtgcgggtgttgaccgatgtatcttttccttaaagttattataataatgggtaatttgtcaataaagcattcctttgggggaaagtccgcc

SEQ ID NO: 121743 - DNA, 120 bp, Artificial Sequence
  ENSG00000101150_19 (sequence is synthesized)
caggcgtgagccactgcgccgggccctcaaaggagccttttcacgtgggagggctgtgccgactctcaccaccttcctgttcaacatctgtcctgtttccttgttttccttcagatggag

SEQ ID NO: 121744 - DNA, 120 bp, Artificial Sequence
  ENSG00000101150_20 (sequence is synthesized)
catctgtcctgtttccttgttttccttcagatggagttttgtcttgtttactacccgagagcccataggtgtgcctcccaaagggccctcctgcagaccagagcaagctcctctaggcca

SEQ ID NO: 121745 - DNA, 120 bp, Artificial Sequence
  ENSG00000101150_21 (sequence is synthesized)
agccggggcgccgccagcacgtgcccttctgctggaaccgggaggtctagagccaggcccagaacaatctgtgatttcttgtgtttttacttgacttggtggtttctcttttgccaaaag

SEQ ID NO: 121746 - DNA, 120 bp, Artificial Sequence
  ENSG00000101150_22 (sequence is synthesized)
gtccttacttgacttctgaaggctgtttgtaccaaatacttttcaaaagcccaagcctggtctcctcacagcttcctatggcagtgctctcccccctcccagtgctatgcgctgggcaac

SEQ ID NO: 121747 - DNA, 120 bp, Artificial Sequence
  ENSG00000101150_23 (sequence is synthesized)
ttggggtgccccccatgaggccaagggaggaccctggggtcgagtttccttcgggggcattgtgtggaggggcaggcagctcgctccaactgctgggagtgggggaatcccagctctgcc

SEQ ID NO: 121748 - DNA, 120 bp, Artificial Sequence
  ENSG00000101150_24 (sequence is synthesized)
catccctgccaagttggggttgtgtgtggatcttggtgttaactcttgcttccttctctgcttctgccatgcttccaagcagcagctactccatccgccactcaataagtatgccagcca

SEQ ID NO: 121749 - DNA, 120 bp, Artificial Sequence
  ENSG00000101150_25 (sequence is synthesized)
tgaggtaatgtatgcctgctcgctgcggctccagagccgggtgtctctggtgggggttggggcagctcccgccggttacaccttgcccttcccatattcctggattaattgaggactcca

SEQ ID NO: 121750 - DNA, 120 bp, Artificial Sequence
  ENSG00000101150_26 (sequence is synthesized)
ttcccttggcaacctctgatgactaagggccggtaaaaaccccctctaggctgacgaggaagagctggtagggggtcaggctcttcacctgcagcctccagaggagatccttgtgtcaaa

SEQ ID NO: 121751 - DNA, 120 bp, Artificial Sequence
  ENSG00000101150_27 (sequence is synthesized)
ctgggccgtgtcctttccaagtcctgaccctggctgcctgcagtgggtggggtggggttcgaggggctcgcacacagatcctggcacttgccctggtgggctgtcactcaggacacttca

SEQ ID NO: 121752 - DNA, 120 bp, Artificial Sequence
  ENSG00000101150_28 (sequence is synthesized)
cggtctcagccttcacggaaacacccagagctgtggtccttattctgtgcctgtcaggcaccaccctgattctcaggattctgtgcctgtgccgtgaggcactgccctgattctcaggag

SEQ ID NO: 121753 - DNA, 120 bp, Artificial Sequence
  ENSG00000101150_29 (sequence is synthesized)
agcccagaactgtggtccctattctgtgcctgcgccgtcaggcaccgccctgattctcaggagagccctgttctccttgtggggactctggctgggtgtcgcagacgtgctggcctctag

SEQ ID NO: 121754 - DNA, 120 bp, Artificial Sequence
  ENSG00000101150_30 (sequence is synthesized)
agtccccgggcctgggaggggtatctgtttgtgtgggagggactgagtgggatggagctggcctgctttctcctcttgtctccttatcactctgctgtcccagaagtgtccttggtcttc

SEQ ID NO: 121755 - DNA, 120 bp, Artificial Sequence
  ENSG00000101150_31 (sequence is synthesized)
cgtttgcttctctgagagatgtgcatgaagaactgcacagacttttcataacttcagtacgagagcccagggtgtccctgtaggggacagcagagaggggccgacagccccccaactgcg

SEQ ID NO: 121756 - DNA, 120 bp, Artificial Sequence
  ENSG00000101150_32 (sequence is synthesized)
cagacttttcataacctcagtacgagagcccagggtgtccctgtaggggatagcagagaggggccgacagccccccaactgcacagacttttcataacctcaatacgagagcccggggta

SEQ ID NO: 121757 - DNA, 120 bp, Artificial Sequence
  ENSG00000101150_33 (sequence is synthesized)
tccctgtaggggacagcagagaggggccgacagccccccaactgcgcagacttttcataacctcagtacgagagcccagggtgtccctgtaggggatagcagagaggggccgacagcccc

SEQ ID NO: 121758 - DNA, 120 bp, Artificial Sequence
  ENSG00000101150_34 (sequence is synthesized)
ccaactgcacagacttttcataacctcagtacgagagcccggggtatccctgtaggggacagcagagaggggccgacagccccccaactgcgcagacttttcataacctcagtacgagag

SEQ ID NO: 121759 - DNA, 120 bp, Artificial Sequence
  ENSG00000101150_35 (sequence is synthesized)
ccctgtagggtatgacagagaggggccgacatctccccagctgcacagtcaaggggtttccagttgccttgtgtgacgtctggacctgtccctgtggttgttgggcatggccgacctcac

SEQ ID NO: 121760 - DNA, 120 bp, Artificial Sequence
  ENSG00000101150_36 (sequence is synthesized)
ttttgacctggggagtctccggaatgacctggctgtctcacagttttgccatgagatcttgggatgttgttagggaccctttggaggctggccctaaccctgaggcccttccgagttagg

SEQ ID NO: 121761 - DNA, 80 bp, Artificial Sequence
  ENSG00000101152_0 (sequence is synthesized)
gcgtgcgtgagcgtgctcgtctccgctgccgctgccgctgccgctgccggtgccgcacccgcgccctctgccgccgccgc

SEQ ID NO: 121762 - DNA, 120 bp, Artificial Sequence
  ENSG00000101152_1 (sequence is synthesized)
cgctgcccagcagcgccgcgaatcggggagcggagccgcggagccggcgggagggcgggcgggcgggcggacgggcagaatagcctaacatggcagaccagagacagcgctcactgtcta

SEQ ID NO: 121763 - DNA, 120 bp, Artificial Sequence
  ENSG00000101152_2 (sequence is synthesized)
cctctggggagtcattgtaccacgtccttgggttggacaagaacgcaacctcagatgacattaaaaagtcctatcggaagcttgccttgaaatatcaccccgacaagaaccccgacaacc

SEQ ID NO: 121764 - DNA, 120 bp, Artificial Sequence
  ENSG00000101152_3 (sequence is synthesized)
cggaggccgcggacaagtttaaggagatcaacaacgcgcacgccatcctcacggacgccacaaaaaggaacatctacgacaagtacggctcgctgggtctctacgtggccgagcagtttg

SEQ ID NO: 121765 - DNA, 120 bp, Artificial Sequence
  ENSG00000101152_4 (sequence is synthesized)
gggaagagaacgtgaacacctacttcgtgctgtccagctggtgggccaaggccctgtttgtcttctgcggcctcctcacgtgctgctactgctgctgctgtctgtgctgctgcttcaact

SEQ ID NO: 121766 - DNA, 120 bp, Artificial Sequence
  ENSG00000101152_5 (sequence is synthesized)
gctgctgcgggaagtgtaagcccaaggcgcctgaaggcgaggagacggagttctacgtgtcccccgaggatctggaggcacagctgcagtctgacgagagggaggccacagacacgccga

SEQ ID NO: 121767 - DNA, 120 bp, Artificial Sequence
  ENSG00000101152_6 (sequence is synthesized)
tcgtcatacagccggcatccgccaccgagaccacccagctcacagccgactcccaccccagctaccacactgacgggttcaactaaatccaggaggagctgtggtcagaggaggagccgg

SEQ ID NO: 121768 - DNA, 120 bp, Artificial Sequence
  ENSG00000101152_7 (sequence is synthesized)
cgcctggccacgccaaccttagaatcatgaactgtagtcacagagatgggaaggcagcctcctgcctgccctggccttgctggggcccctcctgcctccacgcccacccagcgtcgaccc

SEQ ID NO: 121769 - DNA, 120 bp, Artificial Sequence
  ENSG00000101152_8 (sequence is synthesized)
ttgacccacgaagtgcgtagcatgcagtatttaaagcagtgtagctacggtcttctgtttttttcccttttttaatagcatgtatggggttctgttccatgtctgtgttgtggacattcc

SEQ ID NO: 121770 - DNA, 120 bp, Artificial Sequence
  ENSG00000101152_9 (sequence is synthesized)
gcggcatgaccgcgtgaactgcacggtggagctgcctcagggctgtcggtcaggttggtccagtgaggggtgactgcagccggtcaggtgggcgaggagaaggggggctgcccctttcct

SEQ ID NO: 121771 - DNA, 120 bp, Artificial Sequence
  ENSG00000101152_10 (sequence is synthesized)
acctgtgcttgaggggccggaggcaggtgctgcctggcagagctgtgttaccgtcttggcctcggggtctggtccacactctgtgctcccagccttgaggctgcagtaggactctgatct

SEQ ID NO: 121772 - DNA, 120 bp, Artificial Sequence
  ENSG00000101152_11 (sequence is synthesized)
cacctgccagaagagaggcggggccgcgtcctcctggcgtcaccggcgtcactgtcattccttggtgtctgtgctgggcatggttggcttgggggtctgtggtttcctgggccttgtggc

SEQ ID NO: 121773 - DNA, 120 bp, Artificial Sequence
  ENSG00000101152_12 (sequence is synthesized)
agggtttctcccgtgggagaatttggtgtggaaagcataggaggccccttccgaggttgacaccgtgtcctccgcggtgtttctcgcctggtcgtctcgtcgtgtggacgctgccgttct

SEQ ID NO: 121774 - DNA, 120 bp, Artificial Sequence
  ENSG00000101152_13 (sequence is synthesized)
ggttctcggaggtgtgtccttcgccgtgttggggttatttgtctgtgttcctgcacttttcccgggctctgagctggattgatggggccagtctcccccctcccatcttgaggtcgttct

SEQ ID NO: 121775 - DNA, 120 bp, Artificial Sequence
  ENSG00000101152_14 (sequence is synthesized)
ccacattccttccagcacacctgtcctttccatagccctttttggacctttagaaccacagatgataggaccagcccaatgagccacagtcagagagtagattgtgcatgtgtgagcacc

SEQ ID NO: 121776 - DNA, 120 bp, Artificial Sequence
  ENSG00000101152_15 (sequence is synthesized)
cagctactggggacgggggctctcccacgacccctcctcctgtgtttgccagagctcccatctgccccactcgcctttgccccgtcatcgatgattcaggcagagccagattcgttaggt

SEQ ID NO: 121777 - DNA, 120 bp, Artificial Sequence
  ENSG00000101152_16 (sequence is synthesized)
ccctggaggaaggactgactggaccagagggaccctctggctcaggagggttgggtccctgggaggccggcagccaggccacagaatccacacgtggaccattgtgggtccctgggaggc

SEQ ID NO: 121778 - DNA, 120 bp, Artificial Sequence
  ENSG00000101152_17 (sequence is synthesized)
cggcagccaggccacggaatccacacgtggaccattgtgggtcccttgggaggccagcagccagactacggaatccacatgtggaccatgggaagtcagtctcttgcgtgtcctagacct

SEQ ID NO: 121779 - DNA, 120 bp, Artificial Sequence
  ENSG00000101152_18 (sequence is synthesized)
tgtgggtggcgccctgcataggggagcagggggaacgggtctgatgtccctgtgctggctgagggctcagagctgcccgcactccgtagctcatgggatgtgctgggcctgcctttggcg

SEQ ID NO: 121780 - DNA, 120 bp, Artificial Sequence
  ENSG00000101152_19 (sequence is synthesized)
ccatgctgcagactccagtgggcctggtttctgcagaatgtccatggtggccgctgcagagttgcagaggtccctgtagagataaagctgaggaggaggctgtgtgtgatggctctggct

SEQ ID NO: 121781 - DNA, 120 bp, Artificial Sequence
  ENSG00000101152_20 (sequence is synthesized)
cggaccaaccagatgagcctcctgaagcccccttccctgcctgcctgctgacccgtggccccagctcactcattgccctcagcagccacccgaggctgtgcagaagggtaggttcaggtt

SEQ ID NO: 121782 - DNA, 120 bp, Artificial Sequence
  ENSG00000101152_21 (sequence is synthesized)
ccctactgcagatccgcatgtggaccatgagccggctgccagcactaggtcctgggcagctttgtttgtcccacttttctttgtttcttctcactaaaatgatcacgaagacctttgaca

SEQ ID NO: 121783 - DNA, 120 bp, Artificial Sequence
  ENSG00000101152_22 (sequence is synthesized)
agaggagagatatgcactgtgatattaaattagaaataatttatcaaaatcagacctctcctaaaagaataagaaattcattgtttggcccatcctgaaaggtgaggtggcgagacagtg

SEQ ID NO: 121784 - DNA, 120 bp, Artificial Sequence
  ENSG00000101152_23 (sequence is synthesized)
gggtgcctccgtgccgcttcgtgcagcagcaagttcagcctgagatgctggctgtactcagcctttgcaatttttgtagatgtagcttaggacgtgagttatttttccgcagactggcca

SEQ ID NO: 121785 - DNA, 120 bp, Artificial Sequence
  ENSG00000101152_24 (sequence is synthesized)
agagccaggttctaagcttggacctaaggtagaaagctgcccatcgggggccctagctcagccccaccaggccctctgttgggcctgcacacagctctgtggctagaacactccaaggcc

SEQ ID NO: 121786 - DNA, 120 bp, Artificial Sequence
  ENSG00000101152_25 (sequence is synthesized)
cttcggtacccatcagagtgggccccttgccaggtggcttttcagttacagagtccagtggaccattttgtagaaccatgcagctccctgcggaaggtggggtagggtgggaaagaggag

SEQ ID NO: 121787 - DNA, 120 bp, Artificial Sequence
  ENSG00000101152_26 (sequence is synthesized)
caggtctggaggtttgtggaacccagtcccctgcagaatctgtaaaacctaataaatcatggttgtggccattctcacggtggtgattgtgattagacgacccccgggaagcccagacac

SEQ ID NO: 121788 - DNA, 120 bp, Artificial Sequence
  ENSG00000101152_27 (sequence is synthesized)
tcggggcctggagttcctccccctgcctgacctagaagcagaaccgttttcagcgctctgccctgttggctttaaggctttgtcttaatttaaggaaaaagatcctcccgggttttattt

SEQ ID NO: 121789 - DNA, 120 bp, Artificial Sequence
  ENSG00000101152_28 (sequence is synthesized)
ctctctttcttgagtggactgtttccctataattaaaagaggtggtgagtcctggggcagcttccgcgcctccctgtccacgtgctaacagatcaggacgcccccagcacccctgcctgc

SEQ ID NO: 121790 - DNA, 120 bp, Artificial Sequence
  ENSG00000101152_29 (sequence is synthesized)
ttttgctggtggcagtgacgggaccccgactcctcactctcgggccgcagacaatgctgtgagcaagtgtggccatgggcacagaatgtccctttggacgccgctgctgggggctgccag

SEQ ID NO: 121791 - DNA, 120 bp, Artificial Sequence
  ENSG00000101152_30 (sequence is synthesized)
gggccctctggggtcgtgctttgaggcccgtccggttcacgagggggtccgggcagcactgactgcttccgacctgcaggaggcgtaggagcggccctgcgggccctttcacggcagctg

SEQ ID NO: 121792 - DNA, 120 bp, Artificial Sequence
  ENSG00000101152_31 (sequence is synthesized)
ctgctgtatagatttgtctccactcagtgacgtgggatttttttgtcttccttttggctttatttttaaactgctttagatattactgctcagtgtttgtgaactttcctagttctctat

SEQ ID NO: 121793 - DNA, 120 bp, Artificial Sequence
  ENSG00000101152_32 (sequence is synthesized)
gttgttagtgcagccagcacccagtggggacctactagaaaaaggaactggcatgcacacgtgcccagcaggaaaagcttcgtcttcacgtcggctgctgccatccagaagaggccctgg

SEQ ID NO: 121794 - DNA, 120 bp, Artificial Sequence
  ENSG00000101152_33 (sequence is synthesized)
agcctcacgccgtcgaggctgctctcaggcgttctgttccgggcgaggcttgtgctgcaaggaagggcaccagcatgcaggctgccactggagggtccgggtgctgcgggcagagttcag

SEQ ID NO: 121795 - DNA, 120 bp, Artificial Sequence
  ENSG00000101152_34 (sequence is synthesized)
cgcttgtccaccctcccttagctctgactcagtgcatcctactgtggggacatctcgtgaggggacacgaaatgactgatctcaccctttcccagtattcagagctgtgaacccctgtgg

SEQ ID NO: 121796 - DNA, 120 bp, Artificial Sequence
  ENSG00000101152_35 (sequence is synthesized)
cgcaggactggcctgtgtctgttattttggttgtaaatcattctcctgtggaattggcaaaagctacatttttactgtccttaccagcaacagtttgcgtcgtcacatgctgtgagtgtg

SEQ ID NO: 121797 - DNA, 120 bp, Artificial Sequence
  ENSG00000101152_36 (sequence is synthesized)
ggctgtggtgtgtccgtgtgtgtacatatgtgtatatgtatatatcacgcagcaggagtgtcattcatgctgctgtcccctggtgaagtgacaagtacaattaaaggtggctctgaaatg

SEQ ID NO: 121798 - DNA, 120 bp, Artificial Sequence
  ENSG00000101152_37 (sequence is synthesized)
gcctctggtttcttgggagtcgggcagggacctgcaggaggctttcccagcaggtgcacagaaggaagcgctgagcccactgtgtgcagagggtgtgtgcccagggcactgccacggccc

SEQ ID NO: 121799 - DNA, 120 bp, Artificial Sequence
  ENSG00000101152_38 (sequence is synthesized)
ccaccagcattggcctctgctctgcagggtggggtgcccatcctgggggctgtgtgtcatgctcacctgacccaggtgtgtgtcccggtgtgaaatcgaggaggggactggaagcccttc

SEQ ID NO: 121800 - DNA, 120 bp, Artificial Sequence
  ENSG00000101152_39 (sequence is synthesized)
cctgccttgaaacatgaaagctgattttctgagcagcagatacggtcagtggcaaagctgcatctgaagggcggcctgggaaggggccctgtgctggccccgggtccgccccagaggagt

SEQ ID NO: 121801 - DNA, 120 bp, Artificial Sequence
  ENSG00000101152_40 (sequence is synthesized)
ccacacagcaccacctccagaaggggctgggcccggggtcctgcaggcggcaccttttggtagagtttgtttccctggaaaatggggaaaatgtttcaagccaggtgaggggggaagtta

SEQ ID NO: 121802 - DNA, 120 bp, Artificial Sequence
  ENSG00000101152_41 (sequence is synthesized)
acactgaaatatgtattgtttttaaaaatcaaatgcacacgcatggaagctgcttgtccatgcactggttttgtcactggcgtcctggaatccgaccgtgttggggtgcaggcgctgtca

SEQ ID NO: 121803 - DNA, 120 bp, Artificial Sequence
  ENSG00000101152_42 (sequence is synthesized)
gactccggctgatcctggctcgagcacacacatctaagggccaggctggttccgcatggtgatctccgtcttgtatgtctgaatgttggcctaaaataaagattactgttgtaaaataaa

SEQ ID NO: 121804 - DNA, 120 bp, Artificial Sequence
  ENSG00000101158_0 (sequence is synthesized)
cgcccgtccccgcctcgcgcatgcgccgcgctcgctcgcgggagggcatggcgggggccgtgccgggcgccatcatggacgaggactactacgggagcgcggccgagtggggcgacgagg

SEQ ID NO: 121805 - DNA, 120 bp, Artificial Sequence
  ENSG00000101158_1 (sequence is synthesized)
gggagcgcggccgagtggggcgacgaggctgacggcggccagcaggaggatgattctggagaaggagaggatgatgcggaggttcagcaagaatgcctgcataaattttccacccgggat

SEQ ID NO: 121806 - DNA, 120 bp, Artificial Sequence
  ENSG00000101158_2 (sequence is synthesized)
tatatcatggaaccctccatcttcaacactctgaagaggtattttcaggcaggagggtctccagagaatgttatccagctcttatctgaaaactacaccgctgtggcccagactgtgaac

SEQ ID NO: 121807 - DNA, 120 bp, Artificial Sequence
  ENSG00000101158_3 (sequence is synthesized)
ctgctggccgagtggctcattcagacaggtgttgagccagtgcaggttcaggaaactgtggaaaatcacttgaagagtttgctgatcaaacattttgacccccgcaaagcagattctatt

SEQ ID NO: 121808 - DNA, 120 bp, Artificial Sequence
  ENSG00000101158_4 (sequence is synthesized)
tttactgaagaaggagagaccccagcgtggctggaacagatgattgcacataccacgtggcgggaccttttttataaactggctgaagcccatccagactgtttgatgctgaacttcacc

SEQ ID NO: 121809 - DNA, 120 bp, Artificial Sequence
  ENSG00000101158_5 (sequence is synthesized)
gttaagcttatttctgacgcagggtaccagggggagatcaccagtgtgtccacagcatgccagcagctagaagtgttctcgagagtgctccggacctctctagctacaattttagatgga

SEQ ID NO: 121810 - DNA, 120 bp, Artificial Sequence
  ENSG00000101158_6 (sequence is synthesized)
ggagaagaaaaccttgaaaaaaatctccctgagtttgccaagatggtgtgccacggggagcacacgtacctgtttgcccaggccatgatgtccgtgctggcccaggaggagcaggggggc

SEQ ID NO: 121811 - DNA, 120 bp, Artificial Sequence
  ENSG00000101158_7 (sequence is synthesized)
tccgctgtgcgcaggatcgcccaggaagtgcagcgctttgcccaggagaaaggtcatgacgccagtcagatcacactagccttgggcacagctgcctcctaccccagggcctgccaggct

SEQ ID NO: 121812 - DNA, 120 bp, Artificial Sequence
  ENSG00000101158_8 (sequence is synthesized)
ctcggggccatgctgtccaaaggagccctgaaccctgctgacatcaccgtcctgttcaagatgttcacaagcatggaccctcctccggttgaacttatccgcgttccagccttcctggac

SEQ ID NO: 121813 - DNA, 120 bp, Artificial Sequence
  ENSG00000101158_9 (sequence is synthesized)
accaggggctcggatcaaccaggaccacaagcacaaatacatccacatcttggcgtacgcagcaagcgtggttgagacctggaagaagaacaagcgagtgagcatcaataaagatgagct

SEQ ID NO: 121814 - DNA, 120 bp, Artificial Sequence
  ENSG00000101158_10 (sequence is synthesized)
gaagtcaacgtcaaaagctgtcgaaaccgttcacaatttgtgttgcaacgagaacaaaggggcctctgaactagtggcagaattgagcacactttatcagtgtattaggtttccagtggt

SEQ ID NO: 121815 - DNA, 120 bp, Artificial Sequence
  ENSG00000101158_11 (sequence is synthesized)
agcaatgggtgtgctgaagtgggtggattggactgtatcagaaccaaggtactttcagctgcagactgaccatacccctgtccacctggcgttgctggatgagatcagcacctgccacca

SEQ ID NO: 121816 - DNA, 120 bp, Artificial Sequence
  ENSG00000101158_12 (sequence is synthesized)
gctcctgcacccccaggtcctgcagctgcttgttaagctttttgagactgagcactcccagctggacgtgatggagcagcttgagttgaagaagacactgctggacaggatggttcacct

SEQ ID NO: 121817 - DNA, 120 bp, Artificial Sequence
  ENSG00000101158_13 (sequence is synthesized)
gctgagtcgaggttatgtacttcctgttgtcagttacatccgaaagtgtctggagaagctggacactgacatttcactcattcgctattttgtcactgaggtgctggacgtcattgctcc

SEQ ID NO: 121818 - DNA, 120 bp, Artificial Sequence
  ENSG00000101158_14 (sequence is synthesized)
tccttatacctctgacttcgtgcaacttttcctccccatcctggagaatgacagcatcgcaggtaccatcaaaacggaaggcgagcatgaccctgtgacggagtttatagctcactgcaa

SEQ ID NO: 121819 - DNA, 120 bp, Artificial Sequence
  ENSG00000101158_15 (sequence is synthesized)
atctaacttcatcatggtgaactaatttagagcatcctccagagctgaagcagaacattccagaacccgttgtggaaaaaccctttcaagaagctgttttaagaggctcgggcagcgtct

SEQ ID NO: 121820 - DNA, 120 bp, Artificial Sequence
  ENSG00000101158_16 (sequence is synthesized)
tgaaaatgggcaccgctgggaggaggtggatgacttctttacaaaggaaaatggtagcagcttcagtgagaaactgcccttacaaacagtcccttctctgctgtcaatccaatactgctc

SEQ ID NO: 121821 - DNA, 120 bp, Artificial Sequence
  ENSG00000101158_17 (sequence is synthesized)
ccaaatcctgttttcagtgttcatttccctcaaggcaggcgctgggctcccacgacccctcaggacagatctggccgtcagccgcgggccgctgggaactccactcggggaactcctttc

SEQ ID NO: 121822 - DNA, 120 bp, Artificial Sequence
  ENSG00000101158_18 (sequence is synthesized)
caagctgacctcagttttctcacaagaacccagttagctgatgttttattgtaattgtcttaatttgctaagaacaagtaataagtaaatttttaaaaagcctttctgctgggttggatt

SEQ ID NO: 121823 - DNA, 120 bp, Artificial Sequence
  ENSG00000101158_19 (sequence is synthesized)
tctgtttcctttgacagttcatatttgctttttttccataaaggtctttattgttttattttcataagccttacactgagaaagaaaagtgtaaaatttgtatctgtttttgggtcagtg

SEQ ID NO: 121824 - DNA, 120 bp, Artificial Sequence
  ENSG00000101158_20 (sequence is synthesized)
ttgactgtgttttaggatttagcagggatacaagaattctcttgtggttggagaggagctttaggcgtgcctgcttgatcttcctcttgcatatgaagaaacgatggagaggtggtcagc

SEQ ID NO: 121825 - DNA, 120 bp, Artificial Sequence
  ENSG00000101158_21 (sequence is synthesized)
tagcagggtgagggcggagtgaaggcctgagacccacgaccagcgcacacttactccacctcaccatgaacactgacaagccagcttcccgtggaggtgcggtcactgcatgcctcccct

SEQ ID NO: 121826 - DNA, 120 bp, Artificial Sequence
  ENSG00000101158_22 (sequence is synthesized)
tccttcctagtgctccccacaaaacccttcccatggcccgtgttccacagccaaagctgctagctccttctgttcaacgtagaggtaaacttgcttttggctgggcgtggtggctcacgc

SEQ ID NO: 121827 - DNA, 74 bp, Artificial Sequence
  ENSG00000101158_23 (sequence is synthesized)
aaaacttccttttatccagcagagctggaaaagttggagttgtttttggtatacttggagagctggctttctaa

SEQ ID NO: 121828 - DNA, 120 bp, Artificial Sequence
  ENSG00000101158_24 (sequence is synthesized)
tggagttgtttttggtatacttggagagctggctttctaaagtgctgctttgaggactgttgtgtaaagcacttgattcgtcttccctttgctggagttatgggcctgggcttttacact

SEQ ID NO: 121829 - DNA, 120 bp, Artificial Sequence
  ENSG00000101158_25 (sequence is synthesized)
ggggttctgaagtaacaaacaaagtcagtccagaaatagttgctcagcaatctcattgttacagtgtcgcaaaatgagctcatattagctttattttctgctaccaatagagtgttccta

SEQ ID NO: 121830 - DNA, 120 bp, Artificial Sequence
  ENSG00000101158_26 (sequence is synthesized)
agtatttaaagtgtgtgactcctttcttatagagccagcaagctgtattggaatcacttttccagtgttgtaaatgttatttttgtgggtcagtcagtatactcgtgaatgacagaaaaa

SEQ ID NO: 121831 - DNA, 120 bp, Artificial Sequence
  ENSG00000101158_27 (sequence is synthesized)
cagatcccaacaatgcaaagtattatatgtgtaaaaaagaacagaaaaaagaagctgccttgttagtaacggggtctatggtttttctcatcaagaggtcatgacgccagtcagatcaca

SEQ ID NO: 121832 - DNA, 120 bp, Artificial Sequence
  ENSG00000101158_28 (sequence is synthesized)
gaccctcctccggttgaacttgtaagttgcttctcaagaatccccaatgtcagctggtaaggtgactttggaaagtctgtgcttgtctgattgtctgaaggctgtgaatgcaaatccatc

SEQ ID NO: 121833 - DNA, 120 bp, Artificial Sequence
  ENSG00000101158_29 (sequence is synthesized)
attgtcctggtccttcctcagtcacactctctgcctggagcctgttgggcccctgctgtgtagggaaccctgaggggaggtgggtgagcagtgccctcacgcctgccatcccgaactggg

SEQ ID NO: 121834 - DNA, 120 bp, Artificial Sequence
  ENSG00000101158_30 (sequence is synthesized)
acgcagcaagcgtggttgagacctggaagaaggtaccatcggttctgggaatttgtggattttttaggagacaaatatcctcctctgctttgatattattttggaattttggctgcaaga

SEQ ID NO: 121835 - DNA, 120 bp, Artificial Sequence
  ENSG00000101158_31 (sequence is synthesized)
aatcttgaccctccctagtatcaggcatgtgttttcttgtgtttctgcgtagagaaagcactaaacgtctccagaaaatgtgcgtaatgtctccaatgctctgcaaaccgtaaattgaaa

SEQ ID NO: 121836 - DNA, 120 bp, Artificial Sequence
  ENSG00000101158_32 (sequence is synthesized)
tgtgactaaagaaatgaaactgatttccgtaagacatggacaaacactagtctcattgcttttcagtttctgtacactgtgtgactgtgaagtttgacagctgaattgactcccaactta

SEQ ID NO: 121837 - DNA, 120 bp, Artificial Sequence
  ENSG00000101158_33 (sequence is synthesized)
cttctcaaaaatagttatttctgtcctgaggattttcctcttaaggacctagcttcattgactgcagaaatttcttaacctcagtcaagtgttactggaagctgatggccctggcttagg

SEQ ID NO: 121838 - DNA, 120 bp, Artificial Sequence
  ENSG00000101158_34 (sequence is synthesized)
tgtcaggaccttcttccacagtgataagctctttggtggctgtgacagtgcccagtttctctgtgtgctgagcgtgaccacactgctcagcgaagctccctctggcctgtttgtagatca

SEQ ID NO: 121839 - DNA, 120 bp, Artificial Sequence
  ENSG00000101158_35 (sequence is synthesized)
atgcaccgttggtttcatgtttcatactgtttacactagcactgccctttttggcttaatttagttcattttgtacctaactgagaactgtgctttctgatgtagtgatgacaatgacag

SEQ ID NO: 121840 - DNA, 120 bp, Artificial Sequence
  ENSG00000101158_36 (sequence is synthesized)
atactcgtttaccaaaaagcaccttctgcctgcagcagctgtatgacacactttacctccattaccaccctgggcatctgaatgttggagatgggtggtgtcaccggccggtgggggtgg

SEQ ID NO: 121841 - DNA, 120 bp, Artificial Sequence
  ENSG00000101158_37 (sequence is synthesized)
gaggctgggggtaatttagagaaagttttgtaatacacccagaaggtgctatgtaaagcaagagtaacgcgaactgaactaaaggcttcaagggggggtcccctctgccacttttttttt

SEQ ID NO: 121842 - DNA, 120 bp, Artificial Sequence
  ENSG00000101158_38 (sequence is synthesized)
cacaatcaccgctcactgcagcttcagcctcctggaatcaagcagttctcccacctcagccttgcaaggtggccaccacaggcgtctgccatcatgcctggctatttttgtttttgtttt

SEQ ID NO: 121843 - DNA, 120 bp, Artificial Sequence
  ENSG00000101158_39 (sequence is synthesized)
ccatcatgcctggctatttttgtttttgttttttgggagagacagggctccttacgttgccctggctgctcttgaactcctaggctcaagtgattctcccacctctgcctcccaaagtgc

SEQ ID NO: 121844 - DNA, 120 bp, Artificial Sequence
  ENSG00000101158_40 (sequence is synthesized)
cccctccgctgctttaaaaattttgaaacctgattctcttcctccttccttaccttcctgttgtccatcattccattcattcgggtgtaattgctgttgttactttccctaggtattttc

SEQ ID NO: 121845 - DNA, 120 bp, Artificial Sequence
  ENSG00000101158_41 (sequence is synthesized)
gccctagggtcttttgcaaattccctgtgtacagtggagcgtggcatatcatgtaagtaatggcagagttgaggactaaaatcagagtgtgagacagaagttgcatctagtcagaattgc

SEQ ID NO: 121846 - DNA, 120 bp, Artificial Sequence
  ENSG00000101158_42 (sequence is synthesized)
atacaatgccttctttgatttcctggtttctgagacttgtgtaagaaagagctgaacttcttactcatttttatctttatcttactcatttgtatctgcttgcctcttatctttgattca

SEQ ID NO: 121847 - DNA, 120 bp, Artificial Sequence
  ENSG00000101158_43 (sequence is synthesized)
gtaattgaggtttactggtagcctgcaaacgtgattctcattgagctgttttccctaccatgttgtagaattataggattatacagtgtgtgttcagtgtgtcattttcaagacgtctat

SEQ ID NO: 121848 - DNA, 120 bp, Artificial Sequence
  ENSG00000101158_44 (sequence is synthesized)
tacagcaagcagtaaatgacggataatttaggactggctgtgattatggcttttagttaatatgatcaaagtagagtcttactgtaaatccacggagccgggtgcagatgacatcactga

SEQ ID NO: 121849 - DNA, 120 bp, Artificial Sequence
  ENSG00000101158_45 (sequence is synthesized)
agtgcgtgctgtccggaagcttgtggacacactgctgtcccggtgattagatacaagtgtgtctcttttggctgccatctgctccctcctcactgggcagggatgtttttccatccccct

SEQ ID NO: 121850 - DNA, 80 bp, Artificial Sequence
  ENSG00000101160_0 (sequence is synthesized)
aaagtgcggggtcggccgggtgctgggccgaggccgaggccggggcgggatccagagcgggagccggcgcgggatctggg

SEQ ID NO: 121851 - DNA, 120 bp, Artificial Sequence
  ENSG00000101160_1 (sequence is synthesized)
ggggccatggcgaggcgcgggccagggtggcggccgcttctgctgctcgtgctgctggcgggcgcggcgcagggcggcctctacttccgccggggacagacctgctaccggcctctgcgg

SEQ ID NO: 121852 - DNA, 120 bp, Artificial Sequence
  ENSG00000101160_2 (sequence is synthesized)
ggggacgggctggctccgctggggcgcagcacatacccccggcctcatgagtacctgtccccagcggatctgcccaagagctgggactggcgcaatgtggatggtgtcaactatgccagc

SEQ ID NO: 121853 - DNA, 120 bp, Artificial Sequence
  ENSG00000101160_3 (sequence is synthesized)
atcacccggaaccagcacatcccccaatactgcggctcctgctgggcccacgccagcaccagcgctatggcggatcggatcaacatcaagaggaagggagcgtggccctccaccctcctg

SEQ ID NO: 121854 - DNA, 120 bp, Artificial Sequence
  ENSG00000101160_4 (sequence is synthesized)
tccgtgcagaacgtcatcgactgcggtaacgctggctcctgtgaagggggtaatgacctgtccgtgtgggactacgcccaccagcacggcatccctgacgagacctgcaacaactaccag

SEQ ID NO: 121855 - DNA, 120 bp, Artificial Sequence
  ENSG00000101160_5 (sequence is synthesized)
gccaaggaccaggagtgtgacaagtttaaccaatgtgggacatgcaatgaattcaaagagtgccacgccatccggaactacaccctctggagggtgggagactacggctccctctctggg

SEQ ID NO: 121856 - DNA, 120 bp, Artificial Sequence
  ENSG00000101160_6 (sequence is synthesized)
agaaagactggctaactacaccggaggcatctatgccgaataccaggacaccacatatataaaccatgtcgtttctgtggctgggtggggcatcagtgatgggactgagtactggattgt

SEQ ID NO: 121857 - DNA, 120 bp, Artificial Sequence
  ENSG00000101160_7 (sequence is synthesized)
ccggaattcatggggtgaaccatggggcgagagaggctggctgaggatcgtgaccagcacctataaggatgggaagggcgccagatacaaccttgccatcgaggagcactgtacatttgg

SEQ ID NO: 121858 - DNA, 120 bp, Artificial Sequence
  ENSG00000101160_8 (sequence is synthesized)
ggaccccatcgtttaaggccatgtcactagaagcgcagtttaagaaaaggcatggtgacccatgaccagaggggatcctatggttatgtgtgccaggctggctggcaggaactggggtgg

SEQ ID NO: 121859 - DNA, 120 bp, Artificial Sequence
  ENSG00000101160_9 (sequence is synthesized)
ctatcaatattggatggcgaggacagcgtggcactggctgcgagtgttcctgagagttgaaagtgggatgacttatgacacttgcacagcatggctctgcctcacaatgatgcagtcagc

SEQ ID NO: 121860 - DNA, 120 bp, Artificial Sequence
  ENSG00000101160_10 (sequence is synthesized)
cacctggtgaagaagtgacctgcgacacaggaaacgatgggacctcagtcttcttcagcagaggacttgatattttgtatttggcaactgtgggcaataatatggcatttaagaggtgaa

SEQ ID NO: 121861 - DNA, 120 bp, Artificial Sequence
  ENSG00000101160_11 (sequence is synthesized)
agagttcagacttatcaccattcttatgtcactttagaatcaagggtgggggagggagggagggagttggcagtttcaaatcgcccaagtgatgaataaagtatctggctctgcacgaga

SEQ ID NO: 121862 - DNA, 120 bp, Artificial Sequence
  ENSG00000101160_12 (sequence is synthesized)
gcagaaatctatgcaaatggtcccatcaggtgaggagaggtcccgcgggcaaagagaggtttgcgggtgaggaaaggtcccgcgggtgaggaaaggtcccgcgggtgaggagagatccgc

SEQ ID NO: 121863 - DNA, 120 bp, Artificial Sequence
  ENSG00000101160_13 (sequence is synthesized)
ggtgacagcgccagtgtgggctcatgtcggtgctcatgtaggcatctccgtccttcgccactttccttctggccggttgtactcagtaggctcgagacagccacatcatttcccctctaa

SEQ ID NO: 121864 - DNA, 120 bp, Artificial Sequence
  ENSG00000101160_14 (sequence is synthesized)
cccggctgcctgtttataggcccaggcagctcagcccgcggttccaggggcctgtgattcaaggccaggtcagcctgggctggggtgctaaggccgaggagcgcgggcctttgccctctg

SEQ ID NO: 121865 - DNA, 120 bp, Artificial Sequence
  ENSG00000101160_15 (sequence is synthesized)
ctgaggtgacccaagctgggtcattctggggcttttgggtgacaggcaggactaggactgaatcccagtgacaagtggctgccaggtgccctctctcccccaaagcttgtgacctcagcc

SEQ ID NO: 121866 - DNA, 120 bp, Artificial Sequence
  ENSG00000101161_0 (sequence is synthesized)
gacggcgacactttgctacggagtgcatcggacgtcgaagcctagagtctctgcgtctttccctcttccgctgcctcattcctttccttcctagccttggtcgtcgccgccaccatgaac

SEQ ID NO: 121867 - DNA, 120 bp, Artificial Sequence
  ENSG00000101161_1 (sequence is synthesized)
aagaagaagaaaccgttcctagggatgcccgcgcccctcggctacgtgccggggctgggccggggcgccactggcttcaccacgcggtcagacattgggcccgcccgtgatgcaaatgac

SEQ ID NO: 121868 - DNA, 120 bp, Artificial Sequence
  ENSG00000101161_2 (sequence is synthesized)
cctgtggatgatcgccatgcacccccaggcaagagaaccgttggggaccagatgaagaaaaatcaggctgctgacgatgacgacgaggatctaaatgacaccaattacgatgagtttaat

SEQ ID NO: 121869 - DNA, 120 bp, Artificial Sequence
  ENSG00000101161_3 (sequence is synthesized)
ggctatgctgggagcctcttctcaagtggaccctacgagaaagatgatgaggaagcagatgctatctatgcagccctggataaaaggatggatgaaagaagaaaagaaagacgggagcaa

SEQ ID NO: 121870 - DNA, 120 bp, Artificial Sequence
  ENSG00000101161_4 (sequence is synthesized)
agggagaaagaagaaatagagaaatatcgtatggaacgccccaaaatccaacagcagttctcagacctcaagaggaagttggcagaagtcacagaagaagagtggctgagcatccccgag

SEQ ID NO: 121871 - DNA, 120 bp, Artificial Sequence
  ENSG00000101161_5 (sequence is synthesized)
gttggcgatgccagaaataaacgtcagcggaacccacgctatgagaagctgacccctgttcctgacagtttctttgccaaacatttacagaccggagagaaccatacctcagtggatccc

SEQ ID NO: 121872 - DNA, 120 bp, Artificial Sequence
  ENSG00000101161_6 (sequence is synthesized)
cgacaaactcaatttggaggtcttaacacaccctatccaggtggactaaacactccatacccaggtggaatgacgccaggactgatgacacctggcacaggtgagctggacatgaggaag

SEQ ID NO: 121873 - DNA, 120 bp, Artificial Sequence
  ENSG00000101161_7 (sequence is synthesized)
attggccaagcgaggaacactctgatggacatgaggctgagccaggtgtctgactccgtgagtggacagaccgtcgttgaccccaaaggctacctgacggatttaaattccatgatcccg

SEQ ID NO: 121874 - DNA, 120 bp, Artificial Sequence
  ENSG00000101161_8 (sequence is synthesized)
acacacggaggagacatcaatgatatcaagaaggcgcgactgctcctcaagtctgttcgggagacgaaccctcatcacccgccagcctggattgcatcagcccgcctggaagaagtcact

SEQ ID NO: 121875 - DNA, 120 bp, Artificial Sequence
  ENSG00000101161_9 (sequence is synthesized)
gggaagctacaagtagctcggaaccttatcatgaaggggacggagatgtgccccaagagtgaagatgtctggctggaagcagccaggttgcagcctggggacacagccaaggccgtggta

SEQ ID NO: 121876 - DNA, 120 bp, Artificial Sequence
  ENSG00000101161_10 (sequence is synthesized)
gcccaagctgtccgtcatctcccacagtctgtcaggatttacatcagagccgcagagctggaaacggacattcgtgcaaagaagcgggttcttcggaaagccctcgagcatgttccaaac

SEQ ID NO: 121877 - DNA, 120 bp, Artificial Sequence
  ENSG00000101161_11 (sequence is synthesized)
tcggttcgcttgtggaaagcagccgttgagctggaagaacctgaagatgctagaatcatgctgagccgagctgtggagtgctgccccaccagcgtggagctctggcttgctctggcaagg

SEQ ID NO: 121878 - DNA, 120 bp, Artificial Sequence
  ENSG00000101161_12 (sequence is synthesized)
gaacattcctacagaccgacatatctggatcacggctgctaagctggaggaagccaatgggaacacgcagatggtggagaagatcatcgaccgagccatcacctcgctgcgggccaacgg

SEQ ID NO: 121879 - DNA, 120 bp, Artificial Sequence
  ENSG00000101161_13 (sequence is synthesized)
tgtggagatcaaccgtgagcagtggatccaggatgccgaggaatgtgacagggctgggagtgtggccacctgccaggccgtcatgcgtgccgtgattgggattgggattgaggaggaaga

SEQ ID NO: 121880 - DNA, 120 bp, Artificial Sequence
  ENSG00000101161_14 (sequence is synthesized)
tcggaagcatacctggatggaggatgctgacagttgtgtagcccacaatgccctggagtgtgcacgagccatctacgcctacgccctgcaggtgttccccagcaagaagagtgtgtggct

SEQ ID NO: 121881 - DNA, 120 bp, Artificial Sequence
  ENSG00000101161_15 (sequence is synthesized)
gcgcgccgcgtacttcgagaagaaccatggcactcgggagtccctggaagcactcctgcagagggctgtggcccactgccccaaagcagaggtgctgtggctcatgggcgccaagtccaa

SEQ ID NO: 121882 - DNA, 120 bp, Artificial Sequence
  ENSG00000101161_16 (sequence is synthesized)
gtggctggcaggggatgtgcctgcagcaaggagcatcctggccctggccttccaggccaaccccaacagtgaggagatctggctggcagccgtgaagctggagtccgagaatgatgagta

SEQ ID NO: 121883 - DNA, 120 bp, Artificial Sequence
  ENSG00000101161_17 (sequence is synthesized)
cgagcgggcccggaggctgctggccaaggcgcggagcagtgcccccaccgcccgggtgttcatgaagtctgtgaagctggagtgggtgcaagacaacatcagggcagcccaagatctgtg

SEQ ID NO: 121884 - DNA, 120 bp, Artificial Sequence
  ENSG00000101161_18 (sequence is synthesized)
cgaggaggccctgcggcactatgaggacttccccaagctgtggatgatgaaggggcagatcgaggagcagaaggagatgatggagaaggcgcgggaagcctataaccaggggttgaagaa

SEQ ID NO: 121885 - DNA, 120 bp, Artificial Sequence
  ENSG00000101161_19 (sequence is synthesized)
gtgtccccactccacacccctgtggcttttgctctctcggctggaggagaagattgggcagcttactcgagcacgggccattttggaaaagtctcgtctgaagaacccaaagaaccctgg

SEQ ID NO: 121886 - DNA, 120 bp, Artificial Sequence
  ENSG00000101161_20 (sequence is synthesized)
gctgtggttggagtccgtgcggctggagtaccgtgcggggctgaagaacatcgcaaatacactcatggccaaggcgctgcaggagtgccccaactccggtatcctgtggtctgaggccat

SEQ ID NO: 121887 - DNA, 120 bp, Artificial Sequence
  ENSG00000101161_21 (sequence is synthesized)
cttcctcgaggcaaggccccagaggaggaccaagagcgtggatgccctgaagaagtgtgagcatgacccccatgtgctcctggccgtggccaagctgttttggagtcagcggaagatcac

SEQ ID NO: 121888 - DNA, 120 bp, Artificial Sequence
  ENSG00000101161_22 (sequence is synthesized)
caaggccagggagtggttccaccgcactgtgaagattgactcggacctgggggatgcctgggccttcttctacaagtttgagctgcagcatggcactgaggagcagcaggaggaggtgag

SEQ ID NO: 121889 - DNA, 120 bp, Artificial Sequence
  ENSG00000101161_23 (sequence is synthesized)
gaagcgctgtgagagtgcagagcctcggcatggggagctgtggtgcgccgtgtccaaggacatcgccaactggcagaagaagatcggggacatccttaggctggtggccggccgcatcaa

SEQ ID NO: 121890 - DNA, 120 bp, Artificial Sequence
  ENSG00000101161_24 (sequence is synthesized)
gaacaccttctgattgagcggttgccatggccggtctccgtggggcagggttgggccgcatgtggaagggctctgagctgtgtcctccttcattaaaagtttttatgtctcgtgtcagaa

SEQ ID NO: 121891 - DNA, 120 bp, Artificial Sequence
  ENSG00000101162_0 (sequence is synthesized)
ggggcagtattctgtgttgagggaggaaaaacactcccttccaaaagcatgacaggcagaaagcagagaagggccaggactggctgagggcggggagctgggcctctggggtggacacac

SEQ ID NO: 121892 - DNA, 120 bp, Artificial Sequence
  ENSG00000101162_1 (sequence is synthesized)
ccttggtcacattgtgagggtagcttggttggccagtcccaccactgcagtgaccacagttgtgttgggctcacaccagtgaaccgaagctctggattctgagagtctgaggattccgtg

SEQ ID NO: 121893 - DNA, 120 bp, Artificial Sequence
  ENSG00000101162_2 (sequence is synthesized)
aagatctcagacttgggctcagagcaaggatgcgtgaaattgtccatattcagattggccagtgtggcaaccagatcggagccaagttctgggagatgattggtgaggaacacgggatcg

SEQ ID NO: 121894 - DNA, 120 bp, Artificial Sequence
  ENSG00000101162_3 (sequence is synthesized)
acttggctgggagcgaccgcggggcctcggccttgcagctggagagaatcagcgtgtactacaacgaagcctacggtaggaaatatgtgccccgagcagtcttggtggacctagaacctg

SEQ ID NO: 121895 - DNA, 120 bp, Artificial Sequence
  ENSG00000101162_4 (sequence is synthesized)
ggacgatggacagcattcgatctagcaaattaggagctctctttcaacccgacagttttgtccatggtaactctggggctggcaacaactgggccaaaggccactacacggagggagccg

SEQ ID NO: 121896 - DNA, 120 bp, Artificial Sequence
  ENSG00000101162_5 (sequence is synthesized)
agctgatcgagaatgtcctagaggtggtgaggcacgagagtgagagctgtgactgcctgcagggcttccagatcgtccactccctgggcgggggcacaggctccgggatgggcactctgc

SEQ ID NO: 121897 - DNA, 120 bp, Artificial Sequence
  ENSG00000101162_6 (sequence is synthesized)
tcatgaacaagattagagaggagtacccggaccggatcatgaattccttcagcgtcatgccttctcccaaggtgtcggacactgtggtggagccctacaacgcggttctgtctatccacc

SEQ ID NO: 121898 - DNA, 120 bp, Artificial Sequence
  ENSG00000101162_7 (sequence is synthesized)
agctgattgagaatgcagatgcctgtttctgcattgacaatgaggccctctatgacatctgcttccgtaccctgaagctgacgacacccacctatggggatctcaaccacctagtgtcct

SEQ ID NO: 121899 - DNA, 120 bp, Artificial Sequence
  ENSG00000101162_8 (sequence is synthesized)
tgaccatgagcggcataaccacctccctccggttcccgggtcagctcaacgcagacctgcgcaagctggcggtgaacatggtccccttcccccgcctgcacttctttatgcccggctttg

SEQ ID NO: 121900 - DNA, 120 bp, Artificial Sequence
  ENSG00000101162_9 (sequence is synthesized)
ccccactcacggcccagggcagccagcagtaccgagccctctccgtggccgagctcacccagcagatgttcgatgcccgcaataccatggctgcctgtgacctccgccgtggccgctacc

SEQ ID NO: 121901 - DNA, 120 bp, Artificial Sequence
  ENSG00000101162_10 (sequence is synthesized)
tcacagtggcctgcattttccggggcaagatgtccaccaaggaagtggaccagcaactgctctccgtgcagaccaggaacagcagctgctttgtggagtggattcccaacaacgtcaagg

SEQ ID NO: 121902 - DNA, 120 bp, Artificial Sequence
  ENSG00000101162_11 (sequence is synthesized)
tggctgtctgcgacatcccgccccgggggctgagcatggccgccaccttcattggcaacaacacggccatccaagagatctttaatagggtctctgagcatttctcagccatgttcaaaa

SEQ ID NO: 121903 - DNA, 120 bp, Artificial Sequence
  ENSG00000101162_12 (sequence is synthesized)
ggaaagcttttgtgcactggtacaccagcgaagggatggacataaacgaatttggggaagctgaaaataacatccatgatttggtatccgagtaccaacaatttcaagatgccaaagcag

SEQ ID NO: 121904 - DNA, 120 bp, Artificial Sequence
  ENSG00000101162_13 (sequence is synthesized)
ttctagaggaagatgaagaggtcacggaggaggcagaaatggagccagaagataagggacattaactgtgagagaagctgtgccgcggagtcgcttacagaacagtttctcattagatga

SEQ ID NO: 121905 - DNA, 120 bp, Artificial Sequence
  ENSG00000101162_14 (sequence is synthesized)
actccaaaacccactctgcactgcagcacagtgaatgatatgcactcaccattagcttcgacacagggactgagggagacaggtggggagcagctgacaggcattagggtctttgctgac

SEQ ID NO: 121906 - DNA, 120 bp, Artificial Sequence
  ENSG00000101162_15 (sequence is synthesized)
atctactaaccttgaagagtttgatgttcagtgcatacttattaacttaaaaaaatagcaaatttattgtaaagtgctccctttgtttcaaagtgtttgccaggcatccagactacacgt

SEQ ID NO: 121907 - DNA, 120 bp, Artificial Sequence
  ENSG00000101162_16 (sequence is synthesized)
gtggatttgcagggagccactggagttggtgttacatttttatactttagcagcactgataggcaccctggaatcctcacttggtatccgagggctactaagactctttccttaggttct

SEQ ID NO: 121908 - DNA, 120 bp, Artificial Sequence
  ENSG00000101162_17 (sequence is synthesized)
ttcctctgagcaaacactgactggcatcctgctttccagtgcctgccagcctccagaagagccaggtgcctgactagtacatggggagctacagagccaaggtcaatgtgagtcaacatc

SEQ ID NO: 121909 - DNA, 120 bp, Artificial Sequence
  ENSG00000101162_18 (sequence is synthesized)
cactagaaatatccatgttgtgtagacctgtgcatacaacatgctaactggaaaagaggaaaaaagaaaagccacagtcctctccacaaaaatacctggtccaaacaagaaaaacaaaaa

SEQ ID NO: 121910 - DNA, 120 bp, Artificial Sequence
  ENSG00000101162_19 (sequence is synthesized)
gacaagcaaaactaaagaactgcagtcttctgatctttatttctgaagagctagcctttaacatatatgtttatatagtttaaatttcttactactgttagatcccaggaattcattaat

SEQ ID NO: 121911 - DNA, 120 bp, Artificial Sequence
  ENSG00000101162_20 (sequence is synthesized)
aatcatccttggctttccttttaaaggctattttgaaatggtcttttcactttcattcagtcatcaccccccaaaatgctctgcagcctctctgctctttgagaaagggcacaccatgcg

SEQ ID NO: 121912 - DNA, 120 bp, Artificial Sequence
  ENSG00000101162_21 (sequence is synthesized)
ctcggcaaccattcaaatgcaggaattaagcagcaatggctgcagtgtccttctcagttatggaggacatcgtctcattagggaacttttacagttcaaattaatttgcagaagttgcca

SEQ ID NO: 121913 - DNA, 120 bp, Artificial Sequence
  ENSG00000101162_22 (sequence is synthesized)
taaatgtttgcataatgacatagctttaagcactacatgattttaatctgctcacattataacaggaccaaatacacaagagcgtaatcaaatcatctgtaacttcttaattacagttta

SEQ ID NO: 121914 - DNA, 120 bp, Artificial Sequence
  ENSG00000101162_23 (sequence is synthesized)
cctatttctgacatgcagcactgccatctcttccagcaccatcagggttttaatggccctctagaattaccactgagatacactatttgatccatggataaccggtaatgggaaaatgct

SEQ ID NO: 121915 - DNA, 120 bp, Artificial Sequence
  ENSG00000101162_24 (sequence is synthesized)
ccgaccctcaatgcagtaaatatttacttgcaggcaactgggttctcatctcttgatttgcttttgtaatcagcaataataaaatagcaggtagatggatgacagttgctcattctgaga

SEQ ID NO: 121916 - DNA, 120 bp, Artificial Sequence
  ENSG00000101162_25 (sequence is synthesized)
aacttcactcttttcacttatgcatcacgaggaaataactaaaatacataccaagagaaaaataccttgccatcggatcatcaacaagtcttctatttacaaacttcaaaaaacacaaaa

SEQ ID NO: 121917 - DNA, 120 bp, Artificial Sequence
  ENSG00000101162_26 (sequence is synthesized)
caacattcatgttttaaatgctttctacttgtggttcaagaagcactagatttagtaagaaactctacctatatacttagtttgaagttagtaacttcctgagatgctaaagacttacag

SEQ ID NO: 121918 - DNA, 120 bp, Artificial Sequence
  ENSG00000101162_27 (sequence is synthesized)
cctgcgattatacaaggatttacacatgcttcctctggtgctttacttcccaaacctaaaaaagcaatgaaatagatgtaaggaaggagggatttaaaccttttaaaaaacttttgctga

SEQ ID NO: 121919 - DNA, 120 bp, Artificial Sequence
  ENSG00000101162_28 (sequence is synthesized)
cttatattactgtaaagatttgtttgctcaatagtaatcattaaactacaaagtaattcaattttaaatggcaaaattgctttatttcagactaaataaattccttttcttgaagcctaa

SEQ ID NO: 121920 - DNA, 120 bp, Artificial Sequence
  ENSG00000101166_0 (sequence is synthesized)
ctctgtgcctcgttgtcccctggcgctacccggacatctctcagggtgccggcaccatgaagatctggacttcggagcacgtctttgaccacccgtgggaaactgttacaacagctgcaa

SEQ ID NO: 121921 - DNA, 120 bp, Artificial Sequence
  ENSG00000101166_1 (sequence is synthesized)
tgcagaaatacccaaaccctatgaacccaagtgtggttggagttgatgtgttggacagacatatagatccctctggaaagttgcacagccacagacttctcagcacagagtggggactgc

SEQ ID NO: 121922 - DNA, 120 bp, Artificial Sequence
  ENSG00000101166_2 (sequence is synthesized)
cttccattgtgaagtctcttattggtgcagcaagaacgaaaacatatgtgcaagaacattctgtagttgatcctgtagagaaaacaatggaacttaaatctactaatatttcatttacaa

SEQ ID NO: 121923 - DNA, 120 bp, Artificial Sequence
  ENSG00000101166_3 (sequence is synthesized)
acatggtttcagtagatgagagacttatatacaaaccacatcctcaggatccagaaaaaactgttttgacacaagaagccataattaccgtgaaaggagttagcctcagcagttaccttg

SEQ ID NO: 121924 - DNA, 120 bp, Artificial Sequence
  ENSG00000101166_4 (sequence is synthesized)
aaggactgatggcaagtacgatatcctcaaatgctagtaaaggccgagaagcaatggaatgggtaatacataaattaaatgctgagattgaagaactgacagcctcagcaagaggaacca

SEQ ID NO: 121925 - DNA, 120 bp, Artificial Sequence
  ENSG00000101166_5 (sequence is synthesized)
taaggactccaatggcagcagcagcgtttgcagagaagtgatcgtgacagttggtagacaacatcgggtactccaggtctctccaaactgactatatatttatttgttattttaaaaata

SEQ ID NO: 121926 - DNA, 120 bp, Artificial Sequence
  ENSG00000101166_6 (sequence is synthesized)
caactatattttgggtagtttttttttttttttttttgataagttggtgtaaggctatgtgacttgatcaaaacagatgcagggcctctaaataaaagggatcatctgaaattaatgttg

SEQ ID NO: 121927 - DNA, 120 bp, Artificial Sequence
  ENSG00000101166_7 (sequence is synthesized)
tttgaaattactatctgattttgagggttccagtatttctgtgaaaattcaacaagaactccttggaaactggtattgatattcagtctccttaaggtagatttttcaagcttttcatac

SEQ ID NO: 121928 - DNA, 120 bp, Artificial Sequence
  ENSG00000101166_8 (sequence is synthesized)
attggaactccacctgactttggaccaaccccagaacagagcagagccacctcctatagacgcccattgccctgctgctgtacacttcagcagcttgcacaagggagctcacttaaaagg

SEQ ID NO: 121929 - DNA, 120 bp, Artificial Sequence
  ENSG00000101166_9 (sequence is synthesized)
agaaattgtgtagttttaaaatatattttgtgtaaaataccttactatgctataaaccaccattaaaaaccagtgttttgatttggtacttaaatatttttggagtgaaaattatcacta

SEQ ID NO: 121930 - DNA, 120 bp, Artificial Sequence
  ENSG00000101166_10 (sequence is synthesized)
gtactttgtgatttagtatgctgtatcgtgggctggttatgttaactgaaaaaaataaagtcattacctgagttttgcagtgctctaacttaaacagaagaacagctgttcacatctttt

SEQ ID NO: 121931 - DNA, 120 bp, Artificial Sequence
  ENSG00000101166_11 (sequence is synthesized)
agcattttacatttgcctaacttaaaaattgccatgtgtcaaaatcatggttttgtaattgctaaggcatgatatgtcaggttatttgaatataattactttttgaagtaattgtgacca

SEQ ID NO: 121932 - DNA, 120 bp, Artificial Sequence
  ENSG00000101166_12 (sequence is synthesized)
caaaacatcttttttacatgaaggagctgtgtatcatttgaaattactcaaatgatgtcttgctctgaggcataaatcccaggtacttagtgtttttaataatatggtgccactgcagga

SEQ ID NO: 121933 - DNA, 120 bp, Artificial Sequence
  ENSG00000101166_13 (sequence is synthesized)
tttgggggcggtggggaagaacaagcataatggtagggggaggcttggcctgaaactaaccactgagtgaattgcactgcaggttttacttaacgggaattccttatttgggatgtcaag

SEQ ID NO: 121934 - DNA, 120 bp, Artificial Sequence
  ENSG00000101166_14 (sequence is synthesized)
agggcagctgcaaactgaaaaacaatccagtaaatgtactttgttttatgtattgtagcaggcaattaactactaaataatagctttgacatttgcaattgttgcatagagactattttt

SEQ ID NO: 121935 - DNA, 120 bp, Artificial Sequence
  ENSG00000101166_15 (sequence is synthesized)
gctagaagatgattagctcttgcctttattttacagtgcttagtgtgataaacttctagtcatgtttcctatccaagagaccagttaatatatgtacataaaccacagaaatagtataac

SEQ ID NO: 121936 - DNA, 120 bp, Artificial Sequence
  ENSG00000101166_16 (sequence is synthesized)
acactatttttaaattatcgttttcctacttaaattttgtttagcttaagacttcttaggacatttgtaaaagcaggttaaatttaataaggtttctgatttttttttgtaaccggagat

SEQ ID NO: 121937 - DNA, 120 bp, Artificial Sequence
  ENSG00000101166_17 (sequence is synthesized)
agtttttacaagtgaaataacatttcagctaaataaaacatcgctaaataattgatatttgatgaaaatctgctttgtataatttctgtaaattatccttgttctgaaaaaggtgtaatg

SEQ ID NO: 121938 - DNA, 120 bp, Artificial Sequence
  ENSG00000101166_18 (sequence is synthesized)
ccctaatatttttaaatccttatcctttgattttttaaaaactgacctattgataaaactataaattttcattttccagtgcagttagttacctttttaaacataaatgcacaacaagca

SEQ ID NO: 121939 - DNA, 120 bp, Artificial Sequence
  ENSG00000101166_19 (sequence is synthesized)
aatgaatttaagagaactaaactggaataagtgttcataaatgaaacccttggactatttaataaagttgaaatgtgaattaaggaaaacttttgttaataaaaactttcttttaagtga

SEQ ID NO: 121940 - DNA, 120 bp, Artificial Sequence
  ENSG00000101166_20 (sequence is synthesized)
ctgaatgtcattttttgcatccgttcaagttgtattataataaacttgaattatgagtgtataatgaattggaaatattattacagtcttcatgaaggcacccaataaaattttcttaag

SEQ ID NO: 121941 - DNA, 120 bp, Artificial Sequence
  ENSG00000101166_21 (sequence is synthesized)
gaagccagctaatgccgtgtgatctgaaaggagttctattctgctttttctgcttttgccagcaacttgagaccaatactaaggtttggcagtaatggtctggtcataattgttaggtga

SEQ ID NO: 121942 - DNA, 80 bp, Artificial Sequence
  ENSG00000101180_0 (sequence is synthesized)
gcactcggctgcgcgttgcgctccggctgcacggtcgcaccggcagcggctcaggctccggctcctctcccgctgcagca

SEQ ID NO: 121943 - DNA, 80 bp, Artificial Sequence
  ENSG00000101180_1 (sequence is synthesized)
gcggaccatgcgctgggcgcccccaggggaacccgacccggccaagggcccgcaaagacgaggctcccgggccggggccc

SEQ ID NO: 121944 - DNA, 80 bp, Artificial Sequence
  ENSG00000101180_2 (sequence is synthesized)
cgcgtcccggagccgcgtgagcctgcggggccatggagcgcgcgccgcccgacgggccgctgaacgcttcgggggcgctg

SEQ ID NO: 121945 - DNA, 120 bp, Artificial Sequence
  ENSG00000101180_3 (sequence is synthesized)
gcgaggcggcggcggcgggcggggcgcgcggcttctcggcagcctggaccgcggtgctggccgcgctcatggcgctgctcatcgtggccacggtgctgggcaacgcgctggtcatgctcg

SEQ ID NO: 121946 - DNA, 120 bp, Artificial Sequence
  ENSG00000101180_4 (sequence is synthesized)
ccttcgtggccgactcgagcctccgcacccagaacaacttcttcctgctcaacctcgccatctccgacttcctcgtcggcgccttctgcatcccactgtatgtaccctacgtgctgacag

SEQ ID NO: 121947 - DNA, 120 bp, Artificial Sequence
  ENSG00000101180_5 (sequence is synthesized)
gccgctggaccttcggccggggcctctgcaagctgtggctggtagtggactacctgctgtgcacctcctctgccttcaacatcgtgctcatcagctacgaccgcttcctgtcggtcaccc

SEQ ID NO: 121948 - DNA, 120 bp, Artificial Sequence
  ENSG00000101180_6 (sequence is synthesized)
gagcggtctcataccgggcccagcagggtgacacgcggcgggcagtgcggaagatgctgctggtgtgggtgctggccttcctgctgtacggaccagccatcctgagctgggagtacctgt

SEQ ID NO: 121949 - DNA, 120 bp, Artificial Sequence
  ENSG00000101180_7 (sequence is synthesized)
ccgggggcagctccatccccgagggccactgctatgccgagttcttctacaactggtacttcctcatcacggcttccaccctggagttctttacgcccttcctcagcgtcaccttcttta

SEQ ID NO: 121950 - DNA, 120 bp, Artificial Sequence
  ENSG00000101180_8 (sequence is synthesized)
acctcagcatctacctgaacatccagaggcgcacccgcctccggctggatggggctcgagaggcagccggccccgagccccctcccgaggcccagccctcaccacccccaccgcctggct

SEQ ID NO: 121951 - DNA, 120 bp, Artificial Sequence
  ENSG00000101180_9 (sequence is synthesized)
gctggggctgctggcagaaggggcacggggaggccatgccgctgcacaggtatggggtgggtgaggcggccgtaggcgctgaggccggggaggcgaccctcgggggtggcggtgggggcg

SEQ ID NO: 121952 - DNA, 120 bp, Artificial Sequence
  ENSG00000101180_10 (sequence is synthesized)
gctccgtggcttcacccacctccagctccggcagctcctcgaggggcactgagaggccgcgctcactcaagaggggctccaagccgtcggcgtcctcggcctcgctggagaagcgcatga

SEQ ID NO: 121953 - DNA, 120 bp, Artificial Sequence
  ENSG00000101180_11 (sequence is synthesized)
agtggccaagtcgctggccgtcatcgtgagcatctttgggctctgctgggccccatacacgctgctgatgatcatccgggccgcctgccatggccactgcgtccctgactactggtacga

SEQ ID NO: 121954 - DNA, 120 bp, Artificial Sequence
  ENSG00000101180_12 (sequence is synthesized)
aacctccttctggctcctgtgggccaactcggctgtcaaccctgtcctctaccctctgtgccaccacagcttccgccgggccttcaccaagctgctctgcccccagaagctcaaaatcca

SEQ ID NO: 121955 - DNA, 120 bp, Artificial Sequence
  ENSG00000101180_13 (sequence is synthesized)
gccccacagctccctggagcactgctggaagtgagtggcccaccagagcctccctcagccacgcctctctcagcccaggtctcctgggcatctggccctgctgccccctacccggctcgt

SEQ ID NO: 121956 - DNA, 120 bp, Artificial Sequence
  ENSG00000101180_14 (sequence is synthesized)
tcccccaggggtgagccccgccgtgtctgtggccctctcttaatgccacggcagccaccctgccatggaggcgccttcctgggttggccagagggcccctcactggctggactggaggct

SEQ ID NO: 121957 - DNA, 120 bp, Artificial Sequence
  ENSG00000101180_15 (sequence is synthesized)
gggtggccggccctgccccccacattctggctccaccgggagggacagtctggaggtcccagacatgctgcccaccccctgctggtgcccacccttcgcagttactggttggtgttcttc

SEQ ID NO: 121958 - DNA, 120 bp, Artificial Sequence
  ENSG00000101180_16 (sequence is synthesized)
ccaaagcaagcacctgggtgtgctccaggcttcctgccctagcagtttgcctctgcacgtgcacacacctgcacacccctgcacacacctgcacaccgtccctctccccggacaagccca

SEQ ID NO: 121959 - DNA, 120 bp, Artificial Sequence
  ENSG00000101180_17 (sequence is synthesized)
ggacactgcctttgctgccttctgtctcttgcataagcctcaggcctggccctttcacccctcttcccaccaactctctctgcccccaaaagtgtcaaggggccctaggaacctcgaagc

SEQ ID NO: 121960 - DNA, 120 bp, Artificial Sequence
  ENSG00000101180_18 (sequence is synthesized)
tgttctctgcttttccattctgggtgttttcagaaagatgaagaagaaaacatgtctgtgaacttgatgttcctgggatgtttaatcaagagagacaaaattgctgaggagctcagggct

SEQ ID NO: 121961 - DNA, 120 bp, Artificial Sequence
  ENSG00000101180_19 (sequence is synthesized)
ggattggcaggtgtgggctcccacgccctcctccctccgctaaggcttccggctgagctgtgccagctgcttctgcccaccccgcctctgggctcacaccagccctggtggccaagcctg

SEQ ID NO: 121962 - DNA, 120 bp, Artificial Sequence
  ENSG00000101180_20 (sequence is synthesized)
ccccggccactctgtttgctcacccaggacctctgggggttgttgggaggagggggcccggctgggcccgagggtcccaaggcgtgcaggggcggtccagaggaggtgcccgggcagggg

SEQ ID NO: 121963 - DNA, 120 bp, Artificial Sequence
  ENSG00000101180_21 (sequence is synthesized)
ccgcttcgccatgtgctgtgcacccgtgccacgcgctctgcatgctcctctgcctgtgcccgctgcgctgccctgcaaaccgtgaggtcacaataaagtgtatttttttattggtgctga

SEQ ID NO: 121964 - DNA, 120 bp, Artificial Sequence
  ENSG00000101181_0 (sequence is synthesized)
ctttcccgagccggggccatggcacctgcaaggtgtttctcagcaagattgaggaccgtgtttcagggcgtggggcattgggctttgtccacatgggctggcctgaagcccagccggcta

SEQ ID NO: 121965 - DNA, 120 bp, Artificial Sequence
  ENSG00000101181_1 (sequence is synthesized)
ctgccacagcgggcttctcccaggctgctctcggtcggccgtgcggacctcgccaagcatcaggaactcccggggaagaagctgctctctgagaaaaagctgaaaaggtactttgtggac

SEQ ID NO: 121966 - DNA, 120 bp, Artificial Sequence
  ENSG00000101181_2 (sequence is synthesized)
tatcggagagtgcttgtctgtggaggaaacggaggcgctggggcaagctgcttccacagtgagccccgcaaggagtttggaggccctgatggaggggacggaggcaacggtggacacgtc

SEQ ID NO: 121967 - DNA, 120 bp, Artificial Sequence
  ENSG00000101181_3 (sequence is synthesized)
attctgagagttgaccagcaagtcaagtccctgtcgtcggtcctgtcgcggtaccagggtttcagtggagaagatggagggagtaaaaactgcttcgggcgcagtggcgccgtcctctac

SEQ ID NO: 121968 - DNA, 120 bp, Artificial Sequence
  ENSG00000101181_4 (sequence is synthesized)
atccgggtccccgtgggcacgctggtgaaggagggaggcagagttgtggccgacctgtcttgcgtgggagatgagtacattgccgcgctgggcggggcaggagggaaaggcaaccgcttc

SEQ ID NO: 121969 - DNA, 120 bp, Artificial Sequence
  ENSG00000101181_5 (sequence is synthesized)
ttcctggccaacaacaaccgtgcccctgtgacctgtacccctggacagccaggacagcagcgagttctccacctggagctcaagacggtggcccacgccggaatggtgggattccccaac

SEQ ID NO: 121970 - DNA, 120 bp, Artificial Sequence
  ENSG00000101181_6 (sequence is synthesized)
gccgggaagtcctcactgctccgggccatttcaaacgccagacccgccgtggcttcctacccgttcaccaccctgaagccccacgtcgggatcgtccactacgaaggccacctacaaata

SEQ ID NO: 121971 - DNA, 120 bp, Artificial Sequence
  ENSG00000101181_7 (sequence is synthesized)
gcagtggccgacatccccggcatcatacgaggcgcccaccagaacaggggtctggggtccgccttcctcaggcacatcgagcgctgccgctttctcttgttcgtggtggatctttctcag

SEQ ID NO: 121972 - DNA, 120 bp, Artificial Sequence
  ENSG00000101181_8 (sequence is synthesized)
cctgagccgtggactcaagttgacgatttaaaatatgaactggagatgtatgaaaagggcctgtctgcgaggccccacgcaatcgtcgcaaacaagattgacctccctgaagcccaagcc

SEQ ID NO: 121973 - DNA, 120 bp, Artificial Sequence
  ENSG00000101181_9 (sequence is synthesized)
aatctgtcccagctccgggatcacttgggacaggaggtcatcgtgctgtcggcgttgaccggcgagaacctggagcagctgctgttgcacctgaaggtgctgtatgacgcctacgcggag

SEQ ID NO: 121974 - DNA, 120 bp, Artificial Sequence
  ENSG00000101181_10 (sequence is synthesized)
gccgagctgggccagggccgccagccgctcaggtggtagccacgccagagcggggtcgcctctgggcctctgtctgagcaaacctgggtgtgaattcggtggttttgaatgcataaagtg

SEQ ID NO: 121975 - DNA, 120 bp, Artificial Sequence
  ENSG00000101181_11 (sequence is synthesized)
ccttgtggacacgggggagttgtggtgcttctgggtctctgggccccgcctgctggcctgagatgccctcatgttgggaagcattccgtgccccctaccccgcctgccctccgtatttcc

SEQ ID NO: 121976 - DNA, 120 bp, Artificial Sequence
  ENSG00000101181_12 (sequence is synthesized)
gattaacacccctaataaggggttggggtgcccataacggggtggccctgccgctgactcaggtctccgccatgcacgcgtggactctcggatgagctcagcagaaccgcacagccagag

SEQ ID NO: 121977 - DNA, 120 bp, Artificial Sequence
  ENSG00000101181_13 (sequence is synthesized)
ccccaggtcagaagtgcagaccagggttctcagcacagtgcccgtcgtgcttccatggcttgctacggagagagacctctggatccacactggggctgcgtctggcccgttgtccagcag

SEQ ID NO: 121978 - DNA, 120 bp, Artificial Sequence
  ENSG00000101181_14 (sequence is synthesized)
ccctgcggtaccgcaagcccaggcaccagtgtctcggggggcctcactgctgcgcaaggggtggggccgaggatgcaagtccaggcagagcggcgcaggcagctgtgagcttttctccat

SEQ ID NO: 121979 - DNA, 120 bp, Artificial Sequence
  ENSG00000101181_15 (sequence is synthesized)
cagccgtctgagaagagcagtgaggccagctgcttcctgtccttcagaacacttctctgtgctcagtgggagccaggaagcctcaggcttcacgactgaatgcacccaatatccgacctg

SEQ ID NO: 121980 - DNA, 120 bp, Artificial Sequence
  ENSG00000101181_16 (sequence is synthesized)
gctgcgtgtttctggctgggctgccgtgtgcacagcaagttaactagaggggctgtgggccatggaactgtcagcgttattctcagaaggcggccgtggcatgggcagggtatagtgagg

SEQ ID NO: 121981 - DNA, 120 bp, Artificial Sequence
  ENSG00000101181_17 (sequence is synthesized)
agtggaaggagacgtgtgcctggtaatatggggcggaatttccactcagctccatttgctggggatttaaagagaacccttgtgctacgccaggcagttaccgagccgaagggagatgat

SEQ ID NO: 121982 - DNA, 120 bp, Artificial Sequence
  ENSG00000101181_18 (sequence is synthesized)
gggccttcgcccctcagtgggatggcagctgagggggccctgcatttgaccgtcgagactgcagcagcgcctttcctgtctgtggtttaagtctttgcagtcaagtactgatgcatccaa

SEQ ID NO: 121983 - DNA, 120 bp, Artificial Sequence
  ENSG00000101181_19 (sequence is synthesized)
gccaggcccatgcctggtgtctccctgactgcagaggagccccagggcaaggacagctcagctgctggcagcctgcctggcccatagacatcccccaagtagtctcaggcctctgacatg

SEQ ID NO: 121984 - DNA, 120 bp, Artificial Sequence
  ENSG00000101181_20 (sequence is synthesized)
ccccaagtagtctcaggcctctgacatgtccctgaggggcccctaagaaagaaagtggaggggacactccagaggctgtcgtgggaggatcatgtgagcctgggaggtcaaggctgcagt

SEQ ID NO: 121985 - DNA, 120 bp, Artificial Sequence
  ENSG00000101181_21 (sequence is synthesized)
gttcagaaacctgcattgaaattccagccgaggacagtatttcttcccactctatttgtcccctctcatctgtggaagctcagcagcatcacaacacgtgacttaaaagctttccttgtg

SEQ ID NO: 121986 - DNA, 120 bp, Artificial Sequence
  ENSG00000101181_22 (sequence is synthesized)
ctcctctgggtctcatctctgttgatgttagttgatgatcttagtgatggggcacgtggagcttcttgaaaatgacagggtgaaacgcaggcctgcgtgctaaatcccacgctcagcaaa

SEQ ID NO: 121987 - DNA, 120 bp, Artificial Sequence
  ENSG00000101181_23 (sequence is synthesized)
tcccagcaggctgggagaggcgctgcgtgcttggaaagccgtgatacaggctgctcattttcccatgagcctgtgtattttacatgtatgttacatatatcctttcatatgtgtggctat

SEQ ID NO: 121988 - DNA, 84 bp, Artificial Sequence
  ENSG00000101181_24 (sequence is synthesized)
tacatgtatgttacatatatcctttcatatgtgtggctatttcttaatttaaaacaaatgcggaggctgggcacgtaaggcagg

SEQ ID NO: 121989 - DNA, 120 bp, Artificial Sequence
  ENSG00000101181_25 (sequence is synthesized)
actccatctcaaaaaaaaaaaaaaagtggaggggacaaagaagcagagaaggatgatcagaaggggacccccagcccttggaggagagacggcagcctcaggccgccacaaaggattttg

SEQ ID NO: 121990 - DNA, 120 bp, Artificial Sequence
  ENSG00000101181_26 (sequence is synthesized)
tttgtggagtcgccccaggcctgacggcgttaattatccctggctttcatcttgatgctcttgcaggggaggctcaagatgccttgtggctcgacccctgcacggagcccccagcccagc

SEQ ID NO: 121991 - DNA, 120 bp, Artificial Sequence
  ENSG00000101181_27 (sequence is synthesized)
ttgcccagaactttccttgctgcaaaaagccccaagacttctccctgccacacacacagcttttgccatcgcgttctaaaagctgacagctttctctccaacactgttctccctgagtag

SEQ ID NO: 121992 - DNA, 120 bp, Artificial Sequence
  ENSG00000101181_28 (sequence is synthesized)
ggtaaagctacacttggcttccccagtttcctgtttcctgcctagaaacaaatttttgtcagtctgcttttcaaatgggatatatgattcacataccataaaattcaccactttatataa

SEQ ID NO: 121993 - DNA, 120 bp, Artificial Sequence
  ENSG00000101181_29 (sequence is synthesized)
ctgggggccaccgtgtgacccacggggcccctgtggcttgatgcccacagctaggaaacagcacaatggaaacggaggctggcagacagcgggaaagcagccccacccctcaaagcaaac

SEQ ID NO: 121994 - DNA, 120 bp, Artificial Sequence
  ENSG00000101181_30 (sequence is synthesized)
ccagacgggcatttgtaccagggtctcacaccatgtgcatgtctagtgaaaaagtcatgaaacgattctcttttaaaaagagggagcccacggcacggacgcttcctccgtctctgaccc

SEQ ID NO: 121995 - DNA, 88 bp, Artificial Sequence
  ENSG00000101181_31 (sequence is synthesized)
gaaaaagcaactttgaacatgttttgttttgtttgtttaatttcaggagcacagagagtttcctgtcagggaagctgacatgtcggtc

SEQ ID NO: 121996 - DNA, 120 bp, Artificial Sequence
  ENSG00000101181_32 (sequence is synthesized)
gcacagagagtttcctgtcagggaagctgacatgtcggtcgcgtgaaagcacgaggcctgtgtggtgggttcggtgggtgccgctggctgctggttatattcacactcagcatagacgca

SEQ ID NO: 121997 - DNA, 120 bp, Artificial Sequence
  ENSG00000101181_33 (sequence is synthesized)
tagcgagctgggagtgaagccttcacaacaaaagcatagaatacagctactgtaaaaaataagaaatttaaaaattttcagaaatgatagcactttttgaaggaaaataaggatttcatt

SEQ ID NO: 121998 - DNA, 120 bp, Artificial Sequence
  ENSG00000101181_34 (sequence is synthesized)
tttgctggttttgtaacttctgctgcaccctcactccatgcttccatacctatttttaaggttcttaaactggacccagacacatcagcaataggccatggttgtcgtaacacaaaggga

SEQ ID NO: 121999 - DNA, 120 bp, Artificial Sequence
  ENSG00000101182_0 (sequence is synthesized)
gtagtggcgccgggagtcgcgggtgcgcgcgggccgtgagtgtgcgcttttgagagtcgcggcggaaggagcccggccgccgcccgccggcatgagctacgaccgcgccatcaccgtctt

SEQ ID NO: 122000 - DNA, 120 bp, Artificial Sequence
  ENSG00000101182_1 (sequence is synthesized)
ctcgcccgacggccacctcttccaagtggagtacgcgcaggaggccgtcaagaagggctcgaccgcggttggtgttcgaggaagagacattgttgttcttggtgtggagaagaagtcagt

SEQ ID NO: 122001 - DNA, 120 bp, Artificial Sequence
  ENSG00000101182_2 (sequence is synthesized)
ggccaaactgcaggatgaaagaacagtgcggaagatctgtgctttggatgacaacgtctgcatggcctttgcaggcctcaccgccgatgcaaggatagtcatcaacagggcccgggtgga

SEQ ID NO: 122002 - DNA, 120 bp, Artificial Sequence
  ENSG00000101182_3 (sequence is synthesized)
gtgccagagccaccggctgactgtggaggacccggtcactgtggagtacatcacccgctacatcgccagtctgaagcagcgttatacgcagagcaatgggcgcaggccgtttggcatctc

SEQ ID NO: 122003 - DNA, 120 bp, Artificial Sequence
  ENSG00000101182_4 (sequence is synthesized)
ccctcatcgtgggtttcgactttgatggcactcctaggctctatcagactgacccctcgggcacataccatgcctggaaggccaatgccataggtcggggtgccaagtcagtgcgcgagt

SEQ ID NO: 122004 - DNA, 120 bp, Artificial Sequence
  ENSG00000101182_5 (sequence is synthesized)
tcctggagaagaactatactgacgaagccattgaaacagatgatctgaccattaagctggtgatcaaggcactcctggaagtggttcagtcaggtggcaaaaacattgaacttgctgtca

SEQ ID NO: 122005 - DNA, 120 bp, Artificial Sequence
  ENSG00000101182_6 (sequence is synthesized)
tgaggcgagatcaatccctcaagattttaaatcctgaagaaattgagaagtatgttgctgaaattgaaaaagaaaaagaagaaaacgaaaagaagaaacaaaagaaagcatcatgatgaa

SEQ ID NO: 122006 - DNA, 120 bp, Artificial Sequence
  ENSG00000101182_7 (sequence is synthesized)
taaaatgtctttgcttgtaatttttaaattcatatcaatcatggatgagtctcgatgtgtaggcctttccattccatttattcacactgagtgtcctacaataaacttccgtatttttaa

SEQ ID NO: 122007 - DNA, 120 bp, Artificial Sequence
  ENSG00000101182_8 (sequence is synthesized)
atcacccgctacatcgccagtctgaagcaggtgggtgcctgcccgcttgcatgctcacctctggcagcagggcagtcacggctccgccatggagggtcctgccatgtcacttcaggtgaa

SEQ ID NO: 122008 - DNA, 120 bp, Artificial Sequence
  ENSG00000101182_9 (sequence is synthesized)
tcagaaaactgatttattctggggcgtgatcctaatcttgacttgcacaagtgtaacttgacctagctcaccaatttcagtaacattgttctgttctcagttcctggcatgggatattcc

SEQ ID NO: 122009 - DNA, 120 bp, Artificial Sequence
  ENSG00000101182_10 (sequence is synthesized)
aaattcctgtgtctggagggaaatgatagcttttgtcttgccatcctgagtgaccagtcacaaagcagttgaagggggctggaagccaccctatgaggacacgccattagtatgtaagca

SEQ ID NO: 122010 - DNA, 120 bp, Artificial Sequence
  ENSG00000101182_11 (sequence is synthesized)
gaatgtgtgtctacctgtcaaagtaatttccagtaacctgagttcacaattctggtcctaggtgagtttttctaggagtgaaaatgcagaaaaggatgttgaaagctattggctaatgta

SEQ ID NO: 122011 - DNA, 120 bp, Artificial Sequence
  ENSG00000101182_12 (sequence is synthesized)
gtcctaggtgagtttttctaggagtgaaaatgcagaaaaggatgttgaaagctattggctaatgtatcatttgaactgctgataacctgagaaggggctcaggcatggtttaaaatgttc

SEQ ID NO: 122012 - DNA, 120 bp, Artificial Sequence
  ENSG00000101182_13 (sequence is synthesized)
gtatcttcactaagtacggttctttcctcacatgcagtttcttaattggatggcactgacctgtttcttttcttgctagcgttatacgcagagcaatgggcgcaggccgtttggcatctc

SEQ ID NO: 122013 - DNA, 120 bp, Artificial Sequence
  ENSG00000101182_14 (sequence is synthesized)
ccgcccgggtcaggactggtttggacgcggccgtttcgttttgacgagggctcgtgtacattgaccttagtgacattgtttgaaacttaaattcgtaccatcaagacgtgtcagtttaat

SEQ ID NO: 122014 - DNA, 120 bp, Artificial Sequence
  ENSG00000101187_0 (sequence is synthesized)
agagcgtggagcgctgcgcggcgcggcggccgggccctcgagacggggacggacacaccagcccctcggataccacttggccactcccgctgaggccactcccactgcgtggctgaagcc

SEQ ID NO: 122015 - DNA, 120 bp, Artificial Sequence
  ENSG00000101187_1 (sequence is synthesized)
tcgaggtcaccaggcggaggcgcggagatgcccctgcatcagctgggggacaagccgctcaccttccccagccccaactcagccatggaaaacgggcttgaccacaccccacccagcagg

SEQ ID NO: 122016 - DNA, 120 bp, Artificial Sequence
  ENSG00000101187_2 (sequence is synthesized)
agggcatccccgggcacacccctgagccccggctccctccgctccgctgcccatagccccctggacaccagcaagcagcccctctgccagctctgggccgagaagcatggcgcccggggg

SEQ ID NO: 122017 - DNA, 120 bp, Artificial Sequence
  ENSG00000101187_3 (sequence is synthesized)
acccatgaggtgcggtacgtctcggccgggcagagcgtggcgtgcggctggtgggccttcgcaccgccgtgcctgcaggtcctcaacacgcccaagggcatcctgttcttcctgtgtgcg

SEQ ID NO: 122018 - DNA, 120 bp, Artificial Sequence
  ENSG00000101187_4 (sequence is synthesized)
gccgcattcctgcaggggatgactgtgaatggcttcatcaacacagtcatcacctccctggagcgccgctatgacctgcacagctaccagagcgggctcatcgccagctcctacgacatt

SEQ ID NO: 122019 - DNA, 120 bp, Artificial Sequence
  ENSG00000101187_5 (sequence is synthesized)
gccgcctgcctctgcctcaccttcgtcagctacttcgggggctcagggcacaagccgcgctggctgggctggggcgtgctgcttatgggcacggggtcgctggtgttcgcgctgccccac

SEQ ID NO: 122020 - DNA, 120 bp, Artificial Sequence
  ENSG00000101187_6 (sequence is synthesized)
ttcacggctggccgctatgaggtggagttggacgcgggtgtcaggacgtgccctgccaaccccggcgcggtgtgtgcggacagcacctcgggcctgtcccgctaccagctggtcttcatg

SEQ ID NO: 122021 - DNA, 120 bp, Artificial Sequence
  ENSG00000101187_7 (sequence is synthesized)
ctgggccagttcctgcatggcgtgggtgccacacccctctacacgctgggcgtcacctacctggatgagaacgtcaagtccagctgctcgcccgtctacattgccatcttctacacagcg

SEQ ID NO: 122022 - DNA, 120 bp, Artificial Sequence
  ENSG00000101187_8 (sequence is synthesized)
gccatcctgggcccagctgccggctacctgattggaggtgccctgctgaatatctacacggaaatgggccgacggacggagctgaccaccgagagcccactgtgggtcggcgcctggtgg

SEQ ID NO: 122023 - DNA, 120 bp, Artificial Sequence
  ENSG00000101187_9 (sequence is synthesized)
gtcggcttcctgggctctggggccgctgctttcttcaccgccgttcccatccttggttaccctcggcagctgccaggctcccagcgctacgcggtcatgagagcggcggaaatgcaccag

SEQ ID NO: 122024 - DNA, 120 bp, Artificial Sequence
  ENSG00000101187_10 (sequence is synthesized)
ttgaaggacagcagccgtggggaggcgagcaacccggactttgggaaaaccatcagagacctgcctctctccatctggctcctgctgaagaaccccacgttcatcctgctctgcctggcc

SEQ ID NO: 122025 - DNA, 120 bp, Artificial Sequence
  ENSG00000101187_11 (sequence is synthesized)
gtgcctcagaagctgccaccttgtttgggtacctggtggtgccagcgggtggtggcggcaccttcctgggcggcttctttgtgaacaagctcaggctccggggctccgcggtcatcaagt

SEQ ID NO: 122026 - DNA, 120 bp, Artificial Sequence
  ENSG00000101187_12 (sequence is synthesized)
tctgcctgttctgcaccgttgtcagcctgctgggcatcctcgtcttctcactgcactgccccagtgtgcccatggcgggcgtcacagccagctacggcgggagcctcctgcccgaaggcc

SEQ ID NO: 122027 - DNA, 120 bp, Artificial Sequence
  ENSG00000101187_13 (sequence is synthesized)
acctgaacctaacggctccctgcaacgctgcctgcagctgccagccagaacactacagccctgtgtgcggctcggacggcctcatgtacttctcactgtgccacgcagggtgccctgcag

SEQ ID NO: 122028 - DNA, 120 bp, Artificial Sequence
  ENSG00000101187_14 (sequence is synthesized)
ccacggagacgaatgtggacggccagaaggtgtaccgagactgtagctgtatccctcagaatctttcctctggttttggccatgccactgcagggaaatgcacttcaacttgtcagagaa

SEQ ID NO: 122029 - DNA, 120 bp, Artificial Sequence
  ENSG00000101187_15 (sequence is synthesized)
agcccctccttctggttttcatattcgttgtaattttctttacattcctcagcagcattcctgcactaacggcaactctacgatgtgtccgtgaccctcagagatcctttgccctgggaa

SEQ ID NO: 122030 - DNA, 120 bp, Artificial Sequence
  ENSG00000101187_16 (sequence is synthesized)
tccagtggattgtagttagaatactagggggcatcccggggcccatcgccttcggctgggtgatcgacaaggcctgtctgctgtggcaggaccagtgtggccagcagggctcctgcttgg

SEQ ID NO: 122031 - DNA, 120 bp, Artificial Sequence
  ENSG00000101187_17 (sequence is synthesized)
tgtaccagaattcggccatgagccgctacatactcatcatggggctcctgtacaaggtgctgggcgtcctcttctttgccatagcctgcttcttatacaagcccctgtcggagtcttcag

SEQ ID NO: 122032 - DNA, 120 bp, Artificial Sequence
  ENSG00000101187_18 (sequence is synthesized)
atggcctggaaacttgtctgcccagccagtcctcagcccctgacagtgccacagatagccagctccagagcagcgtctgaccaccgcccgcgcccacccggccacggcgggcactcagca

SEQ ID NO: 122033 - DNA, 120 bp, Artificial Sequence
  ENSG00000101187_19 (sequence is synthesized)
tttcctgatgacagaacagtgccgttgggtgatgcaatcacacgggaacttctatttgacctgcaaccttctacttaacctgtggtttaaagtcggctgtgacctcctgtccccagagct

SEQ ID NO: 122034 - DNA, 120 bp, Artificial Sequence
  ENSG00000101187_20 (sequence is synthesized)
gtacggccctgcagtgggtgggaggaacttgcataaatatatatttatggacacacagtttgcatcagaacgtgtttatagaatgtgttttatacccgatcgtgtgtggtgtgcgtgagg

SEQ ID NO: 122035 - DNA, 120 bp, Artificial Sequence
  ENSG00000101187_21 (sequence is synthesized)
acaaactccgcaggggctgtgaatcccactgggagggcggtgggcctgcagcctgaggaaggcttgtgtgtcctcagttaaaactgtgcatatcgaaatatattttgttatttaagcctg

SEQ ID NO: 122036 - DNA, 120 bp, Artificial Sequence
  ENSG00000101187_22 (sequence is synthesized)
ctttctgacaacgtcttccagagcaggctttctctagagggtggactgcctgtgttctcctgggagagaatgcatttgcttccgatgcccagggcacgaaagaggtggacgaaacaacgg

SEQ ID NO: 122037 - DNA, 120 bp, Artificial Sequence
  ENSG00000101187_23 (sequence is synthesized)
aagtggagggggtggattctctacctgggaaacccagcatggcacactcatatagaattaagatcttataataagtgtgcagatgcgcccgttctaaggaaataaagggttctgccctcc

SEQ ID NO: 122038 - DNA, 120 bp, Artificial Sequence
  ENSG00000101187_24 (sequence is synthesized)
gaactagggaaaggggctgtgcatcaggcggacggtgctggggggcatgggtgtgccttccttgcgtgaggaggaaaaaccattctatcaccagaaggcagtgcccagtggtgccctgca

SEQ ID NO: 122039 - DNA, 120 bp, Artificial Sequence
  ENSG00000101187_25 (sequence is synthesized)
tggaaaatgcagtttttgtgggagatggaactggagggtacggagggctgactgcacatacaaatatacatacatgagtgtacatatgttcttatataaacgtgtcacagtaaaattgtt

SEQ ID NO: 122040 - DNA, 120 bp, Artificial Sequence
  ENSG00000101187_26 (sequence is synthesized)
tgtattaaataggaaattccagaagcaaacagttcataacctttaaagcacgcgccgttctgcacagtctggtgagatcttgatctgtcctgcccaggactcggattctccctttgtcca

SEQ ID NO: 122041 - DNA, 120 bp, Artificial Sequence
  ENSG00000101187_27 (sequence is synthesized)
actttggaagaaggcaaggtcagaacttattctgcagggagctttggggatattggatactaaggcccaagccctctgtgatacgcctttcgctttggcataaaataacggttgactctc

SEQ ID NO: 122042 - DNA, 120 bp, Artificial Sequence
  ENSG00000101187_28 (sequence is synthesized)
gtggagccgctgcctaccgcccctgtcctcccctggaccctgggaaggggcccccgtgccttccccttgtaatcggagctattgttgggcttcccaggtgtaccgagactgtagctgtat

SEQ ID NO: 122043 - DNA, 120 bp, Artificial Sequence
  ENSG00000101187_29 (sequence is synthesized)
cagcattcctgcactaacggcaactctacggtaagctggggtcgggtgtgcgcttgtccagagctttccttgcagcaccctgaggcggagctctgcagatcctgagacaggagcactcca

SEQ ID NO: 122044 - DNA, 120 bp, Artificial Sequence
  ENSG00000101187_30 (sequence is synthesized)
ggaaacacccaggtctaagcgggcctgtctgtcactggtggcaggagagacctcactgtctctgatctctgacgaggggcttcccacttgggggggggtgatgatgtggctggggactgg

SEQ ID NO: 122045 - DNA, 120 bp, Artificial Sequence
  ENSG00000101187_31 (sequence is synthesized)
tccaggaggccactggcctagggggtgacttggcatgcaaccccacttctgtgggtgctgacgctgtggttttctattgcagatgtgtccgtgaccctcagagatcctttgccctgggaa

SEQ ID NO: 122046 - DNA, 120 bp, Artificial Sequence
  ENSG00000101187_32 (sequence is synthesized)
actacagccctgtgtgcggctcggacggcctcatgtacttctcactgtgccacgcagggtgccctgcagccacggagacgaatgtggacggccagaagatgtgtccgtgaccctcagaga

SEQ ID NO: 122047 - DNA, 120 bp, Artificial Sequence
  ENSG00000101188_0 (sequence is synthesized)
acaagctcgccccgcgcagcccgagccgggctgggcgctgtcctcgggggcctggggaaccgcgcggtttggagatcggaggcacctggaacccgtggcaagcgccgagccgggagacag

SEQ ID NO: 122048 - DNA, 120 bp, Artificial Sequence
  ENSG00000101188_1 (sequence is synthesized)
cccgaggaaccacgggttctggagctaggagccggaagctgggagtccggaggagagcggagcccggagcccggagcccggggcggcgcgtctgggtctggcgcttcccgactggacggc

SEQ ID NO: 122049 - DNA, 120 bp, Artificial Sequence
  ENSG00000101188_2 (sequence is synthesized)
gcgcccgctggtcttcgccacgcgccctcccctgggctcccgttcatcggtccccgcctgagacgcgcccactcctgcccggacttccagccccggaggcgccggacagagccgcggact

SEQ ID NO: 122050 - DNA, 120 bp, Artificial Sequence
  ENSG00000101188_3 (sequence is synthesized)
caccatgcgcctcaacagctccgcgccgggaaccccgggcacgccggccgccgaccccttccagcgggcgcaggccggactggaggaggcgctgctggccccgggcttcggcaacgcttc

SEQ ID NO: 122051 - DNA, 120 bp, Artificial Sequence
  ENSG00000101188_4 (sequence is synthesized)
aacgcttcgggcaacgcgtcggagcgcgtcctggcggcacccagcagcgagctggacgtgaacaccgacatctactccaaggtgctggtgaccgccgtgtacctggcgctcttcgtggtg

SEQ ID NO: 122052 - DNA, 120 bp, Artificial Sequence
  ENSG00000101188_5 (sequence is synthesized)
ggcacggtgggcaacacggtgacggcgttcacgctggcgcggaagaagtcgctgcagagcctgcagagcacggtgcattaccacctgggcagcctggcgctgtccgacctgctcaccctg

SEQ ID NO: 122053 - DNA, 120 bp, Artificial Sequence
  ENSG00000101188_6 (sequence is synthesized)
ctgctggccatgcccgtggagctgtacaacttcatctgggtgcaccacccctgggccttcggcgacgccggctgccgcggctactacttcctgcgcgacgcctgcacctacgccacggcc

SEQ ID NO: 122054 - DNA, 120 bp, Artificial Sequence
  ENSG00000101188_7 (sequence is synthesized)
ctcaacgtggccagcctgagtgtggagcgctacctggccatctgccaccccttcaaggccaagaccctcatgtcccgaagccgcaccaagaagttcatcagcgccatctggctcgcctcg

SEQ ID NO: 122055 - DNA, 120 bp, Artificial Sequence
  ENSG00000101188_8 (sequence is synthesized)
gccctgctggcggtgcctatgctgttcaccatgggcgagcagaaccgcagcgccgacggccagcacgccggcggcctggtgtgcacccccaccatccacactgccaccgtcaaggtcgtc

SEQ ID NO: 122056 - DNA, 120 bp, Artificial Sequence
  ENSG00000101188_9 (sequence is synthesized)
atacaggtcaacaccttcatgtccttcatattccccatggtggtcatctcggtcctgaacaccatcatcgccaacaagctgaccgtcatggtacgccaggcggccgagcagggccaagtg

SEQ ID NO: 122057 - DNA, 120 bp, Artificial Sequence
  ENSG00000101188_10 (sequence is synthesized)
tgcacggtcgggggcgagcacagcacattcagcatggccatcgagcctggcagggtccaggccctgcggcacggcgtgcgcgtcctacgtgcagtggtcatcgcctttgtggtctgctgg

SEQ ID NO: 122058 - DNA, 120 bp, Artificial Sequence
  ENSG00000101188_11 (sequence is synthesized)
ctgccctaccacgtgcggcgcctcatgttctgctacatctcggatgagcagtggactccgttcctctatgacttctaccactacttctacatggtgaccaacgcactcttctacgtcagc

SEQ ID NO: 122059 - DNA, 120 bp, Artificial Sequence
  ENSG00000101188_12 (sequence is synthesized)
tccaccatcaaccccatcctgtacaacctcgtctctgccaacttccgccacatcttcctggccacactggcctgcctctgcccggtgtggcggcgcaggaggaagaggccagccttctcg

SEQ ID NO: 122060 - DNA, 120 bp, Artificial Sequence
  ENSG00000101188_13 (sequence is synthesized)
aggaaggccgacagcgtgtccagcaaccacaccctctccagcaatgccacccgcgagacgctgtactaggctgtgcgccccggaacgtgtccaggaggagcctggccatgggtccttgcc

SEQ ID NO: 122061 - DNA, 120 bp, Artificial Sequence
  ENSG00000101188_14 (sequence is synthesized)
cccgacagacagagcagcccccacccgggagccttgatgggggtcaggcagaggccagcctgcactggagtctgaggcctgggacccccccctcccaccccctaacccatgtttctcatt

SEQ ID NO: 122062 - DNA, 120 bp, Artificial Sequence
  ENSG00000101188_15 (sequence is synthesized)
agtgtctcccgggcctgtccccaactcctccccacccctcccccatctcctctttgaaagccagaacaagagagcgctcctctcccagataggaaaagggcctctaacaaggagaaatta

SEQ ID NO: 122063 - DNA, 120 bp, Artificial Sequence
  ENSG00000101188_16 (sequence is synthesized)
gtgtgcggcaaaaggcagttttctttgttctcagactaatggatggttccagagaaggaaatgaaaggtgctgggtggggccgggcctccggcggcccggctgctgttcccatgtccaca

SEQ ID NO: 122064 - DNA, 120 bp, Artificial Sequence
  ENSG00000101188_17 (sequence is synthesized)
gcaggctccgtggctttgggcctcacgtgcagaccctgccatgcagacccatgcccccctcccccaggcagctccaagaaagctccctgactcgccccttcaggcctggcaagctggggg

SEQ ID NO: 122065 - DNA, 120 bp, Artificial Sequence
  ENSG00000101188_18 (sequence is synthesized)
cccatcgccgtggggagtccctcccaccaccctcgccgcaggcagctgcagcccccagaggggaccacaagcccaaaaaggacaaaaatgggctggcctggaatggcccagaccccagcc

SEQ ID NO: 122066 - DNA, 120 bp, Artificial Sequence
  ENSG00000101188_19 (sequence is synthesized)
tcccctcctccctcccatcctcacccaggccaaggcccaggggctctgccaggacaccacatgggagggggctcaggcctcagcctcaagatcttcagctgtggcctctcgggctcggca

SEQ ID NO: 122067 - DNA, 120 bp, Artificial Sequence
  ENSG00000101188_20 (sequence is synthesized)
gaagggacgccggatcaggggcctggtctccagcacctgcccgagtggccgtggccaggatggggtgcgcattccgtgtgctttgcttgtggctgtgcaggctgaggtctggagccaggc

SEQ ID NO: 122068 - DNA, 120 bp, Artificial Sequence
  ENSG00000101188_21 (sequence is synthesized)
ccagagctggcttcagggtggggccttgagaaggggaatgtgggacaggggcgatggtgcctggtctctgagtaagatgccaggtcccaggaactcaggcttcaggtgagaaggagcggt

SEQ ID NO: 122069 - DNA, 120 bp, Artificial Sequence
  ENSG00000101188_22 (sequence is synthesized)
gtgtccaggcaccgctggccggcagccctgggctgaggcacagactcatttgtcaccttctggcggcggcagccctggccccggcctccaagcagttgaaaaagctggcgcctccttggt

SEQ ID NO: 122070 - DNA, 120 bp, Artificial Sequence
  ENSG00000101188_23 (sequence is synthesized)
ctctaggatccaggctccacagagcacatgactagccaggcccctggcttaagaaggtcgcctaagcctaagagaagacagtcccaggagaagctggccgggaccagccaggagctggga

SEQ ID NO: 122071 - DNA, 120 bp, Artificial Sequence
  ENSG00000101188_24 (sequence is synthesized)
gccacaggaagcaaaagtcagccttttcttcaagggatttccctgtctcagagcagcctttgccccagggaaatgggctctgggctggctgcctgcaccggccatgtcgacccaggaccc

SEQ ID NO: 122072 - DNA, 120 bp, Artificial Sequence
  ENSG00000101188_25 (sequence is synthesized)
ggacacctggtcttgggctgtgttcagccactttgccttctctggactcagtttccccgtctgagaaatgagagtcgaatgctacagtatctgcagtcgcttggatctggctgttgagtt

SEQ ID NO: 122073 - DNA, 120 bp, Artificial Sequence
  ENSG00000101188_26 (sequence is synthesized)
gacgggttccttgaaccccacaaaatccctctccaaccacaggacccttcggctcaccaagaacagggcccaggggagtcaggcctattcgctgcacttcctgccaaactttgcccccac

SEQ ID NO: 122074 - DNA, 120 bp, Artificial Sequence
  ENSG00000101188_27 (sequence is synthesized)
aagcctggtcatcagccaggcagccctcccagtgcccaagggccaccaaccccagggaaacagggccagcacagaggggccttcctcccccacagagcccccatgacatagtctgctctg

SEQ ID NO: 122075 - DNA, 120 bp, Artificial Sequence
  ENSG00000101188_28 (sequence is synthesized)
ggcggaagagctttgctgccagccagggatgtccagaggtcagtgcagcccctacccctgctcaggagtgggctcagagtctagcaaatgctaaggcccctcaggctgggctctgaacga

SEQ ID NO: 122076 - DNA, 120 bp, Artificial Sequence
  ENSG00000101188_29 (sequence is synthesized)
ggacctggactcagagccagacagggcagcctcagacccttctctggggctcctggaccttgggccataatttctgagcctcggtttccccatctaaggaacagatgtggtcgttccgcc

SEQ ID NO: 122077 - DNA, 120 bp, Artificial Sequence
  ENSG00000101188_30 (sequence is synthesized)
ctctcagctggatgagactgtcctggaggatccaccccggaacagacagaatggtgtctctcaggatggtgctctgagagagggcagagtggatgccccactgccctagaccctcggtag

SEQ ID NO: 122078 - DNA, 120 bp, Artificial Sequence
  ENSG00000101188_31 (sequence is synthesized)
acgtggggtctctggggcggggtctgtggctgtgactgaagtcggcttttcccgttgatgtcttgatgctcctatctgtgcacttaccgtaggtagggacacgtgtccacgcaccacaga

SEQ ID NO: 122079 - DNA, 120 bp, Artificial Sequence
  ENSG00000101188_32 (sequence is synthesized)
cacacccacgacacctgatctcgtatcactagcttgcggccaggtcatgatgtggccccggaagctggccctgcgtgccatgagtgcgtcggtcatggagtccggagcccctgagccggc

SEQ ID NO: 122080 - DNA, 120 bp, Artificial Sequence
  ENSG00000101188_33 (sequence is synthesized)
ccctggtgacggcacagccctcacagctcaaacgcccacccccactcccaccatctgcaggtggtgaaaacaaaccccgtgtatctctcaataaaggtggccgaagggcctcgatgtgga

SEQ ID NO: 122081 - DNA, 120 bp, Artificial Sequence
  ENSG00000101188_34 (sequence is synthesized)
acggagctctcagggctggcgaagcccacagcagggcaacgcccatcctatcggaaccctgaggaccagccccagctcaggacggctggcttgccaacatccaaggtgcagtggtcatcg

SEQ ID NO: 122082 - DNA, 80 bp, Artificial Sequence
  ENSG00000101189_0 (sequence is synthesized)
aggtgggcggcgggggcgccgcaggcgacaagggcccgggggaggcggccaccagcccggcggaggagacagtggtgtgg

SEQ ID NO: 122083 - DNA, 120 bp, Artificial Sequence
  ENSG00000101189_1 (sequence is synthesized)
ccggcggaggagacagtggtgtggagccccgaggtggaggtgtgcctcttccacgccatgctgggccacaagcccgtcggtgtgaaccgacacttccacatgatttgtattcgggacaag

SEQ ID NO: 122084 - DNA, 120 bp, Artificial Sequence
  ENSG00000101189_2 (sequence is synthesized)
ttcagccagaacatcgggcggcaggtcccatccaaggtcatctgggaccatctgagcaccatgtacgacatgcaggcgctgcatgagtctgagattcttccattcccgaatccagagagg

SEQ ID NO: 122085 - DNA, 120 bp, Artificial Sequence
  ENSG00000101189_3 (sequence is synthesized)
aacttcgtccttccagaagagatcattcaggaggtccgagaaggaaaagtgatgatagaagaggagatgaaagaggagatgaaggaagacgtggacccccacaatggggctgacgatgtt

SEQ ID NO: 122086 - DNA, 120 bp, Artificial Sequence
  ENSG00000101189_4 (sequence is synthesized)
ttttcatcttcagggagtttggggaaagcatcagaaaaatccagcaaagacaaagagaagaactcctcagacttggggtgcaaagaaggcgcagacaagcggaagcgcagccgggtcacc

SEQ ID NO: 122087 - DNA, 120 bp, Artificial Sequence
  ENSG00000101189_5 (sequence is synthesized)
gacaaagtcctgaccgcaaacagcaacccttccagtcccagtgctgccaagcggcgccgcacgtagaccctcagccctggtggcggcagagaagcgggcgaggcactgtggtcgctgagg

SEQ ID NO: 122088 - DNA, 120 bp, Artificial Sequence
  ENSG00000101189_6 (sequence is synthesized)
gggttggctgggtctgagtgccaccccccaggccacagtgataccatcccagtgccatgagcccacactgcccgccctcaggctctcaggtgaacgtggccgtcagcggggaaacgtgtg

SEQ ID NO: 122089 - DNA, 120 bp, Artificial Sequence
  ENSG00000101189_7 (sequence is synthesized)
tgtcagttggaccatgtgggaccctgatggacctgaaagaccaggatcggtccagctcagatattgagggctctgaagcctagttctgtcttctctggagcagctgtggcttccccgtgg

SEQ ID NO: 122090 - DNA, 120 bp, Artificial Sequence
  ENSG00000101189_8 (sequence is synthesized)
ctgcttggtgacatggattagcgctacgtgggctgcagcatttgggatccaggctacctagaggggcatcgggccagggaaaacctcggattagcaagcaataaaaacatgacctcactc

SEQ ID NO: 122091 - DNA, 120 bp, Artificial Sequence
  ENSG00000101189_9 (sequence is synthesized)
ttcctcaaaggagcccctggtcttccctgtgtgactcagttctttccatctgtttgtcccgctgcaagcctctttctgcgctgactgtgacattggaacgtggccttcctgtcaccccct

SEQ ID NO: 122092 - DNA, 120 bp, Artificial Sequence
  ENSG00000101189_10 (sequence is synthesized)
ccgtgccacgcactgaaggccacccccacccacctgggaaactaagaactggatattttgcctcattcacttgtactgtaacaatgtatataatttggttggtatttcactatttaattt

SEQ ID NO: 122093 - DNA, 120 bp, Artificial Sequence
  ENSG00000101189_11 (sequence is synthesized)
ttatatgccagatacagagaatttgtagcggttatttttgtatgatctagtaacttgcaaacagaccaaatggatgagaggcggggaccgtgcagctgtcggctgatgaggaggcggccg

SEQ ID NO: 122094 - DNA, 120 bp, Artificial Sequence
  ENSG00000101189_12 (sequence is synthesized)
ccccagtgctgatggagatgccactttcgtgtgactgcgaacattaaagcacaaaaaaatccaacctggagttgtgtgattttgataccaaagtaagttcacttttcctccaaaaggaag

SEQ ID NO: 122095 - DNA, 120 bp, Artificial Sequence
  ENSG00000101189_13 (sequence is synthesized)
tttttatttttccaagatttataactaaagcatacacttagatgacttattaacattcacttgatacaacatataaacaaaatagtaacagattctgagtggttattttgtggactgtga

SEQ ID NO: 122096 - DNA, 120 bp, Artificial Sequence
  ENSG00000101189_14 (sequence is synthesized)
caagcacttcaaatacaaaatgttaggagggcaaaacggtgcgggccctcgtaggtcaggcaggcaccagtgggctccttcctgctgaaagctgcggctgtgagatgagaccgctggctg

SEQ ID NO: 122097 - DNA, 120 bp, Artificial Sequence
  ENSG00000101189_15 (sequence is synthesized)
ggtcacagagtgaaatccagcgttccgtgtgcggacgaggagacaagctgtcctggccagccatcgcaccccaatgtcttcagcttgacgttgcttctctgccagtggagcctcctccac

SEQ ID NO: 122098 - DNA, 120 bp, Artificial Sequence
  ENSG00000101189_16 (sequence is synthesized)
cacctgggaacatccctggccatctgtccctgaagtcctcctcaccatgacgcagatcacaaggcacccactaaaggggcaaagccaggaatcccgtgccatgtgatcgccccgtgtggc

SEQ ID NO: 122099 - DNA, 120 bp, Artificial Sequence
  ENSG00000101189_17 (sequence is synthesized)
acctgccactcgtctgcaccaaacgcactgccagttctggggaagaacagcccagggaagctgctggtctacggcctgcctgagctgtattccaagggtagagcagctgcctggggggac

SEQ ID NO: 122100 - DNA, 120 bp, Artificial Sequence
  ENSG00000101189_18 (sequence is synthesized)
cctgtgggtcccttttctatagagccgggacaaatccacagccctgcagtaacagcctgccacaaagagcaggcatctggagggccccacacacatagaccaaaggactgagcccgcctg

SEQ ID NO: 122101 - DNA, 120 bp, Artificial Sequence
  ENSG00000101189_19 (sequence is synthesized)
gcattcctccactcacagcacaaatactcagccctgcagccagggaagggtggggtctccctttgctgcccaagtgtgcccccttgcccgtctgatctctcctgttaggtcagcctcatt

SEQ ID NO: 122102 - DNA, 120 bp, Artificial Sequence
  ENSG00000101189_20 (sequence is synthesized)
cagggctttgtgccaggtcctgtcctggagtctcagtccgggacagcagcctggctcttaggcagtccagaagcagcagggcaaaggggggcaaatactaacacggggtgtcacgggatg

SEQ ID NO: 122103 - DNA, 120 bp, Artificial Sequence
  ENSG00000101189_21 (sequence is synthesized)
gccaggaggagtcctgctcgccacccaggctcactgtcctaaacctccatctgaaaccgcatctcgggtgacctcagattgtgctaggaaagcctagttaataaatctgcctcatctcga

SEQ ID NO: 122104 - DNA, 80 bp, Artificial Sequence
  ENSG00000101190_0 (sequence is synthesized)
actcagcggttttccctcccccaacggcgcgccggctgtggccggcgcagagtagtgctcgggccgggggtcgcctcccg

SEQ ID NO: 122105 - DNA, 120 bp, Artificial Sequence
  ENSG00000101190_1 (sequence is synthesized)
cggcgctgggcgagccggggctgagcttcacgaccaccgacctgagcctggtggagatgacggaggtggagtacacgcagctgcagcacatcctctgctcgcacatggaggcggcggctg

SEQ ID NO: 122106 - DNA, 120 bp, Artificial Sequence
  ENSG00000101190_2 (sequence is synthesized)
ctgcagcacatcctctgctcgcacatggaggcggcggctgacggcgagctcgagacgcgcctcaactcggcgctgctggcggcggcgggcccgggcgcaggcgcgggcggcttcgcggcg

SEQ ID NO: 122107 - DNA, 120 bp, Artificial Sequence
  ENSG00000101190_3 (sequence is synthesized)
gcccgtccgcgctggcggccgacgcgccctgcctgggccacatcgacttccaggagctgcgcatgatgctgctaagcgaggcgggcgcggcggagaagacgtcgggcggcggggacggag

SEQ ID NO: 122108 - DNA, 80 bp, Artificial Sequence
  ENSG00000101190_4 (sequence is synthesized)
cggctgcggctggacccgacggcgcgcccgaggcccgggccaagccggccgtgcgcgtccgcctggaggaccgcttcaac

SEQ ID NO: 122109 - DNA, 120 bp, Artificial Sequence
  ENSG00000101190_5 (sequence is synthesized)
gcttcaacagcatccccgccgagccgccgcccgcgccgcgcggccccgagccccccgagccgggcggggcgctcaacaatttggtaactctcattcgacatccatctgaactaatgaatg

SEQ ID NO: 122110 - DNA, 120 bp, Artificial Sequence
  ENSG00000101190_6 (sequence is synthesized)
ttcctcttcagcaacaaaacaaatgtacagcattagtgaaaaataaaactgcggctacaactactgctttgcaatttacatacccactgtttactacaaatgcttgctctactagtggaa

SEQ ID NO: 122111 - DNA, 120 bp, Artificial Sequence
  ENSG00000101190_7 (sequence is synthesized)
attctaatctttcacagacacagagttctagtaactcatgttctgtacttgaagctgccaagcaccaggatattggattgcctagagcattttctttctgttatcagcaagaaattgaat

SEQ ID NO: 122112 - DNA, 120 bp, Artificial Sequence
  ENSG00000101190_8 (sequence is synthesized)
ccactaaacagacgttaggtagtagaaacaaagttttgcctgagcaagtttggattaaagtgggagaagcagcgctatgcaaacaagcactgaagaggaatcggagtagaatgcgtcagt

SEQ ID NO: 122113 - DNA, 120 bp, Artificial Sequence
  ENSG00000101190_9 (sequence is synthesized)
acctgggggagcaggcccagagtgggccccagggaggaaggtctcaacgtagggagaggcataaccgaatggaaagagatagaaggcgcagaatccgcatttgctgtgatgagttgaatc

SEQ ID NO: 122114 - DNA, 120 bp, Artificial Sequence
  ENSG00000101190_10 (sequence is synthesized)
tcttagtgccgttctgcaatgccgagactgacaaggccacaactctgcagtggaccacagcattcctgaaatacatccaggaaagacatggagattctcttaaaaaggaatttgagagcg

SEQ ID NO: 122115 - DNA, 120 bp, Artificial Sequence
  ENSG00000101190_11 (sequence is synthesized)
tattttgcggtaaaactggccgaaggctaaagctgaccagaccggactccttggtgacctgtcctgcacaggggagtttacagagcagcccctcgatggagatcaagtgatcggactgaa

SEQ ID NO: 122116 - DNA, 120 bp, Artificial Sequence
  ENSG00000101190_12 (sequence is synthesized)
caggaatcctcggggggtgaacagccattccttcgtgacctgtgcacgccttctgcaaccctggagctctgctcggctagtctgactcgaaaagggcgtgactcaagctgacgggactcc

SEQ ID NO: 122117 - DNA, 120 bp, Artificial Sequence
  ENSG00000101190_13 (sequence is synthesized)
agtagggactttgagagcacattttgtaaaaatatttatctagacgcaaatgcttatccatgaatgtcctcttagaccatttggggatgaagccatcttaataattagtaataattaatt

SEQ ID NO: 122118 - DNA, 120 bp, Artificial Sequence
  ENSG00000101190_14 (sequence is synthesized)
agtaataattagtaagcattttctcaatgctctgattccatcatgttttcttaacatgataacttaaaaaattgacatcctttgtactttctttaatcttaaaaagtacacggcttttta

SEQ ID NO: 122119 - DNA, 120 bp, Artificial Sequence
  ENSG00000101190_15 (sequence is synthesized)
cttatttaccttttaaatatgcccctttagcaattggaacaagttaaattgttaactaaaaacagtttggaaattttatttcattcgttatatcacacccccttgtcatgactctgagtc

SEQ ID NO: 122120 - DNA, 120 bp, Artificial Sequence
  ENSG00000101190_16 (sequence is synthesized)
acgtgctgctgtattgcaacgtgcaggaccattttaaacctgtgtgctaaaaattttccagatacttgctttaaagctacttttgtccacaaatgaaatactgtcacagtagacgcttaa

SEQ ID NO: 122121 - DNA, 120 bp, Artificial Sequence
  ENSG00000101190_17 (sequence is synthesized)
atgccacgttttcataccaagagtcattcattacttcatgtgtcacaaactgtggtgtttggaattgggtttttcaatgagtggctttacttatcaatcacaacaggtaatagcaataga

SEQ ID NO: 122122 - DNA, 120 bp, Artificial Sequence
  ENSG00000101190_18 (sequence is synthesized)
cgttagtgcaatacaaagtcaccctcaataaatactgttaattggagatgtgagtttgtacacaaaacatcagactagacctttgtatgggagagaatttactgtacattaaattcttta

SEQ ID NO: 122123 - DNA, 120 bp, Artificial Sequence
  ENSG00000101190_19 (sequence is synthesized)
ttttttgttactctgtagccagtcattaatctgaaggtttaatatatcattttattgggatgagatcatagtctttacacaaatgctatgtaaacaagttactgaatatttttcacctcg

SEQ ID NO: 122124 - DNA, 120 bp, Artificial Sequence
  ENSG00000101190_20 (sequence is synthesized)
atacgtcatgttatggacttgcttcctgaagatgaaatcagcagttgatggaaagaatccacaacacgcctacagaacagcaaatcacaaatggctgtgtctccacgaagccaggagctt

SEQ ID NO: 122125 - DNA, 120 bp, Artificial Sequence
  ENSG00000101190_21 (sequence is synthesized)
tgcatttgaagtttctatctgggctcatttccagctgttcagggttcggattcctgaaggcttccttagcatttaactcattctttgttgactgaaggcactggcactgtttctccacac

SEQ ID NO: 122126 - DNA, 120 bp, Artificial Sequence
  ENSG00000101190_22 (sequence is synthesized)
gcaaactgatctttgtcataaatcacttttataatgagagagcagcctggacacattgccacaccttccccattctccagctcttccttggtgatggagaagttatctccgcatgggcag

SEQ ID NO: 122127 - DNA, 120 bp, Artificial Sequence
  ENSG00000101190_23 (sequence is synthesized)
ggacagaaatatgtctccgagtcctcgtcatattggaagtcctcgatttccacctcgtcatgaaatactgccatggtcagcgggggttgctgaaggggtgacgccccagcagtccgagac

SEQ ID NO: 122128 - DNA, 120 bp, Artificial Sequence
  ENSG00000101190_24 (sequence is synthesized)
cagctccgagggtctaacttctccggagccggcccaggctctgactttcatttaattgtcctgaaaggtgaattctatcttgccaaataggcaagtgttttttatatgtaggctttaggt

SEQ ID NO: 122129 - DNA, 120 bp, Artificial Sequence
  ENSG00000101190_25 (sequence is synthesized)
ctttaggtgtcagaatataggaaattatcaaaatgtggggtcattttaaattgcatcctaaaaccttttaaaatttgggaagaagctgggcgtcgtagctcacgcctgtaatcccagcac

SEQ ID NO: 122130 - DNA, 120 bp, Artificial Sequence
  ENSG00000101191_0 (sequence is synthesized)
ctcggtggccgtccgcccactccgcggcgttcggggaaatggctgcgagaccctagaggcctgcggagcttactccacgggaacagcctctagataatctgagttgttgaaaatacgaag

SEQ ID NO: 122131 - DNA, 120 bp, Artificial Sequence
  ENSG00000101191_1 (sequence is synthesized)
cctgttactcgtgaacagtggctgacaacagtgttgttgtgagcctggctgtctgcttggacccagaggtttcgtctgccagggtttttggttgtatttaggatttcagggaaaagtgtc

SEQ ID NO: 122132 - DNA, 120 bp, Artificial Sequence
  ENSG00000101191_2 (sequence is synthesized)
caagctttcagtgttggagcaggtatggacgacaaaggcgacccgagcaatgaggaggcacctaaggccatcaaacccaccagcaaagagttcaggaaaacatggggttttcgaaggacc

SEQ ID NO: 122133 - DNA, 120 bp, Artificial Sequence
  ENSG00000101191_3 (sequence is synthesized)
actatcgccaagcgagagggcgcaggggacgcggaggctgacccactggagccgccacccccacagcagcagctgggcctgtccctgcggcgcagtgggaggcagcccaagcgcactgag

SEQ ID NO: 122134 - DNA, 120 bp, Artificial Sequence
  ENSG00000101191_4 (sequence is synthesized)
cgcgtggagcagttcctgaccattgcgcggcgccgcggcaggaggagcatgcctgtctccctggaggattctggtgagcccacgtcctgccccgccacagacgccgagacagcctccgag

SEQ ID NO: 122135 - DNA, 120 bp, Artificial Sequence
  ENSG00000101191_5 (sequence is synthesized)
ggcagcgtggaaagcgcttctgagaccagaagcggcccccagtctgcttccacagctgtgaaggaacgaccagcctcttctgaaaaggtgaaaggaggggatgaccacgatgacacctcc

SEQ ID NO: 122136 - DNA, 120 bp, Artificial Sequence
  ENSG00000101191_6 (sequence is synthesized)
gatagtgacagcgatggcctgaccttgaaagagcttcagaatcgccttcgcaggaagcgggaacaggagcccactgagaggcccctgaaagggatccagagtcgcctgcggaagaagcgc

SEQ ID NO: 122137 - DNA, 120 bp, Artificial Sequence
  ENSG00000101191_7 (sequence is synthesized)
cgggaggagggtcccgccgagactgtgggctccgaggccagtgacactgtggagggcgtcctgcccagtaagcaggagcccgagaacgatcagggggttgtgtcccaggctgggaaagat

SEQ ID NO: 122138 - DNA, 120 bp, Artificial Sequence
  ENSG00000101191_8 (sequence is synthesized)
gacagagagagtaagttggagggaaaggcggctcaggacatcaaagatgaggagcctggagacttgggccgaccgaagcctgaatgtgagggttacgaccccaacgccctgtattgcatt

SEQ ID NO: 122139 - DNA, 120 bp, Artificial Sequence
  ENSG00000101191_9 (sequence is synthesized)
tgccgccagcctcacaacaacaggtttatgatttgctgtgaccgctgtgaagaatggtttcatggcgattgtgtgggcatttctgaggctcgagggaggcttttggaaaggaatggggaa

SEQ ID NO: 122140 - DNA, 120 bp, Artificial Sequence
  ENSG00000101191_10 (sequence is synthesized)
gactatatctgcccaaactgcaccattctgcaagtgcaggatgagactcattcagaaacggcagatcagcaggaagctaaatggagacctggagatgctgatggcaccgattgtacaagt

SEQ ID NO: 122141 - DNA, 120 bp, Artificial Sequence
  ENSG00000101191_11 (sequence is synthesized)
ataggaacaatagagcagaagtctagcgaagaccaagggataaagggtagaattgagaaagctgcaaatccaagtggcaagaagaaactcaagatcttccagcctgtgatagaggcgcct

SEQ ID NO: 122142 - DNA, 120 bp, Artificial Sequence
  ENSG00000101191_12 (sequence is synthesized)
ggtgcctcaaaatgtattggccccgggtgctgtcacgtggcgcagcccgactcggtgtactgcagtaatgactgtatcctcaaacacgccgcagcgacaatgaagtttctaagctcaggt

SEQ ID NO: 122143 - DNA, 120 bp, Artificial Sequence
  ENSG00000101191_13 (sequence is synthesized)
aaagaacagaagccaaagcctaaagaaaagatgaagatgaagccagagaagcccagtcttccgaaatgcggtgctcaggcaggtattaaaatctcttctgtgcacaagagaccagctcca

SEQ ID NO: 122144 - DNA, 120 bp, Artificial Sequence
  ENSG00000101191_14 (sequence is synthesized)
gaaaaaaaagagaccacagtgaagaaggcagtggtggtccctgcgcggagtgaagcactcgggaaggaagcagcttgtgagagcagcacgccgtcgtgggcgagcgatcacaattacaat

SEQ ID NO: 122145 - DNA, 120 bp, Artificial Sequence
  ENSG00000101191_15 (sequence is synthesized)
gcagtaaagccagaaaagactgctgctccctcgccgtcactgttgtataaatccacgaaggaagacaggaggtccgaggagaaagcggcagccatggcagcctcaaagaaaacagcccct

SEQ ID NO: 122146 - DNA, 120 bp, Artificial Sequence
  ENSG00000101191_16 (sequence is synthesized)
ccaggctccgcggtgggcaagcagcctgcacctagaaacctcgtgccaaagaagtcttcttttgctaatgtggcagcagccacaccagccattaaaaagccaccctcaggtttcaagggc

SEQ ID NO: 122147 - DNA, 120 bp, Artificial Sequence
  ENSG00000101191_17 (sequence is synthesized)
accatccccaagaggccatggctctccgctaccccatcgagtggtgcttcagctgccaggcaggccggaccggcacctgcagcggcaacggctgcctccaagaagttccctggctccgct

SEQ ID NO: 122148 - DNA, 120 bp, Artificial Sequence
  ENSG00000101191_18 (sequence is synthesized)
gctttggtgggagccgtaaggaagccagtggtaccttctgttccaatggcctcgccagccccaggacgccttggggctatgagtgctgcaccatcgcagccaaattcacaaattcggcaa

SEQ ID NO: 122149 - DNA, 120 bp, Artificial Sequence
  ENSG00000101191_19 (sequence is synthesized)
aatatcagacgctccttaaaagagattttgtggaaaagagtcaatgacagcgatgacttaatcatgacagaaaacgaagtaggaaaaattgccctccatattgagaaggagatgtttaac

SEQ ID NO: 122150 - DNA, 120 bp, Artificial Sequence
  ENSG00000101191_20 (sequence is synthesized)
ttgtttcaagttacagataatcgctacaagagtaaatatcgcagcatcatgttcaacctgaaggaccctaaaaatcagggactcttccatcgtgttctgcgtgaggaaatctctttggcg

SEQ ID NO: 122151 - DNA, 120 bp, Artificial Sequence
  ENSG00000101191_21 (sequence is synthesized)
aaacttgtgagactgaagccagaagaacttgtatctaaagagctttccacgtggaaagagaggccagcgagatctgtgatggagtccagaactaaactgcacaatgaaagcaagaagacg

SEQ ID NO: 122152 - DNA, 120 bp, Artificial Sequence
  ENSG00000101191_22 (sequence is synthesized)
gcccccaggcaggaggccatccccgatctggaggactctccgccagtgtcggattcagaggaacagcaagagtcagcacgtgctgtccctgagaagagcacagcgccgcttctcgacgtc

SEQ ID NO: 122153 - DNA, 120 bp, Artificial Sequence
  ENSG00000101191_23 (sequence is synthesized)
ttcagcagcatgttgaaagacaccaccagtcagcaccgcgcacacctcttcgatctcaactgtaaaatttgcacaggccaggttccctccgcagaagatgagccagctccgaaaaaacaa

SEQ ID NO: 122154 - DNA, 120 bp, Artificial Sequence
  ENSG00000101191_24 (sequence is synthesized)
aaattgtcagcttctgttaagaaagaagacttaaaatcaaagcatgacagctctgcacctgacccagctccggattcagctgatgaggtgatgccggaggctgtgcctgaagttgcctct

SEQ ID NO: 122155 - DNA, 120 bp, Artificial Sequence
  ENSG00000101191_25 (sequence is synthesized)
gagccaggcctagaaagtgcttctcatccaaatgtggacagaacgtatttccctgggcctccaggagatggccatcccgagccctccccgctggaagacctgtccccctgcccagcctcc

SEQ ID NO: 122156 - DNA, 120 bp, Artificial Sequence
  ENSG00000101191_26 (sequence is synthesized)
tgtgggagcggggtggtcaccaccgtcacagtgtccggccgggaccccaggaccgctccaagcagttcatgcacagccgtggcctccgcagcatcccgcccagacagcacccacatggtg

SEQ ID NO: 122157 - DNA, 120 bp, Artificial Sequence
  ENSG00000101191_27 (sequence is synthesized)
gaagccagacaggatgtgccgaagcctgtcttgacttctgtgatggtgcccaagtccatactagctaagccatcctcatctcctgacccaagatacctgtcagttcctccgtcaccaaat

SEQ ID NO: 122158 - DNA, 120 bp, Artificial Sequence
  ENSG00000101191_28 (sequence is synthesized)
atcagcacttcagaatcacgttcccctccagagggagacacgaccctctttttgtctcgactcagcaccatttggaaaggatttattaacatgcagagtgtggcaaaatttgtcactaag

SEQ ID NO: 122159 - DNA, 120 bp, Artificial Sequence
  ENSG00000101191_29 (sequence is synthesized)
gcgtatcctgtctctgggtgttttgattacctcagtgaggatttgcctgacacaattcacattggtgggaggatcgcaccgaagacagtttgggattatgttggcaaactcaagtcttct

SEQ ID NO: 122160 - DNA, 120 bp, Artificial Sequence
  ENSG00000101191_30 (sequence is synthesized)
gtgtctaaggagctctgtctgatccgcttccaccccgccacagaggaagaggaggtcgcctatatctctctctactcctatttcagcagccgtggccgctttggtgttgtagctaataac

SEQ ID NO: 122161 - DNA, 120 bp, Artificial Sequence
  ENSG00000101191_31 (sequence is synthesized)
tgaggcccacctgcacctgcacccctcctcccactgacatgccctgctgagtcctgaccagcccagggctctctgggagcaggagttaggagcacagacgcagcggttagcaataggatt

SEQ ID NO: 122162 - DNA, 120 bp, Artificial Sequence
  ENSG00000101191_32 (sequence is synthesized)
catctttgagggcgtaggactgtggcacgagaagtacccctgattcacagcataaattgtcttaggagagttttttagagagggaaaaacccacagcctgcaaccagctcatcttggcct

SEQ ID NO: 122163 - DNA, 120 bp, Artificial Sequence
  ENSG00000101191_33 (sequence is synthesized)
caggtcagagaagactcagtgcccagaagcccaaggctcagccagaaagggaggtgacactcccagcggccctgctctttcctctagacagactcgggagccagcacacaccgggaagtg

SEQ ID NO: 122164 - DNA, 120 bp, Artificial Sequence
  ENSG00000101191_34 (sequence is synthesized)
gctccatcagggatcacttctctaacagggatggatttccaggagacttaacaataatgacatagaaaactatttctagaaataattattttaaaatctgcagctcaaattgtaataggt

SEQ ID NO: 122165 - DNA, 120 bp, Artificial Sequence
  ENSG00000101191_35 (sequence is synthesized)
tcattcatctttggcaagctattttgtgtttgcacgttccttggaaagtactgtatttaaacgattatttacaaatagcctaaaatacatctttgtcaagggttgagggtgattccaggg

SEQ ID NO: 122166 - DNA, 120 bp, Artificial Sequence
  ENSG00000101191_36 (sequence is synthesized)
gccacgtgctctgttagtgaccagctctttcatagccccttagaagaagctgatgtgacttcagttaggggttagtatctgatgcccaactgaagtgtctccgtggccatgcagtcccca

SEQ ID NO: 122167 - DNA, 120 bp, Artificial Sequence
  ENSG00000101191_37 (sequence is synthesized)
gaggattggtgttctctcaaagcgggtgtgtggatcacacagtgtcctctgaagtgcttcgtcataaaggcaggtgctgtctggaccctgtgcctcagtgccctctgtccctgtcaccag

SEQ ID NO: 122168 - DNA, 120 bp, Artificial Sequence
  ENSG00000101191_38 (sequence is synthesized)
gcctcggcgggtgttcctgccatagctgtgcagggtgttcccacccacacccctcatgccgcaccctagctagctggggtcctgtaggggccactccacatcttgggcgggacttctgtc

SEQ ID NO: 122169 - DNA, 120 bp, Artificial Sequence
  ENSG00000101191_39 (sequence is synthesized)
gccccaggcacagcccacgttcctactggagcccattcttcacagctggagtgggctcagcctatgcctgtgttgtggaattatatgtccataaagggattggttggtatcagtaatttc

SEQ ID NO: 122170 - DNA, 120 bp, Artificial Sequence
  ENSG00000101191_40 (sequence is synthesized)
agggttaaatatttgctggcgtggtgcattaaattattttagtgccagataaatttttaaaagcaaagtgctttagtgtgtcccctcaaatcctacttgggataaagagatgccacctaa

SEQ ID NO: 122171 - DNA, 120 bp, Artificial Sequence
  ENSG00000101191_41 (sequence is synthesized)
tgggtggcagaaaggaccctggtagaggttcttggtgttgcttgtgaagagctctggccagctccacgtgaccagggagaggaaaagcccggccctcctggaggtgaagaccgagaagct

SEQ ID NO: 122172 - DNA, 120 bp, Artificial Sequence
  ENSG00000101191_42 (sequence is synthesized)
ggcctctccgcacctgtgaagacccactggtcagttgcaagtgcgacagtgtgtgcactcagtgcagacactgcagcacctcagcacctccctaccggggtggaaagagcactttttctt

SEQ ID NO: 122173 - DNA, 120 bp, Artificial Sequence
  ENSG00000101191_43 (sequence is synthesized)
tacagaaacatgattcttagatagcgagcctcccctttttaaaacaattgaggcgatatttcatcctttcttgagcttctctccctgctcatctccaaacttggagctgtcaggtgagca

SEQ ID NO: 122174 - DNA, 120 bp, Artificial Sequence
  ENSG00000101191_44 (sequence is synthesized)
cggttgtagggtgttgagcgagccccggcgcatgccgggcaccgggttccccacactgggcagtgacggggcccagggaggccaccagaggagcggcgcctccattctccccacagcaag

SEQ ID NO: 122175 - DNA, 120 bp, Artificial Sequence
  ENSG00000101191_45 (sequence is synthesized)
ggctggctgtgcaggtgcagccccggggcagagggaaaggacaggtctcccagcacctcccggatggcaccgggacaaggagggctgggctggggtcactcaccttgtctgctgagtgcg

SEQ ID NO: 122176 - DNA, 120 bp, Artificial Sequence
  ENSG00000101191_46 (sequence is synthesized)
atggcaccaaccacccacactgtcagctccgcgaccagctgggggaacgtcacactcgcccaccaaggcacttgctgaggccacgacgccgcctgacggggacacacaaaagccccaggg

SEQ ID NO: 122177 - DNA, 120 bp, Artificial Sequence
  ENSG00000101191_47 (sequence is synthesized)
actttgatccacgataaagagcagaggcgtctgggtaaagtaacacagggcaagggactttagaaaagtaacagctagtgaaacctttccatacacttcagaaatgttttaacttaagac

SEQ ID NO: 122178 - DNA, 120 bp, Artificial Sequence
  ENSG00000101191_48 (sequence is synthesized)
ttcagtataatgttaacttctcctgatgtccttgttgacatgaatgcgtgtgcgtgaaatctcacacacttccatggtcactaaacagccttcaccccgggccaggccatcgggtactcg

SEQ ID NO: 122179 - DNA, 120 bp, Artificial Sequence
  ENSG00000101191_49 (sequence is synthesized)
gcccgcttcacgtactgattacttgacttggcgttttctagatataaacatgtacatgtgtgtcctggctttgtggtgtaaatgtgtagtgcgtgtgcatgtgcgcgcgtgtgtgtgtgt

SEQ ID NO: 122180 - DNA, 120 bp, Artificial Sequence
  ENSG00000101191_50 (sequence is synthesized)
aaggctaggtcctggcatgtttcccctgtctcagcggaccctgtcctcacggagatagcccagaagcccttggacagcacaggccacacctgagggtgctgatggtggtgactccacaga

SEQ ID NO: 122181 - DNA, 120 bp, Artificial Sequence
  ENSG00000101191_51 (sequence is synthesized)
gctgtggtcaggggtgagcgtgtgctgcgcagcttggagtcacgcccccagaagtgctgggtgagggtctgcaggacccagctccattccacagcctcagttctctgcggcacatgcagc

SEQ ID NO: 122182 - DNA, 120 bp, Artificial Sequence
  ENSG00000101191_52 (sequence is synthesized)
acaggcctgaaggagacctggcgccccagccttgagctgcccgtctgcatcagggcactgatgtgggagcatcttcccctggggatgttaaggagaaggtcctgttgggggtagagattc

SEQ ID NO: 122183 - DNA, 120 bp, Artificial Sequence
  ENSG00000101191_53 (sequence is synthesized)
acgcagaaaagagtgactgactcgtccatgtgcctcagtttataccacacaattgcaggtgtccatgcctcccacacatggggacctagtgggttttgacagcgtggtgtccagtcctag

SEQ ID NO: 122184 - DNA, 120 bp, Artificial Sequence
  ENSG00000101191_54 (sequence is synthesized)
ccccctcagtgcttgctgttcacacttaagcaagtgaaggcctgaaggtgcccagctgtgccctcaggggaaacttaagtcacccgccctgtcagcacttggcccttgtcgggcagtgag

SEQ ID NO: 122185 - DNA, 120 bp, Artificial Sequence
  ENSG00000101191_55 (sequence is synthesized)
agtggagctgcccccgcagcaccctcaggagccatgcagttcacagcagtagctggatctccctgaggacatttgtccttgcatatcttaatgatttgtccacagaaacaccgggttgtc

SEQ ID NO: 122186 - DNA, 120 bp, Artificial Sequence
  ENSG00000101191_56 (sequence is synthesized)
ttcctctgcccctctgccccgcagtgggggcactctctgtaactcagcatcacggtggggggcagctgggaggcctggttccaggtgaccttctccacctagatgttcaccccactcagt

SEQ ID NO: 122187 - DNA, 120 bp, Artificial Sequence
  ENSG00000101191_57 (sequence is synthesized)
tccagctttaccaacagggccccccgcagggacttggggtcgcagagtcccggcctgtctcagggccttgttcatggaagggagatgagtcaggttgaaagctcatcgtgtagggttctg

SEQ ID NO: 122188 - DNA, 120 bp, Artificial Sequence
  ENSG00000101191_58 (sequence is synthesized)
tgcagggcccttacaggactggaccgcagccaagatgcctgcctgttaaccatgcccagcccccgtcatttccgcgtgaagccgcaggcctcggagccttggtctgaaatgcctgtggag

SEQ ID NO: 122189 - DNA, 120 bp, Artificial Sequence
  ENSG00000101191_59 (sequence is synthesized)
taacctcggtccataaacatgggtgcacagtctgttctccccaagtacagggcaggaggaaacaccgccctctgtagctgctcgaatggaaagggctcttttctctgaggtctttataca

SEQ ID NO: 122190 - DNA, 120 bp, Artificial Sequence
  ENSG00000101191_60 (sequence is synthesized)
ttagaaagctcttctgggaagaatgtttgaatccatagtgtctttctgtattcacttttaattgctttctaaattagctgagaaattctgacttgaaatattgtcaggtaagcatttctt

SEQ ID NO: 122191 - DNA, 120 bp, Artificial Sequence
  ENSG00000101191_61 (sequence is synthesized)
cagttttcatgtgtgtatgtaacagtagctttgcatggaaattgtaatcagagtcaaatacagtattgaatggaatgtactgccttctcctcctaaatcaataaacatctttcatggaaa

SEQ ID NO: 122192 - DNA, 120 bp, Artificial Sequence
  ENSG00000101191_62 (sequence is synthesized)
gtacttgcgcagaactcccctcgcggcgaccacgcactacgggttggcgccagagtcaaaaggcgtcggccctctggcaagatggctgctgcggaggcgttggagcgcggaaatctggaa

SEQ ID NO: 122193 - DNA, 120 bp, Artificial Sequence
  ENSG00000101191_63 (sequence is synthesized)
tcccgctgagcgcccaggaccctgttccatccaaactcttgccctttgagggaccaggtcttgagtcaccacgtccgaatataattcttgggttagtaatctgccaaaaaatcaaacgtc

SEQ ID NO: 122194 - DNA, 120 bp, Artificial Sequence
  ENSG00000101191_64 (sequence is synthesized)
ccgcaaacagtggagagttagacaagatggacgaaaagcggacccgacttcaaccggaagaagcggacgttccggcctatccaaaagtagccacagtcccgcagtcggaaaagaagccct

SEQ ID NO: 122195 - DNA, 120 bp, Artificial Sequence
  ENSG00000101191_65 (sequence is synthesized)
ccaagtatccactctgctctgcagacgcggctgtcagcaccacacctcctgggtcgccgccgcctccgccccctcttccagaaccaccggtgctaaaagtgctgtcatccctcaaacctg

SEQ ID NO: 122196 - DNA, 120 bp, Artificial Sequence
  ENSG00000101191_66 (sequence is synthesized)
cttcctccaccgcttcgtctgcttccaaaacagcatcaccgctggagcacatcctgcagactctctttggaaagaagaaatcattcgacccgtccgccagagagcctcccgggtccaccg

SEQ ID NO: 122197 - DNA, 120 bp, Artificial Sequence
  ENSG00000101191_67 (sequence is synthesized)
caggtctcccccaggagcccaaaaccacagcagaggacggggtgccggcacctccgttgttagatccgatcgtccagcagttcggtcagttctcaaaagataaggctctagaggaagagg

SEQ ID NO: 122198 - DNA, 120 bp, Artificial Sequence
  ENSG00000101191_68 (sequence is synthesized)
aggacgacaggccatacgaccctgaggaggagtacgacccggagagggccttcgacactcagcttgtggagcgagggcggcgccacgaggtggaaagggctcctgaagcagctgcagccg

SEQ ID NO: 122199 - DNA, 120 bp, Artificial Sequence
  ENSG00000101191_69 (sequence is synthesized)
agcgggaagaggtggcctatgaccccgaggatgagaccatcttagaagaagcgaaagtgactgttgatgacctgcccaacaggatgtgtgccgacgtgagaaggaactccgtggagaggc

SEQ ID NO: 122200 - DNA, 120 bp, Artificial Sequence
  ENSG00000101191_70 (sequence is synthesized)
ctgccgagccggtggccggggctgcgacgccctccctggtggagcaacagaagatgctagaagagctgaacaaacagatcgaggagcagaagagacagctggaggagcaagaagaagctc

SEQ ID NO: 122201 - DNA, 120 bp, Artificial Sequence
  ENSG00000101191_71 (sequence is synthesized)
tcaggcagcagagggccgccgtcggggtctccatggcccacttctcggtgtcggacgccttgatgtctccaccaccaaagtcgtccttgcccaaggcagagctgttccagcaagagcagc

SEQ ID NO: 122202 - DNA, 120 bp, Artificial Sequence
  ENSG00000101191_72 (sequence is synthesized)
agtctgcagacaagcccgcctcactgccccccgccagccaggcgtcaaaccacagggacccccggcaggcgaggcgcctggccactgagaccggtgagggggagggggagcctctctcca

SEQ ID NO: 122203 - DNA, 120 bp, Artificial Sequence
  ENSG00000101191_73 (sequence is synthesized)
ggctctcggcacgtggtgcccagggtgccctgcccgagagagatgcttccaggggtggcctcgtgggccaggcgcccatgccagtcccggaggaaaaagagccagcctcttccccctggg

SEQ ID NO: 122204 - DNA, 120 bp, Artificial Sequence
  ENSG00000101191_74 (sequence is synthesized)
cttcgggcgaaaagcccccagcggggtccgagcaggacggctggaaggcagagcctggggagggcacccgccccgccacggttggagacagctcggccaggcctgcccggagggtgctgc

SEQ ID NO: 122205 - DNA, 120 bp, Artificial Sequence
  ENSG00000101191_75 (sequence is synthesized)
tgcccacaccgccttgcggcgccctgcagcccggcttcccgctgcagcacgacggtgagagggaccctttcacctgcccggggttcgcgtcgcaggacaaggctctcggctcagcccagt

SEQ ID NO: 122206 - DNA, 120 bp, Artificial Sequence
  ENSG00000101191_76 (sequence is synthesized)
atgaggacccaagaaatcttcattctgctggaaggagcagcagccctgcaggtgaaacagagggggacagagagccacaggccagacccggcgagggcaccgccccgctccccccaccag

SEQ ID NO: 122207 - DNA, 120 bp, Artificial Sequence
  ENSG00000101191_77 (sequence is synthesized)
gacagaaagtggggggctctcagcccccgtttcagggtcagcgggaacctggacctcatgctttggggatgtcagggcttcacggccccaatttcccgggaccaagggggccagcccctc

SEQ ID NO: 122208 - DNA, 120 bp, Artificial Sequence
  ENSG00000101191_78 (sequence is synthesized)
cgtttccagaagagaatatcgcttctaacgatgggccacgagggcctccgccagccagattcggagcccagaaggggcccatcccttccttattctcggggcaacatgggccacctcctt

SEQ ID NO: 122209 - DNA, 120 bp, Artificial Sequence
  ENSG00000101191_79 (sequence is synthesized)
atggggacagcagaggcccctcaccctcttaccttggtggaccacgaggagtggcaccatcccaatttgaagaacgcaaggatccccatggggagaagagggagttccaggacgccccgt

SEQ ID NO: 122210 - DNA, 120 bp, Artificial Sequence
  ENSG00000101191_80 (sequence is synthesized)
ataacgaggtgacgggcgcccccgcccagtttgaagggacagagcaagccccatttctgggaagcagaggcggcgcgcctttccagttcggaggccagagaaggccactgctgtctcagc

SEQ ID NO: 122211 - DNA, 120 bp, Artificial Sequence
  ENSG00000101191_81 (sequence is synthesized)
tgaaaggcccccgaggcggcccccctccctctcagtttggaggtcagagaggaccaccccctggtcatttcgtgggcccaagagggccccatcctagtcagtttgaaactgcccggggcc

SEQ ID NO: 122212 - DNA, 120 bp, Artificial Sequence
  ENSG00000101191_82 (sequence is synthesized)
ctcatcccaaccagtttgaaggacccagaggccaagcgcctaactttatgccaggtcccaggggcattcagcctcagcagttcgaagaccagagggtccattcaccaccaagattcacaa

SEQ ID NO: 122213 - DNA, 120 bp, Artificial Sequence
  ENSG00000101191_83 (sequence is synthesized)
accaaagggcgcctgcacccctgcagtttggtggactacgggggtccgcacccttttctgaaaaaaatgagcagaccccttcgcgatttcacttccagggccaggccccgcaggtgatga

SEQ ID NO: 122214 - DNA, 120 bp, Artificial Sequence
  ENSG00000101191_84 (sequence is synthesized)
atgaagccgggccccaggcccctgctggagcttcccagccaccccccgcagcaccggaaggaccgctgggaggaggccgggccgccctccgcgctctcctccagtgcgcccggacagggc

SEQ ID NO: 122215 - DNA, 120 bp, Artificial Sequence
  ENSG00000101191_85 (sequence is synthesized)
aggccgacggacagtgggcatcggccgacttccgagaggggaaaggccacgaatacagaaaccagactttcgaagggaggcagagagagcggtttgacgtggggcccaaagagaagccgc

SEQ ID NO: 122216 - DNA, 120 bp, Artificial Sequence
  ENSG00000101191_86 (sequence is synthesized)
tggaggagcccgacgcccagggccgggcgtccgaggacaggaggagagagcgcgagcgcggccgaaactggagccgagagcgggactgggaccggccccgggagtgggaccgacaccggg

SEQ ID NO: 122217 - DNA, 120 bp, Artificial Sequence
  ENSG00000101191_87 (sequence is synthesized)
acaaggactccagccgggactgggacagaaaccgggagaggagcgccaaccgcgaccgagagcgcgaggccgaccggggcaaggagtgggaccgcagccgggagcggagcaggaaccgag

SEQ ID NO: 122218 - DNA, 120 bp, Artificial Sequence
  ENSG00000101191_88 (sequence is synthesized)
agcgcgagcgagaccggaggcgcgaccgggaccggtcccggagcagagagcgggaccgagacaaggccagggacagggagcggggccgcgaccgcaaggaccggagcaagagcaaagaga

SEQ ID NO: 122219 - DNA, 120 bp, Artificial Sequence
  ENSG00000101191_89 (sequence is synthesized)
gcgctcgggacccgaagcccgaggcctcgagggcctccgacgctggcaccgcctcgcaggcctagacgccccggccgggcagagaccctttttaaagccacgttcgtaagatgcgttgaa

SEQ ID NO: 122220 - DNA, 120 bp, Artificial Sequence
  ENSG00000101191_90 (sequence is synthesized)
caaatagcttttgaaatagccacgatcttagattcaggatagaatattctggacttaaacattactgtaattttgtgtaaatggtttcttacaagatttcacatctttacaattctgatg

SEQ ID NO: 122221 - DNA, 120 bp, Artificial Sequence
  ENSG00000101191_91 (sequence is synthesized)
cttttttaaaaaaactaaactttaatatttccatttaaaattaaaagaaatgggaaattgcctacggagcatattgcttttcagatcatagttatcttttccaataactttattgtaaat

SEQ ID NO: 122222 - DNA, 120 bp, Artificial Sequence
  ENSG00000101191_92 (sequence is synthesized)
tttaagggagtttcgttggaccctagagccataccttcactgacatctcatccgtttgtgtttccaaaagctgcttttacaggtcttagccgccgccccggaggccggtgtgggcgtgac

SEQ ID NO: 122223 - DNA, 120 bp, Artificial Sequence
  ENSG00000101191_93 (sequence is synthesized)
ctgcaggcgtccaccctgcggctacgggagaagtcttagtagcttgtatctggagtcttgagaaacacaaaccttacaaatgcatctttcttttgtcataaaattggaattacaattttc

SEQ ID NO: 122224 - DNA, 120 bp, Artificial Sequence
  ENSG00000101191_94 (sequence is synthesized)
aactgggaaacagaaacacatttcttagcgtgctcagattttatatatcaccttatcaattttttccaaaacatgatttaaagcaacatctgtcctagtataattgttgcattttaaata

SEQ ID NO: 122225 - DNA, 120 bp, Artificial Sequence
  ENSG00000101191_95 (sequence is synthesized)
acaatttattgaaaaatgttaagttttaccagcctaaaaaaagtaacaaaccaattaagtgtactttgggggcagggaggagtccttgatttgaataatcaggagttttgttggtccagt

SEQ ID NO: 122226 - DNA, 120 bp, Artificial Sequence
  ENSG00000101191_96 (sequence is synthesized)
ttcgccttctgagcagttcttctgtatcccgggaaaagtacgctcggccccaaactggtatttgtcagacgatacatgtaaaagtttgtccttgaacgtggaacaagacttgtgtaaagt

SEQ ID NO: 122227 - DNA, 120 bp, Artificial Sequence
  ENSG00000101191_97 (sequence is synthesized)
ctgagacgggaactagtgatcactagctcaagaactgcaaatgagacaggaagctgttcactgtgaaacagtctcttgcttgtcgtgtatttttcgagtacttctgaagtgtgaagtaaa

SEQ ID NO: 122228 - DNA, 120 bp, Artificial Sequence
  ENSG00000101191_98 (sequence is synthesized)
aaaatctggctaatttatttgtacaaatacactttgataattttttatattttcataaacttttacagatgtaaaattaaagaacttcacttgttctttggagtctgttattccattgta

SEQ ID NO: 122229 - DNA, 120 bp, Artificial Sequence
  ENSG00000101191_99 (sequence is synthesized)
cgtcactacagatttttcactttatagcacagattttttaagttaagaaaacattgagaatgtatcagtttgagatgtttggtgttgaaagccaagtgtccataggttaaattacattaa

SEQ ID NO: 122230 - DNA, 120 bp, Artificial Sequence
  ENSG00000101191_100 (sequence is synthesized)
agtaggtgtcacgttccaacatctagtacgatgagaaggttttgtttgtttaacatataaagcaaatttttctaatttaaatacacaaatgtaaaaatcaagtgtgtttctttagtttac

SEQ ID NO: 122231 - DNA, 120 bp, Artificial Sequence
  ENSG00000101191_101 (sequence is synthesized)
ttgatagagattcctgtacattgtattttatattgcggaggcttatatcactgtacatgagaacatggaacgacctaggttttgttactcgcagtagaataaacagctacaggaagtttc

SEQ ID NO: 122232 - DNA, 120 bp, Artificial Sequence
  ENSG00000101191_102 (sequence is synthesized)
ctttctggatagccatcccctgggcctgtccaggactgggagttgcagctttgtgttaagctgatcacagacaccggctgcaccatcagcgggaagcagagcccatgtccaggatgcctc

SEQ ID NO: 122233 - DNA, 120 bp, Artificial Sequence
  ENSG00000101191_103 (sequence is synthesized)
ctgctgccctgtgtccatccctagtctgtcaggacttcctgtcactgttttccaaagctgtaaacctcactggtgaacgttcaccttaatgattgattctttaatctctgttttcactct

SEQ ID NO: 122234 - DNA, 120 bp, Artificial Sequence
  ENSG00000101191_104 (sequence is synthesized)
caggctctggtaagtattcgtattctcttcatcccagtctgattgcatagccacactgcccggcacgccacatccacccctgtctgcacatgagttgttctgacaacagcgctgtatacg

SEQ ID NO: 122235 - DNA, 120 bp, Artificial Sequence
  ENSG00000101191_105 (sequence is synthesized)
cttcagtttttccacattgtccacggccagcacatgaaagcatcacttcttttttatgttgtgggaatctttgcaagttagtgttgcatctgattttcaggtgtacatttatttttgact

SEQ ID NO: 122236 - DNA, 120 bp, Artificial Sequence
  ENSG00000101191_106 (sequence is synthesized)
gggcagataggggatttttttttttccatgtccgattcacacgctacacacccacatgaacacattcgaacttcgaaggccacacactcctgcttcataggccccacggtaagtgagttc

SEQ ID NO: 122237 - DNA, 120 bp, Artificial Sequence
  ENSG00000101191_107 (sequence is synthesized)
acacctagaacactgtcctgaccgcaggacgcgtgccttggacttggtattctacatgtgactggctttcttgccctcgtctcttgaatgtttagactcttaagatcatatcctgcccca

SEQ ID NO: 122238 - DNA, 120 bp, Artificial Sequence
  ENSG00000101191_108 (sequence is synthesized)
aatttcaaattaatgaaatgaagatatttcaaacagatctttgaaacctcagattctgtggtgcaattttaatgttttcttgtttctcagttttctgctataaaactattttcaattcag

SEQ ID NO: 122239 - DNA, 120 bp, Artificial Sequence
  ENSG00000101193_0 (sequence is synthesized)
ctccttctactcgggcgccccggcggccgccacctctccccagcccaggagaggctgcggagccgcagccgcccagaccgcgcagcgcgggaggcaggttccgcacgaaataaatcagaa

SEQ ID NO: 122240 - DNA, 120 bp, Artificial Sequence
  ENSG00000101193_1 (sequence is synthesized)
tgagttatgcagaaaaacccgatgaaatcacgaaagatgagtggatggaaaagctcaataacttgcatgtccagagagcagacatgaaccgcctcatcatgaactacctggtcacagagg

SEQ ID NO: 122241 - DNA, 120 bp, Artificial Sequence
  ENSG00000101193_2 (sequence is synthesized)
gctttaaggaagcagcggagaagtttcgaatggaatctggaatcgaacctagtgtggatctggaaacacttgatgaacgaatcaagatccgggagatgatactgaaaggtcagattcagg

SEQ ID NO: 122242 - DNA, 120 bp, Artificial Sequence
  ENSG00000101193_3 (sequence is synthesized)
aggccatcgccttgatcaacagcctccacccagagctcttggacacaaaccggtatctttacttccatttgcagcaacagcatttgatcgagctgatccgccagcgggagacagaggcgg

SEQ ID NO: 122243 - DNA, 120 bp, Artificial Sequence
  ENSG00000101193_4 (sequence is synthesized)
cgctggagtttgcacagactcagctggcggagcagggcgaggagagccgagagtgcctcacagagatggagcgtaccctggcactgctggcctttgacagtcccgaggagtcgcccttcg

SEQ ID NO: 122244 - DNA, 120 bp, Artificial Sequence
  ENSG00000101193_5 (sequence is synthesized)
gagacctcctccacaccatgcagaggcagaaggtgtggagtgaagttaaccaagctgtgctagattatgaaaatcgcgagtcaacacccaaactggcaaaattactgaaactactacttt

SEQ ID NO: 122245 - DNA, 120 bp, Artificial Sequence
  ENSG00000101193_6 (sequence is synthesized)
gggctcagaacgagctggaccagaagaaagtaaaatatcccaaaatgacagacctcagcaagggtgtgattgaggagcccaagtagcgcctgcgcttgcgtggtggatccaacaccagcc

SEQ ID NO: 122246 - DNA, 120 bp, Artificial Sequence
  ENSG00000101193_7 (sequence is synthesized)
ctgcgtcgtgggacttgcctcagatcagcctgcgactgcaagattcttactgcagtagagaactctttttctcccttgtacttttttttgacctggcatctttttatagggaaaaatggc

SEQ ID NO: 122247 - DNA, 120 bp, Artificial Sequence
  ENSG00000101193_8 (sequence is synthesized)
ctttgtaggcagtggaaaacttgcaaggaaagctgccgtctctttggcagtctgatgcagagcctgcactctggcactcgctgaagaatctggaaggttgcggtttgctcttccagtgtt

SEQ ID NO: 122248 - DNA, 120 bp, Artificial Sequence
  ENSG00000101193_9 (sequence is synthesized)
cgggggcctctggctgctgaaggattcggtctaccacggagggctgtgctgttaggctgcatcccactcaaaatacaggaaaagcacgaatcatgattctgctttctgttagcttaggca

SEQ ID NO: 122249 - DNA, 120 bp, Artificial Sequence
  ENSG00000101193_10 (sequence is synthesized)
ggtttttgtgtttttttttttttctttttccataggaaagaatatataaatttgtaaatcctaattcaaagatggctcatgtgtgagggcattgagtttgatttgttttccctttggtct

SEQ ID NO: 122250 - DNA, 120 bp, Artificial Sequence
  ENSG00000101193_11 (sequence is synthesized)
gtgtgagggcattgagtttgatttgttttccctttggtctgggttgtgtggcttttgggggatgcgtgtgagggggctatgtgttttttaattttttaaatatatattttggtgctgtgt

SEQ ID NO: 122251 - DNA, 120 bp, Artificial Sequence
  ENSG00000101193_12 (sequence is synthesized)
gtggtaagagacttgttcctagtggatcaatgaaccatctcttctgggcagttttgttgaaaataaaggtttctctttgatttcaagaatgaccaaaatggcctctaaaagatgttaatc

SEQ ID NO: 122252 - DNA, 120 bp, Artificial Sequence
  ENSG00000101193_13 (sequence is synthesized)
atctcaaatgaccttttgtctttggggcgttcttccccctgtgatagcggcagtggctttttctggtacctgcagctggaaaggccacttggccctgtgctgagtgagcggccttcatta

SEQ ID NO: 122253 - DNA, 120 bp, Artificial Sequence
  ENSG00000101193_14 (sequence is synthesized)
gagcgaggcagcccttggccggtggggacgcagagccccagcaggtggtgcacgactgttggcggaaggaacgcgtgttcatcctcagtgatctgccctccagcatctcggcagcatctc

SEQ ID NO: 122254 - DNA, 120 bp, Artificial Sequence
  ENSG00000101193_15 (sequence is synthesized)
atcctccatcgtcagctggctctgccgatgtcctgcttctgttcactcacagaactgtcccctgctccgtggtgggcaggagggaagtggtgcagggctgcgtgcattgcctgcgagtcg

SEQ ID NO: 122255 - DNA, 120 bp, Artificial Sequence
  ENSG00000101193_16 (sequence is synthesized)
ggacagttgatgggcacatggccttgtagctctgggcacagatgtgtttggattcattgcagcggaccaccgggcactgttgaccccactgagcagtgctaagtgttggtttagtggatg

SEQ ID NO: 122256 - DNA, 120 bp, Artificial Sequence
  ENSG00000101193_17 (sequence is synthesized)
ttcgtggaattgctgacccatccaagggcgtcctttggagccagtggagcctgccggcgcatctgaggggcagaatgctgctagcacttgaatctgggatctcgccttattctcaagtag

SEQ ID NO: 122257 - DNA, 120 bp, Artificial Sequence
  ENSG00000101193_18 (sequence is synthesized)
acctgagccggtcgggtcatctgcctctgagggaccgtcctcaccgagctcctgcatcccttgagtgttgatcaggaggcgtccacagcattgttctcgcctctgaatgatgcttctttc

SEQ ID NO: 122258 - DNA, 120 bp, Artificial Sequence
  ENSG00000101193_19 (sequence is synthesized)
tgtgttggagcctggcgaagttgtgttttcaagccctctacttctctttccagtgggtaggagcttttggcagtgtttactttacctagatggcttatataatccagtaagagatgcaaa

SEQ ID NO: 122259 - DNA, 120 bp, Artificial Sequence
  ENSG00000101193_20 (sequence is synthesized)
gataaaattgctgcggttgttacagaagcatggcggcctccagactgacccattggttgccctttagattttgtaaggatgcggtgctggggaggtggtgcttccctaccccctagaaat

SEQ ID NO: 122260 - DNA, 120 bp, Artificial Sequence
  ENSG00000101193_21 (sequence is synthesized)
gctgccttccaactaccactctcccagatgtgacccttgcgattatttcctctgaggtttgaggatgaagataagttggagggaaagagagtaactaataggggatgaaatatagcagaa

SEQ ID NO: 122261 - DNA, 120 bp, Artificial Sequence
  ENSG00000101193_22 (sequence is synthesized)
gctagaagaaagcggtgaggtgagagagatgcatctgcacgttttcttcaacagcaccaggtgattcagcatattcctaattacctttcactattcgtgtatataagatcgtttacttgc

SEQ ID NO: 122262 - DNA, 120 bp, Artificial Sequence
  ENSG00000101193_23 (sequence is synthesized)
ataatatatcatcaatttgacatattcttaaaactagagggtgtgagaagcacagcaataggaagtctctccacaaactaggggaacacaaatggggtcattcacgtgcctggactgtca

SEQ ID NO: 122263 - DNA, 120 bp, Artificial Sequence
  ENSG00000101193_24 (sequence is synthesized)
ctatgtggctgtcacgtgaagtgctggtgttgatttccatttcagccagtgggtagctgataagccagtgccagcatccagcatgagcagatgtcggggagactgggaagtctccagcgt

SEQ ID NO: 122264 - DNA, 120 bp, Artificial Sequence
  ENSG00000101193_25 (sequence is synthesized)
tactgctctccttcccttcatgataagccagtgccagcatccagcgtgagcagacgtcggggagactgggaagtctccgatgttactgcctgccttcctttcgtgtgaggggctgcactt

SEQ ID NO: 122265 - DNA, 120 bp, Artificial Sequence
  ENSG00000101193_26 (sequence is synthesized)
gcttttcttgtgatctgttagtggacgaggtcttccaaggaagtgctttgcacactttctttgctcctttttacagtctttgtctttgcagcaagcaaatgaaattaagccactttggga

SEQ ID NO: 122266 - DNA, 120 bp, Artificial Sequence
  ENSG00000101193_27 (sequence is synthesized)
taatgaacattcagtataattctactttgtctcattttggatctcactgttgtctttataaaaatggcacattttacaaagtagtttattcttattatactttctgctggagagtgcctt

SEQ ID NO: 122267 - DNA, 120 bp, Artificial Sequence
  ENSG00000101193_28 (sequence is synthesized)
gaaataaaatgtgagagtattctggtactctgtgttccagatgcatgaaattgggtgaggaataacccctagtctggaatctttgtgaagcatagggttattgcaaggcaaatgggaact

SEQ ID NO: 122268 - DNA, 120 bp, Artificial Sequence
  ENSG00000101193_29 (sequence is synthesized)
aacacatcttgccatttgaatcagggtctccagtttctagaaaaggcagacactggttgggaccaaagtctccatggcacatgactgaagactggtggtcgtgtgtgtgcggagtccacg

SEQ ID NO: 122269 - DNA, 120 bp, Artificial Sequence
  ENSG00000101193_30 (sequence is synthesized)
gaagcctcggggaggtggagctgctccttccattccgtcaggacgtgatctgaaaacatgtagagaagatgagttgaggacagcttttctaaggcaatgtgatgtctttgctttcttatt

SEQ ID NO: 122270 - DNA, 120 bp, Artificial Sequence
  ENSG00000101193_31 (sequence is synthesized)
tctctttctctgcgttgttagttttgaagagtggaggagctaggggctccagaaagaatcttacacatgtgttgaagacattgatgtcatagggagcggggagctgcattcccttctggg

SEQ ID NO: 122271 - DNA, 120 bp, Artificial Sequence
  ENSG00000101193_32 (sequence is synthesized)
ctgttactgctaaatctcagtatgaacagaccaggcggaaagcttggtggccaagcagtctgtgtgcttccccgctgatggagaacgttgcgttgttcacaatagggcctcatgggtgta

SEQ ID NO: 122272 - DNA, 120 bp, Artificial Sequence
  ENSG00000101193_33 (sequence is synthesized)
gccgcatggcagacccatggctggcgcagctgcctgttgccgtctgtcttcagtaactgctgctctgttaactgttctattctgatactacgcgtgttgttttttacaacaggtatgttt

SEQ ID NO: 122273 - DNA, 120 bp, Artificial Sequence
  ENSG00000101193_34 (sequence is synthesized)
ttgtttcagaaatatgtattgcttttctcatattttttgcaaattgtattgtcaacatgggtcatttaaagtcctgtatgaaccataacctgctgtggtacctttgtacatgtttgattc

SEQ ID NO: 122274 - DNA, 120 bp, Artificial Sequence
  ENSG00000101193_35 (sequence is synthesized)
tgtattctttattccagtgtggcatatgtgcccctctgtatcttttgagaagtgcggaataggttgcttctaccacctgttcttaatgtaacagtaaaagttttcacatttttctcagaa

SEQ ID NO: 122275 - DNA, 120 bp, Artificial Sequence
  ENSG00000101193_36 (sequence is synthesized)
ctactcgggcgccccggcggccgccacctctccccagcccaggagaggctgcggagccgcagccgcccagaccgcgcagcgcgggaggcaggttccgcacgaaaccgagcgggtgaggat

SEQ ID NO: 122276 - DNA, 120 bp, Artificial Sequence
  ENSG00000101193_37 (sequence is synthesized)
gagttcttcctgctaacaggactggccagttctacaaagttgttgcttttcatgggcgcacgtaactgcccggagtggaagcgctgtgagtgccgatcaccgaatgggccgagagaaaag

SEQ ID NO: 122277 - DNA, 120 bp, Artificial Sequence
  ENSG00000101194_0 (sequence is synthesized)
agacggaagcgcgctgggactgacacgtggacttgggcggtgctgcccgggtgggtcagcctgggctgggaggcagccccgggacacagctgtgcccacgccgtctgagcaccccaagcc

SEQ ID NO: 122278 - DNA, 120 bp, Artificial Sequence
  ENSG00000101194_1 (sequence is synthesized)
cgatgcagccacccccagacgaggcccgcagggacatggccggggacacccagtggtccaggcccgagtgccaggcatggacggggacgctgctgctgggcacatgccttctgtactgcg

SEQ ID NO: 122279 - DNA, 120 bp, Artificial Sequence
  ENSG00000101194_2 (sequence is synthesized)
cccgctccagcatgcccatctgcaccgtctccatgagccaggacttcggctggaacaagaaggaggccggcatcgtgctcagcagcttcttctggggctactgcctgacacaggttgtgg

SEQ ID NO: 122280 - DNA, 120 bp, Artificial Sequence
  ENSG00000101194_3 (sequence is synthesized)
gcggccacctcggggatcggattgggggtgagaaggtcatcctgctgtcagcctctgcctggggctccatcacggccgtcaccccactgctcgcccacctgagcagtgcccacctggcct

SEQ ID NO: 122281 - DNA, 120 bp, Artificial Sequence
  ENSG00000101194_4 (sequence is synthesized)
tcatgaccttctcacgcatcctcatgggcttgctccaaggggtttacttccctgccctgaccagcctgctgtcgcagaaggtgcgggagagtgagcgagccttcacctacagcatcgtgg

SEQ ID NO: 122282 - DNA, 120 bp, Artificial Sequence
  ENSG00000101194_5 (sequence is synthesized)
gcgccggctcccagtttgggacgctgctgaccggggcggtgggctccctgctcctggaatggtacggctggcagagcatcttctatttctccggcggcctcaccttgctttgggtgtggt

SEQ ID NO: 122283 - DNA, 120 bp, Artificial Sequence
  ENSG00000101194_6 (sequence is synthesized)
acgtgtacaggtacctgctgagtgaaaaagatctcatcctggccttgggtgtcctggcccaaagccggccggtgtccaggcacaacagagtcccctggagacggctcttccggaagcctg

SEQ ID NO: 122284 - DNA, 120 bp, Artificial Sequence
  ENSG00000101194_7 (sequence is synthesized)
ctgtctgggcagccgtcgtctcccagctctctgcagcctgctccttcttcatcctcctctcctggctgcccaccttcttcgaggagaccttccccgacgccaagggctggatcttcaacg

SEQ ID NO: 122285 - DNA, 120 bp, Artificial Sequence
  ENSG00000101194_8 (sequence is synthesized)
tggttccttggttggtggcgattccggccagtctattcagcgggtttctctctgatcatctcatcaatcagggttacagagccatcacggtgcggaagctcatgcagggcatgggccttg

SEQ ID NO: 122286 - DNA, 120 bp, Artificial Sequence
  ENSG00000101194_9 (sequence is synthesized)
gcctctccagcgtctttgctctgtgcctgggccacacctccagcttctgtgagtctgtggtctttgcatcagcctccatcggcctccagaccttcaaccacagtggcatttctgttaaca

SEQ ID NO: 122287 - DNA, 120 bp, Artificial Sequence
  ENSG00000101194_10 (sequence is synthesized)
tccaggacttggccccgtcctgcgccggctttctgtttggtgtggccaacacagccggggccttggcaggtgtcgtgggtgtgtgtctaggcggctacttgatggagaccacgggctcct

SEQ ID NO: 122288 - DNA, 120 bp, Artificial Sequence
  ENSG00000101194_11 (sequence is synthesized)
ggacttgcctgttcaaccttgtggccatcatcagcaacctggggctgtgcaccttcctggtgtttggacaggctcagagggtggacctgagctctacccatgaggacctctagctcccaa

SEQ ID NO: 122289 - DNA, 120 bp, Artificial Sequence
  ENSG00000101194_12 (sequence is synthesized)
ccccacagcctctccaaggacccaggcgccagcagccccaggacacaggggactcagtgtgtgggacttggtcactccatgtcagacacacgagcagagaggaacacaaaccactgtgga

SEQ ID NO: 122290 - DNA, 120 bp, Artificial Sequence
  ENSG00000101194_13 (sequence is synthesized)
gcctgaagctccttaagaagagtccacaacagctggtgggagggtggggtgggcctgggtccagaccaggctcgctgctctctgggcctcagtttccccacctgccagcgggctcggccc

SEQ ID NO: 122291 - DNA, 120 bp, Artificial Sequence
  ENSG00000101194_14 (sequence is synthesized)
ggggttattgttagtaggcgcagcctcattcccaccacgatctgttccgcgtggttcccgccaaacctccctcggtcgccgtgttctccgcaagcctcctgcagcgcccgcctgccaatg

SEQ ID NO: 122292 - DNA, 120 bp, Artificial Sequence
  ENSG00000101194_15 (sequence is synthesized)
tgaggctggcaccaggctgcagcctccccaatcccagcccactttgctgtgtctctggcgggctgtcctccttggtgggagctgtcctgcacactgtaggatgcttaaaggtatccctgg

SEQ ID NO: 122293 - DNA, 120 bp, Artificial Sequence
  ENSG00000101194_16 (sequence is synthesized)
cctccacccacccctagccagcagctcccagtcagacaacagccagaaatgtctccagactctgcccagcctccccaggtagccaccctcgagacacgacctcagagtctctgtgtctcc

SEQ ID NO: 122294 - DNA, 120 bp, Artificial Sequence
  ENSG00000101194_17 (sequence is synthesized)
tagaagcctgacagagacccccagggcagtgggtgggtggcgggctagagacccttgcctgtgtccgggaccctggcgccgctctcccctcctgtggatccctccgcactaacagtgttc

SEQ ID NO: 122295 - DNA, 120 bp, Artificial Sequence
  ENSG00000101194_18 (sequence is synthesized)
tcagtgggcagacgcctgggcaccccttgggccctgcccagcatggccatggcgcaggctctcgaacccgcatggctttcccaggcctggtgattctgctctccagggacggttggcacc

SEQ ID NO: 122296 - DNA, 120 bp, Artificial Sequence
  ENSG00000101194_19 (sequence is synthesized)
ttcctcgggggcgggccccacgcaccccagaacacacagacccacctttctggcgttctttctacctcccttttcgttgcctgaggagctggtggtttcatgagttaatgatacatcttg

SEQ ID NO: 122297 - DNA, 120 bp, Artificial Sequence
  ENSG00000101194_20 (sequence is synthesized)
caaggtgtacacatagagaaaaaaacctaaaaatgtggaaaagcacgccaaagccttatttaaataataactattaaactattcaaaaagaagactgttattttatttaacacctttgtt

SEQ ID NO: 122298 - DNA, 120 bp, Artificial Sequence
  ENSG00000101194_21 (sequence is synthesized)
ttttaagaatgaacacgtgttaaagactttctgtaactaatttcatgaggaaacgagtgacacgttggaatcaggtcaaaggagaatcccaggaacggactcctaggccgggagtgttga

SEQ ID NO: 122299 - DNA, 120 bp, Artificial Sequence
  ENSG00000101194_22 (sequence is synthesized)
aatgagcatgccagcagagccaggctgggtttcggggttcctttgccgccaggggtcctgcgtgtccacagatgacagcgatgtaccctgctatcagctgtccacccagctttcccaaga

SEQ ID NO: 122300 - DNA, 120 bp, Artificial Sequence
  ENSG00000101194_23 (sequence is synthesized)
tgtggggcccccatggagtcagacagcccagctgtgctgtggaaagacaaagtggagttttgcacttgagcacaaatgttcccctacaatctctccagtttcggtcagcccaaccctgtg

SEQ ID NO: 122301 - DNA, 120 bp, Artificial Sequence
  ENSG00000101194_24 (sequence is synthesized)
gcaccatgggtacagcctagagcatcacccccacagaggcttcgggacggtcctgctggactgctggacgctgctgtggggtcttggggcaggaggggcttccagaagcctggcagttgc

SEQ ID NO: 122302 - DNA, 120 bp, Artificial Sequence
  ENSG00000101194_25 (sequence is synthesized)
tgtctggaggccaggaagccaagcccaggaagcccacctgcggctgagttcagaggtggggcctgtgcgttgtgaatgaattgctgtctctctcctcctcatcttgcactaaatctacat

SEQ ID NO: 122303 - DNA, 120 bp, Artificial Sequence
  ENSG00000101194_26 (sequence is synthesized)
aacttaaaatttaccattttagccatttttaagtgcacggttctgtggcattaggtacattcgcattgtgcagccaccgccaccctccgccttcagaactttctcatcttcccaaaccga

SEQ ID NO: 122304 - DNA, 120 bp, Artificial Sequence
  ENSG00000101194_27 (sequence is synthesized)
agctctgtgctcattaaaggctagctccccgttgctctcccccagccccggcaaccccattccactttgtgtctcgaccgtaagtgtggctgctctgggaccagtgccagtgggcgcacg

SEQ ID NO: 122305 - DNA, 120 bp, Artificial Sequence
  ENSG00000101194_28 (sequence is synthesized)
ctgggtttgcctacgtctggcttacttcactcagcagagtgtccttcggttttatcagttttgtcacaagtgtcagcatttttctcatttttaaggctgaataaaatattgtgtggataa

SEQ ID NO: 122306 - DNA, 120 bp, Artificial Sequence
  ENSG00000101194_29 (sequence is synthesized)
gtgtacaggtacctgctgagtgaaaaaggtaacgcaggccgggcgggctagtcccgggcgcccacagctgcccagtgcctcctcccctggtggcagccgctgagcagcctggagcaggag

SEQ ID NO: 122307 - DNA, 120 bp, Artificial Sequence
  ENSG00000101194_30 (sequence is synthesized)
cccggagacgatggctttgacctcccaaagaatccgccagtgaggaaaagcgctcgggtgctgagctgtcagcggctccgccacccaattcgatctggaaggttccatctagggctaagg

SEQ ID NO: 122308 - DNA, 120 bp, Artificial Sequence
  ENSG00000101194_31 (sequence is synthesized)
cagacacccaggaagacctgctgggcacaggtcaaggcagggtgcaggagcagccgagtctttgggtggccagggggctctggaggaggccgtgtggagggtcgttcagaacgcggttct

SEQ ID NO: 122309 - DNA, 120 bp, Artificial Sequence
  ENSG00000101194_32 (sequence is synthesized)
caaaggtgatgctgcctgttaggtgtctggtaggggaggccaagggaggctggcgcccatgtgcaacctgaggcatggacgaggcctgctgacccctctggaaccacccccaaatcccca

SEQ ID NO: 122310 - DNA, 120 bp, Artificial Sequence
  ENSG00000101194_33 (sequence is synthesized)
tcggctcctcctggactctgagggtcctggcactgccaggctcttcctctggagaggaccccgtccatgctcggggcaggtttctgtgtttgaggctggaaatgatgcgggcgctcggtg

SEQ ID NO: 122311 - DNA, 120 bp, Artificial Sequence
  ENSG00000101194_34 (sequence is synthesized)
ccttcctgctgcggctgcagccctcccagccctcatcgtgacctgctggcccacagaacccgacttcagagcctgaggaggccggtgcagaagccgggatgtggacagaggggtcacctg

SEQ ID NO: 122312 - DNA, 120 bp, Artificial Sequence
  ENSG00000101194_35 (sequence is synthesized)
gcagggtggggttgtgcctcccttcagagggggtccgggtgtcagaggagggcacagaccccagagcaggcccaggagaggaggatggggctgccttccaggttccactggactttgctg

SEQ ID NO: 122313 - DNA, 120 bp, Artificial Sequence
  ENSG00000101194_36 (sequence is synthesized)
acggcaggtggctcatgagtcgccatctgccctgactcacagatatgttcccatcctggtagcccagggtccccgggacacctcctggccccgctgagtgccatggatgatgggggtcct

SEQ ID NO: 122314 - DNA, 120 bp, Artificial Sequence
  ENSG00000101194_37 (sequence is synthesized)
tcttcagctcagcctcgcctgggccggcctgtggctcccattttcctttcagcgggacaaaggggacttgttaccaggccattttctggatggcctgtgagatctctgcccctccaagac

SEQ ID NO: 122315 - DNA, 120 bp, Artificial Sequence
  ENSG00000101194_38 (sequence is synthesized)
cctccaagtctgagcctgacccacagctgggacactgaattcagccctgggaaccatgggggctcctatcaggcgctagacccccagcccttcccctggcactaccttgggaaccagggt

SEQ ID NO: 122316 - DNA, 120 bp, Artificial Sequence
  ENSG00000101194_39 (sequence is synthesized)
tttagttgaaaaggatccacatgacaaattgtaggccaattggaaggcctagaagcaagatgtgaaaaacaatgtgagttccacagcagccgcccgactgggacacatgcgtggctggtc

SEQ ID NO: 122317 - DNA, 120 bp, Artificial Sequence
  ENSG00000101194_40 (sequence is synthesized)
ccaggacgctgctgaccggggcggtgggctccctgctcctggaatggtacggctggcagagcatcttctatttctccggcggcctcaccttgctttgggtgtggtacgtgtacagatctc

SEQ ID NO: 122318 - DNA, 120 bp, Artificial Sequence
  ENSG00000101194_41 (sequence is synthesized)
agctgtcttgagccccaagcctcttcctcccctgctgcccctctgcagccattcgggatgggaccccctctggggtgtcagcacgaaagggctaacgggagccccttccttggcctcccc

SEQ ID NO: 122319 - DNA, 120 bp, Artificial Sequence
  ENSG00000101194_42 (sequence is synthesized)
ggaaggaagtgagtgccctgtccttcctccctgccatgagattccaggaccggacctggcaagtgccctatcccagccagtgttcctggggctcttccaggcagggctatgttccccagg

SEQ ID NO: 122320 - DNA, 120 bp, Artificial Sequence
  ENSG00000101194_43 (sequence is synthesized)
ccaggggcattgtcctggacagtcaggaggcatacccctcgccaggtggaaccaccctgtgtatgcatgaccctgacaagcaggcgccaggacagtcaggaggccaggcccgagtgccag

SEQ ID NO: 122321 - DNA, 120 bp, Artificial Sequence
  ENSG00000101197_0 (sequence is synthesized)
acttccagaaagctgtgggccctgggatactcccctcccagggtgtctggtggcaggcctgtgcctatccctgctgtccccagggtgggccccgggggtcaggagctccagaagggccag

SEQ ID NO: 122322 - DNA, 120 bp, Artificial Sequence
  ENSG00000101197_1 (sequence is synthesized)
ctgggcatattctgagattggccatcagcccccatttctgctgcaaacctggtcagagccagtgttccctccatgggacctaaagacagtgccaagtgcctgcaccgtggaccacagccg

SEQ ID NO: 122323 - DNA, 120 bp, Artificial Sequence
  ENSG00000101197_2 (sequence is synthesized)
agccactgggcagccggtgatggtcccacgcaggagcgctgtggaccccgctctctgggcagccctgtcctaggcctggacacctgcagagcctgggaccacgtggatgggcagatcctg

SEQ ID NO: 122324 - DNA, 120 bp, Artificial Sequence
  ENSG00000101197_3 (sequence is synthesized)
ggccagctgcggcccctgacagaggaggaagaggaggagggcgccggggccaccttgtccagggggcctgccttccccggcatgggctctgaggagttgcgtctggcctccttctatgac

SEQ ID NO: 122325 - DNA, 120 bp, Artificial Sequence
  ENSG00000101197_4 (sequence is synthesized)
tggccgctgactgctgaggtgccacccgagctgctggctgctgccggcttcttccacacaggccatcaggacaaggtgaggtgcttcttctgctatgggggcctgcagagctggaagcgc

SEQ ID NO: 122326 - DNA, 120 bp, Artificial Sequence
  ENSG00000101197_5 (sequence is synthesized)
gacggagcatgccaagtggttccccagctgtcagttcctgctccggtcaaaaggaagagactttgtccacagtgtgcaggagactcactcccagctgctgggctcctgggacccgtggga

SEQ ID NO: 122327 - DNA, 120 bp, Artificial Sequence
  ENSG00000101197_6 (sequence is synthesized)
agaaccggaagacgcagcccctgtggccccctccgtccctgcctctgggtaccctgagctgcccacacccaggagagaggtccagtctgaaagtgcccaggagccaggaggggtcagtcc

SEQ ID NO: 122328 - DNA, 120 bp, Artificial Sequence
  ENSG00000101197_7 (sequence is synthesized)
agccgaggcccagagggcgtggtgggttcttgagcccccaggagccagggatgtggaggcgcagctgcggcggctgcaggaggagaggacgtgcaaggtgtgcctggaccgcgccgtgtc

SEQ ID NO: 122329 - DNA, 120 bp, Artificial Sequence
  ENSG00000101197_8 (sequence is synthesized)
catcgtctttgtgccgtgcggccacctggtctgtgctgagtgtgcccccggcctgcagctgtgccccatctgcagagcccccgtccgcagccgcgtgcgcaccttcctgtcctaggccag

SEQ ID NO: 122330 - DNA, 120 bp, Artificial Sequence
  ENSG00000101197_9 (sequence is synthesized)
gtgccatggccggccaggtgggctgcagagtgggctccctgcccctctctgcctgttctggactgtgttctgggcctgctgaggatggcagagctggtgtccatccagcactgaccagcc

SEQ ID NO: 122331 - DNA, 120 bp, Artificial Sequence
  ENSG00000101197_10 (sequence is synthesized)
ctgattccccgaccaccgcccagggtggagaaggaggcccttgcttggcgtgggggatggcttaactgtacctgtttggatgcttctgaatagaaataaagtgggttttccctggaggta

SEQ ID NO: 122332 - DNA, 120 bp, Artificial Sequence
  ENSG00000101197_11 (sequence is synthesized)
gcagaaatgcctctcccatgggactaccctgaagccccatggaggcgtctccacagcagccctcctcgcccatgcccacgggcactgcagggtggcgggaggagggggcccaaccctgac

SEQ ID NO: 122333 - DNA, 120 bp, Artificial Sequence
  ENSG00000101198_0 (sequence is synthesized)
ataggcgggcaccatgggctcctgctccggccgctgcgcgctcgtcgtcctctgcgcttttcagctggtcgccgccctggagaggcaggtgtttgacttcctgggctaccagtgggcgcc

SEQ ID NO: 122334 - DNA, 120 bp, Artificial Sequence
  ENSG00000101198_1 (sequence is synthesized)
catcctggccaactttgtccacatcatcatcgtcatcctgggactcttcggcaccatccagtaccggctgcgctatgtcatggtgtacacgctgtgggcagccgtctgggtcacctggaa

SEQ ID NO: 122335 - DNA, 120 bp, Artificial Sequence
  ENSG00000101198_2 (sequence is synthesized)
cgtcttcatcatctgcttctacctggaagtcggtggcctcttaaaggacagcgagctactgaccttcagcctctcccggcatcgctcctggtggcgtgagcgctggccaggctgtctgca

SEQ ID NO: 122336 - DNA, 120 bp, Artificial Sequence
  ENSG00000101198_3 (sequence is synthesized)
tgaggaggtgccagcagtgggcctcggggccccccatggccaggccctggtgtcaggtgctggctgtgccctggagcccagctatgtggaggccctacacagttgcctgcagatcctgat

SEQ ID NO: 122337 - DNA, 120 bp, Artificial Sequence
  ENSG00000101198_4 (sequence is synthesized)
cgcgcttctgggctttgtctgtggctgccaggtggtcagcgtgtttacggaggaagaggacagctttgatttcattggtggatttgatccatttcctctctaccatgtcaatgaaaagcc

SEQ ID NO: 122338 - DNA, 120 bp, Artificial Sequence
  ENSG00000101198_5 (sequence is synthesized)
tgcgtaagtgaggaaacagctgatcctgctcctgtggcctccagcctcagcgaccgaccagtgacaatgacaggagctcccaggccttgggacgcgcccccacccagcaccccccaggcg

SEQ ID NO: 122339 - DNA, 120 bp, Artificial Sequence
  ENSG00000101198_6 (sequence is synthesized)
gccggcagcacctgccctgggttctaagtactggacaccagccagggcggcagggcagtgccacggctggctgcagcgtcaagagagtttgtaatttcctttctcttaaaaaaaaaaaag

SEQ ID NO: 122340 - DNA, 120 bp, Artificial Sequence
  ENSG00000101198_7 (sequence is synthesized)
aaaagaaaacatacaaaagaaaaggcaaaaccccacatgcccacctcctctggcaacatgggggtcacagctctgcccccaggctgtcgtctcgtcgaggagcccctccctcaggtgccc

SEQ ID NO: 122341 - DNA, 120 bp, Artificial Sequence
  ENSG00000101198_8 (sequence is synthesized)
acctggggctgctggaccctcgggctgcaagcactgctgctgggatgcagcctccccaggaagtcaatgtgaggcccgagacccctcaagcggtgagggcccctgttgaacatggagggt

SEQ ID NO: 122342 - DNA, 120 bp, Artificial Sequence
  ENSG00000101198_9 (sequence is synthesized)
tcctaaccccaaactcgtgccagaagaacccccaccccacccaggagctgaggctgatggagccctagggtgggggctgggcttgaccaggaacagcagagccaggccccaaggcatagg

SEQ ID NO: 122343 - DNA, 120 bp, Artificial Sequence
  ENSG00000101198_10 (sequence is synthesized)
gcagggcacatggtggtgacgagcaggcagtactcttgtaaagggggctcttgggcaaacagtcccaaaggctcccccaggtatcatcaagttggtaaataaacaggaacatggccctca

SEQ ID NO: 122344 - DNA, 120 bp, Artificial Sequence
  ENSG00000101198_11 (sequence is synthesized)
tccgtggctgtgcagcttgggtgtcctgtgctcggcttaggggcacaggcttgcgggcggacctagggacggcggaggcatcgtgtccttcctgcaggaaggaaggagcttccggcgctt

SEQ ID NO: 122345 - DNA, 120 bp, Artificial Sequence
  ENSG00000101198_12 (sequence is synthesized)
tcctgggaggctcgctggggccgcggagataacctgaggtcctgcaacaggctgggggcccaaggaccatcccaggccttggaacagttggtatctttcagtcgccgccctggagaggca

SEQ ID NO: 122346 - DNA, 120 bp, Artificial Sequence
  ENSG00000101198_13 (sequence is synthesized)
gctctgagtctgtcccgtctggggcaaggcgagagacctccccacttggaagggacctcacgcccagcagggccttgctcacggccgtaggcctgagcgaggactcgccacacaccaggg

SEQ ID NO: 122347 - DNA, 120 bp, Artificial Sequence
  ENSG00000101198_14 (sequence is synthesized)
ccctggcagagatctgcaggtgaatggacaccaccctcctggggccacgtggggtcctttgtcccagcccgaccaaccctccaggctggacagcgagctactgaccttcagcctctcccg

SEQ ID NO: 122348 - DNA, 120 bp, Artificial Sequence
  ENSG00000101198_15 (sequence is synthesized)
tccaactcccaccccgggccccggaccgcagctggtcgtagtggccgcggaggacggcagcttttgggggccgggcgggagaagcgtccgttcatccgcggaaccaagctgaggtcgccg

SEQ ID NO: 122349 - DNA, 120 bp, Artificial Sequence
  ENSG00000101198_16 (sequence is synthesized)
ttctggggtgctctgcagtggaggcctgtgctgtccacgtgtaatgtcagcccggtgaggcgaggacaggtcacggcagctcagccagggatgctgtgtccgtacgccgacctgcgctgg

SEQ ID NO: 122350 - DNA, 120 bp, Artificial Sequence
  ENSG00000101198_17 (sequence is synthesized)
ggctcccttgagctggctgtcccaccgcctcattcccggggcacccacgtgggaaagctctgagacgtgtcccagggtgggcttgggggacccctttctccatgctgtgcatctgggggc

SEQ ID NO: 122351 - DNA, 120 bp, Artificial Sequence
  ENSG00000101198_18 (sequence is synthesized)
tgcttctacctggaagtcggtggcctcttaaaggggctctctgctctggccagtgtagcacaggtgggcactggggcaggtgcccagccaggcagacgggcccccgcttcctggaaccac

SEQ ID NO: 122352 - DNA, 120 bp, Artificial Sequence
  ENSG00000101199_0 (sequence is synthesized)
cggccctacctcggccctggcctgaccccggcggccctgcccgcccctccctccagcatcatggccagcccaagaaccaggaaggttcttaaagaagtcagggtgcaggatgagaacaac

SEQ ID NO: 122353 - DNA, 120 bp, Artificial Sequence
  ENSG00000101199_1 (sequence is synthesized)
gtttgttttgagtgtggcgcgttcaatcctcagtgggtcagtgtgacctacggcatctggatctgcctggagtgctcggggagacaccgcgggcttggggttcacctcagctttgtgcgc

SEQ ID NO: 122354 - DNA, 120 bp, Artificial Sequence
  ENSG00000101199_2 (sequence is synthesized)
tctgttactatggacaagtggaaggacattgagcttgagaagatgaaagctggtgggaatgctaagttccgagagttcctggagtctcaggaggattacgatccttgctggtccttgcag

SEQ ID NO: 122355 - DNA, 120 bp, Artificial Sequence
  ENSG00000101199_3 (sequence is synthesized)
gagaagtacaacagcagagccgcggccctctttagggataaggtggtcgctctggccgaaggcagagagtggtctctggagtcatcacctgcccagaactggaccccacctcagcccagg

SEQ ID NO: 122356 - DNA, 120 bp, Artificial Sequence
  ENSG00000101199_4 (sequence is synthesized)
acgctgccgtccatggtgcaccgagtctctggccagccgcagagtgtgaccgcctcctcggacaaggcttttgaagactggctgaatgatgacctcggctcctatcaaggggcccagggg

SEQ ID NO: 122357 - DNA, 120 bp, Artificial Sequence
  ENSG00000101199_5 (sequence is synthesized)
aatcgctacgtggggtttgggaacacgccaccgcctcagaagaaagaagatgacttcctcaacaacgccatgtcctccctgtactcgggctggagcagcttcaccactggagccagccgg

SEQ ID NO: 122358 - DNA, 120 bp, Artificial Sequence
  ENSG00000101199_6 (sequence is synthesized)
tttgcctcggcagccaaggagggcgctacaaagtttggatcccaagcgagtcagaagttttggggtcacaagcagcagccggagccggcgtccgagctgggccacagcctgaacgagaac

SEQ ID NO: 122359 - DNA, 120 bp, Artificial Sequence
  ENSG00000101199_7 (sequence is synthesized)
gtcctcaagcctgcgcaggagaaggtgaaggagggaaagatttttgatgatgtctccagtggggtctctcagttggcgtccaagggagtcggtagtaagggatggcgggacgtcaccacc

SEQ ID NO: 122360 - DNA, 120 bp, Artificial Sequence
  ENSG00000101199_8 (sequence is synthesized)
tttttttcggggaaagcagagggccccttggacagcccctcggagggccacagttatcagaacagcggtctggaccacttccaaaacagcaacatagaccagagcttctgggagaccttt

SEQ ID NO: 122361 - DNA, 120 bp, Artificial Sequence
  ENSG00000101199_9 (sequence is synthesized)
ggaagtgctgagcccaccaagacccgcaagtccccgagcagcgacagctggacgtgcgcggacacctccaccgagaggaggagctcggacagctgggaggtgtggggctcggcctccacc

SEQ ID NO: 122362 - DNA, 120 bp, Artificial Sequence
  ENSG00000101199_10 (sequence is synthesized)
aacaggaacagcaacagcgacggcggggagggcggggagggcaccaagaaggcagtgccgccggccgtgcccactgatgatggctgggacaaccagaactggtagggcccactgcgcccc

SEQ ID NO: 122363 - DNA, 120 bp, Artificial Sequence
  ENSG00000101199_11 (sequence is synthesized)
gggcgacttcgtgtttgcactctgccctcgtcgttcctcctccttccatttgacccaagaatcagcaactgcagtgtgaggacagcgtctcgggaggcaggaccctagggagacccgggt

SEQ ID NO: 122364 - DNA, 120 bp, Artificial Sequence
  ENSG00000101199_12 (sequence is synthesized)
gtgcgccgcctgcgcgtggggagtcttcggtgcgtgggggcggcttgctgtccagcctgtgtgggggccgtcccgtcccacactcccctgggcattcttggactcaaggccggggctctg

SEQ ID NO: 122365 - DNA, 120 bp, Artificial Sequence
  ENSG00000101199_13 (sequence is synthesized)
cgtggcttgctgggaggtgggctgcagcacagaggcctgtgactgcgttccagcggccagttcactacgcagtatctctggggcctgggaccagccacgtgccgagctgtcagcgacgtg

SEQ ID NO: 122366 - DNA, 120 bp, Artificial Sequence
  ENSG00000101199_14 (sequence is synthesized)
aggtgtcccttctcgttgagatatttaactttggttttgctctagttctttctttttgaagagagtgactggagtggtaaagatggaaatgctggaaatgatactggcgctcacgctgcc

SEQ ID NO: 122367 - DNA, 120 bp, Artificial Sequence
  ENSG00000101199_15 (sequence is synthesized)
atccgaccaccctcggctcccgagtccacgcctgcctgggcctgtgctgtcagacccgcgtcggtcgtaaccctctgtggctcccctgcatcagcaccgtcccaccaccaagttcaccag

SEQ ID NO: 122368 - DNA, 120 bp, Artificial Sequence
  ENSG00000101199_16 (sequence is synthesized)
gttcaccagacacggcctccacaatagccacacccacacctgagctgttctcagtgctggaacttgaccatcctggaacaccctggaagaaaaaggagcgcagggtgggccctcggccct

SEQ ID NO: 122369 - DNA, 120 bp, Artificial Sequence
  ENSG00000101199_17 (sequence is synthesized)
gatgcaggagggtgcgatagcggacgtggccaggcaggaggggccgggttcaggagctgagcaggggatgcctgtgcgtggtgcctgggtctagggaagctccagccccaggatggggct

SEQ ID NO: 122370 - DNA, 120 bp, Artificial Sequence
  ENSG00000101199_18 (sequence is synthesized)
gccctgcacaccggtgcccgccacatgccaaccctcacctccccgaggactggatgatgtgctgccacgtgtgactcgtctcccttgtctgccctgtgtgaccctcagtcttggccagcc

SEQ ID NO: 122371 - DNA, 120 bp, Artificial Sequence
  ENSG00000101199_19 (sequence is synthesized)
atgcatgcgcccgaagctcgtgcagtttgtacgtgaggtgctctcctccctgccaccatgctcatcactctggccttggccatgctccctggtcaccccacttcccggtcgccgtctgca

SEQ ID NO: 122372 - DNA, 120 bp, Artificial Sequence
  ENSG00000101199_20 (sequence is synthesized)
gcactcctggagcagcctgggcccttcagcccctgtgctcgtcccaccctagggactcagccacttgcagaacaggatgggaccgagatttcagcgagccctcctggcgcccggtcctcc

SEQ ID NO: 122373 - DNA, 120 bp, Artificial Sequence
  ENSG00000101199_21 (sequence is synthesized)
ctgtgggcaccagccctcttggtagctggtgtggagggccggtgtccttggctgccacggagggatttgatcaccgaagcagccacctgctgtagttggacctgaggtcagaggcggggc

SEQ ID NO: 122374 - DNA, 120 bp, Artificial Sequence
  ENSG00000101199_22 (sequence is synthesized)
atcagaggctcaaggtgctgagaagccaccgggaaagcagccagcacaaagggcccaggaagccagcccccgagagctgagcgtgggggtctttgagtgtctttctccaagctgagacgt

SEQ ID NO: 122375 - DNA, 120 bp, Artificial Sequence
  ENSG00000101199_23 (sequence is synthesized)
acgtcctcaagcctgcgcaggagaaggtgaaggagggaaagatttttgatgatgtctccagtggggtctctcagttggcgtccaagtgccagcgccgtctttgctgccatcagtcccact

SEQ ID NO: 122376 - DNA, 120 bp, Artificial Sequence
  ENSG00000101199_24 (sequence is synthesized)
gctctgcgggccatttggggcgtgcattttgtcctgtttcctggcatgaggcgctctgcggacagacggggagggaagagcaggcctcgctcctcccccccaagcatgtggtgggagctc

SEQ ID NO: 122377 - DNA, 120 bp, Artificial Sequence
  ENSG00000101199_25 (sequence is synthesized)
ttgaggtctgtgcacgaggctgtcctcgctgccatgtcccgcacacacctggcaccgctgcagagtggccggggcgtctgtgtctgtccagggagtcggtagtaagggatggcgggacgt

SEQ ID NO: 122378 - DNA, 120 bp, Artificial Sequence
  ENSG00000101199_26 (sequence is synthesized)
gtgggatgtggtgttccacatgtgcctgtttccacgccagcaccttgacttggcagcatggagccaaggtctgtccccgcccaggagggtgccttcctcgggggtagggggacggcccac

SEQ ID NO: 122379 - DNA, 120 bp, Artificial Sequence
  ENSG00000101199_27 (sequence is synthesized)
tctgccccagggagtcccttttgatgggaagtgcagtcagcagcgtggaggtgtctgggccaccttcagaaggtggatgtggtggccgagaccccgtccacggagggtgatggcctttcc

SEQ ID NO: 122380 - DNA, 120 bp, Artificial Sequence
  ENSG00000101199_28 (sequence is synthesized)
cttctgcaggtgcgggcaggtgggcctgggaccggtgctggggcctctccttgctgtgtgtgagggcccaggtggaaggcgcggacctgacagcattccaataaagcatacgggaacatg

SEQ ID NO: 122381 - DNA, 120 bp, Artificial Sequence
  ENSG00000101199_29 (sequence is synthesized)
caggcatgcgcggtgcagggtctgattgcagtgagtcccagccagcccagtgtgaattgggggtcttgggtgtattgcagtgagccccagccagcccaggtgtgaattggggggtcttag

SEQ ID NO: 122382 - DNA, 120 bp, Artificial Sequence
  ENSG00000101199_30 (sequence is synthesized)
atgtattgcagtgacccccagctgcccaggtgtgaattgggggtcttgggtgtattgcagtgacccccagctgcccaggtgtgaattgggggtcttgggtgtagagaagcgctaacactt

SEQ ID NO: 122383 - DNA, 120 bp, Artificial Sequence
  ENSG00000101199_31 (sequence is synthesized)
acccgcaccccggatctggaatctcccaccggttacgggagtccagagggtccctgcccacgcacgtcgcctcccggggcgcgagcaggaccctgccccgtccgcttcaacacccttttc

SEQ ID NO: 122384 - DNA, 120 bp, Artificial Sequence
  ENSG00000101199_32 (sequence is synthesized)
ccgagctccttcggacccaggactcggcctggacacatcccagtcaggtggcctctgaagcccggtggggcttccaccccctaagaacatcatggccagcccaagaaccaggaaggttct

SEQ ID NO: 122385 - DNA, 120 bp, Artificial Sequence
  ENSG00000101199_33 (sequence is synthesized)
cttttcccgagctccttcggacccaggactcggcctggacacatcccagtcaggtggcctctgaagcccggtggggcttccaccccctaagaagtgagggtcctaagaaggagatatatt

SEQ ID NO: 122386 - DNA, 120 bp, Artificial Sequence
  ENSG00000101199_34 (sequence is synthesized)
tttacatcttggtttcaagcgttcagagtttttgcgttatttttcaagataaactatatttgtacttttgaaggttaggagcatcatggccagcccaagaaccaggaaggttcttaaaga

SEQ ID NO: 122387 - DNA, 120 bp, Artificial Sequence
  ENSG00000101199_35 (sequence is synthesized)
ctcagaagaaagaagatgacttcctcaacaacgccatgtcctccctgtactcgacggagtcttgctttgtcgcccaggctgcagactggagggcagtggtgcgacctcagctcactgcaa

SEQ ID NO: 122388 - DNA, 120 bp, Artificial Sequence
  ENSG00000101199_36 (sequence is synthesized)
gcagagccgcggccctctttagggataaggtagagatgggcccgattcactcttgcccatggtgtggggctgccctgccgtttgtggcagctggactgtggcctttagtggttctggagt

SEQ ID NO: 122389 - DNA, 120 bp, Artificial Sequence
  ENSG00000101199_37 (sequence is synthesized)
ccctttccggcctttgatccgtgctgctccctgcctttgggggaagaggaggcctcacaccacatccccaggtggccgtgtggcctcgactccactgacccaggatcaggagaggctgag

SEQ ID NO: 122390 - DNA, 120 bp, Artificial Sequence
  ENSG00000101199_38 (sequence is synthesized)
ctcctttctcagcagcttcttcctatggccccagcctccgtgccctcttccctccaggggggactcggtgcctgcctggggaggaaggagaggcgttgcaggcgtccgagctgggccaca

SEQ ID NO: 122391 - DNA, 120 bp, Artificial Sequence
  ENSG00000101199_39 (sequence is synthesized)
aaaatgagacccccatctccaaaacacacagacccccaacgcaggcctgctgccggggaggtgctggagggagggcgggggcactgggcgcagagctgctgagcagggtttcctggccac

SEQ ID NO: 122392 - DNA, 120 bp, Artificial Sequence
  ENSG00000101199_40 (sequence is synthesized)
gccgcatggtggcgcgtgagggaggaccctggagggggaccttcctgcaagaattggtgggggccgcggtctccgccttctagaggtggcggcctactgcccttcgggtgttgtgtgcaa

SEQ ID NO: 122393 - DNA, 120 bp, Artificial Sequence
  ENSG00000101199_41 (sequence is synthesized)
agccccgtttcctgctccctgcgcttgtatcctgctgccttccctcctgctggtgaagctcgtgctgccctttgctggcctgtgctgccactgccgacccgtgtcccgtggtggagctgt

SEQ ID NO: 122394 - DNA, 120 bp, Artificial Sequence
  ENSG00000101199_42 (sequence is synthesized)
agatacgcgggcacagtcgaagccagtctccatattccacggccctgggcgtgagagcagggtgtgccccgtgcagccctcagcccagcttggcagtggccgctgtcctctgagacggga

SEQ ID NO: 122395 - DNA, 120 bp, Artificial Sequence
  ENSG00000101199_43 (sequence is synthesized)
ggagagctgcccagcctgacagcccgagggatatggaaacaacttggcccactgcggcccggtcagccactaactgtcacttctccctctgctcttatcttgctgctgctggccttttcc

SEQ ID NO: 122396 - DNA, 120 bp, Artificial Sequence
  ENSG00000101199_44 (sequence is synthesized)
cgtctgtgtctgtacgtgtgtgcgaggcaccccttgtttctggattttgcctgggtcttctcagcgggacggcgcgtgccggcttgcgtgtgggggcctcctgaagctgcctgtgccgcg

SEQ ID NO: 122397 - DNA, 120 bp, Artificial Sequence
  ENSG00000101199_45 (sequence is synthesized)
ctgagcccaccaagacccgcaagtccccgagcagcgacagctggacgtgcgcggacacctccaccgagaggaggagctcggacagctgggagttctttctttttgaagagagtgactgga

SEQ ID NO: 122398 - DNA, 120 bp, Artificial Sequence
  ENSG00000101199_46 (sequence is synthesized)
ggagccaaggtgcgggcaggtgggcctgggaccggtgctggggcctctccttgctgtgtgtgagggcccaggtggaaggcgcggacctgacagcattccaataaagcatacgggaacatg

SEQ ID NO: 122399 - DNA, 120 bp, Artificial Sequence
  ENSG00000101199_47 (sequence is synthesized)
caaggagggcgctacaaagtttggatcccaagcgagtcagaaggtaacagaggagaagcttctgcaccctggtgcatctgaaactatcctgagtctgacgtcacgtgcagcacctgaagc

SEQ ID NO: 122400 - DNA, 120 bp, Artificial Sequence
  ENSG00000101199_48 (sequence is synthesized)
tgcctggttccctcttctcaggccacatgctcagagctgaggggtcccagcgtagaagggggtgttcctgccatgctgttcccctcctcatgcccgggtggctgcctcatggacccactc

SEQ ID NO: 122401 - DNA, 120 bp, Artificial Sequence
  ENSG00000101199_49 (sequence is synthesized)
agggcctgcagggccaaactcgtttcctgttcactggtagctggtaccggtgtgtggccactgcagccggccaccttgttgggagcaggactgcccggcttggcagatggcccacgctgg

SEQ ID NO: 122402 - DNA, 120 bp, Artificial Sequence
  ENSG00000101199_50 (sequence is synthesized)
cggtggccgctcagccagaagggccgctgtggttggtgctgtgcctgcggcacactggacgcgtctgcacttcgaggcaacggagcgtctctttgctctggccagggcttcccccagtcg

SEQ ID NO: 122403 - DNA, 120 bp, Artificial Sequence
  ENSG00000101199_51 (sequence is synthesized)
gggcagtgtggcctcaggcctttgcatgttttttattctttaggatgtgggtaggggccccgcggttcccacttggtggtcagggctgtgatctggctgtcctcgggttcagaatcacac

SEQ ID NO: 122404 - DNA, 120 bp, Artificial Sequence
  ENSG00000101199_52 (sequence is synthesized)
ccaggaggcagtacccatgtgaggctcaccatgaaagctcaggactgcaggcgtggagctgtgcatggctctaggacgcgcctttgccccctgggcgagggtgtcctttctcacgaggtg

SEQ ID NO: 122405 - DNA, 120 bp, Artificial Sequence
  ENSG00000101199_53 (sequence is synthesized)
gctggaatccctttggggccactgtagaactttctggggctcagcctgatgggtatccacatgcccctgatatttcggatgccctcacccgggggattcctgcactcctgaagctttaag

SEQ ID NO: 122406 - DNA, 120 bp, Artificial Sequence
  ENSG00000101199_54 (sequence is synthesized)
ctttcatctctcccgcccccattaatgccgctgtcttcatccgtgcaggtgaaggagggaaagatttttgatgatgtctccagtggggtctctcagttggcgtccaaggtagggagcctg

SEQ ID NO: 122407 - DNA, 120 bp, Artificial Sequence
  ENSG00000101199_55 (sequence is synthesized)
ctccagtcggctgtataggtggatgctcagtttgatgacggtatccgcctgaatgagtcatgctgggggtccaagtcctgcggtcaggagtgagcattcagatgtctgcctcatgatctg

SEQ ID NO: 122408 - DNA, 120 bp, Artificial Sequence
  ENSG00000101200_0 (sequence is synthesized)
acagagccaccaagcagtgctgcatacggggtccacctgtgtgcaccaggatgcctgacaccatgctgcccgcctgcttcctcggcctactggccttctcctccgcgtgctacttccaga

SEQ ID NO: 122409 - DNA, 120 bp, Artificial Sequence
  ENSG00000101200_1 (sequence is synthesized)
actgcccgaggggcggcaagagggccatgtccgacctggagctgagacagtgcctcccctgcggccccgggggcaaaggccgctgcttcgggcccagcatctgctgcgcggacgagctgg

SEQ ID NO: 122410 - DNA, 120 bp, Artificial Sequence
  ENSG00000101200_2 (sequence is synthesized)
tgaggcgctgcgctgccaggaggagaactacctgccgtcgccctgccagtccggccagaaggcgtgcgggagcgggggccgctgcgccgccttcggcgtttgctgcaacgacgagagctg

SEQ ID NO: 122411 - DNA, 120 bp, Artificial Sequence
  ENSG00000101200_3 (sequence is synthesized)
cgtgaccgagcccgagtgccgcgagggctttcaccgccgcgcccgcgccagcgaccggagcaacgccacgcagctggacgggccggccggggccttgctgctgcggctggtgcagctggc

SEQ ID NO: 122412 - DNA, 120 bp, Artificial Sequence
  ENSG00000101200_4 (sequence is synthesized)
cggggcgcccgagcccttcgagcccgcccagcccgacgcctactgagccccgcgctcgccccaccggcgcgctcttcgcgcccgcccctgcagcacggacaataaacctccgccaatgca

SEQ ID NO: 122413 - DNA, 120 bp, Artificial Sequence
  ENSG00000101203_0 (sequence is synthesized)
ataagctccagccttcctgtggccacagcaggaccagagtggaccagcacaccccaggagagaggactggggtcccaggagtaggaggagcccgagcaccatgagctccggagaccctgc

SEQ ID NO: 122414 - DNA, 120 bp, Artificial Sequence
  ENSG00000101203_1 (sequence is synthesized)
acacctcggcctctgcctctggctgtggctgggcgccaccctgggaagagagcaagttcaagcaagcggtctcctgaggctggctgtgctgcctgaggaccggctgcagatgaagtggag

SEQ ID NO: 122415 - DNA, 120 bp, Artificial Sequence
  ENSG00000101203_2 (sequence is synthesized)
agagtcggaggggagcggcctcggctacctggtgcaggtgaagcccatggcaggggactcggaacaggaggtgatactgaccaccaagacccctaaggccacagtggggggcctgagccc

SEQ ID NO: 122416 - DNA, 120 bp, Artificial Sequence
  ENSG00000101203_3 (sequence is synthesized)
ctccaagggctacaccttgcagatcttcgagctcactggctctgggcgcttcctgctagctcggagggagtttgtgattgaggatctgaagagtagctccctggacaggagcagccagag

SEQ ID NO: 122417 - DNA, 120 bp, Artificial Sequence
  ENSG00000101203_4 (sequence is synthesized)
gcccctcggctctggagccccggagcccaccccctcccacacggggagcccagaccctgagcaggcttctgagccccaagttgccttcacaccaagccaggatccgcgcactcctgccgg

SEQ ID NO: 122418 - DNA, 120 bp, Artificial Sequence
  ENSG00000101203_5 (sequence is synthesized)
cccccagttccgctgcctgccccccgtgcctgctgacatggtcttcctggtggacgggtcctggagcattggccacagtcacttccagcaggtcaaggacttcctggccagtgtcatcgc

SEQ ID NO: 122419 - DNA, 120 bp, Artificial Sequence
  ENSG00000101203_6 (sequence is synthesized)
accctttgaaatcgggccggataaggtccaagtaggcctgactcagtacagcggggatgctcagactgagtgggacctgaactccctcagcaccaaggaacaggtgctggcagctgtgcg

SEQ ID NO: 122420 - DNA, 120 bp, Artificial Sequence
  ENSG00000101203_7 (sequence is synthesized)
ccgcctccgctacaagggggggaacacgttcacaggccttgccctgacccacgtgctggggcagaacctgcagccggcggctggcctccgtccagaggcagccaaggtggtgattctggt

SEQ ID NO: 122421 - DNA, 120 bp, Artificial Sequence
  ENSG00000101203_8 (sequence is synthesized)
gacggacggcaagtcccaggacgatgtgcacactgctgcccgtgtcctcaaggacctgggcgtgaacgtcttcgctgtgggtgtgaagaacgccgatgaggctgagctgaggctcctggc

SEQ ID NO: 122422 - DNA, 120 bp, Artificial Sequence
  ENSG00000101203_9 (sequence is synthesized)
gtccccgccgagggacatcaccgtccacagcgtgctggacttcctgcagctcggcgcgctggctggcctgctcagccgtctcatctgccagaggctccagggtgggagcccgcggcaggg

SEQ ID NO: 122423 - DNA, 120 bp, Artificial Sequence
  ENSG00000101203_10 (sequence is synthesized)
cccagcagcggctccagccctggacaccctccctgcccccaccagcctggtcctgagccaggtgacctcctccagcatccgcctgtcctggactccagccccccggcaccccctcaagta

SEQ ID NO: 122424 - DNA, 120 bp, Artificial Sequence
  ENSG00000101203_11 (sequence is synthesized)
tctgatcgtttggcgagcctctagaggtggcacccccagggaggtggtggtggagggacccgccgcctccacggagctgcacaacctggcctcccgcacagagtacctggtctccgtgtt

SEQ ID NO: 122425 - DNA, 120 bp, Artificial Sequence
  ENSG00000101203_12 (sequence is synthesized)
ccccatctatgagggcggggttggcgaaggcctgcggggcctggtgaccacagcacctctgcctccgccccgggcgctgaccctggccgcagtgacgcccagaaccgtccacctcacctg

SEQ ID NO: 122426 - DNA, 120 bp, Artificial Sequence
  ENSG00000101203_13 (sequence is synthesized)
gcagccctcggccggggccacccactacctggtgcgatgttctcctgcttcccccaagggtgaagaggaggagcgagaggtgcaggtcgggcggcccgaggtgctgctggatggcctgga

SEQ ID NO: 122427 - DNA, 120 bp, Artificial Sequence
  ENSG00000101203_14 (sequence is synthesized)
acctggcagggactatgaggtctcggtgcagagcctgcgaggccctgagggcagcgaggcccggggcatccgtgccaggacccccaccctggcccccccgagacacctgggcttctcaga

SEQ ID NO: 122428 - DNA, 120 bp, Artificial Sequence
  ENSG00000101203_15 (sequence is synthesized)
cgtgagccacgacgcggcacgagtgttctgggagggtgccccgaggcctgtgcgcctggtcagggtcacctatgtgtccagcgagggtggacactcggggcagacagaggctcctgggaa

SEQ ID NO: 122429 - DNA, 120 bp, Artificial Sequence
  ENSG00000101203_16 (sequence is synthesized)
cgccacctcggccacgctggggcctctctcttcctccaccacctacactgtccgtgtcacctgcctctaccctgggggtggctcctctacgctgactggccgggtgaccaccaagaaagc

SEQ ID NO: 122430 - DNA, 120 bp, Artificial Sequence
  ENSG00000101203_17 (sequence is synthesized)
accagatcacgtggacgcccctgggagaggggaaggctcacgagatctctgtcccagggaacctcggcacggccgtcctgcctggcctagggaggcacacagagtacgacgtcaccatct

SEQ ID NO: 122431 - DNA, 120 bp, Artificial Sequence
  ENSG00000101203_18 (sequence is synthesized)
tggcctactacagggacggggcccgcagtgaccctgtgtccctccgctataccccctccacggtgagcaggagcccaccctccaacctggccctggcctcggagacccccgacagcctgc

SEQ ID NO: 122432 - DNA, 120 bp, Artificial Sequence
  ENSG00000101203_19 (sequence is synthesized)
aggtcagctggacgcccccgcttggccgcgtgctccattactggctcacctacgcccccgcctctggcttgggacccgagaaatccgtctctgtgccaggagccaggagccacgtgacac

SEQ ID NO: 122433 - DNA, 120 bp, Artificial Sequence
  ENSG00000101203_20 (sequence is synthesized)
tgcccgacctgcaggcagccacgaagtacagggtcctggtctcagctatctatgcagcaggcaggagtgaggctgtgtctgccacgggccagacagcctgcccagccctccgccctgacg

SEQ ID NO: 122434 - DNA, 120 bp, Artificial Sequence
  ENSG00000101203_21 (sequence is synthesized)
gctccctcccagggtttgacctgatggtggccttcagcctggtggaaaaggcttatgcgtccatccggggcgtggccatggagccctctgccttcggtgggaccccgaccttcacgctct

SEQ ID NO: 122435 - DNA, 120 bp, Artificial Sequence
  ENSG00000101203_22 (sequence is synthesized)
tcaaggacgcccagctgacaagacgggtcagtgacgtctacccagcccccctacctccagagcacaccatcgtcttccttgtgcgcctacttcccgagacaccccgtgaggccttcgcgc

SEQ ID NO: 122436 - DNA, 120 bp, Artificial Sequence
  ENSG00000101203_23 (sequence is synthesized)
tgtggcagatgacagccgaggacttccagcccctccttggggttctgctggatgccgggaagaagtccctgacctacttccaccgtgaccccagggctgccttgcaggaggccaccttcg

SEQ ID NO: 122437 - DNA, 120 bp, Artificial Sequence
  ENSG00000101203_24 (sequence is synthesized)
acccgcaggaagtgaggaagattttcttcgggagcttccacaaggtgcacgtggctgtgggccgctccaaggtcaggctctatgtggactgccggaaggtggctgagcggccccttgggg

SEQ ID NO: 122438 - DNA, 120 bp, Artificial Sequence
  ENSG00000101203_25 (sequence is synthesized)
agatgggcagcccacccgctgcgggcttcgtcacgctggggaggctggccaaggccaggggcccccggagcagttcggccgcgtttcagctccagatgctgcagatcgtgtgcagtgaca

SEQ ID NO: 122439 - DNA, 120 bp, Artificial Sequence
  ENSG00000101203_26 (sequence is synthesized)
cctgggccgatgaggaccggtgctgtgagctccctgcctcgagggatggagagacctgccccgccttcgtgtctgcctgttcctgttcctcagagacccctgggcccccaggacctcaag

SEQ ID NO: 122440 - DNA, 120 bp, Artificial Sequence
  ENSG00000101203_27 (sequence is synthesized)
gacccccaggcctccctgggaggaatggcaccccaggagagcagggcttcccagggcccaggggtccaccaggggtcaaaggagagaagggagaccatgggcttccaggcttgcagggcc

SEQ ID NO: 122441 - DNA, 120 bp, Artificial Sequence
  ENSG00000101203_28 (sequence is synthesized)
accccggccaccagggcatccccgggagagttggcctccagggaccaaagggaatgagaggcctggagggaactgctggcctgcctggaccccctggccccagggggttccagggcatgg

SEQ ID NO: 122442 - DNA, 120 bp, Artificial Sequence
  ENSG00000101203_29 (sequence is synthesized)
caggggccaggggcactagtggagagcgaggacctccagggaccgtggggcccacaggactgccagggcccaaaggggaacgaggagagaagggcgagccgcagtcccttgccaccctct

SEQ ID NO: 122443 - DNA, 120 bp, Artificial Sequence
  ENSG00000101203_30 (sequence is synthesized)
accagcttgtgagccaggcctcacacgtgtcaaagttcgactccttccacgagaacaccaggccccccatgcccatcttggagcagaagctggagccgggcactgagcccctggggtccc

SEQ ID NO: 122444 - DNA, 120 bp, Artificial Sequence
  ENSG00000101203_31 (sequence is synthesized)
ctggcacccgcagcaaggccctggttcctggagaatgggggcgtggtggccgccaccttgagggcagaggggagcctggagctgttggtcagatgggcagccctgggcagcagggggcta

SEQ ID NO: 122445 - DNA, 120 bp, Artificial Sequence
  ENSG00000101203_32 (sequence is synthesized)
gcacccagggcctctgggagtgacaggacattttctgcactgccccgaggaacgctgagccttcctccctgggtttgtctggacaccgagagcgaccacatcctggagaagccaggagaa

SEQ ID NO: 122446 - DNA, 120 bp, Artificial Sequence
  ENSG00000101203_33 (sequence is synthesized)
aagctcaggaagagcctgcaggtggaaggagagggaagcagcggcctcggccaaggcccaccccatactcttggctctgtagcatttccaagttcagataaacccctgagtgctcaccca

SEQ ID NO: 122447 - DNA, 120 bp, Artificial Sequence
  ENSG00000101203_34 (sequence is synthesized)
cttcagccgcagtggggaaggggaggggctgggctgatggcgaatcgggttcaggagggcagcagtgccctgtggccgtctcagtagctctaaaacaggctcaacaacatgccccgcccc

SEQ ID NO: 122448 - DNA, 120 bp, Artificial Sequence
  ENSG00000101203_35 (sequence is synthesized)
tttctctgggcctcatctaagcctggccagggccctgtgggcccgcctctctctgcgcctcacgcaggcaacagatggttccactgctggcccaccagtcacctgcacgatggctcctcc

SEQ ID NO: 122449 - DNA, 120 bp, Artificial Sequence
  ENSG00000101203_36 (sequence is synthesized)
ctcagaacagcactcccaccccggccccagcaccttcacatctgggcacaggcaggtccctgcctgcctcatcgtcccctctgtccccagcccaagaaggagttcagatcctgtgtgtga

SEQ ID NO: 122450 - DNA, 120 bp, Artificial Sequence
  ENSG00000101203_37 (sequence is synthesized)
atggccacccctcacccacccagccctgtgctgagttccttgtgcagggacattgctttgagacttggcaccatcagcccctggtccttagggtctcagagcaaggtcatccctcagcag

SEQ ID NO: 122451 - DNA, 120 bp, Artificial Sequence
  ENSG00000101203_38 (sequence is synthesized)
gcttctggcctgtgcgctcctcagcacctctgcccaggtctctcccaaccatcacagacgctgtgtgagcctggacttcctgccttatccccactgtggcccaaacagcatgggggcaag

SEQ ID NO: 122452 - DNA, 120 bp, Artificial Sequence
  ENSG00000101203_39 (sequence is synthesized)
ctcagaacacacacctgggcttctgggccttgtggcccgtgggggtgatgtgggaacttctacttcctttccaaacaaatattcagtaactagtccactgttaccacttaggcagctaag

SEQ ID NO: 122453 - DNA, 120 bp, Artificial Sequence
  ENSG00000101203_40 (sequence is synthesized)
caagaaaggtgccagaaatgaagagggaagccatatcattgaggagagaatgaaaagtattaaaaaggaacaaagagagacccttgatattgacagaaggaaaacccaccaagatcacca

SEQ ID NO: 122454 - DNA, 120 bp, Artificial Sequence
  ENSG00000101203_41 (sequence is synthesized)
gtgcagcattgcgtgcaccaaagcataccccaaagaggtgagcgcaaaacagcttcagggcaaacacttcatctatgattcaactgttccaggaactgaccagacctggagaccaaatag

SEQ ID NO: 122455 - DNA, 120 bp, Artificial Sequence
  ENSG00000101203_42 (sequence is synthesized)
agagtcataggcagggtcagcaggatgggagagagcgcctgcacccacaggagccacagccctgactgaggccaggaagcagccccaaatgccagctcccactgcagcatgagaacagaa

SEQ ID NO: 122456 - DNA, 120 bp, Artificial Sequence
  ENSG00000101203_43 (sequence is synthesized)
acagaccactgaaaattcccaaagtctgtggacaaatcagacgtcgaagaagtcacgtggcatcgagacagattttgcactgagggacaaggagagcatgtggccaaagtaggtgcaggt

SEQ ID NO: 122457 - DNA, 120 bp, Artificial Sequence
  ENSG00000101203_44 (sequence is synthesized)
aaagcagcatctggggcagagttatagccttcagtgcaggtatcagacacagttgttgagagcagcagcccaagccagcccctccgtcctgcagggaggacacctaggtcacttggcttc

SEQ ID NO: 122458 - DNA, 120 bp, Artificial Sequence
  ENSG00000101203_45 (sequence is synthesized)
tgttggggagctgagttgcttcagattgtgtgaccagcaaaacagcttggttgctctcacttggtttctccagggcggggaattacatgtccccagctgaactgagaaggctctttgagc

SEQ ID NO: 122459 - DNA, 120 bp, Artificial Sequence
  ENSG00000101203_46 (sequence is synthesized)
agtggagtgagcaggctttgtcatgaggcaggagtggggctagaatcaagcccagagcccacagggcatccagagccttccaaaggagcccctctcctggggctctccaatttgatgaag

SEQ ID NO: 122460 - DNA, 120 bp, Artificial Sequence
  ENSG00000101203_47 (sequence is synthesized)
ggactgggcactgggtggctgagaccacattggcagccaggaggaggcagcctggccggggggaaccagggtggctctaatccccaccaccccctcagctgccctacccccgccacgctg

SEQ ID NO: 122461 - DNA, 120 bp, Artificial Sequence
  ENSG00000101203_48 (sequence is synthesized)
gtgtgacaccagtgatgctcagcctcaaaaggggagtccggctgtcttcgggaaactgactttatgctggaggccaattaaaatggcacagcaaaggcagcggccagctggtgcccaggc

SEQ ID NO: 122462 - DNA, 120 bp, Artificial Sequence
  ENSG00000101203_49 (sequence is synthesized)
agcttagggactggtccctgaggccccacccgccccagcctgtgcagtggagctgagtacgaatcaaaggtgaggatggcaagggagctgagagcagcctccggatgcaccaaaccggcc

SEQ ID NO: 122463 - DNA, 120 bp, Artificial Sequence
  ENSG00000101203_50 (sequence is synthesized)
tggctcctgtttgcaggaaggcagcctccccgagacccagccgacctgcacgtctcccatcagccccgactccaccgcatccctctgggtccttttaggagcccccagggactgagccgg

SEQ ID NO: 122464 - DNA, 120 bp, Artificial Sequence
  ENSG00000101203_51 (sequence is synthesized)
ggctcacgctcctggccagagcgctgggtttctggcaatgcctcccctcctgcctttacggccacagctctcccctccagaggcccctctgtagtgggcctcggtcccctctccaccccc

SEQ ID NO: 122465 - DNA, 120 bp, Artificial Sequence
  ENSG00000101203_52 (sequence is synthesized)
agaggcagcacagcttcagccctacgcagtgtgggggctccgggaggaaatgcagggaggtgcttggtcttggcccagagctcatggccttaggtgctgcccccagtcacccccgtgccc

SEQ ID NO: 122466 - DNA, 120 bp, Artificial Sequence
  ENSG00000101203_53 (sequence is synthesized)
atgcagccggggatgttcagctcaggccagccaccgaggtggtgtgacgcaaggctgatctgacgctcagctcaggccgctggggtcatgggggttgtgggaaggtcatggaatcacggg

SEQ ID NO: 122467 - DNA, 120 bp, Artificial Sequence
  ENSG00000101203_54 (sequence is synthesized)
gctcacgctggggtcacagggtggtgtggctgtgtggactgtaaggggcgtgcagccatgcgtatctgacctgccctccctaggtctgcaggcagtgccgagtggctctgcctgaggccc

SEQ ID NO: 122468 - DNA, 120 bp, Artificial Sequence
  ENSG00000101203_55 (sequence is synthesized)
caagagcgaccttggaagctccaggccttcacagcccctctgagagccacctgcaaggtggggagctgggaagaacggctcagtgatgagctcagagggaggggtgggcacagcgcccag

SEQ ID NO: 122469 - DNA, 120 bp, Artificial Sequence
  ENSG00000101203_56 (sequence is synthesized)
gaaggcgggtgcgtgcaggcctgggaggaatgtgtagcaggaggcagggggtgctgtgcccgcaggaccagcaggtgaggcgtgtccacccacagaggatggctctggcccaggcagtgt

SEQ ID NO: 122470 - DNA, 120 bp, Artificial Sequence
  ENSG00000101203_57 (sequence is synthesized)
cagaaatggaagctgaggaaacccaaccccagctgtagaggagcctgccccgatgccatctgcacctggggggcgacgtatggctgccagcctcttcatctaccaaggaccagggcagtg

SEQ ID NO: 122471 - DNA, 120 bp, Artificial Sequence
  ENSG00000101203_58 (sequence is synthesized)
gggacgggagagctgggacacgtggactcacaccagggcagatggtgggggaagccagtgtctgtagattcagtgcatttcttggggaagggcgtggaacatttggacttgagccccagc

SEQ ID NO: 122472 - DNA, 120 bp, Artificial Sequence
  ENSG00000101203_59 (sequence is synthesized)
acagagacgatgtcataatacagccccccatcgtgatctgatggtaagtacagaactccttgcccagtggagaaacactctcctctcatgtgtggaatatccacacactaaccatgaact

SEQ ID NO: 122473 - DNA, 120 bp, Artificial Sequence
  ENSG00000101203_60 (sequence is synthesized)
gggccataagaaaccttacattccaaaggatcctgctgttcagaactcactcactcactgatgaaactggaaaaacaaccaatgataacaagctaaagaatgcctctagaagctaaaaga

SEQ ID NO: 122474 - DNA, 120 bp, Artificial Sequence
  ENSG00000101203_61 (sequence is synthesized)
cacacccatgactccacagtaattcatgggttaaagagaaaaaaggaaacgtgaagatacttgtaaccaaataatgatggatgcagcgccacgtcagaatctctgtgctgcagctgcagt

SEQ ID NO: 122475 - DNA, 120 bp, Artificial Sequence
  ENSG00000101203_62 (sequence is synthesized)
atgcagcgccacgtcagaatctctgtgctgcagctgcagtggtacctagagggcaatttatagctgtaaatacagtgctttgttttgttttcttgttttttgagacaaggtcttgctctg

SEQ ID NO: 122476 - DNA, 120 bp, Artificial Sequence
  ENSG00000101203_63 (sequence is synthesized)
gcaacctctgtgccaccctgggctcaagtggtcctcctgctccggtcttctgagtagcaggaaccacaggcgtgcgccaccacgcttggctaatgttttttgtatttttttaaatagaga

SEQ ID NO: 122477 - DNA, 90 bp, Artificial Sequence
  ENSG00000101203_64 (sequence is synthesized)
cacgcttggctaatgttttttgtatttttttaaatagagacagggtgttgccgtgttaacgatccaccctccttggcctcccaaagtggt

SEQ ID NO: 122478 - DNA, 120 bp, Artificial Sequence
  ENSG00000101203_65 (sequence is synthesized)
agtttttagggaagattccaactcaaacaattttaaatagtagaaaataaaccctgaagcagtgtgcattcattagtactgtgtttgcctgtatttaattaaaacctgattgccattggc

SEQ ID NO: 122479 - DNA, 120 bp, Artificial Sequence
  ENSG00000101203_66 (sequence is synthesized)
ggttctgctggatggtgacgtgggccccgcgtcgcccccagcagtcaggaggagtaggggcagggaggccccagagccctgggaggccttcagaggaagtccagcctccaggccaggccc

SEQ ID NO: 122480 - DNA, 120 bp, Artificial Sequence
  ENSG00000101203_67 (sequence is synthesized)
tcagcaccctctgggtgggaggcaggtgtcccgggcagggggctgtgggccacattgagggtcacctccagcttggcaccctcagggctgctcctgtcctgtcgtgggggccgccctgct

SEQ ID NO: 122481 - DNA, 120 bp, Artificial Sequence
  ENSG00000101203_68 (sequence is synthesized)
acagacgtctcaggaaactgggggcaacctggggggagccccgtgggctgtgggaacccctgcccccggcttggaagctgcccacagtggcctggttgcagcctggcagatgaggggtac

SEQ ID NO: 122482 - DNA, 120 bp, Artificial Sequence
  ENSG00000101203_69 (sequence is synthesized)
atcactactcagaataaacggccccctctgcacccacctgtctagatgagggtgacaggcactatcacagggcccccacctgacgccttcccacctggccatgcccccccagaactgtca

SEQ ID NO: 122483 - DNA, 120 bp, Artificial Sequence
  ENSG00000101203_70 (sequence is synthesized)
tggagcccaggaggcgcctgtgtggagcacggggacctggcacgctgctgcccctagatctcagactcccatctaaggaccagacctgctgcctgtgcccagggaggggccctgacaccc

SEQ ID NO: 122484 - DNA, 120 bp, Artificial Sequence
  ENSG00000101203_71 (sequence is synthesized)
gtccccgtcagaacagggccccaagccactgcattgctccgtcctcacatgccctccctttcctcgcaggggagcctggagctgttggtcagatgggcagccctgggcagcagggggcta

SEQ ID NO: 122485 - DNA, 120 bp, Artificial Sequence
  ENSG00000101203_72 (sequence is synthesized)
ttttcttgtctaatggtgttggtgaatactccagaattttgtcagagaacagtggcagtagcagatactctcattttcttcttggcctaacagaagtgcttctagcatttgaccattaaa

SEQ ID NO: 122486 - DNA, 120 bp, Artificial Sequence
  ENSG00000101203_73 (sequence is synthesized)
gtgctgtcctggaagcggagacaggtgcattttgtcatgtggtagtgaagtccatccactcttcttttattagatttaaaacaccaagaatgcacattaaacaagctctagtgctgttat

SEQ ID NO: 122487 - DNA, 120 bp, Artificial Sequence
  ENSG00000101203_74 (sequence is synthesized)
ggacataatgaaatgactgtgcgtcttggagctattaattgtaggatatccctaaatactggatgattgctgcatccgtcgaaaatctgacgtggtcgctgaattctcgttatccatgcc

SEQ ID NO: 122488 - DNA, 120 bp, Artificial Sequence
  ENSG00000101203_75 (sequence is synthesized)
atgtgctgcagagctcagcttgctgacattttgttttggatttcgcactgatgcttctaaataagactgtcacagttttctttatagtgtttggaacctcagtttgctttgttcaaaaga

SEQ ID NO: 122489 - DNA, 120 bp, Artificial Sequence
  ENSG00000101203_76 (sequence is synthesized)
taatttgagtttaaatagcagcagtgtcctctgccccacagggttggatttcccataaaacctgagtctagtgttttggggtccagggcttaagaaagttttctgtctcttccatacagt

SEQ ID NO: 122490 - DNA, 120 bp, Artificial Sequence
  ENSG00000101203_77 (sequence is synthesized)
tggcctgtgggggtctctggcttttcctcggtgatttctgcagcgccccccacaccccgttagaacccagagttgggcaggggagggctgggggtgaggttggttggaactggcttcaca

SEQ ID NO: 122491 - DNA, 120 bp, Artificial Sequence
  ENSG00000101203_78 (sequence is synthesized)
ggcttggctctgccattctctagctctgcagacccctgctgtgggttctcccagaccctcccagggtgagcagtgagggtgctggggctgcccctgctcctttaatggaggtgtctccat

SEQ ID NO: 122492 - DNA, 120 bp, Artificial Sequence
  ENSG00000101203_79 (sequence is synthesized)
gtcggtctgggtctgaatgcccagagggctgggagggctggctgtgacccagaggggccacaggaggggtggcaagcgtgaccttgtcaggccctacccgctgcctgtgtctccagggag

SEQ ID NO: 122493 - DNA, 120 bp, Artificial Sequence
  ENSG00000101203_80 (sequence is synthesized)
cgggccacccggacagatgggaccagaaggtcctggaggccagcagggctcgccggggacccagggccgtgcagtccaggggcctgtggtaggtgtcactccttccctgccctcctgccc

SEQ ID NO: 122494 - DNA, 120 bp, Artificial Sequence
  ENSG00000101203_81 (sequence is synthesized)
gagagcccgggccacccggacagatgggaccagaaggtcctggaggccagcagggctcgccggggacccagggccgtgcagtccaggggcctgtgggtccaccaggggtcaaaggagaga

SEQ ID NO: 122495 - DNA, 120 bp, Artificial Sequence
  ENSG00000101203_82 (sequence is synthesized)
gacttcctgttgaccgctcagagacttcctgttggccactcagggacttcctattgaccacccagggacttcctattgaccactcagggacttcccatttgttgttggaggcctgttctg

SEQ ID NO: 122496 - DNA, 120 bp, Artificial Sequence
  ENSG00000101203_83 (sequence is synthesized)
agctgggagcttggtgttggtgctagtacaagagagtgtagctaagggctggttctgcacctctcccaaccccacccaggacagacgtggtggaggggaggtggtggggcggcaggctcc

SEQ ID NO: 122497 - DNA, 120 bp, Artificial Sequence
  ENSG00000101203_84 (sequence is synthesized)
atggagggtagggggacagacgtgggagatgggggtgtagtgtcccctgggggatgccttggccttcagcagctccatgggcccccccttaggtgggctccaggttcaccaaggagctgg

SEQ ID NO: 122498 - DNA, 120 bp, Artificial Sequence
  ENSG00000101203_85 (sequence is synthesized)
ggaggtggaagaagacagaagacggcagggaagtgccagcacaggcctgacccgggcccggggcccgggaggggtctgttctctgggcagtgtcccacacccgccatctcccctagcaca

SEQ ID NO: 122499 - DNA, 120 bp, Artificial Sequence
  ENSG00000101203_86 (sequence is synthesized)
aaatctacagccagaggcaagtcctttgtggcacaagttccagccccactcaggactctgctgcagaaccgagcctctcacatgcctgctctcgggtgcaggcgaggaccacaggctcct

SEQ ID NO: 122500 - DNA, 120 bp, Artificial Sequence
  ENSG00000101203_87 (sequence is synthesized)
aggatctgggaatttgggatggggctttcacaccgccactgtggctatcaggctgcctgagtgaggatccacctcagggccatctcacacttgtcacgtgtggtctcaggccatctctgc

SEQ ID NO: 122501 - DNA, 120 bp, Artificial Sequence
  ENSG00000101203_88 (sequence is synthesized)
ggagagaagggcgagccgcagtcccttgccaccctctaccagcttgtgagccaggcctgtgagtctgccattcagagtgagtgaggccagcagccctgcacctgtgcctaccacacctgt

SEQ ID NO: 122502 - DNA, 120 bp, Artificial Sequence
  ENSG00000101203_89 (sequence is synthesized)
ctgtcctcacactggccaggccgagggaggccgccttcacccatcgttagcacacctgggccaggtgtcctggcgtggcctgcacaggcctcgcatccccgggtccccactgtgtcctgc

SEQ ID NO: 122503 - DNA, 80 bp, Artificial Sequence
  ENSG00000101204_0 (sequence is synthesized)
gcgccccacaggagaagacgaaccgggcccggcggccgaagcggcccgcgaggcgcgggaggcatgaagttgggcgcgca

SEQ ID NO: 122504 - DNA, 120 bp, Artificial Sequence
  ENSG00000101204_1 (sequence is synthesized)
cctcgaagcggcggggagccgggagccgcccgcatctagagcccgcgaggtgcgtgcgccatggagctagggggccccggagcgccgcggctgctgccgccgctgctgctgcttctgggg

SEQ ID NO: 122505 - DNA, 120 bp, Artificial Sequence
  ENSG00000101204_2 (sequence is synthesized)
ggggaccggcctcctgcgcgccagcagccatgtggagacccgggcccacgccgaggagcggctcctgaagaaactcttctccggttacaacaagtggtcccgacccgtggccaacatctc

SEQ ID NO: 122506 - DNA, 120 bp, Artificial Sequence
  ENSG00000101204_3 (sequence is synthesized)
ggacgtggtcctcgtccgcttcggcctgtccatcgctcagctcattgacgtggatgagaagaaccagatgatgaccacgaacgtatgggtgaagcaggagtggcacgactacaagctgcg

SEQ ID NO: 122507 - DNA, 120 bp, Artificial Sequence
  ENSG00000101204_4 (sequence is synthesized)
ctgggacccagctgactatgagaatgtcacctccatccgcatcccctccgagctcatctggcggccggacatcgtcctctacaacaatgctgacggggacttcgcggtcacccacctgac

SEQ ID NO: 122508 - DNA, 120 bp, Artificial Sequence
  ENSG00000101204_5 (sequence is synthesized)
caaggcccacctgttccatgacgggcgggtgcagtggactcccccggccatttacaagagctcctgcagcatcgacgtcaccttcttccccttcgaccagcagaactgcaccatgaaatt

SEQ ID NO: 122509 - DNA, 120 bp, Artificial Sequence
  ENSG00000101204_6 (sequence is synthesized)
cggctcctggacctacgacaaggccaagatcgacctggtgaacatgcacagccgcgtggaccagctggacttctgggagagtggcgagtgggtcatcgtggatgccgtgggcacctacaa

SEQ ID NO: 122510 - DNA, 120 bp, Artificial Sequence
  ENSG00000101204_7 (sequence is synthesized)
caccaggaagtacgagtgctgtgccgagatctacccggacatcacctatgccttcgtcatccggcggctgccgctcttctacaccatcaacctcatcatcccctgcctgctcatctcctg

SEQ ID NO: 122511 - DNA, 120 bp, Artificial Sequence
  ENSG00000101204_8 (sequence is synthesized)
cctcaccgtgctggtcttctacctgccctccgagtgtggcgagaagatcacgctgtgcatctccgtgctgctgtcgctcaccgtcttcctgctgctcatcaccgagatcatcccgtccac

SEQ ID NO: 122512 - DNA, 120 bp, Artificial Sequence
  ENSG00000101204_9 (sequence is synthesized)
ctcactggtcatcccactcatcggcgagtacctgctgttcaccatgatcttcgtcaccctgtccatcgtcatcacggtcttcgtgctcaacgtgcaccaccgctcgccacgcacgcacac

SEQ ID NO: 122513 - DNA, 120 bp, Artificial Sequence
  ENSG00000101204_10 (sequence is synthesized)
catgcccacctgggtacgcagggtcttcctggacatcgtgccacgcctgctcctcatgaagcggccgtccgtggtcaaggacaattgccggcggctcatcgagtccatgcataagatggc

SEQ ID NO: 122514 - DNA, 120 bp, Artificial Sequence
  ENSG00000101204_11 (sequence is synthesized)
cagtgccccgcgcttctggcccgagccagaaggggagccccctgccacgagcggcacccagagcctgcacccgccctcaccgtccttctgtgtccccctggatgtgccggctgagcctgg

SEQ ID NO: 122515 - DNA, 120 bp, Artificial Sequence
  ENSG00000101204_12 (sequence is synthesized)
gccttcctgcaagtcaccctccgaccagctccctcctcagcagcccctggaagctgagaaagccagcccccacccctcgcctggaccctgccgcccgccccacggcacccaggcaccagg

SEQ ID NO: 122516 - DNA, 120 bp, Artificial Sequence
  ENSG00000101204_13 (sequence is synthesized)
gctggccaaagccaggtccctcagcgtccagcacatgtccagccctggcgaagcggtggaaggcggcgtccggtgccggtctcggagcatccagtactgtgttccccgagacgatgccgc

SEQ ID NO: 122517 - DNA, 120 bp, Artificial Sequence
  ENSG00000101204_14 (sequence is synthesized)
ccccgaggcagatggccaggctgccggcgccctggcctctcgcaacacccactcggctgagctcccacccccagaccagccctctccgtgcaaatgcacatgcaagaaggagccctcttc

SEQ ID NO: 122518 - DNA, 120 bp, Artificial Sequence
  ENSG00000101204_15 (sequence is synthesized)
ggtgtccccgagcgccacggtcaagacccgcagcaccaaagcgccgcccccgcacctgcccctgtcgccggccctgacccgggcggtggagggcgtccagtacattgcagaccacctgaa

SEQ ID NO: 122519 - DNA, 120 bp, Artificial Sequence
  ENSG00000101204_16 (sequence is synthesized)
ggccgaagacacagacttctcggtgaaggaggactggaagtacgtggccatggtcatcgaccgcatcttcctctggatgttcatcatcgtctgcctgctggggacggtgggcctcttcct

SEQ ID NO: 122520 - DNA, 120 bp, Artificial Sequence
  ENSG00000101204_17 (sequence is synthesized)
gccgccctggctggctggcatgatctaggaagggaccgggagcctgcgtggcctggggctgccgtgcacggggccagcatccatgcggccggcctggggccgggctggcttctccctgga

SEQ ID NO: 122521 - DNA, 120 bp, Artificial Sequence
  ENSG00000101204_18 (sequence is synthesized)
ctctgtggggccacacgtttgccaaattttccttcctgttctgtgtctgctgtaagacggccttggacggggacacggcctctggggagaccgagtgtggagctgcttccagttggactg

SEQ ID NO: 122522 - DNA, 120 bp, Artificial Sequence
  ENSG00000101204_19 (sequence is synthesized)
tggcctcaggaggcagtggcttggagcagaggtgggggtcggcgccttctacctgcaggactcgggctaagtccagttcaagagtctcctgagctcccctgcagatggaactcactcctc

SEQ ID NO: 122523 - DNA, 120 bp, Artificial Sequence
  ENSG00000101204_20 (sequence is synthesized)
ccagtctctcagcagatctggtgatggtcccgaccgccccaaggggcccttgaagggagttcacgccccttcagccccaagcgccccgtcttctggaggcccggccgcctctcccaccca

SEQ ID NO: 122524 - DNA, 120 bp, Artificial Sequence
  ENSG00000101204_21 (sequence is synthesized)
ccgtgtcctgcgcctgtgtgggcttcaacttctcccccagggtccttgagcctctcgggccccatgagggtgagccagcagcgctccaatctgcttcgctaggagagggtccaggcaggg

SEQ ID NO: 122525 - DNA, 120 bp, Artificial Sequence
  ENSG00000101204_22 (sequence is synthesized)
attgtgtttggttgtgttttgggtaagttagtgagaactcaagtcttgtgcctaaggagccttggagaacagagttttgtggagctggttccgcgtggggagaatcgggaggcccacgcg

SEQ ID NO: 122526 - DNA, 120 bp, Artificial Sequence
  ENSG00000101204_23 (sequence is synthesized)
ggagaccaggactctgccttccaggcgtagggccagggctctggcaggtggccagggctccacgggggcctagtggcttcagcccctggggtacttctgtgttgtgattccccggagctg

SEQ ID NO: 122527 - DNA, 120 bp, Artificial Sequence
  ENSG00000101204_24 (sequence is synthesized)
ggaaggtcccgaatggagtccagacctgggccctggttcccccaggaccctgagggtttccaccttggcgcgcagcccgggagatccgccctgggctctgggttcgggaagaaggacttc

SEQ ID NO: 122528 - DNA, 120 bp, Artificial Sequence
  ENSG00000101204_25 (sequence is synthesized)
ctgctacagtagctgtggggagctggtgggggcatccttgaggacctccacctgggagatgctgggaccctcggggcaggaagtccctgagaagcctcatgggagtcagggagccctggg

SEQ ID NO: 122529 - DNA, 120 bp, Artificial Sequence
  ENSG00000101204_26 (sequence is synthesized)
gtttccacacaggcccatgccctccgtcctggcagggcaggcagagctcagcacagcctcacccctgcaggcggtatccagaggtgagggaggcctgaaatgtttccaggcatgaccctg

SEQ ID NO: 122530 - DNA, 120 bp, Artificial Sequence
  ENSG00000101204_27 (sequence is synthesized)
gagcccggcagtgcaccccctaaagatggcgcacccggcagccccccagtgtccccaggggcacacttccccttgggatgggcacaggctgccccacccctccatgattccaagggccca

SEQ ID NO: 122531 - DNA, 120 bp, Artificial Sequence
  ENSG00000101204_28 (sequence is synthesized)
gaggggcggggccaggatggcgtgtcccctgcctgtgagtgacatcggttcaggaggagacagtcaggaagcctcctgctgagtggtccacattctgctgcccccagaccccatccagcc

SEQ ID NO: 122532 - DNA, 120 bp, Artificial Sequence
  ENSG00000101204_29 (sequence is synthesized)
aggggtggggatggggttgggctctgcgtcccactgagtctcattcctctgtccccgagccgagctctcctgggccagggtctcgtcaggaggtgcctgagagcagaatgaataattgag

SEQ ID NO: 122533 - DNA, 120 bp, Artificial Sequence
  ENSG00000101204_30 (sequence is synthesized)
gttaggaacccggcatgccgagtgccccagaaatgccgctgtgtccccgcgggcagtgacgtgagtggggaggagactcaggcccacattgcccacacctgcctctgaactgctgctggt

SEQ ID NO: 122534 - DNA, 120 bp, Artificial Sequence
  ENSG00000101204_31 (sequence is synthesized)
cacccccacccccgggtgcctgtgaccggggtcctgaggctggggcttttgtgccaggagtgggtgggacacagagacccccgtgccaaatcctgggcatccccagccccctggcccctc

SEQ ID NO: 122535 - DNA, 120 bp, Artificial Sequence
  ENSG00000101204_32 (sequence is synthesized)
ccacatcccccgtgtattcaggaccccatctgctgagctctgacctgcccccgctctgccatcagcccctgctgctcctcggccagagctcccaggacgcagggagaccctgggagagtg

SEQ ID NO: 122536 - DNA, 120 bp, Artificial Sequence
  ENSG00000101204_33 (sequence is synthesized)
aggtcatcccggggccatggaagctggcaggagacactggtctcagaggagggatagagacgcagatttcagatgtaagaagcccgatccacattgcataagtggacccagctgccagat

SEQ ID NO: 122537 - DNA, 120 bp, Artificial Sequence
  ENSG00000101204_34 (sequence is synthesized)
gtgtgggcagctgcagggagtggcccggggtgctgggcccagctgtggttgttcttttctgggtcaggagtgactgcggagtggctgggacgctcctgccgggggaccctcctgccgggg

SEQ ID NO: 122538 - DNA, 120 bp, Artificial Sequence
  ENSG00000101204_35 (sequence is synthesized)
gtggccgcttgcctgggggaagacccctttccctttctttttttttttgaggctcaaaaaaaaaatccaaataaagcaccatattcccaccacgccaaattaaccttgacaacaatgttg

SEQ ID NO: 122539 - DNA, 120 bp, Artificial Sequence
  ENSG00000101204_36 (sequence is synthesized)
gcgtatttgcgtccagtgctgtttttattaattaaggtaaaatttacatatggtgagatgcatgctcttcagtggagacccagcccctagaaggtccctccagcccttcctgtcggcgtc

SEQ ID NO: 122540 - DNA, 120 bp, Artificial Sequence
  ENSG00000101204_37 (sequence is synthesized)
cctccccatctgtggctctgacttaagcaccgtggattgacctctccggctcacgaccttcgaggagtcagaatcctgcagttggagcctttgatgtctggcttcttcatcctatgactt

SEQ ID NO: 122541 - DNA, 120 bp, Artificial Sequence
  ENSG00000101204_38 (sequence is synthesized)
agagcttcatccgtgctgttgtgtgtgtccgtagctccttgctgtctgttccttcgtttttaattgtgagcagtgttcttctgtctgaataaactaagacgcagtttgtccatcacctgt

SEQ ID NO: 122542 - DNA, 120 bp, Artificial Sequence
  ENSG00000101204_39 (sequence is synthesized)
tagtggactttgcttgcagctgtcggtgattaggaatggaggtgccggtgtgtgcatggcactctatccgttatgcatgtttattttctgcatctgttaatgttttaacatctttcagac

SEQ ID NO: 122543 - DNA, 120 bp, Artificial Sequence
  ENSG00000101204_40 (sequence is synthesized)
ccaggactgctcctcctagggccagttagttcccgggggtggacagcttgcctagaacccaccttgccagggctgtgacccccgaccccctatcaaagtctcacactaagccaacgtttc

SEQ ID NO: 122544 - DNA, 120 bp, Artificial Sequence
  ENSG00000101204_41 (sequence is synthesized)
cccgccctgtgccaggcaccaggcagcgggagacactgctgcagctcgaagcctgccggggcgccggcccctctgcggctgcttgcgccatcctgccccctccttcccaggggaggcccc

SEQ ID NO: 122545 - DNA, 120 bp, Artificial Sequence
  ENSG00000101204_42 (sequence is synthesized)
agtgaaggccctggccagggcttcccagccccttctgcctccggaccggcctgggtgcttcccgtgtggcccggcctggggcgacgtggccctcctctcaggaagcgtggtaatctctca

SEQ ID NO: 122546 - DNA, 120 bp, Artificial Sequence
  ENSG00000101204_43 (sequence is synthesized)
atggctggcctccggagttgtcactcaggctcccttgtaagttaaggccgggcccaggacactctagggcacgcagctgctgtgggactgctgggttaggtgtcccctggagcagaggcg

SEQ ID NO: 122547 - DNA, 120 bp, Artificial Sequence
  ENSG00000101204_44 (sequence is synthesized)
gcttcggatttctaaagtggctgagtcctttcaccttgcaccagaaatgctggatcaggcgcagcacacacagcacctggggatgcaagcccggccagccccatggaccaagccccgccg

SEQ ID NO: 122548 - DNA, 120 bp, Artificial Sequence
  ENSG00000101204_45 (sequence is synthesized)
accgtgtggcccgccgagcccaggtgcggccgcccggcttctgcaggcaatgtctgccaagccctggaatgtgctcccagtgtgtgcacagacttcaatgaataaaacgcaccgtcacca

SEQ ID NO: 122549 - DNA, 120 bp, Artificial Sequence
  ENSG00000101204_46 (sequence is synthesized)
ggcctgtccatcgctcagctcattgacgtggtcgcccgtccaccatatcttgccctggccgtgtccttgtgccagtggctgtagatgaggaaacctagggccagagaaagacaccaaggg

SEQ ID NO: 122550 - DNA, 120 bp, Artificial Sequence
  ENSG00000101204_47 (sequence is synthesized)
gtcctctacaacaactgcaggagagcccttttgggcaggagtgcttttcgccatcagaccccatcctggcctttctgggagaatagtgtggactgcagggtgccctggagagggtgctga

SEQ ID NO: 122551 - DNA, 120 bp, Artificial Sequence
  ENSG00000101204_48 (sequence is synthesized)
ggcctcctgcgcggtaagttacggggcgcgggatgggccccctttcgcccgcgttcggatggcctgggacccccagagccagagggaggcaggctcctgactgcggtcccaagccgcggg

SEQ ID NO: 122552 - DNA, 120 bp, Artificial Sequence
  ENSG00000101204_49 (sequence is synthesized)
agcactgggagggttggtgttgctgctcagcacgggggctcagaagccctccccacgcccccattatcctcagcttccccaggctccatccagcaggagggagcagacggtgggccctgc

SEQ ID NO: 122553 - DNA, 120 bp, Artificial Sequence
  ENSG00000101204_50 (sequence is synthesized)
ctcctggccttgagaccagaagacggcccagggtttgaagcaggtgaaagtctgagctacttctgcaagtgcagcctttgttccaaggaagcagggctgccccgcaccccggtgtgcagg

SEQ ID NO: 122554 - DNA, 120 bp, Artificial Sequence
  ENSG00000101204_51 (sequence is synthesized)
ggggcagctggcttttcccgtctgcagagctccgtctccccaggaggggcgtcctgtctcgggccagcatgaccgccgtctccctgctgctgaaggggagggccccctttctgtgggcct

SEQ ID NO: 122555 - DNA, 120 bp, Artificial Sequence
  ENSG00000101204_52 (sequence is synthesized)
tggcctctgtctgtcaaatgacgacgagttctgtggatagaacaaggttagaaacgccacctgacagagcggcctgcaatgcccatcactgtcctggagccagacaggtggaggagagac

SEQ ID NO: 122556 - DNA, 120 bp, Artificial Sequence
  ENSG00000101204_53 (sequence is synthesized)
ctcagggctgggccgggtcagctgactccagagtggacaccaggcaatgcccagggaggggactcctggaagaagccggcctcttgacttagggttaaatgtcctctggtttgaagacac

SEQ ID NO: 122557 - DNA, 120 bp, Artificial Sequence
  ENSG00000101204_54 (sequence is synthesized)
aagagtctgcatttgcccaatacttggggttctcagcttttctccaacctggtcatcacagagtgaccagcattggcctggcaatggtgccttcacatgggagcgaaaaggaccagcctg

SEQ ID NO: 122558 - DNA, 120 bp, Artificial Sequence
  ENSG00000101204_55 (sequence is synthesized)
aggtgaggaggatgggtcctgtgtccccactctcccctgagcccggggcgttgcagtggccttgaccttcagccctgggcttcttcctacccgagtccccggcagtgtccctcagcccag

SEQ ID NO: 122559 - DNA, 120 bp, Artificial Sequence
  ENSG00000101204_56 (sequence is synthesized)
cccggcccgttcagcctttgtctggggccagtcactgagggtggcttccccgggacgtcccgggctcccttgaaggagctgctctcagcgcgattctgcggacggatggcggcatctgtg

SEQ ID NO: 122560 - DNA, 120 bp, Artificial Sequence
  ENSG00000101204_57 (sequence is synthesized)
ctgagccctccactgtcttgggctcttctaatatcacactgagcactgggcgttgttcgtcccactctacggatgagaaagtcggggctcatgtaggtggaggaaactgcctgagcacca

SEQ ID NO: 122561 - DNA, 120 bp, Artificial Sequence
  ENSG00000101204_58 (sequence is synthesized)
gaacccggggaggcgccgaggctggaccgagcccaccctggctgtgcctgtgccgagctgagcctgctgtggctgtgttgctgcacatttaccaggcagggactcagtttcccctggggt

SEQ ID NO: 122562 - DNA, 120 bp, Artificial Sequence
  ENSG00000101204_59 (sequence is synthesized)
acaactgagggctgggctgggggatcacaaagagggaggcagcacgaggtgcttgtgggggctctgggctgcacgttccagcaggagcaggggcgacggcccacgtctctgaacaggctc

SEQ ID NO: 122563 - DNA, 120 bp, Artificial Sequence
  ENSG00000101204_60 (sequence is synthesized)
ttttagtggtgctgggcgggacccgggtgtgcccctcccgtgggccagagcgactctagggcccaggcctggactcttgggctgcaggtgagagccaggcggcggggcagggagtcagag

SEQ ID NO: 122564 - DNA, 120 bp, Artificial Sequence
  ENSG00000101204_61 (sequence is synthesized)
gcagaggcaggggcgaggcagctcctcccggctgcaccccgagacactggaggaagctgtctctgagctcttcctcctgctgtccagaccaggcgctgaaatcaaagacagaactgatac

SEQ ID NO: 122565 - DNA, 120 bp, Artificial Sequence
  ENSG00000101204_62 (sequence is synthesized)
tgaccacaaaacctctcagagccacttcattggagaagattagggtcaggcagctgcgggcagctcacagccggcacggggcttccctctgggaggctgggatttgatctccctgtgcag

SEQ ID NO: 122566 - DNA, 120 bp, Artificial Sequence
  ENSG00000101204_63 (sequence is synthesized)
gattttccataggaagagtcagtcccgtgcgcctcctttaagccttaaccaaagcggggttcctccatcaggcctgcgggggcccaaggcccccagctgttgcccgtgtgcacacctgga

SEQ ID NO: 122567 - DNA, 120 bp, Artificial Sequence
  ENSG00000101204_64 (sequence is synthesized)
ccttcctgccttcagccatgcccgaggctctgccctgggtaataggtctgccctgggtggaggcgctgccctaggtggtgggtctgcactgggtggcgggtctggagtggccaaggcagg

SEQ ID NO: 122568 - DNA, 120 bp, Artificial Sequence
  ENSG00000101204_65 (sequence is synthesized)
tgcggccctcctgggcccttcagtcggctggggcgagagttaaccaacagtctccatggcggggaacaggagggacctgtcccgtgagaggggagtcagggaggactcttgggaagatgg

SEQ ID NO: 122569 - DNA, 120 bp, Artificial Sequence
  ENSG00000101204_66 (sequence is synthesized)
cctttcattcaaggcctgaatgagaatcagccagatgtgctggggccaggcaggtggggacgagtgcgcgggggggggctcagcatcttctagaaccaaccacacacctgcaagagagaa

SEQ ID NO: 122570 - DNA, 120 bp, Artificial Sequence
  ENSG00000101204_67 (sequence is synthesized)
gacagggtagacccctgcggccccctggggctgagacggctttaggatggtactccagttgcccccatcctttcccgagaccctcctggacctgagctccgggatgcaggagcgccccgg

SEQ ID NO: 122571 - DNA, 120 bp, Artificial Sequence
  ENSG00000101204_68 (sequence is synthesized)
tgttccgtccttgtcctcacgggactcagagcctccctccacgagatgctgctgggctcacctgtcctggtggttttcctgagccaggaatagagtcttcacctgacctaacctgaggcc

SEQ ID NO: 122572 - DNA, 120 bp, Artificial Sequence
  ENSG00000101204_69 (sequence is synthesized)
atgcccaggccactctgaagtgagatccgacggcctggggaggttcaggggctcataggtggctgcgcccaaccctgccacacttctcctggacctatcagaggtgcatgctgtggtcag

SEQ ID NO: 122573 - DNA, 120 bp, Artificial Sequence
  ENSG00000101204_70 (sequence is synthesized)
tgcctggagacagagcagctccaggccacccacccttccggtctgaagcgtctcaccccacacaaggccccagcaccacaagcccattctccccgttccttggagcagaccctggtggca

SEQ ID NO: 122574 - DNA, 120 bp, Artificial Sequence
  ENSG00000101204_71 (sequence is synthesized)
gcatctacaggggggtcccaggcagcctcaccgcaggcaccacggaggcacggaagagctgccttgcgccagcacagggcacgcagggacgtctgggtgccccggctggcagccactctc

SEQ ID NO: 122575 - DNA, 120 bp, Artificial Sequence
  ENSG00000101204_72 (sequence is synthesized)
cccgcaggcagggtctagtgtatccgtgtgcgatgtctgtgattgggctttgtgctgggagcgtaatgaggagcctccccggcctccccagaccccgtcgctgatgggggaaggacacgt

SEQ ID NO: 122576 - DNA, 120 bp, Artificial Sequence
  ENSG00000101204_73 (sequence is synthesized)
ggccatcataacacatacatcaccaaacgtgggcttccagcgcggaggaagcaaattaaacgctgcaaacgagcgtcagggtaattatccccaccagggctgggacagggtccaggcctc

SEQ ID NO: 122577 - DNA, 120 bp, Artificial Sequence
  ENSG00000101204_74 (sequence is synthesized)
cctgagaacggggcagacgcatgttgagcgcttaagagacggggaactggggcaaaggtgctggtgccacaacagcccagacacagaggagggtcgaggccgccccacacccccatctgc

SEQ ID NO: 122578 - DNA, 120 bp, Artificial Sequence
  ENSG00000101204_75 (sequence is synthesized)
tgcgaggaagagaacgatttggagaggagctgaaagtcaagtgagtgcagcccatgaggggaagctcgttggtttaattccagatggttaggaggctcagagacaccatcggagccgtga

SEQ ID NO: 122579 - DNA, 120 bp, Artificial Sequence
  ENSG00000101204_76 (sequence is synthesized)
atattcatgagccggcagccttgcccaggtagccgaggcctggctggtggctgcgttggctccgctcatttttgaaacgacacagcacttctggattggagacgtgatgagctatttgta

SEQ ID NO: 122580 - DNA, 120 bp, Artificial Sequence
  ENSG00000101204_77 (sequence is synthesized)
gacatgtccttgttgataaggaaacggcactggttgacagaactctccaccctccggcgcggctgggctcttctcccgggggtggggcgggggcattgggggcccgggtttggggaatgg

SEQ ID NO: 122581 - DNA, 120 bp, Artificial Sequence
  ENSG00000101204_78 (sequence is synthesized)
ggcatcaagaagctgtgagggtagagaagggccctgggctgggtcaggctgaaatgggtccgtctccccagcccttggctctgtcatcatgggagtaacagaataataatgtcaccccat

SEQ ID NO: 122582 - DNA, 120 bp, Artificial Sequence
  ENSG00000101204_79 (sequence is synthesized)
ggcccagcctggcccagcggggcctatgccagccccatgcatgccagcccaggcccaggaaggaagaagcaggagcaatggagaaattggtgtgggttgaggagggaagggtccccccag

SEQ ID NO: 122583 - DNA, 120 bp, Artificial Sequence
  ENSG00000101204_80 (sequence is synthesized)
gccagcaaagaggctgagggcatccctgggtctcagcactggagcgtcagagccggaggggcctgagagtggctatggcacctggacacagtgtccctgcctggaccagtcctgaggcct

SEQ ID NO: 122584 - DNA, 120 bp, Artificial Sequence
  ENSG00000101204_81 (sequence is synthesized)
ggggtgggaagggctcatgtgaggagctgaaaggaagtggacgtgctgggcagggggctggggcagcctggagagctcctggacagctcccggctcctgtcccgcctgcacctgagccac

SEQ ID NO: 122585 - DNA, 120 bp, Artificial Sequence
  ENSG00000101204_82 (sequence is synthesized)
tgactgaggtcgccctgcaaggagcacaggggtctgggtgggcagaggggacacagccatcaacactccccgtggctgtgagtgtccggcccgggctggtacgtcagaacgacagccacc

SEQ ID NO: 122586 - DNA, 120 bp, Artificial Sequence
  ENSG00000101204_83 (sequence is synthesized)
ggacatcgtcctctacaacaaggagaagtggaaacgcccaggatgggccgggcagagaagccgctctgggtgcctgtgcacagccctccaggaatgcagcccccaggaacgaagcctctg

SEQ ID NO: 122587 - DNA, 120 bp, Artificial Sequence
  ENSG00000101204_84 (sequence is synthesized)
gatgccgagggaggaggctttttcgattcccgcactgcgaggtactcagcagcgatgaagcccccagggctgggccacagctgtgccatcacacccccggccccggggctgaccctttgc

SEQ ID NO: 122588 - DNA, 120 bp, Artificial Sequence
  ENSG00000101204_85 (sequence is synthesized)
tgtgggtgtgggtgtggacgtgggcatgggtgtggcagtgggcgtgggtgtggacgtgggcatggatgtgggggtctcacacccttcgctctcttcctgcccagtgctgacggggacttc

SEQ ID NO: 122589 - DNA, 120 bp, Artificial Sequence
  ENSG00000101204_86 (sequence is synthesized)
gtcccgcccatggctgtgttgggcgcctctgacccagacggaaccggcggacgccctttcttcctggtgtgtaatccaggagccgggcccaggcctcaggctgcttcgctttggggtgca

SEQ ID NO: 122590 - DNA, 120 bp, Artificial Sequence
  ENSG00000101210_0 (sequence is synthesized)
ccctctggctgagacctcggctccggaatcactgcagcccccctcgccctgagccagagcaccccgggtcccgccagcccctcacactcccagcaaaatgggcaaggagaagacccacat

SEQ ID NO: 122591 - DNA, 120 bp, Artificial Sequence
  ENSG00000101210_1 (sequence is synthesized)
caacatcgtggtcatcggccacgtggactccggaaagtccaccaccacgggccacctcatctacaaatgcggaggtattgacaaaaggaccattgagaagttcgagaaggaggcggctga

SEQ ID NO: 122592 - DNA, 120 bp, Artificial Sequence
  ENSG00000101210_2 (sequence is synthesized)
gatggggaagggatccttcaagtatgcctgggtgctggacaagctgaaggcggagcgtgagcgcggcatcaccatcgacatctccctctggaagttcgagaccaccaagtactacatcac

SEQ ID NO: 122593 - DNA, 120 bp, Artificial Sequence
  ENSG00000101210_3 (sequence is synthesized)
catcatcgatgcccccggccaccgcgacttcatcaagaacatgatcacgggtacatcccaggcggactgcgcagtgctgatcgtggcggcgggcgtgggcgagttcgaggcgggcatctc

SEQ ID NO: 122594 - DNA, 120 bp, Artificial Sequence
  ENSG00000101210_4 (sequence is synthesized)
caagaatgggcagacgcgggagcatgccctgctggcctacacgctgggtgtgaagcagctcatcgtgggcgtgaacaaaatggactccacagagccggcctacagcgagaagcgctacga

SEQ ID NO: 122595 - DNA, 120 bp, Artificial Sequence
  ENSG00000101210_5 (sequence is synthesized)
cgagatcgtcaaggaagtcagcgcctacatcaagaagatcggctacaacccggccaccgtgccctttgtgcccatctccggctggcacggtgacaacatgctggagccctcccccaacat

SEQ ID NO: 122596 - DNA, 120 bp, Artificial Sequence
  ENSG00000101210_6 (sequence is synthesized)
gccgtggttcaagggctggaaggtggagcgtaaggagggcaacgcaagcggcgtgtccctgctggaggccctggacaccatcctgccccccacgcgccccacggacaagcccctgcgcct

SEQ ID NO: 122597 - DNA, 120 bp, Artificial Sequence
  ENSG00000101210_7 (sequence is synthesized)
ctttgcgccagtgaacatcaccactgaggtgaagtcagtggagatgcaccacgaggctctgagcgaagctctgcccggcgacaacgtcggcttcaatgtgaagaacgtgtcggtgaagga

SEQ ID NO: 122598 - DNA, 120 bp, Artificial Sequence
  ENSG00000101210_8 (sequence is synthesized)
catccggcggggcaacgtgtgtggggacagcaagtctgacccgccgcaggaggctgctcagttcacctcccaggtcatcatcctgaaccacccggggcagattagcgccggctactcccc

SEQ ID NO: 122599 - DNA, 120 bp, Artificial Sequence
  ENSG00000101210_9 (sequence is synthesized)
ggtcatcgactgccacacagcccacatcgcctgcaagtttgcggagctgaaggagaagattgaccggcgctctggcaagaagctggaggacaaccccaagtccctgaagtctggagacgc

SEQ ID NO: 122600 - DNA, 120 bp, Artificial Sequence
  ENSG00000101210_10 (sequence is synthesized)
ggccatcgtggagatggtgccgggaaagcccatgtgtgtggagagcttctcccagtacccgcctctcggccgcttcgccgtgcgcgacatgaggcagacggtggccgtaggcgtcatcaa

SEQ ID NO: 122601 - DNA, 120 bp, Artificial Sequence
  ENSG00000101210_11 (sequence is synthesized)
gaacgtggagaagaagagcggcggcgccggcaaggtcaccaagtcggcgcagaaggcgcagaaggcgggcaagtgaagcgcgggcgcccgcggcgcgaccctccccggcggtgccgcgct

SEQ ID NO: 122602 - DNA, 120 bp, Artificial Sequence
  ENSG00000101210_12 (sequence is synthesized)
ccccgcccccgccccgcgcgccggtccggcgccccgcacccccgccaggcgcatgtctgcacctccgcttgccagaggccctcggtcagcgactggatgctcgccatcaaggtccagtgg

SEQ ID NO: 122603 - DNA, 120 bp, Artificial Sequence
  ENSG00000101210_13 (sequence is synthesized)
atgctcgccatcaaggtccagtggaagttcttcaagaggaaaggcgcccccgccccaggcttccgcgcccagcgctcgccacgctcagtgcccgttttaccaataaactgagcgacccca

SEQ ID NO: 122604 - DNA, 120 bp, Artificial Sequence
  ENSG00000101210_14 (sequence is synthesized)
aactcccgtggtggccaggcttggcatctcccagccccagggcatggggctcaggtgacctcctccagggcaggagggacccccgctgtggggcactcaggcctcagagggtctggtggg

SEQ ID NO: 122605 - DNA, 120 bp, Artificial Sequence
  ENSG00000101210_15 (sequence is synthesized)
ccctctggctgagacctcggctccggggatgcctgtccagcctgtgccaggacagtctctgctggtgtctccccctggggctccccatcaccggtctccccaccaccactggccccacag

SEQ ID NO: 122606 - DNA, 120 bp, Artificial Sequence
  ENSG00000101210_16 (sequence is synthesized)
gtggtgagatctgggggccctggcctccccacccccacccgtgttcccaccccagggtggcttctgtcctctttccctcccccagccacctgtccgcgaggagcagcgtgggtttctcca

SEQ ID NO: 122607 - DNA, 120 bp, Artificial Sequence
  ENSG00000101210_17 (sequence is synthesized)
ctgacctctgtgatgggacagggctgtgacccagggtcctgagtcacagggagggggggagggagggtgccccctatacccccacggggccgagggcatctccacctggcacttgctggg

SEQ ID NO: 122608 - DNA, 120 bp, Artificial Sequence
  ENSG00000101210_18 (sequence is synthesized)
ctcggcagggccgggtcctccttcctcaggctggaacagggacccccacctcccggccgctgtctgtccctgtgagagtccgggaggggggtgcctagagctattctgggttcctaatct

SEQ ID NO: 122609 - DNA, 120 bp, Artificial Sequence
  ENSG00000101210_19 (sequence is synthesized)
gggcagcgcatctccgtcggggctctggcccagcctgccgggcagggatgaggggaagatggcgccgtccctgcctgaggaggggagtggggagcagtggccatctctccccggtggcag

SEQ ID NO: 122610 - DNA, 120 bp, Artificial Sequence
  ENSG00000101210_20 (sequence is synthesized)
cgggtgggggtggggcgccgtgtccctggccctgccgccggggaggggagtgcgcgtgcaggacagggccctggagcgctgggcaggtgactcatcacccggctctgctggtcacggacg

SEQ ID NO: 122611 - DNA, 120 bp, Artificial Sequence
  ENSG00000101210_21 (sequence is synthesized)
tacccagcctggcgctgcgtggtctctccaaatggtggctaaccccttcccaaggagcagcccgcgggctccaacgcccagttatttacagcagatggggctgtttgggctcaagtgtgg

SEQ ID NO: 122612 - DNA, 120 bp, Artificial Sequence
  ENSG00000101210_22 (sequence is synthesized)
ggtgggggcagtgcacagcctctgcttgccctggccaggcccagctgtgggtgggggcccttccctccccaccaaacatgggggcttggtttgtgggcagggatgcctgtccagcctgtg

SEQ ID NO: 122613 - DNA, 120 bp, Artificial Sequence
  ENSG00000101210_23 (sequence is synthesized)
ggtgggggaggggtggccatcgagctgccggacttgccctgtggtgagggaggtgacctgggagggtctgcagaaggctctggaactctgccatgttgagctggggctggagggcgctgg

SEQ ID NO: 122614 - DNA, 120 bp, Artificial Sequence
  ENSG00000101210_24 (sequence is synthesized)
agccttacccccttccccccagggccaaggctggggctggagatggtactgccctcacttgtcctagggccctgccagggcacacgctactattaatagctgattgatgggcagccggcc

SEQ ID NO: 122615 - DNA, 120 bp, Artificial Sequence
  ENSG00000101210_25 (sequence is synthesized)
cgtctgctccattttcttgtgctgggctgtggagggctgctgtccagggcagccctggggtgggggtcctggatgaggtgacctcctagctgaccttttgaagcgatttctctttggtgg

SEQ ID NO: 122616 - DNA, 120 bp, Artificial Sequence
  ENSG00000101210_26 (sequence is synthesized)
ctgagacggtggtggggagcggtcatgagacggggtctgctctctgatccccatcccccacccaggactctggggagaagcccactcctgggagggcctgtgggagctctcacctggatg

SEQ ID NO: 122617 - DNA, 120 bp, Artificial Sequence
  ENSG00000101210_27 (sequence is synthesized)
atgagggcggaggccagggcccaaggtgggggcactcgctgtcctgggctgagcctctgccctggcggggttgggggtgctctgagctgcacccctgagtttgggctgcatcacccttta

SEQ ID NO: 122618 - DNA, 120 bp, Artificial Sequence
  ENSG00000101210_28 (sequence is synthesized)
gccgctgtttcaggccccagctgggtcccatctgggtctgctccagactgggcagcctcctggagggcagagtcctgtctgtgcgaggccctggcgaggagttctgcccagctgggtagt

SEQ ID NO: 122619 - DNA, 120 bp, Artificial Sequence
  ENSG00000101210_29 (sequence is synthesized)
gaccgccgctgctgccctgactgaagcccgtccccttctgtgggggtctcactggccgaggccccccagcttcccgtgtccggcagagcgaggaaggggaggagaagcctcagagggatg

SEQ ID NO: 122620 - DNA, 120 bp, Artificial Sequence
  ENSG00000101210_30 (sequence is synthesized)
gggaggctggagcagcgggaaggagctgcgtggccaggccctcctcctgacctcattcagttttcctttctccttaccttaaaaaaacacacacacacagagggttatttatctgacagc

SEQ ID NO: 122621 - DNA, 120 bp, Artificial Sequence
  ENSG00000101210_31 (sequence is synthesized)
cccaaacacggtggtattattggcctctggttgaggaagggatctgggggcgtccgcagcttcagataaaggggagccctcgcccgggaggggtttatcccatctggcggcttcgctcgt

SEQ ID NO: 122622 - DNA, 120 bp, Artificial Sequence
  ENSG00000101210_32 (sequence is synthesized)
agagcgagcgactcccaggcccttgcgccacctgctggtggacctgcgtagccgcgcccatttcggagcaggtgcggaggccggccctggggggcagggtctgggtgtggggtcccgacg

SEQ ID NO: 122623 - DNA, 120 bp, Artificial Sequence
  ENSG00000101210_33 (sequence is synthesized)
gagggggccggcgtcccaggaccccgacggagagcaagggggtgctggagcccatctcccgcctctcgcggccactctgctgtaacaagcagctcgcaccaccagggactcctgggtccc

SEQ ID NO: 122624 - DNA, 120 bp, Artificial Sequence
  ENSG00000101210_34 (sequence is synthesized)
tccagggggctggcgcctgctggacagcagcaggactgtcctgggtgaggctgctgtcggcaggtggcctggcgtggggagaaaaccagaccctcaggctgggcgcagtggttcacgcct

SEQ ID NO: 122625 - DNA, 120 bp, Artificial Sequence
  ENSG00000101213_0 (sequence is synthesized)
acgcccagctctgggtgctccagctgggccacagcctggtcctgccgctgcgcccgcccgccatggtgtcccgggaccaggctcacctgggccccaagtatgtgggcctctgggacttca

SEQ ID NO: 122626 - DNA, 120 bp, Artificial Sequence
  ENSG00000101213_1 (sequence is synthesized)
agtcccggacggacgaggagctgagcttccgcgcgggggacgtcttccacgtggccaggaaggaggagcagtggtggtgggccacgctgctggacgaggcgggtggggccgtggcccagg

SEQ ID NO: 122627 - DNA, 120 bp, Artificial Sequence
  ENSG00000101213_2 (sequence is synthesized)
gctatgtgccccacaactacctggccgagagggagacggtggagtcggaaccgtggttctttggctgcatctcccgctcggaagctgtgcgtcggctgcaggccgagggcaacgccacgg

SEQ ID NO: 122628 - DNA, 120 bp, Artificial Sequence
  ENSG00000101213_3 (sequence is synthesized)
gcgccttcctgatcagggtcagcgagaagccgagtgccgactacgtcctgtcggtgcgggacacgcaggctgtgcggcactacaagatctggcggcgtgccgggggccggctgcacctga

SEQ ID NO: 122629 - DNA, 120 bp, Artificial Sequence
  ENSG00000101213_4 (sequence is synthesized)
acgaggcggtgtccttcctcagcctgcccgagcttgtgaactaccacagggcccagagcctgtcccacggcctgcggctggccgcgccctgccggaagcacgagcctgagcccctgcccc

SEQ ID NO: 122630 - DNA, 120 bp, Artificial Sequence
  ENSG00000101213_5 (sequence is synthesized)
attgggatgactgggagaggccgagggaggagttcacgctctgcaggaagctggggtccggctactttggggaggtcttcgaggggctctggaaagaccgggtccaggtggccattaagg

SEQ ID NO: 122631 - DNA, 120 bp, Artificial Sequence
  ENSG00000101213_6 (sequence is synthesized)
tgatttctcgagacaacctcctgcaccagcagatgctgcagtcggagatccaggccatgaagaagctgcggcacaaacacatcctggcgctgtacgccgtggtgtccgtgggggaccccg

SEQ ID NO: 122632 - DNA, 120 bp, Artificial Sequence
  ENSG00000101213_7 (sequence is synthesized)
tgtacatcatcacggagctcatggccaagggcagcctgctggagctgctccgcgactctgatgagaaagtcctgcccgtttcggagctgctggacatcgcctggcaggtggctgagggca

SEQ ID NO: 122633 - DNA, 120 bp, Artificial Sequence
  ENSG00000101213_8 (sequence is synthesized)
tgtgttacctggagtcgcagaattacatccaccgggacctggccgccaggaacatcctcgtcggggaaaacaccctctgcaaagttggggacttcgggttagccaggcttatcaaggagg

SEQ ID NO: 122634 - DNA, 120 bp, Artificial Sequence
  ENSG00000101213_9 (sequence is synthesized)
acgtctacctctcccatgaccacaatatcccctacaagtggacggcccctgaagcgctctcccgaggccattactccaccaaatccgacgtctggtcctttgggattctcctgcatgaga

SEQ ID NO: 122635 - DNA, 120 bp, Artificial Sequence
  ENSG00000101213_10 (sequence is synthesized)
tgttcagcaggggtcaggtgccctacccaggcatgtccaaccatgaggccttcctgagggtggacgccggctaccgcatgccctgccctctggagtgcccgcccagcgtgcacaagctga

SEQ ID NO: 122636 - DNA, 120 bp, Artificial Sequence
  ENSG00000101213_11 (sequence is synthesized)
tgctgacatgctggtgcagggaccccgagcagagaccctgcttcaaggccctgcgggagaggctctccagcttcaccagctacgagaacccgacctgagctgctgtggagcgggcatggc

SEQ ID NO: 122637 - DNA, 120 bp, Artificial Sequence
  ENSG00000101213_12 (sequence is synthesized)
tactgaggtgatgggtgcaggaaaggttcacaaatgtggagtgtctgcgtccaatacacgcgtgtgctcctctccttactccatcgtgtgtgccttgggtctcagctgctgacacgcagc

SEQ ID NO: 122638 - DNA, 120 bp, Artificial Sequence
  ENSG00000101213_13 (sequence is synthesized)
ctgctctggagcctgcagatgagatccgggagactgacacgaagccagcagaggtcagaggggactctgaccacagcccgctctctggctgtctgtctgcagtgcccggctgagggtggg

SEQ ID NO: 122639 - DNA, 120 bp, Artificial Sequence
  ENSG00000101213_14 (sequence is synthesized)
aggcaaacacgccttgttcctgctcttcccagttcagcttggtgggagaaagtcattcgcgtggctcgggacgctcatgtaaatttggttttggtgctcaagggttctttcctcccaggg

SEQ ID NO: 122640 - DNA, 120 bp, Artificial Sequence
  ENSG00000101213_15 (sequence is synthesized)
gcaggtgtttctttcctgtttgtcttgtgtcttgagagcttggccttatgaccagtgagaactctctccctggtctctgccagcccaagcatcactgcccgaggcgccagctcagtttca

SEQ ID NO: 122641 - DNA, 120 bp, Artificial Sequence
  ENSG00000101213_16 (sequence is synthesized)
ccgtccacgtccacaaggggcttttcccaccttcacctttgtcgctgggtcagtgctggaaagcgcccctcactcctgcgctgacaagggcccttctctactgtctgtggggtggttccg

SEQ ID NO: 122642 - DNA, 120 bp, Artificial Sequence
  ENSG00000101213_17 (sequence is synthesized)
ggctgggggggctgcctcctttgcacctgattttgaaggtgtctctttcatccatggttaagtcataaaaagcttattggttttggttttgactcacctgaaagtttttttggtttaaaa

SEQ ID NO: 122643 - DNA, 66 bp, Artificial Sequence
  ENSG00000101213_18 (sequence is synthesized)
tttgggagtttctggaaaggtactaggatttctcaaaaggatttgtcttctgccttgtgaaagaca

SEQ ID NO: 122644 - DNA, 120 bp, Artificial Sequence
  ENSG00000101213_19 (sequence is synthesized)
gatttctcaaaaggatttgtcttctgccttgtgaaagacagatgtcagactaatcaggcttatccgatgtgctacatgagatggaaagcgtgtgaaatagtaagtcacactaagtcttct

SEQ ID NO: 122645 - DNA, 120 bp, Artificial Sequence
  ENSG00000101213_20 (sequence is synthesized)
ggaggttctatttacgggtttggttttgatatgaatgttgcagaaactctataaaattcctagaaatctgatacgttatcctatgatatatatcctatctcacatgctattcctagaaat

SEQ ID NO: 122646 - DNA, 120 bp, Artificial Sequence
  ENSG00000101213_21 (sequence is synthesized)
ctggtgcaatgttatcagtcataattttggttattacattaaaatgctgcatgccacagaaataaccaagtttccttgccaaccgtgtcacgaatataataaactctcatcagatcctga

SEQ ID NO: 122647 - DNA, 120 bp, Artificial Sequence
  ENSG00000101216_0 (sequence is synthesized)
gcgaggacttcttggagtgctttctgcacctgaaactcagttcagggattggggctggctttgagttcaggccaggagagacggaagaactggcaagccgggagcctgcgtccagggaag

SEQ ID NO: 122648 - DNA, 120 bp, Artificial Sequence
  ENSG00000101216_1 (sequence is synthesized)
ttgcttggaattccaggcccctcctgtcctcctgctctgagccccacgtggagggagtggctctgtgctttctacccaagggtttcggcttatccagtgggaaaaacgggtggagtgcgc

SEQ ID NO: 122649 - DNA, 120 bp, Artificial Sequence
  ENSG00000101216_2 (sequence is synthesized)
ttacaccgccctcggaaccagagcctggagtagcccttctgttgccgctcgtttttgtcaggaggtagcagtctgggactcaagggtgggtctttggagctgattagagatgcctttgtg

SEQ ID NO: 122650 - DNA, 120 bp, Artificial Sequence
  ENSG00000101216_3 (sequence is synthesized)
agtgctatgttgtgtggatgtggagatgactccatccctgtgccctgccttgcttcctccaggacttgggaccctggaggactgacgctgctggcctgggcgtccccttccgctgagcca

SEQ ID NO: 122651 - DNA, 120 bp, Artificial Sequence
  ENSG00000101216_4 (sequence is synthesized)
tggcgactcccgacgtgagtgtgcacatggaggaggtggtggttgtgacaactccggacactgcagtggacggcagtggtgtggagggggtgaagaccgtgttggtgacgaccaacttgg

SEQ ID NO: 122652 - DNA, 120 bp, Artificial Sequence
  ENSG00000101216_5 (sequence is synthesized)
cccctcacgggggcgacctgacggaagataacatggagacagaaaatgcagcggcagcagctgccgcggccttcacagcctcctcccagctcaaggaagccgtgttagtgaagatggctg

SEQ ID NO: 122653 - DNA, 120 bp, Artificial Sequence
  ENSG00000101216_6 (sequence is synthesized)
aagagggggagaacctggaagctgagattgtgtaccccatcacctgtggagacagcagagccaacctcatctggaggaagtttgtgtgtcccggcatcaatgtgaaatgtgttcagtacg

SEQ ID NO: 122654 - DNA, 120 bp, Artificial Sequence
  ENSG00000101216_7 (sequence is synthesized)
acgagcatgtaatcagcccaaaggaatttgtgcacctggccgggaagtccaccctgaaggactggaagagagccatccgcatgaacggcatcatgctcaggaagatcatggactccgggg

SEQ ID NO: 122655 - DNA, 120 bp, Artificial Sequence
  ENSG00000101216_8 (sequence is synthesized)
aactggacttctaccagcatgacaaggtctgctccaacacctgccgcagcacaaagattgacctctcaggagcccgtgtgtccctgagcagccccacgtcggccgagtacattcccctca

SEQ ID NO: 122656 - DNA, 120 bp, Artificial Sequence
  ENSG00000101216_9 (sequence is synthesized)
cgcccgccgcagccgacgtgaatgggtctcctgcgaccatcaccatagagacctgtgaagaccctggcgactggaccgcggccattggagatgacacatttaccttctggcgggggctga

SEQ ID NO: 122657 - DNA, 120 bp, Artificial Sequence
  ENSG00000101216_10 (sequence is synthesized)
aggacgccggcctgctggacgaggtcatccaggagttccaccaggagctggtggagaccatgagaggcctgcagcagcgggtccaggaccctcccctgcagcttcgagatgctgtacttc

SEQ ID NO: 122658 - DNA, 120 bp, Artificial Sequence
  ENSG00000101216_11 (sequence is synthesized)
tcaacaacatcgtgcagaacttcggcatgctggacctggtgaagaaggtgctggccagccacaagtgccagatggaccgctcgcgggagcagtacgcccgggacctggcagccctggagc

SEQ ID NO: 122659 - DNA, 120 bp, Artificial Sequence
  ENSG00000101216_12 (sequence is synthesized)
agcagtgtgatgagcatcgtcgccgagccaaggagctgaagcacaagtcccagcacctcagcaacgtgctcatgacgctgacgccggtctccctgccaccgcctgtgaagcggccccggc

SEQ ID NO: 122660 - DNA, 120 bp, Artificial Sequence
  ENSG00000101216_13 (sequence is synthesized)
ttgcacgtgccacatcaggaccggccgccatggcctcgcaggtgctcacccagtctgcccagctggcgcttggcccgggcgtgcccgtcccccagctgaccagcgtgccccttggtaaag

SEQ ID NO: 122661 - DNA, 120 bp, Artificial Sequence
  ENSG00000101216_14 (sequence is synthesized)
tggtgtccaccctgccgtccaccgtcctgggcaagggttcccttcaggcgccccccgccagctccccggcctccccgctgctcgggggatacacagtcttggcctcttccggctccacct

SEQ ID NO: 122662 - DNA, 120 bp, Artificial Sequence
  ENSG00000101216_15 (sequence is synthesized)
accccagcacagtggagatccacccggacgcgtccagcctcacggtcctgagcacggccgccgtgcaggacggtagcacggtgttcaaggtggtcagcccgctacagctgctcacgttgc

SEQ ID NO: 122663 - DNA, 120 bp, Artificial Sequence
  ENSG00000101216_16 (sequence is synthesized)
ctggcctgggccccaccctgcagaacgtggcccaggcctcgcctggctccagcacaattgtgacagtgcccgcaggggctgcccccgggcctgaggagcacacggccaccattgaggtgg

SEQ ID NO: 122664 - DNA, 120 bp, Artificial Sequence
  ENSG00000101216_17 (sequence is synthesized)
ctgccatggcagaggaccacgagcggaagtagccgacaggagggcgaggcccctgggacggacagggctggctgtctctcagccgcggcagcagggagcgggcagaggccgcagggctgg

SEQ ID NO: 122665 - DNA, 120 bp, Artificial Sequence
  ENSG00000101216_18 (sequence is synthesized)
cacgtttcctcccccttttttcttgggaaatatatttttccatctgttgcttattaatactgtttacacattgggccttgatcaggagccaggtgggcgggggctagggggagcctgggt

SEQ ID NO: 122666 - DNA, 120 bp, Artificial Sequence
  ENSG00000101216_19 (sequence is synthesized)
gcagcagagacagaggaagcagagccaggtgccgagcgcgaccctgcaggtgctggacgcggtgcagcaggtcacgaggcccccatgtctgcacccagccaggtccctggggacgttact

SEQ ID NO: 122667 - DNA, 120 bp, Artificial Sequence
  ENSG00000101216_20 (sequence is synthesized)
aactcatgacttgggagctaagcccaagtgtgaaacctctggatcctatggatttggtttcttcccacagttttctgtaggtttagtgtggctggcgccccgttctcctccagttgggaa

SEQ ID NO: 122668 - DNA, 120 bp, Artificial Sequence
  ENSG00000101216_21 (sequence is synthesized)
catgcacccggagcttggggtgcagatcctgatgggtgcctgcctcccccgcccccagccggtgctcaggtggcccaggggccgcacagacgaggcgtggtccaggcattgttgcacatg

SEQ ID NO: 122669 - DNA, 120 bp, Artificial Sequence
  ENSG00000101216_22 (sequence is synthesized)
tactgagggtgtttttaagtgaattgcttagtaggcttctaggaagagtcagatttatagcattttcaaccaaaataatggtgagtgcctaggcttcccgagttagctctttgggtggcc

SEQ ID NO: 122670 - DNA, 120 bp, Artificial Sequence
  ENSG00000101216_23 (sequence is synthesized)
cctgagcccctgtgagtgcacttgaccgggtgcggaggtcctgggcagcctgtccctgagccggcccctcccaggggtctgagatccatgaggtgtgtccctagggcttcagtcctgggg

SEQ ID NO: 122671 - DNA, 120 bp, Artificial Sequence
  ENSG00000101216_24 (sequence is synthesized)
cagaggcataaacagaaccagtcactatggaggtcgaggattcccatgtgggcccttcagcttgggctgcttggccacggaacagcccttggctccctggcccccggcccccatgcagcc

SEQ ID NO: 122672 - DNA, 120 bp, Artificial Sequence
  ENSG00000101216_25 (sequence is synthesized)
cctgggctggcccttggtggtctctgtccaagggagagcccctgggtgttcaggaggctgccccgggtgggctgctcagggcagctgccgaaggtggagcccagagcctgtctggaaggg

SEQ ID NO: 122673 - DNA, 120 bp, Artificial Sequence
  ENSG00000101216_26 (sequence is synthesized)
ctgtctgtggctgtcctgagacctggccttggactcacaaggaagaccaggctgaggcccctccaggccagggtcctggggcaggcatctcagggagcagccagcccaggcctcctgccg

SEQ ID NO: 122674 - DNA, 120 bp, Artificial Sequence
  ENSG00000101216_27 (sequence is synthesized)
tctccaacagggcatgtcccgggaggaccctgagtgccagattcccctggacgctcctgctgattctgtcggcagttgaaggcccgtctgaggccccgcaatgcgagggtcctgtgtccc

SEQ ID NO: 122675 - DNA, 120 bp, Artificial Sequence
  ENSG00000101216_28 (sequence is synthesized)
acttcactgctccgaagggaactggctggctgtccgtccagtgagcggcccagaccccacctctgcgccattgtcaccagggccctgtcctggctgccctcacccatgtcaagctactga

SEQ ID NO: 122676 - DNA, 120 bp, Artificial Sequence
  ENSG00000101216_29 (sequence is synthesized)
ggctgtgtcttgtttgttttctctgttacatttttgtttgctgttgtcacagtcagctggtttcggcgtgatgttgatcttttgatgtacatactccgttttaaactcatttccactcta

SEQ ID NO: 122677 - DNA, 120 bp, Artificial Sequence
  ENSG00000101216_30 (sequence is synthesized)
gttgagttctgcagcatgcagcggtatgaccctacgggggtcaggagagccctgcggcccccacccaccagctcagaacctgtcactaatacagctgcctgtgaccctgggacccgcaac

SEQ ID NO: 122678 - DNA, 120 bp, Artificial Sequence
  ENSG00000101216_31 (sequence is synthesized)
cttccagctgcttccctttgtcaaagtcacgagtgcgtctgccttgacagccctcgtcaacagaacttccagtgggttgtgggttcatttcctttctttttaagaacagggttgggacct

SEQ ID NO: 122679 - DNA, 120 bp, Artificial Sequence
  ENSG00000101216_32 (sequence is synthesized)
tttctgcccctgccccttagctactgaggcatagggagaggaagttaatttcagagccatacaaaaataagccacaaccagcttcagaattaattcccaatcccccattccaccagggct

SEQ ID NO: 122680 - DNA, 120 bp, Artificial Sequence
  ENSG00000101216_33 (sequence is synthesized)
gggagcccattcccagtgcttcccaaggccctcggggacatctaccgccaacccagctgcttctggcaggggctccaagccccagcgtggggaagggccctggagaagccctcatcctca

SEQ ID NO: 122681 - DNA, 120 bp, Artificial Sequence
  ENSG00000101216_34 (sequence is synthesized)
tgggaaccacactgcagtgggtggggaaggttgttgtcagcaccgcccccggctcctccaggtcctgctggctcctcgggggcagggttccctggacctcccagttctgcgccttggggc

SEQ ID NO: 122682 - DNA, 120 bp, Artificial Sequence
  ENSG00000101216_35 (sequence is synthesized)
cagccagtactcagagaggaggaccttctcaaccacgtacagaacacgggttttcatggctgcctttggtttggttttctgagaagataggattggattggattttgcagagggtgagaa

SEQ ID NO: 122683 - DNA, 120 bp, Artificial Sequence
  ENSG00000101216_36 (sequence is synthesized)
cttctctgtgcctgctcagaggcgccctagggaagggccatgtttgagttttgctttgtatgttgttttgcaagtatctgcctggtactttgatttaaaataaaaacaattttcatagtt

SEQ ID NO: 122684 - DNA, 120 bp, Artificial Sequence
  ENSG00000101220_0 (sequence is synthesized)
gttctgatgcttctccaggccgggccaggcacccgggacgcgtctcgggcccgcacgggggttgcttctttcgagacaggggatggggtggaaggggaagaggtccaaaccctggggtcg

SEQ ID NO: 122685 - DNA, 120 bp, Artificial Sequence
  ENSG00000101220_1 (sequence is synthesized)
aaacaggagtgatggagggttcctcagctcctgaacgagaccaacacggcccgtatcgatggccgaagccggcgtggaagcccagggagaaaggccaccttcgggagctccacccagccc

SEQ ID NO: 122686 - DNA, 120 bp, Artificial Sequence
  ENSG00000101220_2 (sequence is synthesized)
cgagacgcgcccgacagccctcccgagagcgaagggcccaagggaggtgcgtcctaagcaaggttcaaggctagaggcgctatcccccaggcggaagaaggagcgggggcggggcctatc

SEQ ID NO: 122687 - DNA, 120 bp, Artificial Sequence
  ENSG00000101220_3 (sequence is synthesized)
cgaggccctccttctccctcttcgagtggtcggttctggcccctggcctagttgggccgcctgcccgtcttcctcgcgagagctcgcccggcaggcgcggactagcagggcgctgcctcg

SEQ ID NO: 122688 - DNA, 120 bp, Artificial Sequence
  ENSG00000101220_4 (sequence is synthesized)
gcgaccctggcacgtgacgtaggcggccctcgccagttggccgttctttggagcccgctcattggtccggagcgtccctcgccccaccctcccagatcaaccaatgggcggaggcggggg

SEQ ID NO: 122689 - DNA, 120 bp, Artificial Sequence
  ENSG00000101220_5 (sequence is synthesized)
cgcggcgcggggctcccttcctcgtgctcggcgttgagctcctgcagccgccgccgctgcagtggtcgtccctgccctccccggccccggggtgcaccccgcaaggctcccgctggtgtc

SEQ ID NO: 122690 - DNA, 120 bp, Artificial Sequence
  ENSG00000101220_6 (sequence is synthesized)
gcaaggctcccgctggtgtccctggagcatgggaggctgctgagcgtgagtggcggtgtctggcaggagctgcgtggcagggagggcgtccatggctgcagccaacaagggcaacaagcc

SEQ ID NO: 122691 - DNA, 120 bp, Artificial Sequence
  ENSG00000101220_7 (sequence is synthesized)
cggtggtcatggtcacccaggagagtgacagcagctttctggtcaaggttggcttcctgaagatcctgcacaggtatgagattaccttcactctgcccccagtgcacaggctgagcaagg

SEQ ID NO: 122692 - DNA, 120 bp, Artificial Sequence
  ENSG00000101220_8 (sequence is synthesized)
atgtccgcgaggcacctgtccccagcctgcacctcaagctcctcagcgtggtgcccgtccctgaaggttatagtgtcaagtgtgagtactcggcgcacaaagagggcgtcctcaaagagg

SEQ ID NO: 122693 - DNA, 120 bp, Artificial Sequence
  ENSG00000101220_9 (sequence is synthesized)
agatactgctagcctgcgaaggtggcactggcacctgtgtgcgcgtgacggtgcaggcccgcgtcatggaccggcaccacggcacgcccatgctgctggatggtgtcaagtgtgtgggcg

SEQ ID NO: 122694 - DNA, 120 bp, Artificial Sequence
  ENSG00000101220_10 (sequence is synthesized)
ccgagctggaatacgactcagagcacagcgactggcacggctttgactgaggcccgaggccccgcctgccccgggcccctcagccttaaaccccgccttgtccccccgacatgctgcgtg

SEQ ID NO: 122695 - DNA, 120 bp, Artificial Sequence
  ENSG00000101220_11 (sequence is synthesized)
atggtgtggcttcctcgcccctctctggggtgggtgtgggggtggagtggccttgcccacgcctctcacctctgccttcatttgtgctgccaccctgcccctccctcgtcctcctctccc

SEQ ID NO: 122696 - DNA, 120 bp, Artificial Sequence
  ENSG00000101220_12 (sequence is synthesized)
acttcctcctctctgtgtgcctcagtctcctgccggaagaaatgggttgagcccgaaaggaggctgtctgaggaagggagagggagggcctggggtgggtcccccactccccaccccaag

SEQ ID NO: 122697 - DNA, 120 bp, Artificial Sequence
  ENSG00000101220_13 (sequence is synthesized)
ccacagggactcccaccagggtctgggagaggacggagctggctctgtggcgtcgtggccccattactgctgccttgcttcagccacctctcctgcccctccctagtccccactgctgtc

SEQ ID NO: 122698 - DNA, 120 bp, Artificial Sequence
  ENSG00000101220_14 (sequence is synthesized)
caccatgagtaggagggaggtgcagtccccagcccccacccctcaggtctgtgttacttggtttttaagcgactggttgggatagaaccctaaagaaataaacttccagtggataccgga

SEQ ID NO: 122699 - DNA, 120 bp, Artificial Sequence
  ENSG00000101220_15 (sequence is synthesized)
tgaggccacccctctgctccctgcctcccggttccttcccgttcgccgaggtcccctcccggtcccggccctgtcctgagcagtcagtgcctgggaccccagcggccgtgatggcagggc

SEQ ID NO: 122700 - DNA, 120 bp, Artificial Sequence
  ENSG00000101220_16 (sequence is synthesized)
tggggtggggggctccgctgtcggggccgggcctggaggactccccagcacctgaactagagtgatgtcaggttcccggggcgcagtgaccgttagctggtgcagctggggtgttttccg

SEQ ID NO: 122701 - DNA, 120 bp, Artificial Sequence
  ENSG00000101220_17 (sequence is synthesized)
cgaagcgattgtccgggggcatgagtgcggtagtgagggcgggggcgtaatggggtcagcgccccctcctccccacgaccctgttcattgccgctgcctcgctgcatgaccttggaccag

SEQ ID NO: 122702 - DNA, 120 bp, Artificial Sequence
  ENSG00000101222_0 (sequence is synthesized)
agaaaacaatatggccgctcccagctgggacgtgagtctctggattaggcaggcagaggcagttatgggcttctgcagtggcgagaaaggaagcgcctgaagggtcgtgaggctggggcg

SEQ ID NO: 122703 - DNA, 120 bp, Artificial Sequence
  ENSG00000101222_1 (sequence is synthesized)
ggacccggcaccgctggggcggccaggccgtgaggacgccaatggcgagcagcgtggacgaggaggcgctgcaccagctgtacctgtgggtagacaacatccctctgtcccggcccaagc

SEQ ID NO: 122704 - DNA, 120 bp, Artificial Sequence
  ENSG00000101222_2 (sequence is synthesized)
gaaacctctcccgggactttagcgatggagtccttgttgcagaggtcatcaagttttacttccccaagatggtggagatgcacaattatgtccccgccaactctctccagcagaagctca

SEQ ID NO: 122705 - DNA, 120 bp, Artificial Sequence
  ENSG00000101222_3 (sequence is synthesized)
gcaactggggtcatctgaacaggaaggtactgaagaggctgaacttttcagtaccggatgacgtgatgcgcaagatcgcgcagtgcgccccaggcgtggtggagctggtgctcatcccgc

SEQ ID NO: 122706 - DNA, 120 bp, Artificial Sequence
  ENSG00000101222_4 (sequence is synthesized)
tgaggcagcgcctggaggagaggcagaggcgcaggaagcagggcgccggctccttacaggagctggctccccaggatggcagtggctacatggatgtgggtgtatcccagaaggcccgag

SEQ ID NO: 122707 - DNA, 120 bp, Artificial Sequence
  ENSG00000101222_5 (sequence is synthesized)
gtgaaggtgtcccggacccccagggagggggtcagctcagctgggaccggccgccggcgcctcggcctccagcgtataaccgggcgttgcagggcgaccccagcttcgtcctccagatcg

SEQ ID NO: 122708 - DNA, 120 bp, Artificial Sequence
  ENSG00000101222_6 (sequence is synthesized)
ttggcctctcaagagaccgtgcaggtcctgcagatgaaggtaaggcgcctggagcacctgctccagctcaagaatgtgcggatcgaagacctctcccggcggctccagcaggcggagcgt

SEQ ID NO: 122709 - DNA, 120 bp, Artificial Sequence
  ENSG00000101222_7 (sequence is synthesized)
gcgtaagcagcggtgagcggcggcccgggccgcgcggggacgcccgggtacccgccagagccccgacgccgcgccggacccacccaccgatggatagaccattgggagggcggagcccgc

SEQ ID NO: 122710 - DNA, 120 bp, Artificial Sequence
  ENSG00000101222_8 (sequence is synthesized)
ctcacgagcctgctggggcccgagtgccctccttccttgggatgggtgagcgtgggaggagatgggacaggaactctaggagcgcaggcccgggactgagccgcctcctaccactccgga

SEQ ID NO: 122711 - DNA, 120 bp, Artificial Sequence
  ENSG00000101222_9 (sequence is synthesized)
gatccgggtcaggagaatggaccgctttccagagcccagaagccacgtgcagagacctagcctgtcccccaaagcagtgtccaacaccttgggcccggccttgcatctcccggcgctggg

SEQ ID NO: 122712 - DNA, 120 bp, Artificial Sequence
  ENSG00000101222_10 (sequence is synthesized)
ccttggggggcggtcccttggctctgtccacacccccagaatcaggtccccgcccagctccgaggacggcggcgtctccatccaggctagttccccatgccctcagccatgggggaatct

SEQ ID NO: 122713 - DNA, 120 bp, Artificial Sequence
  ENSG00000101222_11 (sequence is synthesized)
gtcccgggccgctgaggggctcccctgcccctcctgggagcttacctgggacccacctcggcgacggagaccgcagcagctggagaggaaggggtgaggcgtgggatcgccaggagtagg

SEQ ID NO: 122714 - DNA, 120 bp, Artificial Sequence
  ENSG00000101222_12 (sequence is synthesized)
gaggacatcgacgatgtgcccgtagcagtcgcccctccctcctcgcgcacggggtactgaggcggaaggtttgaaggttacggctcagggctgccccattaaagtcagtgttgtgttcta

SEQ ID NO: 122715 - DNA, 120 bp, Artificial Sequence
  ENSG00000101222_13 (sequence is synthesized)
ctccctcccggttggagctttccttctgtccttcttcctgtcacttgtgagagtggaagtagggagggggaagcaggagaatgagactccagcacagtcattcctccacttgccttgtct

SEQ ID NO: 122716 - DNA, 120 bp, Artificial Sequence
  ENSG00000101222_14 (sequence is synthesized)
caggtgtatcccagaaggcccgaggtgaaggtgtcccggacccccagggagggggtcagctcaggtaaagaagctgggagttccagacttcaccaggctggtgatctctgcacacagctg

SEQ ID NO: 122717 - DNA, 120 bp, Artificial Sequence
  ENSG00000101222_15 (sequence is synthesized)
gggttggggggcacggtacgctgagcctgagacgggaggcaggaaaggggctagagggggagaagggaaggcctggtcgagggccctggaagggtgagtgtagggcccgaggtccaagcc

SEQ ID NO: 122718 - DNA, 120 bp, Artificial Sequence
  ENSG00000101224_0 (sequence is synthesized)
gcgtgaccttgattgagttaatgaacttcacgcctcagcgtccaggtctgtaaaatggggtgtctaacgcagaccgtacagcccagctgggtttagcaaacttccgggagccagttggag

SEQ ID NO: 122719 - DNA, 120 bp, Artificial Sequence
  ENSG00000101224_1 (sequence is synthesized)
cctctccccatccctagcggtgatcccaggtgacgacatgccgcggggggtcctgcggaggccaccctagggcgttgctgctgcctttgggagtgtggagctccaaaccatgtcgcgaga

SEQ ID NO: 122720 - DNA, 120 bp, Artificial Sequence
  ENSG00000101224_2 (sequence is synthesized)
ggcggattttgggaggccgggatcctcgcgccagggggatgtgcgagggtgtgggataaatcttaattcctccggcccacccaaagcctggaaatccagcctccgcgcctcttgccctgc

SEQ ID NO: 122721 - DNA, 120 bp, Artificial Sequence
  ENSG00000101224_3 (sequence is synthesized)
gggccccgccctcagtcccgccctcatctaacccgctaccccattggtggcgtccggcggcgcggctgctgttatttttcgaatatataaggaggtggaagtggcagctgcaactagagg

SEQ ID NO: 122722 - DNA, 120 bp, Artificial Sequence
  ENSG00000101224_4 (sequence is synthesized)
cttccctggctggtgcctgagcccggcgtccctcgccccccgccctccccgcatccctctcctccctcgcgcctggccctgtggctcttcctccctccctccttccccccccccccaccc

SEQ ID NO: 122723 - DNA, 120 bp, Artificial Sequence
  ENSG00000101224_5 (sequence is synthesized)
agccagctgtgccggcgtttgttggctgccctgcgcccggccctccagccagccttctgccggccccgccgcgatggaggtgccccagccggagcccgcgccaggctcggctctcagtcc

SEQ ID NO: 122724 - DNA, 120 bp, Artificial Sequence
  ENSG00000101224_6 (sequence is synthesized)
cgcgccaggctcggctctcagtccagcaggcgtgtgcggtggcgcccagcgtccgggccacctcccgggcctcctgctgggatctcatggcctcctggggtccccggtgcgggcggccgc

SEQ ID NO: 122725 - DNA, 120 bp, Artificial Sequence
  ENSG00000101224_7 (sequence is synthesized)
ttcctcgccggtcaccaccctcacccagaccatgcacgacctcgccgggctcggcagcgaaaccccaaagagtcaggtagggaccctgctcttccgcagccgcagccgcctgacgcacct

SEQ ID NO: 122726 - DNA, 120 bp, Artificial Sequence
  ENSG00000101224_8 (sequence is synthesized)
atccctgtctcgacgggcatccgaatcctccctgtcgtctgaatcctccgaatcttctgatgcaggtctctgcatggattcccccagccctatggacccccacatggcggagcagacgtt

SEQ ID NO: 122727 - DNA, 120 bp, Artificial Sequence
  ENSG00000101224_9 (sequence is synthesized)
tgaacaggccatccaggcagccagccggatcattcgaaacgagcagtttgccatcagacgcttccagtctatgccggtgaggctgctgggccacagccccgtgcttcggaacatcaccaa

SEQ ID NO: 122728 - DNA, 120 bp, Artificial Sequence
  ENSG00000101224_10 (sequence is synthesized)
ctcccaggcgcccgacggccggaggaagagcgaggcgggcagtggagctgccagcagctctggggaagacaaggagaatgatggatttgtcttcaagatgccatggaagcccacacatcc

SEQ ID NO: 122729 - DNA, 120 bp, Artificial Sequence
  ENSG00000101224_11 (sequence is synthesized)
cagctccacccatgctctggcagagtgggccagccgcagggaagcctttgcccagagacccagctcggcccccgacctgatgtgtctcagtcctgaccggaagatggaagtggaggagct

SEQ ID NO: 122730 - DNA, 120 bp, Artificial Sequence
  ENSG00000101224_12 (sequence is synthesized)
cagccccctggccctaggtcgcttctctctgacccctgcagagggggatactgaggaagatgatggatttgtggacatcctagagagtgacttaaaggatgatgatgcagttcccccagg

SEQ ID NO: 122731 - DNA, 120 bp, Artificial Sequence
  ENSG00000101224_13 (sequence is synthesized)
catggagagtctcattagtgccccactggtcaagaccttggaaaaggaagaggaaaaggacctcgtcatgtacagcaagtgccagcggctcttccgctctccgtccatgccctgcagcgt

SEQ ID NO: 122732 - DNA, 120 bp, Artificial Sequence
  ENSG00000101224_14 (sequence is synthesized)
agcccgcgtcctccgctcaaaatcactgtgtcacgatgagatcgagaacctcctggacagtgaccaccgagagctgattggagattactctaaggccttcctcctacagacagtagacgg

SEQ ID NO: 122733 - DNA, 120 bp, Artificial Sequence
  ENSG00000101224_15 (sequence is synthesized)
aaagcaccaagacctcaagtacatctcaccagaaacgatggtggccctattgacgggcaagttcagcaacatcgtggataagtttgtgattgtagactgcagatacccctatgaatatga

SEQ ID NO: 122734 - DNA, 120 bp, Artificial Sequence
  ENSG00000101224_16 (sequence is synthesized)
aggcgggcacatcaagactgcggtgaacttgcccctggaacgcgacgccgagagcttcctactgaagagccccatcgcgccctgtagcctggacaagagagtcatcctcattttccactg

SEQ ID NO: 122735 - DNA, 120 bp, Artificial Sequence
  ENSG00000101224_17 (sequence is synthesized)
tgaattctcatctgagcgtgggccccgcatgtgccgtttcatcagggaacgagaccgtgctgtcaacgactaccccagcctctactaccctgagatgtatatcctgaaaggcggctacaa

SEQ ID NO: 122736 - DNA, 120 bp, Artificial Sequence
  ENSG00000101224_18 (sequence is synthesized)
ggagttcttccctcagcacccgaacttctgtgaaccccaggactaccggcccatgaaccacgaggccttcaaggatgagctaaagaccttccgcctcaagactcgcagctgggctgggga

SEQ ID NO: 122737 - DNA, 120 bp, Artificial Sequence
  ENSG00000101224_19 (sequence is synthesized)
gcggagccggcgggagctctgtagccggctgcaggaccagtgaggggcctgcgccagtcctgctacctcccttgcctttcgaggcctgaagccagctgccctatgggcctgccgggctga

SEQ ID NO: 122738 - DNA, 120 bp, Artificial Sequence
  ENSG00000101224_20 (sequence is synthesized)
gggcctgctggaggcctcaggtgctgtccatgggaaagatggtgtgggtgtcctgcctgtctgccccagcccagattcccctgtgtcatcccatcattttccatatcctggtgcccccca

SEQ ID NO: 122739 - DNA, 120 bp, Artificial Sequence
  ENSG00000101224_21 (sequence is synthesized)
cccctggaagagcccagtctgttgagttagttaagttgggttaataccagcttaaaggcagtattttgtgtcctccaggagcttcttgtttccttgttagggttaacccttcatcttcct

SEQ ID NO: 122740 - DNA, 120 bp, Artificial Sequence
  ENSG00000101224_22 (sequence is synthesized)
gtgtcctgaaacgctcctttgtgtgtgtgtcagctgaggctgggggagagccgtggtccctgaggatgggtcagagctaaactccttcctggcctgagagtcagctctctgccctgtgta

SEQ ID NO: 122741 - DNA, 120 bp, Artificial Sequence
  ENSG00000101224_23 (sequence is synthesized)
cttcccgggccagggctgcccctaatctctgtaggaaccgtggtatgtctgccatgttgcccctttctcttttcccctttcctgtcccaccatacgagcacctccagcctgaacagaagc

SEQ ID NO: 122742 - DNA, 120 bp, Artificial Sequence
  ENSG00000101224_24 (sequence is synthesized)
tcttactctttcctatttcagtgttacctgtgtgcttggtctgtttgactttacgcccatctcaggacacttccgtagactgtttaggttcccctgtcaaatatcagttacccactcggt

SEQ ID NO: 122743 - DNA, 120 bp, Artificial Sequence
  ENSG00000101224_25 (sequence is synthesized)
cccagttttgttgccccagaaagggatgttattatccttgggggctcccagggcaagggttaaggcctgaatcatgagcctgctggaagcccagcccctactgctgtgaaccctggggcc

SEQ ID NO: 122744 - DNA, 120 bp, Artificial Sequence
  ENSG00000101224_26 (sequence is synthesized)
tgactgctcagaacttgctgctgtcttgttgcggatggatggaaggttggatggatgggtggatggccgtggatggccgtggatgcgcagtgccttgcatacccaaaccaggtgggagcg

SEQ ID NO: 122745 - DNA, 120 bp, Artificial Sequence
  ENSG00000101224_27 (sequence is synthesized)
ttttgttgagcatgacagcctgcagcaggaatatatgtgtgcctatttgtgtggacaaaaatatttacacttagggtttggagctattcaagaggaaatgtcacagaagcagctaaacca

SEQ ID NO: 122746 - DNA, 120 bp, Artificial Sequence
  ENSG00000101224_28 (sequence is synthesized)
aggactgagcaccctctggattctgaatctcaagatgggggcagggctgtgcttgaaggccctgctgagtcatctgttagggccttggttcaataaagcactgagcaagttgagaaacca

SEQ ID NO: 122747 - DNA, 80 bp, Artificial Sequence
  ENSG00000101224_29 (sequence is synthesized)
ctcctccccgccctccgcgcccacccccttcccgccgccgggacataccgcgggggggcgctgcggcctgctggacctgc

SEQ ID NO: 122748 - DNA, 120 bp, Artificial Sequence
  ENSG00000101224_30 (sequence is synthesized)
ctgcggcctgctggacctgcccgtgctgcggcctccggcgacccggcagcgacgcgggcggggacgcggtgcatcgctactgcgcccggcggacagcgacttgctgctcaaaaagaataa

SEQ ID NO: 122749 - DNA, 120 bp, Artificial Sequence
  ENSG00000101224_31 (sequence is synthesized)
gaaccagggtttttgtttgttttttttttttttaattaaggtaaaaataacgcacttttttttttgcggaacctgaaaaattcaagaagttgaaaaacgcttttcacgtcacctggagag

SEQ ID NO: 122750 - DNA, 120 bp, Artificial Sequence
  ENSG00000101224_32 (sequence is synthesized)
ttgccatgggaaccagaactgaatttgaaggccaaagcaggtgtggcctctgattttgggaatgaaacttcattctttgaggctcctggtcttaccaatttaactttctcccctctccct

SEQ ID NO: 122751 - DNA, 120 bp, Artificial Sequence
  ENSG00000101224_33 (sequence is synthesized)
ttgctgctgctcagcgcagccagtcgcggaggcggggaggctgcgcggtcagaggcgcctggagcgagcgaatcctggcccaccgcctgcccaaccgcgtgaccttgattgagttaatga

SEQ ID NO: 122752 - DNA, 80 bp, Artificial Sequence
  ENSG00000101230_0 (sequence is synthesized)
ctcctcctcctccccgcgcttctctggcggccgctcccgctccagctgcggcgccgcggccacatctggggcgcccatgt

SEQ ID NO: 122753 - DNA, 80 bp, Artificial Sequence
  ENSG00000101230_1 (sequence is synthesized)
cgcagccccctgccagcagggtggcctccggcccggcccgggtcccgggctgtcccgggacccagtctccgtctccgccg

SEQ ID NO: 122754 - DNA, 80 bp, Artificial Sequence
  ENSG00000101230_2 (sequence is synthesized)
ccgccgccgccaggcagcgccggggcttgctccgcagccggcttggacacccccggcctcgcggtggctccgccgtggtg

SEQ ID NO: 122755 - DNA, 120 bp, Artificial Sequence
  ENSG00000101230_3 (sequence is synthesized)
gaggcgggagccgcgctgccgggctcccgggctcctactcctcctcccccggcgtcaccgccgccgccgccggccgccgcgccgggtcctaaagccgcgcgtctcaaaaggatggtgcgc

SEQ ID NO: 122756 - DNA, 120 bp, Artificial Sequence
  ENSG00000101230_4 (sequence is synthesized)
ctaaagccgcgcgtctcaaaaggatggtgcgcctggcggccgagctgctgctgctgctggggctgctgctgctcacgctgcacatcaccgtgctgcgcggctcgggagccgccgacgggc

SEQ ID NO: 122757 - DNA, 120 bp, Artificial Sequence
  ENSG00000101230_5 (sequence is synthesized)
ccgacgcggccgcgggcaacgccagccaagcccagctgcagaataacctcaacgtgggaagtgacaccacatcagaaaccagcttttctctctccaaagaagcaccaagggagcatctgg

SEQ ID NO: 122758 - DNA, 120 bp, Artificial Sequence
  ENSG00000101230_6 (sequence is synthesized)
accaccaggctgcacaccaacccttccccagaccgcgattccgacaagagacggggcacccttcattgcaaagagatttccccagatcctttctccttgatctaccaaactttccagatc

SEQ ID NO: 122759 - DNA, 120 bp, Artificial Sequence
  ENSG00000101230_7 (sequence is synthesized)
tttccaaagctgatatcaatgggcagaatccaaatatccaggtcaccatagaggtggtcgacggtcctgactctgaagcagataaagatcagcatccggagaataagcccagctggtcag

SEQ ID NO: 122760 - DNA, 120 bp, Artificial Sequence
  ENSG00000101230_8 (sequence is synthesized)
tcccatcccccgactggcgggcctggtggcagaggtccctgtccttggccagggcaaacagcggggaccaggactacaagtacgacagtacctcagacgacagcaacttcctcaaccccc

SEQ ID NO: 122761 - DNA, 120 bp, Artificial Sequence
  ENSG00000101230_9 (sequence is synthesized)
ccagggggtgggaccatacagccccaggccaccggacttttgaaaccaaagatcagccagaatatgattccacagatggcgagggtgactggagtctctggtctgtctgcagcgtcacct

SEQ ID NO: 122762 - DNA, 120 bp, Artificial Sequence
  ENSG00000101230_10 (sequence is synthesized)
gcgggaacggcaaccagaaacggacccggtcttgtggctacgcgtgcactgcaacagaatcgaggacctgtgaccgtccaaactgcccaggaattgaagacacttttaggacagctgcca

SEQ ID NO: 122763 - DNA, 120 bp, Artificial Sequence
  ENSG00000101230_11 (sequence is synthesized)
ccgaagtgagtctgcttgcgggaagcgaggagtttaatgccaccaaactgtttgaagttgacacagacagctgtgagcgctggatgagctgcaaaagcgagttcttaaagaagtacatgc

SEQ ID NO: 122764 - DNA, 120 bp, Artificial Sequence
  ENSG00000101230_12 (sequence is synthesized)
gcaaggacttccgctggaaggacgccagcgggcccaaggagaagctggagatctacaagcccactgcccggtactgcatccgctccatgctgtccctggagagcaccacgctggcggcac

SEQ ID NO: 122765 - DNA, 120 bp, Artificial Sequence
  ENSG00000101230_13 (sequence is synthesized)
agcactgctgctacggcgacaacatgcagctcatcaccaggggcaagggggcgggcacgcccaacctcatcagcaccgagttctccgcggagctccactacaaggtggacgtcctgccct

SEQ ID NO: 122766 - DNA, 120 bp, Artificial Sequence
  ENSG00000101230_14 (sequence is synthesized)
ggattatctgcaagggtgactggagcaggtataacgaggcccggcctcccaacaacggacagaagtgcacagagagcccctcggacgaggactacatcaagcagttccaagaggccaggg

SEQ ID NO: 122767 - DNA, 120 bp, Artificial Sequence
  ENSG00000101230_15 (sequence is synthesized)
aatattaaagagactgggatgaggtggaggacgctgcctctggttctggagcacacacgtgctgcactgacgtgccgactggcgccgagaccttcatagctgcggtcgtgtatatttgta

SEQ ID NO: 122768 - DNA, 120 bp, Artificial Sequence
  ENSG00000101230_16 (sequence is synthesized)
tataccacatgagtatttctcatacattacgctaggggcgtgtgccacgcccaggggactgccttgtgaagccgccctcgccatctgcagagctccttgaaagtgcccctggggagcgat

SEQ ID NO: 122769 - DNA, 120 bp, Artificial Sequence
  ENSG00000101230_17 (sequence is synthesized)
gtgggcagaaggatggggacaacttggaagccagaagaagaacctggaagccacagtgggtgcgactcaattcacacccggatccagagtttcaaagagaggcaaagggggaaagagact

SEQ ID NO: 122770 - DNA, 120 bp, Artificial Sequence
  ENSG00000101230_18 (sequence is synthesized)
gaggttgtaaacgttataagcagtttttatatataacttatttaatacaaatgtgacttaattaagcgtaaccttttctctggagttgtggtgaaactaatcacgtctgtgagagatcag

SEQ ID NO: 122771 - DNA, 120 bp, Artificial Sequence
  ENSG00000101230_19 (sequence is synthesized)
aaagaaagagacttagggaagtggaagagaaagggaattttggaatttatttctttaaaaataatgcaatggaaatatatcaaaacatgtaaacgcccaccttaaaccaaatgttatttg

SEQ ID NO: 122772 - DNA, 120 bp, Artificial Sequence
  ENSG00000101230_20 (sequence is synthesized)
gtcatgaggcaccttgctggagtctcagattccaaaagtctcttcttcagactgggtagggaatatgatattttagggacaaagctgaggactggttttaaataggctttaaaataaaag

SEQ ID NO: 122773 - DNA, 120 bp, Artificial Sequence
  ENSG00000101230_21 (sequence is synthesized)
atcaatattatcataatgctatcattctgctaaacggccccaaaacagtagaatttctgctcatgtcctagcaggttcagaagactgcagccaagttcagatgtaaaaacaagaagtagc

SEQ ID NO: 122774 - DNA, 120 bp, Artificial Sequence
  ENSG00000101230_22 (sequence is synthesized)
acttttccaaaggaaaacaacaaaacaaatgggaaaaagataatggaccgcatttcacctattttaatactattttaacaattttttcatctaccaatatatccccaataaataaatata

SEQ ID NO: 122775 - DNA, 120 bp, Artificial Sequence
  ENSG00000101230_23 (sequence is synthesized)
aaagggggggagggtcaatctggggaatcttagttttttatgttttaagaaaacaaaaaaaactgcattatttttgtaaagtatttattgagtcacggattattgtgcatcaagcaattg

SEQ ID NO: 122776 - DNA, 120 bp, Artificial Sequence
  ENSG00000101230_24 (sequence is synthesized)
ttaatatgacctggtcctatggggtagaacttaggaaaaataaagttggttcttattcaatattttactttgcaaaattctagtaaaagagagtatataataaaatcataataaaaggtg

SEQ ID NO: 122777 - DNA, 120 bp, Artificial Sequence
  ENSG00000101236_0 (sequence is synthesized)
ctggggtttgggggaccgagccgctccgggttcgggatgctgaggagaccgcgggcccgcgccagcctcccacacacacacactctcccggcgcctcggccggccgggcgcggtgtgcag

SEQ ID NO: 122778 - DNA, 120 bp, Artificial Sequence
  ENSG00000101236_1 (sequence is synthesized)
gggtgaggcggtgtctccaggctgaggagggacgcggaggagggtccggcgcggccccgggactggagggtgagtccctcacaaagggcggagcggggctgtcacctggagatcacggag

SEQ ID NO: 122779 - DNA, 120 bp, Artificial Sequence
  ENSG00000101236_2 (sequence is synthesized)
ggaagttcatccatgagctcggatttcccacattacaacttcaggatgcctaatattggattccagaatctgcctctcaacatatatattgtggtttttggtactgctatatttgtcttc

SEQ ID NO: 122780 - DNA, 120 bp, Artificial Sequence
  ENSG00000101236_3 (sequence is synthesized)
atccttagtttactcttctgttgctacttgattaggctaagacatcaagcacacaaagaattttatgcctacaaacaggttatattaaaagagaaagtaaaagaattgaatttacatgag

SEQ ID NO: 122781 - DNA, 120 bp, Artificial Sequence
  ENSG00000101236_4 (sequence is synthesized)
ctctgtgcagtgtgcctagaagacttcaagcctcgagatgagttggggatttgcccatgtaagcacgccttccacagaaagtgccttattaagtggctggaggttcgtaaagtgtgtccc

SEQ ID NO: 122782 - DNA, 120 bp, Artificial Sequence
  ENSG00000101236_5 (sequence is synthesized)
ctgtgcaacatgccagttctacagctggcccagttgcacagtaagcaggaccgtggaccccctcaggggccccttcctggggcagagaacattgtatagcttaccgcaaggatcagactg

SEQ ID NO: 122783 - DNA, 120 bp, Artificial Sequence
  ENSG00000101236_6 (sequence is synthesized)
ttgctggacacgacgtctgtgtggagccaggaggaacacatgtggtgtctgtatggctgctctctacctaggacaccagctgccacttcttttgcctcatgaagaactcttgggccagcc

SEQ ID NO: 122784 - DNA, 120 bp, Artificial Sequence
  ENSG00000101236_7 (sequence is synthesized)
aaactgggaacctaggtgtctgggtcttgtgacaaccaaagcactttgacactaccccctgccgagagaagaggagtggatgagcctgcgggtttgcctcaagaaacttcatgagggtct

SEQ ID NO: 122785 - DNA, 120 bp, Artificial Sequence
  ENSG00000101236_8 (sequence is synthesized)
cttactaactccattacactctctctcctggagcctcatctccatgtcaagcaggagggtaaagaagggaactaagagcaggtctttcaagccacacccccacctgcggatggatgggtt

SEQ ID NO: 122786 - DNA, 120 bp, Artificial Sequence
  ENSG00000101236_9 (sequence is synthesized)
tctctgtaggccatgcaggcctttgtcgcagcaaaccttcccagcagcccttgagccaagtaaaaccagcacaaccagccaccagtggttggtgaggcagtgcccacaaggctcatgttg

SEQ ID NO: 122787 - DNA, 120 bp, Artificial Sequence
  ENSG00000101236_10 (sequence is synthesized)
tatgcctttgataaggccatcttggctttgagtagcagtgttcctcgtcacccatttccccctcaggattacaacacctgctatcaaatcatctaagctgaaaacatgagatgcgcttgg

SEQ ID NO: 122788 - DNA, 120 bp, Artificial Sequence
  ENSG00000101236_11 (sequence is synthesized)
aaaggcctagtcagaagccatttcctcttatcatttccctctcctatgcaccagtaaggcccgtccagagccccagcagggagtgggccctgagtccacactgtccctgagtgatccagg

SEQ ID NO: 122789 - DNA, 120 bp, Artificial Sequence
  ENSG00000101236_12 (sequence is synthesized)
aggctgcccacatccccacatgtgcactgtggttccagtgtagctgctgtgagcccactgccactgcctcagaagggagccactgtgaacctctcgagtggctccaaagagcagtggctt

SEQ ID NO: 122790 - DNA, 120 bp, Artificial Sequence
  ENSG00000101236_13 (sequence is synthesized)
tttgagaatggcccatacttctggcccggctggatgaagggaatgccgaccctttggcctctccccctccttccatctcttctctctcttgccctatctctctttctacttcagaaaaaa

SEQ ID NO: 122791 - DNA, 120 bp, Artificial Sequence
  ENSG00000101236_14 (sequence is synthesized)
aaaaaaaaaaaaaaaaaagcctgtcattcactttttaacactttatcccaaataagatccctgtgtaattctgaagctggtgatccacttggaattgtagatagtttcaggaagctcctg

SEQ ID NO: 122792 - DNA, 120 bp, Artificial Sequence
  ENSG00000101236_15 (sequence is synthesized)
cagggctgtccaccgttggtgtgtgcctcagtatttggacttccgaaactgaaagtgaaagtgtctttataggagagaaacgcatgctgctctttggctctttctgtccaacttttctag

SEQ ID NO: 122793 - DNA, 120 bp, Artificial Sequence
  ENSG00000101236_16 (sequence is synthesized)
aaatgactcaaagtccattaagatttgtgaatattgtataaattagctatggaaagtagcaggtcagatggaaaattcttttccacagccctgctctccgcctccctccatcttaggagc

SEQ ID NO: 122794 - DNA, 120 bp, Artificial Sequence
  ENSG00000101236_17 (sequence is synthesized)
gcctgcctcaattcctcgtcaactgctttgctccactccatcccacaggtgtgagtgggggaagtttttcattaggaatacagtctgcgtgacatggagaatggatggagggagctttgc

SEQ ID NO: 122795 - DNA, 120 bp, Artificial Sequence
  ENSG00000101236_18 (sequence is synthesized)
tactctgctcttggcatgactccaggatttttttctggaatccaacctctgtcctcttaggagaaggaacctgtccttggttcagatggctgggcatgaggaggaaaatttccattagtg

SEQ ID NO: 122796 - DNA, 120 bp, Artificial Sequence
  ENSG00000101236_19 (sequence is synthesized)
tagaacagtgctggacagaatccggtttggaaaattacaaatccagttggtcaaaataggccatttcctatgtgtgacctattcgtggtatgccaactggactgcttcctaaacaggacg

SEQ ID NO: 122797 - DNA, 120 bp, Artificial Sequence
  ENSG00000101236_20 (sequence is synthesized)
aggaaagtgaggaatatttttatatgaaagccttagcctgtctggcacccatgaaaaaaactatttatgcactcctactttcaccgtctttttgcattctctatttgtagcacaacagag

SEQ ID NO: 122798 - DNA, 120 bp, Artificial Sequence
  ENSG00000101236_21 (sequence is synthesized)
ttgaatgccacaaaacaccccgtttatagtgagctgttttcagtgaccaatatcagaaggaggcttgcttctggactagcctcactaattgccagcagccaccattttccatggaatggc

SEQ ID NO: 122799 - DNA, 120 bp, Artificial Sequence
  ENSG00000101236_22 (sequence is synthesized)
cttgggacagatgtcacctctgttatggggctctaataggaaagagaatgttttttcccttcctatgatcaatactgcaaattattgctgctcacagcttttataggattctcccaactg

SEQ ID NO: 122800 - DNA, 120 bp, Artificial Sequence
  ENSG00000101236_23 (sequence is synthesized)
aaagttgcaggctttttctgtccctgtgcatcagtactaacaaaagacagcctcaccaagtctgtatatttgaacagaggcaagttaattcatccccccgtgtcagagccacaggcatgt

SEQ ID NO: 122801 - DNA, 120 bp, Artificial Sequence
  ENSG00000101236_24 (sequence is synthesized)
tgagggggttgatacgtagcactggaccagggcgcaaagcccagatagttccagccatgagaggagagcacaagaatgctctgcactctgcactcagcaccaccttgggtctgctttgcc

SEQ ID NO: 122802 - DNA, 120 bp, Artificial Sequence
  ENSG00000101236_25 (sequence is synthesized)
cagatgagggaccactaacaaccttctcagcacatgtgaatgtggactggttttaaaatgcattcattctgctaggattgggctggaagctggaacagtgagagtactttttctgctcct

SEQ ID NO: 122803 - DNA, 120 bp, Artificial Sequence
  ENSG00000101236_26 (sequence is synthesized)
agtcatctccctttctcagcgtgacatcctcctgcagcaagcctagtatcactagcagtagttcctgcgactcttagcaacacaacccgaatatttgctccctgcatctgggtcctccac

SEQ ID NO: 122804 - DNA, 120 bp, Artificial Sequence
  ENSG00000101236_27 (sequence is synthesized)
caggatgggcctgcgcatctgcattgctgtacagacaaacaggccttttaatttacatcctcctttaattctcattaaaatcgcagggtttttgtttgaaagacagtcctttttttattt

SEQ ID NO: 122805 - DNA, 120 bp, Artificial Sequence
  ENSG00000101236_28 (sequence is synthesized)
attttgaaaaaggaatgagttagggacccctttataactctcttggctcagactcgaaccccatggtaaagtcaccctttccgcatctatcttcaggagttgctgggacttgttactgtg

SEQ ID NO: 122806 - DNA, 120 bp, Artificial Sequence
  ENSG00000101236_29 (sequence is synthesized)
tagctgcgtggggattctggtctgctcttggaccactggctggtatcctttgtgtgtttcttaagcagctcaaagatagaatgttgctggtctgctatgggttagtggagcataactcag

SEQ ID NO: 122807 - DNA, 120 bp, Artificial Sequence
  ENSG00000101236_30 (sequence is synthesized)
ccccaactggactccacgggtggctgaaccattagtagttgctaggggtacaactgaattcaactgccttcagaaacagggaacaaaaccagcctgacttgattcctggttgggtcagta

SEQ ID NO: 122808 - DNA, 120 bp, Artificial Sequence
  ENSG00000101236_31 (sequence is synthesized)
agttgacatctgctgcttttctttgccacgtgtgatttggttaggcctgtccctggcagataaggtccttgaagcctatgcttgcctagccagggaaggcaggacagaaatggccaaata

SEQ ID NO: 122809 - DNA, 120 bp, Artificial Sequence
  ENSG00000101236_32 (sequence is synthesized)
ggggcaggtggcccctgggaaggtctgagctgagggatacaggggacctcccaccattgccggataccctgttcttgacaagaagatccttttccccagtgccaagccccttggatccat

SEQ ID NO: 122810 - DNA, 120 bp, Artificial Sequence
  ENSG00000101236_33 (sequence is synthesized)
cagagaaatagcctcgggccttgtcctttttcacaaccccacttcaaaatcatgtcatctccctggcctgatcccgctctaagctactttgaacaactaggaattatttttctcagaggc

SEQ ID NO: 122811 - DNA, 120 bp, Artificial Sequence
  ENSG00000101236_34 (sequence is synthesized)
tttttgggcattatgaaatacatcctgatacatccagggcagtatacccagagctccaggcagagagtgatggaatcacctcttgtcactcactagccttaggcccttctgcaggttagc

SEQ ID NO: 122812 - DNA, 120 bp, Artificial Sequence
  ENSG00000101236_35 (sequence is synthesized)
ctctcagtctcttccttagcttccttagctaccacccagggattgtagtaacgtccctggcacctcttgtgggggttagctggtgcccagagcctggtaggcagcaggcctggtgtcatg

SEQ ID NO: 122813 - DNA, 120 bp, Artificial Sequence
  ENSG00000101236_36 (sequence is synthesized)
ggggctgctgataccacataacatcatctgggttacatgggctcctctgccatcatgattgataggaacagaacctcagccaaaaagcttcctgagctgtaggggctttccctgaggccc

SEQ ID NO: 122814 - DNA, 120 bp, Artificial Sequence
  ENSG00000101236_37 (sequence is synthesized)
aggttcacctggcccctttcttccttggtcatctctgcctttgcccacagtgaactctgacttggttgttcagtgctgaatatttctttcttaatgttttgaataggtaatccattcatg

SEQ ID NO: 122815 - DNA, 120 bp, Artificial Sequence
  ENSG00000101236_38 (sequence is synthesized)
tggttcacaaatcataaagtagttaaaagcctttcttgagttcctgatgcctagcaagctccgctcctcactccatgaatacctactattggtttgttccttgggtatccttccagagat

SEQ ID NO: 122816 - DNA, 120 bp, Artificial Sequence
  ENSG00000101236_39 (sequence is synthesized)
catttatgcatgtacacacatgtgtatgtgtgtctatataatttttctccttttctactcatgtgataccagacaagtgtattcaaggaacgctcctactaatgtgggaagagccatccc

SEQ ID NO: 122817 - DNA, 120 bp, Artificial Sequence
  ENSG00000101236_40 (sequence is synthesized)
agaaatcagaatacaaaatgtgaacccagaattgggggatgtttttgcaatcacactcctgttgagtaagacatattttcattttattgcaacatactgaaattttagttttctgtacaa

SEQ ID NO: 122818 - DNA, 120 bp, Artificial Sequence
  ENSG00000101236_41 (sequence is synthesized)
atcagaatctgcagtccctcccttaccccaaatgcccagctaatccaagagcacaaccagatttttctgattgactttctatctgcgacaggatgctcaagatcaggctctgtagctgac

SEQ ID NO: 122819 - DNA, 120 bp, Artificial Sequence
  ENSG00000101236_42 (sequence is synthesized)
agcagtggcacaggcctctcccagctctgagcagcctctgcaggtgcctggacagctgctggcccctcccctaccttggccagttccaagtgaggaccagtggtgatgtgtggctgcaac

SEQ ID NO: 122820 - DNA, 120 bp, Artificial Sequence
  ENSG00000101236_43 (sequence is synthesized)
tgttgtggtcacttaggcaagctcttgtgtctttgatgcaggagtttgagcagcagcaactgaaggcttctattttgtggggcagacatcttagctactgagcaagtgcacagtgagtct

SEQ ID NO: 122821 - DNA, 120 bp, Artificial Sequence
  ENSG00000101236_44 (sequence is synthesized)
catgtggatatgcctgaatgtccagcgtcagttcatggagctactccctttccctcccaacttttcgttgttgttgagacagggtcttgttacccagactggagtgcagtggcaccattg

SEQ ID NO: 122822 - DNA, 120 bp, Artificial Sequence
  ENSG00000101236_45 (sequence is synthesized)
tagctcactgcagcctcaacttcctggactcaagtgatcctcccgcctcagtctgtagctgcgtctacaggtgcacaccagcacacctggctaattttcgtaattatttttttgtagaga

SEQ ID NO: 122823 - DNA, 120 bp, Artificial Sequence
  ENSG00000101236_46 (sequence is synthesized)
tatttttttgtagagacaggtctcaactcactatgttgcccaggctggcctcctcactctgtgcacacactttgaaaagaaaatgcttctggtcgggcgcgatggctcacgcctgtaatc

SEQ ID NO: 122824 - DNA, 87 bp, Artificial Sequence
  ENSG00000101236_47 (sequence is synthesized)
tggtgacggacaggagaattgattgaacccgggagacagaagttgcagtgagccaagatccccactgcactccagcctgggcaacag

SEQ ID NO: 122825 - DNA, 120 bp, Artificial Sequence
  ENSG00000101236_48 (sequence is synthesized)
tccgtctcaaaaaaacacacaagaaaagaaaatgcttcctacagaattttccctttatgccttgttttccatttgacaacagaaattaccccaacaattttttttttttttttttttttt

SEQ ID NO: 122826 - DNA, 120 bp, Artificial Sequence
  ENSG00000101236_49 (sequence is synthesized)
cgtgagccactgcgcccggccaataatttttttagtttaagttcatttttgtccccgctgatgaaagttagagctgcttcctccaggcagccctgggagtaggggcacagacttgtgcct

SEQ ID NO: 122827 - DNA, 120 bp, Artificial Sequence
  ENSG00000101236_50 (sequence is synthesized)
agacttgtgcctcgcttcccagcagctgcccagtgcctctgtccacacccacctccctggtgtacttgccccctacagcagcagcccagatcctcccctggattaaaattgcaactggtg

SEQ ID NO: 122828 - DNA, 120 bp, Artificial Sequence
  ENSG00000101236_51 (sequence is synthesized)
ccctaacccaaaacttgagaaaaaattctctatcacatccactcttctggcatttgtagaatctctggccctgggtgtgtcttttcctgtagctgttacagatttcttaagcagatttct

SEQ ID NO: 122829 - DNA, 120 bp, Artificial Sequence
  ENSG00000101236_52 (sequence is synthesized)
taagcagatggacatgtccagattcatgcctaaatatccagttgataactggaaaatgctggttcacggttctttagtaaagattaataagggatccccatgtgctggggagtgtgcttc

SEQ ID NO: 122830 - DNA, 120 bp, Artificial Sequence
  ENSG00000101236_53 (sequence is synthesized)
catttgagtggggatatcagaagaaaaagaggggcttgtgtagtaaaccttactttgccaattcagctgtagagcccaaattgttacaagatgcaaagatgtactccactttttgaccaa

SEQ ID NO: 122831 - DNA, 120 bp, Artificial Sequence
  ENSG00000101236_54 (sequence is synthesized)
gcatcagcacctttggcttaccatccagtccttacttctgtgactgtaagggccccaccagtgtcagcagacttgtttgtgctttgggggaactctcttctcagctccctttgccagtcc

SEQ ID NO: 122832 - DNA, 120 bp, Artificial Sequence
  ENSG00000101236_55 (sequence is synthesized)
caagcctggtggatctgcatctcacgcccactgcacaccgttcctctccatctgcccttccctcccaggcccccggtcgggggagcaggtgtggcaagtgttaggaactcccttctggtg

SEQ ID NO: 122833 - DNA, 120 bp, Artificial Sequence
  ENSG00000101236_56 (sequence is synthesized)
acagctggtcttcctagagtgttgctggtaactatcgcctcttggtcttctgacatcattgccaggaacggggcactttttcgtcttgtagtttggccctcgggtttcctcactaggtat

SEQ ID NO: 122834 - DNA, 120 bp, Artificial Sequence
  ENSG00000101236_57 (sequence is synthesized)
tgtgtaactccctcaaaaaaaggtttatgaaatgctgaacctcaggtttcatagacgtctttgtacactaaaaattctgcagcagaatatttttaaacattcgcagttttttgtaagcta

SEQ ID NO: 122835 - DNA, 120 bp, Artificial Sequence
  ENSG00000101236_58 (sequence is synthesized)
tatttttgtatatttaattgctattttaaaattttaatgcattttgctaatcactcctcaaaaataaaacatgcatgtaattgactcaaacgtgtaaataaaagcaaattttgaaaaata

SEQ ID NO: 122836 - DNA, 120 bp, Artificial Sequence
  ENSG00000101236_59 (sequence is synthesized)
cgccacctccgccgcgctctgtccggacggacgctcgccgcccgcagcctgccgcccgccgcagggcgctgacggtcccgcacgtctgccgctgccaccggcgcgcccgattcatccatg

SEQ ID NO: 122837 - DNA, 120 bp, Artificial Sequence
  ENSG00000101236_60 (sequence is synthesized)
cctccgccgcgctctgtccggacggacgctcgccgcccgcagcctgccgcccgccgcagggcgctgacggtcccgcacgtctgccgctgccaccggcgcgcccgaaacttccagcactat

SEQ ID NO: 122838 - DNA, 120 bp, Artificial Sequence
  ENSG00000101246_0 (sequence is synthesized)
gaggcccgaggggcggcccaggactcgaggatgtacacgctgctgtcgggcttgtacaagtacatgtttcagaaggacgagtactgcatcctgatcctgggcctggacaatgctgggaag

SEQ ID NO: 122839 - DNA, 120 bp, Artificial Sequence
  ENSG00000101246_1 (sequence is synthesized)
acgaccttcctggagcagtcgaaaacccgatttaacaagaactacaaggggatgagtctatccaaaatcaccaccaccgtgggcctaaacatcggcactgtggatgtgggaaaggctcgg

SEQ ID NO: 122840 - DNA, 120 bp, Artificial Sequence
  ENSG00000101246_2 (sequence is synthesized)
ctcatgttctgggacttaggagggcaggaagagctgcagtctttgtgggacaagtattatgcggagtgtcacggcgtcatctacgtcattgactccaccgacgaggagaggctggctgag

SEQ ID NO: 122841 - DNA, 120 bp, Artificial Sequence
  ENSG00000101246_3 (sequence is synthesized)
tccaagcaggcgtttgagaaggtggtgaccagcgaggcgctgtgcggtgtccccgtcttggtgctggccaacaagcaggatgtggagacgtgcctctcaatccctgacatcaagacggcc

SEQ ID NO: 122842 - DNA, 120 bp, Artificial Sequence
  ENSG00000101246_4 (sequence is synthesized)
ttcagcgactgcaccagcaagatcggcaggcgagattgcctgacccaggcctgctcggccctcacaggcaaaggggtgcgcgagggcatcgagtggatggtgaagtgtgtcgtgcggaat

SEQ ID NO: 122843 - DNA, 120 bp, Artificial Sequence
  ENSG00000101246_5 (sequence is synthesized)
gtgcaccggccgccgcggcagagggacatcacgtaggcgcagccgcgctgccgtcgggacggctggtcccctggtgctggaggagtggcctcctgttggctcccatgctgctgatctggg

SEQ ID NO: 122844 - DNA, 120 bp, Artificial Sequence
  ENSG00000101246_6 (sequence is synthesized)
tctatgtctggaaaagcgtaggcatccggaggctttggaggggagtctggcagcccggctggcccaggccctgcagcggcagcctttccacagggcgcagcggcggcctttcgaggccct

SEQ ID NO: 122845 - DNA, 120 bp, Artificial Sequence
  ENSG00000101246_7 (sequence is synthesized)
ttctggggggtctgagggagacctggttgggaattggggctccagtgctcaggctggcttgggctgcatgaggacagccctgtgggaccctcgggagaccccgtggctgtctccgcccca

SEQ ID NO: 122846 - DNA, 120 bp, Artificial Sequence
  ENSG00000101246_8 (sequence is synthesized)
tcgaggaggaggcccgtcagccatggctgccatctggcttctgccctgtgaccccgtgaccccgtgaccccggaagtggtctggggctgatcttgccttgaggaagacccaggccatgtt

SEQ ID NO: 122847 - DNA, 120 bp, Artificial Sequence
  ENSG00000101246_9 (sequence is synthesized)
cccaaaggccagcgggggccctggattgtgatgcagcctcgggacagggctgaggcctgcgggggaagacctataccccacgcctgggcctggcttcacctcaccctaatcccccgggag

SEQ ID NO: 122848 - DNA, 120 bp, Artificial Sequence
  ENSG00000101246_10 (sequence is synthesized)
ggagctgactgatgcaaaaagctgagggggcctgctgggagtggctgtttttatgccccagccccgcaagttggggagtgtttgtgggggtccagagccctcccccagccaggagagaac

SEQ ID NO: 122849 - DNA, 120 bp, Artificial Sequence
  ENSG00000101246_11 (sequence is synthesized)
ctcccggaggggttctctgtggggccctgtgtcccctgctcgggagtaaggctggtcctggggtcctccctgcacggaccccactgggcctgccgagtgctgtgttcttcctcagtctgg

SEQ ID NO: 122850 - DNA, 120 bp, Artificial Sequence
  ENSG00000101246_12 (sequence is synthesized)
ctgtgggcaggagcggcctgcccagtgtcacccagggtgagtgcaaaataaagacggcgagtgtggctctgtccatcccttccctcctggagggtggaggctcctggctgttggacacgg

SEQ ID NO: 122851 - DNA, 120 bp, Artificial Sequence
  ENSG00000101246_13 (sequence is synthesized)
tgggaaggacatggggtcctgggaggagctgctgggaaggggcatgagtcagggtgggggtggcgcagcagctgcggggctgtgactcacaggagtcgggccctggaagtccccgcgtcc

SEQ ID NO: 122852 - DNA, 120 bp, Artificial Sequence
  ENSG00000101246_14 (sequence is synthesized)
tctccaggggaccctgtgtgtgttctgcaggttggttcccaggacctgggggggacctccagccccgggaacctggccgtgctggggaggcgagtggctggtgcagccccccggttgctc

SEQ ID NO: 122853 - DNA, 120 bp, Artificial Sequence
  ENSG00000101246_15 (sequence is synthesized)
tgggtgcatcgggaggcttcagagcctgccccagagagggagaagcttcacttcccggaaagcatgggaggcctggaggaggtctttggcaggtcccctctcgggaaatcccctgtgagt

SEQ ID NO: 122854 - DNA, 120 bp, Artificial Sequence
  ENSG00000101246_16 (sequence is synthesized)
tgggagtgggaggaattcataagtggggggttagtgtgggccccggcgactagggctggcctgagccccatcctgttcttccagcaatgataccctcccaggccctgaccctcgctgagc

SEQ ID NO: 122855 - DNA, 120 bp, Artificial Sequence
  ENSG00000101246_17 (sequence is synthesized)
ttcaggggcccctgccacgtgccacagccactgggggcagaggtggcactccccactgatcctcccagggagggtctgtctgaggtaggggaagccccgggcagcagttctgatggcagg

SEQ ID NO: 122856 - DNA, 120 bp, Artificial Sequence
  ENSG00000101246_18 (sequence is synthesized)
cagcctgagggatctgggcacagcgggcggctcaggtgtccccggctgccctcccagtagctgtgcaactacaaccagttttatgaaaaagctttataaaaataagctttaagaaacctc

SEQ ID NO: 122857 - DNA, 120 bp, Artificial Sequence
  ENSG00000101246_19 (sequence is synthesized)
attccctgaggccggcccgcgtcccgtcaggcgccgcgcggggttagcgcggggtcagcggaggtcagcgggggtcagcagcagcggctccgagggcgcggcggacgcagggcaggatgt

SEQ ID NO: 122858 - DNA, 120 bp, Artificial Sequence
  ENSG00000101246_20 (sequence is synthesized)
agcggagcgcggaggccgctgggacgcggttcagctcattccctgaggccggcccgcgtcccgtcaggcgccgcgcggggttagcgcggggtcagcggaggtcagcgggggtcagcagca

SEQ ID NO: 122859 - DNA, 120 bp, Artificial Sequence
  ENSG00000101246_21 (sequence is synthesized)
gtcaccaccagcctcctgaagagcagagtgttgctctgtttctgtttctgtcttttaaagaacagacctgagtaaggatatttggaagccagtatagcccctccttgatgtgtttcgcct

SEQ ID NO: 122860 - DNA, 120 bp, Artificial Sequence
  ENSG00000101246_22 (sequence is synthesized)
ctgcctcccgcagcagcttcccgagtccccagcctcccccacagcaaggggagcaggtgtgcacccagacaccccaggcccagtgactgcccagggggtacagagccattctcaaggcct

SEQ ID NO: 122861 - DNA, 120 bp, Artificial Sequence
  ENSG00000101246_23 (sequence is synthesized)
gcactccaggagcagccgcgccgctgctcacccgccctgtagtccgctccccccagggccgtccccgttttaagaaatggggtgatggggcgtccctacccggcgcctgcaggggctcct

SEQ ID NO: 122862 - DNA, 120 bp, Artificial Sequence
  ENSG00000101246_24 (sequence is synthesized)
cgccggtggctcgctgctcccgggtggggcgcggggctggcgctcgagggtgccgtggcccaggcggggctgcagcgagtgtgttccccgttccgcgcgcgtgaagcgtgggagcgaagc

SEQ ID NO: 122863 - DNA, 120 bp, Artificial Sequence
  ENSG00000101246_25 (sequence is synthesized)
agcgaagcctcgggggagggcgggagcgcggctgagctcactgtgaacacccggctgggtagtcccgcgagcaggggaggggccggaaccgatgtgtatgcggagaggtcgcagtcattg

SEQ ID NO: 122864 - DNA, 120 bp, Artificial Sequence
  ENSG00000101246_26 (sequence is synthesized)
ctgtgagcaggacacagtggcggctgacctgggagaagttacagagggacggggtgggagagggacgaggagtcgggaatggcccccaggctctcgtcctgagcggtcggctggacgtgg

SEQ ID NO: 122865 - DNA, 120 bp, Artificial Sequence
  ENSG00000101246_27 (sequence is synthesized)
aggggaacctgttgacagagtgcggcatcctcaggtgaccagtgagagaagggcgtgttcactggtcatgcctgaagccgggggggatctgggttcagggctggggctagtttctttcaa

SEQ ID NO: 122866 - DNA, 120 bp, Artificial Sequence
  ENSG00000101246_28 (sequence is synthesized)
tgttttgaaacctgaacattatgttaacaacctaaacatcttacaagtgtctgggaatgttcaaaccctggcttgggtttgagcctaagggcaacctcgctggccaagtcagagaggtca

SEQ ID NO: 122867 - DNA, 120 bp, Artificial Sequence
  ENSG00000101246_29 (sequence is synthesized)
gggcagtctgtttctttctcagtcaggacaagacaaagtgtggggacctggggaccctgcactcctccaaagtgagtgcctcctttcggctcagagaccttgctgctgaccaccacagga

SEQ ID NO: 122868 - DNA, 120 bp, Artificial Sequence
  ENSG00000101246_30 (sequence is synthesized)
cacagaaatggcaaagaccagatgtggggacggcaggatggctgcctctcccctgatgaggttccttcagttctagcttaacatttgttcttccatgatcaccagaagactcctcagggt

SEQ ID NO: 122869 - DNA, 120 bp, Artificial Sequence
  ENSG00000101246_31 (sequence is synthesized)
ctcacagcggcagtctcctattttgacacaggttttgggcatttctgagatcccagtgtggtgccccttccccacacccccaaggctgcagtttatctccttctcagcctgggccaggca

SEQ ID NO: 122870 - DNA, 120 bp, Artificial Sequence
  ENSG00000101246_32 (sequence is synthesized)
ctgagtccagcactgagcagggcagagcctgtggcttcctcgggctccctgccctaggctggcacagtgggtgtggggtgtccccagtgccttggctgccctgatgccatctctagagct

SEQ ID NO: 122871 - DNA, 120 bp, Artificial Sequence
  ENSG00000101246_33 (sequence is synthesized)
gagtgcccaggtcctgatctcttttttgatcctagttcccctttcctaggcgcccccaaagtgtcccctcctgctgtgacttctagccaagaagacatttctcccatggccaagtgatct

SEQ ID NO: 122872 - DNA, 120 bp, Artificial Sequence
  ENSG00000101246_34 (sequence is synthesized)
ctgatagatcctgtaggaccactgaagtcagacaggacaagttgagtcagggcctgtgtgtccagtgcgcagcatgcttggggagtgacacagatgatgatgatcttgtcacaggccggt

SEQ ID NO: 122873 - DNA, 120 bp, Artificial Sequence
  ENSG00000101246_35 (sequence is synthesized)
gtctcaggcacagatgctgagacaggtcgaggtacaggatgcacactgggggtcggcaccaggaaggcagggaggacgggagaggagaggtcgactcaggcagcaggatccacagagctg

SEQ ID NO: 122874 - DNA, 120 bp, Artificial Sequence
  ENSG00000101246_36 (sequence is synthesized)
tggttggcccagcagggagccctggaggagaactggctatgctgtgccatgtggggccaggctggccgggacttcacaccatggcctggtgggtccccagtgtgggctgccctgggcagg

SEQ ID NO: 122875 - DNA, 120 bp, Artificial Sequence
  ENSG00000101246_37 (sequence is synthesized)
tgtgacctggcagtgtggctctttgcagccaaagtgggtcccacagaaaccaaaatgagaccatctgctggtgcagtgttctccaacatgaagcaagaatacagtggggccagagatgcc

SEQ ID NO: 122876 - DNA, 120 bp, Artificial Sequence
  ENSG00000101246_38 (sequence is synthesized)
tgcactggccacagctgcagccctatgtggacccacacttccacgttggagaggggttcctccaaggtcctgagggcctctcttaaggcgaaactggaagagggagacttaagggggcca

SEQ ID NO: 122877 - DNA, 120 bp, Artificial Sequence
  ENSG00000101246_39 (sequence is synthesized)
ctgtagcccatccttgctgctggtcttggggctgcacagcccttccttgagtgccctcccaattcactaccacttctgctggggtgcgacttcctggcagtctgagcccttctccagaca

SEQ ID NO: 122878 - DNA, 120 bp, Artificial Sequence
  ENSG00000101246_40 (sequence is synthesized)
ccaccgtggtggggccagtggctccctgggtccccagctgtgggacagctgtgggatggcagccccatctcctgcccaccagggtctcctagacatgaggtgcaagtcatgcccatgagg

SEQ ID NO: 122879 - DNA, 120 bp, Artificial Sequence
  ENSG00000101246_41 (sequence is synthesized)
cagctgtggctcgtcattcagcgtgtctgctgagtatgtgctgctctagtggccgggacccctgaccctgctgagctcagagctgggaggatcagctgcagggacccccctaggtcactg

SEQ ID NO: 122880 - DNA, 120 bp, Artificial Sequence
  ENSG00000101246_42 (sequence is synthesized)
ggagggaccggaagggaggcccctgctcccaccctggtttcctgtatcctgcatccttgtgcagagccagcaccacagaaaggggcgtcattgcgaattggcctcgtcctggggctggac

SEQ ID NO: 122881 - DNA, 120 bp, Artificial Sequence
  ENSG00000101246_43 (sequence is synthesized)
cctgggttggtgtccacatgtgtggcatgtgccaggacctcagctcctgggttctttgctgtaacactagtctctcaggctggctggcactttgcagttggggagctcccattgctgctg

SEQ ID NO: 122882 - DNA, 120 bp, Artificial Sequence
  ENSG00000101246_44 (sequence is synthesized)
gggagaaaaactcagacccacagtccctctgactgctccactggggtcagctggccagccaggagccacgcttggacacctccctcttccccctccttgtggggcaccccacaatgacca

SEQ ID NO: 122883 - DNA, 120 bp, Artificial Sequence
  ENSG00000101246_45 (sequence is synthesized)
ctgctgtgacgcctccactggggcgtggggctctgggtcctgcccgcactcagccctgaggtgtcgctcccgtccactgcggccctgctgggctgtgcaccttgtgcctggtaggtgtga

SEQ ID NO: 122884 - DNA, 120 bp, Artificial Sequence
  ENSG00000101246_46 (sequence is synthesized)
tgggtggctctggccacgtggtcccatggtccaggacccggttgcacatgaaccttctgccaccctgctcagaagccccaggagccacgtggagattctctcactgggcttgctgcagcc

SEQ ID NO: 122885 - DNA, 120 bp, Artificial Sequence
  ENSG00000101246_47 (sequence is synthesized)
tccacagagccgcccctcctgccacagaggtctccaccttagggtccgcctgctcccttgtgtcagcagcagacagccggcacactgcagggtcccttgaggggttggcggcctctgtgt

SEQ ID NO: 122886 - DNA, 120 bp, Artificial Sequence
  ENSG00000101246_48 (sequence is synthesized)
agagaagttcctgggggtgggggggcctcgctacctgcagaaccctggagggcgcctggccttgggcctcctctccactgtgggaagttcctgggggtgggggggcctggccttgggcct

SEQ ID NO: 122887 - DNA, 120 bp, Artificial Sequence
  ENSG00000101246_49 (sequence is synthesized)
cctcctttccactgtgggaagtgcaggtgcacaggcttctctcctctgtgggaagtgcaggtgcacaagcttgtctggcactgggatggggttgtctggtactccctgctcagacaccct

SEQ ID NO: 122888 - DNA, 120 bp, Artificial Sequence
  ENSG00000101246_50 (sequence is synthesized)
aaggatttcggagagttgggctgtgcctcctggcttctcatgctctcgggtgtgtgtgtcttaacacactgaccaccagcttgtcctacctggtcagcatccagttctaggtctctgggc

SEQ ID NO: 122889 - DNA, 120 bp, Artificial Sequence
  ENSG00000101246_51 (sequence is synthesized)
actcatgcctggacaggagagctggcacagcctggaggcaaagtggcaaatgtgagctgttgtctgctccacgtggacgcggagtttgctgtgtttttttctgattgagatagaggtgca

SEQ ID NO: 122890 - DNA, 120 bp, Artificial Sequence
  ENSG00000101246_52 (sequence is synthesized)
ctcatctggtccagggctcagcacttgtacctgaggctgcaggggctgtgccctgtcttgcccaggagtgttgccagcgagcccaggactgaccagcccaggctgcagaggtctgagctc

SEQ ID NO: 122891 - DNA, 120 bp, Artificial Sequence
  ENSG00000101246_53 (sequence is synthesized)
agtgactctggccctgtcctggcagggaaggctcgcttcgtagatggcgctggtcagtcttatccgcatggccacactccctccctgtgcgaggtgctggcacagagccccacaggtgca

SEQ ID NO: 122892 - DNA, 120 bp, Artificial Sequence
  ENSG00000101246_54 (sequence is synthesized)
cccacaggtgcactccctcaacgggccaggctgtggtctaggttcctccagcccccaaaccctatcttttttttgagacagggtctctcattctcacccaggctggagtgcagtggtgtg

SEQ ID NO: 122893 - DNA, 120 bp, Artificial Sequence
  ENSG00000101246_55 (sequence is synthesized)
acctcagcctcccgagtagctaggactgcaggcgcacattaccataagcttttgtacagacggagtctcactgtgttgcccaggttggccgtgaagtgggctcaggtgatcctcctgctt

SEQ ID NO: 122894 - DNA, 120 bp, Artificial Sequence
  ENSG00000101246_56 (sequence is synthesized)
ttggccgtgaagtgggctcaggtgatcctcctgcttctgcctcccaaagtgttgggataataagtgtgagccaccacgcctggcccaatccctgtctttcacctttggccaccatcaggc

SEQ ID NO: 122895 - DNA, 120 bp, Artificial Sequence
  ENSG00000101246_57 (sequence is synthesized)
caaaggttgccggcaggttctcaggagcagcgtctggggacacctccaccagatctccccgcaaccccagaatgcatcccagaagggtcttgcagttgggggctgccctcttgccccttc

SEQ ID NO: 122896 - DNA, 120 bp, Artificial Sequence
  ENSG00000101246_58 (sequence is synthesized)
ctcatgtgagcccctcactgtggccatgacacaggcctggctctgctggcccttggcagggtggggactgagccccaactcctggtgcttcctcccagtattatgcggagtgtcacggcg

SEQ ID NO: 122897 - DNA, 120 bp, Artificial Sequence
  ENSG00000101246_59 (sequence is synthesized)
ctctgaggtgccactgcccccgggagcactggccacgctgagttctagctgttctcttggagtggctttgcacagaagcagcccggcgtccagagggccaggtgaatcttcacttcctgc

SEQ ID NO: 122898 - DNA, 120 bp, Artificial Sequence
  ENSG00000101247_0 (sequence is synthesized)
atgcgcacaaaaagcgccggcaattggggtcgcagctggagatgctgcggccggcagggctctggcgcttatgtcggcgaccttgggcggcgagggtcccagcggagaatcttggccgta

SEQ ID NO: 122899 - DNA, 120 bp, Artificial Sequence
  ENSG00000101247_1 (sequence is synthesized)
gggaagtcacctctggtgtctctccccgcggtagcacctcgcccagaaccctgaatattttcgaccgggatttgaaaaggaaacagaagaactgggcagcccggcagcccgagccgacca

SEQ ID NO: 122900 - DNA, 120 bp, Artificial Sequence
  ENSG00000101247_2 (sequence is synthesized)
aatttgactacctgaaggaggaggttggaagtcggatcgcagaccgtgtatatgacatacccagaaatttcccccttgctttggatcttggttgtggaagaggttacattgcacaatatt

SEQ ID NO: 122901 - DNA, 120 bp, Artificial Sequence
  ENSG00000101247_3 (sequence is synthesized)
tgaataaggaaactattggaaagtttttccaagctgacattgcagaaaatgctttgaaaaattcctcagaaacagaaatacctactgtcagcgttttagctgatgaagaattccttccct

SEQ ID NO: 122902 - DNA, 120 bp, Artificial Sequence
  ENSG00000101247_4 (sequence is synthesized)
tcaaagaaaatacatttgacctggtggttagcagtttaagtttgcattgggtgaatgaccttcctagagcacttgagcagattcattatattttaaaaccagatggagtgtttatcggtg

SEQ ID NO: 122903 - DNA, 120 bp, Artificial Sequence
  ENSG00000101247_5 (sequence is synthesized)
caatgtttggaggcgacacactctatgaacttcggtgttccttacagttagcggaaacggaaagggaaggaggattttctccacacatttctcctttcactgctgtcaatgacctgggac

SEQ ID NO: 122904 - DNA, 120 bp, Artificial Sequence
  ENSG00000101247_6 (sequence is synthesized)
atctgcttgggagagctggctttaatactctgactgtggacactgatgaaattcaagttaactatcctggaatgtttgaattgatggaagatttacaaggtatgggtgagagtaactgtg

SEQ ID NO: 122905 - DNA, 120 bp, Artificial Sequence
  ENSG00000101247_7 (sequence is synthesized)
cttggaatagaaaagccctgctgcatcgagacacaatgctggcagctgcggcagtgtacagagaaatgtacagaaatgaagatggttcagtacctgctacataccagatctattacatga

SEQ ID NO: 122906 - DNA, 120 bp, Artificial Sequence
  ENSG00000101247_8 (sequence is synthesized)
taggatggaaatatcatgagtcacaggcaagaccagctgaaagaggttccgcaactgtgtcatttggagagctaggaaaaataaacaaccttatgccaccggggaaaaaatcacaataaa

SEQ ID NO: 122907 - DNA, 120 bp, Artificial Sequence
  ENSG00000101247_9 (sequence is synthesized)
tatttattcagtgttaatgtcgtccagaattttcatcagaaatggatagctttaacatctaaaattattatattttgaagcaagaagcactctaagctatttactaataggcttttcata

SEQ ID NO: 122908 - DNA, 120 bp, Artificial Sequence
  ENSG00000101247_10 (sequence is synthesized)
taattaggaaaacctaatatcacatctatagtaaccatttcagtttcatattgtttctgttctcataaggatactgctgagtgtctttgcagattcagcctaaaagcaaagaaaatattt

SEQ ID NO: 122909 - DNA, 120 bp, Artificial Sequence
  ENSG00000101247_11 (sequence is synthesized)
ccctaaaatatttgcaaataatgttcacatatgtaaatgccttggaaaatattactcatgctgaccttttacacctttttcatttgtcatactgttttctttgccttgaagaggaacaga

SEQ ID NO: 122910 - DNA, 120 bp, Artificial Sequence
  ENSG00000101247_12 (sequence is synthesized)
tgaatatgcaccttctccagagttatgtggttttagaatttagaagagcatgtatctttattaaatccctcctcaactctttttttttaaagcatctgaatttaaccttatttctttttt

SEQ ID NO: 122911 - DNA, 120 bp, Artificial Sequence
  ENSG00000101247_13 (sequence is synthesized)
atctccatggtgtgggtgggaccaccatggttttacaccccaccctaccttagggaagaagaaaacattttaaagaataccagaagtagaatcacatgtaacagtctctgcacagtcatc

SEQ ID NO: 122912 - DNA, 120 bp, Artificial Sequence
  ENSG00000101247_14 (sequence is synthesized)
agtttattgttaagctttcctttgtaatttcagggcttaagcactattatcctaatccaagttcacagtcctgttgttgtcgaggagggttcaaaatcatttggagataatcaagctcag

SEQ ID NO: 122913 - DNA, 120 bp, Artificial Sequence
  ENSG00000101247_15 (sequence is synthesized)
acagcttaggataggtgagaagaacatagaggaagcagggagaaggctgagaagcaagcaggagtgagcgctaagtgttttgtttccagttagctgttcgctgtcttttccatttaacct

SEQ ID NO: 122914 - DNA, 120 bp, Artificial Sequence
  ENSG00000101247_16 (sequence is synthesized)
gggcactgccctagcctcatcttcagccttcagtgatctataatagcatttccttctgtctcctctcagtctctcttctgccttccttccctcctttactgtattagcaacaagctgtcc

SEQ ID NO: 122915 - DNA, 120 bp, Artificial Sequence
  ENSG00000101247_17 (sequence is synthesized)
atgggtgggggctgtgtgttagcctgtacgtagcacatgggactttccacatagtagatattcagttacattttgaactaattatataacaaacttgccctttgaaagactaagttatag

SEQ ID NO: 122916 - DNA, 120 bp, Artificial Sequence
  ENSG00000101247_18 (sequence is synthesized)
ttaaaaaccaagatttgtaggagaaaaagaaattattgttcccttcagtttgaaaaatcatcgatatttgaaactgggatacgcttggtagcttttttgttttaacacaaagtaaacctg

SEQ ID NO: 122917 - DNA, 120 bp, Artificial Sequence
  ENSG00000101247_19 (sequence is synthesized)
tgaagtagaatttggcgttttgttttttggggttttttttttttttagcttaattttcagaacttgaagagagagaacaacaacaaaaaacaaactgcgctagccaggtgcaatggcgca

SEQ ID NO: 122918 - DNA, 120 bp, Artificial Sequence
  ENSG00000101247_20 (sequence is synthesized)
gtcccagctacttgggaggctgaggcaggcaggagttcaaggctgcagtgagctgtctgtgccacggcactccaacctgggcaaaagaggagacctcatctaaagaaaaatccaccaaaa

SEQ ID NO: 122919 - DNA, 120 bp, Artificial Sequence
  ENSG00000101247_21 (sequence is synthesized)
caccaaaaaccctgtgttttaaagtgcaaactgatgatggaggaatgggtaaattccaggggtctatatttccaaaaggacatgtgtttttgtgcactaatacttgtttttgaagaacac

SEQ ID NO: 122920 - DNA, 120 bp, Artificial Sequence
  ENSG00000101247_22 (sequence is synthesized)
tgtgtctgtgtcattctgtttgaatgtctgtcaggggtatagaaactaggagggagacttgtacttttcactttttaaacttcctgtaaaatttgaattttccaagcaagaatattactt

SEQ ID NO: 122921 - DNA, 120 bp, Artificial Sequence
  ENSG00000101247_23 (sequence is synthesized)
ttgcttatttaatgtcaacggaattatatgtggatggtggggtggagctaaggattactctactctggctatcccaaaaaaagctccatttgtttaaaaaaattaagtaaatcaaacaca

SEQ ID NO: 122922 - DNA, 120 bp, Artificial Sequence
  ENSG00000101247_24 (sequence is synthesized)
gctaattgaggacccttattgtttaatgtgagtgattgtagtgaaaacacttattttagtgtgtataacactagtgaaattatttttgtagttaaatctgctggaagtgtgctattaagc

SEQ ID NO: 122923 - DNA, 120 bp, Artificial Sequence
  ENSG00000101247_25 (sequence is synthesized)
ttttattgtttggagccctcaggaaactaatttttctgaataaccacattttccaaatgattaagagctcatccttttaagcaatgaaacttttaaaaggtctttatcaaaaatttttca

SEQ ID NO: 122924 - DNA, 68 bp, Artificial Sequence
  ENSG00000101247_26 (sequence is synthesized)
tacagtggcgcaatctcggctcactgctgcctccgcttcctgggttcaagtgattctggctaattttt

SEQ ID NO: 122925 - DNA, 120 bp, Artificial Sequence
  ENSG00000101247_27 (sequence is synthesized)
ctggccaataaccatttcttgataaccccacagataatatcataaactcaagttgtctgtattgcttcttcccagactggtcccaagaatgctgtggttggttttgtgtcttttccagca

SEQ ID NO: 122926 - DNA, 120 bp, Artificial Sequence
  ENSG00000101247_28 (sequence is synthesized)
cttttcttacttgctgtcagttgtcaatctcaacaccttgaccaaaatgaactttcttgagtcatttcttctctgtttagctataagattagaattcatactgaaagatttctaggactt

SEQ ID NO: 122927 - DNA, 120 bp, Artificial Sequence
  ENSG00000101247_29 (sequence is synthesized)
ttgtattaaggtaggaaagaggaactaggttctgggagaaagactcctttggaataaaattcatgagctttattggttcctttaacagatcttcattgagtttcatgtgccaggcatcca

SEQ ID NO: 122928 - DNA, 120 bp, Artificial Sequence
  ENSG00000101247_30 (sequence is synthesized)
actagtctctgcttttatagttgtcagtctgacagggctctagtatgtgcacaccgtgacacctgttggctgccaggagactgtttggcttatttcctggttcttagcaatattccaggt

SEQ ID NO: 122929 - DNA, 120 bp, Artificial Sequence
  ENSG00000101247_31 (sequence is synthesized)
tggcctggagaattccaaaggtaaatatgaaaatgtatacctacaaaagaatttttgctttataggaagaatttgtaggatttattgagatgtaagctacctatatacatcaagtatgtg

SEQ ID NO: 122930 - DNA, 120 bp, Artificial Sequence
  ENSG00000101247_32 (sequence is synthesized)
atatgattgtaaaaagttacagaagtgtgtgagtcatgaagtacctgtgagggaagtttatatattttttcaaactcttttagtaccattttcatccactaggtggaagcaattacagta

SEQ ID NO: 122931 - DNA, 120 bp, Artificial Sequence
  ENSG00000101247_33 (sequence is synthesized)
ttacagtatgacctgcattaaagacatgtacagttttttggccggctgcagtggctcacacctgtgatctcaacactttgggaagctgagacgggaggattgcttgagcccaggagtttg

SEQ ID NO: 122932 - DNA, 82 bp, Artificial Sequence
  ENSG00000101247_34 (sequence is synthesized)
aaaattagccaggcatggtggcacaatattgatcgagcccaggaggtcaaggctgcagcaagctgtcgcaccactgcactct

SEQ ID NO: 122933 - DNA, 120 bp, Artificial Sequence
  ENSG00000101247_35 (sequence is synthesized)
ccactgcactctagcctgggcaacagcaagaccctcgtctcaaaaaagaaaaaaaaaaagtacaatttttgtattgattatgtattccttaagtaggagtggaataaaagtattttaccg

SEQ ID NO: 122934 - DNA, 120 bp, Artificial Sequence
  ENSG00000101247_36 (sequence is synthesized)
gtaggagtggaataaaagtattttaccgtggattggcttctgtgaaggaaagaagtgaatattagtagatatttggaaaaaagaaagatagttgatgcagtgattattattctgttcctt

SEQ ID NO: 122935 - DNA, 120 bp, Artificial Sequence
  ENSG00000101247_37 (sequence is synthesized)
tgtaagttaccattagcctctcttgcttaagaaatattttgagcttttttggggaggggttgtggttaatgatgtgaaattaatcttcaggaaatttatcataagcagacttgccttttc

SEQ ID NO: 122936 - DNA, 120 bp, Artificial Sequence
  ENSG00000101247_38 (sequence is synthesized)
agatattggtatattttaattctctacctgaatacatacatgacagttattttaccatgctggtttaaaaaacatcaatttgaaaatactagaaggtggggtgaacactgataagttact

SEQ ID NO: 122937 - DNA, 120 bp, Artificial Sequence
  ENSG00000101247_39 (sequence is synthesized)
gttaacaaataagaaaataatgctttgccatctgtggtggttttaaaatctatccacaaatttttgatatgcttctctttaagacgggacacttcattcccctctaagtacaggctgagt

SEQ ID NO: 122938 - DNA, 120 bp, Artificial Sequence
  ENSG00000101247_40 (sequence is synthesized)
ttagtgattcccttccaacaaatagatggtgtgtcacttctgagactaggtaataaaaggcattgcatcctccttactctctcttggatccttcactctagggaaagccagcagccatat

SEQ ID NO: 122939 - DNA, 120 bp, Artificial Sequence
  ENSG00000101247_41 (sequence is synthesized)
tgtaaggccactcaactccatggagaagacctagaagtgaggagcagaggcctccagccaaaagccatgtgagggagccatcttggaagcaattctccaggcccaaacttcagatgactg

SEQ ID NO: 122940 - DNA, 120 bp, Artificial Sequence
  ENSG00000101247_42 (sequence is synthesized)
tggtcccagccaatgcattgaccacaacctcatgagagaccctgagctagaaccacctagctaagccactctcaaatatcttatctacagaaactgagatgataaatgtttgtggtttaa

SEQ ID NO: 122941 - DNA, 120 bp, Artificial Sequence
  ENSG00000101247_43 (sequence is synthesized)
tgttggaaaggagcctccagggagggaagaattaacaggctggaggactaggctgggaactgaagagaaccccggaggcttcacacctgtgactagtgttgatcttttgttaacttttaa

SEQ ID NO: 122942 - DNA, 120 bp, Artificial Sequence
  ENSG00000101247_44 (sequence is synthesized)
atggcctgagtccatagaaactgcatcctgagaggttgctcggctagaaagcggaaaaccgcttcacatgagtgctctactttgtaatgaaaataaacactattaatacaggcaattgta

SEQ ID NO: 122943 - DNA, 120 bp, Artificial Sequence
  ENSG00000101247_45 (sequence is synthesized)
tgcactgacctgtcctcctccaaagagcagctaaaagcatgagatgtgacatccttggtaaagttcttgccaattgctgacaactcacctggggtggcagtcacctggcttttgcccagc

SEQ ID NO: 122944 - DNA, 120 bp, Artificial Sequence
  ENSG00000101247_46 (sequence is synthesized)
gggcttactttagaccattgctggcaagtaaagcattgtggagctgcctcctgaaatttcacttgcctgtcttaatgttgaaaaagtttcaagtagtttcgctttagagtcactaagaaa

SEQ ID NO: 122945 - DNA, 120 bp, Artificial Sequence
  ENSG00000101247_47 (sequence is synthesized)
aatgtgtgaggaaacccaggcagaagttaagtaacttgtcccagatgttgtaattagtgagtggtagagccaggatttaaacctagtcgaacagcctgatttgtatgctgaaatcttagc

SEQ ID NO: 122946 - DNA, 120 bp, Artificial Sequence
  ENSG00000101247_48 (sequence is synthesized)
cattctgccttggaaaaagtcagaggcagatgagatgggaagaagcatagtcaggggatgatggaggcagggagaccgtgggagactttcaggtgtgccattctgctgactagaagatca

SEQ ID NO: 122947 - DNA, 120 bp, Artificial Sequence
  ENSG00000101247_49 (sequence is synthesized)
ttcttgtccttcctctcaaaacacagatcctgtagctttttccagacagcctttactatttccttaccctcagtattaagaatttttcatgtaagatgttctcagaatcttacaagtatc

SEQ ID NO: 122948 - DNA, 120 bp, Artificial Sequence
  ENSG00000101247_50 (sequence is synthesized)
ggctttaatactctgactgtgggaaaagctctgattgacaatgtttagtttgtataacacatcttaattgacacaaggacactgatgaaattcaagttaactatcctggaatgtttgaat

SEQ ID NO: 122949 - DNA, 120 bp, Artificial Sequence
  ENSG00000101247_51 (sequence is synthesized)
caattttgtttcctggtggtttgagaagaaagttcctgtggtgaaattgaaaaggggataaagggaagtacttattttaaaacataagtaacttgtggattgttgaatactggaaaaaga

SEQ ID NO: 122950 - DNA, 120 bp, Artificial Sequence
  ENSG00000101251_0 (sequence is synthesized)
ctgagaagaggagctcttgggccaatcacctagtttctgcctgtgttacagtgaagagaagctgcttaagagaagatgaagcccttgtctctgttaatagagatattgataattcttggg

SEQ ID NO: 122951 - DNA, 120 bp, Artificial Sequence
  ENSG00000101251_1 (sequence is synthesized)
gtcacaattaaaactatcaaagcagaggaacataataaaagacaaaaggaaagaaatgtcaccacacaggtatcagtgaacgaaatcaaacaatatttatcacacatattggaacaaaga

SEQ ID NO: 122952 - DNA, 120 bp, Artificial Sequence
  ENSG00000101251_2 (sequence is synthesized)
acatctagtaatgtaatcaataaaagagaaaatctcctggagaaaaagaagaatcaacgtaaaataagaataaaaggaattcaaaataaagatatcttgaagagaaataagaatcattta

SEQ ID NO: 122953 - DNA, 120 bp, Artificial Sequence
  ENSG00000101251_3 (sequence is synthesized)
caaaagcaagcagagaaaaattttacagatgaaggagaccagctatttaagatgggcatcaaggttctccagcagtctaaaagccaaaaacaaaaagaagaagcctacctactttttgcc

SEQ ID NO: 122954 - DNA, 120 bp, Artificial Sequence
  ENSG00000101251_4 (sequence is synthesized)
aaagcagctgacatgggaaacttgaaagctatggagaaaatggctgacgctttgctatttggaaattttggcgtgcaaaatataacagcagctatccaattatatgagtccttggctaaa

SEQ ID NO: 122955 - DNA, 120 bp, Artificial Sequence
  ENSG00000101251_5 (sequence is synthesized)
gaaggatcatgtaaagcccaaaacgcattaggatttttgtcttcttatggaataggaatggaatatgatcaagctaaggcactgatatattacacctttggaagtgctggaggaaacatg

SEQ ID NO: 122956 - DNA, 120 bp, Artificial Sequence
  ENSG00000101251_6 (sequence is synthesized)
atgtcccagatgattttggggtacagatatttgtcgggaatcaatgttctacagaattgtgaagttgccctaagttattacaagaaagtggcagattatattgctgacacatttgaaaaa

SEQ ID NO: 122957 - DNA, 120 bp, Artificial Sequence
  ENSG00000101251_7 (sequence is synthesized)
agtgaaggtgttccagtggaaaaagtgagactaacggaaagacctgaaaatctgagttctaacagtgagattttggattgggacatataccaatactataaatttttggcagaaagagga

SEQ ID NO: 122958 - DNA, 120 bp, Artificial Sequence
  ENSG00000101251_8 (sequence is synthesized)
gatgttcagatacaagtctctcttggacaattacatctaattggcaggaaaggtctagatcaggattactacaaagcattacactacttcttaaaggcagcaaaggccgggagtgcaaat

SEQ ID NO: 122959 - DNA, 120 bp, Artificial Sequence
  ENSG00000101251_9 (sequence is synthesized)
ctgccttcaagtacttttccatggcagccagtaagggcaatgcaatcggccttcatgggcttggtcttctttactttcatggaaaaggagttcccctgaattatgccgaagcacttaaat

SEQ ID NO: 122960 - DNA, 120 bp, Artificial Sequence
  ENSG00000101251_10 (sequence is synthesized)
actttcagaaagctgcggaaaaagggtggcccgacgcacagttccagttaggcttcatgtactactctggctctggaatatggaaggattataaacttgccttcaaatatttttacctgg

SEQ ID NO: 122961 - DNA, 120 bp, Artificial Sequence
  ENSG00000101251_11 (sequence is synthesized)
catctcagagtgggcagccccttgccatttattatctggccaagatgtatgcaacaggaacaggagtagtaagatcatgcagaactgctgtggagctttataaaggtgtctgtgaactag

SEQ ID NO: 122962 - DNA, 120 bp, Artificial Sequence
  ENSG00000101251_12 (sequence is synthesized)
gccactgggctgagaaattcctgacagcttactttgcctataaggatggtgatatagattcttctcttgttcagtatgcactgcttgcagaaatggggtatgaagtagctcaaagcaatt

SEQ ID NO: 122963 - DNA, 120 bp, Artificial Sequence
  ENSG00000101251_13 (sequence is synthesized)
cagcattcattttggaatctaaaaaggctaacattcttgaaaaagagaagatgtatccaatggcgcttctcctatggaatcgagctgccattcaaggcaatgcatttgctagagtaaaaa

SEQ ID NO: 122964 - DNA, 120 bp, Artificial Sequence
  ENSG00000101251_14 (sequence is synthesized)
ttggagattaccattactatggctatgggactaagaaagactatcaaacagcagccacacactacagcattgcagccaacaaataccacaacgcgcaagccatgttcaatctggcttata

SEQ ID NO: 122965 - DNA, 120 bp, Artificial Sequence
  ENSG00000101251_15 (sequence is synthesized)
tgtatgaacacggcttaggcatcacaaaggacattcacttggccagaagattgtacgacatggctgctcaaacgagtccagatgcccacatacctgtgctctttgccgtcatgaaactgg

SEQ ID NO: 122966 - DNA, 120 bp, Artificial Sequence
  ENSG00000101251_16 (sequence is synthesized)
aaactacgcatttgctccgggatatcctgttttttaatttcacaacgagatggaactggctgaaactggacaacaccattggaccacactgggacttatttgtgattggcctcattgttc

SEQ ID NO: 122967 - DNA, 120 bp, Artificial Sequence
  ENSG00000101251_17 (sequence is synthesized)
ctgggctgattttgttgcttagaaatcaccatgggtaggatgcggatcacaggaaaacctgctcacgggaatcagttcactccaaggtatccccactaaataaacagtttcccatccaaa

SEQ ID NO: 122968 - DNA, 120 bp, Artificial Sequence
  ENSG00000101251_18 (sequence is synthesized)
ggatgtttctctgtctgaggtccttcttgcctggactactctgctccagcttctgcccaagagcagcttattttagcctcagcatggatgggctgtacataaagagcctacctacttttt

SEQ ID NO: 122969 - DNA, 120 bp, Artificial Sequence
  ENSG00000101251_19 (sequence is synthesized)
aatagtattccagctctgctgcatgaacccagtctagggaggttaccataatgcactgaaacagtggtgtcagggcaggagtacagcagaagcctccgaacccccaacagctaaatttta

SEQ ID NO: 122970 - DNA, 120 bp, Artificial Sequence
  ENSG00000101251_20 (sequence is synthesized)
tataaaatgtattcacctatatgaagaaatatgaaactgtctattatcttagggtgacatgtttgcatgatttttacttttcaaatattttataagctaaatgtaattccttttctattt

SEQ ID NO: 122971 - DNA, 120 bp, Artificial Sequence
  ENSG00000101251_21 (sequence is synthesized)
aaagacattgccctacagaactagggagaggaacgttgacattttgtttttgaaagggtgagaagaaaagaacaggagaagaactatgaaaacagcagatgtgaggagcaagaaagatgg

SEQ ID NO: 122972 - DNA, 120 bp, Artificial Sequence
  ENSG00000101251_22 (sequence is synthesized)
tgattggctgcgctaaactgaaaagttagtgaaacttcaaagttgggggattccaactgatatttttaaatcagcaatgtctaaggtgaccattaaaaattgtttttgttcctaggataa

SEQ ID NO: 122973 - DNA, 120 bp, Artificial Sequence
  ENSG00000101251_23 (sequence is synthesized)
gtcctcgagacgtgggcgcggcgtgaagccgacgcctagtgggagagggaggtggaccgcgcttaccgctggcctcttggaagacttgagggcgtggcctgtagagccaggtgcgccaag

SEQ ID NO: 122974 - DNA, 120 bp, Artificial Sequence
  ENSG00000101251_24 (sequence is synthesized)
tgacaggcgagctagcggaaagccgcctcagggacttggaggatgtagaagtgggaggagaccgagggtcaacacgaattgtccgtgctcactccaactgccctgttgaggaggattttc

SEQ ID NO: 122975 - DNA, 120 bp, Artificial Sequence
  ENSG00000101251_25 (sequence is synthesized)
actgggaattcaggggtgaacagacagtccaagcccttgtttttgaggacctggagacaaacaaatgaataaataaattctagaacttcaggtatggacattcacttggccagaagattg

SEQ ID NO: 122976 - DNA, 120 bp, Artificial Sequence
  ENSG00000101251_26 (sequence is synthesized)
atgggaaacagacaagacttggggaccatcctagagaaacaacttcagacttcctgcttagtagagaaaaccctttgcgggatgctgggaactggtcacctaagaccttgttaccaatct

SEQ ID NO: 122977 - DNA, 120 bp, Artificial Sequence
  ENSG00000101251_27 (sequence is synthesized)
ctctgaaggcacttatcctcacggacaacacgctcgttttagggctcccctagagttccaggtttcaaaagtcacgctgcggcagcgaaggaaggaaacctagacaaggggtaaacaccc

SEQ ID NO: 122978 - DNA, 120 bp, Artificial Sequence
  ENSG00000101251_28 (sequence is synthesized)
ggtggcccgacgcacagttccagttaggcttcatgtactactaaaaggctaacattcttgaaaaagagaagatgtatccaatggcgcttctcctatggaatcgagctgccattcaaggac

SEQ ID NO: 122979 - DNA, 120 bp, Artificial Sequence
  ENSG00000101251_29 (sequence is synthesized)
acaaagtgacaaggcccatcagggagtctcttgtggactggctttcctttgagaagtaaaattcagagtcttacacttgccatgcagagtaattctgcatgttctattgagtatgtgttg

SEQ ID NO: 122980 - DNA, 80 bp, Artificial Sequence
  ENSG00000101255_0 (sequence is synthesized)
gcgcgcgtccgctgctaggacccgggcagggctggagctgggctgggatcccgagctcggcagcagcgcagcgggccggc

SEQ ID NO: 122981 - DNA, 120 bp, Artificial Sequence
  ENSG00000101255_1 (sequence is synthesized)
cccgggcccacgcggaacgacggggcgagatgcgagccacccctctggctgctcctgcgggttccctgtccaggaagaagcggttggagttggatgacaacttagataccgagcgtcccg

SEQ ID NO: 122982 - DNA, 120 bp, Artificial Sequence
  ENSG00000101255_2 (sequence is synthesized)
tccagaaacgagctcgaagtgggccccagcccagactgcccccctgcctgttgcccctgagcccacctactgctccagatcgtgcaactgctgtggccactgcctcccgtcttgggccct

SEQ ID NO: 122983 - DNA, 120 bp, Artificial Sequence
  ENSG00000101255_3 (sequence is synthesized)
atgtcctcctggagcccgaggagggcgggcgggcctaccaggccctgcactgccctacaggcactgagtatacctgcaaggtgtaccccgtccaggaagccctggccgtgctggagccct

SEQ ID NO: 122984 - DNA, 120 bp, Artificial Sequence
  ENSG00000101255_4 (sequence is synthesized)
atgcgcggctgcccccgcacaagcatgtggctcggcccactgaggtcctggctggtacccagctcctctacgcctttttcactcggacccatggggacatgcacagcctggtgcgaagcc

SEQ ID NO: 122985 - DNA, 120 bp, Artificial Sequence
  ENSG00000101255_5 (sequence is synthesized)
gccaccgtatccctgagcctgaggctgccgtgctcttccgccagatggccaccgccctggcgcactgtcaccagcacggtctggtcctgcgtgatctcaagctgtgtcgctttgtcttcg

SEQ ID NO: 122986 - DNA, 120 bp, Artificial Sequence
  ENSG00000101255_6 (sequence is synthesized)
ctgaccgtgagaggaagaagctggtgctggagaacctggaggactcctgcgtgctgactgggccagatgattccctgtgggacaagcacgcgtgcccagcctacgtgggacctgagatac

SEQ ID NO: 122987 - DNA, 120 bp, Artificial Sequence
  ENSG00000101255_7 (sequence is synthesized)
tcagctcacgggcctcatactcgggcaaggcagccgatgtctggagcctgggcgtggcgctcttcaccatgctggccggccactaccccttccaggactcggagcctgtcctgctcttcg

SEQ ID NO: 122988 - DNA, 120 bp, Artificial Sequence
  ENSG00000101255_8 (sequence is synthesized)
ctgtctggttcgctgcctccttcgtcgggagccagctgaacggctcacagccacaggcatcctcctgcacccctggctgcgacaggacccgatgcccttagccccaacccgatcccatct

SEQ ID NO: 122989 - DNA, 120 bp, Artificial Sequence
  ENSG00000101255_9 (sequence is synthesized)
ctgggaggctgcccaggtggtccctgatggactggggctggacgaagccagggaagaggagggagacagagaagtggttctgtatggctaggaccaccctactacacgctcagctgccaa

SEQ ID NO: 122990 - DNA, 120 bp, Artificial Sequence
  ENSG00000101255_10 (sequence is synthesized)
cagtggattgagtttgggggtagctccaagccttctcctgcctctgaactgagccaaaccttcagtgccttccagaagggagaaaggcagaagcctgtgtggagtgtgctgtgtacacat

SEQ ID NO: 122991 - DNA, 120 bp, Artificial Sequence
  ENSG00000101255_11 (sequence is synthesized)
ctgctttgttccacacacatgcagttcctgcttgggtgcttatcaggtgccaagccctgttctcggtgctgggagtacagcagtgagcaaaggagacaatattccctgctcacagagatg

SEQ ID NO: 122992 - DNA, 120 bp, Artificial Sequence
  ENSG00000101255_12 (sequence is synthesized)
acaaactggcatccttgagctgacaacacttttccatgaccataggtcactgtctacactgggtacactttgtaccagtgtcggcctccactgatgctggtgctcaggcacctctgtcca

SEQ ID NO: 122993 - DNA, 120 bp, Artificial Sequence
  ENSG00000101255_13 (sequence is synthesized)
aggacaatccctttcacaaacaaaccagctgcctttgtatcttgtaccttttcagagaaagggaggtatccctgtgccaaaggctccaggcctctcccctgcaactcaggacccaagccc

SEQ ID NO: 122994 - DNA, 120 bp, Artificial Sequence
  ENSG00000101255_14 (sequence is synthesized)
agctcactctgggaactgtgttcccagcatctctgtcctcttgattaagagattctccttccaggcctaagcctgggatttgggccagagataagaatccaaactatgaggctagttctt

SEQ ID NO: 122995 - DNA, 120 bp, Artificial Sequence
  ENSG00000101255_15 (sequence is synthesized)
gtctaactcaagactgttctggaatgagggtccaggcctgtcaaccatggggcttctgacctgagcaccaaggttgagggacaggattaggcagggtctgtcctgtggccacctggaaag

SEQ ID NO: 122996 - DNA, 120 bp, Artificial Sequence
  ENSG00000101255_16 (sequence is synthesized)
tcccaggtgggactcttctggggacacttggggtccacaatcccaggtccatactctaggttttggataccatgagtatgtatgtttacctgtgcctaataaaggagaattatgaaataa

SEQ ID NO: 122997 - DNA, 120 bp, Artificial Sequence
  ENSG00000101255_17 (sequence is synthesized)
cttacacaccttttcacagaccccgccgtcggggcgcggccaggtcagatcccttttgatccgggcctgggctgagtgctccccccgggcttcaggtgacgcggccccgcggagcgtggg

SEQ ID NO: 122998 - DNA, 120 bp, Artificial Sequence
  ENSG00000101255_18 (sequence is synthesized)
gtcgcccgagttgggctggggaagccagggacggaggtgtccggccgtcacccctagaggagggcgtgcgggggtctgttttgcggcacaaagcatgtgcacagccaggtatcatcctgc

SEQ ID NO: 122999 - DNA, 120 bp, Artificial Sequence
  ENSG00000101255_19 (sequence is synthesized)
gtgactcagaacagccttgagatgtaaggagtgtcatcccagcctcgaacctggggagctttctaagactcccaaggatggtacttatgcatcttgctgtgaagaataacaggatgagtg

SEQ ID NO: 123000 - DNA, 120 bp, Artificial Sequence
  ENSG00000101255_20 (sequence is synthesized)
ggaggccaggaatgagggagtaagtgagccattgactcaatgaatgaatgaatgagcgagtgagtgaaggaaggaagggataagaaatttgaagcccccgcaaagggaggtgacttgtcc

SEQ ID NO: 123001 - DNA, 120 bp, Artificial Sequence
  ENSG00000101255_21 (sequence is synthesized)
acaatctcacaggctcagtggcttcagccagacttggaacgcaaccagaagttctaaggcatcatgtcacttttgtgggggaaattcacgctcattctccaccgtgttcttggggaacat

SEQ ID NO: 123002 - DNA, 120 bp, Artificial Sequence
  ENSG00000101255_22 (sequence is synthesized)
gcagcatgttcttttgcctcttccctcaccccagaacaggggttactggacagcggcatcaacttcacctgggaactggatagaaatgcagattcagaccttctgaatgagctactttgg

SEQ ID NO: 123003 - DNA, 120 bp, Artificial Sequence
  ENSG00000101265_0 (sequence is synthesized)
aatgctgtgagttccttgttaggcctctccttccgatgaaaagagaaaggaagaatggactacagccaccaaacgtccctagtcccatgtggacaagataaatacatttccaaaaatgaa

SEQ ID NO: 123004 - DNA, 120 bp, Artificial Sequence
  ENSG00000101265_1 (sequence is synthesized)
cttctcttgcatctgaagacctacaacttgtactatgaaggccagaatttacagctccggcaccgggaggaagaagacgagttcattgtggaggggctcctgaacatctcctggggcctg

SEQ ID NO: 123005 - DNA, 120 bp, Artificial Sequence
  ENSG00000101265_2 (sequence is synthesized)
cgccggcccattcgcctgcagatgcaggatgacaacgaacgcattcgaccccctccatcctcctcctcctggcactctggctgtaacctgggggctcagggaaccactctgaagcccctg

SEQ ID NO: 123006 - DNA, 120 bp, Artificial Sequence
  ENSG00000101265_3 (sequence is synthesized)
actgtgcccaaagttcagatctcagaggtggatgccccgccggagggtgaccagatgccaagctccacagactccaggggcctgaagcccctgcaggaggacaccccacagctgatgcgc

SEQ ID NO: 123007 - DNA, 120 bp, Artificial Sequence
  ENSG00000101265_4 (sequence is synthesized)
acacgcagtgatgttggggtgcgtcgccgtggcaatgtgaggacgcctagtgaccagcggcgaatcagacgccaccgcttctccatcaacggccatttctacaaccataagacatccgtg

SEQ ID NO: 123008 - DNA, 120 bp, Artificial Sequence
  ENSG00000101265_5 (sequence is synthesized)
ttcacaccagcctatggctctgtcaccaacgtccgcatcaacagcaccatgaccaccccacaggtcctgaagctgctgctcaacaaatttaagattgagaattcagcagaggagtttgcc

SEQ ID NO: 123009 - DNA, 120 bp, Artificial Sequence
  ENSG00000101265_6 (sequence is synthesized)
ttgtacgtggtccatacgagtggtgagaaacagaagctgaaggccaccgattacccgctgattgcccgaatcctccagggcccatgtgagcagatctccaaagtgttcctaatggagaag

SEQ ID NO: 123010 - DNA, 120 bp, Artificial Sequence
  ENSG00000101265_7 (sequence is synthesized)
gaccaggtggaggaagtcacctacgacgtggcccagtatataaagttcgagatgccggtacttaaaagcttcattcagaagctccaggaggaagaagatcgggaagtaaagaagctgatg

SEQ ID NO: 123011 - DNA, 120 bp, Artificial Sequence
  ENSG00000101265_8 (sequence is synthesized)
cgcaagtacaccgtgctccggctaatgattcgacagaggctggaggagatagccgagaccccagcaacaatctgagccatgagaacgaggggatctgggcaccccaggaaccgccattgc

SEQ ID NO: 123012 - DNA, 120 bp, Artificial Sequence
  ENSG00000101265_9 (sequence is synthesized)
ccataagacccccaggaagctaggcactttctttccatggaaacatttagacacaaacctccccagctccggccaagccatcatttgctacctggagctggatgtagaagtcagcagaca

SEQ ID NO: 123013 - DNA, 120 bp, Artificial Sequence
  ENSG00000101265_10 (sequence is synthesized)
gctccctatccctggacccctgccctccttttttctgctcacaaggacttttgattttagttataaggaggacccaaaatgtgtgtgtgtacatgtgtgtgcacacatggtacgtgtcca

SEQ ID NO: 123014 - DNA, 120 bp, Artificial Sequence
  ENSG00000101265_11 (sequence is synthesized)
tgtgcctacctgatactttcacatgtaattaaattccaggcaaccagcacaagagccgtgagcttggcacatgtgctgctcgtgagcaggaaaatcagaggagccactgatctgagtggt

SEQ ID NO: 123015 - DNA, 120 bp, Artificial Sequence
  ENSG00000101265_12 (sequence is synthesized)
atttaggttgaaggaaagatttctcctctcaagtgccagggagcagccacacgtctgtctgtgtttagagagggaagagggttctccaggttcaccatttgggttgtttatatgttggta

SEQ ID NO: 123016 - DNA, 120 bp, Artificial Sequence
  ENSG00000101265_13 (sequence is synthesized)
gaaattctccctgtatgcctagaaggatcagtgaatgtaagagccttggaaattaacaaaataacagccacataaccttgcggcaagtctgatggaaagaaaaagataaaccatccgtgg

SEQ ID NO: 123017 - DNA, 120 bp, Artificial Sequence
  ENSG00000101265_14 (sequence is synthesized)
ggtagatgcaataagcccacgtatttttacactggaaacgttgattgttttaaatgacaaagacatatgtgatgttctatgtggaaacctgtgaagagtggattctgcctccatctctgc

SEQ ID NO: 123018 - DNA, 120 bp, Artificial Sequence
  ENSG00000101265_15 (sequence is synthesized)
ctccatggctacctttaggagacagagaagatcctgtgtgtttctctgtacccagctgacagcctgtctctatggcgcttccttgagtggaaggaaatgtctcaagaaacaaagatctcg

SEQ ID NO: 123019 - DNA, 120 bp, Artificial Sequence
  ENSG00000101265_16 (sequence is synthesized)
ctggtgcgtacacagtgctgaccagctagtgtggccagggcctggtggcctggtggccaggaagtttcaggttgaagggaaatgtcgaggctacctgcagatatgacaggtgccttgaac

SEQ ID NO: 123020 - DNA, 120 bp, Artificial Sequence
  ENSG00000101265_17 (sequence is synthesized)
gcagcccatcttcatgtcatcaaaggtcttcctgcacttgaagctggggcgatgtttgcagtcaagaccattctttccaacctctgggttcttgcaagttgccctcaccttgtgtgtgga

SEQ ID NO: 123021 - DNA, 120 bp, Artificial Sequence
  ENSG00000101265_18 (sequence is synthesized)
gatgcattccaagaatgaagcctcatcttgctactgagtgtggggttcagggaagctctttaggccacctggtgaaggtgcatggggaggatggagcttctcctcagctcctctgagcag

SEQ ID NO: 123022 - DNA, 120 bp, Artificial Sequence
  ENSG00000101265_19 (sequence is synthesized)
ccacctatgtgatctttaaatccaaccccaatgggagaaaagggcaagaacagtctgtgccctgggactcctatcaggaagcttgacaggcagctgggcatcagtgcagctgatatcgtt

SEQ ID NO: 123023 - DNA, 120 bp, Artificial Sequence
  ENSG00000101265_20 (sequence is synthesized)
tgaggagggagacagatgcttggacctgggtgcctggctatggagattgaccaagcaagatcaggagctcctgatagcaggcgtctttgagcctagctggggtagaggcactgcccatct

SEQ ID NO: 123024 - DNA, 120 bp, Artificial Sequence
  ENSG00000101265_21 (sequence is synthesized)
cttctccaccttctctccacagaatgtttgcagagctgggcagttgaggaaaggacagcccctggttggtgcctccaaaggaaggtggacttttttggtggagacgtttctgccctgggc

SEQ ID NO: 123025 - DNA, 120 bp, Artificial Sequence
  ENSG00000101265_22 (sequence is synthesized)
cctcctgcccccgattcatacctatggcttcttgagaaggctcacagctgtggtcttaacgtagactgcagaaagatggcatgcggcccctggcatttcgccaagggttttatagcaagt

SEQ ID NO: 123026 - DNA, 120 bp, Artificial Sequence
  ENSG00000101265_23 (sequence is synthesized)
ctccttcctccatagggacagcagcaccagccctgtggggcatggagtggaagcccagaagggcttctgcaagctgcacagaactggggtaagaagacaaagagtagccaccgggagagg

SEQ ID NO: 123027 - DNA, 120 bp, Artificial Sequence
  ENSG00000101265_24 (sequence is synthesized)
cttcctttgttacagctgggaaagaacagttctgtgaatgcaaacacctcctgagttttgcaattgagaaaatgatttggagaacttctcttctggtaatttttattttgaatgttcagg

SEQ ID NO: 123028 - DNA, 120 bp, Artificial Sequence
  ENSG00000101265_25 (sequence is synthesized)
gccttagttggccccagtaattctccttggaggacttgggagaagaatttccacaaagcaaactactaaccactagctcttactggacagcgatttctggcttataagagttctctttga

SEQ ID NO: 123029 - DNA, 120 bp, Artificial Sequence
  ENSG00000101265_26 (sequence is synthesized)
tttgcactagcactacgatagtgttagatggggaaatactgcaacatgtccagttggccagatcactttccaagggagcgatactaaggcagactcagctttttaaagatgggaggtcag

SEQ ID NO: 123030 - DNA, 120 bp, Artificial Sequence
  ENSG00000101265_27 (sequence is synthesized)
gaggtggaagtgagaggagatcccatctcacacaacacacttccacgtaatgcagaccacacttttccattttgtcctgccctcttgagaggtcatttctcacgtcctaagaacctgatc

SEQ ID NO: 123031 - DNA, 120 bp, Artificial Sequence
  ENSG00000101265_28 (sequence is synthesized)
agaaattttggaagggttctttgaaatagcagcagttgaaacagagacactttgccacagtgtggagcagattttctcactggtatcacatggtcttgcagttttgaactcttcgaccga

SEQ ID NO: 123032 - DNA, 120 bp, Artificial Sequence
  ENSG00000101265_29 (sequence is synthesized)
tttgtgggagtttatgtaattgcgtgcaatgaacctgaaattgtgtaaaggacaaaagaccagtttatagggttgggttttttttccaacttgtgaaaagcagtttagctgcatctgtct

SEQ ID NO: 123033 - DNA, 120 bp, Artificial Sequence
  ENSG00000101265_30 (sequence is synthesized)
ccccaccacccccaccccgggaggggcttatgttacaaggtgatcaagtgaaggaaaaacctgagcctatctggctgggatggtggaattaagcacaaggtcacattctctgtgatcaca

SEQ ID NO: 123034 - DNA, 120 bp, Artificial Sequence
  ENSG00000101265_31 (sequence is synthesized)
tgagagggaaggtgatgacttaaatggcagggggtggggattatcttggggagaggctgaaaagcacaaaagatagtcttccctgtacgtattggtgaagaacgtgcacaaggctggatg

SEQ ID NO: 123035 - DNA, 120 bp, Artificial Sequence
  ENSG00000101265_32 (sequence is synthesized)
gacttcaacttggagttgagttgaggcaagaggatttctggatattagtcacccatctgcaagaaaaatgctgaggcctcgggtcaagattttgatctgagacatgctgatgcttcaagg

SEQ ID NO: 123036 - DNA, 120 bp, Artificial Sequence
  ENSG00000101265_33 (sequence is synthesized)
agaaatattttcacaatcctctcttccctcaccagaagagaacagtactctctcctagaaacctctaggtaaacacattttatcctaatatcggtagcatataatgccccccccaaaata

SEQ ID NO: 123037 - DNA, 120 bp, Artificial Sequence
  ENSG00000101265_34 (sequence is synthesized)
tctgttttccatgcaaaaaagtctcaacaagaagtctgtggagttgagtggttacttcaaagtgtcaggagagtgaagaaattggccacagaagagcaagaagctctcttaagaaaaggg

SEQ ID NO: 123038 - DNA, 120 bp, Artificial Sequence
  ENSG00000101265_35 (sequence is synthesized)
aattctctttaaagaaaccaccaccaacaacaaaacaaccaaaaaccatgttttatgtcaaagctctgtagcacagagaatgtggtgtcacagatacatcgccgagagaggtttctttct

SEQ ID NO: 123039 - DNA, 120 bp, Artificial Sequence
  ENSG00000101265_36 (sequence is synthesized)
caggcgtgagccactgtgcccagccaaaagagaaatttctacatgaacaaggcaatttcagtgtcttacagcggccaaaccatgacgtgaagaatgagataggagacaggagatcaccat

SEQ ID NO: 123040 - DNA, 120 bp, Artificial Sequence
  ENSG00000101265_37 (sequence is synthesized)
acgtgaagaatgagataggagacaggagatcaccataagcgtccctgatatagcagcacacattttcacgtttccacttaaatcgttttgcacaaagtcttgcttcgctcagatgagatg

SEQ ID NO: 123041 - DNA, 120 bp, Artificial Sequence
  ENSG00000101265_38 (sequence is synthesized)
agatatgatttcctagagatgtaaaaataagaatgaatgtggcgcccccttcttccagatgtaatagaaagctctgccctatcacaaggggggtgttgaagcgccccttgtgttttaact

SEQ ID NO: 123042 - DNA, 120 bp, Artificial Sequence
  ENSG00000101265_39 (sequence is synthesized)
gtatttaactgagcacaagatgcacaagctgtggtgggaaaccctcagtttacctttggagtcttccctgcagatcgcagacctgtttccaggctgatgtttctggtgtgtaattgctag

SEQ ID NO: 123043 - DNA, 120 bp, Artificial Sequence
  ENSG00000101265_40 (sequence is synthesized)
cgtttctgaagggttttcccaattgttttagccttgtgaagtattcttaattataacttgcctttcagcgatggtacatgacttgattcaacgtttggttctgaacttacacactgatgc

SEQ ID NO: 123044 - DNA, 120 bp, Artificial Sequence
  ENSG00000101265_41 (sequence is synthesized)
gtttactcatctaacataatctgacagggcctcagcaagggagccatacatttttgtaacattttgatatgttttaatgcatctgacttagatcttactgaaataaagcacttttcaaag

SEQ ID NO: 123045 - DNA, 120 bp, Artificial Sequence
  ENSG00000101265_42 (sequence is synthesized)
agagtgatatgaagagcgagagaaaagagaggacagcggacgagcagatccggtatctggaatcccggcgcctagaacgtgtttttcgggagagcaaaggctgtgtctacggcagcctgg

SEQ ID NO: 123046 - DNA, 120 bp, Artificial Sequence
  ENSG00000101265_43 (sequence is synthesized)
gtggctagtgaggcccagcctgtatatttctaacagggcgccccatgccccagcaccctccccactgggaccactcctcatagaatagccccactccaaagcatttatgacttgaacctt

SEQ ID NO: 123047 - DNA, 120 bp, Artificial Sequence
  ENSG00000101265_44 (sequence is synthesized)
ctgaccaaagctctctgaatcttgggggaacctagaagaggaaaaggaatgtcaggctctgtcagagtcagccaagcgagatcagccaggggtctgctccctgcagaccatacggggagc

SEQ ID NO: 123048 - DNA, 120 bp, Artificial Sequence
  ENSG00000101266_0 (sequence is synthesized)
agcctcgctctggtccctgcggctggcggccgagccgtgtgtctcctcctccatcgccgccatattgtctgtgtgagcagaggggagagcggccgccgccgctgccgcttccaccacagc

SEQ ID NO: 123049 - DNA, 120 bp, Artificial Sequence
  ENSG00000101266_1 (sequence is synthesized)
tctatcaaggcttgtcaagcagtgtgctcatcacatggtaaatcatgcagcgtggaacctcataaaatctccaagaaacatcattcacccatactgactagtttcacatctctttgtttg

SEQ ID NO: 123050 - DNA, 120 bp, Artificial Sequence
  ENSG00000101266_2 (sequence is synthesized)
aagaaaacaggtctgaaacaaggtcttacccccagctgcttctgaacacagtgactgccagatctccaaacatcaagtccagctttgtccgccaacctgtctgacatgtcgggacccgtg

SEQ ID NO: 123051 - DNA, 120 bp, Artificial Sequence
  ENSG00000101266_3 (sequence is synthesized)
ccaagcagggccagagtttacacagatgttaatacacacagacctcgagaatactgggattacgagtcacatgtggtggaatggggaaatcaagatgactaccagctggttcgaaaatta

SEQ ID NO: 123052 - DNA, 120 bp, Artificial Sequence
  ENSG00000101266_4 (sequence is synthesized)
ggccgaggtaaatacagtgaagtatttgaagccatcaacatcacaaataatgaaaaagttgttgttaaaattctcaagccagtaaaaaagaagaaaattaagcgtgaaataaagattttg

SEQ ID NO: 123053 - DNA, 120 bp, Artificial Sequence
  ENSG00000101266_5 (sequence is synthesized)
gagaatttgagaggaggtcccaacatcatcacactggcagacattgtaaaagaccctgtgtcacgaacccccgccttggtttttgaacacgtaaacaacacagacttcaagcaattgtac

SEQ ID NO: 123054 - DNA, 120 bp, Artificial Sequence
  ENSG00000101266_6 (sequence is synthesized)
cagacgttaacagactatgatattcgattttacatgtatgagattctgaaggccctggattattgtcacagcatgggaattatgcacagagatgtcaagccccataatgtcatgattgat

SEQ ID NO: 123055 - DNA, 120 bp, Artificial Sequence
  ENSG00000101266_7 (sequence is synthesized)
catgagcacagaaagctacgactaatagactggggtttggctgagttttatcatcctggccaagaatataatgtccgagttgcttcccgatacttcaaaggtcctgagctacttgtagac

SEQ ID NO: 123056 - DNA, 120 bp, Artificial Sequence
  ENSG00000101266_8 (sequence is synthesized)
tatcagatgtacgattatagtttggatatgtggagtttgggttgtatgctggcaagtatgatctttcggaaggagccatttttccatggacatgacaattatgatcagttggtgaggata

SEQ ID NO: 123057 - DNA, 120 bp, Artificial Sequence
  ENSG00000101266_9 (sequence is synthesized)
gccaaggttctggggacagaagatttatatgactatattgacaaatacaacattgaattagatccacgtttcaatgatatcttgggcagacactctcgaaagcgatgggaacgctttgtc

SEQ ID NO: 123058 - DNA, 120 bp, Artificial Sequence
  ENSG00000101266_10 (sequence is synthesized)
cacagtgaaaatcagcaccttgtcagccctgaggccttggatttcctggacaaactgctgcgatatgaccaccagtcacggcttactgcaagagaggcaatggagcacccctatttctac

SEQ ID NO: 123059 - DNA, 120 bp, Artificial Sequence
  ENSG00000101266_11 (sequence is synthesized)
actgttgtgaaggaccaggctcgaatgggttcatctagcatgccagggggcagtacgcccgtcagcagcgccaatatgatgtcagggatttcttcagtgccaaccccttcaccccttgga

SEQ ID NO: 123060 - DNA, 120 bp, Artificial Sequence
  ENSG00000101266_12 (sequence is synthesized)
cctctggcaggctcaccagtgattgctgctgccaacccccttgggatgcctgttccagctgccgctggcgctcagcagtaacggccctatctgtctcctgatgcctgagcagaggtgggg

SEQ ID NO: 123061 - DNA, 120 bp, Artificial Sequence
  ENSG00000101266_13 (sequence is synthesized)
gagtccaccctctccttgatgcagcttgcgcctggcggggaggggtgaaacacttcagaagcaccgtgtctgaaccgttgcttgtggatttatagtagttcagtcataaaaaaaaaatta

SEQ ID NO: 123062 - DNA, 120 bp, Artificial Sequence
  ENSG00000101266_14 (sequence is synthesized)
taataggctgattttcttttttctttttttttttaactcgaacttttcataactcaggggattccctgaaaaattacctgcaggtggaatatttcatggacaaatttttttttctcccct

SEQ ID NO: 123063 - DNA, 120 bp, Artificial Sequence
  ENSG00000101266_15 (sequence is synthesized)
cccaaatttagttcctcatcacaaaagaacaaagataaaccagcctcaatcccggctgctgcatttaggtggagacttcttcccattcccaccattgttcctccaccgtcccacacttta

SEQ ID NO: 123064 - DNA, 120 bp, Artificial Sequence
  ENSG00000101266_16 (sequence is synthesized)
gggggttggtatctcgtgctcttctccagagattacaaaaatgtagcttctcaggggaggcaggaagaaaggaaggaaggaaagaaggaagggaggacccaatctataggagcagtggac

SEQ ID NO: 123065 - DNA, 120 bp, Artificial Sequence
  ENSG00000101266_17 (sequence is synthesized)
tgcttgctggtcgcttacatcactttactccataagcgcttcagtggggttatcctagtggctcttgtggaagtgtgtcttagttacatcaagatgttgaaaatctacccaaaatgcaga

SEQ ID NO: 123066 - DNA, 120 bp, Artificial Sequence
  ENSG00000101266_18 (sequence is synthesized)
cagatactaaaaacttctgttcagtaagaatcatgtcttactgatctaaccctaaatccaactcatttatacttttatttttagttcagtttaaaatgttgataccttccctcccaggct

SEQ ID NO: 123067 - DNA, 120 bp, Artificial Sequence
  ENSG00000101266_19 (sequence is synthesized)
ccttaccttggtcttttccctgttcatctcccaacatgctgtgctccatagctggtaggagagggaaggcaaaatctttcttagttttctttgtcttggccattttgaattcatttagtt

SEQ ID NO: 123068 - DNA, 120 bp, Artificial Sequence
  ENSG00000101266_20 (sequence is synthesized)
actgggcataacttactgctttttacaaaagaaacaaacattgtctgtacaggtttcatgctagagctaatgggagatgtggccacactgacttccattttaagctttctaccttctttt

SEQ ID NO: 123069 - DNA, 120 bp, Artificial Sequence
  ENSG00000101266_21 (sequence is synthesized)
cctccgaccgtccccttccctcacatgccatccagtgagaagacctgctcctcagtcttgtaaatgtatcttgagaggtaggagcagagccactatctccattgaagctgaaatggtaga

SEQ ID NO: 123070 - DNA, 120 bp, Artificial Sequence
  ENSG00000101266_22 (sequence is synthesized)
cctgtaattgtgggaaaactataaactctcttgttacagccccgccaccccttgctgtgtgtatatatataatactttgtccttcatatgtgaaagatccagtgttggaattctttggtg

SEQ ID NO: 123071 - DNA, 120 bp, Artificial Sequence
  ENSG00000101266_23 (sequence is synthesized)
taaataaacgtttggttttatttatcaaggttagatttaagttccctgtgtaaaggtcttgctgggtgggtgtctcatgttcacatctgaggggcctgcagccctgtaccgtggaggctt

SEQ ID NO: 123072 - DNA, 120 bp, Artificial Sequence
  ENSG00000101266_24 (sequence is synthesized)
cccaaggcccccattttatacacccctcgttcgacccatggtaccgggcagagcagagaggccttaaaaaaaaagcaccacaagccaaagcgtctctggggattaaggatcctttgccat

SEQ ID NO: 123073 - DNA, 120 bp, Artificial Sequence
  ENSG00000101266_25 (sequence is synthesized)
aaaactcattttgtgtctcagcagtgcagggattggggatggaaaaagtcgccagtttttgtgtgtttgtgtgtgtgtgtaaagtggactttccactgtaatccaaccacctaagtttat

SEQ ID NO: 123074 - DNA, 120 bp, Artificial Sequence
  ENSG00000101266_26 (sequence is synthesized)
caggtgcttcactgaggaagcctagttttttaagcacaatagcaaaaccatcagctctgtattttctcctgttatttcattacagtagctgcttgtgggaactaggaaaaattcttccaa

SEQ ID NO: 123075 - DNA, 120 bp, Artificial Sequence
  ENSG00000101266_27 (sequence is synthesized)
catattttaaggcctaaaatcttagttccccattctcctaccttatagattcacaggcctttctcgcctaggcatcatagataaacgtaattgtttggggagttgaatttaatgaactta

SEQ ID NO: 123076 - DNA, 120 bp, Artificial Sequence
  ENSG00000101266_28 (sequence is synthesized)
tctaactttgtaacccatcttggctttagtaactttatcaaggtggtggctttagtgaatataatggtaaactttagaggacgctaaagcctccttttatagcgcttctcaacggtaggg

SEQ ID NO: 123077 - DNA, 120 bp, Artificial Sequence
  ENSG00000101266_29 (sequence is synthesized)
agagctgaagggaaaacattctgactgtgtggcagggtgattttcttccttatgaccacttacagtggatatttattgtacttgacccttttatgccctagaatgctgtgagggttacca

SEQ ID NO: 123078 - DNA, 120 bp, Artificial Sequence
  ENSG00000101266_30 (sequence is synthesized)
tgttgaatttgtgcagaagctaaaagcaccagatgtgccagagatgcaatttgtgattatgtttgcactggattgtgatttgaacaggacacttataactaatgagttctttcttttgag

SEQ ID NO: 123079 - DNA, 120 bp, Artificial Sequence
  ENSG00000101266_31 (sequence is synthesized)
gtggggagagggttgtaaatcaagacttcataccctatccttgtagctcggaaattgaggtgtagcttaggctgatgcggagagctgcagacagctggacctccttacacccatcagacc

SEQ ID NO: 123080 - DNA, 120 bp, Artificial Sequence
  ENSG00000101266_32 (sequence is synthesized)
ttggaataaaccgaaggtgaatgcagaggactctgaggtgccacccaagagccttttaaaataaatagaagtttttaaaaatgctacttaagagtcactgcagaagcatggagagagaga

SEQ ID NO: 123081 - DNA, 120 bp, Artificial Sequence
  ENSG00000101266_33 (sequence is synthesized)
aaaaaaaaaaagacccaattgggtggggggtgggggggaggcaagggtttacagagtaacaacttacgtgttgttgtaaattacctcatctgtataccttgtattgggacactatttctc

SEQ ID NO: 123082 - DNA, 120 bp, Artificial Sequence
  ENSG00000101266_34 (sequence is synthesized)
agcactacctgtgtctgcattgcttagatggcaggaaatggaatggccaacatgaaaggttatgttggcaattactctgaaagattttttaaagtatttttaaactttgtttgaagtggt

SEQ ID NO: 123083 - DNA, 120 bp, Artificial Sequence
  ENSG00000101266_35 (sequence is synthesized)
ccctcccctcttcctctgcttttttttaagtttgaagccagaaggccctccccaccttgctttattggttgtaattgtattgtaattggtatgactaaaccataactgtgctgggaagaa

SEQ ID NO: 123084 - DNA, 120 bp, Artificial Sequence
  ENSG00000101266_36 (sequence is synthesized)
gttgtgccatgaaggtctttaattttttttaataaaaacatttaaataaatgaaatgtccctgcagcctgagcaatatgcttctccaaccgacaccgtgtgtgatagatggctccgtttt

SEQ ID NO: 123085 - DNA, 120 bp, Artificial Sequence
  ENSG00000101266_37 (sequence is synthesized)
cacgttttgaattctgtttcttgtacttgaaatgcctgtccagcttacataagatagattaaattgttagagtgggactgtcagaggaatatatcttgtaaagtagatcctcagggtatg

SEQ ID NO: 123086 - DNA, 120 bp, Artificial Sequence
  ENSG00000101266_38 (sequence is synthesized)
gctaattactatagtcctaaagtagcagagaaaattagagattggttgacagatttgggaattttaatttcttcttagtttttaactttcatctttgcttcaccttttgacaagtatggt

SEQ ID NO: 123087 - DNA, 120 bp, Artificial Sequence
  ENSG00000101266_39 (sequence is synthesized)
tataattagaattgaccatttaagcatctcttgaaaaacctgattttgtcccaccagcaaattctctcccaagactggaattgggtttgcatagtagagagcctgtcttcccagggcctt

SEQ ID NO: 123088 - DNA, 120 bp, Artificial Sequence
  ENSG00000101266_40 (sequence is synthesized)
ttcctagttaaagaaacacttaactaaaaaggctgtgtggtaaggtcatgctcagttccttcctcaaaaaatgagtctaaaattggtttatcctgaatccgacttcccccactgtcatca

SEQ ID NO: 123089 - DNA, 120 bp, Artificial Sequence
  ENSG00000101266_41 (sequence is synthesized)
cttacccttgcccttctttttcctcagaacacctgaacttttgttgtattattttgtatctccccacttgcatgtaaactccctggtgaccttgcatgtcttatgcaatcctcattaaaa

SEQ ID NO: 123090 - DNA, 120 bp, Artificial Sequence
  ENSG00000101266_42 (sequence is synthesized)
ccttttgtttttttttttaagtgggttcgttttccctcaggatcgaagagtattgaatggaatggcacgaggaaaatatttaacaccctacttggcttgtaataataggtgcttaataaa

SEQ ID NO: 123091 - DNA, 120 bp, Artificial Sequence
  ENSG00000101266_43 (sequence is synthesized)
ttgtagttccactctccactccattgccccctttctctccctacacacacacacccacccacccacacacacacacacacacacacaaagtaaatggaagtattgttgcataaagagcat

SEQ ID NO: 123092 - DNA, 120 bp, Artificial Sequence
  ENSG00000101266_44 (sequence is synthesized)
ctcaaaatcctaagaactttgcccttgagtttgcagctataattacaagccacaggccagactgaactaacatgacaagtaactttatttaatgagaccctgataaataggtatctgaag

SEQ ID NO: 123093 - DNA, 120 bp, Artificial Sequence
  ENSG00000101266_45 (sequence is synthesized)
actaaggaatgatcctggccaatttagtagacttagatgctgcagtctccctgcttttcccctgctgtattacctgtgtgtaatataggttgaatatcccctatccaaaatggttgggac

SEQ ID NO: 123094 - DNA, 120 bp, Artificial Sequence
  ENSG00000101266_46 (sequence is synthesized)
cagaagtgttttgaatttttttggatttttggaatatttgcggaatacataccagttcaatattcctaatctgaaatttgaaatattccaaatagcatttactttaggcatcatgttgat

SEQ ID NO: 123095 - DNA, 120 bp, Artificial Sequence
  ENSG00000101266_47 (sequence is synthesized)
gcttaaaaaatttcagatttttgaggattttgtattttcaaattagaaatgctcaacgtgtaatacgaaattcagactattctccaagtaaaacatatgtagatggtgtcacaagatgtt

SEQ ID NO: 123096 - DNA, 120 bp, Artificial Sequence
  ENSG00000101266_48 (sequence is synthesized)
ctggactcaatcctatgtaaataagtacttcctagactttatagctctcctttgattctgtgctaaatttaaccattagagaagcaatgtaatgttactgcaagtggtctacctctaaca

SEQ ID NO: 123097 - DNA, 120 bp, Artificial Sequence
  ENSG00000101266_49 (sequence is synthesized)
gagttctgtctggcagtgtgatttttttgatcagttaacctctctgaatcttttcttcacaggtgatttaaattgttattgtaaaacattttaggcatgtaccaaattataaagaaagct

SEQ ID NO: 123098 - DNA, 120 bp, Artificial Sequence
  ENSG00000101266_50 (sequence is synthesized)
gtaacacatccataatcctaccacccaagttgaatttccattgccaatacagaccaagccccctttttgcccttttttggtgataccctcttcttcctcccttccccagaggtcccaata

SEQ ID NO: 123099 - DNA, 120 bp, Artificial Sequence
  ENSG00000101266_51 (sequence is synthesized)
tttcctatctgttaaattggggtataagtactgatttcatagagcggttgttcagattctatgacagatgcctggtatatggtagagttacaccaaatgttggtttctcttctaaattgt

SEQ ID NO: 123100 - DNA, 120 bp, Artificial Sequence
  ENSG00000101266_52 (sequence is synthesized)
acagttgtgcagactatgtacagtaaaaggatgctacattatagggaggccatagatgtttgcatttggaaaatttctgactcttttccagcaggtggcagtaaagtgtctttactagaa

SEQ ID NO: 123101 - DNA, 120 bp, Artificial Sequence
  ENSG00000101266_53 (sequence is synthesized)
gaaaaaatatccaagcattaaacatgacaggttttcaacgggtacaagtcaagtttctgattgaatgaaggccagcattgccttgttcccactccctctatggaaagccagatattttgc

SEQ ID NO: 123102 - DNA, 120 bp, Artificial Sequence
  ENSG00000101266_54 (sequence is synthesized)
ttgtctccctgtcgctctactcactagaagttttttgtttgttttgttttttgatacgggtcttgctctgttacccaggctagagtgcagtagcgccatcacagctcactgcagcctcaa

SEQ ID NO: 123103 - DNA, 120 bp, Artificial Sequence
  ENSG00000101266_55 (sequence is synthesized)
cctcccaggctcaggtgatcctcccaactcagccttccagggactacaggcacgagccatcatgcttggctaatttttttttttttttttttggtagagatgaagttttgccgtgttgcc

SEQ ID NO: 123104 - DNA, 78 bp, Artificial Sequence
  ENSG00000101266_56 (sequence is synthesized)
cacctggcccactagggattcttattggcctcaatgtgagaagcccttccccaggtacctccagatggaagcttacag

SEQ ID NO: 123105 - DNA, 120 bp, Artificial Sequence
  ENSG00000101266_57 (sequence is synthesized)
agaagcccttccccaggtacctccagatggaagcttacaggatggtcagtccatttcttagagaagttcctggggggattgagtatttctgagtcagcttcactcttgcatcatctgctt

SEQ ID NO: 123106 - DNA, 120 bp, Artificial Sequence
  ENSG00000101266_58 (sequence is synthesized)
tgacagttttcttggctcctgtaatgagaaaaagggaaaaaaatgctgcagcagctggggctggcttcctgatcccaccctgggaatcagagtctcagctattgataaacatttctagcc

SEQ ID NO: 123107 - DNA, 120 bp, Artificial Sequence
  ENSG00000101266_59 (sequence is synthesized)
atacctagaaggagaggaccttgcttctgtgtgttgaacagttccaagaactccatggtgaacttcctatgaagaaccctccataaccctcaacccttcaaacctgacggtatacctcat

SEQ ID NO: 123108 - DNA, 120 bp, Artificial Sequence
  ENSG00000101266_60 (sequence is synthesized)
tttgttctcccgtctctggcattcctcacccacccacgctgactggtctttccaaagttcatttctgtaatataggatgtctttggtttcaacaaacatttgtaagtgcccctgagcctg

SEQ ID NO: 123109 - DNA, 120 bp, Artificial Sequence
  ENSG00000101266_61 (sequence is synthesized)
gtctttgctatacactggggattgagaggtgagacacaagcccatggggaaatgtatgttaattagaaaagtgaaaaaattgtgtatatgggataattccaactgttttaaaaaaaaaat

SEQ ID NO: 123110 - DNA, 120 bp, Artificial Sequence
  ENSG00000101266_62 (sequence is synthesized)
cctaggaaaaatgcaaatgcctatttcagagaaagaaatggaaatcccaaggtggcaaaaaggaaggcagaattcatcctgaatgtaactggggtttttttgttttgttttgttttgttt

SEQ ID NO: 123111 - DNA, 89 bp, Artificial Sequence
  ENSG00000101266_63 (sequence is synthesized)
gtgggtattaaagtcagtgcttccaagacactgggtctgggtataggtgggcctcaggctatggactagggtttgaatgcccccaggga

SEQ ID NO: 123112 - DNA, 120 bp, Artificial Sequence
  ENSG00000101266_64 (sequence is synthesized)
ggcctcaggctatggactagggtttgaatgcccccagggagataggacacagactcccgggctttctaagatagaaactgaaacaatgctgtggcacttggaaaggctacaggggcagga

SEQ ID NO: 123113 - DNA, 120 bp, Artificial Sequence
  ENSG00000101266_65 (sequence is synthesized)
ttgaggtggtgggggtggtaaaaactagaagaatactagctgttgttgcctctgggtgatgaggttaagataccacggaaggcccacacacctgtggttggaacactttgggagccggga

SEQ ID NO: 123114 - DNA, 120 bp, Artificial Sequence
  ENSG00000101266_66 (sequence is synthesized)
gtcccagaccagcctggacaacatggcgaaaacccacctctacaaaaaatagattagctgagtgtggtggtgtgcgcctgtgtcctagctactggggaggccaaaggacgagaattaatt

SEQ ID NO: 123115 - DNA, 120 bp, Artificial Sequence
  ENSG00000101266_67 (sequence is synthesized)
gcctgagcccaagaagtcaaggctgcagtgaggtgtgattgtgccacagtactcaagcccaagtgacagagcaagaccctgtctaaaaagatttttttaaagtcacagaagctgggcgtg

SEQ ID NO: 123116 - DNA, 75 bp, Artificial Sequence
  ENSG00000101266_68 (sequence is synthesized)
gctgcagtgagctatgatagtgccactgcaccccagactgagcaacagagtgagaccctgtctgtaaaagaagtt

SEQ ID NO: 123117 - DNA, 120 bp, Artificial Sequence
  ENSG00000101266_69 (sequence is synthesized)
tgagctatgatagtgccactgcaccccagactgagcaacagagtgagaccctgtctgtaaaagaagttgttattaattgaaaaaaagatttaacaggctgggtgcagtggctcacacctg

SEQ ID NO: 123118 - DNA, 120 bp, Artificial Sequence
  ENSG00000101266_70 (sequence is synthesized)
tttgagaggtggaggcgggcgactcacttgagctcaggaattcaaggccggtctgggaaacatgatgaaaccctctctacaaaaaatacacagattagctgggcatggtggtgcatgcct

SEQ ID NO: 123119 - DNA, 76 bp, Artificial Sequence
  ENSG00000101266_71 (sequence is synthesized)
gcaacatagggagaccccgcctccaaaaaaaaaagtaacagaaaaactcactaggtgccgggcatggtggctcacg

SEQ ID NO: 123120 - DNA, 89 bp, Artificial Sequence
  ENSG00000101266_72 (sequence is synthesized)
ctgtgcaacatagggagaccccgcctccaaaaaaaaaagtaacagaaaaactcactaggaacactttgggagaccaaggcgagtggatc

SEQ ID NO: 123121 - DNA, 120 bp, Artificial Sequence
  ENSG00000101266_73 (sequence is synthesized)
gcctgggtgacagagccagactccatctaaaagtaaaaaagaaaaactcactaggaaggaatcttgaagtcttggagaagagagaatggtccatgaggcctcagaggaggggctgcctga

SEQ ID NO: 123122 - DNA, 120 bp, Artificial Sequence
  ENSG00000101266_74 (sequence is synthesized)
gtccatgaggcctcagaggaggggctgcctgaactggcgagggagaggcccagcctaacaagtttcagctgccaaggcccatgcctgggatcagaaccctgtctcctggctcaattttgc

SEQ ID NO: 123123 - DNA, 120 bp, Artificial Sequence
  ENSG00000101266_75 (sequence is synthesized)
ttgtggggctgcttttgcacagctatgttgccaggaatctgtccaggttcctagccagtcattgcagacaaattttttctttcttttgcttttgttctctgtctagtcttagtctcacaa

SEQ ID NO: 123124 - DNA, 120 bp, Artificial Sequence
  ENSG00000101266_76 (sequence is synthesized)
atttctaaggcaactgtatgtagttcagctgatctagatcaagttcagcccaagcagctgtttttcaggttgtgggtcggctgggctggacacctccatgtgaattggattcaggtttgc

SEQ ID NO: 123125 - DNA, 120 bp, Artificial Sequence
  ENSG00000101266_77 (sequence is synthesized)
ccaatgtggcagaagttgcagcagctactcagggcgtgctcttctcatgaatcacagaaacttagaagagaccaaatggaatcacacaagcacatttcaagcctctgctgtgtcacaagc

SEQ ID NO: 123126 - DNA, 120 bp, Artificial Sequence
  ENSG00000101266_78 (sequence is synthesized)
accatcatcccattggcgaaagcaaatcacatagccaagcccaacatcagtgcagtagggaagcatagagcctgtgttgggaaaactttatgaggttatatggcaaagggtgtgtatgtt

SEQ ID NO: 123127 - DNA, 120 bp, Artificial Sequence
  ENSG00000101266_79 (sequence is synthesized)
tagtcttattacaggggaatgaagaaacaaaccaataatgcaatcagccatactattcatatatatcagtaggaacagaaggcaaccacatataacatctatgtatatatatatgtgtgt

SEQ ID NO: 123128 - DNA, 90 bp, Artificial Sequence
  ENSG00000101266_80 (sequence is synthesized)
ggcaaccacatataacatctatgtatatatatatgtgtgtgtggaaaggattacaccaacaactctgtcacccaggctggagtgcggtgg

SEQ ID NO: 123129 - DNA, 74 bp, Artificial Sequence
  ENSG00000101266_81 (sequence is synthesized)
attataggcacatgccaccacacccagatagtttttgtatttttacaaaaatcaagtaatctgcctgcctcggc

SEQ ID NO: 123130 - DNA, 84 bp, Artificial Sequence
  ENSG00000101266_82 (sequence is synthesized)
aggctgagaatacttgtttacttgttttcaagcaacaaaaattgagaatcagtctttgagactccatggccagaaacaacacaa

SEQ ID NO: 123131 - DNA, 120 bp, Artificial Sequence
  ENSG00000101266_83 (sequence is synthesized)
agaatcagtctttgagactccatggccagaaacaacacaacattccactatacacagggtgcttctgggggtcctcggtgttgtgtttattggggtggtacctaaatgttgtatttgctc

SEQ ID NO: 123132 - DNA, 120 bp, Artificial Sequence
  ENSG00000101266_84 (sequence is synthesized)
tataattatttgttaaactctccatttacgtttggggcacttctcagtatatttgctagagttcaaatgtttaaaagtttacaaaatgaaaactgagcagagtaagacaagccaaaaaag

SEQ ID NO: 123133 - DNA, 120 bp, Artificial Sequence
  ENSG00000101266_85 (sequence is synthesized)
tattaactcagcaggaatgggaaaagttatgaaaggagggaaaactaaatatcatactgctggttcagctgtgattagaatttacgtagtcataatggaaacactgaatactggtctaac

SEQ ID NO: 123134 - DNA, 120 bp, Artificial Sequence
  ENSG00000101266_86 (sequence is synthesized)
caggattacagtatgatgacaatggaaagaggagtgatgggaaatgctggcatgtgtggtggtgttggtaacaggacaagcggtctaagctctaaactctcatcatttataaggggaact

SEQ ID NO: 123135 - DNA, 120 bp, Artificial Sequence
  ENSG00000101266_87 (sequence is synthesized)
aatgcctaaaactgaaaaatcaaacagttgcatgttattttgagattttttaaattattgttaagatagtagcagtatttacttttaaaactatatttatgtattactctggtgaaaaag

SEQ ID NO: 123136 - DNA, 120 bp, Artificial Sequence
  ENSG00000101266_88 (sequence is synthesized)
caactacttttaataaatggatatttatcttgaatgcatccacttcctcccattcccgttgccaaattcctcatcccagccaccatcctctcttgcttggagtatcatagcagataactg

SEQ ID NO: 123137 - DNA, 120 bp, Artificial Sequence
  ENSG00000101266_89 (sequence is synthesized)
gtcttgatgccttcccatctcgtctcaattcctgattcatctgacacctgcaaccaaagatctttcaaaaataaatattctagtccaggcacagtgactcatatctataaccccagcatt

SEQ ID NO: 123138 - DNA, 120 bp, Artificial Sequence
  ENSG00000101266_90 (sequence is synthesized)
ttgggaggccaaggcccgatgatcacttgaggcctgggtaacacagcgagtcctctgttctacaaaaaatgaaaacattaactagtgtggtggtgtgtgactatagtgctagctactggg

SEQ ID NO: 123139 - DNA, 120 bp, Artificial Sequence
  ENSG00000101266_91 (sequence is synthesized)
ggaggctgcagtgagctatgatcacattgctctcagtgagacctggctgacagagtgagaacctctctcttaaaaataataaataaattttatctcagtcccttgcttaaaagcctttca

SEQ ID NO: 123140 - DNA, 120 bp, Artificial Sequence
  ENSG00000101266_92 (sequence is synthesized)
aaattttatctcagtcccttgcttaaaagcctttcaaagactagatcacttgcaatgttgttgtctcctcccaagggagtcattcctcccttcctctttgttgacagagccccagtttga

SEQ ID NO: 123141 - DNA, 120 bp, Artificial Sequence
  ENSG00000101266_93 (sequence is synthesized)
gggacagcgggatatccaccatgctgctgtgagactcgggcagttgtgactggtttagaagtggatacacagggagaggtcttctggaaaaggtcttctggagagctgagatcagaagac

SEQ ID NO: 123142 - DNA, 120 bp, Artificial Sequence
  ENSG00000101266_94 (sequence is synthesized)
aatcaactggcttcaaatctaaggagagacaggcacaaaatggaagagatgacatgggcactggttacctggtaaacacaagtggacactggtgagggactgggtcatggagactgcagt

SEQ ID NO: 123143 - DNA, 120 bp, Artificial Sequence
  ENSG00000101266_95 (sequence is synthesized)
agtctttacccttttcagcgtttttcaccatgaaccccactgggagcacacagaagattggagaaagttttaataaaatgtctcaagatctggaagaagacaatggcagctactgtgaaa

SEQ ID NO: 123144 - DNA, 120 bp, Artificial Sequence
  ENSG00000101266_96 (sequence is synthesized)
ggatcacagtgctccacccagacccttccctgtatcccctaccggacaaaagccttagtctgtggagggaaggacaccaaatcctgtcacccccttggatgaagctcccttgcatctggg

SEQ ID NO: 123145 - DNA, 120 bp, Artificial Sequence
  ENSG00000101266_97 (sequence is synthesized)
ggaatgaaacaggaacaaaacaaaactttccctgggcaggggcaggaatacacactgggcccagaactgggggaggaacaggagcactaaggaggacataaccccaaaatcagagacaca

SEQ ID NO: 123146 - DNA, 120 bp, Artificial Sequence
  ENSG00000101266_98 (sequence is synthesized)
aagggcctgacagagactgagacttgatcagaacagagaattccctcctcccccacctgccaatggtaagctgacaagccttgagttagaagtaaaaatgttacaggagagagacaagag

SEQ ID NO: 123147 - DNA, 120 bp, Artificial Sequence
  ENSG00000101266_99 (sequence is synthesized)
tatgggaagaagaccctttctgagggtcacaaagggaggacctaaagctgagcagggagcacacatggaaggagaaaatccctctggcaggccagcctgcaccctcagtccaaggtgtca

SEQ ID NO: 123148 - DNA, 120 bp, Artificial Sequence
  ENSG00000101266_100 (sequence is synthesized)
gtcattggaggaactggaagctgctgcattgggggtaaccatagcaacaataaacctcaaacctagcccaactcttttttttatttactttttagagacaaggtcttgctctgttgccca

SEQ ID NO: 123149 - DNA, 85 bp, Artificial Sequence
  ENSG00000101266_101 (sequence is synthesized)
tgtaggagattggtcagggtggtgggagaaattataggaaagacacaaaccttcttggaaggccgagaggttttgcaaaagcttc

SEQ ID NO: 123150 - DNA, 120 bp, Artificial Sequence
  ENSG00000101266_102 (sequence is synthesized)
caaaccttcttggaaggccgagaggttttgcaaaagcttcagaaagaaattatggctgaaggcagccaaattcttatctgaagcctgagagcaaagggcagataacaggggagttgtata

SEQ ID NO: 123151 - DNA, 120 bp, Artificial Sequence
  ENSG00000101266_103 (sequence is synthesized)
ggaacttacctagataaatttgtttattcctgtgtccagaaaccaacctttgatcattcacacacaggactgctgtctacttgggatgttgacaatgtttattgcccacaaattgtgttt

SEQ ID NO: 123152 - DNA, 120 bp, Artificial Sequence
  ENSG00000101266_104 (sequence is synthesized)
gctccaagcctttgtcattaaatttgtgctaaataaatgtgagggccaccagcttaaggggactgctaactctcttcggcccctagtgctggcagtcccctagcctgctctctcactgaa

SEQ ID NO: 123153 - DNA, 120 bp, Artificial Sequence
  ENSG00000101266_105 (sequence is synthesized)
gcctcctggtaggagggggtttccgcttccggcagcagcggctgcagcctcgctctggtccctgcggctggcggccgagccgtgtgtctcctcctccatcgccgccatattgtctgtgtg

SEQ ID NO: 123154 - DNA, 65 bp, Artificial Sequence
  ENSG00000101266_106 (sequence is synthesized)
agaggggagagcggccgccgccgctgccgcttccaccacagagtctcgcctcccgggttcaagcg

SEQ ID NO: 123155 - DNA, 120 bp, Artificial Sequence
  ENSG00000101266_107 (sequence is synthesized)
ctcgctctggtccctgcggctggcggccgagccgtgtgtctcctcctccatcgccgccatattgtctgtgtgagcagaggggagagcggccgccgccgctgccgcttccaccacagagag

SEQ ID NO: 123156 - DNA, 120 bp, Artificial Sequence
  ENSG00000101266_108 (sequence is synthesized)
gaccacatggaaagtttatcagaaggaatgtgggcagcctctagtggcaaagaccagtccctggctgacaaccagaaagaaatggggacctcagttgtgcaaccagaaggaacctgaatt

SEQ ID NO: 123157 - DNA, 120 bp, Artificial Sequence
  ENSG00000101266_109 (sequence is synthesized)
caaggcccgccagagctgagatggtgtttgacctggagcacaactggcctctttttgttccctcccccaaccctcatcattaagtcctgctttgaaagtgcttaatcagatataccattt

SEQ ID NO: 123158 - DNA, 120 bp, Artificial Sequence
  ENSG00000101266_110 (sequence is synthesized)
aactagcttgggtctttctttcaaagagacctccacccacagactatttcttattcttctaggctaagagactgatagcactggaaactgaaatgtgttaatccattttgcaaactcagg

SEQ ID NO: 123159 - DNA, 120 bp, Artificial Sequence
  ENSG00000101266_111 (sequence is synthesized)
tccgatgccgatgggcgatgggcgcattgtcgggctgcctagagcctggtgagacttcagctccatgtcttctgtttgaaatccatcccaaaaatgacctaagtgcggtgatgatcagag

SEQ ID NO: 123160 - DNA, 120 bp, Artificial Sequence
  ENSG00000101266_112 (sequence is synthesized)
cggggagggcttgtagcaatagagggtttcttactactgaggcgaggactgccaaatttcaccacgcagcatccgcaaacattgtccccattaaagctgtcagggctattgctaatgtgt

SEQ ID NO: 123161 - DNA, 120 bp, Artificial Sequence
  ENSG00000101266_113 (sequence is synthesized)
cgccttggtttttgaacacgtaaacaacacagacttcaaggtataatatataaccaactgtttcgggctagtgggtttttagaccacatagcctttggggatgatgctgttagaagagct

SEQ ID NO: 123162 - DNA, 120 bp, Artificial Sequence
  ENSG00000101266_114 (sequence is synthesized)
tgcttcgcatttgtttttaaaaagcttttcatccttacagtgcaaattttaagatagaagaactcctatataagcagtgcccactttctgcatcttgatattttgcccatttgtttaatg

SEQ ID NO: 123163 - DNA, 120 bp, Artificial Sequence
  ENSG00000101266_115 (sequence is synthesized)
ttctttttaatgaccaacacattgacttctcactacttagttgacagtttctgctgatgtccaacctaatgaaggcagtaacacacgttcacttaggatctggccatatggcaattcgct

SEQ ID NO: 123164 - DNA, 120 bp, Artificial Sequence
  ENSG00000101266_116 (sequence is synthesized)
ttaaacaatagtgttcaggaagaaatatattgtatgtataaaagtagggactgcttatttcttaggattcctcataaactgtgggctatagatcttaaaaggcagggatcgaggaaggat

SEQ ID NO: 123165 - DNA, 120 bp, Artificial Sequence
  ENSG00000101266_117 (sequence is synthesized)
aatgtcaaattctgccataacacaaacctctataagagatatctcagaattccagtctatccagtggcctacttatttcacacagttccaattttacagaagaatatagctactcttttg

SEQ ID NO: 123166 - DNA, 120 bp, Artificial Sequence
  ENSG00000101266_118 (sequence is synthesized)
gagtaaaagtaaaaatcttcgatttgcctttccaccagtccagtatccagaatgttatatattaataaattagtgaattctgttgcagagatagggagaaaggaagaggaactgctttag

SEQ ID NO: 123167 - DNA, 120 bp, Artificial Sequence
  ENSG00000101266_119 (sequence is synthesized)
agtcagaatgataatttcaagaaaaactttgtcagaagacgttgctaaccattaaagagacgtacctgtggctgggcatggtggctttcgcctgtagtcctagctactggggaagctgag

SEQ ID NO: 123168 - DNA, 120 bp, Artificial Sequence
  ENSG00000101266_120 (sequence is synthesized)
gtctcctcctccatcgccgccatattgtctgtgtgagcagaggggagagcggccgccgccgctgccgcttccaccacaggtacctagggagcagccaggcgaggtcgttggcgggtgggt

SEQ ID NO: 123169 - DNA, 120 bp, Artificial Sequence
  ENSG00000101266_121 (sequence is synthesized)
aaacccagcttcacaaaaatatgccatcgcgaggagtataacacaatccatcacgaggagtgtaacacaatctaatgttgaaactacgaaccacctcaagctggcagtgcacccagtgtc

SEQ ID NO: 123170 - DNA, 120 bp, Artificial Sequence
  ENSG00000101266_122 (sequence is synthesized)
tggcagattcaacgatgggttgatgtgtcttcctcaaaaatgtaaagtgttccacagtattcctgtgcattgctggggtgcttcacatgccctttgagaaccagagagtttaagtattta

SEQ ID NO: 123171 - DNA, 120 bp, Artificial Sequence
  ENSG00000101266_123 (sequence is synthesized)
tatctgtcttgaaatatgtagaaagagaactaggttggaaatcaaaacatgtgggtgactagccatagtagtccttttaacctaggacatgtttatccatctattaaaaagaatgttggc

SEQ ID NO: 123172 - DNA, 120 bp, Artificial Sequence
  ENSG00000101266_124 (sequence is synthesized)
cgtaatcccagctcctgtcagcttgctgcaaagttaattcacccacactgagcctcagattcttccagtggggatagtgatggcaactacattgcagaattactggaagaattcttctgt

SEQ ID NO: 123173 - DNA, 120 bp, Artificial Sequence
  ENSG00000101266_125 (sequence is synthesized)
aacagaatacatgacacaagagcattcctaaataaactcttttcatactgtgaggatgacacttctcagtgcctcagtctggaatggttgaattagaatacacagccctgtatctttcct

SEQ ID NO: 123174 - DNA, 120 bp, Artificial Sequence
  ENSG00000101266_126 (sequence is synthesized)
gtccctagtaatcattcgttggaaagagctaatgaggcttacaaatcttaaaattgtatgaacaccttgacttagatttgtgagtatagccacctgtgccatcctaagtgaaaataccac

SEQ ID NO: 123175 - DNA, 120 bp, Artificial Sequence
  ENSG00000101266_127 (sequence is synthesized)
tgagacccaccccatctgcactgtgatgttagctgcaacatgacatttttccttcggtgtgatggttttgtactgaatcatttatacttttgcccaatacctgaagcagatagataggct

SEQ ID NO: 123176 - DNA, 120 bp, Artificial Sequence
  ENSG00000101266_128 (sequence is synthesized)
gattgggatagagaatgtggtcatagccctaagctacatggacctatagctttggcctacttggtactgggctgtggacacactggtaatatattaccgtctttgccgagttacagtgtc

SEQ ID NO: 123177 - DNA, 120 bp, Artificial Sequence
  ENSG00000101266_129 (sequence is synthesized)
ttgtctccattaaacctcaacaggaccagggcttcattaaattcgctctgctataaataattacctcatctttctaccatttgattgaaaggttagcttttaccacagtttgataggaaa

SEQ ID NO: 123178 - DNA, 120 bp, Artificial Sequence
  ENSG00000101266_130 (sequence is synthesized)
gctatttctgctttttaccacttgtctaattcatggtgaaggcaattgccaccttaagttctttggggaataatgtagagtatatataaattgcaaagaatgaagctggctgctttcagg

SEQ ID NO: 123179 - DNA, 120 bp, Artificial Sequence
  ENSG00000101266_131 (sequence is synthesized)
aactgaaatgtgttaatccattttgcaaactcaggtccgatgccgatgggcgatgggcgcattgtcgggctgcctagagcctgtcacgaacccccgccttggtttttgaacacgtaaaca

SEQ ID NO: 123180 - DNA, 120 bp, Artificial Sequence
  ENSG00000101266_132 (sequence is synthesized)
cacaggccctagtacctattcggcagttgagaaatatttggtgaatgaatgtacgaatttacaagtcaacatgtttgaaccattatttatattcctaagaatattcccaagaaggaaaca

SEQ ID NO: 123181 - DNA, 120 bp, Artificial Sequence
  ENSG00000101266_133 (sequence is synthesized)
tgagtaaagtgggcaaaatgttcatcttctaagcccggaaacgtggcttctcgccttatttattgagtaactggtttcctgagaaactactttctctccatttgccttctttttcttacg

SEQ ID NO: 123182 - DNA, 120 bp, Artificial Sequence
  ENSG00000101266_134 (sequence is synthesized)
taagtggacgagatatacagaaaatgctgtttctgtttattggatgtcataagggccctgttgtctgcaaatgcttttacatgagagctgtaatggccacatgctttagcatttcagttt

SEQ ID NO: 123183 - DNA, 120 bp, Artificial Sequence
  ENSG00000101266_135 (sequence is synthesized)
tttaaggtgacaagctgtgatgacttgcctgttgtggtctctggggaggcaggtgatttatttatgcaactgaattacttttagacacacaccatgtcagaggcaccaccctagggctgg

SEQ ID NO: 123184 - DNA, 120 bp, Artificial Sequence
  ENSG00000101266_136 (sequence is synthesized)
ggatatgtaagtgaactcaacatacaataaatgcttgtcttttaggagctacatttagggaggctggtgggatagaaagttattttgatgtagaagaaaaaacgaatagggaatggcaag

SEQ ID NO: 123185 - DNA, 120 bp, Artificial Sequence
  ENSG00000101266_137 (sequence is synthesized)
agggtatttgcagttttaaaccagttataagggaaggtttcattggaaaggtgacattttagagagcactgggagggacccagccatgcagtcttatgaagaaacatgtcccaaggcaga

SEQ ID NO: 123186 - DNA, 120 bp, Artificial Sequence
  ENSG00000101266_138 (sequence is synthesized)
gtaaatagcaagtacaaaagcccttcaggtaaggatatgtttggcatgttggaagagcagcagcaaggataaagctgggacagaatgaatgcggggaaagaaggaggaaatgaaatcaaa

SEQ ID NO: 123187 - DNA, 120 bp, Artificial Sequence
  ENSG00000101266_139 (sequence is synthesized)
gaggtaaaaccaaatcatgtaaaaccttattggtcattgttaggccttttctctgaagatagagagcttttgcatattctaagctttagcatgttctcacttgaaatttaaaagttaact

SEQ ID NO: 123188 - DNA, 120 bp, Artificial Sequence
  ENSG00000101266_140 (sequence is synthesized)
acacatttattagaacagctaaaataaaaaatagtgatggtaccaagtgctggcaaaaatgtgaagaaacttgatctctcatacattgctggtaggaatgcaaagtttggcattttggaa

SEQ ID NO: 123189 - DNA, 120 bp, Artificial Sequence
  ENSG00000101266_141 (sequence is synthesized)
aatgcttaactattgttttatagttggttggtttcttgaaaagctaaacatatgcttaccatacaatcctgcagtggcatttatctcagagcaacaaaatcttaggtccacacaaaagcc

SEQ ID NO: 123190 - DNA, 90 bp, Artificial Sequence
  ENSG00000101266_142 (sequence is synthesized)
ttatctcagagcaacaaaatcttaggtccacacaaaagcctatatatgaatgcaactatatttgtaatagcttaaaattggggggaaaat

SEQ ID NO: 123191 - DNA, 120 bp, Artificial Sequence
  ENSG00000101266_143 (sequence is synthesized)
aaaaaaaaaaaaaaaaaaaagagcattggtgatcaggctagacagttattattatgttatgtttcagccatattccgaaatctttcgaatacctcatttgattcttgcaacaatcttatg

SEQ ID NO: 123192 - DNA, 120 bp, Artificial Sequence
  ENSG00000101266_144 (sequence is synthesized)
agatgggtactcttgttactcattttacacttaatgaaaggcttagagaggttatgtagtttgccattaacagccagcaggtagtaaaggtaggtttcacattgggcattgtgactccaa

SEQ ID NO: 123193 - DNA, 120 bp, Artificial Sequence
  ENSG00000101266_145 (sequence is synthesized)
gactcaccctttaccctcagggttgtgctacacaaagatgttttggccatccttgttgttggccctaattagaggaagaaatggaaagggcccatgtttcatcctaattgataaaaagtt

SEQ ID NO: 123194 - DNA, 120 bp, Artificial Sequence
  ENSG00000101266_146 (sequence is synthesized)
tgatatactttagtattactaacgatttaaattgctactttgtaaggttttaagacattaacatgtttaacatgttttaaaacattaacatcaagactgatgattgaaatgctaattctg

SEQ ID NO: 123195 - DNA, 120 bp, Artificial Sequence
  ENSG00000101266_147 (sequence is synthesized)
cagaagtgtctggtctttggaatagaaatctttttttctttcaattcaacatttgtaagtacctgcagaatacctggcacagtgctaggagaaggattcagagacgaatgtgacacattt

SEQ ID NO: 123196 - DNA, 120 bp, Artificial Sequence
  ENSG00000101266_148 (sequence is synthesized)
tcttccttcaaggtgtgctcataagtaagccatttatcatttatgtattacactacgtgttgaaatactctgaaaaaattttttttttttttttttgctgatgtacttttcccctttcag

SEQ ID NO: 123197 - DNA, 120 bp, Artificial Sequence
  ENSG00000101266_149 (sequence is synthesized)
ttacgagtcacatgtggtggaatgggggtaattgtttttgttgacttcattatactcactcaaagggctgaatcttgtggatctgttgagtagtttttgtcagaaaacctccgtgactct

SEQ ID NO: 123198 - DNA, 120 bp, Artificial Sequence
  ENSG00000101266_150 (sequence is synthesized)
gtatgtgtatacctcaggatcaaagcccaatttgtgttttcttttgagctgaaaatttggttttgcagtgaggaagcagagttgctttggcaagtgaacaattttaatgggcttaccatt

SEQ ID NO: 123199 - DNA, 120 bp, Artificial Sequence
  ENSG00000101266_151 (sequence is synthesized)
taaaaatcattttagtttcttatccttttctatgatgtatatgcagtcgtgcaccacataacaaagtttgaattaatgacagaccacatgtaggacagtggttccataagattataagag

SEQ ID NO: 123200 - DNA, 120 bp, Artificial Sequence
  ENSG00000101266_152 (sequence is synthesized)
agctgaaaaatgtctgtggcctagtgatgtcatcgtaacatcaacagtgcattcattaccttttctacgtttagatacacaaataccattgtgttacaattgcctaaagtatttattacg

SEQ ID NO: 123201 - DNA, 120 bp, Artificial Sequence
  ENSG00000101266_153 (sequence is synthesized)
gtacacatttgtatcctaggagccgtaggccataccctaggtatgtaatatgccataccatgtaggtttgtgtaaacactctgatgtttaacacatttctcagaatgtcattaaataacg

SEQ ID NO: 123202 - DNA, 120 bp, Artificial Sequence
  ENSG00000101266_154 (sequence is synthesized)
catgacggtattctgtatgggcacctggcaacaaaaagttacctatcagcttgcttatcaagccaagggcattgcagatcagtgagaagtgatacttgagagactttgaaaacaccaaag

SEQ ID NO: 123203 - DNA, 120 bp, Artificial Sequence
  ENSG00000101266_155 (sequence is synthesized)
tcttatataaagtatttttgaggtagagaatgttgtttcgtgttaatacaggaggacgaaacagttctccaaagaggtaacttctttctgatgagaaacaattaaattcttaaacatttg

SEQ ID NO: 123204 - DNA, 120 bp, Artificial Sequence
  ENSG00000101266_156 (sequence is synthesized)
cccttatcctgagactaggcatgtcttagcatggaattcagcccaaattctatcttgaacagttgtagtctgcctgaacagctgtgtttgccctcctaattctctgtgcagactcatttg

SEQ ID NO: 123205 - DNA, 120 bp, Artificial Sequence
  ENSG00000101266_157 (sequence is synthesized)
gatgtttgcatttcctgtcccaatgtggtagacatttaattgttcagatcatacttttgtgataaaagcattttgacattcaagtgcaaaagaaagcaatttgaaaactaaagctacagc

SEQ ID NO: 123206 - DNA, 120 bp, Artificial Sequence
  ENSG00000101266_158 (sequence is synthesized)
tgtaagtggttagtggatggcttccctaaattgtcatagggcgtatttttaatcttgagtatgccatgaatttgtgtatgtgtgtgtgtggaaatgagtcttgctctgttgccctggctg

SEQ ID NO: 123207 - DNA, 71 bp, Artificial Sequence
  ENSG00000101266_159 (sequence is synthesized)
tcctgggttcatccaccctacccagctaatttgagtatgccatgattcttaacagtaaatacattgcctct

SEQ ID NO: 123208 - DNA, 120 bp, Artificial Sequence
  ENSG00000101266_160 (sequence is synthesized)
tgagtatgccatgattcttaacagtaaatacattgcctctgaatacagaggcactgtatgctgtaaagacaccattaaatgccagtgtggtttagtaccaataaatgttgttattactga

SEQ ID NO: 123209 - DNA, 120 bp, Artificial Sequence
  ENSG00000101266_161 (sequence is synthesized)
taatctaacaattctcctcttatgtcacaggctttggactctaggtgacactgtgtttactataggaatttcagccgctatcttcaaattgagtgctttgcacttggttctgcttaaatg

SEQ ID NO: 123210 - DNA, 120 bp, Artificial Sequence
  ENSG00000101266_162 (sequence is synthesized)
gcactaaagagcccttttgggcttttggcatggttctgtttgcttgctggcatttgttttgtatgccctcccataggaagagaactcaaccagaagtaggagcattcttcccctacacct

SEQ ID NO: 123211 - DNA, 120 bp, Artificial Sequence
  ENSG00000101266_163 (sequence is synthesized)
gccatgattattatgttgtccattgtttttagtaccttttgtcttttcattcactttctttttagctacttgaggaaaatgaatggttgaggtggttgatttggttcatattggatactt

SEQ ID NO: 123212 - DNA, 120 bp, Artificial Sequence
  ENSG00000101266_164 (sequence is synthesized)
agtaggtccagaggattctatccagtaggatagaatttaggccttattggaactgtgtttgtcattcttcagagcaaagcgctctacattggaagcaggcaggggcaggaggaaaatgtt

SEQ ID NO: 123213 - DNA, 120 bp, Artificial Sequence
  ENSG00000101266_165 (sequence is synthesized)
ggcatttcccttattctacctctgtttattacctctgatgttgcttattggtcacagaatatgggtatatgtagaggaggggatcgctgattatagtttacaatctataatgtgcttcgt

SEQ ID NO: 123214 - DNA, 120 bp, Artificial Sequence
  ENSG00000101266_166 (sequence is synthesized)
actacgcatggactatccccagagcttgccctggagggcaaatagattaagcctatacatttgaaagccatttaccttcaaagaggcctgttaaaaatcagctgctgccaaagtgtggct

SEQ ID NO: 123215 - DNA, 120 bp, Artificial Sequence
  ENSG00000101266_167 (sequence is synthesized)
agattgaaacagtcttgcaaaatgtttttagttcctgctaagtgccaacactggaccaagcactaagggacaagaatatataaaaattattctccggccgggtgcggtggctcacgcctg

SEQ ID NO: 123216 - DNA, 120 bp, Artificial Sequence
  ENSG00000101266_168 (sequence is synthesized)
catcacaaataatgaaaaagttgttgttaaaattctcaagtcgcaggtcctcgaggggctaaagtgggaggatcgcttgagcctggaagttgaaggttgcacggatctatgatcaaacca

SEQ ID NO: 123217 - DNA, 120 bp, Artificial Sequence
  ENSG00000101266_169 (sequence is synthesized)
ctgcactccagcctgggcgatgagaatgagaccctgtctcaaaaaacaaaaaggatcaaacacaaaattgtgtgtatatatacatacgttggagactggagttctttgtgattgtatggt

SEQ ID NO: 123218 - DNA, 120 bp, Artificial Sequence
  ENSG00000101266_170 (sequence is synthesized)
gatattcatatggaaaggtatatgatagaatgaggtgatatattattatttagagccacatgaaaagcatgcatagtgggtctacagttcagaagagggtagtagttaggaaaagctccc

SEQ ID NO: 123219 - DNA, 120 bp, Artificial Sequence
  ENSG00000101266_171 (sequence is synthesized)
aggagctgtcttcaggctgaatgggaggaggatttggataggtgttgggtggaagtggtgaagggaagcaggctgtagagtgcaccaagataagaaaagaggaggagggaaaagtgagag

SEQ ID NO: 123220 - DNA, 120 bp, Artificial Sequence
  ENSG00000101266_172 (sequence is synthesized)
aaatatttcatgtgaaagatgttatgtgaccatacataggagttgaacttggaaagagagattaagttggcgaaggcctggaaaaaataatctctgcatttccttgcagtcttaaaatta

SEQ ID NO: 123221 - DNA, 120 bp, Artificial Sequence
  ENSG00000101266_173 (sequence is synthesized)
tatgactatctcttctaggtaattgtgagcccttgatgattttgaatgaagggtgatttagaaagatttttttcagctcagtctttctaactgtattgtatattttactgtaactgtggg

SEQ ID NO: 123222 - DNA, 120 bp, Artificial Sequence
  ENSG00000101266_174 (sequence is synthesized)
taggtggtgtaagtatagatgaatttcctttgtaaaccatatttaaaatttttaatctcccctatttaataagacaaaagttgcattgatcgcattaaattcgggcctgagtcagctgcc

SEQ ID NO: 123223 - DNA, 120 bp, Artificial Sequence
  ENSG00000101266_175 (sequence is synthesized)
tggtctgtcacaaaccagctttttaagtttatagatttgaagcattctgtagagtagttttgtcaaccagaagctttttttttccactaaaaaaccagcagttgggttaatggaaaacag

SEQ ID NO: 123224 - DNA, 120 bp, Artificial Sequence
  ENSG00000101266_176 (sequence is synthesized)
gaggtaagttgttgggttagtctctgcagggtggaaagatctcccagataatataacagtttataaagatctgaatagttgaagcaggaagagaagacttatattatcttgtttcttagg

SEQ ID NO: 123225 - DNA, 120 bp, Artificial Sequence
  ENSG00000101266_177 (sequence is synthesized)
tagatattgtattgggtaagaggtcgtgggttgaattcaatggactacatggaagtcattagtaaaatagcttctgtttattgggtaccactttgcattggacctgttctaactgtggta

SEQ ID NO: 123226 - DNA, 120 bp, Artificial Sequence
  ENSG00000101266_178 (sequence is synthesized)
agaaacatttaaatgcttttctgaacactgcacaaccacaaagccaggttttgagaactgtcaatgtttccaaaatctgcttgctttctgctatcatgtgcttgaggcttaagacaaagt

SEQ ID NO: 123227 - DNA, 120 bp, Artificial Sequence
  ENSG00000101266_179 (sequence is synthesized)
taaaagaatttatagtattatttggtagtttctggacctggatcatcagcctggaaagtatctaaaaataaatcccccgtttccctctcaagattttgatttagtgaatcttggtgggtt

SEQ ID NO: 123228 - DNA, 120 bp, Artificial Sequence
  ENSG00000101266_180 (sequence is synthesized)
ctgtgagtctgtatattaaaaaaatccaggtgattgttggtcatcaaactttagtaaccaccaatcttgttaatgaagagatgagatgtacttaacttctaagagttatatgcagtgcat

SEQ ID NO: 123229 - DNA, 120 bp, Artificial Sequence
  ENSG00000101266_181 (sequence is synthesized)
ctagtctgaggtgaccaacaccctaggaaaagacctgcacagtccagtacagcaggcacgcaggccacatgaggctgttaagcacttgaaatatggctgggctgaattgagatatgctgt

SEQ ID NO: 123230 - DNA, 120 bp, Artificial Sequence
  ENSG00000101266_182 (sequence is synthesized)
ctgggctgaattgagatatgctgtaagagtaaaatacattagatttcaagggtttaatacaaaaaaaggtaaaatagattaataatttttatattgatttatatgttaagattttagatt

SEQ ID NO: 123231 - DNA, 120 bp, Artificial Sequence
  ENSG00000101266_183 (sequence is synthesized)
ttttaaaattttcttgatgtggctactaacacatttaaaattacacatgtggtttgtattatatttcctttgggccagcactgttttagactattcaggagaaggctttataatataagc

SEQ ID NO: 123232 - DNA, 120 bp, Artificial Sequence
  ENSG00000101266_184 (sequence is synthesized)
caagactctgtctcaaaaaaaaaaaaaggctttataaaggaggtgcagtgggaccaaggccctcctcagaaaaaaatgaaaaggattccatactagaacagatgtggaaagaatgggtaa

SEQ ID NO: 123233 - DNA, 120 bp, Artificial Sequence
  ENSG00000101266_185 (sequence is synthesized)
aacagatgtggaaagaatgggtaaggacaaaggaatgtttaagatatgctctgcagaatactctttagaatggaggggttcatttataagagtattggcactttgggaggccgaggcagg

SEQ ID NO: 123234 - DNA, 120 bp, Artificial Sequence
  ENSG00000101266_186 (sequence is synthesized)
tggagattccctagattttgaaactgctttggaccggaggctctgttttcttttacattttgcccatttgaactggaatgtctaactgttattctctacatgtctcacagtggtatgttg

SEQ ID NO: 123235 - DNA, 120 bp, Artificial Sequence
  ENSG00000101266_187 (sequence is synthesized)
ggagtagagaacttgtttctttaggaattgtgccccaggaattggacttactgttttgtccccagaacctcatccacacctgaatagatgaatgagatttgggacttctgaaatgataag

SEQ ID NO: 123236 - DNA, 120 bp, Artificial Sequence
  ENSG00000101266_188 (sequence is synthesized)
ctttagatgggaaacctttgggaccttgggatgggatggatgtattttgcatttgagagagagatgaatccttggaaaccagaaggcagactgcggtaagcagaatggctcccctacgat

SEQ ID NO: 123237 - DNA, 120 bp, Artificial Sequence
  ENSG00000101266_189 (sequence is synthesized)
ttccatactataaaccctggaacatgaatatgttaagtagatttaattaaagttaaggatcttaggtagattatcttggattttctgggtgggtttattctactcacataagcacttaaa

SEQ ID NO: 123238 - DNA, 120 bp, Artificial Sequence
  ENSG00000101266_190 (sequence is synthesized)
gagaaggactcagcctgccgttactggaggggaccagattgaaagtgtgagacggggaatgcaggcagcctctagtaggaaaggccagtcccagctgacaaccagcaaggaagtgggaac

SEQ ID NO: 123239 - DNA, 120 bp, Artificial Sequence
  ENSG00000101266_191 (sequence is synthesized)
tcagtcctacagctgcaaggaactaaattcagccaatagcttgaatgaatgtggaagcaaattttccccagagtttccagcagggaacccacccactggataccctcatttagcccttgt

SEQ ID NO: 123240 - DNA, 120 bp, Artificial Sequence
  ENSG00000101266_192 (sequence is synthesized)
ggggctgaaggcaatgatcagacttcattgagaagctgacttaaatattccaaaagttaaggaaatgcttaccaataggattataggctgggtagtagggacattttagtcattgagcag

SEQ ID NO: 123241 - DNA, 120 bp, Artificial Sequence
  ENSG00000101266_193 (sequence is synthesized)
tttaagaaatttgtaaaagcacaggtgagattgtgtcttccaggaacaaaatcatggagaaagaggtttgtcaagctaagaagttttattttcattctaaaggctataagtagtcagtgg

SEQ ID NO: 123242 - DNA, 120 bp, Artificial Sequence
  ENSG00000101266_194 (sequence is synthesized)
aggggtttcagtaaagagtgacgtgtctggtatattttatcaagagtatgctaatggcacagtgtgggtagcttagagaaagataagattgctcatggtttattctttttcagctacgac

SEQ ID NO: 123243 - DNA, 120 bp, Artificial Sequence
  ENSG00000101266_195 (sequence is synthesized)
agctggagtaggggccttcttagggtccctctgggcggggctgagcttcccacctgcagagtgggtgcgaggtggagagaaccccaggcggggttgctggggcgaaagggggaagggacc

SEQ ID NO: 123244 - DNA, 120 bp, Artificial Sequence
  ENSG00000101266_196 (sequence is synthesized)
aagacgtggggcagaacgtctggagttggagttaaggactagttaggagcctggatagaaaaagagaacctcatccacacctgaatagatgaatgagatttgggacttctgaaatgataa

SEQ ID NO: 123245 - DNA, 120 bp, Artificial Sequence
  ENSG00000101266_197 (sequence is synthesized)
taactctgtatcaagtgcatgcagtactgaggaatacagaaaaaagaaagaatagttttcttcccctcagatagttcatagctgatcttgtaagggagtcaaacatacaacaaaataggt

SEQ ID NO: 123246 - DNA, 120 bp, Artificial Sequence
  ENSG00000101266_198 (sequence is synthesized)
tacagtcataacttcagagtagaaatgtggacaaggcacaaaaggcagtagtggtgagtagtttgagtgtgcaatgggagcttcccaaaagaagtgacatcttcaattgggttttgaggg

SEQ ID NO: 123247 - DNA, 120 bp, Artificial Sequence
  ENSG00000101266_199 (sequence is synthesized)
gagaaaaataagggttcaccagggtgacatttcaagaggaagaaaccagtttataaagtagtttgctttttctaacactatcacattgagttgaagtctaaactgttaggaggtagcatt

SEQ ID NO: 123248 - DNA, 120 bp, Artificial Sequence
  ENSG00000101266_200 (sequence is synthesized)
catacctgtagacatgatgacccgtttatgtaaattcaatcattgttaattgttgatttgttaatataatatgcttgtgatatgggtttttgtctttctttaatactagttggtgaggat

SEQ ID NO: 123249 - DNA, 120 bp, Artificial Sequence
  ENSG00000101266_201 (sequence is synthesized)
catacccactggtgatctgcagggccaactatgtaaggcaaagatgagttagttccctactaaggaggcagtatatttgccaaaatgcctcttttgagaaggtctgaagatacatgaaaa

SEQ ID NO: 123250 - DNA, 120 bp, Artificial Sequence
  ENSG00000101266_202 (sequence is synthesized)
gcaaactaaattataggtgggtgtcagtgcatattaacgtatctagatcagtatgtttctgacagtggattatagcttccgcaatatatgtttaagtaattcttcatttttaagagttga

SEQ ID NO: 123251 - DNA, 120 bp, Artificial Sequence
  ENSG00000101266_203 (sequence is synthesized)
agacccaaagtatctctttaaagttaatgtaatgttggagaaatagagggcagtgaatggacagatcttggaacaacggtaaatgagccaagtcttggtttgaattactgtgagtgaggg

SEQ ID NO: 123252 - DNA, 120 bp, Artificial Sequence
  ENSG00000101266_204 (sequence is synthesized)
tactaaacaagagttgacataaagcctgctgttggagccttagaaatcccctgaggagattgtgccagcagagatacttgatctttccattggctcatgcagtttgtggcaagcaaggct

SEQ ID NO: 123253 - DNA, 120 bp, Artificial Sequence
  ENSG00000101266_205 (sequence is synthesized)
ttagaaagttacagatatgattgcccagccctgggaactgtaggaacccaagttgcccttcaggaaggacaagaatttggccaacaacgtcggctgactgaaaggctgggattaacaaac

SEQ ID NO: 123254 - DNA, 120 bp, Artificial Sequence
  ENSG00000101266_206 (sequence is synthesized)
cccaaagattatactactcagttccctttagtttgaggttggaaacatttcagattggatttgatgacctaaatcaggcattggcaaacttctttaaagggccaaatagtaaatatttta

SEQ ID NO: 123255 - DNA, 120 bp, Artificial Sequence
  ENSG00000101266_207 (sequence is synthesized)
ggctttgtgggccatgtagtgtttgtcacactattcaagtctgctgttgttgcacaagagcaaccataaacaatatgcaaacaaataggcatggctatgttgcaataaaacattatttac

SEQ ID NO: 123256 - DNA, 120 bp, Artificial Sequence
  ENSG00000101266_208 (sequence is synthesized)
aaaagcagacatcaggccaaatttggcctgtggtctgccaacctctgttacagactcttaatggctaaagaattactgttcttagaataagaggtttgtagtaaagatctgttttctttc

SEQ ID NO: 123257 - DNA, 120 bp, Artificial Sequence
  ENSG00000101266_209 (sequence is synthesized)
tttgaggggtctgtggaaataatctaggatctggacaagacagaaaaatttgaagtggtgcaatttgggtatactttgggtcttttaggacagaaaacatgttgaaacaactgtgtcaga

SEQ ID NO: 123258 - DNA, 120 bp, Artificial Sequence
  ENSG00000101266_210 (sequence is synthesized)
aaaagatctctaagctcagagagctgagtttgcttgactgtgagatcatgaacaagtctctgaagcattgctgtggaagtgactgtgtcctcagcttgaatcccaggggtattgtgaggc

SEQ ID NO: 123259 - DNA, 120 bp, Artificial Sequence
  ENSG00000101266_211 (sequence is synthesized)
taaaaggaaaatttacatggagggaaaagtaaaggactcttacgtattattcaggctaactcctttctgacccgttcatcccacaggccctggattattgtcacagcatgggaattatgc

SEQ ID NO: 123260 - DNA, 120 bp, Artificial Sequence
  ENSG00000101266_212 (sequence is synthesized)
taatgcaatgatagccagcactgcctgtaactttcagttcactgtttattcagccaccccgatattgatccttagattgatgtttcgggagctaccagcttagccttttgaaatcagaca

SEQ ID NO: 123261 - DNA, 120 bp, Artificial Sequence
  ENSG00000101266_213 (sequence is synthesized)
ttcccccctagtctttgtcatttgcattgcttattttattgtgaagaatacatataaattgtcatccagatttttaaaataggacattaccttagaattctcctaataaacccttatctc

SEQ ID NO: 123262 - DNA, 120 bp, Artificial Sequence
  ENSG00000101266_214 (sequence is synthesized)
gatccacgtttcaatgatatcttgggcaggtaagtcatgaaacaaaatatgtgcatctgtggcttaagcactttgagagtgaactggcacttaggatcttcaaaatagttatgttttctt

SEQ ID NO: 123263 - DNA, 120 bp, Artificial Sequence
  ENSG00000101266_215 (sequence is synthesized)
tgccagcactgtcaggatgtcagtggtccagtgccacaggatgctgcattgagcaggcctctgataaaggcattggattgaatggccctttattcaaattaacttacaggagtctgatgg

SEQ ID NO: 123264 - DNA, 120 bp, Artificial Sequence
  ENSG00000101266_216 (sequence is synthesized)
aggggttatagctagaggattcctacaaaatgaatgtagattctagtagaagggttacagttgaggcaaaaatcaaaatttaccttgcttctttaagtgaaaaacctctctccaagagaa

SEQ ID NO: 123265 - DNA, 120 bp, Artificial Sequence
  ENSG00000101266_217 (sequence is synthesized)
tctccaagagaaagaaattgaagtagaaaatgcatgctttaagactgatgtgcaggctgggcacggtggctcatatctgtaatcccagaactttaggaggatcacttgagcccaggagtt

SEQ ID NO: 123266 - DNA, 120 bp, Artificial Sequence
  ENSG00000101266_218 (sequence is synthesized)
ggacaacataatgagaccctcgactccatgcatggtgatgtgtggcagtagtccagactactaggaagctgaggcaggagcttcccttgagcccaggagggaatgctacagagagcaatg

SEQ ID NO: 123267 - DNA, 120 bp, Artificial Sequence
  ENSG00000101266_219 (sequence is synthesized)
cctgtctccaaaaaaaaaaaaaaaaaggctatatgcagacaaccgactcttaacagtagtgactagatatagtacttatacacttaaccactcaacaggaggagatggactttcctgatg

SEQ ID NO: 123268 - DNA, 120 bp, Artificial Sequence
  ENSG00000101266_220 (sequence is synthesized)
cacttaaccactcaacaggaggagatggactttcctgatgcaaaggcttttgctggccaattggcagagatgccaggaatatgtgtggggatgggaaataggcctggtgagctcagccac

SEQ ID NO: 123269 - DNA, 120 bp, Artificial Sequence
  ENSG00000101266_221 (sequence is synthesized)
agcggtcacgtcctgtcaagtaacctgaattatgtttcttaaaattgagaggactcagatgtcttttttcactctagctatgttgtttccagtctccagttagctttgttgtcccactca

SEQ ID NO: 123270 - DNA, 120 bp, Artificial Sequence
  ENSG00000101266_222 (sequence is synthesized)
gtggcagagcggtgcaagactaccctcttgagtttggatccctctttgcttttgtctgggctgttagccactaagaaaaatgtaggaatgaaatgttgggcttctgtgcccacgtggccc

SEQ ID NO: 123271 - DNA, 120 bp, Artificial Sequence
  ENSG00000101266_223 (sequence is synthesized)
ataatttcagaggtatttggaatatagatttttaaaagtagttttgaagacttttttaaaacagcatttaaaaggtttttggtgccaaagcaaataaataaaattttattgtatcctatg

SEQ ID NO: 123272 - DNA, 120 bp, Artificial Sequence
  ENSG00000101266_224 (sequence is synthesized)
ggagcaaaggtacagtctcttctctcccagttattgcctaatacttatttcctttacttttcattatataatgaggcttttgttttcaataaataaatcattgcctctactttgtaaaga

SEQ ID NO: 123273 - DNA, 120 bp, Artificial Sequence
  ENSG00000101266_225 (sequence is synthesized)
tgaggagtcacaggactcgagggggacagacagatgatattagtgcagctagtcgggtgtaattgcccttgcttaggtgatgtgagtggtagggactgaaacaaactgggaaacacatgc

SEQ ID NO: 123274 - DNA, 120 bp, Artificial Sequence
  ENSG00000101266_226 (sequence is synthesized)
ctcttcaaaaggagttagctgcttctcagctgaagctgatgattgccctgcagtaatgcaagtccattgttgcttgatactctgttttgcaaataaaagccagaaatttatatttgtata

SEQ ID NO: 123275 - DNA, 120 bp, Artificial Sequence
  ENSG00000101266_227 (sequence is synthesized)
tgaattttcctgacttttaagtgttggctcaagattttaaaaaaacaatgcacaggccagatttggcctctgggagaccaatatacaacttttaatttagttataactatgctgtgcact

SEQ ID NO: 123276 - DNA, 120 bp, Artificial Sequence
  ENSG00000101266_228 (sequence is synthesized)
gtcatatattgggaacttagcatatagttccttaccacaggaactttttcatatttgacactgaaaagtagaagtttccaaactttctcaatttataacacttatactgtctttaatttt

SEQ ID NO: 123277 - DNA, 120 bp, Artificial Sequence
  ENSG00000101266_229 (sequence is synthesized)
cttatactgtctttaatttttcacggtactcctaagtcaagaaatacctcatagttctctgtattaagtagcaaggtccaaatagctaagtaagttttgttttttttattgtttttgttt

SEQ ID NO: 123278 - DNA, 120 bp, Artificial Sequence
  ENSG00000101276_0 (sequence is synthesized)
atacaaaacgagctgcctctggcccctcccatgcagagcggctggggaactggaccagcagaaggaagaagtatggagttaaagactgcagcgtgaactgaggagtcccggacaggccgc

SEQ ID NO: 123279 - DNA, 120 bp, Artificial Sequence
  ENSG00000101276_1 (sequence is synthesized)
ttgctgcagaggatccagtccagatcccaggagagcccctctgccccttcggacctcgtctcccatctacaaaacgtgaagattggcccagttagcgtgtctctacaaaaaggtgcatat

SEQ ID NO: 123280 - DNA, 120 bp, Artificial Sequence
  ENSG00000101276_2 (sequence is synthesized)
accactgccccgctgcaggctgatctgagaaagcctctggcccagggcagataccgccatggccttcctgatgcacctgctggtctgcgtcttcggaatgggctcctgggtgaccatcaa

SEQ ID NO: 123281 - DNA, 120 bp, Artificial Sequence
  ENSG00000101276_3 (sequence is synthesized)
tgggctctgggtagagctgcccctgctggtgatggagctgcccgagggctggtacctgccctcctacctcacggtggtcatccagctggccaacatcgggcccctcctggtcaccctgct

SEQ ID NO: 123282 - DNA, 120 bp, Artificial Sequence
  ENSG00000101276_4 (sequence is synthesized)
ccatcacttccggcccagctgcctttccgaagtgcccatcatcttcaccctgctgggcgtgggaaccgtcacctgcatcatctttgccttcctctggaatatgacctcctgggtgctgga

SEQ ID NO: 123283 - DNA, 120 bp, Artificial Sequence
  ENSG00000101276_5 (sequence is synthesized)
cggccaccacagcatcgccttcttggtcctcaccttcttcctggccctggtggactgcacctcttcagtgaccttcctgccgttcatgagccggctgcccacctactacctcaccacctt

SEQ ID NO: 123284 - DNA, 120 bp, Artificial Sequence
  ENSG00000101276_6 (sequence is synthesized)
ctttgtgggtgaaggactcagcggcctcttgcccgccctggtggctcttgcccagggctccggtctcactacctgcgtcaatgtcactgagatatcagacagcgtaccaagccctgtacc

SEQ ID NO: 123285 - DNA, 120 bp, Artificial Sequence
  ENSG00000101276_7 (sequence is synthesized)
cacgagggagactgacatcgcacagggagttcccagagctttggtgtccgccctccccggaatggaagcacccttgtcccacctggagagccgctaccttcccgcccacttctcacccct

SEQ ID NO: 123286 - DNA, 120 bp, Artificial Sequence
  ENSG00000101276_8 (sequence is synthesized)
ggtcttcttcctcctcctatccatcatgatggcctgctgcctcgtggcgttctttgtcctccagcgtcaacccaggtgctgggaggcttccgtggaagacctcctcaatgaccaggtcac

SEQ ID NO: 123287 - DNA, 120 bp, Artificial Sequence
  ENSG00000101276_9 (sequence is synthesized)
cctccactccatccggccgcgggaagagaatgacttgggccctgcaggcacggtggacagcagccagggccaggggtatctagaggagaaagcagccccctgctgcccggcgcacctggc

SEQ ID NO: 123288 - DNA, 120 bp, Artificial Sequence
  ENSG00000101276_10 (sequence is synthesized)
cttcatctataccctggtggccttcgtcaacgcgctcaccaacggcatgctgccctctgtgcagacctactcctgcctgtcctatgggccagttgcctaccacctggctgccaccctcag

SEQ ID NO: 123289 - DNA, 120 bp, Artificial Sequence
  ENSG00000101276_11 (sequence is synthesized)
ctcttgcctcgttggtctccatgttcctgcctaacaggtctctgctgttcctgggggtcctctccgtgcttgggacctgctttgggggctacaacatggccatggcggtgatgagcccct

SEQ ID NO: 123290 - DNA, 120 bp, Artificial Sequence
  ENSG00000101276_12 (sequence is synthesized)
gccccctcttgcagggccactggggtggggaagtcctcattgtggcctcgtgggtgcttttcagcggctgcctcagttacgtcaaggtgatgctgggcgtggtcctgcgcgacctcagcc

SEQ ID NO: 123291 - DNA, 120 bp, Artificial Sequence
  ENSG00000101276_13 (sequence is synthesized)
gcagcgccctcttgtggtgcggggcggcggtgcagctgggctcgctgctcggagcgctgctcatgttccctctggtcaacgtgctgcggctcttctcgtccgcggacttctgcaatctgc

SEQ ID NO: 123292 - DNA, 120 bp, Artificial Sequence
  ENSG00000101276_14 (sequence is synthesized)
actgtccagcctaggcaggccgccgaccccgcccccatcgctcacggacggaactggggtccagagaggccaggtcacagagcaaggggcaggaacagagagacagagcctgagtaattg

SEQ ID NO: 123293 - DNA, 120 bp, Artificial Sequence
  ENSG00000101276_15 (sequence is synthesized)
aatcatgaacgcaagtgcccactggggactgtggggaagatggcacctggaaatgcaaggtgcggctctatccccaactctgtgtcacactacctgtgacgaccagctcagatctccttt

SEQ ID NO: 123294 - DNA, 120 bp, Artificial Sequence
  ENSG00000101276_16 (sequence is synthesized)
gctttgactctcaagagaggactgatttgcagcatctagctggaggcaggcccaagggtgttagaagggaaacagctgggacagccggctgtcccttcaggctgtgtgaccttgggaaag

SEQ ID NO: 123295 - DNA, 120 bp, Artificial Sequence
  ENSG00000101276_17 (sequence is synthesized)
tcatttggcttctctgtgcctgtttcttcatgcatgcagtggggattccagtaagtaccaactacctcacaggcatggcacggaggcaaaaggaaaaagcagcccgcatcaagcaagccc

SEQ ID NO: 123296 - DNA, 120 bp, Artificial Sequence
  ENSG00000101276_18 (sequence is synthesized)
tcctgggccacctgctgatctgacagtccatcgtagtaacaagagtggcagtctgcacaacctagaagtggccagaagggttgagacacgcccctgccctctctcctttgcccctcagtc

SEQ ID NO: 123297 - DNA, 120 bp, Artificial Sequence
  ENSG00000101276_19 (sequence is synthesized)
tcacagaggggcttctacaagacaagcagataacgatagaatcttgggcatcttggctttcggattctcagtgtggagggacgtagtaccccacacaccccttcctgtcatccttcctgg

SEQ ID NO: 123298 - DNA, 120 bp, Artificial Sequence
  ENSG00000101276_20 (sequence is synthesized)
cccataaagcccactagttggagagtaagtaccctcctggaagccgggagagatgatttgctggtggggctggggaaggcccatccctgagcctctgaaagtgaactccccgaccaggtt

SEQ ID NO: 123299 - DNA, 120 bp, Artificial Sequence
  ENSG00000101276_21 (sequence is synthesized)
ggggaccagacatgcagagcccctggaagtattctctcaaatggaggcaacagaggtgattgttattttgttttagtttctgtttttcatttttttaaataaaggcattccctgctttta

SEQ ID NO: 123300 - DNA, 120 bp, Artificial Sequence
  ENSG00000101276_22 (sequence is synthesized)
gtgtgtcggattgaacttttctttcatgaatcacggttaggaaaggcttctcttgttttctgctaataaaaagacagcttgggccaggcgtggtggctcacactgtaatcccagcacttt

SEQ ID NO: 123301 - DNA, 81 bp, Artificial Sequence
  ENSG00000101276_23 (sequence is synthesized)
gttcgagaccagcctgaccaacgtggggaaaccctgtttccactaaaaatacaaaattagctaactgaggcaggagaatca

SEQ ID NO: 123302 - DNA, 120 bp, Artificial Sequence
  ENSG00000101276_24 (sequence is synthesized)
atcacttgagcccaggaggcagagggtcactgagccgagatcatcccattgcactccagcctggactaaaagagtgaaactatgtctcaaaggaaaaaaaaaaaagccagcttgttcaca

SEQ ID NO: 123303 - DNA, 120 bp, Artificial Sequence
  ENSG00000101276_25 (sequence is synthesized)
gagcattgggttcgctcagtgaaggtatgaggaaggaagtcccagccctgtgagggaattccgtgtgtgggaaccgtggggaggagctgccaggattcaggagtttcctgggtgaggcgt

SEQ ID NO: 123304 - DNA, 120 bp, Artificial Sequence
  ENSG00000101276_26 (sequence is synthesized)
ggagagcttgggcgcggccctttccagcgagcggggtctgtgggaccctcccgggaagccccaggtgggggaagcgccccttcctcatttgggagtggaggcttagggaatcgaggtgac

SEQ ID NO: 123305 - DNA, 120 bp, Artificial Sequence
  ENSG00000101276_27 (sequence is synthesized)
tggtaggcctcttcccaccatgtgtacctcagcaggggccttctctcaagggcccttgccctgatcatgggcacgtgaacccagaaaagccactggattctccttcgcccccgggcggcc

SEQ ID NO: 123306 - DNA, 120 bp, Artificial Sequence
  ENSG00000101276_28 (sequence is synthesized)
aactcatgggacccgtcggccccgcaggctcactcccagaaggcgctcctcgcacctagagagtattccgtgggttcccctgagccctgtgagagttctttgctccggcgctcgccccgc

SEQ ID NO: 123307 - DNA, 120 bp, Artificial Sequence
  ENSG00000101280_0 (sequence is synthesized)
agacagaggtttgtagctgcagctgcaggcaagcctggccactgttggctgcagcaggacatcccaggcacagcccctagggctctgagcagacatccctcgccattgacacatcttcag

SEQ ID NO: 123308 - DNA, 120 bp, Artificial Sequence
  ENSG00000101280_1 (sequence is synthesized)
atgctctcccagctagccatgctgcagggcagcctcctccttgtggttgccaccatgtctgtggctcaacagacaaggcaggaggcggataggggctgcgagacacttgtagtccagcac

SEQ ID NO: 123309 - DNA, 120 bp, Artificial Sequence
  ENSG00000101280_2 (sequence is synthesized)
ggccactgtagctacaccttcttgctgcccaagtctgagccctgccctccggggcctgaggtctccagggactccaacaccctccagagagaatcactggccaacccactgcacctgggg

SEQ ID NO: 123310 - DNA, 120 bp, Artificial Sequence
  ENSG00000101280_3 (sequence is synthesized)
aagttgcccacccagcaggtgaaacagctggagcaggcactgcagaacaacacgcagtggctgaagaagctagagagggccatcaagacgatcttgaggtcgaagctggagcaggtccag

SEQ ID NO: 123311 - DNA, 120 bp, Artificial Sequence
  ENSG00000101280_4 (sequence is synthesized)
cagcaaatggcccagaatcagacggcccccatgctagagctgggcaccagcctcctgaaccagaccactgcccagatccgcaagctgaccgacatggaggctcagctcctgaaccagaca

SEQ ID NO: 123312 - DNA, 120 bp, Artificial Sequence
  ENSG00000101280_5 (sequence is synthesized)
tcaagaatggatgcccagatgccagagacctttctgtccaccaacaagctggagaaccagctgctgctacagaggcagaagctccagcagcttcagggccaaaacagcgcgctcgagaag

SEQ ID NO: 123313 - DNA, 120 bp, Artificial Sequence
  ENSG00000101280_6 (sequence is synthesized)
cggttgcaggccctggagaccaagcagcaggaggagctggccagcatcctcagcaagaaggcgaagctgctgaacacgctgagccgccagagcgccgccctcaccaacatcgagcgcggc

SEQ ID NO: 123314 - DNA, 120 bp, Artificial Sequence
  ENSG00000101280_7 (sequence is synthesized)
ctgcgcggtgtcaggcacaactccagcctcctgcaggaccagcagcacagcctgcgccagctgctggtgttgttgcggcacctggtgcaagaaagggctaacgcctcggccccggccttc

SEQ ID NO: 123315 - DNA, 120 bp, Artificial Sequence
  ENSG00000101280_8 (sequence is synthesized)
ataatggcaggtgagcaggtgttccaggactgtgcagagatccagcgctctggggccagtgccagtggtgtctacaccatccaggtgtccaatgcaacgaagcccaggaaggtgttctgt

SEQ ID NO: 123316 - DNA, 120 bp, Artificial Sequence
  ENSG00000101280_9 (sequence is synthesized)
gacctgcagagcagtggaggcaggtggaccctcatccagcgccgtgagaatggcaccgtgaattttcagcggaactggaaggattacaaacagggcttcggagacccagctggggagcac

SEQ ID NO: 123317 - DNA, 120 bp, Artificial Sequence
  ENSG00000101280_10 (sequence is synthesized)
tggctgggcaatgaagtggtgcaccagctcaccagaagggcagcctactctctgcgtgtggagctgcaagactgggaaggccacgaggcctatgcccagtacgaacatttccacctgggc

SEQ ID NO: 123318 - DNA, 120 bp, Artificial Sequence
  ENSG00000101280_11 (sequence is synthesized)
agtgagaaccagctatacaggctttctgtggtcgggtacagcggctcagcagggcgccagagcagcctggtcctgcagaacaccagctttagcacccttgactcagacaacgaccactgt

SEQ ID NO: 123319 - DNA, 120 bp, Artificial Sequence
  ENSG00000101280_12 (sequence is synthesized)
ctctgcaagtgtgcccaagtgatgtctggagggtggtggtttgacgcctgtggcctgtcaaacctcaacggcgtctactaccacgctcccgacaacaagtacaagatggacggcatccgc

SEQ ID NO: 123320 - DNA, 120 bp, Artificial Sequence
  ENSG00000101280_13 (sequence is synthesized)
tggcactacttcaagggccccagctactcactgcgtgcctctcgcatgatgatacggcctttggacatctaacgagcagctgtgccagaggctggaccacacaggagaagctcggacttg

SEQ ID NO: 123321 - DNA, 120 bp, Artificial Sequence
  ENSG00000101280_14 (sequence is synthesized)
gcactcctggacaacctggacccagatgcaagacactgtgccaccgccttccctgacaccctgggcttcctgagccagccctccttgacccagaagtccagaagggtcatctgcccccca

SEQ ID NO: 123322 - DNA, 120 bp, Artificial Sequence
  ENSG00000101280_15 (sequence is synthesized)
actcccctccgtctgtgacatggagggtgttcggggcccatccctctgatgtagtcctcgcccctcttctctccctcccccttcaggggctccctgcctgagggtcacagtaccttgaat

SEQ ID NO: 123323 - DNA, 120 bp, Artificial Sequence
  ENSG00000101280_16 (sequence is synthesized)
gggctgagaacagaccaaacttgattcccatgaccaatggtggggttgcaggcaggtgggaatgtatttgcacatcggaagctgcccagatggcccaggttctctcccttggattggcaa

SEQ ID NO: 123324 - DNA, 120 bp, Artificial Sequence
  ENSG00000101280_17 (sequence is synthesized)
gaaggccatctcccattctaagctcctgttccaagattttctagtcttgagatgtccttgaactttcttttcaagtctgaaggggctgcatccaccccttagtgggtgggttaatcatta

SEQ ID NO: 123325 - DNA, 120 bp, Artificial Sequence
  ENSG00000101280_18 (sequence is synthesized)
tttccccttcacacttcaccacttctaggttctaatgaccctagatctcagggtctttagacttcaccacttctaggctttaccacttcaccacttctaggctccaatgtttggagctca

SEQ ID NO: 123326 - DNA, 120 bp, Artificial Sequence
  ENSG00000101280_19 (sequence is synthesized)
gacccaaaaggacatgctccttcacctccagcatgtcctagaggatgtgtcacagggaataactatggcttgtctctaaaagtacctatgagcaatgagaaaaggaaacagcaggttaag

SEQ ID NO: 123327 - DNA, 120 bp, Artificial Sequence
  ENSG00000101280_20 (sequence is synthesized)
tcaaagtgaacaggcactcttcactgcaggactgatcagagcctttaatatggccaagtgccttgtgactacccatgaaggggctagagtgggcagctttctccaaatttacttatttga

SEQ ID NO: 123328 - DNA, 120 bp, Artificial Sequence
  ENSG00000101280_21 (sequence is synthesized)
aaatgggctcggtttgtcccagagcatctcacaggactgtagatgctcttggacaaagctagtgctcccctggcataaggaggagccctacgaccccatccccaccccagctatactcac

SEQ ID NO: 123329 - DNA, 120 bp, Artificial Sequence
  ENSG00000101280_22 (sequence is synthesized)
cctttttggctacaagggccacagtgacagcctcaaacaacctctaaaaacaactggaaataacctttcagttaaaacagataccatccctgaagaagggtctagaactaggtccctgtc

SEQ ID NO: 123330 - DNA, 120 bp, Artificial Sequence
  ENSG00000101280_23 (sequence is synthesized)
tgtgttataggctcatgtcctccaaggctccttcaagtcccaggaagctgatctctacctgggtggcttcccttaggactccctgtaacctcaactcccccaggctcaattacagggact

SEQ ID NO: 123331 - DNA, 120 bp, Artificial Sequence
  ENSG00000101280_24 (sequence is synthesized)
gttaggcaggacatctgtctccaagtccagatcctctctgcctccaagccctaacccctagcctccctcccttccccatccagcagtgatgctgcctctgtggtggtaggtggggagctg

SEQ ID NO: 123332 - DNA, 120 bp, Artificial Sequence
  ENSG00000101280_25 (sequence is synthesized)
caggggaggagataaggcctctgcctgagtttgggagaccagggccctcatagcttctttcagaggatggagtcagaaaggatccacagctactctgtcacctgcccccatcactgtgtc

SEQ ID NO: 123333 - DNA, 120 bp, Artificial Sequence
  ENSG00000101280_26 (sequence is synthesized)
atgctgtctgccctgttgtcatcagccaacacccaggcatagccaggagcccacctgccctaccgccaggatacacctctgtcctcagaaggttttctcctggatgagactgagccaatg

SEQ ID NO: 123334 - DNA, 120 bp, Artificial Sequence
  ENSG00000101280_27 (sequence is synthesized)
ggaatgggaccccttcatccccctggctcgccccagccctgagtcccactctcagccgatccctgagtaaacccagcacagactgactttgatctcattcctgggaattagcactcttcc

SEQ ID NO: 123335 - DNA, 120 bp, Artificial Sequence
  ENSG00000101280_28 (sequence is synthesized)
ccttcaagactcaaaggacatggttgctaatggtggcatttcaggcatgatgggaaatctttaggggcagattgctgcccagagagctcaaatcgccttaagcagcatttgcccagcaga

SEQ ID NO: 123336 - DNA, 120 bp, Artificial Sequence
  ENSG00000101280_29 (sequence is synthesized)
cctttatttagcctctactgtgtgcagtgtggtgtggtgggcagggctttggagtcggacaaacctgctccagctctgacactttggtccagtggctcagcctctcaaggcaccagttat

SEQ ID NO: 123337 - DNA, 120 bp, Artificial Sequence
  ENSG00000101280_30 (sequence is synthesized)
cttcacatcatcaaagcctcagttttcccatctgtaaaatggagatgataatattccttcctggctgggctatggcaaggaggaaatgagaccatgtatgtcatcttcttaatagagcct

SEQ ID NO: 123338 - DNA, 120 bp, Artificial Sequence
  ENSG00000101280_31 (sequence is synthesized)
ggcatgaagcaggtgcctaataaatgtttgtcctcaaagaggagaatggggtgaggaaggcattccccagcacatgccgccccttctcctgcactcaggtgaggaaaaggcattttattt

SEQ ID NO: 123339 - DNA, 120 bp, Artificial Sequence
  ENSG00000101280_32 (sequence is synthesized)
ttgtatccacatcatttatttttctattgtagtttctaggctgactgcaagctagagaggagacagggcaaagctgtgaggcccagggacagaactcctctgggtgggttgaaggcccaa

SEQ ID NO: 123340 - DNA, 120 bp, Artificial Sequence
  ENSG00000101280_33 (sequence is synthesized)
tgggtgggttgaaggcccaagtccctctctactcccattttataagggggcaggaagctgatttgagttatcctcagacacctgttctttatgtaattttattttatttttttgagacag

SEQ ID NO: 123341 - DNA, 84 bp, Artificial Sequence
  ENSG00000101280_34 (sequence is synthesized)
cactgcaatctctgcctcctatgggattacagacgcctaccaccacgcccggaaaacttttgtatttttagtagaaacgggttt

SEQ ID NO: 123342 - DNA, 120 bp, Artificial Sequence
  ENSG00000101280_35 (sequence is synthesized)
accatacccagcctcagacacctgttcttaaatattcatccttctttcttaccttccttcctcttccatgccaggactcaggtataagggatagaaattctagccctaaggaataaattg

SEQ ID NO: 123343 - DNA, 120 bp, Artificial Sequence
  ENSG00000101280_36 (sequence is synthesized)
actcacataactggaaagtctaagggtaaaggcaagtgaggttagatccagaggctcaaatgatgtcagctccacctctcagcccctccatctgccccgttgacttcattctcagccagg

SEQ ID NO: 123344 - DNA, 120 bp, Artificial Sequence
  ENSG00000101280_37 (sequence is synthesized)
atctttcctcacaagaaggctctggcagccccaggctcatgtcctcccagctcagcatccctgacccggggagctccctcgtctccatgattccagtaaaggaatgattttctgcagcca

SEQ ID NO: 123345 - DNA, 120 bp, Artificial Sequence
  ENSG00000101282_0 (sequence is synthesized)
agcgccagcccggatccggctgcccagatgcgggcgccactctgcctgctcctgctcgtcgcccacgccgtggacatgctcgccctgaaccgaaggaagaagcaagtgggcactggcctg

SEQ ID NO: 123346 - DNA, 120 bp, Artificial Sequence
  ENSG00000101282_1 (sequence is synthesized)
gggggcaactgcacaggctgtatcatctgctcagaggagaacggctgttccacctgccagcagaggctcttcctgttcatccgccgggaaggcatccgccagtacggcaagtgcctgcac

SEQ ID NO: 123347 - DNA, 120 bp, Artificial Sequence
  ENSG00000101282_2 (sequence is synthesized)
gactgtccccctgggtacttcggcatccgcggccaggaggtcaacaggtgcaaaaaatgtggggccacttgtgagagctgcttcagccaggacttctgcatccggtgcaagaggcagttt

SEQ ID NO: 123348 - DNA, 120 bp, Artificial Sequence
  ENSG00000101282_3 (sequence is synthesized)
tacttgtacaaggggaagtgtctgcccacctgcccgccgggcactttggcccaccagaacacacgggagtgccagggggagtgtgaactgggtccctggggcggctggagcccctgcaca

SEQ ID NO: 123349 - DNA, 120 bp, Artificial Sequence
  ENSG00000101282_4 (sequence is synthesized)
cacaatggaaagacctgcggctcggcttggggcctggagagccgggtacgagaggctggccgggctgggcatgaggaggcagccacctgccaggtgctttctgagtcaaggaaatgtccc

SEQ ID NO: 123350 - DNA, 120 bp, Artificial Sequence
  ENSG00000101282_5 (sequence is synthesized)
atccagaggccctgcccaggagagaggagccccggccagaagaagggcaggaaggaccggcgcccacgcaaggacaggaagctggaccgcaggctggacgtgaggccgcgccagcccggc

SEQ ID NO: 123351 - DNA, 120 bp, Artificial Sequence
  ENSG00000101282_6 (sequence is synthesized)
ctgcagccctgaccgccggctctcccgactctctggtcctagtcctcggcccctgcacacctcctcctgctccttctcctcctctcctcttactctttctcctctgtcttctccatttgt

SEQ ID NO: 123352 - DNA, 120 bp, Artificial Sequence
  ENSG00000101282_7 (sequence is synthesized)
cctctctttctttccacccttctatcatttttctgtcagtctaccttccctttctttttcttttttatttcctttatttcttccacctccattctcctctcctttctccctccctccttc

SEQ ID NO: 123353 - DNA, 120 bp, Artificial Sequence
  ENSG00000101282_8 (sequence is synthesized)
ccttccttcctcttctttctcacttatcttttatctttccttttctttcttcctgtgtttcttcctgtccttcaccgcatccttctctctctccctcctcttgtctccctctcacacaca

SEQ ID NO: 123354 - DNA, 120 bp, Artificial Sequence
  ENSG00000101282_9 (sequence is synthesized)
ctttaagagggaccatgagcctgtgccctcccctgcagctttctctatctacaacttaaagaaagcaaacatcttttcccaggcctttccctgaccccatctttgcagagaaagggtttc

SEQ ID NO: 123355 - DNA, 120 bp, Artificial Sequence
  ENSG00000101282_10 (sequence is synthesized)
catttccacagccttcagccaccagccaccccgaggagctggctggacaaggctccagggcttccagaggcctggcttggacacctcccccagctggccgtggagggtcacaacctggcc

SEQ ID NO: 123356 - DNA, 120 bp, Artificial Sequence
  ENSG00000101282_11 (sequence is synthesized)
tctgggtgggcagccagccctggagggcatcctctgcaagctgcctgccaccctcatcggcactcccccacaggcctccctctcatgggttccatgcccctttttcccaagccggatcag

SEQ ID NO: 123357 - DNA, 120 bp, Artificial Sequence
  ENSG00000101282_12 (sequence is synthesized)
gtgagctgtcactgctgggggatccacctgcccagcccagaagaggccactgaaacggaaaggaaagctgagattatccagcagctctgttccccacctcagcgcttcctgcccatgtgg

SEQ ID NO: 123358 - DNA, 120 bp, Artificial Sequence
  ENSG00000101282_13 (sequence is synthesized)
ggaaacaggtctgagaaggaaggggcttgcccagggtcacacaggaagccttcaggctctgcttctgcctgatggctctgctcagcacattcacggtggagaggagaatttgggggtcac

SEQ ID NO: 123359 - DNA, 120 bp, Artificial Sequence
  ENSG00000101282_14 (sequence is synthesized)
ttgaggggggaaatgtagggaattgtgggtggggagcaagggaagatccgtgcactcgtccacacccaccaccacactcgctgacacccacccccacacgctgacacccacccccacact

SEQ ID NO: 123360 - DNA, 120 bp, Artificial Sequence
  ENSG00000101282_15 (sequence is synthesized)
tgcccacacccatcaccgcactcgcccacacccaccaccacactgccccacacccaccaccacactcccccacacccaccaccacactcgcccacacccaccaccagtgacttgagcatc

SEQ ID NO: 123361 - DNA, 120 bp, Artificial Sequence
  ENSG00000101282_16 (sequence is synthesized)
tgtgcttcgctgtgacgcccctcgccctaggcaggaacgacgctgggaggagtctccaggtcagacccagcttggaagcaagtctgtcctcactgcctatccttctgccatcataacacc

SEQ ID NO: 123362 - DNA, 120 bp, Artificial Sequence
  ENSG00000101282_17 (sequence is synthesized)
cccttcctgctctgctccccggaatcctcagaaacgggatttgtatttgccgtgactggttggcctgaacacgtagggctccgtgactgggacaggaatgggcaggagaagcaagagtcg

SEQ ID NO: 123363 - DNA, 120 bp, Artificial Sequence
  ENSG00000101282_18 (sequence is synthesized)
gagctccaaggggcccaggggtggcctggggaaggaagatggtcagcaggctgggggagaggctctaggtgatgaaatattacattcccgaccccaagagagcacccaccctcagacctg

SEQ ID NO: 123364 - DNA, 120 bp, Artificial Sequence
  ENSG00000101282_19 (sequence is synthesized)
ccctccacctggcagctggggagccctggcctgaacccccccctcccagcaggcccaccctctctctgacttccctgctctcacctccccgagaacagctagagccccctcctccgcctg

SEQ ID NO: 123365 - DNA, 120 bp, Artificial Sequence
  ENSG00000101282_20 (sequence is synthesized)
gccaggccaccagcttctcttctgcaaacgtttgtgcctctgaaatgctccgttgttattgtttcaagaccctaacttttttttaaaactttcttaataaagggaaaagaaacttgtaaa

SEQ ID NO: 123366 - DNA, 120 bp, Artificial Sequence
  ENSG00000101290_0 (sequence is synthesized)
gggagtccgcgcgtgcccgcgccgagctgcctgctccggcggcttcgctgctagctcgcggcgacgtcgggccgattttcccaggatgacagagctgaggcagagggtggcccatgagcc

SEQ ID NO: 123367 - DNA, 120 bp, Artificial Sequence
  ENSG00000101290_1 (sequence is synthesized)
ggttgcgccacccgaggacaaggagtcagagtcagaagcaaaggtagatggagagactgcatcggacagtgagagccgggcagaatccgcacccctgccagtctctgcagatgatacccc

SEQ ID NO: 123368 - DNA, 120 bp, Artificial Sequence
  ENSG00000101290_2 (sequence is synthesized)
ggaggtcctcaatagggccctttccaacttgtcttcaagatggaagaactggtgggtgagaggcatcctgactttggccatgattgcatttttcttcatcatcatttacctgggaccaat

SEQ ID NO: 123369 - DNA, 120 bp, Artificial Sequence
  ENSG00000101290_3 (sequence is synthesized)
ggttttgatgataatcgtgatgtgcgttcagattaagtgtttccatgagataatcactattggctacaacgtctaccactcatatgatctgccctggttcaggacgctcagctggtactt

SEQ ID NO: 123370 - DNA, 120 bp, Artificial Sequence
  ENSG00000101290_4 (sequence is synthesized)
tctcctgtgtgtaaactatttcttctatggtgagacagtgacggattacttcttcaccctggtccagagagaagagcctttgcggattctcagtaaataccaccggttcatttcctttac

SEQ ID NO: 123371 - DNA, 120 bp, Artificial Sequence
  ENSG00000101290_5 (sequence is synthesized)
tctctatctaataggattctgcatgtttgtactgagtctggtcaagaagcattatcgactgcagttctacatgtttggctggacccatgtgacattgctgattgttgtaacacagtcaca

SEQ ID NO: 123372 - DNA, 120 bp, Artificial Sequence
  ENSG00000101290_6 (sequence is synthesized)
tcttgttatccacaacctatttgaaggaatgatctggttcattgtccccatatcttgtgtgatctgtaatgacatcatggcctatatgtttggctttttctttggtcggaccccactcat

SEQ ID NO: 123373 - DNA, 120 bp, Artificial Sequence
  ENSG00000101290_7 (sequence is synthesized)
caagctgtccccgaagaagacctgggaaggcttcattgggggcttctttgctactgtggtgtttggccttctgctgtcctatgtgatgtccgggtacagatgctttgtctgccctgtgga

SEQ ID NO: 123374 - DNA, 120 bp, Artificial Sequence
  ENSG00000101290_8 (sequence is synthesized)
gtacaacaatgacaccaacagcttcactgtggactgtgagccctcggacctgtttcgcctgcaggagtacaacattcctggggtgatccagtcagtcattggctggaaaacggtccggat

SEQ ID NO: 123375 - DNA, 120 bp, Artificial Sequence
  ENSG00000101290_9 (sequence is synthesized)
gtaccccttccagattcacagcatcgctctctccacctttgcctcgctcattggcccctttggaggattcttcgcaagtggattcaaacgagcctttaaaatcaaagactttgccaatac

SEQ ID NO: 123376 - DNA, 120 bp, Artificial Sequence
  ENSG00000101290_10 (sequence is synthesized)
cattcctggccatggaggcatcatggatcgctttgactgccagtatctgatggccacctttgtcaatgtatacatcgccagttttatcagaggccctaacccaagcaaactgattcagca

SEQ ID NO: 123377 - DNA, 120 bp, Artificial Sequence
  ENSG00000101290_11 (sequence is synthesized)
gttcctgactttacggccagatcagcagctccacatcttcaacacgctgcggtctcatctgatcgacaaagggatgctgacatccaccacagaggacgagtaggggccacccagggccag

SEQ ID NO: 123378 - DNA, 120 bp, Artificial Sequence
  ENSG00000101290_12 (sequence is synthesized)
gagaacaggaacagaactgagcaggggcaggtctccaaggcaagcccagctggtgtgacttagacaatgacgaggcttcaactcactgtcttttttttttttttttggagggtatttttt

SEQ ID NO: 123379 - DNA, 120 bp, Artificial Sequence
  ENSG00000101290_13 (sequence is synthesized)
atttgtgggttcaaaaaatctgtatatacagtctatgtgtttagaatttgtgttgtaagtaaactacagctttgagttggaaagaagtcacgggttgtaaaaccatttggatttttttaa

SEQ ID NO: 123380 - DNA, 120 bp, Artificial Sequence
  ENSG00000101290_14 (sequence is synthesized)
aacaaaagtattaataatctggaagacagtgttgcccaggtcaggagtgttttcttggtggttccagcccccatcaattgaactgtttctgggctcagtcagacacagacattcatctgt

SEQ ID NO: 123381 - DNA, 120 bp, Artificial Sequence
  ENSG00000101290_15 (sequence is synthesized)
gtctgaccaaatcaggggacttccccacctgtggtgggaggcacagcttagatgttttgtacacctggtcttttctagaaatccctgcttggagctgcagaagggttgccttctgtaggt

SEQ ID NO: 123382 - DNA, 120 bp, Artificial Sequence
  ENSG00000101290_16 (sequence is synthesized)
cggaggaatggaggcttactaaccaggtaagccttctatgcatccacaccaaaatcctgcagaatgtaagtaagctctgctttataagatgggttcaccttcatcgcagactgaaagttt

SEQ ID NO: 123383 - DNA, 120 bp, Artificial Sequence
  ENSG00000101290_17 (sequence is synthesized)
cagtttttatttttttcagaaagcacgaaaaattatttataatagtctggagaaaaaacacactgtaatatttcaagtgtatgcagtagaatgtactgtaactgagccctttcccacatg

SEQ ID NO: 123384 - DNA, 120 bp, Artificial Sequence
  ENSG00000101290_18 (sequence is synthesized)
tctaggctccaatgtctcctgtaggtccacctaactgtgtgttttcagggacaatgccatccatgtttgtgctgtagacttgctgctgctgaatcctttctggggactttctcatcgggc

SEQ ID NO: 123385 - DNA, 120 bp, Artificial Sequence
  ENSG00000101290_19 (sequence is synthesized)
agggagcagagggcttctcgttcatgcaccctttgcctgaacacccatgtagctgctgtgttgtgtatatattactcttaagaggagtgtgtgtgtctgtgtttgttttaaaagtcactt

SEQ ID NO: 123386 - DNA, 120 bp, Artificial Sequence
  ENSG00000101290_20 (sequence is synthesized)
atttcttacagtgatttcaattgcaccatgacttcttcactaaaaccacaaagtcctgcttaaaactatggaaaacctaacctgattagagccttgactattttgaagattaaatgcaca

SEQ ID NO: 123387 - DNA, 120 bp, Artificial Sequence
  ENSG00000101290_21 (sequence is synthesized)
ctttttatataatgtgaccagtttaaatgtagtttgtattgtactgggggacctttcgttgttgttgtttgcttaaactgtgattttttttcccctccctaatttcaggggtgagattga

SEQ ID NO: 123388 - DNA, 120 bp, Artificial Sequence
  ENSG00000101290_22 (sequence is synthesized)
ctttgggaagacagattagttctttgtcaggccaacaagtgatggagtgcgggagagagaacttggcacccaaatatatcaaactattccgtgccgtggatgttttcattgccaacgagg

SEQ ID NO: 123389 - DNA, 120 bp, Artificial Sequence
  ENSG00000101290_23 (sequence is synthesized)
gtgtaatgatttgcttctgcaccttggtctagtgctggtttgtggtgtttttgtttgtaaattagcctcactgcctccctgaaagtgcacagtcagcccaggtctctagagtgtccagca

SEQ ID NO: 123390 - DNA, 120 bp, Artificial Sequence
  ENSG00000101290_24 (sequence is synthesized)
gaggatggagccctcgggatgtttcagctcacacatccttgagtgacttcccatatgtgtgtggggctgaagcggcttctttccgctgaacttttatttccatttcagcctcgtggcttc

SEQ ID NO: 123391 - DNA, 120 bp, Artificial Sequence
  ENSG00000101290_25 (sequence is synthesized)
tcttattcaggtccaaggccccttaaaaacaaaacatattatcgcaagggctttcatttcagtattggctgtgtcactggcaggatgcatcactctccagggcctctttttcggagctac

SEQ ID NO: 123392 - DNA, 120 bp, Artificial Sequence
  ENSG00000101290_26 (sequence is synthesized)
tcccaattccactcttctgtgattctggctgagcaagttcatgccggtagaggctcattaagtgaggtcctgggcaccccccaaacaggaagtgttttcaggcccttacatgcttatcct

SEQ ID NO: 123393 - DNA, 120 bp, Artificial Sequence
  ENSG00000101290_27 (sequence is synthesized)
taaggtgagtaggtatctcagcagcacacccgaacagtaaaggtgatcaataacgaaactgtagttttcagattgaagaatgaacctggatcaccaaactagataccgaaagggctcctc

SEQ ID NO: 123394 - DNA, 120 bp, Artificial Sequence
  ENSG00000101290_28 (sequence is synthesized)
atttgtctcttttgtcccattgtgggcatatggtgggctccttgagaggagggagtctcagctggggcctggctgcagagacctgctcttgaatagggctgcctttgggatcagggagcc

SEQ ID NO: 123395 - DNA, 120 bp, Artificial Sequence
  ENSG00000101290_29 (sequence is synthesized)
gagcatactgggcaaggctcatcatgttcctttgtggaagtggttacttggtgggggtggggtggggaaggggggtctaggaagccgaagctgagtgcgcactagagctgctagcaggca

SEQ ID NO: 123396 - DNA, 120 bp, Artificial Sequence
  ENSG00000101290_30 (sequence is synthesized)
ggccagagggtcagcttgtgttttattttctgatttctcctgcatgctttctggagatgaggattttttgtcaggtagctaggagagcactgccaccttgtgtccatatagcacaatgtt

SEQ ID NO: 123397 - DNA, 120 bp, Artificial Sequence
  ENSG00000101290_31 (sequence is synthesized)
tctctttcctattcacagacaagattcaagaaaccatttttacgtgtgtacattcaaatcttcatgaatggcatcacttgctttagacccattttttttttattggtcagaaataaaatg

SEQ ID NO: 123398 - DNA, 120 bp, Artificial Sequence
  ENSG00000101290_32 (sequence is synthesized)
tgactgcaactgtgtgccctcccttgtcgtgaattccctgtttatcacttccatgcatggttttatgcttctcatttgtttatgtattcatgaatactgcatagtcctgattcagagact

SEQ ID NO: 123399 - DNA, 120 bp, Artificial Sequence
  ENSG00000101290_33 (sequence is synthesized)
tttgctttgctttccaacttgtatccctacattctcacaacagccttcttacctcgggtgagagtcatgagcaccttaccaggcagggagcttccccaggatagtgtggtggagtcagga

SEQ ID NO: 123400 - DNA, 120 bp, Artificial Sequence
  ENSG00000101290_34 (sequence is synthesized)
ctcactccatcctgcactttacccacaggacacctggagggtcccccagccctgcttgcttttgtgaacgtcgtgtgagtacaccgaggtgttgcagctttccttccctctagctcagga

SEQ ID NO: 123401 - DNA, 120 bp, Artificial Sequence
  ENSG00000101290_35 (sequence is synthesized)
ggcctggcctgagccaggttggagcttaaattgctgttggctcctgcctggtggaacaagggggtcatagaaaccagggctgatgggcaccccccagcccctgggagctctgctcatgac

SEQ ID NO: 123402 - DNA, 120 bp, Artificial Sequence
  ENSG00000101290_36 (sequence is synthesized)
cgctcacagggtaccgagtctttgccttttgtgtgtgcgcatgctgccctcttaactgcttttagtattcagaaaggttccatttatgttttactcctgaaagtgaaaccctcttaggca

SEQ ID NO: 123403 - DNA, 120 bp, Artificial Sequence
  ENSG00000101290_37 (sequence is synthesized)
gccctataatgtatgagaactagtttcacatcctttgaaactaatctctttcattggggaggatacaacttttgactttacacaggtggactttgaatccatttttatagaatttttttc

SEQ ID NO: 123404 - DNA, 120 bp, Artificial Sequence
  ENSG00000101290_38 (sequence is synthesized)
cactgtaacttgacctatattatgcaagaaaatcccaaaaatatgttttaagggagactacacagaccttgtgatttggtctgagctagttgctgagttgactggagccttatttgaatg

SEQ ID NO: 123405 - DNA, 120 bp, Artificial Sequence
  ENSG00000101290_39 (sequence is synthesized)
gatctttgagttgagatcttcacactgtcagtgagcccttggctcagcccttgtcacctgtttgtatggggaccatgtttcccaaagctcaggttcatctccactattgacagagtcggg

SEQ ID NO: 123406 - DNA, 120 bp, Artificial Sequence
  ENSG00000101290_40 (sequence is synthesized)
tagtgggagagtataagtgacttgagacagagtgtccttgctcagaaaactgtgaagcaggggtcttgttagttacaaagccagtcctagttgcatgtccaagggggtagattttcatca

SEQ ID NO: 123407 - DNA, 120 bp, Artificial Sequence
  ENSG00000101290_41 (sequence is synthesized)
ccctactaaatgtggtatgtcactgctgaagccttttcctgttttagtaatatcttaggcactattgtcttttgtcttccagagtaacatatctgggcccacctttcttgcacactgtga

SEQ ID NO: 123408 - DNA, 120 bp, Artificial Sequence
  ENSG00000101290_42 (sequence is synthesized)
ttatgtgctaagaaaagggtggagttgggaggacaatttcacttgaacaggtttctgttcttctgaggtcagggtggggaggatgtccaggtgacttttatggacacattgcaagacagt

SEQ ID NO: 123409 - DNA, 120 bp, Artificial Sequence
  ENSG00000101290_43 (sequence is synthesized)
aagccgcggatggactctcacttgtgctttggaacactggactccaaagagcaggtggaacaaactctggcctgaagatgatggctaatactcaggcagagccccgtattcttccctgac

SEQ ID NO: 123410 - DNA, 120 bp, Artificial Sequence
  ENSG00000101290_44 (sequence is synthesized)
ttggtcaaaacaaacttccttttcccttgatcaccctgcacgcagctgcccagcttccagtttttaaagagatgaacagctctcacttcctgactcagtttctcttgttgggtgggggcc

SEQ ID NO: 123411 - DNA, 120 bp, Artificial Sequence
  ENSG00000101290_45 (sequence is synthesized)
ttgtgccacaacctgcatggggtgctagggtttaaaccaagtggtcacgaaggattcttatctcagggctctgcctggcccaccttctcttgggcctggactctccttatccacatccct

SEQ ID NO: 123412 - DNA, 120 bp, Artificial Sequence
  ENSG00000101290_46 (sequence is synthesized)
gcagaaggtgggccctattctcagaagagtcctggctgctgttgccatctgaatgcgcccttccctttcaggttgaccagcagtggccttacctggcctctcaggtggatggaggctgtt

SEQ ID NO: 123413 - DNA, 120 bp, Artificial Sequence
  ENSG00000101290_47 (sequence is synthesized)
ctcatctggggctgtctcttgattaaggctgtcacctgtttgtatagggaccatgtttcccaacgcactttgagtgcagtttaggaggtatcctttggatgctgaagtgttgggattttg

SEQ ID NO: 123414 - DNA, 120 bp, Artificial Sequence
  ENSG00000101290_48 (sequence is synthesized)
aggacatgcggatgatttatgagaatagaggggcagagtttgtgaagtctagggttttttgtccagtgggtttcaaatttgttggctgtttaaagaccctgtctcctcccccaccctccc

SEQ ID NO: 123415 - DNA, 120 bp, Artificial Sequence
  ENSG00000101290_49 (sequence is synthesized)
cttccttttcccatcaaatgcctacctactgaggcgccttctctttttattcttgagccaatgagatatcagtgtgtttattaataaggattgcaatagtatagtgcttaatatgtgcca

SEQ ID NO: 123416 - DNA, 120 bp, Artificial Sequence
  ENSG00000101290_50 (sequence is synthesized)
ggcatagtgctaagggtttacatacgttatcccttttaatccagaaaacagcctttgattaggtattgttgtctccattttatagatgaggaaactgaggcagtatgactgaggccgaga

SEQ ID NO: 123417 - DNA, 120 bp, Artificial Sequence
  ENSG00000101290_51 (sequence is synthesized)
gcagtggttaagacagactttgggatcaaatcaccctaggtgcgggcaggtttctaggctgctctaagcttctaccttgaaggcagttgggtctgataatagtaccttcttcctggggtg

SEQ ID NO: 123418 - DNA, 120 bp, Artificial Sequence
  ENSG00000101290_52 (sequence is synthesized)
gttgtgaggatataacgaggtaatgcatgtaagcatttagtaccatgcctggcacatagtaagcactcaataaatggtagttacttttgttgagctcagctggtagtttgacctccgttg

SEQ ID NO: 123419 - DNA, 120 bp, Artificial Sequence
  ENSG00000101290_53 (sequence is synthesized)
gtgcaatgccagagatgggattgtcagccaccacactgccaccaccctgcacacagtctgggtccctccgagagaagcacgccaaccttaacatcccctacagcatcttggtgcttcaca

SEQ ID NO: 123420 - DNA, 120 bp, Artificial Sequence
  ENSG00000101290_54 (sequence is synthesized)
caccatttaggaggccaccctaacgaggcaagaggacatgggggtgtgcagaagttctgttcttagtgagaatggctggcctgagaatccagctcacctcctctgcccacagtctggact

SEQ ID NO: 123421 - DNA, 120 bp, Artificial Sequence
  ENSG00000101290_55 (sequence is synthesized)
gcttgtgggaaggccatctcctcctgtctggtggtacctccactctgggcagggagggcctgtctgtgactcgctctggaccccacttcccgctctggccaagggctgtcttctgtgcac

SEQ ID NO: 123422 - DNA, 120 bp, Artificial Sequence
  ENSG00000101290_56 (sequence is synthesized)
atagctcaggagcctgcagcagttccctgtatgggtggatgtcctcaggggccaagaagagaagaatggggacaacagaaacctgctttgtaggggattatgtagactaaaagcctagaa

SEQ ID NO: 123423 - DNA, 120 bp, Artificial Sequence
  ENSG00000101290_57 (sequence is synthesized)
gttctgcccacatccttatgacgcagccaatctggagcttcatgtttccttctaaaagtagtaaccgggtagaagtgggtgacccattgaggacacatgatgtgaggtatttctgccgga

SEQ ID NO: 123424 - DNA, 120 bp, Artificial Sequence
  ENSG00000101290_58 (sequence is synthesized)
ttctaggttagcaaagactcaaatgggtgactcatgaatgaagggagaacaggcacaggacttaatgaaaagagtttcttgaacttagttttctgaatgggggtggggagttggggcacg

SEQ ID NO: 123425 - DNA, 120 bp, Artificial Sequence
  ENSG00000101290_59 (sequence is synthesized)
tgtgtgtaaggggaggctgcctcactttgaaggaatggtgttggctaacaggatccatgaaattcctaggtcagttgaataataactgaactactggtttgactgtggattatttcctgg

SEQ ID NO: 123426 - DNA, 120 bp, Artificial Sequence
  ENSG00000101290_60 (sequence is synthesized)
gtattagtgggacccaacagcacattgctattaatagtatggaaataatggtccctctgtttcattgaattgctgaagtaatgataatgccatgaaccaggagaagatggttgtgggggt

SEQ ID NO: 123427 - DNA, 120 bp, Artificial Sequence
  ENSG00000101290_61 (sequence is synthesized)
ttctaggaagcagctgctgtgacaggccaatcccaggcttgcccccgagccctcctgtccttctgggtttgtgtttgccttgcctggtgcttcctccctcattgtgttgttgaatagacc

SEQ ID NO: 123428 - DNA, 120 bp, Artificial Sequence
  ENSG00000101290_62 (sequence is synthesized)
taggcagccttgtatccatagaaagcctccactgctgggccggggagggggttgtggtaagggccctctggaaatcaagcagagaatgcctttgcagtggtctcccgggcattgggcagg

SEQ ID NO: 123429 - DNA, 120 bp, Artificial Sequence
  ENSG00000101290_63 (sequence is synthesized)
gcctagccttttgcagcccccagaggaccttgcctgcataaagcactcagaagggttagccacctggtgattttgtctctagtgaaactgtgtttgccgataatcatccacatagccacc

SEQ ID NO: 123430 - DNA, 120 bp, Artificial Sequence
  ENSG00000101290_64 (sequence is synthesized)
tctgtcctcgcagtttggatgcctttttttgacacctgcgctaggttcttgtatgctggcttttcttaaaggaacagcagagtagaaaagaggttgagaatgttttctagcaggcagaat

SEQ ID NO: 123431 - DNA, 120 bp, Artificial Sequence
  ENSG00000101290_65 (sequence is synthesized)
gtgcatacatgttttcatgagtgtcctttgggtgctgtttcttttaaatcctctgtgcacagggctctggcctttagtaaactgtttttctgtcttacgtcatgctgactgggtgctagg

SEQ ID NO: 123432 - DNA, 120 bp, Artificial Sequence
  ENSG00000101290_66 (sequence is synthesized)
ggctgattacaaaggggaagagttgaacagacatcaggggccgatgaaaccaaaggactaggagtcaggagaacaagtcagggattaggagacagcggtttggtttattgttatccagct

SEQ ID NO: 123433 - DNA, 120 bp, Artificial Sequence
  ENSG00000101290_67 (sequence is synthesized)
ggaggactcctaggggcagcagcaggaggaataccagggccacggaggggccaggagtctcacagtggagggcagactctaacagatgccagctgaacgctcgctggccctggatgtcat

SEQ ID NO: 123434 - DNA, 120 bp, Artificial Sequence
  ENSG00000101290_68 (sequence is synthesized)
acgagttggggaccagaaatctgggctcagagaacccgtccagggagatttgaagccatgggttatcttctagagttgatactgataatatattttaatttttattgatgtttaatacct

SEQ ID NO: 123435 - DNA, 120 bp, Artificial Sequence
  ENSG00000101290_69 (sequence is synthesized)
tatattttaatttttattgatgtttaataccttctgaaacaggagggtaagatcagatgggaagcccctctgttgaaggatcttgggaaccttggtggttttttttttttttttggtttt

SEQ ID NO: 123436 - DNA, 120 bp, Artificial Sequence
  ENSG00000101290_70 (sequence is synthesized)
aattcgattctgaggatttgtttaactaaaaagttcccaaacacagaaagggcctccccacctgctttggggagctgtctgtgctgggagtgccaggcatcccatgggacccatcactgc

SEQ ID NO: 123437 - DNA, 120 bp, Artificial Sequence
  ENSG00000101290_71 (sequence is synthesized)
cagtgtctgtgcctcccagaggtcagccgtgtctgccctggctctgtctcctctgtgacagggcagagcatttctggtcagtttctccatggtgcctcccacccctttgtaaagtggatg

SEQ ID NO: 123438 - DNA, 120 bp, Artificial Sequence
  ENSG00000101290_72 (sequence is synthesized)
gacatgatggaattcagttgtctcaccctgatagcctgggtgttgatattcactttacccgcactcagacacaggcgaccttgaagcagttctcggtgtgtagagtccacgtgacagtcc

SEQ ID NO: 123439 - DNA, 120 bp, Artificial Sequence
  ENSG00000101290_73 (sequence is synthesized)
ccacagcctccccagatagctgtgtgcctgtgcgctactgctgtgccattttcccaacttggcgtttcactaaatgcagctgatctctctctctgtgcactcgtgatccatgttgaacaa

SEQ ID NO: 123440 - DNA, 120 bp, Artificial Sequence
  ENSG00000101290_74 (sequence is synthesized)
tacatgtaggttctttttccacgcaatgtaagaacatgatatactgtacgttggaaagcatttaccttatttatatacctgaatgttcctactacacaaataaacatatattaaattcta

SEQ ID NO: 123441 - DNA, 120 bp, Artificial Sequence
  ENSG00000101290_75 (sequence is synthesized)
gttgcgccacccgaggacaagataattggagggtccaccatcactttgtcacctgctcaatggttggctggagctgaggatcatcggttcccaccaatccctgttgccttacaccaggct

SEQ ID NO: 123442 - DNA, 120 bp, Artificial Sequence
  ENSG00000101290_76 (sequence is synthesized)
cacggcttcccctaatgcagcctgtaactttttgatgactggacgcaacggacattagggagacacccagaaggaagaaagcacaagatttggtgacaggatgtcaacagagcagttaca

SEQ ID NO: 123443 - DNA, 120 bp, Artificial Sequence
  ENSG00000101290_77 (sequence is synthesized)
ctaggaggaatgtttttggtgaaagataatgagatcatgggttttttttaaacaactttcgtgttattgcagttgacagtggactatccaaagagaactgttcctaccgatttttagaac

SEQ ID NO: 123444 - DNA, 88 bp, Artificial Sequence
  ENSG00000101290_78 (sequence is synthesized)
ggactatccaaagagaactgttcctaccgatttttagaacatatattttggccaggcacagtgctgctcgcctgtaatcctagcttct

SEQ ID NO: 123445 - DNA, 120 bp, Artificial Sequence
  ENSG00000101290_79 (sequence is synthesized)
catattttggagaacatttagggctggggctgaggatttagcagtcgcttgcagagacaagatactttgaagtctctaatttttcatttggctatcctggttcagcctgaaagaattctg

SEQ ID NO: 123446 - DNA, 120 bp, Artificial Sequence
  ENSG00000101290_80 (sequence is synthesized)
gaaaaaagctagcttcctccttcccaaagctgtaagccccaggatgaaggagaattgctcacgccaggtcagggtatgggcaggacagctttcccccaacatcagattgtttagaccagt

SEQ ID NO: 123447 - DNA, 120 bp, Artificial Sequence
  ENSG00000101290_81 (sequence is synthesized)
ggttttcaaagtgtgttctgtggatccctggagggccctgggatccttttagttgcgggggtagggtgggggggtctgtgaggtcacaactgtttcataattagactatgacattatttt

SEQ ID NO: 123448 - DNA, 120 bp, Artificial Sequence
  ENSG00000101290_82 (sequence is synthesized)
cctttttcaatgtgttgacatttgctgtgatacggcgcaaaagcagcagtggttaaaactgcgttaaggcagtgggttcctcatgccacacactcacagtacaaacaggccagttctaat

SEQ ID NO: 123449 - DNA, 120 bp, Artificial Sequence
  ENSG00000101290_83 (sequence is synthesized)
gaatgtctatgaaatagtaaagttactaattttgttaaatcttgacctttgtacacacacctttttaacactctctactgaaatggaaagtatgtgtaaaacatttctgctaagtactgt

SEQ ID NO: 123450 - DNA, 120 bp, Artificial Sequence
  ENSG00000101290_84 (sequence is synthesized)
agtacagtgcttgcctaaagggaaagcatgtgtgcagttgtttgagttgtgagctaaattagctgctttttttttagaaaagaaagtaaattttacttggaaagaaccaacaaattataa

SEQ ID NO: 123451 - DNA, 120 bp, Artificial Sequence
  ENSG00000101290_85 (sequence is synthesized)
ataatttttcagacttgggtatttggcagacatttttcttgaaaaggatgaagtgagcctatcactttaaagaaaacaactgaggctaggcacagtggctcacacctgaaatcccagcac

SEQ ID NO: 123452 - DNA, 120 bp, Artificial Sequence
  ENSG00000101290_86 (sequence is synthesized)
cacactattttagttttcccttcagtttttgctgcaggcccggttgtcttaagtgcgaggtgttgggttggttgtgggaattgacgggggtccaggcttctcagaaaacctctgccatag

SEQ ID NO: 123453 - DNA, 120 bp, Artificial Sequence
  ENSG00000101290_87 (sequence is synthesized)
aacatctgtgacttcccacttctcagtagccacctggagggtcattggtgtaggctggttgtttatggttgaagatgtctcagtgtcttttcttttaaaaaactgactttattgcctgtg

SEQ ID NO: 123454 - DNA, 77 bp, Artificial Sequence
  ENSG00000101290_88 (sequence is synthesized)
cccaggagttcgagaccagcctgggaaagaaggtgaaacctcgtctctacttaaaaaaaaaatccttggaggctgag

SEQ ID NO: 123455 - DNA, 120 bp, Artificial Sequence
  ENSG00000101290_89 (sequence is synthesized)
gcctgggcaacacggtgaaaccctgtcttaaaaaaaaaaaagttaattgaaacatcagggtgtgtattttattgtgagtggaaaattggatctactccctgtgacatagagggctgcatt

SEQ ID NO: 123456 - DNA, 120 bp, Artificial Sequence
  ENSG00000101290_90 (sequence is synthesized)
gtgacatagagggctgcattgctctgtgggatggtatgagagaggaagaaggagggaagcagaaccactggaggcccgatatttttcttaagtataatgggttttctggaaggctcatga

SEQ ID NO: 123457 - DNA, 120 bp, Artificial Sequence
  ENSG00000101290_91 (sequence is synthesized)
gctcggcccgggtgaaagggcggtgacggcactgggtggggccgagctccagggctggctgctgggctgctaagggaactgtgagccgctcagagccgcgcgcctcccgggcggggcggg

SEQ ID NO: 123458 - DNA, 120 bp, Artificial Sequence
  ENSG00000101292_0 (sequence is synthesized)
atggcagcccagaatggaaacaccagtttcacacccaactttaatccaccccaagaccatgcctcctccctctcctttaacttcagttatggtgattatgacctccctatggatgaggat

SEQ ID NO: 123459 - DNA, 120 bp, Artificial Sequence
  ENSG00000101292_1 (sequence is synthesized)
gaggacatgaccaagacccggaccttcttcgcagccaagatcgtcattggcattgcactggcaggcatcatgctggtctgcggcatcggtaactttgtctttatcgctgccctcacccgc

SEQ ID NO: 123460 - DNA, 120 bp, Artificial Sequence
  ENSG00000101292_2 (sequence is synthesized)
tataagaagttgcgcaacctcaccaatctgctcattgccaacctggccatctccgacttcctggtggccatcatctgctgccccttcgagatggactactacgtggtacggcagctctcc

SEQ ID NO: 123461 - DNA, 120 bp, Artificial Sequence
  ENSG00000101292_3 (sequence is synthesized)
tgggagcatggccacgtgctctgtgcctccgtcaactacctgcgcaccgtctccctctacgtctccaccaatgccttgctggccattgccattgacagatatctcgccatcgttcacccc

SEQ ID NO: 123462 - DNA, 120 bp, Artificial Sequence
  ENSG00000101292_4 (sequence is synthesized)
atcccatcggcttactttgcaacagaaacggtcctctttattgtcaagagccaggagaagatcttctgtggccagatctggcctgtggatcagcagctctactacaagtcctacttcctc

SEQ ID NO: 123463 - DNA, 120 bp, Artificial Sequence
  ENSG00000101292_5 (sequence is synthesized)
ttcatctttggtgtcgagttcgtgggccctgtggtcaccatgaccctgtgctatgccaggatctcccgggagctctggttcaaggcagtccctgggttccagacggagcagattcgcaag

SEQ ID NO: 123464 - DNA, 120 bp, Artificial Sequence
  ENSG00000101292_6 (sequence is synthesized)
cggctgcgctgccgcaggaagacggtcctggtgctcatgtgcattctcacggcctatgtgctgtgctgggcacccttctacggtttcaccatcgttcgtgacttcttccccactgtgttc

SEQ ID NO: 123465 - DNA, 120 bp, Artificial Sequence
  ENSG00000101292_7 (sequence is synthesized)
gtgaaggaaaagcactacctcactgccttctacgtggtcgagtgcatcgccatgagcaacagcatgatcaacaccgtgtgcttcgtgacggtcaagaacaacaccatgaagtacttcaag

SEQ ID NO: 123466 - DNA, 120 bp, Artificial Sequence
  ENSG00000101292_8 (sequence is synthesized)
aagatgatgctgctgcactggcgtccctcccagcgggggagcaagtccagtgctgaccttgacctcagaaccaacggggtgcccaccacagaagaggtggactgtatcaggctgaagtga

SEQ ID NO: 123467 - DNA, 120 bp, Artificial Sequence
  ENSG00000101294_0 (sequence is synthesized)
ggagggagcacgtcacttcctgttgccttaggggaacgtggctttccctgcagagccggtgtctccgcctgcgtccctgctgcagcaaccggagctggagtcggatcccgaacgcaccct

SEQ ID NO: 123468 - DNA, 120 bp, Artificial Sequence
  ENSG00000101294_1 (sequence is synthesized)
cgccatggactcggccctcagcgatccgcataacggcagtgccgaggcaggcggccccaccaacagcactacgcggccgccttccacgcccgagggcatcgcgctggcctacggcagcct

SEQ ID NO: 123469 - DNA, 120 bp, Artificial Sequence
  ENSG00000101294_2 (sequence is synthesized)
cctgctcatggcgctgctgcccatcttcttcggcgccctgcgctccgtacgctgcgcccgcggcaagaatgcttcagacatgcctgaaacaatcaccagccgggatgccgcccgcttccc

SEQ ID NO: 123470 - DNA, 120 bp, Artificial Sequence
  ENSG00000101294_3 (sequence is synthesized)
catcatcgccagctgcacactcttggggctctacctctttttcaaaatattctcccaggagtacatcaacctcctgctgtccatgtatttcttcgtgctgggaatcctggccctgtccca

SEQ ID NO: 123471 - DNA, 120 bp, Artificial Sequence
  ENSG00000101294_4 (sequence is synthesized)
caccatcagccccttcatgaataagttttttccagccagctttccaaatcgacagtaccagctgctcttcacacagggttctggggaaaacaaggaagagatcatcaattatgaatttga

SEQ ID NO: 123472 - DNA, 120 bp, Artificial Sequence
  ENSG00000101294_5 (sequence is synthesized)
caccaaggacctggtgtgcctgggcctgagcagcatcgttggcgtctggtacctgctgaggaagcactggattgccaacaacctttttggcctggccttctcccttaatggagtagagct

SEQ ID NO: 123473 - DNA, 120 bp, Artificial Sequence
  ENSG00000101294_6 (sequence is synthesized)
ctcttcatctacgatgtcttctgggtatttggcaccaatgtgatggtgacagtggccaagtccttcgaggcaccaataaaattggtgtttccccaggatctgctggagaaaggcctcgaa

SEQ ID NO: 123474 - DNA, 120 bp, Artificial Sequence
  ENSG00000101294_7 (sequence is synthesized)
gcaaacaactttgccatgctgggacttggagatgtcgtcattccagggatcttcattgccttgctgctgcgctttgacatcagcttgaagaagaatacccacacctacttctacaccagc

SEQ ID NO: 123475 - DNA, 120 bp, Artificial Sequence
  ENSG00000101294_8 (sequence is synthesized)
tttgcagcctacatcttcggcctgggccttaccatcttcatcatgcacatcttcaagcatgctcagcctgccctcctatacctggtccccgcctgcatcggttttcctgtcctggtggcg

SEQ ID NO: 123476 - DNA, 120 bp, Artificial Sequence
  ENSG00000101294_9 (sequence is synthesized)
ctggccaagggagaagtgacagagatgttcagttatgaggagtcaaatcctaaggatccagcggcagtgacagaatccaaagagggaacagaggcatcagcatcgaaggggctggagaag

SEQ ID NO: 123477 - DNA, 120 bp, Artificial Sequence
  ENSG00000101294_10 (sequence is synthesized)
aaagagaaatgatgcagctggtgcccgagcctctcagggccagaccagacagatgggggctgggcccacacaggcgtgcaccggtagagggcacaggaggccaagggcagctccaggaca

SEQ ID NO: 123478 - DNA, 120 bp, Artificial Sequence
  ENSG00000101294_11 (sequence is synthesized)
gggcagggggcagcaggatacctccagccaggcctctgtggcctctgtttccttctccctttcttggccctcctctgctcctccccacaccctgcaggcaaaagaaacccccagcttccc

SEQ ID NO: 123479 - DNA, 120 bp, Artificial Sequence
  ENSG00000101294_12 (sequence is synthesized)
ccctccccgggagccaggtgggaaaagtgggtgtgatttttagattttgtattgtggactgattttgcctcacattaaaaactcatcccatggccagggcgggccactgtgctcctggaa

SEQ ID NO: 123480 - DNA, 120 bp, Artificial Sequence
  ENSG00000101294_13 (sequence is synthesized)
gcctcataccccgaggctcacccacttccccacagtctcgggctccccagccagcctggccgactccatgcagcagaagctagctggccctcgccgccggcgcccgcagaatcccagcgc

SEQ ID NO: 123481 - DNA, 120 bp, Artificial Sequence
  ENSG00000101294_14 (sequence is synthesized)
cccgtaaaacaccttttagccagtagagggggcccacgagccctctctcaccagctagcacttttctcaccaccttcctcgaaatacttgggggcagcaagggtgttggcagatgagagt

SEQ ID NO: 123482 - DNA, 120 bp, Artificial Sequence
  ENSG00000101294_15 (sequence is synthesized)
ctcccactcaccatggtgagagtggtggggagtacccagggctgacctgactcacaagggaagcagtaactgtagaacctgccagcctccctggtccctgtgcccatatggcttcggctg

SEQ ID NO: 123483 - DNA, 120 bp, Artificial Sequence
  ENSG00000101294_16 (sequence is synthesized)
atgagggctcagactctaggttgccctgaagatcaaggctttgtctcccattctgcccattcctgggtttcttcccaaaatgactactgtggggccagtcatggcacaagggccaggacc

SEQ ID NO: 123484 - DNA, 120 bp, Artificial Sequence
  ENSG00000101294_17 (sequence is synthesized)
tctagaggctggggtggggaaggactgagctagtgattcttagaggccttctggggcctaagagctgaaatctcagcgcccgggtttccctaaagtttgctgaagacagcagccccggcc

SEQ ID NO: 123485 - DNA, 120 bp, Artificial Sequence
  ENSG00000101294_18 (sequence is synthesized)
agcaggagaccgaccgggcaccaccccaaaccaggcaaacggtggccacaaccctcatccacccacctggtatgaggtcactgagtggggaaacagacaggagcgggtggccaccatact

SEQ ID NO: 123486 - DNA, 120 bp, Artificial Sequence
  ENSG00000101294_19 (sequence is synthesized)
gacagacccggggctctcccttgcccaagcttcaggttcaaaggctgaaaataacagtggcttccagtttggaagtggccaaaggacaatcatgaccagagactcaggagtatgactgta

SEQ ID NO: 123487 - DNA, 120 bp, Artificial Sequence
  ENSG00000101294_20 (sequence is synthesized)
ataccctcactaggtattgacatgcactaagcaccttgatataggatttcacttccttctgagtcttgggctgtatgtgctattattcgctccgctgtgcagatgagggaattgaggcag

SEQ ID NO: 123488 - DNA, 120 bp, Artificial Sequence
  ENSG00000101294_21 (sequence is synthesized)
cttgcccatggacatcgatttgaccttagccaagccaaacaattccaggttcctaaggaccgcagctcctccccagacccctgggaccaagtcactggctggtgtgctgggcatccctga

SEQ ID NO: 123489 - DNA, 120 bp, Artificial Sequence
  ENSG00000101294_22 (sequence is synthesized)
gccccagccacccaattttactggctccagggttctataggaaggaaaaggggtagaaaatttcaaaaggcttcttcctttcagggaggggggttccctttcaggggcttctggaatctc

SEQ ID NO: 123490 - DNA, 120 bp, Artificial Sequence
  ENSG00000101294_23 (sequence is synthesized)
tacccactccagccaactctgaggccatgtggtcctggaacaaggcccctctgaggcagatggggcaggcggcccaggcacatagcatggttggctctgcggcccagggcgcacaaaggc

SEQ ID NO: 123491 - DNA, 120 bp, Artificial Sequence
  ENSG00000101294_24 (sequence is synthesized)
cttattgagtcaccaccagcccccggcagaggctgaggtggcagtggcgccgagcgcctgccacctaatgactgtcctggtccagccagatgttccacagacctccggagcagcggacta

SEQ ID NO: 123492 - DNA, 120 bp, Artificial Sequence
  ENSG00000101294_25 (sequence is synthesized)
gggcccgcccggccagccggcaccgcagaggccactgtaattccaattaaccagcttcagctgagcaaacagcgggcagtggtggcccagcccaggcggtaggcctggcccgcagagcct

SEQ ID NO: 123493 - DNA, 120 bp, Artificial Sequence
  ENSG00000101294_26 (sequence is synthesized)
gcgagtctagactccagatgtgaaccgccaccatcagagtcccatggaaaaatggcaccaggccgggcaaggattgggcctgcatgctggggagggggtgtgggtggttgggcagggccc

SEQ ID NO: 123494 - DNA, 120 bp, Artificial Sequence
  ENSG00000101294_27 (sequence is synthesized)
cgagtgggctagatgccagcctcacctggtttggggtggattattaggaaactgctctagaacccaagttctaccctgctttattagattctgtttctgtgcctcagtctcccatgactg

SEQ ID NO: 123495 - DNA, 120 bp, Artificial Sequence
  ENSG00000101294_28 (sequence is synthesized)
cgacaagagagagggttccaaggggaaaaccagccctgctgagaccccagtgtgcactgactgtatttcacgtgactagcattatgctagtgcaactgacccttgaacaacacagggatt

SEQ ID NO: 123496 - DNA, 120 bp, Artificial Sequence
  ENSG00000101294_29 (sequence is synthesized)
aggggcaccaacccatcatggtcgaaaatctgtataacttttcagtcccgcaaaacaactaatagtctgctgttgaccagaagccttacctgataacataaacagtcaaaacatcttgta

SEQ ID NO: 123497 - DNA, 120 bp, Artificial Sequence
  ENSG00000101294_30 (sequence is synthesized)
taaaggcagcgtgtctggaatttgttccttgtgatgttcggatgtgctgggagttttttccttctggtgggttcgtgatctcactggctcaggaatgaagctgcagaccctcgcggtgag

SEQ ID NO: 123498 - DNA, 120 bp, Artificial Sequence
  ENSG00000101294_31 (sequence is synthesized)
gcggcgtatccggagttgttcgttcctccccgtgggtttgtggtctcgctggcttcaaaagtgaagctgtagacctttacagcgagtatcacagctcacaaaagcaatgtggaaccaaac

SEQ ID NO: 123499 - DNA, 120 bp, Artificial Sequence
  ENSG00000101294_32 (sequence is synthesized)
gagaagtgacagagatgttcagttaaaaattccaaagctgtaacagagagagcaccctcatgctccagctaccccacagaggccagcagtgttacacagacattcagacacctgtgcact

SEQ ID NO: 123500 - DNA, 120 bp, Artificial Sequence
  ENSG00000101294_33 (sequence is synthesized)
ggatgagaacatgacttttggcatcattcagagccaggtttgaatcctggctataaaactcaagggactctttcccctgcacactgtagatgactaggacaagaacaatgacctctctgg

SEQ ID NO: 123501 - DNA, 120 bp, Artificial Sequence
  ENSG00000101294_34 (sequence is synthesized)
gcacactcttggggctctacctctttttcaaagtttattttcccaataaaagttatgcaggctcagtgttgaaaacctggaaaacacagaaaagtaaaaagggaaaaacagcagtcatcc

SEQ ID NO: 123502 - DNA, 120 bp, Artificial Sequence
  ENSG00000101294_35 (sequence is synthesized)
tcatgcacatcttcaagcatgctcaggacaatctcttcacttcatgagcacccatgaagacgcaccatgaaggagccattcactgagtatttaccaggccctcttcagtatgcagggcac

SEQ ID NO: 123503 - DNA, 120 bp, Artificial Sequence
  ENSG00000101294_36 (sequence is synthesized)
ggtgacacactgcaagtatgtggtaaagccaggattcaaacctgggtcagcatggaaaccacacccaggctctcaagccctggccatgggaaacgcagcattgaacaggggctaagggag

SEQ ID NO: 123504 - DNA, 120 bp, Artificial Sequence
  ENSG00000101294_37 (sequence is synthesized)
ccctgttgtgaatcccagcaccacccagtaaccatggaactctgggcttgctgcttctgtcccctttccccttccccagggcccaaatacagacgagccatctttgaattaatcacaaaa

SEQ ID NO: 123505 - DNA, 120 bp, Artificial Sequence
  ENSG00000101294_38 (sequence is synthesized)
ccgtttgtttccctgttgtcgcccgcttcaccctggatcatgttcaagaagtttgatgaaaaggaaagtgtgtccaactgcatccagttgaaaacgtcagttattaagggcattaagagc

SEQ ID NO: 123506 - DNA, 120 bp, Artificial Sequence
  ENSG00000101294_39 (sequence is synthesized)
caactggtagagcaatttccagggccccccacaaaagcagcctcggggactccggcctttccttgagacctgcatctcttcccttcttcatcgcctgctagtgaactgaggctgccgcta

SEQ ID NO: 123507 - DNA, 120 bp, Artificial Sequence
  ENSG00000101294_40 (sequence is synthesized)
accttcttcatcctttggtggcaaagtagaaagattccagaattaactcgacctttctaaagacctgggctcagaggcagctggcactgactgagcacccactatgtgccaggcactgtg

SEQ ID NO: 123508 - DNA, 120 bp, Artificial Sequence
  ENSG00000101294_41 (sequence is synthesized)
cccctttttacagataagaaaactgaagctcagagagggcactgccttccccaaggtcacccagctacaagtaacaaagcctgtgcttctaacaccaaagaccacttcccgctgacactg

SEQ ID NO: 123509 - DNA, 120 bp, Artificial Sequence
  ENSG00000101294_42 (sequence is synthesized)
cagtaatgtcatgttagttgtgacagtactcaggtgagtaacaccagtaccacctgccgggtgttgtggcctagctgtgtgctaagtgccatgttgggctcctcacacatgatcgtgttt

SEQ ID NO: 123510 - DNA, 120 bp, Artificial Sequence
  ENSG00000101294_43 (sequence is synthesized)
cgtaaggagccagaggcagcatagtgaaaagttaggagcgtgggctctggcatttgactaccttactttgagtccagactctgccacttaatagctctgtgatcttgggcaagttactta

SEQ ID NO: 123511 - DNA, 120 bp, Artificial Sequence
  ENSG00000101294_44 (sequence is synthesized)
atctctctggcctcaatttcctggtgaatgtggagaaaaataatagtgcccttcccatggggtcatgtggaaagcttttagcacagtatctggtgatttaaagtgttcagtaactattag

SEQ ID NO: 123512 - DNA, 120 bp, Artificial Sequence
  ENSG00000101294_45 (sequence is synthesized)
ctgttactgtcattatctgtgttaacctgccagacaaccttatatgggttgcttttgctttcacacctgtatgatagtcatggaaactgaagcccagagaggttaagaaatttgctagga

SEQ ID NO: 123513 - DNA, 120 bp, Artificial Sequence
  ENSG00000101294_46 (sequence is synthesized)
tcacaccactaataagcaacagagccaggattcaaacccaggtgtggctccagagcccatcctcttcccactgctaccctaactcaaactgccacatgctcgtgtcctttcagtggggag

SEQ ID NO: 123514 - DNA, 120 bp, Artificial Sequence
  ENSG00000101294_47 (sequence is synthesized)
agtggttcattagagggggttgctacttttattttggacaggccagttctccattctgcaggactatcccatgtattacaaacagttggcaaccttgccctgctcaccaaatgggagttg

SEQ ID NO: 123515 - DNA, 120 bp, Artificial Sequence
  ENSG00000101294_48 (sequence is synthesized)
cataccagtattccccagcttgtgactacagagatgtcccagtatgtttctttctgccccgttgaagaggtgcagcctcaggctgagaaacactgatagaccaagaggtggccagggttc

SEQ ID NO: 123516 - DNA, 120 bp, Artificial Sequence
  ENSG00000101294_49 (sequence is synthesized)
ccagaaggaaggaactcaccttgaacttagctttctttgaagggtaggaaacctggaagacgtacaaaggagggagaggtcaggtgctagaaagtttgtgcacattgagggcatgggcag

SEQ ID NO: 123517 - DNA, 77 bp, Artificial Sequence
  ENSG00000101294_50 (sequence is synthesized)
caggtgctagaaagtttgtgcacattgagggcatgggcagaatctgctcccaaaagcattgaaagccaatatgaggc

SEQ ID NO: 123518 - DNA, 120 bp, Artificial Sequence
  ENSG00000101294_51 (sequence is synthesized)
tatgaatgtggcttcattcttctaggcacactggcaggacagtgtggtagtcaggagcacagggtcaagaggcaggcagccttgggacaaacacctggtgctgccagctctaatatgtgt

SEQ ID NO: 123519 - DNA, 120 bp, Artificial Sequence
  ENSG00000101294_52 (sequence is synthesized)
aaattactcaagctctgagcatagttcttctacctataaaatggagagactacaggtacctcctcagaggtgtggggagggtctagtgagccccaggctgtaacatccctagagcacagt

SEQ ID NO: 123520 - DNA, 120 bp, Artificial Sequence
  ENSG00000101294_53 (sequence is synthesized)
gccaagcacacagtgagcctagtggctggcccagggttacacagctgagacttcacctctggtcttcccactgaggtcattgttgtcctcacctgcactgactcttcacccacaaaattc

SEQ ID NO: 123521 - DNA, 120 bp, Artificial Sequence
  ENSG00000101294_54 (sequence is synthesized)
tattctagctagcttgggagaattctagtccagccccgcatcctgaaaaatggaggcccagggaacctgagtgacttggacccaaccaagataatggcaggcccagtcgcccttgctcac

SEQ ID NO: 123522 - DNA, 120 bp, Artificial Sequence
  ENSG00000101294_55 (sequence is synthesized)
aggacaaaccagtcctttcgtggtggacctggggtggggtgggggcagtcacttgcagacattgggtgtcctcctttcccatgctgattaggatcctccccaactgtagcccatcctacc

SEQ ID NO: 123523 - DNA, 120 bp, Artificial Sequence
  ENSG00000101294_56 (sequence is synthesized)
ccagcatctgtgagacgcttgagacccccaagtctccccacagcccagcctccacctcagagagcccagtgggttttgaaagccactgttaggctgtgtgctgaggaactgattatttaa

SEQ ID NO: 123524 - DNA, 120 bp, Artificial Sequence
  ENSG00000101294_57 (sequence is synthesized)
tgttatagcaacaaccctacaatgaagatcttatctctacccagctgcctaggcagggtattttgaacctttatcatcttgacaccaaagactttttttcccttttagaataataactaa

SEQ ID NO: 123525 - DNA, 120 bp, Artificial Sequence
  ENSG00000101294_58 (sequence is synthesized)
tttttttcccttttagaataataactaagggacattgtcccaaatttctcatagatgagtaatctatgtcaagaaataattgagggtgggcacggtggctcacacctgtaatcgcagcac

SEQ ID NO: 123526 - DNA, 62 bp, Artificial Sequence
  ENSG00000101294_59 (sequence is synthesized)
actaaaaatacaaaaaagtagccgggtgtgatgacgcacccagctactcgggaggctgaggc

SEQ ID NO: 123527 - DNA, 120 bp, Artificial Sequence
  ENSG00000101294_60 (sequence is synthesized)
ttttagccacttcataatttttagagatagatattatcaacagaaaataaaaccaacagcagctaaaactgcacatggtaaaatgtatgagtgactagaaactaacagaagaataatttt

SEQ ID NO: 123528 - DNA, 120 bp, Artificial Sequence
  ENSG00000101294_61 (sequence is synthesized)
cttaatgaaatttagagcaacaaaatttgacctgggaaaaccataccttttaaaaataatggatcacctgggcatggtggttcacacctgtcatcccagcactttgggaaccctaggctg

SEQ ID NO: 123529 - DNA, 65 bp, Artificial Sequence
  ENSG00000101294_62 (sequence is synthesized)
aacatgttgagggtcccaactgctcggtaggctgaggtgggatgatcgcgtgaacctgggaggca

SEQ ID NO: 123530 - DNA, 80 bp, Artificial Sequence
  ENSG00000101294_63 (sequence is synthesized)
agccgggtatggtggtgcgtgcctgtggtcccaactgctcggtaggctgaggtgggatgatcgcgtgaacctgggaggca

SEQ ID NO: 123531 - DNA, 120 bp, Artificial Sequence
  ENSG00000101294_64 (sequence is synthesized)
aaaaaaaaaaaaagaataatggatggccataggcagaaggtatgcttaccatatggggttaaagctggtccactaaaaaatttgatggggaccaaaaactgtcagatgaaggaaatcatt

SEQ ID NO: 123532 - DNA, 120 bp, Artificial Sequence
  ENSG00000101294_65 (sequence is synthesized)
attgtaaaattaacatgaaaaagaactgaatccagtgaaaataattttagtaagtaggggatgatttgatcatgctttttagaaagttggtctaccaattaaatggatgtttcaattaaa

SEQ ID NO: 123533 - DNA, 120 bp, Artificial Sequence
  ENSG00000101294_66 (sequence is synthesized)
gcttgtaagtctctctctgggcctccattccctcctgtaggaaattggaggggttggggtggctccagtgagctctccccttctgaaactcatactaatctggggcagccaaggcttagc

SEQ ID NO: 123534 - DNA, 120 bp, Artificial Sequence
  ENSG00000101294_67 (sequence is synthesized)
cccgccagcctgtgaacctctcacagtgcccacagccatgccctcctccgtccaggggctgacaggtgggaggggtagccctgcctcagggagtggacttacctggcctctctgctcaga

SEQ ID NO: 123535 - DNA, 120 bp, Artificial Sequence
  ENSG00000101294_68 (sequence is synthesized)
atactttttcttgcacagacggtggcattcttggagcattctgcacattgggtttctacggtatttcttagaggtgtttccacagcagcacatacacttctagagcatgcttgttcttct

SEQ ID NO: 123536 - DNA, 120 bp, Artificial Sequence
  ENSG00000101294_69 (sequence is synthesized)
gcacagtggcctgatgtgcctttgtctaggtgcatctttcttttttcattctccaaataatatcagcttctttccataaaatctggaagtgcaaaaataggtaaaaacaagacagttctg

SEQ ID NO: 123537 - DNA, 120 bp, Artificial Sequence
  ENSG00000101294_70 (sequence is synthesized)
ctttttcaaaccccttcatgaataagttttttccagccagctttccaaatcgacagtaccagctgctcttcacacagggttctggggaaaacaaggaaggtatttggcaccaatgtgatg

SEQ ID NO: 123538 - DNA, 120 bp, Artificial Sequence
  ENSG00000101294_71 (sequence is synthesized)
ggagccctgggttcaggcccagccactgacttgctatggtcctggaccagtcactgtccttcagtccagcccagaaggggtttggggtgctgggcacggccctgaggcagtgccgtgccc

SEQ ID NO: 123539 - DNA, 120 bp, Artificial Sequence
  ENSG00000101294_72 (sequence is synthesized)
cctcctgtggctccccagcctggtttccttatcctcaattgattcatctggctgtgttcatcctgcccaggtcccggcccctggccacttggtcgtggtgcagcatggcgtgaaatgagc

SEQ ID NO: 123540 - DNA, 120 bp, Artificial Sequence
  ENSG00000101294_73 (sequence is synthesized)
caaaatgggagcgagcatggaggggaagtgtttaacccagcccggggggcacgcgcaggggctttccaggagagaaaacctctaagccgagacccctcactggggtccccttggcacctg

SEQ ID NO: 123541 - DNA, 120 bp, Artificial Sequence
  ENSG00000101294_74 (sequence is synthesized)
ccttaccgtaagtggggaattattgttttttagacaaagaaaggggcctttttgtccaactctaaggttgcttcacaaatacccttttatcctgccacaccagcaggttgataaaggagc

SEQ ID NO: 123542 - DNA, 120 bp, Artificial Sequence
  ENSG00000101294_75 (sequence is synthesized)
tatcaaatttgtactcagtggcgcaaatattatgtgtccaggtttaacttctcctggagctaagctgtaccctgctgcagtagatacgattgtagcagtcacagcggaaggaaaacagca

SEQ ID NO: 123543 - DNA, 120 bp, Artificial Sequence
  ENSG00000101294_76 (sequence is synthesized)
tgctctgtgtgttggggtcatgaagatgtctgcagaagatattgagaaagtcaacaaaggaattggcattgaaaatatccattatttaaatgatgggctgtggcacatgaagacatataa

SEQ ID NO: 123544 - DNA, 120 bp, Artificial Sequence
  ENSG00000101294_77 (sequence is synthesized)
atgagcctcagaaggaatgcatttggggggctaaatgtggatattgattgtgtcgtatgtgtgtttgtgtctgtgtgtgacagcgtgaatacaatgcctctgtggttatgctaaataagt

SEQ ID NO: 123545 - DNA, 120 bp, Artificial Sequence
  ENSG00000101294_78 (sequence is synthesized)
ttaacagatactttatagaaaacaaatcagggtgctcttaccacagatgaaaaaacaaattaggggacaagcagcaagcagtctgctaacactctggaatgtgaaaggagtgtctggact

SEQ ID NO: 123546 - DNA, 120 bp, Artificial Sequence
  ENSG00000101298_0 (sequence is synthesized)
cagctagccgcctcctgcaggggctcgggagagcaattcggcggcccctgcagggcagctgaagccatggaagcctccgcaggtcgctgatcagggccaggcggctgcagcagcgactgc

SEQ ID NO: 123547 - DNA, 120 bp, Artificial Sequence
  ENSG00000101298_1 (sequence is synthesized)
agaggcgctgcgccaagccgggccggagtggtgcgagccggcggggctgcggagggccagtggactcagcccccgggataccgcccatcccaccccttactcggacccacagcctcatgg

SEQ ID NO: 123548 - DNA, 120 bp, Artificial Sequence
  ENSG00000101298_2 (sequence is synthesized)
ccatgtccctgccaggaagtagacggacctctgctggatcacgcaggcgcacctctccacctgtgagcgtgcgggatgcctacggcacctcttcgctcagcagcagcagcaattctggct

SEQ ID NO: 123549 - DNA, 120 bp, Artificial Sequence
  ENSG00000101298_3 (sequence is synthesized)
cctacaagggcagtgacagcagtcccacgccaaggcgctccatgaaatacacgctgtgcagtgacaaccatggcatcaagcccccgaccccggagcagtacctgacccccctgcagcaga

SEQ ID NO: 123550 - DNA, 120 bp, Artificial Sequence
  ENSG00000101298_4 (sequence is synthesized)
aggaggtgtgcatccggcacctgaaagcccggctgaaggacacacaggaccggctccaggaccgggacacagagattgatgacctgaagacgcagctgtcacgcatgcaggaggactgga

SEQ ID NO: 123551 - DNA, 120 bp, Artificial Sequence
  ENSG00000101298_5 (sequence is synthesized)
ttgaggaggagtgccaccgcgtggaggcccagctggccctgaaggaggcccgaaaggagatcaagcagctcaagcaggtcatcgacactgtcaagaacaacctgattgacaaggacaagg

SEQ ID NO: 123552 - DNA, 120 bp, Artificial Sequence
  ENSG00000101298_6 (sequence is synthesized)
ggctgcagaagtacttcgtggacatcaacatccagaacaagaagctggagacgctgctgcacagcatggaggtggcccagaatggcatggccaaggaggatggcactggggagtcagccg

SEQ ID NO: 123553 - DNA, 120 bp, Artificial Sequence
  ENSG00000101298_7 (sequence is synthesized)
gtgggtcccctgcccgctccctcacccgcagctccacctacaccaagctgagtgacccggctgtctgtggtgaccgccagccgggtgatccctccagcggctctgctgaggatggggcag

SEQ ID NO: 123554 - DNA, 120 bp, Artificial Sequence
  ENSG00000101298_8 (sequence is synthesized)
acagtggctttgcagcagccgatgacacactgagccggacggacgcgctggaagccagcagcctgctgtcgtcgggggtggactgtggcaccgaggagacctcgctgcacagctccttcg

SEQ ID NO: 123555 - DNA, 120 bp, Artificial Sequence
  ENSG00000101298_9 (sequence is synthesized)
gcctgggcccccgcttccctgccagcaacacctatgagaagctgctgtgtggcatggaggctggtgtgcaggccagctgcatgcaggagcgtgccatccagacagacttcgtgcagtacc

SEQ ID NO: 123556 - DNA, 120 bp, Artificial Sequence
  ENSG00000101298_10 (sequence is synthesized)
agcctgaccttgacaccatcctggagaaagtgacccaggcccaggtctgtgggacagaccctgagtcaggggacaggtgcccagagctggatgcccacccttcagggcccagagacccca

SEQ ID NO: 123557 - DNA, 120 bp, Artificial Sequence
  ENSG00000101298_11 (sequence is synthesized)
actcagcagtggtggtgacagtgggtgatgagctagaggccccagagcccatcacccgtggacccaccccacagcggcctggtgccaaccccaaccctggccagtcggtgagcgtggtgt

SEQ ID NO: 123558 - DNA, 120 bp, Artificial Sequence
  ENSG00000101298_12 (sequence is synthesized)
gccccatggaagaggaggaggaggctgccgtggctgagaaggagcccaagagctactggagccgccactacatcgtggatctgctggctgtggtggtgccggccgtgcccacggtggcct

SEQ ID NO: 123559 - DNA, 120 bp, Artificial Sequence
  ENSG00000101298_13 (sequence is synthesized)
ggctttgccgctcccagcggcgccagggccagcccatctacaacatcagctccctgctgcggggctgctgcactgtggccttgcactccatccgcaggatcagctgccgctcgctgagcc

SEQ ID NO: 123560 - DNA, 120 bp, Artificial Sequence
  ENSG00000101298_14 (sequence is synthesized)
agccgagtcccagcccagcgggcggcggctcccagctctgagggggcccattctggcagcggcgcctgcggcctgaccactgattgtagggatgccgttcccccctcccttctcccatgg

SEQ ID NO: 123561 - DNA, 120 bp, Artificial Sequence
  ENSG00000101298_15 (sequence is synthesized)
gcatcatcttatttatttagttttgggtgtggaactgtttctttttttcaagatgttaaaacagtcccgtggaaggagcaggggttggagaaaggcatcccaaagcttcgatggagagca

SEQ ID NO: 123562 - DNA, 120 bp, Artificial Sequence
  ENSG00000101298_16 (sequence is synthesized)
gggaagggggacccaaggcaggaggtacaccagctggacaaattgcagggaggggagggagcgagggccaacccggcccctctgtccccttggctcttcagacagggccagccctgctca

SEQ ID NO: 123563 - DNA, 120 bp, Artificial Sequence
  ENSG00000101298_17 (sequence is synthesized)
ggaagtctctggctgtcttcatgtggggaagccgggcttgagttgcccataggcccctgccctgcaccatcctgtccagtgccctgcgcactccatgccgtctcttccaagccaccttgc

SEQ ID NO: 123564 - DNA, 120 bp, Artificial Sequence
  ENSG00000101298_18 (sequence is synthesized)
ccgcagcccaggctcctgggccagtgctctctcctcaaatggaggcagccatggcctgaagtgcagatcactgacccagggctcagagcagaggccagaaccactgggccggccggcatt

SEQ ID NO: 123565 - DNA, 120 bp, Artificial Sequence
  ENSG00000101298_19 (sequence is synthesized)
ccagcctccccagactgctgcccaccttgggactcaggagctcagtcaaggccacaggctggaggagagacggggctgggcgcaaggtggcggagggcagtgtgggttctgtgtctgtct

SEQ ID NO: 123566 - DNA, 120 bp, Artificial Sequence
  ENSG00000101298_20 (sequence is synthesized)
gctaagcccggcaagctcagtgctggggtaggagggcctgcctgagtcccagctcccagctggagaatccaccagcacaagaagaggaggcaggggcagaaacccaagggggctccccca

SEQ ID NO: 123567 - DNA, 120 bp, Artificial Sequence
  ENSG00000101298_21 (sequence is synthesized)
gccttccaaggtgaggccatctcatctgcaggctgggaggcagggctggactcaggaacccacagcttactgaaaaagccagaggccatgactgcccccagaaacttgccccgagtttct

SEQ ID NO: 123568 - DNA, 120 bp, Artificial Sequence
  ENSG00000101298_22 (sequence is synthesized)
ctggggccctcgggcccaacttctgctttgcactatgttcactttggggttggttctcagccatccaagggtctccagtgaggtggctgcttgctgtctgagatgagggttcctaaacct

SEQ ID NO: 123569 - DNA, 120 bp, Artificial Sequence
  ENSG00000101298_23 (sequence is synthesized)
taaacctctctgcctctggaggagggtggggtattctggcaggatgaatcgcaggatggcgcgtactgaagccacgatgttcatccaggccaaagcagggtgtcctgggataggtttcct

SEQ ID NO: 123570 - DNA, 120 bp, Artificial Sequence
  ENSG00000101298_24 (sequence is synthesized)
aggcaggggcgtggcagagcaggtaggcgccctgcagcctccctgctcccagcccaaggccagtcggcctgggaagttcactgccccaactcttttcccgggaccatactgagtccccca

SEQ ID NO: 123571 - DNA, 120 bp, Artificial Sequence
  ENSG00000101298_25 (sequence is synthesized)
gccacgctgctgacattaccattattattttaccaagtaaactcactccttttcccccacaggggttacacccatctggttgtcccacccactcttcagaggctaggccccacctctggg

SEQ ID NO: 123572 - DNA, 120 bp, Artificial Sequence
  ENSG00000101298_26 (sequence is synthesized)
ggttggagggaccctgtgtcttactcgcccctctggcctaagggccactctggttatctgccaaggttgcttgccctcaccccaatgctccaacagccattgcctaactcatgggctctg

SEQ ID NO: 123573 - DNA, 120 bp, Artificial Sequence
  ENSG00000101298_27 (sequence is synthesized)
cccttctgctcggtgccctccacgtgaggcggggcacctgcatgcactgggagggggcggctggcccagccctcggggcaggagccccctctgccacacgctttgtgcctccaaagctcc

SEQ ID NO: 123574 - DNA, 120 bp, Artificial Sequence
  ENSG00000101298_28 (sequence is synthesized)
ccccgccttggtcagggcctcagaccagccaacctttgtggaataagccccagcccagccaaaccaaacccagatgcctgaggcctggctggggctgcccccgcaggacactgtggccat

SEQ ID NO: 123575 - DNA, 120 bp, Artificial Sequence
  ENSG00000101298_29 (sequence is synthesized)
gccacggagggggcagtggacaaaaccaatccaaagccaagccgggactggctgcggacccagcctcctgtgccgcgcactcacggagctgcgtagtctcctcagacatagtcaaagctt

SEQ ID NO: 123576 - DNA, 120 bp, Artificial Sequence
  ENSG00000101298_30 (sequence is synthesized)
tgccgagaaaagaaatgtatgaactatatttgacaacataaaatctctctatttttcaccactggaatttagtcaagcttcaggcccctctgctcctgtctgtgtcttgcgtctgtggcc

SEQ ID NO: 123577 - DNA, 120 bp, Artificial Sequence
  ENSG00000101298_31 (sequence is synthesized)
ttcctattgtgtcttgtgttttggtggatgtgacagggctggggccacagtctactctgtctctgctgctagagaagccacctgtggaggactgggctgtggttgggcctgaggcctgtg

SEQ ID NO: 123578 - DNA, 120 bp, Artificial Sequence
  ENSG00000101298_32 (sequence is synthesized)
gaggaggtgagtgtagccagcagcggccgtctactcctgttctggcctgagaccaccggtgtgggtcacgagggccctggcccacagtgttgagggtcctctctttcgggggctctcctg

SEQ ID NO: 123579 - DNA, 120 bp, Artificial Sequence
  ENSG00000101298_33 (sequence is synthesized)
gggccttcgatgggcttttcttcttgtcagtggagggagcagctccccactcagccctgggacaggccctgggactgtggtggccggtggccctggcccagctctggagtgcatgtgtgt

SEQ ID NO: 123580 - DNA, 120 bp, Artificial Sequence
  ENSG00000101298_34 (sequence is synthesized)
gtgctcagatcccgcatctatgcaaaggtgcaggctgcctgtgaggctccaggcggtggaggtgcggcagctgctgctcaggtgccatgccctgaagaggcagggtacacatggggctgg

SEQ ID NO: 123581 - DNA, 120 bp, Artificial Sequence
  ENSG00000101298_35 (sequence is synthesized)
gagggcaaagatggggcggggcctccccctgagagagctcaccctccacagtgacccttttccttcctgcctaatacctcctcccgttgggctgtgacttttcctcctgccctcagcctc

SEQ ID NO: 123582 - DNA, 120 bp, Artificial Sequence
  ENSG00000101298_36 (sequence is synthesized)
tgaaacagaaatctttggggcctcccctttccccagcgtctggcaagagctgatgaggtcctgaggaacagtgtccccaggaaccaccttctggagcctagcggccagacgtggcttctc

SEQ ID NO: 123583 - DNA, 120 bp, Artificial Sequence
  ENSG00000101298_37 (sequence is synthesized)
ctgagttctagggctcgggccagagtggcactactgcccggccagtccaggctcaggcaggaatcggacgctggggcccgggctctgcacagagagctgggcttgagtggagtttattgt

SEQ ID NO: 123584 - DNA, 120 bp, Artificial Sequence
  ENSG00000101298_38 (sequence is synthesized)
agatttctcccaaggggatcacttagcttctcactgacacacccttcccaattgccacaagcgcaggggtatcttacagcactttggggaggggtgggacaaactgcaaggttctggggc

SEQ ID NO: 123585 - DNA, 120 bp, Artificial Sequence
  ENSG00000101298_39 (sequence is synthesized)
caaggcctacccaggggcctctgcccagagaactcacaaccccctctctgacctgggggacaatgcaaacaggtcacagtgcattcccatattaggccatccccttcacgaagaattcag

SEQ ID NO: 123586 - DNA, 120 bp, Artificial Sequence
  ENSG00000101298_40 (sequence is synthesized)
gggatgtgggaagtggggaggcggggagggatcttgactcttgtctcctttgtccttttgttcagacagagttgtacctgcagcagacaactctgaattaaagcatgaaaacacagcaag

SEQ ID NO: 123587 - DNA, 120 bp, Artificial Sequence
  ENSG00000101298_41 (sequence is synthesized)
cgggaagccccgaaccacgggccaactgggaagttgatggtcggcgagaccagcccatcctaatttggggttcctggtcctgctccaggagtcctacagcctgcagcccctaccagagag

SEQ ID NO: 123588 - DNA, 120 bp, Artificial Sequence
  ENSG00000101298_42 (sequence is synthesized)
ggaggactgaacagcaagggggtgtgtgggtctgagtatcagggtcctggggaagaagcaggcctggctcgtagagtagaagactcggtgccggcagtcaggaggccctgctcctgaagc

SEQ ID NO: 123589 - DNA, 120 bp, Artificial Sequence
  ENSG00000101298_43 (sequence is synthesized)
ctctgtgaccttgggcacggccttcactctgtctggggcacattcactcatctggagaacacagggttggactgattacttttagccactcctgacagttgtggttttaagttgggtggt

SEQ ID NO: 123590 - DNA, 120 bp, Artificial Sequence
  ENSG00000101298_44 (sequence is synthesized)
gggaacctgtgcaccagccctattcaattcactggtggaggcagccgtggtctgccaggccctcgctcctggggtgtcctgccgaagggtgagaagagaagccatgccgggcagcggccc

SEQ ID NO: 123591 - DNA, 120 bp, Artificial Sequence
  ENSG00000101306_0 (sequence is synthesized)
ctcctgagcagccgctgggagacagacggcaaccaggttgcccctctttgctccagctagaaagacttgagttagacaagcagcagcacacgcctccctacctcatggcgacagaaaatg

SEQ ID NO: 123592 - DNA, 120 bp, Artificial Sequence
  ENSG00000101306_1 (sequence is synthesized)
gagcagttgagctgggaattcagaacccatcaacagacaaggcacctaaaggtcccacaggtgaaagacccctggctgcagggaaagaccctggccccccagacccaaagaaagctccgg

SEQ ID NO: 123593 - DNA, 120 bp, Artificial Sequence
  ENSG00000101306_2 (sequence is synthesized)
atccacccaccctgaagaaagatgccaaagcccctgcctcagagaaaggggatggtaccctggcccaaccctcaactagcagccaaggccccaaaggagagggtgacaggggcggggggc

SEQ ID NO: 123594 - DNA, 120 bp, Artificial Sequence
  ENSG00000101306_3 (sequence is synthesized)
ccgcggagggcagtgctgggcccccggcagccctgccccagcagactgcgacacctgagaccagcgtcaagaagcccaaggctgagcagggagcctcaggcagccaggatcctggaaagc

SEQ ID NO: 123595 - DNA, 120 bp, Artificial Sequence
  ENSG00000101306_4 (sequence is synthesized)
ccagggtgggcaagaaggcagcagagggccaagcagcagccaggaggggctcacctgcctttctgcatagccccagctgtcctgccatcatctccagttctgagaagctgctggccaaga

SEQ ID NO: 123596 - DNA, 120 bp, Artificial Sequence
  ENSG00000101306_5 (sequence is synthesized)
agcccccaagcgaggcatcagagctcacctttgaaggggtgcccatgacccacagccccacggatcccaggccagccaaggcagaagaaggaaagaacatcctggcagagagccagaagg

SEQ ID NO: 123597 - DNA, 120 bp, Artificial Sequence
  ENSG00000101306_6 (sequence is synthesized)
aagtgggagagaaaaccccaggccaggctggccaggctaagatgcaaggggacacctcgagggggattgagttccaggctgttccctcagagaaatccgaggtggggcaggccctctgtc

SEQ ID NO: 123598 - DNA, 120 bp, Artificial Sequence
  ENSG00000101306_7 (sequence is synthesized)
tcacagccagggaggaggactgcttccagattttggatgattgcccgccacctccggcccccttccctcaccgcatggtggagctgaggaccgggaatgtcagcagtgaattcagtatga

SEQ ID NO: 123599 - DNA, 120 bp, Artificial Sequence
  ENSG00000101306_8 (sequence is synthesized)
actccaaggaggcgctcggaggtggcaagtttggggcagtctgtacctgcatggagaaagccacaggcctcaagctggcagccaaggtcatcaagaaacagactcccaaagacaaggaaa

SEQ ID NO: 123600 - DNA, 120 bp, Artificial Sequence
  ENSG00000101306_9 (sequence is synthesized)
tggtgttgctggagattgaggtcatgaaccagctgaaccaccgcaatctgatccagctgtatgcagccatcgagactccgcatgagatcgtcctgttcatggagtacatcgagggcggag

SEQ ID NO: 123601 - DNA, 120 bp, Artificial Sequence
  ENSG00000101306_10 (sequence is synthesized)
agctcttcgagaggattgtggatgaggactaccatctgaccgaggtggacaccatggtgtttgtcaggcagatctgtgacgggatcctcttcatgcacaagatgagggttttgcacctgg

SEQ ID NO: 123602 - DNA, 120 bp, Artificial Sequence
  ENSG00000101306_11 (sequence is synthesized)
tcaacaccaccgggcatttggtgaagatcattgactttggcctggcacggaggtataaccccaacgagaagctgaaggtgaactttgggaccccagagttcctgtcacctgaggtggtga

SEQ ID NO: 123603 - DNA, 120 bp, Artificial Sequence
  ENSG00000101306_12 (sequence is synthesized)
attatgaccaaatctccgataagacagacatgtggagtatgggggtgatcacctacatgctgctgagcggcctctcccccttcctgggagatgatgacacagagaccctaaacaacgttc

SEQ ID NO: 123604 - DNA, 120 bp, Artificial Sequence
  ENSG00000101306_13 (sequence is synthesized)
tatctggcaactggtactttgatgaagagacctttgaggccgtatcagacgaggccaaagactttgtctccaacctcatcgtcaaggaccagagggcccggatgaacgctgcccagtgtc

SEQ ID NO: 123605 - DNA, 120 bp, Artificial Sequence
  ENSG00000101306_14 (sequence is synthesized)
tcgcccatccctggctcaacaacctggcggagaaagccaaacgctgtaaccgacgccttaagtcccagatcttgcttaagaaatacctcatgaagaggcgctggaagaaaaacttcattg

SEQ ID NO: 123606 - DNA, 120 bp, Artificial Sequence
  ENSG00000101306_15 (sequence is synthesized)
ctgtcagcgctgccaaccgcttcaagaagatcagcagctcgggggcactgatggctctgggggtctgagccctgggcgcagctgaagcctggacgcagccacacagtggccggggctgaa

SEQ ID NO: 123607 - DNA, 120 bp, Artificial Sequence
  ENSG00000101306_16 (sequence is synthesized)
gccacacagcccagaaggccagaaaaggcagccagatccccagggcagcctcgttaggacaaggctgtgccaggctgggaggctcggggctccccacgcccccatgcagtgaccgcttcc

SEQ ID NO: 123608 - DNA, 120 bp, Artificial Sequence
  ENSG00000101306_17 (sequence is synthesized)
ccgatgtgagccgcctcggagtgtggcctggatccatcctgctagcacctccccagacagggctccagcctgtcggccacaccccagactccaggcccccgttgaagccgctcccggttc

SEQ ID NO: 123609 - DNA, 120 bp, Artificial Sequence
  ENSG00000101306_18 (sequence is synthesized)
cctccccagctcctcgtctttgaactgccgccgccgtggtgacccctgctttgccccactgggagagtccttagcctgggcctcctcctagctggagtgccatggctggggggtctcagc

SEQ ID NO: 123610 - DNA, 120 bp, Artificial Sequence
  ENSG00000101306_19 (sequence is synthesized)
atgtagggcttctgtggttgtggatgggaggctcctggtggggcagaaaggctgcaacgctgattcctaaggcccagctgccagggaagacagagcaggctttgtgagagaggacctcca

SEQ ID NO: 123611 - DNA, 120 bp, Artificial Sequence
  ENSG00000101306_20 (sequence is synthesized)
tgcccccgccacctccccactccagcagataaggccgagcccacaccatctggcccaggctggcccccacccaccttccttgcgaccaccaacacacaggaactctgtgtgagagagagg

SEQ ID NO: 123612 - DNA, 120 bp, Artificial Sequence
  ENSG00000101306_21 (sequence is synthesized)
gcgcccagcccaggcctggtggagggggaggggagaagccaagggacacaggagaccacccccgagcttgcctcagggccaagccggcccaacccaaccactcggggcccccatcttggg

SEQ ID NO: 123613 - DNA, 120 bp, Artificial Sequence
  ENSG00000101306_22 (sequence is synthesized)
ggtcacccatggcctcagatgatggggtcagcaggcccaggagaattaggaaggccatggggcagcctccagtctgctctcagcttgtgccttgtaaataaatgtacaggttggatgtgg

SEQ ID NO: 123614 - DNA, 120 bp, Artificial Sequence
  ENSG00000101306_23 (sequence is synthesized)
actgcccacacccctgcctccgcctctgcccacccggcccaatcccttacaactgcccaggactgctcctgagcagccgctgggagacagacggcaaccaggttgcccctctttgctcca

SEQ ID NO: 123615 - DNA, 120 bp, Artificial Sequence
  ENSG00000101306_24 (sequence is synthesized)
ggtacctctctcccctcagttagcaggcctcggcttcctgtctcactgcagccagacgagaggggaaattggacagcctgacacactccactcttgtttctgcagctagaaagacttgag

SEQ ID NO: 123616 - DNA, 120 bp, Artificial Sequence
  ENSG00000101307_0 (sequence is synthesized)
agagcagagtctgcgatcttcccagcacagacgtttggacagagcaggctcctaaggtctccagaatgcccgtgccagcctcctggccccaccttcctagtcctttcctgctgatgacgc

SEQ ID NO: 123617 - DNA, 120 bp, Artificial Sequence
  ENSG00000101307_1 (sequence is synthesized)
tactgctggggagactcacaggggtagctggcgaggaagagctgcaggtgattcagcctgacaagtccatatcagttgcagctggagagtcggccactctgcactgcactgtgacttccc

SEQ ID NO: 123618 - DNA, 120 bp, Artificial Sequence
  ENSG00000101307_2 (sequence is synthesized)
tgatccctgtggggcccatccagtggttcagaggagctggaccaggccgggaattaatctacaatcagaaagaaggccacttcccacgggtaacaactgtttcagacctcacaaagagaa

SEQ ID NO: 123619 - DNA, 120 bp, Artificial Sequence
  ENSG00000101307_3 (sequence is synthesized)
acaacatggacttttccatccgcatcagtaacatcaccccagcagatgccggcacctactactgtgtgaagttccggaaagggagccccgaccacgtggagtttaagtctggagcaggca

SEQ ID NO: 123620 - DNA, 120 bp, Artificial Sequence
  ENSG00000101307_4 (sequence is synthesized)
ccgagctgtctgtgcgtgccaaaccctctgcccccgtggtatcgggccctgcggcgagggccacacctcagcacacagtgagcttcacctgcgagtcccacggcttctcacccagagaca

SEQ ID NO: 123621 - DNA, 120 bp, Artificial Sequence
  ENSG00000101307_5 (sequence is synthesized)
tcaccctgaaatggttcaaaaatgggaatgagctctcagacttccagaccaacgtggaccccgcaggagacagtgtgtcctacagcatccacagcacagccaaggtggtgctgacccgcg

SEQ ID NO: 123622 - DNA, 120 bp, Artificial Sequence
  ENSG00000101307_6 (sequence is synthesized)
aggacgttcactctcaagtcatctgcgaggtggcccacgtcaccttgcagggggaccctcttcgtgggactgccaacttgtctgagaccatccgagttccacccaccttggaggttactc

SEQ ID NO: 123623 - DNA, 120 bp, Artificial Sequence
  ENSG00000101307_7 (sequence is synthesized)
aacagcccgtgagggcagagaaccaggtgaatgtcacctgccaggtgaggaagttctacccccagagactacagctgacctggttggagaatggaaacgtgtccaggacagaaacggcct

SEQ ID NO: 123624 - DNA, 120 bp, Artificial Sequence
  ENSG00000101307_8 (sequence is synthesized)
caacccttacagaaaacaaggatggtacctacaactggatgagctggctcctggtgaatgtatctgcccacagggatgatgtgaagctcacctgccaggtggagcatgacgggcagccag

SEQ ID NO: 123625 - DNA, 120 bp, Artificial Sequence
  ENSG00000101307_9 (sequence is synthesized)
cagggctcaaatactgctcctggcccagcactggcttctgctgctccacttctcatagctttcctcctgggccccaaggtgctgctggtggttggtgtctctgtcatctatgtctactgg

SEQ ID NO: 123626 - DNA, 120 bp, Artificial Sequence
  ENSG00000101307_10 (sequence is synthesized)
aagcagaaggcctgactgcatcccagaaggagaccagcaccaggaatacaacagcctcccaggaaatgtttcttaaatgatgagcagatgattaaatatggacatgttacccacagctcc

SEQ ID NO: 123627 - DNA, 120 bp, Artificial Sequence
  ENSG00000101307_11 (sequence is synthesized)
ttccctcctcccctgccacatggaacccccagtctctcctgcctacttccttccttgaatggctctgactgagagaaggggctggtgagaagcttccccagactgagctccaaacacctc

SEQ ID NO: 123628 - DNA, 120 bp, Artificial Sequence
  ENSG00000101307_12 (sequence is synthesized)
ccctcccaggacatcttcctgcccacaggctcctgttgctcctttgcagagtccttgattctccagagcagtcttcattcatggtcctgagcagaggccatgggatggggctctggggag

SEQ ID NO: 123629 - DNA, 120 bp, Artificial Sequence
  ENSG00000101307_13 (sequence is synthesized)
tgactcatgacacctccctaggatgtgggaaacacgccaaatctaaacacatcaggacacctctcctccatcgtcttggactctccgtaagccacaaactgcagtccagattctcaagag

SEQ ID NO: 123630 - DNA, 120 bp, Artificial Sequence
  ENSG00000101307_14 (sequence is synthesized)
ttattctgccttctggattcctgcctacccaattacccagccttgttgagattctctattgcctcctgaatacaaattaacactcatcctggttttaaggagaaaaatgattatccttcc

SEQ ID NO: 123631 - DNA, 120 bp, Artificial Sequence
  ENSG00000101307_15 (sequence is synthesized)
tctttgtttatacgtatgatataatttggatattttttccctacaaatctcaatgtgaaatttcatcccctatgttggaggtggggtcaggtgggaggtgtttgggtcatggggatggat

SEQ ID NO: 123632 - DNA, 120 bp, Artificial Sequence
  ENSG00000101307_16 (sequence is synthesized)
tcatcatgaatgacttggtgttatcttggtctattagcacccacaagatctgattgtttaaaagtgcctagcagctccctcttctctttttctcttcctctctccccatgttatgccaac

SEQ ID NO: 123633 - DNA, 120 bp, Artificial Sequence
  ENSG00000101307_17 (sequence is synthesized)
tccacttcactgtccactgtgagcagaagcactctgaggccctcagcagcagatgcaagtaccatgcttcttgtacagtctgcagaaccaaaagccaaataaacctctctttataaatta

SEQ ID NO: 123634 - DNA, 120 bp, Artificial Sequence
  ENSG00000101307_18 (sequence is synthesized)
atgcctgtcccagcctcctggccccaccctccttgtcctttcctgctgctgactctattgctgggactcacaggagtggcaggtgaggacgagctacaggtgattcagcctgaaaagtcc

SEQ ID NO: 123635 - DNA, 120 bp, Artificial Sequence
  ENSG00000101307_19 (sequence is synthesized)
gtatcagttgcagctggagagtcggccactctgcgctgtgctatgacgtccctgatccctgtggggcccatcatgtggtttagaggagctggagcaggccgggaattaatctacaatcag

SEQ ID NO: 123636 - DNA, 120 bp, Artificial Sequence
  ENSG00000101307_20 (sequence is synthesized)
aaagaaggccacttcccacgggtaacaactgtttcagaactcacaaagagaaacaacctggacttttccatcagcatcagtaacatcaccccagcagacgccggcacctactactgtgtg

SEQ ID NO: 123637 - DNA, 120 bp, Artificial Sequence
  ENSG00000101307_21 (sequence is synthesized)
aagttccggaaagggagccctgacgacgtggagtttaagtctggagcaggcactgagctgtctgtgcgcgaagcagcgctggctcctactgctccactcctcgtagctctcctcctgggc

SEQ ID NO: 123638 - DNA, 120 bp, Artificial Sequence
  ENSG00000101307_22 (sequence is synthesized)
cccaagctgctactggtggttggtgtctctgccatctacatctgctggaaacagaaggcctgactgaccctcagtctctgctgcctcctcctttcttgagaagctcagcctgagagaagg

SEQ ID NO: 123639 - DNA, 120 bp, Artificial Sequence
  ENSG00000101307_23 (sequence is synthesized)
agctggcgagaaccttccccacactcagctccaaacgcctcctctcccaggtcatctgcctgcccacacgctcctgttccaccttcacaagaccatgatgccccaaagcagtgtctctat

SEQ ID NO: 123640 - DNA, 120 bp, Artificial Sequence
  ENSG00000101307_24 (sequence is synthesized)
cttctcccatccgtcgccttgggactggccataaaccacagactctctccaggctctcaagagttatcctgtcttctggattcctgcctaccccaactcccccagccttgttgaggttct

SEQ ID NO: 123641 - DNA, 120 bp, Artificial Sequence
  ENSG00000101307_25 (sequence is synthesized)
ctactgcctcctgaatacacatgaacccctataccaattttaagaaaaaaatgattctctttcctctttgtccaagcatcctatccctcaaacccaaaaagaaagaagctctcccttctc

SEQ ID NO: 123642 - DNA, 120 bp, Artificial Sequence
  ENSG00000101307_26 (sequence is synthesized)
tctctgtgatggagacagtatttcttctagtatcctgcagccttcccagtcctgctgcttgtggtagaaatgctgccacagcccaacattgaggagccctcgatgactgccctttacaac

SEQ ID NO: 123643 - DNA, 120 bp, Artificial Sequence
  ENSG00000101307_27 (sequence is synthesized)
tcatattcagttctgcctccaaaatgcatgtgtccacttacatgagatggtaaatgtttaacaatggactttctgaaagggaaaaaccaaaagctgttttgcagtgcttgccaatttctc

SEQ ID NO: 123644 - DNA, 120 bp, Artificial Sequence
  ENSG00000101307_28 (sequence is synthesized)
tagtgtaataactcccaacctgaccaatttcacactgccaacagttaaacaaccagattgcaagattcctgaaatttaacaattggttttcagggcccagtccaagcctgctgctggaaa

SEQ ID NO: 123645 - DNA, 120 bp, Artificial Sequence
  ENSG00000101307_29 (sequence is synthesized)
cctcagagttaaatccctattctccacacctctcacctccaccacccctccctgtcccagccagcatcatctctttggggaccactcctctggctttcatttttcagccacagtgattct

SEQ ID NO: 123646 - DNA, 120 bp, Artificial Sequence
  ENSG00000101307_30 (sequence is synthesized)
ttggaaaagtcaaatcatatcacttctctgcttcttccccaacacagctgcatggctcccgctctccctccttcaagtctctgctcaatgtcacttcattaaaggcaccttctataaact

SEQ ID NO: 123647 - DNA, 120 bp, Artificial Sequence
  ENSG00000101307_31 (sequence is synthesized)
tctactgcaacatcctgtggcttgacctctagcagccaaaccctctgcccccgtggtatcgggccctgcggcgagggccacacctcagcacacagtgagcttcacctgcgagtcccacgg

SEQ ID NO: 123648 - DNA, 120 bp, Artificial Sequence
  ENSG00000101307_32 (sequence is synthesized)
gggaatgagctctcagacttccagaccaacgtggaccccgcaggagacagtgtgtcctacagcatccacagcacagccagggtggtgctgacccgtggggacgttcactctcaagtcatc

SEQ ID NO: 123649 - DNA, 120 bp, Artificial Sequence
  ENSG00000101307_33 (sequence is synthesized)
tgcgagatagcccacatcaccttgcagggggaccctcttcgtgggactgccaacttgtctgaggccatccgagttccacccaccttggaggttactcaacagcccatgagggcagagaac

SEQ ID NO: 123650 - DNA, 120 bp, Artificial Sequence
  ENSG00000101307_34 (sequence is synthesized)
caggcaaacgtcacctgccaggtgagcaatttctacccccggggactacagctgacctggttggagaatggaaatgtgtcccggacagaaacagcttcgaccctcatagagaacaaggat

SEQ ID NO: 123651 - DNA, 120 bp, Artificial Sequence
  ENSG00000101307_35 (sequence is synthesized)
aagcagtcagcaaaagctatgccctggagatctcagcgcaccagaaggagcacggctcagatatcacccatggtgcggttacttcccatttttaaattttgtctttttctttaatgttaa

SEQ ID NO: 123652 - DNA, 120 bp, Artificial Sequence
  ENSG00000101307_36 (sequence is synthesized)
aagcaatattcatgcttgtcataaaataagctagaagtctataaatataaagtagaattttaacgtctacattaaaatcctacactccatgggtcaccactacttagaaggttcaaggta

SEQ ID NO: 123653 - DNA, 120 bp, Artificial Sequence
  ENSG00000101307_37 (sequence is synthesized)
acaattggccatttgtagacacccttaagccccatctaccaggagaaactgtgcgtcaagtctgatgcacaacttgatagatattttgacataaatatacattaaaggaaaaaagagaga

SEQ ID NO: 123654 - DNA, 120 bp, Artificial Sequence
  ENSG00000101307_38 (sequence is synthesized)
ctgagctgtctgtgcgcgccaaaccctctgcccccgtggtatcgggccctgcggtgagggccacacctgagcacacagtgagcttcacctgcgagtcccatggcttctctcccagagaca

SEQ ID NO: 123655 - DNA, 120 bp, Artificial Sequence
  ENSG00000101307_39 (sequence is synthesized)
tttctctatcccggcattctaatttctcttatcctaattaatttttctttagcccttattttgatgagtattatgccgaatacaggcagccctcacttttcatggcagtgcaagattgca

SEQ ID NO: 123656 - DNA, 120 bp, Artificial Sequence
  ENSG00000101307_40 (sequence is synthesized)
aaaatgactgtgcaacctgaaacccaggaaagcagtctccatagtcaatcagaaaaacaatgatcattctgtgacctttaccattttttgtcaaaatattagaaactctcacactctcag

SEQ ID NO: 123657 - DNA, 120 bp, Artificial Sequence
  ENSG00000101307_41 (sequence is synthesized)
ttacaaatgtagaggacaatgaaaatataatgaaataaatatttatttgtgcactacaattcaaagcattagaaacattgagagttcaagtgctgtttctttgtaaaaatgtatccagag

SEQ ID NO: 123658 - DNA, 120 bp, Artificial Sequence
  ENSG00000101307_42 (sequence is synthesized)
tagttggaagagtgcttgcctttttttgtatatttctaatatggagtgatatagtttggctctgtgtctccatccaaatctcatcttaaattgtaatctgcatgtgttgtgggatgggcc

SEQ ID NO: 123659 - DNA, 120 bp, Artificial Sequence
  ENSG00000101307_43 (sequence is synthesized)
tggtaggaggtgactgaatcatgggggcggacttcccccttgctgttcttgtgatagtgagttctcataagatctcagtgagttctcatgagatctggttttttgaaagtgtgtggcaag

SEQ ID NO: 123660 - DNA, 120 bp, Artificial Sequence
  ENSG00000101307_44 (sequence is synthesized)
gtgtgtggcaagtcccccttcgctctctctctctctctccctcctgccaccatgtgaagaaggtgcctgcttccttttctccttccaccatggttgtaagtttcctgaggcctcccagtc

SEQ ID NO: 123661 - DNA, 89 bp, Artificial Sequence
  ENSG00000101307_45 (sequence is synthesized)
aagcctattcataaaatatccagtttctggtagttctttatagcagtgtgagaatgggctaatacacggagcaagcattgtttcttttc

SEQ ID NO: 123662 - DNA, 120 bp, Artificial Sequence
  ENSG00000101307_46 (sequence is synthesized)
agcccacccgaaggagcagggctcaaatactgctcctgtgagtctggagttttacagaaggggaaaccaggacttgggaagcaatgggggatattgttgaagacaattagatcaaggcat

SEQ ID NO: 123663 - DNA, 120 bp, Artificial Sequence
  ENSG00000101310_0 (sequence is synthesized)
atcgttctcgctttccggtagctaaggcgatcagcgggacttcccactgagacgagcggatgtcatattgtatcagggcgaacctctgaggagcgctggctgcgcttaggcaacggtgcg

SEQ ID NO: 123664 - DNA, 120 bp, Artificial Sequence
  ENSG00000101310_1 (sequence is synthesized)
gcaggcgccggggttttctgaaacagaaacgtttaggggtggggaaacgtgttccgaggaactctcgttttgaagtgcgacatacacctgtcttgccctgttccaagatggtggcagagc

SEQ ID NO: 123665 - DNA, 120 bp, Artificial Sequence
  ENSG00000101310_2 (sequence is synthesized)
ttctctgagtctctcgcttcctccagtccgtcggagaagcgctctttgattggccagtggacagcgccgtggcatgacgcgctggggcgctggccaatcggttgagagctgagctggact

SEQ ID NO: 123666 - DNA, 120 bp, Artificial Sequence
  ENSG00000101310_3 (sequence is synthesized)
tggcggtgggagccggagcctgcttgttgcagctgtgggtgaggacggctctagctaggtgagcggctccggccaggtgagcggggcgcataggtgacggagggccgagggcacggttcc

SEQ ID NO: 123667 - DNA, 120 bp, Artificial Sequence
  ENSG00000101310_4 (sequence is synthesized)
cttttagactatggcgacatacctggagttcatccagcagaatgaagaacgggatggtgtgcgttttagttggaacgtgtggccttccagccggctggaggctacaagaatggttgtacc

SEQ ID NO: 123668 - DNA, 120 bp, Artificial Sequence
  ENSG00000101310_5 (sequence is synthesized)
cctggcttgtctccttactcctttgaaagaacgtccagacctacctcctgtacaatatgaacctgtgctttgcagcaggccaacttgtaaagctgttctcaacccactttgtcaggttga

SEQ ID NO: 123669 - DNA, 120 bp, Artificial Sequence
  ENSG00000101310_6 (sequence is synthesized)
ttatcgagcaaaactttgggcctgtaatttctgttttcaaagaaatcagtttcctccagcttatggaggcatatctgaggtgaatcaacctgccgaattgatgccccagttttctacaat

SEQ ID NO: 123670 - DNA, 120 bp, Artificial Sequence
  ENSG00000101310_7 (sequence is synthesized)
tgagtacgtgatacagcgaggtgctcagtcccctctgatctttctctatgtggttgacacatgcctggaggaagatgaccttcaagcactcaaagagtccctgcagatgtccctgagtct

SEQ ID NO: 123671 - DNA, 120 bp, Artificial Sequence
  ENSG00000101310_8 (sequence is synthesized)
tcttcctccagatgctctggtgggtctgatcacatttggaaggatggtgcaggttcatgagctaagctgtgaaggaatctccaaaagttatgtcttccgagggaccaaggatttaactgc

SEQ ID NO: 123672 - DNA, 120 bp, Artificial Sequence
  ENSG00000101310_9 (sequence is synthesized)
aaagcaaatacaggatatgttgggcctgaccaagccagccatgcccatgcagcaagcacgacctgcacaaccacaggagcacccttttgcttcaagcagatttctgcagcctgttcacaa

SEQ ID NO: 123673 - DNA, 120 bp, Artificial Sequence
  ENSG00000101310_10 (sequence is synthesized)
gattgatatgaacctcactgatcttcttggggagctacagagggacccatggccagtaactcaggggaagagacctttgcgatccactggtgtggctttgtccattgctgttggcttgct

SEQ ID NO: 123674 - DNA, 120 bp, Artificial Sequence
  ENSG00000101310_11 (sequence is synthesized)
ggagggcacttttccaaacacaggagccaggatcatgctgtttactggaggtccccctacccaagggcctggcatggtggttggagatgaattaaagattcctattcgttcttggcatga

SEQ ID NO: 123675 - DNA, 120 bp, Artificial Sequence
  ENSG00000101310_12 (sequence is synthesized)
tattgagaaagataatgcacgattcatgaaaaaggcaaccaagcactatgagatgcttgctaatcgaacagctgcaaatggtcactgcattgatatttatgcttgtgcccttgatcaaac

SEQ ID NO: 123676 - DNA, 120 bp, Artificial Sequence
  ENSG00000101310_13 (sequence is synthesized)
gagattctttcaacacttctctcttcaagcagacattccaaagaatctttactaaagattttaatggagatttccgaatggcatttggtgctactttggacgtaaagacctctcgggaac

SEQ ID NO: 123677 - DNA, 120 bp, Artificial Sequence
  ENSG00000101310_14 (sequence is synthesized)
tgaagattgcaggagccattggtccatgcgtatctctgaatgtgaaaggaccgtgtgtgtcagaaaatgagcttggtgttggtggcacgagtcagtggaaaatctgtggcctagatccta

SEQ ID NO: 123678 - DNA, 120 bp, Artificial Sequence
  ENSG00000101310_15 (sequence is synthesized)
catctacacttggcatctattttgaagttgtcaatcagcacaacaccccgatcccccaaggaggcagaggagccatccagtttgtcacgcattatcagcactccagcacccagagacgca

SEQ ID NO: 123679 - DNA, 120 bp, Artificial Sequence
  ENSG00000101310_16 (sequence is synthesized)
tccgcgtgaccaccatcgcccgaaattgggcagatgtacagagtcagctcaggcacatagaagcagcatttgaccaggaggctgcggcagtgttgatggcacggcttggggtgttccgag

SEQ ID NO: 123680 - DNA, 120 bp, Artificial Sequence
  ENSG00000101310_17 (sequence is synthesized)
cggagtcagaggaggggcccgatgtgctccggtggctggaccgacaactcatccgactgtgtcaaaagtttggacagtataacaaagaagaccccacttcttttaggttatcagattcct

SEQ ID NO: 123681 - DNA, 120 bp, Artificial Sequence
  ENSG00000101310_18 (sequence is synthesized)
tttctctatatcctcagtttatgttccatctgagaagatctccatttcttcaagtgtttaacaacagtcctgatgagtcgtcatattacagacatcattttgcccggcaggacctgaccc

SEQ ID NO: 123682 - DNA, 120 bp, Artificial Sequence
  ENSG00000101310_19 (sequence is synthesized)
agtccctcatcatgatccagcccattctctactcttactcctttcatgggccaccagagccagtactcttggatagcagcagcattctagctgacagaattttgctgatggatactttct

SEQ ID NO: 123683 - DNA, 120 bp, Artificial Sequence
  ENSG00000101310_20 (sequence is synthesized)
ttcaaattgtcatttatcttggtgagaccatagcccagtggcgtaaagctggctaccaggacatgcccgagtatgaaaacttcaagcaccttctgcaggcaccactggatgatgctcaag

SEQ ID NO: 123684 - DNA, 120 bp, Artificial Sequence
  ENSG00000101310_21 (sequence is synthesized)
aaattctgcaagcacgcttcccgatgccacgttacatcaacacggagcatggaggcagtcaggctcgattccttttgtccaaagtgaacccatctcagacacacaataacctgtatgctt

SEQ ID NO: 123685 - DNA, 120 bp, Artificial Sequence
  ENSG00000101310_22 (sequence is synthesized)
ggggacaggaaactggagcacccatcctaactgatgatgttagcctgcaggtgttcatggaccatttgaagaagctggctgtctccagtgcctgttaagctgaggatacaaccaggaaat

SEQ ID NO: 123686 - DNA, 120 bp, Artificial Sequence
  ENSG00000101310_23 (sequence is synthesized)
gcaacggtgtcagattgtgttcaaaatgtctagaaaggcttgataacattcctgttacttttctagcagattttaacaaataatcaaggacattttatatgtaactctttagattataat

SEQ ID NO: 123687 - DNA, 120 bp, Artificial Sequence
  ENSG00000101310_24 (sequence is synthesized)
ttatttgtattcctgtctttgtcctttttcttgcactataaaattataaggtcataaatgttttggtacttgtagatgtttatgtgctttttgtatcctaacttttagaatctaaataaa

SEQ ID NO: 123688 - DNA, 120 bp, Artificial Sequence
  ENSG00000101310_25 (sequence is synthesized)
atcagaggtaatgtattttggcagcttgtttaggtgagaatcttaatgatcataaaggaaataaatctagatgcagaaagtactggctaaaatattgctaatacaaatgtgatttcctga

SEQ ID NO: 123689 - DNA, 120 bp, Artificial Sequence
  ENSG00000101310_26 (sequence is synthesized)
ctgaacctaattctcataattaaagtaatgtatatgcaggatcaaaatgaaacaaatataccttatcctaaagagctcataacaaataagttacctccactctataaactcagacctact

SEQ ID NO: 123690 - DNA, 120 bp, Artificial Sequence
  ENSG00000101310_27 (sequence is synthesized)
ttttgaagataactgcttttaacctctccttacaagatttttgttgttgatgtatttaattttagcccatgtctcaattctcattttcaaagaatcaatatattaatatacctttggtca

SEQ ID NO: 123691 - DNA, 120 bp, Artificial Sequence
  ENSG00000101310_28 (sequence is synthesized)
gttgcagctgtgggtgaggacggctctagctaggtgagcggctccggccaggtgagcggggcgcataggtgacggagggccgagggcacgggtatgagtttctgccgggggcgaggtgag

SEQ ID NO: 123692 - DNA, 120 bp, Artificial Sequence
  ENSG00000101310_29 (sequence is synthesized)
cggcttctgggaggaggccttttcttgacagtttagggtagcgggggaatggatgatccgggagtcccctgcggatgtcgtcccgcaccaggccgggaccgatttctggctccagtttcc

SEQ ID NO: 123693 - DNA, 120 bp, Artificial Sequence
  ENSG00000101310_30 (sequence is synthesized)
ccagaattgcggagtgcgcacacctggaaggacccaagtcccgttttatagttgagaaactcaagactcagacaagtgaaacgacttttgcttcatgacagctggaactggaacccagtt

SEQ ID NO: 123694 - DNA, 120 bp, Artificial Sequence
  ENSG00000101310_31 (sequence is synthesized)
cgggggcgagttcccttttagactatggcgacatacctggagttcatccagcagaatgaagaacgggatggtgtgcgttttagttggaacgtgtggccttccagccggctggaggctaca

SEQ ID NO: 123695 - DNA, 120 bp, Artificial Sequence
  ENSG00000101310_32 (sequence is synthesized)
tttgttgtgcatttaatgagcaatgttaaatactgaatttctcttgaaatcctttgtcttccatgtctcttacctgggcaggggacttaaagctgtgagggcagcaggatcctaaccttt

SEQ ID NO: 123696 - DNA, 120 bp, Artificial Sequence
  ENSG00000101310_33 (sequence is synthesized)
aggtttgatgtgtgtgcatctactggcattgttttcaagtcctgacattatagaaggctactaaaaaggtagaactgattaaattccaaacctgttctctgtagccttcttcatctcagt

SEQ ID NO: 123697 - DNA, 120 bp, Artificial Sequence
  ENSG00000101310_34 (sequence is synthesized)
gttgcagctgtgggtgaggacggctctagctaggtgagcggctccggccagagtctggctctgtcgcccaggctgtgcaatggcattgtctcgcctcactgcaatctctgcctcccgagt

SEQ ID NO: 123698 - DNA, 120 bp, Artificial Sequence
  ENSG00000101311_0 (sequence is synthesized)
ctggagtctcccctggtcgggagcctcagccttctggagactgacaccaccctcttactcagagacgaatcgttttgtcgttgccttcacctccctgaccacaagtgctccggggctctt

SEQ ID NO: 123699 - DNA, 120 bp, Artificial Sequence
  ENSG00000101311_1 (sequence is synthesized)
tctgagggaggcagctgttctaggcgggaggctggagtctcctgggcctggacgcaccccggggtgtgagtgatgggtatgcctgaaaggaggggaagtggcgcggctttaatcatctgg

SEQ ID NO: 123700 - DNA, 120 bp, Artificial Sequence
  ENSG00000101311_2 (sequence is synthesized)
gctagtccccggcgggcctgggggaacagggaaactggaggcggccttaaagcgtcaggatgagacatcgcaagaggagctgcagatactgagcgtgcgccccgggttctcgccgccttc

SEQ ID NO: 123701 - DNA, 120 bp, Artificial Sequence
  ENSG00000101311_3 (sequence is synthesized)
tctccgccgagcagcccttcggccaccctttgcccttaaaaatctgcagactgcgcctcctctccgcgggagcgagacctagcaggcccggggctgggcgtgccctcgcctgccacgctg

SEQ ID NO: 123702 - DNA, 120 bp, Artificial Sequence
  ENSG00000101311_4 (sequence is synthesized)
cgctggggccgtgcagtgcaccgggcacgccgcgccaggctgggggcaggcaccgagcctccgtgggaggtcccgaggcagcttcgcctgctcgccctggctccagccctcacctgccgc

SEQ ID NO: 123703 - DNA, 120 bp, Artificial Sequence
  ENSG00000101311_5 (sequence is synthesized)
ctccagccctcacctgccgcagccttagctgagcagccgccgccactgggcgccccccgctccccacttcgccagcgcccgctcctcggctcggcccggggtagtttgtagggacgcagc

SEQ ID NO: 123704 - DNA, 120 bp, Artificial Sequence
  ENSG00000101311_6 (sequence is synthesized)
tctccacgtgcgcgactgcgaggctggacgctacgggctcctggaaaggagacaccagcatttgccacaatgctgtcatccactgactttacatttgcttcctgggagcttgtggtccgc

SEQ ID NO: 123705 - DNA, 120 bp, Artificial Sequence
  ENSG00000101311_7 (sequence is synthesized)
gttgaccatcccaatgaagagcagcagaaagacgtcacactgagagtatctggagaccttcatgttggaggagtgatgctcaagttagtagaacagatcaatatatcccaagactggtca

SEQ ID NO: 123706 - DNA, 120 bp, Artificial Sequence
  ENSG00000101311_8 (sequence is synthesized)
gactttgctctttggtgggaacagaagcattgctggcttctgaaaacccactggaccctggacaaatatggggtccaggcagatgcaaagcttctcttcacccctcagcataaaatgctg

SEQ ID NO: 123707 - DNA, 120 bp, Artificial Sequence
  ENSG00000101311_9 (sequence is synthesized)
cgccttcgtctgccgaatttgaagatggtgaggttgcgagtcagcttctcagctgtggtttttaaagctgtcagtgatatctgcaaaatcctgaatattagaagatcagaagagctttcc

SEQ ID NO: 123708 - DNA, 120 bp, Artificial Sequence
  ENSG00000101311_10 (sequence is synthesized)
ttgttaaagccgtctggtgactattttaagaagaagaagaaaaaagacaaaaataataaggaacccataattgaagatattctaaacctggagagttctccaacagcttcaggttcatca

SEQ ID NO: 123709 - DNA, 120 bp, Artificial Sequence
  ENSG00000101311_11 (sequence is synthesized)
gtaagtcctggtttatacagtaaaaccatgacccctatatatgaccccatcaatggaacaccagcatcatccaccatgacttggttcagtgacagccctttgacggaacaaaactgcagc

SEQ ID NO: 123710 - DNA, 120 bp, Artificial Sequence
  ENSG00000101311_12 (sequence is synthesized)
atcctcgcattcagccaacccccccagtccccagaagcacttgcggatatgtaccagcctcggtctctggttgataaagccaagctcaatgcaggttggctagactcctcacgctccctt

SEQ ID NO: 123711 - DNA, 120 bp, Artificial Sequence
  ENSG00000101311_13 (sequence is synthesized)
atggaacaaggcatccaagaggatgagcagctgctcttacgatttaaatattattctttcttcgacttgaatcctaaatatgatgctgtccgaataaaccaactctatgagcaagccagg

SEQ ID NO: 123712 - DNA, 120 bp, Artificial Sequence
  ENSG00000101311_14 (sequence is synthesized)
tgggccattctcttagaagaaattgattgcacagaggaagaaatgttgatctttgcagctctacagtaccacattagcaaactgtcgttgtctgctgaaacacaggattttgcaggcgag

SEQ ID NO: 123713 - DNA, 120 bp, Artificial Sequence
  ENSG00000101311_15 (sequence is synthesized)
tccgaggttgatgaaatagaagcggcgctttctaatttggaagtaaccctagaaggtggaaaagcggacagccttttggaggacattactgatatccctaaacttgcagataatctcaaa

SEQ ID NO: 123714 - DNA, 120 bp, Artificial Sequence
  ENSG00000101311_16 (sequence is synthesized)
ttatttaggcccaagaagttactaccaaaagctttcaaacaatattggtttatctttaaagacacatccatagcatactttaaaaataaggaacttgaacaaggagaaccactagaaaaa

SEQ ID NO: 123715 - DNA, 120 bp, Artificial Sequence
  ENSG00000101311_17 (sequence is synthesized)
ctaaatcttagaggctgcgaagttgtgcccgatgtaaatgtagcaggaagaaaatttggaatcaagttactaatccctgttgccgatggtatgaatgaaatgtatttgagatgtgaccat

SEQ ID NO: 123716 - DNA, 120 bp, Artificial Sequence
  ENSG00000101311_18 (sequence is synthesized)
gagaatcaatacgcccaatggatggctgcctgcatgttggcatcgaagggcaaaaccatggcagacagctcctaccagccagaggtcctcaacatcctttcatttctgaggatgaaaaac

SEQ ID NO: 123717 - DNA, 120 bp, Artificial Sequence
  ENSG00000101311_19 (sequence is synthesized)
aggaactctgcatctcaggtggcttccagtctcgaaaacatggatatgaacccagaatgttttgtgtcaccacggtgtgcaaaaagacacaaatccaaacagctggccgcccggatcctg

SEQ ID NO: 123718 - DNA, 120 bp, Artificial Sequence
  ENSG00000101311_20 (sequence is synthesized)
gaggcgcaccagaacgtggcccagatgcccctggtcgaagccaagctgcggttcatccaggcgtggcagtcactgcctgagtttggcctcacctactaccttgtcagatttaaaggaagc

SEQ ID NO: 123719 - DNA, 120 bp, Artificial Sequence
  ENSG00000101311_21 (sequence is synthesized)
aactgggaaacccggcaggtggtcatcgagtttgaccaaaacgtctttactgctttcacctgcctgagtgcagattgcaagattgtgcacgagtacattggcggctacattttcttgtcc

SEQ ID NO: 123720 - DNA, 120 bp, Artificial Sequence
  ENSG00000101311_22 (sequence is synthesized)
acccgctccaaggaccagaatgaaacactcgatgaggacttgttccacaaattgaccggcggtcaggattgaaacaagcacgcgtgctcggctcacaccaacaaggcaagccaaaggcgc

SEQ ID NO: 123721 - DNA, 120 bp, Artificial Sequence
  ENSG00000101311_23 (sequence is synthesized)
ccctccccagagggatccctaacgtgcccagcatgtagattctggactaacagacaacatacattcaccgctggtcacccagatcctcattcaaacccactgctggcacatccctttcct

SEQ ID NO: 123722 - DNA, 120 bp, Artificial Sequence
  ENSG00000101311_24 (sequence is synthesized)
tactttgccctgtgctaccagccacggaaggagcctctcttgttttttctataaaatgggtaggcaggagaaaagcaggtgccctaagattgctctaaggcccagcatgtggttacagtt

SEQ ID NO: 123723 - DNA, 120 bp, Artificial Sequence
  ENSG00000101311_25 (sequence is synthesized)
ctctgacttgcagaacctgccaggtgtatggctacaagttatcctcgtgctgatctgtctcattactaagtcaatggagaagacagaaaggtaaaaatcacgtgtagcaagaacaactct

SEQ ID NO: 123724 - DNA, 120 bp, Artificial Sequence
  ENSG00000101311_26 (sequence is synthesized)
tatttcacaaactcaggtatgaaacgaaacgcctgtccttcatggaactgcttttagctcctgtcttttcaaaatggcagagggagttcctacacacactttttccctggaggccaaggt

SEQ ID NO: 123725 - DNA, 120 bp, Artificial Sequence
  ENSG00000101311_27 (sequence is synthesized)
ctaggggtagaaaggggaggggtggggctaccaggtagcagttgacaacccaaggtcagaggagtggccctcagtgtcatctgtccacagtgatacctgccaagatgaccactgacccac

SEQ ID NO: 123726 - DNA, 120 bp, Artificial Sequence
  ENSG00000101311_28 (sequence is synthesized)
atctggtcttagtcattggtctcctcagatttctggggccacctgcaagccccattccattcctacagatctctcagccacctgtaagtcctttgtgaagatgtgggtgacacaggggga

SEQ ID NO: 123727 - DNA, 120 bp, Artificial Sequence
  ENSG00000101311_29 (sequence is synthesized)
caggaaaacccatttctcaacccagatccatgtctccactgcttctactctgggttgggattcaggaagacaggcacagtcctctctgttcatagaaacacctgccagtgtcaaggattc

SEQ ID NO: 123728 - DNA, 120 bp, Artificial Sequence
  ENSG00000101311_30 (sequence is synthesized)
cagtcaggtgtctatcccaactggtcagggagagaagggcagacccattctcaaagaccaccatgtccaaggtctgacagctccccactggctgcccccacaggggctttaggctggtct

SEQ ID NO: 123729 - DNA, 120 bp, Artificial Sequence
  ENSG00000101311_31 (sequence is synthesized)
gggtcatggggaagcgtccctcttatcgctggtctgtgttctcctggatttggtatctatgttggtacgactcctggccttttatctaaaggactttggcttttgtaaatcacaagccaa

SEQ ID NO: 123730 - DNA, 120 bp, Artificial Sequence
  ENSG00000101311_32 (sequence is synthesized)
taatagacttttttctccccctctgttttttgctgtgtcatctctgccttgagactgccttgagacagtgcttgccttgagagagtgagccaattaacagctgcctgaattgtcattttc

SEQ ID NO: 123731 - DNA, 120 bp, Artificial Sequence
  ENSG00000101311_33 (sequence is synthesized)
cattttggtttgttagaggtgggaggggtgggttttgagaaggtcaaaagcaataccagaagtaaagggaaatatcagacaatattttattattttttcatagatgttctgccacacaaa

SEQ ID NO: 123732 - DNA, 120 bp, Artificial Sequence
  ENSG00000101311_34 (sequence is synthesized)
gaacttggggtgtaaggataaggcaaaagctccaatcccatttttcagttctcctaggatgcacccctcagggagcctggccagagttccgaggcccgtgagcgtcagctgttgctttat

SEQ ID NO: 123733 - DNA, 120 bp, Artificial Sequence
  ENSG00000101311_35 (sequence is synthesized)
tttccatcaaagccctctgagaagtgagacctcagcaattccgggagccacatagagacagacttggcaagggaccccctggttctgagccagtagctgccatctggaaattcctctttt

SEQ ID NO: 123734 - DNA, 120 bp, Artificial Sequence
  ENSG00000101311_36 (sequence is synthesized)
agcctctccttagaggtgaatgtgaatgaagcctcccaggcacccgctgaatttctgaggccttgcttaaagctcagaagtggtttaggcatttggaaaatctggttcacatcataaaga

SEQ ID NO: 123735 - DNA, 120 bp, Artificial Sequence
  ENSG00000101311_37 (sequence is synthesized)
acttgatttgaaatgttttctatagaaacaagtgctaagtgtaccgtatatacttgatgttggtcatttctcagtcctatttctcagttctattattttagaacctagtcagttctttaa

SEQ ID NO: 123736 - DNA, 120 bp, Artificial Sequence
  ENSG00000101311_38 (sequence is synthesized)
gattataactggtcctacattaaaataatgcttctcgatgtcagattttacctgtttgctgctgagaacatctctgcctaatttaccaaagccagaccttcagttcaacatgcttcctta

SEQ ID NO: 123737 - DNA, 120 bp, Artificial Sequence
  ENSG00000101311_39 (sequence is synthesized)
gcttttcatagttgtctgacatttccatgaaaacaaaggaaccaactttgttttaaccaaactttgtttggttacagttttcaggggagcgtttcttccatgacacacagcaacatccca

SEQ ID NO: 123738 - DNA, 120 bp, Artificial Sequence
  ENSG00000101311_40 (sequence is synthesized)
aagaaataaacaagtgtgacaaaaaaaaaaaaaaacaaacctaaatgctactgttccaaagagcaacttgatggttttttttaatactgagtgcaaaaggtcacccaaattcctatgatg

SEQ ID NO: 123739 - DNA, 120 bp, Artificial Sequence
  ENSG00000101311_41 (sequence is synthesized)
aaattttaaattaatgggcacctttcaacatcatttgcttccttatctacagttgattcagaaatctgcattttttattcttttatatgacttttaagtaaaagatttatatggatttga

SEQ ID NO: 123740 - DNA, 120 bp, Artificial Sequence
  ENSG00000101311_42 (sequence is synthesized)
ccagttaccccctgaaacatttcagttgtgaacgttctttcctgctagcttctcccatgaggggaaaacgatgggtttgaaattcacatccctatctgtactttgaagaacaccagcatt

SEQ ID NO: 123741 - DNA, 120 bp, Artificial Sequence
  ENSG00000101323_0 (sequence is synthesized)
aacgaactccatctgggatagcaataacctgtgaaaatgctcccccggctaatttgtatcaatgattatgaacaacatgctaaatcagtacttccaaagtctatatatgactattacagg

SEQ ID NO: 123742 - DNA, 120 bp, Artificial Sequence
  ENSG00000101323_1 (sequence is synthesized)
tctggggcaaatgatgaagaaactttggctgataatattgcagcattttccagatggaagctgtatccaaggatgctccggaatgttgctgaaacagatctgtcgacttctgttttagga

SEQ ID NO: 123743 - DNA, 120 bp, Artificial Sequence
  ENSG00000101323_2 (sequence is synthesized)
cagagggtcagcatgccaatatgtgtgggggctacggccatgcagcgcatggctcatgtggacggcgagcttgccactgtgagagcctgtcagtccctgggaacgggcatgatgttgagt

SEQ ID NO: 123744 - DNA, 120 bp, Artificial Sequence
  ENSG00000101323_3 (sequence is synthesized)
tcctgggccacctcctcaattgaagaagtggcggaagctggtcctgaggcacttcgttggctgcaactgtatatctacaaggaccgagaagtcaccaagaagctagtgcggcaggcagag

SEQ ID NO: 123745 - DNA, 120 bp, Artificial Sequence
  ENSG00000101323_4 (sequence is synthesized)
aagatgggctacaaggccatatttgtgacagtggacacaccttacctgggcaaccgtctggatgatgtgcgtaacagattcaaactgccgccacaactcaggatgaaaaattttgaaacc

SEQ ID NO: 123746 - DNA, 120 bp, Artificial Sequence
  ENSG00000101323_5 (sequence is synthesized)
agtactttatcattttctcctgaggaaaattttggagacgacagtggacttgctgcatatgtggctaaagcaatagacccatctatcagctgggaagatatcaaatggctgagaagactg

SEQ ID NO: 123747 - DNA, 120 bp, Artificial Sequence
  ENSG00000101323_6 (sequence is synthesized)
acatcattgccaattgttgcaaagggcattttgagaggtgatgatgccagggaggctgttaaacatggcttgaatgggatcttggtgtcgaatcatggggctcgacaactcgatggggtg

SEQ ID NO: 123748 - DNA, 120 bp, Artificial Sequence
  ENSG00000101323_7 (sequence is synthesized)
gcggaaaggcactgatgttctgaaagctctggctcttggcgccaaggctgtgtttgtggggagaccaatcgtttggggcttagctttccagggggagaaaggtgttcaagatgtcctcga

SEQ ID NO: 123749 - DNA, 120 bp, Artificial Sequence
  ENSG00000101323_8 (sequence is synthesized)
gatactaaaggaagaattccggttggccatggctctgagtgggtgccagaatgtgaaagtcatcgacaagacattggtgaggaaaaatcctttggccgtttccaagatctgacagtgcac

SEQ ID NO: 123750 - DNA, 120 bp, Artificial Sequence
  ENSG00000101323_9 (sequence is synthesized)
aatattttcccatctgtattattttttttcagcatgtattacttgacaaagagacactgtgcagagggtgaccacagtctgtaattccccacttcaatacaaagggtgtcgttcttttcc

SEQ ID NO: 123751 - DNA, 120 bp, Artificial Sequence
  ENSG00000101323_10 (sequence is synthesized)
aacaaaatagcaatcccttttatttcattgcttttgacttttcaatgggtgtcctaggaaccttttagaaagaaatggactttcatcctggaaatatattaactgttaaaaagaaaacat

SEQ ID NO: 123752 - DNA, 120 bp, Artificial Sequence
  ENSG00000101323_11 (sequence is synthesized)
tgaaaatgtgtttagacaacgtcatcccctggcaggctaaagtgctgtatcctttagtaaaattggaggtagcaaacactaaggtgaaaagataatgatctcattgtttattaacctgta

SEQ ID NO: 123753 - DNA, 120 bp, Artificial Sequence
  ENSG00000101323_12 (sequence is synthesized)
ttctgtttacatgtctttaaaacagtggttcttaaattgtaagctcaggttcaaagtgttggtaatgcctgattcacaactttgagaaggtagcactggagagaattggaatgggtggcg

SEQ ID NO: 123754 - DNA, 120 bp, Artificial Sequence
  ENSG00000101323_13 (sequence is synthesized)
gtaattggtgatacttctttgaatgtagatttccaatcacatctttagtgtctgaatatatccaaatgttttaggatgtatgttacttcttagagagaaataaagcatttttgggaagaa

SEQ ID NO: 123755 - DNA, 120 bp, Artificial Sequence
  ENSG00000101327_0 (sequence is synthesized)
catttgaaggggctttggtggtgttcacagctgcctctttggcacctcctcccaagccggagtcaaggaggcccctgagccttggaccagccactgccacctccgacctgctcggccaga

SEQ ID NO: 123756 - DNA, 120 bp, Artificial Sequence
  ENSG00000101327_1 (sequence is synthesized)
agctgcccagggacaaagcagagtgcaggtcatttatcttcaggctttgagatctgcgtggggggagctgttgcagcagcccaagccgcaggaattgctgagacaggatggcctggcagg

SEQ ID NO: 123757 - DNA, 120 bp, Artificial Sequence
  ENSG00000101327_2 (sequence is synthesized)
ggctggtcctggctgcctgcctcctcatgttcccctccaccacagcggactgcctgtcgcggtgctccttgtgtgctgtaaagacccaggatggtcccaaacctatcaatcccctgattt

SEQ ID NO: 123758 - DNA, 120 bp, Artificial Sequence
  ENSG00000101327_3 (sequence is synthesized)
gctccctgcaatgccaggctgccctgctgccctctgaggaatgggagagatgccagagctttctgtcttttttcaccccctccacccttgggctcaatgacaaggaggacttggggagca

SEQ ID NO: 123759 - DNA, 120 bp, Artificial Sequence
  ENSG00000101327_4 (sequence is synthesized)
agtcggttggggaagggccctacagtgagctggccaagctctctgggtcattcctgaaggagctggagaaaagcaagtttctcccaagtatctcaacaaaggagaacactctgagcaaga

SEQ ID NO: 123760 - DNA, 120 bp, Artificial Sequence
  ENSG00000101327_5 (sequence is synthesized)
gcctggaggagaagctcaggggtctctctgacgggtttagggagggagcagagtctgagctgatgagggatgcccagctgaacgatggtgccatggagactggcacactctatctcgctg

SEQ ID NO: 123761 - DNA, 120 bp, Artificial Sequence
  ENSG00000101327_6 (sequence is synthesized)
aggaggaccccaaggagcaggtcaaacgctatgggggctttttgcgcaaataccccaagaggagctcagaggtggctggggagggggacggggatagcatgggccatgaggacctgtaca

SEQ ID NO: 123762 - DNA, 120 bp, Artificial Sequence
  ENSG00000101327_7 (sequence is synthesized)
aacgctatgggggcttcttgcggcgcattcgtcccaagctcaagtgggacaaccagaagcgctatggcggttttctccggcgccagttcaaggtggtgactcggtctcaggaagatccga

SEQ ID NO: 123763 - DNA, 120 bp, Artificial Sequence
  ENSG00000101327_8 (sequence is synthesized)
atgcttactctggagagctttttgatgcataagcacctcttttcatggagtagagtcaggagaaacccctgacaccttttcaggttggagtgcattcattcatcctcttatatgtgcccc

SEQ ID NO: 123764 - DNA, 120 bp, Artificial Sequence
  ENSG00000101327_9 (sequence is synthesized)
ttccccatgctcagctcagcattgtgtacaaaatatccaagcccagcctatctctcttctgcgtgggagtatgttatttctctggggtctgtgatggggaagggtggatgtcccttcccc

SEQ ID NO: 123765 - DNA, 120 bp, Artificial Sequence
  ENSG00000101327_10 (sequence is synthesized)
ctaaaactatcagcagcggcagcagcagcagcagcagcagtttgtgatctgtccttccaacctgttcacgtgactcctcaattccagggaaccagagcgatgtgttctttgtacctgtag

SEQ ID NO: 123766 - DNA, 120 bp, Artificial Sequence
  ENSG00000101327_11 (sequence is synthesized)
gtctatgatgtccaaacttaacagatcacatgcccctcttagaagaaatatgagcatgctccctcatgcagatagtatacacatcataaacaaagagtagaactttaaaagaaggtaaat

SEQ ID NO: 123767 - DNA, 120 bp, Artificial Sequence
  ENSG00000101327_12 (sequence is synthesized)
aatcatacacagaaatcctaacattatattcccaaatctcaaaagatctcctgtgcacctgactttggagacgatgctttaggtaaaaagcttaaacattgccttatattggatcaggaa

SEQ ID NO: 123768 - DNA, 120 bp, Artificial Sequence
  ENSG00000101327_13 (sequence is synthesized)
cccttacagtagagggtccagtcttctagtgggtttaatgtttagtcagtgtactctgagtcctcattgttcagaaaagcacctcttgaagaactgacttcctgaactcccagtcatgtt

SEQ ID NO: 123769 - DNA, 120 bp, Artificial Sequence
  ENSG00000101327_14 (sequence is synthesized)
ggtaccctggacagtgcctaactccttacagaagggagtgaaaacctctttcggaaatgattgagagcagcctcttgaatgcttaaatgatcaaggagggagaaaggcaaaccaatttgt

SEQ ID NO: 123770 - DNA, 120 bp, Artificial Sequence
  ENSG00000101327_15 (sequence is synthesized)
tctgtgcaacaaactcaaaatgtggaccagttccctcagccctcattaaactaattaaactgatgggtatcatgcttctactccatggtgaactgaagcagagtcaagctgatgaagtta

SEQ ID NO: 123771 - DNA, 120 bp, Artificial Sequence
  ENSG00000101327_16 (sequence is synthesized)
agcacaaccatgttcttgagcagctgaattggctgccaagagtccaagccatctggcccaacatacgcactgggcattgggtaagggactccagaagcagcagctagaaagagaaaaagc

SEQ ID NO: 123772 - DNA, 120 bp, Artificial Sequence
  ENSG00000101327_17 (sequence is synthesized)
cctcttcaatccccataatgcttctttcctcttaatgtctcaaaataaaaccagaaagaggaataaaatgattaagtgcttgaggccaaatgagttcccttgattcaaataaccctgaat

SEQ ID NO: 123773 - DNA, 120 bp, Artificial Sequence
  ENSG00000101327_18 (sequence is synthesized)
cagaggcagagacctcctgatgtcttggtttccatcaaagccctccctgtctgtctgtctctcttttgctctctcattcccaggcactctcttttggtttgtgggtccaggagatgaggc

SEQ ID NO: 123774 - DNA, 120 bp, Artificial Sequence
  ENSG00000101327_19 (sequence is synthesized)
tggataggagaggaaaaggcttgagtctggataatttgtataagatgctgctgagcacatctcttcatgcgcagtccccaggtatctgatgatgttctgaaatggatagattgttttaga

SEQ ID NO: 123775 - DNA, 120 bp, Artificial Sequence
  ENSG00000101327_20 (sequence is synthesized)
gttattttgtgtcctttaaaaaaatcccatttatgcaatttacttggaatttgcttagcctttaataggcttgtgtaatttcctgctcctccagtacaataaataaaagaaagatgctga

SEQ ID NO: 123776 - DNA, 120 bp, Artificial Sequence
  ENSG00000101327_21 (sequence is synthesized)
agaatccgccccctccccaacacggctgccttcctcctccacatccctgtcacgaagagaagcctattgtgtcaggcccagggagttcgagttgaagggcctgggggtctgtgctctgac

SEQ ID NO: 123777 - DNA, 120 bp, Artificial Sequence
  ENSG00000101327_22 (sequence is synthesized)
atcccagtcgagatccattgcaaagcattgcagaatgtcgatcctcttctgttctttctcaccccaggcctcactcccacccctctgtggcaccttccttctcttttcccctcctcttct

SEQ ID NO: 123778 - DNA, 120 bp, Artificial Sequence
  ENSG00000101327_23 (sequence is synthesized)
cagtgctgtagagtttctgtgaatatgtatgagttaatccacgagaactgctcagaacatcgtgagtacttcattaccttcagatcaaccagaattatcattcaatataaagttaatgga

SEQ ID NO: 123779 - DNA, 120 bp, Artificial Sequence
  ENSG00000101327_24 (sequence is synthesized)
aaatgcctctctgccaatgtgacaactaatttaatgacaaagaaggaactagtgatgtagaagtctgaggtcaaaatactgcaggcagaagaacagaaagtgcaaaggccctgagcagga

SEQ ID NO: 123780 - DNA, 120 bp, Artificial Sequence
  ENSG00000101327_25 (sequence is synthesized)
ggatgccaatgctgtttttgcctgagataaagagatcttaacgaattgctgagacaggatggcctggcaggggctggtcctggctgcctgcctcctcatgttcccctccaccacagcgga

SEQ ID NO: 123781 - DNA, 120 bp, Artificial Sequence
  ENSG00000101327_26 (sequence is synthesized)
acaaagaaggaactagtgatgtagaagtctgaggtcaaaatactgcaggcagaagaacagaaagtgcaaaggccctgaggtaggagcaagcttatttgaggaacagagtgactatttcag

SEQ ID NO: 123782 - DNA, 120 bp, Artificial Sequence
  ENSG00000101327_27 (sequence is synthesized)
agaaaaagacaagacgtggaaccaaatcctgaagactcgcatagctaattaccaaatagtagactattttcatggaagaggcacatgttgctgggagaatagaaaggaggagcagctcac

SEQ ID NO: 123783 - DNA, 120 bp, Artificial Sequence
  ENSG00000101331_0 (sequence is synthesized)
tcaccatggaatatgaagtcaagaaagggaagaagggctttgtatcccccatccgaaggctggtgttccccaaggccgggcgccgggcagcctgtaggagcagcgtgagccgccggcccc

SEQ ID NO: 123784 - DNA, 120 bp, Artificial Sequence
  ENSG00000101331_1 (sequence is synthesized)
tgcactcgatgcccctttatccccccgactacctcatcgacccccagattctgctgtgtgactacctggagaaagaggtcaagttcctgggccaccttacctgggtgacttcctcactga

SEQ ID NO: 123785 - DNA, 120 bp, Artificial Sequence
  ENSG00000101331_2 (sequence is synthesized)
acccctccagtcgggacgagctcctgcagctgctagacaccgccaggcagctgaaggagctgccgctgaagaccacggcggagcaggacagcatcctgagcctgtctgcccgctgcctgc

SEQ ID NO: 123786 - DNA, 120 bp, Artificial Sequence
  ENSG00000101331_3 (sequence is synthesized)
tgctcacctggcgcgacaatgaagagctcattctgcgaatccctacgcacgagatcgccgccgcctcctacctgcaggacgacgcgctgcacctgctagtgctcaagaccggtctgggtg

SEQ ID NO: 123787 - DNA, 120 bp, Artificial Sequence
  ENSG00000101331_4 (sequence is synthesized)
ctgctagtgctcaagaccggtctgggtgtggacccggtgccggccggcgtggatgccagcccaggcggcgcaggacgcgaccccggcccgccaggcggggcgcccgagaagcggcgggtg

SEQ ID NO: 123788 - DNA, 80 bp, Artificial Sequence
  ENSG00000101331_5 (sequence is synthesized)
ggaggcggcggcggcagcttggagcgccagcgcgccggggcgcgggcgtcgggcagctgggagcgacggcagacgttcag

SEQ ID NO: 123789 - DNA, 80 bp, Artificial Sequence
  ENSG00000101331_6 (sequence is synthesized)
gagcgacggcagacgttcagcggcagctgggagcggcggcacggaggcggcggcggcggcggcggcgcgggaaagccggg

SEQ ID NO: 123790 - DNA, 120 bp, Artificial Sequence
  ENSG00000101331_7 (sequence is synthesized)
gctgggagcggcgccaccccggccccaacccgctcgacccgcaggaccccagccccgacgcctactgcaacctggtcatcctggctgtagccaacagggacgctgcagaggagtcctgcg

SEQ ID NO: 123791 - DNA, 120 bp, Artificial Sequence
  ENSG00000101331_8 (sequence is synthesized)
cactcatctgtcaggtcttccagatcatctacggggaccagagtattgagtgtgtggaccgggctggctaccactacacatccacacctgaacggccatggctctgcagccgcataatgg

SEQ ID NO: 123792 - DNA, 120 bp, Artificial Sequence
  ENSG00000101331_9 (sequence is synthesized)
ctcccaggacacctttgaagcatgttacagcggcacgtccacaccttctttccatggctcccactgcagcggcagcgaccacagcagtctgggcttggagcagttacaggattacatggt

SEQ ID NO: 123793 - DNA, 120 bp, Artificial Sequence
  ENSG00000101331_10 (sequence is synthesized)
gttgcggagtaagctggggcccctcgagatccagcagtttgcgatgctgctgcgggagtaccggctggggctgcccatccaggactattgcacaggcctgctgaagctctacggagaccg

SEQ ID NO: 123794 - DNA, 120 bp, Artificial Sequence
  ENSG00000101331_11 (sequence is synthesized)
gcgcaagttcctcctccttgggatgcggcccttcatcccggaccaggacatcggctacttcgagggcttcctggagggcgtgggcatccgcgagggcggcatcctcactgacagcttcgg

SEQ ID NO: 123795 - DNA, 120 bp, Artificial Sequence
  ENSG00000101331_12 (sequence is synthesized)
ccgcatcaagcgcagcatgagctccacgtcggcctccgcagtgcgcagctacgatggcgcggcgcagcggcccgaggcacaggccttccaccggctgctggctgacatcacgcacgacat

SEQ ID NO: 123796 - DNA, 120 bp, Artificial Sequence
  ENSG00000101331_13 (sequence is synthesized)
cgaggcgctggcccccgatgacgacgacgacgacgaggatgagccccggggctccaggggcgggagcgacgccgcagaagacaactacctgtagccaccgcccctgcggacggcgtggct

SEQ ID NO: 123797 - DNA, 120 bp, Artificial Sequence
  ENSG00000101331_14 (sequence is synthesized)
cagcagcccacctctgagtctcagctttgcttcggggaccctatccccagggcccccccatcacacctggcggggccggggggtcttcactccagggtctcgctccctgcccttggggcc

SEQ ID NO: 123798 - DNA, 120 bp, Artificial Sequence
  ENSG00000101331_15 (sequence is synthesized)
cggggccatgcagtacctggagtgtcctgcagggggaaagcgaagccgggccctgaagtccggggcagtcacccggggctcctgggccgctctgccgggctggggctgagcagcgatcct

SEQ ID NO: 123799 - DNA, 120 bp, Artificial Sequence
  ENSG00000101331_16 (sequence is synthesized)
gctttgtcccagaagtccagagggatcagccccagaacacaccctcctccccgggacgccgcagctttctggaggctgaggaaggcatgaagagtgggctccacctgctggccgactgag

SEQ ID NO: 123800 - DNA, 120 bp, Artificial Sequence
  ENSG00000101331_17 (sequence is synthesized)
aaaagaatttccagaactcggtcctattttacagattgagaaactatggttcaagaagagaggacggggcttgagggaatctcctgattctccttatatgacctcaaactgaccatacta

SEQ ID NO: 123801 - DNA, 120 bp, Artificial Sequence
  ENSG00000101331_18 (sequence is synthesized)
aacagtgtagaaggtctttttaaggctctaaatgtcagggtctcccatcccctgatgcctgacttgtacagtcagtgtggagtagacggtttcctccacccagggttgactcagggggat

SEQ ID NO: 123802 - DNA, 120 bp, Artificial Sequence
  ENSG00000101331_19 (sequence is synthesized)
gatctgggtcccattctggtcttaagaccccaaacaagggttttttcagctccaggatctggagcctctatctggttagtgtcgtaacctctgtgtgcctcccgttaccccatctgtcca

SEQ ID NO: 123803 - DNA, 120 bp, Artificial Sequence
  ENSG00000101331_20 (sequence is synthesized)
gtgagctcagcccccatccacctaacagggtggccacagggattactgagggttaagaccttagaactgggtctagcacccgataagagctcaataaatgttgttcctttccacatcaaa

SEQ ID NO: 123804 - DNA, 120 bp, Artificial Sequence
  ENSG00000101333_0 (sequence is synthesized)
gtcttgaatataatcatggccaaaccttatgaatttaactggcagaaggaagttccctcctttttgcaagaaggagcagtttttgacagatacgaggaggaatcctttgtgtttgaaccc

SEQ ID NO: 123805 - DNA, 120 bp, Artificial Sequence
  ENSG00000101333_1 (sequence is synthesized)
aactgcctcttcaaagtggatgagtttggcttctttctgacatggagaagtgaaggcaaggaaggacaggtgctagaatgctccctcatcaacagtattcggtcgggagccataccaaag

SEQ ID NO: 123806 - DNA, 120 bp, Artificial Sequence
  ENSG00000101333_2 (sequence is synthesized)
gatcccaaaatcttggctgctcttgaagctgttggaaaatcagaaaatgatctggaagggcggatagtttgtgtctgcagtggcacagatctagtgaacattagttttacctacatggtg

SEQ ID NO: 123807 - DNA, 120 bp, Artificial Sequence
  ENSG00000101333_3 (sequence is synthesized)
gctgaaaatccagaagtaactaagcaatgggtagaaggcctgagatcaatcatacacaacttcagggccaacaacgtcagtccaatgacatgcctcaagaaacactggatgaaattggca

SEQ ID NO: 123808 - DNA, 120 bp, Artificial Sequence
  ENSG00000101333_4 (sequence is synthesized)
tttatgaccaacacaaatggtaaaattccagttaggagtattactagaacatttgcatcgggaaaaacagaaaaggtgatctttcaagcactcaaggagttaggtcttcccagtggaaag

SEQ ID NO: 123809 - DNA, 120 bp, Artificial Sequence
  ENSG00000101333_5 (sequence is synthesized)
aatgatgaaattgagcccacagcattttcttatgaaaagttctatgaactgacacaaaagatttgtcctcggacagatatagaagatcttttcaaaaaaatcaatggagacaaaactgat

SEQ ID NO: 123810 - DNA, 120 bp, Artificial Sequence
  ENSG00000101333_6 (sequence is synthesized)
tatttaacggtagaccaattagtgagctttctaaatgaacatcaacgagatcctcgattgaatgaaattttatttccattttatgatgccaaaagggcaatgcagatcattgagatgtat

SEQ ID NO: 123811 - DNA, 120 bp, Artificial Sequence
  ENSG00000101333_7 (sequence is synthesized)
gaacctgatgaagatttgaagaaaaaaggccttatatcaagtgatgggttttgcagatatctgatgtcagatgaaaacgccccagtcttcctagatcgtttagaactttaccaagaaatg

SEQ ID NO: 123812 - DNA, 120 bp, Artificial Sequence
  ENSG00000101333_8 (sequence is synthesized)
gaccatcctctggctcactacttcatcagttcttcccataacacttatctcactggcagacagttcggcgggaagtcttcggtagaaatgtacagacaggttctcctggctggttgcaga

SEQ ID NO: 123813 - DNA, 120 bp, Artificial Sequence
  ENSG00000101333_9 (sequence is synthesized)
tgtgttgaacttgactgctgggatggaaaaggtgaagaccaagaaccaataataactcatggaaaagcaatgtgtacagatatcctttttaaggatgtaattcaagccatcaaggaaact

SEQ ID NO: 123814 - DNA, 120 bp, Artificial Sequence
  ENSG00000101333_10 (sequence is synthesized)
gcatttgtcacatcagaatatcctgtaattctctcctttgaaaatcactgcagcaaatatcaacagtacaagatgtccaaatattgcgaagatctatttggggatctcctgttgaaacaa

SEQ ID NO: 123815 - DNA, 120 bp, Artificial Sequence
  ENSG00000101333_11 (sequence is synthesized)
gcacttgaatcacatccacttgaaccaggcagggctttgccatcccccaatgacctcaaaagaaaaatactcataaaaaacaagcggctgaaacctgaagttgaaaaaaaacagctggaa

SEQ ID NO: 123816 - DNA, 120 bp, Artificial Sequence
  ENSG00000101333_12 (sequence is synthesized)
gctttgagaagcatgatggaagctggagaatctgcctccccagcaaacatcttagaggacgataatgaagaggagatcgaaagtgctgaccaagaggaggaagctcaccccgaattcaaa

SEQ ID NO: 123817 - DNA, 120 bp, Artificial Sequence
  ENSG00000101333_13 (sequence is synthesized)
tttggaaatgaactttctgctgatgacttgggtcacaaggaagctgttgcaaatagcgtcaagaagggcctggtcactgtagaagatgagcaggcgtggatggcatcttataaatatgta

SEQ ID NO: 123818 - DNA, 120 bp, Artificial Sequence
  ENSG00000101333_14 (sequence is synthesized)
ggtgctaccactaatatccatccatatttgtccacaatgatcaactacgcccagcctgtaaagtttcaaggtttccatgtggcagaagaacgcaatattcattataacatgtcttctttt

SEQ ID NO: 123819 - DNA, 120 bp, Artificial Sequence
  ENSG00000101333_15 (sequence is synthesized)
aatgaatcagtcggtcttggctacttgaagacacatgcaattgaatttgtcaattataacaaacggcaaatgagtcgcatttaccccaagggaggccgagtcgattccagtaattacatg

SEQ ID NO: 123820 - DNA, 120 bp, Artificial Sequence
  ENSG00000101333_16 (sequence is synthesized)
cctcagattttctggaacgctggctgccagatggtttcactgaactatcaaaccccagatttagcgatgcaattgaatcagggaaaatttgagtataatggatcgtgcgggtaccttctc

SEQ ID NO: 123821 - DNA, 120 bp, Artificial Sequence
  ENSG00000101333_17 (sequence is synthesized)
aaaccagatttcatgaggcggcctgatcgaacatttgaccccttctctgaaactcctgttgatggtgttattgcagccacttgctcagtgcaggttatatcaggtcaattcttatcagat

SEQ ID NO: 123822 - DNA, 120 bp, Artificial Sequence
  ENSG00000101333_18 (sequence is synthesized)
aagaaaattggcacctacgtagaggtggatatgtatgggttgcccactgacaccatacgtaaggaattccgaactcgcatggttatgaataatggactcaatccagtttacaatgaagag

SEQ ID NO: 123823 - DNA, 120 bp, Artificial Sequence
  ENSG00000101333_19 (sequence is synthesized)
tcatttgtatttcggaaggtgatcctgccggacctggctgtcttgagaatagctgtgtatgatgataacaacaagctgattggccagaggatcctcccgcttgatggcctccaagccgga

SEQ ID NO: 123824 - DNA, 120 bp, Artificial Sequence
  ENSG00000101333_20 (sequence is synthesized)
tatcgacacatttcccttcgaaatgagggaaataaaccattatcactaccaacaattttctgcaatattgttcttaaaacatatgtgcctgatggatttggagatatcgtggatgcttta

SEQ ID NO: 123825 - DNA, 120 bp, Artificial Sequence
  ENSG00000101333_21 (sequence is synthesized)
tcagatccaaagaaatttctctcaattacagaaaagagagcagaccaaatgagagctatgggcattgaaactagtgacatagccgacgtgcccagtgacacttccaaaaatgacaagaaa

SEQ ID NO: 123826 - DNA, 120 bp, Artificial Sequence
  ENSG00000101333_22 (sequence is synthesized)
ggaaaggccaacaccgccaaagcaaatgtgacccctcagagtagctctgagctcagaccaaccaccacggctgccctggcctctggtgtggaagccaagaaaggtattgaacttatccct

SEQ ID NO: 123827 - DNA, 120 bp, Artificial Sequence
  ENSG00000101333_23 (sequence is synthesized)
caagtaaggatagaagacttaaagcagatgaaggcttacttgaagcatttaaagaaacagcagaaggagctaaattctttaaagaagaaacatgcaaaggaacacagtaccatgcagaag

SEQ ID NO: 123828 - DNA, 120 bp, Artificial Sequence
  ENSG00000101333_24 (sequence is synthesized)
agaaggcaatgaagaagaaggggggaagtaattgtctcgaaatgaaaaaagaaacagaaatcaaaattcagacgctgacatcagatcacaaatctaaggtcaaagagattgtagcacagc

SEQ ID NO: 123829 - DNA, 120 bp, Artificial Sequence
  ENSG00000101333_25 (sequence is synthesized)
acacaaaggaatggtcagaaatgatcaatacccacagtgctgaggagcaagaaatccgagacctgcacctcagccagcagtgtgagctgctgaaaaagctactcatcaatgcccacgagc

SEQ ID NO: 123830 - DNA, 120 bp, Artificial Sequence
  ENSG00000101333_26 (sequence is synthesized)
agcaaacccagcagctgaaactgtcccatgacagggaaagcaaggaaatgcgagcacaccaggctaagatttctatggaaaatagcaaagccatcagccaagataaatctatcaagaata

SEQ ID NO: 123831 - DNA, 120 bp, Artificial Sequence
  ENSG00000101333_27 (sequence is synthesized)
aagcagaacgggaaaggcgagtcagggagttaaacagcagcaacactaaaaagtttctggaagaaagaaagagacttgccatgaagcagtccaaagaaatggatcagttgaaaaaagtcc

SEQ ID NO: 123832 - DNA, 120 bp, Artificial Sequence
  ENSG00000101333_28 (sequence is synthesized)
agcttgaacatctagaattcctagagaaacagaatgagcagcttttgaaatcctgtcatgcagtgtcccaaacgcaaggcgaaggagatgcagcagatggtgaaattggaagccgagatg

SEQ ID NO: 123833 - DNA, 120 bp, Artificial Sequence
  ENSG00000101333_29 (sequence is synthesized)
gaccgcagaccagcaacagtagtatgaaactccaaaatgcaaactgaagcagcaaacccacaaagcatcaaaagactcactcacaaacttctgaacacaaactccatggatgaaagctgt

SEQ ID NO: 123834 - DNA, 120 bp, Artificial Sequence
  ENSG00000101333_30 (sequence is synthesized)
ttattttgtttcctttatgtgtaaacaagatgatatctgaaaccagagagacttggaatgtctgactgacttctatttaacagcttgagtattgcatttccttggccaaacaaaaatagc

SEQ ID NO: 123835 - DNA, 120 bp, Artificial Sequence
  ENSG00000101333_31 (sequence is synthesized)
tacaaatccacaaaaatttactattccagtaaggcagagtccaaccattgataatacaacttaaacatgtttgctataaaataccatcacaagtaaatgagcttggtgtgaacaactctc

SEQ ID NO: 123836 - DNA, 120 bp, Artificial Sequence
  ENSG00000101333_32 (sequence is synthesized)
ctttgtgatgccttaggacatgtttgaactgcagcaaaaaacaaaaacaaaaaacagtgcattagcaatttcatagcaagtgcatgcactaggaaaagaaaactctgtctacaagtttat

SEQ ID NO: 123837 - DNA, 120 bp, Artificial Sequence
  ENSG00000101333_33 (sequence is synthesized)
tagcagaagtggtggtctgctagacaaataattttgcaaaatttttctacatctaagttacctcatcagtaagtgccatgtctctaccatgccatcagaggctaatttcctgtaaaagtt

SEQ ID NO: 123838 - DNA, 120 bp, Artificial Sequence
  ENSG00000101333_34 (sequence is synthesized)
gtggaaattgttagaacaatagaaaaatagagcagtgtatgtgtgccaaaactcatcattactcaaaggagaactgtgttaggcacatttaagaaagtttacatctgacattgctttata

SEQ ID NO: 123839 - DNA, 120 bp, Artificial Sequence
  ENSG00000101333_35 (sequence is synthesized)
ggaattgtttctgcagattccggatattataattcacaccataaagattgtgaagtggttattggcaaacgtttgtaaatgtgaccatgtataaagtatttatactctttaattcacact

SEQ ID NO: 123840 - DNA, 120 bp, Artificial Sequence
  ENSG00000101333_36 (sequence is synthesized)
gttagagagcaaaatcatctaagtattgccacatgacaagattagtaaacaggaatactagaactatgtttgcatgatacacaagcaccaataaagactaatccatacacagttaaccta

SEQ ID NO: 123841 - DNA, 120 bp, Artificial Sequence
  ENSG00000101333_37 (sequence is synthesized)
atgccaaataaatactggttaaataaatgtatggcacagaatataatttgactatcaagacttttagcataatgaaaaaccctctctctatatatatatgtgtatatgaattatgtgggc

SEQ ID NO: 123842 - DNA, 120 bp, Artificial Sequence
  ENSG00000101333_38 (sequence is synthesized)
attcttgatacttcaagttctagtttgaaaaaaatacataactaatttaattttacacaaaaatatttatgcagattttcagaatttcatatcaggaaatgacctttttatgtctgttaa

SEQ ID NO: 123843 - DNA, 120 bp, Artificial Sequence
  ENSG00000101333_39 (sequence is synthesized)
atatcaaaacaatttgctacagtgttaatctgcatggtctttaagcctgctgtagttgagttgcagacagtgcatgaaaaagtattccgctgggaattgagccatgccaccaaagccaag

SEQ ID NO: 123844 - DNA, 120 bp, Artificial Sequence
  ENSG00000101333_40 (sequence is synthesized)
aggagcgcatggaaacccggtagtctagaactaatcagattactgattttagggcacagcaccagatgaattgttgtatatgcttgtaaaaattgattctgtgtgttcctctgaacaaag

SEQ ID NO: 123845 - DNA, 120 bp, Artificial Sequence
  ENSG00000101333_41 (sequence is synthesized)
cggagaaaatgatgataccatcaatattgaaattaaacttccaacttctctaataaaaaattaaaacacgcataacactcgtcaagagtatttgctcccaagacacattctagcaaatgt

SEQ ID NO: 123846 - DNA, 120 bp, Artificial Sequence
  ENSG00000101333_42 (sequence is synthesized)
tttgcctttttcatatacatgatatcatcgttattttcaaagggggcttattaataccctcagcatgtttttcacccaaatgatgcaaaacatgcagattctagttgacttcagttgtaa

SEQ ID NO: 123847 - DNA, 120 bp, Artificial Sequence
  ENSG00000101333_43 (sequence is synthesized)
tagacttgtttttctcctatttatgatttgaagtggattctgtaaaatatctcttgttcttagtttccttatctgtaaaacagtggagttagactacatatcttttggcactaacatctc

SEQ ID NO: 123848 - DNA, 120 bp, Artificial Sequence
  ENSG00000101333_44 (sequence is synthesized)
atgaaaaattatggttaataaaatatcaccacatttggattgccaattttcaaagattctgagtggcttctcatcatcaaatcaaatcaaatccaagagctcaactatgctcaccattct

SEQ ID NO: 123849 - DNA, 120 bp, Artificial Sequence
  ENSG00000101333_45 (sequence is synthesized)
gtaacacttgactgaattcatcacttgcctcctcttgtttctgctttggagaggtactactagtttttccatttttcttatttcttccctcttttcatcctcctaggccaccataagcat

SEQ ID NO: 123850 - DNA, 120 bp, Artificial Sequence
  ENSG00000101333_46 (sequence is synthesized)
ttatattttccagtgttatacatggaaccagtttgtttttctttgatccaggttacttttagtatttgagacatcataccattaatccattgtagtaggattaaaatgtacacacaactc

SEQ ID NO: 123851 - DNA, 120 bp, Artificial Sequence
  ENSG00000101333_47 (sequence is synthesized)
aaatgtgcaacaaaagcatgtgttacctgctattgtcagttcatattgcactcaaaccttgcattatcccttattatgaagaaaaattaatagccaattaaagtaactcagtgtcttcca

SEQ ID NO: 123852 - DNA, 120 bp, Artificial Sequence
  ENSG00000101333_48 (sequence is synthesized)
agtaagtgagctgcaccgccaacaagatctctcacacacagacacacacacgcacacgcacacacgggcgcgcacacacacgcgcgtacacactgggtctccaggcagcggccgtcgccg

SEQ ID NO: 123853 - DNA, 120 bp, Artificial Sequence
  ENSG00000101333_49 (sequence is synthesized)
gacttgggtcacaaggaagctgttgcaaatagcgtcaagaaggcttcagatgaccttgaacatgaaaacaacaaaaagggcctggtcactgtagaagatgagcaggcgtggatggcatct

SEQ ID NO: 123854 - DNA, 120 bp, Artificial Sequence
  ENSG00000101333_50 (sequence is synthesized)
gcgggggacgcgcagggcccggcggtgggcgggcgggtcggcgctgccccgtgggctcgctggggagccacggcggagacccccgccctcaactgagaggacagtgctgctgtgagtttg

SEQ ID NO: 123855 - DNA, 120 bp, Artificial Sequence
  ENSG00000101333_51 (sequence is synthesized)
ctgtgacaagcgtttgctgtatttgttgttcgacttagggtagttgaaagagtctctctcagccactctctctggatattttgttgtggctgtgggcactgtttgcccagcctctcactt

SEQ ID NO: 123856 - DNA, 120 bp, Artificial Sequence
  ENSG00000101333_52 (sequence is synthesized)
tgtagcggaggggtgggactctgcgtgaaaggaccagcgttatagtccctggcttctccggctaattcatcccgaggctcctgccccttcccattctggaaggggcgagcttatcctaga

SEQ ID NO: 123857 - DNA, 120 bp, Artificial Sequence
  ENSG00000101333_53 (sequence is synthesized)
tgttctcccaagcaccagggggacccctggtcttagattcaagttgcatcactagactaaccagctctgggaaccagagggacactggaggaactagtttgggaaatgaaaaacatctgc

SEQ ID NO: 123858 - DNA, 120 bp, Artificial Sequence
  ENSG00000101333_54 (sequence is synthesized)
aatgagaggtaattttattctcctcttccttttaccctagtctcactctccatagtaggacctggatctttgcatcagagaaaacataatgaacaataactggaatgtgtgtttctttct

SEQ ID NO: 123859 - DNA, 120 bp, Artificial Sequence
  ENSG00000101333_55 (sequence is synthesized)
ggcccggagcgggggacgcgcagggcccggcggtgggcgggcgggtcggcgctgccccgtgggctcgctggggagccacggcggagacccccgccctcaactgaggaaaagacaatttct

SEQ ID NO: 123860 - DNA, 120 bp, Artificial Sequence
  ENSG00000101333_56 (sequence is synthesized)
agacccccgccctcaactgaggaaaagacaatttctctctgattcagaatcctgaaaatgtgatctcccttaaaaagaggacagtgctgctgtgagtttgacgaagtggacatcacctgc

SEQ ID NO: 123861 - DNA, 120 bp, Artificial Sequence
  ENSG00000101333_57 (sequence is synthesized)
acacgcacacgcacacacgggcgcgcacacacacgcgcgtacacactgggtctccaggcagcggccgtcgccgcatccccggcagcagctccaggcaaagtgacaggaaaagacaatttc

SEQ ID NO: 123862 - DNA, 120 bp, Artificial Sequence
  ENSG00000101335_0 (sequence is synthesized)
agttccacgcacccagcgagcccaagcgccttctccgcaccagggaagccccacccaccagaagccaagatgtccagcaagcgggccaaagccaagaccaccaagaagcggccacagcgg

SEQ ID NO: 123863 - DNA, 120 bp, Artificial Sequence
  ENSG00000101335_1 (sequence is synthesized)
gccacatccaatgtcttcgcaatgtttgaccagtcccagatccaggagtttaaggaggctttcaacatgattgaccagaaccgtgatggcttcattgacaaggaggacctgcacgacatg

SEQ ID NO: 123864 - DNA, 120 bp, Artificial Sequence
  ENSG00000101335_2 (sequence is synthesized)
ctggcctcgctggggaagaaccccacagacgaatacctggagggcatgatgagcgaggccccggggcccatcaacttcaccatgttcctcaccatgtttggggagaagctgaacggcacg

SEQ ID NO: 123865 - DNA, 120 bp, Artificial Sequence
  ENSG00000101335_3 (sequence is synthesized)
gaccccgaggatgtgattcgcaacgcctttgcctgcttcgacgaggaagcctcaggtttcatccatgaggaccacctccgggagctgctcaccaccatgggtgaccgcttcacagatgag

SEQ ID NO: 123866 - DNA, 120 bp, Artificial Sequence
  ENSG00000101335_4 (sequence is synthesized)
gaagtggacgagatgtaccgggaggcacccattgataagaaaggcaacttcaactacgtggagttcacccgcatcctcaaacatggcgccaaggataaagacgactaggccaccccagcc

SEQ ID NO: 123867 - DNA, 120 bp, Artificial Sequence
  ENSG00000101335_5 (sequence is synthesized)
ccctgacaccccagcccccgccagtcacccctccccgcacacacccgtccataccagctccctgcccatgaccctcgctcagggatccccctttgaggggttagggtcccagttcccagt

SEQ ID NO: 123868 - DNA, 120 bp, Artificial Sequence
  ENSG00000101335_6 (sequence is synthesized)
ggaagaaacaggccaggagaagtgcgtgccgagctgaggcagatgttcccacagtgaccccagagccctgggctatagtctctgacccctccaaggaaagaccaccttctggggacatgg

SEQ ID NO: 123869 - DNA, 120 bp, Artificial Sequence
  ENSG00000101335_7 (sequence is synthesized)
gctggagggcaggacctagaggcaccaagggaaggccccattccggggctgttccccgaggaggaagggaaggggctctgtgtgccccccaggaggaagaggccctgagtcctgggatca

SEQ ID NO: 123870 - DNA, 120 bp, Artificial Sequence
  ENSG00000101335_8 (sequence is synthesized)
gacaccccttcacgtgtatccccacacaaatgcaagctcaccaaggtcccctctcagtccccttccctacaccctgaccggccactgccgcacacccacccagagcacgccacccgccat

SEQ ID NO: 123871 - DNA, 120 bp, Artificial Sequence
  ENSG00000101335_9 (sequence is synthesized)
gggagtgtgctcaggagtcgcgggcagcgtggacatctgtcccagagggggcagaatctccaatagaggactgagcactgcttctggtctgtgtgtctgtggctggggtgaagtaagggg

SEQ ID NO: 123872 - DNA, 120 bp, Artificial Sequence
  ENSG00000101335_10 (sequence is synthesized)
accccgggcctgaaaccctctcccaccttctcctgccatctccagttactgccctgctcctcccaccctggcccagggaaggactgggtgtcctccggccatatggtccctgaagcctct

SEQ ID NO: 123873 - DNA, 120 bp, Artificial Sequence
  ENSG00000101335_11 (sequence is synthesized)
ctctgtgctcagctgagaccagcaggggacaggggacggagggaatgggcctcatggccttctcagggcttgtgggaaagggaggaccatgggaatcaccacagccaatcccgtggaggg

SEQ ID NO: 123874 - DNA, 120 bp, Artificial Sequence
  ENSG00000101335_12 (sequence is synthesized)
ttccaggcctcttggggggcagaggtcaggccacacagccctcaggactaaagctccgggttccagaagaacagggaggctccaacagtgatgaggcaggcgtcccagcagctcagggtt

SEQ ID NO: 123875 - DNA, 120 bp, Artificial Sequence
  ENSG00000101335_13 (sequence is synthesized)
ggaggtgggaatgaggggtttcccagccccaggcaggtggagggcgagttcagccccaggaccaacagcatgggggccacagctttccatgtccctgtgtacgcagggcaggcagggccg

SEQ ID NO: 123876 - DNA, 120 bp, Artificial Sequence
  ENSG00000101335_14 (sequence is synthesized)
ggacccctgctactggtggatgatggggacactgatggcagtgcctggggcctaagaggggcagaaagagcgctgaatgactgagcagagagtccagaggggcatggactgcctgggtca

SEQ ID NO: 123877 - DNA, 120 bp, Artificial Sequence
  ENSG00000101335_15 (sequence is synthesized)
cccaataggcctagggaagagtgagggccggacccaccccacctgaccccagcgagtggacccagcttggtcctgaggccttctccagaggtcacccagcgcaggcagccgcagcactca

SEQ ID NO: 123878 - DNA, 120 bp, Artificial Sequence
  ENSG00000101335_16 (sequence is synthesized)
gcaaaggtcccagatcagggccaagggggagctgagcaccaggggaccctgtgcctgaccaggaggccctaacctcctgcaggcctcaacgccaggccctgctcagagctcggctgaaac

SEQ ID NO: 123879 - DNA, 120 bp, Artificial Sequence
  ENSG00000101335_17 (sequence is synthesized)
tcctcatcctggctccaaacagaggcccaaaagtccctggtatcaactccagaaggggcgagacccgaacaagttccaaaccaggcccaaatagtatcccaaactcagtcccaaacacat

SEQ ID NO: 123880 - DNA, 120 bp, Artificial Sequence
  ENSG00000101335_18 (sequence is synthesized)
tctcacccccggcagcaggctgcaggcctccagctacacacacggccctgggcaactctcagtctggccacccattcgatgctgccagccccaagggtgtgggaggggggtctcagagtg

SEQ ID NO: 123881 - DNA, 120 bp, Artificial Sequence
  ENSG00000101335_19 (sequence is synthesized)
tcccagggtactggccacacatgcccgacaccagggtcataaggtcctctcagcagagccactgcagcaccaaaggcatttctggaaggaggcaaggacgcgtcatctagatgtcaagcc

SEQ ID NO: 123882 - DNA, 120 bp, Artificial Sequence
  ENSG00000101335_20 (sequence is synthesized)
ccagcgtgcgattctgtcacagttcaccccaccttcaccccgagacggaagacggaagagcttcgcacacaggcgggaagaggtcaggaccagtccagcctcactggcttcagaactggc

SEQ ID NO: 123883 - DNA, 120 bp, Artificial Sequence
  ENSG00000101335_21 (sequence is synthesized)
ctgggggctaccttgacccacaggaagggaagaggaacgtgctctgggcagggcaaggcaggacctgcagcacccacagaccagcagtaaaggacccccggaactttccaagtctagcac

SEQ ID NO: 123884 - DNA, 120 bp, Artificial Sequence
  ENSG00000101335_22 (sequence is synthesized)
aaaacccagaagccacaaaggaaaatactggcagatttaaatgcatgaagtcaacattctttttgtagagctaaagaaaccataagcaaaattaaaagccaaatgcattctgggaggaaa

SEQ ID NO: 123885 - DNA, 120 bp, Artificial Sequence
  ENSG00000101336_0 (sequence is synthesized)
accacgtccctggtcccagctcgggagcacatcagaggcttagaggcgagtgggaagggactcagacagtgcaggacgagaaacgcccgcggcaccaaagcccctcagagcgtcgccccc

SEQ ID NO: 123886 - DNA, 120 bp, Artificial Sequence
  ENSG00000101336_1 (sequence is synthesized)
gcctctagttctagaaagtcagtttcccggcactggcaccccggaacctcaggggctgccgagctgggggggcgctcaagctgcgaggatccgggctgcccgcgagacgaggagcgggcg

SEQ ID NO: 123887 - DNA, 120 bp, Artificial Sequence
  ENSG00000101336_2 (sequence is synthesized)
cccaggatggggtgcatgaagtccaagttcctccaggtcggaggcaatacattctcaaaaactgaaaccagcgccagcccacactgtcctgtgtacgtgccggatcccacatccaccatc

SEQ ID NO: 123888 - DNA, 120 bp, Artificial Sequence
  ENSG00000101336_3 (sequence is synthesized)
aagccggggcctaatagccacaacagcaacacaccaggaatcagggaggcaggctctgaggacatcatcgtggttgccctgtatgattacgaggccattcaccacgaagacctcagcttc

SEQ ID NO: 123889 - DNA, 120 bp, Artificial Sequence
  ENSG00000101336_4 (sequence is synthesized)
cagaagggggaccagatggtggtcctagaggaatccggggagtggtggaaggctcgatccctggccacccggaaggagggctacatcccaagcaactatgtcgcccgcgttgactctctg

SEQ ID NO: 123890 - DNA, 120 bp, Artificial Sequence
  ENSG00000101336_5 (sequence is synthesized)
gagacagaggagtggtttttcaagggcatcagccggaaggacgcagagcgccaactgctggctcccggcaacatgctgggctccttcatgatccgggatagcgagaccactaaaggaagc

SEQ ID NO: 123891 - DNA, 120 bp, Artificial Sequence
  ENSG00000101336_6 (sequence is synthesized)
tactctttgtccgtgcgagactacgaccctcggcagggagataccgtgaaacattacaagatccggaccctggacaacgggggcttctacatatccccccgaagcaccttcagcactctg

SEQ ID NO: 123892 - DNA, 120 bp, Artificial Sequence
  ENSG00000101336_7 (sequence is synthesized)
caggagctggtggaccactacaagaaggggaacgacgggctctgccagaaactgtcggtgccctgcatgtcttccaagccccagaagccttgggagaaagatgcctgggagatccctcgg

SEQ ID NO: 123893 - DNA, 120 bp, Artificial Sequence
  ENSG00000101336_8 (sequence is synthesized)
gtctggatggccacctacaacaagcacaccaaggtggcagtgaagacgatgaagccagggagcatgtcggtggaggccttcctggcagaggccaacgtgatgaaaactctgcagcatgac

SEQ ID NO: 123894 - DNA, 120 bp, Artificial Sequence
  ENSG00000101336_9 (sequence is synthesized)
aagctggtcaaacttcatgcggtggtcaccaaggagcccatctacatcatcacggagttcatggccaaaggaagcttgctggactttctgaaaagtgatgagggcagcaagcagccattg

SEQ ID NO: 123895 - DNA, 120 bp, Artificial Sequence
  ENSG00000101336_10 (sequence is synthesized)
ccaaaactcattgacttctcagcccagattgcagaaggcatggccttcatcgagcagaggaactacatccaccgagacctccgagctgccaacatcttggtctctgcatccctggtgtgt

SEQ ID NO: 123896 - DNA, 120 bp, Artificial Sequence
  ENSG00000101336_11 (sequence is synthesized)
aagattgctgactttggcctggcccgggtcattgaggacaacgagtacacggctcgggaaggggccaagttccccatcaagtggacagctcctgaagccatcaactttggctccttcacc

SEQ ID NO: 123897 - DNA, 120 bp, Artificial Sequence
  ENSG00000101336_12 (sequence is synthesized)
atcaagtcagacgtctggtcctttggtatcctgctgatggagatcgtcacctacggccggatcccttacccagggatgtcaaaccctgaagtgatccgagctctggagcgtggataccgg

SEQ ID NO: 123898 - DNA, 120 bp, Artificial Sequence
  ENSG00000101336_13 (sequence is synthesized)
atgcctcgcccagagaactgcccagaggagctctacaacatcatgatgcgctgctggaaaaaccgtccggaggagcggccgaccttcgaatacatccagagtgtgctggatgacttctac

SEQ ID NO: 123899 - DNA, 120 bp, Artificial Sequence
  ENSG00000101336_14 (sequence is synthesized)
acggccacagagagccagtaccaacagcagccatgatagggaggaccagggcagggccagggggtgcccaggtggtggctgcaaggtggctccagcaccatccgccagggcccacacccc

SEQ ID NO: 123900 - DNA, 120 bp, Artificial Sequence
  ENSG00000101336_15 (sequence is synthesized)
cttcctactcccagacacccaccctcgcttcagccacagtttcctcatctgtccagtgggtaggttggactggaaaatctctttttgactcttgcaatccacaatctgacattctcagga

SEQ ID NO: 123901 - DNA, 120 bp, Artificial Sequence
  ENSG00000101336_16 (sequence is synthesized)
agcccccaagttgatatttctatttcctggaatggttggattttagttacagctgtgatttggaagggaaactttcaaaatagtgaaatgaatatttaaataaaagatataaatgccaaa

SEQ ID NO: 123902 - DNA, 120 bp, Artificial Sequence
  ENSG00000101336_17 (sequence is synthesized)
tgctgccccaacattgccctaacagcctcctgtcttcccaaggttgggcagggtgagcttggggtgaaagggagctgactggccaccaacagtgtcctgactcgactctccgggacgcag

SEQ ID NO: 123903 - DNA, 120 bp, Artificial Sequence
  ENSG00000101336_18 (sequence is synthesized)
agcccaggcttggcccctcagcctgagctccaccaaacaggtgtgagtgagcatctcaggcctccggcctgggcagaagcaaaagcagtgctgagaaacgagtgaacagtaatgatagca

SEQ ID NO: 123904 - DNA, 120 bp, Artificial Sequence
  ENSG00000101336_19 (sequence is synthesized)
gctgaagtgacaatgtaatggtagtatcagcagcattgcaaaaatacagtaacaattgtcatactaatagtaccaaccataattgcgtgagtataagaccaagagtagcagcaggaacaa

SEQ ID NO: 123905 - DNA, 120 bp, Artificial Sequence
  ENSG00000101336_20 (sequence is synthesized)
cagcaagagttgtaaaaagagaagcagtcatgctaggagaggtatttaccaacttcttttatgtttatacaaagctgactatgaacccagcactgttgtaagcctttacggttattaaca

SEQ ID NO: 123906 - DNA, 120 bp, Artificial Sequence
  ENSG00000101336_21 (sequence is synthesized)
ccctaatcctcacaataatcctattgtgtgacacacaaatacattcttcttgaaaataaaaacacaggccaggtgcagtggctcacacttgtactcccagcattttgggaggctgaggca

SEQ ID NO: 123907 - DNA, 120 bp, Artificial Sequence
  ENSG00000101337_0 (sequence is synthesized)
gtcattacggcgacacgtggatccaagatggcgacggcgatggattggttgccgtggtctttactgcttttctccctgatgtgtgaaacaagcgccttctatgtgcctggggtcgcgcct

SEQ ID NO: 123908 - DNA, 120 bp, Artificial Sequence
  ENSG00000101337_1 (sequence is synthesized)
atcaacttccaccagaacgatcccgtagaaatcaaggctgtgaagctcaccagctctcgaacccagctaccttatgaatactattcactgcccttctgccagcccagcaagataacctac

SEQ ID NO: 123909 - DNA, 120 bp, Artificial Sequence
  ENSG00000101337_2 (sequence is synthesized)
aaggcagagaatctgggagaggtgctgagaggggaccggattgtcaacacccctttccaggttctcatgaacagcgagaagaagtgtgaagttctgtgcagccagtccaacaagccagtg

SEQ ID NO: 123910 - DNA, 120 bp, Artificial Sequence
  ENSG00000101337_3 (sequence is synthesized)
accctgacagtggagcagagccgactcgtggccgagcggatcacagaagactactacgtccacctcattgctgacaacctgcctgtggccacccggctggagctctactccaaccgagac

SEQ ID NO: 123911 - DNA, 120 bp, Artificial Sequence
  ENSG00000101337_4 (sequence is synthesized)
agcgatgacaagaagaaggaaaaagatgtgcagtttgaacacggctaccggctcggcttcacagatgtcaacaagatctacctgcacaaccacctctcattcatcctttactatcatcgg

SEQ ID NO: 123912 - DNA, 120 bp, Artificial Sequence
  ENSG00000101337_5 (sequence is synthesized)
gaggacatggaagaggaccaggagcacacgtaccgtgtcgtccgcttcgaggtgattccccagagcatcaggctggaggacctcaaagcagatgagaagagttcgtgcactctgcctgag

SEQ ID NO: 123913 - DNA, 120 bp, Artificial Sequence
  ENSG00000101337_6 (sequence is synthesized)
ggtaccaactcctcgccccaagaaattgaccccaccaaggagaatcagctgtacttcacctactctgtccactgggaggaaagtgatatcaaatgggcctctcgctgggacacttacctg

SEQ ID NO: 123914 - DNA, 120 bp, Artificial Sequence
  ENSG00000101337_7 (sequence is synthesized)
accatgagtgacgtccagatccactggttttctatcattaactccgttgttgtggtcttcttcctgtcaggtatcctgagcatgattatcattcggaccctccggaaggacattgccaac

SEQ ID NO: 123915 - DNA, 120 bp, Artificial Sequence
  ENSG00000101337_8 (sequence is synthesized)
tacaacaaggaggatgacattgaagacaccatggaggagtctgggtggaagttggtgcacggcgacgtcttcaggcccccccagtaccccatgatcctcagctccctgctgggctcaggc

SEQ ID NO: 123916 - DNA, 120 bp, Artificial Sequence
  ENSG00000101337_9 (sequence is synthesized)
attcagctgttctgtatgatcctcatcgtcatctttgtagccatgcttgggatgctgtcgccctccagccggggagctctcatgaccacagcctgcttcctcttcatgttcatgggggtg

SEQ ID NO: 123917 - DNA, 120 bp, Artificial Sequence
  ENSG00000101337_10 (sequence is synthesized)
tttggcggattttctgctggccgtctgtaccgcactttaaaaggccatcggtggaagaaaggagccttctgtacggcaactctgtaccctggtgtggtttttggcatctgcttcgtattg

SEQ ID NO: 123918 - DNA, 120 bp, Artificial Sequence
  ENSG00000101337_11 (sequence is synthesized)
aattgcttcatttggggaaagcactcatcaggagcggtgccctttcccaccatggtggctctgctgtgcatgtggttcgggatctccctgcccctcgtctacttgggctactacttcggc

SEQ ID NO: 123919 - DNA, 120 bp, Artificial Sequence
  ENSG00000101337_12 (sequence is synthesized)
ttccgaaagcagccatatgacaaccctgtgcgcaccaaccagattccccggcagatccccgagcagcggtggtacatgaaccgatttgtgggcatcctcatggctgggatcttgcccttc

SEQ ID NO: 123920 - DNA, 120 bp, Artificial Sequence
  ENSG00000101337_13 (sequence is synthesized)
ggcgccatgttcatcgagctcttcttcatcttcagtgctatctgggagaatcagttctattacctctttggcttcctgttccttgttttcatcatcctggtggtatcctgttcacaaatc

SEQ ID NO: 123921 - DNA, 120 bp, Artificial Sequence
  ENSG00000101337_14 (sequence is synthesized)
agcatcgtcatggtgtacttccagctgtgtgcagaggattaccgctggtggtggagaaatttcctagtctccgggggctctgcattctacgtcctggtttatgccatcttttatttcgtt

SEQ ID NO: 123922 - DNA, 120 bp, Artificial Sequence
  ENSG00000101337_15 (sequence is synthesized)
tacacggccctcatggtcttgtccttctggctgctaacgggtaccatcggcttctatgcagcctacatgtttgttcgcaagatctatgctgctgtgaagatagactgattggagtggacc

SEQ ID NO: 123923 - DNA, 120 bp, Artificial Sequence
  ENSG00000101337_16 (sequence is synthesized)
acggccaagcttgctccgtcctcggacaggaagccaccctgcgtgggggactgcaggcacgcaaaataaaataactcctgctcgtttggaatgtaactcctggcacagtgttcctggatc

SEQ ID NO: 123924 - DNA, 120 bp, Artificial Sequence
  ENSG00000101337_17 (sequence is synthesized)
ctggggctgcgtggggggcgggagggcctgtagataatcttgcgtttttcgtcatcttattccagttctgtgggggatgagtttttttgtgggttgctttttcttcagtgctaagaaagt

SEQ ID NO: 123925 - DNA, 120 bp, Artificial Sequence
  ENSG00000101337_18 (sequence is synthesized)
tccctccaacaggaactctctgacctgtttattcaggtgtatttctggtttggatttttttttccttctttgttttaacaaatggatccaggatggataaatccaccgagataagggttt

SEQ ID NO: 123926 - DNA, 120 bp, Artificial Sequence
  ENSG00000101337_19 (sequence is synthesized)
tggtcactgtctccacctcagttcctcagggctgttggccaccctatgactaactggaagaggacacgccagagcttcagtgaggtttccgagcctctccctgcccatcctcaccactga

SEQ ID NO: 123927 - DNA, 120 bp, Artificial Sequence
  ENSG00000101337_20 (sequence is synthesized)
ggccacgacaaagcacagctccagctcggacagcaccctcagtgccagccagcctctgccagacctctctttccctcttctccccagcctcctccagggctgcccaaggcagggtttcca

SEQ ID NO: 123928 - DNA, 120 bp, Artificial Sequence
  ENSG00000101337_21 (sequence is synthesized)
gccaggcctcggggtcatcttttcaccaggagcaaacccaagtcttagttgctacaagaaaatcccctggaagtactgggggccaggttccccagacagcaggaattgcccctgttcaga

SEQ ID NO: 123929 - DNA, 120 bp, Artificial Sequence
  ENSG00000101337_22 (sequence is synthesized)
gcagccggagtttgctggaccacaaggaagaagagaagagacttgcagtgaactgtttttgtgccaagaaaccctggacctggggccaagtatttcccaagccaagcatccacttgtctg

SEQ ID NO: 123930 - DNA, 120 bp, Artificial Sequence
  ENSG00000101337_23 (sequence is synthesized)
tgtctgggaagggatggccaaggccgctagggtccttacccctcaggatcactccccagccctttcctcaggaggtaccgctctccaaggtgtgctagcagtgggccctgcccaacttca

SEQ ID NO: 123931 - DNA, 120 bp, Artificial Sequence
  ENSG00000101337_24 (sequence is synthesized)
ggcagaacagggaggcccagagattacagatcccctcctgtaagtggccaggcattctctccctgccctctctggcctctggggtcatactcacttctttagccagccccatcccctcca

SEQ ID NO: 123932 - DNA, 120 bp, Artificial Sequence
  ENSG00000101337_25 (sequence is synthesized)
ccccacacctgagttcttgcctcctccttttggggacacccaaaacactgcttgtgagaaggaagatggaaggtaagttctgtcgttctttccccaatccccaggaatggacaagaagcc

SEQ ID NO: 123933 - DNA, 120 bp, Artificial Sequence
  ENSG00000101337_26 (sequence is synthesized)
aacttagaaagaagggtctcacgtggctggcctggctcctccgtagacccctgttcttttcaacctctgcccacccgtgcatgtcatcacaaacatttgctcttaagttacaagagacca

SEQ ID NO: 123934 - DNA, 120 bp, Artificial Sequence
  ENSG00000101337_27 (sequence is synthesized)
catccacccagggattagggttcaagtagcagctgctaacccttgcaccagcccttgtgggactcccaacacaagacaaagctcaggatgctggtgatgctaggaagatgtccctcccct

SEQ ID NO: 123935 - DNA, 120 bp, Artificial Sequence
  ENSG00000101337_28 (sequence is synthesized)
cactgccccacattctcccagtggctctaccagcctcacccatcaaaccagtgaatttctcaatcttgcctcacagtgactgcagcgccaagcggcatccaccaagcatcaagttggaga

SEQ ID NO: 123936 - DNA, 120 bp, Artificial Sequence
  ENSG00000101337_29 (sequence is synthesized)
aaagggaacccaagcagtagagagcgatattggagtcttttgttcattcaaatcttggatttttttttttccctaagagattctctttttagggggaatgggaaacggacacctcataaa

SEQ ID NO: 123937 - DNA, 120 bp, Artificial Sequence
  ENSG00000101337_30 (sequence is synthesized)
gggttcaaagatcatcaatttttctgactttttaaatcattatcattattatttttaattaaaaaaatgcctgtatgcctttttttggtcggattgtaaataaatataccattgtcctac

SEQ ID NO: 123938 - DNA, 120 bp, Artificial Sequence
  ENSG00000101337_31 (sequence is synthesized)
ccaagatggcgacggcgatggtgagtgaaggagactccgggagcgggagctggagcggggccctccggggtatcccaggatcttccagcaccccatgcctggccctgagccacctccggg

SEQ ID NO: 123939 - DNA, 120 bp, Artificial Sequence
  ENSG00000101337_32 (sequence is synthesized)
acccctgactcaggcctgagggctacctctgactgggcttgtcttccccgaaatccacctccctggccctgcccctgcactcaggcttgtgaaggccccgagttttgggggaggcgccgt

SEQ ID NO: 123940 - DNA, 120 bp, Artificial Sequence
  ENSG00000101337_33 (sequence is synthesized)
atctttacctctctgtgttactcacagctcctgggagggtggacagaatgattcctgcttgtcagggtcattgtgaagttggaataagtcattgtaaaaatgcttgacttcaggaaatgc

SEQ ID NO: 123941 - DNA, 120 bp, Artificial Sequence
  ENSG00000101337_34 (sequence is synthesized)
tgttgtaatggtgatgatgactcctcccaaagagtgccaagatgaaagttggtaggaaggcccttcagaggcatgtaagtgtggctgacccagctcggggcccagcacagatggtacctt

SEQ ID NO: 123942 - DNA, 120 bp, Artificial Sequence
  ENSG00000101337_35 (sequence is synthesized)
gtaccaagtcagtaccggacatgtatctgctattccagagtagtggcccagcccctccctgctgagaccacctcacccacacaggtttgcctgggagaagggtcagaggaggtgttggct

SEQ ID NO: 123943 - DNA, 120 bp, Artificial Sequence
  ENSG00000101337_36 (sequence is synthesized)
gcccatggtaccaaagcccatgtgcacttcccagggaagccccctctgtttcatctgtgtgactctgggccagtcaccagcgtctctgatccttgactttcttagctctaccaggccaag

SEQ ID NO: 123944 - DNA, 120 bp, Artificial Sequence
  ENSG00000101337_37 (sequence is synthesized)
ctttcatagacacacacatgtagcaattgtatatgaggcatgtggcataaggcctagcgcttggtaagctgctcaagtggtggtggctgctctataattttgatttggataagaatcatt

SEQ ID NO: 123945 - DNA, 120 bp, Artificial Sequence
  ENSG00000101337_38 (sequence is synthesized)
attttctacaagctgctgagttcaggctggggtctacccagagcaggtcagtcaacccctggcccctccctaaggacagtgtggctcaccccctgctctggggaagaggggccagagcca

SEQ ID NO: 123946 - DNA, 120 bp, Artificial Sequence
  ENSG00000101337_39 (sequence is synthesized)
catgccaggcccacgggccctgatggtgtcatgatgatgtgtccactcctgcccttgtgacaggttggtgtgccaggggaaggggagcagggtggtcaagccagctgaagccccactgtg

SEQ ID NO: 123947 - DNA, 120 bp, Artificial Sequence
  ENSG00000101337_40 (sequence is synthesized)
ttctgtggtttttagaaatgcatacagttctggaaccaccatcacagtcaagctgtgaaacatttccatcaccccatatgttactgctcttaccagagtcttcagcccctcaagcaactg

SEQ ID NO: 123948 - DNA, 120 bp, Artificial Sequence
  ENSG00000101342_0 (sequence is synthesized)
actcactgcccacggccggctgagcagggacaggagaatgagaggcctccgctggcgttacactcggctgcccagccaggtggaggacaccctgtctggggaggagggtaacgaagagga

SEQ ID NO: 123949 - DNA, 120 bp, Artificial Sequence
  ENSG00000101342_1 (sequence is synthesized)
agaggaggaggaggcagctccagacccagctgctgctcctgaggatcccacggtgccccagctgacagaagccagccaggttttgagtgcctcagagattcggcagctcagctttcactt

SEQ ID NO: 123950 - DNA, 120 bp, Artificial Sequence
  ENSG00000101342_2 (sequence is synthesized)
cccaccaagagtcaccggccatccctggagtctggtcttctgcacgtcaagggacggtttcagcctgcagagcctgtaccggcggatggagggctgcagcgggccagtgctgctggtgct

SEQ ID NO: 123951 - DNA, 120 bp, Artificial Sequence
  ENSG00000101342_3 (sequence is synthesized)
cagggaccaggacgggcagatatttggagccttctcctcctcggctatccgactcagcaaaggcttctatggtactggcgagacattcctcttctccttctccccacagctgaaggtctt

SEQ ID NO: 123952 - DNA, 120 bp, Artificial Sequence
  ENSG00000101342_4 (sequence is synthesized)
taagtggactggaagcaactctttctttgtgaagggagacttggattcactgatgatgggcagtggcagtggccggtttgggctgtggttggatggagacttgttccgcgggggaagctc

SEQ ID NO: 123953 - DNA, 120 bp, Artificial Sequence
  ENSG00000101342_5 (sequence is synthesized)
cccttgcccgaccttcaacaacgaggtgctggcccggcaggagcagttctgcatccaggagctggaggcttggcttctcagctgacagccctgcggcaacagaattctatgattgaagcc

SEQ ID NO: 123954 - DNA, 120 bp, Artificial Sequence
  ENSG00000101342_6 (sequence is synthesized)
tctaaatgaattgtgcaggagagggagtttgtaaacaactgactacagacattcacattgggtcatctttaaaaagctggactctgcttttggatgcttctcggaggcgagttggatttt

SEQ ID NO: 123955 - DNA, 120 bp, Artificial Sequence
  ENSG00000101342_7 (sequence is synthesized)
ggactgaagtactgtcgttccattcctttttttgaggtgttatgagtggggctataacatcgccatcctattaggaagagagagaaaaacaggcaatagagaaaagccagtttccatcat

SEQ ID NO: 123956 - DNA, 120 bp, Artificial Sequence
  ENSG00000101342_8 (sequence is synthesized)
tcatcttgcatatagattgcttctagctgtcctcaatccagggaaactccaaattacatatgccctgtgcttggggcaaattagaaacactacagtcttacgcaggaagagccttcatga

SEQ ID NO: 123957 - DNA, 120 bp, Artificial Sequence
  ENSG00000101342_9 (sequence is synthesized)
aaacagccactggcctctgcagagatgactgggagcagcataccactgcccacctctatggcctccttcacacaccttcacggagcacaaactctgtcctgttttcccaggagaaagacg

SEQ ID NO: 123958 - DNA, 120 bp, Artificial Sequence
  ENSG00000101342_10 (sequence is synthesized)
ggatgcactgaacccctagcttctctctcgcctggtcccctctgcaataaaaggcccaggtctacaagatggcaaagaaggggaggaagaacagtatgtacctgcagaatttaaattttt

SEQ ID NO: 123959 - DNA, 120 bp, Artificial Sequence
  ENSG00000101342_11 (sequence is synthesized)
ctctgcatcaaagctctaacgttggtcccatcagcataggctccagccaaagaagctcctccacccaaaataagggagagatccaaagggaggcgatacaatgacgtgaaaccatagagg

SEQ ID NO: 123960 - DNA, 120 bp, Artificial Sequence
  ENSG00000101342_12 (sequence is synthesized)
taagaagcaaggcctcctaatacttgactctatgctaaactgttctgaacttgtgggtagatcttctttggttacaagatgatgcacgatcttggagagcctctgttgtaccaggaatac

SEQ ID NO: 123961 - DNA, 120 bp, Artificial Sequence
  ENSG00000101342_13 (sequence is synthesized)
aatgctggtgggaggattcgtgctcctcatctgcttatttgctctcagatccattcttcactcttcctctccctactctgtctcacaggagctactccggtaaattacatttctcagctc

SEQ ID NO: 123962 - DNA, 120 bp, Artificial Sequence
  ENSG00000101342_14 (sequence is synthesized)
ccatgcctgttggtttccagttagatttggtcagtgggaggctctggtgggagactggaggtgagaagagggcagagaagtcaggttttttctctccctacctcctctggcacgagcggc

SEQ ID NO: 123963 - DNA, 120 bp, Artificial Sequence
  ENSG00000101342_15 (sequence is synthesized)
agtggcagtgactattctgtggttctagcttttgcaggtggccccagctcctggactcccacctgctcccttggtctctcctatcctagaggtggtagcagcttcctgctgttgaatcac

SEQ ID NO: 123964 - DNA, 120 bp, Artificial Sequence
  ENSG00000101342_16 (sequence is synthesized)
tgtcctctatgctcatttagctctgccaaaacttttgtatctcacccccatgttaaattttttctgttgaactacactggatctgacttgatagaactattaaaaatagtttttaaaaaa

SEQ ID NO: 123965 - DNA, 120 bp, Artificial Sequence
  ENSG00000101342_17 (sequence is synthesized)
ctgctggccagcctccttgtggcctggggacccaagatacaggtgggggcaggcactgctcttttgcagaggtgactttgaaggattaaaagacgcttacaccttactcaagcagcacag

SEQ ID NO: 123966 - DNA, 120 bp, Artificial Sequence
  ENSG00000101342_18 (sequence is synthesized)
agaccctaagctaacagggtcttagaaaactcagaaaaatccacatctcttccccgctagtgcctgcctcctggcaaagggaagatttttcactatgctgttcctcgccagctactgaac

SEQ ID NO: 123967 - DNA, 120 bp, Artificial Sequence
  ENSG00000101342_19 (sequence is synthesized)
gaggaaaaccaacctcatgaacattatcattttagaggttctacaactgattcatgtttattgtagaaaaaccagaagacgttaaaaaaattaaaattgcctaaaattcaacccccccca

SEQ ID NO: 123968 - DNA, 120 bp, Artificial Sequence
  ENSG00000101343_0 (sequence is synthesized)
ctttccgacactctttgggaagagaatctctaatgacggcaacagtggagaacctaacgttccagaaggacactttgggaaatgctgttgacaaaaacacatccagattggagctccgtt

SEQ ID NO: 123969 - DNA, 120 bp, Artificial Sequence
  ENSG00000101343_1 (sequence is synthesized)
cttactcccttgcagggcgccacggctcgacagagccactcgtcctcgcctggtcatcccagttccggaggctgacctggggatgcgccctggacgccctgcaccgcagtccttgcgtcg

SEQ ID NO: 123970 - DNA, 120 bp, Artificial Sequence
  ENSG00000101343_2 (sequence is synthesized)
ctgctagtcagcacggcgttacccacctcatccgcagctccaggacgccgcactccacgcgctgccgcaaggaggacgcgcagcctggtcaccatggaaacggtgccgcctccgtcacgg

SEQ ID NO: 123971 - DNA, 120 bp, Artificial Sequence
  ENSG00000101343_3 (sequence is synthesized)
ctcaagcgagaggtcaaaggtcagtcctgcaagttccgcttccggttccgagatcctgtttgttttctgaaagctttgtggtttcggtgagctctcagagccgatttctagcgtccgtgc

SEQ ID NO: 123972 - DNA, 120 bp, Artificial Sequence
  ENSG00000101343_4 (sequence is synthesized)
cggggacaggtgtccagaggtcgactgctgcagacatggcggcctccaccgcggccgggaagcagcggattcccaaagtggccaaggtgaaaaacaaagccccggctgaggtacagataa

SEQ ID NO: 123973 - DNA, 120 bp, Artificial Sequence
  ENSG00000101343_5 (sequence is synthesized)
ctgctgaacaactcttaagagaggctaaagaaagagaacttgagcttcttccacctccacctcaacagaagatcacagatgaagaagaattaaatgattataaactaaggaaaaggaaga

SEQ ID NO: 123974 - DNA, 120 bp, Artificial Sequence
  ENSG00000101343_6 (sequence is synthesized)
cttttgaagataatataagaaaaaacaggactgtgattagtaactggataaaatacgcacaatgggaagaaagcctaaaggagattcaaagggctcgatccatatacgagcgtgctttag

SEQ ID NO: 123975 - DNA, 120 bp, Artificial Sequence
  ENSG00000101343_7 (sequence is synthesized)
atgtagactaccgaaatattacactctggctgaaatacgcagaaatggaaatgaagaatcgccaagtcaaccatgctcgaaatatctgggaccgggccataacaacgctgcctcgagtta

SEQ ID NO: 123976 - DNA, 120 bp, Artificial Sequence
  ENSG00000101343_8 (sequence is synthesized)
atcagttctggtacaagtacacgtacatggaggaaatgttgggaaacgttgccggtgcccggcaggtgtttgagcgctggatggagtggcagcctgaggagcaagcctggcactcctaca

SEQ ID NO: 123977 - DNA, 120 bp, Artificial Sequence
  ENSG00000101343_9 (sequence is synthesized)
tcaactttgagctgagatacaaagaggtggatcgggcccgcaccatttatgagcgatttgtcctcgtgcaccctgatgttaagaactggatcaagtatgcccgctttgaagaaaaacatg

SEQ ID NO: 123978 - DNA, 120 bp, Artificial Sequence
  ENSG00000101343_10 (sequence is synthesized)
cttattttgcccatgcacggaaagtgtatgagagagctgtggaattctttggagatgaacatatggatgagcacctttatgttgcctttgccaagtttgaagaaaatcagaaagagtttg

SEQ ID NO: 123979 - DNA, 120 bp, Artificial Sequence
  ENSG00000101343_11 (sequence is synthesized)
aaagggtacgagtgatttacaagtatgccctggacagaatttcaaaacaagatgcccaagaactctttaaaaattataccatctttgagaagaagtttggtgataggcggggtattgaag

SEQ ID NO: 123980 - DNA, 120 bp, Artificial Sequence
  ENSG00000101343_12 (sequence is synthesized)
atatcattgtgagcaaacggagattccagtacgaagaagaagtgaaggcgaatccacacaattatgatgcatggtttgattacttgcgcttggtagaaagtgacgcagaagctgaagccg

SEQ ID NO: 123981 - DNA, 120 bp, Artificial Sequence
  ENSG00000101343_13 (sequence is synthesized)
tgagagaagtctatgaaagggccattgccaatgtcccacccattcaggagaagaggcactggaagcgctacatttatctttggatcaactatgcactctatgaagaattggaggcaaagg

SEQ ID NO: 123982 - DNA, 120 bp, Artificial Sequence
  ENSG00000101343_14 (sequence is synthesized)
atcctgagaggacaagacaggtgtatcaagcctctttggaactaattcctcacaaaaagttcacatttgccaaaatgtggatactgtatgcacagtttgaaatacgacagaagaatctgt

SEQ ID NO: 123983 - DNA, 120 bp, Artificial Sequence
  ENSG00000101343_15 (sequence is synthesized)
cattagccagaagagcattgggaacttccataggcaaatgtccaaagaacaaattatttaaagtttacatagaattggagctacagcttcgagaatttgacagatgccggaagctttatg

SEQ ID NO: 123984 - DNA, 120 bp, Artificial Sequence
  ENSG00000101343_16 (sequence is synthesized)
aaaagttcctggaatttggacctgaaaattgtacctcatggattaaattcgctgaattagagacaatccttggtgatattgacagagcacgggcaatctatgaattagccatcagtcagc

SEQ ID NO: 123985 - DNA, 120 bp, Artificial Sequence
  ENSG00000101343_17 (sequence is synthesized)
cacgtttagacatgccagaggtgctttggaaatcatatattgattttgaaattgagcaggaagaaacagaaagaacacgaaacctttaccggcggttgcttcaacggacgcagcatgtca

SEQ ID NO: 123986 - DNA, 120 bp, Artificial Sequence
  ENSG00000101343_18 (sequence is synthesized)
aacaaaaccatgcgaaactgtgaagaaaaggaagagagacttatgctgctggaatcttggcgaagttttgaagaagaatttggaacagcttcagataaggagagagtagacaaactcatg

SEQ ID NO: 123987 - DNA, 120 bp, Artificial Sequence
  ENSG00000101343_19 (sequence is synthesized)
ccagagaaagtcaagaagagaagaaaggtccagactgatgatgggtctgatgcaggctgggaagaatactttgattacatctttccagaagatgctgccaaccaacctaacctcaaactc

SEQ ID NO: 123988 - DNA, 120 bp, Artificial Sequence
  ENSG00000101343_20 (sequence is synthesized)
ctggccatggccaaactgtggaagaaacagcagcaggaaaaggaggatgctgagcaccatccagatgaggacgtcgatgagagtgaatcctgatctttttttcatagacaaatgttttgt

SEQ ID NO: 123989 - DNA, 120 bp, Artificial Sequence
  ENSG00000101343_21 (sequence is synthesized)
tatttttataaattaattgtttggaactcttgtgactcctggaagttcttatatatttcaccagtaagaaattgattggtatctttgatggctactttttaagttattttttaaatgctc

SEQ ID NO: 123990 - DNA, 120 bp, Artificial Sequence
  ENSG00000101343_22 (sequence is synthesized)
ttgggttagctaggggtagggattgcaagtaaaggacttttttaactgctggatttgtttttccaactgagtccaaacttttctaatgtctgtccacatcatgcattaggaaatgtaatt

SEQ ID NO: 123991 - DNA, 120 bp, Artificial Sequence
  ENSG00000101343_23 (sequence is synthesized)
aaggtaacattctacagttacttttcatgtcatacccataaagatagtttatgcattcatctgaaatgtgtaactttttcatgtcttcagagtcacagacttgagttcatttcccagctc

SEQ ID NO: 123992 - DNA, 120 bp, Artificial Sequence
  ENSG00000101343_24 (sequence is synthesized)
tgccactcatgattatataacttaattttcattttcctcattcacaaaatgggccaatagtttgacagctcattttgaagattacattataaaaggaatatacctggtgggtgcatagta

SEQ ID NO: 123993 - DNA, 120 bp, Artificial Sequence
  ENSG00000101343_25 (sequence is synthesized)
agtgctcagtaaattgtttgttctaagccacttttaaaaatggtttcattccttgtagaattgaatgcgagtggattaataatttaccttactttcttactagtgtccagttatattgtt

SEQ ID NO: 123994 - DNA, 120 bp, Artificial Sequence
  ENSG00000101343_26 (sequence is synthesized)
ttttagaacaacacttggaaaataatttgcagtgattatatttctgaacaaggttcagaaaacattgtttactaagaatttagtctaataatttcagttaggcgctcatcagttctccag

SEQ ID NO: 123995 - DNA, 120 bp, Artificial Sequence
  ENSG00000101343_27 (sequence is synthesized)
agtggttgagtttgtaataccttgtttaaagaataatggcttgttcacgtgtgtgctatgaaaaatgatgtcccatgttcacataaatttgggaaattctggactaagacttaagtctcg

SEQ ID NO: 123996 - DNA, 120 bp, Artificial Sequence
  ENSG00000101343_28 (sequence is synthesized)
ttaatcaaatctctttatagttaggcttctgtacattatgtatctccagtagcaatgttgccatattatttatttcccaaacttagtggacaatggagtcatttctacctagagtaccag

SEQ ID NO: 123997 - DNA, 120 bp, Artificial Sequence
  ENSG00000101343_29 (sequence is synthesized)
taaacatctcccagtgtgctatagtagaaaatgtctactcctcactgctgacatgttaaacttactcttggtttagagcatgtgtagaaacacctaaggtagctctatgctaaataatga

SEQ ID NO: 123998 - DNA, 120 bp, Artificial Sequence
  ENSG00000101343_30 (sequence is synthesized)
agagtagcacaagaatgaatgtatttgctgatacgttgctcacattctcaagcaaaaattcaactgcattaaccgatctgagagttttcctttaacctggactgtgtttctcaagcacat

SEQ ID NO: 123999 - DNA, 120 bp, Artificial Sequence
  ENSG00000101343_31 (sequence is synthesized)
tttttctttgttcactgcccaaggactagaactgtatttttaaggttgttttcccctaaaaggacctttagtaagcaaatttattattaaatgtgcacatcttattcacccaagggaata

SEQ ID NO: 124000 - DNA, 120 bp, Artificial Sequence
  ENSG00000101343_32 (sequence is synthesized)
aaagctacttcgtaatgttgttactaaattttatcttgaaaataaataacagtgtttgaggacagaagaaactaggactgttgttgagataaaatctgttttcagcctgactgctttagt

SEQ ID NO: 124001 - DNA, 120 bp, Artificial Sequence
  ENSG00000101343_33 (sequence is synthesized)
cactggacgagcatcagctactgcggtgtcagatcacttctcgagtagaggtctgcctagtgagtgagcaggagaacatcatcttaatagcctttggctcacccagagtcagggagagat

SEQ ID NO: 124002 - DNA, 120 bp, Artificial Sequence
  ENSG00000101343_34 (sequence is synthesized)
gaaaataataggtcagaatgcaagtgacttaatcacagtcttcctagaattatctgtttatgttgcatgaatgcataagaaaaaaattctgtcatgttcccaaggtagaattgtaataag

SEQ ID NO: 124003 - DNA, 120 bp, Artificial Sequence
  ENSG00000101343_35 (sequence is synthesized)
catgtgccagtgtgaaagctggaaggaaaaaagctattctctaacaggagaacataaagattcatttctctcccaccctcaactccaccaaagtaaatcctttcgatagtaaaagtttaa

SEQ ID NO: 124004 - DNA, 120 bp, Artificial Sequence
  ENSG00000101343_36 (sequence is synthesized)
agataccaatgttatttatcttatccacatgtgttctttagttgttcagtaaaaatcctatgttcctagatgtaggttagagtgatacttcagctgtgctttggatgggggcatgctgct

SEQ ID NO: 124005 - DNA, 120 bp, Artificial Sequence
  ENSG00000101343_37 (sequence is synthesized)
aggtgctttggaaatcatatattgattttgaaattgagcaggaagaaacagaaagaacacgaaacctttaccggcggttgcttcaacggacgcagcatgtcaaggaaaagaaggaagttt

SEQ ID NO: 124006 - DNA, 120 bp, Artificial Sequence
  ENSG00000101346_0 (sequence is synthesized)
gctcgcgtccctccttccctccccgactgtgcgccgcggctggctcgggttcccgggccgacatgggcgccgccgcgtgggcacggccgctgagcgtgtctttcctgctgctgcttctgc

SEQ ID NO: 124007 - DNA, 120 bp, Artificial Sequence
  ENSG00000101346_1 (sequence is synthesized)
cgctcccggggatgcctgcgggctcctgggacccggccggttacctgctctactgcccctgcatggggcgctttgggaaccaggccgatcacttcttgggctctctggcatttgcaaagc

SEQ ID NO: 124008 - DNA, 120 bp, Artificial Sequence
  ENSG00000101346_2 (sequence is synthesized)
tgctaaaccgtaccttggctgtccctccttggattgagtaccagcatcacaagcctcctttcaccaacctccatgtgtcctaccagaagtacttcaagctggagcccctccaggcttacc

SEQ ID NO: 124009 - DNA, 120 bp, Artificial Sequence
  ENSG00000101346_3 (sequence is synthesized)
atcgggtcatcagcttggaggatttcatggagaagctggcacccacccactggccccctgagaagcgggtggcatactgctttgaggtggcagcccagcgaagcccagataagaagacgt

SEQ ID NO: 124010 - DNA, 120 bp, Artificial Sequence
  ENSG00000101346_4 (sequence is synthesized)
gccccatgaaggaaggaaacccctttggcccattctgggatcagtttcatgtgagtttcaacaagtcggagctttttacaggcatttccttcagtgcttcctacagagaacaatggagcc

SEQ ID NO: 124011 - DNA, 120 bp, Artificial Sequence
  ENSG00000101346_5 (sequence is synthesized)
agagattttctccaaaggaacatccggtgcttgccctgccaggagccccagcccagttccccgtcctagaggaacacaggccactacagaagtacatggtatggtcagacgaaatggtga

SEQ ID NO: 124012 - DNA, 120 bp, Artificial Sequence
  ENSG00000101346_6 (sequence is synthesized)
agacgggagaggcccagattcatgcccaccttgtccggccctatgtgggcattcatctgcgcattggctctgactggaagaacgcctgtgccatgctgaaggacgggactgcaggctcgc

SEQ ID NO: 124013 - DNA, 120 bp, Artificial Sequence
  ENSG00000101346_7 (sequence is synthesized)
acttcatggcctctccgcagtgtgtgggctacagccgcagcacagcggcccccctcacgatgactatgtgcctgcctgacctgaaggagatccagagggctgtgaagctctgggtgaggt

SEQ ID NO: 124014 - DNA, 120 bp, Artificial Sequence
  ENSG00000101346_8 (sequence is synthesized)
cgctggatgcccagtcggtctacgttgctactgattccgagagttatgtgcctgagctccaacagctcttcaaagggaaggtgaaggtggtgagcctgaagcctgaggtggcccaggtcg

SEQ ID NO: 124015 - DNA, 120 bp, Artificial Sequence
  ENSG00000101346_9 (sequence is synthesized)
acctgtacatcctcggccaagccgaccactttattggcaactgtgtctcctccttcactgcctttgtgaagcgggagcgggacctccaggggaggccgtcttctttcttcggcatggaca

SEQ ID NO: 124016 - DNA, 120 bp, Artificial Sequence
  ENSG00000101346_10 (sequence is synthesized)
ggccccctaagctgcgggacgagttctgattctggccggagcaccagaccctctgatcctggagggaccagagtctgagctggtccttccagccaggcctggcagccagaggtgctccgg

SEQ ID NO: 124017 - DNA, 120 bp, Artificial Sequence
  ENSG00000101346_11 (sequence is synthesized)
gattgcaaactcctcttctcacctgccaaagatggagaagagtgccagggacccctcaaggagggagacgctccatatcccagggcataggacttgcaggttcctaggagcaggagcatc

SEQ ID NO: 124018 - DNA, 120 bp, Artificial Sequence
  ENSG00000101346_12 (sequence is synthesized)
tcccatcgcacgtgctttctgctcttctgggaatttctcacactggcaaagcagtccagcctccgtcttctggtccactctgctctgagcagcctgggatgctgaactcttcagagagat

SEQ ID NO: 124019 - DNA, 120 bp, Artificial Sequence
  ENSG00000101346_13 (sequence is synthesized)
ttttttatagagagatttctataattttgatacaaggtcatgactatcctagaactctctgtggtttttgaaaatcattgaattctattaatgtaggtacctaaagtgaccttaactgaa

SEQ ID NO: 124020 - DNA, 120 bp, Artificial Sequence
  ENSG00000101346_14 (sequence is synthesized)
tgtggatgaggctggggctggtgtgggtcttttggctgcttttcaaggtgtcccccaatgtggccctcaagagccatccccactgcctggccagagccattgttgtcccctacttcctag

SEQ ID NO: 124021 - DNA, 120 bp, Artificial Sequence
  ENSG00000101346_15 (sequence is synthesized)
gccatttctggggcttgggggatgaatgctgtcctgtgctgtaaacactatgcaaatggaagttatcggttgtggtgctgtgcagcgctctgtgggcgactaagtgccactcacgcagca

SEQ ID NO: 124022 - DNA, 120 bp, Artificial Sequence
  ENSG00000101346_16 (sequence is synthesized)
tgttcctggcaaggagcacataccatcaagccacactatcatggtattgttctcacagtcttttggtggttgatggccactgcaaacctggcaccatcagatctcttctgatctcttgcc

SEQ ID NO: 124023 - DNA, 120 bp, Artificial Sequence
  ENSG00000101346_17 (sequence is synthesized)
ccagtggggcctggttggtagaatgttggcattcggttgatatccaaagcctgttctcccagccgtcctcctgcagctggagccttcaggccgtattctcacgagggaacgtttgccaag

SEQ ID NO: 124024 - DNA, 120 bp, Artificial Sequence
  ENSG00000101346_18 (sequence is synthesized)
gctctgacctcacagaagatgcccagggcccagaagccatcagaattatcagtggagaagcaccttttgactcttcccttccaatgtaatctctgccaacaccatgaggcttaaggtgct

SEQ ID NO: 124025 - DNA, 120 bp, Artificial Sequence
  ENSG00000101346_19 (sequence is synthesized)
ctaagtcatgagtgttttggtctcaaatgctgcagttttaataatctgtgactcctgagagcccatggttttttgaccttgtggttctaaaattccttgtctgacccctgtagatctttt

SEQ ID NO: 124026 - DNA, 120 bp, Artificial Sequence
  ENSG00000101346_20 (sequence is synthesized)
ccttgccatgtcacctcccttggcctttgatcctggaaaggtggcagagcctccactgagccaggcccagagctccttgcagtgccttcttccttgtttacctgtgggaggaaacacttt

SEQ ID NO: 124027 - DNA, 120 bp, Artificial Sequence
  ENSG00000101346_21 (sequence is synthesized)
gtcagcatttgctgtatagagctgccacccaactctaagcaggagaaactgtacagaaagggctttgctatttttcccttttgggaaaacaatgaagtgttttaagtcctgggtggactg

SEQ ID NO: 124028 - DNA, 120 bp, Artificial Sequence
  ENSG00000101346_22 (sequence is synthesized)
agagatggtttgcctgtccagacttgctctcaagcctcatccagagaaggagctgcagatgagggagcccgtacactccctgccaccactaggttgtaagcctgtagctggctggctgat

SEQ ID NO: 124029 - DNA, 120 bp, Artificial Sequence
  ENSG00000101346_23 (sequence is synthesized)
ttcattttggaattcatttgccatccacagccttacactaggcacacactttagagtctggggctccagtggggcccgcctaattttttttccccccaagacagggccttgctctgtctc

SEQ ID NO: 124030 - DNA, 120 bp, Artificial Sequence
  ENSG00000101346_24 (sequence is synthesized)
atgatcatggcttactgcagccttgatctcccaggctcaagcgatccttctgcctcagcctctctggtagctgagactgcatgcccagctccaaatcaccttgattcatatcagcagtaa

SEQ ID NO: 124031 - DNA, 120 bp, Artificial Sequence
  ENSG00000101346_25 (sequence is synthesized)
ttgattcatatcagcagtaataatcacttgtgttctgaaagaaagggcaccagaagttctagcaaaattcagttgtgttctgtgagctagcactttttcctctgacccaattttcttacc

SEQ ID NO: 124032 - DNA, 120 bp, Artificial Sequence
  ENSG00000101346_26 (sequence is synthesized)
tataaaatggtgataaaaaccgacaggttgttcaaaggcccagatcagctaaagcatgtatataagagcacgttgtaaacttgaaagagacaaaggcacaaatgtggctgttgattaatt

SEQ ID NO: 124033 - DNA, 120 bp, Artificial Sequence
  ENSG00000101346_27 (sequence is synthesized)
tgactgcttctcgttgctcgtcacctccatgccaggcactgtgcttgctaattgctttatgggggcattctcttatttattccccagccctgggaaataggagctgtcattatccttctc

SEQ ID NO: 124034 - DNA, 120 bp, Artificial Sequence
  ENSG00000101346_28 (sequence is synthesized)
tttctgcacaaggaaaaattaatgccctgagaattgtcataattttcccaaggctgcccagctggtggtgttaagccagaatttgacctcccagagccagtttccattagctgccatgct

SEQ ID NO: 124035 - DNA, 120 bp, Artificial Sequence
  ENSG00000101346_29 (sequence is synthesized)
ctgctgcctctaattcacagaatgcactttctaccctgtgtgccatggagacctcctatggaaaaatgatcagccaccttaccttctactgggtacctgctgtgagtctgcctatgccag

SEQ ID NO: 124036 - DNA, 120 bp, Artificial Sequence
  ENSG00000101346_30 (sequence is synthesized)
aaggattaaggaggggaggttacccaagaaacaaagcctacatgccgcttacagcccccgttggatggttgctcagtacaacagtcttgcattcagcaggtgtttgttcatcacctacta

SEQ ID NO: 124037 - DNA, 120 bp, Artificial Sequence
  ENSG00000101346_31 (sequence is synthesized)
tgtgtcaggctctatgctaggtactggggatacaggagagaatcaagcgtaaagtctttgttctcaaggaatttgcattctagaaagtagaagatgtaataaatgtactgtgggacatgt

SEQ ID NO: 124038 - DNA, 120 bp, Artificial Sequence
  ENSG00000101346_32 (sequence is synthesized)
taataagtgctataaagaaatataaagggtttgggagcaaaaagagggagtggatctattttagatgagcccaggtaagacctctctgaagagctgtcatgaaggagggagggagcacat

SEQ ID NO: 124039 - DNA, 120 bp, Artificial Sequence
  ENSG00000101346_33 (sequence is synthesized)
tcctggcagagaaaacagcacgtgcaaaggccccgagactggagtgtgttcctgaagagcagccaggaggccagcatggctggagaggcaggcataggcagggaaccgagcagcaggtca

SEQ ID NO: 124040 - DNA, 120 bp, Artificial Sequence
  ENSG00000101346_34 (sequence is synthesized)
gagcaggcgagctgacattctgcagcctggacggccatggcaggaagcttttagttggagagatacaggaagcctcctagggttctgagcagaagaggggcatgagctgattcacattct

SEQ ID NO: 124041 - DNA, 120 bp, Artificial Sequence
  ENSG00000101346_35 (sequence is synthesized)
gaaggacctctctagctggccagtgctgaggaggttggagagagaaagggtgaaagcagagagaccagtgcagggctgttaacagggttgcaggcgagagactggggtgctgggctcccc

SEQ ID NO: 124042 - DNA, 120 bp, Artificial Sequence
  ENSG00000101346_36 (sequence is synthesized)
tagactaggactccagtgccctcctctcccaagagacaaaggccattgcattgaaggaggtgggaaatgattagattctgaacatatgtaattatttttcagtctttttcaaagatacaa

SEQ ID NO: 124043 - DNA, 120 bp, Artificial Sequence
  ENSG00000101346_37 (sequence is synthesized)
atatttacatagttttaatcatgtaatatatacaatttaatgtcctagtgttttacttaatagtgtatcatgttttccctgttggtatgtagcctggataaatgctcttaattataaaaa

SEQ ID NO: 124044 - DNA, 90 bp, Artificial Sequence
  ENSG00000101346_38 (sequence is synthesized)
gttggtatgtagcctggataaatgctcttaattataaaaaattctgtcgaggagtgttccatagtttattgttttcctattatgagaatt

SEQ ID NO: 124045 - DNA, 61 bp, Artificial Sequence
  ENSG00000101346_39 (sequence is synthesized)
tatctctactaaaaatacaaaaaaataataataatagccaggcgtggtggcacatgcctgt

SEQ ID NO: 124046 - DNA, 120 bp, Artificial Sequence
  ENSG00000101346_40 (sequence is synthesized)
gtgcccccaatttttcactattgttatttgaaaaaatatttttatttgtaagagtttttctttatttaaaatgttcattaataaagttgttggacgggaagcaaaaaaaaaaagttgttt

SEQ ID NO: 124047 - DNA, 120 bp, Artificial Sequence
  ENSG00000101346_41 (sequence is synthesized)
aagataaattcccagaagtgaatttgttagatcaaacacttaaaactttttgttatggaagaattcaaatataaataaaaaattgtgagtaataaaatgaactcacagtttcaacaatga

SEQ ID NO: 124048 - DNA, 120 bp, Artificial Sequence
  ENSG00000101346_42 (sequence is synthesized)
gaatgaaaggaggagccaggatggtcccactgcccactgcatgcttcacgggctcccctacaagccttttgcctggacctaccattcctcttcagttcctaccctccttcaaaccccagc

SEQ ID NO: 124049 - DNA, 120 bp, Artificial Sequence
  ENSG00000101346_43 (sequence is synthesized)
tcagaggcctcctccgtagtctttccaggttttcatccactcctggagctcacgtatccctgctgggaccttcgtggccctatatcatttcttctctcgggcactttctggactgtatga

SEQ ID NO: 124050 - DNA, 120 bp, Artificial Sequence
  ENSG00000101346_44 (sequence is synthesized)
tcactcctgtgttaccttactcttcccaaggtgaaactggaagcagcttctagagaacagcttcaggtgcagaccgagaaatgacgtcatcctgataattattggacgtgtttattaatt

SEQ ID NO: 124051 - DNA, 120 bp, Artificial Sequence
  ENSG00000101346_45 (sequence is synthesized)
ttatagggcgcctgtcacgtgtgagacatagtaatcagaggccaatggtgatgtgtgaaaatgaggatgaccagctctggttttctaggagctatggtctcataatgacaataatcagca

SEQ ID NO: 124052 - DNA, 120 bp, Artificial Sequence
  ENSG00000101346_46 (sequence is synthesized)
tagtgtacttgtccttaatgttatagcatggcaggaaagaccatgggcttagaaggcagacattggttaggaggtgcagggaacatactaattcatgtgcggtcaaagcacttggcattt

SEQ ID NO: 124053 - DNA, 73 bp, Artificial Sequence
  ENSG00000101346_47 (sequence is synthesized)
gaacatactaattcatgtgcggtcaaagcacttggcatttaatagggcaaaggtaaacagatgtagagaaatg

SEQ ID NO: 124054 - DNA, 120 bp, Artificial Sequence
  ENSG00000101346_48 (sequence is synthesized)
atggtacccctgcactccagcccaggttacagagcaagggcctgtctcagcaaaacaaaacaagcacaggccaaggagtgagatagccagcgctgatggtatctgcctcgtagtgcatga

SEQ ID NO: 124055 - DNA, 120 bp, Artificial Sequence
  ENSG00000101346_49 (sequence is synthesized)
agtgcatgtcatacactaagcagccagccagtgttggctgtcagtgttattactcacatgctttattttatttaagactttgagatagttcatgaagtgggtattattatcaatttccat

SEQ ID NO: 124056 - DNA, 120 bp, Artificial Sequence
  ENSG00000101346_50 (sequence is synthesized)
tttataggtgaggaaactgagcccagtgaagttaaataacttcccaaggtcattgagctgttgagtggacagctcaggtctgtttgtaaatctttaataaataacaacagctaagattca

SEQ ID NO: 124057 - DNA, 120 bp, Artificial Sequence
  ENSG00000101347_0 (sequence is synthesized)
cctttcgcgttcacgtccagcgccctggcgggattgatttgaggacgactggactgccattgcgcctgcgcagggagcccaaggcaagagccgctaggctgccctgcccgaagggctcaa

SEQ ID NO: 124058 - DNA, 120 bp, Artificial Sequence
  ENSG00000101347_1 (sequence is synthesized)
ctgtcagtgagcctgcgcaggaggccaataggctgccaatactccttggactccccgccagggccctgctgtcagtgcgcctgcgcgcgggtccggcgccgaggttcttgactgctgtgc

SEQ ID NO: 124059 - DNA, 120 bp, Artificial Sequence
  ENSG00000101347_2 (sequence is synthesized)
cggacgccaggtgtagccatgcagcgagccgattccgagcagccctccaagcgtccccgttgcgatgacagcccgagaaccccctcaaacaccccttccgcagaggcagactggtccccg

SEQ ID NO: 124060 - DNA, 120 bp, Artificial Sequence
  ENSG00000101347_3 (sequence is synthesized)
ggcctggaactccatcccgactacaagacatggggtccggagcaggtgtgctccttcctcaggcgcggtggctttgaagagccggtgctgctgaagaacatccgagaaaatgaaatcaca

SEQ ID NO: 124061 - DNA, 120 bp, Artificial Sequence
  ENSG00000101347_4 (sequence is synthesized)
ggcgcattactgccttgtcttgatgagtctcgttttgaaaatcttggagtaagttccttgggggagaggaagaagctgcttagttatatccagcgattggttcaaatccacgttgataca

SEQ ID NO: 124062 - DNA, 120 bp, Artificial Sequence
  ENSG00000101347_5 (sequence is synthesized)
atgaaggtaattaatgatcctatccatggccacattgagctccaccctctcctcgtccgaatcattgatacacctcaatttcaacgtcttcgatacatcaaacagctgggaggtggttac

SEQ ID NO: 124063 - DNA, 120 bp, Artificial Sequence
  ENSG00000101347_6 (sequence is synthesized)
tatgtttttccaggagcttcacacaatcgatttgagcatagtctaggggtggggtatctagcaggatgtctagttcacgcactgggtgaaaaacaaccagagctgcagataagtgaacga

SEQ ID NO: 124064 - DNA, 120 bp, Artificial Sequence
  ENSG00000101347_7 (sequence is synthesized)
gatgttctctgtgttcagattgctggactttgtcatgatctcggtcatgggccattttctcacatgtttgatggacgatttattccacttgctcgcccggaggtgaaatggacgcatgaa

SEQ ID NO: 124065 - DNA, 120 bp, Artificial Sequence
  ENSG00000101347_8 (sequence is synthesized)
caaggctcagttatgatgtttgagcaccttattaattctaatggaattaagcctgtcatggaacaatatggtctcatccctgaagaagatatttgctttataaaggaacaaattgtagga

SEQ ID NO: 124066 - DNA, 120 bp, Artificial Sequence
  ENSG00000101347_9 (sequence is synthesized)
ccacttgaatcacctgtcgaagattcattgtggccatataaagggcgtcctgaaaacaaaagcttcctttatgagatagtatctaataaaagaaatggcattgatgtggacaaatgggat

SEQ ID NO: 124067 - DNA, 120 bp, Artificial Sequence
  ENSG00000101347_10 (sequence is synthesized)
tattttgccagggactgccatcatcttggaatccaaaataattttgattacaagcgctttattaagtttgcccgtgtctgtgaagtagacaatgagttgcgtatttgtgctagagataag

SEQ ID NO: 124068 - DNA, 120 bp, Artificial Sequence
  ENSG00000101347_11 (sequence is synthesized)
gaagttggaaatctgtatgacatgttccacactcgcaactctttacaccgtagagcttatcaacacaaagttggcaacattattgatacaatgattacagatgctttcctcaaagcagat

SEQ ID NO: 124069 - DNA, 120 bp, Artificial Sequence
  ENSG00000101347_12 (sequence is synthesized)
gactacatagagattacaggtgctggaggaaaaaagtatcgcatttctacagcaattgacgacatggaagcctatactaagctgacagataacatttttctggagattttatactctact

SEQ ID NO: 124070 - DNA, 120 bp, Artificial Sequence
  ENSG00000101347_13 (sequence is synthesized)
gatcccaaattgaaagacgcacgagagattttaaaacaaattgaataccgtaatctattcaagtatgtgggtgagacgcagccaacaggacaaataaagattaaaagggaggactatgaa

SEQ ID NO: 124071 - DNA, 120 bp, Artificial Sequence
  ENSG00000101347_14 (sequence is synthesized)
tctcttccaaaagaggttgccagtgctaaacccaaagtattgctagacgtgaaactgaaggctgaagattttatagtggatgttatcaacatggattatggaatgcaagaaaagaatcca

SEQ ID NO: 124072 - DNA, 120 bp, Artificial Sequence
  ENSG00000101347_15 (sequence is synthesized)
attgatcatgttagcttctattgtaagactgcccccaacagagcaatcaggattactaaaaaccaggtttcacaacttctgccagagaaatttgcagagcagctgattcgagtatattgt

SEQ ID NO: 124073 - DNA, 120 bp, Artificial Sequence
  ENSG00000101347_16 (sequence is synthesized)
aagaaggtggacagaaagagtttgtatgccgcaagacaatattttgttcagtggtgtgcagacagaaatttcaccaagccgcaggatggcgatgttatagccccactcataacacctcaa

SEQ ID NO: 124074 - DNA, 120 bp, Artificial Sequence
  ENSG00000101347_17 (sequence is synthesized)
aaaaaggaatggaacgacagtacttcagtccaaaatccaactcgcctccgagaagcatccaaaagcagagtccagctttttaaagatgacccaatgtgaatgtctgtagtcagttgttta

SEQ ID NO: 124075 - DNA, 120 bp, Artificial Sequence
  ENSG00000101347_18 (sequence is synthesized)
caaactccctctcctgcacaattcatttagaggcttcaatcatagaattctgcaaattaatgacaactcatgctttaattttgtattttgaatgtacacgcatgctgaagctaagtaact

SEQ ID NO: 124076 - DNA, 120 bp, Artificial Sequence
  ENSG00000101347_19 (sequence is synthesized)
tttaatcaaagaaataagatggtattaggcaaatcttactatactatgaaaagcattaccttgcctatttttaatattattaaagcctttctccttcagtagtctattttcttagaataa

SEQ ID NO: 124077 - DNA, 120 bp, Artificial Sequence
  ENSG00000101347_20 (sequence is synthesized)
caactcttttatctattctgaactctattttttttcttttttaagagacaaggttttgctctgttgcccagcttggactcgaactttcctgggctcaagcgaccctcctgcctcagcccc

SEQ ID NO: 124078 - DNA, 120 bp, Artificial Sequence
  ENSG00000101347_21 (sequence is synthesized)
ccaagtagctgggactaaagtcatgtgccaccacacccagcttactctgaacttttatgacagatgattgttttttgtttttaatgtagaaatgagacaagggtacaaattggaactaga

SEQ ID NO: 124079 - DNA, 120 bp, Artificial Sequence
  ENSG00000101347_22 (sequence is synthesized)
caaacatggctaaaaacaaaacatcaaatcctgcccccgtgaagagttccctgtcacctcaagtttgaggatagtcctctaagagtgacctaagcataagtgaaagacacctcccctcac

SEQ ID NO: 124080 - DNA, 120 bp, Artificial Sequence
  ENSG00000101347_23 (sequence is synthesized)
ccttctagccccctacaaggtgccaggttggggtaaagagttggagatgatggccaggagtggcctccaacacgctggtgagaggcctgattaggttttggggaagatctgagagctctg

SEQ ID NO: 124081 - DNA, 120 bp, Artificial Sequence
  ENSG00000101347_24 (sequence is synthesized)
gcctcttcgtgagtggaacataaagccgcctcttgttgggagatcctaccccagtgacagaggaatcccccaaactaggctgtgccctggctccgtggcggctccagacccgggtagtgc

SEQ ID NO: 124082 - DNA, 120 bp, Artificial Sequence
  ENSG00000101347_25 (sequence is synthesized)
ctttgtcccctgaatactcactcccccggtccagagggccttcccactgcccagcctggagaaggcctcccctgacctgctctctcagtatcctggagagctggccagaggccatcacag

SEQ ID NO: 124083 - DNA, 120 bp, Artificial Sequence
  ENSG00000101347_26 (sequence is synthesized)
acaggcatcatcctcagagctcctcagacctgggactttgtttttgctggttcagtgcattttgtgtatttaagagcaaacactagccaggcgtggcggcgtgtgcctgtagtcccagct

SEQ ID NO: 124084 - DNA, 120 bp, Artificial Sequence
  ENSG00000101347_27 (sequence is synthesized)
acaaacactgcactgcctgtgctgaaattagtgaccacccagtgggctccaggctccgctaggtaacttcgttttcccagcagtggagtgggcaccaccttggtggggcagtgcccctgt

SEQ ID NO: 124085 - DNA, 120 bp, Artificial Sequence
  ENSG00000101347_28 (sequence is synthesized)
gcccagggcacacctcattcccagttctatagcaattcaccaagaacaaagtctgcagttagagccaaagctggtggtggccagagggtgctgaagatacaggccagtggggatgggagc

SEQ ID NO: 124086 - DNA, 120 bp, Artificial Sequence
  ENSG00000101347_29 (sequence is synthesized)
catgagccccgaatgtcttctgctctgatgctccccggactaagcctccctggcacactgggagtgaggggcagcctgagcaagtaggggaactcagaccacaggccagcagatttccca

SEQ ID NO: 124087 - DNA, 120 bp, Artificial Sequence
  ENSG00000101347_30 (sequence is synthesized)
gcagtccatcactggccaccgtgtagccagattctgttccgtccacactggggtgaagagtacttggaatgtctgccatcctgtatgatcaccccaccccctgtccatccatcagtagat

SEQ ID NO: 124088 - DNA, 120 bp, Artificial Sequence
  ENSG00000101347_31 (sequence is synthesized)
aataagggttggttacaattcataagagaatagttaaaacacttctcctctcatgcctaccatggtgctgtatcaaggggatttgttcacatatgggctcagcaacgcacaagtgaggtc

SEQ ID NO: 124089 - DNA, 120 bp, Artificial Sequence
  ENSG00000101347_32 (sequence is synthesized)
agccatggcactaggtcattcccattttagccaaggtgcctctataggggtcagacatcatgtgcccagacctaaggtcaggaatgtcatatttttctgttaaaatcattttatttctgt

SEQ ID NO: 124090 - DNA, 120 bp, Artificial Sequence
  ENSG00000101347_33 (sequence is synthesized)
gtatcttacctttaaatcattgtggtttactctgagattctgtagtcctaatattgtatcattgtgctgtctgcaaaacaacttgaatctattttgtttgcatcttttgttacatgtaac

SEQ ID NO: 124091 - DNA, 120 bp, Artificial Sequence
  ENSG00000101347_34 (sequence is synthesized)
taacgcagctgtactttatgttctttgcaactgtttccattatgagaacgctgtgctatttacaaggttacatttttcttggccaggcgaggtggtcatgcctgtaatcccagcactttg

SEQ ID NO: 124092 - DNA, 72 bp, Artificial Sequence
  ENSG00000101347_35 (sequence is synthesized)
gccaaggtgggcggatcacttgaggtaaagagttgagaccagcctggctaaaattagccgggcgtggtggtg

SEQ ID NO: 124093 - DNA, 120 bp, Artificial Sequence
  ENSG00000101347_36 (sequence is synthesized)
tgcactccagcctcggggtcaagagcgaaactctgtctcaaacaaaaagaaagaaaggaaggaaggaaggagggaaggaaggaaggaaagagagaaagaaaagaaagaaagaaagaaaga

SEQ ID NO: 124094 - DNA, 120 bp, Artificial Sequence
  ENSG00000101347_37 (sequence is synthesized)
ataaaaatggaaattttaacagcttagcctctagagagttactgaacgtggttaccttgggaatgtaaatagaactgcaaattaaaatgactggccacttcaactgggtaagggaaacag

SEQ ID NO: 124095 - DNA, 120 bp, Artificial Sequence
  ENSG00000101347_38 (sequence is synthesized)
ctgcaataaagcttcgtgaatatatatctccatcttgaaagttgtgttccacaaaggtttcgacctctttgtccaaaaatgcatattactcatttactcctttcataccttcattgtgaa

SEQ ID NO: 124096 - DNA, 120 bp, Artificial Sequence
  ENSG00000101347_39 (sequence is synthesized)
attaaataacagactcacaagcacctggcactggtggcagacaaaaaggcctcaacattctgcagcaggccagaggaggaacgacgctgctacagtatttattagttccagtgctcaagc

SEQ ID NO: 124097 - DNA, 120 bp, Artificial Sequence
  ENSG00000101347_40 (sequence is synthesized)
ccaggtttctaaggtttgacaatattctgtaagttaaaatcatttccacacatacagagtagaatcctgtttttgtaagtatacacacacacacacacacacattcatggaacattgtct

SEQ ID NO: 124098 - DNA, 120 bp, Artificial Sequence
  ENSG00000101347_41 (sequence is synthesized)
ggaaggatatacatgaaaatgttaagagttggggggggttgaattttaggcaattttaatttttttaacgtcttctggtttttctacaataaacatgaatcagttgtagaacctctaaaa

SEQ ID NO: 124099 - DNA, 120 bp, Artificial Sequence
  ENSG00000101347_42 (sequence is synthesized)
atttcaccaagccgcagtctcccaccagagcctcccactgaccaaatctaactggaaaccaacaggcatgggagctgagaaatgtaatttaccggagtagctcctgtgagacagagtagg

SEQ ID NO: 124100 - DNA, 120 bp, Artificial Sequence
  ENSG00000101347_43 (sequence is synthesized)
gagaggaagagtgaagaatggatctgagagcaaataagcagatgaggagcacgaatcctcccaccagcattgtattcctggtacaacagaggctctccaagatcgtgcatcatcttgtaa

SEQ ID NO: 124101 - DNA, 120 bp, Artificial Sequence
  ENSG00000101347_44 (sequence is synthesized)
ccaaagaagatctacccacaagttcagaacagtttagcatagagtcaagtattaggaggccttgcttcttacctctatggtttcacgtcattgtatcgcctccctttggatctctccctt

SEQ ID NO: 124102 - DNA, 120 bp, Artificial Sequence
  ENSG00000101347_45 (sequence is synthesized)
attttgggtggaggagcttctttggctggagcctatgctgatgggaccaacgttagagctttgatgcagagaaaaatttaaattctgcaggtacatactgttcttcctccccttctttgc

SEQ ID NO: 124103 - DNA, 120 bp, Artificial Sequence
  ENSG00000101347_46 (sequence is synthesized)
catcttgtagacctgggccttttattgcagaggggaccaggcgagagagaagctaggggttcagtgcatcccgtctttctcctgggaaaacaggacagagtttgtgctccgtgaaggtgt

SEQ ID NO: 124104 - DNA, 120 bp, Artificial Sequence
  ENSG00000101347_47 (sequence is synthesized)
gtgaaggaggccatagaggtgggcagtggtatgctgctcccagtcatctctgcagaggccagtggctgttttcatgaaggctcttcctgcgtaagactgtagtgtttctaatttgcccca

SEQ ID NO: 124105 - DNA, 120 bp, Artificial Sequence
  ENSG00000101347_48 (sequence is synthesized)
agcacagggcatatgtaatttggagtttccctggattgaggacagctagaagcaatctatatgcaagatgaggatgtgcgcacttgagactttcactcagaaataagatgatggaaactg

SEQ ID NO: 124106 - DNA, 120 bp, Artificial Sequence
  ENSG00000101347_49 (sequence is synthesized)
cctcattttaaatctatgaagtgctttaaaacagcagaatcccttgcctgctggttttgtttgttcatttgttttttgagatagtctcttgttcacccaggctggagtatctcggctcac

SEQ ID NO: 124107 - DNA, 120 bp, Artificial Sequence
  ENSG00000101347_50 (sequence is synthesized)
agtaataaactgagtgaatacgttttaaagataaagcacccaccattataaaagtagtacatgttcattttagcaaattagaaaaatacagaaagatgatgtgccctcacaaagagaacc

SEQ ID NO: 124108 - DNA, 120 bp, Artificial Sequence
  ENSG00000101347_51 (sequence is synthesized)
aatttggaataattggtaaatcgtcagtctctttacttaattcctaggatttgtaaatatctttagtctcttcccttctactgcattattaaataataataaaattaacatggacattta

SEQ ID NO: 124109 - DNA, 61 bp, Artificial Sequence
  ENSG00000101347_52 (sequence is synthesized)
ttactacaaatacaaaattagccagacatgattgtgcgcacctgtaatcctagctactcag

SEQ ID NO: 124110 - DNA, 120 bp, Artificial Sequence
  ENSG00000101347_53 (sequence is synthesized)
acagtgtccagggtgctttcattcacatatatatatatatgcttttgtttggttctcacagtagtctgtaaggaagttatcgttatctccctttttacaaataaaggaacttgaaactct

SEQ ID NO: 124111 - DNA, 120 bp, Artificial Sequence
  ENSG00000101347_54 (sequence is synthesized)
aagttggcaacattattgatacaatgtaagaaacttgattgtcatttccctataaaattttccttgatacttggctagagtatcatactaggctcaactagacatttctagatgagttca

SEQ ID NO: 124112 - DNA, 120 bp, Artificial Sequence
  ENSG00000101347_55 (sequence is synthesized)
agtgaatattaagtgattaaattgaaaatggtttccttaaagaaaaaaaatctagcataaagttaatttagttggaggaaaaggagggaagtggataaaggggcagatggagggaagtgg

SEQ ID NO: 124113 - DNA, 120 bp, Artificial Sequence
  ENSG00000101347_56 (sequence is synthesized)
ataaaggggcagatgaagggaagaagagctggcttaggccagacgtgaagcggcagtgctgagatcactcaggacctcggcacaggtagtcacttacacaccattctcatcaggagaatg

SEQ ID NO: 124114 - DNA, 120 bp, Artificial Sequence
  ENSG00000101347_57 (sequence is synthesized)
ggaggtaggacatgaatatttaaattctgagattaatgacaaaagttaactttaaggattaagattaatgtctatttgtatcctttcaaatatttatcaaaattagtaccaaatggtaaa

SEQ ID NO: 124115 - DNA, 120 bp, Artificial Sequence
  ENSG00000101347_58 (sequence is synthesized)
accaacaggaattttacctcttcctgacccagtcagaaccatagcagaaaactgtacagccaggtctctccgtgactcaaagatccataaggagttatcaaacactgggtgtgagtcaag

SEQ ID NO: 124116 - DNA, 120 bp, Artificial Sequence
  ENSG00000101347_59 (sequence is synthesized)
ttacttcttccatgtctctaaaatagccttaaattgattaacttttcatgttcgttttcacatttgtgttgaggaagtatatcttcattcctattttttacctatcctttgtcatgagca

SEQ ID NO: 124117 - DNA, 120 bp, Artificial Sequence
  ENSG00000101347_60 (sequence is synthesized)
gattacttggaataccttctcctatttgtatgttaattcttcggtaagagtttttgttgttgttattgttgttgttttgtaattcagagatatctagtttcaaagcctggcactgtttct

SEQ ID NO: 124118 - DNA, 120 bp, Artificial Sequence
  ENSG00000101347_61 (sequence is synthesized)
tcctaacttggttaaatcaaaatttacttcatttctgcatctataaaatgagggctgaatacacctaccttattgttgggaggaataaataagatggtgaatgcaaagccctgcgacagt

SEQ ID NO: 124119 - DNA, 120 bp, Artificial Sequence
  ENSG00000101347_62 (sequence is synthesized)
gcctggaacacagtaagcatggcagctcacagcttaccaagcacaaatttagtacggtggagaagcagttgtctttagaacactgtgcctcattattttgtttccctaaagtagaaagat

SEQ ID NO: 124120 - DNA, 120 bp, Artificial Sequence
  ENSG00000101347_63 (sequence is synthesized)
taagtgctttacgtttattctcatttaatcttcacagtagtgcaggggtcttaggcctgttttacagatagagaaactgaggcttcactgagattaaataacttgctcatgaaagcatat

SEQ ID NO: 124121 - DNA, 120 bp, Artificial Sequence
  ENSG00000101347_64 (sequence is synthesized)
ttagccaggattcaaaagccaggtctaacttaactccaaatctttgatctcatccaggaagtgagagtgggtctccaattttggctagattcagacatgagaaaatgaatataagggaaa

SEQ ID NO: 124122 - DNA, 120 bp, Artificial Sequence
  ENSG00000101347_65 (sequence is synthesized)
ggaacctcaaaagaaagtgcctgcatgagcttcattgaggctgtggtgacctgttgtaatgacttggttccttcacaggatatcagtctcccagatggcacatacctgtcttctttagct

SEQ ID NO: 124123 - DNA, 120 bp, Artificial Sequence
  ENSG00000101347_66 (sequence is synthesized)
caaatatctattttcacctcctacttgttgaagagttttctgtttgccagaaagccgtaacacaagtcatacttataaccacatcctacctcaataatttcttgggttatactttacttc

SEQ ID NO: 124124 - DNA, 120 bp, Artificial Sequence
  ENSG00000101347_67 (sequence is synthesized)
cttgggttatactttacttcctcttgttgtactaataggttaatgtcactttttttttttcaaaatgtgaattttgtttgtttgtttgtttgtttttagacagagtctcgctctgtcacc

SEQ ID NO: 124125 - DNA, 120 bp, Artificial Sequence
  ENSG00000101347_68 (sequence is synthesized)
tttacaattttttacaaaaatgctctctttgtttaacgagtgacattggtaggagctatatttgttaaggatatctctaatcgtttttcttagttaggtgccattttcataaagagaacc

SEQ ID NO: 124126 - DNA, 120 bp, Artificial Sequence
  ENSG00000101347_69 (sequence is synthesized)
tgtttgtggctcaaagacttgatgaaaaatggattctaacatggggagtcttgtgttttccaggaggactatgaatctcttccaaaagaggttgccagtgctaaacccaaagtattgcta

SEQ ID NO: 124127 - DNA, 120 bp, Artificial Sequence
  ENSG00000101347_70 (sequence is synthesized)
ttctcagtgatagaattgtgagtagtggatcttttctaaactttctgcactttctaaaatgagcacagagtatttaaatcagaagaagaactaaaatatgtttaagcatacagaaaagca

SEQ ID NO: 124128 - DNA, 120 bp, Artificial Sequence
  ENSG00000101347_71 (sequence is synthesized)
gttatttttagagcaaaatattagaaactattgaagacctcctttgtacattcttttttttttaatgaaatgtggtcttgctctgtcatctaggctggagtacagtggtgcaatctcagc

SEQ ID NO: 124129 - DNA, 120 bp, Artificial Sequence
  ENSG00000101347_72 (sequence is synthesized)
ggagtacagtggtgcaatctcagctcactccaacctccgtctccctggctcaagtgatccttccatctcagccaccccagtagcttggactatgggtgcatgccaccacacctggctaat

SEQ ID NO: 124130 - DNA, 85 bp, Artificial Sequence
  ENSG00000101347_73 (sequence is synthesized)
tcaagagattgatgtgagcccccacgcctggccctgtttctatttattatgtttctatccttttctccctagaagtaataagcat

SEQ ID NO: 124131 - DNA, 120 bp, Artificial Sequence
  ENSG00000101347_74 (sequence is synthesized)
attatgtttctatccttttctccctagaagtaataagcatcttcctgaatttgatgtttatcattgtcatgaatggtttttactcttattgcatatttatgtatatccataaacaatgta

SEQ ID NO: 124132 - DNA, 120 bp, Artificial Sequence
  ENSG00000101347_75 (sequence is synthesized)
tagtattgttttacatatttttaaactttatttttttgagacagagcctggccttttttttttttttttcctctttttgagatgtaatctctctctgtcacccaggttggggctcagtgg

SEQ ID NO: 124133 - DNA, 120 bp, Artificial Sequence
  ENSG00000101347_76 (sequence is synthesized)
gttactcacaaactttgcacaattttttatttttaagtaaaaaccaaaagtaagtctatctgctgaaaagttcccatttaagttatagtcatttggttatggttttgaaaataaggtctt

SEQ ID NO: 124134 - DNA, 120 bp, Artificial Sequence
  ENSG00000101347_77 (sequence is synthesized)
tcactttctttccttttaaaatgtctgaatctgtgtcagccagtgatttcttcctacaggagttgggaatggatactgtttagcattattgtcctaataataaaaatgtgaacatgtaaa

SEQ ID NO: 124135 - DNA, 120 bp, Artificial Sequence
  ENSG00000101347_78 (sequence is synthesized)
gtttttcttggaactaatttacacaaataattttgaaattttcacgtgatttatcaaaaaatgcttcttggtttagttatttaattaaaattaagtctttacaagtagcagatcaaaaaa

SEQ ID NO: 124136 - DNA, 120 bp, Artificial Sequence
  ENSG00000101349_0 (sequence is synthesized)
agttccccagcgtgcgcccggggagaccgggaacatggcgctgggagcgctgtagcagctgagaaggggctgaggcaccgccgcttcgctgacagccggccaccagaaatacactgtggt

SEQ ID NO: 124137 - DNA, 120 bp, Artificial Sequence
  ENSG00000101349_1 (sequence is synthesized)
gaaatgcttccacctcttgctaaaatgaacactgaggaaaaatgaagaagactgacaagcaccagcgaaaagttgcagaatagaaatagccacactcctctggagtctttaattcatcca

SEQ ID NO: 124138 - DNA, 120 bp, Artificial Sequence
  ENSG00000101349_2 (sequence is synthesized)
cagccatcatataaaggttttggcatcatgtttgggaagaaaaagaaaaagattgaaatatctggcccgtccaactttgaacacagggttcatactgggtttgatccacaagagcagaag

SEQ ID NO: 124139 - DNA, 120 bp, Artificial Sequence
  ENSG00000101349_3 (sequence is synthesized)
tttaccggccttccccagcagtggcacagcctgttagcagatacggccaacaggccaaagcctatggtggacccttcatgcatcacacccatccagctggctcctatgaagacaatcgtt

SEQ ID NO: 124140 - DNA, 120 bp, Artificial Sequence
  ENSG00000101349_4 (sequence is synthesized)
agaggaaacaaaccctgcaaggaaacctccatcaacggcctgctagaggattttgacaacatctcggtgactcgctccaactccctaaggaaagaaagcccacccaccccagatcaggga

SEQ ID NO: 124141 - DNA, 120 bp, Artificial Sequence
  ENSG00000101349_5 (sequence is synthesized)
gcctccagccacggtccaggccacgcggaagaaaatggcttcatcaccttctcccagtattccagcgaatccgatactactgctgactacacgaccgaaaagtacagggagaagagtctc

SEQ ID NO: 124142 - DNA, 120 bp, Artificial Sequence
  ENSG00000101349_6 (sequence is synthesized)
tatggagatgatctggatccgtattatagaggcagccacgcagccaagcaaaatgggcacgtaatgaaaatgaagcacggggaggcctactattctgaggtgaagcctttgaaatccgat

SEQ ID NO: 124143 - DNA, 120 bp, Artificial Sequence
  ENSG00000101349_7 (sequence is synthesized)
tttgccagattttctgccgattatcactcacatttggactcactgagcaaaccaagtgaatacagtgacctcaagtgggagtatcagagagcctcgagtagctcccctctggattattca

SEQ ID NO: 124144 - DNA, 120 bp, Artificial Sequence
  ENSG00000101349_8 (sequence is synthesized)
ttccaattcacaccttctagaactgcagggaccagcgggtgctccaaggagagcctggcgtacagtgaaagtgaatggggacccagcctggatgactatgacaggaggccaaagtcttcg

SEQ ID NO: 124145 - DNA, 120 bp, Artificial Sequence
  ENSG00000101349_9 (sequence is synthesized)
tacctgaatcagacaagccctcagcccaccatgcggcagaggtccaggtcaggctcgggactccaggaaccgatgatgccatttggagcaagtgcatttaaaacccatccccaaggacac

SEQ ID NO: 124146 - DNA, 120 bp, Artificial Sequence
  ENSG00000101349_10 (sequence is synthesized)
tcctacaactcctacacctaccctcgcttgtccgagcccacaatgtgcattccaaaggtggattacgatcgagcacagatggtcctcagccctccactgtcagggtctgacacctacccc

SEQ ID NO: 124147 - DNA, 120 bp, Artificial Sequence
  ENSG00000101349_11 (sequence is synthesized)
aggggccctgccaaactacctcaaagtcaaagcaaatcgggctattcctcaagcagtcaccagtacccgtctgggtaccacaaagccaccttgtaccatcacccctccctgcagagcagt

SEQ ID NO: 124148 - DNA, 120 bp, Artificial Sequence
  ENSG00000101349_12 (sequence is synthesized)
tcgcagtacatctccacggcttcctacctgagctccctcagcctctcatccagcacctacccgccgcccagctggggctcctcctccgaccagcagccctccagggtgtcccatgaacag

SEQ ID NO: 124149 - DNA, 120 bp, Artificial Sequence
  ENSG00000101349_13 (sequence is synthesized)
tttcgggcggccctgcagctggtggtcagcccaggagaccccagggaatacttggccaactttatcaaaatcggggaaggctcaaccggcatcgtatgcatcgccaccgagaaacacaca

SEQ ID NO: 124150 - DNA, 120 bp, Artificial Sequence
  ENSG00000101349_14 (sequence is synthesized)
gggaaacaagttgcagtgaagaaaatggacctccggaagcaacagagacgagaactgcttttcaatgaggtcgtgatcatgcgggattaccaccatgacaatgtggttgacatgtacagc

SEQ ID NO: 124151 - DNA, 120 bp, Artificial Sequence
  ENSG00000101349_15 (sequence is synthesized)
agctaccttgtcggcgatgagctctgggtggtcatggagtttctagaaggtggtgccttgacagacattgtgactcacaccagaatgaatgaagaacagatagctactgtctgcctgtca

SEQ ID NO: 124152 - DNA, 120 bp, Artificial Sequence
  ENSG00000101349_16 (sequence is synthesized)
gttctgagagctctctcctaccttcataaccaaggagtgattcacagggacataaaaagtgactccatcctcctgacaagcgatggccggataaagttgtctgattttggtttctgtgct

SEQ ID NO: 124153 - DNA, 120 bp, Artificial Sequence
  ENSG00000101349_17 (sequence is synthesized)
caagtttccaaagaggtgccgaagaggaaatcattggttggcactccctactggatggcccctgaggtgatttctaggctaccttatgggacagaggtggacatctggtccctcgggatc

SEQ ID NO: 124154 - DNA, 120 bp, Artificial Sequence
  ENSG00000101349_18 (sequence is synthesized)
atgcggaggatccgggacagtttacctccaagagtgaaggacctacacaaggtttcttcagtgctccggggattcctagacttgatgttggtgagggagccctctcagagagcaacagcc

SEQ ID NO: 124155 - DNA, 120 bp, Artificial Sequence
  ENSG00000101349_19 (sequence is synthesized)
caggaactcctcggacatccattcttaaaactagcaggtccaccgtcttgcatcgtccccctcatgagacaatacaggcatcactgagcagaggattcgtgtaggtggcaaagctagatg

SEQ ID NO: 124156 - DNA, 120 bp, Artificial Sequence
  ENSG00000101349_20 (sequence is synthesized)
aggacatgagaataattcaggagaacaaaaggaaacacagaacatgcaaaaggcctgtgcattctagaccagccaattggtgggacagcgtgatgaccggcagggttcaacagaccaggg

SEQ ID NO: 124157 - DNA, 120 bp, Artificial Sequence
  ENSG00000101349_21 (sequence is synthesized)
catcttcttgtgtcttaaacaggcatctctccactgacagccggtgtggtcacttggagcacggctttaataagtcattattatatttttcagcccttcatccagcaaatcagaaggact

SEQ ID NO: 124158 - DNA, 120 bp, Artificial Sequence
  ENSG00000101349_22 (sequence is synthesized)
gaaggactcagtacaaactccgttatgatatatcctagccacatgcagggtaacatgtaggattttctatattgaaagaatacttttctggcaaaaaaaaaaaaaaaagaaagaaaggaa

SEQ ID NO: 124159 - DNA, 120 bp, Artificial Sequence
  ENSG00000101349_23 (sequence is synthesized)
gcacttttttcttaatggtagcagtataatgtattttgcaacgaatttgtaatttttctgtacgatagttttgataatttatagtactttgatgtcatgtagccattgtatcagttgaag

SEQ ID NO: 124160 - DNA, 120 bp, Artificial Sequence
  ENSG00000101349_24 (sequence is synthesized)
taatacttgtttactagaggagtttgaacaaagcctttcctacttttttatccctttaagagaaccaatgattctttaggaactttgaatactgaatgactctcaatcaccgtcagcttt

SEQ ID NO: 124161 - DNA, 120 bp, Artificial Sequence
  ENSG00000101349_25 (sequence is synthesized)
agtaaaatctctttcttatcctaacaagtgtcttatttggtggaagaagaattaagagtgatggtgatggtgtgcacgtttcattaatccaaccaaaaataatgaaataaaatttgagcc

SEQ ID NO: 124162 - DNA, 120 bp, Artificial Sequence
  ENSG00000101349_26 (sequence is synthesized)
acagtataccactccttgggataaagttaaatatttttaaagatcacattttccatgaacgcctctagtagcaaaccattcttttgcacaccacaatgtttccctcagtgccctttctca

SEQ ID NO: 124163 - DNA, 120 bp, Artificial Sequence
  ENSG00000101349_27 (sequence is synthesized)
aatgggtacaatgttcccttgtggccaaatttccctcccagggagcaatttcagtgctaggatcattggattcagttcccaaaatagaatgtttcagtgagaccatgagaattccaggct

SEQ ID NO: 124164 - DNA, 120 bp, Artificial Sequence
  ENSG00000101349_28 (sequence is synthesized)
cacaaagggagaggagagaacagggcaagacgtttggtttcatttgtcaccatttttaaaactctgtatgctagcacaccaaactcttgtctatatttacctttgtaccacagtattaat

SEQ ID NO: 124165 - DNA, 120 bp, Artificial Sequence
  ENSG00000101349_29 (sequence is synthesized)
cgctattgttcatgtatcgtgctggaagtctgaactgactctagaggatgaattagcaagagggtattttaccaggtatgatctgacttcagttgtgcccatgttataatgtgtttccga

SEQ ID NO: 124166 - DNA, 120 bp, Artificial Sequence
  ENSG00000101349_30 (sequence is synthesized)
cataggagagtcgtgctgctgtctagatcttcttgaatgttgataaaaatgaatgactactacaatacattttgtgttgcttgttggatgaatttgcatgttaactgtaggccaatatag

SEQ ID NO: 124167 - DNA, 120 bp, Artificial Sequence
  ENSG00000101349_31 (sequence is synthesized)
atttgcctttaaaactctggaagagctacatagtcatcattagtttctattaattatgcatcagacaaaagccatttgttaccaaactgggaaaacagaggcttttcttaactatttcac

SEQ ID NO: 124168 - DNA, 120 bp, Artificial Sequence
  ENSG00000101349_32 (sequence is synthesized)
atactgtaacaaatatgaatttaaatttgtgatagcgctctggttgctctaagcataattaagaatttttgtaattaataggttgctaattatttatcactgctaaaaaggaaaaaaggc

SEQ ID NO: 124169 - DNA, 120 bp, Artificial Sequence
  ENSG00000101349_33 (sequence is synthesized)
ataaaatgaccttctactgattagattttcagttttctttcaaactggaaatgcctccataaatatgatctatgattttgcttcataaaacagcaaatcaatgttttatgtaaaatatta

SEQ ID NO: 124170 - DNA, 120 bp, Artificial Sequence
  ENSG00000101349_34 (sequence is synthesized)
aagcattaatataaatatgtgagaataaaaacaatctaaatccagaaaatggcagtcctaaatgttcatgagacagattgtattaatttaaccaggactatgtagaagtagaaagaaaag

SEQ ID NO: 124171 - DNA, 120 bp, Artificial Sequence
  ENSG00000101349_35 (sequence is synthesized)
aaaaagaaaatcttttttaaaccagaataaacattaaaaactattgcagaaaatagtggattttggattccaaacattttcgacagtgtaatggaaatttttctgtaattttcttaccat

SEQ ID NO: 124172 - DNA, 120 bp, Artificial Sequence
  ENSG00000101349_36 (sequence is synthesized)
cgggtattttttaaagtattcattgagtttaccaaaagttactgtagcttaaaaggttttgtgagcactaactattggcagaaactgcatttgcaaataaaaataaatgtttgccttttc

SEQ ID NO: 124173 - DNA, 120 bp, Artificial Sequence
  ENSG00000101349_37 (sequence is synthesized)
ggcgctgggagcgctgtagcagctgagaaggggctgaggcaccgccgcttcgctgacagccggccaccaggtttctgtctcccagtataatcatatccagccccatggctcttactgggg

SEQ ID NO: 124174 - DNA, 120 bp, Artificial Sequence
  ENSG00000101349_38 (sequence is synthesized)
cgaaaacccggagcagctgcgtacgctcatggacagtcctccgaggggcgaagccgggcagctgggcatgctcagtagctgggggaggtttgggtggagagtagaaagctgtggctctgc

SEQ ID NO: 124175 - DNA, 120 bp, Artificial Sequence
  ENSG00000101349_39 (sequence is synthesized)
ctctcaccccctcccgctggcccccgccccccttgcccctacccagccagtagtagttccccagcgtgcgcccggggagaccgggaacatggcgctgggagcgctgtagcagctgagaag

SEQ ID NO: 124176 - DNA, 120 bp, Artificial Sequence
  ENSG00000101349_40 (sequence is synthesized)
gggctgaggcaccgccgcttcgctgacagccggccaccagatgttcatgcattctagagaaagtggaaaacttagaagcctaattaatgactgtcttctggacctctgagaccatgtttc

SEQ ID NO: 124177 - DNA, 80 bp, Artificial Sequence
  ENSG00000101350_0 (sequence is synthesized)
actgtctctccccatccggggcagcggggaatggctgagccaggggttcgccgcccccgccgccgccgccgccgccgccg

SEQ ID NO: 124178 - DNA, 120 bp, Artificial Sequence
  ENSG00000101350_1 (sequence is synthesized)
tagcatcctgagacattttgaattgacacttctcaagatttgactggatcagagttcatcatgtcaaagttgaaaagctcagagtcagtcagggtggtggttcgctgtcggcccatgaat

SEQ ID NO: 124179 - DNA, 120 bp, Artificial Sequence
  ENSG00000101350_2 (sequence is synthesized)
ggcaaggaaaaggctgcttcgtatgacaaagtggtggatgtggatgttaagctggggcaggtgtctgtgaagaaccccaaagggacggcccatgaaatgcccaagaccttcacctttgat

SEQ ID NO: 124180 - DNA, 120 bp, Artificial Sequence
  ENSG00000101350_3 (sequence is synthesized)
gccgtctatgactggaatgccaagcagtttgaactgtacgatgagacgttccgaccacttgttgactctgtcctgcaaggtttcaatggaaccatttttgcctatggacaaactgggaca

SEQ ID NO: 124181 - DNA, 120 bp, Artificial Sequence
  ENSG00000101350_4 (sequence is synthesized)
ggaaaaacctacaccatggaaggaatccgtggtgaccctgaaaaaagaggagtcattcctaactcatttgaccatatcttcacccacatctctcgatcccagaatcaacaatacctggtc

SEQ ID NO: 124182 - DNA, 120 bp, Artificial Sequence
  ENSG00000101350_5 (sequence is synthesized)
agggcttcttacttagagatctaccaggaggagatccgagatttgctctcaaaggatcagaccaaaaggcttgagctcaaagagaggcctgacacaggagtgtatgtgaaagacctgtct

SEQ ID NO: 124183 - DNA, 120 bp, Artificial Sequence
  ENSG00000101350_6 (sequence is synthesized)
tcctttgtcaccaagagtgtgaaggagatagagcatgtgatgaatgtggggaaccagaaccgttctgtcggtgctaccaacatgaacgagcacagctcgcgttctcatgcaattttcgtt

SEQ ID NO: 124184 - DNA, 120 bp, Artificial Sequence
  ENSG00000101350_7 (sequence is synthesized)
atcactattgagtgcagcgaggtgggcctcgatggtgaaaaccacatccgtgtaggaaaattgaaccttgtagatcttgctggcagcgaacggcaagccaagaccggcgcacaaggggag

SEQ ID NO: 124185 - DNA, 120 bp, Artificial Sequence
  ENSG00000101350_8 (sequence is synthesized)
agattaaaagaagctaccaagatcaacctctccctttccgctttgggtaatgtcatctctgctctagtggacggcaaaagcactcacattccatatcgggactcaaagcttaccaggctc

SEQ ID NO: 124186 - DNA, 120 bp, Artificial Sequence
  ENSG00000101350_9 (sequence is synthesized)
ctccaagattcccttggtggcaatgccaagactgtgatggtggccaacgtggggcctgcctcttacaacgtagaagagactctgaccactctgcgatatgccaaccgtgccaaaaacatt

SEQ ID NO: 124187 - DNA, 120 bp, Artificial Sequence
  ENSG00000101350_10 (sequence is synthesized)
aagaacaaaccaagggtcaatgaggaccccaaggatgccctccttcgagaattccaggaagagattgctcggctcaaggcccagctggaaaaacggtccattggtaggaggaagaggcga

SEQ ID NO: 124188 - DNA, 120 bp, Artificial Sequence
  ENSG00000101350_11 (sequence is synthesized)
gagaagcggagggaaggtggtggcagtggtgggggtggggaagaggaggaggaggagggagaagagggtgaggaggaaggggatgataaggatgattactggcgggaacagcaagaaaaa

SEQ ID NO: 124189 - DNA, 120 bp, Artificial Sequence
  ENSG00000101350_12 (sequence is synthesized)
ctggagattgagaagcgggccattgtagaggatcacagcttggttgcagaggagaagatgaggctgctgaaggagaaagagaaaaagatggaggacctgcggcgggagaaggatgctgcc

SEQ ID NO: 124190 - DNA, 120 bp, Artificial Sequence
  ENSG00000101350_13 (sequence is synthesized)
gagatgctgggcgccaagatcaaggccatggagagtaagttgcttgttggaggaaaaaatatagtagatcatacgaatgaacagcagaaaatcctggagcagaaacgacaggaaattgca

SEQ ID NO: 124191 - DNA, 120 bp, Artificial Sequence
  ENSG00000101350_14 (sequence is synthesized)
gagcagaaacgtcgagaaagagaaatccagcaacagatggaaagtcgagatgaggagaccttggaacttaaagagacatacagctcattgcagcaagaggtggacatcaagaccaaaaaa

SEQ ID NO: 124192 - DNA, 120 bp, Artificial Sequence
  ENSG00000101350_15 (sequence is synthesized)
ctcaaaaagctcttctccaagcttcaggcagtgaaggctgagatccatgacctccaagaagaacacatcaaggagcgccaagagctagagcagactcagaatgagctcaccagggagctg

SEQ ID NO: 124193 - DNA, 120 bp, Artificial Sequence
  ENSG00000101350_16 (sequence is synthesized)
aaactcaagcatcttattatagaaaactttatccctctggaagaaaaaagtaaaattatgaatagagccttctttgatgaagaggaagatcattggaaactacatcctataaccagactg

SEQ ID NO: 124194 - DNA, 120 bp, Artificial Sequence
  ENSG00000101350_17 (sequence is synthesized)
gagaaccagcagatgatgaagcggccagtctcagccgtgggatataagagaccattgagccagcacgcaagaatgtccatgatgattcgtccagaggcccgatatagggcagaaaacatt

SEQ ID NO: 124195 - DNA, 120 bp, Artificial Sequence
  ENSG00000101350_18 (sequence is synthesized)
gtgctgttagagctggacatgcccagccggaccaccagagactatgagggtccagccattgcccccaaggtccaggctgcattggatgcggctctgcaggatgaagatgagatacaggtg

SEQ ID NO: 124196 - DNA, 120 bp, Artificial Sequence
  ENSG00000101350_19 (sequence is synthesized)
gatgcatcatcatttgaaagcactgcaaataagaaatccaaggccaggcctaaaagtggaaggaagtcgggatcctcctcctcttcctcaggaacccctgcatctcagctttatccacag

SEQ ID NO: 124197 - DNA, 120 bp, Artificial Sequence
  ENSG00000101350_20 (sequence is synthesized)
tctcgggggctggttccaaagtaaagccagcttctcctctcccagggcggaaacagcatttgccttctgagagaagagactagcaaaaagctgcagagaggattcggcccaaactcagaa

SEQ ID NO: 124198 - DNA, 120 bp, Artificial Sequence
  ENSG00000101350_21 (sequence is synthesized)
ctgttcccctgaggagaagcggtggcctctttgcagatcaaccaacttaatctggttgaacgtgctgttcctaatctggcactcagcccctctgggaaacatcttttaattagcatctca

SEQ ID NO: 124199 - DNA, 120 bp, Artificial Sequence
  ENSG00000101350_22 (sequence is synthesized)
gaaatgcatgggtaaggtaaagtgcgatagttcaagtggaaagcaagagaatgaccagtgaccttgcttccttcccccttgccttcttctcccccttcccctgtgctccctttctctcct

SEQ ID NO: 124200 - DNA, 120 bp, Artificial Sequence
  ENSG00000101350_23 (sequence is synthesized)
ctctccttttctagcctgttctttacatggggctcccttcttgttgaacaatagggcagaatcaggagtcaccttagcaggaccacatctttggagcctcgggataaaatgacagtgagg

SEQ ID NO: 124201 - DNA, 120 bp, Artificial Sequence
  ENSG00000101350_24 (sequence is synthesized)
ttgaaaagtgaaaaccctagaacttgaataggtgcctgttcttgtagggagaaatgagaaatcgcatttggatccaggccccaggtgggcaccatcagcagtcttgcttccatgcacctc

SEQ ID NO: 124202 - DNA, 120 bp, Artificial Sequence
  ENSG00000101350_25 (sequence is synthesized)
agtgtttagggaaatagcttctttaaaacctcaaaaccatgaccatcctgtcaaagacctaagtctgtaagctggtgccatgtccatacaccatgtcactttactcttcatttgtcacca

SEQ ID NO: 124203 - DNA, 120 bp, Artificial Sequence
  ENSG00000101350_26 (sequence is synthesized)
tcttttcccatgcacgcatactctgaacatccttgtgtgggcccatcctctgcatccagagcatgctctgcagtgggcctgttttgtggaagaaaggaggctgtctctgccttctctgat

SEQ ID NO: 124204 - DNA, 120 bp, Artificial Sequence
  ENSG00000101350_27 (sequence is synthesized)
gggactggagttgagggaaggagctgtattgtggcacttctgaattccccgttttgttccatattggtatagagagcagaagagtagctaggcagatgcagagatggagacatgagactc

SEQ ID NO: 124205 - DNA, 120 bp, Artificial Sequence
  ENSG00000101350_28 (sequence is synthesized)
agtgcagtgggcagggaagacataacagatggaagcaaaggaatcctgcctgccttcagcagagaattcaccgaatcctagaactgtggctccctccaggcagagcctaagatgctggtg

SEQ ID NO: 124206 - DNA, 120 bp, Artificial Sequence
  ENSG00000101350_29 (sequence is synthesized)
aagaatagctgtgtgattgaataggctcaaaggagagttcagaattcccatttacatattactagtttggtttgtaagttttagttccttgtattattgagattcagagcttcattttat

SEQ ID NO: 124207 - DNA, 120 bp, Artificial Sequence
  ENSG00000101350_30 (sequence is synthesized)
gttggtcattaggtgaatattactcattttccctcaagagaagctcataagtgtgtgtgggtgtgagagcacgatggtgcctgtgttctgtgaatgtgtccatatgtgtctgtaagagag

SEQ ID NO: 124208 - DNA, 120 bp, Artificial Sequence
  ENSG00000101350_31 (sequence is synthesized)
acagagaccaagaacttgcccaattttagaaatacactaatgtgcagttgttgccttttgtctgtattgaaggcccattgaatgactaatccaggctggaagcattcccatgtgggtgtc

SEQ ID NO: 124209 - DNA, 120 bp, Artificial Sequence
  ENSG00000101350_32 (sequence is synthesized)
tgagtccatgagccaagcctgaggggacagtgagtctccaggtctgccacactggtgcaccttgctggcacggtgcctcaggaaggtggcgactcaggtgggccttgagttatattttaa

SEQ ID NO: 124210 - DNA, 120 bp, Artificial Sequence
  ENSG00000101350_33 (sequence is synthesized)
ctcagctgctcagttcccagggcacatttctggatcagaacccatgggaaacaggaggtactaagtgcaatgtcttagcattctgcaaaatggagatctgttgtccagcggcttatctcc

SEQ ID NO: 124211 - DNA, 120 bp, Artificial Sequence
  ENSG00000101350_34 (sequence is synthesized)
tttttagtaacccttctttctgaacccagggcccttttcagccttccctcatattttcttgagatcaaactttacttctttcttatttactaagaatttgcctgtttgaataagaacaaa

SEQ ID NO: 124212 - DNA, 120 bp, Artificial Sequence
  ENSG00000101350_35 (sequence is synthesized)
acgctaaggtgggtagcctaagctgattttctgctggttacacgtgtctctcacaccacatttcctcaaagctaatctgaattctgtaggctaaaaatattcatgtagcaaatctgagaa

SEQ ID NO: 124213 - DNA, 66 bp, Artificial Sequence
  ENSG00000101350_36 (sequence is synthesized)
attctgtaggctaaaaatattcatgtagcaaatctgagaattgaaaactgcagataaccggccggg

SEQ ID NO: 124214 - DNA, 68 bp, Artificial Sequence
  ENSG00000101350_37 (sequence is synthesized)
gacagagtgagactccctgcagataaccctatacattaatactggtatctcgaggtgactcttctgac

SEQ ID NO: 124215 - DNA, 120 bp, Artificial Sequence
  ENSG00000101350_38 (sequence is synthesized)
ctatacattaatactggtatctcgaggtgactcttctgaccaagggtggttaagtgacacatagaacttttctaagagaagacagacaagttgacaggcatgccttgtactcagctgtgt

SEQ ID NO: 124216 - DNA, 120 bp, Artificial Sequence
  ENSG00000101350_39 (sequence is synthesized)
tcatgtggtggtctgtggaaagaaaagaagactcatttggaaatgaagctgtccctttccaagcagtctctggtgcttttcttctctcaaaatggatccgataaatatttgaatagagca

SEQ ID NO: 124217 - DNA, 120 bp, Artificial Sequence
  ENSG00000101350_40 (sequence is synthesized)
gattgtagaatgtcgtgctgtcaccagaaagctgctgttttgggttctgcattgagccaaatatgtagaggacctaccaagcccactgagggactaggttttcatgtctctagtcatacc

SEQ ID NO: 124218 - DNA, 120 bp, Artificial Sequence
  ENSG00000101350_41 (sequence is synthesized)
tagaatgttctgagccgtctgagggccttcatgccggcagcagctagcaaagccagaaagcaagtctaacaggatctaagatgaccatcaggagaaggagtttgagactgtgtatgcaac

SEQ ID NO: 124219 - DNA, 120 bp, Artificial Sequence
  ENSG00000101350_42 (sequence is synthesized)
ccccaatagacccccttttactctgatctggagaatgtatctggcttcatattttcaagtcacatgtctctcagacccctggattcagaacccaaggccacaaatcataggcatgaagca

SEQ ID NO: 124220 - DNA, 120 bp, Artificial Sequence
  ENSG00000101350_43 (sequence is synthesized)
ctttcttaagactgacctaacgctggattatttcccgtccaatgcctgcatgctgcttgaattgctccacccacacctccatgaccaagggcgccagagtgctgcaactggggcgtgggc

SEQ ID NO: 124221 - DNA, 120 bp, Artificial Sequence
  ENSG00000101350_44 (sequence is synthesized)
cgctctctgcttttcctgtctgactctgacaagtcctccctcactgaatgtagaatcgttgccaagtttctgagaagtgtcgattccctgttaacatggatatcagttctgcctcacatt

SEQ ID NO: 124222 - DNA, 120 bp, Artificial Sequence
  ENSG00000101350_45 (sequence is synthesized)
tcccacttgaggttgaggcgtactggagacaacacctcagaccatctgaaccccatcagtggacgaaaatggggctgttaatatactctaaaagccatactaaaaatgctctgagggaac

SEQ ID NO: 124223 - DNA, 120 bp, Artificial Sequence
  ENSG00000101350_46 (sequence is synthesized)
tggctaagaatagtgggcctggtgattgtctatcacgcaaggctttgttttgtactgttcagaaatctgtcacctttctgcctgcccttgtttcctgaatgaaatgcttctggggttatt

SEQ ID NO: 124224 - DNA, 120 bp, Artificial Sequence
  ENSG00000101350_47 (sequence is synthesized)
tatgaaaggagtgatcctggggcaggcaggaggcagtgggcttcatggctccttgaagttattactgatcttgaccttctctttggctacctttagacaaagaatacgccaatcaatact

SEQ ID NO: 124225 - DNA, 120 bp, Artificial Sequence
  ENSG00000101350_48 (sequence is synthesized)
tggggctctaagttttacaattgatatttatttgtatcatctctttgtctaggaatgtaaaagtgattctaaactaagatgtgtaataaaaatcaatcagatttattgtacctacaaaaa

SEQ ID NO: 124226 - DNA, 120 bp, Artificial Sequence
  ENSG00000101353_0 (sequence is synthesized)
atgcccctgtcccgcaggggaaggggatcccgcctggccggctctcgagcggcgactagtaacctcccgcgggcgacagccctctccccaaagcacgcgcaactcctcacccggcggcgc

SEQ ID NO: 124227 - DNA, 120 bp, Artificial Sequence
  ENSG00000101353_1 (sequence is synthesized)
cattcctccgagcaggtcccgccggagtccgagccgcgggctgacttccgctcgggaaagtggctccaagagcccgccacaggggacgccagggactcgcggcaggctctgcgggccagg

SEQ ID NO: 124228 - DNA, 120 bp, Artificial Sequence
  ENSG00000101353_2 (sequence is synthesized)
atgagttctaagcacaggatctgtagtcaggaagaagtagtgatcccctgtgcctatgacagtgattcagaaagtgtggatttggagctgagcaacttagagattattaaaaaaggctca

SEQ ID NO: 124229 - DNA, 120 bp, Artificial Sequence
  ENSG00000101353_3 (sequence is synthesized)
agtagcattgaactgacagacttggacatccctgacatccctggactccattgtgagcccctgtcacatagccccagacacctgacccaacaggacccgctcagtgaggccattgttgag

SEQ ID NO: 124230 - DNA, 120 bp, Artificial Sequence
  ENSG00000101353_4 (sequence is synthesized)
aaactgatccagtccatccagaaggttttcaatggtgagctaaagggtgaacttgaaaagctgaaattcctaggagatctgtcttctctcagccaagctttaccttatgatgaaaccgca

SEQ ID NO: 124231 - DNA, 120 bp, Artificial Sequence
  ENSG00000101353_5 (sequence is synthesized)
aaatcattcattcacagccacatagcagacattgtgcataccttaaatgtactggtacaagaggaacgcccgcattctctgtccagttccatgcgccaggaggtctttgtcaccatcgct

SEQ ID NO: 124232 - DNA, 120 bp, Artificial Sequence
  ENSG00000101353_6 (sequence is synthesized)
gatctcagttaccaagatgtccatttgctgttgggctctgaagatcgagctgagttgttcagtcttaccatcaagagtataatcactctgccctctgtaaggacccttacccagatacag

SEQ ID NO: 124233 - DNA, 120 bp, Artificial Sequence
  ENSG00000101353_7 (sequence is synthesized)
gaaatcatgcccaatgggacctgcaacacagagtgtctttacaggcagacgtttcaggcattctctgagatgctccagagtttggtggtaaaagacccacatttggaaaatcttgacacc

SEQ ID NO: 124234 - DNA, 120 bp, Artificial Sequence
  ENSG00000101353_8 (sequence is synthesized)
attattaagcacttggtcccctggttacagtcagtcaaagaccatgagcgggaacgggccacggccagcatggctcaagttctgaagtgcctatccaaacatctcaacttgaagcttcca

SEQ ID NO: 124235 - DNA, 120 bp, Artificial Sequence
  ENSG00000101353_9 (sequence is synthesized)
ctgcgattccaaagacttggacacctagtggctctgatggcactgctctgtggggacccacaggaaaaggtggctgaggaggctgcagagggcattcactccctgctgcatatcaccctg

SEQ ID NO: 124236 - DNA, 120 bp, Artificial Sequence
  ENSG00000101353_10 (sequence is synthesized)
aggctgaagtatatcactcatgacaagaaagatcagcaaaacttgaaaagagcattgacaaaatgtcgagaattcctggagctccacagctctgccgctaaatgcttctacaactgtccc

SEQ ID NO: 124237 - DNA, 120 bp, Artificial Sequence
  ENSG00000101353_11 (sequence is synthesized)
ttcagaattgcccaggtctttgaaggttttcttgattcaaatgagctctgccagtttataatgactacatttgataccctgaaaaccctgaaacatccctgcatccagcgatcagcagga

SEQ ID NO: 124238 - DNA, 120 bp, Artificial Sequence
  ENSG00000101353_12 (sequence is synthesized)
gaattactgctaactttggcaaaaaatacagagtcccaatttgagaaggtgccagaaattatgggagttatctgtgcccagttatccataatcagccagcctagagtccgccaacaaatc

SEQ ID NO: 124239 - DNA, 120 bp, Artificial Sequence
  ENSG00000101353_13 (sequence is synthesized)
tggagaatgctgtcggtggagcttcccagcacgacctggattctgtggaggctcctgaggaagctgcagaaatgccataatgagcctgcacaggagaagatggcatatgtggctgtggct

SEQ ID NO: 124240 - DNA, 120 bp, Artificial Sequence
  ENSG00000101353_14 (sequence is synthesized)
gcaacagatgccctttatgaggtgtttttgggaaacaggcttcgagcagctacgttccgactctttcctcagcttctcatgacactgcttatccagattcatcacagcatcggcctcacc

SEQ ID NO: 124241 - DNA, 120 bp, Artificial Sequence
  ENSG00000101353_15 (sequence is synthesized)
atgtctgatgtcgacatcccaagtggcctgtacacagaacaggaagtgccttcagaggtcacccctttgtgctttgccatgcaggctacaaagactctcctcctcagaacatgctgcttg

SEQ ID NO: 124242 - DNA, 120 bp, Artificial Sequence
  ENSG00000101353_16 (sequence is synthesized)
caggaattcaacatcatggaaaagaataaaggatgggctctcctgggaggaaaagatggccatcttcagggactatttctccttgccaacgcattgctggaaagaaatcagctccttgca

SEQ ID NO: 124243 - DNA, 120 bp, Artificial Sequence
  ENSG00000101353_17 (sequence is synthesized)
cagaaggtcatgtacttattagtccctcttcttaaccgagggaatgataaacataaactcacatctgcaggcttttttgtggagcttctccggagtccagtggccaagagactgcccagc

SEQ ID NO: 124244 - DNA, 120 bp, Artificial Sequence
  ENSG00000101353_18 (sequence is synthesized)
atatactctgttgcccgctttaaagactggctacaagatggaaatcatctctttagaattctcggcctgaggggactgtacaatcttgttggacaccaggagatgagagaagacatcaag

SEQ ID NO: 124245 - DNA, 120 bp, Artificial Sequence
  ENSG00000101353_19 (sequence is synthesized)
agcctgttgccatacattgtagacagcttgcgtgaaaccgatgagaagatcgttctgtcagccatccagatactcctgcaacttgttagaacaatggatttcactaccctggctgccatg

SEQ ID NO: 124246 - DNA, 120 bp, Artificial Sequence
  ENSG00000101353_20 (sequence is synthesized)
atgaggaccctgttctccttatttggtgatgtgagatctgatgttcatcgtttctccgtgactctctttggagccgccataaagtctgtaaaaaacccagataagaagagtatagagaac

SEQ ID NO: 124247 - DNA, 120 bp, Artificial Sequence
  ENSG00000101353_21 (sequence is synthesized)
caagtcctggacagcttggtcccactacttctgtattctcaggatgaaaatgatgcagtagctgaggagagcaggcaagtcctaactatatgtgcccagttcctgaagtggaagctgccc

SEQ ID NO: 124248 - DNA, 120 bp, Artificial Sequence
  ENSG00000101353_22 (sequence is synthesized)
caagaagtgtactccaaagatccctggcacatcaaacctactgaagcaggaacaatctgcagattctttggaaaaaaagtgcaaggggaaaattaacatcctagaacaaacactgatgta

SEQ ID NO: 124249 - DNA, 120 bp, Artificial Sequence
  ENSG00000101353_23 (sequence is synthesized)
ctccaagaacccaaaacttcccatcagaagatcagcagtcttgtttgtaggccttttatcgaagtacatggatcacaatgagctcaggaggatgggtactgactggatagaggacgatct

SEQ ID NO: 124250 - DNA, 120 bp, Artificial Sequence
  ENSG00000101353_24 (sequence is synthesized)
gagagacctgctgtgtgaccctgagccctcgctgtgcatcatcgcttcccagactctgttactagtccagatggcgagggccgaaccaaaacctaagcagagagtgaactggttgcagaa

SEQ ID NO: 124251 - DNA, 120 bp, Artificial Sequence
  ENSG00000101353_25 (sequence is synthesized)
gctcatgggcaggtcctctgcctagaaacacaaggcaagcaacatcagagacagaatcttgctatgttgtgcggcaagctagtcttgaactcatggcctcaagtcatcctcctgtgtcag

SEQ ID NO: 124252 - DNA, 120 bp, Artificial Sequence
  ENSG00000101353_26 (sequence is synthesized)
cctcccaaagtgctgggattacaagcatgcaccacggcacccagcagaattccagtcttgagaaacaggtcaaggacagcttcaaaagagattctaaataaatgttaatgttacaatgtt

SEQ ID NO: 124253 - DNA, 120 bp, Artificial Sequence
  ENSG00000101353_27 (sequence is synthesized)
aggtcgcgggcactcccaccagctcgcagccctccttcggaccctcgatccgagagcgccccagccagagcttgtgcccatgcccctgtcccgcaggggaaggggatcccgcctggccgg

SEQ ID NO: 124254 - DNA, 120 bp, Artificial Sequence
  ENSG00000101353_28 (sequence is synthesized)
caaagcctgcatctgtcatccatttataagtctacagtgtttctgccaagggattgacatggagggagctggggagagtgaaggagtcagaatgccttaatacaaactcgtccaacctgc

SEQ ID NO: 124255 - DNA, 120 bp, Artificial Sequence
  ENSG00000101353_29 (sequence is synthesized)
ccggagtccgagccgcgggctgacttccgctcgggaaagtggctccaagagcccgccacaggggacgccagggactcgcggcaggctctgcgggccaggatgagttctaagcacagactt

SEQ ID NO: 124256 - DNA, 120 bp, Artificial Sequence
  ENSG00000101353_30 (sequence is synthesized)
gctgcccggcccattttaaaggaacaggaagggtctcgtcgggaggggatagcttagaagggatttttttttcctctttagaaaattgtggcagtttctggccgggcgcagtggctcacg

SEQ ID NO: 124257 - DNA, 120 bp, Artificial Sequence
  ENSG00000101361_0 (sequence is synthesized)
attgcgagccgaacccgggagctggcgccatggtgctgttgcacgtgctgtttgagcacgcggtcggctacgcgctgctggcgctgaaggaagtggaggagatcagtctgctgcagccgc

SEQ ID NO: 124258 - DNA, 120 bp, Artificial Sequence
  ENSG00000101361_1 (sequence is synthesized)
aggtggaggagtctgtgctcaacctgggcaaattccacagcatcgttcgtctggtggccttttgtccctttgcctcatcccaggttgccttggaaaatgccaacgccgtgtctgaagggg

SEQ ID NO: 124259 - DNA, 120 bp, Artificial Sequence
  ENSG00000101361_2 (sequence is synthesized)
ttgttcatgaggacctccgcctgctcttggagacccacctgccgtccaaaaagaagaaagtactcttgggagttggggatcccaagattggtgccgcaatacaggaggagttagggtaca

SEQ ID NO: 124260 - DNA, 120 bp, Artificial Sequence
  ENSG00000101361_3 (sequence is synthesized)
actgccagactggaggagtcatagctgagatcctgcgaggagttcgtctgcacttccacaatctggtgaagggtctgaccgatctgtcagcttgtaaagcacagctggggctgggacaca

SEQ ID NO: 124261 - DNA, 120 bp, Artificial Sequence
  ENSG00000101361_4 (sequence is synthesized)
gctattcccgtgccaaagttaagtttaatgtgaaccgggtggacaatatgatcatccagtccattagcctcctggaccagctggataaggacatcaataccttctctatgcgtgtcaggg

SEQ ID NO: 124262 - DNA, 120 bp, Artificial Sequence
  ENSG00000101361_5 (sequence is synthesized)
agtggtacgggtatcactttccggagctggtgaagatcatcaacgacaatgccacatactgccgtcttgcccagtttattggaaaccgaagggaactgaatgaggacaagctggagaagc

SEQ ID NO: 124263 - DNA, 120 bp, Artificial Sequence
  ENSG00000101361_6 (sequence is synthesized)
tggaggagctgacaatggatggggccaaggctaaggctattctggatgcctcacggtcctccatgggcatggacatatctgccattgacttgataaacatcgagagcttctccagtcgtg

SEQ ID NO: 124264 - DNA, 120 bp, Artificial Sequence
  ENSG00000101361_7 (sequence is synthesized)
atcgcacatgctggcagcctcaccaacctggccaagtatccagcatccacagtgcagatccttggggctgaaaaggccctgttcagagccctgaagacaaggggtaacactccaaaatat

SEQ ID NO: 124265 - DNA, 120 bp, Artificial Sequence
  ENSG00000101361_8 (sequence is synthesized)
ggactcattttccactccaccttcattggccgagcagctgccaagaacaaaggccgcatctcccgatacctggcaaacaaatgcagtattgcctcacgaatcgattgcttctctgaggtg

SEQ ID NO: 124266 - DNA, 120 bp, Artificial Sequence
  ENSG00000101361_9 (sequence is synthesized)
cccacgagtgtattcggggagaagcttcgagaacaagttgaagagcgactgtccttctatgagactggagagataccacgaaagaatctggatgtcatgaaggaagcaatggttcaggca

SEQ ID NO: 124267 - DNA, 120 bp, Artificial Sequence
  ENSG00000101361_10 (sequence is synthesized)
gaggaagcggctgctgagattactaggaagctggagaaacaggagaagaaacgcttaaagaaggaaaagaaacggctggctgcacttgccctcgcgtcttcagaaaacagcagtagtact

SEQ ID NO: 124268 - DNA, 120 bp, Artificial Sequence
  ENSG00000101361_11 (sequence is synthesized)
ccagaggagtgtgaggagatgagtgaaaaacccaaaaagaagaaaaagcaaaagccccaggaggttcctcaggagaatggaatggaagacccatctatctctttctccaaacccaagaaa

SEQ ID NO: 124269 - DNA, 120 bp, Artificial Sequence
  ENSG00000101361_12 (sequence is synthesized)
aagaaatctttttccaaggaggagttgatgagtagcgatcttgaagagaccgctggcagcaccagtattcccaagaggaagaagtctacacccaaggaggaaacagttaatgaccctgag

SEQ ID NO: 124270 - DNA, 120 bp, Artificial Sequence
  ENSG00000101361_13 (sequence is synthesized)
gaggcaggccacagaagtggctccaagaaaaagaggaaattctccaaagaggagccggtcagcagtgggcctgaagaggcggttggcaagagcagctccaagaagaagaaaaagttccat

SEQ ID NO: 124271 - DNA, 120 bp, Artificial Sequence
  ENSG00000101361_14 (sequence is synthesized)
aaagcatcccaggaagattagaatgcaaatggacattctctgggaggtggggcataccatagcccaaggtgacatttcccaccctgtgccgtgttccccaataaaaacaaattcacaaga

SEQ ID NO: 124272 - DNA, 120 bp, Artificial Sequence
  ENSG00000101361_15 (sequence is synthesized)
accgccagagcctacacacttacctgcgctccaagatgagccaagtagcccccagcctgtcagccctaattggggaagcggtgcgtcacaggggactcaaaaatgggagaataaggactg

SEQ ID NO: 124273 - DNA, 120 bp, Artificial Sequence
  ENSG00000101361_16 (sequence is synthesized)
ttgccatgtgcacctgcactgctgtatttcgtgacccaccatgtcttccctagttgtgcttgatggggaggtggggagcagggctgtcgtgcaactgggcaggtcagcagttcatttctc

SEQ ID NO: 124274 - DNA, 120 bp, Artificial Sequence
  ENSG00000101361_17 (sequence is synthesized)
ctgttcaggtaccagtgagggcacctgcccacaatcaggtgccacttctggtgcccactgcttgttgggggatcacggtgatggctgaccagggctccctgacctatacaggcctctgct

SEQ ID NO: 124275 - DNA, 120 bp, Artificial Sequence
  ENSG00000101361_18 (sequence is synthesized)
atgggggtgatggccagtcctggtgtctgagtgattcccagggcccagcaaagggaccaagtttccaggtcagcgacattggatgccttccctctgcctctgggagctatgggttggcat

SEQ ID NO: 124276 - DNA, 120 bp, Artificial Sequence
  ENSG00000101361_19 (sequence is synthesized)
gcattggggtagagatccaatctggcctgaggctcactcaggacttcggggtgagaggaggggaggagctgagctgccttggctaatggggttgaaatttctgatcttaaactctccact

SEQ ID NO: 124277 - DNA, 120 bp, Artificial Sequence
  ENSG00000101361_20 (sequence is synthesized)
caatgatggcaatatttttcgtcaacagcagttcacctagtgagtgttgagactctgggtctgagtgaagctgagggtagagggaacacagggttggggtagtttctctctttgggctga

SEQ ID NO: 124278 - DNA, 120 bp, Artificial Sequence
  ENSG00000101361_21 (sequence is synthesized)
caggcttttggactgaaacaaggacctgaaacatctaaaactacctcttgattctataggaaggagataggtgctgaacttgctcaagagcccagagagctggttgtagctcacacccgt

SEQ ID NO: 124279 - DNA, 120 bp, Artificial Sequence
  ENSG00000101361_22 (sequence is synthesized)
tccctgggcatgtgtgttctgtcctcggctgcctcccaggagtcctcaacctggggtagtgtaaattcctgctctgcttattatcagacgtgtgtccggaggtggtcgtgtttcacagtg

SEQ ID NO: 124280 - DNA, 120 bp, Artificial Sequence
  ENSG00000101361_23 (sequence is synthesized)
gggatgggggcagggaggtccccaatgtgctaagctacaatcattctccctgagattttcatttagcacccagtttcttaaacagtgtttcagggccctgtctggaacttggcatgatgg

SEQ ID NO: 124281 - DNA, 120 bp, Artificial Sequence
  ENSG00000101361_24 (sequence is synthesized)
ttctgttgcgaccagcatggtgggtgttttttaggtttttttttttaatgggctgaggtaatttctcatgacatgttttccttctaatttgggacagcctttggggtggatttctaaagt

SEQ ID NO: 124282 - DNA, 120 bp, Artificial Sequence
  ENSG00000101361_25 (sequence is synthesized)
tatacccacacaattaaactatcccagaaacactgggcaatgttaacgacacgcgttcccctgccttggctacttaattgctgaagatgtaatgagcactgttctcacagcctgttcccc

SEQ ID NO: 124283 - DNA, 120 bp, Artificial Sequence
  ENSG00000101361_26 (sequence is synthesized)
tgatagtatttgccgtccttggctggctctgagtctgataggcgtgaggcagtatttgagccatacaatgtgtaatttgaaataattgtcttcacagagctcaaggtctgggaactgtgc

SEQ ID NO: 124284 - DNA, 120 bp, Artificial Sequence
  ENSG00000101361_27 (sequence is synthesized)
tcaaggtctgggaactgtgctagaccaaactgtttaagcagacgatgtggaatgtgtgttaacgtttccttgtgggcactgtagtgacaaactattttttatttttattttttttgagat

SEQ ID NO: 124285 - DNA, 120 bp, Artificial Sequence
  ENSG00000101361_28 (sequence is synthesized)
cgcgctcccacgtggccggccgagcggttcggggcggggggacgggcctggaaagctctagatccgggggtctttaccttgacccatgggtagaatcgctctagcaattagaaataagcc

SEQ ID NO: 124286 - DNA, 120 bp, Artificial Sequence
  ENSG00000101361_29 (sequence is synthesized)
gagctggcgccatggtgaggagtggttgcggggcgcgggcgacgcgacggtgggggtttcggcctgcgttcgggccgcagacagggcctgggcctgggcctgggcctgcgcctgcgcctg

SEQ ID NO: 124287 - DNA, 120 bp, Artificial Sequence
  ENSG00000101361_30 (sequence is synthesized)
cttacactgactgtatagaaagaggaggtagagtaaacctaccccatatacacctcagctcaggccctgtgcctggtctgtattgtgaatgggggaacatagaattgaggaagatttgga

SEQ ID NO: 124288 - DNA, 120 bp, Artificial Sequence
  ENSG00000101361_31 (sequence is synthesized)
accagcatggagatgagtgaaaaacccaaaaagaagaaaaagcaaaagccccaggaggttcctcaggagaatggaatggaagacccatctatctctttctccaaacccaagaaaaagaaa

SEQ ID NO: 124289 - DNA, 120 bp, Artificial Sequence
  ENSG00000101361_32 (sequence is synthesized)
tgaatgcagttgttcccatggctgggccaggctttgcagtgatgacttgcgaatcaaatctgtcaatcccctgagtgcaatcactgatgtctccatgtctctgagcaatgcctgatgggg

SEQ ID NO: 124290 - DNA, 120 bp, Artificial Sequence
  ENSG00000101361_33 (sequence is synthesized)
gaactgtctgagcctgaccttgtagaatggaggcaaaaaaactgatttaatgagcctgatccaataaagccagaaaggagtcctcagagcaccagaagtcttcaggcccttttagcactt

SEQ ID NO: 124291 - DNA, 120 bp, Artificial Sequence
  ENSG00000101361_34 (sequence is synthesized)
cgaagggaactgaatgaggacaagctggagaagctggaggagctgacaatggatggggccaaggctaaggctattctggatgcctcacggtcctccatgggtcagtgcagagcctggcaa

SEQ ID NO: 124292 - DNA, 120 bp, Artificial Sequence
  ENSG00000101361_35 (sequence is synthesized)
cctgcataaggtatggggctctaaatagctggcctcttgcattcacacttggtttttcctaggcatggacatatctgccattgacttgataaacatcgagagcttctccagtcgtgtggt

SEQ ID NO: 124293 - DNA, 120 bp, Artificial Sequence
  ENSG00000101361_36 (sequence is synthesized)
aaatctgtcaatcccctgagtgcaatcactgatgtctccatgtctctgagcaatgcctgatggggagggatctaggtatgccatcccagcgtgctcggtgggaccagggtagtcagctga

SEQ ID NO: 124294 - DNA, 120 bp, Artificial Sequence
  ENSG00000101363_0 (sequence is synthesized)
tttgtcctctgcttcccaactcttgccctatctttctattgtaccactccaaatatttcttatcacaatgttgctgttagtagtaacactagtaaatctgagtatttataagctcataaa

SEQ ID NO: 124295 - DNA, 120 bp, Artificial Sequence
  ENSG00000101363_1 (sequence is synthesized)
gcttgttacagccttaagcaaaaagcttggggccaagggcgttttaaaaaatgcacactttatgaggtgcaactgcggagaaatgaggacgcgttcttaagctttggtattcacatggtg

SEQ ID NO: 124296 - DNA, 120 bp, Artificial Sequence
  ENSG00000101363_2 (sequence is synthesized)
gtggtgctggtagaggctgttacatttcttccagtgaagctgttcttgcagccgccttggaattcacttcagggccagtttatgagccaccccaagtaatctgcttggagtctgagcatc

SEQ ID NO: 124297 - DNA, 120 bp, Artificial Sequence
  ENSG00000101363_3 (sequence is synthesized)
ataccttgtatttgaccaaaaatggtattcctgagctcagtgccacctgattcactgcacttggaaccagatgatgttgggctctttccagaagtcaaatccttcctgggaggatgaaga

SEQ ID NO: 124298 - DNA, 120 bp, Artificial Sequence
  ENSG00000101363_4 (sequence is synthesized)
tctgccagctctgaggattctggctgggaagaaaaagagcctcaagctttgaaggccattcccatggtagacagagctgatgtgaaaagtggccatcctgttgccccaggcacatgacct

SEQ ID NO: 124299 - DNA, 120 bp, Artificial Sequence
  ENSG00000101363_5 (sequence is synthesized)
tctgaagtgaccaggctgaaagggaagcaatactcgtgtgatctctcaccccgtcactcagggtggcgcaatcacgactcattggctcactgcagcctagacctcccagctggagcaatt

SEQ ID NO: 124300 - DNA, 120 bp, Artificial Sequence
  ENSG00000101363_6 (sequence is synthesized)
tcagccttctgagtagctgggactacagttggttctaaagagtggtgagtcagaagagacgtcaggcagcaagcgacttgggccatggcctctgacctagacttctcacctccggaggtg

SEQ ID NO: 124301 - DNA, 120 bp, Artificial Sequence
  ENSG00000101363_7 (sequence is synthesized)
cgaggcggaggctgaaccgtctgagcccagaagtgctgaggtgacgaggaagcccaaggctgctgttccttctgtgaacaagaggcccaagaaagagactaagaagaagcggtagaagag

SEQ ID NO: 124302 - DNA, 120 bp, Artificial Sequence
  ENSG00000101363_8 (sequence is synthesized)
gaggcctgaggagctgggcgggcagggagagggtcttggggacagccctcctgggaatctacattgtgttcccccgcattccaggctcagggtctgaggaggctgtgacgccctatgacc

SEQ ID NO: 124303 - DNA, 120 bp, Artificial Sequence
  ENSG00000101363_9 (sequence is synthesized)
gcagagatctagacagtcgtaacagtccccaggctccagctgggcaatccaccacttcctcttccttctgcttctgtgacggtttagagtcaagggggctgaaacacactgtgagcatag

SEQ ID NO: 124304 - DNA, 120 bp, Artificial Sequence
  ENSG00000101363_10 (sequence is synthesized)
actgtattaggtttgttcagaagccgggtcagctcacagagtcacattttcttgcttagtcatgtgtccctccttgagttgccccctccttgtgggtttacactacatttgggagtcatt

SEQ ID NO: 124305 - DNA, 120 bp, Artificial Sequence
  ENSG00000101363_11 (sequence is synthesized)
gtctaatgctgacaagcacaccctctcccattatttgtgcactacagatctcctcctgatcagtcacctttgttgctgctgtgtagacagagccaggcctcacctgtttgtttaggccaa

SEQ ID NO: 124306 - DNA, 120 bp, Artificial Sequence
  ENSG00000101363_12 (sequence is synthesized)
gatgccatggacatgcagcgttagtgatcccactagctgtgacagccaggcccagaaaatgcctggcgtgagagccagcagacagccaggccagggtaggcagtgcctgcttctgctcca

SEQ ID NO: 124307 - DNA, 120 bp, Artificial Sequence
  ENSG00000101363_13 (sequence is synthesized)
tcaggtgcaggggatttggctgaaggcgtgcatatttcctgggcacaaacttcctgagcctctgaaatgggaggctcgtcaatttcagaccaacctcttttcaacccatcatagcacgtt

SEQ ID NO: 124308 - DNA, 120 bp, Artificial Sequence
  ENSG00000101363_14 (sequence is synthesized)
caaggtgtgccttttacttctacctgtacatcccccatcccttcaattctttcattccctgaccagtgagagggttcctgggggaagtatggtgaataaactgacatgcatgcttcagaa

SEQ ID NO: 124309 - DNA, 120 bp, Artificial Sequence
  ENSG00000101365_0 (sequence is synthesized)
acttcccacgcgacttcctgcgggaaacatggcggcattgagcggagtccgctggctgacccgagcgctggtctccgccgggaaccctggggcatggagaggtctgagtacctcggccgc

SEQ ID NO: 124310 - DNA, 120 bp, Artificial Sequence
  ENSG00000101365_1 (sequence is synthesized)
ggcgcacgctgcatcgcggagccaggccgaggacgtgagggtggagggctcctttcccgtgaccatgcttccgggagacggtgtggggcctgagctgatgcacgccgtcaaggaggtgtt

SEQ ID NO: 124311 - DNA, 120 bp, Artificial Sequence
  ENSG00000101365_2 (sequence is synthesized)
caaggctgccgctgtcccagtggagttccaggagcaccacctgagtgaggtgcagaatatggcatctgaggagaagctggagcaggtgctgagttccatgaaggagaacaaagtggccat

SEQ ID NO: 124312 - DNA, 120 bp, Artificial Sequence
  ENSG00000101365_3 (sequence is synthesized)
cattggaaagattcataccccgatggagtataagggggagctagcctcctatgatatgcggctgaggcgtaagttggacttatttgccaacgtagtccatgtgaagtcacttcctgggta

SEQ ID NO: 124313 - DNA, 120 bp, Artificial Sequence
  ENSG00000101365_4 (sequence is synthesized)
tatgactcggcacaacaatctagacctggtgatcattcgagagcagacagaaggggagtacagctctctggaacatgagagtgcaaggggtgtgattgagtgtttgaagattgtcacacg

SEQ ID NO: 124314 - DNA, 120 bp, Artificial Sequence
  ENSG00000101365_5 (sequence is synthesized)
agccaagtctcagcggattgcaaagttcgcctttgactatgccaccaagaaggggcggggcaaggtcactgctgtccacaaggccaacatcatgaaacttggggatgggttgttcctgca

SEQ ID NO: 124315 - DNA, 120 bp, Artificial Sequence
  ENSG00000101365_6 (sequence is synthesized)
tgtgcttgtgatgcccaatctctatgggaacattattgacaatctggctgctggcctggttgggggagctggtgtggtccctggtgagagctatagtgcagaatacgcagtctttgagac

SEQ ID NO: 124316 - DNA, 120 bp, Artificial Sequence
  ENSG00000101365_7 (sequence is synthesized)
gggtgcccggcacccatttgcccaggcagtgggcaggaatatagccaatcccacggccatgctgctgtcggcttccaacatgctgcggcatcttaatcttgagtatcactccagcatgat

SEQ ID NO: 124317 - DNA, 120 bp, Artificial Sequence
  ENSG00000101365_8 (sequence is synthesized)
cgcagatgcggtgaagaaggtgatcaaagttggcaaggtgcggactcgagacatgggcggctacagcaccacaaccgacttcatcaagtctgtcatcggtcacctgcagactaaagggag

SEQ ID NO: 124318 - DNA, 120 bp, Artificial Sequence
  ENSG00000101365_9 (sequence is synthesized)
ctagagccctttatttcttccaaccttgcaaggaccacactccccatacccttcagtgcagtgtaccagggaagagaccttgtgcctctaagcagtggaccatggtcaccttgctgggta

SEQ ID NO: 124319 - DNA, 120 bp, Artificial Sequence
  ENSG00000101365_10 (sequence is synthesized)
gagcctaggttgtccttgggccggcttccttaggggacagactgttgggtggtgatggggattgttaggatggagcccaggccacatggatgatgatgattctcccccacaggttcgaac

SEQ ID NO: 124320 - DNA, 120 bp, Artificial Sequence
  ENSG00000101365_11 (sequence is synthesized)
ctctgacatgggtggctatgctacttgccatgacttcactgaggctgtcattgctgccttgccccacccataggccctgtccatacccatgtaaggtgttcaataaagaacatgaaccaa

SEQ ID NO: 124321 - DNA, 120 bp, Artificial Sequence
  ENSG00000101365_12 (sequence is synthesized)
gaatgcagaacttgcagctctccttgggggtggaacagcaagggatacaggcaggctgaagcatcagcttcaccttcacgccccatctccttttcgctgtgattctttccttccacctgg

SEQ ID NO: 124322 - DNA, 120 bp, Artificial Sequence
  ENSG00000101365_13 (sequence is synthesized)
tcttgtctctatttcttccaaggaaggtagccacatcctgcctctgatctgcgtttcccatcatctttgcctgctcagcctcctgtcctgccctggctgcagcacagctaatagtggctt

SEQ ID NO: 124323 - DNA, 120 bp, Artificial Sequence
  ENSG00000101365_14 (sequence is synthesized)
caccatgcctcttttcagtgaccctggcctgagctccccctcccataatgtccttttccaacctaagcctctgcatacccctcctgcctcctcccagtgtctagcctgcccctctctcca

SEQ ID NO: 124324 - DNA, 120 bp, Artificial Sequence
  ENSG00000101365_15 (sequence is synthesized)
gagttgagaagagtagtgctggcttcaggatttagagtagttctggtgtcagcacctcggcactaccctctggggaacctgaatgggggtctcctttccccccaggtccccagaacatct

SEQ ID NO: 124325 - DNA, 120 bp, Artificial Sequence
  ENSG00000101365_16 (sequence is synthesized)
gctccctgacatccctgcatccctctcagggctgttcttcatctcccttctcttggctgtttcatcctcttgatctcttttgcctcttagatcccatctgctgttccctctttcctgctc

SEQ ID NO: 124326 - DNA, 120 bp, Artificial Sequence
  ENSG00000101365_17 (sequence is synthesized)
tagcccctgtactttcttggctgattctgtcccctttggcccatggacaggaaacttggggatgggttgttcctgcagtgctgtgaggaagttgctgaactgtaccccaaaatcaaattt

SEQ ID NO: 124327 - DNA, 120 bp, Artificial Sequence
  ENSG00000101367_0 (sequence is synthesized)
gtctggcggtttgaacgagacgaagacggaaccggagccggttgcgggcagtggacgcggttctgccgagagccgaagatggcagtgaacgtatactcaacgtcagtgaccagtgataac

SEQ ID NO: 124328 - DNA, 120 bp, Artificial Sequence
  ENSG00000101367_1 (sequence is synthesized)
ctaagtcgacatgacatgctggcctggatcaatgagtctctgcagttgaatctgacaaagatcgaacagttgtgctcaggggctgcgtattgtcagtttatggacatgctgttccctggc

SEQ ID NO: 124329 - DNA, 120 bp, Artificial Sequence
  ENSG00000101367_2 (sequence is synthesized)
tccattgccttgaagaaagtgaaattccaagctaagctagaacacgagtacatccagaacttcaaaatactacaagcaggttttaagagaatgggtgttgacaaaataattcctgtggac

SEQ ID NO: 124330 - DNA, 120 bp, Artificial Sequence
  ENSG00000101367_3 (sequence is synthesized)
aaattagtaaaaggaaagtttcaggacaattttgaattcgttcagtggttcaagaagtttttcgatgcaaactatgatggaaaagactatgaccctgtggctgccagacaaggtcaagaa

SEQ ID NO: 124331 - DNA, 120 bp, Artificial Sequence
  ENSG00000101367_4 (sequence is synthesized)
actgcagtggctccttcccttgttgctccagctctgaataaaccgaagaaacctctcacttctagcagtgcagctccccagaggcccatctcaacacagagaaccgctgcggctcctaag

SEQ ID NO: 124332 - DNA, 120 bp, Artificial Sequence
  ENSG00000101367_5 (sequence is synthesized)
gctggccctggtgtggtgcgaaagaaccctggtgtgggcaacggagacgacgaggcagctgagttgatgcagcaggtcaacgtattgaaacttactgttgaagacttggagaaagagagg

SEQ ID NO: 124333 - DNA, 120 bp, Artificial Sequence
  ENSG00000101367_6 (sequence is synthesized)
gatttctacttcggaaagctacggaacattgaattgatttgccaggagaacgagggggaaaacgaccctgtattgcagaggattgtagacattctgtatgccacagatgaaggctttgtg

SEQ ID NO: 124334 - DNA, 120 bp, Artificial Sequence
  ENSG00000101367_7 (sequence is synthesized)
atacctgatgaagggggcccacaggaggagcaagaagagtattaacagcctggaccagcagagcaacatcggaattcttcactccaaatcatgtgcttaactgtaaaatactcccttttg

SEQ ID NO: 124335 - DNA, 120 bp, Artificial Sequence
  ENSG00000101367_8 (sequence is synthesized)
ttatccttagaggactcactggtttcttttcataagcaaaaagtacctcttcttaaagtgcactttgcagacgtttcactccttttccaataagtttgagttaggagcttttaccttgta

SEQ ID NO: 124336 - DNA, 120 bp, Artificial Sequence
  ENSG00000101367_9 (sequence is synthesized)
gcagagcagtattaacacctagttggttcacctggaaaacagagaggctgaccgtggggctcaccatgcggatgcgggtcacactgaatgctggagagatgttatgtaatatgctgaggt

SEQ ID NO: 124337 - DNA, 120 bp, Artificial Sequence
  ENSG00000101367_10 (sequence is synthesized)
agctaatgtgaaatcagagaatgttgtaataagtaaatgccttaagagtatttaaaatatgcttccacatttcaaaatataaaatgtaacatgacaagagattttgcgtttgacattgtg

SEQ ID NO: 124338 - DNA, 120 bp, Artificial Sequence
  ENSG00000101367_11 (sequence is synthesized)
tctgggaaggaagggccagaccttggaacctttggaacctgctgtcaacaggtcttacagggctgcttgaaccctcataggcctaggctttggtctaaaaggaacatttaaaaagttgcc

SEQ ID NO: 124339 - DNA, 120 bp, Artificial Sequence
  ENSG00000101367_12 (sequence is synthesized)
ctgtaaagttatttggtgtcattgaccaattgcatcccagctaaaaagcaagaggcatcgttgcctggataatagaggatgtgtttcagccctgagatgttacagttgaagagcttggtt

SEQ ID NO: 124340 - DNA, 120 bp, Artificial Sequence
  ENSG00000101367_13 (sequence is synthesized)
ttcattgagcatttctctatttttccagttatccccgaaatttctatgtattatattttttggggaagtgaggtgtgcccagttttttaatctaacaactacttttggggacttgcccac

SEQ ID NO: 124341 - DNA, 120 bp, Artificial Sequence
  ENSG00000101367_14 (sequence is synthesized)
atctctgggatttgaatggggattgtatcccattttactgtcttttaggtttacatttaccacgtttctcttctctgctccccttgcccactggggactcctctttggctccttgaagtt

SEQ ID NO: 124342 - DNA, 120 bp, Artificial Sequence
  ENSG00000101367_15 (sequence is synthesized)
tgctgcttagagttggaagtgcagcaggcaggtgatcatgctgcaagttctttctggacctctggcaaagggagtggtcagtgaaggccatcgttaccttgggatctgccaggctggggt

SEQ ID NO: 124343 - DNA, 120 bp, Artificial Sequence
  ENSG00000101367_16 (sequence is synthesized)
gttttcggtatctgctgttcacagctctccactgtaatccgaatactttgccagtgcactaatctctttggagataaaattcattagtgtgttactaaatgttaattttcttttgcggaa

SEQ ID NO: 124344 - DNA, 120 bp, Artificial Sequence
  ENSG00000101367_17 (sequence is synthesized)
aatacagtaccgtgtctgaattaattattaatatttaaaatacttcattccttaactctccctcatttgctttgcccacagcctattcagttcctttgtttggcaggattctgcaaaatg

SEQ ID NO: 124345 - DNA, 120 bp, Artificial Sequence
  ENSG00000101367_18 (sequence is synthesized)
tgtctcacccactactgagattgttcagcccctgatgtatttgtattgatttgtttctggtggtagcttgtcctgaaatgtgtgtagaaagcaagtattttatgataaaaatgttgtgta

SEQ ID NO: 124346 - DNA, 120 bp, Artificial Sequence
  ENSG00000101367_19 (sequence is synthesized)
gtgcatgctctgtgtggaattcagaggaaaacccagattcagtgattaacaatgccaaaaaatgcaagtaactagccattgttcaaatgacagtggtgctatttctcttttgtggccttt

SEQ ID NO: 124347 - DNA, 120 bp, Artificial Sequence
  ENSG00000101367_20 (sequence is synthesized)
tagacttttgttgccctaaaattccattttattgggaacccattttccacctggtctttcttgacagggtttttttctactttaaacagtttctaaataaaattctgtatttcaagagta

SEQ ID NO: 124348 - DNA, 120 bp, Artificial Sequence
  ENSG00000101384_0 (sequence is synthesized)
agacgggctctccgggtccttctccgagagccgggcgggcacgcgtcattgtgttacctgcggccggcccgcgagctaggctggtttttttttttctcccctccctcccccctttttcca

SEQ ID NO: 124349 - DNA, 120 bp, Artificial Sequence
  ENSG00000101384_1 (sequence is synthesized)
tgcagctgatctaaaagggaataaaaggctgcgcataatcataataataaaagaaggggagcgcgagagaaggaaagaaagccgggaggtggaagaggagggggagcgtctcaaagaagc

SEQ ID NO: 124350 - DNA, 120 bp, Artificial Sequence
  ENSG00000101384_2 (sequence is synthesized)
gatcagaataataaaaggaggccgggctctttgccttctggaacgggccgctcttgaaagggcttttgaaaagtggtgttgttttccagtcgtgcatgctccaatcggcggagtatatta

SEQ ID NO: 124351 - DNA, 120 bp, Artificial Sequence
  ENSG00000101384_3 (sequence is synthesized)
gtatattagagccgggacgcggcggccgcaggggcagcggcgacggcagcaccggcggcagcaccagcgcgaacagcagcggcggcgtcccgagtgcccgcggcgcgcggcgcagcgatg

SEQ ID NO: 124352 - DNA, 120 bp, Artificial Sequence
  ENSG00000101384_4 (sequence is synthesized)
acggacgcgcggccggtccgggcgccccctaagcctcctgctcgccctgctctgtgccctgcgagccaaggtgtgtggggcctcgggtcagttcgagttggagatcctgtccatgcagaa

SEQ ID NO: 124353 - DNA, 120 bp, Artificial Sequence
  ENSG00000101384_5 (sequence is synthesized)
cgtgaacggggagctgcagaacgggaactgctgcggcggcgcccggaacccgggagaccgcaagtgcacccgcgacgagtgtgacacatacttcaaagtgtgcctcaaggagtatcagtc

SEQ ID NO: 124354 - DNA, 120 bp, Artificial Sequence
  ENSG00000101384_6 (sequence is synthesized)
ccgcgtcacggccggggggccctgcagcttcggctcagggtccacgcctgtcatcgggggcaacaccttcaacctcaaggccagccgcggcaacgaccgcaaccgcatcgtgctgccttt

SEQ ID NO: 124355 - DNA, 120 bp, Artificial Sequence
  ENSG00000101384_7 (sequence is synthesized)
cagtttcgcctggccgaggtcctatacgttgcttgtggaggcgtgggattccagtaatgacaccgttcaacctgacagtattattgaaaaggcttctcactcgggcatgatcaaccccag

SEQ ID NO: 124356 - DNA, 120 bp, Artificial Sequence
  ENSG00000101384_8 (sequence is synthesized)
ccggcagtggcagacgctgaagcagaacacgggcgttgcccactttgagtatcagatccgcgtgacctgtgatgactactactatggctttggctgcaataagttctgccgccccagaga

SEQ ID NO: 124357 - DNA, 120 bp, Artificial Sequence
  ENSG00000101384_9 (sequence is synthesized)
tgacttctttggacactatgcctgtgaccagaatggcaacaaaacttgcatggaaggctggatgggccccgaatgtaacagagctatttgccgacaaggctgcagtcctaagcatgggtc

SEQ ID NO: 124358 - DNA, 120 bp, Artificial Sequence
  ENSG00000101384_10 (sequence is synthesized)
ttgcaaactcccaggtgactgcaggtgccagtacggctggcaaggcctgtactgtgataagtgcatcccacacccgggatgcgtccacggcatctgtaatgagccctggcagtgcctctg

SEQ ID NO: 124359 - DNA, 120 bp, Artificial Sequence
  ENSG00000101384_11 (sequence is synthesized)
tgagaccaactggggcggccagctctgtgacaaagatctcaattactgtgggactcatcagccgtgtctcaacgggggaacttgtagcaacacaggccctgacaaatatcagtgttcctg

SEQ ID NO: 124360 - DNA, 120 bp, Artificial Sequence
  ENSG00000101384_12 (sequence is synthesized)
ccctgaggggtattcaggacccaactgtgaaattgctgagcacgcctgcctctctgatccctgtcacaacagaggcagctgtaaggagacctccctgggctttgagtgtgagtgttcccc

SEQ ID NO: 124361 - DNA, 120 bp, Artificial Sequence
  ENSG00000101384_13 (sequence is synthesized)
aggctggaccggccccacatgctctacaaacattgatgactgttctcctaataactgttcccacgggggcacctgccaggacctggttaacggatttaagtgtgtgtgccccccacagtg

SEQ ID NO: 124362 - DNA, 120 bp, Artificial Sequence
  ENSG00000101384_14 (sequence is synthesized)
gactgggaaaacgtgccagttagatgcaaatgaatgtgaggccaaaccttgtgtaaacgccaaatcctgtaagaatctcattgccagctactactgcgactgtcttcccggctggatggg

SEQ ID NO: 124363 - DNA, 120 bp, Artificial Sequence
  ENSG00000101384_15 (sequence is synthesized)
tcagaattgtgacataaatattaatgactgccttggccagtgtcagaatgacgcctcctgtcgggatttggttaatggttatcgctgtatctgtccacctggctatgcaggcgatcactg

SEQ ID NO: 124364 - DNA, 120 bp, Artificial Sequence
  ENSG00000101384_16 (sequence is synthesized)
tgagagagacatcgatgaatgtgccagcaacccctgtttgaatgggggtcactgtcagaatgaaatcaacagattccagtgtctgtgtcccactggtttctctggaaacctctgtcagct

SEQ ID NO: 124365 - DNA, 120 bp, Artificial Sequence
  ENSG00000101384_17 (sequence is synthesized)
ggacatcgattattgtgagcctaatccctgccagaacggtgcccagtgctacaaccgtgccagtgactatttctgcaagtgccccgaggactatgagggcaagaactgctcacacctgaa

SEQ ID NO: 124366 - DNA, 120 bp, Artificial Sequence
  ENSG00000101384_18 (sequence is synthesized)
agaccactgccgcacgaccccctgtgaagtgattgacagctgcacagtggccatggcttccaacgacacacctgaaggggtgcggtatatttcctccaacgtctgtggtcctcacgggaa

SEQ ID NO: 124367 - DNA, 120 bp, Artificial Sequence
  ENSG00000101384_19 (sequence is synthesized)
gtgcaagagtcagtcgggaggcaaattcacctgtgactgtaacaaaggcttcacgggaacatactgccatgaaaatattaatgactgtgagagcaacccttgtagaaacggtggcacttg

SEQ ID NO: 124368 - DNA, 120 bp, Artificial Sequence
  ENSG00000101384_20 (sequence is synthesized)
catcgatggtgtcaactcctacaagtgcatctgtagtgacggctgggagggggcctactgtgaaaccaatattaatgactgcagccagaacccctgccacaatgggggcacgtgtcgcga

SEQ ID NO: 124369 - DNA, 120 bp, Artificial Sequence
  ENSG00000101384_21 (sequence is synthesized)
cctggtcaatgacttctactgtgactgtaaaaatgggtggaaaggaaagacctgccactcacgtgacagtcagtgtgatgaggccacgtgcaacaacggtggcacctgctatgatgaggg

SEQ ID NO: 124370 - DNA, 120 bp, Artificial Sequence
  ENSG00000101384_22 (sequence is synthesized)
ggatgcttttaagtgcatgtgtcctggcggctgggaaggaacaacctgtaacatagcccgaaacagtagctgcctgcccaacccctgccataatgggggcacatgtgtggtcaacggcga

SEQ ID NO: 124371 - DNA, 120 bp, Artificial Sequence
  ENSG00000101384_23 (sequence is synthesized)
gtcctttacgtgcgtctgcaaggaaggctgggaggggcccatctgtgctcagaataccaatgactgcagccctcatccctgttacaacagcggcacctgtgtggatggagacaactggta

SEQ ID NO: 124372 - DNA, 120 bp, Artificial Sequence
  ENSG00000101384_24 (sequence is synthesized)
ccagtcttcaccttgtgcctttggagcgacctgtgtggatgagatcaatggctaccggtgtgtctgccctccagggcacagtggtgccaagtgccaggaagtttcagggagaccttgcat

SEQ ID NO: 124373 - DNA, 120 bp, Artificial Sequence
  ENSG00000101384_25 (sequence is synthesized)
caccatggggagtgtgataccagatggggccaaatgggatgatgactgtaatacctgccagtgcctgaatggacggatcgcctgctcaaaggtctggtgtggccctcgaccttgcctgct

SEQ ID NO: 124374 - DNA, 120 bp, Artificial Sequence
  ENSG00000101384_26 (sequence is synthesized)
ccacaaagggcacagcgagtgccccagcgggcagagctgcatccccatcctggacgaccagtgcttcgtccacccctgcactggtgtgggcgagtgtcggtcttccagtctccagccggt

SEQ ID NO: 124375 - DNA, 120 bp, Artificial Sequence
  ENSG00000101384_27 (sequence is synthesized)
gaagacaaagtgcacctctgactcctattaccaggataactgtgcgaacatcacatttacctttaacaaggagatgatgtcaccaggtcttactacggagcacatttgcagtgaattgag

SEQ ID NO: 124376 - DNA, 120 bp, Artificial Sequence
  ENSG00000101384_28 (sequence is synthesized)
gaatttgaatattttgaagaatgtttccgctgaatattcaatctacatcgcttgcgagccttccccttcagcgaacaatgaaatacatgtggccatttctgctgaagatatacgggatga

SEQ ID NO: 124377 - DNA, 120 bp, Artificial Sequence
  ENSG00000101384_29 (sequence is synthesized)
tgggaacccgatcaaggaaatcactgacaaaataatcgatcttgttagtaaacgtgatggaaacagctcgctgattgctgccgttgcagaagtaagagttcagaggcggcctctgaagaa

SEQ ID NO: 124378 - DNA, 120 bp, Artificial Sequence
  ENSG00000101384_30 (sequence is synthesized)
cagaacagatttccttgttcccttgctgagctctgtcttaactgtggcttggatctgttgcttggtgacggccttctactggtgcctgcggaagcggcggaagccgggcagccacacaca

SEQ ID NO: 124379 - DNA, 120 bp, Artificial Sequence
  ENSG00000101384_31 (sequence is synthesized)
ctcagcctctgaggacaacaccaccaacaacgtgcgggagcagctgaaccagatcaaaaaccccattgagaaacatggggccaacacggtccccatcaaggattatgagaacaagaactc

SEQ ID NO: 124380 - DNA, 120 bp, Artificial Sequence
  ENSG00000101384_32 (sequence is synthesized)
caaaatgtctaaaataaggacacacaattctgaagtagaagaggacgacatggacaaacaccagcagaaagcccggtttgccaagcagccggcgtacacgctggtagacagagaagagaa

SEQ ID NO: 124381 - DNA, 120 bp, Artificial Sequence
  ENSG00000101384_33 (sequence is synthesized)
gccccccaacggcacgccgacaaaacacccaaactggacaaacaaacaggacaacagagacttggaaagtgcccagagcttaaaccgaatggagtacatcgtatagcagaccgcgggcac

SEQ ID NO: 124382 - DNA, 120 bp, Artificial Sequence
  ENSG00000101384_34 (sequence is synthesized)
tgccgccgctaggtagagtctgagggcttgtagttctttaaactgtcgtgtcatactcgagtctgaggccgttgctgacttagaatccctgtgttaatttaagttttgacaagctggctt

SEQ ID NO: 124383 - DNA, 120 bp, Artificial Sequence
  ENSG00000101384_35 (sequence is synthesized)
acactggcaatggtagtttctgtggttggctgggaaatcgagtgccgcatctcacagctatgcaaaaagctagtcaacagtaccctggttgtgtgtccccttgcagccgacacggtctcg

SEQ ID NO: 124384 - DNA, 120 bp, Artificial Sequence
  ENSG00000101384_36 (sequence is synthesized)
gatcaggctcccaggagcctgcccagccccctggtctttgagctcccacttctgccagatgtcctaatggtgatgcagtcttagatcatagttttatttatatttattgactcttgagtt

SEQ ID NO: 124385 - DNA, 120 bp, Artificial Sequence
  ENSG00000101384_37 (sequence is synthesized)
gtttttgtatattggttttatgatgacgtacaagtagttctgtatttgaaagtgcctttgcagctcagaaccacagcaacgatcacaaatgactttattatttattttttttaattgtat

SEQ ID NO: 124386 - DNA, 120 bp, Artificial Sequence
  ENSG00000101384_38 (sequence is synthesized)
ttttgttgttgggggaggggagactttgatgtcagcagttgctggtaaaatgaagaatttaaagaaaaaaatgtcaaaagtagaactttgtatagttatgtaaataattcttttttatta

SEQ ID NO: 124387 - DNA, 120 bp, Artificial Sequence
  ENSG00000101384_39 (sequence is synthesized)
atcactgtgtatatttgatttattaacttaataatcaagagccttaaaacatcattcctttttatttatatgtatgtgtttagaattgaaggtttttgatagcattgtaagcgtatggct

SEQ ID NO: 124388 - DNA, 120 bp, Artificial Sequence
  ENSG00000101384_40 (sequence is synthesized)
ttatttttttgaactcttctcattacttgttgcctataagccaaaattaaggtgtttgaaaatagtttattttaaaacaataggatgggcttctgtgcccagaatactgatggaattttt

SEQ ID NO: 124389 - DNA, 120 bp, Artificial Sequence
  ENSG00000101384_41 (sequence is synthesized)
ttgtacgacgtcagatgtttaaaacaccttctatagcatcacttaaaacacgttttaaggactgactgaggcagtttgaggattagtttagaacaggtttttttgtttgtttgttttttg

SEQ ID NO: 124390 - DNA, 120 bp, Artificial Sequence
  ENSG00000101384_42 (sequence is synthesized)
tttttctgctttagacttgaaaagagacaggcaggtgatctgctgcagagcagtaagggaacaagttgagctatgacttaacatagccaaaatgtgagtggttgaatatgattaaaaata

SEQ ID NO: 124391 - DNA, 120 bp, Artificial Sequence
  ENSG00000101384_43 (sequence is synthesized)
tcaaattaattgtgtgaacttggaagcacaccaatcttactttgtaaattctgatttcttttcaccattcgtacataatactgaaccacttgtagatttgatttttttttttaatctact

SEQ ID NO: 124392 - DNA, 120 bp, Artificial Sequence
  ENSG00000101384_44 (sequence is synthesized)
gcatttagggagtattctaataagctagttgaatacttgaaccataaaatgtccagtaagatcactgtttagatttgccatagagtacactgcctgccttaagtgaggaaatcaaagtgc

SEQ ID NO: 124393 - DNA, 120 bp, Artificial Sequence
  ENSG00000101384_45 (sequence is synthesized)
tattacgaagttcaagatcaaaaaggcttataaaacagagtaatcttgttggttcaccattgagaccgtgaagatactttgtattgtcctattagtgttatatgaacatacaaatgcatc

SEQ ID NO: 124394 - DNA, 120 bp, Artificial Sequence
  ENSG00000101384_46 (sequence is synthesized)
tttgatgtgttgttcttggcaataaattttgaaaagtaatatttattaaatttttttgtatgaaaacatggaacagtgtggcctcttctgagcttacgtagttctaccggctttgccatg

SEQ ID NO: 124395 - DNA, 120 bp, Artificial Sequence
  ENSG00000101384_47 (sequence is synthesized)
tgcttctgccaccctgctgagtctgttctggtaatcggggtataataggctctgcctgacagagggatggaggaagaactgaaaggcttttcaaccacaaaactcatctggagttctcaa

SEQ ID NO: 124396 - DNA, 120 bp, Artificial Sequence
  ENSG00000101384_48 (sequence is synthesized)
agacctggggctgctgtgaagctggaactgcgggagccccatctaggggagccttgattcccttgttattcaacagcaagtgtgaatactgcttgaataaacaccactggattaatggcc

SEQ ID NO: 124397 - DNA, 120 bp, Artificial Sequence
  ENSG00000101384_49 (sequence is synthesized)
ctaggttgggtgattcctcttttctgtaggagtttcttccccactttcacctagtaccggtgactaaatgcccatgtgagggcattaagtgggtaaggcactctctggaagcttctgctt

SEQ ID NO: 124398 - DNA, 120 bp, Artificial Sequence
  ENSG00000101384_50 (sequence is synthesized)
gataagccgcctgtctaatttgagaaacagccctgatggagggtagcaggtggaggtgccaggtgcattgtgtcaggagggagccatgaaaactgctgaacagtgcttgtctatggcttc

SEQ ID NO: 124399 - DNA, 120 bp, Artificial Sequence
  ENSG00000101384_51 (sequence is synthesized)
gggacttgcaatggaaaccagaagcagagctgtttgatgtctgcttttgtatcacctgggtctgcattaatgacttgatgggatacagccctgacctgggcatgagaaagtcgccaataa

SEQ ID NO: 124400 - DNA, 120 bp, Artificial Sequence
  ENSG00000101384_52 (sequence is synthesized)
gataagtggagacagatggcgtctcagttcccagctctgggtctgaccagcagcctgtctccttccattctcacccccacccctatcccctaccagggcctcttcctgtgtacatgtgtc

SEQ ID NO: 124401 - DNA, 120 bp, Artificial Sequence
  ENSG00000101384_53 (sequence is synthesized)
ccacagcaaatgaaactaagtgtggtgcgggcctggttccaatttagcaaaggtattttgctggtgttaactacgactttatcatttgggtattaggaaaataagtggtggttttactta

SEQ ID NO: 124402 - DNA, 120 bp, Artificial Sequence
  ENSG00000101384_54 (sequence is synthesized)
attgaaacaatccacccggtagagtgaacagcttgaggttgatcctggcctgtgataagagccaggtcagtatacttgttagggacatgtgagagacctccccgccacactgcagcattc

SEQ ID NO: 124403 - DNA, 120 bp, Artificial Sequence
  ENSG00000101384_55 (sequence is synthesized)
acagcacctttcctggacctcctgtcacctcgcaggtcagggagttatgtcccctgggaacccagggcttgtccagagctacccacagttgtctgcatttccaggtagcccgattttggg

SEQ ID NO: 124404 - DNA, 120 bp, Artificial Sequence
  ENSG00000101384_56 (sequence is synthesized)
ccactctttggggagctctgggatgtatgggtcatgttggagggatcccacttcaacgtgggaaaactttctttgtactggaaatctctggaagcaagaccgcagtgatttctgcactgg

SEQ ID NO: 124405 - DNA, 120 bp, Artificial Sequence
  ENSG00000101384_57 (sequence is synthesized)
gacagtatcacttgtgtctcatttgcatttatgagtcctgatgatagcttatggggaggagcttctgctgaggacctatagaattagactgtgtaataaatattcctgcttgcaaggaaa

SEQ ID NO: 124406 - DNA, 120 bp, Artificial Sequence
  ENSG00000101384_58 (sequence is synthesized)
gtctaccttcctgtccccagaaacaaaacagaaaaagcctggactttgcagtcttccatttgaattgtacaggtgtctcttaacgttcaaaaggctaacctggaggtgtgctgtgtgtct

SEQ ID NO: 124407 - DNA, 120 bp, Artificial Sequence
  ENSG00000101384_59 (sequence is synthesized)
gctctacaagtaagtccaattttcagcctgtgtccattctaaggatccttgtgccaagataccacgctggggagaggtacctaggcttgtccagtgtgaatgtctcggtgagagaggggc

SEQ ID NO: 124408 - DNA, 120 bp, Artificial Sequence
  ENSG00000101384_60 (sequence is synthesized)
gggtgcaggcctaagtctggtaagcagtctggtggcttgtgtgtttggaagtctcccagcacccccatcctgtcccactaaggtagcgcatgtatctgttcttggaaggaacgtcctcgt

SEQ ID NO: 124409 - DNA, 120 bp, Artificial Sequence
  ENSG00000101384_61 (sequence is synthesized)
ggaatcgcttgttcctttgcatctgcttcctggagctggccaccttccaattgtggttattcttcttgcagccatggagaggctgccttcaggggaggttgtcacttactactggattct

SEQ ID NO: 124410 - DNA, 120 bp, Artificial Sequence
  ENSG00000101384_62 (sequence is synthesized)
gtcatagggccagggggccccagagaagaacctggcctgcagagttcctttggctgtgagacagggctgtatatcagaatcacctgggctgctttacagtgtaaatctctgggtccccca

SEQ ID NO: 124411 - DNA, 120 bp, Artificial Sequence
  ENSG00000101384_63 (sequence is synthesized)
gattccctccagaatcggggagtccatggtctttgataaacttctggaattctgcagtgcagccaggtctgagaaccgctgtcatcagcaccccaggtgtggttatggatgtggatttct

SEQ ID NO: 124412 - DNA, 120 bp, Artificial Sequence
  ENSG00000101384_64 (sequence is synthesized)
ggggtcagattgcctgtgctggtcctaggcccccacctgtcacttgcggaactccagcaggccacagaagctccccgggccctctttaaatggcacagtagcaattcccatctccgaggt

SEQ ID NO: 124413 - DNA, 120 bp, Artificial Sequence
  ENSG00000101384_65 (sequence is synthesized)
tgtcataaagacacaaaagtgaatacttcataaattgttaggagttgtctctggtcagagcagaagtggagaatgcagcctctaggtgtgctattttgggcaaactctgtaagcaaatga

SEQ ID NO: 124414 - DNA, 120 bp, Artificial Sequence
  ENSG00000101384_66 (sequence is synthesized)
gaggaataaggttttccacctgtaaagaactatttttcctgacttcttagctacttctgagccatgatgaaacttttctttaaaaataaagattaggcagatagagatgtcctgtgttcc

SEQ ID NO: 124415 - DNA, 120 bp, Artificial Sequence
  ENSG00000101384_67 (sequence is synthesized)
tcctgggcggatgctccgtcagtatccagctgtctttctcccccactgcttaggttggggattacatgaactggggcagtgggggatttaaagctaaaatcaaggcttcggccttatcgt

SEQ ID NO: 124416 - DNA, 120 bp, Artificial Sequence
  ENSG00000101384_68 (sequence is synthesized)
caccgtcccacttgtcctgctgtagctttccttgtagcaggtgtctggctcttcaatgacagcccctcatgtaagaggtgatgttaaaggatctaattgtcagatggattgaattaaatt

SEQ ID NO: 124417 - DNA, 120 bp, Artificial Sequence
  ENSG00000101384_69 (sequence is synthesized)
aagaatctcattgccagctactactgcgactgtcttcccggctggatgggtcagaattgtgacataaatattaatgactgccttggccagtgtcagaatgacgcctcctgtcgggtatgt

SEQ ID NO: 124418 - DNA, 120 bp, Artificial Sequence
  ENSG00000101384_70 (sequence is synthesized)
aaatctttgcttaaatcaaaactttgacaattgacaacaaatctttagatttgtgcgacactaggagagctctgtccctgtgagatttaaaaatttgggtgaaaaaagagtctcttggaa

SEQ ID NO: 124419 - DNA, 120 bp, Artificial Sequence
  ENSG00000101384_71 (sequence is synthesized)
gtttcgctagggcttatgttaccccagcctcgtgggagtcattttgaaggcatgcacatagaaattcctctaaccactttcagaggtttagcatttggctatttcagtgaaccagctaaa

SEQ ID NO: 124420 - DNA, 120 bp, Artificial Sequence
  ENSG00000101384_72 (sequence is synthesized)
aaatgctttaaaactctttgcctggagtctcaactttgcctgtcataatgtgatgtggcacgttgccagtatcttggcttccctggggtgtgtctcattagccagagggtccctgtctcc

SEQ ID NO: 124421 - DNA, 120 bp, Artificial Sequence
  ENSG00000101391_0 (sequence is synthesized)
gtgtatgaacgcagcggcggacctgtgaggggatccgacttgccggcagaacttacgctgcgggaccccgggcactgttgctgctgcgggagactgtgggctgtttagtgccatgcaccc

SEQ ID NO: 124422 - DNA, 120 bp, Artificial Sequence
  ENSG00000101391_1 (sequence is synthesized)
tttacagtgtgtcctccaagtgcagaggtctctggggtggggaccattggcctctgtgtcttggctgtcgctgaggatgtgcagggcacacagcagtctctctagtaccatgtgtcccag

SEQ ID NO: 124423 - DNA, 120 bp, Artificial Sequence
  ENSG00000101391_2 (sequence is synthesized)
tccagagaggcaggaggatggagctcggaaggatttcagctccaggctggctgctggaccgacttttcaacattttttaaaaagtgcctcagctcctcaggagaagctgtcttcagaagt

SEQ ID NO: 124424 - DNA, 120 bp, Artificial Sequence
  ENSG00000101391_3 (sequence is synthesized)
ggaagacccacctccctatctcatgatggatgaacttcttggaaggcagagaaaagtctacctcgagacctatggctgccagatgaatgtgaatgacacagagatagcctggtccatctt

SEQ ID NO: 124425 - DNA, 120 bp, Artificial Sequence
  ENSG00000101391_4 (sequence is synthesized)
acagaagagtggctacctgcggaccagtaacctccaagaggcagatgtgattctccttgtcacatgctctatcagggagaaggctgagcagaccatctggaaccgtttacatcagcttaa

SEQ ID NO: 124426 - DNA, 120 bp, Artificial Sequence
  ENSG00000101391_5 (sequence is synthesized)
agccttgaagacaaggcggccccgctcccgggttcctctgaggattggaattctaggctgcatggctgagaggttgaaggaggagattctcaacagagagaaaatggtagatattttggc

SEQ ID NO: 124427 - DNA, 120 bp, Artificial Sequence
  ENSG00000101391_6 (sequence is synthesized)
tggtcctgatgcctaccgggaccttccccggctgctggctgttgctgagtcgggccagcaagctgccaacgtgctgctctctctggacgagacctatgctgatgtcatgccagtccagac

SEQ ID NO: 124428 - DNA, 120 bp, Artificial Sequence
  ENSG00000101391_7 (sequence is synthesized)
aagcgccagtgccacgtctgcctttgtgtcaatcatgcgaggctgtgacaacatgtgtagctactgcattgttcctttcacccggggcagggagaggagtcggcctattgcctccattct

SEQ ID NO: 124429 - DNA, 120 bp, Artificial Sequence
  ENSG00000101391_8 (sequence is synthesized)
gtgacacttcttggtcagaatgttaatagttttcgggacaattcggaggtccagttcaacagtgcagtgcctaccaatctcagtcgtggctttaccaccaactataaaaccaagcaagga

SEQ ID NO: 124430 - DNA, 120 bp, Artificial Sequence
  ENSG00000101391_9 (sequence is synthesized)
ggacttcgttttgctcatcttctggatcaggtctccagagtagatcctgaaatgaggatccgttttacctctccccaccccaaggattttcctgatgaggttctgcagctgattcatgag

SEQ ID NO: 124431 - DNA, 120 bp, Artificial Sequence
  ENSG00000101391_10 (sequence is synthesized)
agagataacatctgtaaacagatccacctgccagcccagagtggaagcagccgtgtgttggaggccatgcggaggggatattcaagagaagcttatgtggagttagttcaccatattaga

SEQ ID NO: 124432 - DNA, 120 bp, Artificial Sequence
  ENSG00000101391_11 (sequence is synthesized)
gaatctattccaggtgtgagcctcagcagcgatttcattgctggcttttgtggtgagacggaggaagatcacgtccagacagtctctttgctccgggaagttcagtacaacatgggcttc

SEQ ID NO: 124433 - DNA, 120 bp, Artificial Sequence
  ENSG00000101391_12 (sequence is synthesized)
ctctttgcctacagcatgagacagaagacacgggcatatcataggctgaaggatgatgtcccggaagaggtaaaattaaggcgtttggaggaactcatcactatcttccgagaagaagca

SEQ ID NO: 124434 - DNA, 120 bp, Artificial Sequence
  ENSG00000101391_13 (sequence is synthesized)
acaaaagccaatcagacctctgtgggctgtacccagttggtgctagtggaagggctcagtaaacgctctgccactgacctgtgtggcaggaatgatggaaaccttaaggtgatcttccct

SEQ ID NO: 124435 - DNA, 120 bp, Artificial Sequence
  ENSG00000101391_14 (sequence is synthesized)
gatgcagagatggaggatgtcaataaccctgggctcagggtcagagcccagcctggggactatgtgctggtgaagatcacctcagccagttctcagacacttaggggacatgttctctgc

SEQ ID NO: 124436 - DNA, 120 bp, Artificial Sequence
  ENSG00000101391_15 (sequence is synthesized)
aggaccactctgagggactcttctgcatattgctgacctgagaggatggcctcagagctgacttgggcaatcctccccaacaggaaggggagacattgcctgccactgaggaaacaggtc

SEQ ID NO: 124437 - DNA, 120 bp, Artificial Sequence
  ENSG00000101391_16 (sequence is synthesized)
atgaaggtggagataagctgcaaggggcgaagcaactttatgtcagtggaaaacgtgtctctttaaagctgctatgtgaacagcttttacagtcattaaatttacctaaactaaggttaa

SEQ ID NO: 124438 - DNA, 120 bp, Artificial Sequence
  ENSG00000101391_17 (sequence is synthesized)
ggcggacctgtgaggggatccgacttgccggcagaacttacgctgcgggaccccgggcactgttgctgctgcgggagatattcaagagaagcttatgtggagttagttcaccatattaga

SEQ ID NO: 124439 - DNA, 120 bp, Artificial Sequence
  ENSG00000101391_18 (sequence is synthesized)
gcttgtgtatgaacgcagcggcggacctgtgaggggatccgacttgccggcagaacttacgctgcgggaccccgggcactgttgctgctgcgggagggagaaggctgagcagaccatctg

SEQ ID NO: 124440 - DNA, 120 bp, Artificial Sequence
  ENSG00000101391_19 (sequence is synthesized)
gagagggggcatccctcacttttccatgtttccttaatgaccaaacagtgtccttgttgccaagaacctagcatagtgtgtggcacaaagtagctgctcagtaaatatttattgtatgac

SEQ ID NO: 124441 - DNA, 120 bp, Artificial Sequence
  ENSG00000101391_20 (sequence is synthesized)
tttgcttctgctcacttcataagcaaaggctaaggactggtcacccattttcactgtttagtttaaaaagcataaatatttactgagcagccactgtgtgacagtaagtatttattgtat

SEQ ID NO: 124442 - DNA, 120 bp, Artificial Sequence
  ENSG00000101391_21 (sequence is synthesized)
gactaagccacagggcactggagcttgcttcgctaactccataacataggctaaggactgggtcatccattttcactgtttagtatgtttttttttaattaagcacctatggtgtggcac

SEQ ID NO: 124443 - DNA, 120 bp, Artificial Sequence
  ENSG00000101391_22 (sequence is synthesized)
actctgagattttaattttttaatgttaacattaaggttttgttacatcttggaatttaaatgtcgctctatgtgttcactttctttgagaataataagtattacacagatgagactgaa

SEQ ID NO: 124444 - DNA, 120 bp, Artificial Sequence
  ENSG00000101391_23 (sequence is synthesized)
ttgtgcaacatggggaaacccagtctttacacacacacacacctgggcaacatggcgaaacccagtctctacacacacaaacacacacctgggcaacatggtgaaacccagtccctacac

SEQ ID NO: 124445 - DNA, 79 bp, Artificial Sequence
  ENSG00000101391_24 (sequence is synthesized)
gaaacccagtccctacatggcgaaacccagtctctacacacatacacacacacatacagacacacagacacacacacac

SEQ ID NO: 124446 - DNA, 120 bp, Artificial Sequence
  ENSG00000101391_25 (sequence is synthesized)
gcaacatggcgaaacccagtctctacacacatacacacacacatacagacacacagacacacacacacactagctgggtgtggtggcgcacatctgtggtcccagctactcaagaggctg

SEQ ID NO: 124447 - DNA, 70 bp, Artificial Sequence
  ENSG00000101391_26 (sequence is synthesized)
atgtccttaaataaaaattcataggctctagattagattagaagatacagcttagatcaaaagggctctt

SEQ ID NO: 124448 - DNA, 120 bp, Artificial Sequence
  ENSG00000101391_27 (sequence is synthesized)
gattagattagaagatacagcttagatcaaaagggctcttttggatactttaatttactcgtgtgccctgccatgtggatgagaagtgattacatgtggaaattcatagtgttatctttt

SEQ ID NO: 124449 - DNA, 120 bp, Artificial Sequence
  ENSG00000101391_28 (sequence is synthesized)
gtggtaataaagttttttcctagagacacattttagtaaaataaaaatcccctctcaaccagtacaatggaagggcactttggattggattttagactgctccttactaatgccttctta

SEQ ID NO: 124450 - DNA, 120 bp, Artificial Sequence
  ENSG00000101391_29 (sequence is synthesized)
ctattctcctgccctggaagcgttctttgtgggaatttggtgagtttggagtatgcagtggcatgtagtttctcgctgcagagaggccaggaggtggagtgatttcgagtgagtagagag

SEQ ID NO: 124451 - DNA, 120 bp, Artificial Sequence
  ENSG00000101391_30 (sequence is synthesized)
tgttccctgttggagatcaacattttctttgtgatctctgacggctcaggcctctttaacttacatgtgctcgagtttcttgggtctcttccctggactcacagatcagctatatggctg

SEQ ID NO: 124452 - DNA, 120 bp, Artificial Sequence
  ENSG00000101391_31 (sequence is synthesized)
tgggattttctctccctttctttctctctttctttctccctttcactggcgatatgcttctcttattgtctccttccatttcttcctttcttctgccttctcttctcacactgcccagtt

SEQ ID NO: 124453 - DNA, 120 bp, Artificial Sequence
  ENSG00000101391_32 (sequence is synthesized)
ctgctactgccaccttccctgtcttgttctcatatctgcttcgcctcagaaccagaagctggcaggacacagactgatgccctagagcatccacagaagttcctttaagggcagggaaaa

SEQ ID NO: 124454 - DNA, 120 bp, Artificial Sequence
  ENSG00000101391_33 (sequence is synthesized)
tgcctgttttgtttctgtttgtttatctttgtttatcttctagcacctagggcaattccgggtacaaaatatgtacttagtaaggatttactaatggactgacttgctcttatgataaga

SEQ ID NO: 124455 - DNA, 120 bp, Artificial Sequence
  ENSG00000101391_34 (sequence is synthesized)
catgtgaccacagataactttggggtcacattcttttagctctcaattggaggagagagaacatttctcaccaaatgttggctgtaaatatcctaaggaaggatttgactggatcagcct

SEQ ID NO: 124456 - DNA, 120 bp, Artificial Sequence
  ENSG00000101391_35 (sequence is synthesized)
tggagttaggagggcagggcctgtgatgggcagtttcacctgaattttatggttagagctgaggaggagccatcttccaagagaaaagggagaagtggctgggactgacctgctttgact

SEQ ID NO: 124457 - DNA, 120 bp, Artificial Sequence
  ENSG00000101391_36 (sequence is synthesized)
tcttaaattatatccattgccattccatgagacctcgcttcctgccaggatcgggggcacacaggagccatgtggtctctgccagccggtcgcctccatcagattccttttgggggcttc

SEQ ID NO: 124458 - DNA, 120 bp, Artificial Sequence
  ENSG00000101391_37 (sequence is synthesized)
tcctctagaggctccacatgaagtcccagtgctacagtcctagttattttgccttcttctgcctggttttctttcagatcacctcagccagttctcagacacttaggggacatgttctct

SEQ ID NO: 124459 - DNA, 120 bp, Artificial Sequence
  ENSG00000101391_38 (sequence is synthesized)
cggcggacctgtgaggggatccgacttgccggcagaacttacgctgcgggaccccgggcactgttgctgctgcgggagtctacctcgagacctatggctgccagatgaatgtgaatgaca

SEQ ID NO: 124460 - DNA, 120 bp, Artificial Sequence
  ENSG00000101400_0 (sequence is synthesized)
cccttctgacccaccccgctaggtagtcccacacggcggccctcggctcccgggccccgccccggcctcctgcatttgcccgaggccccctccccagcactggccacaccccagggtagc

SEQ ID NO: 124461 - DNA, 80 bp, Artificial Sequence
  ENSG00000101400_1 (sequence is synthesized)
ggcggctggcccagccgggcccccgctgccctctgccctgggcgcttggtcggagcgggctgggcaaagcgggacagggc

SEQ ID NO: 124462 - DNA, 80 bp, Artificial Sequence
  ENSG00000101400_2 (sequence is synthesized)
caaagcgggacagggcgagcgcggcggcccgggggctcggaggcgaagatggcgtccggcaggcgcgccccgcgcaccgg

SEQ ID NO: 124463 - DNA, 120 bp, Artificial Sequence
  ENSG00000101400_3 (sequence is synthesized)
gggtgctgctgagtctggcggaggacgtgctgaccgtgagccccgccgacggcgaccctggtcccgagcccggcgctccgcgggagcaggagcccgcgcagctcaacggcgccgcggagc

SEQ ID NO: 124464 - DNA, 120 bp, Artificial Sequence
  ENSG00000101400_4 (sequence is synthesized)
cgggcgccgggcccccgcagctgccagaggcgctactgctccagcggcgccgcgtgacggtgcgcaaggccgacgccggtgggctgggcatcagcatcaaaggcggccgggagaacaaga

SEQ ID NO: 124465 - DNA, 120 bp, Artificial Sequence
  ENSG00000101400_5 (sequence is synthesized)
tgcctattctcatttccaagatcttcaagggattggcagctgaccagacagaggccctttttgtgggggatgccatcctgtctgtgaatggggaagacttgtcctctgctacccatgatg

SEQ ID NO: 124466 - DNA, 120 bp, Artificial Sequence
  ENSG00000101400_6 (sequence is synthesized)
aggcggtgcaggtcctcaagaagacaggcaaggaggtggtgctggaggtcaagtatatgaaggacgtctcaccgtatttcaagaactctactggtgggacctcggtcggctgggactcac

SEQ ID NO: 124467 - DNA, 120 bp, Artificial Sequence
  ENSG00000101400_7 (sequence is synthesized)
ctcctgcctcaccccttcagcggcagccttcctcccctggccccacaccccggaacttcagcgaggccaaacacatgtccttgaagatggcatatgtctcgaagaggtgcacccccaatg

SEQ ID NO: 124468 - DNA, 120 bp, Artificial Sequence
  ENSG00000101400_8 (sequence is synthesized)
acccggagcccaggtatctggagatctgctcggcagatggtcaagacaccctcttcctgagggccaaggatgaggctagtgcgaggtcgtgggcgactgccatccaagcccaggtcaata

SEQ ID NO: 124469 - DNA, 120 bp, Artificial Sequence
  ENSG00000101400_9 (sequence is synthesized)
agccaggacatcaagcagattggctggctaactgagcagctgcccagtgggggcacagcccccaccctggccctgctaactgaaaaggaactgctcctctacttgtctctccccgagacc

SEQ ID NO: 124470 - DNA, 120 bp, Artificial Sequence
  ENSG00000101400_10 (sequence is synthesized)
cgcgaggccctgagccggccagcccgtactgccccactcatcgccaccagactggtgcactcaggcccctccaagggctcagtgccctacgatgcagagctctcttttgccctgcgcacg

SEQ ID NO: 124471 - DNA, 120 bp, Artificial Sequence
  ENSG00000101400_11 (sequence is synthesized)
ggcacgcgtcacggtgtggacactcacctgttcagcgtggagtcaccgcaggagctggctgcctggacccgccagcttgtggatggctgtcaccgggccgccgagggtgtgcaggaggtg

SEQ ID NO: 124472 - DNA, 120 bp, Artificial Sequence
  ENSG00000101400_12 (sequence is synthesized)
tctacagcctgcacgtggaatgggcgtccctgcagcctgtctgtgcacatcgacaagggcttcacactgtgggcggctgagccaggtgcagcccgagctgtgctcctgcgacagcccttc

SEQ ID NO: 124473 - DNA, 120 bp, Artificial Sequence
  ENSG00000101400_13 (sequence is synthesized)
gagaagctgcagatgtcttcagatgacggtgccagtctccttttcctggattttggaggtgctgaaggcgagatccagctggacctgcactcgtgtcccaaaaccatagtcttcatcatc

SEQ ID NO: 124474 - DNA, 120 bp, Artificial Sequence
  ENSG00000101400_14 (sequence is synthesized)
cactccttcctgtcggccaaagtcacccgcctcgggctgttggcctagaagtcgccggatgcactagccctgaagaggggtgtccatgacatggcctgagctgggcctccaccgactgcc

SEQ ID NO: 124475 - DNA, 120 bp, Artificial Sequence
  ENSG00000101400_15 (sequence is synthesized)
tgctcacccctgggctgagggaagggagaggagaggaacaagggcctccgaaaccccaaccctgagggagactggattggtcttggggcccaggacccagacgcaggacagagtggactc

SEQ ID NO: 124476 - DNA, 120 bp, Artificial Sequence
  ENSG00000101400_16 (sequence is synthesized)
tgcctgtgatggggtggccttcctgctgcccccctccaccagtgccttttgcagagagatattttgtgtacacagaagccattccgagtctgggacctgcccctgtgcggatcctgaccc

SEQ ID NO: 124477 - DNA, 120 bp, Artificial Sequence
  ENSG00000101400_17 (sequence is synthesized)
cagccaacagctgagctgccgggcctcctcgaggcccctaagccacccccagaggtcccatctgaagctggagtaccctggggtcagcagcaagagaaagaagaggagattttctgtttg

SEQ ID NO: 124478 - DNA, 120 bp, Artificial Sequence
  ENSG00000101400_18 (sequence is synthesized)
tttttcccctcagccctgccaccgtggggagtctggtttttctcttcatcctgtctctctcctccttactcttggataaataaacagcctgtgagcacacaggcagcccggcccagtgta

SEQ ID NO: 124479 - DNA, 120 bp, Artificial Sequence
  ENSG00000101405_0 (sequence is synthesized)
accagtcacggaccctggacccagcgcacccgcaccatggccggccccagcctcgcttgctgtctgctcggcctcctggcgctgacctccgcctgctacatccagaactgccccctggga

SEQ ID NO: 124480 - DNA, 120 bp, Artificial Sequence
  ENSG00000101405_1 (sequence is synthesized)
ggcaagagggccgcgccggacctcgacgtgcgcaagtgcctcccctgcggccccgggggcaaaggccgctgcttcgggcccaatatctgctgcgcggaagagctgggctgcttcgtgggc

SEQ ID NO: 124481 - DNA, 120 bp, Artificial Sequence
  ENSG00000101405_2 (sequence is synthesized)
tacctgccgtcgccctgccagtccggccagaaggcgtgcgggagcgggggccgctgcgcggtcttgggcctctgctgcagcccggacggctgccacgccgaccctgcctgcgacgcggaa

SEQ ID NO: 124482 - DNA, 120 bp, Artificial Sequence
  ENSG00000101405_3 (sequence is synthesized)
gccaccttctcccagcgctgaaacttgatggctccgaacaccctcgaagcgcgccactcgcttcccccatagccaccccagaaatggtgaaaataaaataaagcaggtttttctcctcta

SEQ ID NO: 124483 - DNA, 120 bp, Artificial Sequence
  ENSG00000101407_0 (sequence is synthesized)
acttccggcgaggcagaggaggcgggagagtgagagaaaggctggaagacgagcctgcaggatgtttcctcaatgaggggaaggctgctgcacaatggcagtttttgatactcctgagga

SEQ ID NO: 124484 - DNA, 120 bp, Artificial Sequence
  ENSG00000101407_1 (sequence is synthesized)
ggcctttggtgtcttacgtccagtctgtgttcagctcacaaagacccagacagtggagaatgtggagcatctgcagacacgactacaagctgtgagtgacagtgcccttcaggaacttca

SEQ ID NO: 124485 - DNA, 120 bp, Artificial Sequence
  ENSG00000101407_2 (sequence is synthesized)
gcagtacatcctcttccctctgcgatttaccctgaagaccccaggtcccaaaagagagcgtttgatccaaagtgtggtggaatgcctcacatttgtcctttcttcaacatgtgtgaaaga

SEQ ID NO: 124486 - DNA, 120 bp, Artificial Sequence
  ENSG00000101407_3 (sequence is synthesized)
acaggagcttctccaggaactcttttcagaactctctgcttgtctgtattcacccagctcccaaaaacctgcggctgtgtccgaggagttgaaattggctgtgatccagggacttagcac

SEQ ID NO: 124487 - DNA, 120 bp, Artificial Sequence
  ENSG00000101407_4 (sequence is synthesized)
attaatgcactcagcttatggggacatcattctgactttttatgagccctccattctgccacgtttaggatttgctgtatctttactgttaggccttgcagaacaggagaaatcaaagca

SEQ ID NO: 124488 - DNA, 120 bp, Artificial Sequence
  ENSG00000101407_5 (sequence is synthesized)
aattaaaattgctgccttaaaatgtttacaggttctactcttgcagtgtgattgtcaggaccatccaaggtcattggatgaacttgaacaaaagcagctgggggatttgtttgcctcttt

SEQ ID NO: 124489 - DNA, 120 bp, Artificial Sequence
  ENSG00000101407_6 (sequence is synthesized)
tttacctggaatctcaactgcactgaccaggcttatcacaggagactttaaacaaggtcacagcattgtcgtatcttccctaaagatcttttacaagacagtgagcttcattatggctga

SEQ ID NO: 124490 - DNA, 120 bp, Artificial Sequence
  ENSG00000101407_7 (sequence is synthesized)
tgaacagctcaaaagaatctcaaaggtccaagcaaaacctgcagttgagcacagagtagcagagctgatggtttacagggaagcagattgggtaaaaaagactggcgacaagttgactat

SEQ ID NO: 124491 - DNA, 120 bp, Artificial Sequence
  ENSG00000101407_8 (sequence is synthesized)
ccttattaaaaagataattgagtgtgtttctgttcacccacactggaaggtgagactggaactggtagaacttgtggaggaccttcttttgaagtgcagtcaatcattggtcgaatgtgc

SEQ ID NO: 124492 - DNA, 120 bp, Artificial Sequence
  ENSG00000101407_9 (sequence is synthesized)
tggtccccttctgaaggccttagtgggactagtaaatgatgagagtcctgaaatccaagcccagtgcaataaagttctgagacattttgcagatcaaaaagtagtggtgggcaacaaagc

SEQ ID NO: 124493 - DNA, 120 bp, Artificial Sequence
  ENSG00000101407_10 (sequence is synthesized)
cctcgctgacatcttgtcagaaagcctgcattcccttgccacatctcttcctcgcctaatgaactcccaagatgaccagggcaaattctctactctttccttgttacttggttatctgaa

SEQ ID NO: 124494 - DNA, 120 bp, Artificial Sequence
  ENSG00000101407_11 (sequence is synthesized)
actcttgggcccaaaaataaactttgtcctcaactctgtggcccatctccagcggctttccaaagcactcatccaagttctagagctagacgtggctgacatcaagattgttgaggaacg

SEQ ID NO: 124495 - DNA, 120 bp, Artificial Sequence
  ENSG00000101407_12 (sequence is synthesized)
gcgttggaactctgatgatctgaatgcttctccaaagacctcagccacacagccttggaaccgcatccagaggagatatttccgcttcttcactgatgagagaatcttcatgctcttgag

SEQ ID NO: 124496 - DNA, 120 bp, Artificial Sequence
  ENSG00000101407_13 (sequence is synthesized)
gcaggtttgtcagctacttggttattatgggaatctttatttgcttgtggatcactttatggaactttaccatcaatctgtggtttaccggaagcaagctgccatgatccttaatgaact

SEQ ID NO: 124497 - DNA, 120 bp, Artificial Sequence
  ENSG00000101407_14 (sequence is synthesized)
ggttacaggggctgctgggctggaggttgaggatcttcacgaaaaacatattaaaacaaacccagaagaactgagagagattgtgacatctatacttgaagaatacacaagtcaagaaaa

SEQ ID NO: 124498 - DNA, 120 bp, Artificial Sequence
  ENSG00000101407_15 (sequence is synthesized)
acgtctggtgaacacacctgccaagttacatcttttctagccttctcaaagccaagtcccactatttgctccatgaacagtaacatctggcaaatatgcattcagttggaaggaattggc

SEQ ID NO: 124499 - DNA, 120 bp, Artificial Sequence
  ENSG00000101407_16 (sequence is synthesized)
cagtttgcatatgcactaggaaaagacttctgtttgctcttgatgtcagccctttatccagtactggagaaggctggagaccaaaccctactcattagtcaggtggctaccagcaccatg

SEQ ID NO: 124500 - DNA, 120 bp, Artificial Sequence
  ENSG00000101407_17 (sequence is synthesized)
atggacgtttgccgtgcttgtggctacgactccctgcagcacctgatcaatcaaaattcagactatttagtgaatgggatctctttaaatctgcgtcatctggctctgcatcctcatacc

SEQ ID NO: 124501 - DNA, 120 bp, Artificial Sequence
  ENSG00000101407_18 (sequence is synthesized)
ccaaaggtcctggaagtcatgctgcggaactcagatgctaacctgcttcctttggtggcagatgtggttcaagatgtcttggccaccctggaccaattttacgataagagagctgcttcc

SEQ ID NO: 124502 - DNA, 120 bp, Artificial Sequence
  ENSG00000101407_19 (sequence is synthesized)
tttgtcagcgttctgcatgctctgatggcagcattagcccagtggttcccagacacaggtaatcttgggcacctccaagagcaaagtttaggagaagagggaagtcatttgaaccaaaga

SEQ ID NO: 124503 - DNA, 120 bp, Artificial Sequence
  ENSG00000101407_20 (sequence is synthesized)
ccagcagctcttgagaagagcaccaccacagctgaagacatcgaacagtttttgctgaactacctcaaagagaaggatgtggcagatggaaatgtctcggattttgataatgaagaagag

SEQ ID NO: 124504 - DNA, 120 bp, Artificial Sequence
  ENSG00000101407_21 (sequence is synthesized)
gaacagtcagtccctcccaaagtggatgagaatgacacccgtccagatgtggagccaccactgccattgcagatccaaatagccatggacgtgatggaacgctgcatccacttgttgtca

SEQ ID NO: 124505 - DNA, 120 bp, Artificial Sequence
  ENSG00000101407_22 (sequence is synthesized)
gataaaaatctgcaaatccgcctgaaggtcttggatgtgctggatctgtgtgtggttgttcttcagtcccacaaaaaccagctgcttcccttggctcatcaggcctggccctcgctcgtt

SEQ ID NO: 124506 - DNA, 120 bp, Artificial Sequence
  ENSG00000101407_23 (sequence is synthesized)
caccgactcacacgggacgcccccctggcagtgcttagagccttcaaggttttacgtaccctgggaagcaagtgtggtgactttcttcgcagccggttctgcaaagatgtcctgccaaag

SEQ ID NO: 124507 - DNA, 120 bp, Artificial Sequence
  ENSG00000101407_24 (sequence is synthesized)
ctggctggctccctagtcacccaggcccccatcagtgccagggctggaccagtttactcgcacacgctggccttcaagttgcagctggctgtcttacagggcctgggccccctctgtgag

SEQ ID NO: 124508 - DNA, 120 bp, Artificial Sequence
  ENSG00000101407_25 (sequence is synthesized)
agactggacctaggtgagggtgacctgaataaagtggctgatgcctgcttgatttacctcagtgtcaaacagcccgtgaaattacaagaggctgccaggagcgtcttcctccacttgatg

SEQ ID NO: 124509 - DNA, 120 bp, Artificial Sequence
  ENSG00000101407_26 (sequence is synthesized)
aaggtggacccagactccacctggttcctcctgaacgagctttactgccccgtgcagttcacacctccccaccccagcctccaccctgtgcagctgcacggggccagcgggcagcagaac

SEQ ID NO: 124510 - DNA, 120 bp, Artificial Sequence
  ENSG00000101407_27 (sequence is synthesized)
ccctacacgaccaacgtgctccagctgctcaaggagctgcagtgaccctgctcccccaccacagaggccaccgatccctcccctactgccagccagaagctgggctgaccccaccccggc

SEQ ID NO: 124511 - DNA, 120 bp, Artificial Sequence
  ENSG00000101407_28 (sequence is synthesized)
cataggcggtggcagcggcagcagagaaggtgaattagttagccaatcgatttataaattgatcgatcacacaactgcttagaaatggattgaaggaaagtagctgactattatttatgt

SEQ ID NO: 124512 - DNA, 120 bp, Artificial Sequence
  ENSG00000101407_29 (sequence is synthesized)
ttcataccttgtgttgtcaagtgacattgtctggtggctctaagggtttaaccccttagcctaccatctctatagccccagctccctcacaggccacacacacacacacacaagaggtca

SEQ ID NO: 124513 - DNA, 120 bp, Artificial Sequence
  ENSG00000101407_30 (sequence is synthesized)
gttcccctccatctgcatacacctccctgtcttcaaataatgagatggaactaatttgttttacctaacctgatctttgggaaacaaacggaaataaagacacttcttggatgaaaagta

SEQ ID NO: 124514 - DNA, 90 bp, Artificial Sequence
  ENSG00000101407_31 (sequence is synthesized)
gcgtcacttccggcgaggcagaggaggcgggagagtgagagaaaggctggaagacgagacctgctcactctgtcaccgaggctagagtac

SEQ ID NO: 124515 - DNA, 120 bp, Artificial Sequence
  ENSG00000101407_32 (sequence is synthesized)
aacctcccaggctcaatcgatccttccaactgagcctccctagcagctgggactattagtgcacaccaccacacctagcctgcaggatgtttcctcaatgaggggaaggctgctgcacaa

SEQ ID NO: 124516 - DNA, 120 bp, Artificial Sequence
  ENSG00000101407_33 (sequence is synthesized)
aacagtttttgctgaactacctcaaagagaaggatgtggcagatggaaatgtctcggattttgataatgaagaaggtaacttgtttattttggcttagctggttttttctttctgaaaca

SEQ ID NO: 124517 - DNA, 120 bp, Artificial Sequence
  ENSG00000101407_34 (sequence is synthesized)
ggctaacatagctattctcctgttttgtgtaatctttttccattcttttctgttacaaaactgtttttccgtggttgcagctgtgtaccctttttgtgtttagttataagcaactctgct

SEQ ID NO: 124518 - DNA, 120 bp, Artificial Sequence
  ENSG00000101407_35 (sequence is synthesized)
tattgccgttgaattttgatcattaacgttttaatagctgttactaagtgtccatcccctgtaggacatttaggttgcttctggcttaataataactctaataaacagtgctgcggtgga

SEQ ID NO: 124519 - DNA, 120 bp, Artificial Sequence
  ENSG00000101407_36 (sequence is synthesized)
ggcgtccatgtgggagggaagcctgcgctggccgcccacgcgggagggaagcctgcgctggccgtcgtactgaccgctgcctgtgacactgatgcaggcagtctcttttcagtcttggat

SEQ ID NO: 124520 - DNA, 80 bp, Artificial Sequence
  ENSG00000101412_0 (sequence is synthesized)
gggactttgcaggcagcggcggccgggggcggagcgggatcgagccctcgccgaggcctgccgccatgggcccgcgccgc

SEQ ID NO: 124521 - DNA, 120 bp, Artificial Sequence
  ENSG00000101412_1 (sequence is synthesized)
gcgtcatggccttggccggggcccctgcgggcggcccatgcgcgccggcgctggaggccctgctcggggccggcgcgctgcggctgctcgactcctcgcagatcgtcatcatctccgccg

SEQ ID NO: 124522 - DNA, 120 bp, Artificial Sequence
  ENSG00000101412_2 (sequence is synthesized)
tcctcgcagatcgtcatcatctccgccgcgcaggacgccagcgccccgccggctcccaccggccccgcggcgcccgccgccggcccctgcgaccctgacctgctgctcttcgccacaccg

SEQ ID NO: 124523 - DNA, 120 bp, Artificial Sequence
  ENSG00000101412_3 (sequence is synthesized)
gcccgcgctcggccgcccgccggtgaagcggaggctggacctggaaactgaccatcagtacctggccgagagcagtgggccagctcggggcagaggccgccatccaggaaaaggtgtgaa

SEQ ID NO: 124524 - DNA, 120 bp, Artificial Sequence
  ENSG00000101412_4 (sequence is synthesized)
atccccgggggagaagtcacgctatgagacctcactgaatctgaccaccaagcgcttcctggagctgctgagccactcggctgacggtgtcgtcgacctgaactgggctgccgaggtgct

SEQ ID NO: 124525 - DNA, 120 bp, Artificial Sequence
  ENSG00000101412_5 (sequence is synthesized)
gaaggtgcagaagcggcgcatctatgacatcaccaacgtccttgagggcatccagctcattgccaagaagtccaagaaccacatccagtggctgggcagccacaccacagtgggcgtcgg

SEQ ID NO: 124526 - DNA, 120 bp, Artificial Sequence
  ENSG00000101412_6 (sequence is synthesized)
cggacggcttgaggggttgacccaggacctccgacagctgcaggagagcgagcagcagctggaccacctgatgaatatctgtactacgcagctgcgcctgctctccgaggacactgacag

SEQ ID NO: 124527 - DNA, 120 bp, Artificial Sequence
  ENSG00000101412_7 (sequence is synthesized)
ccagcgcctggcctacgtgacgtgtcaggaccttcgtagcattgcagaccctgcagagcagatggttatggtgatcaaagcccctcctgagacccagctccaagccgtggactcttcgga

SEQ ID NO: 124528 - DNA, 120 bp, Artificial Sequence
  ENSG00000101412_8 (sequence is synthesized)
gaactttcagatctcccttaagagcaaacaaggcccgatcgatgttttcctgtgccctgaggagaccgtaggtgggatcagccctgggaagaccccatcccaggaggtcacttctgagga

SEQ ID NO: 124529 - DNA, 120 bp, Artificial Sequence
  ENSG00000101412_9 (sequence is synthesized)
ggagaacagggccactgactctgccaccatagtgtcaccaccaccatcatctcccccctcatccctcaccacagatcccagccagtctctactcagcctggagcaagaaccgctgttgtc

SEQ ID NO: 124530 - DNA, 120 bp, Artificial Sequence
  ENSG00000101412_10 (sequence is synthesized)
ccggatgggcagcctgcgggctcccgtggacgaggaccgcctgtccccgctggtggcggccgactcgctcctggagcatgtgcgggaggacttctccggcctcctccctgaggagttcat

SEQ ID NO: 124531 - DNA, 120 bp, Artificial Sequence
  ENSG00000101412_11 (sequence is synthesized)
agggcgagggcatcagagacctcttcgactgtgactttggggacctcacccccctggatttctgacagggcttggagggaccagggtttccagagatgctcaccttgtctctgcagccct

SEQ ID NO: 124532 - DNA, 120 bp, Artificial Sequence
  ENSG00000101412_12 (sequence is synthesized)
ggagccccctgtccctggccgtcctcccagcctgtttggaaacatttaatttatacccctctcctctgtctccagaagcttctagctctggggtctggctaccgctaggaggctgagcaa

SEQ ID NO: 124533 - DNA, 120 bp, Artificial Sequence
  ENSG00000101412_13 (sequence is synthesized)
gccaggaagggaaggagtctgtgtggtgtgtatgtgcatgcagcctacacccacacgtgtgtaccgggggtgaatgtgtgtgagcatgtgtgtgtgcatgtaccggggaatgaaggtgaa

SEQ ID NO: 124534 - DNA, 120 bp, Artificial Sequence
  ENSG00000101412_14 (sequence is synthesized)
catacacctctgtgtgtgcactgcagacacgccccagtgtgtccacatgtgtgtgcatgagtccatgtgtgcgcgtgggggggctctaactgcactttcggcccttttgctctgggggtc

SEQ ID NO: 124535 - DNA, 120 bp, Artificial Sequence
  ENSG00000101412_15 (sequence is synthesized)
ccacaaggcccagggcagtgcctgctcccagaatctggtgctctgaccaggccaggtggggaggctttggctggctgggcgtgtaggacggtgagagcacttctgtcttaaaggtttttt

SEQ ID NO: 124536 - DNA, 120 bp, Artificial Sequence
  ENSG00000101412_16 (sequence is synthesized)
ctgattgaagctttaatggagcgttatttatttatcgaggcctctttggtgagcctggggaatcagcaaaggggaggaggggtgtggggttgataccccaactccctctacccttgagca

SEQ ID NO: 124537 - DNA, 120 bp, Artificial Sequence
  ENSG00000101412_17 (sequence is synthesized)
agggcaggggtccctgagctgttcttctgccccatactgaaggaactgaggcctgggtgatttatttattgggaaagtgagggagggagacagactgactgacagccatgggtggtcaga

SEQ ID NO: 124538 - DNA, 120 bp, Artificial Sequence
  ENSG00000101412_18 (sequence is synthesized)
tggtggggtgggccctctccagggggccagttcagggccccagctgccccccaggatggatatgagatgggagaggtgagtgggggaccttcactgatgtgggcaggaggggtggtgaag

SEQ ID NO: 124539 - DNA, 120 bp, Artificial Sequence
  ENSG00000101412_19 (sequence is synthesized)
gcctcccccagcccagaccctgtggtccctcctgcagtgtctgaagcgcctgcctccccactgctctgccccaccctccaatctgcactttgatttgcttcctaacagctctgttccctc

SEQ ID NO: 124540 - DNA, 120 bp, Artificial Sequence
  ENSG00000101412_20 (sequence is synthesized)
ctgctttggttttaataaatattttgatgacgtttgggccgggttttgggactctgttgggaacatttcggggcgggagaggccaaggttgctggggaaatgcccattctccacttccct

SEQ ID NO: 124541 - DNA, 120 bp, Artificial Sequence
  ENSG00000101412_21 (sequence is synthesized)
tctccctgtccgtgcccgatttgatttgagcctcataactcgaagaaaggtcagcttcctcgctgttttggtcctaactcaaaagcagatccagtaaaggtttttgttgtagaaagccaa

SEQ ID NO: 124542 - DNA, 120 bp, Artificial Sequence
  ENSG00000101413_0 (sequence is synthesized)
gtcgggtggccatcttgtggcggcggcgcgggcggctgttactgcggagacccatcccctcccccttctcgcacccctggcagtctgtcagtcggtaaaaagtcccgcagcctgtcaggt

SEQ ID NO: 124543 - DNA, 120 bp, Artificial Sequence
  ENSG00000101413_1 (sequence is synthesized)
gaggccccggcctcgtgccgtcgctcttcccgccgcactgggcggcccaggccgctccctgccgggcctcactgccgccaccatgtcctccttctctgagtcggcgctggagaagaagct

SEQ ID NO: 124544 - DNA, 120 bp, Artificial Sequence
  ENSG00000101413_2 (sequence is synthesized)
ctcggagctgagcaactctcagcagagcgtgcagaccctgtccctttggctcatccaccaccgcaagcacgcgggacccatcgtctccgtgtggcaccgcgagctccgcaaagccaaatc

SEQ ID NO: 124545 - DNA, 120 bp, Artificial Sequence
  ENSG00000101413_3 (sequence is synthesized)
aaatagaaagcttacttttctgtatttagcgaatgatgtcatccaaaacagtaaaaggaaaggacctgaattcactagagaatttgaatctgtccttgtggatgctttttctcatgttgc

SEQ ID NO: 124546 - DNA, 120 bp, Artificial Sequence
  ENSG00000101413_4 (sequence is synthesized)
cagagaggcagatgaaggctgtaaaaaacctttagaaagattgctgaacatctggcaagaacgaagtgtgtatggcggcgagttcatacagcagctgaagctgtctatggaggactccaa

SEQ ID NO: 124547 - DNA, 120 bp, Artificial Sequence
  ENSG00000101413_5 (sequence is synthesized)
gagccctccccccaaagcaacagaagagaagaaatctctgaaacgaacttttcagcaaattcaggaggaggaggatgacgactaccctggcagctactctcctcaggatccttctgcagg

SEQ ID NO: 124548 - DNA, 120 bp, Artificial Sequence
  ENSG00000101413_6 (sequence is synthesized)
acccctcttgactgaggaactaatcaaagctttgcaggatctggaaaatgccgcatcaggggatgctactgtccgacagaaaattgcttctctgccccaggaagtgcaagatgtttctct

SEQ ID NO: 124549 - DNA, 120 bp, Artificial Sequence
  ENSG00000101413_7 (sequence is synthesized)
attggaaaaaataacagacaaagaggcagctgaacgtctttcaaaaacagtagatgaagcatgtctgttactagcagaatataacgggcgcctggcagcagaactggaggaccgtcgcca

SEQ ID NO: 124550 - DNA, 120 bp, Artificial Sequence
  ENSG00000101413_8 (sequence is synthesized)
gctggctcggatgttggtggagtatacccagaatcagaaagatgttttgtcggagaaggagaaaaaactagaggaatacaaacagaagcttgcacgagtaacccaggtccgcaaggaact

SEQ ID NO: 124551 - DNA, 120 bp, Artificial Sequence
  ENSG00000101413_9 (sequence is synthesized)
gaaatcccatattcagagcttgccagacctctcactgctgcccaacgtcacagggggcttagcccccctgccctctgctggggacctgttttcaactgactaggatgggtgtcatgtccc

SEQ ID NO: 124552 - DNA, 120 bp, Artificial Sequence
  ENSG00000101413_10 (sequence is synthesized)
agatttctgtttgtaccagcagaaagaagagggcaagtcatggttggaaataaccttctagcccctggttctatcccttcttccgcccagccccccagcctcaagaaagaacctcagact

SEQ ID NO: 124553 - DNA, 120 bp, Artificial Sequence
  ENSG00000101413_11 (sequence is synthesized)
ctgattctcctcttcagcctctcatcttgagcacagttcagaacagtggcgactggaatctggtttatattcatatttgcaaagactacagactttttctcccacttcatattttcatgc

SEQ ID NO: 124554 - DNA, 120 bp, Artificial Sequence
  ENSG00000101413_12 (sequence is synthesized)
ccccctgttggttttccattcttaactgtctccttatacctaagaagttatgaaaatcatgtgtacttctggaagctttcgaaagaatcttgtccctcatgacagcattttatcatgaaa

SEQ ID NO: 124555 - DNA, 120 bp, Artificial Sequence
  ENSG00000101413_13 (sequence is synthesized)
gcagcttctcctttctgggctgggcttgttcaagttcggtgtgggcttccactaaggcacttgtcctggagacgttggctttcccagctgcatctgccccaaaaggttgtaggcacagct

SEQ ID NO: 124556 - DNA, 120 bp, Artificial Sequence
  ENSG00000101413_14 (sequence is synthesized)
gtcgtagcgttgccataaagagtttgccaaatctctgatcctccctttccattgcttctcctagtgatgcacgaagattaggtgcatttattttgtaaacagattggagaatctagcaat

SEQ ID NO: 124557 - DNA, 120 bp, Artificial Sequence
  ENSG00000101413_15 (sequence is synthesized)
aaaaggaatttatttgcttcaagttcctagatacaaccttcccatgctgcacttctccactgtcggagcacgttccgaaaaacagaatgccttgatccctggtgggtgcgaaggcagttg

SEQ ID NO: 124558 - DNA, 120 bp, Artificial Sequence
  ENSG00000101413_16 (sequence is synthesized)
ttagggatggcaggcattggtgggctccaaaagatgaaggccccacacacaggtgtgctgcatttgggatctgtgtgggtgtttcttggaccctttcttctgggagtagggtacacacta

SEQ ID NO: 124559 - DNA, 120 bp, Artificial Sequence
  ENSG00000101413_17 (sequence is synthesized)
acgtttaatccgctgtctgggtgcatgtccacagtacggtggctaaactcgaacatcactgcaaataggacgctgagcaggtccgtctgtcatgtcacgccactgcacaggtccttgtcc

SEQ ID NO: 124560 - DNA, 120 bp, Artificial Sequence
  ENSG00000101413_18 (sequence is synthesized)
ccacacgacggggagtacttgcgtcagatgttattgaatagctcgtctcgggcaggggaagcggggagttggggatattaattgggggttttaattctattatcatgtcagctgacatta

SEQ ID NO: 124561 - DNA, 120 bp, Artificial Sequence
  ENSG00000101413_19 (sequence is synthesized)
tgactatataatgtagttagagacaatttttatcttgcttatagtaaaggttcagcctgccaattgtaaatcattctaatttggcaggcttatttttgacattggaaagggcagaaagcg

SEQ ID NO: 124562 - DNA, 120 bp, Artificial Sequence
  ENSG00000101413_20 (sequence is synthesized)
atttgccccagtagtgtaataggagttatagaccagaggctgaaacccaaactatataaaaaggaattcagtggagggggctttgtaatctccattaatttgtgttgctacttccaggat

SEQ ID NO: 124563 - DNA, 120 bp, Artificial Sequence
  ENSG00000101413_21 (sequence is synthesized)
caccaaaaattacatgtaattttacatgttaaacacattgaaacataacctatgtttataaagcataacgggcttcccttccagaagctctcctgcttgtcatgaagtgagaacaatgaa

SEQ ID NO: 124564 - DNA, 120 bp, Artificial Sequence
  ENSG00000101413_22 (sequence is synthesized)
aagtcatagcagatactcagtttaactctgtgtagaacctagtagtgtttgagctgttattcagatttgaattcagactgtgtgttgtttgcttatggacactgcctgtcgttctgtcac

SEQ ID NO: 124565 - DNA, 120 bp, Artificial Sequence
  ENSG00000101413_23 (sequence is synthesized)
tgttaaattaatgagtctataaggtttttcttccagaggccataggtgacatcactaaaattgcaagataaattgtaatctttgctgctgctgcactccccaacctctcccccacccccc

SEQ ID NO: 124566 - DNA, 120 bp, Artificial Sequence
  ENSG00000101413_24 (sequence is synthesized)
gtggtgtgctgctttctagatgagcgtgttttggagcaggcccatctgggacactctatgctttcaccaaggaagtgcgatctgagcagccacaatccagccaaaagaggatcgtagata

SEQ ID NO: 124567 - DNA, 120 bp, Artificial Sequence
  ENSG00000101413_25 (sequence is synthesized)
tttgctctgatcaactagatgaaaatatagcagaatggatttagcccactgctctgttttatccaactgagtctctgaccagcaattggtgcataattattacagcaaaagttaagaaat

SEQ ID NO: 124568 - DNA, 120 bp, Artificial Sequence
  ENSG00000101413_26 (sequence is synthesized)
gaaactgtagcaattatgtaaatgaatgtgttggcctcttaatacctgttactagtggacttcctgtgaggaagttagttttttgttttgatgaaatgctttcgttttttaaatcttaat

SEQ ID NO: 124569 - DNA, 120 bp, Artificial Sequence
  ENSG00000101413_27 (sequence is synthesized)
tctgctgtccacatcctcccaaagtgtgcttacttcatttgtttaatttaaatgaactttcctccttgtatgtatgaggtgacttggtgggtggggtgggtggtttttgtttttgtgttt

SEQ ID NO: 124570 - DNA, 120 bp, Artificial Sequence
  ENSG00000101413_28 (sequence is synthesized)
tttctttcttagggcatctgtaggcctcaaaggacctttcctttaggtcatattcctcagaaagtcttcaatcttcccttgtttttgtttgtttgtttttcttaaagaatattttcaaag

SEQ ID NO: 124571 - DNA, 120 bp, Artificial Sequence
  ENSG00000101413_29 (sequence is synthesized)
cttaaatttgtatattaatttaggactatttagaagtataggctgtcgttggcggcagcagtatattctgaaatgtctcatagatatatatttttgaataaagatggtgttgttgaacaa

SEQ ID NO: 124572 - DNA, 120 bp, Artificial Sequence
  ENSG00000101413_30 (sequence is synthesized)
agattacaggtgtgaaccactgcacctggacttacagtcttattttcacatataaagcatcttgtttaaggctcacaatatccctaggaggtgtaccctactggaacccctatctcccag

SEQ ID NO: 124573 - DNA, 120 bp, Artificial Sequence
  ENSG00000101413_31 (sequence is synthesized)
cctatctcccagaaaagggtatggaggggactcaggacctgagttgcccgaggcacctgacctcaagcctgccctgaaaaacgccctgtgctccccgagaaggccccgcatagtgcctgg

SEQ ID NO: 124574 - DNA, 120 bp, Artificial Sequence
  ENSG00000101413_32 (sequence is synthesized)
agtatagtcctgagtaaagtgtctgaaacaagaagcatgtgaccacctgggcacatcatttttctacctgagtggtacttggtgtactaaagagattatgggatgcagcacacttagaca

SEQ ID NO: 124575 - DNA, 120 bp, Artificial Sequence
  ENSG00000101413_33 (sequence is synthesized)
aggtggaagaatctgagtgggtctcatcacgttggagttggtttttatgggatatggaaaagaggcccggatttcttctgagagcaggagtagctgaggagccccgtggcagcagagctc

SEQ ID NO: 124576 - DNA, 120 bp, Artificial Sequence
  ENSG00000101413_34 (sequence is synthesized)
ccagctggctcggatgttggtggagtatacccagaatcagaaagatgttttgtcggagaaggagaaaaaactagagggtgtcatgattgactttggcctatgatgttggcccttaaacac

SEQ ID NO: 124577 - DNA, 120 bp, Artificial Sequence
  ENSG00000101413_35 (sequence is synthesized)
gcccaaagaggaggttagagaatgtggagggtatagaagaaagcccattcagaaaggcaaaggccaaagataccagaaaagccttccagcttcacttccagagcaaagagaagctttgtt

SEQ ID NO: 124578 - DNA, 120 bp, Artificial Sequence
  ENSG00000101413_36 (sequence is synthesized)
tgtggttgacagaggtgactacattactcccagatgtctgctcaaagctcataagacatagcgtgagtgggttggatagggttcctgtcttgtcagcgtgaataaagcatgatacagaca

SEQ ID NO: 124579 - DNA, 120 bp, Artificial Sequence
  ENSG00000101413_37 (sequence is synthesized)
gtgcatgtcatgtctttctacatgacttcccaagggtggggactgtccccatcatctattcattcaacagatactcatgagtgcttcgatggtggggaatgagatgaatgaccaagtctg

SEQ ID NO: 124580 - DNA, 120 bp, Artificial Sequence
  ENSG00000101413_38 (sequence is synthesized)
cacatccacggaatcgcagtctagacctgcttcatccagtactagccagactggctaccgagcacttgaaatgcagctagttcaaattgagacctgctgtcagtataaaacacacaccac

SEQ ID NO: 124581 - DNA, 120 bp, Artificial Sequence
  ENSG00000101413_39 (sequence is synthesized)
cacaccacatttcaaagattgagtacaaaaataagaaggtcaaataccttactaattcttatattgattacatgttgaaataatgttttggatatattggattaaataaaatacattatt

SEQ ID NO: 124582 - DNA, 120 bp, Artificial Sequence
  ENSG00000101417_0 (sequence is synthesized)
acgagtcggcggcgctaccgaggggctgtgggcgcgcagctggaacctccggctgtcagtgcgcttacagttcctaaccccgaccctgcgcgcagcccgcactatggcagccccgccgca

SEQ ID NO: 124583 - DNA, 120 bp, Artificial Sequence
  ENSG00000101417_1 (sequence is synthesized)
gctaagggctctgctcgtagtcgtcaacgcactgctgcgcaagcgccgctaccacgctgcgttggccgtgcttaagggcttccggaacggggctgtctatggagccaaaatccgggcccc

SEQ ID NO: 124584 - DNA, 120 bp, Artificial Sequence
  ENSG00000101417_2 (sequence is synthesized)
tcacgcgctggtcatgacctttctcttccggaatggcagcctccaggagaagctgtgggccatactgcaggccacatatatccactcctggaacctggcacggtttgtgttcacctacaa

SEQ ID NO: 124585 - DNA, 120 bp, Artificial Sequence
  ENSG00000101417_3 (sequence is synthesized)
gggtctccgtgccctgcagtcctacatacaaggcaagacctacccagcacacgcattcctggcggccttcctcgggggtatcctggtgtttggagaaaacaataacatcaacagccagat

SEQ ID NO: 124586 - DNA, 120 bp, Artificial Sequence
  ENSG00000101417_4 (sequence is synthesized)
caacatgtacctgttgtcacgcgtcctgtttgccctgagccgcctggctgtagagaagggctacatccctgaacccaggtgggacccgttcccgctgctcactgcggtggtgtgggggct

SEQ ID NO: 124587 - DNA, 120 bp, Artificial Sequence
  ENSG00000101417_5 (sequence is synthesized)
ggtgctgtggctctttgagtatcaccgatccaccctgcagccctcgctgcagtcctccatgacctacctctatgaggacagcaatgtatggcacgacatctcagacttcctcgtctataa

SEQ ID NO: 124588 - DNA, 120 bp, Artificial Sequence
  ENSG00000101417_6 (sequence is synthesized)
caagagccgtccctccaattaatgcagccctgaggtgtctggctgtggctcaagatttggccccatgcagaccctcccaaaggatactgccttctcaagatcataggcctcagactccaa

SEQ ID NO: 124589 - DNA, 120 bp, Artificial Sequence
  ENSG00000101417_7 (sequence is synthesized)
ctggtgttatcccagggttccgtttgctgaagtaaaaacactgattttaaaatcccagtgggtacctttgtatggtggcacaagtggccgaatcaggctgaggaatctacggcttggttc

SEQ ID NO: 124590 - DNA, 120 bp, Artificial Sequence
  ENSG00000101417_8 (sequence is synthesized)
cagctgtgcagctgacttctgtgagactggggccagccacactactctctaggcctcaggggtcaaggagctcagaggagggccctgaggtctctttccggtgggtatgttcattcttca

SEQ ID NO: 124591 - DNA, 120 bp, Artificial Sequence
  ENSG00000101417_9 (sequence is synthesized)
actgttcttatgtcacagagggctccttgctggtgggcagtgggttgtaaatactttttaaaaaacactaagttccttatctcagatgctgttctactggagaagttctagattcccact

SEQ ID NO: 124592 - DNA, 120 bp, Artificial Sequence
  ENSG00000101417_10 (sequence is synthesized)
gtccaatagaaacacgtgagccatatatgtaattaaaatgtttctagtagctgcattacaaaaaagaagcctgggcactgtggctcactcctgtaatctcagaactttgggaggctgagg

SEQ ID NO: 124593 - DNA, 90 bp, Artificial Sequence
  ENSG00000101417_11 (sequence is synthesized)
ggcaacatggtgaaacccagtttccatcacctgtggttccagctgaggtgggaggatcacttgagcctatgaggtcgaggctacagtgag

SEQ ID NO: 124594 - DNA, 73 bp, Artificial Sequence
  ENSG00000101417_12 (sequence is synthesized)
aattagccgggttccatcacctgtggttccagctgaggtgggaggatcacttgagcctatgaggtcgaggcta

SEQ ID NO: 124595 - DNA, 120 bp, Artificial Sequence
  ENSG00000101417_13 (sequence is synthesized)
cttcactatatattttaacacaaatttctaaaagttatttcaacatataattaacatcattagatattttgtactcttttttgtattaagtattcaaaattgggtgtatattttgccacc

SEQ ID NO: 124596 - DNA, 120 bp, Artificial Sequence
  ENSG00000101417_14 (sequence is synthesized)
cacattttcaggacccagtagccacatgtggctagtggctgctgtgacgggcaacacagatatggaacacttgtatcctcacagattattctagtggacagtgcagatctagagctagag

SEQ ID NO: 124597 - DNA, 120 bp, Artificial Sequence
  ENSG00000101417_15 (sequence is synthesized)
gacatgggtttgagtccccactcccccactgtgtaaccttggggaaggttctggacctctcagagcctcaatttatcataaaatgaggataatcataatgccgtggtcctcactggactt

SEQ ID NO: 124598 - DNA, 120 bp, Artificial Sequence
  ENSG00000101417_16 (sequence is synthesized)
gtgcaactaccactgatgtgctactaattactttcatttagtgcattcatacttccacttgggtgttttccacatattattattattttttttttttaagtagcgacagggtctcgctct

SEQ ID NO: 124599 - DNA, 120 bp, Artificial Sequence
  ENSG00000101417_17 (sequence is synthesized)
gtcactagggctagtctcgacctcctagcctcaagcaatcttcctgcctcagtctcccaaagtgccatgattacaggcatgagccactgcccctagcctgcacatattatttttaaacca

SEQ ID NO: 124600 - DNA, 120 bp, Artificial Sequence
  ENSG00000101417_18 (sequence is synthesized)
cactgcccctagcctgcacatattatttttaaaccatacagtggccttgcaaatgtgtgttttcgtccccattttacagatgtagaaactgagggtcaggccaggtgcagtggctcacgc

SEQ ID NO: 124601 - DNA, 120 bp, Artificial Sequence
  ENSG00000101417_19 (sequence is synthesized)
agaaaagaaaagaaactgagaatcagagaggagagtaacttgcccaaggtaatacagctagtataacagccgaatcaagatttgaactcagattcgtctgatttcaaagcccatgttttt

SEQ ID NO: 124602 - DNA, 120 bp, Artificial Sequence
  ENSG00000101417_20 (sequence is synthesized)
tccagtgccttgtttcaaatttagaaacctaagccatgctatgcaaatgttagctcattataggatatgggccagaaaggggtacacattcaaatgcccataggggcctacaatgacata

SEQ ID NO: 124603 - DNA, 62 bp, Artificial Sequence
  ENSG00000101417_21 (sequence is synthesized)
tggggggctgctgtgagccgagatagttccattacacttcagcctgggtgacagagtaagac

SEQ ID NO: 124604 - DNA, 120 bp, Artificial Sequence
  ENSG00000101417_22 (sequence is synthesized)
aaaaaaaaaaaaaaaaaaacacaatcctggacaaatcaaacaagtctccaggaaaatctggtccatgggctaccaatttgagaccattggtctggtagatacactttcattaatatactt

SEQ ID NO: 124605 - DNA, 120 bp, Artificial Sequence
  ENSG00000101417_23 (sequence is synthesized)
tggtagatacactttcattaatatacttactccatcactctttctatattttagaagttactagtagaaatgtatgcaggagtcactggagaccttattaaaatgcagcttctgattcag

SEQ ID NO: 124606 - DNA, 120 bp, Artificial Sequence
  ENSG00000101417_24 (sequence is synthesized)
tgagctggggtggggcctgagagtctgcatttctcccaggctccctggtgctgccagtggtgctgctctgagtaacaagggggtggggaatgatatggagccgtccattattatcccatc

SEQ ID NO: 124607 - DNA, 120 bp, Artificial Sequence
  ENSG00000101417_25 (sequence is synthesized)
tgacaaatgagtcacagagcccttaggtaattgaggtgggatcagtctgattctgtaagctgtgttttcagccacaacatttactgcaaacttggagtaggtaattatgaagttccttta

SEQ ID NO: 124608 - DNA, 120 bp, Artificial Sequence
  ENSG00000101417_26 (sequence is synthesized)
acttgctgtggaggttgaatgagctctagagtaaggggtccgcaaccccggtaccggtccatggcctgttcggaaccaggccacgcagcaggagttgaaaggtgggtgagctagcgaagc

SEQ ID NO: 124609 - DNA, 120 bp, Artificial Sequence
  ENSG00000101417_27 (sequence is synthesized)
ttcatctgtatgtacagccactccccactgctcacattaccacctgagctctgccttctgtcagatcagtggtggcattagatgctcgtaggaatgcaaaccctattgtgaactgcgcat

SEQ ID NO: 124610 - DNA, 76 bp, Artificial Sequence
  ENSG00000101417_28 (sequence is synthesized)
taatgcctgatgatctgtcactgtctcccgtcacgccttgatgggactgtctagttgcgttgtacaattatttcat

SEQ ID NO: 124611 - DNA, 120 bp, Artificial Sequence
  ENSG00000101417_29 (sequence is synthesized)
gattctacattatggtgtgttgtacaattatttcattatatattacaaggtaataataatagaaataaaatccacagtaaatgcaatgtgcttgaatcatcctgaaaccacgtcccctcc

SEQ ID NO: 124612 - DNA, 89 bp, Artificial Sequence
  ENSG00000101417_30 (sequence is synthesized)
ctaggggttggggagggcagagggcttgggccatcaccaggcaggttttatagcagatggtgggggtgccctgcctatagctcctctaa

SEQ ID NO: 124613 - DNA, 120 bp, Artificial Sequence
  ENSG00000101417_31 (sequence is synthesized)
atagcagatggtgggggtgccctgcctatagctcctctaaataacgactctggtgcacactagccagctttgccagtggccgcccctctgtctttctgcctgaggactctagcttgtcac

SEQ ID NO: 124614 - DNA, 120 bp, Artificial Sequence
  ENSG00000101417_32 (sequence is synthesized)
tggtgcctcctttgccagcctctggcaggcctgaagggctggagaatgaacacatccttggagcaaccttcaaccaatgactgataaatacccccactcccacagcccgcatccctcacc

SEQ ID NO: 124615 - DNA, 120 bp, Artificial Sequence
  ENSG00000101417_33 (sequence is synthesized)
cctcgggtgggataactcagaggtgcgtgctccacactgactcccagggccgcccagcagggctgagcctcaaacaccctccccatctcccttcctcatgcccctaccagtgcttcctgg

SEQ ID NO: 124616 - DNA, 120 bp, Artificial Sequence
  ENSG00000101417_34 (sequence is synthesized)
gaccacttcccatatgaaccacttgcactcaaacccttgtcttagagtctgctattgggggaacccaaactaaaactggcctctgtacagcaggttgagaggcaatatagcatggtggtc

SEQ ID NO: 124617 - DNA, 120 bp, Artificial Sequence
  ENSG00000101417_35 (sequence is synthesized)
agggacataggctttggagccagagtgcctgggctcaagccctggccccacagtttccttgggcaagtgactgagccattctgtgcctctatttcctcattgataaagtaggcgttgtcg

SEQ ID NO: 124618 - DNA, 120 bp, Artificial Sequence
  ENSG00000101417_36 (sequence is synthesized)
tagcacacacctcatcgagtggtgtggagggttaaagaatatgacacagttaaagtgagtccccaataaatgctgttatttctaagagcatccaaatgtagaggaagtgtgcccctgagg

SEQ ID NO: 124619 - DNA, 120 bp, Artificial Sequence
  ENSG00000101417_37 (sequence is synthesized)
actgagcacaccctgcttttagcctgtcctgcccccagctgaaggtgaaaccttggccgcctgccctcctgaagtcccgccactgctgctgggggttggccaactccgctaccgactgtc

SEQ ID NO: 124620 - DNA, 120 bp, Artificial Sequence
  ENSG00000101417_38 (sequence is synthesized)
tctgctctctaagaataggtttccctcacagatggcatctctctggatgctgctagagcatctggtgcttccaactgcacactccagggaggaaggcagtgtggtctgtgccggggagca

SEQ ID NO: 124621 - DNA, 120 bp, Artificial Sequence
  ENSG00000101417_39 (sequence is synthesized)
gggctctgccttccagcagatctgagaggagtcccatttggctccttcctagctgccctccattctctaagacctgtaaaacagggatggccagagggctcttgttgcacagtaagtgct

SEQ ID NO: 124622 - DNA, 120 bp, Artificial Sequence
  ENSG00000101417_40 (sequence is synthesized)
atgcttcctaaatgctagttcctgaaatagaatggtttaacctctacttactaaacacctgctacaatcctgttaattcttttgacatgtaagactaaaataaataaataaataaataaa

SEQ ID NO: 124623 - DNA, 120 bp, Artificial Sequence
  ENSG00000101421_0 (sequence is synthesized)
ggagcggcgggactgggagcgggcgccggagccgacccgagccgagccgagccgagccgagccggagcgggcggcgaaggccggcgcggcgagcagcaaccatgtcggtgttcgggaagc

SEQ ID NO: 124624 - DNA, 120 bp, Artificial Sequence
  ENSG00000101421_1 (sequence is synthesized)
catgtcggtgttcgggaagctgttcggggctggagggggtaaggccggcaagggcggcccgaccccccaggaggccatccagcggctgcgggacacggaagagatgttaagcaagaaaca

SEQ ID NO: 124625 - DNA, 120 bp, Artificial Sequence
  ENSG00000101421_2 (sequence is synthesized)
ggagttcctggagaagaaaatcgagcaggagctgacggccgccaagaagcacggcaccaaaaacaagcgcgcggccctccaggcactgaagcgtaagaagaggtatgagaagcagctggc

SEQ ID NO: 124626 - DNA, 120 bp, Artificial Sequence
  ENSG00000101421_3 (sequence is synthesized)
gcagatcgacggcacattatcaaccatcgagttccagcgggaggccctggagaatgccaacaccaacaccgaggtgctcaagaacatgggctatgccgccaaggccatgaaggcggccca

SEQ ID NO: 124627 - DNA, 120 bp, Artificial Sequence
  ENSG00000101421_4 (sequence is synthesized)
tgacaacatggacatcgataaagttgatgagttaatgcaggacattgctgaccagcaagaacttgcagaggagatttcaacagcaatttcgaaacctgtagggtttggagaagagtttga

SEQ ID NO: 124628 - DNA, 120 bp, Artificial Sequence
  ENSG00000101421_5 (sequence is synthesized)
cgaggatgagctcatggcggaattagaagaactagaacaggaggaactagacaagaatttgctggaaatcagtggacccgaaacagtccctctaccaaatgttccctctatagccctacc

SEQ ID NO: 124629 - DNA, 120 bp, Artificial Sequence
  ENSG00000101421_6 (sequence is synthesized)
gaaggaattggagaactgggctggatccatgtaatggggtccagcgctggctgggcccagacagactgtggtggcctgcgcagcgagcaggcgtgtgcgtgtgtggggcaggcaggatgt

SEQ ID NO: 124630 - DNA, 120 bp, Artificial Sequence
  ENSG00000101421_7 (sequence is synthesized)
ggtgcaggcaggttccatcgctttcgactctcactccaaagcagtagggccgcgttgctgctcactctctgcatagcatggtctgcacctgggagatgggcggggggaggggggcgggcg

SEQ ID NO: 124631 - DNA, 120 bp, Artificial Sequence
  ENSG00000101421_8 (sequence is synthesized)
gggtgggaagtgcctgctgtttataatgttgaatttctgtaaaataaactgtatttgcaaatccaacattgagcttctggactacgctgactccactgctgaatcctcaatggaaagggt

SEQ ID NO: 124632 - DNA, 120 bp, Artificial Sequence
  ENSG00000101421_9 (sequence is synthesized)
cgactggttgcagttgaaatgacctgaaatgtagcctctgtccttgtaagtcagttgacttgccgcacatctctttgtgtacttgtacggtactggcagaaaagtcatttttcaaaagcc

SEQ ID NO: 124633 - DNA, 120 bp, Artificial Sequence
  ENSG00000101421_10 (sequence is synthesized)
ataggcttttccttgcccttagctgtaataatgcatctgattttgatttcctccagagctgtgtttctgtccatcacctgtgtattggccctgtgtttaccactctggcccactcctcac

SEQ ID NO: 124634 - DNA, 120 bp, Artificial Sequence
  ENSG00000101421_11 (sequence is synthesized)
ccccttgctcccctggtcttctggagtttgtgacattgatttgaaatggatggtgttctcttgagagcaagtgagattgttagaattaagttccaactatacagttttctaacatagcta

SEQ ID NO: 124635 - DNA, 120 bp, Artificial Sequence
  ENSG00000101421_12 (sequence is synthesized)
taaggtccttgttgctgtttgtgataactgatagataactcattggaaacgtgcatacatttatattcagatgaaattatggtttgcactgtctattaaatatctcgattaattttcata

SEQ ID NO: 124636 - DNA, 120 bp, Artificial Sequence
  ENSG00000101425_0 (sequence is synthesized)
ccgactcttttatagctccctggttcaacctcaaggccttgaggttttggcagctctggaggatgagagagaacatggccaggggcccttgcaacgcgccgagatgggcgtccctgatgg

SEQ ID NO: 124637 - DNA, 120 bp, Artificial Sequence
  ENSG00000101425_1 (sequence is synthesized)
tgctggtcgccataggcaccgccgtgacagcggccgtcaaccctggcgtcgtggtcaggatctcccagaagggcctggactacgccagccagcaggggacggccgctctgcagaaggagc

SEQ ID NO: 124638 - DNA, 120 bp, Artificial Sequence
  ENSG00000101425_2 (sequence is synthesized)
tgaagaggatcaagattcctgactactcagacagctttaagatcaagcatcttgggaaggggcattatagcttctacagcatggacatccgtgaattccagcttcccagttcccagataa

SEQ ID NO: 124639 - DNA, 120 bp, Artificial Sequence
  ENSG00000101425_3 (sequence is synthesized)
gcatggtgcccaatgtgggccttaagttctccatcagcaacgccaatatcaagatcagcgggaaatggaaggcacaaaagagattcttaaaaatgagcggcaattttgacctgagcatag

SEQ ID NO: 124640 - DNA, 120 bp, Artificial Sequence
  ENSG00000101425_4 (sequence is synthesized)
aaggcatgtccatttcggctgatctgaagctgggcagtaaccccacgtcaggcaagcccaccatcacctgctccagctgcagcagccacatcaacagtgtccacgtgcacatctcaaaga

SEQ ID NO: 124641 - DNA, 120 bp, Artificial Sequence
  ENSG00000101425_5 (sequence is synthesized)
gcaaagtggggtggctgatccaactcttccacaaaaaaattgagtctgcgcttcgaaacaagatgaacagccaggtctgcgagaaagtgaccaattctgtatcctccgagctgcaacctt

SEQ ID NO: 124642 - DNA, 120 bp, Artificial Sequence
  ENSG00000101425_6 (sequence is synthesized)
atttccagactctgccagtaatgaccaaaatagattctgtggctggaatcaactatggtctggtggcacctccagcaaccacggctgagaccctggatgtacagatgaagggggagtttt

SEQ ID NO: 124643 - DNA, 120 bp, Artificial Sequence
  ENSG00000101425_7 (sequence is synthesized)
tggagtttcccgctgcccatgaccgcatggtatacctgggcctctcagactacttcttcaacacagccgggcttgtataccaagaggctggggtcttgaagatgacccttagagatgaca

SEQ ID NO: 124644 - DNA, 120 bp, Artificial Sequence
  ENSG00000101425_8 (sequence is synthesized)
tgattccaaaggagtccaaatttcgactgacaaccaagttctttggaaccttcctacctgaggtggccaagaagtttcccaacatgaagatacagatccatgtctcagcctccaccccgc

SEQ ID NO: 124645 - DNA, 120 bp, Artificial Sequence
  ENSG00000101425_9 (sequence is synthesized)
cacacctgtctgtgcagcccaccggccttaccttctaccctgccgtggatgtccaggcctttgccgtcctccccaactcctccctggcttccctcttcctgattggcatgcacacaactg

SEQ ID NO: 124646 - DNA, 120 bp, Artificial Sequence
  ENSG00000101425_10 (sequence is synthesized)
gttccatggaggtcagcgccgagtccaacaggcttgttggagagctcaagctggataggctgctcctggaactgaagcactcaaatattggccccttcccggttgaattgctgcaggata

SEQ ID NO: 124647 - DNA, 120 bp, Artificial Sequence
  ENSG00000101425_11 (sequence is synthesized)
tcatgaactacattgtacccattcttgtgctgcccagggttaacgagaaactacagaaaggcttccctctcccgacgccggccagagtccagctctacaacgtagtgcttcagcctcacc

SEQ ID NO: 124648 - DNA, 120 bp, Artificial Sequence
  ENSG00000101425_12 (sequence is synthesized)
agaacttcctgctgttcggtgcagacgttgtctataaatgaaggcaccaggggtgccgggggctgtcagccacacctgttcctgatgggctgtggggcaccggctgcctttccccaggga

SEQ ID NO: 124649 - DNA, 120 bp, Artificial Sequence
  ENSG00000101425_13 (sequence is synthesized)
atcctctccagatcttaaccaagagccccttgcaaacttcttcgactcagattcagaaatgatctaaacacgaggaaacattattcattggaaaagtgcatggtgtgtattttagggatt

SEQ ID NO: 124650 - DNA, 120 bp, Artificial Sequence
  ENSG00000101425_14 (sequence is synthesized)
atgagcttctttcaagggctaaggctgcagagatatttcctccaggaatcgtgtttcaattgtaaccaagaaatttccatttgtgcttcatgaaaaaaaacttctggtttttttcatgtg

SEQ ID NO: 124651 - DNA, 120 bp, Artificial Sequence
  ENSG00000101425_15 (sequence is synthesized)
cagtccctacctagggccaggcatgctggttcagggaggctgtctacccaggctctctggccctccctcctcccctgcccttctctttcttttctcctggtcctcaccatcggtctctgt

SEQ ID NO: 124652 - DNA, 120 bp, Artificial Sequence
  ENSG00000101425_16 (sequence is synthesized)
cccagattctagtggcaagttcacagactccatctcttggtgggggtgtggcaaagccacattacagaagagcaaatggaatggaaaatgtctgcgagaaagtgaccaattctgtatcct

SEQ ID NO: 124653 - DNA, 120 bp, Artificial Sequence
  ENSG00000101425_17 (sequence is synthesized)
gcatccacctcctctcaaaaccctcccagcatctgtgaggtcactaggattctctctgttctacaaatgacaaaaagtgctcagagaagtgcaaggacttgtccaaggtcatccagagtt

SEQ ID NO: 124654 - DNA, 120 bp, Artificial Sequence
  ENSG00000101425_18 (sequence is synthesized)
tggttcaagcctaggtctctctgtgcccttgaccctgtgtcttagcgactcatctcagggctgttggaagaagagacttccagcgatgctgccgtgggagccagctcatggtccattttc

SEQ ID NO: 124655 - DNA, 120 bp, Artificial Sequence
  ENSG00000101425_19 (sequence is synthesized)
ctggaatcaactatggtctggtggcacctccagcaaccacggctgagaccctggatgtacagatgaagttatttgtttgcttcaaaacacattcaatgtgaaaaagaaactttagaaact

SEQ ID NO: 124656 - DNA, 120 bp, Artificial Sequence
  ENSG00000101425_20 (sequence is synthesized)
gcagaggaatgcagaaataaatataggaaagaaggaaaaaaaagagagagagagagagaattacccgagtctacaacctagagataagcatcatcaataaataagtgtagatccctccaa

SEQ ID NO: 124657 - DNA, 120 bp, Artificial Sequence
  ENSG00000101435_0 (sequence is synthesized)
aagagcaaagtcagcggtgcctacagtcagcaccatgctgggcctgccgtggaagggaggtctgtcctgggcgctgctgctgcttctcttaggctcccagatcctgctgatctatgcctg

SEQ ID NO: 124658 - DNA, 120 bp, Artificial Sequence
  ENSG00000101435_1 (sequence is synthesized)
gcatttccacgagcaaagggactgtgatgaacacaatgtcatggctcgttacctccctgccacagtggagtttgctgtccacacattcaaccaacagagcaaggactactatgcctacag

SEQ ID NO: 124659 - DNA, 120 bp, Artificial Sequence
  ENSG00000101435_2 (sequence is synthesized)
tttgaagacgacattgacaactgccatttccaagaaagcacagagctgaacaatactttcacctgcttcttcaccatcagcaccaggccctggatgactcagttcagcctcctgaacaag

SEQ ID NO: 124660 - DNA, 120 bp, Artificial Sequence
  ENSG00000101435_3 (sequence is synthesized)
acctgcttggagggattccactgagtgaaacccactcacaggcttgtccatgtgctgctcccacattccgtggacatcagcactactctcctgaggactcttcagtggctgagcagcttt

SEQ ID NO: 124661 - DNA, 120 bp, Artificial Sequence
  ENSG00000101435_4 (sequence is synthesized)
ggacttgtttgttatcctattttgcatgtgtttgagatctcagatcagtgttttagaaaatccacacatcttgagcctaatcatgtagtgtagatcattaaacatcagcattttaagaaa

SEQ ID NO: 124662 - DNA, 120 bp, Artificial Sequence
  ENSG00000101438_0 (sequence is synthesized)
agtgcactagccaccaccgccgccgccgccgctccgccagacctgctgccagcttgcccggtccagccctgagagagcctcgaacgccagctgcgagggtcatgagccagagagccccgg

SEQ ID NO: 124663 - DNA, 120 bp, Artificial Sequence
  ENSG00000101438_1 (sequence is synthesized)
ggcgccgcgcggagagcaagcggagatagcgactttgcgccccccagccctcgccttcttgcatcgcgttccccgcatcctcgggtccttctgtcctttccgctgtccccaccgccgcca

SEQ ID NO: 124664 - DNA, 120 bp, Artificial Sequence
  ENSG00000101438_2 (sequence is synthesized)
tggccaccttgctccgcagcaagctgtccaacgtggccacgtccgtgtccaacaagtcccaggccaagatgagcggcatgttcgccaggatgggttttcaggcggccacggatgaggagg

SEQ ID NO: 124665 - DNA, 120 bp, Artificial Sequence
  ENSG00000101438_3 (sequence is synthesized)
cggtgggcttcgcgcattgcgacgacctcgactttgagcaccgccagggcctgcagatggacatcctgaaagccgagggagagccctgcggggacgagggcgctgaagcgcccgtcgagg

SEQ ID NO: 124666 - DNA, 120 bp, Artificial Sequence
  ENSG00000101438_4 (sequence is synthesized)
gagacatccattatcagcgaggcagcggagctcctctgccgccctccggctccaaggaccaggtgggaggtggtggcgaattcgggggccacgacaagcccaaaatcacggcgtgggagg

SEQ ID NO: 124667 - DNA, 120 bp, Artificial Sequence
  ENSG00000101438_5 (sequence is synthesized)
caggctggaacgtgaccaacgccatccagggcatgttcgtgctgggcctaccctacgccatcctgcacggcggctacctggggttgtttctcatcatcttcgccgccgttgtgtgctgct

SEQ ID NO: 124668 - DNA, 120 bp, Artificial Sequence
  ENSG00000101438_6 (sequence is synthesized)
acaccggcaagatcctcatcgcgtgcctgtacgaggagaatgaagacggcgaggtggtgcgcgtgcgggactcgtacgtggccatagccaacgcctgctgcgccccgcgcttcccaacgc

SEQ ID NO: 124669 - DNA, 120 bp, Artificial Sequence
  ENSG00000101438_7 (sequence is synthesized)
tgggcggccgagtggtgaacgtagcgcagatcatcgagctggtgatgacgtgcatcctgtacgtggtggtgagtggcaacctcatgtacaacagcttcccggggctgcccgtgtcgcaga

SEQ ID NO: 124670 - DNA, 120 bp, Artificial Sequence
  ENSG00000101438_8 (sequence is synthesized)
agtcctggtccattatcgccacggccgtgctgctgccttgcgccttccttaagaacctcaaggccgtgtccaagttcagtctgctgtgcactctggcccacttcgtcatcaatatcctgg

SEQ ID NO: 124671 - DNA, 120 bp, Artificial Sequence
  ENSG00000101438_9 (sequence is synthesized)
tcatagcctactgtctatcgcgggcgcgcgactgggcctgggagaaggtcaagttctacatcgacgtcaagaagttccccatctccattggcatcatcgtgttcagctacacgtctcaga

SEQ ID NO: 124672 - DNA, 120 bp, Artificial Sequence
  ENSG00000101438_10 (sequence is synthesized)
agcagcccagcgagttccactgcatgatgaactggacgcacatcgcagcctgcgtgctcaagggcctcttcgcgctcgtcgcctacctcacctgggccgacgagaccaaggaggtcatca

SEQ ID NO: 124673 - DNA, 120 bp, Artificial Sequence
  ENSG00000101438_11 (sequence is synthesized)
cggataacctgcccggctccatccgcgccgtggtcaacatctttctggtggccaaggcgctgttgtcctatcctctgccattctttgccgctgtcgaggtgctggagaagtcgctcttcc

SEQ ID NO: 124674 - DNA, 120 bp, Artificial Sequence
  ENSG00000101438_12 (sequence is synthesized)
aggaaggcagccgcgcctttttcccggcctgctacagcggcgacgggcgcctgaagtcctgggggctgacgctgcgctgcgcgctcgtcgtcttcacgctgctcatggccatttatgtgc

SEQ ID NO: 124675 - DNA, 120 bp, Artificial Sequence
  ENSG00000101438_13 (sequence is synthesized)
cgcacttcgcgctgctcatgggcctcaccggcagcctcacgggcgccggcctctgtttcttgctgcccagcctctttcacctgcgcctgctctggcgcaagctgctgtggcaccaagtct

SEQ ID NO: 124676 - DNA, 120 bp, Artificial Sequence
  ENSG00000101438_14 (sequence is synthesized)
tcttcgacgtcgccatcttcgtcatcggcggcatctgcagcgtgtccggcttcgtgcactccctcgagggcctcatcgaagcctaccgaaccaacgcggaggactagggcgcaagggcga

SEQ ID NO: 124677 - DNA, 120 bp, Artificial Sequence
  ENSG00000101438_15 (sequence is synthesized)
gcccccgccgcgcttctgcgctctctcccttctcccctcaccccgcccccaccagcccagtgcgccctgccgccgcgcttgggaggccaagctttaaacatctctggttcctagtttctg

SEQ ID NO: 124678 - DNA, 120 bp, Artificial Sequence
  ENSG00000101438_16 (sequence is synthesized)
attattcggggatgggggggatgggaggggacagggattcacgatccatcgcgtctgcgtttctgttgtcctttcttttccacaacaccctggttttggggggaggcggggtgcatttgc

SEQ ID NO: 124679 - DNA, 120 bp, Artificial Sequence
  ENSG00000101438_17 (sequence is synthesized)
gggcagggttctctgtccttccaagtggggccccgacactttggttccagtcatcgagggggttgggaagggagggagagggggcgcagctcgcaggcgtggcaacttgaccttggggga

SEQ ID NO: 124680 - DNA, 120 bp, Artificial Sequence
  ENSG00000101438_18 (sequence is synthesized)
atatttcacatccatccagagctcggaatctacagcgtccagccatttccagcaagagcgcttcccattccggagacgtttcaaccctgcagcgggaaaggctgactgggaaatccattt

SEQ ID NO: 124681 - DNA, 120 bp, Artificial Sequence
  ENSG00000101438_19 (sequence is synthesized)
tgggtgggcaatttccttcaacgaagccggaaggcgagaagccgcggcggggccagcttgcctgccggttttcaggaatctaaactctcatcttgtgcaatttatcaggtgtggaactgt

SEQ ID NO: 124682 - DNA, 120 bp, Artificial Sequence
  ENSG00000101438_20 (sequence is synthesized)
tctactgtgcgtgtggtgtgctcgtggtgaataagatgaaatgtatatcagaaaaaaatctatctctaatttagagtgcggtacataattatatccgcaaataaagaagagacaaaggct

SEQ ID NO: 124683 - DNA, 120 bp, Artificial Sequence
  ENSG00000101439_0 (sequence is synthesized)
acggcctcgcctcggtatcgcagcgggtcctctctatctagctccagcctctcgcctgcgccccactccccgcgtcccgcgtcctagccgaccatggccgggcccctgcgcgccccgctg

SEQ ID NO: 124684 - DNA, 120 bp, Artificial Sequence
  ENSG00000101439_1 (sequence is synthesized)
ctcctgctggccatcctggccgtggccctggccgtgagccccgcggccggctccagtcccggcaagccgccgcgcctagtgggaggccccatggacgccagcgtggaggaggagggtgtg

SEQ ID NO: 124685 - DNA, 120 bp, Artificial Sequence
  ENSG00000101439_2 (sequence is synthesized)
cggcgtgcactggactttgccgtcggcgagtacaacaaagccagcaacgacatgtaccacagccgcgcgctgcaggtggtgcgcgcccgcaagcagatcgtagctggggtgaactacttc

SEQ ID NO: 124686 - DNA, 120 bp, Artificial Sequence
  ENSG00000101439_3 (sequence is synthesized)
agccacatctgaaaaggaaagcattctgctctttccagatctacgctgtgccttggcagggcacaatgaccttgtcgaaatccacctgtcaggacgcctaggggtctgtaccgggctggc

SEQ ID NO: 124687 - DNA, 120 bp, Artificial Sequence
  ENSG00000101439_4 (sequence is synthesized)
ctgtgcctatcacctcttatgcacacctcccaccccctgtattcccacccctggactggtggcccctgccttggggaaggtctccccatgtgcctgcaccaggagacagacagagaaggc

SEQ ID NO: 124688 - DNA, 120 bp, Artificial Sequence
  ENSG00000101439_5 (sequence is synthesized)
agcaggcggcctttgttgctcagcaaggggctctgccctccctccttccttcttgcttctcatagccccggtgtgcggtgcatacacccccacctcctgcaataaaatagtagcatcggc

SEQ ID NO: 124689 - DNA, 120 bp, Artificial Sequence
  ENSG00000101439_6 (sequence is synthesized)
gtttaccccacaggctctgtgccttctctgactgggcagctcatgctgtatgcatggaggcatcattaccaaacacacctctgaggccagcggccagcgtctgactcacaagccatgact

SEQ ID NO: 124690 - DNA, 120 bp, Artificial Sequence
  ENSG00000101439_7 (sequence is synthesized)
gccccaccttcttacaacaacaatagcagtttccccgtgaggattcacccctcctcccctctcactccgcctttttccagggaagctgactctaccctttggaccacagcttggagcact

SEQ ID NO: 124691 - DNA, 120 bp, Artificial Sequence
  ENSG00000101439_8 (sequence is synthesized)
tgaccctggctaagctggtcagggcagcgggtctccctcccctgaagcctcatgattggcatgaggacaacacgtgacctatgtgtggctgcccaggacccacataggcttaacggtggg

SEQ ID NO: 124692 - DNA, 120 bp, Artificial Sequence
  ENSG00000101439_9 (sequence is synthesized)
attttgtttgactgtgtgataagtgggttcttccttccctgctgagtgtgaagataaaaaagacttgaggtctggggcccacttggagcctgtttgagaatgaagccaagttatgggaag

SEQ ID NO: 124693 - DNA, 120 bp, Artificial Sequence
  ENSG00000101439_10 (sequence is synthesized)
caacaaaactgaagagacagcaaggaaaccaggcctggtggtgcactcccagctattctggaggctgacgcgggaggactgcgtgagctcagcagtttgaggctgcaatgagccatgatt

SEQ ID NO: 124694 - DNA, 120 bp, Artificial Sequence
  ENSG00000101439_11 (sequence is synthesized)
tcactactgaactccagcctgggcaaaagagcgagaccctgtgtctcagaaaaagagagagagaaacagagagcaaggagcaggtgggttataatggagtccctgcaccaagcagagcct

SEQ ID NO: 124695 - DNA, 120 bp, Artificial Sequence
  ENSG00000101439_12 (sequence is synthesized)
gatgcccgcccttgctctgaacttcctagttatgtgaaccaaccaccaggccagttgggttgggtttccagccctgtgctcttgtctgtcctcactgacagacaaaaataactcatcagt

SEQ ID NO: 124696 - DNA, 120 bp, Artificial Sequence
  ENSG00000101439_13 (sequence is synthesized)
cggttctcagacccacagtcccatgacatttcttgactgtttcagaagtaatgcctcaaggaccagcttgcagaaagtggaggacctgccccctggaccttacaagtagcaggccactct

SEQ ID NO: 124697 - DNA, 120 bp, Artificial Sequence
  ENSG00000101439_14 (sequence is synthesized)
ctggccctgcctctgaagatgctgcaatggacttgtgttcaaggagaaattggctgtaacttcccttattgagatataatcgggctcatcgttaagctgtggtcagccagaagtgtagct

SEQ ID NO: 124698 - DNA, 120 bp, Artificial Sequence
  ENSG00000101439_15 (sequence is synthesized)
gtgcccctgggattgaaatcagcaatcaatctggacatcctttttctatcttcatgaggcacctccccagtaccaaccaaatttcttggggatcccccgggacttctcataaatggaatt

SEQ ID NO: 124699 - DNA, 120 bp, Artificial Sequence
  ENSG00000101439_16 (sequence is synthesized)
tcccccgggacttctcataaatggaattgatttgaactcaggaaaccctcaaataggccagaacaactcactaattaaattcatcccctcccaaaaacaaaaacaaaaacaaaaaaaaac

SEQ ID NO: 124700 - DNA, 120 bp, Artificial Sequence
  ENSG00000101439_17 (sequence is synthesized)
aaattatatatctgatatagaacttgtattcagaacatataatgaactcttacaactcaataagactggtaacccaattaaaaattctttttaaaaaaaccaatttaaaaataaaggcaa

SEQ ID NO: 124701 - DNA, 120 bp, Artificial Sequence
  ENSG00000101439_18 (sequence is synthesized)
ataacctaatttttatataactcaaagtttttaaagaaacaaaccaatttaaaagttccaaaggatttgaataaacgtttttccaaagaagatatgtaaatagccaataaacgcataaaa

SEQ ID NO: 124702 - DNA, 120 bp, Artificial Sequence
  ENSG00000101439_19 (sequence is synthesized)
acgtgcataacaccattagctattaggaaaaggcaaatcaaaaccacagtaaaaagcagcttcaaagccactacatggttgtggtcaaagagaccacaaataacaaattggaatctttat

SEQ ID NO: 124703 - DNA, 120 bp, Artificial Sequence
  ENSG00000101439_20 (sequence is synthesized)
acatagctggtgggaatgtaaaatggtgcagctgctttggaaaacagtttcacaagttttcaaaaggttagacctaccatataacctagcaactctactcatatttatatgtcagctaca

SEQ ID NO: 124704 - DNA, 120 bp, Artificial Sequence
  ENSG00000101439_21 (sequence is synthesized)
aataaaaacattaagttcaccaaaatatttacacatgaaagttcatagcatcattattaaaatcagaaaaaaatatattaaaaaaaacctcaaatgtccatcaactgacgaatggataat

SEQ ID NO: 124705 - DNA, 120 bp, Artificial Sequence
  ENSG00000101439_22 (sequence is synthesized)
caagatatagtgttagtctattcatacaatggaaaatgaacgggcataaaagagaatgacatgacccgtgctacaatgtggagcaatcttgaaaatgtgctaagtgaaagaagccagcaa

SEQ ID NO: 124706 - DNA, 120 bp, Artificial Sequence
  ENSG00000101439_23 (sequence is synthesized)
gccatgctgaaacaagtcagcattcatacaatatgattcaatttatatgaaatacccagaacagaaaaatgtatagagacaggctgtagattagtggttgtctagggctgggggcaatag

SEQ ID NO: 124707 - DNA, 120 bp, Artificial Sequence
  ENSG00000101439_24 (sequence is synthesized)
aaggcagagtgactgctaataggaagtttccttggagggatcatgaaaatgttctaaaatcagattatacgtccatttgcacaattttgtgaatatactcggaaccactgaattgtatac

SEQ ID NO: 124708 - DNA, 120 bp, Artificial Sequence
  ENSG00000101439_25 (sequence is synthesized)
tttaagtgggtgaggtatgtgaaaattaaatgtcagtaaagctgtttaaaaaagtttcatcccaaagctacattttacctaaggcaaatgtttactaccgcttctctttcagtcccaaat

SEQ ID NO: 124709 - DNA, 120 bp, Artificial Sequence
  ENSG00000101439_26 (sequence is synthesized)
aatttccagccatatgttccagtcaagcctcgacaaaattaaacaacaccacaacttactccagttacaagccaatgtgcaaatgccccaaacttgaccataaatttaccacccaacccc

SEQ ID NO: 124710 - DNA, 120 bp, Artificial Sequence
  ENSG00000101439_27 (sequence is synthesized)
catcgtctcattcccaggaaaaactaaacacaagatcaactccccttgcaagttgaagtcctgacattgaagtctaaagaaatcacagcccacaataaaattcttaaagtgtacaaacaa

SEQ ID NO: 124711 - DNA, 120 bp, Artificial Sequence
  ENSG00000101440_0 (sequence is synthesized)
gcctcctgggatggatgtcacccgcttactcctggccaccctgctggtcttcctctgcttcttcactgccaacagccacctgccacctgaggagaagctccgagatgacaggagcctgag

SEQ ID NO: 124712 - DNA, 120 bp, Artificial Sequence
  ENSG00000101440_1 (sequence is synthesized)
aagcaactcctctgtgaacctactggatgtcccttctgtctctattgtggcgctgaacaagaaatccaaacagatcggcagaaaagcagcagaaaagaaaagatcttctaagaaggaggc

SEQ ID NO: 124713 - DNA, 120 bp, Artificial Sequence
  ENSG00000101440_2 (sequence is synthesized)
tcctgccagtgccgcttcttccgcagcgcctgctcctgccgcgtgctcagcctcaactgctgagcgcccccactcccggccgcgagcaggcagggcttcggggacgcggggcgcttctcg

SEQ ID NO: 124714 - DNA, 120 bp, Artificial Sequence
  ENSG00000101440_3 (sequence is synthesized)
ggcgggtgatccctaacagggcggcttcccagggctgcaggcgggcggaggttccaggagatgggacttcagggagacctggcttgggctaaaatcgaaatacaatatatataggctgct

SEQ ID NO: 124715 - DNA, 120 bp, Artificial Sequence
  ENSG00000101440_4 (sequence is synthesized)
gactcagcccgctgaacgcctggaagaaattttgcagacccaccagagatccccagattccacttgtaaaaccattgatctaaaaactacgtcttgacttcagaacacttcttttgatct

SEQ ID NO: 124716 - DNA, 120 bp, Artificial Sequence
  ENSG00000101441_0 (sequence is synthesized)
gggctccctgcctcgggctctcaccctcctctcctgcagctccagctttgtgctctgcctctgaggagaccatggcccggcctctgtgtaccctgctactcctgatggctaccctggctg

SEQ ID NO: 124717 - DNA, 120 bp, Artificial Sequence
  ENSG00000101441_1 (sequence is synthesized)
gggctctggcctcgagctccaaggaggagaataggataatcccaggtggcatctatgatgcagacctcaatgatgagtgggtacagcgtgcccttcacttcgccatcagcgagtacaaca

SEQ ID NO: 124718 - DNA, 120 bp, Artificial Sequence
  ENSG00000101441_2 (sequence is synthesized)
aggccaccgaagatgagtactacagacgcccgctgcaggtgctgcgagccagggagcagacctttgggggggtgaattacttcttcgacgtagaggtgggccgcaccatatgtaccaagt

SEQ ID NO: 124719 - DNA, 120 bp, Artificial Sequence
  ENSG00000101441_3 (sequence is synthesized)
tgaacagccagaactgcagaagaaacagttgtgctctttcgagatctacgaagttccctgggaggacagaatgtccctggtgaattccaggtgtcaagaagcctaggggtctgtgccagg

SEQ ID NO: 124720 - DNA, 120 bp, Artificial Sequence
  ENSG00000101441_4 (sequence is synthesized)
ccagtcacaccgaccaccacccactcccacccactgtagtgctcccacccctggactggtggcccccaccctgcgggaggcctccccatgtgcctgtgccaagagacagacagagaaggc

SEQ ID NO: 124721 - DNA, 120 bp, Artificial Sequence
  ENSG00000101441_5 (sequence is synthesized)
tgcaggagtcctttgttgctcagcagggcgctctgccctccctccttccttcttgcttctaatagacctggtacatggtacacacacccccacctcctgcaattaaacagtagcatcgcc

SEQ ID NO: 124722 - DNA, 120 bp, Artificial Sequence
  ENSG00000101442_0 (sequence is synthesized)
gctggacgcgcgctccaagatggcggcgaacgtgttcccgttccgcgacgcccgtgccgcaccggacccagtgctggaggccggcccggtggcacacgggccactgccggtaccgctggt

SEQ ID NO: 124723 - DNA, 120 bp, Artificial Sequence
  ENSG00000101442_1 (sequence is synthesized)
gctggacaacgggtcgttccaagtccgcgctggctgggcgtgtcccgggcaggacccaggtcccgagccgcgcctgcagttccgcgcggtgtgcgcccgcggtcgtggcggggcacgggg

SEQ ID NO: 124724 - DNA, 120 bp, Artificial Sequence
  ENSG00000101442_2 (sequence is synthesized)
cgcgtcgggcccgcaggtggggaacgctctgggcagcctggagccactgcgctggatgctgcgctcgcccttcgaccgcaacgtgccggtcaacctggagcttcaggagttgctgctgga

SEQ ID NO: 124725 - DNA, 120 bp, Artificial Sequence
  ENSG00000101442_3 (sequence is synthesized)
ctacagcttccagcacctgggtgtctcctcacagggctgtgttgatcatcccatagttttgacagaagctgtgtgcaacccactgtattcacggcaaatgatgtctgagcttctttttga

SEQ ID NO: 124726 - DNA, 120 bp, Artificial Sequence
  ENSG00000101442_4 (sequence is synthesized)
gtgctacgggattcccaaggttgcctatggaatagacagcctcttcagcttctaccacaataagccaaagaactcgatgtgcagtgggctaatcatttcatctggataccagtgtacgca

SEQ ID NO: 124727 - DNA, 120 bp, Artificial Sequence
  ENSG00000101442_5 (sequence is synthesized)
tgttttacccatcttagaagggagattagatgctaaaaactgcaagcgcatcaatcttggaggaagccaagcagctggttacctccagcgtctcctccagctgaagtaccctgggcacct

SEQ ID NO: 124728 - DNA, 120 bp, Artificial Sequence
  ENSG00000101442_6 (sequence is synthesized)
ggcagccatcaccctcagccgcatggaggagattctgcatgagcacagctacatcgctgaggattatgtggaagaattacacaaatggcggtgtcctgattattatgagaataatgtcca

SEQ ID NO: 124729 - DNA, 120 bp, Artificial Sequence
  ENSG00000101442_7 (sequence is synthesized)
caagatgcagctcccattttccagcaagctcctgggcagcactctgacctctgaggagaaacaagaaaggcggcagcagcaattgcggcggctgcaggagctcaatgcccggcggcggga

SEQ ID NO: 124730 - DNA, 120 bp, Artificial Sequence
  ENSG00000101442_8 (sequence is synthesized)
ggagaagctgcagctggatcaggagcgtctggaccgactgctatatgtgcaggaacttctagaggatggccagatggatcagtttcacaaagctctgatagagctgaatatggactcccc

SEQ ID NO: 124731 - DNA, 120 bp, Artificial Sequence
  ENSG00000101442_9 (sequence is synthesized)
agaagagctgcagtcctacatccagaagctcagtatagcagtggagcaggctaagcagaaaatcctccaagcggaagtcaacctcgaggtggatgtggtagacagcaagccagagacccc

SEQ ID NO: 124732 - DNA, 120 bp, Artificial Sequence
  ENSG00000101442_10 (sequence is synthesized)
ggaagatgtggaaagcatgaatgattttgatcccttgttttcagaggaaacacctggagtggagaagccggtcaccactgttcagcccgtgtttaacttggcagcatatcatcagctatt

SEQ ID NO: 124733 - DNA, 120 bp, Artificial Sequence
  ENSG00000101442_11 (sequence is synthesized)
tgttgggacagaaagaattcgagctccagagattattttccagccatctctcataggagaagaacaggctgggattgcagagactcttcagtacattctggacaggtacccaaaggacat

SEQ ID NO: 124734 - DNA, 120 bp, Artificial Sequence
  ENSG00000101442_12 (sequence is synthesized)
tcaggaaatgctggttcagaacgttttcctcactggcggcaacacgatgtatcctggcatgaaagccagaatggagaaggaactgttggagatgagacccttccggtcttcttttcaggt

SEQ ID NO: 124735 - DNA, 120 bp, Artificial Sequence
  ENSG00000101442_13 (sequence is synthesized)
tcaacttgcctcgaaccctgtgctggatgcctggtacggtgctcgtgactgggccttgaaccacctagatgataatgaagtttggatcaccaggaaagagtatgaagaaaagggaggaga

SEQ ID NO: 124736 - DNA, 120 bp, Artificial Sequence
  ENSG00000101442_14 (sequence is synthesized)
gtacctcaaggagcactgtgcttccaacatctatgtccccatccgcctgccgaagcaggcctcccgctcctcagatgcccaggcatccagcaagggctccgctgctggtggaggtggtgc

SEQ ID NO: 124737 - DNA, 120 bp, Artificial Sequence
  ENSG00000101442_15 (sequence is synthesized)
tggtgagcaggcatagcagaggccctccagagagactgccctgcacgccatgccttgggccacgttggcagtgtgacaggactgtgattgtgctagatgtacctgcccaagtctgctggt

SEQ ID NO: 124738 - DNA, 120 bp, Artificial Sequence
  ENSG00000101442_16 (sequence is synthesized)
cacatttggcagcaaaatggatttctcctggggagaacaaagttaagggacactgagacctgcccttcagaattcggttcacttgggggcttctgtggtagagactaactggccttctga

SEQ ID NO: 124739 - DNA, 120 bp, Artificial Sequence
  ENSG00000101442_17 (sequence is synthesized)
tgtctttgttcaactgtggccagctgtggcatcagcttcctggagcagtaaatgaagacagagtggaggacacaaatgtacaaaatgcacaagactgatttcttaccacattttagtctt

SEQ ID NO: 124740 - DNA, 120 bp, Artificial Sequence
  ENSG00000101442_18 (sequence is synthesized)
tcttgttttaaaaaaaattctttaaaatttatcttgtccgtgtagatactttattcttctggatgtattcagaaattgcatgaatgcccagtgaggggaggtctttcatgcatataaaaa

SEQ ID NO: 124741 - DNA, 120 bp, Artificial Sequence
  ENSG00000101442_19 (sequence is synthesized)
ggtaatgtttattgccgggcacagtggcacgtgcctgttaaggcccagctttgtgggaggctaaggcaggaggatcgctggagcttaggagttcgaggctatcgtgtgctgtgatcgcac

SEQ ID NO: 124742 - DNA, 82 bp, Artificial Sequence
  ENSG00000101442_20 (sequence is synthesized)
gaagacattgtctctaaaaagatacatttttcataaaaggtaatgtttattcaataaaagcagttgcctcaggaaccggaaa

SEQ ID NO: 124743 - DNA, 120 bp, Artificial Sequence
  ENSG00000101443_0 (sequence is synthesized)
acacctgcaccccgcccgggcatagcaccatgcctgcttgtcgcctaggcccgctagccgccgccctcctcctcagcctgctgctgttcggcttcaccctagtctcaggcacaggagcag

SEQ ID NO: 124744 - DNA, 120 bp, Artificial Sequence
  ENSG00000101443_1 (sequence is synthesized)
agaagactggcgtgtgccccgagctccaggctgaccagaactgcacgcaagagtgcgtctcggacagcgaatgcgccgacaacctcaagtgctgcagcgcgggctgtgccaccttctgct

SEQ ID NO: 124745 - DNA, 120 bp, Artificial Sequence
  ENSG00000101443_2 (sequence is synthesized)
acagccagtgtcctggccagatgaaatgctgccgcaatggctgtgggaaggtgtcctgtgtcactcccaatttctgagctccagccaccaccaggctgagcagtgaggagagaaagtttc

SEQ ID NO: 124746 - DNA, 120 bp, Artificial Sequence
  ENSG00000101443_3 (sequence is synthesized)
tgcctggccctgcatctggttccagcccacctgccctcccctttttcgggactctgtattccctcttgggctgaccacagcttctccctttcccaaccaataaagtaaccactttcagca

SEQ ID NO: 124747 - DNA, 120 bp, Artificial Sequence
  ENSG00000101443_4 (sequence is synthesized)
cctgcaccccgcccgggcatagcaccatgcctgcttgtcgcctaggcccgctagccgccgccctcctcctcagcctgctgctgttcggcttcaccctagtctcagataaggagggttcct

SEQ ID NO: 124748 - DNA, 120 bp, Artificial Sequence
  ENSG00000101443_5 (sequence is synthesized)
tccactctaaggattgagtgagcgcgagctggggactctctcaaagataaggagggttcctgcccccaggtgaacattaactttccccagctcggcctctgtcgggaccagtgccaggtg

SEQ ID NO: 124749 - DNA, 120 bp, Artificial Sequence
  ENSG00000101443_6 (sequence is synthesized)
agatccctccccttcttttaggattattgtgagaattagaagagttaatatatgttaggggcttgatacctggcatgtaataagagctaattaagtgttcactgttataatttctcataa

SEQ ID NO: 124750 - DNA, 120 bp, Artificial Sequence
  ENSG00000101443_7 (sequence is synthesized)
ctacagagtagtttgatatttcagggagaaataatatatgtttgtttcccactgctttcacaacaaccctatgttgtaattagcactgttccactggcacctaaagacacggaggctctg

SEQ ID NO: 124751 - DNA, 120 bp, Artificial Sequence
  ENSG00000101443_8 (sequence is synthesized)
ggagatttctggccctaggccacgaaggcccacttgggactcaagctgaggtcctgtgattccatttgggagcaggaggagggatttgcaggtgatcttcctgggcctcctgagagcagc

SEQ ID NO: 124752 - DNA, 120 bp, Artificial Sequence
  ENSG00000101443_9 (sequence is synthesized)
ctctcaaaggtgcttgctggagctgcagtctccaccaggctatcagaacagggggtggcttaaacagcatggaatctcagctttccgttctccagaggaaaatgctgaggattagaggca

SEQ ID NO: 124753 - DNA, 120 bp, Artificial Sequence
  ENSG00000101444_0 (sequence is synthesized)
ccctgctcggcgctgcccgcccagttcctgttcccagactgaggcccagcccccttcgcccgtttccatcacgagtgccgccagcatgtctgacaaactgccctacaaagtcgccgacat

SEQ ID NO: 124754 - DNA, 120 bp, Artificial Sequence
  ENSG00000101444_1 (sequence is synthesized)
cggcctggctgcctggggacgcaaggccctggacattgctgagaacgagatgccgggcctgatgcgtatgcgggagcggtactcggcctccaagccactgaagggcgcccgcatcgctgg

SEQ ID NO: 124755 - DNA, 120 bp, Artificial Sequence
  ENSG00000101444_2 (sequence is synthesized)
ctgcctgcacatgaccgtggagacggccgtcctcattgagaccctcgtcaccctgggtgctgaggtgcagtggtccagctgcaacatcttctccacccaggaccatgcggcggctgccat

SEQ ID NO: 124756 - DNA, 120 bp, Artificial Sequence
  ENSG00000101444_3 (sequence is synthesized)
tgccaaggctggcattccggtgtatgcctggaagggcgaaacggacgaggagtacctgtggtgcattgagcagaccctgtacttcaaggacgggcccctcaacatgattctggacgacgg

SEQ ID NO: 124757 - DNA, 120 bp, Artificial Sequence
  ENSG00000101444_4 (sequence is synthesized)
gggcgacctcaccaacctcatccacaccaagtacccgcagcttctgccaggcatccgaggcatctctgaggagaccacgactggggtccacaacctctacaagatgatggccaatgggat

SEQ ID NO: 124758 - DNA, 120 bp, Artificial Sequence
  ENSG00000101444_5 (sequence is synthesized)
cctcaaggtgcctgccatcaatgtcaatgactccgtcaccaagagcaagtttgacaacctctatggctgccgggagtccctcatagatggcatcaagcgggccacagatgtgatgattgc

SEQ ID NO: 124759 - DNA, 120 bp, Artificial Sequence
  ENSG00000101444_6 (sequence is synthesized)
cggcaaggtagcggtggtagcaggctatggtgatgtgggcaagggctgtgcccaggccctgcggggtttcggagcccgcgtcatcatcaccgagattgaccccatcaacgcactgcaggc

SEQ ID NO: 124760 - DNA, 120 bp, Artificial Sequence
  ENSG00000101444_7 (sequence is synthesized)
tgccatggagggctatgaggtgaccaccatggatgaggcctgtcaggagggcaacatctttgtcaccaccacaggctgtattgacatcatccttggccggcactttgagcagatgaagga

SEQ ID NO: 124761 - DNA, 120 bp, Artificial Sequence
  ENSG00000101444_8 (sequence is synthesized)
ggttgaagaatgggcgccgcatcatcctgctggccgagggtcggctggtcaacctgggttgtgccatgggccaccccagcttcgtgatgagtaactccttcaccaaccaggtgatggcgc

SEQ ID NO: 124762 - DNA, 120 bp, Artificial Sequence
  ENSG00000101444_9 (sequence is synthesized)
agatcgagctgtggacccatccagacaagtaccccgttggggttcatttcctgcccaagaagctggatgaggcagtggctgaagcccacctgggcaagctgaatgtgaagttgaccaagc

SEQ ID NO: 124763 - DNA, 120 bp, Artificial Sequence
  ENSG00000101444_10 (sequence is synthesized)
taactgagaagcaagcccagtacctgggcatgtcctgtgatggccccttcaagccggatcactaccgctactgagagccaggtctgcgtttcaccctccagctgctgtccttgcccaggc

SEQ ID NO: 124764 - DNA, 120 bp, Artificial Sequence
  ENSG00000101444_11 (sequence is synthesized)
cccacctctcctccctaagagctaatggcaccaactttgtgattggtttgtcagtgtcccccatcgactctctggggctgatcacttagtttttggcctctgctgcagccgtcatactgt

SEQ ID NO: 124765 - DNA, 120 bp, Artificial Sequence
  ENSG00000101444_12 (sequence is synthesized)
tccaaatgtggcagcgggaacagagtaccctcttcaagccccggtcatgatggaggtcccagccacagggaaccatgagctcagtggtcttggaacagctcactaagtcagtccttcctt

SEQ ID NO: 124766 - DNA, 120 bp, Artificial Sequence
  ENSG00000101444_13 (sequence is synthesized)
agcctggaagtcagtagtggagtcacaaagcccatgtgttttgccatctaggccttcacctggtctgtggacttatacctgtgtgcttggtttacaggtccagtggttcttcagcccatg

SEQ ID NO: 124767 - DNA, 120 bp, Artificial Sequence
  ENSG00000101444_14 (sequence is synthesized)
acagatgagaaggggctatattgaagggcaaagaggaactgttgtttgaattttcctgagagcctggcttagtgctgggccttctcttaaacctcattacaatgaggttagtacttttag

SEQ ID NO: 124768 - DNA, 120 bp, Artificial Sequence
  ENSG00000101444_15 (sequence is synthesized)
tccctgttttacaggggttagaatagactgttaaggggcaactgagaaagaacagagaagtgacagctaggggttgagaggggccagaaaaacatgaatgcaggcagatttcgtgaaatc

SEQ ID NO: 124769 - DNA, 120 bp, Artificial Sequence
  ENSG00000101444_16 (sequence is synthesized)
tgccaccactttataaccagatggttcctttcacaaccctgggtcaaaaagagaataatttggcctataatgttaaaagaaagcaggaaggtgggtaaataaaaatcttggtgcctggaa

SEQ ID NO: 124770 - DNA, 120 bp, Artificial Sequence
  ENSG00000101444_17 (sequence is synthesized)
ctggagggaggggcgtggatacagcgggaaaggagagacccctagcggggtggacaagaagggaggaactccacagaactgcttaatccggctccatccccatcagcgggctttctcagc

SEQ ID NO: 124771 - DNA, 120 bp, Artificial Sequence
  ENSG00000101444_18 (sequence is synthesized)
gcctgcacccctctctatcccatctcgaagcctccagttaatccagagtgagacgcaggaccgccgggaggcgagcggggatgctgaagctagggcaggctaaagccccgcggccaaagg

SEQ ID NO: 124772 - DNA, 120 bp, Artificial Sequence
  ENSG00000101444_19 (sequence is synthesized)
tgctgtatatctggtgatttacgtgtgtttacacaataatcttcatagaggtggacgtaatcccgttatatagagcatgaaactgaggcccttgggaggtgacttgcaaagattctgttg

SEQ ID NO: 124773 - DNA, 120 bp, Artificial Sequence
  ENSG00000101444_20 (sequence is synthesized)
tctgtccctgacaatctcccacggtcttgggctgcctgacaggcactttgagcagatgaaggatgatgccattgtgtgtaacattggacactttgacgtggagatcgatgtcaagtggct

SEQ ID NO: 124774 - DNA, 120 bp, Artificial Sequence
  ENSG00000101444_21 (sequence is synthesized)
gggaagaagacgactgtgccagggtggggaccttccaggtgtggagctgaccgcgggcctggaggggttcctccctctcactcggtttcctccgtttcccagtgctgccaccccttgtgg

SEQ ID NO: 124775 - DNA, 120 bp, Artificial Sequence
  ENSG00000101444_22 (sequence is synthesized)
ttctgagacgtggaatttgtgaagggattctgccctctttgcttcactgactgctagagcaacagacttccttacatatcagaaagggagaggagtcaccgccacaaaatcctagcccag

SEQ ID NO: 124776 - DNA, 120 bp, Artificial Sequence
  ENSG00000101444_23 (sequence is synthesized)
cgaccccacaggaaagagctgctttgtcccatcatcatctaaaatcctgtggaagttgtttattgacccaggtcaagccgtgtaaccaggaagagcaagatcttatgattgggaactaca

SEQ ID NO: 124777 - DNA, 120 bp, Artificial Sequence
  ENSG00000101444_24 (sequence is synthesized)
tgatgaagcggaggggaagttcattaaaggaaggatgtggatctctttccaaagaactggggagggctacggggcagaaaaagaggttcactgcctagggtatggcggtctaaaggactg

SEQ ID NO: 124778 - DNA, 120 bp, Artificial Sequence
  ENSG00000101444_25 (sequence is synthesized)
aggaaggaccaagtctaacgagaatggagttttcacaggctgggcacatgtctgcttggacttggggaggggagtggttagatctgacccagtgattaggacattcaagattgcttctaa

SEQ ID NO: 124779 - DNA, 120 bp, Artificial Sequence
  ENSG00000101444_26 (sequence is synthesized)
ccaaccacaggtggacaggagggggtggcacagcactccttcacagactgaccagggctgaatgggcatgatccccattcctcagccttggcaccgtggctttcttcttttttttttttc

SEQ ID NO: 124780 - DNA, 120 bp, Artificial Sequence
  ENSG00000101444_27 (sequence is synthesized)
agaaatctcgaagaaaatttggagtggtttgaaaaatcctgctgtcccaccgattgaagtgtaatacagggatagttaacgtttacttagtgtttcctgtgggatcggcactgccttcta

SEQ ID NO: 124781 - DNA, 120 bp, Artificial Sequence
  ENSG00000101444_28 (sequence is synthesized)
gctttattctagtctcatggctctatagggaaactgttctcattttatgatgagaatcctgaggcagaggtaacttgccctcagtcttacagctggtggtgatggagcaagattggaacg

SEQ ID NO: 124782 - DNA, 120 bp, Artificial Sequence
  ENSG00000101445_0 (sequence is synthesized)
agagccagctctgtcgccgctggagcagctgcggctcggggacccacagacacagccggggtcgggagccgcccggggcagggctcgggagagcgggccacaccatgaggccccagcccc

SEQ ID NO: 124783 - DNA, 120 bp, Artificial Sequence
  ENSG00000101445_1 (sequence is synthesized)
accagaggccccgcgctgccctggcccccggtgcaccgtgctagcccccagccagggcgttggggagggcggtggccatggccagtcacgtggacctgctgacggagctgcagctgctgg

SEQ ID NO: 124784 - DNA, 120 bp, Artificial Sequence
  ENSG00000101445_2 (sequence is synthesized)
agaaggtgcccacgctggagcggctgcgggctgcccagaagcgccgggcccagcagctgaagaaatgggcacagtacgagcaggacttgcagcaccgcaagcgaaagcatgagcggaagc

SEQ ID NO: 124785 - DNA, 120 bp, Artificial Sequence
  ENSG00000101445_3 (sequence is synthesized)
gcagcacgggcggccgccgcaagaaagtgtccttcgaggccagcgtggccctgctggaggcctcgctgaggaacgacgccgaggaagtacgctacttcctgaagaataaggtcagccctg

SEQ ID NO: 124786 - DNA, 120 bp, Artificial Sequence
  ENSG00000101445_4 (sequence is synthesized)
atttgtgcaatgaggacggactcacagccctacaccagtgctgcatcgacaactttgaggaaattgtgaagctgctcctctcccatggtgccaatgtgaacgccaaggacaacgagctgt

SEQ ID NO: 124787 - DNA, 120 bp, Artificial Sequence
  ENSG00000101445_5 (sequence is synthesized)
ggacacctctccatgctgcagccacctgcggccacatcaacctggtgaagatcctcgttcagtatggggccgacttgcttgctgtcaactcggatgggaacatgccatatgacctctgcg

SEQ ID NO: 124788 - DNA, 120 bp, Artificial Sequence
  ENSG00000101445_6 (sequence is synthesized)
aggatgaacccaccctggatgtcatcgagacctgcatggcataccagggcatcacccaagagaaaatcaacgagatgcgggtggctcctgagcagcagatgattgcggacatccactgca

SEQ ID NO: 124789 - DNA, 120 bp, Artificial Sequence
  ENSG00000101445_7 (sequence is synthesized)
tgatcgcagcgggccaggacctggactggatagatgcccagggtgccacactgctgcacatagctggagccaatggatacctgcgggcagctgagctcctcctggaccatggagtgcgtg

SEQ ID NO: 124790 - DNA, 120 bp, Artificial Sequence
  ENSG00000101445_8 (sequence is synthesized)
tggatgtgaaggactgggatggctgggagcccctgcatgcagctgccttctggggacagatgcagatggcagagctattggtgtcccatggagctagtctcagtgcaaggacatccatgg

SEQ ID NO: 124791 - DNA, 120 bp, Artificial Sequence
  ENSG00000101445_9 (sequence is synthesized)
atgagatgccaatagacctgtgcgaggaggaagagttcaaggtcctgctgctggagctaaaacacaagcatgatgtgatcatgaagtcacagctgaggcacaagtcatccttgagccgga

SEQ ID NO: 124792 - DNA, 120 bp, Artificial Sequence
  ENSG00000101445_10 (sequence is synthesized)
ggacctccagcgcaggcagccgtgggaaggtggtgcggcgagccagcctgtcggacaggaccaacctgtataggaaggagtatgagggagaggccatcctgtggcagcggagtgcagctg

SEQ ID NO: 124793 - DNA, 120 bp, Artificial Sequence
  ENSG00000101445_11 (sequence is synthesized)
aggatcagcggacctccacctacaacggggacatcagggagaccaggacagaccaagagaataaggaccctaaccccaggctggagaagcccgtgctactctccgaatttcctaccaaga

SEQ ID NO: 124794 - DNA, 120 bp, Artificial Sequence
  ENSG00000101445_12 (sequence is synthesized)
tcccacgaggtgaactggacatgcctgttgagaatggcctccgggctccggtcagtgcctaccagtatgcgctggccaacggggatgtctggaaggtgcatgaggtgcctgactacagca

SEQ ID NO: 124795 - DNA, 120 bp, Artificial Sequence
  ENSG00000101445_13 (sequence is synthesized)
tggcctatggcaaccctggcgtggccgacgccaccccgccctggagcagctacaaggaacagagccctcagacgcttctggagctgaagcggcagcgggctgcagccaagctgctcagcc

SEQ ID NO: 124796 - DNA, 120 bp, Artificial Sequence
  ENSG00000101445_14 (sequence is synthesized)
accccttccttagcacacacctgggcagcagcatggccaggacgggcgagagtagcagtgaaggcaaggcccccttgatcggaggcagaacttcaccgtacagcagcaatgggacctcgg

SEQ ID NO: 124797 - DNA, 120 bp, Artificial Sequence
  ENSG00000101445_15 (sequence is synthesized)
tatattacacggtcaccagcggagatcccccactcttaaagttcaaggcccccatagaggagatggaggagaaggtgcatggctgttgccgtatctcctagtctccgtgtgatggaggag

SEQ ID NO: 124798 - DNA, 120 bp, Artificial Sequence
  ENSG00000101445_16 (sequence is synthesized)
ggagatgcctggggaggggctcctggaatccaggccagcccaacagccctggctggggaggtgtcagggcagctggggagaggtgggctctgcttttcagaggaactcagaccccagccc

SEQ ID NO: 124799 - DNA, 120 bp, Artificial Sequence
  ENSG00000101445_17 (sequence is synthesized)
tcagctggctgcccatagcatcccatgtcccacgtcccgtggttctgcttcctgctgcatcgtctgccatctgacacaaggcctgtcgtggcctcctggttcactctgctgtctgatctt

SEQ ID NO: 124800 - DNA, 120 bp, Artificial Sequence
  ENSG00000101445_18 (sequence is synthesized)
gggagggtgggcttgagatcccagctctattcttggtataaaggcttctccggatcagtacatgcatgtcacattaacacacacacacacacacatatacacacacacacaagctcgatc

SEQ ID NO: 124801 - DNA, 120 bp, Artificial Sequence
  ENSG00000101445_19 (sequence is synthesized)
agtgtgtgtaggaatgacatacctgggctcaggggaagcaagggggcttagaatttgtggggtattcccaaaaggatggaagttaagactcagagtctcattaccactgccaatgtggtt

SEQ ID NO: 124802 - DNA, 120 bp, Artificial Sequence
  ENSG00000101445_20 (sequence is synthesized)
ttagcaggggaggggacctgctaagctgagacccatagtcctgctcagagttatcccaaagtctgagccaccagccacacctgacaggggtgagaagtcctcgctgtgttcagagggagc

SEQ ID NO: 124803 - DNA, 120 bp, Artificial Sequence
  ENSG00000101445_21 (sequence is synthesized)
caggaatctacatgggtagatgagatagacacagacctgctccccgcagccttgttgagagccacacttctgcccatgccaggagccagctgtgtgaccatccaggggtggagggggaaa

SEQ ID NO: 124804 - DNA, 120 bp, Artificial Sequence
  ENSG00000101445_22 (sequence is synthesized)
accaggcaatttcgttcctggaatcaaccaaatcatgttttcctcttggatggaagtgtcaaaggcagaagggtgtgggagggggacaaggtcagtatttaccaaagtgtatctgatttt

SEQ ID NO: 124805 - DNA, 120 bp, Artificial Sequence
  ENSG00000101445_23 (sequence is synthesized)
aaaaattcctttagtctgtaaaactcctagagggagggaggtaactgaattcacttctttttgtggatcgtatcaaggtcactgggttttactggctggtgctgggaaaatgaagctaag

SEQ ID NO: 124806 - DNA, 120 bp, Artificial Sequence
  ENSG00000101445_24 (sequence is synthesized)
tgaggagcttccattggaatgcttttccagggagagaggccagttaatttaaaaaaaacagtcgctagttaacagcgacagagcccagcaccctggggtctttgtgaatatccagactgt

SEQ ID NO: 124807 - DNA, 120 bp, Artificial Sequence
  ENSG00000101445_25 (sequence is synthesized)
ttcagcccagcccatctcagccaaccctccttagactgagctgtcagagcaagcaattaggggccagcctgcctccacctcccacccccttccacctccatcagtcatgtgtgcagagtc

SEQ ID NO: 124808 - DNA, 120 bp, Artificial Sequence
  ENSG00000101445_26 (sequence is synthesized)
ccagcttttgcctttttggggatgcttggtgagacagatttgccagtcagcccttttgagttcccgcctcacccaggggctcccagcctgcacttgcaggagtggtgatgccccaagtct

SEQ ID NO: 124809 - DNA, 120 bp, Artificial Sequence
  ENSG00000101445_27 (sequence is synthesized)
gcgaatccagggtgcacgtggtcaatatcccctcctgcattcaggagagccatggtagggctagagttgggtcttgcccagccctgcagtttcatagtcccagccttcctggtgctgggg

SEQ ID NO: 124810 - DNA, 120 bp, Artificial Sequence
  ENSG00000101445_28 (sequence is synthesized)
agggaggactgtgaatggctgttctcccctcactgctgagtctcccaggaccccctttggagatgcccatggcatgggcactgcccacaggctcagccagaacctcttggtgtacccgat

SEQ ID NO: 124811 - DNA, 120 bp, Artificial Sequence
  ENSG00000101445_29 (sequence is synthesized)
aagctgcaggttatcccttgctctgtgcgccttttatttgtccttaaactacctccttagagctctgaaggggtctcctagttccagattttaatttggggaacagatctgggttctttt

SEQ ID NO: 124812 - DNA, 120 bp, Artificial Sequence
  ENSG00000101445_30 (sequence is synthesized)
taaccctcttctttctcagtctatgagaaacttgccctgaggggcacctgggctaggggcttgggactggaagaccatccccgccttgtgccacaactttggtcatgggatctgctcttt

SEQ ID NO: 124813 - DNA, 120 bp, Artificial Sequence
  ENSG00000101445_31 (sequence is synthesized)
gtcattcttagccccctactgtggcccccatagccccataacccagagagggagctggacttcagggagcctgagtgatgctttcccaggagcagggcagctggctggaccagaaagtag

SEQ ID NO: 124814 - DNA, 120 bp, Artificial Sequence
  ENSG00000101445_32 (sequence is synthesized)
agggcccatgggagtgactgcacccttggtggctgctggaaggggagaggttctcagcatcaggccacctccaccccaatgccaggatagatgtattctagagtaggggtggaggcggcc

SEQ ID NO: 124815 - DNA, 120 bp, Artificial Sequence
  ENSG00000101445_33 (sequence is synthesized)
caggaggctgaagacaggtgcacagatgcttcccacgaccttgccatttggggtgggctcttcaacatctcaggctgtggctggaacaggacaggatgatctaaaacacacgtaccattg

SEQ ID NO: 124816 - DNA, 120 bp, Artificial Sequence
  ENSG00000101445_34 (sequence is synthesized)
gctgtaaaacagtatgagcccagactgacgctgaaatccctcatgagccaaccttagctacaaggtagggagttctgagggaagccgcgtgctcctcaggagagagctgtttaggttttc

SEQ ID NO: 124817 - DNA, 120 bp, Artificial Sequence
  ENSG00000101445_35 (sequence is synthesized)
cgatctttttgctcaggggccaaacactgaaggcacgtactgcccaacccactgagcgcctgaggccattccctccttttccgcatgcctcctgcctcctgggctattcctctccaccca

SEQ ID NO: 124818 - DNA, 120 bp, Artificial Sequence
  ENSG00000101445_36 (sequence is synthesized)
gaaggctgggaatcccagctgattccctgacaggagccgacttcacacacaggtgactctcaggcattggctcatgttttcagccagggataaaccatcccttcttggggctttaagtcc

SEQ ID NO: 124819 - DNA, 120 bp, Artificial Sequence
  ENSG00000101445_37 (sequence is synthesized)
ctggggagctttccctgtaggtctcctgggtgttgagagacaagttggagaccaacctccaatgaatgagccgcggtcattcattaattcactcacgtaatttactgagtagctgcaaca

SEQ ID NO: 124820 - DNA, 120 bp, Artificial Sequence
  ENSG00000101445_38 (sequence is synthesized)
tgccagcctctacgttaggttctgcggataaaggaggaataagacagagtcaggagaactgttccttgtggtttccgtcccttggggaccacaggcatcagcagtcccattcaagtcacc

SEQ ID NO: 124821 - DNA, 120 bp, Artificial Sequence
  ENSG00000101445_39 (sequence is synthesized)
tgaggcaaagtgtctgcatcttcgtccagcgaccctttgcttttcggctcctagaatccttagagtctgaattcctttagctgggaacagctgtcatggtcacccctggataacatttgc

SEQ ID NO: 124822 - DNA, 120 bp, Artificial Sequence
  ENSG00000101445_40 (sequence is synthesized)
caccaagtatagatgctggatcttgggttccaggcagacatcatccaggtccatctggaactttcagtgatagctgccttcagccagcatctttgggggactctataatagcagcttgag

SEQ ID NO: 124823 - DNA, 120 bp, Artificial Sequence
  ENSG00000101445_41 (sequence is synthesized)
atcagtgtctagaagactgttctgcaatttgctgccaaatgcatctcaggtttttaaagtcattgtttcttgctcatggtggctcatttattacatagtcccctcaccccactaatggat

SEQ ID NO: 124824 - DNA, 120 bp, Artificial Sequence
  ENSG00000101445_42 (sequence is synthesized)
aatgggaggaaaagttgctgcttccttcagcatcaaagcctttccttgggaatctgcctccctccatggcaggggtggattcgggagctgggagtaaccaggcaaagtcaaccagatgcc

SEQ ID NO: 124825 - DNA, 120 bp, Artificial Sequence
  ENSG00000101445_43 (sequence is synthesized)
tagctcctgctgagacccaggtcctatggcagctcctcattagattaaaggagaccacttccaaagcaggtgctgcatggctcaccatcatatgccccaaacaactgaaagttggcggtt

SEQ ID NO: 124826 - DNA, 120 bp, Artificial Sequence
  ENSG00000101445_44 (sequence is synthesized)
atcaccagactgtgagtttctggcaagtagcttggggaagctgaataaactctaggcccagggctactaaagacttcaggatagaattctccatcaaatatacagcataagtaaaactgc

SEQ ID NO: 124827 - DNA, 120 bp, Artificial Sequence
  ENSG00000101445_45 (sequence is synthesized)
tctgcactgtttaatccatttccaaggggcttagaaaagctaacaagggtgtgtcccctgtcctgccccaccggtttgctggctttgtaataacataagaccattgtggttgttggtgtc

SEQ ID NO: 124828 - DNA, 120 bp, Artificial Sequence
  ENSG00000101445_46 (sequence is synthesized)
agataccttcccatcctgagctctctcacctacctgctctctctcctagagcaggatactggggtacttttaagaagggtgctccttttaagatgcccagaaaagctgtatttaactctt

SEQ ID NO: 124829 - DNA, 120 bp, Artificial Sequence
  ENSG00000101445_47 (sequence is synthesized)
gctatttgtaacttggggatggtctcccctgccccagggcacataagagcaaaggctccaatggtcagtggatgactctgcaaaagtgaccccctgtgccagaagctatagccctctccc

SEQ ID NO: 124830 - DNA, 120 bp, Artificial Sequence
  ENSG00000101445_48 (sequence is synthesized)
caacaggtctctcttgttggccagagggcctgcttcccatgggcattgcaagtgccaccgtgcggggcctggctctgcacacccaggaaaagtctgcagacccccagccctccgcaataa

SEQ ID NO: 124831 - DNA, 120 bp, Artificial Sequence
  ENSG00000101445_49 (sequence is synthesized)
ttcaccagaccagaagccactggtgtacagagaacacttaaaaaaatgtattttatgtgaaaaaaaattaaaactctgtatactgtatcagcagctttgtgtaaaaatggcaatcaagag

SEQ ID NO: 124832 - DNA, 120 bp, Artificial Sequence
  ENSG00000101445_50 (sequence is synthesized)
agtctaatatatttaaaacttttttaaaaaaaatcttcgcagatctttgatatcgtactgaggtaacttccacgtagccccttgccacgcggcaccggtgggccttgggtccaaaactgt

SEQ ID NO: 124833 - DNA, 120 bp, Artificial Sequence
  ENSG00000101445_51 (sequence is synthesized)
ggctcagccacatcccaaagggggcacatgtccctggagttgcttccagctgccaaggcctgtgacagaattcgctgttaagagtttttaattaaaattattaaattccttttaataaca

SEQ ID NO: 124834 - DNA, 120 bp, Artificial Sequence
  ENSG00000101445_52 (sequence is synthesized)
tgtccttcgaggccagcgtggccctgctggaggcctcgctgaggaacgacgccgaggaaggaatgaatggagaatccatgatgtaaccacagcccccttccctgggcttgttcagaggcg

SEQ ID NO: 124835 - DNA, 120 bp, Artificial Sequence
  ENSG00000101446_0 (sequence is synthesized)
ggctgagtggcaccatgcagcttcaggcctctctctcgtttctcctgattctcactctctgcctagagcttcgatcagaactagcacgagacactatcaaggatctcctcccaaatgtat

SEQ ID NO: 124836 - DNA, 120 bp, Artificial Sequence
  ENSG00000101446_1 (sequence is synthesized)
acaactttttgaggaaagaaaaatgtgagaaattctgcaagttcacctgattttctaacaagaacacagccctccatggattcgggattgctctgagggccatagaaggcatttgcgtgt

SEQ ID NO: 124837 - DNA, 120 bp, Artificial Sequence
  ENSG00000101446_2 (sequence is synthesized)
gtgtgtgtgtgtgtgtgtgaacaagaggttcattcctctacccccacatttattctccctgatgtgctcctacaagtgcttcatctctgtgcctgaaattctataaatgttgcaatcatg

SEQ ID NO: 124838 - DNA, 120 bp, Artificial Sequence
  ENSG00000101447_0 (sequence is synthesized)
gagggctgtcgagtccgagcgccgccatggctctgctgtccgagggcctggacgaggtgcccgccgcctgcctgtcgccgtgcgggccgcccaacccgaccgagctgttcagcgagtcac

SEQ ID NO: 124839 - DNA, 120 bp, Artificial Sequence
  ENSG00000101447_1 (sequence is synthesized)
ggcgcctggctctggaggagctggtggcgggcggccccgaagccttcgcggccttcctgcgacgcgagcgcctggctcgtttcctgaaccccgatgaggtgcacgccattctgcgcgcgg

SEQ ID NO: 124840 - DNA, 120 bp, Artificial Sequence
  ENSG00000101447_2 (sequence is synthesized)
cggagaggccgggagaggagggcgcggcggcggcggcggcggccgaggactcgttcggctcctcgcacgactgctcttcgggcacctacttccccgagcagtcggacctggagccaccgc

SEQ ID NO: 124841 - DNA, 120 bp, Artificial Sequence
  ENSG00000101447_3 (sequence is synthesized)
tgttggagcttggctggcccgccttctaccagggcgcctaccgcggcgccacgcgtgtcgagacgcacttccagccccgcggcgctggcgaaggtggcccctacggctgcaaggacgctc

SEQ ID NO: 124842 - DNA, 120 bp, Artificial Sequence
  ENSG00000101447_4 (sequence is synthesized)
tgcgccagcagctccgctcggcgcgagaggtgattgcagtggtcatggacgtgttcacagacatcgacatcttcagagacctgcaagaaatatgcaggaaacagggagttgctgtgtata

SEQ ID NO: 124843 - DNA, 120 bp, Artificial Sequence
  ENSG00000101447_5 (sequence is synthesized)
tccttctggaccaggctctcctctctcaatttctggatatgtgcatggatctgaaagttcatcctgaacaggaaaagttaatgacagttcggactatcacaggaaatatctactatgcaa

SEQ ID NO: 124844 - DNA, 120 bp, Artificial Sequence
  ENSG00000101447_6 (sequence is synthesized)
ggtcaggaactaagattattgggaaggttcacgaaaagttcacgttgattgatggcatccgcgtggcaacaggctcctacagttttacatggacggatggcaaattaaacagcagtaact

SEQ ID NO: 124845 - DNA, 120 bp, Artificial Sequence
  ENSG00000101447_7 (sequence is synthesized)
tggtaattctgtctggccaagtggttgaacactttgatctggagttccgaatcctgtatgcccagtccaagcccatcagccccaaactcctgtctcacttccagagcagcaacaagtttg

SEQ ID NO: 124846 - DNA, 120 bp, Artificial Sequence
  ENSG00000101447_8 (sequence is synthesized)
atcacctcaccaaccgaaaaccacagtccaaggagctcaccctgggcaacctgctgcggatgcggctggctaggctgtcaagtactcccaggaaggcggacctggacccagagatgcccg

SEQ ID NO: 124847 - DNA, 120 bp, Artificial Sequence
  ENSG00000101447_9 (sequence is synthesized)
agagcagaaaggccattgacgctgccactcaaacagagccaggagaggagatgccagggctgagtgtgagtgaggtgggaacacaaaccagcatcaccacagcatgtgctggtacccaga

SEQ ID NO: 124848 - DNA, 120 bp, Artificial Sequence
  ENSG00000101447_10 (sequence is synthesized)
ctgcagtcatcaccaggatagcaagctctcaaaccacgatttggtccagatcgaccactactcagactgacatggatgagaacattctctttcctcgaggaactcaatctacagaagggt

SEQ ID NO: 124849 - DNA, 120 bp, Artificial Sequence
  ENSG00000101447_11 (sequence is synthesized)
caccagtctcaaaaatgtctgtatcgagatcttccagtttgaagtcttcctcctctgtgtcttcccaaggctctgtggcaagctccactggttctcccgcttccatcagaaccactgact

SEQ ID NO: 124850 - DNA, 120 bp, Artificial Sequence
  ENSG00000101447_12 (sequence is synthesized)
tccacaatcctggctatcccaagtacctgggcaccccccacctggaactgtacttgagtgactcacttagaaacttgaacaaagagcggcaattccacttcgctggtatcaggtcccggc

SEQ ID NO: 124851 - DNA, 120 bp, Artificial Sequence
  ENSG00000101447_13 (sequence is synthesized)
tcaaccacatgctggctatgctgtcaaggagaacactctttactgaaaaccaccttggccttcattctggcaatttcagcagagttaatttgcttgctgttagagatgtagcactttatc

SEQ ID NO: 124852 - DNA, 120 bp, Artificial Sequence
  ENSG00000101447_14 (sequence is synthesized)
cttcctatcagtaactgctccgtgttcagactcctggtttcttccaggcttacagtggacatcatcagcttcctgctttaaaaaatatcttatgtccctaattgcctttcttttacctga

SEQ ID NO: 124853 - DNA, 120 bp, Artificial Sequence
  ENSG00000101447_15 (sequence is synthesized)
ctttgtcacctttgttgtctttgaattctttaggctgcatattattttacatgctttgttttgtcatgtatataccaggtattggttttatggtttaaacactatggatacaggggtttg

SEQ ID NO: 124854 - DNA, 120 bp, Artificial Sequence
  ENSG00000101447_16 (sequence is synthesized)
ttttgcacaattttaatagtcatgcactacataatgatgttttggtcaatgacagaccacgtatatgttggcagtctcataagattataatactgtatttttactataccttttctgtgt

SEQ ID NO: 124855 - DNA, 120 bp, Artificial Sequence
  ENSG00000101447_17 (sequence is synthesized)
ttagatacaaataccattatgttacagttgcctacagtattcagtgcagtaacatgatgtacaggtttgtagcctgttttgcatttttcttaggttgtatgctcttctgttttaaaggtt

SEQ ID NO: 124856 - DNA, 120 bp, Artificial Sequence
  ENSG00000101447_18 (sequence is synthesized)
tgaatcaccagcatttttgtgatcaaaatcctatttagaaaaaataaaactactttctgtttatctctttagaatatctgtgttcttagcattaaataaatataaacttgtgcttctgta

SEQ ID NO: 124857 - DNA, 120 bp, Artificial Sequence
  ENSG00000101448_0 (sequence is synthesized)
tatccaaggtgcagcagctgagcattccaaattcgggaaccaccagaaaggctggcctctcttcaacatgggatcttctggacttttgagcctcctggtgctattcgtcctcttagcgaa

SEQ ID NO: 124858 - DNA, 120 bp, Artificial Sequence
  ENSG00000101448_1 (sequence is synthesized)
tgtccagggacctggtctgactgattggttatttcccaggagatgtcccaaaatcagagaagaatgtgaattccaagaaagggatgtgtgtacaaaggacagacaatgccaggacaacaa

SEQ ID NO: 124859 - DNA, 120 bp, Artificial Sequence
  ENSG00000101448_2 (sequence is synthesized)
gaagtgttgtgtcttcagctgcggaaaaaaatgtttagatctcaaacaagatgtatgcgaaatgccaaaagaaactggcccctgcctggcttattttcttcattggtggtatgacaagaa

SEQ ID NO: 124860 - DNA, 120 bp, Artificial Sequence
  ENSG00000101448_3 (sequence is synthesized)
agataatacttgctccatgtttgtctatggtggctgccagggaaacaataacaacttccaatccaaagccaactgcctgaacacctgcaagaataaacgctttccctgattggataagga

SEQ ID NO: 124861 - DNA, 120 bp, Artificial Sequence
  ENSG00000101448_4 (sequence is synthesized)
tgcactggaagaactgccagaatgtggctcatgctctgagtactgttcctgtacctgacggatgctccagactggcttccagtttcactctcagcattccaagatcttagcccttcccag

SEQ ID NO: 124862 - DNA, 120 bp, Artificial Sequence
  ENSG00000101448_5 (sequence is synthesized)
aacagaacgcttgcatctacctcctcttcctccatctttggctcttttgatgcacaatatccatccgttttgatttcatctttatgtcccctttatctccaacttctagaactcccagtt

SEQ ID NO: 124863 - DNA, 120 bp, Artificial Sequence
  ENSG00000101448_6 (sequence is synthesized)
tatacctgtgtcactctcaattttttccagtaaagtacttgatgtagtcctgtgccttgaggctgagtgattgacatctttttggcacattacactttgcagagtaagggatcattgagg

SEQ ID NO: 124864 - DNA, 120 bp, Artificial Sequence
  ENSG00000101448_7 (sequence is synthesized)
cttctggtgacatcattcaagggagtgaagacaatcagaactttgagagttcagagttccaggaatattgttattgttatcttcctctgtttctacaaaagattgtaaaaccctttttag

SEQ ID NO: 124865 - DNA, 120 bp, Artificial Sequence
  ENSG00000101448_8 (sequence is synthesized)
tgcaggtagtttgtttgagagatttcccaggacatacaagatggggagtgagatgagtaattcagggaagagaagggaagagagaagagtctattatgagctggttactactgtggctca

SEQ ID NO: 124866 - DNA, 120 bp, Artificial Sequence
  ENSG00000101448_9 (sequence is synthesized)
atcctattggggaccttttaaagaatcatgtaaaacaggcttacaaattttctttttaaaaatattttattttattttacgttccgggatacatgtgcaggacctgcaggtttgttacat

SEQ ID NO: 124867 - DNA, 77 bp, Artificial Sequence
  ENSG00000101448_10 (sequence is synthesized)
ccattaccttccctccccctgccccctcaacagtccacgtgttctcattgttcatctcccacttgcaagtgagaaca

SEQ ID NO: 124868 - DNA, 120 bp, Artificial Sequence
  ENSG00000101448_11 (sequence is synthesized)
acagtccacgtgttctcattgttcatctcccacttgcaagtgagaacatgtggtatttacttttgttcctgcgttactttgctgaggataacggcttccagcttcatccatgtccctgca

SEQ ID NO: 124869 - DNA, 79 bp, Artificial Sequence
  ENSG00000101448_12 (sequence is synthesized)
tatatgtaccacattttctttatccagcctatcgttgatggatatttggtttgattccatgtttttgctattgtaaaag

SEQ ID NO: 124870 - DNA, 79 bp, Artificial Sequence
  ENSG00000101448_13 (sequence is synthesized)
gtttgattccatgtttttgctattgtaaaagaatgatttatattcctttgagtgtatacccagtaatgggattgctggg

SEQ ID NO: 124871 - DNA, 120 bp, Artificial Sequence
  ENSG00000101448_14 (sequence is synthesized)
gaattggcacactctcttccacaatggttgaaccaatttacattcccaacagtgtaaaagcattcatgtttctccacagctttaccagcatctgttgtttctggactttttaataatcac

SEQ ID NO: 124872 - DNA, 120 bp, Artificial Sequence
  ENSG00000101448_15 (sequence is synthesized)
acagatgatgaaaccaaggttcagagagggtcagaattcagaccaagtcagaattcaaaatctaaactggctccggggtaagtgatactaattgctgtataatactaccacctagaggaa

SEQ ID NO: 124873 - DNA, 120 bp, Artificial Sequence
  ENSG00000101448_16 (sequence is synthesized)
cttccaaacatggattcctcaacaaggccaaaaagaccgcattggcttacatcagtggcccacaatggtgtgattttgccttccaggggacctttgcagtgcctggagacattttcagtt

SEQ ID NO: 124874 - DNA, 120 bp, Artificial Sequence
  ENSG00000101448_17 (sequence is synthesized)
gttacaatcaggggtgctactggattctgatgggaagaggcctgggatgctgctaaacatcctacaatccccagttcagccccccaaacaaagaattatccagcccaaatatcaccagtg

SEQ ID NO: 124875 - DNA, 120 bp, Artificial Sequence
  ENSG00000101448_18 (sequence is synthesized)
gttgagaaattctgccttagatgggatggagctggggggtgggaatagagggaggagaggtcactggggagtggtgggggtgtaggcagtagggaaatgagtgaggctgccctgaggaaa

SEQ ID NO: 124876 - DNA, 120 bp, Artificial Sequence
  ENSG00000101448_19 (sequence is synthesized)
agaactcctgggggcaagcaaactgaaagcaaacttccctgactctctagaattgccttgtgtctggcaaagtggggagacactatgctctctaaggcacacgggtgtaaaaccgctctt

SEQ ID NO: 124877 - DNA, 120 bp, Artificial Sequence
  ENSG00000101448_20 (sequence is synthesized)
agaataaccaacccctcctccccctgtcctcaccttctgccttcctggactggctttgtgccctgatcgctgagggctggtctctggcaaaactgctggacttgggagacctgcgattta

SEQ ID NO: 124878 - DNA, 120 bp, Artificial Sequence
  ENSG00000101448_21 (sequence is synthesized)
gattcattactgtgccaaatatggtgtgtgccattaggaatgaccttatcctatcaggtaatgtctgagactcagtttcccagaacaaatcattggtgaatcagtggcattgaatcagat

SEQ ID NO: 124879 - DNA, 120 bp, Artificial Sequence
  ENSG00000101448_22 (sequence is synthesized)
tcttttggctatttggatacctgtcactcttataattttttgagctcccaggtggccatcgttgccctaacatatgctgcaagtgataaattaagcaatttatatttcccaacttttttg

SEQ ID NO: 124880 - DNA, 120 bp, Artificial Sequence
  ENSG00000101448_23 (sequence is synthesized)
ctatggagtgaccacctctctgcctacacaaatccaactttgcaccaaaacgcctctcctgactgctccagaacagagggtttctcctttctgctgcatcttagtttcatgcccatcacc

SEQ ID NO: 124881 - DNA, 120 bp, Artificial Sequence
  ENSG00000101448_24 (sequence is synthesized)
ctgggatgcaaaaagactatcaaagattctgtttttattcattcaacaaatactgattgagtgcctctgagacccacaataggatttggtctcagtgtggtcaggggggttgggattgcc

SEQ ID NO: 124882 - DNA, 120 bp, Artificial Sequence
  ENSG00000101448_25 (sequence is synthesized)
ttctttgagaaagaaaatctggggttgagttgagaaagatgggtaatgttttaggcaaaaagtgggtggaggggttttccaggcacaggcagtagcatgcacaaaggctcagtggtgggg

SEQ ID NO: 124883 - DNA, 120 bp, Artificial Sequence
  ENSG00000101448_26 (sequence is synthesized)
ccttgggagtccagaacgcagagtgagcacgagcatggtacaaggaaaacagattctgggtgggcagagatcaaacaattcaggtatggtgggccagattaaagagtcttgcctggatcc

SEQ ID NO: 124884 - DNA, 120 bp, Artificial Sequence
  ENSG00000101448_27 (sequence is synthesized)
caagggctatggcaatccaccgaggcggggcatcatatgaccaggttcatactacatctatcgagtttaaaataggaggaacagagtatcttaaaggacttcaagatgatagaaatggtg

SEQ ID NO: 124885 - DNA, 120 bp, Artificial Sequence
  ENSG00000101448_28 (sequence is synthesized)
gccggaactagaggtagctgaggggatgaagaagagtaggacctgcttgaaagaaagagtaggacataggaggcaaagtgaacaggacttgacagagaagtagagtgggcaggttagggg

SEQ ID NO: 124886 - DNA, 120 bp, Artificial Sequence
  ENSG00000101448_29 (sequence is synthesized)
gctaagtcactcatatgccagcaggtaaggattctgaattcagccatcctgagttcaactcttacctccagtttttacgagcctttttgtcttggataaattaacaactttccctcactg

SEQ ID NO: 124887 - DNA, 120 bp, Artificial Sequence
  ENSG00000101448_30 (sequence is synthesized)
tgagtcagtttcctcagataataaaaggatcagtgtaaaagattattttgaggatccaattgatctgcatgatgtgattagagttatgcctggcacacagtagccacctgatacctattc

SEQ ID NO: 124888 - DNA, 120 bp, Artificial Sequence
  ENSG00000101448_31 (sequence is synthesized)
gcttatttgtaattcttggctaagggctcctaaatagcagagatcatgccttttctctgttccttgaagcattgagcacataataggtgctcaatgaataatttattcagttcagatcag

SEQ ID NO: 124889 - DNA, 120 bp, Artificial Sequence
  ENSG00000101448_32 (sequence is synthesized)
gatacatttcgtttatcctcaacgttccataaggttctgtactgtgccaggctacctgttaggaattgggatgccaagatgaaagcagatacactagaaactcactccctgctcactaga

SEQ ID NO: 124890 - DNA, 120 bp, Artificial Sequence
  ENSG00000101448_33 (sequence is synthesized)
aactcacagcctcagggatgagactgaagatataaacaaatgaaaaatgaatgcacaagactctgaagcaaggtgtggcagtgaggaatgtagaatggggtcaagagtgacatcacagca

SEQ ID NO: 124891 - DNA, 120 bp, Artificial Sequence
  ENSG00000101448_34 (sequence is synthesized)
ggatggaggtatagaggtagcacggtgtgttgagtactgctggagcatgtggctcaaaggggttctgcggcaggagaggaggccagcgtcacagtaggagccagacaatgaagggccttg

SEQ ID NO: 124892 - DNA, 120 bp, Artificial Sequence
  ENSG00000101448_35 (sequence is synthesized)
tgggtcatgggaggacattgtcatagagtgaaggtaggtcttctctgtgcaatgacatgataagcctggctctcagatccatcagatccttctctctggtgggaagcatgaaggattgat

SEQ ID NO: 124893 - DNA, 120 bp, Artificial Sequence
  ENSG00000101448_36 (sequence is synthesized)
tggaggggccaggaatggaggcagggggatcaatctgaggtcacctcaacagtccaggcatgagacactgaggcttatattaaagagactggcagagaggtgagctattaggaggtaaaa

SEQ ID NO: 124894 - DNA, 120 bp, Artificial Sequence
  ENSG00000101448_37 (sequence is synthesized)
atcaacaggatctaattgtttagcagtggagatttacccaaatggaactgtgtaagcattatttagttgggacctgcatttgtttggtagagttgctataacaaagcaccactgactggg

SEQ ID NO: 124895 - DNA, 120 bp, Artificial Sequence
  ENSG00000101448_38 (sequence is synthesized)
agtcttaaacaacagaaatgtattgtctcacagttcctcaggctagaagtccgagatcaaggtgtcagcatggttggttccttgtcagggttatggggaagaagcatgttccattgctct

SEQ ID NO: 124896 - DNA, 120 bp, Artificial Sequence
  ENSG00000101448_39 (sequence is synthesized)
cccctggcttctggtgctttgctggcaatctttggtgttctttggcttgtagacacatcaccccgatctctgccttcacattcatatggtgttctcacagtgtgtgtgcctctgtccaaa

SEQ ID NO: 124897 - DNA, 120 bp, Artificial Sequence
  ENSG00000101448_40 (sequence is synthesized)
ttaacctgtttgtataaggacaccagtcatattggtataggggcccaccctattttggtctgacctcattttagctaattacacctgcaacaaccctatctccagggatgcagatgccca

SEQ ID NO: 124898 - DNA, 120 bp, Artificial Sequence
  ENSG00000101448_41 (sequence is synthesized)
ctctggggtctccttgcaaatgtgtgcaatatgtcagtggagctgtgctcctgccatgtgataagagaaaaggagcctactccagtttcttctatagcagttgccagggagaataataac

SEQ ID NO: 124899 - DNA, 120 bp, Artificial Sequence
  ENSG00000101448_42 (sequence is synthesized)
cccggtctttcatcctctccagtcccatgccgggaggtctgggtgttggctggtccattccaggacagctacatctttggcagacctggtgctgacagaaccagctctgatcaggaggta

SEQ ID NO: 124900 - DNA, 120 bp, Artificial Sequence
  ENSG00000101448_43 (sequence is synthesized)
agaatgcacctggcaaaaggcaagacaaagttactttctgagtatgaggaactgaggatgagaagggatgtagaagtaatcaatgctggcaagtatgaggggaattaggaggggtggagg

SEQ ID NO: 124901 - DNA, 120 bp, Artificial Sequence
  ENSG00000101448_44 (sequence is synthesized)
aagggtgtagaagtggtgaaatctcagagatgaattgcagaagaggcacaggacgctaaacttaagacacgttgaccaaccaacccttctaagccatcaatgtctcaacacaactctttg

SEQ ID NO: 124902 - DNA, 120 bp, Artificial Sequence
  ENSG00000101448_45 (sequence is synthesized)
gcagcgattcactcctatttgtttttccttgaaggagatggagagctccccaaagcaaacccactactttttagtgtctttctgtgcaaagatgtataaacataacttcaagctccaaag

SEQ ID NO: 124903 - DNA, 120 bp, Artificial Sequence
  ENSG00000101448_46 (sequence is synthesized)
gtgtgctagtaagtgtgcacgtacgatggaaaatgaatgaagaatgaggacattccaccactctccaagttatcaagatgaagacccaagatggtggcattcactctgaaggtagcctgg

SEQ ID NO: 124904 - DNA, 120 bp, Artificial Sequence
  ENSG00000101448_47 (sequence is synthesized)
aaagtgggagacacgctttgcccactccctgtggttgactagagcccccagcccagtgcagcctaggggtgtaaggatcaagatccattcaataagagacccttcctcccaagctgtgag

SEQ ID NO: 124905 - DNA, 120 bp, Artificial Sequence
  ENSG00000101452_0 (sequence is synthesized)
agcctcgtgaccttttaccccaacatggctgcgcccgtgggaccggtgaagttctggcgacccggtacagaggggccaggtgtaagcatctctgaagagagacaaagtctggctgaaaac

SEQ ID NO: 124906 - DNA, 120 bp, Artificial Sequence
  ENSG00000101452_1 (sequence is synthesized)
tctgggacaacggttgtttacaacccttatgctgccctttccatagagcagcagaggcagaagctgccggtattcaagcttaggaatcatattttatacttgatagaaaattatcagaca

SEQ ID NO: 124907 - DNA, 120 bp, Artificial Sequence
  ENSG00000101452_2 (sequence is synthesized)
gtggtgattgttggtgaaacaggatgtgggaagagcacacagattcctcagtaccttgcagaagccggctggacagctgaaggaagagtggtaggagtgacccagcctcgaagagtggct

SEQ ID NO: 124908 - DNA, 120 bp, Artificial Sequence
  ENSG00000101452_3 (sequence is synthesized)
gctgttacagttgcagggagagtagctgaagaaaggggtgcagtgctgggccacgaggtgggctactgcatccgctttgatgactgcaccgaccagctggccacgagaattaagtttctt

SEQ ID NO: 124909 - DNA, 120 bp, Artificial Sequence
  ENSG00000101452_4 (sequence is synthesized)
actgatggaatgctggtcagggaaatgatggttgatccgttgttaacaaaatatagtgtcatcatgctggatgaagcccacgagaggaccttgtacactgacattgccattggcttgcta

SEQ ID NO: 124910 - DNA, 120 bp, Artificial Sequence
  ENSG00000101452_5 (sequence is synthesized)
aaaaagattcagaaaaagcgaggggatcttcgattgattgtagcttcagccactctggatgcagacaaattccgggatttctttaatcaaaatgaaaccagtgatccagcaagggataca

SEQ ID NO: 124911 - DNA, 120 bp, Artificial Sequence
  ENSG00000101452_6 (sequence is synthesized)
tgtgtgatccttacagtggaagggagaacatttccggtggatatcttttatctacaaagtcctgttccagattatatcaaatcaactgtcgaaactgtggtgaaaattcaccagacagag

SEQ ID NO: 124912 - DNA, 120 bp, Artificial Sequence
  ENSG00000101452_7 (sequence is synthesized)
ggagacggagacgttttagcatttcttactggccaggaagaggtagaaactgttgtgtcgatgctcatcgagcaggctcgagcactagctcgcactgggatgaagagacacctccgagtt

SEQ ID NO: 124913 - DNA, 120 bp, Artificial Sequence
  ENSG00000101452_8 (sequence is synthesized)
ctccccatgtatgcaggactgccttcctttgagcaaatgaaagtgtttgaaagggtgtcacgcagtgtcagaaaggtgatagtggccaccaatgtggcagaaacctctatcacaatcagc

SEQ ID NO: 124914 - DNA, 120 bp, Artificial Sequence
  ENSG00000101452_9 (sequence is synthesized)
ggcattgtgtatgtgatcgactgtggctttgtgaaactccgagcctacaatcccaggacagctattgaatgcttggtggtggtgccagtctcccaggcatcagctaatcagcgagcagga

SEQ ID NO: 124915 - DNA, 120 bp, Artificial Sequence
  ENSG00000101452_10 (sequence is synthesized)
cgtggtggtcgtagtcgctcgggaaaatgttatcgcctttatacagaggaagcctttgacaagttgcctcagtctacggttcctgagatgcagcgtagtaatttggcacctgtcatcctg

SEQ ID NO: 124916 - DNA, 120 bp, Artificial Sequence
  ENSG00000101452_11 (sequence is synthesized)
cagctgaaagcactaggaattgacaatgtcctcaggttccacttcatgtcgccccctccagcacagtcgatggttcaagccttggagttactgtatgctctgggaggtctggacaaagac

SEQ ID NO: 124917 - DNA, 120 bp, Artificial Sequence
  ENSG00000101452_12 (sequence is synthesized)
tgtcgcctaactgaaccgcttggcatgagaattgcagagtttcctttgaatcccatgtttgccaaaatgctgcttgaatcaggaaacttcggctgttctcaggaaattctaagcatcgct

SEQ ID NO: 124918 - DNA, 120 bp, Artificial Sequence
  ENSG00000101452_13 (sequence is synthesized)
atttgctgtggaggagggcgaccacctcactatgctcaatatatatgaagcatttatcaaacacaataaggactctaaatggtgtcaggaacatttcctgaattacaagggtcttgtcag

SEQ ID NO: 124919 - DNA, 120 bp, Artificial Sequence
  ENSG00000101452_14 (sequence is synthesized)
agctgcgactgtaagagaacaattgaaaaagcttcttgtcaagtttcaagtgcccaggaagtctagtgaaggtgacccggatctggttctgaggtgcattgtctccggcttcttcgccaa

SEQ ID NO: 124920 - DNA, 120 bp, Artificial Sequence
  ENSG00000101452_15 (sequence is synthesized)
tgcagcgaggtttcattctactggagcttataggaccatccgtgatgaccatgagctgcacatacaccctgcgtcagtcctctatgcagagaagccgcctcgctgggtcatctataacga

SEQ ID NO: 124921 - DNA, 120 bp, Artificial Sequence
  ENSG00000101452_16 (sequence is synthesized)
agttatacagacctccaagtactacatgagagatgtgactgccattgaatcggcctggctgttggagctggctccacacttttatcaacaaggaacgcacctgtctctgaaagccaaaag

SEQ ID NO: 124922 - DNA, 120 bp, Artificial Sequence
  ENSG00000101452_17 (sequence is synthesized)
ggccaaggtccaggacccgtgagaggagcccacagctacagctgcagggactgctggcgtcctctcctccatgctgctgcccctggtcccaggtggggtgagctggcaccagctcctgtg

SEQ ID NO: 124923 - DNA, 120 bp, Artificial Sequence
  ENSG00000101452_18 (sequence is synthesized)
gaatgtttggttgctctgaagtgggctgcggcctgttcattagtcctttcttcccgctgcccacagcatttgcatccttgctgggatcctggaggactttgtgcatgggcaggcatcctt

SEQ ID NO: 124924 - DNA, 120 bp, Artificial Sequence
  ENSG00000101452_19 (sequence is synthesized)
ctgtgctgcagcgggcagagtgggagttggctcactcagcacgctcactaacccagcatgccacttccagcaggcatgcagtcctggcccagctctatgggaaacaaggaggaaagttag

SEQ ID NO: 124925 - DNA, 120 bp, Artificial Sequence
  ENSG00000101452_20 (sequence is synthesized)
ccactgaaggccaaaacaccatgtggggtggacagagggtttgctgggctggctttgctttccctgctggggccacagctgtgttaaccaatgaggtctgctgccaggtgtgaacaagca

SEQ ID NO: 124926 - DNA, 120 bp, Artificial Sequence
  ENSG00000101452_21 (sequence is synthesized)
tgtctctacgaatgaacgaaacattggggatctctgccgaaaccaccaaagggcatgtctgatgggcacagggtctcccaaacccagtggcttctgtctgtcctcagcccttgtccctgt

SEQ ID NO: 124927 - DNA, 120 bp, Artificial Sequence
  ENSG00000101452_22 (sequence is synthesized)
ttatctgcagccaggagacttgcaagggattggtgattgacagagaggactcgtgcgctgttttgtgttagcagaggatttgtgtttcacaggtaggcttagcgtcctctcagagtgtag

SEQ ID NO: 124928 - DNA, 120 bp, Artificial Sequence
  ENSG00000101452_23 (sequence is synthesized)
tgccaggtcctggtgccacgctagctgagcactcaggagagttcatcagctcagatcccacagggcctcctctttagcaggaattcacaacagtttggatgccctaaacttctgtagctc

SEQ ID NO: 124929 - DNA, 120 bp, Artificial Sequence
  ENSG00000101452_24 (sequence is synthesized)
aggaacatcactggtgtatttgtttttttgtttgtttgcttgggttcttgcaagagcgcgtggggacagttcttccagcaggcactggttttgttgccccagggctgctttgctgtgatg

SEQ ID NO: 124930 - DNA, 120 bp, Artificial Sequence
  ENSG00000101452_25 (sequence is synthesized)
atgattgcatttcaacacatgccagatgcagattttttcccccttactgtttcaatgacctttattttaaaaacacatagcttgaaaatttatttttatactgatattagtttggatgtg

SEQ ID NO: 124931 - DNA, 120 bp, Artificial Sequence
  ENSG00000101452_26 (sequence is synthesized)
ccacttttggcaccaaacgtgtatgtcatttttatttccattttataaacatgtaaataatagtgataacttgttaataatagtaaacctttatacctaaagtaaatgtcttccctccca

SEQ ID NO: 124932 - DNA, 120 bp, Artificial Sequence
  ENSG00000101452_27 (sequence is synthesized)
atcgctgccatgatgcagatccagaatatctttgtggtccccccaaaccagaagtctcacgcacacaataaggactctaaatggtgtcaggaacatttcctgaattacaagggtcttgtc

SEQ ID NO: 124933 - DNA, 120 bp, Artificial Sequence
  ENSG00000101452_28 (sequence is synthesized)
gtttcataacctcagtgtagcctcctaaaagtgtagctatcatcattttctgttctttaataagagaacactccaaagaatttctccccagctcttctatgtattattttgtcattaatt

SEQ ID NO: 124934 - DNA, 120 bp, Artificial Sequence
  ENSG00000101452_29 (sequence is synthesized)
ttttttcccagagaaaatattactgccctgttatcttgaggtcagccaagatatcccttgtcctgggctcctgttaatgagtccagagttgcactgagccttttttaattttgacagcca

SEQ ID NO: 124935 - DNA, 120 bp, Artificial Sequence
  ENSG00000101452_30 (sequence is synthesized)
gatctgctccatctagtatcctagtagccgactgttggaactgcaggatagcactttacaatgatctctagtatgttctctttgttactccaggcatgttgtagcctgtcagtattgtga

SEQ ID NO: 124936 - DNA, 120 bp, Artificial Sequence
  ENSG00000101452_31 (sequence is synthesized)
ttcatttgcccattgtatgagctcacctccccaccctgagttgtctgtatttgaggcaacttgtccatgtggaggcgacccccacggtggcccgagatcttccctaaggagtgctgccag

SEQ ID NO: 124937 - DNA, 120 bp, Artificial Sequence
  ENSG00000101452_32 (sequence is synthesized)
cttgtcatcttgattgctcctactctcctggagagttagcaattttgactagcgtttggaaaattcttttatcagtgtccttagcaacaatgtgggctacctaagaggttccaggctaat

SEQ ID NO: 124938 - DNA, 120 bp, Artificial Sequence
  ENSG00000101452_33 (sequence is synthesized)
cattcctttgagacaacatttagtgttgatcagctcaccaccccctggtaggacagcccaggaccccaggacgctggctttattacaatgccgacgaggcattccgtcacagcacttgaa

SEQ ID NO: 124939 - DNA, 120 bp, Artificial Sequence
  ENSG00000101452_34 (sequence is synthesized)
acagcacttgaagcacttcccccaagaaacagatcattctactgagttggaattggaagtactatttcagagaaattaatagtccagtattgagcttttttttttttttttgagatggag

SEQ ID NO: 124940 - DNA, 62 bp, Artificial Sequence
  ENSG00000101452_35 (sequence is synthesized)
ggagtttcgctcttgttgcccatgctagagtgcaatggggtgatcttggctcatcgcaacct

SEQ ID NO: 124941 - DNA, 120 bp, Artificial Sequence
  ENSG00000101452_36 (sequence is synthesized)
catgagccaccatgcctggctgtgagctttcttttttcattatcgttacgtccccctatagtcattatctttagtatttaactttgctttttagattatagaagaaatcacatgtattat

SEQ ID NO: 124942 - DNA, 120 bp, Artificial Sequence
  ENSG00000101452_37 (sequence is synthesized)
ttccattccaaaggaaattgttttgaaagagcacctgcagaagatacacataaacataggcagagcattttattcctaaatgttttttctaagtgtccgcgtgttgcttttctcctcttc

SEQ ID NO: 124943 - DNA, 120 bp, Artificial Sequence
  ENSG00000101452_38 (sequence is synthesized)
gctttttccacgtgatttattcttgacttctggggtggcagccaggagagggatcaagaaaggttgcaagagaagatggagataattgttttgcttgtgacgagttcagtctgcatgctt

SEQ ID NO: 124944 - DNA, 120 bp, Artificial Sequence
  ENSG00000101457_0 (sequence is synthesized)
actttccggccggtgacagagtccagcggagttgtgggggccgggggcgccatgggagccactggcgacgccgagcagccgcggggacctagcggggccgagaggggcggcttggagctg

SEQ ID NO: 124945 - DNA, 120 bp, Artificial Sequence
  ENSG00000101457_1 (sequence is synthesized)
ggggatgcgggcgcagcggggcagctggttcttacgaacccttggaacataatgataaagcaccggcaggtgcagcggaggggccgccgctcacagatgacaacaagtttcacagatcct

SEQ ID NO: 124946 - DNA, 120 bp, Artificial Sequence
  ENSG00000101457_2 (sequence is synthesized)
gccatctccatggatctcctccgagctgtcctgcagcccagcatcaacgaggagatccagactgtcttcaacaagtacatgaagttcttccagaaggcagcactgaacgtgcgagacaat

SEQ ID NO: 124947 - DNA, 120 bp, Artificial Sequence
  ENSG00000101457_3 (sequence is synthesized)
gttggggaggaggtggacgcagagcagctgatccaggaagcctgtcggagctgcctggagcaggctaaactgctcttttcagatggagaaaaagtaatacccagattgacccatgagctt

SEQ ID NO: 124948 - DNA, 120 bp, Artificial Sequence
  ENSG00000101457_4 (sequence is synthesized)
ccaggaataaagcgtggccgtcaggcagaagaagaatgtgcccatcgaggaagcccccttcctaaaaagaggaaaggacggcctcctggacacatcctgtcaagcgaccgggcagccgcc

SEQ ID NO: 124949 - DNA, 120 bp, Artificial Sequence
  ENSG00000101457_5 (sequence is synthesized)
ctcgcctgaatgaatctaccacctttgtgttgggatctcgagccaacaaagccctggggatggggggcaccagaggaagaatctacatcaagcacccacacctctttaagtatgcagctg

SEQ ID NO: 124950 - DNA, 120 bp, Artificial Sequence
  ENSG00000101457_6 (sequence is synthesized)
acccccaggataagcactggctggctgagcagcatcacatgcgggcaacagggggcaagatggcctacctcctcatcgaggaggacatccgggaccttgcggccagtgatgattacagag

SEQ ID NO: 124951 - DNA, 120 bp, Artificial Sequence
  ENSG00000101457_7 (sequence is synthesized)
gatgcctggatctgaagctagaggaattgaaatcctttgtcctaccctcctggatggtggagaagatgagaaagtatatggagacactacggacagagaatgagcatcgtgctgttgaag

SEQ ID NO: 124952 - DNA, 120 bp, Artificial Sequence
  ENSG00000101457_8 (sequence is synthesized)
cacctccacagacctgaggccgggtcccctggccacacttggcagccctcctccaaagccctcttcctcacgtggctgaggccaccgctgggactgctcctagatggatctcagcggcat

SEQ ID NO: 124953 - DNA, 120 bp, Artificial Sequence
  ENSG00000101457_9 (sequence is synthesized)
taagctgtgcctgagcgagtttgtagtgactcactgcacagcacccccagactagcatgtggttctatatttgtaaagttattgggataagaaacaattaaacagtttgtagtaaacaca

SEQ ID NO: 124954 - DNA, 120 bp, Artificial Sequence
  ENSG00000101457_10 (sequence is synthesized)
cttagatgtgtctcctacacgaagcagttttattcctcacaaacacaagataggtagggcagttgctgtttttgtctcttttgacagatgagaaaactgccactcagaggttcttggagt

SEQ ID NO: 124955 - DNA, 120 bp, Artificial Sequence
  ENSG00000101457_11 (sequence is synthesized)
tgctcatgccactatgtaagagcagagctagtgctagaatggcttctagtccagtgctttttttccctttgttcctcctcttatgtgtcaccacgaaggaggatgtccagggctaaagtg

SEQ ID NO: 124956 - DNA, 120 bp, Artificial Sequence
  ENSG00000101457_12 (sequence is synthesized)
caccaccagcaagctggcatttagtcctaggtctcaccttggagaattcacctttattctttccttccaagcagatggaaaccaaaatcctgtgaaccaattcgccgggaaggccccaag

SEQ ID NO: 124957 - DNA, 120 bp, Artificial Sequence
  ENSG00000101457_13 (sequence is synthesized)
gcaggtgcgtggtggatcaagttatcatggccccatttggtatcatggggatgagcaccctgctgcctccctgcctctctggtgtggtcaggaagcatgacatcaggtctataaatgact

SEQ ID NO: 124958 - DNA, 120 bp, Artificial Sequence
  ENSG00000101457_14 (sequence is synthesized)
atcgtcccaccccaaggcgggagagatggtgacggatctgagaagcagggatgtccaggtttaacttcatacccaccctccacctccaccccaccccagtgtcacaggccgcagtgacat

SEQ ID NO: 124959 - DNA, 120 bp, Artificial Sequence
  ENSG00000101460_0 (sequence is synthesized)
gggcgagttacctcccgcagccgcagccgccgtgctcagcgcgagccccggagcccttgagcgcgaggcgcggagcccccggagcccccaaaccgcagacacatccccgcgccccagagc

SEQ ID NO: 124960 - DNA, 120 bp, Artificial Sequence
  ENSG00000101460_1 (sequence is synthesized)
cccggcctgcgcgcccagccgggcccgcgcgatgccctcagaccggcctttcaagcagcggcggagcttcgccgaccgctgtaaggaggtacagcagatccgcgaccagcaccccagcaa

SEQ ID NO: 124961 - DNA, 120 bp, Artificial Sequence
  ENSG00000101460_2 (sequence is synthesized)
aatcccggtgatcatcgagcgctacaagggtgagaagcagctgcccgtcctggacaagaccaagtttttggtcccggaccatgtcaacatgagcgagttggtcaagatcatccggcgccg

SEQ ID NO: 124962 - DNA, 120 bp, Artificial Sequence
  ENSG00000101460_3 (sequence is synthesized)
cctgcagctgaaccccacgcaggccttcttcctgctggtgaaccagcacagcatggtgagtgtgtccacgcccatcgcggacatctacgagcaggagaaagacgaggacggcttcctcta

SEQ ID NO: 124963 - DNA, 120 bp, Artificial Sequence
  ENSG00000101460_4 (sequence is synthesized)
gtctacgcctcccaggaaaccttcggcttctgagccagcagtaggggggctcggcctgggagtcgggcggccccggtcaggccctgcccagagagctcctggttcctgaactgagctgcc

SEQ ID NO: 124964 - DNA, 120 bp, Artificial Sequence
  ENSG00000101460_5 (sequence is synthesized)
tctaccgtggtgggctgggcaggcatgtgcccccctagtcagagggcaccaacccacctactctgcccctgggtggatcctgggccggtcgtgttagggttgtccctctgggtgctggct

SEQ ID NO: 124965 - DNA, 120 bp, Artificial Sequence
  ENSG00000101460_6 (sequence is synthesized)
ggtgggatgggggagggtggggagcagctcccagcacccctgctgtgtggttcatcttttttttaggcccctgcctgtctgcccatctgcccctcacccacccgaggctctgcccaccgc

SEQ ID NO: 124966 - DNA, 120 bp, Artificial Sequence
  ENSG00000101460_7 (sequence is synthesized)
ctggacctgcccacccctgaaagactggcccctggctccccgcccctcggtctccacgtggtgtatggatctgtggtcattgtccctctgcagaataaagattgctcaggcctgcctggc

SEQ ID NO: 124967 - DNA, 120 bp, Artificial Sequence
  ENSG00000101460_8 (sequence is synthesized)
cagccacctgccactcctgactgcatggaagccaggtgcaaggagaaaggattttgaggaggggactccatggcttccgagttgctgactgaccctccacctcagaggtagttctgacac

SEQ ID NO: 124968 - DNA, 120 bp, Artificial Sequence
  ENSG00000101463_0 (sequence is synthesized)
agaggaggagagagcctggcagcggaggagcagaggcgggcgccgcaccgccccgcacgctcgctcgctcgggagagtcgcgggcggccgcttgggcgcacttgccgggtcaccttgtcc

SEQ ID NO: 124969 - DNA, 120 bp, Artificial Sequence
  ENSG00000101463_1 (sequence is synthesized)
cggaggagaaatggcttccctgaggcaagtgtaacctacattcccagcccaccagcctgacgcccagccagggagagagtaccatggatggcatcattgaacagaagagcatgctggtgc

SEQ ID NO: 124970 - DNA, 120 bp, Artificial Sequence
  ENSG00000101463_2 (sequence is synthesized)
acagtaaaatcagtgatgctggcaagaggaatggtttaattaacaccagaaacttgatggccgagagcagagatggtctggtgtctgtttacccagcgccccagtaccagagccaccggg

SEQ ID NO: 124971 - DNA, 120 bp, Artificial Sequence
  ENSG00000101463_3 (sequence is synthesized)
tgggggccagcacagtgccggccagcctggacagcagcaggagtgagccgatgcagcagctgctggaccccaacaccctgcagcagtcagtggagtcccgctaccggcccaacatcatcc

SEQ ID NO: 124972 - DNA, 120 bp, Artificial Sequence
  ENSG00000101463_4 (sequence is synthesized)
tctattcagagggcgtgctgcgctcctggggggacggtgtggccgccgactgctgcgagaccaccttcatcgaggaccggtcgcccaccaaagacagcctcgagtacccggatgggaagt

SEQ ID NO: 124973 - DNA, 120 bp, Artificial Sequence
  ENSG00000101463_5 (sequence is synthesized)
tcattgacctctcagctgatgacataaaaatccacaccctgtcctacgatgtggaggaggaggaggagttccaggagctggagagcgactactcaagcgacacagagagtgaggacaatt

SEQ ID NO: 124974 - DNA, 120 bp, Artificial Sequence
  ENSG00000101463_6 (sequence is synthesized)
tcctcatgatgcccccgcgggaccacctgggcctcagtgtcttctccatgctctgctgcttctggcctctgggcatcgcagccttctacttgtcccatgagaccaacaaagccgtggcca

SEQ ID NO: 124975 - DNA, 120 bp, Artificial Sequence
  ENSG00000101463_7 (sequence is synthesized)
agggggacttgcaccaggccagcaccagctcccggcgggccctattcctggcagtgctgtccatcaccattgggactggcgtctatgtgggcgtggccgtggccctcatcgcctacctct

SEQ ID NO: 124976 - DNA, 120 bp, Artificial Sequence
  ENSG00000101463_8 (sequence is synthesized)
ccaggtctgtgtggacgtggaggaagcaggcataccgcatgatgctgtacagtacaaatgattgccaaatgatgccacgaagccctgggatttcctacccatggatttattttgttttta

SEQ ID NO: 124977 - DNA, 120 bp, Artificial Sequence
  ENSG00000101463_9 (sequence is synthesized)
tcctttaatttcatgttcacagcactgtgtagagcaccagacagacgggcactgctaatccttccaaaggaaagctccaaagatcccagcccgcaaggctgtctctggatggattctggt

SEQ ID NO: 124978 - DNA, 120 bp, Artificial Sequence
  ENSG00000101463_10 (sequence is synthesized)
ggatgaatggcaacgcggctctctgcagcctgccagtgcccagagtgccaccgcattagcaatatacaaacagtccaaaaaagtgtttattttttatggaatacggtgcaataggcagag

SEQ ID NO: 124979 - DNA, 120 bp, Artificial Sequence
  ENSG00000101463_11 (sequence is synthesized)
gacaagggacacatcactcttctgtctgtggccctgctggagtcctttgtgccccccggagtccacacgccttccctgcaagacgagaatggggctgggaagaaagaggcaacaccacgg

SEQ ID NO: 124980 - DNA, 120 bp, Artificial Sequence
  ENSG00000101463_12 (sequence is synthesized)
ctggcaggagccccgctgcactgctctgcagacccattggcctgaccctgagaagcagagccagcaaagcccgggacctgcccctctttctttcccttcacaccaccccagcctcaggat

SEQ ID NO: 124981 - DNA, 120 bp, Artificial Sequence
  ENSG00000101463_13 (sequence is synthesized)
gtcaagccacctccggaacgtgtctacactccacagctaccccgcagcaatacgcactcttgggacctcgctgatctaggatggggaggcaggccaccgcccctcccaagactcctcaag

SEQ ID NO: 124982 - DNA, 120 bp, Artificial Sequence
  ENSG00000101463_14 (sequence is synthesized)
aaagagccccgcggttgctccggaaactcgaggcactgcagctatgggcactgcctcagcctaaagacacaggggcgcctcccaatcaccgcgctggcggatgctcaccccgtcataagc

SEQ ID NO: 124983 - DNA, 120 bp, Artificial Sequence
  ENSG00000101463_15 (sequence is synthesized)
agaaactagtgatcctggaaatgagatgggccttactctgtcgactaaatgaatagctattttcttgtcattttttaaagtgcaactcttgcttcatgctgcttaagttaccagatgaat

SEQ ID NO: 124984 - DNA, 120 bp, Artificial Sequence
  ENSG00000101463_16 (sequence is synthesized)
gctgagaaataagtaatcacagacattttaataccatttcattgctgttttacgagtgttcattacttaacaaaaaattatcttttagctttttcgcttaagacttttctttctgatgaa

SEQ ID NO: 124985 - DNA, 120 bp, Artificial Sequence
  ENSG00000101463_17 (sequence is synthesized)
tgcccccgcgggaccacctgggcctcagtgtcttctccatgctctgctgcttctggcctctgggcatcgcagccttctacttgtcccatgagtccctttcagatcgattcattggccgtc

SEQ ID NO: 124986 - DNA, 120 bp, Artificial Sequence
  ENSG00000101463_18 (sequence is synthesized)
ggtcacacagcatcctccttactcaggcatttgcagcctgtgtagatggtaaaggggggcacaccccttgctggtgggacgcaaagaggctctgagtgctgaggaggggggagtgcagta

SEQ ID NO: 124987 - DNA, 120 bp, Artificial Sequence
  ENSG00000101463_19 (sequence is synthesized)
ccctgggtgtgcggaaggccgtctgaccctgtcttccactgggagtccatgaacagatttctctctgaattccctcctccttccttcccctcgtgtccttttccatggtcctcttccaga

SEQ ID NO: 124988 - DNA, 120 bp, Artificial Sequence
  ENSG00000101464_0 (sequence is synthesized)
atggcggctcccttggtcctggtgctggtggtggctgtgacagtgcgggcggccttgttccgctccagtctggccgagttcatttccgagcgggtggaggtggtgtccccactgagctct

SEQ ID NO: 124989 - DNA, 120 bp, Artificial Sequence
  ENSG00000101464_1 (sequence is synthesized)
tggaagagagtggttgaaggcctttcactgttggacttgggagtatctccgtattctggagcagtatttcatgaaactccattaataatatacctctttcatttcctaattgactatgct

SEQ ID NO: 124990 - DNA, 120 bp, Artificial Sequence
  ENSG00000101464_2 (sequence is synthesized)
gaattggtgtttatgataactgatgcactcactgctattgccctgtattttgcaatccaggacttcaataaagttgtgtttaaaaagcagaaactcctcctagaactggaccagtatgcc

SEQ ID NO: 124991 - DNA, 120 bp, Artificial Sequence
  ENSG00000101464_3 (sequence is synthesized)
ccagatgtggccgaactcatccggacccctatggaaatgcgttacatccctttgaaagtggccctgttctatctcttaaatccttacacgattttgtcttgtgttgccaagtctacctgt

SEQ ID NO: 124992 - DNA, 120 bp, Artificial Sequence
  ENSG00000101464_4 (sequence is synthesized)
gccatcaacaacaccctcattgctttcttcattttgactacgataaaaggcagtgctttcctcagtgctatttttcttgccttagcgacataccagtctctgtacccactcaccttgttt

SEQ ID NO: 124993 - DNA, 120 bp, Artificial Sequence
  ENSG00000101464_5 (sequence is synthesized)
gtcccaggactcctctatctcctccagcggcagtacatacctgtgaaaatgaagagcaaagccttctggatcttttcttgggagtatgccatgatgtatgtgggaagcctagtggtaatc

SEQ ID NO: 124994 - DNA, 120 bp, Artificial Sequence
  ENSG00000101464_6 (sequence is synthesized)
ccagatctcactccaaacattggtcttttctggtacttctttgcagagatgtttgagcacttcagcctcttctttgtatgtgtgtttcagatcaacgtcttcttctacaccatcccctta

SEQ ID NO: 124995 - DNA, 120 bp, Artificial Sequence
  ENSG00000101464_7 (sequence is synthesized)
gccataaagctaaaggagcaccccatcttcttcatgtttatccagatcgctgtcatcgccatctttaagtcctacccgacagtgggggacgtggcgctctacatggccttcttccccgtg

SEQ ID NO: 124996 - DNA, 120 bp, Artificial Sequence
  ENSG00000101464_8 (sequence is synthesized)
tggaaccatctctacagattcctgagaaacatctttgtcctcacctgcatcatcatcgtctgttccctgctcttccctgtcctgtggcacctctggatttatgcaggaagtgccaactct

SEQ ID NO: 124997 - DNA, 120 bp, Artificial Sequence
  ENSG00000101464_9 (sequence is synthesized)
aatttcttttatgccatcacactgaccttcaacgttgggcagatcctgctcatctctgattacttctatgccttcctgcggcgggagtactacctcacacatggcctctacttgaccgcc

SEQ ID NO: 124998 - DNA, 120 bp, Artificial Sequence
  ENSG00000101464_10 (sequence is synthesized)
aaggatggcacagaggccatgctcgtgctcaagtaggcctggctggcacagggctgcatggacctcagggggctgtggggccagaagctgggccaagccctccagccagagttgccagca

SEQ ID NO: 124999 - DNA, 120 bp, Artificial Sequence
  ENSG00000101464_11 (sequence is synthesized)
ggcgagtgcttgggcagaagaggttcgagtccagggtcacaagtctctggtaccaaaagggacccatggctgactgacagcaaggcctatggggaagaactgggagctccccaacttgga

SEQ ID NO: 125000 - DNA, 120 bp, Artificial Sequence
  ENSG00000101464_12 (sequence is synthesized)
cccccaccttgtggctctgcacaccaaggagccccctcccagacaggaaggagaagaggcaggtgagcagggcttgttagattgtggctacttaataaatgttttttgttatgaagtcta

SEQ ID NO: 125001 - DNA, 120 bp, Artificial Sequence
  ENSG00000101464_13 (sequence is synthesized)
gaaacttctggcctgttcagccagctctggaatgatcaaccccaaacccacaagacagctttactaacagataaagaagggccagcttcatctatgtagcttattaataactattaatat

SEQ ID NO: 125002 - DNA, 120 bp, Artificial Sequence
  ENSG00000101464_14 (sequence is synthesized)
ccacatacctgtgcaagttcagacttctggagtagtgctgaataacagttatattacctgtcgttaatgaggacccttaaaaatcttctagtctttcaccagtctttttttttttttttt

SEQ ID NO: 125003 - DNA, 120 bp, Artificial Sequence
  ENSG00000101464_15 (sequence is synthesized)
ttttttgcataggaagataaatacagcttttaagtcactgttatgcctatctgaggtaaaattggattctcaatgtcatttctgtctccctgcagaaagtaatcttaattggaaaatttg

SEQ ID NO: 125004 - DNA, 120 bp, Artificial Sequence
  ENSG00000101464_16 (sequence is synthesized)
acatgtattaaatgcctgatataaacttcagtcttaatccatatgtaatagccaaggagaattgcatagtgggaccattcttcttttcctggggtctgagaaagttaacagattaaccat

SEQ ID NO: 125005 - DNA, 120 bp, Artificial Sequence
  ENSG00000101464_17 (sequence is synthesized)
gaacgtggcccctccctgagtgtaggtcccagacgctggactctctggagcttggatgagtcatacagacgcacaattgtggtgttagggaacagcctgctggcagaacccatgccagcc

SEQ ID NO: 125006 - DNA, 120 bp, Artificial Sequence
  ENSG00000101464_18 (sequence is synthesized)
tgcatggtacagcagaaggagccagttaccaaagggctggatttgtgtgtgtgtttgttttgtttttattactattgtatagcgataaaagaatgttgatagatatacatataaagaatc

SEQ ID NO: 125007 - DNA, 120 bp, Artificial Sequence
  ENSG00000101464_19 (sequence is synthesized)
atgataaaatatattcccacgtgttttggcacctcgtttaagaaagggaatatcaccatggcctttgaagtccccaaatcccccctgttccccttctgattggactggatttttcaggtg

SEQ ID NO: 125008 - DNA, 120 bp, Artificial Sequence
  ENSG00000101470_0 (sequence is synthesized)
atctttgggtggtggagtgcaaaggaggcgacctgcaacagaggagtcccggtcaccagcaaccatgacggaccagcaggctgaggccaggtcctacctcagcgaagagatgatcgctga

SEQ ID NO: 125009 - DNA, 120 bp, Artificial Sequence
  ENSG00000101470_1 (sequence is synthesized)
gttcaaggctgcctttgacatgtttgatgctgatggtggtggggacatcagcgtcaaggagttgggcacggtgatgaggatgctgggccagacacccaccaaggaggagctggacgccat

SEQ ID NO: 125010 - DNA, 120 bp, Artificial Sequence
  ENSG00000101470_2 (sequence is synthesized)
ggacgcgaaagggaagagcgaggaggagctggccgagtgcttccgcatcttcgacaggaatgcagacggctacatcgacccggaggagctggctgagattttcagggcctccggggagca

SEQ ID NO: 125011 - DNA, 120 bp, Artificial Sequence
  ENSG00000101470_3 (sequence is synthesized)
cgtgacggacgaggagatcgaatctctgatgaaagacggcgacaagaacaacgacggccgcattgacttcgacgagttcctgaagatgatggagggcgtgcagtaaggagtggacagtcg

SEQ ID NO: 125012 - DNA, 120 bp, Artificial Sequence
  ENSG00000101470_4 (sequence is synthesized)
cctctaccaagatcgcgtgtccctagggtgtgggagactccgccctgccgggtccccaccagggaggcgcgaccccttgtgggtctttgtctggaaggaataaaagcaaatgttccaaaa

SEQ ID NO: 125013 - DNA, 120 bp, Artificial Sequence
  ENSG00000101470_5 (sequence is synthesized)
gggcccttggctccaggagggacttgggaagcctgggtcggcctgagggagtcccaggcctgccgcagagtcatcccagtccggccagtgttcacaggcttgcacaatctgatttgaacc

SEQ ID NO: 125014 - DNA, 120 bp, Artificial Sequence
  ENSG00000101473_0 (sequence is synthesized)
gccggaagagtcaggttctgtgtatgtctccgcgtcttccgcggagcgggtgtgcagggcctgcagcattgaactagatgtcgtccccgcaggccccagaagatgggcagggctgtggcg

SEQ ID NO: 125015 - DNA, 120 bp, Artificial Sequence
  ENSG00000101473_1 (sequence is synthesized)
accgcggcgatccccctggggacctccgtagcgtcttggtcacgaccgtgctcaacctcgagccgctggacgaggatctcttcagaggaaggcattactgggtaccggccaagaggctgt

SEQ ID NO: 125016 - DNA, 120 bp, Artificial Sequence
  ENSG00000101473_2 (sequence is synthesized)
ttggtggtcagatcgtgggccaggccctggtggctgcagccaagtctgtgagtgaagacgtccacgtgcactccctgcactgctactttgttcgggcaggggacccgaagctgccagtac

SEQ ID NO: 125017 - DNA, 120 bp, Artificial Sequence
  ENSG00000101473_3 (sequence is synthesized)
tgtaccaagtggagcggacacgaacagggtcgagcttctcggtgcgctctgtgaaggccgtgcaacatgggaagcccatcttcatctgccaggcctccttccagcaggcccagcccagcc

SEQ ID NO: 125018 - DNA, 120 bp, Artificial Sequence
  ENSG00000101473_4 (sequence is synthesized)
cagtatttaagggaccctaacctccaaaagaggtacccattggcgctcaaccgaattgctgctcaggaggtccccattgagatcaagccagtaaacccatcccccctgagccagctgcag

SEQ ID NO: 125019 - DNA, 120 bp, Artificial Sequence
  ENSG00000101473_5 (sequence is synthesized)
agaatggagcccaaacagatgttctgggtgcgagcccggggctatattggcgagggcgacatgaagatgcactgctgcgtggccgcctatatctccgactatgccttcttgggcactgca

SEQ ID NO: 125020 - DNA, 120 bp, Artificial Sequence
  ENSG00000101473_6 (sequence is synthesized)
ctgctgcctcaccagtggcagcacaaggtgcacttcatggtctcactggaccattccatgtggttccacgcccccttccgagctgaccactggatgctctatgaatgcgagagcccctgg

SEQ ID NO: 125021 - DNA, 120 bp, Artificial Sequence
  ENSG00000101473_7 (sequence is synthesized)
gccggtggctctcgggggctggtccatgggcggctgtggcgtcaggatggagtcctagctgtgacctgtgcccaggagggcgtgatccgagtgaagccccaggtctcagagagcaagctg

SEQ ID NO: 125022 - DNA, 120 bp, Artificial Sequence
  ENSG00000101473_8 (sequence is synthesized)
tagccagaggtaccagcttcgcctggggcttcaagaacctcccatctatccccattcctgagacaggagttacagtcccttttggccctcacatccaataaagagactgataccactgga

SEQ ID NO: 125023 - DNA, 120 bp, Artificial Sequence
  ENSG00000101473_9 (sequence is synthesized)
ttcacgggggagctagcccagagagggcagtgatttgcccaagggcacacagctgatggatcagccttaaaaccgacgccgcagctccttgtgtcttcagtatccttttcttctcacaat

SEQ ID NO: 125024 - DNA, 120 bp, Artificial Sequence
  ENSG00000101473_10 (sequence is synthesized)
tgctctaaatttctagaatgtgctggaaatgtgattcaccttctcccagggacccagttctagtcccaaaaccagttcagattctttgtattacaataggcaaatcatatcttccatctg

SEQ ID NO: 125025 - DNA, 120 bp, Artificial Sequence
  ENSG00000101473_11 (sequence is synthesized)
aacctcagtttcctcatctaaacaaagagggttacattacagcagtggtatccaaacccgcagtccatcagactgccatttggggatgccttttcaaaatagattctgattccaccctca

SEQ ID NO: 125026 - DNA, 120 bp, Artificial Sequence
  ENSG00000101473_12 (sequence is synthesized)
agattctcactcagtaggtcttggataaggtccaggaaactgtatttttaagttctctaagtgattctgattaacctgattgggatcggggcattcagtggtccctaagggcctgcttgg

SEQ ID NO: 125027 - DNA, 120 bp, Artificial Sequence
  ENSG00000101473_13 (sequence is synthesized)
accttccttgcaggggagagaaacaagactcgttcatcaatgtctagcttcagaaccctgacctcctttccaagggagtacatttcaaatgaagaaaagctttgcttgataaaccaagga

SEQ ID NO: 125028 - DNA, 120 bp, Artificial Sequence
  ENSG00000101473_14 (sequence is synthesized)
caaaactcaaggattctttatactcagataaggggtattctcaagtaccaatagcatcacaatccaagattgataaccttgaagtgaggacatgggttcagatttggcttcatcatgggg

SEQ ID NO: 125029 - DNA, 120 bp, Artificial Sequence
  ENSG00000101473_15 (sequence is synthesized)
ttatttaacaaacacatatagagccctcactatgtgccagatattattctaaacactttacaactacggattcatttcattatcattaaaatcctgtaagcgatgagcaccatgatgatc

SEQ ID NO: 125030 - DNA, 120 bp, Artificial Sequence
  ENSG00000101473_16 (sequence is synthesized)
cccagtttgcaaataagcacactgctcagagaagtgaagggtcacacggctggtgagtggtggagccaggatttgaatgcaaggaatctgtcaatgtctctgctgtttgtgctgttagag

SEQ ID NO: 125031 - DNA, 120 bp, Artificial Sequence
  ENSG00000101473_17 (sequence is synthesized)
aaaagctccacctgcacagggagaagcctgatgacagggcctggtggtctctgtatccctgggcctggaccttagcagacctcagttagtagtcactgagatgaaatggaatggaagatg

SEQ ID NO: 125032 - DNA, 120 bp, Artificial Sequence
  ENSG00000101473_18 (sequence is synthesized)
gaggaaaccactctccaaggggtctaccactcatttgctgtgtggccttgggcacatgagttcccttctctgggcctgtttccttatctgcatgatggggaagttggcttagcttctcac

SEQ ID NO: 125033 - DNA, 120 bp, Artificial Sequence
  ENSG00000101473_19 (sequence is synthesized)
ctgggccctctcagccctttgcatggggagaaggtggagatgactataatcccgacacaaggcctttctgaggaaggcaaaaggcacctcgctggggttgttgtccagctttgctgctaa

SEQ ID NO: 125034 - DNA, 120 bp, Artificial Sequence
  ENSG00000101473_20 (sequence is synthesized)
ctataaagtatctttgtgcaaattggaagaagacaccccttttggggcctagagtgggagacttgggtggtgaagactgaatttcagtccctgctcacccctgccctccccaagtcgcca

SEQ ID NO: 125035 - DNA, 120 bp, Artificial Sequence
  ENSG00000101473_21 (sequence is synthesized)
tctcacttctcccctatcacacacacacactgtaggccaagcgctcttgtgcagcaaccagtctgcacacccatgcacgggagtcccttttccccctacctccgtgcaggtcctgagctg

SEQ ID NO: 125036 - DNA, 120 bp, Artificial Sequence
  ENSG00000101473_22 (sequence is synthesized)
attcctgaccctctctggatttcagtcctggtctggaaaactggacaacacataactgcttcatttggctactgtgagaactgagtgagctctgctatgtgtaagggaaaccagcaatca

SEQ ID NO: 125037 - DNA, 120 bp, Artificial Sequence
  ENSG00000101473_23 (sequence is synthesized)
tcctcataaacatcaaacttgggcccaaagccagcaagggagaaagagtctccagatggggagggaagaggccagacctcatggcctcaagtcctctcttctgagtcctttcttcccctt

SEQ ID NO: 125038 - DNA, 120 bp, Artificial Sequence
  ENSG00000101473_24 (sequence is synthesized)
ggtggtggtagtggggatatttttcatgaattaccacttggaggacctggcttgatttattatacagggagccgatagttttcctaacacaagtggtcagaggtacagcagttctgcttg

SEQ ID NO: 125039 - DNA, 120 bp, Artificial Sequence
  ENSG00000101473_25 (sequence is synthesized)
gccgagctgttgaaggagactgttctcagagctcctccctctgtgatctttttgaggaagcgaggagaggtgtgaaagtgcttttaaactgtcaactggggttcctgtgggaggagttac

SEQ ID NO: 125040 - DNA, 120 bp, Artificial Sequence
  ENSG00000101473_26 (sequence is synthesized)
ccctcaatgacggtccataataagctcatgaaggggcatttggagcagccacgacactcagtgcacccttgtgtggggcagccctgccctgggccagaccctttgcaagaagtccacttg

SEQ ID NO: 125041 - DNA, 85 bp, Artificial Sequence
  ENSG00000101473_27 (sequence is synthesized)
gaggttgggcatggtgatgtgggaggatcccttgaacccaggcgcttgagaccagcctggcaacttagtgagactctgtttcagg

SEQ ID NO: 125042 - DNA, 120 bp, Artificial Sequence
  ENSG00000101473_28 (sequence is synthesized)
ctcttctcggcccccagtcactgctataaagtatttgaatacttaccttgggctcagccaggttcttatctttatgctagttgggagtaaatatgtgctttgtttctttaatttgtttgt

SEQ ID NO: 125043 - DNA, 120 bp, Artificial Sequence
  ENSG00000101473_29 (sequence is synthesized)
aagtaccagccttttgatattgtaatccttccagcctagtgaaatacctggctgttttcttttgtgtgggtgggggcattacttgaactctgaatctcttcatcctgtgatggaagaatt

SEQ ID NO: 125044 - DNA, 120 bp, Artificial Sequence
  ENSG00000101473_30 (sequence is synthesized)
caatgagtctttgccagtaaagtatctagtgcagggcttggcataatctagttttccataaatattattagtttttgatgattaacttatgggaataattaaaatttgcatgatacagag

SEQ ID NO: 125045 - DNA, 120 bp, Artificial Sequence
  ENSG00000101473_31 (sequence is synthesized)
tactttgttcgggcagatgccctcatgtgttctgcgtagatccccagctgagaagagtttgtggacctttacagtatgtgatttgtattaagaaaaccatggggtttcccccttcatttt

SEQ ID NO: 125046 - DNA, 120 bp, Artificial Sequence
  ENSG00000101474_0 (sequence is synthesized)
ggagtctgagccggcgccgctcagtgtgaggtggtttctgcgggtgaggctggcgcccgtaccatgagcgaggcggacgggctgcgacagcgccggcccctgcggccgcaggtcgtcaca

SEQ ID NO: 125047 - DNA, 120 bp, Artificial Sequence
  ENSG00000101474_1 (sequence is synthesized)
gacgatgatggccaggccccggaggctaaggacggcagctcctttagcggcagagttttccgagtgaccttcttgatgctggctgtttctctcaccgttcccctgcttggagccatgatg

SEQ ID NO: 125048 - DNA, 120 bp, Artificial Sequence
  ENSG00000101474_2 (sequence is synthesized)
ctgctggaatctcctatagatccacagcctctcagcttcaaagaacccccgctcttgcttggtgttctgcatccaaatacgaagctgcgacaggcagaaaggctgtttgaaaatcaactt

SEQ ID NO: 125049 - DNA, 120 bp, Artificial Sequence
  ENSG00000101474_3 (sequence is synthesized)
gttggaccggagtccatagcacatattggggatgtgatgtttactgggacagcagatggccgggtcgtaaaacttgaaaatggtgaaatagagaccattgcccggtttggttcgggccct

SEQ ID NO: 125050 - DNA, 120 bp, Artificial Sequence
  ENSG00000101474_4 (sequence is synthesized)
tgcaaaacccgagatgatgagcctgtgtgtgggagacccctgggtatccgtgcagggcccaatgggactctctttgtggccgatgcatacaagggactatttgaagtaaatccctggaaa

SEQ ID NO: 125051 - DNA, 120 bp, Artificial Sequence
  ENSG00000101474_5 (sequence is synthesized)
cgtgaagtgaaactgctgctgtcctccgagacacccattgaggggaagaacatgtcctttgtgaatgatcttacagtcactcaggatgggaggaagatttatttcaccgattctagcagc

SEQ ID NO: 125052 - DNA, 120 bp, Artificial Sequence
  ENSG00000101474_6 (sequence is synthesized)
aaatggcaaagacgagactacctgcttctggtgatggagggcacagatgacgggcgcctgctggagtatgatactgtgaccagggaagtaaaagttttattggaccagctgcggttcccg

SEQ ID NO: 125053 - DNA, 120 bp, Artificial Sequence
  ENSG00000101474_7 (sequence is synthesized)
aatggagtccagctgtctcctgcagaagactttgtcctggtggcagaaacaaccatggccaggatacgaagagtctacgtttctggcctgatgaagggcggggctgatctgtttgtggag

SEQ ID NO: 125054 - DNA, 120 bp, Artificial Sequence
  ENSG00000101474_8 (sequence is synthesized)
aacatgcctggatttccagacaacatccggcccagcagctctggggggtactgggtgggcatgtcgaccatccgccctaaccctgggttttccatgctggatttcttatctgagagaccc

SEQ ID NO: 125055 - DNA, 120 bp, Artificial Sequence
  ENSG00000101474_9 (sequence is synthesized)
gtgatgaagtttgtgccgcggtacagcctcgtcctagaactcagcgacagcggtgccttccggagaagcctgcatgatcccgatgggctggtggccacctacatcagcgaggtgcacgaa

SEQ ID NO: 125056 - DNA, 120 bp, Artificial Sequence
  ENSG00000101474_10 (sequence is synthesized)
cacgatgggcacctgtacctgggctctttcaggtcccccttcctctgcagactcagcctccaggctgtttagccctcccagatagctgcccctgccacgcaggccaggagtcttcacact

SEQ ID NO: 125057 - DNA, 120 bp, Artificial Sequence
  ENSG00000101474_11 (sequence is synthesized)
caggcaccaggcctggtccaggaggagctgtggacacagtcgtggttcaagtgtccacatgcacctgttagtccctgagaggtggtgggaatggctgcttcattcctcgaggatgcccgg

SEQ ID NO: 125058 - DNA, 120 bp, Artificial Sequence
  ENSG00000101474_12 (sequence is synthesized)
gccccacctgggcttgtctttctgtttagagggaagtgtaacatatctgccatgaggaacataaattcatgtaaagccattttctcttaaacaaaacaaaactttctaagtacagtcatt

SEQ ID NO: 125059 - DNA, 120 bp, Artificial Sequence
  ENSG00000101474_13 (sequence is synthesized)
ctctaggatttgggaagctccttgcacttggaacagggctcaggtgggtggagcagtaaggcactacccagagagcttgctgctgcggccctgtcctgcggcctcaaagttcttctttac

SEQ ID NO: 125060 - DNA, 120 bp, Artificial Sequence
  ENSG00000101474_14 (sequence is synthesized)
tatatataacgtgcggtcatacctttcttcgttgtggtggggatggaagagcagagggagcatggcccaggggtgttgaggccagcggtgagagccgtgttagccaagacatggaactgt

SEQ ID NO: 125061 - DNA, 120 bp, Artificial Sequence
  ENSG00000101474_15 (sequence is synthesized)
gttctcaagggttatgtggggcgtgggctctccatagtgtgtatgaaaagcttgttgactctagcggctcagagaggactttgctgggtttctttctgtgaatatctccgtgctgaccat

SEQ ID NO: 125062 - DNA, 120 bp, Artificial Sequence
  ENSG00000101474_16 (sequence is synthesized)
gctggaattggatgattctgcaattcgggacctactgcaggggtccgtttagtaacgtcttgtctgtgatctttgttcttgacctctagaccccaagatgtgaacagtgcacgtgttaat

SEQ ID NO: 125063 - DNA, 120 bp, Artificial Sequence
  ENSG00000101474_17 (sequence is synthesized)
gtcatctttgctcatgtgttataagccccaagttgctgtatattttcacaagtatgtctacacactggtcatgattttgataataaataacgataaatcgacttctgctgattaaccttt

SEQ ID NO: 125064 - DNA, 120 bp, Artificial Sequence
  ENSG00000101489_0 (sequence is synthesized)
gagagagcagagagcgagcggagagcgaggtgtagagaaaccgagggggagagaacccgagtgtgtgtatgcgtgtgcgtgtgtgagcgcgagcgagcgagagagaggagcgagagagtg

SEQ ID NO: 125065 - DNA, 120 bp, Artificial Sequence
  ENSG00000101489_1 (sequence is synthesized)
tgagcgagaaagaataaaaggaaagaagattttctctatgtatataaagatggccacgttagcaaacggacaggctgacaacgcaagcctcagtaccaacgggctcggcagcagcccggg

SEQ ID NO: 125066 - DNA, 120 bp, Artificial Sequence
  ENSG00000101489_2 (sequence is synthesized)
cagtgccgggcacatgaacggattaagccacagcccggggaacccgtcgaccattcccatgaaggaccacgatgccatcaagctgttcattgggcagatcccccgcaacctggatgagaa

SEQ ID NO: 125067 - DNA, 120 bp, Artificial Sequence
  ENSG00000101489_3 (sequence is synthesized)
ggacctcaagcccctcttcgaggagtttggcaaaatctacgagcttacggttctgaaggacaggttcacaggcatgcacaaaggctgcgccttcctcacctactgcgagcgtgagtcagc

SEQ ID NO: 125068 - DNA, 120 bp, Artificial Sequence
  ENSG00000101489_4 (sequence is synthesized)
gctgaaggcccagagcgcgctgcacgagcagaagactctgcccgggatgaaccggccgatccaggtgaagcctgcggacagcgagagccgaggaggtagtagctgcctgcgccagccccc

SEQ ID NO: 125069 - DNA, 120 bp, Artificial Sequence
  ENSG00000101489_5 (sequence is synthesized)
ttcacaagatagaaaactcttcgtgggcatgctcaacaagcaacagtccgaggacgacgtgcgccgccttttcgaggcctttgggaacatcgaggagtgcaccatcctgcgcgggcccga

SEQ ID NO: 125070 - DNA, 120 bp, Artificial Sequence
  ENSG00000101489_6 (sequence is synthesized)
cggcaacagcaaggggtgcgcctttgtgaagtactcctcccacgccgaggcgcaggccgccatcaacgcgctacacggcagccagaccatgccgggagcctcgtccagtctggtggtcaa

SEQ ID NO: 125071 - DNA, 120 bp, Artificial Sequence
  ENSG00000101489_7 (sequence is synthesized)
gttcgccgacaccgacaaggagcgcacgatgcggcgaatgcagcagatggctggccagatgggcatgttcaaccccatggccatccctttcggggcctacggcgcctacgctcaggcact

SEQ ID NO: 125072 - DNA, 120 bp, Artificial Sequence
  ENSG00000101489_8 (sequence is synthesized)
gatgcagcagcaagcggccctgatggcatcagtcgcgcagggcggctacctgaaccccatggctgccttcgctgccgcccagatgcagcagatggcggccctcaacatgaatggcctggc

SEQ ID NO: 125073 - DNA, 120 bp, Artificial Sequence
  ENSG00000101489_9 (sequence is synthesized)
ggccgcacctatgaccccaacctcaggtggcagcacccctccgggcatcactgcaccagccgtgcctagcatcccatcccccattggggtgaatggcttcaccggcctccccccacaggc

SEQ ID NO: 125074 - DNA, 120 bp, Artificial Sequence
  ENSG00000101489_10 (sequence is synthesized)
caatgggcaacctgctgcggaagctgtgttcgccaatggcatccacccctacccagcacagagccccaccgccgcggaccccctgcagcaggcctacgccggagtgcagcagtatgcagg

SEQ ID NO: 125075 - DNA, 120 bp, Artificial Sequence
  ENSG00000101489_11 (sequence is synthesized)
tccagctgcctaccctgctgcctatggtcagataagccaggcctttcctcagccgcctccaatgatcccccagcagcagagagaagggcccgagggctgtaacctgttcatctaccatct

SEQ ID NO: 125076 - DNA, 120 bp, Artificial Sequence
  ENSG00000101489_12 (sequence is synthesized)
gccccaggagtttggggacgctgagctgatgcagatgttcctccctttcggcttcgtgagcttcgacaacccggccagcgcgcagaccgccatccaggccatgaacggcttccagatcgg

SEQ ID NO: 125077 - DNA, 120 bp, Artificial Sequence
  ENSG00000101489_13 (sequence is synthesized)
catgaagaggctcaaggtgcagctgaagcggcccaaagacgccaatcgcccgtactgagcgccggcgggagcgtcccccgggggagaccaggactcgcacagggcaggatgctgaacggg

SEQ ID NO: 125078 - DNA, 120 bp, Artificial Sequence
  ENSG00000101489_14 (sequence is synthesized)
ctacattaaaaaacaaacctctctctatatatatttataaatgagaactgttggatgacacctttgacatatcagccaatatcaatcaagctgaagactccagacactgtctgtgtgact

SEQ ID NO: 125079 - DNA, 120 bp, Artificial Sequence
  ENSG00000101489_15 (sequence is synthesized)
gaaaaaaacacacaaaaggcaactttaaaacaaaatatcacgagcagacggggaggctgaagggctgggagctgggaggagacgctgcttaccgatcccggggcttttccagcccacggg

SEQ ID NO: 125080 - DNA, 120 bp, Artificial Sequence
  ENSG00000101489_16 (sequence is synthesized)
cgcctgacgcaggctggggcaagtggtgcgtggggcctggtccccaaggggcggctgagaggccgccactgagcatctctatctgtcattcctttagctatttagggaccaaaggaccaa

SEQ ID NO: 125081 - DNA, 120 bp, Artificial Sequence
  ENSG00000101489_17 (sequence is synthesized)
actttttattgcagatgtgtagctctatgtcaaatagagggggaatggaggaccccctccttcctgcctcatggctgttcttgaaacagcttagagcgattctatgaaaaaatgtaataa

SEQ ID NO: 125082 - DNA, 120 bp, Artificial Sequence
  ENSG00000101489_18 (sequence is synthesized)
aaaaaaaacaacaaaaaaaggaaaaataacgcttcaatgcttttaaaacagcaagataatagttctttgatactttgagaggcgctttgatgaccctcatccaagtctatgacactttcc

SEQ ID NO: 125083 - DNA, 120 bp, Artificial Sequence
  ENSG00000101489_19 (sequence is synthesized)
tcatccaagtctatgacactttcctatggttttctgtattctatgtctggatggagctgttaaaagatgaacaaattggtggatatttggggaaagcaacacaaatcttaaaactcaccc

SEQ ID NO: 125084 - DNA, 120 bp, Artificial Sequence
  ENSG00000101489_20 (sequence is synthesized)
gtgaagtgtgagaaaacaaggaggggaacaaatgggacttaccaagcaaggtcattgttgtgaaaagtctgtaaatgcttctaactcttccccctcttaaaatcataatagttgtacaga

SEQ ID NO: 125085 - DNA, 120 bp, Artificial Sequence
  ENSG00000101489_21 (sequence is synthesized)
ctaactcttccccctcttaaaatcataatagttgtacagaattttaaaaaggaaaagtttaaaatacctatataatagaagaaaaattagaggaaagcaaaaaataaaaaaaaaaaataa

SEQ ID NO: 125086 - DNA, 120 bp, Artificial Sequence
  ENSG00000101489_22 (sequence is synthesized)
aaaatcccagatgttgtaggactgtacttttgtagagtttagacagagcatcaatcccttctccccgcgagtgcagtcggatgccgttgtccccaagggccaggccgaactcgccccaca

SEQ ID NO: 125087 - DNA, 120 bp, Artificial Sequence
  ENSG00000101489_23 (sequence is synthesized)
cacacctgcgggcgcctggctgccgacgccggtggaggccacgccgtcggtcgggaacggtcgcgtcgcccgggtcgccgccgccgccgccgccgtcatcctcgcctctcgcttccctct

SEQ ID NO: 125088 - DNA, 120 bp, Artificial Sequence
  ENSG00000101489_24 (sequence is synthesized)
gctgcgcgcgcttcactcaccttccgcttcactcgccttccacgcttgctccagagactttccgggcaagggagaactgggaactttcatcttaaaacaactagacaacacacacacaca

SEQ ID NO: 125089 - DNA, 120 bp, Artificial Sequence
  ENSG00000101489_25 (sequence is synthesized)
caaaaccttaaaaaagagagagaaaaataaacaatctttgaagaatttctgaaactgtttacaaggaattttgaaaaacagggatgtttaaatgatgccggctctgtttttctgtaaata

SEQ ID NO: 125090 - DNA, 120 bp, Artificial Sequence
  ENSG00000101489_26 (sequence is synthesized)
aatttgcatattttgtaggacttttaattgtaatgatagagaaaaaaacaaggaaaactatttaatgaaagcacgatatttatctttggtaaatgactttagagcagttaaagacattgc

SEQ ID NO: 125091 - DNA, 120 bp, Artificial Sequence
  ENSG00000101489_27 (sequence is synthesized)
ttaaaaaactcagaatcagaaaaaacactgaattatttaagaacacatatattttaaagtataacatatttattataatttatttgcacccttgggaagattgctttggcattctgcctt

SEQ ID NO: 125092 - DNA, 120 bp, Artificial Sequence
  ENSG00000101489_28 (sequence is synthesized)
gattccttctcattgatgtccaggtcatctggaggccgggggttctcagacctaccagtttccctttagaagaacaaatttccagttcctctagggcctcctgcctttcctttctttctg

SEQ ID NO: 125093 - DNA, 120 bp, Artificial Sequence
  ENSG00000101489_29 (sequence is synthesized)
cctcctgcctttcctttctttctgtcaattttgttgttgttgttgtttttcattttctttttttctcttgactcctccttttaggatgtccagatgtaaaaaaaaaaaaaaaaaaaagaa

SEQ ID NO: 125094 - DNA, 120 bp, Artificial Sequence
  ENSG00000101489_30 (sequence is synthesized)
ctgcagttcagtacaactgctcttttcacactcaactccctaaaactccttgtaaccttctgtaactattggatgacgctttctccagcttagccctaaataaagcacagtttaaaaaaa

SEQ ID NO: 125095 - DNA, 120 bp, Artificial Sequence
  ENSG00000101489_31 (sequence is synthesized)
tcacaggcatgcacaaagatgcaaggaggctggtactatcatcatcctcattttacagatgaggacaccgaggcacagagcacctgagcgacttgcccagtaaatccccaatttgagacc

SEQ ID NO: 125096 - DNA, 120 bp, Artificial Sequence
  ENSG00000101489_32 (sequence is synthesized)
ctggttcttaatcctttagtacccacctccacctgggtcatcctaccctagagcctccatcctctgggaaagtagcaatttggggtaaaaaaataataataaaggaatgagctaagagta

SEQ ID NO: 125097 - DNA, 120 bp, Artificial Sequence
  ENSG00000101489_33 (sequence is synthesized)
agcacccgccacgccccgccggctgtccagtctccccaagagacaggaaagcatgacccttattccgggcctcagacaaggacgcggaagcccagggatgttaaggaactggcctgaggt

SEQ ID NO: 125098 - DNA, 120 bp, Artificial Sequence
  ENSG00000101489_34 (sequence is synthesized)
tacccaggtggaaaatgcccgcggtggggttcacacctcattcccctgggcgagcgccgatgccgcctcctccaaagcgccccgaggagcgggcggggtgggcgcaggccagaggcaccg

SEQ ID NO: 125099 - DNA, 120 bp, Artificial Sequence
  ENSG00000101489_35 (sequence is synthesized)
ctcccctgggagcctcagagagcgggacatgaaaccgaaaatactactctatcccttgccctctccctccagagtgaggaggggccgggaatgaacccatgaacctggggggtttaactt

SEQ ID NO: 125100 - DNA, 120 bp, Artificial Sequence
  ENSG00000101489_36 (sequence is synthesized)
cagaagggtttgaaagaaggctggcccagttggggtggctgccaggaggaggtgggctgctgtcttagttctaaggggcagagctgagagaggccccacagaaaagtgggttaccctgag

SEQ ID NO: 125101 - DNA, 120 bp, Artificial Sequence
  ENSG00000101489_37 (sequence is synthesized)
ccttttcctctcagccagatcaacgttgaaccccaggaagcacagatgagagggtgaggttcaggtcattggttgcaaaccacccctactccatggaacggtgacttcaggccttctggt

SEQ ID NO: 125102 - DNA, 120 bp, Artificial Sequence
  ENSG00000101489_38 (sequence is synthesized)
ctctcctggcagggctcctgtgaggtgccctaaagccctacacacccacacttctgatatcccctcaggcctctggcccacctacttctttcttccacatgggggcccactctgtcagcc

SEQ ID NO: 125103 - DNA, 120 bp, Artificial Sequence
  ENSG00000101489_39 (sequence is synthesized)
tctcccggagctgcctgcagactggtaaccacagctcccatgtgggtggcactgaggcaggccacggttctgggtctgaaaatgcaagcttacctcacttctgcagtactgtccgccttg

SEQ ID NO: 125104 - DNA, 120 bp, Artificial Sequence
  ENSG00000101489_40 (sequence is synthesized)
gccacattccgcagcctcccctgtccgcactcacctttgtgacaacactaggggtgcctggggttctattcataattctcctgtcacttctaccaacagactccaaattaaaaccattct

SEQ ID NO: 125105 - DNA, 120 bp, Artificial Sequence
  ENSG00000101489_41 (sequence is synthesized)
gagccagtctcctcctctgcccctagcaacaactttggagttccaaagaccctagcattacttttaaatacagtcatctctcagggtggtggactctaatagctgttgaggtacagggca

SEQ ID NO: 125106 - DNA, 120 bp, Artificial Sequence
  ENSG00000101489_42 (sequence is synthesized)
agaatgggagaggcatcagggctttctggagtggtagttgggagcttctggggctcagagcctgggagattggtctccaggagctgaggcccctgtcggggagggatgccccctggaagc

SEQ ID NO: 125107 - DNA, 120 bp, Artificial Sequence
  ENSG00000101489_43 (sequence is synthesized)
ttgtggatcgggcgactaaccaaagtaaatgctttggcttcgtgagcttcgacaacccggccagcgcgcagaccgccatccaggccatgaacggcttccagatcggcatgaagaggctca

SEQ ID NO: 125108 - DNA, 120 bp, Artificial Sequence
  ENSG00000101489_44 (sequence is synthesized)
gggaagatgcagggtggggagactccgcggagggagcaaaatagaaaagcaaagggaggtacgagaggcagacagccgggaacaccgagaggcagagaagctccgagaacagtgcacggg

SEQ ID NO: 125109 - DNA, 120 bp, Artificial Sequence
  ENSG00000101489_45 (sequence is synthesized)
aaagtgtttgtggatcgggcgactaaccaaagtaaatgctttggtgggtaaagataacaaaccaattagcttcacctaggacagggcggtgctcgcaccaacctaccggtgtccgactgc

SEQ ID NO: 125110 - DNA, 120 bp, Artificial Sequence
  ENSG00000101489_46 (sequence is synthesized)
caggcctggggccagcactgcatggggtggggagagagagtggaaagagggagggctgtgctggcagagaccctccaggctgccttcttgtcagcgggccaccgagagtgcccctgcagt

SEQ ID NO: 125111 - DNA, 120 bp, Artificial Sequence
  ENSG00000101489_47 (sequence is synthesized)
ggggttgggcagaacttcaggcaagtgggcaggccaggtggaagtttcacccttgctgggcagttacctgtctttgaggccagatttcccttccccatggagcttccagggccactttgc

SEQ ID NO: 125112 - DNA, 120 bp, Artificial Sequence
  ENSG00000101493_0 (sequence is synthesized)
agtgcagcgctcggctccgcgccgcgggcgctcggcttcaccttcagatgcgcggggcgtgcgcgtcctcctccccaggcccgccgcctccctgccaagaatctgagagaggccgagtgg

SEQ ID NO: 125113 - DNA, 120 bp, Artificial Sequence
  ENSG00000101493_1 (sequence is synthesized)
agttcggtccttctctgaacacttttagctgagagtaccagcatccaactgggagcgttgtcattgcatttccacattcccaggaaagcccaggtgctggctgccagctgctgcgccccc

SEQ ID NO: 125114 - DNA, 120 bp, Artificial Sequence
  ENSG00000101493_2 (sequence is synthesized)
catgtagaaggtgcacctcctgggagcaggcacgtcttttggctcttctgaccatggagagataggacggtccctgcagcccgcgcgacagaaagctgtgccgccaccaccggccgcgcc

SEQ ID NO: 125115 - DNA, 120 bp, Artificial Sequence
  ENSG00000101493_3 (sequence is synthesized)
cgtccttcggatggatcgcaacagagaggccgagatggagctgaggcgaggccccagccccaccagggccggccggggccacgaggtggatggggacaaggctacctgccacacctgctg

SEQ ID NO: 125116 - DNA, 120 bp, Artificial Sequence
  ENSG00000101493_4 (sequence is synthesized)
catctgcggcaagagcttccccttccagagctcgctttcgcagcacatgcgcaagcacacgggcgagaagccctacaagtgtccctactgcgaccaccgggcttcccagaagggcaacct

SEQ ID NO: 125117 - DNA, 120 bp, Artificial Sequence
  ENSG00000101493_5 (sequence is synthesized)
gaagattcacatccggagccaccgcacggggactctgattcagggacacgagccggaggcgggcgaggcgccgctgggtgagatgcgcgcctccgagggcctggacgcctgcgccagccc

SEQ ID NO: 125118 - DNA, 120 bp, Artificial Sequence
  ENSG00000101493_6 (sequence is synthesized)
caccaagagcgcctcggcctgcaaccggctgctgaacggggcctcgcaggccgacggcgccagggtcctgaacggggcctcgcaggccgacagcggcagagtcctgctgcggagcagcaa

SEQ ID NO: 125119 - DNA, 120 bp, Artificial Sequence
  ENSG00000101493_7 (sequence is synthesized)
gaagggggcagaggggtccgcatgcgccccgggggaggccaaggcagcggtccagtgctccttctgcaagagccagttcgagcgtaagaaggacctggagctgcacgtgcaccaggcgca

SEQ ID NO: 125120 - DNA, 120 bp, Artificial Sequence
  ENSG00000101493_8 (sequence is synthesized)
caagccgttcaagtgcaggctgtgcagctacgcgacgctgcgggaggagtcgctgctgagccacatcgagagggaccacatcaccgcgcaggggcccggcagcggcgaggcctgcgtgga

SEQ ID NO: 125121 - DNA, 120 bp, Artificial Sequence
  ENSG00000101493_9 (sequence is synthesized)
gaacggcaagcccgagctgagccccggggagttcccgtgcgaggtgtgtggccaggccttcagccagacctggttcctgaaggcgcacatgaagaagcaccggggctccttcgaccacgg

SEQ ID NO: 125122 - DNA, 120 bp, Artificial Sequence
  ENSG00000101493_10 (sequence is synthesized)
ctgccacatctgcggccgtaggttcaaggagccctggttcctcaagaaccacatgaaggcgcacggccccaagacgggcagcaagaacaggcccaagagtgagctggaccccatcgccac

SEQ ID NO: 125123 - DNA, 120 bp, Artificial Sequence
  ENSG00000101493_11 (sequence is synthesized)
catcaacaacgtggtccaggaggaggtgatcgtcgccggcctgagcctctacgaggtctgcgccaagtgcgggaacctgtttacaaacctggacagcttgaacgcccacaatgccatcca

SEQ ID NO: 125124 - DNA, 120 bp, Artificial Sequence
  ENSG00000101493_12 (sequence is synthesized)
ccgcagagtcgaggccagccgcacgcgcgccccggccgaggagggggcggaggggccctcggacaccaagcagttcttcctccagtgcctgaacctgaggccgtcggcggccggcgactc

SEQ ID NO: 125125 - DNA, 120 bp, Artificial Sequence
  ENSG00000101493_13 (sequence is synthesized)
gtgccctggcacgcaggccggacggcgggtggctgagctggacccggtcaacagctaccaggcctggcagctggccacgcggggtaaggtggccgagccggccgagtacctcaagtacgg

SEQ ID NO: 125126 - DNA, 120 bp, Artificial Sequence
  ENSG00000101493_14 (sequence is synthesized)
ggcctgggacgaggcgctggccggggacgtggccttcgacaaggacaggcgcgagtacgtcctggtgagccaggagaagcgcaagcgtgagcaggatgcaccagccgcgcaggggccccc

SEQ ID NO: 125127 - DNA, 120 bp, Artificial Sequence
  ENSG00000101493_15 (sequence is synthesized)
ctggggaccccgcgcccgccggccacctcgatccccgctcggccgcgcgccccaaccgcagggccgcagccaccaccggccagggcaagtcctccgagtgcttcgagtgcggcaagatct

SEQ ID NO: 125128 - DNA, 120 bp, Artificial Sequence
  ENSG00000101493_16 (sequence is synthesized)
cttcgagtgcggcaagatcttccgcacctatcatcagatggtgctgcactcacgcgtgcatcgccgcgcgcgccgcgagagggacagtgacggggacagggcggcgcgggcccgctgcgg

SEQ ID NO: 125129 - DNA, 120 bp, Artificial Sequence
  ENSG00000101493_17 (sequence is synthesized)
atcactcagtgagggtgactcggcctcccagcccagcagccctggctccgcctgtgccgctgctgactccccgggctctggcctggccgacgaggctgccgaagacagtggtgaggaggg

SEQ ID NO: 125130 - DNA, 120 bp, Artificial Sequence
  ENSG00000101493_18 (sequence is synthesized)
cgcccctgaacctgcaccagggggacagccgcgccgctgctgcttttccgaagaggtgacttcgaccgagctctccagtggagaccagagtcacaagatgggagataacgcctcggaaag

SEQ ID NO: 125131 - DNA, 120 bp, Artificial Sequence
  ENSG00000101493_19 (sequence is synthesized)
agacaccggcgagtccaaggcagggatcgcagcttctgtgtccatacttgaaaacagtagcagagagacttctagaaggcaagagcagcacagattttctatggacttaaagatgccagc

SEQ ID NO: 125132 - DNA, 120 bp, Artificial Sequence
  ENSG00000101493_20 (sequence is synthesized)
atttcaccccaagcaggaggtgcccgtccctggtgatggtgtggagttcccttccagtacgggagcggagggccagacgggtcaccctgcagaaaagctgtccgatttgcacaacaagga

SEQ ID NO: 125133 - DNA, 120 bp, Artificial Sequence
  ENSG00000101493_21 (sequence is synthesized)
acactctgggggagggaagcgggcgctggccccagacctcatgccgctagatttaagtgcgaggtcgacgcgggatgaccccagcaataaggagacggcctcctccctgcaggcggcttt

SEQ ID NO: 125134 - DNA, 120 bp, Artificial Sequence
  ENSG00000101493_22 (sequence is synthesized)
agtcgttcacccgtgtccttactgcagccacaagacctactaccccgaggtcctgtggatgcacaaacgcatctggcaccgcgtcagctgcaactccgtggctcccccgtggattcagcc

SEQ ID NO: 125135 - DNA, 120 bp, Artificial Sequence
  ENSG00000101493_23 (sequence is synthesized)
caatggttacaaaagcatcagaagcaatttggttttcctttcccggagcggacgcacgggccccccgcctgccctcggtggcaaagaatgccagcctttgctccttgctcggttcacccg

SEQ ID NO: 125136 - DNA, 120 bp, Artificial Sequence
  ENSG00000101493_24 (sequence is synthesized)
cactcaggtgccaggggggatgccggggtccaaaagtggctcttctcccctgggagtggtcacaaaagccgctagcatgcctaagaataaggagagccattccggaggtccctgcgctct

SEQ ID NO: 125137 - DNA, 120 bp, Artificial Sequence
  ENSG00000101493_25 (sequence is synthesized)
gtgggcgcccggccctgacgggtatcgacagaccaaaccttgtcacggccaggagccacatggcgcggccacacaggggcccctggccaagcccaggcaggaggctagctccaaaccggt

SEQ ID NO: 125138 - DNA, 120 bp, Artificial Sequence
  ENSG00000101493_26 (sequence is synthesized)
gcctgccccgggtggcgggggcttcagcaggagcgccacccctacgcccaccgtcatcgcccgggctggcgcgcagccctcggccaatagcaagcctgtggagaagtttggggtcccccc

SEQ ID NO: 125139 - DNA, 120 bp, Artificial Sequence
  ENSG00000101493_27 (sequence is synthesized)
agcgggggctggctttgcccccacaaataagcacagtgccccggactccctgaaagccaaattcagtgctcagcctcagggtccacctcctgcaaagggcgaagggggcgctcctcctct

SEQ ID NO: 125140 - DNA, 120 bp, Artificial Sequence
  ENSG00000101493_28 (sequence is synthesized)
ctctacctccccgcgagcccccctcgaaggcagcccaggagctgaggactctggccacctgtgctgcggggtccaggggcgacgcggccttgcaggcccagcccggcgtggctggggcgc

SEQ ID NO: 125141 - DNA, 120 bp, Artificial Sequence
  ENSG00000101493_29 (sequence is synthesized)
cgtcctacactccatcaaacaggagccggtggccgaggggcatgagaagcgcctggacatcctcaacatctttaagacgtacattccaaaggactttgcgaccctctaccagggatgggg

SEQ ID NO: 125142 - DNA, 120 bp, Artificial Sequence
  ENSG00000101493_30 (sequence is synthesized)
tgtcagcggccctgggttggagcacagagggacactccggacgcaggcccggccaggagagttcgtctgcatcgagtgcggaaagagcttccaccagcccggccacctcagggcccacat

SEQ ID NO: 125143 - DNA, 120 bp, Artificial Sequence
  ENSG00000101493_31 (sequence is synthesized)
gcgggcacactcagtggtgtttgagtccgatgggcctcggggttctgaagttcataccacctccgcagacgcccccaaacaagggagagaccattctaacacaggtaccgtccagacagt

SEQ ID NO: 125144 - DNA, 120 bp, Artificial Sequence
  ENSG00000101493_32 (sequence is synthesized)
gcctctgagaaagggaacctaaaggcgtgtttccgacgcaccccaggtccccgtaacggccattagcagtaccctcacgatgtcccagcagcctcccacctgtgacctggccgctccatg

SEQ ID NO: 125145 - DNA, 120 bp, Artificial Sequence
  ENSG00000101493_33 (sequence is synthesized)
gaagaacagccggggaactcctgagcagacacctcacatcccgagccgctgcgctggagtggaaactgaaggcagatgcctctccttgttaaacgttcagaaataaatgaagatgctata

SEQ ID NO: 125146 - DNA, 120 bp, Artificial Sequence
  ENSG00000101493_34 (sequence is synthesized)
ttctagaaatacatgtagatactatatacgcatttacgtgctcatcgtccatagtcccatattttcttataataaacagtagtactggcaggcacagtaggggcacaaggcatctgtctt

SEQ ID NO: 125147 - DNA, 120 bp, Artificial Sequence
  ENSG00000101493_35 (sequence is synthesized)
attcaagacaagtttgagacactggaaaaaaagatacttgttgtgtgtgttggacagagtggcgaggctgagcactgtcacaggggcctcccatgttaagagggactgtggggatgatgt

SEQ ID NO: 125148 - DNA, 120 bp, Artificial Sequence
  ENSG00000101493_36 (sequence is synthesized)
taatactactgcctctccttgtcttagtgggtatttaaaatagtaaataagagagaggaaggaggtgacgttcaggtgctgtgggaagcaggcttggcggaggggtatgatgatgagacc

SEQ ID NO: 125149 - DNA, 120 bp, Artificial Sequence
  ENSG00000101493_37 (sequence is synthesized)
ctcattgttcactggctccatcgcactcctccctggggccgtgtgcctgttccattcttcccaccattcgaactgagcgaatctggcaaaggagacacgtctgtgggaatgcgtagattc

SEQ ID NO: 125150 - DNA, 120 bp, Artificial Sequence
  ENSG00000101493_38 (sequence is synthesized)
cgcctcggaagagagctagcgcaacactaagaaaagcaggcttcttgtttattctcaggacctttttgtaacagggctacattctgcaaactgcttacaaaggaagactatacgtcttaa

SEQ ID NO: 125151 - DNA, 120 bp, Artificial Sequence
  ENSG00000101493_39 (sequence is synthesized)
caaattatttagccactgagtcctcccgattcggacctgttttagtaatggcagaagaatccctgagcaggttcaggtgccctagatgactagggtgctgagctctggcgccttctgtcc

SEQ ID NO: 125152 - DNA, 120 bp, Artificial Sequence
  ENSG00000101493_40 (sequence is synthesized)
ccactctttgcctccccgccccttccctgagccaccccagcaagtgggtgtcttttctccctgggcctggtgacctccacaggatgagtgactttgttcataaagggtggggatcaccag

SEQ ID NO: 125153 - DNA, 120 bp, Artificial Sequence
  ENSG00000101493_41 (sequence is synthesized)
ccccttgggtgggggacggcttcatatacctcttcctcagtaatgcaaatgcgagtttttgtggtgggggttaaggcccataacaaaggatcttaaaccatgcagtgtacgcaattgaaa

SEQ ID NO: 125154 - DNA, 120 bp, Artificial Sequence
  ENSG00000101493_42 (sequence is synthesized)
tggtattccacagatataaatattttcttttcccattgccgtgacactatgtgtgatggtaatatttctgagagtttcagatttttgcacatatgattttatgcattatcaaaagttact

SEQ ID NO: 125155 - DNA, 120 bp, Artificial Sequence
  ENSG00000101493_43 (sequence is synthesized)
gctgccttgaatgaaaatgttctgtgaaattttttgcaaaagctttactaggtttttttttaattgtgaaattttgtaaaggcaggaaatggattaaaacgagcatgctaaatatatttt

SEQ ID NO: 125156 - DNA, 120 bp, Artificial Sequence
  ENSG00000101493_44 (sequence is synthesized)
tcaaaaaagcaataattttacatgtacagaaattatcctaacctttaatactggcgagagcaacagtttacttaatacggtaatggactagtgcagtttttgtagacagtgggcttctga

SEQ ID NO: 125157 - DNA, 88 bp, Artificial Sequence
  ENSG00000101493_45 (sequence is synthesized)
cacacacacaaacacacacacacaccctaaagtgtgggtttcctgttctaatgatttgttgaatattgttattgttattagtaatgtt

SEQ ID NO: 125158 - DNA, 120 bp, Artificial Sequence
  ENSG00000101493_46 (sequence is synthesized)
tattattgttattgttattagtaatgtttggttctggattctacttgttactgagtttaaattacttgacggttcaggttactttgcaacactttcaaacgatgcaatgtaactggctag

SEQ ID NO: 125159 - DNA, 120 bp, Artificial Sequence
  ENSG00000101493_47 (sequence is synthesized)
tttttttttttttacttatttttttctgatattcttacaccagatatgtacgaaaatgatctgtcctgttggtgtaattaggaatgtccatgcagatacagttaaacaactgtaattgac

SEQ ID NO: 125160 - DNA, 120 bp, Artificial Sequence
  ENSG00000101493_48 (sequence is synthesized)
tgtccatgcagatacagttaaacaactgtaattgactgttctgtaaagttattttgggcaaagttgcggagacacattcctctgtccacctaagaaatcagaagactcttctgttgattt

SEQ ID NO: 125161 - DNA, 120 bp, Artificial Sequence
  ENSG00000101493_49 (sequence is synthesized)
atgtttaatcatttcagtagtttccccacagtgatcatttctgcattttctggcttttgttttcttggctgaaagtgaatggtgactgttaggaatgtcagggactagtgacccagtcct

SEQ ID NO: 125162 - DNA, 120 bp, Artificial Sequence
  ENSG00000101493_50 (sequence is synthesized)
gtttctctgtgttttagttattaaaaagaaattctgtacccaaagtgacacgaaagtgtagtctacatttttactgtttcagaagcggcatggaaaagtgcagttggcctttggagctgg

SEQ ID NO: 125163 - DNA, 120 bp, Artificial Sequence
  ENSG00000101493_51 (sequence is synthesized)
aagtgtcttgctggtgaggctccatcctggaggctctggtggggagtgggctggcgctggggccctgccggccgcgtgctggatccttcctggcttgcaggagagcaggcgtggaggaca

SEQ ID NO: 125164 - DNA, 120 bp, Artificial Sequence
  ENSG00000101493_52 (sequence is synthesized)
gtcagcttgcggggccgcgcagggtgcacagagtgcaggaggaaggttttcacccagttaaacagactggggagcccccccaagaacgccatcccttgaggccagctgtgggcaggcctg

SEQ ID NO: 125165 - DNA, 120 bp, Artificial Sequence
  ENSG00000101493_53 (sequence is synthesized)
gatgtgtggtcccttccttccacccatcgtcagtattgtgttggtttgttaatttgttgatttggtcatagtatttaatatgatttgtgtttccttatttatttagccaccgttttgatt

SEQ ID NO: 125166 - DNA, 120 bp, Artificial Sequence
  ENSG00000101493_54 (sequence is synthesized)
gcctttttttttccgaatggtaatttctgcatgatacacttctgtacgttgtcttctgactgttacagactttctactacctctcccgatctgctgtttccttgtttcttaacaggattt

SEQ ID NO: 125167 - DNA, 120 bp, Artificial Sequence
  ENSG00000101493_55 (sequence is synthesized)
tttacagtgttgcgtctaatgtaacttagacaataaagggtttggttgtctacactgcagcttctcggtgtctctcccctgctttccgctcgctgcttcccgctctgcccctgctggggc

SEQ ID NO: 125168 - DNA, 120 bp, Artificial Sequence
  ENSG00000101493_56 (sequence is synthesized)
ctggctgcaccctggcctgccttcctatactctcctgtttcctgctcatatctcttcctcatttttgcgttcaaataacacacagctaatgagcttctaaaaatcttttcaggttgttca

SEQ ID NO: 125169 - DNA, 120 bp, Artificial Sequence
  ENSG00000101493_57 (sequence is synthesized)
cttgtattccttaatttgaagaatgaatatttaaattctctcaaaagtcagatattgaggatcttctctgggaaattggccactgtacctgcccacctttctgcctggttccctggaagg

SEQ ID NO: 125170 - DNA, 120 bp, Artificial Sequence
  ENSG00000101493_58 (sequence is synthesized)
tcttattgtcatcttagacggacagatttcattctcagcaccatacagatttggcttcaaagccaggtgaattttgcctttgaggctctgaaaagtattaagtgttttaagaggtccccc

SEQ ID NO: 125171 - DNA, 120 bp, Artificial Sequence
  ENSG00000101493_59 (sequence is synthesized)
aatatttacttatttattttttaaaccaagaaagacactggttccctgaaaagcaggtgcttcaggaagtagcaattgggagttgcatacagttacttcgtcagagaaaggagcgcccag

SEQ ID NO: 125172 - DNA, 120 bp, Artificial Sequence
  ENSG00000101493_60 (sequence is synthesized)
tatgacaggcccccacccctgatccggccactgtgcacaggtcgctgagggtgtgagaacacctctgcaggggctccggcacatgtgggtttcatcgtctcacactccttcaggctgcag

SEQ ID NO: 125173 - DNA, 120 bp, Artificial Sequence
  ENSG00000101493_61 (sequence is synthesized)
gggttgagtgcagaaagggcaagcttcatctccatggtgcctctccaggctggcaactctggtcggcctctgttctttggacagagagggtgtaggttacagggtcagtagggatgcttt

SEQ ID NO: 125174 - DNA, 120 bp, Artificial Sequence
  ENSG00000101493_62 (sequence is synthesized)
ctggatcaaagaaagtgggtgtagtgcttagtctgttgtgtggaagagggcacctcctgggctttcgtggctggagactgtctaccaacattccttccttcaaactagacaaaccctcct

SEQ ID NO: 125175 - DNA, 120 bp, Artificial Sequence
  ENSG00000101493_63 (sequence is synthesized)
ctgccacccccagcaaattctcagaggtttccaagctgtagaaaaaggaaggaaggaaggacggcattcacatagctttactttctgcttcaaaatgtcttaagtagcatatgttgtttt

SEQ ID NO: 125176 - DNA, 120 bp, Artificial Sequence
  ENSG00000101493_64 (sequence is synthesized)
actgcttttaactttggtgagttctaatttcagaacgttttgttcactgagcaaaaaaacagatgaaacaaccacaggccaggacttcaagtgaggaggacgcctttgtttgccgtggtt

SEQ ID NO: 125177 - DNA, 120 bp, Artificial Sequence
  ENSG00000101493_65 (sequence is synthesized)
ggtgggagcacacgccggagcccggtaacgtgcctgtgggagtgaccaagggccacccgcccaagggaaaatgttcattcttcatcagctttgctaattctgctttgaggcagtaaaatg

SEQ ID NO: 125178 - DNA, 120 bp, Artificial Sequence
  ENSG00000101493_66 (sequence is synthesized)
tgctttgaggcagtaaaatgcaaaagaccatagaatttgtatttctttttttaaaatacaatttataacattatattttgtactctttatattagaatttgtaactagattgatgtattt

SEQ ID NO: 125179 - DNA, 120 bp, Artificial Sequence
  ENSG00000101493_67 (sequence is synthesized)
ttcaatgttttagttgtgtgataaaaatatttagataaaacatattcattctattggaatttgaaataaataaaaacatcttggagttctgagatttgtaagacatttttccccaatttc

SEQ ID NO: 125180 - DNA, 120 bp, Artificial Sequence
  ENSG00000101493_68 (sequence is synthesized)
agagggtggcgtaaatcgtttgacagcccgctttggtctgtggttatttatttttgttggctgaacataaaccaaagtgttaatgctctttatttatggaagagttttagggtaattcac

SEQ ID NO: 125181 - DNA, 120 bp, Artificial Sequence
  ENSG00000101493_69 (sequence is synthesized)
aagatcgttcatctgaacagatgcccagatggcccgagtggtttttttccaactcttttgtggactcgaggacatacagttttttaatggagacgctgtgtttttctcattttctttcac

SEQ ID NO: 125182 - DNA, 120 bp, Artificial Sequence
  ENSG00000101493_70 (sequence is synthesized)
agcacacatgttatttccccactgaatacacccactgttcttacccttgcactgtcacccatacaggacgcacagggatggacgcggacggaattctgactcagccacacctggaggaaa

SEQ ID NO: 125183 - DNA, 120 bp, Artificial Sequence
  ENSG00000101493_71 (sequence is synthesized)
ttattgtgtcaaaaatgtggggacacaagggctggcactgtggtttgcaatggtttactgatgagacagcaaaaatgagacaggaccatcagatgcaataaagattctaatttaaaaaga

SEQ ID NO: 125184 - DNA, 120 bp, Artificial Sequence
  ENSG00000101493_72 (sequence is synthesized)
aagtcacaaaaggaactttagtggggatcctacttacacatacagcagaaaggcattgcccccgtcagcctgccatgcagtttcgaatcttgattgaaggtgctggctgccagctgctgc

SEQ ID NO: 125185 - DNA, 120 bp, Artificial Sequence
  ENSG00000101542_0 (sequence is synthesized)
agccactcctgctagggaaggcgcgagggaggggaagcggaccgcgcgccacgctcgggggacggtgaccgcgaccagggggctcttctcactggacaggccgaacgcggtggccgcggg

SEQ ID NO: 125186 - DNA, 120 bp, Artificial Sequence
  ENSG00000101542_1 (sequence is synthesized)
agggcagggcagggcatcggcggggttggtgcacttggcagtaccccccaactcctggcaaccgcacggagactttgcgaaacatccgaaggcagaaaagctgtgacacttctgacagag

SEQ ID NO: 125187 - DNA, 120 bp, Artificial Sequence
  ENSG00000101542_2 (sequence is synthesized)
ggggtaggggggtggggggcggggacagcgccgcgagcaggggtgaagagacccagcggggcaccagccgcccagtgggggaggcagctacgtgagcagaacgcccgccctggagcagtt

SEQ ID NO: 125188 - DNA, 120 bp, Artificial Sequence
  ENSG00000101542_3 (sequence is synthesized)
aggaccgaaggtctccggagagtcgccggcggtgccaggaagtcaacttcaagcagattgacttgaaacgggatctcatttaggaagcataagtgtccaatcaaaaactgtgtatttttt

SEQ ID NO: 125189 - DNA, 120 bp, Artificial Sequence
  ENSG00000101542_4 (sequence is synthesized)
taaatttggaaaatactcaagttccagttgcttatcattctccttcattttctgaaaacctggcaatcccatgtggacttctggtagaatgagcaatgcaaagaactggcttggacttgg

SEQ ID NO: 125190 - DNA, 120 bp, Artificial Sequence
  ENSG00000101542_5 (sequence is synthesized)
catgtccttgtacttctgggggctgatggaccttacgaccaccgttctctcggacaccccaacaccacaaggtgaattagaagcactcctgtcagacaagccacagtcacatcagcggac

SEQ ID NO: 125191 - DNA, 120 bp, Artificial Sequence
  ENSG00000101542_6 (sequence is synthesized)
caagaggagctgggtttggaaccagtttttcgttctggaagagtacactgggaccgaccctttgtatgtcggcaagcttcattcagatatggacaggggagacggatccatcaaatacat

SEQ ID NO: 125192 - DNA, 120 bp, Artificial Sequence
  ENSG00000101542_7 (sequence is synthesized)
cctctcgggagaaggtgctggcatcgtgtttaccatcgacgacaccactggagacatccacgccattcagaggctcgaccgagaggaaagagcccagtatactctaagggctcaagccct

SEQ ID NO: 125193 - DNA, 120 bp, Artificial Sequence
  ENSG00000101542_8 (sequence is synthesized)
agacaggcggacgggcaggccaatggagcccgagtcagagttcatcatcaaaattcaagacatcaatgacaatgagcccaagttcctggacggaccttatgtggccactgtgccagaaat

SEQ ID NO: 125194 - DNA, 120 bp, Artificial Sequence
  ENSG00000101542_9 (sequence is synthesized)
gtcccctgtgggtacctccgtcatccaagtgacagccacagatgcagatgacccgacctacggcaacagtgccagggtggtgtacagcattcttcagggccagccatatttttctgtgga

SEQ ID NO: 125195 - DNA, 120 bp, Artificial Sequence
  ENSG00000101542_10 (sequence is synthesized)
ctctaaaacaggtgtaattaggacagcgctcatgaacatggacagagaagccaaagaatactacgaagtgattatccaagccaaggacatgggagggcagcttggaggattagctgggac

SEQ ID NO: 125196 - DNA, 120 bp, Artificial Sequence
  ENSG00000101542_11 (sequence is synthesized)
cacaacagtcaacatcaccctctcagatgtcaatgataacccaccccgctttccccagaaacattaccagatgagtgtgttggaatcagctccaattagctccactgtcgggagagtgtt

SEQ ID NO: 125197 - DNA, 120 bp, Artificial Sequence
  ENSG00000101542_12 (sequence is synthesized)
tgccaaggacttggatgaaggcatcaatgcagagatgaaatatactattgtggatggagatggtgcagatgcctttgacattagcacagatcccaatttccaagttggtatcataactgt

SEQ ID NO: 125198 - DNA, 120 bp, Artificial Sequence
  ENSG00000101542_13 (sequence is synthesized)
gaagaagcccctgagttttgaaagcaagaaaagctacaccttaaaggtggagggagccaatcctcacctagagatgcgttttctgaacttgggcccatttcaggacacaacaacagtgca

SEQ ID NO: 125199 - DNA, 120 bp, Artificial Sequence
  ENSG00000101542_14 (sequence is synthesized)
catcagtgtggaagacgtggacgagccccctgtgtttgaacctggcttttactttgtggaggtgcctgaggatgtggcgattggaacaaccatacagatcatttctgccaaggacccaga

SEQ ID NO: 125200 - DNA, 120 bp, Artificial Sequence
  ENSG00000101542_15 (sequence is synthesized)
tgtgaccaacaactcaatcagatactccattgatagaagcagtgaccctggaagatttttctatgttgacattacaacaggtgccctaatgacagcaagacccctagaccgggaagaatt

SEQ ID NO: 125201 - DNA, 120 bp, Artificial Sequence
  ENSG00000101542_16 (sequence is synthesized)
tcttagatgtgaatgacaatgctccagagttccccagattctatgaagcttttgtctgtgagaacgccaaggcaggacagctgatccagacagtgagtgcggtggaccaagatgacccac

SEQ ID NO: 125202 - DNA, 120 bp, Artificial Sequence
  ENSG00000101542_17 (sequence is synthesized)
gcaatggtcagcatttctactacagcttggctcctgaggctgctaacaaccccaactttaccataagggacaaccaagataacacagcacggattctaaccaggaggtctggtttccggc

SEQ ID NO: 125203 - DNA, 120 bp, Artificial Sequence
  ENSG00000101542_18 (sequence is synthesized)
agcaggagcagagtgtctttcacctgcctatcctgatagcagatagcgggcagcccgtgctgagcagcacaggcacactgaccatccaagtgtgcagctgtgatgacgacggccacgtca

SEQ ID NO: 125204 - DNA, 120 bp, Artificial Sequence
  ENSG00000101542_19 (sequence is synthesized)
tgtcctgcagcccagaggcctacatgctcccagtcagtttgagccggggcgccctcattgccatcctcgcctgcatctttgtcctcttagtgctggtgttgctcattttgtccatgaggc

SEQ ID NO: 125205 - DNA, 120 bp, Artificial Sequence
  ENSG00000101542_20 (sequence is synthesized)
ggcaccggaaacaaccatacatcatcgacgacgaggaaaacatccacgagaacatcgtccgctacgacgacgagggcggcggcgaggaggacaccgaggccttcgacatcgcggccatgt

SEQ ID NO: 125206 - DNA, 120 bp, Artificial Sequence
  ENSG00000101542_21 (sequence is synthesized)
ggaacccccgggaggcgcaggcgggggccgcccccaagacgcggcaggacatgctgcccgagatcgagagcctctcccgctacgtgcctcagacgtgcgcagtgaacagcactgtccaca

SEQ ID NO: 125207 - DNA, 120 bp, Artificial Sequence
  ENSG00000101542_22 (sequence is synthesized)
gctacgtgctggccaagctctacgaggccgacatggacctgtgggcaccgcccttcgactccctccagacgtatatgttcgagggggacggctctgtggcggggtcgctgagctccctgc

SEQ ID NO: 125208 - DNA, 120 bp, Artificial Sequence
  ENSG00000101542_23 (sequence is synthesized)
agtcggccacgtcggactcggaacagagcttcgacttcctgacggactgggggccccgcttccggaagctggccgagctctacggggcgtcggagggacccgcgccgctgtggtgacgga

SEQ ID NO: 125209 - DNA, 120 bp, Artificial Sequence
  ENSG00000101542_24 (sequence is synthesized)
agccaggaggcaggcgcgcgtccaaatccagacgttctccgcgggtgcttcgcggacaaggtgcagccaaccacacgagcaatactgtgctggagagtgagaatgggggtgagcaggcga

SEQ ID NO: 125210 - DNA, 120 bp, Artificial Sequence
  ENSG00000101542_25 (sequence is synthesized)
acagagctctctctggatcagctttacttgggtagattaagttaaataagcaaaaggaaacccagaaggaagagggcagaatctttaattacctttttttcttttctttttgatttttct

SEQ ID NO: 125211 - DNA, 120 bp, Artificial Sequence
  ENSG00000101542_26 (sequence is synthesized)
gacactgtgtgcgaaggcttggagtccaaggtgttctgacaagggtggcttttctctgccattcgctaaggcctttgtcacttttccaccacagaaaggctctggccttggatacagaga

SEQ ID NO: 125212 - DNA, 120 bp, Artificial Sequence
  ENSG00000101542_27 (sequence is synthesized)
tgccaattgaaagcagaaagttctactctcgtatctgttttttatcttatcttattctccatttaagagttttgctggctcaaaccacagaaaccaacccacaagaaagaacaaaaaact

SEQ ID NO: 125213 - DNA, 120 bp, Artificial Sequence
  ENSG00000101542_28 (sequence is synthesized)
tgttactcagtgaaattaacctacttgttctgggatggatggaatttcccgtaacccttttgagacaaggttaagactgaatcagccttgcatgggggtggatgggtgggagggtgggtg

SEQ ID NO: 125214 - DNA, 120 bp, Artificial Sequence
  ENSG00000101542_29 (sequence is synthesized)
aaggaagagacattgactttatgctcaagtttagtggctgaaccaagagatgttggcattacagctcatccaacgccatcaagttagagtgctcgtgtctcctctcagctatttaactgt

SEQ ID NO: 125215 - DNA, 120 bp, Artificial Sequence
  ENSG00000101542_30 (sequence is synthesized)
gcccctgcaaaattgttcagaatgaaaccagaaaaatctgcctcttttgcactgtagatgtctcttccatgtgccaaatgtggagattagatgctacaaatgaaagccaaataaaaaaga

SEQ ID NO: 125216 - DNA, 120 bp, Artificial Sequence
  ENSG00000101542_31 (sequence is synthesized)
agtatctgacaaaagcatgggttagagggctttcctaatctgtgtgaggtcaatccaagggatgtttacatactgtagataacctacttgaacaaaaatcagtattatagagaataaatg

SEQ ID NO: 125217 - DNA, 120 bp, Artificial Sequence
  ENSG00000101542_32 (sequence is synthesized)
gatgtaagaaaattacatgtacaagttttgtatatttgttaataattttggtaataaatatgatgtactgcatctcagtaccttagcacttcttttaataaaagttaaatagaaggaaaa

SEQ ID NO: 125218 - DNA, 120 bp, Artificial Sequence
  ENSG00000101542_33 (sequence is synthesized)
gatgtgcgccgggaaggggaccagagagccaggctccggggaggcgcaggcacctacggggccgatccctggtccgtgcctcgcgccgcgcccccgccggagctcggctgtgggaggaga

SEQ ID NO: 125219 - DNA, 120 bp, Artificial Sequence
  ENSG00000101542_34 (sequence is synthesized)
atctgactatcctctttccttcctacaccctgcccctgcccccttgctttcctcaatccaagaaattaattcaccttcccttttccaatcctggaacccctccttctttcagataacaca

SEQ ID NO: 125220 - DNA, 80 bp, Artificial Sequence
  ENSG00000101544_0 (sequence is synthesized)
aatcgagcgccattttctctttctggctgcgcgggaggaggggaccagtcgcgctgggggtgggcgcgcgctgaggcggg

SEQ ID NO: 125221 - DNA, 120 bp, Artificial Sequence
  ENSG00000101544_1 (sequence is synthesized)
ggccccacgggacgcggctgcgctcggcggaagacgcggcagccctgcgagaggcagcagcggagacgcggtgctcctcgggcgccaagcggaaaatttcaaaaatgtttcaaattcctg

SEQ ID NO: 125222 - DNA, 120 bp, Artificial Sequence
  ENSG00000101544_2 (sequence is synthesized)
tggaaaatcttgacaacatcagaaaggtgcgaaaaaaggtgaaaggtattcttgtggatattgggcttgacagctgcaaggagttactgaaggaccttaaaggctttgatccaggagaga

SEQ ID NO: 125223 - DNA, 120 bp, Artificial Sequence
  ENSG00000101544_3 (sequence is synthesized)
aatactttcataacacatcatggggtgatgtttctctctgggaaccttctggaaagaaagtgagatatcgaacaaagccatactgttgtggcctctgtaaatactctacaaaggtgctta

SEQ ID NO: 125224 - DNA, 120 bp, Artificial Sequence
  ENSG00000101544_4 (sequence is synthesized)
cttcattcaagaatcatttacatcgttaccatgaagatgaaattgaccaagagctggtgatcccttgcccaaactgtgtatttgcatctcagcccaaagttgtgggaaggcacttcagaa

SEQ ID NO: 125225 - DNA, 120 bp, Artificial Sequence
  ENSG00000101544_5 (sequence is synthesized)
tgttccatgcacctgtccggaaagtccagaactacacagtgaatattttaggtgaaactaaatcatctaggagcgatgtgataagtttcacatgtctaaaatgtaacttttcaaacactt

SEQ ID NO: 125226 - DNA, 120 bp, Artificial Sequence
  ENSG00000101544_6 (sequence is synthesized)
tgtactacagcatgaagaagcatgtgctggtagcccattttcactacttaattaactcctactttggcctaagaactgaggaaatgggtgagcaaccgaaaactaacgatactgtttcta

SEQ ID NO: 125227 - DNA, 120 bp, Artificial Sequence
  ENSG00000101544_7 (sequence is synthesized)
tagagaagatcccaccacctgacaaatattactgtaaaaagtgcaacgccaatgccagcagccaggatgcgttaatgtatcacattttgacatcagacatacacagagatttggagaata

SEQ ID NO: 125228 - DNA, 120 bp, Artificial Sequence
  ENSG00000101544_8 (sequence is synthesized)
agcttagatctgtgatttcagaacatattaagaggactggactcttgaagcaaacgcacattgctccaaaaccagcagcacatttggctgcaccagcaaatggcagtgctccaagcgctc

SEQ ID NO: 125229 - DNA, 120 bp, Artificial Sequence
  ENSG00000101544_9 (sequence is synthesized)
cagcgcagcctccttgcttccatcttgctttgccacagaacagtccaagcccagccgcaggacagccagtgactgtggcccagggtgcccctggaagcctcactcattccccccctgctg

SEQ ID NO: 125230 - DNA, 120 bp, Artificial Sequence
  ENSG00000101544_10 (sequence is synthesized)
ctggccaatcccacatgactctggtctccagccctctgcctgtgggccagaacagcctcaccctgcagcccccagcacctcagcccgtctttctttctcacggggttccacttcatcagt

SEQ ID NO: 125231 - DNA, 120 bp, Artificial Sequence
  ENSG00000101544_11 (sequence is synthesized)
ctgtgaatcctcctgtgttgcccttgagtcagccagtcggacctgtcaataagtctgttggaactagtgtcctccccataaatcagactgttcgccctggggttttacccctcacccagc

SEQ ID NO: 125232 - DNA, 120 bp, Artificial Sequence
  ENSG00000101544_12 (sequence is synthesized)
ctgtgggacccataaacagacctgttgggcctggtgttcttcctgtgagcccctctgtcacccctggggtcctgcaggctgtctcgccaggggtgctttctgtgagtcgggcggtcccgt

SEQ ID NO: 125233 - DNA, 120 bp, Artificial Sequence
  ENSG00000101544_13 (sequence is synthesized)
ctggagtccttcctgcaggccagatgactcctgcaggccagatgactcctgcaggggttatccctgggcaaacagcaacttctggggttcttcctactggccagatggtccagtcaggag

SEQ ID NO: 125234 - DNA, 120 bp, Artificial Sequence
  ENSG00000101544_14 (sequence is synthesized)
ttctccctgtgggccagacagctccgtcacgggttcttcccccaggccagacagccccattgagggttatctctgcaggccaggtggtcccgtctgggcttctttctcccaaccagacag

SEQ ID NO: 125235 - DNA, 120 bp, Artificial Sequence
  ENSG00000101544_15 (sequence is synthesized)
tctcctcctcagctgttgtgcctgtaaaccagggtgtgaattctggtgttctgcagcttagtcagcctgttgtgtcgggagttcttcctgtgggccagccagtgaggcctggggtcttgc

SEQ ID NO: 125236 - DNA, 120 bp, Artificial Sequence
  ENSG00000101544_16 (sequence is synthesized)
aactcaaccagactgtgggcaccaacattctgcctgtgaatcagccagtgagacctggtgcttcgcagaacaccaccttcctgacatcaggctctattctcagacagctcatccctacag

SEQ ID NO: 125237 - DNA, 120 bp, Artificial Sequence
  ENSG00000101544_17 (sequence is synthesized)
ggaaacaagtgaatgggattccaacctacacgctggcccccgtgtctgtcactctgccggttccccctggaggccttgcgactgtcgctccgccccagatgcccatccagctcctgccgt

SEQ ID NO: 125238 - DNA, 120 bp, Artificial Sequence
  ENSG00000101544_18 (sequence is synthesized)
caggtgcagctgcaccaatggccggttccatgcccggcatgccctctcctccagtgctggtgaatgctgctcagagcgtgtttgttcaggcctcctcctctgcagcagacacaaaccagg

SEQ ID NO: 125239 - DNA, 120 bp, Artificial Sequence
  ENSG00000101544_19 (sequence is synthesized)
tgctcaaacaggccaagcagtggaagacctgccctgtctgcaacgagctctttccgtccaacgtctaccaggtccacatggaggtagcgcataagcacagcgagtccaagtctggtgaga

SEQ ID NO: 125240 - DNA, 120 bp, Artificial Sequence
  ENSG00000101544_20 (sequence is synthesized)
aacttgagcctgaaaaactggcagcgtgtgcaccatttctaaagtggatgagagagaaaacggtgcgatgtctgtcttgtaagtgcttggtctctgaggaagagcttatacaccacttgc

SEQ ID NO: 125241 - DNA, 120 bp, Artificial Sequence
  ENSG00000101544_21 (sequence is synthesized)
acagaggttttcaattagatgtcgatgccaatggcaacctgctctttccccaccttgatttcatcaccatattgccaaaggagaagcttggggagcgggaagtctacttggcaatcctgg

SEQ ID NO: 125242 - DNA, 120 bp, Artificial Sequence
  ENSG00000101544_22 (sequence is synthesized)
ctgggatacactccaagtcactggtgcctgtgtatgtgaaggtgaggcctcaggctgagggcacccccgggagcaccggcaagcgagtgtccacctgccccttttgctttggcccctttg

SEQ ID NO: 125243 - DNA, 120 bp, Artificial Sequence
  ENSG00000101544_23 (sequence is synthesized)
tgacaactgaggcctatgagctgcatttgaaggagaggcaccacatcatgcccacagtccacacggtcctgaagtctcccgccttcaagtgcatccactgctgtggggtctacacgggaa

SEQ ID NO: 125244 - DNA, 120 bp, Artificial Sequence
  ENSG00000101544_24 (sequence is synthesized)
atatgaccctggctgccatcgccgtccatttggtgcgctgcagaagtgctcccaaggacagcagctcagacctgcaggcccagccgggttttattcacaacagtgaactgcttttagtca

SEQ ID NO: 125245 - DNA, 120 bp, Artificial Sequence
  ENSG00000101544_25 (sequence is synthesized)
gtggtgaagtgatgcatgattccagtttttctgttaagagaaagctgcctgacggccacttaggggccgaagaccagcggcatggggaggagcagcctcccatcctaaatgccgatgcag

SEQ ID NO: 125246 - DNA, 120 bp, Artificial Sequence
  ENSG00000101544_26 (sequence is synthesized)
ccccgggtccagaaaaggtgacgagtgttgtgccttttaaaagacaaaggaatgaaagcagaacagagggacctattgtcaaggacgaggctcttcagattttagcattagatcctaaaa

SEQ ID NO: 125247 - DNA, 120 bp, Artificial Sequence
  ENSG00000101544_27 (sequence is synthesized)
aatatgaaggccgttcttatgaagaaaagaagcaatttcttaaagattatttccataagaaaccatatcctagtaaaaaggaaatagaactgttgtcctcactcttttgggtgtggaaaa

SEQ ID NO: 125248 - DNA, 120 bp, Artificial Sequence
  ENSG00000101544_28 (sequence is synthesized)
ttgatgtggcttcattttttggaaaaagaaggtatatttgcatgaaagcaataaaaaatcacaagccttctgtacttttaggctttgatatgtctgaacttaaaaatgtgaaacatagat

SEQ ID NO: 125249 - DNA, 120 bp, Artificial Sequence
  ENSG00000101544_29 (sequence is synthesized)
tgaactttgaatatgaaccataaaacttgcaaaaaaaaaaaaaagtaactctaaagtagtaggtagatttttttcagttgaaatttcacagtgttgtcctcactgtgttggtgaatcaac

SEQ ID NO: 125250 - DNA, 120 bp, Artificial Sequence
  ENSG00000101544_30 (sequence is synthesized)
ctcagtggtcactgtgctgctctgcagagttacttcaggtgctggagagacccctgttaccaggaagccagtagttatttcacatctattgtttcctgcagtttgatttgtaacagaaca

SEQ ID NO: 125251 - DNA, 120 bp, Artificial Sequence
  ENSG00000101544_31 (sequence is synthesized)
gttgttttcaggtttttttctctgtcatgtaaatgaaatcttttgatatttcatgcacgccttgttttcccactagtgtcagtatcgtatgataagaaactgaaatctataaataatttg

SEQ ID NO: 125252 - DNA, 120 bp, Artificial Sequence
  ENSG00000101544_32 (sequence is synthesized)
ctttttcattaaggacatttcagcctttttcagaatacttgatttaactgcgagtggaagcatcgatctccttcagctttccctgtagcagcagatggtacagtgagtgttcagagacgt

SEQ ID NO: 125253 - DNA, 120 bp, Artificial Sequence
  ENSG00000101544_33 (sequence is synthesized)
gggtacaaaccctgtgatgtatgtataaggctccctgaggatgcactgcattaacttacgctgacttctttgtaagatctttgcttatagattataatttagatctgtatttttttaggt

SEQ ID NO: 125254 - DNA, 120 bp, Artificial Sequence
  ENSG00000101544_34 (sequence is synthesized)
ttatcctaatagctgtttttttttttaaccataactcatagaaaatcaaatgtttttatttgttaaaagtagactgaatttgacatctggtatgctggtatgtagctcatacatcaagag

SEQ ID NO: 125255 - DNA, 120 bp, Artificial Sequence
  ENSG00000101544_35 (sequence is synthesized)
ttattttacaaataaatttattctgtagatgcagaaatatttttcagtgtagattttcccttttgatatgctaagtcatttctccgttcagaggtaaaacaataaatttttagtgccttt

SEQ ID NO: 125256 - DNA, 120 bp, Artificial Sequence
  ENSG00000101544_36 (sequence is synthesized)
agaataaacattgaaagaatacaccccaaaactcttctcctaacttaactactcataaactagtgaaagggaaggtctatgatactcaggaataagattattgcccctgagtgtgaaaac

SEQ ID NO: 125257 - DNA, 120 bp, Artificial Sequence
  ENSG00000101544_37 (sequence is synthesized)
taacttaaatttcagcatagggtttcaggggacatggcgaagtttacagactgagatctcagtctccatggttggtacagtaagtctttgaccacattttctgaaggtcatgtttagtgg

SEQ ID NO: 125258 - DNA, 120 bp, Artificial Sequence
  ENSG00000101544_38 (sequence is synthesized)
agaaacgggcttttctctagctggtttaggctggaagctgtgtccgggtcgatgggatggcatattgttaaagaatctccattgtcgtcactgtcctgtggatgttaaacctcgtttttt

SEQ ID NO: 125259 - DNA, 120 bp, Artificial Sequence
  ENSG00000101544_39 (sequence is synthesized)
tccccacacgatattaaaacttaaagcaccagaaccagtcatggagaccagccagtttagatggtaagtcatatttctggtggtacacagcagaggaaccccttcactctatctttaggt

SEQ ID NO: 125260 - DNA, 120 bp, Artificial Sequence
  ENSG00000101544_40 (sequence is synthesized)
agaaatatttggaggatgtgacagcctctgagaaacataatgttactatgtggattttaaaaaatataatacttgcatgtaattgctataatgttcatatttgaggcagttgtgaaactg

SEQ ID NO: 125261 - DNA, 120 bp, Artificial Sequence
  ENSG00000101544_41 (sequence is synthesized)
gtttatgattgttggtgtactctgttgtaaattcaaagagagcttgttgaacattttttttttttacctattgttttcagagtgtctattttgaattaaaatttgttacaccgctgcaaa

SEQ ID NO: 125262 - DNA, 120 bp, Artificial Sequence
  ENSG00000101544_42 (sequence is synthesized)
tggaaagaaagtgttgttagcaccttcctcggtatcagactcagctcatcccagacttgacttggctgtcccctctcaccagcttctgtggtcaaagtcatgctggccttgggaatttgg

SEQ ID NO: 125263 - DNA, 120 bp, Artificial Sequence
  ENSG00000101544_43 (sequence is synthesized)
acgtgggagcgggggccgccccgggagggcggagaaggggatggggacctgaggggagagtaggaataggggaaagacgaggacggggaccgagggagagaggggggctggtgaagggag

SEQ ID NO: 125264 - DNA, 120 bp, Artificial Sequence
  ENSG00000101544_44 (sequence is synthesized)
cgaggagtagagggagagggaacggggatggagaagaagagagggggcaaggagctgtggcgacccctgtaaggactccagaaacgccccgcccgctggcccgcccgccgcatccccgag

SEQ ID NO: 125265 - DNA, 120 bp, Artificial Sequence
  ENSG00000101544_45 (sequence is synthesized)
tgggcttgacagctgcaaggagttactgaagcccgacaggaagagtggagccctgcgctgtgtgcgtgcgttttaaagcgtgctggaaacgtctacaatggcagcgcagccagcagccac

SEQ ID NO: 125266 - DNA, 120 bp, Artificial Sequence
  ENSG00000101546_0 (sequence is synthesized)
gcccgttgtctccctgctcgctccgggtcccggcgccgcgccatgtgggctgcggcgggcgggctgtggcgctcccgcgcgggtctccgggccctgttccgtagccgcgatgctgcgcta

SEQ ID NO: 125267 - DNA, 120 bp, Artificial Sequence
  ENSG00000101546_1 (sequence is synthesized)
gtagccgcgatgctgcgctatttccaggctgcgagcggggacttcactgctctgctgtctcctgcaagaactggctcaagaaatttgcctcgaaaaccaaaaaaaaggtttggtatgaaa

SEQ ID NO: 125268 - DNA, 120 bp, Artificial Sequence
  ENSG00000101546_2 (sequence is synthesized)
gtccttccttgggttctcactcgacttacaaaccatccaagttggaattcctcatgaggagcacctcaaagaaaaccaggaaggaagaccatgcgcgcctgagggccctgaacggcctcc

SEQ ID NO: 125269 - DNA, 120 bp, Artificial Sequence
  ENSG00000101546_3 (sequence is synthesized)
tctataaggcactgacagacctgctgtgtacccctgaagtgagtcaggagctgtatgaccttaacgtggagctctccaaggtttccctgactccagacttctcagcctgccgagcgtact

SEQ ID NO: 125270 - DNA, 120 bp, Artificial Sequence
  ENSG00000101546_4 (sequence is synthesized)
ggaagacaacgctctctgctgagcagaacgcacacatggaggctgtcctgcagagaagtgccgcgcacatgaggcaccttttgatgtcccagcagaccctgaggaatgtgccaccgatag

SEQ ID NO: 125271 - DNA, 120 bp, Artificial Sequence
  ENSG00000101546_5 (sequence is synthesized)
tgtttgttcaagacaagggaaatgcagctctagctgagcttgatcagttactggcagtcgcagactttggaccccgggatgaaagagacaactttgtacaaaatgatttcagggaccctg

SEQ ID NO: 125272 - DNA, 120 bp, Artificial Sequence
  ENSG00000101546_6 (sequence is synthesized)
atgccccacaaccctgcggcaccacagagccgaccacaagctccagtctgtgtgggatcgatcatgaggcgctcaacaagcagattatggagtacaaaaggaggaaagataaagggctcg

SEQ ID NO: 125273 - DNA, 120 bp, Artificial Sequence
  ENSG00000101546_7 (sequence is synthesized)
ggggcctggtgtggcaggggcaggtggctgagctgacaacgcagatgaaaaagggaaggaagagggccaagccccgcctggagcaggacagctccctcaagagttacctgtcaggcgagg

SEQ ID NO: 125274 - DNA, 120 bp, Artificial Sequence
  ENSG00000101546_8 (sequence is synthesized)
aggttgaagatgacctggacctggttggtgccccggagtacgaatgctatgccccggacacagaggagttggaggcagagagaggaggtggcagaacagaggatggccacagctgcggag

SEQ ID NO: 125275 - DNA, 120 bp, Artificial Sequence
  ENSG00000101546_9 (sequence is synthesized)
caagcagggagtagatggagaggctctgcccatcccacatttgcagggaaaagcattggcacgcaacgcagcatgtggcttcattgaggcagttgatggagttaaaccatctgctcttct

SEQ ID NO: 125276 - DNA, 120 bp, Artificial Sequence
  ENSG00000101546_10 (sequence is synthesized)
gctacttcaacattttctagcttttccgtgtatctaaacacaatttgctacacaagtcactgtttttttttccatgcactgtgtgtaatttaaaaattaaatggccatcttatcacagat

SEQ ID NO: 125277 - DNA, 120 bp, Artificial Sequence
  ENSG00000101546_11 (sequence is synthesized)
tctcacaaaaagaaaatggtaaaatagtgtctctgagatgctggcatggccacctccacctgcagagccctgccaggtgccagtgagtgcttggcccgaggggtcaggccacagcagtgg

SEQ ID NO: 125278 - DNA, 120 bp, Artificial Sequence
  ENSG00000101546_12 (sequence is synthesized)
ccggggtaagaactgaacctgcaaacctggggagaacagagggtccccagagcctcccaaccccctggagctgggctccgtccctggggctgctgggctggcacgtggcgccgggggctc

SEQ ID NO: 125279 - DNA, 120 bp, Artificial Sequence
  ENSG00000101546_13 (sequence is synthesized)
catccctggggctgctgggtcggcacgtggcgccgggggctccgtccctgactggcctcttcacagctttgtgcagcaggctccaccttctggttcaggccaaggttgggcagaaagtga

SEQ ID NO: 125280 - DNA, 120 bp, Artificial Sequence
  ENSG00000101546_14 (sequence is synthesized)
gttgggtttgctggggcttcctgggcgaccccggctctgaccgtggttccatcacgcctgaagtagtaacacttttcccttggtgcccgtggccagctagtgtattttctaatccatcca

SEQ ID NO: 125281 - DNA, 120 bp, Artificial Sequence
  ENSG00000101546_15 (sequence is synthesized)
aaggtgaaacagacttggtctttgccttctgaagagtgtgcgactctgagtcatactgaattctttgtgtcacctccgacgcaaagattcgttttgctgtttatcagaagagaaaacaca

SEQ ID NO: 125282 - DNA, 120 bp, Artificial Sequence
  ENSG00000101546_16 (sequence is synthesized)
gattccataccttgtcagctcctatttagttcggcttccctcttaatgtcccagcccctgtgagctgtcaggttctaaattcagaattctctcaattctgtcaggttctgcactacgagt

SEQ ID NO: 125283 - DNA, 120 bp, Artificial Sequence
  ENSG00000101546_17 (sequence is synthesized)
cagtgtcatccctccaagccctggctctctgccagtgcagcagggctgtgagaatcaagacggcacagggaaggcatctgtcccagcatttgcacatgacaggtgcccacggtgcaggag

SEQ ID NO: 125284 - DNA, 120 bp, Artificial Sequence
  ENSG00000101546_18 (sequence is synthesized)
tagaatctgtggaagcagcagtggctttagttgctgtgccctgccacctcctccccaaaaaggagaagtgtccaagggatagcagacccgtagcactgagcggcctgccgtgctgaccac

SEQ ID NO: 125285 - DNA, 120 bp, Artificial Sequence
  ENSG00000101546_19 (sequence is synthesized)
tggatccaggccacgtgctgcagacagcggctgtgggcgagtgatgaggccactacccagaaagctgcatgtgcactgtgtggggtaaggacagtaggagatgctgctgcaagatgctga

SEQ ID NO: 125286 - DNA, 120 bp, Artificial Sequence
  ENSG00000101546_20 (sequence is synthesized)
ctcccttgtttttcttttcatttgtgctctgggactaagctgtgtataagtcatcaaatggcagaagcaagatttttcttttgagatctaggaaattatttgtttatactctacactctt

SEQ ID NO: 125287 - DNA, 120 bp, Artificial Sequence
  ENSG00000101546_21 (sequence is synthesized)
atttcctatatcaggatggggaggccactacctcaggccagttaaactaagaagaaagaatttaaggcaatttgtaaggatagacaaaaccccacatgatggtatgagtaggagagagaa

SEQ ID NO: 125288 - DNA, 120 bp, Artificial Sequence
  ENSG00000101546_22 (sequence is synthesized)
aaaaaaaagggagccagaaattaggttacaaagtgtacaccacacataaaggctgatgcctctgttacaccgtgagccaaatgtttatctctagggtttctggtagccagttgcggggtg

SEQ ID NO: 125289 - DNA, 120 bp, Artificial Sequence
  ENSG00000101546_23 (sequence is synthesized)
aaatggcaaatctccctggcttacaacaaccagtttgcctcttattcttctaggggaccatcatgggctgaggtcaggccaaggccttttgtatctggtgttactggaacatggctatgt

SEQ ID NO: 125290 - DNA, 120 bp, Artificial Sequence
  ENSG00000101546_24 (sequence is synthesized)
gaattcatttatgtacaagagacctccccatcctgatgtaggaaatgaatggtgatgatttacgagcgcaacatcctaaaaaacgtttttgtatttccctagcaagataacttcaggtta

SEQ ID NO: 125291 - DNA, 120 bp, Artificial Sequence
  ENSG00000101546_25 (sequence is synthesized)
caaggctctggtacttgaccatgatgactccatgagaaaacagcagaacgccagctttgcaggtacctccacagcactgccgggctgggaacagggccagtgcttgcaccagcgctggag

SEQ ID NO: 125292 - DNA, 120 bp, Artificial Sequence
  ENSG00000101546_26 (sequence is synthesized)
ggggccacagcagagtaaagacagagtctgccatgcaggagtgcttcgcaggtcaggcactgctctgagtgctttgtgttaacctgccccccgccccctaacttgggaaaggtgttaaag

SEQ ID NO: 125293 - DNA, 120 bp, Artificial Sequence
  ENSG00000101546_27 (sequence is synthesized)
aaggagagaacgccctcaatggtgtgtcctttgcatacacacctttgcatgcatctgatgtgcccaggctgtgttttattgttctagcaatttattgttacaaaacagattgctgccatc

SEQ ID NO: 125294 - DNA, 120 bp, Artificial Sequence
  ENSG00000101546_28 (sequence is synthesized)
aatttgtctcaggtccttctagcacatctgacagggactagtgtctagagccatgaggacagagaccagaagggacaagaaggagtgggcagagggaatggaaggtagagttaggcccag

SEQ ID NO: 125295 - DNA, 120 bp, Artificial Sequence
  ENSG00000101546_29 (sequence is synthesized)
agagccccaggctgctgcccagacctccacgcctgtgccggatgtggtgttggcatccatagcagtctcgcaaagttgttctcattttccaaataaggaatctgaggcccagggagaggt

SEQ ID NO: 125296 - DNA, 120 bp, Artificial Sequence
  ENSG00000101546_30 (sequence is synthesized)
gaagtgctgcaggagatccaaccaggcgccggctcagtgcctcctagaaagaggagtgtgggcacgtttgcaggggatccaaccaggcgtcagctcagtgcctcctagaaagtggagtgt

SEQ ID NO: 125297 - DNA, 120 bp, Artificial Sequence
  ENSG00000101546_31 (sequence is synthesized)
gggcatgtttgcaggggatccaaccaggcgtcggctcagtgcctcctagaaagtggagtgtgggcacgtttgcaggggatccaaccaggcgtctgctcagtgcctcctagaaagtggagt

SEQ ID NO: 125298 - DNA, 120 bp, Artificial Sequence
  ENSG00000101546_32 (sequence is synthesized)
gtgggcacgtttgtaggggatcccaccaggcatcagctcagtgcctcctagaaagaggagtgtgggcacgtttcagagaaaactggcttaggcctccctgtttctggcgtggccttccct

SEQ ID NO: 125299 - DNA, 120 bp, Artificial Sequence
  ENSG00000101546_33 (sequence is synthesized)
gggagcgagttagggacacggaagctcacccgcttctgaatgggtccactcctggggatttccgcggccttccctgggagcgggttagggacacggaagctcacccccttctgaatgggt

SEQ ID NO: 125300 - DNA, 120 bp, Artificial Sequence
  ENSG00000101546_34 (sequence is synthesized)
ccactcctggggatttccgcggccttccctgggagcgggttagggacatggaagctcaccctcttctgaatgggtccactcctggggatttccacggcctttcctgggagcaggttaggg

SEQ ID NO: 125301 - DNA, 120 bp, Artificial Sequence
  ENSG00000101546_35 (sequence is synthesized)
acatggaagctcacgcccttctgaatgggtccactcccggggatttccatggccttccctggatgatccactcctggggattttccgcagctctccagatgacgtgcacgcacactaaac

SEQ ID NO: 125302 - DNA, 120 bp, Artificial Sequence
  ENSG00000101546_36 (sequence is synthesized)
acccagaagttagggaggcactgatccagtgaagtcctcagatcaaccttgtgagctttttacaagtacctgtcactgttaaactgctgatgaaatgtgaaacgacttcacaggttttca

SEQ ID NO: 125303 - DNA, 120 bp, Artificial Sequence
  ENSG00000101546_37 (sequence is synthesized)
gtctgataagctctcctgtgtcactgtcccttaccttgttagtaaaggtcaatggttctcaaagttccgggcacatcccctgggggctcataaaaccagactgtcggccacttcagcctt

SEQ ID NO: 125304 - DNA, 120 bp, Artificial Sequence
  ENSG00000101546_38 (sequence is synthesized)
ctggttcgctgttccttggtaatgcagatggcccagtaagcaactctacaaacattagaacattttgaggtagacaggggaacttaatcaccccttgtaggcccccagaagactggaccc

SEQ ID NO: 125305 - DNA, 120 bp, Artificial Sequence
  ENSG00000101546_39 (sequence is synthesized)
aacatccagcacaatgcctctcagccttggctgtgcatctgaaacacctgctgtttgaagacacctgggcctggagacgggccagagccaccttggtggtctgagtatgaggccagcatt

SEQ ID NO: 125306 - DNA, 120 bp, Artificial Sequence
  ENSG00000101546_40 (sequence is synthesized)
agaacctctgctctacgggtgactgccctgggttgatttttttccagtattatctttagtacagaatcttttcctctctaagggcctgagaccctctcttaggaatagaagtacagtttt

SEQ ID NO: 125307 - DNA, 120 bp, Artificial Sequence
  ENSG00000101546_41 (sequence is synthesized)
cttccccactccttttgtccagaaggaaaacctggttttacatcagaaacttgaggtactttgaaaatttgccagctgccttgaaggagagagggcttgagtgtattttgggggaagaat

SEQ ID NO: 125308 - DNA, 120 bp, Artificial Sequence
  ENSG00000101546_42 (sequence is synthesized)
gaggggacaacagggcagggagaagggacagagctagaggaaggacaggcctgtgccacccaggccagggtaaggggagcagagaccttttggttcctggtttgtgacacaggaagggag

SEQ ID NO: 125309 - DNA, 120 bp, Artificial Sequence
  ENSG00000101546_43 (sequence is synthesized)
ggaactggggaggacaggtcatgatcagtgtttcctgattaaaaattttttatttttatttttaattatcatgggcacagagtaggtgtatatatttgtggggtacatgagatgttttga

SEQ ID NO: 125310 - DNA, 120 bp, Artificial Sequence
  ENSG00000101546_44 (sequence is synthesized)
tacagacatgcaatgtgaaaaagcacatcatggagactggggcacccatcccctcaagcatttatcctttgtgccacaaacaatccgattatattgttttagttatttttaaatatgcaa

SEQ ID NO: 125311 - DNA, 120 bp, Artificial Sequence
  ENSG00000101546_45 (sequence is synthesized)
ttaaattgttattgactatagtcacccttctgtgctgctgctctactgtggcctcaaagatcataaatgctgtgggtgctggcaagatactgaaataaattaattctgtatttctaaaaa

SEQ ID NO: 125312 - DNA, 120 bp, Artificial Sequence
  ENSG00000101546_46 (sequence is synthesized)
ccaagatttagggtcaccgttttccatagctgtgtaccaaagatctgtggtcacggctttcgctggttatatgtgccgtgcctacattggccctaggtctgtattatgtgatgtgcatga

SEQ ID NO: 125313 - DNA, 120 bp, Artificial Sequence
  ENSG00000101546_47 (sequence is synthesized)
tacaaatatcacttctgtgtctaatatctgggaacctgagggttgtgtcgtgccagggcgtgtccactgggcacaggaggacaggctgttagtgcacagaccctggagcccaaggctacg

SEQ ID NO: 125314 - DNA, 120 bp, Artificial Sequence
  ENSG00000101546_48 (sequence is synthesized)
gcgatgagttcagatcaggttatttgtacagatcgcacaagttgcgttgagaaaagtcaaggcaattgcagttatgatgcattttgcatcccttttttgatgtggtagttgactaaagat

SEQ ID NO: 125315 - DNA, 120 bp, Artificial Sequence
  ENSG00000101546_49 (sequence is synthesized)
attttgcatcccttttttgatgtggtagttgactaaagatgactcttctgggctgaggttttcatttttgagtaatacgataaatctcactcctgcctcttttttttttttttctttttt

SEQ ID NO: 125316 - DNA, 120 bp, Artificial Sequence
  ENSG00000101546_50 (sequence is synthesized)
cggtgtccccgggttgcggtgtccgctcatccgcgttcttgcgcccatgcggcctagctcgccagttcctgcctcctggggtctgcagcagttctagctctcactgtcagcatttgcagc

SEQ ID NO: 125317 - DNA, 120 bp, Artificial Sequence
  ENSG00000101546_51 (sequence is synthesized)
ttttgtgttcgtggacgtgtgtcgggttaagaaaacaaagtgacaatgtgtgtttattttgattcttgtcaccagacgtatttttcagaagattagtttcagaaaatgaggaaaaatgaa

SEQ ID NO: 125318 - DNA, 120 bp, Artificial Sequence
  ENSG00000101546_52 (sequence is synthesized)
aaaatataagaatttccttgctaatgttgactttctgtgtgaatttgaagactaaagcttgtcatgataattagtgtttttaaattatgaaagataagtacaataaaatacattgacttt

SEQ ID NO: 125319 - DNA, 120 bp, Artificial Sequence
  ENSG00000101546_53 (sequence is synthesized)
tcacactgcttttagttcttctaagtatggtaggtggttgtatgttttctactttaatacactacttttaaagacagttttagaccctgcagaaaaattgcaaaaatagtaccgcgttcc

SEQ ID NO: 125320 - DNA, 120 bp, Artificial Sequence
  ENSG00000101546_54 (sequence is synthesized)
gttagcgtcggactttagcttccaacgtgttccagttaatgagccgatattgataagagtgttgctaactgaagctcatactttattcacttttccttggttctgcctgctgtcccttcc

SEQ ID NO: 125321 - DNA, 120 bp, Artificial Sequence
  ENSG00000101546_55 (sequence is synthesized)
tgtcccaggtgcccacccaaggtccacgttacattgaattgtcttgtttccttaggctggggtagtgtcccagactgtccctggttttgatggctgtgccagttttgaggggtactggtc

SEQ ID NO: 125322 - DNA, 120 bp, Artificial Sequence
  ENSG00000101546_56 (sequence is synthesized)
aggtgctttgcaggatgcctctctgttggaatgtgcctgtttttttaatgcttagacgtggattatggcttttggggaggaagactacagaggtaaaggccattctcatcgcaccgtatc

SEQ ID NO: 125323 - DNA, 120 bp, Artificial Sequence
  ENSG00000101546_57 (sequence is synthesized)
cagggtccacgctggccgtgatcccctgcatgaggtgcttgccaggtttctctaccgtaaagttactctttttgccccctttccttactgtactctgggagaaagtcgctgtgtgcagcc

SEQ ID NO: 125324 - DNA, 120 bp, Artificial Sequence
  ENSG00000101546_58 (sequence is synthesized)
catgcctaatgagtggggaattttgctcataagtggtttgcattctgcacaagggatatgtctcttcaccccatgtattaattcattcatatcaccaagaactcatgggttataatcccg

SEQ ID NO: 125325 - DNA, 120 bp, Artificial Sequence
  ENSG00000101546_59 (sequence is synthesized)
tgttacttagttttgttcgaatgtttccagctcaggcccttaggagctcactaagctcctatgtcctgtttgcataccctgtcattgtggggttttgctgggttctgtgtgtgttaaaca

SEQ ID NO: 125326 - DNA, 120 bp, Artificial Sequence
  ENSG00000101546_60 (sequence is synthesized)
ctttcctactttctggcactacaagatactccaggctcatcttgtgtgtttcgtaccacagccctaaaatcagccatttctccaagaagccctcgttccttttattggagagagagatta

SEQ ID NO: 125327 - DNA, 120 bp, Artificial Sequence
  ENSG00000101557_0 (sequence is synthesized)
gaatgagactcgtcgcaccgaagccgccgccaccaccgcgcctccgcctcggccgccgccgcagctgctcctggtccccgtccctttgccgccctcgtcaggcccagctctcctgcgccg

SEQ ID NO: 125328 - DNA, 120 bp, Artificial Sequence
  ENSG00000101557_1 (sequence is synthesized)
ccgcctcccgccgcgccccgccatgccgctctactccgttactgtaaaatggggaaaggagaaatttgaaggtgtagaattgaatacagatgaacctccaatggtattcaaggctcagct

SEQ ID NO: 125329 - DNA, 120 bp, Artificial Sequence
  ENSG00000101557_2 (sequence is synthesized)
gtttgcgttgactggagtccagcctgccagacagaaagttatggtgaaaggaggaacgctaaaggatgatgattggggaaacatcaaaataaaaaatggaatgactctactaatgatggg

SEQ ID NO: 125330 - DNA, 120 bp, Artificial Sequence
  ENSG00000101557_3 (sequence is synthesized)
gtcagcagatgctcttccagaagaaccctcagccaaaactgtcttcgtagaagacatgacagaagaacagttagcatctgctatggagttaccatgtggattgacaaaccttggtaacac

SEQ ID NO: 125331 - DNA, 120 bp, Artificial Sequence
  ENSG00000101557_4 (sequence is synthesized)
ttgttacatgaatgccacagttcagtgtattcgttctgtgcctgaactcaaagatgcccttaaaaggtatgcaggtgccttgagagcttcaggggaaatggcttcagcgcagtatattac

SEQ ID NO: 125332 - DNA, 120 bp, Artificial Sequence
  ENSG00000101557_5 (sequence is synthesized)
tgcagcccttagagatttgtttgattccatggataaaacttcttccagtattccacctattattctactgcagtttttgcacatggctttcccacagtttgccgagaaaggtgaacaagg

SEQ ID NO: 125333 - DNA, 120 bp, Artificial Sequence
  ENSG00000101557_6 (sequence is synthesized)
acagtatcttcaacaggatgctaatgaatgttggatacaaatgatgcgagtattgcaacagaaattggaagcaatagaggatgattctgttaaagagacagactcctcatctgcatcggc

SEQ ID NO: 125334 - DNA, 120 bp, Artificial Sequence
  ENSG00000101557_7 (sequence is synthesized)
agcgacaccttctaaaaagaaaagtttaatcgatcagttcttcggtgttgagtttgaaactaccatgaaatgtacagaatctgaagaagaagaagtcaccaaaggaaaggaaaatcaact

SEQ ID NO: 125335 - DNA, 120 bp, Artificial Sequence
  ENSG00000101557_8 (sequence is synthesized)
tcagcttagctgttttatcaatcaggaagtcaagtatctttttacaggacttaaattgcgacttcaggaagaaatcaccaaacagtctccaacgttgcaaagaaatgccttgtatatcaa

SEQ ID NO: 125336 - DNA, 120 bp, Artificial Sequence
  ENSG00000101557_9 (sequence is synthesized)
atcttccaagatcagccggctgcctgcttacttgaccattcagatggttcgatttttttataaagagaaggaatctgtgaatgccaaagttcttaaggatgttaaatttcctcttatgtt

SEQ ID NO: 125337 - DNA, 120 bp, Artificial Sequence
  ENSG00000101557_10 (sequence is synthesized)
ggatatgtatgaactgtgtacaccagaacttcaagagaaaatggtgtcttttcgatccaaattcaaggatctagaagataaaaaagtgaatcagcagccaaatacaagtgacaaaaagag

SEQ ID NO: 125338 - DNA, 120 bp, Artificial Sequence
  ENSG00000101557_11 (sequence is synthesized)
tagtccccagaaagaagttaagtatgaacccttttcttttgctgatgatattggctccaataattgtggatactatgacttacaagcagtactaacacaccagggaaggtctagttcttc

SEQ ID NO: 125339 - DNA, 120 bp, Artificial Sequence
  ENSG00000101557_12 (sequence is synthesized)
aggtcattatgtatcatgggtgaaaaggaaacaagatgaatggattaagtttgatgatgacaaagtcagcatcgtaacaccagaagatatcttacggctttctggtggtggagactggca

SEQ ID NO: 125340 - DNA, 120 bp, Artificial Sequence
  ENSG00000101557_13 (sequence is synthesized)
tatcgcttacgttctactctatgggcctcgcagagttgaaataatggaagaggaaagtgaacagtaatcttcattttagtatttatgcttagatgtgaaaataaatgttatttgttgatc

SEQ ID NO: 125341 - DNA, 120 bp, Artificial Sequence
  ENSG00000101557_14 (sequence is synthesized)
atttctataatccagagctttagaggaagacacataggtgggtttatgtttcacctcatttggaacaaaagaggacagaagcagaccactctgtgcaccaacctaaaaaattacagagaa

SEQ ID NO: 125342 - DNA, 120 bp, Artificial Sequence
  ENSG00000101557_15 (sequence is synthesized)
gagaaaattatctttggattgtgctgccctatataaaggtggcagaaagacatttttaaaaagcttattatttcttgcattattttaaaaagttcagagttgaaatgcctttcaaccatt

SEQ ID NO: 125343 - DNA, 120 bp, Artificial Sequence
  ENSG00000101557_16 (sequence is synthesized)
tccttctgtggtcatttttcttgctgcctttttcacccaagattcagcagtcagatgtttactgcacacctattacctattatttgctgttcttgcatggttcaaaccaccattctgtag

SEQ ID NO: 125344 - DNA, 120 bp, Artificial Sequence
  ENSG00000101557_17 (sequence is synthesized)
ccacccatcctttgccttatctaacaaacatttttccaggaaggtggaaaaggaagtgttgctctcattgtgtgactcagtgctgctgtccatcccatggaaacatgggcacaatcaagt

SEQ ID NO: 125345 - DNA, 120 bp, Artificial Sequence
  ENSG00000101557_18 (sequence is synthesized)
atttgtccagcctattgcaggcttttcctgactttaaaataaattgtgatcaataatagtacctttgattatacatttattattgtgtctctctctgatgtactgtggattgtacattta

SEQ ID NO: 125346 - DNA, 120 bp, Artificial Sequence
  ENSG00000101557_19 (sequence is synthesized)
actttggaatggctttgtaataatcagtcttaagaaaatgttgacaagctctggttgcttatttttagaaaatgaggacatttaataataataaaaaaaaagggattaatagcttttgac

SEQ ID NO: 125347 - DNA, 120 bp, Artificial Sequence
  ENSG00000101557_20 (sequence is synthesized)
actgtacaatttctgaagatggttattaacactgtgctgttaagcatccatttaaaaatatttgttatcttctttgcctgcctgtattttaaaaagaaatacaaagttgtaaaagtaatg

SEQ ID NO: 125348 - DNA, 120 bp, Artificial Sequence
  ENSG00000101557_21 (sequence is synthesized)
aatggatttctttggatgctgaatgcagtgatgttatcagtcagattctttccttggctcagttgtgtttgtatttcctttcttaattccccaaatcttggctgggcacggtggctcacg

SEQ ID NO: 125349 - DNA, 120 bp, Artificial Sequence
  ENSG00000101557_22 (sequence is synthesized)
tctgtctcaaaaaaaaaaagaaaaaattcccaaatcttaatgtctgtttcagaattttagtgattttaaagtgatagtagaaaataccaagcatatgaggtatttcaatatgataggctt

SEQ ID NO: 125350 - DNA, 120 bp, Artificial Sequence
  ENSG00000101557_23 (sequence is synthesized)
gcttcttacattttaatagttactcatctttgttccaggacccttgactgatgctagggaaaggataaagcatagaataccagccagtttggctctgattttgagttatttataataaag

SEQ ID NO: 125351 - DNA, 120 bp, Artificial Sequence
  ENSG00000101557_24 (sequence is synthesized)
tttggggattatcataacatctcatatctttgtgtatgttgttttaatgctcggcagagcacaacactgatgataactattaaaaatagaaaataacagccattttactttcaaatctga

SEQ ID NO: 125352 - DNA, 120 bp, Artificial Sequence
  ENSG00000101557_25 (sequence is synthesized)
tgtgatgcaatctgtgaacactaggaggggataaaataagcattgcagggaaacttatttgtaaatagcttcctcacctaaactttgacttggcaatcaatactttctactttgtggagg

SEQ ID NO: 125353 - DNA, 120 bp, Artificial Sequence
  ENSG00000101557_26 (sequence is synthesized)
ggattaagaatagaatgggcaggatgagaccatgaaaattataatgattcatgtatatttgtatgatgcttgtaactttgcaaagtcttttttattcattgtctcatttggtcagaacaa

SEQ ID NO: 125354 - DNA, 120 bp, Artificial Sequence
  ENSG00000101557_27 (sequence is synthesized)
ttttattgaggacatgaatttaacaattagaatttagattttctgactgtagctactaaatgttgtagctactagaccaggtgagctaggtttagagcaaagtatataagccttgtatgg

SEQ ID NO: 125355 - DNA, 120 bp, Artificial Sequence
  ENSG00000101557_28 (sequence is synthesized)
agccttgtatggactatattagaattttaaaaattgtaattaattccttatcatcattataaaaagcttgatttttttatttgatctaaaaaagcattattccaaagaattttttcaagt

SEQ ID NO: 125356 - DNA, 120 bp, Artificial Sequence
  ENSG00000101557_29 (sequence is synthesized)
tagttataccagtgttgtttttaactaataaggctattttagaattcagccttgcctgtaaggtctttgagaagggagaggagtaggccaaaaaaaaaaaagtcttgattcctgaatgtg

SEQ ID NO: 125357 - DNA, 120 bp, Artificial Sequence
  ENSG00000101557_30 (sequence is synthesized)
ccttatatgctgtgccactcacaccgaggccatcatctcaacattagagttgtgctagattactgcttgactgactagctaggttaggcctaagagtgtttaccgaataatctgcactca

SEQ ID NO: 125358 - DNA, 120 bp, Artificial Sequence
  ENSG00000101557_31 (sequence is synthesized)
ctcagtagcccttcttcaggattaaaaacgatgatgacctcatcttagagccctaaagggaaatgcttatgtgggaacaagaaaagtcggtggtactgtcttctgctactactacttagt

SEQ ID NO: 125359 - DNA, 120 bp, Artificial Sequence
  ENSG00000101557_32 (sequence is synthesized)
gctttgctgtgtatagggtgtgttcacatatatctcagttgaatgtcacaagaatccctgaagtgattaaaagtcttgagaggtcaggcaatttttgtaaggctagaaggaaaagtgagg

SEQ ID NO: 125360 - DNA, 120 bp, Artificial Sequence
  ENSG00000101557_33 (sequence is synthesized)
aggtcaggcaatttttgtaaggctagaaggaaaagtgaggttttagacttcatttcttttaaagttggcaaacaaacattttctgtaatggacaagatagatagattagatagatagata

SEQ ID NO: 125361 - DNA, 120 bp, Artificial Sequence
  ENSG00000101557_34 (sequence is synthesized)
atttcaggctttgcaggctataaagtgctgcagctccttagctttgctgttgttatagtgtagctggagccatagacagttagttagttagttatgagtgagcacagctgggtgccagta

SEQ ID NO: 125362 - DNA, 120 bp, Artificial Sequence
  ENSG00000101557_35 (sequence is synthesized)
caattttaatgatcaagactcgtggcaggcagaacaaaccatcatttgttgatcctctgcttgaaagcacgaataagtgagaacagagcagtcatatggtttcagaaagtgttattctgg

SEQ ID NO: 125363 - DNA, 120 bp, Artificial Sequence
  ENSG00000101557_36 (sequence is synthesized)
gatttcaggataaattttgtaaaactactaacaaacaacacacaggaaactaatttggtataagaaacgacatatccctaaatagtgcttatttaacttcattataaatacatctactta

SEQ ID NO: 125364 - DNA, 120 bp, Artificial Sequence
  ENSG00000101557_37 (sequence is synthesized)
acaaaaaaatatattttgtgatcttgaggtcacttcgtttaggtcattatctcaacccaacctccccaaactctggtttgagccaatatgtgttctattgttctcagagcaccagccgac

SEQ ID NO: 125365 - DNA, 120 bp, Artificial Sequence
  ENSG00000101557_38 (sequence is synthesized)
tgtacaacaattgttataaaaatgtttattgtttaccaaaaccagtggacctcttatcaaatgctgcttggtaacaaaatctatcacagttttaataaaaagaaaaaaaaaagaagctaa

SEQ ID NO: 125366 - DNA, 120 bp, Artificial Sequence
  ENSG00000101557_39 (sequence is synthesized)
agccaccacgcccagcctgctgaagtctcagtttctttaactatgaaatgagaagttaggtttgatccagtgaaattttattcagcacctactgcatgcatgctcctcttgattagttac

SEQ ID NO: 125367 - DNA, 120 bp, Artificial Sequence
  ENSG00000101557_40 (sequence is synthesized)
aggcaccgtcccctctcccggctgggtcggagccctgcgtggcaggggagcgccgtccccctgagccaccgatgggtggggggagtggagatggggaagcctctcaaagtcgtgactctg

SEQ ID NO: 125368 - DNA, 86 bp, Artificial Sequence
  ENSG00000101557_41 (sequence is synthesized)
gggagtggagatggggaagcctctcaaagtcgtgactctgcagaatagtttctgacgctgccctggtgtgcggtgaaagtgaggag

SEQ ID NO: 125369 - DNA, 120 bp, Artificial Sequence
  ENSG00000101557_42 (sequence is synthesized)
ccctcacttgctccctccttccttcccgccacccctccaccgccttccccctcctccctcctctcgccacctctaggccccgccccggtcctgccgcccagtctcctcgctgcagtcgct

SEQ ID NO: 125370 - DNA, 120 bp, Artificial Sequence
  ENSG00000101557_43 (sequence is synthesized)
atcttaccccatatttacttattctgatgtgcttttcaaacaaaatgtcaggtttcttgaacaatttaccttaatgacatatagtaaatttactcattggcatacagttctatgagtaag

SEQ ID NO: 125371 - DNA, 120 bp, Artificial Sequence
  ENSG00000101557_44 (sequence is synthesized)
ttacttattaaaacatcaatcatgaagccttaactatgattggacagtagtatcttattggattctgataatactttcgtaatgtgaactttagagttattcttgttacttagcttgaga

SEQ ID NO: 125372 - DNA, 120 bp, Artificial Sequence
  ENSG00000101558_0 (sequence is synthesized)
tcagttgtgggacccggagctgctgacccagcgggtggcccaccgaaccggtgacacagcggcaggcgttagggctcgggagccgcgagcctggcctcgtcctagagctcggccgagccg

SEQ ID NO: 125373 - DNA, 120 bp, Artificial Sequence
  ENSG00000101558_1 (sequence is synthesized)
tcgccgccgtcgtcccccgcccccagtcagcaaaccgccgccgcgggcgcgcccccgctctgcgctgtctctccgatggcgtccgcctcaggggccatggcgaagcacgagcagatcctg

SEQ ID NO: 125374 - DNA, 120 bp, Artificial Sequence
  ENSG00000101558_2 (sequence is synthesized)
gtcctcgatccgcccacagacctcaaattcaaaggccccttcacagatgtagtcactacaaatcttaaattgcgaaatccatcggatagaaaagtgtgtttcaaagtgaagactacagca

SEQ ID NO: 125375 - DNA, 120 bp, Artificial Sequence
  ENSG00000101558_3 (sequence is synthesized)
cctcgccggtactgtgtgaggcccaacagtggaattattgacccagggtcaactgtgactgtttcagtaatgctacagccctttgactatgatccgaatgaaaagagtaaacacaagttt

SEQ ID NO: 125376 - DNA, 120 bp, Artificial Sequence
  ENSG00000101558_4 (sequence is synthesized)
atggtacagacaatttttgctccaccaaacacttcagatatggaagctgtgtggaaagaggcaaaacctgatgaattaatggattccaaattgagatgcgtatttgaaatgcccaatgaa

SEQ ID NO: 125377 - DNA, 120 bp, Artificial Sequence
  ENSG00000101558_5 (sequence is synthesized)
gggaatgctccgactgtcacttcaatgagcagcatcaacaacacagttgcaacacctgccagttatcacacgaaggatgaccccaggggactcagtgtgttgaaacaggagaaacagaag

SEQ ID NO: 125378 - DNA, 120 bp, Artificial Sequence
  ENSG00000101558_6 (sequence is synthesized)
aatgatatggaacctagcaaagctgttccactgaatgcatctaagcaagatggacctatgccaaaaccacacagtgtttcacttaatgataccgaaacaaggaaactaatggaagagtgt

SEQ ID NO: 125379 - DNA, 120 bp, Artificial Sequence
  ENSG00000101558_7 (sequence is synthesized)
aaaagacttcagggagaaatgatgaagctatcagaagaaaatcggcacctgagagatgaaggtttaaggctcagaaaggtagcacattcggataaacctggatcaacctcaactgcatcc

SEQ ID NO: 125380 - DNA, 120 bp, Artificial Sequence
  ENSG00000101558_8 (sequence is synthesized)
ttcagagataatgtcaccagtcctcttccttcacttcttgttgtaattgcagccattttcattggattctttctagggaaattcatcttgtagagtgaagcatgcagagtgctgtttctt

SEQ ID NO: 125381 - DNA, 120 bp, Artificial Sequence
  ENSG00000101558_9 (sequence is synthesized)
tttttttttttctcttgaccagaaaaagatttgtttacctaccatttcattggtagtatggcccacggtgaccatttttttgtgtgtacagcgtcatataggctttgcctttaatgatct

SEQ ID NO: 125382 - DNA, 120 bp, Artificial Sequence
  ENSG00000101558_10 (sequence is synthesized)
ggttgtatattaccagatcatcactagcagatgtcagttgcacattgagtcctttatgaaattcataaataaagaattgttctttctttgtggttttaataagagttcaagaattgttca

SEQ ID NO: 125383 - DNA, 120 bp, Artificial Sequence
  ENSG00000101558_11 (sequence is synthesized)
gagtcttgtaaatgttattttaataatccctttaaattttatctgttgctgttacctcttgaaatatgatttatttagattgctaatcccactcattcaggaaatgccaagaggtattcc

SEQ ID NO: 125384 - DNA, 120 bp, Artificial Sequence
  ENSG00000101558_12 (sequence is synthesized)
ttggggaaatggtgcctcttacagtgtaaatttttcctcctttacctttgctaatatcatggcagaatttttcttatcccttgtgaggcagttgttgactgagtttttcatccttacaat

SEQ ID NO: 125385 - DNA, 120 bp, Artificial Sequence
  ENSG00000101558_13 (sequence is synthesized)
cctgtcccatggtatttaacataaaaaaaaataaaactgttaacagattcttgctcgatagcttgtttgtgtctgtcgtgttattagagggaactccactatatatggtcacttgaaatt

SEQ ID NO: 125386 - DNA, 120 bp, Artificial Sequence
  ENSG00000101558_14 (sequence is synthesized)
atgatgcaaaggtttctcttgcattgaaaccctcttggatattacagtatttttaattgaaagtcctaattctgttaaggaaaggagttgattaaattttaaggtaccactggtattttg

SEQ ID NO: 125387 - DNA, 120 bp, Artificial Sequence
  ENSG00000101558_15 (sequence is synthesized)
ggagattataatcagtttgttttcaagataatagaaaataaggtccatgagaatagaagttatgtgatttcagtgagttgatgtgtacagcatggctgtgctccatctgatttaccccat

SEQ ID NO: 125388 - DNA, 120 bp, Artificial Sequence
  ENSG00000101558_16 (sequence is synthesized)
tcttaagttctgagagtatgttctcaaggaagatttaactctctttggttttaaattactttttaaccagcctaataaataagtcttactacttttcataatatttcataatagttaaaa

SEQ ID NO: 125389 - DNA, 120 bp, Artificial Sequence
  ENSG00000101558_17 (sequence is synthesized)
gtaggtgtttttttcgtgctcaatttggcactcaaaataatgttcattatggaagtttggtaatactgagcaagcctgtggaattttctttatgaaaaatgattttagcctttgcaaatg

SEQ ID NO: 125390 - DNA, 120 bp, Artificial Sequence
  ENSG00000101558_18 (sequence is synthesized)
ttaaccatgtgaaacacattttcagtataagtatgcgttacagggtttgatactttcctgcacttaggtttgtcctattcttcatttattcatactaggatagaaaattttggaatcaga

SEQ ID NO: 125391 - DNA, 120 bp, Artificial Sequence
  ENSG00000101558_19 (sequence is synthesized)
aaatagatccagtgtttagctacatacaatctagtacaagtgaatttttattcttaaacataggtgtgttggctctttttttaaaagatgcgctctacctgaaaaggaaattggatttta

SEQ ID NO: 125392 - DNA, 120 bp, Artificial Sequence
  ENSG00000101558_20 (sequence is synthesized)
gaactggatgtggtgcagtgaagtattttaggcccaggtctgtgtacacattttatagaagaatgaagtactctgaagtattttggttgccttttcatttcaactgtgttttgaatttgt

SEQ ID NO: 125393 - DNA, 120 bp, Artificial Sequence
  ENSG00000101558_21 (sequence is synthesized)
cagatcacacatatattgtgttattgggcgctgtggtatcttttataaaacctcttgcttgtgtgcaaaagttcctaaaaggaaacacaagtaatgcctatccattactagcatgctatg

SEQ ID NO: 125394 - DNA, 120 bp, Artificial Sequence
  ENSG00000101558_22 (sequence is synthesized)
ctgcatgctttactgccattgctgtatgctttactgtctttgtaaaaatccccctctccccttttctggtaactggaaaagcatgctaaaaatagtcttatattttcaccccataaatgc

SEQ ID NO: 125395 - DNA, 120 bp, Artificial Sequence
  ENSG00000101558_23 (sequence is synthesized)
agaatcagtaattccttggcttaaagctcttatataatcaatattattggtggtaaataccaagtttggtatctcatagctatctttttttaaagaaattaagttcttgaaaatttagcc

SEQ ID NO: 125396 - DNA, 120 bp, Artificial Sequence
  ENSG00000101558_24 (sequence is synthesized)
aaatcccgttttatgggaatgctctttagaattcattttgttcagcccctttgttctatggttgagaaatctgaggccttacgaaggttaagagaactttccccgtgtctcacaggtagg

SEQ ID NO: 125397 - DNA, 120 bp, Artificial Sequence
  ENSG00000101558_25 (sequence is synthesized)
tagaggcagagctggaactagatatctggtctgttgactctagctcagtgtcttctggtaactgttgaaaattgtcttagtttgagagatggctgaaataatgaacataaaatgctattt

SEQ ID NO: 125398 - DNA, 120 bp, Artificial Sequence
  ENSG00000101558_26 (sequence is synthesized)
ataataacaagtatatgtgaaatttcttattgtaagactactaccggcttactgttgaatagtttggttatagtgtttaggctagaaatgcctcccacattggtaataaacattacaaaa

SEQ ID NO: 125399 - DNA, 120 bp, Artificial Sequence
  ENSG00000101558_27 (sequence is synthesized)
tacaatgtatttttaggtaggcattttataaaatgcattatgccatggttgcttttgagatagattgtagtctgggtagcatctttaaaatgtatgtgggcttaactgttgttcatatca

SEQ ID NO: 125400 - DNA, 120 bp, Artificial Sequence
  ENSG00000101558_28 (sequence is synthesized)
tttgaaagtccaactgtattaattgactgataatatgataatatagagattaaattgtttgtcttcattccttatatgtttagaagtttttgctttgtctgcctgcttacttgtatatgt

SEQ ID NO: 125401 - DNA, 120 bp, Artificial Sequence
  ENSG00000101558_29 (sequence is synthesized)
aagcatgagggaaatacactgttgctaatactgaaattacaatcaagtaactaaggccttgagttcatatgtgacactgaatgcactagcttccttcgttctataactaatgtaccttaa

SEQ ID NO: 125402 - DNA, 120 bp, Artificial Sequence
  ENSG00000101558_30 (sequence is synthesized)
cttcccccattcttatatttacaagaagctaagtcattatgttctgagtgtgtggtatgttcccttaaaaaaaaatgacacttggaagaaaaatgtatgaaattcagaaattccgatcaa

SEQ ID NO: 125403 - DNA, 120 bp, Artificial Sequence
  ENSG00000101558_31 (sequence is synthesized)
tgggattacaggtgtgagctgccgcacccagccaagaaaaataatactcttaaatacttagatgttcacctaaagttgatattatttggtatgggaattacttttgaactgtaatctttc

SEQ ID NO: 125404 - DNA, 120 bp, Artificial Sequence
  ENSG00000101558_32 (sequence is synthesized)
gggaattacttttgaactgtaatctttcagattacaccactttgaaaacaagttttaacagtagggtaaaaatatagtttttgagggtattcccaacttgtgatcttctaccactttaga

SEQ ID NO: 125405 - DNA, 120 bp, Artificial Sequence
  ENSG00000101558_33 (sequence is synthesized)
gacattcaagtaatagttttcttagagctttgcacattcctattcactgagattttaaaaatttcacctttattcgagggaaggatcaatgcttattaccatttggaaaaacgaagatca

SEQ ID NO: 125406 - DNA, 120 bp, Artificial Sequence
  ENSG00000101558_34 (sequence is synthesized)
gaaggtaaatgatctttattttctagctttaaagggaaattaaaccattcatgaataaactttaaaaatgtgaagtgtccttttccttttcacaatacaaaaaaaatttcaacagattgt

SEQ ID NO: 125407 - DNA, 120 bp, Artificial Sequence
  ENSG00000101558_35 (sequence is synthesized)
gtggtttgtgcatttatatcctgttaagcattaatagctaatcactgggacttgaattctgatggcagatagtctcttgcttagtgagatggagttaactattttttagtaggaagtgag

SEQ ID NO: 125408 - DNA, 120 bp, Artificial Sequence
  ENSG00000101558_36 (sequence is synthesized)
aacagctgattttcatgccacgtttcatagccccacttttggtagactaccaccacgcttcttcgcgtaagcagtggcatcttgggaatgaatgcccagccgctcgtgggttggtgcaaa

SEQ ID NO: 125409 - DNA, 120 bp, Artificial Sequence
  ENSG00000101558_37 (sequence is synthesized)
gaagtataaacatatatcactaaggaaaaagaaagtttgtcttgcccttctgacacagtgtgtgcacttcaggcaatttttggaaaatataaaaaattccaaattctgcctttcagcagc

SEQ ID NO: 125410 - DNA, 120 bp, Artificial Sequence
  ENSG00000101558_38 (sequence is synthesized)
atcaattgctaggaacatttcattcatttccctgtaatattaatgttctttaagcataatcactaattataagttgtatcctatttttttccagcttaatttctgtggtttattgaaaac

SEQ ID NO: 125411 - DNA, 120 bp, Artificial Sequence
  ENSG00000101558_39 (sequence is synthesized)
caagtataaatgtgactaaaagcattttgctttgtttttatagttaactttcttaaggttatggacattttataatgtaacatttgattggcctggcctcttgacaattcccttctagtt

SEQ ID NO: 125412 - DNA, 120 bp, Artificial Sequence
  ENSG00000101558_40 (sequence is synthesized)
atgcatatcctcctgttgccacatttcttgttttaaaactcagtttcttgttttccagttgttgctatgtataacacccatcttgaaagagagtatataggaagttattcagataacttt

SEQ ID NO: 125413 - DNA, 120 bp, Artificial Sequence
  ENSG00000101558_41 (sequence is synthesized)
tgtagtagtgatattcaactatagcagtaccttaactcatgatgagcttaggaacataaaagataattgttgcttgaatagcacccccagagatactgacctaattggtctggggtggag

SEQ ID NO: 125414 - DNA, 120 bp, Artificial Sequence
  ENSG00000101558_42 (sequence is synthesized)
atctggcatggtagtttttttcaagctccaatcatcggccagacagttgctttatgtaggtttttaaatgccaaaggcagatatgaagtagatttaattaagacttgacttcagcaatac

SEQ ID NO: 125415 - DNA, 120 bp, Artificial Sequence
  ENSG00000101558_43 (sequence is synthesized)
aggggaacttaaaatacttatttttctttaaactgcaggagtcactgttaggtattgcttaaaaaaaattgcataaaagctttgcttgtcaagttaggattgctggaataccactaaaga

SEQ ID NO: 125416 - DNA, 120 bp, Artificial Sequence
  ENSG00000101558_44 (sequence is synthesized)
tttttgacttgtgaataaatgagctgtcatcgcaaaaaggcgatttgagaaatgtgggcttcagtattaattgccattttgctgacacccagtgtacctacctacctgagaaatttattt

SEQ ID NO: 125417 - DNA, 120 bp, Artificial Sequence
  ENSG00000101558_45 (sequence is synthesized)
tgtccatcatgtatttctcaaagcaaaaggtggttttcaagtataatgtcgttttcaacatgcttattacttagttttacgtcagctcatttcatcatcattgataacttgtgaaatact

SEQ ID NO: 125418 - DNA, 120 bp, Artificial Sequence
  ENSG00000101558_46 (sequence is synthesized)
tatctccatcctatggaataggggagacgggtttagacaggttcaattagctcaagtctacacagctgaagtagcagagaaagtgggatctagatggtctgatcctagtgatctaccata

SEQ ID NO: 125419 - DNA, 120 bp, Artificial Sequence
  ENSG00000101558_47 (sequence is synthesized)
tgaaggacatagtttgtgtcctggtccaagtcaaatattgactcctcacaaacagtaagtatggcaattttgtgatgcctttgattccactttacatggagtactattatttgtgaaatg

SEQ ID NO: 125420 - DNA, 120 bp, Artificial Sequence
  ENSG00000101558_48 (sequence is synthesized)
tctttaagatttttggtcttaaatttttgaagactgctttccccctttatctcccagaaaattgagaagaagtaaactcctgcccactaacaatctcagtccgtgaacaaaaccaacatg

SEQ ID NO: 125421 - DNA, 120 bp, Artificial Sequence
  ENSG00000101558_49 (sequence is synthesized)
aacattcctaaacaagagtgtgtgttactctaagaagaaggctatagaatttatggaaatggcttatgtaacctacaagactggagaacagaatgtgactggccttttctaatggtcctt

SEQ ID NO: 125422 - DNA, 120 bp, Artificial Sequence
  ENSG00000101558_50 (sequence is synthesized)
taagatttaatgattaaagcaagagttttttataattgactttgtggtctaaattcttgatactgtttataattctacaaagaacaaaaattgttatgtactataggcacttaagaaccc

SEQ ID NO: 125423 - DNA, 120 bp, Artificial Sequence
  ENSG00000101558_51 (sequence is synthesized)
caaaaattgttatgtactataggcacttaagaaccctgaggaaaaataatacaatgtgtgtgtgtgagagagagagtgagttactgacattgttccaaaaaaaaaaaaaaaaaaaaaaaa

SEQ ID NO: 125424 - DNA, 120 bp, Artificial Sequence
  ENSG00000101558_52 (sequence is synthesized)
tttgtattttcgagcaataagaattcctattcttgtttcaaatagaggtttgttaggaattacagttgtggggagcaaactttcttttttgtgctgttttaattcaaaatgtatatcctt

SEQ ID NO: 125425 - DNA, 120 bp, Artificial Sequence
  ENSG00000101558_53 (sequence is synthesized)
aattgtatataatatgtagataaatatatgagggtattaagctactttgaattaaatttaaggatatatttcacatgaaaacaaatacaaacgagaatcaaaataaagttttgcaaagta

SEQ ID NO: 125426 - DNA, 120 bp, Artificial Sequence
  ENSG00000101558_54 (sequence is synthesized)
attgcagtgttaaatgtaaggttaccattcatcaatttactaagagtcacagcatgttgaatctctctggtgtgcttgtttcatggttctcagaacaaccagtcttttctttctggacca

SEQ ID NO: 125427 - DNA, 120 bp, Artificial Sequence
  ENSG00000101558_55 (sequence is synthesized)
gtttgaagcaactctcaagaaacaagctgttttattggagccaaacctcactaatagaggtcctggatggaagcatatacttaaagttacacctgcttaattttttccatcaggctcttc

SEQ ID NO: 125428 - DNA, 120 bp, Artificial Sequence
  ENSG00000101558_56 (sequence is synthesized)
agattgtcactccatgcatgactcaaagcccaccctcccatcacacttccccccattacatatacatatatagcataacatatacatatgtagcatatgtatatgtaaataaattagatt

SEQ ID NO: 125429 - DNA, 120 bp, Artificial Sequence
  ENSG00000101558_57 (sequence is synthesized)
ttcttgcacctgttatgtatgttcactggtttgtaaggggcctaggtagtatgtgatataacttattgggcacacttttgaaatgtgtttcggcttcactgtattctttgcattctattc

SEQ ID NO: 125430 - DNA, 120 bp, Artificial Sequence
  ENSG00000101558_58 (sequence is synthesized)
tgtttatgctccacatattggttatcatttcttctcctttttgttacaaaagcagtataacatttttaagagaaattcaacaacaaaaaaatctaattctatttgcttagataaattcta

SEQ ID NO: 125431 - DNA, 120 bp, Artificial Sequence
  ENSG00000101558_59 (sequence is synthesized)
atctaattccaagtctaattctattagaattagaaaaatctaaatctaattccaatctagttatctttttatggaatgtcttcctatggacatgttatttaaaatttgaaagaatggaaa

SEQ ID NO: 125432 - DNA, 120 bp, Artificial Sequence
  ENSG00000101558_60 (sequence is synthesized)
gctgcccatcaaatgcttaacaaaagtgaaatgtttaattttggcaaggcatagaatagaatatttaatgacatgtcatttaataatagtaatataaataatagttttgttgatttgaca

SEQ ID NO: 125433 - DNA, 120 bp, Artificial Sequence
  ENSG00000101558_61 (sequence is synthesized)
agattgtgagaaatgactttttcccttccctccgtaatttaaaattttatgcaatgtaaagaatttaaaaataatcagttgtcgagcttgatgattcttttagttttttttctctttggt

SEQ ID NO: 125434 - DNA, 120 bp, Artificial Sequence
  ENSG00000101558_62 (sequence is synthesized)
gtcgagcttgatgattcttttagttttttttctctttggtgttgaccccatgtatatctttttttcccccttttggagatagggtctcactctcacctgggctggagtgcagtggcacga

SEQ ID NO: 125435 - DNA, 120 bp, Artificial Sequence
  ENSG00000101558_63 (sequence is synthesized)
aggtgcacaccaccatgcctggctaatttctaaaattgttttttgtagagacagggtctccctctgttgctcaggctgttcttgaactcctgggctcaagcaggccacccatctcggcct

SEQ ID NO: 125436 - DNA, 120 bp, Artificial Sequence
  ENSG00000101558_64 (sequence is synthesized)
gcctcccaaagtgttgggattacagacatcagacatggtgccctgcttcatcctctttaagtttttatcagttttctggtatgagtatgatactttttcccaatttttaaccaaaacctg

SEQ ID NO: 125437 - DNA, 120 bp, Artificial Sequence
  ENSG00000101558_65 (sequence is synthesized)
ttcccaatttttaaccaaaacctgaaagttcttctattgccatattggtggccattgccacctcctttatagagtaagtcagtgtgccaacctcattatcagaagttggatttgtgctag

SEQ ID NO: 125438 - DNA, 120 bp, Artificial Sequence
  ENSG00000101558_66 (sequence is synthesized)
gatagaatttgaccacactgaaaatcacaaatgagttctaactactattaaggaaaagaacaggaaaaagtattggcagggtaaaatatatctgaaacagttttttaataataggggcgg

SEQ ID NO: 125439 - DNA, 120 bp, Artificial Sequence
  ENSG00000101558_67 (sequence is synthesized)
ctattattagattggttggggtgggagaaatgggggtgaagaacaaaaaagctagcaagagaaaaactcagagaattgaagtaggctgctttaaaacgttgcttaactgggaagcttgaa

SEQ ID NO: 125440 - DNA, 120 bp, Artificial Sequence
  ENSG00000101558_68 (sequence is synthesized)
gaagaatggaagagtctgccgacaggtcacatacatgctgttgttcattagaacctcattataaattttcatttttaaatagattttacatggatttaggcatactaatcaaatcacatc

SEQ ID NO: 125441 - DNA, 120 bp, Artificial Sequence
  ENSG00000101558_69 (sequence is synthesized)
gtttatacttaatataaaattggcagctgggatggtgtggtaggtgtgcagcctctgataaatcttataaaatgagtattgtggaatgccataaagttgatttagtaaatgtctttttta

SEQ ID NO: 125442 - DNA, 120 bp, Artificial Sequence
  ENSG00000101558_70 (sequence is synthesized)
gcagtttatagctgaataaagcagattttacctaaaattattttaaagtaagtgaatttaattaaaatgaaaaaagcttgttacactaatactgctacgatgtgtggtgacataaatgct

SEQ ID NO: 125443 - DNA, 120 bp, Artificial Sequence
  ENSG00000101558_71 (sequence is synthesized)
gttggagtgaaggatgttggggtactttagacaacgggctgaagaatacataggtgctgtcatagatatttatctccaggccttcactagcttcaaatggttcaatgttggtgaggatta

SEQ ID NO: 125444 - DNA, 120 bp, Artificial Sequence
  ENSG00000101558_72 (sequence is synthesized)
agattttggggctcatagtcttcaaagcatgctaagtgctcctgtgatgttgaatcacgtgaattaaagcaaacagcattactaaagatgacaaattaatagaagttagcttttcttggg

SEQ ID NO: 125445 - DNA, 120 bp, Artificial Sequence
  ENSG00000101558_73 (sequence is synthesized)
catgttttttcttaggtagtttccgattttattggaatgattacgataatatccccctaccccccagaaccttatttgaattgcacaaccagagcacggaaaatgaccttcaatggattt

SEQ ID NO: 125446 - DNA, 120 bp, Artificial Sequence
  ENSG00000101558_74 (sequence is synthesized)
tgttgacgtcattcagcatactttcattgaataactactcttgaccaaagtgctggttttaggggtaaatacaaagagagatggctcttgctctctcagcctttgaagtattacaggaaa

SEQ ID NO: 125447 - DNA, 120 bp, Artificial Sequence
  ENSG00000101558_75 (sequence is synthesized)
gaacttgaacaataattattaagatacataataaagtgctatggtagaggtacgtgccagggattatgggaatagagggagtgggctggttatttagactaatctgactgctgacatgta

SEQ ID NO: 125448 - DNA, 120 bp, Artificial Sequence
  ENSG00000101558_76 (sequence is synthesized)
ctgatttaggccttttaaagagtttttcatgaacaaagatgtagaatttatattgttatttgtttaaaacctgtaaggagatttggttagttaaaaaattcccaatatctttgtaatgca

SEQ ID NO: 125449 - DNA, 120 bp, Artificial Sequence
  ENSG00000101558_77 (sequence is synthesized)
gccattttagcaattagcttttaaatttttgcttggtcagttctttcttctttgccccagtgcctttgctccccaccctactcctcttttaacagtcttcccgtggtttctcattgctgc

SEQ ID NO: 125450 - DNA, 120 bp, Artificial Sequence
  ENSG00000101558_78 (sequence is synthesized)
aagttccttactttagcacacattctaattatttgtgatctggcctgcagtattgccagcttctgctcttgtttctcatgtccttcccattttgtgccctagtcatactgaactgcctag

SEQ ID NO: 125451 - DNA, 120 bp, Artificial Sequence
  ENSG00000101558_79 (sequence is synthesized)
gattgtgttgtcccacatcatagccattagtcacctagggctgttgagcactgaaatgggatttgttcaaattgagctgtgctgttgagtgtaaaatactgatgttgaagagttagtaca

SEQ ID NO: 125452 - DNA, 120 bp, Artificial Sequence
  ENSG00000101558_80 (sequence is synthesized)
gaaaaaggtaaaatcttttttttttaatggttacatactgaaatagtagtttgggtatattgggttgaatcaaatatattattaaaatgaattttacccatttctttttactttttaaat

SEQ ID NO: 125453 - DNA, 120 bp, Artificial Sequence
  ENSG00000101558_81 (sequence is synthesized)
gtactgttggaaaatttaactttacatacggggctcacatttgaagctcacattgtatttgcgtggggcagcattgggctggagtatgctggagaagcatctgtttatcacccctctttg

SEQ ID NO: 125454 - DNA, 120 bp, Artificial Sequence
  ENSG00000101558_82 (sequence is synthesized)
ctttagtgtaagctcttcactgtgactggaaaggcccagaaccctgcccctcccgacacagcacatacacacattgacgttttgctactacagcatatagcctttgctgggaccctctcc

SEQ ID NO: 125455 - DNA, 120 bp, Artificial Sequence
  ENSG00000101558_83 (sequence is synthesized)
aatttgttttgggaagtggagtttaaactgtgggtgttgtttagcagtcagtagaaaaacttaatttctaaaaactaaaagttaaatttaggtttttaaaaaactgccaatttcttcatt

SEQ ID NO: 125456 - DNA, 120 bp, Artificial Sequence
  ENSG00000101558_84 (sequence is synthesized)
aatttcttcattatagataatcctaacttaaagaatgaaagaatttttaaatagtatttttttttagaaacaatttagaaatgctgctactggcctggtgcagtggctcacacctgtaat

SEQ ID NO: 125457 - DNA, 120 bp, Artificial Sequence
  ENSG00000101558_85 (sequence is synthesized)
taatcccagccctttgggaggccaagatgggagtatctcaagcccaggagttcgagaccagctcaggcgacatgacaagaccctgtctctacaaaaacaaacaaacaaacaaacaaaaaa

SEQ ID NO: 125458 - DNA, 120 bp, Artificial Sequence
  ENSG00000101558_86 (sequence is synthesized)
agaaagaaatgctaagaagaaagtcctatggttgctagtaatatcatcgtgattttaatggatggtgatagtaactaggattatataaaggttctgtgacattagccgataacaatggca

SEQ ID NO: 125459 - DNA, 120 bp, Artificial Sequence
  ENSG00000101558_87 (sequence is synthesized)
gggtgatcaataaagagtgcaccagtgtgtttcagccaagccaggcagcttcactcatcttttagctgtcccgtgaggtgaaacttacttaccatgatcatacctcctatgtctcatgtt

SEQ ID NO: 125460 - DNA, 80 bp, Artificial Sequence
  ENSG00000101558_88 (sequence is synthesized)
ggtccgcctgggcccgcgtccttggccccagaggccgacggcgtgcttcggcggggcgtgggcggctgggcacccgaggg

SEQ ID NO: 125461 - DNA, 120 bp, Artificial Sequence
  ENSG00000101558_89 (sequence is synthesized)
gctgggcacccgagggcgtgcgctctgggctgcggcggggagtgggctctggaggtggcgcaagctgcgtctgtcgcccgctcccggctgtcagcggcgcggggaggctagggcacggcg

SEQ ID NO: 125462 - DNA, 120 bp, Artificial Sequence
  ENSG00000101558_90 (sequence is synthesized)
agagctcgctgcagccggccctcgggttccgcggagggcgtcgcttgtcacctttccgccaggtttagaactcggccgtcaggtgtaggacgcgccggggaggtggagagtccttggagg

SEQ ID NO: 125463 - DNA, 120 bp, Artificial Sequence
  ENSG00000101558_91 (sequence is synthesized)
tgcctggcgagggctgcccggtgctgttggcacggacccaggtacgtgtttatgtaaaggtgatggatgagtatttatacgaccagaacaatactacactgtatgaaaatggtgtaaaag

SEQ ID NO: 125464 - DNA, 120 bp, Artificial Sequence
  ENSG00000101574_0 (sequence is synthesized)
ccatgcgaccgcctcgtcgctggaaggctgcgtgctggtcgcgcccagctgcgtcaccccaggaactggggtctgtgggccagtgtggccgtctctacgaagactggcacgacccctaaa

SEQ ID NO: 125465 - DNA, 120 bp, Artificial Sequence
  ENSG00000101574_1 (sequence is synthesized)
gttaggtcggaagacctgtgggcagcttgagcgccgaggagtgccctgaacgctcaactcgccctggaaacgtttttccgtacagcaacatggcggcgcccatggactcttagaaaagga

SEQ ID NO: 125466 - DNA, 120 bp, Artificial Sequence
  ENSG00000101574_2 (sequence is synthesized)
gaaagctttttctctgtggactggaaggggcatttttcatgatcactatttagatgggtgctgttttcatgaggagagtctgggaaggcggcgtccgcttttctgacaagggaagaggct

SEQ ID NO: 125467 - DNA, 120 bp, Artificial Sequence
  ENSG00000101574_3 (sequence is synthesized)
actttgtccttttaaggattcaatgacttcctgacttggaggatgtggacctagtggctagacccaaggaccaaagcaagaagtcgtggggggcccaggaagacaggaggatcacattgg

SEQ ID NO: 125468 - DNA, 120 bp, Artificial Sequence
  ENSG00000101574_4 (sequence is synthesized)
gattccagacataagatcaggttttaaccccctttggccaaattttggctgaaaatgttgaattatcaactctgaaattaaaaagaaagtttatattaaaacattgcaattttccttaga

SEQ ID NO: 125469 - DNA, 120 bp, Artificial Sequence
  ENSG00000101574_5 (sequence is synthesized)
atttctgtatatattaacatcatgaatgataaattctcttcaatgtgcatgtcaggtttttgtacttgtatatcaaatctatctgtgtgtatgaagtgtatgtttattgaaatacaagat

SEQ ID NO: 125470 - DNA, 120 bp, Artificial Sequence
  ENSG00000101574_6 (sequence is synthesized)
atttaagaagctgatctggaaagttggattttcattctagttcctaattcccagaggcttttttaaaggaagggaatgtctgtggtacaccagttgtcagctgggtggttactggatcat

SEQ ID NO: 125471 - DNA, 120 bp, Artificial Sequence
  ENSG00000101574_7 (sequence is synthesized)
ctttcttttatcaacaagataaactatcaacttcaccagcatcatgaaccttgttgccgtaaaaaggagttcactacttctgttcactttgagtctcttcaaatggattctgtgtcctcc

SEQ ID NO: 125472 - DNA, 120 bp, Artificial Sequence
  ENSG00000101574_8 (sequence is synthesized)
tctggagtctgtgctgcatttattgcttctgactcttccactaagccagagaatgatgatggaggaaattatgaaatgttcacacgaaaatttgtttttcgacctgaactgtttgatgtc

SEQ ID NO: 125473 - DNA, 120 bp, Artificial Sequence
  ENSG00000101574_9 (sequence is synthesized)
accaaaccttatataactccagctgttcataaagaatgccagcaaagtaatgaaaaggaagatctgatgaatggtgttaaaaaagaaatctccatttctattattgggaagaagcgtaaa

SEQ ID NO: 125474 - DNA, 120 bp, Artificial Sequence
  ENSG00000101574_10 (sequence is synthesized)
agatgtgttgttttcaatcaaggtgaattggatgctatggaataccatacaaagatcagggagctgattttggatggatctttacagttgatccaggaaggtctcaaaagtggttttctt

SEQ ID NO: 125475 - DNA, 120 bp, Artificial Sequence
  ENSG00000101574_11 (sequence is synthesized)
tatccactttttgaaaaacaggacaagggtagtaagcccattactttaccacttgacgcctgcagtttgtcagaattatgtgaaatggcaaagcatttgccttctctgaatgaaatggaa

SEQ ID NO: 125476 - DNA, 120 bp, Artificial Sequence
  ENSG00000101574_12 (sequence is synthesized)
catcagacattacaattggtggaagaggatacatctgttacagaacaggatttatttttgcgagttgttgaaaacaactctagctttacaaaagtgattactttaatgggacagaaatac

SEQ ID NO: 125477 - DNA, 120 bp, Artificial Sequence
  ENSG00000101574_13 (sequence is synthesized)
ctgctaccaccgaaaagcagttttcttttatctgacatttcttgtatgcaaccacttctaaactataggaaaacatttgatgtaattgtgatagatccaccatggcagaacaaatcagtt

SEQ ID NO: 125478 - DNA, 120 bp, Artificial Sequence
  ENSG00000101574_14 (sequence is synthesized)
aaaagaagtaataggtacagttatttgtcacccctgcaaatacagcaaatacctatccctaaattggctgctccaaactgtcttcttgttacttgggtgaccaatagacagaagcaccta

SEQ ID NO: 125479 - DNA, 120 bp, Artificial Sequence
  ENSG00000101574_15 (sequence is synthesized)
gaatttgtgttcccattagattctccacacaaaaagccctacgaaggtcttatactggggagggttcaagaaaaaactgctctaccattgaggaatgcagatgtaaacgtgctccccatt

SEQ ID NO: 125480 - DNA, 120 bp, Artificial Sequence
  ENSG00000101574_16 (sequence is synthesized)
ccagaccacaaattaattgtcagcgtgccctgtactcttcactcacataagccaccgcttgctgaggttttaaaagactacatcaagccagatggggaatatttggagttgtttgctcga

SEQ ID NO: 125481 - DNA, 120 bp, Artificial Sequence
  ENSG00000101574_17 (sequence is synthesized)
aatttacagccaggttggactagttggggcaatgaagttctcaaatttcagcatgtggattattttattgctgtggagtctggaagctgactatgatcttgattaaagtagtggtttctt

SEQ ID NO: 125482 - DNA, 120 bp, Artificial Sequence
  ENSG00000101574_18 (sequence is synthesized)
cattgtttcctcaccacttttcccttaattctaagtcatttttttattttgttaccaacccatattcttagaatataaacaggacttgtttttttcagtaagggaccagaagtgactagc

SEQ ID NO: 125483 - DNA, 120 bp, Artificial Sequence
  ENSG00000101574_19 (sequence is synthesized)
cttcatgtaattttaagatgaattttacttgagttgcactaacattctatgttattctagactatacaaattaagtggtaagcagttataaagacggcaagaccatgctattgaaaaagt

SEQ ID NO: 125484 - DNA, 120 bp, Artificial Sequence
  ENSG00000101574_20 (sequence is synthesized)
tcagaaaacatacaccgtggaccagaggtcttaatcctatctatggatgtgttttgtgtgacccatacagtgttgtaaaaaacacttagaaccattattctaaaaaatggggctatttca

SEQ ID NO: 125485 - DNA, 120 bp, Artificial Sequence
  ENSG00000101574_21 (sequence is synthesized)
cattaaagtccagatttctgcttctttttaaacatcagaggctctggctacacagaggcctttgttctttcctggcatcagtctgcaggaccaagcggtggtggctcacttgggaagagc

SEQ ID NO: 125486 - DNA, 120 bp, Artificial Sequence
  ENSG00000101574_22 (sequence is synthesized)
cttgtgctctccactttgccacagtaccactgccaccatgctgctcacttatgtcatccacttggcccttgtatgacctgaatttgcaacctctggtatactgttatgttctggagaaaa

SEQ ID NO: 125487 - DNA, 120 bp, Artificial Sequence
  ENSG00000101574_23 (sequence is synthesized)
tattcaaagatctgccaaatactgcattagtatactgagtttatacagcatttttgtagggttttaaattgcattcaaggtcactttccaagcactttctggttttgcttgtttttctag

SEQ ID NO: 125488 - DNA, 120 bp, Artificial Sequence
  ENSG00000101574_24 (sequence is synthesized)
aagaaaatgaaaagctattccttataataaacatggcagcaagtaaacagtgtgattgtgaaaaaaatattatttatagattttctacaaataaatatttgtctaccaagtaaaatattt

SEQ ID NO: 125489 - DNA, 120 bp, Artificial Sequence
  ENSG00000101574_25 (sequence is synthesized)
tgactgaaatgattctttgaaatgcatattgatttattatgtattgactttttaaaaattgaggtataattttcacaaaattctccaattttcagtgtcaaattcagtgaattttgaaaa

SEQ ID NO: 125490 - DNA, 120 bp, Artificial Sequence
  ENSG00000101574_26 (sequence is synthesized)
catatatacagttgtctgtctgccacagtgatcatgatacagaacactttctttaccctgaaaacttctcatttttccttttgcagtcaatcccctgctcctatccttggcccctggcaa

SEQ ID NO: 125491 - DNA, 120 bp, Artificial Sequence
  ENSG00000101574_27 (sequence is synthesized)
acactggtttgctttctatcattagttctgctgtttgagaatttcatataaatggaatcatgcaatgtgtaatctattgtgcctggcttctttcacgtagcattttgagaaaagcattta

SEQ ID NO: 125492 - DNA, 120 bp, Artificial Sequence
  ENSG00000101574_28 (sequence is synthesized)
tactatttacagattgttgacaaatatttatccactaagtaaaatgttagactgaaatgattctttgacaagcttgccaatttactgattttgtcaaagaaaaatatgttatttttgaag

SEQ ID NO: 125493 - DNA, 120 bp, Artificial Sequence
  ENSG00000101574_29 (sequence is synthesized)
tttgttcatcctttgagtgtgtgagtatagtatcagaggcttaattttgtatttatggagctattctaacttgttatttaaaaggaaaaaggtattaaacttgaagcaaacttctcatga

SEQ ID NO: 125494 - DNA, 120 bp, Artificial Sequence
  ENSG00000101574_30 (sequence is synthesized)
ttcttgtatgcaaccacttctaaactgtaagtaattattgtgtttgttattagaaaaagataatttttccgtgggctgaaaagttaagagctagtctgaaatttgaagatgggtcagcat

SEQ ID NO: 125495 - DNA, 120 bp, Artificial Sequence
  ENSG00000101574_31 (sequence is synthesized)
ttatgaggatagggtagacacttttccttgggttatttgtctcttaggtttaattttaaggtgctgacttttgctttttttaaaaaaataaatattgtgaataaagagtcaaaagctaat

SEQ ID NO: 125496 - DNA, 120 bp, Artificial Sequence
  ENSG00000101574_32 (sequence is synthesized)
ttctaagagaacaaatatagttacttctctgtacttaggaattcggtatgcagttgtgtttaaccaaatcacttttttttttaactttttttcatagcaaagtagaaacacttcagttat

SEQ ID NO: 125497 - DNA, 120 bp, Artificial Sequence
  ENSG00000101574_33 (sequence is synthesized)
gaatatcaattcccacatcattcctagccttgtataaaggataccatttaggctagtgttcaagctcattgtctaaaatttcttgaaacatttccgtacaaagttaaaaaatttaaatat

SEQ ID NO: 125498 - DNA, 120 bp, Artificial Sequence
  ENSG00000101574_34 (sequence is synthesized)
tgaagtccgcagtcacacagacctgtatttgactttagattctgaagcttatttaactgtgagtctttggggtattcatttcacaaaaccgagccccagtctccaatctataaaatggac

SEQ ID NO: 125499 - DNA, 120 bp, Artificial Sequence
  ENSG00000101574_35 (sequence is synthesized)
atgataatacctgctgcttagggtcattttgaggtatattgatcagattgaatttaatgtgctgtttattgttatttggacattttatagcaaaattttaagttactgagcaactacaac

SEQ ID NO: 125500 - DNA, 120 bp, Artificial Sequence
  ENSG00000101574_36 (sequence is synthesized)
acaacttactaatgaaaagcttcttttaattgctatcaagccatcttacacttgagtggttatccatgtagcagtgccataaattcttcagagtaaatgacaggataacaaattaatgag

SEQ ID NO: 125501 - DNA, 120 bp, Artificial Sequence
  ENSG00000101574_37 (sequence is synthesized)
aaaaccattctatgcatgcacattttttctcttctttttgatctttgttactctaatagcttaaaaagtgtcacttctttattttaatttgcattcttttgattacttatgagattgtac

SEQ ID NO: 125502 - DNA, 120 bp, Artificial Sequence
  ENSG00000101574_38 (sequence is synthesized)
acatttacaaaaatatacctatgtttataaaagggggagaaaggacagctcttccttacagtaaaattccagttaataaatgaatggaatgatggatctagagaatttccatctgacaaa

SEQ ID NO: 125503 - DNA, 120 bp, Artificial Sequence
  ENSG00000101574_39 (sequence is synthesized)
caccataataattggatgtcaaaatagtggatgaaaagatgagacaggatattttcatggtcttaaagtatctcctcccaagatacttgttaattacaagggaaaaactggtgaaactca

SEQ ID NO: 125504 - DNA, 120 bp, Artificial Sequence
  ENSG00000101574_40 (sequence is synthesized)
gcagacaacactttaaccaaagactctttaacatcctttatctcctgatatgttgcactgatagggcatggcaggcattactttggtggtcctcttgcaaaaaataagtaatctaaattt

SEQ ID NO: 125505 - DNA, 120 bp, Artificial Sequence
  ENSG00000101574_41 (sequence is synthesized)
gggacatcctataaaataattggtagcctttaaaagtttcaaaatcatgaaagacgaagaaagaccgaggaacttttccaggttggaggagagttaggagggatggcagctaaatgcaat

SEQ ID NO: 125506 - DNA, 120 bp, Artificial Sequence
  ENSG00000101574_42 (sequence is synthesized)
gtttgatcctggctttgatcctgggtcagaaaaagtacattagtaaataattggggaagttttattatggccaataagtcagttgtaaaggctgaaattattttaaaataaaaagtaaaa

SEQ ID NO: 125507 - DNA, 120 bp, Artificial Sequence
  ENSG00000101574_43 (sequence is synthesized)
aaaagacctagatttcttagaactatattaatatggctgccaagacgcatagggaattcacagatcattagtgttcagcttactgagctgtagtcatctgcagatagtctctgcaacaat

SEQ ID NO: 125508 - DNA, 120 bp, Artificial Sequence
  ENSG00000101574_44 (sequence is synthesized)
tgcaataggtaacattatgatacaattctagaggtaaaggaaacatctaatatttaatgataaattactctgtttgaataaatgctatatacagatccctttggtgcattccattatatt

SEQ ID NO: 125509 - DNA, 120 bp, Artificial Sequence
  ENSG00000101574_45 (sequence is synthesized)
cgtgtccgtagtgaaatcacttgagttttgaagaacatgtttagtttttaaagtgatcacatagagaaggtattttctgaaattgtatctttgttttcagataggaaaacatttgatgta

SEQ ID NO: 125510 - DNA, 120 bp, Artificial Sequence
  ENSG00000101574_46 (sequence is synthesized)
gttttaagaaatatttatttttctccagaaaacataattgagatttattatctaaatgtcttaaatatctggtgattcgttaagtataaagaagaatcagtaaaacccaaaaaggcttta

SEQ ID NO: 125511 - DNA, 120 bp, Artificial Sequence
  ENSG00000101577_0 (sequence is synthesized)
gagaagaagtggcaggtgatgctgaagcgggggagaagcggcagagccggccacacagtgcaggggatggagacaggtgctgggctggtcctcctgcagcatcctcagttgttggagggc

SEQ ID NO: 125512 - DNA, 120 bp, Artificial Sequence
  ENSG00000101577_1 (sequence is synthesized)
agtcatcctcaggccgtacccagccagagaagaaaaagaacagtgtgaagccacgtgtgatagccgtccaacatcggctcttccctccaattacattgtagttgattgtgtctcaaacca

SEQ ID NO: 125513 - DNA, 120 bp, Artificial Sequence
  ENSG00000101577_2 (sequence is synthesized)
tgaattatgtgggacagctggctgggcaggtgattgtcactgtgaaggaactctacaagggcattaaccaggccaccctctctgggtgcattgatgtcatcgtggtacagcagcaggatg

SEQ ID NO: 125514 - DNA, 120 bp, Artificial Sequence
  ENSG00000101577_3 (sequence is synthesized)
gcagctatcagtgttcaccttttcacgttcggtttggaaagctgggagtcctgagatccaaagagaaagtgattgatatagaaatcaacggcagtgcagtggatcttcacatgaagttgg

SEQ ID NO: 125515 - DNA, 120 bp, Artificial Sequence
  ENSG00000101577_4 (sequence is synthesized)
gtgataacggagaagctttctttgttgaggagactgaagaagaatatgaaaagcttcctgcttaccttgccacctcaccaattcctactgaagatcagttctttaaagatattgacaccc

SEQ ID NO: 125516 - DNA, 120 bp, Artificial Sequence
  ENSG00000101577_5 (sequence is synthesized)
ctttggtgaaatcgggtggagatgaaacaccatctcagagttcagacatctcacacgtcttggaaacagagacaatttttactccaagttctgtgaaaaagaaaaaacgaaggagaaaga

SEQ ID NO: 125517 - DNA, 120 bp, Artificial Sequence
  ENSG00000101577_6 (sequence is synthesized)
aatacaaacaggacagtaagaaggaagagcaggccgcatctgctgctgcagaagacacatgtgatgtaggcgtgagctccgatgatgacaagggggcccaggcagcacgaggatcttcaa

SEQ ID NO: 125518 - DNA, 120 bp, Artificial Sequence
  ENSG00000101577_7 (sequence is synthesized)
atgcttccttgaaagaagaagaatgtaaagagcctttgctcttccattctggggatcattaccccttatctgatggagattggtcccctttagagaccacctatccccagacagcgtgtc

SEQ ID NO: 125519 - DNA, 120 bp, Artificial Sequence
  ENSG00000101577_8 (sequence is synthesized)
ctaagagtgattcagagctggaggtgaaacctgcggagagcctgctcagatcagagtctcacatggagtggacgtggggcggattcccagagtccaccaaggtcagcaaaagagaacgat

SEQ ID NO: 125520 - DNA, 120 bp, Artificial Sequence
  ENSG00000101577_9 (sequence is synthesized)
ctgaccatcatcctaggacagctacaattacaccatcagaaaatactcattttcgggtaattcccagtgaggacaacctcatcagtgaagttgagaaggatgcttccatggaagacactg

SEQ ID NO: 125521 - DNA, 120 bp, Artificial Sequence
  ENSG00000101577_10 (sequence is synthesized)
tctgtaccatagtgaagcccaaacccagagccctgggtacacagatgagcgacccaacatctgtggcagagcttctcgaacctcctcttgagagtactcagatttcatctatgttagatg

SEQ ID NO: 125522 - DNA, 120 bp, Artificial Sequence
  ENSG00000101577_11 (sequence is synthesized)
ctgaccaccttcccaacgcagccttagcggaggcgccctcagaatccaaaccggcagctaaagtagactcgccgtcaaagaagaaaggtgttcacaaaagaagccaacaccagggacctg

SEQ ID NO: 125523 - DNA, 120 bp, Artificial Sequence
  ENSG00000101577_12 (sequence is synthesized)
atgatatttaccttgatgacttaaagggtctagaacctgaagttgcagctctttatttccctaaaagtgaatcggagcccggttccaggcagtggcccgagtctgacacactctctggct

SEQ ID NO: 125524 - DNA, 120 bp, Artificial Sequence
  ENSG00000101577_13 (sequence is synthesized)
cccagtccccacagtccgtgggaagcgcagctgcagatagcggcaccgagtgcctctcagattctgccatggacttgcctgacgttaccctctccctttgcgggggcctcagtgaaaatg

SEQ ID NO: 125525 - DNA, 120 bp, Artificial Sequence
  ENSG00000101577_14 (sequence is synthesized)
gagaaatttcaaaagaaaaattcatggagcatatcattacttatcacgaatttgcagaaaaccctggacttatagacaatcctaaccttgtaataaggatatataatcgttactataact

SEQ ID NO: 125526 - DNA, 120 bp, Artificial Sequence
  ENSG00000101577_15 (sequence is synthesized)
gggctttggcagctcccatgatccttagcttgcaagtattccagaagagcttgcctaaggccacagttgagtcctgggtgaaagacaagatgccaaagaaatctggtcgctggtggtttt

SEQ ID NO: 125527 - DNA, 120 bp, Artificial Sequence
  ENSG00000101577_16 (sequence is synthesized)
ggcgaaagagagaaagcatgaccaaacagctgccagaatccaaggagggaaaatctgaggcaccgccagccagtgacctgccatccagctccaaggagccggccggtgccaggccggccg

SEQ ID NO: 125528 - DNA, 120 bp, Artificial Sequence
  ENSG00000101577_17 (sequence is synthesized)
agaatgactcctcgagtgacgagggatcacaggagctcgaagaatccatcacagtggaccccatccccacagagcccctgagccacggcagcacaacttcatataagaagtctctccgcc

SEQ ID NO: 125529 - DNA, 120 bp, Artificial Sequence
  ENSG00000101577_18 (sequence is synthesized)
tctcctcagaccagatcgcaaaactgaagctccacgatggcccaaatgatgttgtgtttagtattacaacccagtatcaaggcacctgtcgctgtgcagggaccatttacctgtggaact

SEQ ID NO: 125530 - DNA, 120 bp, Artificial Sequence
  ENSG00000101577_19 (sequence is synthesized)
ggaatgacaagatcatcatttctgatattgatgggacaataaccaagtcggatgctttgggacagattctcccacagctgggcaaagactggacccaccagggtatagcaaagctctacc

SEQ ID NO: 125531 - DNA, 120 bp, Artificial Sequence
  ENSG00000101577_20 (sequence is synthesized)
attccatcaatgagaatggctacaagtttctgtactgctcggctcgtgccatcggcatggccgacatgacccgtggctacctgcactgggtcaatgacaagggcacaatcttgccccggg

SEQ ID NO: 125532 - DNA, 120 bp, Artificial Sequence
  ENSG00000101577_21 (sequence is synthesized)
gccccctgatgctgtcccccagcagcttgttctccgccttccacagagaagtgatagaaaagaaaccagagaagttcaaaattgagtgtctaaatgatatcaagaatctgtttgccccgt

SEQ ID NO: 125533 - DNA, 120 bp, Artificial Sequence
  ENSG00000101577_22 (sequence is synthesized)
ctaagcagcccttctatgctgcctttggaaaccgtccaaatgatgtctatgcctacacacaagttggagttccagactgtagaatattcaccgtgaaccccaagggtgaattaatacaag

SEQ ID NO: 125534 - DNA, 120 bp, Artificial Sequence
  ENSG00000101577_23 (sequence is synthesized)
aaagaaccaaaggaaacaagtcatcgtatcacaggctgagtgagctcgtggagcatgtgttcccccttctcagtaaggagcagaattccgcttttccctgcccggagttcagctccttct

SEQ ID NO: 125535 - DNA, 120 bp, Artificial Sequence
  ENSG00000101577_24 (sequence is synthesized)
gctactggcgagacccgatccctgaagtggacctggatgacctgtcttgaggcggcacctcagtgggtgggcagggcttggtccccctccccacagcaagggaaggcagctggctcttct

SEQ ID NO: 125536 - DNA, 120 bp, Artificial Sequence
  ENSG00000101577_25 (sequence is synthesized)
gctcagctcctggaaggagaagggaggaactgggcctggggctggaggcctgggatccctcctttgtgggtcgcacacatgtttcctgctgtgagctggggcctccttccattgcatcat

SEQ ID NO: 125537 - DNA, 120 bp, Artificial Sequence
  ENSG00000101577_26 (sequence is synthesized)
tttaaaggaagaaaaaagcagctaaaaaagagtggaccaaaacactgcacacagtgaagtgttccagtttccactgggcagttgaggtggcttctgtaaccagggctgtcttcagatgtc

SEQ ID NO: 125538 - DNA, 120 bp, Artificial Sequence
  ENSG00000101577_27 (sequence is synthesized)
agggtccctgaactgctgcgggcccagtcagtgatgctggctgaagctgcctgtgcacgtttcttctctggtcgcctcatttcctgctacactgaaggggtcagctgctccagtgggcca

SEQ ID NO: 125539 - DNA, 120 bp, Artificial Sequence
  ENSG00000101577_28 (sequence is synthesized)
agttgggcaggacccccgcccctgcagggcccatgcaccagagccactgagcccagtcccataaacctggccctctttggggaaagatccccacagagcatcctcctctcatctgtgaca

SEQ ID NO: 125540 - DNA, 120 bp, Artificial Sequence
  ENSG00000101577_29 (sequence is synthesized)
actccacgagcccttaatttcttagtcctcaccagaagaacaggtctcacaagtatatatttgatgtctgtaataaaagtgggaaggtgggtcttaaaacagaccaaaccccgccccgcc

SEQ ID NO: 125541 - DNA, 120 bp, Artificial Sequence
  ENSG00000101577_30 (sequence is synthesized)
cccaacaactctgcttttagggaggcctccgaaatgcagataggcggttgagtggggtcctgggaagagcgctgaatccctctgcttgctgcctggtgtgggcctttggaaagcatcttg

SEQ ID NO: 125542 - DNA, 120 bp, Artificial Sequence
  ENSG00000101577_31 (sequence is synthesized)
ccttgggacaggatttctaaaattctgtgattcagatttgtcagggaagcacagtgaagcttgcttaaaggcactggccagcagtgtgtgactttggcttttgggatcacaccctgtaat

SEQ ID NO: 125543 - DNA, 120 bp, Artificial Sequence
  ENSG00000101577_32 (sequence is synthesized)
cgggcccgtggaagcagcgtcaaagaggggtcttggagctcctatggagcagactgccccccgagcagtgtccccagcctagccctgtgagaccccatggggacacgggtgcctatgtat

SEQ ID NO: 125544 - DNA, 120 bp, Artificial Sequence
  ENSG00000101577_33 (sequence is synthesized)
tttcactaaaatatacatggtagctccatttactgatgcggttgtaatgagctcacatcgtgtctgaagagatggcaccagggaaaggtgtgccataagctgctccagagcttttggtat

SEQ ID NO: 125545 - DNA, 120 bp, Artificial Sequence
  ENSG00000101577_34 (sequence is synthesized)
gctgagtgttgacagagctgcactcttaacatcaagagaactgtcaggagcccagaaccaaccccaggtcttggtctccattggcgagaacacaggacgtggtggttcctgagcagagag

SEQ ID NO: 125546 - DNA, 120 bp, Artificial Sequence
  ENSG00000101577_35 (sequence is synthesized)
ggatctgcagatacaggcttggcgctcggggtggtctcgtggccaactcttcatgcccctgccgttgtagtggaacctctacatgttttagtttgcttcacctaaaataatgctgatcta

SEQ ID NO: 125547 - DNA, 120 bp, Artificial Sequence
  ENSG00000101577_36 (sequence is synthesized)
gagatagagaaataggggtggttatttttccagattggagagttgaaagtccctgactgatttcagccattttcctagtgcttgtcggatgcagagacaatgttgaaatcccctaaacac

SEQ ID NO: 125548 - DNA, 120 bp, Artificial Sequence
  ENSG00000101577_37 (sequence is synthesized)
agttctcagtggcaaaacctaggaaggctcatgttcccagagaagggaccacatgagccttctcccatgcaaagcttcccccagcttaaatagttgataaggactaattgtttaatgagt

SEQ ID NO: 125549 - DNA, 120 bp, Artificial Sequence
  ENSG00000101577_38 (sequence is synthesized)
ttatttatctacagtaggttagggatcctgggttctgtttatatgaagttcttcccagtttgtgaattctagtacagcagccatgcagccaccttatttcatagatgccatctgtgtgtc

SEQ ID NO: 125550 - DNA, 120 bp, Artificial Sequence
  ENSG00000101577_39 (sequence is synthesized)
ctcttgactaccttctatttagaggaagaatgagagctttgtgtgtttaactgagcttatagtaggacttctttgcatatgtatggtactgaaaaatcttaatatacatctttaatcctt

SEQ ID NO: 125551 - DNA, 120 bp, Artificial Sequence
  ENSG00000101577_40 (sequence is synthesized)
tttaggttgtcctttaaagagtttttgactagtttctttttcttgacagctcttctctttggacacatgggccttcttagagggttcagtctaggacccggctctcctggccctgtgttg

SEQ ID NO: 125552 - DNA, 120 bp, Artificial Sequence
  ENSG00000101577_41 (sequence is synthesized)
agggtagctggtccctctgtccctgtgtctgctagcactagactttgttgctgcagattgatccagtgggtacataggctaattaatgtgagtctttttccttgtttaaaggagtccctc

SEQ ID NO: 125553 - DNA, 120 bp, Artificial Sequence
  ENSG00000101577_42 (sequence is synthesized)
ttgctgaaagtagatgattactattgctgtagtgttaggaaagtattaagtttgtgctgaaaatccattgccatttggtacaaatgacatttgttctttctgtgaaagagatgccctcga

SEQ ID NO: 125554 - DNA, 120 bp, Artificial Sequence
  ENSG00000101577_43 (sequence is synthesized)
gtgtgtttgtacacaaacccttaggatggtgagttgaagcatcaccctcgcgctatcttcagtgacgggtgacggctcagggagatggcaggcagattgggctctaagtcattattctct

SEQ ID NO: 125555 - DNA, 120 bp, Artificial Sequence
  ENSG00000101577_44 (sequence is synthesized)
cagttactccattggtgaaatggccctttccctctttgcagttcagtctaagtctcgtatttgctttgctgtctgtgtgctgaagctcgtcccgtgtgagttgctgtctgccccttgtca

SEQ ID NO: 125556 - DNA, 120 bp, Artificial Sequence
  ENSG00000101577_45 (sequence is synthesized)
ggctgtgaggtgctcgtgtagacctggagcatgcaggctgcctccgtttttgggtactgtgttgtgttttgctctgtctaaaaacatctgcatagttttcaactggaaaaagaaaaaact

SEQ ID NO: 125557 - DNA, 120 bp, Artificial Sequence
  ENSG00000101577_46 (sequence is synthesized)
taaaaatgggatgtcctaaaatgaaagctgctcaaagtcacagaacaaccgagggacaaaggagattggatgactgggaagcgctggcccggaacagcccctgcaactgtggggcctgca

SEQ ID NO: 125558 - DNA, 120 bp, Artificial Sequence
  ENSG00000101577_47 (sequence is synthesized)
cacagcccttccacagttggcactgcaggtgcaggccaaccctttaaagaataaacaaggaagtcagctctttcactttttacaagttggcaaaaacagacttccggggaatttcgatgt

SEQ ID NO: 125559 - DNA, 120 bp, Artificial Sequence
  ENSG00000101577_48 (sequence is synthesized)
tttcccgtgttgtagagcttccagggtttaataaaactggttaaaaattgagtctttccctgaagtaagtgctctttccagatgaaaactactcttttggttttgtttgaaagtaagaaa

SEQ ID NO: 125560 - DNA, 120 bp, Artificial Sequence
  ENSG00000101577_49 (sequence is synthesized)
gggaggggaaactttgctcttttaataattatgttcagcctatgatgaagtatttgattattagacagcaatgtcactaataagttttaagttgtccaaagttaattgtaaacatcatca

SEQ ID NO: 125561 - DNA, 120 bp, Artificial Sequence
  ENSG00000101577_50 (sequence is synthesized)
gtacagtactcttagttacagtaaagcaattgttgcaagatgaatggctaatattttggtgcagtgtttgatgttcaaaacaaaatgttacaacaataaacgaacataacataaactgaa

SEQ ID NO: 125562 - DNA, 80 bp, Artificial Sequence
  ENSG00000101577_51 (sequence is synthesized)
agctgccggctcggccgccgcagccgcggcgtcccattcatgagggccgcccgactcagctgcggcccaggcggcttcca

SEQ ID NO: 125563 - DNA, 120 bp, Artificial Sequence
  ENSG00000101577_52 (sequence is synthesized)
actgtgtctgcaagcagtttgtactcagtttgtcaagagagcagctttctgttttgattatataccttcatctctgaaaaaagacatgctagttaaatttcaagatgttttacttagaag

SEQ ID NO: 125564 - DNA, 120 bp, Artificial Sequence
  ENSG00000101577_53 (sequence is synthesized)
gtctggagtgcagtgtaggaggcaacctctgcctcccaggctcaagcagtcctttcgcctcagccttctaaggagctaggacctcagttacggcacccttgcccctgcctcggctgactt

SEQ ID NO: 125565 - DNA, 120 bp, Artificial Sequence
  ENSG00000101596_0 (sequence is synthesized)
cgctggtcgcgggtcgcaccgtgaggctcgcgtgggcggcgataggcgctgggcccgggcccggtgaggagcgcgccgcgcgtccccttctcctcaggagtggcgggccgcggaagtgac

SEQ ID NO: 125566 - DNA, 120 bp, Artificial Sequence
  ENSG00000101596_1 (sequence is synthesized)
tgacgtggtgcacgggcaggagcgcgtttgaatcggttcccgggtgatcctcgcgcctgccgctgctcggccgccgccgctgacgaggagctgcagcgcgccgggccgaggcctcgagcc

SEQ ID NO: 125567 - DNA, 120 bp, Artificial Sequence
  ENSG00000101596_2 (sequence is synthesized)
gccccgggagctggagctgaaggcgccgcgcggagcgcgcacctcagccctgagcccggcggcggcaggcgtcgctgtcttttctccttttccccaatatggcagcggcggacggcggcg

SEQ ID NO: 125568 - DNA, 120 bp, Artificial Sequence
  ENSG00000101596_3 (sequence is synthesized)
ggcctggtggggcctctgtggggactgaggaggatggcggaggcgtcggccacaggacggtgtacttgtttgatcggcgcgaaaaggagtccgagctcggggaccggcctctgcaggtcg

SEQ ID NO: 125569 - DNA, 120 bp, Artificial Sequence
  ENSG00000101596_4 (sequence is synthesized)
gggagcgctcggactacgcgggatttcgcgcgtgtgtgtgtcagacacttggcatttcacctgaagaaaaatttgttattacaacaacaagtaggaaagaaattacctgtgataattttg

SEQ ID NO: 125570 - DNA, 120 bp, Artificial Sequence
  ENSG00000101596_5 (sequence is synthesized)
atgaaactgttaaagatggagtcaccttatacctgctacagtcggtcaatcagttactactgacagctacgaaagaacgaattgacttcttacctcactatgacacactggttaaaagtg

SEQ ID NO: 125571 - DNA, 120 bp, Artificial Sequence
  ENSG00000101596_6 (sequence is synthesized)
gcatgtatgaatattatgccagtgaaggacaaaatcctttgccatttgctcttgcggaattaattgacaattcattgtctgctacttctcgtaacattggggttagaagaatacagatca

SEQ ID NO: 125572 - DNA, 120 bp, Artificial Sequence
  ENSG00000101596_7 (sequence is synthesized)
aattgctttttgatgaaacacaaggaaaacctgctgttgcagtgatagataatggaagaggaatgacctctaaacagcttaacaactgggccgtgtataggttgtcaaaattcacaaggc

SEQ ID NO: 125573 - DNA, 120 bp, Artificial Sequence
  ENSG00000101596_8 (sequence is synthesized)
aaggtgactttgaaagtgatcattcaggatatgttcgtccagtaccagtgccacgcagtttaaatagtgatatttcctattttggtgttgggggcaagcaagctgtcttctttgttggac

SEQ ID NO: 125574 - DNA, 120 bp, Artificial Sequence
  ENSG00000101596_9 (sequence is synthesized)
aatcagccagaatgataagcaaacctgcagattcccaagatgttcacgagcttgtgctttctaaagaagattttgagaagaaggagaaaaataaagaggcaatatatagtggatatatta

SEQ ID NO: 125575 - DNA, 120 bp, Artificial Sequence
  ENSG00000101596_10 (sequence is synthesized)
gaaacagaaagccctctgattctgttcacattacaaatgatgatgaaagatttctacatcatcttatcatagaggagaaggaaaaagatagctttactgctgtggttatcacaggggtac

SEQ ID NO: 125576 - DNA, 120 bp, Artificial Sequence
  ENSG00000101596_11 (sequence is synthesized)
aaccagaacacatacagtacttgaaaaattatttccacctttggacacgacagttagcgcatatttatcactactatattcatggcccaaaaggaaatgaaatacgaacatcaaaagaag

SEQ ID NO: 125577 - DNA, 120 bp, Artificial Sequence
  ENSG00000101596_12 (sequence is synthesized)
ttgaacctttcaacaatattgatattgaaatttctatgtttgaaaaagggaaggtacctaagattgtcaacctaagggaaatacaagacgacatgcagacgttgtatgtaaacacagcag

SEQ ID NO: 125578 - DNA, 120 bp, Artificial Sequence
  ENSG00000101596_13 (sequence is synthesized)
ctgatagttttgaattcaaagctcatgttgaaggagatggtgtagtggaagggattatccgttatcatccattcttatatgatagagaaacttaccctgatgatccatgctttccatcaa

SEQ ID NO: 125579 - DNA, 120 bp, Artificial Sequence
  ENSG00000101596_14 (sequence is synthesized)
aattaaaagatgaagatgatgaagatgattgtttcatacttgagaaagcagctagagggaaaaggcctatttttgaatgtttttggaatggacgattaataccatatacatcagttgaag

SEQ ID NO: 125580 - DNA, 120 bp, Artificial Sequence
  ENSG00000101596_15 (sequence is synthesized)
actttgactggtgtactcctcctaagaagagagggcttgcaccaattgaatgctacaataggatatctggtgcattattcactaatgacaaattccaggtcagcacaaataaattgacgt

SEQ ID NO: 125581 - DNA, 120 bp, Artificial Sequence
  ENSG00000101596_16 (sequence is synthesized)
ttatggatcttgagctaaaattgaaagataagaacaccctttttacaaggattttaaatggacaggaacagcgaatgaaaattgacagagaatttgctttgtggctgaaggactgtcatg

SEQ ID NO: 125582 - DNA, 120 bp, Artificial Sequence
  ENSG00000101596_17 (sequence is synthesized)
agaagtatgataaacaaataaaatttacactttttaagggagtaattacacgtcctgatcttccttctaaaaagcaaggtccctgggcaacatatgcagcaatagaatgggatggaaaga

SEQ ID NO: 125583 - DNA, 120 bp, Artificial Sequence
  ENSG00000101596_18 (sequence is synthesized)
tatacaaagcaggacagctggtcaagacaatcaagacacttcccctcttttatggaagcatagtaagattttttctttatggcgatcatgatggagaagtatatgctacaggaggagagg

SEQ ID NO: 125584 - DNA, 120 bp, Artificial Sequence
  ENSG00000101596_19 (sequence is synthesized)
ttcaaattgcaatggaacctcaggcactatatgatgaagtaagaactgtgccaattgcaaagctggataggacagttgctgagaaagctgttaaaaaatatgtagaagatgaaatggcaa

SEQ ID NO: 125585 - DNA, 120 bp, Artificial Sequence
  ENSG00000101596_20 (sequence is synthesized)
ggctccctgatagattgtcagtaacttggcctgaaggagatgaattattgcctaatgaggttaggcctgctggaacccctattggtgcgttaagaattgaaatactgaataaaaaagggg

SEQ ID NO: 125586 - DNA, 120 bp, Artificial Sequence
  ENSG00000101596_21 (sequence is synthesized)
aagcaatgcaaaagcttccaggaacaagccatggagggtcaaagaaactcctggttgagctcaaagttattttacattcttcaagtggaaataaagagattatttcgcatattagtcaac

SEQ ID NO: 125587 - DNA, 120 bp, Artificial Sequence
  ENSG00000101596_22 (sequence is synthesized)
atggaggaaaatggccttactggtttaaaaaaatggaaaatattcagaagttggggaattataccttgaaattacaagttgtgttgaatgaaagtaatgcagacacttatgcaggaagac

SEQ ID NO: 125588 - DNA, 120 bp, Artificial Sequence
  ENSG00000101596_23 (sequence is synthesized)
cactaccatctaaagcaattaagttttctgttaaagagggtaagccagagaaattttcatttggtcttctggatcttccttttcgtgttggagttccatttaatatccctctggagtttc

SEQ ID NO: 125589 - DNA, 120 bp, Artificial Sequence
  ENSG00000101596_24 (sequence is synthesized)
aggatgaatttggtcataccagtcaactagtaactgatattcagccagttcttgaagcaagtggtttatctttacattatgaagaaataaccaaaggaccaaattgtgtaattcgaggtg

SEQ ID NO: 125590 - DNA, 120 bp, Artificial Sequence
  ENSG00000101596_25 (sequence is synthesized)
ttacagccaagggccctgtaaactcttgtcaaggcaagaattataatctgaaggttactctgcctggcttaaaagaagactcacagattttgaaaattagattactacctggtcaccctc

SEQ ID NO: 125591 - DNA, 120 bp, Artificial Sequence
  ENSG00000101596_26 (sequence is synthesized)
gtcgactgaaagtgaaacctgattctgaaattttagttatagaaaatggaacagctttcccatttcaggtggaagttttagatgaatcagacaacataacagcacaaccaaaattgattg

SEQ ID NO: 125592 - DNA, 120 bp, Artificial Sequence
  ENSG00000101596_27 (sequence is synthesized)
ttcattgtaagttttcaggtgctccaaaccttccagtctatgttgtagattgcagtagttctggaaccagtattttaacaggatctgcaattcaagttcagaatattaaaaaagaccaga

SEQ ID NO: 125593 - DNA, 120 bp, Artificial Sequence
  ENSG00000101596_28 (sequence is synthesized)
cgcttaaagcaagaattgaaatacctagttgtaaagatgtggcacctgtggagaagactattaagttgcttcccagtagccatgttgcaagactacaaatattcagtgtagaaggacaaa

SEQ ID NO: 125594 - DNA, 120 bp, Artificial Sequence
  ENSG00000101596_29 (sequence is synthesized)
aggcaattcagatcaaacatcaggatgaggttaattggatagcgggtgatattatgcataatcttatttttcaaatgtatgatgaaggagaaagagaaatcaatataacatcagctttag

SEQ ID NO: 125595 - DNA, 120 bp, Artificial Sequence
  ENSG00000101596_30 (sequence is synthesized)
cagaaaaaattaaagttaattggactcctgagattaacaaagaacacttgctacagggtctgcttcctgatgtgcaagtaccaacatctgtaaaagatatgcgctattgccaggtttcat

SEQ ID NO: 125596 - DNA, 120 bp, Artificial Sequence
  ENSG00000101596_31 (sequence is synthesized)
tccaagatgatcatgtgtctttggaaagtgcgtttacagtaagaccacttcctgatgaacctaaacatttaaaatgtgaaatgaaaggaggaaaaacagtacagatgggccaagagcttc

SEQ ID NO: 125597 - DNA, 120 bp, Artificial Sequence
  ENSG00000101596_32 (sequence is synthesized)
aaggagaagtagttataataattacagatcagtacggaaatcagattcaagcattttcaccaagttctttatcttctttgtcaattgctggggttggacttgatagctcaaatttgaaaa

SEQ ID NO: 125598 - DNA, 120 bp, Artificial Sequence
  ENSG00000101596_33 (sequence is synthesized)
caacctttcaggaaaacacacagagtataagtgtaagaggcatcaaatttattccaggtcctcctggaaataaggatctttgttttacttggcgtgagttttctgactttattcgagtgc

SEQ ID NO: 125599 - DNA, 120 bp, Artificial Sequence
  ENSG00000101596_34 (sequence is synthesized)
aactaatttctggacctcctgctaaacttctccttatagactggccagaactaaaggagtccattccagtgattaatggaagagatttacagaaccctattattgttcaactttgtgatc

SEQ ID NO: 125600 - DNA, 120 bp, Artificial Sequence
  ENSG00000101596_35 (sequence is synthesized)
agtgggataatccagcaccggtacaacatgttaaaataagtcttacaaaagctagcaatttaaagctcatgccttcaaaccaacagcataaaacagatgagaaaggcagggctaatttgg

SEQ ID NO: 125601 - DNA, 120 bp, Artificial Sequence
  ENSG00000101596_36 (sequence is synthesized)
caaaagtatcatagaaggacctataattaagttaatgattcttccagacccagaaaaacccgttcgtctcaatgttaaatatgacaaagatgcatccttcttagcagggggtcttttcac

SEQ ID NO: 125602 - DNA, 120 bp, Artificial Sequence
  ENSG00000101596_37 (sequence is synthesized)
tgattttatgattagtgttatttctgaagatgacagtatcattaaaaacattaatccagcacgtatttccatgaaaatgtggaagctgtctaccagtgggaaccgacccccagcaaatgc

SEQ ID NO: 125603 - DNA, 120 bp, Artificial Sequence
  ENSG00000101596_38 (sequence is synthesized)
agaaacatttagttgtaataaaataaaagataatgacaaagaagatggctgcttctatttcagggataaagtaattcctaataaagtggggacatattgtatccagtttggttttatgat

SEQ ID NO: 125604 - DNA, 120 bp, Artificial Sequence
  ENSG00000101596_39 (sequence is synthesized)
ggataaaacaaatattctcaacagtgaacaggttatagttgaagtcctgcctaatcaacctgtgaagttagtacctaaaattaaaccacctacaccagctgtttcaaatgttcgctcagt

SEQ ID NO: 125605 - DNA, 120 bp, Artificial Sequence
  ENSG00000101596_40 (sequence is synthesized)
tgccagtaggaccttggtcagagatctacatcttagtatcacggatgactacgacaaccatactggaattgatttggttggcactataatagccaccattaaaggctctaatgaggaaga

SEQ ID NO: 125606 - DNA, 120 bp, Artificial Sequence
  ENSG00000101596_41 (sequence is synthesized)
tactgataccccactttttattgggaaagttagaacacttgaattccccttcgtgaatggttcggctgaaatcatgagtctggtgctggcagaaagtagtcctggaagggatagtactga

SEQ ID NO: 125607 - DNA, 120 bp, Artificial Sequence
  ENSG00000101596_42 (sequence is synthesized)
atattttattgtatttgagccccggctaccacttttatcaagaaccttagaaccatatatcctaccgttcatgttttacaatgatgttaagaagcagcaacaaatggcagcacttacaaa

SEQ ID NO: 125608 - DNA, 120 bp, Artificial Sequence
  ENSG00000101596_43 (sequence is synthesized)
agaaaaggaccaattatctcagtctattgttatgtataaaagtttatttgaagccagccaacagcttcttaatgaaatgaaatgtcaagttgaagaagcaagattaaaagaggcccaatt

SEQ ID NO: 125609 - DNA, 120 bp, Artificial Sequence
  ENSG00000101596_44 (sequence is synthesized)
gcgaaatgaactaaaaatacataatattgacattcctacaacacaacaggtgccacacattgaagcacttctgaaaagaaagctatcagaacaagaagaactgaagaaaaaacctagaag

SEQ ID NO: 125610 - DNA, 120 bp, Artificial Sequence
  ENSG00000101596_45 (sequence is synthesized)
atcgtgtactcttccaaactatactaaaggcagtggagatgttttgggaaagattgcacatctagcacaaattgaagatgatagagctgcgatggttatttcttggcatctggcaagtga

SEQ ID NO: 125611 - DNA, 120 bp, Artificial Sequence
  ENSG00000101596_46 (sequence is synthesized)
catggactgtgtagtcaccctaaccactgacgctgcacgtcgtatctatgatgaaacccaaggtcgtcagcaggtgttgccccttgattctatttacaagaagactcttccagattggaa

SEQ ID NO: 125612 - DNA, 120 bp, Artificial Sequence
  ENSG00000101596_47 (sequence is synthesized)
aagatctctacctcatttccgaaatggaaaattgtattttaaacccattggagatccagtctttgctcgagacttgttaacatttccagataatgtagaacattgtgaaacagtatttgg

SEQ ID NO: 125613 - DNA, 120 bp, Artificial Sequence
  ENSG00000101596_48 (sequence is synthesized)
tatgctgttaggagacaccattattttggataatctggatgcggccaatcattatagaaaagaggttgttaaaattacacactgtcctacactgctgaccagagatggagatcgaattcg

SEQ ID NO: 125614 - DNA, 120 bp, Artificial Sequence
  ENSG00000101596_49 (sequence is synthesized)
aagtaatggaaagtttgggggccttcagaataaagctcctccaatggataaacttcggggaatggtatttggagctccagttccaaaacagtgtctgatcttaggggaacaaatagatct

SEQ ID NO: 125615 - DNA, 120 bp, Artificial Sequence
  ENSG00000101596_50 (sequence is synthesized)
tcttcagcagtatcgttctgctgtgtgcaaactagacagtgtgaataaggatcttaacagtcaattagagtaccttcgcactccggatatgaggaagaaaaagcaagaacttgatgaaca

SEQ ID NO: 125616 - DNA, 120 bp, Artificial Sequence
  ENSG00000101596_51 (sequence is synthesized)
tgagaaaaatctcaaactaatagaggaaaaactaggtatgactcccatacgtaagtgtaatgactcattgcgtcattcaccaaaggttgagacgacagattgtccagttcctcctaaaag

SEQ ID NO: 125617 - DNA, 120 bp, Artificial Sequence
  ENSG00000101596_52 (sequence is synthesized)
aatgagacgagaagctacaagacaaaataggattataaccaaaacagatgtatgagaggtgacagagagaagaggccattggtctcagtaagaatgccctgctttctgcatctctgtttc

SEQ ID NO: 125618 - DNA, 120 bp, Artificial Sequence
  ENSG00000101596_53 (sequence is synthesized)
agaagaccaagagggtgacttaccagactgagtatttctggggacaatacaagtacctgggcatgaatttccatttcgattcagatgggactggaaacaaccattcaattttatgaatct

SEQ ID NO: 125619 - DNA, 120 bp, Artificial Sequence
  ENSG00000101596_54 (sequence is synthesized)
tactggacattatggatttactggaattattccagacattatgccctttggttgtcactaccttgcaaatgtgtaagaggaaaatgtgctaatgtggcagtgactgtaaaactggcacat

SEQ ID NO: 125620 - DNA, 120 bp, Artificial Sequence
  ENSG00000101596_55 (sequence is synthesized)
ggcatttattaatcctgaagaaaagtacatgtactatttttcagtataaatataatgaacatgtcagaactatttcttgaaaacctttttattacttttgcgtgaatttatttaacaaag

SEQ ID NO: 125621 - DNA, 120 bp, Artificial Sequence
  ENSG00000101596_56 (sequence is synthesized)
atgttttgtcttttgtgtaagggaggttctagaggctagatgtttaattgtaaatatgtgaggaaactcaatgcagaattcaggataaaaattttaaaagcacaggtatttgggaattga

SEQ ID NO: 125622 - DNA, 120 bp, Artificial Sequence
  ENSG00000101596_57 (sequence is synthesized)
tttgggaattgaaatgttaagatacccagaacaacattaaatcaatgagtgaacttgtgacagtggtagcatttcaaatttcaaaagacttatcctgtgtgtgtgtgtgtgtgtatatat

SEQ ID NO: 125623 - DNA, 120 bp, Artificial Sequence
  ENSG00000101596_58 (sequence is synthesized)
ataaaatattcagcagcaccaagttttataactattgtttgtttgactttattaatactagaatatgtagtctcagccttaattttacatttacattattttgtaattttttattactat

SEQ ID NO: 125624 - DNA, 120 bp, Artificial Sequence
  ENSG00000101596_59 (sequence is synthesized)
ttttattactatttttaaggggttaaagagaacatacattctcacattagtgtactttctggtagaaagttgctgcaaaaacatttgaaatgtatattaacctaatgtatgtcatatata

SEQ ID NO: 125625 - DNA, 120 bp, Artificial Sequence
  ENSG00000101596_60 (sequence is synthesized)
tgtctttgtgtaagttcaagactattgatctgtgaagttattttgtaaggacatacatttggtaagtaagtttgtgtcccaggaaatgtatgtgtttttaaaccctttctaaatatgcag

SEQ ID NO: 125626 - DNA, 120 bp, Artificial Sequence
  ENSG00000101596_61 (sequence is synthesized)
gccattaataaataagattgtttcttccctactgaatagataagtgtttttcttttttaaaattggaagcttcataaaagttatcttgttaaaaaacgatgatgatgttaacctatctat

SEQ ID NO: 125627 - DNA, 120 bp, Artificial Sequence
  ENSG00000101596_62 (sequence is synthesized)
ctttataattggaaattatttaaactgtttgttgttacagaagaaacaaaatggtaattacagaattagctgtggggaagattggctcccatggtactacaggttgagtatcccttattc

SEQ ID NO: 125628 - DNA, 120 bp, Artificial Sequence
  ENSG00000101596_63 (sequence is synthesized)
aaaatggttgggacctgaagtgttttggattttggttttttgtggggtttttaaattattattttggaatatttgcattatatttaccaatttagcatccctaatccaaaaatctttcat

SEQ ID NO: 125629 - DNA, 120 bp, Artificial Sequence
  ENSG00000101596_64 (sequence is synthesized)
tagaaattggaaatgcttcaatgagcatttcccttatgtgtcatatctgcgctcaaatgttttgaattttggaacatttcttgtttctgacttttagattagggatactcaccccgtacc

SEQ ID NO: 125630 - DNA, 120 bp, Artificial Sequence
  ENSG00000101596_65 (sequence is synthesized)
aatatttggagtccttagacattagattatatgaaaatgattgattgataggtaagaaaggttaaagagaaatgactttttaggaactagacttgaacgtataattaatatgtggaacta

SEQ ID NO: 125631 - DNA, 120 bp, Artificial Sequence
  ENSG00000101596_66 (sequence is synthesized)
gtttgcttttataattcattgtatcaagaaggagtcatgttttaaatccaaggcattgagactatctagaagcaaaaaagttggttttaaaaattctttttattagaagtgtgtttaaaa

SEQ ID NO: 125632 - DNA, 120 bp, Artificial Sequence
  ENSG00000101596_67 (sequence is synthesized)
acatgtctttttttcccttgagcgacagtggcctcactacattgcccaggctagtcttgaactcctgggttcaagcagtcttcctgccttggcctcctaagtagcagggattacaggcat

SEQ ID NO: 125633 - DNA, 120 bp, Artificial Sequence
  ENSG00000101596_68 (sequence is synthesized)
gcacccacatgccaatttttattgcttaaaatggcgagttctatggatattatctagccccaagcccatatctgtacacttttgttcattttataataccagaaagaatgttctatcagt

SEQ ID NO: 125634 - DNA, 120 bp, Artificial Sequence
  ENSG00000101596_69 (sequence is synthesized)
aaaagaaggtttttaagtatgaatctccatttttgtggagtttttctaccctgtaaaaattaactttgtggttcccagtaattacagtaaggagtttttctatattttcacagttggatt

SEQ ID NO: 125635 - DNA, 120 bp, Artificial Sequence
  ENSG00000101596_70 (sequence is synthesized)
tatctaaggatatttctcagcatattaaggaatccttttctacatttgagcaaatactgaggttcatgttgtaccaaataataataaattgcttttgtgtttaatatgtaacacgtaaga

SEQ ID NO: 125636 - DNA, 120 bp, Artificial Sequence
  ENSG00000101596_71 (sequence is synthesized)
acaattgaaattttcttctaagatttaatactagtcttttagtataaaggaatgtaactggagaaaaaaattaatgctacagccatttatcctgtgttatgtgttatataatctgaaatt

SEQ ID NO: 125637 - DNA, 120 bp, Artificial Sequence
  ENSG00000101596_72 (sequence is synthesized)
tgtcacaatgttacaatcaggaagttttttttctggtttcttcttccaaaggaaaataatagcctacttgtattttgaagtaactgaaataaaactctctccaagcctttttgcacatta

SEQ ID NO: 125638 - DNA, 120 bp, Artificial Sequence
  ENSG00000101596_73 (sequence is synthesized)
atagagatggggtcttgctgtgttgaccaggctggtctcaagctcctgggcttaagctactctcctgccgcggcctcccaaagtactgagattacaggcctgagtcaccatgctcggccc

SEQ ID NO: 125639 - DNA, 120 bp, Artificial Sequence
  ENSG00000101596_74 (sequence is synthesized)
aacatccacatgtttaaagcaaaacctgtggacccatgacgttgatttgccctatcccagttatagttaccatcaagtcccactcggagaagagacttgttggtaaaacagttctatttt

SEQ ID NO: 125640 - DNA, 120 bp, Artificial Sequence
  ENSG00000101596_75 (sequence is synthesized)
agcaatgtaatcctctttcttaaatgtaattgtacaactaacagtcatcacacatatgagggtagccagcaacgtgagagacaaaattcaagattaagttccaaaatcaacatggaggac

SEQ ID NO: 125641 - DNA, 120 bp, Artificial Sequence
  ENSG00000101596_76 (sequence is synthesized)
aatttagtaaagagactagacctcttttataaaattataattactatgtagcagaaaggagccaggacaagaatgaataaacagattacaaatattgttgctgaaataaaaatgttcaat

SEQ ID NO: 125642 - DNA, 120 bp, Artificial Sequence
  ENSG00000101596_77 (sequence is synthesized)
aggaggattaaagtccaaaaagaaaacttccccaatacaaaaagagatagaagacatagagaaccaattcagactattaggaatctagaaagaagaaaatggagaaggaaatgctatcat

SEQ ID NO: 125643 - DNA, 120 bp, Artificial Sequence
  ENSG00000101596_78 (sequence is synthesized)
gtggaagaggatttcctagggatgaataaaattcattgaatgcccagcaacagtgactgacaaaatactcactaagatacttcatagtaatactgtatcatatcaaggagagggagaaag

SEQ ID NO: 125644 - DNA, 120 bp, Artificial Sequence
  ENSG00000101596_79 (sequence is synthesized)
tgtaaggtaagcttattggaagatatttagattgagtcccattgtagtaagtggcaatgactattttagccacttaatagtaagtcttacacaggatttaagtctgaaacgattattccg

SEQ ID NO: 125645 - DNA, 120 bp, Artificial Sequence
  ENSG00000101596_80 (sequence is synthesized)
tggaaggatttgtgggatcttattgccaatagttttttttttttaatcgtacctaaaccaataaagatgccaactgtgcccagtttcataaatttgtgaataaaagtttactcacctctc

SEQ ID NO: 125646 - DNA, 120 bp, Artificial Sequence
  ENSG00000101596_81 (sequence is synthesized)
tccccttcgtgaatggttcggctgaaatcatgctatgaagatgttctaatcatagcactaaattgggaagtcagctgaaatattttctgtttttgctattacaaattgaacccaagatct

SEQ ID NO: 125647 - DNA, 120 bp, Artificial Sequence
  ENSG00000101596_82 (sequence is synthesized)
tacaaggattttaaatggacaggtatgatttttaaatataaagttgtgaatatttgcaaatgttttatttttaagtaaaagaagacactagcagtgtaggtttttattgatattttgcat

SEQ ID NO: 125648 - DNA, 120 bp, Artificial Sequence
  ENSG00000101596_83 (sequence is synthesized)
agtgttcacattactaaaaaatttaaagctaattttttagtaatgactaaacctacctagtaaagactaggtttggatagaatttacatatcttcattagttttttttgttttttttttt

SEQ ID NO: 125649 - DNA, 120 bp, Artificial Sequence
  ENSG00000101596_84 (sequence is synthesized)
aacctttcaacaatattgatattgaagtaagagaaaaatccatcttaaaataataaaaattatgagatatttgttccagttccaaatgactcaggataataaaaaacacttgataattag

SEQ ID NO: 125650 - DNA, 120 bp, Artificial Sequence
  ENSG00000101596_85 (sequence is synthesized)
cgacccccagcaaatgcagaaacatttagttgtaataaaataaaagataatgacaaagaagatggctgcttctatttcaggtatttctcaaaacatttcatattttgaatacatatcttg

SEQ ID NO: 125651 - DNA, 120 bp, Artificial Sequence
  ENSG00000101596_86 (sequence is synthesized)
ttacaaagtaattcaaccctggagatatatgtgggctcacctgaggaaaagtaatttatgatcaaatagaaatgttagtgtctctaaatttttctcagttttttgggaaaaggtgtgttt

SEQ ID NO: 125652 - DNA, 120 bp, Artificial Sequence
  ENSG00000101596_87 (sequence is synthesized)
tgaaactatcgaagccatcagaagaattcttttatgttgtcagggcactttataacttcttattatataggaggtttctataaagattagactggcttttaacatttctgtgactttgag

SEQ ID NO: 125653 - DNA, 120 bp, Artificial Sequence
  ENSG00000101596_88 (sequence is synthesized)
catgttgctgcttcattctggacctccattttcaaatctaaaaacattatgtgttaagtttctttacaaatcctttatcatcaatagggtcaaaatgctcattatatttgttcagtgctt

SEQ ID NO: 125654 - DNA, 120 bp, Artificial Sequence
  ENSG00000101596_89 (sequence is synthesized)
tttcagactaattggtaaaggaccaatcatggaagctccaccccttacctcttccagttattaccgtcttccttcctgttgtgcatgccatgcacacactcatgtagacacacacatgca

SEQ ID NO: 125655 - DNA, 120 bp, Artificial Sequence
  ENSG00000101596_90 (sequence is synthesized)
attcctgttctttcaatttttaccatatccagcacgtttattctggatgttttgtaaaagaatgtacaggtaagaggaacctgggagtaagcaagaaatatttgttgaacgaatgaaggt

SEQ ID NO: 125656 - DNA, 120 bp, Artificial Sequence
  ENSG00000101596_91 (sequence is synthesized)
caatatactattagtagttctattcttcctactcatttatttttgtggaaagaacagaaatgttgactctttgaattccttccccctttatacaaacattgtcagtaatcttaactttct

SEQ ID NO: 125657 - DNA, 120 bp, Artificial Sequence
  ENSG00000101596_92 (sequence is synthesized)
ggtttttgggcttttagtagtggtgtaaatcttgaaaatacacttaaatgtcaaaccatagcactgacagaaatgaccagtttttaaaaaggaaaacatttaggaagatgttattgacat

SEQ ID NO: 125658 - DNA, 120 bp, Artificial Sequence
  ENSG00000101596_93 (sequence is synthesized)
agatgggtctgttctttacattttgttgataaaactgtttcatattttaagaagaaaaacttctaatgttatttttattaagttaacttgataatgacttaacctgagaaaatgaagttg

SEQ ID NO: 125659 - DNA, 120 bp, Artificial Sequence
  ENSG00000101596_94 (sequence is synthesized)
cattaaagttacgtagggtagaatatgctggctaatttgagaggtagtctatggtagagattttaagtacattctggagtcagcccttctgggttagtatctaggtaaactcgttctatg

SEQ ID NO: 125660 - DNA, 120 bp, Artificial Sequence
  ENSG00000101596_95 (sequence is synthesized)
cctcagtttcttcatgtgtaaaatgagataatatctactcccttggggttgttaggaggattaaatgagttactacaggtagtccttgccttgcacagttctgtagtactcaatggagga

SEQ ID NO: 125661 - DNA, 120 bp, Artificial Sequence
  ENSG00000101605_0 (sequence is synthesized)
ggcattatgcaattatattactaaggctgctacctgcccatgcccctctcctcctcctggtttggaactaccctccccatctgctgctatatttatctgccttcttggccataaaaggct

SEQ ID NO: 125662 - DNA, 120 bp, Artificial Sequence
  ENSG00000101605_1 (sequence is synthesized)
ggttgtgtggcctgacattcgactgcctgaccacatgcattatttttgaactggcccccagggtcctgtctttagccctgcctcttaacattgtcttggattcaacctaggtggagtctt

SEQ ID NO: 125663 - DNA, 120 bp, Artificial Sequence
  ENSG00000101605_2 (sequence is synthesized)
cattctctcatccagctcctcggcctcatcggaacatttccaccaccattactcctttggaaactggtggcccggttccttcaaggggcacaggatgtctttgcctttttatcagaggtg

SEQ ID NO: 125664 - DNA, 120 bp, Artificial Sequence
  ENSG00000101605_3 (sequence is synthesized)
ccaccagcactatgatctcagctaccgcaacaaggacgtgcgcagcaccgtgagtcactaccagcgggagaagaaacgctccgccgtctacacccagggctccacggcctacagcagccg

SEQ ID NO: 125665 - DNA, 120 bp, Artificial Sequence
  ENSG00000101605_4 (sequence is synthesized)
ctcctccgccgcgcaccgccgggagtccgaggccttccgtcgggcgtccgcctcctcctcccagcagcaggcctcgcagcacgccctgagctctgaagtcagtcggaaggcagcctcagc

SEQ ID NO: 125666 - DNA, 120 bp, Artificial Sequence
  ENSG00000101605_5 (sequence is synthesized)
ctacgattatggctcctcccatggacttacagattccagtctgctgttagatgattattcatccaagttgagccccaaaccaaagagagccaagcacagcctactgtctggagaagagaa

SEQ ID NO: 125667 - DNA, 120 bp, Artificial Sequence
  ENSG00000101605_6 (sequence is synthesized)
agaaaatttgcccagtgactacatggtacccattttctcaggacgtcaaaagcatgtcagtggaattactgatacggaagaagaaagaattaaagaagctgctgcttatatagcccagag

SEQ ID NO: 125668 - DNA, 120 bp, Artificial Sequence
  ENSG00000101605_7 (sequence is synthesized)
gaatcttcttgctagtgaggaaggaatcacaacatctaaacagtccacggcatccaagcagaccacggcatctaagcagtccacggcatccaagcagtccacagcatccaagcagtccac

SEQ ID NO: 125669 - DNA, 120 bp, Artificial Sequence
  ENSG00000101605_8 (sequence is synthesized)
ggcatccaggcagtccacggcatccaggcagtctgtggtttccaaacaggccacatccgctcttcaacaggaagaaacttctgaaaagaagtcaaggaaagttgtgattcgagaaaaggc

SEQ ID NO: 125670 - DNA, 120 bp, Artificial Sequence
  ENSG00000101605_9 (sequence is synthesized)
agaacgcctgtccctgaggaaaacattagaagaaaccgagacatatcatgccaagctgaatgaagaccatcttctccatgctcctgagtttatcattaaacctcgctcccacacggtttg

SEQ ID NO: 125671 - DNA, 120 bp, Artificial Sequence
  ENSG00000101605_10 (sequence is synthesized)
ggagaaggagaatgtaaaattgcattgctccatagcaggctggccagaacctcgtgtcacgtggtataaaaaccaggtgccaataaatgtccatgcaaaccctggaaagtatattattga

SEQ ID NO: 125672 - DNA, 120 bp, Artificial Sequence
  ENSG00000101605_11 (sequence is synthesized)
gagtcgatatgggatgcacactctggagattaatggatgtgattttgaagatacagctcagtaccgggcctcggcgatgaatgttaaaggagagctttcggcatatgcttcagttgtggt

SEQ ID NO: 125673 - DNA, 120 bp, Artificial Sequence
  ENSG00000101605_12 (sequence is synthesized)
aaaaaggtataagggagagtttgatgagactcgcttccacgctggggcttccaccatgcccctcagctttggtgtgaccccatatggttatgcatcccggtttgagatccactttgatga

SEQ ID NO: 125674 - DNA, 120 bp, Artificial Sequence
  ENSG00000101605_13 (sequence is synthesized)
caaatttgatgtgtcttttgggagagagggagagacaatgagtctaggctgtcgtgttgtcatcactcctgaaattaaacatttccagccagagatccagtggtacagaaacggagtacc

SEQ ID NO: 125675 - DNA, 120 bp, Artificial Sequence
  ENSG00000101605_14 (sequence is synthesized)
tctttctccatcaaaatgggtgcaaacactttggagtggagagcgggcaacgctgacattttcccatctcaacaaagaagatgaaggcctctatacaatccgtgtacggatgggagaata

SEQ ID NO: 125676 - DNA, 120 bp, Artificial Sequence
  ENSG00000101605_15 (sequence is synthesized)
ttatgaacaatatagtgcttatgtctttgttcgagatgctgatgcagagattgaaggagccccagctgctcccttggatgtgaagtgcttggaggccaacaaagattatatcatcatctc

SEQ ID NO: 125677 - DNA, 120 bp, Artificial Sequence
  ENSG00000101605_16 (sequence is synthesized)
ctggaaacagccagctgtcgatggagggagtcctattctcggatattttattgataagtgtgaggtgggcacagatagctggtcgcagtgcaatgacacacctgtgaagtttgctcgttt

SEQ ID NO: 125678 - DNA, 120 bp, Artificial Sequence
  ENSG00000101605_17 (sequence is synthesized)
tcctgtcactggattgatcgaaggtcgttcctatatcttccgagttcgagctgtgaataaaatgggaataggtttcccatctcgagtttccgagcccgtggctgctctggatccggctga

SEQ ID NO: 125679 - DNA, 120 bp, Artificial Sequence
  ENSG00000101605_18 (sequence is synthesized)
gaaagctagacttaaaagtcgcccctcagcaccctggactggacagatcattgttactgaagaggaaccttcagagggtattgtgcctggccccccgacagacctctctgtcactgaggc

SEQ ID NO: 125680 - DNA, 120 bp, Artificial Sequence
  ENSG00000101605_19 (sequence is synthesized)
cacccggagctatgtggtgctcagctggaagccccctggccagcgtggtcatgagggcattatgtactttgtggaaaagtgtgaggcaggaacagaaaactggcagcgagtgaacacgga

SEQ ID NO: 125681 - DNA, 120 bp, Artificial Sequence
  ENSG00000101605_20 (sequence is synthesized)
gctccctgtgaagtctccccgctttgctctgtttgacttggccgaggggaaatcctactgtttccgtgtccgctgttctaattctgcaggagttggtgagccctcagaggcaacggaggt

SEQ ID NO: 125682 - DNA, 120 bp, Artificial Sequence
  ENSG00000101605_21 (sequence is synthesized)
gactgtggtaggggacaaacttgatatccccaaggctcctggcaaaatcatcccaagcagaaacacagacacctcagtggtagtttcgtgggaggagtccaaagatgccaaagagctggt

SEQ ID NO: 125683 - DNA, 120 bp, Artificial Sequence
  ENSG00000101605_22 (sequence is synthesized)
cgggtactacatagaggcgagcgttgctggctctggcaagtgggagccctgtaacaacaaccccgtgaagggctcacgattcacttgtcatggattagtgactggtcagagttatatttt

SEQ ID NO: 125684 - DNA, 120 bp, Artificial Sequence
  ENSG00000101605_23 (sequence is synthesized)
ccgggtcagagcagtcaatgcagctggacttagtgaatattcccaggattcagaagctattgaagtcaaagctgctattgggggaggagtgtctccagatgtgtgtcccgcactgagcga

SEQ ID NO: 125685 - DNA, 120 bp, Artificial Sequence
  ENSG00000101605_24 (sequence is synthesized)
acctaacaaaccttcactacccagtagctctcaaaacctgggccaaacagaagtgagtaaagtaagtgaaacagttcaggaagagcttaccccgccaccacagaaagcggctcctcaggg

SEQ ID NO: 125686 - DNA, 120 bp, Artificial Sequence
  ENSG00000101605_25 (sequence is synthesized)
gaaaagtaagtctgaccccctgaaaaagaagacagacagagcaccaccatctccaccctgtgatatcacctgtcttgaaagttttcgtgactcaatggttcttggatggaagcaaccaga

SEQ ID NO: 125687 - DNA, 120 bp, Artificial Sequence
  ENSG00000101605_26 (sequence is synthesized)
taagattggaggggcagaaattactggctattatgtgaactatcgcgaggtcattgatggggtaccaggaaaatggagagaagccaatgtcaaggctgtcagtgaggaggcatacaagat

SEQ ID NO: 125688 - DNA, 120 bp, Artificial Sequence
  ENSG00000101605_27 (sequence is synthesized)
tagcaacttgaaggaaaacatggtgtatcagttccaagtggcagccatgaacatggctgggctgggcgcgccctccgcagtaagcgaatgcttcaaatgtgaagagtggaccatcgccgt

SEQ ID NO: 125689 - DNA, 120 bp, Artificial Sequence
  ENSG00000101605_28 (sequence is synthesized)
cccaggaccaccgcacagtctcaagtgtagtgaagtcaggaaagactcactggttctccagtggaagccgccagtccactccgggcggactccggtcactggttacttcgtggacttgaa

SEQ ID NO: 125690 - DNA, 120 bp, Artificial Sequence
  ENSG00000101605_29 (sequence is synthesized)
ggaggccaaggccaaagaagaccagtggcgagggctcaatgaggcggctattaaaaacgtatacctgaaggttcgaggcctcaaggagggcgtcagctacgtgttccgtgttcgagccat

SEQ ID NO: 125691 - DNA, 120 bp, Artificial Sequence
  ENSG00000101605_30 (sequence is synthesized)
aaaccaggcgggagttgggaagccatctgaccttgctggccctgttgtggcagagacccgtccaggaaccaaagaggttgttgtaaatgtggatgatgatggagtcatttcattgaactt

SEQ ID NO: 125692 - DNA, 120 bp, Artificial Sequence
  ENSG00000101605_31 (sequence is synthesized)
cgagtgtgataagatgactccaaagtccgagttctcctggtccaaagattatgtatccactgaggactctccacgattggaagtcgaaagcaagggcaacaagacgaaaatgaccttcaa

SEQ ID NO: 125693 - DNA, 120 bp, Artificial Sequence
  ENSG00000101605_32 (sequence is synthesized)
agaccttgggatggatgacttgggtatttactcttgcgatgtaacagacactgatggaatagcatcaagctacttaatagatgaggaagaattgaaacgtttacttgctctcagccatga

SEQ ID NO: 125694 - DNA, 120 bp, Artificial Sequence
  ENSG00000101605_33 (sequence is synthesized)
acacaagttcccaactgtcccagttaaatcagagttggcagttgaaattttggagaaaggccaggtccggttttggatgcaggctgagaaactgtctggcaatgccaaagtcaactacat

SEQ ID NO: 125695 - DNA, 120 bp, Artificial Sequence
  ENSG00000101605_34 (sequence is synthesized)
atttaacgagaaggaaatttttgaaggcccgaaatataaaatgcatattgaccgaaacactggcatcatcgaaatgttcatggaaaagctacaggatgaggatgagggaacgtacacttt

SEQ ID NO: 125696 - DNA, 120 bp, Artificial Sequence
  ENSG00000101605_35 (sequence is synthesized)
ccagcttcaagatggaaaagcaactaaccattctactgttgttctcgttggagatgttttcaaaaagctccagaaagaagctgaattccagcggcaagaatggatcaggaaacaaggtcc

SEQ ID NO: 125697 - DNA, 120 bp, Artificial Sequence
  ENSG00000101605_36 (sequence is synthesized)
tcactttgttgagtatttgagctgggaagtgactggtgaatgtaatgtactattgaaatgcaaggtggcaaatattaagaaggagactcatattgtgtggtacaaagatgagagggagat

SEQ ID NO: 125698 - DNA, 120 bp, Artificial Sequence
  ENSG00000101605_37 (sequence is synthesized)
atcagtggatgaaaagcatgactttaaggatggtatatgtaccctgcttataacagagttttccaagaaagatgctgggatttatgaagttatcctgaaagatgaccgaggaaaagataa

SEQ ID NO: 125699 - DNA, 120 bp, Artificial Sequence
  ENSG00000101605_38 (sequence is synthesized)
gagcagactgaagcttgtggatgaagcctttaaggaactgatgatggaagtatgcaaaaaaatagctttgtctgctacagacctgaaaatccagagcacagccgagggcatccaactgta

SEQ ID NO: 125700 - DNA, 120 bp, Artificial Sequence
  ENSG00000101605_39 (sequence is synthesized)
ctcttttgtaacttactatgtggaggatttgaaagttaactggtcccacaatgggtccgccattaggtactcagacagagttaagaccggggtcactggagagcagatctggctacaaat

SEQ ID NO: 125701 - DNA, 120 bp, Artificial Sequence
  ENSG00000101605_40 (sequence is synthesized)
caacgagcccaccccgaatgacaaagggaagtatgtcatggagctctttgatggcaaaactggacatcagaagacagtggatctctctggacaagcatacgatgaggcctatgctgaatt

SEQ ID NO: 125702 - DNA, 120 bp, Artificial Sequence
  ENSG00000101605_41 (sequence is synthesized)
ccagaggttgaaacaagctgccattgccgagaaaaatcgtgcccgggtgttgggaggtctcccagacgtggtcaccatccaggaggggaaggcccttaatctcacttgcaacgtgtgggg

SEQ ID NO: 125703 - DNA, 120 bp, Artificial Sequence
  ENSG00000101605_42 (sequence is synthesized)
agacccgcctccggaggtgtcgtggttgaagaacgagaaggccctggcctcagacgaccactgcaacctcaagttcgaggctgggaggaccgcgtacttcaccatcaacggcgtgagcac

SEQ ID NO: 125704 - DNA, 120 bp, Artificial Sequence
  ENSG00000101605_43 (sequence is synthesized)
cgctgactcgggcaaatacgggctggttgtgaagaacaagtatggctcggagaccagcgacttcaccgtcagcgtgttcatcccagaggaggaggcgaggatggccgccttggagtccct

SEQ ID NO: 125705 - DNA, 120 bp, Artificial Sequence
  ENSG00000101605_44 (sequence is synthesized)
gaaaggtggcaagaaggccaagtgaccggaggtgcgaggagagccagccggcctgtgtgacttgggtgtgaatggtttgggttaaggatgagacgtcttcatgctttctcctccctatta

SEQ ID NO: 125706 - DNA, 120 bp, Artificial Sequence
  ENSG00000101605_45 (sequence is synthesized)
ttttctggcttgaggggaaaataatgtcaggtctttcactcatataaaaaagcaccaactaatgacactttaattgtttttctttatctacaaaattatgtgttaagaaaataccattca

SEQ ID NO: 125707 - DNA, 120 bp, Artificial Sequence
  ENSG00000101605_46 (sequence is synthesized)
tagcatgaagattaggaaacagttttaaggagaagacttgaatgaagttggagggacattgaatgatggtcagagggcagacgaatgtgtcgtggggcgaattgggatttgctgcagctg

SEQ ID NO: 125708 - DNA, 120 bp, Artificial Sequence
  ENSG00000101605_47 (sequence is synthesized)
tgaagccatggccgtgtctcgtgtgttgttacagaggtgatgtgcttttcgacgggcgcctcgtggcttggaacctcctctgtatgaataaacagttttcacgtctgtcctcttccccga

SEQ ID NO: 125709 - DNA, 120 bp, Artificial Sequence
  ENSG00000101605_48 (sequence is synthesized)
ctgagtgttagaaagagccttttatttcagaaagtacagtagaagcagcacttcccattgttatattgaacagcaaaatgtctctgaggcaaggaaaatgtcgtcaagtttagctacttt

SEQ ID NO: 125710 - DNA, 120 bp, Artificial Sequence
  ENSG00000101605_49 (sequence is synthesized)
ataagagcagctgatactctgtccgggctcaatgcgtttctgttgttgtctggcaactgtagggggaggagtgtctccagatgtgtgtcccgcactgagcgatgagcctggtggactaac

SEQ ID NO: 125711 - DNA, 120 bp, Artificial Sequence
  ENSG00000101605_50 (sequence is synthesized)
cttaacctatacattaaacaaaaattcattatttttgtttatgaaaagtaaacttctttgggagtttcaacaatattgataatgtgttttttctgaagttcatggacatttagtttatcc

SEQ ID NO: 125712 - DNA, 120 bp, Artificial Sequence
  ENSG00000101605_51 (sequence is synthesized)
tttagtttatccatgctccctaactgttttaaaattttttgctttaaaaaatacaatgtaggccaggcgcggtggctcatgtctgtaatctgagcactttgggaggccgaggcaggcaga

SEQ ID NO: 125713 - DNA, 120 bp, Artificial Sequence
  ENSG00000101608_0 (sequence is synthesized)
ggacgcaaccatctgcggaaaggataggggggaggaagacttaacactgcaacaacaggtacaaaaaagaaggaaactcagtaacaggacccagaggaccattatatattgctctatatt

SEQ ID NO: 125714 - DNA, 120 bp, Artificial Sequence
  ENSG00000101608_1 (sequence is synthesized)
ctaggtcgcccactttacacttccttctcatgcacttggtcaataccacgcccgctgaccacactggcgacttccctctctgtcgcccctccgtgaagtcagacccactctgcgggccaa

SEQ ID NO: 125715 - DNA, 120 bp, Artificial Sequence
  ENSG00000101608_2 (sequence is synthesized)
gaaaggtgaccgggcttccttccggcttgctaagcagaggccggaagcggtggtttttagcggctctctgggtagcagggtggtgtgatagcggcagcgaggggctcggagaggtgctcg

SEQ ID NO: 125716 - DNA, 120 bp, Artificial Sequence
  ENSG00000101608_3 (sequence is synthesized)
gattctcgtagctgtgccgggacttaaccaccaccatgtcgagcaaaagaacaaagaccaagaccaagaagcgccctcagcgtgcaacatccaatgtgtttgctatgtttgaccagtcac

SEQ ID NO: 125717 - DNA, 120 bp, Artificial Sequence
  ENSG00000101608_4 (sequence is synthesized)
agattcaggagttcaaagaggccttcaacatgattgatcagaacagagatggtttcatcgacaaggaagatttgcatgatatgcttgcttcattggggaagaatccaactgatgagtatc

SEQ ID NO: 125718 - DNA, 120 bp, Artificial Sequence
  ENSG00000101608_5 (sequence is synthesized)
cccatcaatttcaccatgttcctcaccatgtttggtgagaagttaaatggcacagatcctgaagatgtcatcagaaatgcctttgcttgctttgatgaagaagcaactggcaccatacag

SEQ ID NO: 125719 - DNA, 120 bp, Artificial Sequence
  ENSG00000101608_6 (sequence is synthesized)
gaagattacttgagagagctgctgacaaccatgggggatcggtttacagatgaggaagtggatgagctgtacagagaagcacctattgataaaaaggggaatttcaattacatcgagttc

SEQ ID NO: 125720 - DNA, 120 bp, Artificial Sequence
  ENSG00000101608_7 (sequence is synthesized)
acacgcatcctgaaacatggagccaaagacaaagatgactgaaataacttcaaattccagccaaacgttccttgttgccactttgggtattctgagattttctcttgcatgcccttagct

SEQ ID NO: 125721 - DNA, 120 bp, Artificial Sequence
  ENSG00000101608_8 (sequence is synthesized)
ttacagcttttgcatttcctgttgtatttattctcagccattttgggcatatgtatctttataatcagactggaaacgggactttctattaatatcattttcagaataaaaaataggata

SEQ ID NO: 125722 - DNA, 120 bp, Artificial Sequence
  ENSG00000101608_9 (sequence is synthesized)
atttaacctaccagcccttctcccccaataactgtggtctatacagagtcaatatattttttcagagaaagttattcgctcgattttttctgaatcataattaaactttatgataaaata

SEQ ID NO: 125723 - DNA, 120 bp, Artificial Sequence
  ENSG00000101608_10 (sequence is synthesized)
gaagcggtggtttttagcggctctctgggtagcagggtggtgtgatagcggcagcgaggggctcggagaggtgctcggattctcgtagctgtgccggcccacaatgattctgagctaaaa

SEQ ID NO: 125724 - DNA, 120 bp, Artificial Sequence
  ENSG00000101608_11 (sequence is synthesized)
ccgcccttcgccgtgccctggaatgtgcggccaggcaaagccacaggacggacgcaaccatctgcggaaaggataggggggaggaagacttaacactgcaacaacaggacttaaccacca

SEQ ID NO: 125725 - DNA, 120 bp, Artificial Sequence
  ENSG00000101608_12 (sequence is synthesized)
cgggtgagtggcgctcgcgttcgggcgcgtgagacccatcccggggacccgtctccgcgggggcagctggagggcggcggggctcctggcgccggtagcgcacctgggcaggtgtgccag

SEQ ID NO: 125726 - DNA, 120 bp, Artificial Sequence
  ENSG00000101608_13 (sequence is synthesized)
ccaggtccccggttctgggatccgaggccatggcttggagtggcccagacccgaacttcgctcctgtgcccaaacttggaactctggaaatgtggcttcgctcactggcgccttgagctt

SEQ ID NO: 125727 - DNA, 120 bp, Artificial Sequence
  ENSG00000101608_14 (sequence is synthesized)
gggcgactgccgggcccgcgaaacccgacccctgcagagctgactccgggactattttagtttctaacgtcaacttgcccgattcaagagggtttgcgcaaaaacgtagcccgttgtccc

SEQ ID NO: 125728 - DNA, 120 bp, Artificial Sequence
  ENSG00000101608_15 (sequence is synthesized)
gcagctgtgtggctgcgtttagtaggaataaccaactcaaattgggaagttcttcagctcagtatccgctcctgtaattagaactttttttctttaagcgatgaaattttggacagagag

SEQ ID NO: 125729 - DNA, 120 bp, Artificial Sequence
  ENSG00000101608_16 (sequence is synthesized)
atctggagtttagtttgtgactcgaagaaaaactccaaaatgtaataccttgtcccatttggggggaaagtttgggctaattcaattcgccatggaagtgtcttctttttaaagtagttt

SEQ ID NO: 125730 - DNA, 120 bp, Artificial Sequence
  ENSG00000101608_17 (sequence is synthesized)
agtaggtatatgaatgtatctgtcagttcttgagagacctatggatttagcagagattttaacttaagtgcaaaaagtttcatatttaaaggcgaataaagcgaatatttcttaaaatta

SEQ ID NO: 125731 - DNA, 120 bp, Artificial Sequence
  ENSG00000101608_18 (sequence is synthesized)
tagtgcctattttagacctgcttggaagaatataactcaatgcagtgtcttacttttgctgctgagcggttttgcagactaccatcttccctgcaactctgaaggatggtatggtagaat

SEQ ID NO: 125732 - DNA, 120 bp, Artificial Sequence
  ENSG00000101608_19 (sequence is synthesized)
tttattgtctgatgactgagatttttaacttgaaacaaatttttgtagtttttaacagattgagtattgaaaattgcctttttattttaggtattattagacattctttttaattttaac

SEQ ID NO: 125733 - DNA, 120 bp, Artificial Sequence
  ENSG00000101608_20 (sequence is synthesized)
cttaaaaaaaaggttatgctcctttagatctgtaaactcagtctcctaactgcccttcatccactttctcatgcatctgaaatcctcatattttgtagaagcctgttctgtaagtctctc

SEQ ID NO: 125734 - DNA, 120 bp, Artificial Sequence
  ENSG00000101608_21 (sequence is synthesized)
ctgttctgtaagtctctctactttccagtttcgtacaacagacactccttgacaccaaggatctttcacttaatccctcaaaaataaagactcgagctgggtgcggtggctcacgcctgt

SEQ ID NO: 125735 - DNA, 120 bp, Artificial Sequence
  ENSG00000101608_22 (sequence is synthesized)
taatctattggatagaatttccatggtgcctttcatcttgatttcatgagtcttaaagctctgtaaagcctgtctaatgagtctactaaggtttgagtaaagtgtggaacagtgtttccc

SEQ ID NO: 125736 - DNA, 120 bp, Artificial Sequence
  ENSG00000101608_23 (sequence is synthesized)
accggatcaccagcagattcgtgaccctgtcttaggattgggttggggttcgtgtgtgtgtgtgtgtgtataaaaacactgatcttgattatggaagcagtattattccttctgacattc

SEQ ID NO: 125737 - DNA, 120 bp, Artificial Sequence
  ENSG00000101624_0 (sequence is synthesized)
atttccaggtcagcccccggcctgacgcggcgttgcgtcccccgggagctgcgctaggcgaacggctgcggcgctttgtgctccagtcgctcctaacgctccctggcccggccggggccg

SEQ ID NO: 125738 - DNA, 120 bp, Artificial Sequence
  ENSG00000101624_1 (sequence is synthesized)
cgcagttagggcatctgaggcggggagaagcggcggggagacgccggctgccagcatgtcgctgcctccggagaaagcctccgagctgaagcagctcatccaccagcagctgagcaagat

SEQ ID NO: 125739 - DNA, 120 bp, Artificial Sequence
  ENSG00000101624_2 (sequence is synthesized)
ggatgtccatggtagaataagagaaatccttgctgagactatacgggaagaattggcacctgatcaacagcatttatcaacagaagatttgatcaaagcccttagacgtcgaggaatcat

SEQ ID NO: 125740 - DNA, 120 bp, Artificial Sequence
  ENSG00000101624_3 (sequence is synthesized)
tgacgatgtgatgaaagaacttaattttgttactgacagtgttgagcaagaactcccttcctctccaaaacaacctatttgttttgatagacaatcgacattaaaaaaaactaatattga

SEQ ID NO: 125741 - DNA, 120 bp, Artificial Sequence
  ENSG00000101624_4 (sequence is synthesized)
tccaacacggaggtatctttaccttcaggttttgggtggaaaagctttcttggaacatctgcaagaacctgagcctttacctggacaagtttgttcaacgtttactttatgtttacatta

SEQ ID NO: 125742 - DNA, 120 bp, Artificial Sequence
  ENSG00000101624_5 (sequence is synthesized)
tcgaaaccaacgttttcgttctaaacctgttccatgtgcctgtgaaccagattttcatgatggctttttacttgaagtacacagagaaagcttgggtgatggaactagaatggctgattc

SEQ ID NO: 125743 - DNA, 120 bp, Artificial Sequence
  ENSG00000101624_6 (sequence is synthesized)
aacaacaatgttatcaataagtgatccaattcatatggtgctaatcaaaacagacatatttggtgagacgactttagtagcatcatattttctggaatggcgatcggttttgggctcaga

SEQ ID NO: 125744 - DNA, 120 bp, Artificial Sequence
  ENSG00000101624_7 (sequence is synthesized)
aaatggagtgaccagtctgactgtggaacttatgggtgtaggcacagaatcaaaagtttctgtgggaattttaaatataaaacttgaaatgtatccaccactcaatcaaacgttatctca

SEQ ID NO: 125745 - DNA, 120 bp, Artificial Sequence
  ENSG00000101624_8 (sequence is synthesized)
agaagtagtgaacacacagcttgctttggaacgtcagaaaactgcagagaaagagcgattatttcttgtatatgctaagcagtggtggagagaatatttgcaaattcgaccctcacacaa

SEQ ID NO: 125746 - DNA, 120 bp, Artificial Sequence
  ENSG00000101624_9 (sequence is synthesized)
ctcacgactggttaagatttttgcacaggatgaaaatgggataaatagaccagtctgttcctatgttaaaccacttcgagctggacggcttcttgatactccaaggcaagcagcaagatt

SEQ ID NO: 125747 - DNA, 120 bp, Artificial Sequence
  ENSG00000101624_10 (sequence is synthesized)
tgttaatgtccttggttatgaacgagcccctgttattggaggaggaggtaaacaggagcagtggtgcactctgctggcctttctctgtagaaacaagggtgactgtgaagatcacgctaa

SEQ ID NO: 125748 - DNA, 120 bp, Artificial Sequence
  ENSG00000101624_11 (sequence is synthesized)
ccttctgtgcagccttcttcttggatatggattagaagcctttgtttgtgttgggaccaaggcaaaaggagtacctcatgcatgggttatgacttgtggaactgatggggccatcacttt

SEQ ID NO: 125749 - DNA, 120 bp, Artificial Sequence
  ENSG00000101624_12 (sequence is synthesized)
aggacacaggtacatccataaacctaccaatcctgatgaacctccagttgctgaacagcccaaaccactgtacccatatcgaacaattggttgtgttttcaaccatcagatgttcctggg

SEQ ID NO: 125750 - DNA, 120 bp, Artificial Sequence
  ENSG00000101624_13 (sequence is synthesized)
aaattgtcaaccctctgatgcagtagaaacctgtgtatttgatttgaacgatgaatccaaatggaaacccatgagtgaggaagcaattaaatctgtgtgtgctcctggagctacaacatc

SEQ ID NO: 125751 - DNA, 120 bp, Artificial Sequence
  ENSG00000101624_14 (sequence is synthesized)
ccttcctccctttccacctctgtgtgcatccacaattgacgcgtcagtaacaagtaatgaaattgaaatgcagctgaggctcctggtgtcagaacacaggaaggatcttggcctcactac

SEQ ID NO: 125752 - DNA, 120 bp, Artificial Sequence
  ENSG00000101624_15 (sequence is synthesized)
tgtttgggaagaccagctctcctaccttttatcaccagctttggcttcttatgaatttgagcgtacaacaagtatatcagcaggcaatgaagaatttcaagatgccataagaagggctgt

SEQ ID NO: 125753 - DNA, 120 bp, Artificial Sequence
  ENSG00000101624_16 (sequence is synthesized)
acctgatggtcacacatttaaagggttcccaatacattttgtgtatagaaatgcaagacgtgcatttgccacatgtcttcgatctcctttctgtgaagaaataatctgttgccgtggaga

SEQ ID NO: 125754 - DNA, 120 bp, Artificial Sequence
  ENSG00000101624_17 (sequence is synthesized)
ccaagtgcgactggcagttcgtgtccgagtatttacttaccctgaatctgcatgtgctgtttggatcatgtttgcttgtaaatatcgctcggtattatagggccaatatttatataagat

SEQ ID NO: 125755 - DNA, 120 bp, Artificial Sequence
  ENSG00000101624_18 (sequence is synthesized)
ttatacctgtgtttaattggaattttacacattgtacattacttagctatttagaggtttgttattttaaaatcacaatctggcttgaatggcatacttcaattttgtatatacttgact

SEQ ID NO: 125756 - DNA, 120 bp, Artificial Sequence
  ENSG00000101624_19 (sequence is synthesized)
ggtaatgtttaaaaaaaatcatgcattcctttaaaaattaaggctgaaaaacttgtataaatctccctggaatttagtataaattaagtgtatattctattttaataaatgctactttgt

SEQ ID NO: 125757 - DNA, 120 bp, Artificial Sequence
  ENSG00000101624_20 (sequence is synthesized)
ttacagttatcagtagtttaaatattaatataaaatgcattcagttttctttacacaaacaggtaatcaaagagatgtttgtctaagggtttgagccctagacaaatcagtatgatcatt

SEQ ID NO: 125758 - DNA, 120 bp, Artificial Sequence
  ENSG00000101624_21 (sequence is synthesized)
acttttcacaggttaatggaattattttatacagattaggagaaattaacctcatgacagatttatttattgcattggtgaaaataaatgttaatgaattaccacttttgtggtttattc

SEQ ID NO: 125759 - DNA, 120 bp, Artificial Sequence
  ENSG00000101624_22 (sequence is synthesized)
gtggtccttgggatatttgagactgtccagaaatttatggttggaccttgaagcaagagtaggaaaaaactaataccagaaaagcataaatattaataacctcatatgaaagtacatgaa

SEQ ID NO: 125760 - DNA, 120 bp, Artificial Sequence
  ENSG00000101624_23 (sequence is synthesized)
tcatttagaaatatttatcactgtgatttgttgtaaaaatgaattgggtattttagaaaaactttattatacctctttgttatgatactgataaattgtgatcttgcagtcgatcactga

SEQ ID NO: 125761 - DNA, 120 bp, Artificial Sequence
  ENSG00000101624_24 (sequence is synthesized)
tgctgtttggatcatgtttgcttgtgaatgtgcctcttaggagcacttgtccagaagtgtctgggaaaagcttgggctgcacagtgatggtgctccctgaaagactcagagcagcacagc

SEQ ID NO: 125762 - DNA, 120 bp, Artificial Sequence
  ENSG00000101624_25 (sequence is synthesized)
cagtacctccagagtatgaagcatgaagtacacttattctacaagaataagaagtaaatataaaaaaagtcaaggattcaatttttaataaagtaacaaaatcaacaaaacaaaatcata

SEQ ID NO: 125763 - DNA, 120 bp, Artificial Sequence
  ENSG00000101624_26 (sequence is synthesized)
ttcagagtaacatggacttcacagcactttgaaaaagacatttaaatgttgatttgagttgttcagacattttaaatatgaagtcatagagtaaaaatacaatcaatgactgaaattggg

SEQ ID NO: 125764 - DNA, 120 bp, Artificial Sequence
  ENSG00000101624_27 (sequence is synthesized)
aataatgactttttctgtaaggagagatttataatggaggaatctctattttgtttcccactgctcttttcaatttaaactactatccaccttcttgcaatattctgtttgctattcatt

SEQ ID NO: 125765 - DNA, 120 bp, Artificial Sequence
  ENSG00000101624_28 (sequence is synthesized)
ttttgcacaggtttgtaaattatattagaataattttatgcctgtatttgagatttactgttatgtgtgtaaatttcatttaatatttatttgtaaaatgtattccaaaaaataaaagtg

SEQ ID NO: 125766 - DNA, 120 bp, Artificial Sequence
  ENSG00000101624_29 (sequence is synthesized)
tcctcccagtgcacaggctggttggagtttctctggggacccctttccacctggctgtctcacttctttcttcatggaacattctctttccttagcttcttttttatcattgtctttcaa

SEQ ID NO: 125767 - DNA, 120 bp, Artificial Sequence
  ENSG00000101624_30 (sequence is synthesized)
tatttattattcctctctggctgttcttagtttttccttcatcttgtctttaaatgtgtgtgttctagaggcccagccctgggccctcttttcattcccgagtcctctttctccctggtt

SEQ ID NO: 125768 - DNA, 120 bp, Artificial Sequence
  ENSG00000101624_31 (sequence is synthesized)
tagtcaaccctctgtacccacaggttctgtatctgtagattcaaccaactgcagatcaaaaatacttacaaaagtaaaaaattacaataataaaaaatagtacaaattaaaaaatggtgt

SEQ ID NO: 125769 - DNA, 120 bp, Artificial Sequence
  ENSG00000101624_32 (sequence is synthesized)
caatttagaggtgatttaaagtatataggaggatgtgcttaggttatatataaaatactataccattttggctggccgcagtggctcatgcctgtatcccagcattttgggaggctgagg

SEQ ID NO: 125770 - DNA, 63 bp, Artificial Sequence
  ENSG00000101624_33 (sequence is synthesized)
cctatctctactaaaatacaaaaaattatctgggcatggtgttggaggcggaggttgcagtga

SEQ ID NO: 125771 - DNA, 120 bp, Artificial Sequence
  ENSG00000101624_34 (sequence is synthesized)
agatcgcaccattgcactctagcctgaggacagagcaagacacgtctcaaaaaaaaaaaaaatactattttatataagccttgagtatccacggattttgttttgcaagggtcctggaac

SEQ ID NO: 125772 - DNA, 120 bp, Artificial Sequence
  ENSG00000101624_35 (sequence is synthesized)
gtatccacggattttgttttgcaagggtcctggaactaaccgctttggggtgctatcagcttgaccacgtcagaaccttgttctgtttttcataacatttaaatatcaatacacaaaaaa

SEQ ID NO: 125773 - DNA, 120 bp, Artificial Sequence
  ENSG00000101624_36 (sequence is synthesized)
ctcagcatctttattttctcatgtagtttcttatttattgtgatttctgtgatgtagggacctacaagtactaaaatgtcagaaatcaagttgcagaatgaattaggaacagcaccagga

SEQ ID NO: 125774 - DNA, 120 bp, Artificial Sequence
  ENSG00000101624_37 (sequence is synthesized)
aattaggaacagcaccaggaccagaccatggctttctggtactactgatgtgttgcaatttgctcagataatacatctttaaaaaagagaaaataaggctgggcgtggtggctcatgcct

SEQ ID NO: 125775 - DNA, 120 bp, Artificial Sequence
  ENSG00000101624_38 (sequence is synthesized)
aggagttcaagaccagtctgaccaacgtggagaaactccgtctccactaaaagtacaaaattagcgtggtgtggtggcacgtgcctgtaatcttagctactgaggaggctgaggcaggag

SEQ ID NO: 125776 - DNA, 120 bp, Artificial Sequence
  ENSG00000101624_39 (sequence is synthesized)
agcgaaactccataaaaaaaaaagagaaaatggcagtacaaaattaatatagaaaaaatattaaaatagaaaaaaatcttgaattgcatgctatttagtttgtttagtttgtatttaaat

SEQ ID NO: 125777 - DNA, 120 bp, Artificial Sequence
  ENSG00000101624_40 (sequence is synthesized)
actttttgaatgacttgattttagtaaactaattttatagattatgggatatttcctaatctgtgttctaaaaatgttgatagtatgataacaaacaagtaaaactatctttaggccagg

SEQ ID NO: 125778 - DNA, 120 bp, Artificial Sequence
  ENSG00000101624_41 (sequence is synthesized)
atcccagcactttgggaggccggggagggtggatcacctgtggtcgggagttctagaacagcctggctaacatggagaaactccatctctactgaaaaaatacaaaaattagccagccat

SEQ ID NO: 125779 - DNA, 72 bp, Artificial Sequence
  ENSG00000101624_42 (sequence is synthesized)
aaaaaaaaaacaaaaaactatctggtgacagcaggccaggcatggtggctcatgcccgcaattccagcactt

SEQ ID NO: 125780 - DNA, 120 bp, Artificial Sequence
  ENSG00000101624_43 (sequence is synthesized)
aggccaggcatggtggctcatgcccgcaattccagcacttgggtaggccaaggtgggcaaatcacttgagcccagaagttccagacaaacctgggcaacatggcaaaatccctctctcta

SEQ ID NO: 125781 - DNA, 120 bp, Artificial Sequence
  ENSG00000101624_44 (sequence is synthesized)
taatacaatagggaataagtattttaatacagcacctttttttggtttttgaagtttatgaacccgtttgttataaaaattgacctaataacagcttctactctgtgatgacactttatt

SEQ ID NO: 125782 - DNA, 120 bp, Artificial Sequence
  ENSG00000101638_0 (sequence is synthesized)
ttttaattccaagattcaaacccggcgttttgcgctccgcccctccccctccccacggcccgcctatcattagccagactgcgcgggtgttttgtacgccccctccccccgtccctatcg

SEQ ID NO: 125783 - DNA, 120 bp, Artificial Sequence
  ENSG00000101638_1 (sequence is synthesized)
gcagaaccggaggccaaccttcgcgatcccttgctgcgggcccggagatcaaacgtggcccgcccccggcagggcacagcgcgctgggcaaccgcgatccggcgccggactggaggggtc

SEQ ID NO: 125784 - DNA, 120 bp, Artificial Sequence
  ENSG00000101638_2 (sequence is synthesized)
gcgcgctggggcgcacaggggacggagcccgggtcttgctccccattggccgccacctcggcgggaggggccgcctccggctcgtggcacctggcgtctcccctccgcggggaaatcggc

SEQ ID NO: 125785 - DNA, 120 bp, Artificial Sequence
  ENSG00000101638_3 (sequence is synthesized)
aaatcggcggctacccggcaccggcgcctggaggtaaaggtacccgggggtggggaaggcccctggccgcggcagagctccctgccaccggccctgtcctgcttgccgccccagcgcctg

SEQ ID NO: 125786 - DNA, 120 bp, Artificial Sequence
  ENSG00000101638_4 (sequence is synthesized)
cgacgcttggatgcccccagctccggccgcgccaaccagaaactttgcccctcgaagtcccccgcctgcctgaccgcaccgtgaggcgccaagtcggccgcgcgccccccggggccccgg

SEQ ID NO: 125787 - DNA, 120 bp, Artificial Sequence
  ENSG00000101638_5 (sequence is synthesized)
aaccccgcgagtcattgcctggccgccccgtaccccgcgcccgcggcgcccggtagccaggatgcgctacgcggacccctcggccaaccgggatttgttggggagccgaactttgctctt

SEQ ID NO: 125788 - DNA, 120 bp, Artificial Sequence
  ENSG00000101638_6 (sequence is synthesized)
catcttcatctgcgcctttgccttggtgaccttgctgcaacagatcctgtatggcaggaactacattaagaggtactttgaattttatgaggggccttttgaatataactccacaagatg

SEQ ID NO: 125789 - DNA, 120 bp, Artificial Sequence
  ENSG00000101638_7 (sequence is synthesized)
cctggagctgaggcacgaaatattggaagtgaaggtgctgtccatggtgaagcagtcagagctgttcgacaggtggaagagcctccagatgtgcaaatgggcgatgaacatctctgaggc

SEQ ID NO: 125790 - DNA, 120 bp, Artificial Sequence
  ENSG00000101638_8 (sequence is synthesized)
caaccagttcaagtctactctgtccaggtgctgcaacgcccctgcctttctcttcaccacccagaagaacactcccctggggacaaagctcaagtatgaggtggacaccagtggcatcta

SEQ ID NO: 125791 - DNA, 120 bp, Artificial Sequence
  ENSG00000101638_9 (sequence is synthesized)
ccacatcaaccaggagatcttccgcatgtttcccaaggacatgccctactaccggtcccagtttaagaagtgtgctgtagtgggcaacggaggcatcttgaagaacagccgctgcgggag

SEQ ID NO: 125792 - DNA, 120 bp, Artificial Sequence
  ENSG00000101638_10 (sequence is synthesized)
ggagatcaacagcgccgacttcgtcttccggtgcaacctgccccccatctcagagaagtacaccatggatgtgggggtgaagacggatgtggtcactgtgaaccccagcatcatcacaga

SEQ ID NO: 125793 - DNA, 120 bp, Artificial Sequence
  ENSG00000101638_11 (sequence is synthesized)
ctgcctgccttctacaacacgcgcaacaccgacgtgtccatccgcgtcaagtacgtgctggacgacttcgaatcgccgcaagctgtctactacttccatccgcagtacctggtcaacgtg

SEQ ID NO: 125794 - DNA, 120 bp, Artificial Sequence
  ENSG00000101638_12 (sequence is synthesized)
tcgcgctactggctcagcctgggggtgcgcgccaagcgcatcagcaccggcctcattctggtcactgcggcgctggagctctgtgaggaggtgcacctctttggcttctgggccttcccc

SEQ ID NO: 125795 - DNA, 120 bp, Artificial Sequence
  ENSG00000101638_13 (sequence is synthesized)
atgaacccctcgggcctctacatcactcaccactactatgacaacgtcaagccgcgtcccggcttccacgccatgccctctgagatcttcaacttcctgcacttgcacagccgaggcatc

SEQ ID NO: 125796 - DNA, 120 bp, Artificial Sequence
  ENSG00000101638_14 (sequence is synthesized)
ctccgcgtgcacacgggcacctgcagctgctgctgatggctgccagccaggctgcccggcaagcggcgccccctctcctgctgtccctcctggtggaactgggagccccgaaccgggcag

SEQ ID NO: 125797 - DNA, 120 bp, Artificial Sequence
  ENSG00000101638_15 (sequence is synthesized)
cgtggggtcctggcgttcaggctgtctctccctccattgttcagctctgtacttggatcctggggtagggaggcagggttaggaaccggggcagagtcagctctgtgctgagcctcctgg

SEQ ID NO: 125798 - DNA, 120 bp, Artificial Sequence
  ENSG00000101638_16 (sequence is synthesized)
cctggcccccaccggtgcatccgcccagtgcgtccacctgccctggctagcatgctgctgggccacaccccaagatcaggggccctggggacggcaagtgaataaagcacatttccaccc

SEQ ID NO: 125799 - DNA, 120 bp, Artificial Sequence
  ENSG00000101638_17 (sequence is synthesized)
aattttgtcatccgagagagagcacaaactgcaggcccttgttgcagctgaaggaagaccctacagagaatggaattgagagtggagacaggacacttcacaggacacttgagcacagtc

SEQ ID NO: 125800 - DNA, 120 bp, Artificial Sequence
  ENSG00000101638_18 (sequence is synthesized)
aagattttattcacacttttggttcctgtgttttatatcgaagacttagctatgaattgctatctaaatctcagagcttagaagccaacccagtgactagaccttccagtgaagaaagtg

SEQ ID NO: 125801 - DNA, 120 bp, Artificial Sequence
  ENSG00000101638_19 (sequence is synthesized)
atctcaagaggtccagggacttaacagccaagccacaccacccgacaggttcttctgtgacaccgagagatctaacccaaggcctgggttatgtcttagtcgagacatcatcatctgaga

SEQ ID NO: 125802 - DNA, 120 bp, Artificial Sequence
  ENSG00000101638_20 (sequence is synthesized)
agcaccacatcctttcagacacatcctcggacacacatgcggtcttggtgcccccaggttcaatcctgcgttagctcttttgatgagaaggaaataaaccaaaccagccacttgcactat

SEQ ID NO: 125803 - DNA, 120 bp, Artificial Sequence
  ENSG00000101638_21 (sequence is synthesized)
ggcttccaagccaatgttattgactcaataagtgcttagcaattggcttcctcttttgtcttcctattttcagctccatttaaaccaggagttatttataaagacctcttcctctcatgt

SEQ ID NO: 125804 - DNA, 120 bp, Artificial Sequence
  ENSG00000101638_22 (sequence is synthesized)
tatggtgccatccctaactttagagatgatggtcataggatgagcagggccctcccctggccaggatgggatccgtcaggaagactgtttatatccttaggttgaggattattcatcccc

SEQ ID NO: 125805 - DNA, 120 bp, Artificial Sequence
  ENSG00000101638_23 (sequence is synthesized)
tttgacggatgagaaaactgagacttcaagaggttcaatgctgagagtcacactgctagtgaatggtggaatgcgagcccccctatccaagaatctctagaggcaagcattgcctggaga

SEQ ID NO: 125806 - DNA, 120 bp, Artificial Sequence
  ENSG00000101638_24 (sequence is synthesized)
ggcctccagtttggttggcagagtggtgaccagctgaccaattggacggggctctttaatgtcacggatgatccagcagtgcagagcggcagtgactccagctccaggtactttgaattt

SEQ ID NO: 125807 - DNA, 120 bp, Artificial Sequence
  ENSG00000101638_25 (sequence is synthesized)
agcaccaagtagagaaaaattagtgaaaaattagtactgtcatcttggagcctgtgtgtaggacctacctcataatttggcccagtgcaaagagaaatgcaaacccccttgttcaaaagt

SEQ ID NO: 125808 - DNA, 120 bp, Artificial Sequence
  ENSG00000101638_26 (sequence is synthesized)
ttgaagacagcaagagtggagcaatcagtcaaaatcaatggtggtggtggggacaaatgaacaagtcccactcccaagaagccagcctgcctgtgtgtgtgggagaaagaacctcatctc

SEQ ID NO: 125809 - DNA, 120 bp, Artificial Sequence
  ENSG00000101638_27 (sequence is synthesized)
ggttccctaatgctaccctttaagcaagtaatccccacttcccacccctgcagaccctcaggtctgggatatcccttcttctctccagccccatccctttggggaagtcgttgaactcct

SEQ ID NO: 125810 - DNA, 120 bp, Artificial Sequence
  ENSG00000101638_28 (sequence is synthesized)
aggtcctcagtttccacatctgcacaatgggagatgtgttaagagcaaaggacatcacagatttgaaggcactgaggacttaggagcttgcagctgtgtcgggaggtcctctgggcaccg

SEQ ID NO: 125811 - DNA, 120 bp, Artificial Sequence
  ENSG00000101638_29 (sequence is synthesized)
tgggctggaaagcactgacatgtcaggtggtgagcttagcagagagaaacgagttgtggcctccgacaccagcatcactgaggcttccgctgtgaaggcgggacttctcacagcagaccc

SEQ ID NO: 125812 - DNA, 120 bp, Artificial Sequence
  ENSG00000101638_30 (sequence is synthesized)
cagggcctgggcttggggcagtcagctgggcttaggcagagaggggttcacatatcatttcacatctgaaattaattccctttgcttctccctgtggtgtttccaccataaatgggatgg

SEQ ID NO: 125813 - DNA, 120 bp, Artificial Sequence
  ENSG00000101638_31 (sequence is synthesized)
tgtctaagagacactgttggtgaactaactgccttagaacttagctttgtggaatcataggatgttagtgctgggaggaggacttcagcctacctgcctggcaacctgtctccctccctc

SEQ ID NO: 125814 - DNA, 120 bp, Artificial Sequence
  ENSG00000101638_32 (sequence is synthesized)
cttcctttctccctgcctcctcccctttctccttccctcccttcctcttttcttcctccccttaaacatttctggaaagcctattctgctttggtctgtggttggacttaggaagacata

SEQ ID NO: 125815 - DNA, 120 bp, Artificial Sequence
  ENSG00000101638_33 (sequence is synthesized)
aggataaacaaaggcattatctgtgtcttctgggggtgcagggcccagagattatagacccagtcccacgtgctgggtgctctgggagggttaggagctgtaagagtctatcagggagtg

SEQ ID NO: 125816 - DNA, 120 bp, Artificial Sequence
  ENSG00000101638_34 (sequence is synthesized)
ggatctgctatccaatcacctcatttgacaggccccccggctgagccagtcagggacgtggagagtgcaggctttatcccaggcctccaggctcctgatccagggctccgttcttggcca

SEQ ID NO: 125817 - DNA, 120 bp, Artificial Sequence
  ENSG00000101638_35 (sequence is synthesized)
aacttttgtgtcttggcttgggcttcctgtgggggggttgttgtggaacctgtgccctgtgcacaacactgttctcagtgctgactctcacctgcattctgagctctggtcctggttggg

SEQ ID NO: 125818 - DNA, 120 bp, Artificial Sequence
  ENSG00000101638_36 (sequence is synthesized)
aaaacctcaggtggctctgagtctcagtctgctggtcaggaatgtaggggagtagccaaggggatgaaatgatcccaaacacctgctaaaccaggaagaactgcaaaggacagtggatgg

SEQ ID NO: 125819 - DNA, 120 bp, Artificial Sequence
  ENSG00000101638_37 (sequence is synthesized)
ttattacttgcttgagctctgcctatttctcccagggagggaatttctgggaaagattccagttacctgagatttctagccactgcatggttaattgaacccagttcttgaaaccatgga

SEQ ID NO: 125820 - DNA, 120 bp, Artificial Sequence
  ENSG00000101638_38 (sequence is synthesized)
atataaaaactagaaggttcttaaagaccattttgttccactttaggaaacaggcccagagcaaagatgtgactgggtcaagtcatgcctggggctctactgagtgcctgctgtggacag

SEQ ID NO: 125821 - DNA, 120 bp, Artificial Sequence
  ENSG00000101638_39 (sequence is synthesized)
agccctctactggaagccctctgggtactagttatgttccagatgggcagtgtttgggggaggctccctggtgacacagacatcaggattcccacagctgagggtgttgcaggttggaat

SEQ ID NO: 125822 - DNA, 120 bp, Artificial Sequence
  ENSG00000101638_40 (sequence is synthesized)
ctgccccagccagggccctcgtaggagctgaggattggagcatcgggatccagcccacagaggagttgggacacctggctgctggccatattcctgcctgtgggtcttagggccagtcct

SEQ ID NO: 125823 - DNA, 120 bp, Artificial Sequence
  ENSG00000101638_41 (sequence is synthesized)
tcctctccctcaatgtctcagtttcctcatctctacaactagaagctttgtaaaaatcttcagcgtctgtacaatgtccttattttggggggacattcatgatgaatggatctaaaccat

SEQ ID NO: 125824 - DNA, 120 bp, Artificial Sequence
  ENSG00000101638_42 (sequence is synthesized)
aattaatatttctcattatactagctagcatttatcaagctacgttaagcactttccctatattatctcctgtaatcatcatgagacccctttgggtaaggaggctcccattgtacagat

SEQ ID NO: 125825 - DNA, 120 bp, Artificial Sequence
  ENSG00000101638_43 (sequence is synthesized)
gaggagacagaggcttaaagcaattccaggacttgcccttggtcaggcacccaatggagggaacggcacccaatggagggaactgcacccagatctgtagagccccaaagtctgtgctcc

SEQ ID NO: 125826 - DNA, 120 bp, Artificial Sequence
  ENSG00000101638_44 (sequence is synthesized)
aaacctctgtcttagcttcccagacagtgacaccagaacatgagggatcctgaccaagatgcccctgcaggatagtacggggccctcctccagggacaaatgctctaggaggctgtcatc

SEQ ID NO: 125827 - DNA, 120 bp, Artificial Sequence
  ENSG00000101638_45 (sequence is synthesized)
gtccgggaagcagcctgtgcttataggtgcctctccctaaccctgccgcctacagcagtagcgacttacccacagtggcactggaggggaactgaggccatcgtcacatttttaaggtga

SEQ ID NO: 125828 - DNA, 120 bp, Artificial Sequence
  ENSG00000101638_46 (sequence is synthesized)
ggaaagatgcccagagatagcacatgttaagtgacaacacgaatgacttgcccagggctacatggccagcttgtggctcaactgggactcaccagtctcctgactttcaggatatagttt

SEQ ID NO: 125829 - DNA, 120 bp, Artificial Sequence
  ENSG00000101638_47 (sequence is synthesized)
ttctgctgcagccagtgtttataagaaaaacattttttcaaaggctcagagagacctggtgttgactctggaagccttctgccatgttcctccacagccctgtcaccacgccaccatgca

SEQ ID NO: 125830 - DNA, 120 bp, Artificial Sequence
  ENSG00000101638_48 (sequence is synthesized)
gtgcagactacccattgaattattattcaagggaaatcgattcccgtaaacaaaacaaccatcatgtcttcctttgtgctaaacccactgctccaggcttgaaaggcagcaaaaacaagt

SEQ ID NO: 125831 - DNA, 120 bp, Artificial Sequence
  ENSG00000101638_49 (sequence is synthesized)
aaatgactcagtgcttagccaagcacaaagaaaggtggctcaaggtcagaggcagcgtctgagaccatttcagcaatgctgctgcggcagctctgcccactaatcacctggtgcccagag

SEQ ID NO: 125832 - DNA, 120 bp, Artificial Sequence
  ENSG00000101638_50 (sequence is synthesized)
acagcatgtgctcatcgcccttgactttgctgagagcagggaggaagcagagcagtgcttagaaacaactgaggcagagtagagtgctggccaatttagtgagtgaattggtgaataaat

SEQ ID NO: 125833 - DNA, 120 bp, Artificial Sequence
  ENSG00000101638_51 (sequence is synthesized)
tatatttattgagtgctcatgttgtgccaggcatggtgccaggtgccggggagctagtgatgaacaaaacgtcgtccctgccctccgggagtttgtggtctggtgtgtgtgtatacagac

SEQ ID NO: 125834 - DNA, 120 bp, Artificial Sequence
  ENSG00000101638_52 (sequence is synthesized)
gttaaatgacgaatcccacaaacgtacgtgggagctggttgtgctgaacactatcaaatccagtctcagggacagttatctgggagaggtggaggaggggatgaccaaagtcaattccga

SEQ ID NO: 125835 - DNA, 120 bp, Artificial Sequence
  ENSG00000101638_53 (sequence is synthesized)
attctgaaggttggcagcataaaaagtgtaatgagcaaagcagcagatacttctcagatatcatccttgacatccgtgtaacatttgacaaggttggcctctctggtcttttttgtttgt

SEQ ID NO: 125836 - DNA, 72 bp, Artificial Sequence
  ENSG00000101638_54 (sequence is synthesized)
gacagagtctccctctgtcacccaggctagagggtggtgatataaatatggctcactgcagcctcgacacac

SEQ ID NO: 125837 - DNA, 120 bp, Artificial Sequence
  ENSG00000101638_55 (sequence is synthesized)
agctaggaccacaggcacgtgccattgctcccagctaatttgaaaatttttttttttttgtagaaacggggttttgctatgttgacgaggctagtctcgaactcctgagctcaagcaatc

SEQ ID NO: 125838 - DNA, 120 bp, Artificial Sequence
  ENSG00000101638_56 (sequence is synthesized)
ctgggattacaggtgtgagccactatgcacagtctctctggtctttctaaagtcctctcctcttctgttttctaactattcttccctgactttcctcctgtctctctgaatgctccttct

SEQ ID NO: 125839 - DNA, 120 bp, Artificial Sequence
  ENSG00000101638_57 (sequence is synthesized)
tctctctgaatgctccttctcaggttcctttgtggattcatcttccgtgaagcttcctcagggttctcttctcttcctaggagcattcctgcagaaatctcatctattcaaagccttaag

SEQ ID NO: 125840 - DNA, 120 bp, Artificial Sequence
  ENSG00000101638_58 (sequence is synthesized)
tatcttctgccctggcatcttaacccctctacctgcaggccagtcctccctaggagcattggaagcatgctcactgtggcctcctgcatgtctgtgtctgcacagcatctcagacctcaa

SEQ ID NO: 125841 - DNA, 120 bp, Artificial Sequence
  ENSG00000101638_59 (sequence is synthesized)
catgtcctcaactggtatagttaaaagaacaatctgaactcagagtctcctcctactacttcgtagctgtgtgaaattgagggagctccagaagcccctggaggctctggactcatcatc

SEQ ID NO: 125842 - DNA, 120 bp, Artificial Sequence
  ENSG00000101638_60 (sequence is synthesized)
tgaaatgaggacaggataccaaccacaacagctgttgcaaagctaagtgaaatagtgttgcacaatgcctagcacagtgcccagcacaaactagacactagcaagcacaggttgccttgg

SEQ ID NO: 125843 - DNA, 120 bp, Artificial Sequence
  ENSG00000101638_61 (sequence is synthesized)
cccaaaacttggatcacctttgcctcttccttctccttcactctttatgtctatttgttcactgtatcttgtcaattccaactcataaacatccctttaagtcattccctccctgcaacc

SEQ ID NO: 125844 - DNA, 120 bp, Artificial Sequence
  ENSG00000101638_62 (sequence is synthesized)
cctctgctactgccctaacccagaccatctgatggatctttttgctttcagagaataaccttccaaaaataccttttgtggggcccattgcctacctgtatcataaacttcaggttcttt

SEQ ID NO: 125845 - DNA, 120 bp, Artificial Sequence
  ENSG00000101638_63 (sequence is synthesized)
accaagtcatgcagggaatgtcccaagctggcttactcaccttcccagagatcctcctgccacctccctgccctatcccatactattccaggcacctttgcacactctgttcaaacacct

SEQ ID NO: 125846 - DNA, 120 bp, Artificial Sequence
  ENSG00000101638_64 (sequence is synthesized)
ggaatggccctcacactcctaagttcctctctccttccttttatctggccacttttgcagaagtcaggtaatggccccctgcatcctcccctctagagacctgggctgggcactctctcc

SEQ ID NO: 125847 - DNA, 120 bp, Artificial Sequence
  ENSG00000101638_65 (sequence is synthesized)
agaaggtttgccttctccccaagggaagacacgatatctaagctcattttgtattgccagcactggcggggaagcacatgccatggccactcaacacatgtttactacagtaatgaggtc

SEQ ID NO: 125848 - DNA, 120 bp, Artificial Sequence
  ENSG00000101638_66 (sequence is synthesized)
tctggttcctgggggactccagcagttcaggataccccgctaataaactgagtaacaccttggggaaattgtcagctgaggagagtcctctattgatttttttacctagcacatcccagg

SEQ ID NO: 125849 - DNA, 120 bp, Artificial Sequence
  ENSG00000101638_67 (sequence is synthesized)
aaggcagagactcctcctgcctgtccaggggagctcggggctcaggaggctgaaatgtctgtctagtgggggcttatgggcttggctagcctctttttgttttccctcattataatcctg

SEQ ID NO: 125850 - DNA, 120 bp, Artificial Sequence
  ENSG00000101638_68 (sequence is synthesized)
ctcatctgctttttgctggctagccaatcctttttcctctagtttaaatgaaagaagggagagacattttctgtgtttcttgttgtctacttcttcccttcctcaaagccacacaaacat

SEQ ID NO: 125851 - DNA, 120 bp, Artificial Sequence
  ENSG00000101638_69 (sequence is synthesized)
gtcaggctcttacatcactgtggctgaggtgcagcctgggaagcaatgtaagagggatttatcaatggtgtttaaaaaactagaggaacatgctgaatgctttggctgggaaacaggtga

SEQ ID NO: 125852 - DNA, 120 bp, Artificial Sequence
  ENSG00000101638_70 (sequence is synthesized)
gctgagctttgcaggatgtctgctccagatgcgaaggggaagaccaggagcatggggttgtttcctgggggaaaaaaggtgctgcttctctgagctcaacacacgccctgacctagtctc

SEQ ID NO: 125853 - DNA, 120 bp, Artificial Sequence
  ENSG00000101638_71 (sequence is synthesized)
ctccctgtaaccagagcaccctctgggaagaggctaactgtggctcaggggtcaggtgaggccaggcgaggggtgcaccagtggccagggtgtgccttgtgctattgtttagaggtctag

SEQ ID NO: 125854 - DNA, 120 bp, Artificial Sequence
  ENSG00000101638_72 (sequence is synthesized)
tcaaacgaggccagtctgtggaggctgattccatcctacggggcatcctaataaaccagtgtgatcttcaaagggtagactggatagatctacagtgtgatcttcaaagggtagactgga

SEQ ID NO: 125855 - DNA, 120 bp, Artificial Sequence
  ENSG00000101638_73 (sequence is synthesized)
tagacctacagtatagatctacagtatagatctacagtctaccctttgaagatcacatgggtttattaggatgccctgtaggatggccttctgatggcctgcatcagaatcacctgggtg

SEQ ID NO: 125856 - DNA, 120 bp, Artificial Sequence
  ENSG00000101638_74 (sequence is synthesized)
cttgttaaaactatggactgagaacctgggggagaggtggcgcctgggaatcagcatgtgtgaggccctatctgttccctgagcatacaactgcttgtggttcagaagttgccaccagtt

SEQ ID NO: 125857 - DNA, 120 bp, Artificial Sequence
  ENSG00000101638_75 (sequence is synthesized)
gagtggccatgtatggcttgaaattcagactggagccttgagtaggaaaagaatgaaaagaagaatttggcacacaacccaacttctgccttttctgtacatacaaatataatatataac

SEQ ID NO: 125858 - DNA, 120 bp, Artificial Sequence
  ENSG00000101638_76 (sequence is synthesized)
ccactatgtacctagcaacaaaagtcaagtgctcgggaatctaacatttacaaaattggttttgctttaacacaaacaaagatttctttttcatttgtaattatggtaaaatacacataa

SEQ ID NO: 125859 - DNA, 120 bp, Artificial Sequence
  ENSG00000101638_77 (sequence is synthesized)
catagaatttatcatcttaaccatttttaagtgtacagttcagtaatggtaagtacattcacactgttgtatattctgtctctggaactcttctcatcttgcaaaatgaaaactttaaac

SEQ ID NO: 125860 - DNA, 120 bp, Artificial Sequence
  ENSG00000101638_78 (sequence is synthesized)
ccattaaatgacaagtcttcacttcccccttccccagcccctggcaatcgcaattctactttctttctctatgaattttactgctctaggtccctcatataagtagaatcatataatatt

SEQ ID NO: 125861 - DNA, 120 bp, Artificial Sequence
  ENSG00000101638_79 (sequence is synthesized)
tgtctttctgatgactggcttatttcacttagtatagtataccagagactttttagaatcacttaggtgcaagcagctctcaaatgacattaactgttttgggtgtccctaaagcagaaa

SEQ ID NO: 125862 - DNA, 120 bp, Artificial Sequence
  ENSG00000101638_80 (sequence is synthesized)
tctgatttttgtttttgtttttgccttgggcagttgtcctgggctggtcgttggcccctggcttcctgagaccttggccccttgctgagggagagtgcagacctggccttgctctgccac

SEQ ID NO: 125863 - DNA, 120 bp, Artificial Sequence
  ENSG00000101638_81 (sequence is synthesized)
ctgggctccactgtcctggccagcatgtcctgagagacaatagccttgctgatcttttagaagtctttaggtattttcccctgcacagtctcttctgagaacctttcttttttttttttt

SEQ ID NO: 125864 - DNA, 120 bp, Artificial Sequence
  ENSG00000101638_82 (sequence is synthesized)
ttatttcaaaggaaaaaaaccaaaagcaaaaacatacacttccatgacttagctgttggccacaaaagccagaaatcagtgactctctcttcagttgaagatggttcccatggcaacaaa

SEQ ID NO: 125865 - DNA, 120 bp, Artificial Sequence
  ENSG00000101638_83 (sequence is synthesized)
tctctcatttccttcaactaaatgatctgctcagctttggggtaaaagttctgttttctctagaattgccatttgcaaccttgtgtgtacataggaatcacctggaagtctttataaaat

SEQ ID NO: 125866 - DNA, 120 bp, Artificial Sequence
  ENSG00000101638_84 (sequence is synthesized)
aatccccaagccaggtcctttacttcccggaggatctgattcagcaggcctggggatagggcctggtatccctattttgaaagatctcattaagtggttctgtctcacatggttgggagt

SEQ ID NO: 125867 - DNA, 120 bp, Artificial Sequence
  ENSG00000101638_85 (sequence is synthesized)
cattaccctaaggcaggcagtctatgccttggtgcacgctagagtcgtctgaagagctttaagaaatactcgtgcgaccccaccccttgacattctgagtcaggtggtctgagatgtgac

SEQ ID NO: 125868 - DNA, 120 bp, Artificial Sequence
  ENSG00000101638_86 (sequence is synthesized)
ctgaatattaggatttcacaaattctccagatgtttctaatgtgcagccagccttgagaaccactattctaggtcagcagttctcaaactggaggctgcctcagaatctcttggagagct

SEQ ID NO: 125869 - DNA, 120 bp, Artificial Sequence
  ENSG00000101638_87 (sequence is synthesized)
ccttgattatgggccccgccccagagttatttggtgaggccagggtggagcatctctaacaagttcccaggtgatgccaatgctggtccagggactgcacttggaggctcatggctctag

SEQ ID NO: 125870 - DNA, 120 bp, Artificial Sequence
  ENSG00000101638_88 (sequence is synthesized)
atgatcctttaatgagattggccctgttctgctgccctgttctttttcctggttgggggttggtggacccttccttccctcagtctgactcaggcgtgagacttcttaaaggtaccagct

SEQ ID NO: 125871 - DNA, 120 bp, Artificial Sequence
  ENSG00000101638_89 (sequence is synthesized)
tttctttttctgaacattttagcattcagataaatattatgacatatttttaaagcaaagtaacatagatttcttctcccggggctaggagcctcagagtctgcctgaattaagaattta

SEQ ID NO: 125872 - DNA, 120 bp, Artificial Sequence
  ENSG00000101638_90 (sequence is synthesized)
tctgtgcctaagattaggatgcatttagtgatctgagctaaggggttggtggatctgcagcaataggttcagcctgtgcctgggtgagggtcaccttgtgaccggcgctgggtaggatct

SEQ ID NO: 125873 - DNA, 120 bp, Artificial Sequence
  ENSG00000101638_91 (sequence is synthesized)
gagtaccacacacttggccctctagcatggggaggacctgtctggtccacctgggggaaagcctggttttctgatgcagacccagccctctgcccacctccacatctgtgcacaaacatg

SEQ ID NO: 125874 - DNA, 120 bp, Artificial Sequence
  ENSG00000101638_92 (sequence is synthesized)
gaaggtagcaatgaggaaacacagcaccaggactgccgtgagcccaggagctagggttagagcctcacttctttatgcatttccttttctatcatactttggaacaggcttgagctgaaa

SEQ ID NO: 125875 - DNA, 120 bp, Artificial Sequence
  ENSG00000101638_93 (sequence is synthesized)
ccagagagttagtacctggtttctgcctcaatctagtctccctcctccaaagatgcccccacaacgtgggcaacttcaacccccatgagagctcagaattccacattcagcgacaaagtt

SEQ ID NO: 125876 - DNA, 120 bp, Artificial Sequence
  ENSG00000101638_94 (sequence is synthesized)
gacaagagcctctggagatctcaaagacttattaaaagtggaaatggctactgttttactgaggcagggtgaaaacacaactcacttcctaggatcgaacccagcaaattcactcagccc

SEQ ID NO: 125877 - DNA, 120 bp, Artificial Sequence
  ENSG00000101638_95 (sequence is synthesized)
ccaggtaactgaggactcagttgaaggaaaataattttgagcccctgaaaatagatgctataaagctgtgtatcaagggccaaccattttgctaatatcacatatctcacggcatttgct

SEQ ID NO: 125878 - DNA, 120 bp, Artificial Sequence
  ENSG00000101638_96 (sequence is synthesized)
ttgattttaaattcagttctagtgaacttggttctgatttctaatgacaaagcaaactaagagaatgatgacatgtgctagataaagcaagaagtggcagctaatagcctaaattgtgat

SEQ ID NO: 125879 - DNA, 120 bp, Artificial Sequence
  ENSG00000101638_97 (sequence is synthesized)
ggcattaagaagaccaaaactagtttacttgttcaacgacagcttgtctttggaaaaaaaaaaacactacattaaggataagaaaatatgtccaggcatggtggctcacatctgtaatcc

SEQ ID NO: 125880 - DNA, 120 bp, Artificial Sequence
  ENSG00000101638_98 (sequence is synthesized)
cagcattttgggaggctgaggcgggagatcgcttgagctcaagagttgacgaccaacctgggcaacatggcaaaaccctgtctcaataaagaatacaaaagcacacctgtagtcagtccc

SEQ ID NO: 125881 - DNA, 67 bp, Artificial Sequence
  ENSG00000101638_99 (sequence is synthesized)
tctcaataaagaatacaaaagcacacctgtagtcagtcccagctactcaagaggttgaggtgggaga

SEQ ID NO: 125882 - DNA, 120 bp, Artificial Sequence
  ENSG00000101638_100 (sequence is synthesized)
aataattaaaaaagaccaaaactaaatacatatctcaggaaccatcaagtagcctgaggtcgttggtcgtttagtggggaagagagggagaatatgttataataaccccgggagcaacac

SEQ ID NO: 125883 - DNA, 120 bp, Artificial Sequence
  ENSG00000101638_101 (sequence is synthesized)
agcatttcagctcagttcaccctgtgacatccaggacatgcagaggtaaaaaagcgttccaacaatgttcaatacactgtctaagaaggcagggctgcgttttatccactttagaattat

SEQ ID NO: 125884 - DNA, 120 bp, Artificial Sequence
  ENSG00000101638_102 (sequence is synthesized)
ttccatccccaaacagttaaaatactttcacaaaagtcttggtgcttaaaagataaatgctcagtgacctggaagttcacataaatgaaacggttgatgatctgatgatgaaggataggc

SEQ ID NO: 125885 - DNA, 82 bp, Artificial Sequence
  ENSG00000101638_103 (sequence is synthesized)
agtagctgggattacaggcgcccaccacttccaccattttggccaggctggttgtgaactcctgacctcgtgattcgcccac

SEQ ID NO: 125886 - DNA, 120 bp, Artificial Sequence
  ENSG00000101638_104 (sequence is synthesized)
aagtgctgggattataggtgtgggccaccgtgcccggccaaactcactcttttgaacttaacattttccccctgacattggagactctcctgctacctctctcctaagaaaaaagggcag

SEQ ID NO: 125887 - DNA, 120 bp, Artificial Sequence
  ENSG00000101638_105 (sequence is synthesized)
cctgctacctctctcctaagaaaaaagggcaggtggtggggggacaagccccttccaccttcccatctccaagggactttgcagtgtgggtgatggtgtggctgatcatcctctttctgc

SEQ ID NO: 125888 - DNA, 120 bp, Artificial Sequence
  ENSG00000101638_106 (sequence is synthesized)
acctctgattctgcttgtgttgtccttattgtgtggggcaggagggtcaggacttcagctaggggtgtgctggctctgcagtgactcaggcctgggtgttttttggtgaatttaaaaaga

SEQ ID NO: 125889 - DNA, 120 bp, Artificial Sequence
  ENSG00000101638_107 (sequence is synthesized)
tgaccatttctgggggaaagtgacacttttactttctccacaccttcaccatccattttcttactggacttcgctgcgttcctgcaaggaggacagggcagagagtagcaaccctccttg

SEQ ID NO: 125890 - DNA, 120 bp, Artificial Sequence
  ENSG00000101638_108 (sequence is synthesized)
ccgaggcccagaaagatagcgtggtgtgcccagggcacccatggtgggtgatggacatctccttttgggtgccaaggcttcctcaaggtgggaggaactggagggcaggggacggtggcc

SEQ ID NO: 125891 - DNA, 120 bp, Artificial Sequence
  ENSG00000101638_109 (sequence is synthesized)
agtgtcccgctctagccctctagggcacctttttctcccctctgaagttgttaggctgatctggagtctgctccaggcctgggcttcaccctggcctcatgccctgcccagcacctgtgt

SEQ ID NO: 125892 - DNA, 120 bp, Artificial Sequence
  ENSG00000101638_110 (sequence is synthesized)
ggagggacctgttcgtattcattcctctttgggggccaagctcagggcacccgaaccagcagccttgggtggctgaacctagtgggacagaagggaggcagttgtatctggcagagtcac

SEQ ID NO: 125893 - DNA, 120 bp, Artificial Sequence
  ENSG00000101638_111 (sequence is synthesized)
ccaaggccacaggcctgagcaaagcaggagagcggggcaagctggggtcagggaccatggtgctggccccctgctgctctggccatgtgggaggcagctggaggggtcccaagtggcagc

SEQ ID NO: 125894 - DNA, 120 bp, Artificial Sequence
  ENSG00000101638_112 (sequence is synthesized)
tcctgccagactaccccggactcccgagcccatcgtcctgtactcttctccagtgggacgtctggccctcactgtggctagcttctgggcaagtccctctgctcaagatcactttatggg

SEQ ID NO: 125895 - DNA, 120 bp, Artificial Sequence
  ENSG00000101638_113 (sequence is synthesized)
gcagctggtgccccctggggctcccacactctgcacatacaatttagggacctggcagggtcttggtggcctgcagcttccctttctggaaccgactcgcctcccatcagagagccataa

SEQ ID NO: 125896 - DNA, 120 bp, Artificial Sequence
  ENSG00000101638_114 (sequence is synthesized)
ctcttcttcaatacagtattgtttgaactttgaaatatatgcatttgtctatgtattttcttaaaaattaacactgtatctcaataagcatacaatggattgttcaatggtacagtttgg

SEQ ID NO: 125897 - DNA, 120 bp, Artificial Sequence
  ENSG00000101638_115 (sequence is synthesized)
aaccaatcccccgccacttccctccccaagtaaagccaggacagatgctggagtcagcatgggagctgtggaaaccttttgccctggagccaggtgcctgtggctgtgcctgggagtggc

SEQ ID NO: 125898 - DNA, 120 bp, Artificial Sequence
  ENSG00000101638_116 (sequence is synthesized)
ttcagcccaggcgtggtgtcagtttcctggcacccctgcccaggagcctgcatgaaggcagccgggtctctctctgagtggctggtgcaccggctcatttctgagtggcctcctgcgtat

SEQ ID NO: 125899 - DNA, 120 bp, Artificial Sequence
  ENSG00000101638_117 (sequence is synthesized)
gaagaaaaagcggccacgtggcatgcctcccttccctcccttgctttcctctcaaagagccaagtcacgctgcactgcgctccgtggagcctttcccgatggagaagagaagggaggcct

SEQ ID NO: 125900 - DNA, 120 bp, Artificial Sequence
  ENSG00000101638_118 (sequence is synthesized)
gagatgtcctttgctgggatgtggagaaacaccatctatatgaaaagccccttgcttgctctgctgattttctccctcccctggccctggagagaaaggctgtgccattcaaagacagtt

SEQ ID NO: 125901 - DNA, 120 bp, Artificial Sequence
  ENSG00000101638_119 (sequence is synthesized)
tggggacatgggggctgcaggcctgatcttatttttatgcaaattttgttctgggagcagtggtttatacaaactcctgtagcataattccagcttgtgtgtggctgtccttgagtagtg

SEQ ID NO: 125902 - DNA, 120 bp, Artificial Sequence
  ENSG00000101638_120 (sequence is synthesized)
attctgaagtgatgactgtgatgctatgcctaaaaacatcatcagggtactttgtatctgtcactgtgtttgaacggccctcaatttctatctaataaaaccagtcaaatggttcaccta

SEQ ID NO: 125903 - DNA, 120 bp, Artificial Sequence
  ENSG00000101638_121 (sequence is synthesized)
agtatctatgattcgtctgtcctcccttctccttgtatgattctcctcactgccacctcttctggtctccattgtcctgcaaggcccagctctcagcgtgcatcttccccagagcagacc

SEQ ID NO: 125904 - DNA, 120 bp, Artificial Sequence
  ENSG00000101638_122 (sequence is synthesized)
ctgactgggcttaggaatccgggcagtgggggagatctgattcaacatgcaggctgaggcaggcaccttgcccaggtgctatcctccaccttctctcccttagtccttgcagcagccttg

SEQ ID NO: 125905 - DNA, 120 bp, Artificial Sequence
  ENSG00000101638_123 (sequence is synthesized)
tgaggttggtggtgccatctccagtacacagctgaggttcactgaagctattagcagggaagcatgtgtgggcggtctccagcaggcctgtgtgaaggtgcattacgcatcctctatagc

SEQ ID NO: 125906 - DNA, 120 bp, Artificial Sequence
  ENSG00000101638_124 (sequence is synthesized)
ctcctggtcctcacctcccctgtcctggggcagcggctctgacccagtagcttctctccttctcagagcatttgagttcttccagcctccacgagacatttgagccctgctgcagattat

SEQ ID NO: 125907 - DNA, 120 bp, Artificial Sequence
  ENSG00000101638_125 (sequence is synthesized)
tttataaatgctctctaaccaaaatgagcagattataaacttccagagaggtaagagctggatcttaaagttgtcctgtgggaactctgcaaataacagatgtccaaaaattctttttga

SEQ ID NO: 125908 - DNA, 120 bp, Artificial Sequence
  ENSG00000101638_126 (sequence is synthesized)
tggatggtgaactttagggtcttctccatctctaaagttctgtaagcttatgggattattttagtgcaggtagaccttattttatggagttgatgtaatctggcaatttgtgtctatact

SEQ ID NO: 125909 - DNA, 120 bp, Artificial Sequence
  ENSG00000101639_0 (sequence is synthesized)
agtgccctgggacacctcttcagtccgtggactttcccgctgcacactgccctccgaagtcggggacgcgggctcgtgagatggaagattttcgaggtatagcagaagaatcatttccaa

SEQ ID NO: 125910 - DNA, 120 bp, Artificial Sequence
  ENSG00000101639_1 (sequence is synthesized)
gctttctcaccaattcattatttggtaacagtgggattttggaaaatgtcactctttcttcaaatcttggcttgcctgttgctgtttctacacttgctagggatagatccagcactgata

SEQ ID NO: 125911 - DNA, 120 bp, Artificial Sequence
  ENSG00000101639_2 (sequence is synthesized)
acaggtatcctgatatccaggcatcttacttagtagaagggagattttcagttccatccgggtcatctcccggaagccagagtgatgctgaaccaagagagaggttacagcttagcttcc

SEQ ID NO: 125912 - DNA, 120 bp, Artificial Sequence
  ENSG00000101639_3 (sequence is synthesized)
aggatgatgattctatctctaggaaaaagagctatgtggaaagtcaacgtttgtcaaatgctctcagcaaacagtcagctttacaaatggagacagcaggaccagaagaggagccagccg

SEQ ID NO: 125913 - DNA, 120 bp, Artificial Sequence
  ENSG00000101639_4 (sequence is synthesized)
gagctacagaatccttgcagggccaagatctcttcaacagggcttcaccactggaacaagcacaagactcacctattgattttcatttacagtcatggatgaataataaggaacccaaga

SEQ ID NO: 125914 - DNA, 120 bp, Artificial Sequence
  ENSG00000101639_5 (sequence is synthesized)
ttgttgtgcttgatgctggaaaacattttgaagacaagactctaaagagtgacctaagccacactagcttattagaaaatgagaaacttatcttaccgacaagcttggaagattcttctg

SEQ ID NO: 125915 - DNA, 120 bp, Artificial Sequence
  ENSG00000101639_6 (sequence is synthesized)
atgatgatattgatgatgaaatgttttatgatgatcatttggaggcttattttgaacaactggcaattccaggaatgatatatgaagacctagaaggaccagaacctccagaaaaaggtt

SEQ ID NO: 125916 - DNA, 120 bp, Artificial Sequence
  ENSG00000101639_7 (sequence is synthesized)
ttaagttacctacaaatggtcttagacaggcaaatgaaaacggtagcttaaactgcaagtttcaatcagaaaataacagctctctgatttccctcgactcacactcttctgaaacaactc

SEQ ID NO: 125917 - DNA, 120 bp, Artificial Sequence
  ENSG00000101639_8 (sequence is synthesized)
acaaagagtctgaggaaagccaagttatttgtctacctgggactagtaattctataggtactggagatagtagaaggtacacagatggtatgttaccattttcctctggtacttggggaa

SEQ ID NO: 125918 - DNA, 120 bp, Artificial Sequence
  ENSG00000101639_9 (sequence is synthesized)
ctgagaaagaaatagaaaatttgaagggtattgttccagatcttaacagtgaatgtgcaagtaaagatgttctggtgaagaccctcagggctattgatgtgaaacttaactctgataatt

SEQ ID NO: 125919 - DNA, 120 bp, Artificial Sequence
  ENSG00000101639_10 (sequence is synthesized)
ttcatgatgcaaatgccaatagaggtggttttgatctgactgaccctgtaaaacagggggcagagtgtcctcaccaaaataagacagttttgcacatggatggatgtttagacactgaga

SEQ ID NO: 125920 - DNA, 120 bp, Artificial Sequence
  ENSG00000101639_11 (sequence is synthesized)
ctcctacggtgtccattcaagaaaatgtggatgtagcctctttgaagcccattagtgacagtggaattaatttcactgatgccatttggtcaccaacttgtgaaaggcgaacatgtgaat

SEQ ID NO: 125921 - DNA, 120 bp, Artificial Sequence
  ENSG00000101639_12 (sequence is synthesized)
gtcacgagtccatcgaaaagaataaagacaaaacagatctcccacagagtgtggtctatcaaaatgaagagggtaggtgggtcacagaccttgcctattacacatcttttaatagcaaac

SEQ ID NO: 125922 - DNA, 120 bp, Artificial Sequence
  ENSG00000101639_13 (sequence is synthesized)
aaaatttaaatgtgtctctaagtgatgagatgaatgaagacttcagatctggttctgaagcatttgatttgattgcacaagatgaagaagaatttaataaagagcatcaatttatacagg

SEQ ID NO: 125923 - DNA, 120 bp, Artificial Sequence
  ENSG00000101639_14 (sequence is synthesized)
aagaaaacatagatgctcataatacttcggttgcactgggcgatacgtcctggggagctacaattaattacagtctgttgaggaaatcacgtagcacatcagatttggataaagatgatg

SEQ ID NO: 125924 - DNA, 120 bp, Artificial Sequence
  ENSG00000101639_15 (sequence is synthesized)
ccagttatttacgtctgtctttaggagagttctttgctcaaagatctgaagctcttggttgccttggtggtggtaacaatgtgaaaagaccatcatttggctattttattagatcaccag

SEQ ID NO: 125925 - DNA, 120 bp, Artificial Sequence
  ENSG00000101639_16 (sequence is synthesized)
agaagagagaacctattgccttaataagaaaatctgatgtatcaagaggtaatttggaaaaagaaatggctcatcttaaccatgatctatattcaggagatttaaatgaacagtcccagg

SEQ ID NO: 125926 - DNA, 120 bp, Artificial Sequence
  ENSG00000101639_17 (sequence is synthesized)
cacagctaagtgaaggatcaattacacttcaggttgaagcagtagagagtacttcacaagtggatgaaaatgatgtgacgttaacggctgataaaggcaaaacagaggacactttcttca

SEQ ID NO: 125927 - DNA, 120 bp, Artificial Sequence
  ENSG00000101639_18 (sequence is synthesized)
tgagcaacaaaccccaaagatacaaagacaagctaccagatagtggtgattctatgcttaggatcagcaccattgcttcagccattgcagaggcatcagttaatactgatccttcccaac

SEQ ID NO: 125928 - DNA, 120 bp, Artificial Sequence
  ENSG00000101639_19 (sequence is synthesized)
ttgctgcaatgatcaaggcactttcaaataaaaccagagacaagacttttcaggaagatgagaaacaaaaggactattctcatgtgcgtcatttcttacctaatgatttagaaaaaagta

SEQ ID NO: 125929 - DNA, 120 bp, Artificial Sequence
  ENSG00000101639_20 (sequence is synthesized)
atggatccaatgcacttgatatggagaaataccttaaaaaaacagaagttagtagatatgaaagtgcattggaaaacttttcaagggctagtatgtctgatacttgggatttatctttgc

SEQ ID NO: 125930 - DNA, 120 bp, Artificial Sequence
  ENSG00000101639_21 (sequence is synthesized)
ccaaagaacaaactactcaagacattcatccggtggacttaagtgctactagtgtaagtgtgagggcaccagaagaaaacacagcagctattgtttatgttgaaaatggagagagtgaga

SEQ ID NO: 125931 - DNA, 120 bp, Artificial Sequence
  ENSG00000101639_22 (sequence is synthesized)
atcaagagtcatttagaaccataaactcctcaaattcagttacaaatagagagaataacagtgcagtagttgatgtgaagacatgttccattgacaacaaattacaagatgttggtaacg

SEQ ID NO: 125932 - DNA, 120 bp, Artificial Sequence
  ENSG00000101639_23 (sequence is synthesized)
atgaaaaagctacctcaatttccactccatctgatagttattcatcagtgaggaaccccagaataacatccctttgtctgttaaaagactgtgaagaaatacgagataacagagaaaatc

SEQ ID NO: 125933 - DNA, 120 bp, Artificial Sequence
  ENSG00000101639_24 (sequence is synthesized)
agaggcaaaatgagtgtgtcagtgaaataagcaacagtgagaagcatgtgacttttgaaaaccatcgcatagtctcacctaaaaatagtgatttgaaaaatacctctcctgagcatggtg

SEQ ID NO: 125934 - DNA, 120 bp, Artificial Sequence
  ENSG00000101639_25 (sequence is synthesized)
gacgtggctcagaggatgagcaggagagcttcagaccttccacgtcaccactgagtcattcttctcctagtgaaatttctggaacgagttcatcagggtgtgcgttagagtcctttggtt

SEQ ID NO: 125935 - DNA, 120 bp, Artificial Sequence
  ENSG00000101639_26 (sequence is synthesized)
cagcagctcagcagcagcagcctccctgtgagcaggagttgtctcccttggtgtgctcgcctgctggggtgagcaggctgacgtatgtgtctgaaccagagagctcctatcctaccacag

SEQ ID NO: 125936 - DNA, 120 bp, Artificial Sequence
  ENSG00000101639_27 (sequence is synthesized)
ccacagatgatgccctggaggaccgcaagagtgatatcaccagcgagttgagtaccacaattattcaaggcagtccagccgcattggaggaacgggctatggaaaaattgagagaaaaag

SEQ ID NO: 125937 - DNA, 120 bp, Artificial Sequence
  ENSG00000101639_28 (sequence is synthesized)
ttccatttcagaatagaggaaaaggaacattatcatctattatccagaataactctgatacaagaaaagcaactgaaactacttctctgagtagcaagcctgaatatgtaaaacctgact

SEQ ID NO: 125938 - DNA, 120 bp, Artificial Sequence
  ENSG00000101639_29 (sequence is synthesized)
ttagatggagtaaagatccttcctccaaaagtggaaatctgttggaaaccagtgaggtaggttggacatcaaaccctgaggaattggacccgatcaggctggctctcctgggcaagtcag

SEQ ID NO: 125939 - DNA, 120 bp, Artificial Sequence
  ENSG00000101639_30 (sequence is synthesized)
gtctgagctgtcaggtggggtcagccacatcacaccctgtgtcctgccaggagcctatagatgaagatcaaagaataagtcctaaagataagtcaactgctggccgtgagttcagtggcc

SEQ ID NO: 125940 - DNA, 120 bp, Artificial Sequence
  ENSG00000101639_31 (sequence is synthesized)
aggtttctcatcagaccacctctgaaaaccagtgtactcctattcccagcagcacagttcacagctctgtggctgacatgcagaacatgcctgctgctgtgcacgcactcttgacacaac

SEQ ID NO: 125941 - DNA, 120 bp, Artificial Sequence
  ENSG00000101639_32 (sequence is synthesized)
cctctctcagcgctgctccttttgctcagcggtatttgggaacactcccttcaactggaagcaccaccttgcctcagtgccatgctggcaatgccacagtctgtggcttctcaggaggcc

SEQ ID NO: 125942 - DNA, 120 bp, Artificial Sequence
  ENSG00000101639_33 (sequence is synthesized)
tgtggctgtgggaatttgtctaggatcaaatatcggctctggatggatgggtacctcttccctctgtaacccatattctaataccttaaatcagaacctgctaagcacaacaaaaccttt

SEQ ID NO: 125943 - DNA, 120 bp, Artificial Sequence
  ENSG00000101639_34 (sequence is synthesized)
tcctgtgccgtctgttggtacaaactgtggaattgaaccatgggattcaggagtgacatcaggattggggagtgtccgagtgcccgaggagttgaagcttcctcatgcttgctgtgtcgg

SEQ ID NO: 125944 - DNA, 120 bp, Artificial Sequence
  ENSG00000101639_35 (sequence is synthesized)
gatcgcttcccagaccctcctcagtgtgcttaatccaactgaccgctggctgcaagtcagcattggggtcctcagcattagtgttaatggtgaaaaggtggatctttcaacatatcgttg

SEQ ID NO: 125945 - DNA, 120 bp, Artificial Sequence
  ENSG00000101639_36 (sequence is synthesized)
tttagttttcaagaataaagccatcataagacctcatgccacagaagagataaaagtgctttttataccatccagtcctggggttttcagatgcacattcagtgttgcttcttggccatg

SEQ ID NO: 125946 - DNA, 120 bp, Artificial Sequence
  ENSG00000101639_37 (sequence is synthesized)
ttcgacagatgctgagaccatcgtacaggcagaagctttggccagcaccgtcactctcactgccattgccgagagtcctgttattgaggtagaaacagaaaagaaagacgttcttgattt

SEQ ID NO: 125947 - DNA, 120 bp, Artificial Sequence
  ENSG00000101639_38 (sequence is synthesized)
tggtgacttgacttatggaggctggaaagccctcccactaaaattgataaaccgaacgcatgccactgtgccaattagactgattattaatgctaacgctgtagcctggcgctgtttcac

SEQ ID NO: 125948 - DNA, 120 bp, Artificial Sequence
  ENSG00000101639_39 (sequence is synthesized)
gttttccaaggaatccgtccgagctcctgtggaagttgctccttgcgctgatgtggtcactcggctagcaggcccttctgtggtcaaccacatgatgcctgctagttatgatggacagga

SEQ ID NO: 125949 - DNA, 120 bp, Artificial Sequence
  ENSG00000101639_40 (sequence is synthesized)
tccagaatttctgatgatttgggttcttttccatagtccaaagaaacagatcagctcttcagatattctggactcagcagaagaattctcggcaaaagttgatatcgaagttgacagccc

SEQ ID NO: 125950 - DNA, 120 bp, Artificial Sequence
  ENSG00000101639_41 (sequence is synthesized)
aaaccctacgcccgttcttagaagtgtgagtctccgagcaagagcaggaatagctaggatccatgctcccagggacttgcagacgatgcatttcttggccaaagtggcttcctcaagaaa

SEQ ID NO: 125951 - DNA, 120 bp, Artificial Sequence
  ENSG00000101639_42 (sequence is synthesized)
gcagcacttacctttgaaaaatgctgggaacattgaagtttatttggatatcaaggtcccagaacaaggaagtcacttttcagtggatccaaagaatctactccttaaacctggagaaga

SEQ ID NO: 125952 - DNA, 120 bp, Artificial Sequence
  ENSG00000101639_43 (sequence is synthesized)
acatgaggttattgtttcatttactccaaaggatcctgaagcctgcgaggaaaggatcttgaaaatatttgtgcagccatttggacctcagtatgaggtagtgttaaaaggcgaagtcat

SEQ ID NO: 125953 - DNA, 120 bp, Artificial Sequence
  ENSG00000101639_44 (sequence is synthesized)
ttcttcaggaagtaaacctctgtcacctggaccttgcttagatattccatcgattttgtccaacaaacaatttctggcttggggaggagtccctctaggtagaacacagcttcagaaact

SEQ ID NO: 125954 - DNA, 120 bp, Artificial Sequence
  ENSG00000101639_45 (sequence is synthesized)
agctttaagaaataattctgcatctacaactcaacatttacgactgcttattagaggacaagatcaggactgctttcagcttcagaacacttttggttcagaacagcgattgaccagtaa

SEQ ID NO: 125955 - DNA, 120 bp, Artificial Sequence
  ENSG00000101639_46 (sequence is synthesized)
ctgtgagatcagaattcacccaaaggaagacattttcatctctgtattatttgcacctactcgattatcttgcatgttggctagactagaaatcaaacaacttggaaatcgatcacaacc

SEQ ID NO: 125956 - DNA, 120 bp, Artificial Sequence
  ENSG00000101639_47 (sequence is synthesized)
aggcattaagttcacaatacctttgtctggatatggaggaacaagcaatcttattttggaaggcgttaaaaaattatctgacagttacatggtaacagtgaatggcttagtacctggcaa

SEQ ID NO: 125957 - DNA, 120 bp, Artificial Sequence
  ENSG00000101639_48 (sequence is synthesized)
agaaagtaaaattgttttttctgtccgcaacactggctcccgagcagcttttgttaaagcagtaggttttaaggattctcagaaaaaagttttgctggatcctaaagtattgaggatttt

SEQ ID NO: 125958 - DNA, 120 bp, Artificial Sequence
  ENSG00000101639_49 (sequence is synthesized)
tccagataaatttgtactcaaggaaagaacacaagaaaatgttactttaatatataatccatcagacagaggaatcaataataaaactgcaacagaactatcaactgtatacttatttgg

SEQ ID NO: 125959 - DNA, 120 bp, Artificial Sequence
  ENSG00000101639_50 (sequence is synthesized)
tggagatgaaatttcaagacagcagtatcgcagggccctgttacataaaccagagatgataaaacagatacttccagaacatagtgtgcttcaaaacattaattttgttgaagcatttca

SEQ ID NO: 125960 - DNA, 120 bp, Artificial Sequence
  ENSG00000101639_51 (sequence is synthesized)
agatgagctattagtaactgaagtatatgatcttccccaacgacctaatgatgttcagctcttttatggaagcatgtgtaaaattatactttcagtaattggagaattcagagattgcat

SEQ ID NO: 125961 - DNA, 120 bp, Artificial Sequence
  ENSG00000101639_52 (sequence is synthesized)
ttctagcagagaattccttcagccttcttccaaagctagcttggaatctacaagcgacttgggagcttctgggaaacatggtggcaacgtctctttggatgttttaccagtcaaaggtcc

SEQ ID NO: 125962 - DNA, 120 bp, Artificial Sequence
  ENSG00000101639_53 (sequence is synthesized)
tcagggttctcctcttctctcacgggcggctcgcccgcctctggatcagctggcctccgaagagccgtggactgtcctacccgagcacttgattctggtagctccttctccttgtgacat

SEQ ID NO: 125963 - DNA, 120 bp, Artificial Sequence
  ENSG00000101639_54 (sequence is synthesized)
ggcaaaaactggacgtttccagattgtgaataactctgtgaggttactgagatttgagctgtgctggccagcgcattgcctcacagtcacgccgcagcatggatgtgtcgcgccagagag

SEQ ID NO: 125964 - DNA, 120 bp, Artificial Sequence
  ENSG00000101639_55 (sequence is synthesized)
taaactacaaattcttgtgagtcctaattcctccttatccacaaaacagtcaatgttcccgtggagtggtttgatctatatacactgtgacgatggacagaagaaaattgtgaaagttca

SEQ ID NO: 125965 - DNA, 120 bp, Artificial Sequence
  ENSG00000101639_56 (sequence is synthesized)
aattcgagaagatttaactcaagtggaacttttaactcgtttgacctccaaaccatttggaattctttccccagtatctgagccttcagttagtcatttggtcaaaccaatgacaaaacc

SEQ ID NO: 125966 - DNA, 120 bp, Artificial Sequence
  ENSG00000101639_57 (sequence is synthesized)
gccttccacaaaagttgaaataagaaacaagagtattacttttcctacaacagaacctggtgaaacttcagagagctgtctagaactcgagaatcatggcaccacagacgtgaaatggca

SEQ ID NO: 125967 - DNA, 120 bp, Artificial Sequence
  ENSG00000101639_58 (sequence is synthesized)
tctgtcatctttagcgccaccttatgtcaagggagttgatgaaagtggagatgtttttagagctacctatgcagcattcagatgttctcctatttctggtctgctggaaagccatgggat

SEQ ID NO: 125968 - DNA, 120 bp, Artificial Sequence
  ENSG00000101639_59 (sequence is synthesized)
ccaaaaagtctccatcacatttttgcccagaggtaggggggattatgcccagttttgggatgttgaatgtcaccctcttaaggagcctcacatgaaacacacgttgagattccaactctc

SEQ ID NO: 125969 - DNA, 120 bp, Artificial Sequence
  ENSG00000101639_60 (sequence is synthesized)
tggacaaagcatcgaagcagaaaatgagcctgaaaacgcatgcctttccacggattccctcattaaaatagatcatttagttaagccccgaagacaagctgtgtcagaggcttctgctcg

SEQ ID NO: 125970 - DNA, 120 bp, Artificial Sequence
  ENSG00000101639_61 (sequence is synthesized)
catacctgagcagcttgatgtgactgctcgtggagtttatgccccagaggatgtgtacaggttccggccgactagtgtgggggaatcacggacacttaaagtcaatctgcgaaataattc

SEQ ID NO: 125971 - DNA, 120 bp, Artificial Sequence
  ENSG00000101639_62 (sequence is synthesized)
ttttattacacactcactgaagtttttgagtcccagagagccattctatgtcaaacattccaagtactctttgagagcccagcattacatcaacatgcccgtgcagttcaaaccgaagtc

SEQ ID NO: 125972 - DNA, 120 bp, Artificial Sequence
  ENSG00000101639_63 (sequence is synthesized)
cgcaggcaaatttgaagctttgcttgtcattcaaacagatgaaggcaagagtattgctattcgactaattggtgaagctcttggaaaaaattaactagaatacatttttgtgtaaagtaa

SEQ ID NO: 125973 - DNA, 120 bp, Artificial Sequence
  ENSG00000101639_64 (sequence is synthesized)
cataagttgtattttgttaactttatctttctacactacaattatgcttttgtatatatattttgtatgatggatatctataattgtagattttgtttttacaagctaatactgaagact

SEQ ID NO: 125974 - DNA, 120 bp, Artificial Sequence
  ENSG00000101639_65 (sequence is synthesized)
gactcgactgaaatattatgtatctagcccatagtattgtacttaacttttacaggtgagaagagagttctgtgtttgcattgattatgatattctgaataaatatggaatatattttaa

SEQ ID NO: 125975 - DNA, 120 bp, Artificial Sequence
  ENSG00000101639_66 (sequence is synthesized)
atatatggtcagcagctgttttgaaatgtcccagttttacgactgttacttgtgaatcagtattggtggatgcttccctcgtgcctcttagtggccatcgtctgcctggtggatctttca

SEQ ID NO: 125976 - DNA, 120 bp, Artificial Sequence
  ENSG00000101639_67 (sequence is synthesized)
agagccattctatgtcaaacattccaagtactctttgagcatccaagaaatcataaatacatttaagctgaatgtggcttgaccgagctctttcctcaacacctgagccaggcactgtgc

SEQ ID NO: 125977 - DNA, 120 bp, Artificial Sequence
  ENSG00000101639_68 (sequence is synthesized)
agtgctaggttctcccttcacgcctttattaatgcacacagtcattgccatggtatctttctctcagaccccttttgttgtagtgcttgtagagtgtaaagtgaaacagttttgcatttt

SEQ ID NO: 125978 - DNA, 120 bp, Artificial Sequence
  ENSG00000101639_69 (sequence is synthesized)
ccatcatttattatttatattttattgttatttattggtaaattcctataaatttgcttttagtgctattatttaaatcatcaaaagttctgagtttcttgtttctacttgtcagttttg

SEQ ID NO: 125979 - DNA, 120 bp, Artificial Sequence
  ENSG00000101639_70 (sequence is synthesized)
ttaaaggtgattgaatataagtaaccatgacttgtaaaaaaaaaaaaagaaagcagttactcttggagcttatgccttcatttggcaagggaagtctttttaactagtttatctgatgat

SEQ ID NO: 125980 - DNA, 120 bp, Artificial Sequence
  ENSG00000101639_71 (sequence is synthesized)
tttcttacatgagcttttgaaatacctggaaatgcagttttaatatgaacttttaagacagatgtctcttacatgatcaattacagttgctataattctagactctaaatcttctctcct

SEQ ID NO: 125981 - DNA, 120 bp, Artificial Sequence
  ENSG00000101639_72 (sequence is synthesized)
aaggagaggattgagggtggaaggtgggctgtgaagactttttgggggcatcctggagtctgtgaatgaagcagtgttgtctatggaagtggggagtagaaaagaagatccccattgaca

SEQ ID NO: 125982 - DNA, 120 bp, Artificial Sequence
  ENSG00000101639_73 (sequence is synthesized)
gtgaggagggagggtggctggagttgtcactgcagtcgaggcggagtcagggctgtgggacctcagcggttagcctgactcttcttccccccagcccccacccactgctgtgttgtgtgt

SEQ ID NO: 125983 - DNA, 120 bp, Artificial Sequence
  ENSG00000101639_74 (sequence is synthesized)
gctagagagacttacagggctgtgaaagagtgacctttgtcagtgtcctttttaagacaagtgagtgtaagggtcaatgtgcttgcttggaggtggactggggagacagccttggtgcag

SEQ ID NO: 125984 - DNA, 120 bp, Artificial Sequence
  ENSG00000101639_75 (sequence is synthesized)
caagaacattcaactcaggaagcatttgactcgttgtacttcagagaccataaatgacaaggttttgacatttttgaagagataataaatgttttaatttggcagtttgagtgattggga

SEQ ID NO: 125985 - DNA, 120 bp, Artificial Sequence
  ENSG00000101639_76 (sequence is synthesized)
tggcgacttgctacatgatgttagaacagaccaaatacaaagcttgcctttgaacctggttttgtttcttaattattttggaaatagaaactgacatttggagaaatcacattatgaggg

SEQ ID NO: 125986 - DNA, 120 bp, Artificial Sequence
  ENSG00000101654_0 (sequence is synthesized)
agtgttggttcatgaagttttaccatcaattcaagtaatcataaatggcaaattctgcaaaagcagaagaatatgaaaagatgtctcttgaacaggcaaaagcgtcagtgaattctgaaa

SEQ ID NO: 125987 - DNA, 120 bp, Artificial Sequence
  ENSG00000101654_1 (sequence is synthesized)
cagagtcttcattcaatattaatgaaaacacaacagcttctgggactgggctttctgaaaagacttctgtctgtaggcaagtagacatagcaagaaagagaaaagagtttgaagatgatc

SEQ ID NO: 125988 - DNA, 120 bp, Artificial Sequence
  ENSG00000101654_2 (sequence is synthesized)
ttgtaaaggaaagttctagttgtgggaaagacactccatccaagaagagaaaacttgatcctgaaattgtcccagaggaaaaagattgtggtgatgctgaaggcaattcaaagaaaagaa

SEQ ID NO: 125989 - DNA, 120 bp, Artificial Sequence
  ENSG00000101654_3 (sequence is synthesized)
aaagagaaactgaggatgttccaaaagataaatcttctactggagatggcactcaaaataagagaaaaatagcacttgaggatgttcctgaaaagcagaaaaatctggaagaaggacaca

SEQ ID NO: 125990 - DNA, 120 bp, Artificial Sequence
  ENSG00000101654_4 (sequence is synthesized)
gctcaacagtggctgcccattacaatgaacttcaggaagttggtttggagaagcgtagtcaaagtcgtattttttacctaagaaactttaataattggatgaaaagtgttctcattggag

SEQ ID NO: 125991 - DNA, 120 bp, Artificial Sequence
  ENSG00000101654_5 (sequence is synthesized)
aatttttggaaaaggtacgacagaagaaaaaacgtgatatcactgttttggacctgggatgtggtaaaggtggagatttgctgaaatggaaaaaaggaagaattaacaagctagtttgta

SEQ ID NO: 125992 - DNA, 120 bp, Artificial Sequence
  ENSG00000101654_6 (sequence is synthesized)
ctgatattgccgatgtttctgtcaaacagtgtcagcagcggtatgaggacatgaaaaatcgtcgtgatagtgaatatattttcagtgcagaatttataactgctgacagctcaaaggaac

SEQ ID NO: 125993 - DNA, 120 bp, Artificial Sequence
  ENSG00000101654_7 (sequence is synthesized)
ttctgattgacaaatttcgtgacccacaaatgtgttttgacatctgcagttgtcagtttgtctgtcattactcatttgagtcttatgagcaggctgacatgatgctgagaaatgcgtgtg

SEQ ID NO: 125994 - DNA, 120 bp, Artificial Sequence
  ENSG00000101654_8 (sequence is synthesized)
agagacttagccctgggggctattttattggtactactcccaatagctttgaattgataagacgccttgaagcttcagaaacagaatcatttggaaatgaaatatatactgtgaaatttc

SEQ ID NO: 125995 - DNA, 120 bp, Artificial Sequence
  ENSG00000101654_9 (sequence is synthesized)
agaagaaaggagattatcctttatttggctgcaaatatgacttcaacttggaaggtgttgtggatgttcctgaattcttggtctattttccattgctaaatgaaatggcaaagaagtaca

SEQ ID NO: 125996 - DNA, 120 bp, Artificial Sequence
  ENSG00000101654_10 (sequence is synthesized)
atatgaaactagtctacaaaaaaacatttctggaattctacgaagaaaagattaagaacaatgaaaataaaatgctcttaaaacgaatgcaggccttggagccatatcctgcaaatgaga

SEQ ID NO: 125997 - DNA, 120 bp, Artificial Sequence
  ENSG00000101654_11 (sequence is synthesized)
gttctaaacttgtctctgagaaggtggatgactatgaacatgcagcaaagtacatgaagaacagtcaagtaaggttacctttgggaaccttaagtaaatcagaatgggaagctacaagta

SEQ ID NO: 125998 - DNA, 120 bp, Artificial Sequence
  ENSG00000101654_12 (sequence is synthesized)
tttacttggtgtttgcctttgagaaacagcagtgagcacataggcagtagtcccagaggggccgtgttctgtcctgcacaaatttgaacaactcatctcgatatatttgatatttctctg

SEQ ID NO: 125999 - DNA, 120 bp, Artificial Sequence
  ENSG00000101654_13 (sequence is synthesized)
tctgttgattttaattctaaatgtgcaggatgctgccagaaactccaatgtagaaattcaacatttgctgtctgtgacagatgaacttttgcatgtgtatataagaatgagttgggacct

SEQ ID NO: 126000 - DNA, 120 bp, Artificial Sequence
  ENSG00000101654_14 (sequence is synthesized)
ctgtctttaaaaatctatttttaggtaatgttctaagaattccatttgcctctatgatcttagctcataaaaatataatatgacttgataaagcaactaaactctttccacagtgttcag

SEQ ID NO: 126001 - DNA, 120 bp, Artificial Sequence
  ENSG00000101654_15 (sequence is synthesized)
atttgtcctgtgtgtgtttacagtattcaatttattgcagttatagaattggtcagagagcattttcatagtgtgctcatttctatggttttgttatatagcatttttcaacatttaatg

SEQ ID NO: 126002 - DNA, 120 bp, Artificial Sequence
  ENSG00000101654_16 (sequence is synthesized)
gtctgtacagttgaatgtaagtgttcaatatgtattgctgaagttataagtttaaaactcaatttcagatgctcataaaagttacttagctaaaattttagcaatttattgcattttgaa

SEQ ID NO: 126003 - DNA, 120 bp, Artificial Sequence
  ENSG00000101654_17 (sequence is synthesized)
ataatcattaacatgctgcaattcaggagctggttagaacattttaagtggcagcatagaattttggaattttggggctttcttttcagaaattgctaccatagtaattaatgtttccag

SEQ ID NO: 126004 - DNA, 120 bp, Artificial Sequence
  ENSG00000101654_18 (sequence is synthesized)
ttatcaagattgtgattagacacatttacctttcttcattgaacaaatggtgccatagttatttttctcaaaatttagtgaaaatccctcccatgtagacatgttgcacattttttccaa

SEQ ID NO: 126005 - DNA, 120 bp, Artificial Sequence
  ENSG00000101654_19 (sequence is synthesized)
atttatacatggaactgcagtaggaatattctcaccatctgatgccatgtacccacttcagaaataagcaatacttgttcctctgttacaacctcagcactttgcaccgtaggagccatt

SEQ ID NO: 126006 - DNA, 120 bp, Artificial Sequence
  ENSG00000101654_20 (sequence is synthesized)
gttaaagttgtcacttgtgtaactgactgcttttccaaaactggtacttatgtgaactgttgtccttgctttacaccaccatttggaaaacttaccagtttttagatgtagatgtagtga

SEQ ID NO: 126007 - DNA, 120 bp, Artificial Sequence
  ENSG00000101654_21 (sequence is synthesized)
aaaacttcaagaatgaagcagagcaattgagtattcttttttaaattattaagccatgatttacaaaaacattactttctgtaattcacaatacttgttttaaaaacatagtgtcttcat

SEQ ID NO: 126008 - DNA, 120 bp, Artificial Sequence
  ENSG00000101654_22 (sequence is synthesized)
tagtgtgcatctattaactgttcatggtgttagagttgcaaactttttagcaagaaaatatggatttcctcatttcagttccttctgcagcctgtgaatctccacaaagtgttaccagtt

SEQ ID NO: 126009 - DNA, 120 bp, Artificial Sequence
  ENSG00000101654_23 (sequence is synthesized)
tacaaaaataagtctttttgccttaagtcattttggaaataagtaatactgcatctgactctggtggctgtattagctaggaaaggtttgtaaatggtgtcagtgaggtggggaaaggaa

SEQ ID NO: 126010 - DNA, 120 bp, Artificial Sequence
  ENSG00000101654_24 (sequence is synthesized)
gtcttcctgtcacatatgcaggttcgttttcattctagggcagtgccaggaagtatattgatagctttgtaggtacaggaaaaacatcatcattatttcctctgttcacatttactggtc

SEQ ID NO: 126011 - DNA, 120 bp, Artificial Sequence
  ENSG00000101654_25 (sequence is synthesized)
acgccatgggtaacttgggggagagaagaatcctccaaacgatggagtagccagtggtaatacaaagcagggagaacagaaaggtagagttactaaggccttcagtgaacagaaaggagc

SEQ ID NO: 126012 - DNA, 120 bp, Artificial Sequence
  ENSG00000101654_26 (sequence is synthesized)
agagagcaagattagatctgagaagatgctctggggactgagcccactgttgttggtgtcagggaggcttactggagccacacctgcaggcgctgtgttcaggcaccaccttcctccttg

SEQ ID NO: 126013 - DNA, 120 bp, Artificial Sequence
  ENSG00000101654_27 (sequence is synthesized)
agctttgcctgtctcttgccttatcagttcttcctccaccaccctacacccccctccccccggccccaagcccctgtgtctccttgttacaattaagtttctggatattgacttaagaac

SEQ ID NO: 126014 - DNA, 120 bp, Artificial Sequence
  ENSG00000101654_28 (sequence is synthesized)
tgttaggaagaggactagaaaaggcttcccctgcctatcctctccgatcaccaaggtggaagggagctagtaggactcttccttgacacaccttgtcgtctaaatgttcggtattctatt

SEQ ID NO: 126015 - DNA, 120 bp, Artificial Sequence
  ENSG00000101654_29 (sequence is synthesized)
caggacttacggtaactattatgagggaggcatggctttccaccgtcgggccaggaagagcacctgttgctgcaagctcagtgaagtggggcactcccagacctgccatgcagtttatcc

SEQ ID NO: 126016 - DNA, 120 bp, Artificial Sequence
  ENSG00000101654_30 (sequence is synthesized)
tctgagaatggaattggaaatgaagacctaaccagctattggtgggaatgacggaactggggattgcgatgattgatctgggaacatggctggattgtgatttaaccaagaatgctgatg

SEQ ID NO: 126017 - DNA, 120 bp, Artificial Sequence
  ENSG00000101654_31 (sequence is synthesized)
ttgaattctttgggcctagaatatacttgagaaagcactagtggcttgtgttcagggagaggagctggcagtttttaaccacttctgtgggagccgtgttctaacctgtggaaagtattg

SEQ ID NO: 126018 - DNA, 120 bp, Artificial Sequence
  ENSG00000101654_32 (sequence is synthesized)
caattctgtgagagtgactctgcagagtcactgcaccatcaggcttggccctgctgtgccttcagtacccagccaggttctctgggtccagggtgactctccaaagaaattggccttcag

SEQ ID NO: 126019 - DNA, 120 bp, Artificial Sequence
  ENSG00000101654_33 (sequence is synthesized)
ctggagaaaacattgggtggagactctcacttatgttaatgcaatcttgaaatgactgaaaggtagattgccagcacagtgagtttcccagcctgctcccccatccacacttggaaattg

SEQ ID NO: 126020 - DNA, 120 bp, Artificial Sequence
  ENSG00000101654_34 (sequence is synthesized)
agggagcatgaccgctctctgacttcacatgttaatagaggatcagagcagagttgggagtatattggtcaggatcatagaaaagaagacaaagcttgctcagccatgagatggccaggt

SEQ ID NO: 126021 - DNA, 120 bp, Artificial Sequence
  ENSG00000101654_35 (sequence is synthesized)
atccagttttgttaactctctttgggaatttctttttcagcctgttttttagcttagtgccattatgtcattttgatttgtattcaagtactcttcaagtatctttgtaatgaaggtttg

SEQ ID NO: 126022 - DNA, 120 bp, Artificial Sequence
  ENSG00000101654_36 (sequence is synthesized)
gctacttgtataggtctgcctgcagggtgaaaatgccagtgtgaatattctagctaccaaacattgttttttgttgaaaaactgactttctgttgtctacctcaggccttgtgcatttgg

SEQ ID NO: 126023 - DNA, 120 bp, Artificial Sequence
  ENSG00000101654_37 (sequence is synthesized)
gttatctcaagccagtcaccacagagggtctctagggtctgcaaaatagaggccaaatccagggaccaggccctaataatagaagttgtaccaaaatgcctgtggtacttgatggcctgt

SEQ ID NO: 126024 - DNA, 120 bp, Artificial Sequence
  ENSG00000101654_38 (sequence is synthesized)
tggtcaaataggaagtacaagtgtgtgatgttagaacctccctagttgctgctatatcaaacactgcacacttgacaagtgttttcattccccgccctctgacagaacaacattcctaat

SEQ ID NO: 126025 - DNA, 120 bp, Artificial Sequence
  ENSG00000101654_39 (sequence is synthesized)
tctttgaaggcaaccagtgcaaaggctactacacttgtgtaatgatatttagcagatgcatacaggactggatcccagggcactgtcagttcttccctccctctcgtgctgctcagtttg

SEQ ID NO: 126026 - DNA, 120 bp, Artificial Sequence
  ENSG00000101654_40 (sequence is synthesized)
tcctctgctcccatgtaggcctaaagtcaccccactccttagtgcctgcacctcaccacgatattgaggaagcacaggacatccaagggtactctccagtttggctgtggagacttgagc

SEQ ID NO: 126027 - DNA, 120 bp, Artificial Sequence
  ENSG00000101654_41 (sequence is synthesized)
aagccctaaagtcccctgctccctggacttctcctgggttgtgcttttttgggggcaacataccttggacaaagctgagctgacagctaatgtttattagcctcctacctaagtcagtca

SEQ ID NO: 126028 - DNA, 120 bp, Artificial Sequence
  ENSG00000101654_42 (sequence is synthesized)
ctttgctaaattcttcacctgtggtaactcattttgattgttataacatctcagcaccgttattcccattttaatgatgaggaaactgagtcatagaggatacagacttgcccaaaggag

SEQ ID NO: 126029 - DNA, 120 bp, Artificial Sequence
  ENSG00000101654_43 (sequence is synthesized)
agccaggattttcacaccccctcctcaagctgggcctgccctccaagtgcttgttatatacctccacgggtgtcagcccagatgactcctcacccatccaccacctgcagcttgagatgt

SEQ ID NO: 126030 - DNA, 120 bp, Artificial Sequence
  ENSG00000101654_44 (sequence is synthesized)
taactattagagctccattcttttggttcaaaacgttgatacttacttagatgttccctgagaggagtgtttatttctgagtaaggggctttgttgaaagagggggttagagagagcaag

SEQ ID NO: 126031 - DNA, 120 bp, Artificial Sequence
  ENSG00000101654_45 (sequence is synthesized)
acagcacttgagtgcactggcaggaagcagagataagacttgaatttcagtttggtagaccaccttctttagcagcccaacctgtagcaaatctagtttagcctgcatggcagggagagg

SEQ ID NO: 126032 - DNA, 120 bp, Artificial Sequence
  ENSG00000101654_46 (sequence is synthesized)
gattctcttcccaccctcaccatttgcaagtggcaggagctgagaatgccagtacgagagtgtagccaaagtgagaggctgagagcaaaggagacatttttttcagttttgagtcgagta

SEQ ID NO: 126033 - DNA, 120 bp, Artificial Sequence
  ENSG00000101654_47 (sequence is synthesized)
tccagacagaggcaaatcattttgtttaactttttattaaagtgtaactatagaaacacatcaatgatttttcacaagtggagcacgtgcatacaatcggcaccccagaagccccccgtc

SEQ ID NO: 126034 - DNA, 120 bp, Artificial Sequence
  ENSG00000101654_48 (sequence is synthesized)
agattcccttccagttaactacctctccaagggaaaccactatcctgagttctaagcgcatagattagttctgtctggtttggggagatatataaatggaattatgcattcttcgtatct

SEQ ID NO: 126035 - DNA, 120 bp, Artificial Sequence
  ENSG00000101654_49 (sequence is synthesized)
ggtttcttttcaccaatattatgtttgtgagatttttgttgcatgtatttgtacatggattttcattctcatggttgtataatatttcattgtgtgaataaaccacatactgtttatctg

SEQ ID NO: 126036 - DNA, 120 bp, Artificial Sequence
  ENSG00000101654_50 (sequence is synthesized)
agtgacgtaagcagacacgcgtggcgcgggccgccgtttccgcaaacagaatcgcgtttggctgtgctggatgtgtgaacctattgggtactgtacaacttcaagcctcgaaatcagata

SEQ ID NO: 126037 - DNA, 120 bp, Artificial Sequence
  ENSG00000101654_51 (sequence is synthesized)
gatgcccttagtgtccataggccaaaagaaatataacagttccatttattaagtagtttaccccaaagaatttaaaagtatttatggtctaacaactttatgtctgtttaaaaaattaac

SEQ ID NO: 126038 - DNA, 120 bp, Artificial Sequence
  ENSG00000101654_52 (sequence is synthesized)
acacataaattggggggaaaggtaatgtttctgttttattcttgattaatcacaatcccttactaacaggatgtgtgaacctattgggtactgtacaacttcaagcctcgaaatcagata

SEQ ID NO: 126039 - DNA, 120 bp, Artificial Sequence
  ENSG00000101654_53 (sequence is synthesized)
gtgtttgtccctcggccgccgtggaggggtggaactggcactcccacccctgacatgggctcacttcgcattagccctgtgcttcactacccaacgcgatgtgtgaacctattgggtact

SEQ ID NO: 126040 - DNA, 120 bp, Artificial Sequence
  ENSG00000101654_54 (sequence is synthesized)
aagcaatatttattttactctttattttaaatgagggctaaagaaaaagtataatcttgtttttttgtttttgtgtttttaaaaaaaaaaaacaaaacaagactagcttcacatctaggg

SEQ ID NO: 126041 - DNA, 120 bp, Artificial Sequence
  ENSG00000101654_55 (sequence is synthesized)
gattattgccataggtctcataatagcctaacttagttttctctcattcctggaattttttaatcctgtgggtgaaaaagggaaccagttgccttcagcttgtggcacaaaatgcctgac

SEQ ID NO: 126042 - DNA, 120 bp, Artificial Sequence
  ENSG00000101654_56 (sequence is synthesized)
tgcctgacactgcaaatagcaaaagttttttttttttttttagtgactactggtaactttgatgataaacaatgagtcttcataaatcaaagatccggccgggcgcggtggctcacgcct

SEQ ID NO: 126043 - DNA, 120 bp, Artificial Sequence
  ENSG00000101665_0 (sequence is synthesized)
ggaggccttgcgggaggcggtgagccccgggcacactcgcttgctgctcggcgcacggaagatcctgtccccgagccgcgccagccgagccagccgggcgccgtgctcggtccgctcgcc

SEQ ID NO: 126044 - DNA, 120 bp, Artificial Sequence
  ENSG00000101665_1 (sequence is synthesized)
gagagctgcccgagacagagccagtccgtcggcgccgagccgccgagcgcccggcccctgagcccctgagtgcggcgcggcgagcccctggcggcggcagaaggaccggagcgccaggag

SEQ ID NO: 126045 - DNA, 120 bp, Artificial Sequence
  ENSG00000101665_2 (sequence is synthesized)
gccaggagagggcggaccggggacaaggaggctcccgggcgcgacgaggagagtctcggaggaggaggcgccgagaggacaccggggcctcctgccgccgcagctgggtcgaggcgagca

SEQ ID NO: 126046 - DNA, 120 bp, Artificial Sequence
  ENSG00000101665_3 (sequence is synthesized)
gcccatgcggggagcctcggcggccagccgcggccaggggaagggacatcggcggcccctgcactagcaagcagcttgtgcccggggggggcgagaacgcgcgacccgtctggggccctc

SEQ ID NO: 126047 - DNA, 120 bp, Artificial Sequence
  ENSG00000101665_4 (sequence is synthesized)
cgcgctgtcagccccgccgggctcagccgccgccgcagcatcttctgcccctgcgcccgcgccagcctcgaggaagtccccgccgaggacctgggcccccaggagcgcagggggaaagac

SEQ ID NO: 126048 - DNA, 120 bp, Artificial Sequence
  ENSG00000101665_5 (sequence is synthesized)
ccccaggagcgcagggggaaagaccagagactcccctaaaccacccagatgcgcaggattgaagcggtctagccaaagctttctgtggattaaaaaaatacacgattttttttttttttt

SEQ ID NO: 126049 - DNA, 120 bp, Artificial Sequence
  ENSG00000101665_6 (sequence is synthesized)
ttggcagaagaaaaggagaggaagaccagcggggctttgcaaggaaacggggggatgtaactcgtggatacatttttccacccatcaaacatcttgttatactttgtaaacattttcttt

SEQ ID NO: 126050 - DNA, 120 bp, Artificial Sequence
  ENSG00000101665_7 (sequence is synthesized)
ttttaaaccccagttccagccggacgcccccagacctctgaggttcgaggaggtggtggttttcatttggggctttgcatatttggttgttaggttttgcgagagccttcttattttgcc

SEQ ID NO: 126051 - DNA, 120 bp, Artificial Sequence
  ENSG00000101665_8 (sequence is synthesized)
agacgtctcatgcggggtgaagtccactcggccccctcccctgagtcttcgtgtgcgcggaattcgaggagatccggttactaaggatatagaggaaaaaaataaatcgcttgctttttt

SEQ ID NO: 126052 - DNA, 120 bp, Artificial Sequence
  ENSG00000101665_9 (sequence is synthesized)
ttttttaattgcctgcttctccccacccccaaattaagttgcttagcaagggggaaagaggctttttccttcttccaacagcccagccgaacgcctttcgttttttgcccccgcggacct

SEQ ID NO: 126053 - DNA, 120 bp, Artificial Sequence
  ENSG00000101665_10 (sequence is synthesized)
tccatgtaggaagccgaggctggcgagcccgacattcgggagccactgcgggggggcctctttttggggaggcgccgacgggggcaggctcggccgtccccagggaagcggcggccgggt

SEQ ID NO: 126054 - DNA, 120 bp, Artificial Sequence
  ENSG00000101665_11 (sequence is synthesized)
cctccgggagactggcgcatgccacggagcgcccctcgggccgccgccgctcctgcccgggcccctgctgctgctgctgtcgcctgcgcctgctgccccaactcggcgcccgacttcttc

SEQ ID NO: 126055 - DNA, 120 bp, Artificial Sequence
  ENSG00000101665_12 (sequence is synthesized)
atggtgtgcggaggtcatgttcgctccttagcaggcaaacgacttttctcctcgcctcctcgccccgcatgttcaggaccaaacgatctgcgctcgtccggcgtctctggaggagccgtg

SEQ ID NO: 126056 - DNA, 120 bp, Artificial Sequence
  ENSG00000101665_13 (sequence is synthesized)
ggcgaggacgaggaggagggcgcagggggaggtggaggaggaggcgagctgcggggagaaggggcgacggacagccgagcgcatggggccggtggcggcggcccgggcagggctggatgc

SEQ ID NO: 126057 - DNA, 120 bp, Artificial Sequence
  ENSG00000101665_14 (sequence is synthesized)
ctggatgctgcctgggcaaggcggtgcgaggtgccaaaggtcaccaccatccccacccgccagccgcgggcgccggcgcggccgggggcgccgaggcggatctgaaggcgctcacgcact

SEQ ID NO: 126058 - DNA, 120 bp, Artificial Sequence
  ENSG00000101665_15 (sequence is synthesized)
cggtgctcaagaaactgaaggagcggcagctggagctgctgctccaggccgtggagtcccgcggcgggacgcgcaccgcgtgcctcctgctgcccggccgcctggactgcaggctgggcc

SEQ ID NO: 126059 - DNA, 120 bp, Artificial Sequence
  ENSG00000101665_16 (sequence is synthesized)
cgggggcgcccgccggcgcgcagcctgcgcagccgccctcgtcctactcgctccccctcctgctgtgcaaagtgttcaggtggccggatctcaggcattcctcggaagtcaagaggctgt

SEQ ID NO: 126060 - DNA, 120 bp, Artificial Sequence
  ENSG00000101665_17 (sequence is synthesized)
acccgatggattttctcaaaccaactgcagactgtccagatgctgtgccttcctccgctgaaacagggggaacgaattatctggcccctggggggctttcagattcccaacttcttctgg

SEQ ID NO: 126061 - DNA, 120 bp, Artificial Sequence
  ENSG00000101665_18 (sequence is synthesized)
agcctggggatcggtcacactggtgcgtggtggcatactgggaggagaagacgagagtggggaggctctactgtgtccaggagccctctctggatatcttctatgatctacctcagggga

SEQ ID NO: 126062 - DNA, 120 bp, Artificial Sequence
  ENSG00000101665_19 (sequence is synthesized)
atggcttttgcctcggacagctcaattcggacaacaagagtcagctggtgcagaaggtgcggagcaaaatcggctgcggcatccagctgacgcgggaggtggatggtgtgtgggtgtaca

SEQ ID NO: 126063 - DNA, 120 bp, Artificial Sequence
  ENSG00000101665_20 (sequence is synthesized)
accgcagcagttaccccatcttcatcaagtccgccacactggacaacccggactccaggacgctgttggtacacaaggtgttccccggtttctccatcaaggctttcgactacgagaagg

SEQ ID NO: 126064 - DNA, 120 bp, Artificial Sequence
  ENSG00000101665_21 (sequence is synthesized)
cgtacagcctgcagcggcccaatgaccacgagtttatgcagcagccgtggacgggctttaccgtgcagatcagctttgtgaagggctggggccagtgctacacccgccagttcatcagca

SEQ ID NO: 126065 - DNA, 120 bp, Artificial Sequence
  ENSG00000101665_22 (sequence is synthesized)
gctgcccgtgctggctagaggtcatcttcaacagccggtagccgcgtgcggaggggacagagcgtgagctgagcaggccacacttcaaactactttgctgctaatattttcctcctgagt

SEQ ID NO: 126066 - DNA, 120 bp, Artificial Sequence
  ENSG00000101665_23 (sequence is synthesized)
gcttgcttttcatgcaaactctttggtcgttttttttttgtttgttggttggttttcttcttctcgtcctcgtttgtgttctgttttgtttcgctctttgagaaatagcttatgaaaaga

SEQ ID NO: 126067 - DNA, 120 bp, Artificial Sequence
  ENSG00000101665_24 (sequence is synthesized)
attgttgggggtttttttggaagaaggggcaggtatgatcggcaggacaccctgataggaagaggggaagcagaaatccaagcaccaccaaacacagtgtatgaaggggggcggtcatca

SEQ ID NO: 126068 - DNA, 120 bp, Artificial Sequence
  ENSG00000101665_25 (sequence is synthesized)
tttcacttgtcaggagtgtgtgtgagtgtgagtgtgcggctgtgtgtgcacgcgtgtgcaggagcggcagatggggagacaacgtgctctttgttttgtgtctcttatggatgtccccag

SEQ ID NO: 126069 - DNA, 120 bp, Artificial Sequence
  ENSG00000101665_26 (sequence is synthesized)
cagagaggtttgcagtcccaagcggtgtctctcctgccccttggacacgctcagtggggcagaggcagtacctgggcaagctggcggctggggtcccagcagctgccaggagcacggctc

SEQ ID NO: 126070 - DNA, 120 bp, Artificial Sequence
  ENSG00000101665_27 (sequence is synthesized)
tgtccccagcctgggaaagcccctgcccctcctctccctcatcaaggacacgggcctgtccacaggcttctgagcagcgagcctgctagtggccgaaccagaaccaattattttcatcct

SEQ ID NO: 126071 - DNA, 120 bp, Artificial Sequence
  ENSG00000101665_28 (sequence is synthesized)
tgtcttattcccttcctgccagcccctgccattgtagcgtctttcttttttggccatctgctcctggatctccctgagatgggcttcccaagggctgccggggcagccccctcacagtat

SEQ ID NO: 126072 - DNA, 120 bp, Artificial Sequence
  ENSG00000101665_29 (sequence is synthesized)
tgctcacccagtgccctctcccctcagcctctcccctgcctgccctggtgacatcaggtttttcccggacttagaaaaccagctcagcactgcctgctcccatcctgtgtgttaagctct

SEQ ID NO: 126073 - DNA, 120 bp, Artificial Sequence
  ENSG00000101665_30 (sequence is synthesized)
gctattaggccagcaagcggggatgtccctgggagggacatgcttagcagtccccttccctccaagaaggatttggtccgtcataacccaaggtaccatcctaggctgacacctaactct

SEQ ID NO: 126074 - DNA, 120 bp, Artificial Sequence
  ENSG00000101665_31 (sequence is synthesized)
tctttcatttcttctacaactcatacactcgtatgatacttcgacactgttcttagctcaatgagcatgtttagactttaacataagctatttttctaactacaaaggtttaaatgaaca

SEQ ID NO: 126075 - DNA, 120 bp, Artificial Sequence
  ENSG00000101665_32 (sequence is synthesized)
agagaagcattctcattggaaatttagcattgtagtgctttgagagagaaaggactcctgaaaaaaaacctgagatttattaaagaaaaaaatgtattttatgttatatataaatatatt

SEQ ID NO: 126076 - DNA, 120 bp, Artificial Sequence
  ENSG00000101665_33 (sequence is synthesized)
attacttgtaaatataaagacgttttataagcatcattatttatgtattgtgcaatgtgtataaacaagaaaaataaagaaaagatgcactttgctttaatataaatgcaaataacaaat

SEQ ID NO: 126077 - DNA, 120 bp, Artificial Sequence
  ENSG00000101665_34 (sequence is synthesized)
gccaaattaaaaaagataaacacaagattggtgtttttttctatgggtgttatcacctagctgaatgtttttctaaaggagtttatgttccattaaacgatttttaaaatgtacacttga

SEQ ID NO: 126078 - DNA, 120 bp, Artificial Sequence
  ENSG00000101665_35 (sequence is synthesized)
agtctcattgagcctgactcgagtaatgattaactggctgcccggagcccagacgggtgacaaggtgctgtggtctgtcttacgatgggcagtgaagcctgagcagaccattaataatca

SEQ ID NO: 126079 - DNA, 120 bp, Artificial Sequence
  ENSG00000101665_36 (sequence is synthesized)
gcatcaaggccgcgagtcagccttttggaatgtgtggtttgtctttcatgctgtttagagcgtgcttaaagatggatcttggtgtttttatttgtgtatttatttctttctctccccttt

SEQ ID NO: 126080 - DNA, 120 bp, Artificial Sequence
  ENSG00000101665_37 (sequence is synthesized)
agtaaatacggagaatcacgtcgaacaccagtggcccagatactgtcgtggccgcgcacctttggagttttggggcaaagagagttggatggaaggccgaactggagtctcccccccctc

SEQ ID NO: 126081 - DNA, 120 bp, Artificial Sequence
  ENSG00000101665_38 (sequence is synthesized)
atatgccgcggcggctgagtgtgacctagcgcagaacagggcttccctcttgtgtcctccgtggggagtccaggagagggacttggtccttctggctgactccgtgcttggaaggtgtgc

SEQ ID NO: 126082 - DNA, 120 bp, Artificial Sequence
  ENSG00000101670_0 (sequence is synthesized)
agcagcgagtccttgcctcccggcggctcaggacgagggcagatctcgttctggggcaagccgttgacactcgctccctgccaccgcccgggctccgtgccgccaagttttcattttcca

SEQ ID NO: 126083 - DNA, 120 bp, Artificial Sequence
  ENSG00000101670_1 (sequence is synthesized)
ccttctctgcctccagtcccccagcccctggccgagagaagggtcttaccggccgggattgctggaaacaccaagaggtggtttttgttttttaaaacttctgtttcttgggagggggtg

SEQ ID NO: 126084 - DNA, 120 bp, Artificial Sequence
  ENSG00000101670_2 (sequence is synthesized)
tggcggggcaggatgagcaactccgttcctctgctctgtttctggagcctctgctattgctttgctgcggggagccccgtaccttttggtccagagggacggctggaagataagctccac

SEQ ID NO: 126085 - DNA, 120 bp, Artificial Sequence
  ENSG00000101670_3 (sequence is synthesized)
aaacccaaagctacacagactgaggtcaaaccatctgtgaggtttaacctccgcacctccaaggacccagagcatgaaggatgctacctctccgtcggccacagccagcccttagaagac

SEQ ID NO: 126086 - DNA, 120 bp, Artificial Sequence
  ENSG00000101670_4 (sequence is synthesized)
tgcagtttcaacatgacagctaaaacctttttcatcattcacggatggacgatgagcggtatctttgaaaactggctgcacaaactcgtgtcagccctgcacacaagagagaaagacgcc

SEQ ID NO: 126087 - DNA, 120 bp, Artificial Sequence
  ENSG00000101670_5 (sequence is synthesized)
aatgtagttgtggttgactggctccccctggcccaccagctttacacggatgcggtcaataataccagggtggtgggacacagcattgccaggatgctcgactggctgcaggagaaggac

SEQ ID NO: 126088 - DNA, 120 bp, Artificial Sequence
  ENSG00000101670_6 (sequence is synthesized)
gatttttctctcgggaatgtccacttgatcggctacagcctcggagcgcacgtggccgggtatgcaggcaacttcgtgaaaggaacggtgggccgaatcacaggtttggatcctgccggg

SEQ ID NO: 126089 - DNA, 120 bp, Artificial Sequence
  ENSG00000101670_7 (sequence is synthesized)
cccatgtttgaaggggccgacatccacaagaggctctctccggacgatgcagattttgtggatgtcctccacacctacacgcgttccttcggcttgagcattggtattcagatgcctgtg

SEQ ID NO: 126090 - DNA, 120 bp, Artificial Sequence
  ENSG00000101670_8 (sequence is synthesized)
ggccacattgacatctaccccaatgggggtgacttccagccaggctgtggactcaacgatgtcttgggatcaattgcatatggaacaatcacagaggtggtaaaatgtgagcatgagcga

SEQ ID NO: 126091 - DNA, 120 bp, Artificial Sequence
  ENSG00000101670_9 (sequence is synthesized)
gccgtccacctctttgttgactctctggtgaatcaggacaagccgagttttgccttccagtgcactgactccaatcgcttcaaaaaggggatctgtctgagctgccgcaagaaccgttgt

SEQ ID NO: 126092 - DNA, 120 bp, Artificial Sequence
  ENSG00000101670_10 (sequence is synthesized)
aatagcattggctacaatgccaagaaaatgaggaacaagaggaacagcaaaatgtacctaaaaacccgggcaggcatgcctttcagagtttaccattatcagatgaaaatccatgtcttc

SEQ ID NO: 126093 - DNA, 120 bp, Artificial Sequence
  ENSG00000101670_11 (sequence is synthesized)
agttacaagaacatgggagaaattgagcccaccttttacgtcaccctttatggcactaatgcagattcccagactctgccactggaaatagtggagcggatcgagcagaatgccaccaac

SEQ ID NO: 126094 - DNA, 120 bp, Artificial Sequence
  ENSG00000101670_12 (sequence is synthesized)
accttcctggtctacaccgaggaggacttgggagacctcttgaagatccagctcacctgggagggggcctctcagtcttggtacaacctgtggaaggagtttcgcagctacctgtctcaa

SEQ ID NO: 126095 - DNA, 120 bp, Artificial Sequence
  ENSG00000101670_13 (sequence is synthesized)
ccccgcaaccccggacgggagctgaatatcaggcgcatccgggtgaagtctggggaaacccagcggaaactgacattttgtacagaagaccctgagaacaccagcatatccccaggccgg

SEQ ID NO: 126096 - DNA, 120 bp, Artificial Sequence
  ENSG00000101670_14 (sequence is synthesized)
gagctctggtttcgcaagtgtcgggatggctggaggatgaaaaacgaaaccagtcccactgtggagcttccctgagggtgcccgggcaagtcttgccagcaaggcagcaagacttcctgc

SEQ ID NO: 126097 - DNA, 120 bp, Artificial Sequence
  ENSG00000101670_15 (sequence is synthesized)
tatccaagcccatggaggaaagttactgctgaggacccacccaatggaaggattcttctcagccttgaccctggagcactgggaacaactggtctcctgtgatggctgggactcctcgcg

SEQ ID NO: 126098 - DNA, 120 bp, Artificial Sequence
  ENSG00000101670_16 (sequence is synthesized)
ggaggggactgcgctgctatagctcttgctgcctctcttgaatagctctaactccaaacctctgtccacacctccagagcaccaagtccagatttgtgtgtaagcagctgggtgcctggg

SEQ ID NO: 126099 - DNA, 120 bp, Artificial Sequence
  ENSG00000101670_17 (sequence is synthesized)
gcctctcgtgcacactggattggtttctcagttgctgggcgagcctgtactctgcctgacgaggaacgctggctccgaagaggccctgtgtagaaggctgtcagctgctcagcctgcttt

SEQ ID NO: 126100 - DNA, 120 bp, Artificial Sequence
  ENSG00000101670_18 (sequence is synthesized)
gagcctcagtgagaagtccttccgacaggagctgactcatgtcaggatggcaggcctggtatcttgctcgggccctagctgttggggttctcatgggttgcactgaccatactgcttacg

SEQ ID NO: 126101 - DNA, 120 bp, Artificial Sequence
  ENSG00000101670_19 (sequence is synthesized)
tcttagccattccgtcctgctccccagctcactctctgaagcacacatcattggctttcctatttttctgttcattttttaattgagcaaatgtctattgaacacttaaaattaattaga

SEQ ID NO: 126102 - DNA, 120 bp, Artificial Sequence
  ENSG00000101670_20 (sequence is synthesized)
atgtggtaatggacatattactgagcctctccatttggaacccagtggagttgggatttctagaccctctttctgtttggatggtgtatgtgtatatgcatggggaaaggcacctggggc

SEQ ID NO: 126103 - DNA, 120 bp, Artificial Sequence
  ENSG00000101670_21 (sequence is synthesized)
ctgggggaggctataggatataagcattagggaccctgaggctttaagtggtttctatttcttcttagttattatgtgccaccttcttagttattatgtgccacctcccctatgagtgac

SEQ ID NO: 126104 - DNA, 120 bp, Artificial Sequence
  ENSG00000101670_22 (sequence is synthesized)
gtgtttgatcactagcagaatagcaagcagagtatcattcatgctggggccagaatgatggccggttgccagatataactgctttggagcaaatctcttctgtttagagagatagaagtt

SEQ ID NO: 126105 - DNA, 120 bp, Artificial Sequence
  ENSG00000101670_23 (sequence is synthesized)
atgacatatgtaatacacatctgtgtacacagaaaccggcacctgccagacagagctggttctaagatttaatacagtgctttttttcctctttgaaatattttactttaataccagtgc

SEQ ID NO: 126106 - DNA, 120 bp, Artificial Sequence
  ENSG00000101670_24 (sequence is synthesized)
cttttcttgttgaacttcttggaaaagccaccaattctagatcttgatttgaattaatacacacaatatctgagacacttacacttttcaaaagatttgtgtatgcattgcctaattaga

SEQ ID NO: 126107 - DNA, 120 bp, Artificial Sequence
  ENSG00000101670_25 (sequence is synthesized)
gtagggggagaagggcaactattattatccctattttacaaaactgaggcttagtgaggttcagccacatgcctagacttatatactagttagtggtgcagccagggagaggactcagat

SEQ ID NO: 126108 - DNA, 120 bp, Artificial Sequence
  ENSG00000101670_26 (sequence is synthesized)
ttcctggaggcaaagtctatctctgaaactccatgaagacttttgcagccagttcccaccaatatgccccagacgtgagacaaacaaggacttttttttttatatagagccatccataaa

SEQ ID NO: 126109 - DNA, 120 bp, Artificial Sequence
  ENSG00000101670_27 (sequence is synthesized)
atcctaagcccttttattaatgtataaccaggagaacatctgtgccaacggttggactttttatggctgagattcgggaggaagtgtgacaccaagcaggagaggaagaatgattttctt

SEQ ID NO: 126110 - DNA, 120 bp, Artificial Sequence
  ENSG00000101670_28 (sequence is synthesized)
tgtacttaggttttctaaggacattgttttaatctgtatcgtgccaaagttgtatcactgttaaacttctgaagacataaccagttgagtcttatttcaagatatgttctcaagccaatt

SEQ ID NO: 126111 - DNA, 120 bp, Artificial Sequence
  ENSG00000101670_29 (sequence is synthesized)
ccagttgagtcttatttcaagatatgttctcaagccaattgtgtgcttctcttgtttctgtgattgctttctagccaaagcgaagcttgtacaggttgagtatcccttatccaaaatgct

SEQ ID NO: 126112 - DNA, 120 bp, Artificial Sequence
  ENSG00000101670_30 (sequence is synthesized)
tttggaatgtttgcatatacataatgagatattttgggaataggacccgagcctaaacacaaaattcattgatgtgtcagttacaccttatccacatagcctgagggtaattttatacga

SEQ ID NO: 126113 - DNA, 120 bp, Artificial Sequence
  ENSG00000101670_31 (sequence is synthesized)
tattttaaatagttgtgtacatgaagcatggtttgtggtaacttatgtgaggggttttcccattttttgtcttgttggtgctcaaaaagttttggattttggagcatttcggattttgga

SEQ ID NO: 126114 - DNA, 120 bp, Artificial Sequence
  ENSG00000101670_32 (sequence is synthesized)
tttttggattagggttgctcaacccatattattggctgtacatcctggtcacttctgacttctgtttttactaatggaagctttgcaaattgaattctcagtgagttgtatatttataca

SEQ ID NO: 126115 - DNA, 120 bp, Artificial Sequence
  ENSG00000101670_33 (sequence is synthesized)
cctggcttgaagccttaattgtatataatgatgctttttaaaaaatgctatttggaagactatttatttctcgtgtatataatgtatataaaaaaatatggttagtgtttacctaaggtt

SEQ ID NO: 126116 - DNA, 120 bp, Artificial Sequence
  ENSG00000101670_34 (sequence is synthesized)
ttataggtgtgagccaccgtgcctggccaattcttaaagtttgaaagaatatagctgccccaacctagagtctgacaaaaagttactctaatataaggcatattctttatttgacactca

SEQ ID NO: 126117 - DNA, 120 bp, Artificial Sequence
  ENSG00000101670_35 (sequence is synthesized)
ctcatcgttagcagaagtggacagcaattcactaaagaaccagaacaagaacatcatttcactgaagacgagaagaaaaattatttcaattgtagcagcttgaaggcctgaaggtggatg

SEQ ID NO: 126118 - DNA, 120 bp, Artificial Sequence
  ENSG00000101670_36 (sequence is synthesized)
ttaggaagaacagggagcatggctggacactggggagcattagtgagattattaggtttggttgaattggaactagatatcagtgacttagaccagagggaagctgatttctctattggt

SEQ ID NO: 126119 - DNA, 120 bp, Artificial Sequence
  ENSG00000101670_37 (sequence is synthesized)
taaagtcccagctggtagtaaggttctattctacaggccaagagggctgcaggttcttagtttttcactgtgccattcatggggtattcctcgcatccccacagcccaggggtcccctac

SEQ ID NO: 126120 - DNA, 120 bp, Artificial Sequence
  ENSG00000101670_38 (sequence is synthesized)
cagccaatggaaagccagaaaagggaagggatgaacagtctcctcttaaagacatgactgagaagttgcttacattctattggccagaaataaatccatggtcacatgacaggctgggaa

SEQ ID NO: 126121 - DNA, 120 bp, Artificial Sequence
  ENSG00000101670_39 (sequence is synthesized)
atacagtctttatttagggtgcccatgggccctgctgaagatccaattactatttatttaaaattgacatataataattgtacatatttgtggggaaaatagtgatgtttcgatacatac

SEQ ID NO: 126122 - DNA, 120 bp, Artificial Sequence
  ENSG00000101670_40 (sequence is synthesized)
cttgaaaccatattttattaactctagttttacccttcagtggtataggacactagaatttattcctcctgtctagctgtaatcttgtttgtttcgtttggtgttttttgtttttttgtt

SEQ ID NO: 126123 - DNA, 120 bp, Artificial Sequence
  ENSG00000101670_41 (sequence is synthesized)
cagccttccaaactgtcgggattaccggtgtgagccaccgggcccagccactagctgtaattttgtatcttttaacaattccgtccctatttcccctttccccctaccaattactattta

SEQ ID NO: 126124 - DNA, 120 bp, Artificial Sequence
  ENSG00000101670_42 (sequence is synthesized)
ttaaaagggaaattggatcttgccatccgtttatcaggaattagttttttctctgctaaagccagcgagatagaccagagtaccctttaaatgattaaatcctgtagtcaatttttagta

SEQ ID NO: 126125 - DNA, 120 bp, Artificial Sequence
  ENSG00000101670_43 (sequence is synthesized)
atcttaaattgatctatgactatgaagtataatgcattacatcagtttgactttatttctggtcttaagtgtgaaaacatttctaaatgacaaggaagctctttataaagggctttagtg

SEQ ID NO: 126126 - DNA, 120 bp, Artificial Sequence
  ENSG00000101670_44 (sequence is synthesized)
atggtggaaactccactgtccatctctaccaggacattctgaaaccaggcttgataatggctgtagggagttgggttagacaataagagataagttcttaacttggttcagatgtcagag

SEQ ID NO: 126127 - DNA, 120 bp, Artificial Sequence
  ENSG00000101670_45 (sequence is synthesized)
gaaagcagaaaatggtgtctctggcatagtaaagaaaattgttgaaatttcccaaaggaagagtcatagcctggatgactgcaagtgccttctttggcttgggggttcagttactagtta

SEQ ID NO: 126128 - DNA, 120 bp, Artificial Sequence
  ENSG00000101670_46 (sequence is synthesized)
gagtcaggggaacttccacaggacttcctttgactctccaaacaagctgaagccccagaccccttggaaggatggatacaaagtaggtactagaacagtctttgtcatcaaatatggtat

SEQ ID NO: 126129 - DNA, 120 bp, Artificial Sequence
  ENSG00000101670_47 (sequence is synthesized)
ttctcaggtgtcacctctgtgttcagagctaccctgagccctctgccatgtaagctctctgatggcacagatttttatctggcttgttttctgccgttatcttagaagctagaatagtgt

SEQ ID NO: 126130 - DNA, 120 bp, Artificial Sequence
  ENSG00000101670_48 (sequence is synthesized)
ctggaacatcatgggtattcaatgaatatttaaataaatagatgaaattagatataagaaactaggtgcttaaacaggcaggaggtaatctgggaaaagagcagttagtttggaatcaga

SEQ ID NO: 126131 - DNA, 120 bp, Artificial Sequence
  ENSG00000101670_49 (sequence is synthesized)
attcttggtgtgtcatccagcattatgtgagttttaggctaaatacagcctttctgagtctctatctgctcatttaagaaacagagacaatactgctcagggttgttgtgaatgttaaag

SEQ ID NO: 126132 - DNA, 120 bp, Artificial Sequence
  ENSG00000101670_50 (sequence is synthesized)
gtacatggtaaaaaagaaagtatttgtgttttgtaaacatttgaattgataagaggacagtgtgagacaaaaataaaatcctgggtgggcacggtggctcacccctgtaatctcagcact

SEQ ID NO: 126133 - DNA, 68 bp, Artificial Sequence
  ENSG00000101670_51 (sequence is synthesized)
cgaacctgggagtgagtgagactccatctcaaaataaaataaaatagaatagaataaaataaaatcct

SEQ ID NO: 126134 - DNA, 120 bp, Artificial Sequence
  ENSG00000101670_52 (sequence is synthesized)
tcaaaataaaataaaatagaatagaataaaataaaatcctttccacatatatgcggaaattttatgtatgataaaaggggcctattagtctttgggaaaggaatggatggatgatgagaa

SEQ ID NO: 126135 - DNA, 120 bp, Artificial Sequence
  ENSG00000101670_53 (sequence is synthesized)
agtaggctcatttgacaaagagaaacaaaattagattcctattttaacacgcaacaaagatgaattccaaaatacctattgggtactatgcttattacctgagtgacgaaataatctgta

SEQ ID NO: 126136 - DNA, 120 bp, Artificial Sequence
  ENSG00000101670_54 (sequence is synthesized)
cagcaaactcctgtgacacaccatttaactacataacaaacctgcatacgtacccctgaaactaaagtagaagttaaaaccatcaacccccccaaaacaaaaatgaattccatctgaata

SEQ ID NO: 126137 - DNA, 120 bp, Artificial Sequence
  ENSG00000101670_55 (sequence is synthesized)
aaaggtataaatgtgaaagtcatcatgctaatagatattatgaaatataaattcaaaacctgtataaaaactgaaaaaatgtaaaacgtcacaattagaataagaaaatttaaatagaac

SEQ ID NO: 126138 - DNA, 89 bp, Artificial Sequence
  ENSG00000101670_56 (sequence is synthesized)
ctgaggtaggaaaatcacctagatcacggcactacactccagcctgggcaacaagagcaaatctctatctcaaaaaaaaaaaaaaaaaa

SEQ ID NO: 126139 - DNA, 120 bp, Artificial Sequence
  ENSG00000101670_57 (sequence is synthesized)
gaaatgtccatccagcaggtggacaattacccttttgtcagccgttcctctgttgctgaccattagatccacatttcttttctgtccgccctggtcccctggtgccccctttcctggccc

SEQ ID NO: 126140 - DNA, 120 bp, Artificial Sequence
  ENSG00000101670_58 (sequence is synthesized)
ctgtgacatattgtcatgtagctccaagtatttccccccctcatatccctcaagtgctccattttccaaatgcatttgacttcctactctcttagccccagctctctggtattctgtgta

SEQ ID NO: 126141 - DNA, 120 bp, Artificial Sequence
  ENSG00000101670_59 (sequence is synthesized)
gctgacttccacaagggatctgttgggagcttgtaactgaactgaagtcatgcacattgtcaatggctagtagacctttacctggtccagagttgtctgcattgtttaaagaagacgttt

SEQ ID NO: 126142 - DNA, 120 bp, Artificial Sequence
  ENSG00000101670_60 (sequence is synthesized)
gttaatccaaattaatctttgatttgcatggaggcagtaggtcaaatcaaaaggaaattttcctctccctagcaagcaaactcagaaacaaacaaacaaacgaaaaccaagaaacaaaag

SEQ ID NO: 126143 - DNA, 120 bp, Artificial Sequence
  ENSG00000101670_61 (sequence is synthesized)
gaaaggttcctgttgggatagagaaacagtggagcagggcagccaccttacacataggctagatctgcttgggaatctttcttctaatcgaggcccctaaaatattcctgattttcacag

SEQ ID NO: 126144 - DNA, 120 bp, Artificial Sequence
  ENSG00000101670_62 (sequence is synthesized)
ttgatttcatttcttccctcctgaacttacagagcctttcagtaaacaccagtatttgtccctccccgtgtatgcccagtggtttccatggcagcaacggttgccatagagaggtgaaga

SEQ ID NO: 126145 - DNA, 120 bp, Artificial Sequence
  ENSG00000101670_63 (sequence is synthesized)
gaggtgtcggtgccctcttttgtaactgtgggttatctatagattgggggtggcctctcctaaaaaagactaatatgtaaataaaaggaataagaatcaaacaaatataaatcagggctc

SEQ ID NO: 126146 - DNA, 120 bp, Artificial Sequence
  ENSG00000101670_64 (sequence is synthesized)
aagtcatttgttttcctaaacctttgtggttatccataccatttaaccttgactttccttaaatcataccggtgcgtgtgtgtgtgcagagggaaagggctgcaagaagactctggaagc

SEQ ID NO: 126147 - DNA, 120 bp, Artificial Sequence
  ENSG00000101670_65 (sequence is synthesized)
taggacaggtctcagcaggtgagggctcaggcccagaggccagctggggcagcagggagcagagttatctgggccatttgctaattatctcagcccagacgagtctgcacgctatgtggt

SEQ ID NO: 126148 - DNA, 120 bp, Artificial Sequence
  ENSG00000101670_66 (sequence is synthesized)
ttaataccttcaccagaggcaaatggttttggactcacaagaattgctcatggccagaggcaatggacagatgccatatgagaaagggctgaggccaggaacagaggcagggttatctca

SEQ ID NO: 126149 - DNA, 120 bp, Artificial Sequence
  ENSG00000101670_67 (sequence is synthesized)
ctggaatggagaagctaaaatgacattatctttacttctgccctggttattatcccaaggcaacttcagtgggcttgttttgaagtcaaagcctcaactatttattgtgagggagataat

SEQ ID NO: 126150 - DNA, 120 bp, Artificial Sequence
  ENSG00000101670_68 (sequence is synthesized)
tcattttcattttcctgccagagatgtcagtcttactattcatcctgtatcctctattagatacacagagcttcttccttctgcttaggctgccccaaattccatataggattctttttg

SEQ ID NO: 126151 - DNA, 120 bp, Artificial Sequence
  ENSG00000101670_69 (sequence is synthesized)
aagaatatatatcatccaaaaagaggtcctaggaaatgtggcttcacaaccctggggtttgtttccctggctgctgtctctctctctctcttttttaattttttttggagacacggtatc

SEQ ID NO: 126152 - DNA, 78 bp, Artificial Sequence
  ENSG00000101670_70 (sequence is synthesized)
tctctctctcttttttaattttttttggagacacggtatcactgtgtggcccaggctggagtgtggtggcgccatcac

SEQ ID NO: 126153 - DNA, 120 bp, Artificial Sequence
  ENSG00000101670_71 (sequence is synthesized)
attagaggcatgagccatcaggcctggccatgctgcctctctctccttcaaggtagacttcctctttccttccccttctccctgcttctttctccttctcctctccttctcctcttctcc

SEQ ID NO: 126154 - DNA, 120 bp, Artificial Sequence
  ENSG00000101670_72 (sequence is synthesized)
ttcttcttctcacagctttttattgacttataacaggcacacaataaactgcacacaggtaaatcatataatttgacattttggtacaggaaatcatcatgaaactgaaagcattaccac

SEQ ID NO: 126155 - DNA, 120 bp, Artificial Sequence
  ENSG00000101670_73 (sequence is synthesized)
atcgagattgtgaacataccaccaccagaagttttcttgtgcccctttgtaattcttcccactgccctctccccaggttgtccctgatctgctttttgtccttgtagattagttgcattt

SEQ ID NO: 126156 - DNA, 120 bp, Artificial Sequence
  ENSG00000101670_74 (sequence is synthesized)
tctagaattttgtataagtggagtgtatctacagtatgttctcttttgtgtctgccttcttgtactcagcataattattttgagattcatccacgtctttgcatggatcagtcatctgtt

SEQ ID NO: 126157 - DNA, 120 bp, Artificial Sequence
  ENSG00000101670_75 (sequence is synthesized)
ccattttattgctaagcagtattccactgtatagataaataacattttgtttatccgtttacttgttgatgaactttaagttgtttccagttttgagttattagagtaatgctactatga

SEQ ID NO: 126158 - DNA, 120 bp, Artificial Sequence
  ENSG00000101670_76 (sequence is synthesized)
acatttgcatatgaatccttgtatggacatgaactttcatttcttttgggagtaggatagctggatcatatggaatgtatatgtttaacttttaaataaactgccaaactgttttccaaa

SEQ ID NO: 126159 - DNA, 120 bp, Artificial Sequence
  ENSG00000101670_77 (sequence is synthesized)
tatttaaatgtgtacatttcaaagtgtttccacatatattaacttcattgatcctccagacaaccatgtagattggacacacccaggaaagatgactaaggaaggctattctttttttat

SEQ ID NO: 126160 - DNA, 89 bp, Artificial Sequence
  ENSG00000101670_78 (sequence is synthesized)
gagtacagtggcatgatcacagctcattgcagcctcgacctccctgggctcagatgatcttcctaaatgtgccactatgcctggctaat

SEQ ID NO: 126161 - DNA, 73 bp, Artificial Sequence
  ENSG00000101670_79 (sequence is synthesized)
cagcctcctgagtagcttggattacaggaatgtgccactatgcctggctatctcctgagctcaagtgatctgc

SEQ ID NO: 126162 - DNA, 120 bp, Artificial Sequence
  ENSG00000101670_80 (sequence is synthesized)
tgggtttgcaggcatgagccactgtgcccagtcaggatggctattcttatgataaaggctaagatatttattcttctttcccgctttggaattcatatacctgagaactctatgattcac

SEQ ID NO: 126163 - DNA, 120 bp, Artificial Sequence
  ENSG00000101670_81 (sequence is synthesized)
cctctcactactaattttagaaaacaagctgtccttttccattccctcaaaaacaataggagtccaagtaataaatgaacactaggaagtcatagcatcatatgtaacatgtttagcatc

SEQ ID NO: 126164 - DNA, 120 bp, Artificial Sequence
  ENSG00000101670_82 (sequence is synthesized)
ctccctcctgacatggatgctgttcacatgttcactgataaggagcctgagattcagagaggttcagtggtgtgttcacatagctgagactagaatccaggtctcctaactctcagtctt

SEQ ID NO: 126165 - DNA, 120 bp, Artificial Sequence
  ENSG00000101670_83 (sequence is synthesized)
tcttgccccctttctgccaatacagtgtctctcttgtatttctagatcaaggcaaagaggacactttgatagttctccccacacttgtgtgtccatgattgtgtgtgtgtgtgtgtgtgt

SEQ ID NO: 126166 - DNA, 120 bp, Artificial Sequence
  ENSG00000101670_84 (sequence is synthesized)
gtgtgtgtgtatgttgtgggtggataatatgtaaatgcaagaactgtgatgtactcaactcagggtccagagggtgctgcagtgtggtgtttctcaaagtgcatctatggcttgtcaggt

SEQ ID NO: 126167 - DNA, 120 bp, Artificial Sequence
  ENSG00000101670_85 (sequence is synthesized)
tagggagagaaggcagcactcgggaccttgtccatttattctgaaaggaatacatgtaaaatagtcccataggggtgtcagaaagcttggccttaaggtcaaaagagcacaccctgaata

SEQ ID NO: 126168 - DNA, 120 bp, Artificial Sequence
  ENSG00000101670_86 (sequence is synthesized)
gcacatcctagcccaggagaagtggccagcacaatccaatcaaatcgttgcaaatcagattacactgtgcatgtcctaggaaagggaatctttacaaaataaacagtgtggacccctttt

SEQ ID NO: 126169 - DNA, 120 bp, Artificial Sequence
  ENSG00000101670_87 (sequence is synthesized)
ctcctgtcaccagcaggatctcaaacccaatcttcttaagaaatgcaggtcatgcatctgttgccatgaacttctggagtctgataaaaatctttgagattaaaagttttattgaattaa

SEQ ID NO: 126170 - DNA, 120 bp, Artificial Sequence
  ENSG00000101670_88 (sequence is synthesized)
aatgaggcgaggtcggaacaggatctgctggctccggctcggtttcctcgcacaggtctctccagctggatcctcgacgctagggaggaaggggcgcgggactgctgtgggggttttccc

SEQ ID NO: 126171 - DNA, 120 bp, Artificial Sequence
  ENSG00000101670_89 (sequence is synthesized)
tccccaggcaggggcaggacctgttccgggcgactgcagggttaagggtatcgtcttaaagagccggatcctcccggctggagcgaggctggatggcgggacgcagcctctcagcctctc

SEQ ID NO: 126172 - DNA, 120 bp, Artificial Sequence
  ENSG00000101670_90 (sequence is synthesized)
gtacccgccctgcgtccgcagtggttgttggcgcagccgccccgtcggtgttccgggctcagtccccgctccccagcgccagacgcagactccgggccaagttctccctccgctcgctgc

SEQ ID NO: 126173 - DNA, 120 bp, Artificial Sequence
  ENSG00000101670_91 (sequence is synthesized)
tttctgccgcaggacccggatcaataaagggaaggagagccgggaggaaatgatggagaacagagagaaaggagatgcttgatttcactcgccaaggagtgagtgctcatcggcagacac

SEQ ID NO: 126174 - DNA, 120 bp, Artificial Sequence
  ENSG00000101670_92 (sequence is synthesized)
tgggctctggccacgcgtcttagactccaaatctcggctcactggtccctttgaggaggtcgcctggtgttcccgtagccctccaccccaccgtaggagagcgcctgccacgagctccgc

SEQ ID NO: 126175 - DNA, 120 bp, Artificial Sequence
  ENSG00000101670_93 (sequence is synthesized)
gcctcgctaagtgctttgctacgtgaactcttagttttcccaacatccctaagccgccgatacattatcacccacgtattgcggacgagagaaccgcctcggagaagctggctggctcgc

SEQ ID NO: 126176 - DNA, 120 bp, Artificial Sequence
  ENSG00000101670_94 (sequence is synthesized)
ttggagttttgcagctagtggcggagcgagcattccgagcaggtactgtgcgatcctccagcgccggccgcagctcacagccccttagctccgccgggttattgtgcggccgcgccttct

SEQ ID NO: 126177 - DNA, 120 bp, Artificial Sequence
  ENSG00000101670_95 (sequence is synthesized)
gcacctgttgcggccctcgctaggcgggaagggagggagaagaggaggacaaaggggatgaccaggtggctctcccccgacggactcccggcccagggagcggatagaccactcccagag

SEQ ID NO: 126178 - DNA, 120 bp, Artificial Sequence
  ENSG00000101670_96 (sequence is synthesized)
agagtgtggctttgagccttggagaggatgctctccttctccagggatcgcctccccagcggacgcagagtttcagggaaatgtccgcctccgccacttgggatggcagtggggagagga

SEQ ID NO: 126179 - DNA, 120 bp, Artificial Sequence
  ENSG00000101680_0 (sequence is synthesized)
ggactcgcgtcccgtggagcgttccaggcgggcgcgcggctttctccccagacccaccgagtggcggcggaggcgagatgcgcgggggcgtgctcctggtcttgctgctgtgtgtcgccg

SEQ ID NO: 126180 - DNA, 120 bp, Artificial Sequence
  ENSG00000101680_1 (sequence is synthesized)
cgcagtgccggcagagaggcctgtttcctgccattctcaatcttgccagcaatgctcacatcagcaccaatgccacctgtggcgagaaggggccggagatgttctgcaaacttgtggagc

SEQ ID NO: 126181 - DNA, 120 bp, Artificial Sequence
  ENSG00000101680_2 (sequence is synthesized)
atgtgccaggtcggcccgtccgaaacccacagtgccggatctgtgatggcaacagcgcaaaccccagagaacgccatccaatatcacatgccatagatggcaccaataactggtggcaaa

SEQ ID NO: 126182 - DNA, 120 bp, Artificial Sequence
  ENSG00000101680_3 (sequence is synthesized)
gtcccagcattcagaatgggagagaatatcactgggtcacaatcactctggacttaagacaggtctttcaagttgcatatgtcatcattaaagctgccaatgcccctcgacctggaaact

SEQ ID NO: 126183 - DNA, 120 bp, Artificial Sequence
  ENSG00000101680_4 (sequence is synthesized)
ggattttggagcgttctctggatggcaccacgttcagcccctggcagtattatgcagtcagcgactcagagtgtttgtctcgttacaatataactccaagacgagggccacccacctaca

SEQ ID NO: 126184 - DNA, 120 bp, Artificial Sequence
  ENSG00000101680_5 (sequence is synthesized)
gggctgatgatgaagtgatctgcacctcctattattccagattggtgccacttgagcatggagagattcatacatcactcatcaatggcagaccaagcgctgacgatctttcacccaagt

SEQ ID NO: 126185 - DNA, 120 bp, Artificial Sequence
  ENSG00000101680_6 (sequence is synthesized)
tgttggaattcacttctgcacgatatattcgccttcgcttgcaacgcattagaacgctcaatgcagatctcatgacccttagccaccgggaacctaaagaactggatcctattgttacca

SEQ ID NO: 126186 - DNA, 120 bp, Artificial Sequence
  ENSG00000101680_7 (sequence is synthesized)
gacgctattattattcaataaaggacatttctgttggaggcatgtgtatctgctatggccatgctagtagctgcccatgggatgaaactacaaagaaactgcagtgtcaatgtgagcata

SEQ ID NO: 126187 - DNA, 120 bp, Artificial Sequence
  ENSG00000101680_8 (sequence is synthesized)
atacttgcggggagagctgtaacaggtgctgtcctgggtaccatcagcagccctggaggccgggaaccgtgtcctccggcaatacatgtgaagcatgtaattgtcacaataaagccaaag

SEQ ID NO: 126188 - DNA, 120 bp, Artificial Sequence
  ENSG00000101680_9 (sequence is synthesized)
actgttactatgatgaaagtgttgcaaagcagaagaaaagtttgaatactgctggacagttcagaggaggaggggtttgcataaattgcttgcagaacaccatgggaatcaactgtgaaa

SEQ ID NO: 126189 - DNA, 120 bp, Artificial Sequence
  ENSG00000101680_10 (sequence is synthesized)
cctgtattgatggatattatagaccacacaaagtgtctccttatgaggatgagccttgccgcccctgtaattgtgaccctgtggggtccctcagttctgtctgtattaaggatgacctcc

SEQ ID NO: 126190 - DNA, 120 bp, Artificial Sequence
  ENSG00000101680_11 (sequence is synthesized)
attctgacttacacaatgggaagcagccaggtcagtgcccatgtaaggaaggttatacaggagaaaaatgtgatcgctgccaacttggctataaggattacccgacctgtgtctcctgtg

SEQ ID NO: 126191 - DNA, 120 bp, Artificial Sequence
  ENSG00000101680_12 (sequence is synthesized)
ggtgcaacccagtgggcagtgccagtgatgagccctgcacagggccctgtgtttgtaaggaaaacgttgaggggaaggcctgtgatcgctgcaagccaggattctataacttgaaggaaa

SEQ ID NO: 126192 - DNA, 120 bp, Artificial Sequence
  ENSG00000101680_13 (sequence is synthesized)
aaaacccccggggctgctccgagtgcttctgctttggcgtttctgatgtctgcagcagcctctcttggcctgttggtcaggtaaacagtatgtccgggtggctggtcaccgacttgatca

SEQ ID NO: 126193 - DNA, 120 bp, Artificial Sequence
  ENSG00000101680_14 (sequence is synthesized)
gtcccaggaagatcccgtctcagcaagatgcactaggcgggcgccatcaggtcagcatcaacaacaccgcggtcatgcagagactggctcccaagtactactgggcagcccccgaggcct

SEQ ID NO: 126194 - DNA, 120 bp, Artificial Sequence
  ENSG00000101680_15 (sequence is synthesized)
accttggaaataagctgactgcgtttggcggattcctgaaatacacggtgtcctacgatattccggtagagacggtagacagtaacctcatgtcgcatgctgacgtcatcattaagggaa

SEQ ID NO: 126195 - DNA, 120 bp, Artificial Sequence
  ENSG00000101680_16 (sequence is synthesized)
acggactcactttaagcacacaggctgagggtctgtcattgcagccttatgaagagtacctaaacgtggttagacttgtgcctgaaaacttccaagattttcacagcaaaaggcagattg

SEQ ID NO: 126196 - DNA, 120 bp, Artificial Sequence
  ENSG00000101680_17 (sequence is synthesized)
atcgtgaccagctgatgactgtccttgccaatgtgacacatcttttgatcagagccaactacaattctgcaaaaatggctctttacaggttggagtccgtctctctggacatagccagct

SEQ ID NO: 126197 - DNA, 120 bp, Artificial Sequence
  ENSG00000101680_18 (sequence is synthesized)
ctaatgccatcgacctggtggtggccgctgatgtggagcactgtgaatgtccgcaaggctacacagggacctcctgtgagtcgtgcctctctggctattaccgcgtggatggaatactct

SEQ ID NO: 126198 - DNA, 120 bp, Artificial Sequence
  ENSG00000101680_19 (sequence is synthesized)
ttggaggaatttgtcaaccctgtgaatgccacggccatgcagctgagtgtaatgttcacggcgtttgcattgcgtgtgcgcacaacaccaccggcgtccactgtgagcagtgcttgcccg

SEQ ID NO: 126199 - DNA, 120 bp, Artificial Sequence
  ENSG00000101680_20 (sequence is synthesized)
gcttctacggggagccttcccgagggacacctggggactgccagccctgcgcctgccctctcaccatagcctccaacaatttcagccccacctgccacctcaatgatggagatgaagtgg

SEQ ID NO: 126200 - DNA, 120 bp, Artificial Sequence
  ENSG00000101680_21 (sequence is synthesized)
tctgtgactggtgtgccccgggctactcaggagcttggtgtgagagatgtgcagatggttactatggaaacccaacagtgcctggcgaatcttgtgttccctgtgactgcagcggcaacg

SEQ ID NO: 126201 - DNA, 120 bp, Artificial Sequence
  ENSG00000101680_22 (sequence is synthesized)
tggacccctcggaggctggtcactgtgactcagtcaccggggagtgcctgaagtgcctggggaacacagatggcgcccactgtgaaaggtgtgctgacgggttctatggggacgctgtga

SEQ ID NO: 126202 - DNA, 120 bp, Artificial Sequence
  ENSG00000101680_23 (sequence is synthesized)
cagccaagaactgccgcgcctgtgaatgccatgtgaaaggctcccattctgccgtgtgccatcttgagaccgggctctgtgactgcaaaccaaacgtgactggacagcagtgtgaccagt

SEQ ID NO: 126203 - DNA, 120 bp, Artificial Sequence
  ENSG00000101680_24 (sequence is synthesized)
gcttgcatggctattatgggctggactcaggccatggctgccggccctgcaactgcagcgtggcaggctccgtgtcagatggctgcacggatgaaggccagtgtcactgtgtcccaggtg

SEQ ID NO: 126204 - DNA, 120 bp, Artificial Sequence
  ENSG00000101680_25 (sequence is synthesized)
tggcagggaaaaggtgtgacaggtgtgcccatggcttctacgcctaccaggatggtagctgtacaccctgtgactgcccacacactcagaatacctgcgacccagaaactggagagtgtg

SEQ ID NO: 126205 - DNA, 120 bp, Artificial Sequence
  ENSG00000101680_26 (sequence is synthesized)
tctgcccccctcacacacagggtgtgaagtgtgaagaatgtgaggatgggcactggggctacgatgcggaggtggggtgccaggcctgcaattgcagtctcgtggggtcgactcatcatc

SEQ ID NO: 126206 - DNA, 120 bp, Artificial Sequence
  ENSG00000101680_27 (sequence is synthesized)
ggtgcgatgtggtcaccggccattgccagtgcaagtcaaaatttggtggccgggcctgcgatcagtgttccttgggttacagagactttcccgactgtgttccctgtgactgtgacctga

SEQ ID NO: 126207 - DNA, 120 bp, Artificial Sequence
  ENSG00000101680_28 (sequence is synthesized)
gggggacgtcgggggacgcctgcaacctggagcagggtctctgcggctgtgtggaggaaaccggggcctgcccttgcaaggaaaatgtctttggtcctcagtgcaacgaatgtcgagagg

SEQ ID NO: 126208 - DNA, 120 bp, Artificial Sequence
  ENSG00000101680_29 (sequence is synthesized)
gcaccttcgctctccgcgcagacaaccccctgggctgcagcccgtgcttctgctccgggctgtcccacctctgctcagagctggaggactacgtgaggaccccagtaacgctgggctccg

SEQ ID NO: 126209 - DNA, 120 bp, Artificial Sequence
  ENSG00000101680_30 (sequence is synthesized)
atcagcctcttctgcgtgtggtttctcagagtaacttgaggggcacgaccgagggggtttactaccaggcccccgacttcctgctggatgccgccaccgtccggcagcacatccgtgcag

SEQ ID NO: 126210 - DNA, 120 bp, Artificial Sequence
  ENSG00000101680_31 (sequence is synthesized)
agccgttttactggcggctgccgcagcagttccaaggagaccagctcatggcctatggtggcaaactgaagtacagcgtggccttctattctttggatggcgtcggcacctccaattttg

SEQ ID NO: 126211 - DNA, 120 bp, Artificial Sequence
  ENSG00000101680_32 (sequence is synthesized)
agcctcaagttctcatcaaaggtggtcggatcagaaagcaagtcatttacatggatgcaccagccccagagaatggagtgagacaggaacaagaagtagcaatgagagagaatttttgga

SEQ ID NO: 126212 - DNA, 120 bp, Artificial Sequence
  ENSG00000101680_33 (sequence is synthesized)
aatattttaactctgtttctgaaaaacctgtcacgcgagaggattttatgtctgtcctcagcgatattgagtacatcctcatcaaggcatcgtatggtcaaggattacagcagagcagaa

SEQ ID NO: 126213 - DNA, 120 bp, Artificial Sequence
  ENSG00000101680_34 (sequence is synthesized)
tctcagacatttcaatggaggttggcagaaaggctgaaaagctgcacccagaagaagaggttgcatctcttttagagaattgtgtctgtcctcctggcactgtgggattctcatgtcagg

SEQ ID NO: 126214 - DNA, 120 bp, Artificial Sequence
  ENSG00000101680_35 (sequence is synthesized)
actgcgcccctgggtaccacagagggaagctcccagcagggagtgacaggggaccacgccctctggttgctccttgtgttccctgcagttgcaacaaccacagtgacacctgtgacccca

SEQ ID NO: 126215 - DNA, 120 bp, Artificial Sequence
  ENSG00000101680_36 (sequence is synthesized)
acaccgggaagtgtctgaactgtggcgataacacagcaggtgaccattgtgatgtgtgtacttctggctactacgggaaggtgactggctcagcaagtgactgtgctctgtgtgcctgtc

SEQ ID NO: 126216 - DNA, 120 bp, Artificial Sequence
  ENSG00000101680_37 (sequence is synthesized)
ctcacagccctcctgccagttttagtcccacttgtgtcttggaaggggaccacgatttccgttgtgacgcctgtctcctgggctatgaaggaaaacactgtgaaaggtgctcctcaagct

SEQ ID NO: 126217 - DNA, 120 bp, Artificial Sequence
  ENSG00000101680_38 (sequence is synthesized)
attatgggaaccctcaaacaccaggtggcagttgccagaagtgtgactgcaacccgcacggctctgtccacggtgactgtgaccgcacatctgggcagtgcgtttgcaggctgggggcct

SEQ ID NO: 126218 - DNA, 120 bp, Artificial Sequence
  ENSG00000101680_39 (sequence is synthesized)
cggggctccggtgcgatgagtgtgaaccgaggcacattctgatggaaacagattgtgtttcctgtgatgatgagtgtgtaggtgtgctgctgaatgacttggatgagattggtgatgccg

SEQ ID NO: 126219 - DNA, 120 bp, Artificial Sequence
  ENSG00000101680_40 (sequence is synthesized)
gaattttgtcaaacctggaaaatacaactaaatatctccaggaatctttattaaaagaaaatatgcaaaaggacctgggaaaaattaagcttgaaggtgttgcagaagaaacggacaacc

SEQ ID NO: 126220 - DNA, 120 bp, Artificial Sequence
  ENSG00000101680_41 (sequence is synthesized)
tgcaaaagaagctcactaggatgttagcgagtacccaaaaggtgaatagggcaactgagagaatcttcaaggagagtcaagacctggccatagccattgagaggctgcagatgagcatca

SEQ ID NO: 126221 - DNA, 120 bp, Artificial Sequence
  ENSG00000101680_42 (sequence is synthesized)
cagaaattatggaaaagacaactttaaatcagactttggatgaagatttcctactacccaattctactcttcagaacatgcaacagaatggtacatctttgctagaaatcatgcagataa

SEQ ID NO: 126222 - DNA, 120 bp, Artificial Sequence
  ENSG00000101680_43 (sequence is synthesized)
gagacttcacacagttgcaccaaaatgccacccttgaactcaaggctgctgaagatttattgtcacaaattcaggaaaattaccagaagccgctggaagaattggaggtattgaaagaag

SEQ ID NO: 126223 - DNA, 120 bp, Artificial Sequence
  ENSG00000101680_44 (sequence is synthesized)
cagcaagccacgtcctttcaaagcacaacaatgaactaaaggcggctgaggcgctcgtgagggaagctgaggcaaagatgcaggaaagcaaccacctgctgctcatggtcaatgctaatc

SEQ ID NO: 126224 - DNA, 120 bp, Artificial Sequence
  ENSG00000101680_45 (sequence is synthesized)
tgagagaattcagtgataaaaagctgcatgttcaagaagaacaaaatctgacctcagagctcattgtccaaggaagaggattgatagatgctgctgctgcacaaacagatgctgtacaag

SEQ ID NO: 126225 - DNA, 120 bp, Artificial Sequence
  ENSG00000101680_46 (sequence is synthesized)
atgctctagagcacttagaggatcaccaggataagctacttttatggtctgccaaaatcaggcaccacatagatgacctggtcatgcacatgtcccaaaggaacgcagtcgacctggtct

SEQ ID NO: 126226 - DNA, 120 bp, Artificial Sequence
  ENSG00000101680_47 (sequence is synthesized)
acagagctgaggaccatgccgctgagttccagagactagcagatgttctgtacagtggccttgaaaacatcagaaatgtgtccctgaatgccaccagtgcagcctatgtccattacaaca

SEQ ID NO: 126227 - DNA, 120 bp, Artificial Sequence
  ENSG00000101680_48 (sequence is synthesized)
tccagagcctgattgaagaatcggaggaactggccagagatgctcacaggactgtgactgagacgagcctgctctcagaatcccttgtttctaacgggaaagcggccgtgcagcgcagct

SEQ ID NO: 126228 - DNA, 120 bp, Artificial Sequence
  ENSG00000101680_49 (sequence is synthesized)
ccagatttctaaaagaaggcaacaacctcagcaggaagcttccaggtattgcattggaactgagtgaattgagaaataagacaaacagatttcaagagaatgctgttgaaattaccaggc

SEQ ID NO: 126229 - DNA, 120 bp, Artificial Sequence
  ENSG00000101680_50 (sequence is synthesized)
aaaccaatgaatcactcttgatacttagagcaattcctaaaggtataagagacaagggagccaaaaccaaagagctggccacgtctgcaagccagagcgcggtgagcacgctgagggacg

SEQ ID NO: 126230 - DNA, 120 bp, Artificial Sequence
  ENSG00000101680_51 (sequence is synthesized)
tggcggggctgagccaggagctgctgaacacatctgccagcctgtccagggtcaacaccacattacgagagacacaccagcttctgcaggactccaccatggccactctgttggctggaa

SEQ ID NO: 126231 - DNA, 120 bp, Artificial Sequence
  ENSG00000101680_52 (sequence is synthesized)
gaaaagtcaaagacgtggaaattcaagccaaccttttgtttgatcggttgaagcctttgaagatgttagaggagaatctgagcagaaacctatcagaaattaaactgttgatcagccagg

SEQ ID NO: 126232 - DNA, 120 bp, Artificial Sequence
  ENSG00000101680_53 (sequence is synthesized)
cccgcaaacaagcagcttctattaaagtcgccgtgtctgcagacagagattgcatccgggcctaccagcctcagatttcctctaccaactacaataccttaacactaaatgttaagacac

SEQ ID NO: 126233 - DNA, 120 bp, Artificial Sequence
  ENSG00000101680_54 (sequence is synthesized)
aggaacccgataatcttctcttctacctcggtagcagcaccgcttctgatttccttgcagtggagatgcggcgagggagagtggccttcctgtgggacctgggctccgggtccacacgct

SEQ ID NO: 126234 - DNA, 120 bp, Artificial Sequence
  ENSG00000101680_55 (sequence is synthesized)
tggagtttccagactttcccattgatgacaacagatggcacagtatccatgtagccagatttggaaacattggttcactgagtgtaaaggaaatgagctcaaatcaaaagtcaccaacaa

SEQ ID NO: 126235 - DNA, 120 bp, Artificial Sequence
  ENSG00000101680_56 (sequence is synthesized)
aaacaagtaaatcccctgggacagctaatgttctggatgtaaacaattcaacactcatgtttgttggaggtcttggaggacaaatcaagaaatctcctgctgtgaaggttactcatttta

SEQ ID NO: 126236 - DNA, 120 bp, Artificial Sequence
  ENSG00000101680_57 (sequence is synthesized)
aaggctgcttgggggaggccttcctgaatggaaaatccataggcctatggaactatattgaaagggaaggcaagtgccgtgggtgcttcggaagctcccagaatgaagacccttccttcc

SEQ ID NO: 126237 - DNA, 120 bp, Artificial Sequence
  ENSG00000101680_58 (sequence is synthesized)
attttgacgggagtgggtactctgtcgtggagaagtcacttccggctaccgtgacccagataatcatgctttttaataccttttcacctaatggacttcttctctacctgggttcatacg

SEQ ID NO: 126238 - DNA, 120 bp, Artificial Sequence
  ENSG00000101680_59 (sequence is synthesized)
gcacaaaagactttttatccatcgagctgtttcgtggcagagtgaaggttatgactgacctgggttcaggacccattacccttttgacagacagacgttataacaatggaacctggtaca

SEQ ID NO: 126239 - DNA, 120 bp, Artificial Sequence
  ENSG00000101680_60 (sequence is synthesized)
aaattgccttccagcgaaaccggaagcaaggagtgctagcagttatcgatgcctataacaccagtaataaagaaaccaagcagggcgagactccgggagcatcttctgacctcaaccgcc

SEQ ID NO: 126240 - DNA, 120 bp, Artificial Sequence
  ENSG00000101680_61 (sequence is synthesized)
tagacaaggacccgatttatgtgggtggattaccaaggtcaagagttgtaaggagaggtgtcaccaccaaaagctttgtgggctgcatcaagaacctggaaatatccagatcaacctttg

SEQ ID NO: 126241 - DNA, 120 bp, Artificial Sequence
  ENSG00000101680_62 (sequence is synthesized)
acttactcagaaattcctatggagtgagaaaaggctgtttactggagcccatccggagtgttagcttcctgaaaggcggctacattgaattgccacccaaatctttgtcaccagaatcag

SEQ ID NO: 126242 - DNA, 120 bp, Artificial Sequence
  ENSG00000101680_63 (sequence is synthesized)
aatggctggtaacatttgccaccacgaacagcagtggcatcatcctggctgccctcggcggggatgtggagaagcggggtgatcgtgaggaagcacacgtgcccttcttttccgtcatgc

SEQ ID NO: 126243 - DNA, 120 bp, Artificial Sequence
  ENSG00000101680_64 (sequence is synthesized)
tgatcggaggcaacattgaggtacatgtcaatcctggggatgggacaggcctgagaaaagctctcctgcacgctcccacgggtacctgcagtgatggacaagcgcattccatctccttgg

SEQ ID NO: 126244 - DNA, 120 bp, Artificial Sequence
  ENSG00000101680_65 (sequence is synthesized)
tcaggaatcggagaattatcactgtccaattggatgagaacaatcctgtggaaatgaagttgggcacattagtagaaagcaggacgataaatgtgtccaatctgtacgtcgggggaattc

SEQ ID NO: 126245 - DNA, 120 bp, Artificial Sequence
  ENSG00000101680_66 (sequence is synthesized)
cagagggagaggggacgtcactgctcacaatgagaagatcgttccatggctgtatcaaaaacctgatcttcaatttggaacttttggatttcaacagtgcagttggccatgagcaagtcg

SEQ ID NO: 126246 - DNA, 120 bp, Artificial Sequence
  ENSG00000101680_67 (sequence is synthesized)
acctggacacctgctggctgtcagaaaggcctaagctggctcccgatgcagaggacagcaagctcttgccagagccccgggcttttccagaacagtgtgtggtggatgcagctctggagt

SEQ ID NO: 126247 - DNA, 120 bp, Artificial Sequence
  ENSG00000101680_68 (sequence is synthesized)
acgttcccggcgctcaccagtttggtctcacacaaaacagccatttcatcttgccttttaatcagtcggctgtcagaaagaagctctcggttgagctaagcatccgcacgttcgcctcca

SEQ ID NO: 126248 - DNA, 120 bp, Artificial Sequence
  ENSG00000101680_69 (sequence is synthesized)
gcggcctgatttactacatggctcatcagaaccaagcagactacgctgtgctccagctgcacgggggccgcctccacttcatgtttgaccttggcaaaggcagaacaaaggtctctcacc

SEQ ID NO: 126249 - DNA, 120 bp, Artificial Sequence
  ENSG00000101680_70 (sequence is synthesized)
ctgcactgctcagtgatggcaagtggcacacggtcaagacagactatgttaaaagaaaaggcttcataactgtcgacggccgagagtctcccatggtgactgtggtgggagatggaacca

SEQ ID NO: 126250 - DNA, 120 bp, Artificial Sequence
  ENSG00000101680_71 (sequence is synthesized)
tgctggatgtggagggtttgttctacctaggaggcctgccctcccagtaccaggccaggaaaattggaaatatcacccacagcatccctgcctgcattggggatgtgacggttaacagca

SEQ ID NO: 126251 - DNA, 120 bp, Artificial Sequence
  ENSG00000101680_72 (sequence is synthesized)
aacagctggacaaggacagcccggtgtctgccttcacggtgaacaggtgctacgcagtggcccaggaaggaacatactttgacggaagcggatatgcagctcttgtcaaagagggctaca

SEQ ID NO: 126252 - DNA, 120 bp, Artificial Sequence
  ENSG00000101680_73 (sequence is synthesized)
aagtccagtcagatgtgaacatcacactggagtttcgaacctcctcgcagaatggcgtcctcctggggatcagcactgccaaagtggatgccattggactagagcttgtggacggcaagg

SEQ ID NO: 126253 - DNA, 120 bp, Artificial Sequence
  ENSG00000101680_74 (sequence is synthesized)
tcttgttccatgtcaacaatggtgctggcaggataacagctgcatatgagcccaaaaccgccactgtgctctgtgatggaaaatggcacactcttcaagctaacaaaagcaaacaccgta

SEQ ID NO: 126254 - DNA, 120 bp, Artificial Sequence
  ENSG00000101680_75 (sequence is synthesized)
tcactctgattgttgacgggaacgcagttggcgctgaaagtccacacacccagtctacctcagtggacaccaacaatcccatttatgttggtggctatcctgctggtgtgaagcaaaaat

SEQ ID NO: 126255 - DNA, 120 bp, Artificial Sequence
  ENSG00000101680_76 (sequence is synthesized)
gcctgcgcagccagacctcgttccgcgggtgtttgaggaagctagctctgattaagagcccgcaggtgcagtcctttgacttcagcagagcgttcgaactgcacggagttttccttcatt

SEQ ID NO: 126256 - DNA, 120 bp, Artificial Sequence
  ENSG00000101680_77 (sequence is synthesized)
cctgtcctgggaccgagtcctgaacttcaagcagaatcctcagttggaatcattgctaatattttgaggagaagtgtatgtgtgaattaagaatctcttcagttcatatttcatttccaa

SEQ ID NO: 126257 - DNA, 120 bp, Artificial Sequence
  ENSG00000101680_78 (sequence is synthesized)
ctcaggttaagtgtttctggggagagatgttgtgtttacgttacactaaaaccacatgtgcaacaaatacctccattaaatggtctaaaatgtaaattgaattccctggctctcttttta

SEQ ID NO: 126258 - DNA, 120 bp, Artificial Sequence
  ENSG00000101680_79 (sequence is synthesized)
aacgtatttttaaaaaaatctttatacacattgaatgttctgttgattacttgatagtattttatgtttttcattttgagctttttaaaaaagtatcaatacagatgataacagatcaga

SEQ ID NO: 126259 - DNA, 120 bp, Artificial Sequence
  ENSG00000101680_80 (sequence is synthesized)
actgagatgatctttaagatcctgcccagttgttactcattctaggattccacttcataactgaaaggaaatccagtgattacaaactggcttttttctaatgtggctctctcaaaattt

SEQ ID NO: 126260 - DNA, 120 bp, Artificial Sequence
  ENSG00000101680_81 (sequence is synthesized)
ggatctgttagattgaagctcccagagagaagttttgtgcacttggagaatgtattttgcttggtcagcttatatattggttatgtttgtttgcttgtttgcattagaaatctcctgctg

SEQ ID NO: 126261 - DNA, 120 bp, Artificial Sequence
  ENSG00000101680_82 (sequence is synthesized)
ccagatccagttttctcagtttgactttagaaggtttcagccatccctgacttgaagggaaagggaaacctgggataaagctataacctggggaactgtgttctcttttttacagaaaga

SEQ ID NO: 126262 - DNA, 120 bp, Artificial Sequence
  ENSG00000101680_83 (sequence is synthesized)
tgttaccgtgcaatatttggagaccctacttgctgtcatacttcatctccctctctctagacattttagagaagtagatctcttttaaggcaaaaggaaaaaaaaaaaaagaaatcatgc

SEQ ID NO: 126263 - DNA, 120 bp, Artificial Sequence
  ENSG00000101680_84 (sequence is synthesized)
tttctgcagacttttctggattctcctttgtgtggttagactgaataatgtatgtgcaagttgaaagaccagcatcaagaagtggaatgaaatggcacaggacacacaatggaatccttg

SEQ ID NO: 126264 - DNA, 120 bp, Artificial Sequence
  ENSG00000101680_85 (sequence is synthesized)
cagaggacaaagctcttgccagagccccgggcttttccagtaggagcggcttcctttactatcagtcaggtccagtcagcaaaggagggcctaggacagagggagttaaaatggggcctt

SEQ ID NO: 126265 - DNA, 120 bp, Artificial Sequence
  ENSG00000101680_86 (sequence is synthesized)
gctgtaaaggtgcctgcgaaagctggagctggagctggagctggagctgtgctaaaaatcagagcggggacagggagggaaagggtgcctcaagcaactcagatgacacggcccaatcca

SEQ ID NO: 126266 - DNA, 120 bp, Artificial Sequence
  ENSG00000101680_87 (sequence is synthesized)
aggtgggaggcgccatctgcgcggcgggatttaatgagcaggtcgtattgcacaagcttggcacgagctgtgtgaggaggaaatgaggatgacttcccgtgacaccactctcatcgctat

SEQ ID NO: 126267 - DNA, 120 bp, Artificial Sequence
  ENSG00000101680_88 (sequence is synthesized)
gcaatgatactgacgtgggtcaaaggcagccgtctgcctctcaagattctttataggtcatgtgcttactcccacacacatttctctatggaaaaaacaggatgatgtggcactagagaa

SEQ ID NO: 126268 - DNA, 120 bp, Artificial Sequence
  ENSG00000101680_89 (sequence is synthesized)
catgaaaataagtacttcatgtaaagccattgtgcacatatttgttgctttaaaaaaaaaaaaagattcaattcattaggaaaagccagttctggccaaatattttgaatggcagccatt

SEQ ID NO: 126269 - DNA, 120 bp, Artificial Sequence
  ENSG00000101680_90 (sequence is synthesized)
gctatttttcatgttctccccttttgctttctctgtttccctggtttaaagtgtgcactctaataatttagaagatggcagaagcattcaagagcaggaccttctgagcagggcgaggct

SEQ ID NO: 126270 - DNA, 120 bp, Artificial Sequence
  ENSG00000101680_91 (sequence is synthesized)
ttgagttcggggcagttttcatggtagcatctgcctgtgctgaagcagaaaacagcatctgggacccccatgacttgggcactcttaggacagcccgcagatggttgcgtggggttcagg

SEQ ID NO: 126271 - DNA, 120 bp, Artificial Sequence
  ENSG00000101680_92 (sequence is synthesized)
ggcccttcccgcctggctcctcttgtctgcatcctgccctgtcagtgtggacctaggttcacactctgaggccctgcaaaacatgtcacctgtgggcacctccagttttccagtgcctgg

SEQ ID NO: 126272 - DNA, 120 bp, Artificial Sequence
  ENSG00000101680_93 (sequence is synthesized)
tccgcagctcgtctcggcagctgcatccttagggccattcccaaaacctcgggtcacggcgggggcctagggggacagcaaggcctttgccccttaagcctgatgaaaatttgtaggaga

SEQ ID NO: 126273 - DNA, 120 bp, Artificial Sequence
  ENSG00000101680_94 (sequence is synthesized)
gacttcagtgtccttatgaatttcagtgaagccgagtgggattaaggtgacagacagaagctctaagtgctttcttcagggagataaagcgctggcgagtgcatcatttaaaccgaagat

SEQ ID NO: 126274 - DNA, 120 bp, Artificial Sequence
  ENSG00000101680_95 (sequence is synthesized)
ggagtgagcgccaacaggcactggtggttgttgctgttctaatgggattgcttcgtagatggcccttcatggcggaacacgcgtgtgtcagtggggttcgggctgcgggtggcggctgag

SEQ ID NO: 126275 - DNA, 120 bp, Artificial Sequence
  ENSG00000101680_96 (sequence is synthesized)
attgtagaacctttagaaaaatatagaagaacaccaagtagaaactagccttctagtctttatagatatcaattcaacatttgttattaaatttcgagctcaaataatatgtcttgttct

SEQ ID NO: 126276 - DNA, 120 bp, Artificial Sequence
  ENSG00000101680_97 (sequence is synthesized)
gggttcactgtgaccaccgtgacattgtttgaattccatccatgggaatttcatgttcttgtttgcatctcatgggctggtgatttctgtctttcagtcttttggttttattttttagaa

SEQ ID NO: 126277 - DNA, 120 bp, Artificial Sequence
  ENSG00000101680_98 (sequence is synthesized)
cgggccccttgtcagtctcaatgaaaaagatacgaggagattccacttctcttactgaattgtggattttggtaacaacagatgacatttcatttatattagtgtagtgttctagaaagc

SEQ ID NO: 126278 - DNA, 120 bp, Artificial Sequence
  ENSG00000101680_99 (sequence is synthesized)
gatctttttttttttttttgtagttgagctgaaattcatataacctaaaatcgaccatttcatagtgaacaattcagcagcgtttagtgcattcacaatgttacgaggccacctttccta

SEQ ID NO: 126279 - DNA, 120 bp, Artificial Sequence
  ENSG00000101680_100 (sequence is synthesized)
tctagttgcaaacattttcatcactcaaaagcctatgccattaattagtcactccccattctcctctctccccactcctggcaaccaccaatttgctttccggctgtatagatggattta

SEQ ID NO: 126280 - DNA, 120 bp, Artificial Sequence
  ENSG00000101680_101 (sequence is synthesized)
ctattctggatattttgtacaaatggaatcatatgatgatgtcttgcatctttcacttagcatgtctttgaagttcatccccattggagcatggatcagtacttcattcctttttatggc

SEQ ID NO: 126281 - DNA, 120 bp, Artificial Sequence
  ENSG00000101680_102 (sequence is synthesized)
tgagtaatattccactgtatatacataccacagtgtgttcatcagttacttcatggatgaactttggggcatttctgccttttagctattatgaataaatgctgctatgaacatatgtgg

SEQ ID NO: 126282 - DNA, 120 bp, Artificial Sequence
  ENSG00000101680_103 (sequence is synthesized)
ataagtatttgtttgagtccctgtcttcagttcttctgggtgtatacttaggagtggaatcactggttatatgataattctatgtttaactttttgaggaactgccaaacttcttctcca

SEQ ID NO: 126283 - DNA, 120 bp, Artificial Sequence
  ENSG00000101680_104 (sequence is synthesized)
ttagtcttagtaaggttaccttcaaatcaaagtgtgcttactaagtcagcaaaaaggaatgatattagccattgctagcaagggtattgtgagatactcacgttccaattcttctagtgt

SEQ ID NO: 126284 - DNA, 120 bp, Artificial Sequence
  ENSG00000101680_105 (sequence is synthesized)
ataaactacctcttttcaatgtgtcgaaaaaaaattaaaagctttaaacattttcacatccttcaaatgtttaattctacttttcataatgttggaaacaacatcacaggcaaaacaatt

SEQ ID NO: 126285 - DNA, 120 bp, Artificial Sequence
  ENSG00000101680_106 (sequence is synthesized)
aaacattcacatgtatggtaataaaaagttggaaaatactttaaatttcattgataaaaagacaaattacaatatatctacttattggtatctaatgtagcaataaaccataaatatgag

SEQ ID NO: 126286 - DNA, 120 bp, Artificial Sequence
  ENSG00000101680_107 (sequence is synthesized)
gcaatgcagaatggaaatgtttgaaatcttcagcaataatagcataatgcagaatataaattatatgaacagagattagaaagtaacatacaaaatgtaacattgtgacagctgaagaga

SEQ ID NO: 126287 - DNA, 120 bp, Artificial Sequence
  ENSG00000101680_108 (sequence is synthesized)
ttcttaaggaattgctctactcacttgatgttaatcttctcacgttatcttcataagatgaaagttttctaaatcatatagtaatgtgttttgtctgggaaattctctatgcaacctccc

SEQ ID NO: 126288 - DNA, 120 bp, Artificial Sequence
  ENSG00000101680_109 (sequence is synthesized)
gccacagagtcttttccaaaagaacctgcttttattttatgatgaagtgcttgatttgcaaccaaatggcaaagagaaggaattcagtgttggtgcaaatcacaacgctttcatggtggt

SEQ ID NO: 126289 - DNA, 120 bp, Artificial Sequence
  ENSG00000101680_110 (sequence is synthesized)
tcactggggagtctgtggtttctgccttttcccttctggagagtggctggcttcccctttctgtgtgcatgtaaggaagcgtgtgggcatctaaattaagtctcctggatctattattgt

SEQ ID NO: 126290 - DNA, 120 bp, Artificial Sequence
  ENSG00000101680_111 (sequence is synthesized)
ctggactttcaaccccattccactttaagcattccctagtctgatgtctttgtctacccaaactcttacactgtggtggccaaaatcccgagtgccacacccacccctctctgcaccttc

SEQ ID NO: 126291 - DNA, 120 bp, Artificial Sequence
  ENSG00000101680_112 (sequence is synthesized)
tggccctcatacctgcctgtccctgggacccttctgccaagggaagatctcaaggcctggagcttggggctcccggactccatgttgctcctctctcctcctgaggtcctccagctcacc

SEQ ID NO: 126292 - DNA, 120 bp, Artificial Sequence
  ENSG00000101680_113 (sequence is synthesized)
tgccaggcttgcctgcagtctctgccatgccctgcccgtcttgttgtcattggctgtgccaccctgtcatacccccttagacctgggctcctgtctgtcttctgcagctcctgccatcac

SEQ ID NO: 126293 - DNA, 120 bp, Artificial Sequence
  ENSG00000101680_114 (sequence is synthesized)
tctctgtgaattcaacagctgcctaacacctgacctttctgtgctcaaactgtgatctgtggaaggtctttccctgctccctcctcagccagcctcttccgtggccatacccttgacttc

SEQ ID NO: 126294 - DNA, 120 bp, Artificial Sequence
  ENSG00000101680_115 (sequence is synthesized)
ttcacaggtatccatccctctcacagtctcgactttaaaagcctcctattagcacacccctttcttcttgtctccactctgtgcctccccactcctgcagtttctcagctgcatggagac

SEQ ID NO: 126295 - DNA, 120 bp, Artificial Sequence
  ENSG00000101680_116 (sequence is synthesized)
ctctaagccgctagccctaatgccctcccaccactatctcccctcttctctagccccaaatcacaattcatcccccagataggttccaggccagtgttacaggtgtcctctgcaaaatcc

SEQ ID NO: 126296 - DNA, 120 bp, Artificial Sequence
  ENSG00000101680_117 (sequence is synthesized)
cctaaccctttctctctcccactcctgcgagcccaggtaaaagccaacattccgccttctctgtgccagaacccacacgggagaccaaggccaaggagatggatgtctccttcctagctg

SEQ ID NO: 126297 - DNA, 120 bp, Artificial Sequence
  ENSG00000101680_118 (sequence is synthesized)
gtttgagctggatatcatagccgtcaatctcagatggagcctccaaacgacatggggagccagtgcattgctctaatatgttcatggtttttattctccatgactacttcctcatagctg

SEQ ID NO: 126298 - DNA, 120 bp, Artificial Sequence
  ENSG00000101680_119 (sequence is synthesized)
ctcttagctcagagccctgtgcaccgcagtccctcttcccaccccagctgatgacttgcctcgttgagaagaaagagctccttcatccgtccaccaccaaaaagaccagcccctgctttt

SEQ ID NO: 126299 - DNA, 120 bp, Artificial Sequence
  ENSG00000101680_120 (sequence is synthesized)
gttcctgaccctctatctcttctgctaccacagatgaagggtacttgttcctagcaaagcccacccagccagccccagcttgtcctctggatcccatccgccctctcctcctaggacatg

SEQ ID NO: 126300 - DNA, 120 bp, Artificial Sequence
  ENSG00000101680_121 (sequence is synthesized)
cacagcagccactcctcacagaccagcacacagatgccgctgtcaccccatcgtcagcagtgacagcaagagcagcaaactattgtgctggaggttgacacaaagatttttacacagatg

SEQ ID NO: 126301 - DNA, 120 bp, Artificial Sequence
  ENSG00000101680_122 (sequence is synthesized)
gtatttctttgccattgctgatcttcatcatcttccccaggtggaaaagagactttgtcaagtcttaacctctgtattggagacttttgtaatatttcatttatatccttgttatgccag

SEQ ID NO: 126302 - DNA, 120 bp, Artificial Sequence
  ENSG00000101680_123 (sequence is synthesized)
tagtgtttttatatatatatttcctactctatcctgcttttcttgctcaaaataagatgtcagtcattgttatttatcttgaattcaggggtccattagctatgtaatcctgggtcataa

SEQ ID NO: 126303 - DNA, 120 bp, Artificial Sequence
  ENSG00000101680_124 (sequence is synthesized)
ataatactaactacagatgtgaaaattcagctataactaaagcagctgtctcttgcctgtaggagatgttcagccaatcttttttttttaatttttattttttgagacggagtctcgctc

SEQ ID NO: 126304 - DNA, 60 bp, Artificial Sequence
  ENSG00000101680_125 (sequence is synthesized)
caccatgtcggccaggatggtctcaatcccttgaccttgtgggtgttcagccaatcttta

SEQ ID NO: 126305 - DNA, 120 bp, Artificial Sequence
  ENSG00000101680_126 (sequence is synthesized)
gagccaccacgcctggccgtgttcagccaatctttaattgacttgatatgtagttcttacatgagtccttgtggtgtcctggttataacgtggctctgagagacagcagcgcgagggggg

SEQ ID NO: 126306 - DNA, 120 bp, Artificial Sequence
  ENSG00000101680_127 (sequence is synthesized)
ctggagagcagggataatagaaaaagatgacactttgctaagggtactaactactgccaccatcaaaaagatgtttgggcttcctggcttgggatcatcttatcttcctcaaacctaacc

SEQ ID NO: 126307 - DNA, 120 bp, Artificial Sequence
  ENSG00000101680_128 (sequence is synthesized)
cccacccccatgcacaaaatcatcgtaatagtcccatcttgagtaaaaagccaataccttcttatttatactattgccaacattgctgttatttctagtaagagaatccagggcaacctc

SEQ ID NO: 126308 - DNA, 120 bp, Artificial Sequence
  ENSG00000101695_0 (sequence is synthesized)
actgagtgcttcgcagctgtctgggcgagaggcacagcgatgggctccgtgctgagcaccgacagcggcaaatcggcgcccgcctctgccaccgcgcgggccctggagcgcaggagggac

SEQ ID NO: 126309 - DNA, 120 bp, Artificial Sequence
  ENSG00000101695_1 (sequence is synthesized)
ccggagttgcccgtcacgtccttcgactgcgccgtgtgccttgaggtgttacaccagcctgtccggacccgctgtggccacgtattctgccgttcctgtattgctaccagtctaaagaac

SEQ ID NO: 126310 - DNA, 120 bp, Artificial Sequence
  ENSG00000101695_2 (sequence is synthesized)
aacaagtggacctgtccttattgccgggcatatcttccttcagaaggagttccagcaactgatgtagccaaaagaatgaaatcagagtataagaactgcgctgagtgtgacaccctggtt

SEQ ID NO: 126311 - DNA, 120 bp, Artificial Sequence
  ENSG00000101695_3 (sequence is synthesized)
tgcctcagtgaaatgagggcacatattcggacttgtcagaagtacatagataagtatggaccactacaagaacttgaggagacagcagcaaggtgtgtatgtcccttttgtcagagggaa

SEQ ID NO: 126312 - DNA, 120 bp, Artificial Sequence
  ENSG00000101695_4 (sequence is synthesized)
ctgtatgaagacagcttgctggatcattgtattactcatcacagatcggaacggaggcctgtgttctgtccactttgccgtttaatacccgatgagaatccaagcagcttcagtggcagt

SEQ ID NO: 126313 - DNA, 120 bp, Artificial Sequence
  ENSG00000101695_5 (sequence is synthesized)
ttaataagacatctgcaagttagtcacactttgttttatgatgatttcatagattttaatataattgaggaagctcttatccgaagagtcttagaccggtcacttcttgaatatgtgaat

SEQ ID NO: 126314 - DNA, 120 bp, Artificial Sequence
  ENSG00000101695_6 (sequence is synthesized)
cactcgaacaccacataattttattaaaacgaagggaaaagggaccactgaattgcaccatttaagatgctgcttgaacaaatgggagggaagttgtcaatgattgatgggcaaaaatgt

SEQ ID NO: 126315 - DNA, 120 bp, Artificial Sequence
  ENSG00000101695_7 (sequence is synthesized)
acaacacagttatgtgtttgtccatgtttattgttatagtgcatttaaaaactgctttaattttaatggtttaaatctgttttacatccttgagattcttacacatctaacaacaaaaaa

SEQ ID NO: 126316 - DNA, 120 bp, Artificial Sequence
  ENSG00000101695_8 (sequence is synthesized)
aattatctacatcagtcattgttacatggaaaagacaggtggtaggcaagtaggtggaggatctcggtttgcaaattagataatactctgtgtataatgctacatatcaataactaccat

SEQ ID NO: 126317 - DNA, 120 bp, Artificial Sequence
  ENSG00000101695_9 (sequence is synthesized)
catggttaggcacgataactaatctttgttctgtgtaaaaaaatatggagagtgaaacaaagtgcagacattcaaagaaataagaaatctgctccaatgctcttgttctaatctctaata

SEQ ID NO: 126318 - DNA, 120 bp, Artificial Sequence
  ENSG00000101695_10 (sequence is synthesized)
tcttgttctaatctctaataggttaacgttaataatcttgtatgggagttggaaaggaaaattttggaagtcaagaaagtccatttaggccggacgcggtggcttacgcttgtaatccca

SEQ ID NO: 126319 - DNA, 75 bp, Artificial Sequence
  ENSG00000101695_11 (sequence is synthesized)
caggagttcgagaccagcctggccaacactggtctctttggcgggcatctgtaataccagctacttgggaggctg

SEQ ID NO: 126320 - DNA, 120 bp, Artificial Sequence
  ENSG00000101695_12 (sequence is synthesized)
aaaaaaaaaaaaaatccatttaaccaaattgtcttacataatactgtaacaaaacaaattttgtgttagaaaagtatacttaattctttgactttttataactgcatacataagaattca

SEQ ID NO: 126321 - DNA, 120 bp, Artificial Sequence
  ENSG00000101695_13 (sequence is synthesized)
ttttcaaatatttatagcttatttagaaatatttctataatataagcaatttcttaaaaaccatcagatgatacttacagtataagtattcacatccagactttttagtagaaaacccta

SEQ ID NO: 126322 - DNA, 120 bp, Artificial Sequence
  ENSG00000101695_14 (sequence is synthesized)
cctaagggctttgatatcttttttgattgtaacattttaaaaattatgaaataaaagtactgaaaaccagacacaaaatttatagctgaatgccttattataaggaaatactcttttagg

SEQ ID NO: 126323 - DNA, 120 bp, Artificial Sequence
  ENSG00000101695_15 (sequence is synthesized)
actcagccagtcaccccacgtgtcctttttgtgtcctgtcacaattacaaccccacaaaagtaactgctagactgatttaaatggtaatcactttgttgcatttgattactgctgccaca

SEQ ID NO: 126324 - DNA, 120 bp, Artificial Sequence
  ENSG00000101695_16 (sequence is synthesized)
ctgccacacctaaatgcatatatctatattttaatattatcaatttaaagttgttattaaatgtatattttattttacatctcttttttaatctagaagttcctccttctttccagttcc

SEQ ID NO: 126325 - DNA, 120 bp, Artificial Sequence
  ENSG00000101695_17 (sequence is synthesized)
tacctggtgaagaacctgatcctaggacctatagagtttcccatactttgtattttgctgattgcacactcatggcacggttcagcacattgccctgtcctctcgatattagcacacagt

SEQ ID NO: 126326 - DNA, 120 bp, Artificial Sequence
  ENSG00000101695_18 (sequence is synthesized)
gcaggttcaggcacattgaatttgagaagacttaggttcagtcctttggcaagactgtaaatcacggtgtctttctttccttcctccttcttctctctctctctctctctctctttcctt

SEQ ID NO: 126327 - DNA, 63 bp, Artificial Sequence
  ENSG00000101695_19 (sequence is synthesized)
ttcctccttcttctctctctctctctctctctctttccttttctttctctttttttcagagtt

SEQ ID NO: 126328 - DNA, 120 bp, Artificial Sequence
  ENSG00000101695_20 (sequence is synthesized)
tgtgcccggcctacagggtttttatctaacctttctgttacaactgtacctctccttctgtactgaaagtcctggttttcaagaacacagggcacgatagaattagaacatcccacaatt

SEQ ID NO: 126329 - DNA, 120 bp, Artificial Sequence
  ENSG00000101695_21 (sequence is synthesized)
actcatttcttttatttatcttacacttacagctgtctcagaataacaatagaaatacaaccacaaataatatggcaattgaaacaattaaaaagttttcatttgcttttctcattcttt

SEQ ID NO: 126330 - DNA, 74 bp, Artificial Sequence
  ENSG00000101695_22 (sequence is synthesized)
gattatcaggatttctccacattggtcaggctggcctcaaactctcgacctcaggtgatccgcctgcctcggcc

SEQ ID NO: 126331 - DNA, 120 bp, Artificial Sequence
  ENSG00000101695_23 (sequence is synthesized)
ttacaggtgtgagccactgcgcccgacatcccaatttttaaaatagttatactatgtcaacattttcagaacatactggtatagcatactgtactttcttccttttatcccccatttatt

SEQ ID NO: 126332 - DNA, 120 bp, Artificial Sequence
  ENSG00000101695_24 (sequence is synthesized)
catactgtactttcttccttttatcccccatttattcttagttcttcaactatatatttaacacttgcccccagttttgttttgttttgttttgaggaggaatcttgctctgttgcccag

SEQ ID NO: 126333 - DNA, 120 bp, Artificial Sequence
  ENSG00000101695_25 (sequence is synthesized)
caccgcgccaggcaattgcccccagtttttatttgatggctctgactgtttctcatatctgactctttaattatgaatccagggcatagattagtatctccatcttgtaaggatgcaaag

SEQ ID NO: 126334 - DNA, 120 bp, Artificial Sequence
  ENSG00000101695_26 (sequence is synthesized)
aagccatgaaaataagtaatatcaactcctgaggataaaacgttacttgactagagttagctttttaattgtaatcatttataaacttctttgttccttacatataagcatagtcataac

SEQ ID NO: 126335 - DNA, 120 bp, Artificial Sequence
  ENSG00000101695_27 (sequence is synthesized)
catggtacccaaaattttctataagttattgtaactccttaaaggtcttgctacagttcttttatccagtacaaataattgggaaaatgtaaagctgaatgaaatctagtgagcctcata

SEQ ID NO: 126336 - DNA, 120 bp, Artificial Sequence
  ENSG00000101695_28 (sequence is synthesized)
tcctcccttttagatattgattttaagtttgcttttcacagctgctaaaaagtaacaactgatttttagttccacaacctctctttcttcaatttagatggatcatacaataaagcaaaa

SEQ ID NO: 126337 - DNA, 87 bp, Artificial Sequence
  ENSG00000101695_29 (sequence is synthesized)
tttgggaggctgaggtggagggtctcaatagtgagactctttctatttaaacaaaaacaaaaacaaacaaacaaacaaacaaaaagc

SEQ ID NO: 126338 - DNA, 120 bp, Artificial Sequence
  ENSG00000101695_30 (sequence is synthesized)
tgagactctttctatttaaacaaaaacaaaaacaaacaaacaaacaaacaaaaagctgggcatgatgcacacctttagtttcagctactaaggaggctgaggttggaggatcacttgagc

SEQ ID NO: 126339 - DNA, 120 bp, Artificial Sequence
  ENSG00000101695_31 (sequence is synthesized)
aacagagcaagaccctgtctccaaaaacataaataattaaatataaataaaaataaagcaaaatctgttgggaaacgagaaaaaggagaggaatttttcaggaataatcataaaaagaaa

SEQ ID NO: 126340 - DNA, 120 bp, Artificial Sequence
  ENSG00000101695_32 (sequence is synthesized)
aaaaggagaggaatttttcaggaataatcataaaaagaaatgatcatcagactgaaagtccagagcctgagaaatgaaaacatatttttaagcattggtgttgaccatgcagacaaactt

SEQ ID NO: 126341 - DNA, 120 bp, Artificial Sequence
  ENSG00000101695_33 (sequence is synthesized)
ttgttaattcagagcgatacaaaaggcactttgaatctataaaacttgaaaaagttaaaaattgtatgtcggataaagctttaagtcatctgtcactattaacctcagtgcagcaattct

SEQ ID NO: 126342 - DNA, 120 bp, Artificial Sequence
  ENSG00000101695_34 (sequence is synthesized)
gactcctgtgcctggattccttttatgataattttgccacctacaggacagattaggtgctggtcgcctgaattattttgtgttctgaattattttgagctctaaaatggtaaagtacaa

SEQ ID NO: 126343 - DNA, 120 bp, Artificial Sequence
  ENSG00000101695_35 (sequence is synthesized)
atactcattgttttactgtgcctttggccttttataaaaaggtatttataattcgttgataaaaaccaatatttgaagctgttgattaccaacaaaaaagtttcactctctttatagtgc

SEQ ID NO: 126344 - DNA, 120 bp, Artificial Sequence
  ENSG00000101695_36 (sequence is synthesized)
ttcaggatacaactttttcagggccttattagagaaaaactgattcacatgttattcttctaaagctaaattattaaaatgtaggttgaaagattggattgattgtgaatctacactaaa

SEQ ID NO: 126345 - DNA, 120 bp, Artificial Sequence
  ENSG00000101695_37 (sequence is synthesized)
gatatggttccaggcagacctccttagagacctccaggcagacctccttactgtcttcagtgatgtttaatttcattactgttactgggtgccaagtgtctttcatttggaagtgaactt

SEQ ID NO: 126346 - DNA, 120 bp, Artificial Sequence
  ENSG00000101695_38 (sequence is synthesized)
actccagttattgaatgtttatcatatcataatttgcatttttccaacattgaaggtattttaaaaagtcactaagagattcattcttttattattcaactacaaaaaaatagtgtaatg

SEQ ID NO: 126347 - DNA, 120 bp, Artificial Sequence
  ENSG00000101695_39 (sequence is synthesized)
atcagaatttaaaatgtgtgattctttttcttctgtaagtatgtattgctatgataaataaaaaatggcaggaccattgtttttattaaaatatctactgtgtctattcttaaacattaa

SEQ ID NO: 126348 - DNA, 120 bp, Artificial Sequence
  ENSG00000101695_40 (sequence is synthesized)
aggcgtgagccaccgcgcccggccgtatatgctttttagaagaaccaaattcaagaacttaacagttggatcttctaagtatcggagaatttgaaaaatagtagtattcttgataatgcc

SEQ ID NO: 126349 - DNA, 120 bp, Artificial Sequence
  ENSG00000101695_41 (sequence is synthesized)
ttaatttttggtggtactggtgttacgaatgcatctatttagtcagttgatcccacagtatgaccttacttgaaagttaaaaggctggatcgcataagctttcattgagcccttttttaa

SEQ ID NO: 126350 - DNA, 120 bp, Artificial Sequence
  ENSG00000101695_42 (sequence is synthesized)
tcttatttttacattatgttttcatgctgtcttgttaagcttacctttccgatccaagtgaataaaattatagaggaaaaaatgtgtatatagctatagtgttgagtattagcattaagt

SEQ ID NO: 126351 - DNA, 120 bp, Artificial Sequence
  ENSG00000101745_0 (sequence is synthesized)
gcggggcgacgctgtcctgggagcgaggaggctgtggtgagagacggaccgagaccggagatgttttcaagcccggctccggcggctttacaggcggctgcagcggcgacgaagacaacg

SEQ ID NO: 126352 - DNA, 120 bp, Artificial Sequence
  ENSG00000101745_1 (sequence is synthesized)
acagcgacggctacgccgaagcactcgttccgggggtgaagcctcctgcgccggccttgcctcggatccaggatgagaagactgataaaagaagaagctagctgaacagctgtaaaatgc

SEQ ID NO: 126353 - DNA, 120 bp, Artificial Sequence
  ENSG00000101745_2 (sequence is synthesized)
ccaaatctgggttcacaaaaccaattcagagtgaaaattctgacagtgacagcaatatggtagagaaaccatatggaagaaagagtaaagacaagattgcatcctacagcaaaactccaa

SEQ ID NO: 126354 - DNA, 120 bp, Artificial Sequence
  ENSG00000101745_3 (sequence is synthesized)
aaattgaacgaagtgatgtgagcaaggagatgaaagagaaatcatccatgaaacgtaaacttccttttactattagcccatcaagaaatgaagaacgagattcagacacagattcagatc

SEQ ID NO: 126355 - DNA, 120 bp, Artificial Sequence
  ENSG00000101745_4 (sequence is synthesized)
caggacatacaagtgaaaattggggggagagacttatatcttcttacaggacatactcagagaaagaaggtccagaaaagaagaagacaaaaaaggaagctggaaataagaaatccacac

SEQ ID NO: 126356 - DNA, 120 bp, Artificial Sequence
  ENSG00000101745_5 (sequence is synthesized)
cagttagcattctttttggttatccactctctgagcgaaaacagatggcacttcttatgcagatgacagcaagagacaacagtccagattccacaccaaatcatccatcacaaacaacgc

SEQ ID NO: 126357 - DNA, 120 bp, Artificial Sequence
  ENSG00000101745_6 (sequence is synthesized)
ctgcccaaaagaaaactcccagttcttcatctcgacagaaagataaagttaataaaagaaatgaacgtggtgaaactcctttacacatggctgctattcgaggagatgtgaaacaagtta

SEQ ID NO: 126358 - DNA, 120 bp, Artificial Sequence
  ENSG00000101745_7 (sequence is synthesized)
aagaattaataagtttaggggcaaatgtgaatgtgaaagattttgcaggttggacaccactgcatgaagcttgcaatgttggatattacgatgttgctaagatacttatagcagctggag

SEQ ID NO: 126359 - DNA, 120 bp, Artificial Sequence
  ENSG00000101745_8 (sequence is synthesized)
cagatgttaacacacaaggattagatgatgacactccactccatgattctgctagtagtgggcacagagatatagtaaagctgttacttcgtcacggtggaaatccatttcaagctaata

SEQ ID NO: 126360 - DNA, 120 bp, Artificial Sequence
  ENSG00000101745_9 (sequence is synthesized)
aacatggggagcgtccagtggatgtagcagaaacagaggagttggagttgctactaaaaagagaggtgcctttatctgatgatgatgaaagttacacagattccgaagaggctcaatctg

SEQ ID NO: 126361 - DNA, 120 bp, Artificial Sequence
  ENSG00000101745_10 (sequence is synthesized)
taaatccttctagtgttgatgaaaatattgactctgaaacagagaaagactctctcatctgtgaaagtaaacagatacttcccagtaaaacacctcttccatctgcccttgatgagtatg

SEQ ID NO: 126362 - DNA, 120 bp, Artificial Sequence
  ENSG00000101745_11 (sequence is synthesized)
agttcaaagatgatgatgatgaagaaattaataagatgattgatgataggcatattcttaggaaagaacaacgaaaagaaaatgaacctgaagcagaaaaaactcatttatttgcaaaac

SEQ ID NO: 126363 - DNA, 120 bp, Artificial Sequence
  ENSG00000101745_12 (sequence is synthesized)
aggagaaagccttctatcctaaatcatttaaaagtaaaaaacaaaagccatctagggtcttatattcaagtactgaaagttctgatgaagaagctcttcagaataaaaagatttctactt

SEQ ID NO: 126364 - DNA, 120 bp, Artificial Sequence
  ENSG00000101745_13 (sequence is synthesized)
catgttccgtcatccctgaaacatcaaattctgatatgcaaaccaaaaaggaatatgtagtttcaggtgaacacaaacagaaaggcaaagttaaaagaaaattgaaaaatcagaataaaa

SEQ ID NO: 126365 - DNA, 120 bp, Artificial Sequence
  ENSG00000101745_14 (sequence is synthesized)
ataaagagaaccaagagctaaagcaagaaaaggaaggaaaagaaaatacaagaataacaaacttgacagtaaatactggactagattgttcagaaaagaccagagaggaggggaacttta

SEQ ID NO: 126366 - DNA, 120 bp, Artificial Sequence
  ENSG00000101745_15 (sequence is synthesized)
ggaaatcttttagcccaaaagatgatacttcattacatttatttcatatttccactggtaaatctcccaaacattcttgtggattaagtgaaaaacagtcaacaccactaaaacaagaac

SEQ ID NO: 126367 - DNA, 120 bp, Artificial Sequence
  ENSG00000101745_16 (sequence is synthesized)
atactaaaacatgtttatcaccaggaagttctgaaatgtcattacagcctgatcttgttcggtatgataatacagaatctgaattcttgccagaaagttcaagtgtaaaatcttgtaagc

SEQ ID NO: 126368 - DNA, 120 bp, Artificial Sequence
  ENSG00000101745_17 (sequence is synthesized)
ataaggaaaaaagcaaacatcagaaagatttccacttagaatttggtgaaaaatcaaatgccaaaataaaggatgaagatcatagtccaacatttgaaaattcagattgcacactgaaaa

SEQ ID NO: 126369 - DNA, 120 bp, Artificial Sequence
  ENSG00000101745_18 (sequence is synthesized)
aaatggataaagaaggtaaaacattaaaaaaacataaattgaagcataaagagagggaaaaagaaaagcataaaaaagaaattgaaggtgaaaaggaaaaatacaaaactaaggatagtg

SEQ ID NO: 126370 - DNA, 120 bp, Artificial Sequence
  ENSG00000101745_19 (sequence is synthesized)
ccaaagaactgcagaggagtgtggaatttgatagagaattttggaaagagaatttttttaaaagtgatgaaactgaagatctctttttaaatatggaacatgaatccttaacattagaaa

SEQ ID NO: 126371 - DNA, 120 bp, Artificial Sequence
  ENSG00000101745_20 (sequence is synthesized)
aaaaatcaaaattggaaaaaaacatcaaagatgataaatcaaccaaggaaaagcatgtgtcaaaagagaggaactttaaagaggaacgagacaagattaaaaaggaaagcgagaaatctt

SEQ ID NO: 126372 - DNA, 120 bp, Artificial Sequence
  ENSG00000101745_21 (sequence is synthesized)
ttagggaggaaaaaataaaagatctaaaagaagagagagaaaacatacccacagataaagactcagaatttacttctttgggtatgagtgccattgaggaatctatagggcttcatttag

SEQ ID NO: 126373 - DNA, 120 bp, Artificial Sequence
  ENSG00000101745_22 (sequence is synthesized)
tggaaaaggaaatagacattgaaaaacaagaaaagcatataaaggaaagtaaagaaaaacctgagaagcgatctcaaattaaagaaaaggacattgagaagatggaaagaaaaacctttg

SEQ ID NO: 126374 - DNA, 120 bp, Artificial Sequence
  ENSG00000101745_23 (sequence is synthesized)
aaaaagaaaagaagataaaacatgagcataagtcagaaaaagacaaattagatcttagtgaatgtgttgataaaataaaagaaaaggacaagctatattcgcatcacacagaaaaatgcc

SEQ ID NO: 126375 - DNA, 120 bp, Artificial Sequence
  ENSG00000101745_24 (sequence is synthesized)
ataaagaaggtgagaagagcaaaaatactgctgctattaaaaaaactgacgacagagagaaaagtagagaaaagatggataggaaacatgacaaagaaaagcctgaaaaagagaggcatc

SEQ ID NO: 126376 - DNA, 120 bp, Artificial Sequence
  ENSG00000101745_25 (sequence is synthesized)
tagcagaaagcaaagaaaagcacttgatggagaaaaaaaataaacaatcagataatagtgaatacagtaaatcagaaaaaggcaaaaataaagaaaaagacagggagctagataaaaagg

SEQ ID NO: 126377 - DNA, 120 bp, Artificial Sequence
  ENSG00000101745_26 (sequence is synthesized)
aaaaatctagagataaagaaagtataaatataactaactccaaacacatacaggaagaaaaaaaatcaagtatagtagacggtaataaagcacaacatgaaaaacccttatcccttaaag

SEQ ID NO: 126378 - DNA, 120 bp, Artificial Sequence
  ENSG00000101745_27 (sequence is synthesized)
aaaaaacaaaagatgaacctttgaaaactccagatggaaaagaaaaagataaaaaagataaagatatagatagatacaaagaacgagacaaacataaagataaaattcaaataaatagct

SEQ ID NO: 126379 - DNA, 120 bp, Artificial Sequence
  ENSG00000101745_28 (sequence is synthesized)
tactcaaactaaaatctgaagcagataagcctaaacctaagtcatcaccagcatcaaaagatacccgacctaaagaaaagaggttagtgaatgatgatttaatgcagacaagttttgaac

SEQ ID NO: 126380 - DNA, 120 bp, Artificial Sequence
  ENSG00000101745_29 (sequence is synthesized)
gaatgctaagccttaaagacctagaaatagaacagtggcacaaaaaacataaggaaaaaattaagcaaaaagaaaaggaacggttgagaaaccgaaactgtttagaacttaaaataaaag

SEQ ID NO: 126381 - DNA, 120 bp, Artificial Sequence
  ENSG00000101745_30 (sequence is synthesized)
ataaagaaaaaacaaagcatacaccaactgaatccaaaaataaagaacttactaggtcaaagagttcagaagtgactgatgcatataccaaggagaaacaacctaaagatgctgtaagta

SEQ ID NO: 126382 - DNA, 120 bp, Artificial Sequence
  ENSG00000101745_31 (sequence is synthesized)
acagatcacaatctgttgacaccaaaaatgtaatgactttagggaagtcatcttttgtttcagataatagcttaaacaggtctcctagatcagaaaatgaaaagccgggtctcagctcca

SEQ ID NO: 126383 - DNA, 120 bp, Artificial Sequence
  ENSG00000101745_32 (sequence is synthesized)
gatctgtatccatgatttctgttgctagttcagaagattcctgccatactacagtgacaaccccaaggcctccagttgagtatgactctgactttatgttagagagttcagaatcccaaa

SEQ ID NO: 126384 - DNA, 120 bp, Artificial Sequence
  ENSG00000101745_33 (sequence is synthesized)
tgtccttttcccagtcaccttttttgtcaattgccaaatctcctgctcttcatgaaagggaattggacagcctggctgacttgccggagcggattaaaccaccatatgcaaacagacttt

SEQ ID NO: 126385 - DNA, 120 bp, Artificial Sequence
  ENSG00000101745_34 (sequence is synthesized)
caacatcccatcttaggtcatcttctgtagaagatgttaaactaattataagcgaggggagacctaccatagaagttcgaagatgtagcatgccttctgtcatttgtgaacataccaaac

SEQ ID NO: 126386 - DNA, 120 bp, Artificial Sequence
  ENSG00000101745_35 (sequence is synthesized)
aattccaaacaatatcagaagagagcaatcaaggtagcttattaactgtgccaggagatactagtccttctcccaaacctgaggtattctcaaatgtgcctgaaagagacctttcaaatg

SEQ ID NO: 126387 - DNA, 120 bp, Artificial Sequence
  ENSG00000101745_36 (sequence is synthesized)
tatctaacatacattccagttttgcaacttctccaactggagcttcaaacagcaagtatgtttcagctgatagaaatctcatcaagaatactgccccagtgaacactgtaatggacagtc

SEQ ID NO: 126388 - DNA, 120 bp, Artificial Sequence
  ENSG00000101745_37 (sequence is synthesized)
cagtgcatttagagccatctagtcaggttggtgtgatccagaataaatcatgggagatgcctgttgatagactagagacattaagcaccagagactttatctgcccaaattctaacatac

SEQ ID NO: 126389 - DNA, 120 bp, Artificial Sequence
  ENSG00000101745_38 (sequence is synthesized)
ctgatcaagaatcctctcttcagagtttttgtaattctgaaaataaggtattgaaagaaaatgctgattttttatccctgcgccagactgaactgccaggaaactcttgtgctcaggatc

SEQ ID NO: 126390 - DNA, 120 bp, Artificial Sequence
  ENSG00000101745_39 (sequence is synthesized)
cggcatcctttatgcctccacagcagccttgctctttccccagccaatcactttcagatgctgaatcgatttctaaacatatgtctttgtcatatgttgctaatcaagagccaggtattt

SEQ ID NO: 126391 - DNA, 120 bp, Artificial Sequence
  ENSG00000101745_40 (sequence is synthesized)
tacaacaaaaaaatgcagttcagattattagttctgctttagatactgataatgaatctacaaaagatacagaaaatacttttgtcctaggagatgttcaaaaaacagatgcctttgtcc

SEQ ID NO: 126392 - DNA, 120 bp, Artificial Sequence
  ENSG00000101745_41 (sequence is synthesized)
cagtgtactctgacagcactattcaagaagcatcaccaaactttgagaaagcttatactttacctgtgttaccatcagaaaaggactttaatggaagtgatgcctctacccagctaaata

SEQ ID NO: 126393 - DNA, 120 bp, Artificial Sequence
  ENSG00000101745_42 (sequence is synthesized)
cacattatgcatttagcaaactaacttacaagtcttccagtggccatgaagttgagaatagcacaactgatactcaggtcatttcacatgaaaaagaaaacaaactggagagtttggttt

SEQ ID NO: 126394 - DNA, 120 bp, Artificial Sequence
  ENSG00000101745_43 (sequence is synthesized)
taactcatttgagtaggtgtgattctgatttatgtgaaatgaatgcagggatgccaaaaggaaacctaaatgaacaagatccaaaacattgtcctgaaagtgaaaagtgtttgctttcca

SEQ ID NO: 126395 - DNA, 120 bp, Artificial Sequence
  ENSG00000101745_44 (sequence is synthesized)
tagaagatgaggaatctcaacaaagcattttatcaagtctggaaaaccattcacagcagtcaactcaaccagaaatgcataaatatggtcagttagttaaagtagaattagaagaaaatg

SEQ ID NO: 126396 - DNA, 120 bp, Artificial Sequence
  ENSG00000101745_45 (sequence is synthesized)
ccgaagatgataaaactgaaaaccaaatccctcaaagaatgactagaaacaaagcaaatacaatggcaaatcaaagcaaacagattcttgctagctgtacactattatcagaaaaagaca

SEQ ID NO: 126397 - DNA, 120 bp, Artificial Sequence
  ENSG00000101745_46 (sequence is synthesized)
gtgaatcctcatctcctagaggaagaataagattaactgaagatgacgatcctcaaattcaccatccacggaaaaggaaagtgtcacgtgtacctcagcctgtgcaagtgagtccctctt

SEQ ID NO: 126398 - DNA, 120 bp, Artificial Sequence
  ENSG00000101745_47 (sequence is synthesized)
acaagcaaaagagaaaactcagcaatctctggcagccattgtagattctctaaaactagatgagattcagccatacagttcagagagagcaaatccatattttgaatacttgcacataag

SEQ ID NO: 126399 - DNA, 120 bp, Artificial Sequence
  ENSG00000101745_48 (sequence is synthesized)
gaaaaaaatagaagaaaaacgcaaattactgtgtagtgtgattcctcaagcacctcagtactatgacgaatatgtaacatttaacggatcatatctcctggatggaaaccccttaagcaa

SEQ ID NO: 126400 - DNA, 120 bp, Artificial Sequence
  ENSG00000101745_49 (sequence is synthesized)
gatttgtattcccacaattacaccaccaccttcactgtcagatccacttaaagagctttttcgacaacaggaagttgtaaggatgaaactacgtttgcaacacagtattgaaagggaaaa

SEQ ID NO: 126401 - DNA, 120 bp, Artificial Sequence
  ENSG00000101745_50 (sequence is synthesized)
actcattgtatccaacgaacaagaagttttgcgagttcattacagagctgcaagaacattggcaaatcaaacactgccatttagtgcttgtactgttttgctggatgccgaagtatacaa

SEQ ID NO: 126402 - DNA, 120 bp, Artificial Sequence
  ENSG00000101745_51 (sequence is synthesized)
tgtaccattggactctcagtctgatgacagtaaaacttctgtgagggatcgctttaatgcaagacaattcatgtcttggttacaagatgtggatgataaatttgacaaattaaagacctg

SEQ ID NO: 126403 - DNA, 120 bp, Artificial Sequence
  ENSG00000101745_52 (sequence is synthesized)
tcttttaatgaggcaacaacatgaagctgcggctttaaatgctgtccagaggttagaatggcagctcaaactccaggaacttgatcctgccacctataaatctatcagcatttacgaaat

SEQ ID NO: 126404 - DNA, 120 bp, Artificial Sequence
  ENSG00000101745_53 (sequence is synthesized)
ccaggagttttatgttccccttgttgatgttaacgacgactttgaattgactcctatatagcagtcagtacttcctgatggtattgtcctaaactggtgatgctcaagcattatactgtg

SEQ ID NO: 126405 - DNA, 120 bp, Artificial Sequence
  ENSG00000101745_54 (sequence is synthesized)
gaatactgccttttgacaaaaatactcatgcctttacaattgttagtaaagttcgattatagttggttatgtagtaaacactgtcattttataaaaaatgagaattattttggatcttag

SEQ ID NO: 126406 - DNA, 120 bp, Artificial Sequence
  ENSG00000101745_55 (sequence is synthesized)
atccaaacacagtttctaatagaaaactattatttatattgggaaaggtaactattgcattagagcatgttggcagactggtaggtatttaaaaagttgagaatctgctaacagcgctgg

SEQ ID NO: 126407 - DNA, 120 bp, Artificial Sequence
  ENSG00000101745_56 (sequence is synthesized)
aagttgttagcgctctaagtaataagataaccactagtattcaaatctctttcaggttttattaaaaaatatatatcaataaactaaaaggttcaattcctaccaaatagtttctaatgt

SEQ ID NO: 126408 - DNA, 120 bp, Artificial Sequence
  ENSG00000101745_57 (sequence is synthesized)
gggagaaaaacttggcacaaaatttcttcagtttattatctgtaaattgtacagttttctttttgaaagttttaatattgtcttcctttttaataacttattttatacatattgtgcaga

SEQ ID NO: 126409 - DNA, 120 bp, Artificial Sequence
  ENSG00000101745_58 (sequence is synthesized)
tgtaaatcttgtaattaatggtcaaactgtataaagggattggtagtcaaaacatgtacaaagaaatacctgtaaaactgttttgtctcatgttttattggaccaaagttgtggtttgta

SEQ ID NO: 126410 - DNA, 120 bp, Artificial Sequence
  ENSG00000101745_59 (sequence is synthesized)
tggagtgtagtagtagtgtgtacaggtagaaaacttttaaatacagcatgcaggtgtttcagttagcttgttttcatcaccataactgcaaagatgtggcttagttgtattgcatgcttc

SEQ ID NO: 126411 - DNA, 120 bp, Artificial Sequence
  ENSG00000101745_60 (sequence is synthesized)
ctataatttaactctccataattgatgcctgcagtagtgtaaggcatttcatactagtctcctctagtagacctgtgacttactgtgttggacatattatttagacttagtcatacaaag

SEQ ID NO: 126412 - DNA, 120 bp, Artificial Sequence
  ENSG00000101745_61 (sequence is synthesized)
aaacttagctcttttttcatctcacagtaaagcctatttccccaggaaaaaaataaatgcctttgaatgaaaattctgaaattgtaaatgtctattttaatattcacctatgaaagaatc

SEQ ID NO: 126413 - DNA, 120 bp, Artificial Sequence
  ENSG00000101745_62 (sequence is synthesized)
tgtgaatatatgtaaatacgtttaataaattttattggtcatgttaaatcattgtaaaacttttttacattgcttaatgttttaagcttaatagcctttgcacttttaaaataaaaacca

SEQ ID NO: 126414 - DNA, 120 bp, Artificial Sequence
  ENSG00000101745_63 (sequence is synthesized)
agtatgcaaatcaaagatatttggtagtcaaaataagtaaaagaaatataggaatattccagtcaatctctgaaatgtttatgaaaaacaggttaatatgttgtatttttttccttgtat

SEQ ID NO: 126415 - DNA, 120 bp, Artificial Sequence
  ENSG00000101745_64 (sequence is synthesized)
caagatgcaaaacataatttgcaaaattttataattgaaataaaacttggtatgctgttttataataaattagcaatatactttaaaaaaaatccagtttctcctataacatgatgtaaa

SEQ ID NO: 126416 - DNA, 120 bp, Artificial Sequence
  ENSG00000101745_65 (sequence is synthesized)
ttaaatattcaggaatatttcaggtctgaaatctgctgctgaacttgttagacatttttgaaaggaaaattaggttagcgtacaatttatcataaatatatgaggtaaaatttgcaaaac

SEQ ID NO: 126417 - DNA, 120 bp, Artificial Sequence
  ENSG00000101745_66 (sequence is synthesized)
tttccacagtactttcttgaattataatactgaatgttttctgttccgatagagaaaagtgaagcaaatatgtgaggaatgaagtgatctagtgcaagttggtaattccagctaatggga

SEQ ID NO: 126418 - DNA, 120 bp, Artificial Sequence
  ENSG00000101745_67 (sequence is synthesized)
gagaatgtaaatgtgcaaaggtacatattaagcttagggatttttgaatttttacgtcagtttatattttaattcttactgtacttggcatgcgcaataaagcagcacatgtaaaaaaaa

SEQ ID NO: 126419 - DNA, 120 bp, Artificial Sequence
  ENSG00000101745_68 (sequence is synthesized)
aatacacagtgcaaggactttattataaaggttggatgtagttttccttagaaatttaggtgagagattttggccttttttattggataaattgggccagaaaggcagggtagatttcga

SEQ ID NO: 126420 - DNA, 120 bp, Artificial Sequence
  ENSG00000101745_69 (sequence is synthesized)
agcactggttctgttgaagttaagtttattaagcctgggaacattaaaagctaatttataaaagcaatactttttaatatgaaaacttactgcaaagtttgtttatacttttgcctaaaa

SEQ ID NO: 126421 - DNA, 120 bp, Artificial Sequence
  ENSG00000101745_70 (sequence is synthesized)
aggaaattggatgggatactgtggcaaatcataaaaaaccagataattgaactttgaagttatagaaaatcagagaggggtaagtttatagggcattttgttctgatggttcaaccagag

SEQ ID NO: 126422 - DNA, 120 bp, Artificial Sequence
  ENSG00000101745_71 (sequence is synthesized)
gtctgggaaatagcactgttggcccaaacagaacaggcttttagaagataaaagcgacaagaaggaatctggtgaattttagtcatcccagctttttagtcttaaccacagttctcactc

SEQ ID NO: 126423 - DNA, 120 bp, Artificial Sequence
  ENSG00000101745_72 (sequence is synthesized)
tcttaaatggtacctcaaaaagctggagcctctctgccatgattatgcttctacaaatttcttttataaagagactcaaagctaatgatagcttaaaagaaaagttaatgccttctcatt

SEQ ID NO: 126424 - DNA, 120 bp, Artificial Sequence
  ENSG00000101745_73 (sequence is synthesized)
ggaaatgtataatcaaataagtagttaagggcttttggtattaaagatattctgaagctctgaaatgctagaaaaaaatttggaatggagtatatgcctgaaaaggttttggattcagaa

SEQ ID NO: 126425 - DNA, 120 bp, Artificial Sequence
  ENSG00000101745_74 (sequence is synthesized)
agaaaaaggatggttagtttaatcagtgattctttttaaactcttcaaatatcatgaacaagatactaaattgtacctaaggatttgtatttctttacaatttgttctaaatatctgttt

SEQ ID NO: 126426 - DNA, 120 bp, Artificial Sequence
  ENSG00000101745_75 (sequence is synthesized)
aatgactagttgatatttgtgcatgttatttaataaagagttatatttttatagaaaaaaagagtgaaatgtgtgctaactgtttttttacttaattttacttgggcagctagcaaaatt

SEQ ID NO: 126427 - DNA, 120 bp, Artificial Sequence
  ENSG00000101745_76 (sequence is synthesized)
gcagaaatatgcatcctgggaaaagaaacagcctttgaagaattagcctttcaagttcaaatctatttaataatgagaagtctcacaagtgaatttttaagtacaggcatacctcagacg

SEQ ID NO: 126428 - DNA, 120 bp, Artificial Sequence
  ENSG00000101745_77 (sequence is synthesized)
acaagtgaatttttaagtacaggcatacctcagacgtactttaggttccagaccatctcagtaaagcaaataccacaacaaagcgagtcaggaggaattttttggtttcccagtgcatat

SEQ ID NO: 126429 - DNA, 120 bp, Artificial Sequence
  ENSG00000101745_78 (sequence is synthesized)
cattatgtctaaaaatatgtacataagtttaaaaatattttattgctaaaaatggtaacaaagtgagcacatgctgttggaaaaagagcaccaatagacttgcttgaagcagggttgcca

SEQ ID NO: 126430 - DNA, 120 bp, Artificial Sequence
  ENSG00000101745_79 (sequence is synthesized)
caaaccttcaatttgtaaaaaacgccaatatgtacaaagcacaataaagcaaagcacaatagaacaggattgcctgtattagacatgctacaaacttcataactggaaacatctcaaaga

SEQ ID NO: 126431 - DNA, 120 bp, Artificial Sequence
  ENSG00000101745_80 (sequence is synthesized)
ccccatgaagctcatttgaatgggacttaacaattagacagttattttagaaattgagtgcagacctaaatacatagttttccaaaaagaaaattattgtctctgatatcttaaaacata

SEQ ID NO: 126432 - DNA, 120 bp, Artificial Sequence
  ENSG00000101745_81 (sequence is synthesized)
aaaacccaaaattttatatagaagaaattgactctgtaaaacgcaatgaaatagtcctctttttaaacagtttaaaggaagcattttcaccgtttgtaaaaattatttttaaatatttag

SEQ ID NO: 126433 - DNA, 120 bp, Artificial Sequence
  ENSG00000101745_82 (sequence is synthesized)
ggcaaaatttttgttagataataatggaaaagcttgtgtgagtttagtggttaaaatatcttgtaattcatcattatttaagtgacttcttgggagccgtctttgtacctaaaatggagt

SEQ ID NO: 126434 - DNA, 120 bp, Artificial Sequence
  ENSG00000101745_83 (sequence is synthesized)
ttttttttaagcctccacagagatagtcacccaaagtatttccagtcagtaaaagtagaattcatagaaaaaactgaggcaaattaaaacaattccattaatcaaaatggctttaaacaa

SEQ ID NO: 126435 - DNA, 120 bp, Artificial Sequence
  ENSG00000101745_84 (sequence is synthesized)
attaagtattagcataaaaatagcaaaaagtacaactaaaaaaatggttgggttttcccagtggttaaatgctatataataactgcaaataaaagtttttttgtacatggacagcgtcct

SEQ ID NO: 126436 - DNA, 89 bp, Artificial Sequence
  ENSG00000101745_85 (sequence is synthesized)
ccaagcgtgacggtgcctgcctgtagtcctcttgaagcctggaggcggaggttgcagtgagctcacgccactgcaccccagcctgggca

SEQ ID NO: 126437 - DNA, 87 bp, Artificial Sequence
  ENSG00000101745_86 (sequence is synthesized)
catatgtagcatgtgtttacaagtttaaaaggcaccacctatgcactcatcactcaagagaatatcaataactttctcagttttttt

SEQ ID NO: 126438 - DNA, 120 bp, Artificial Sequence
  ENSG00000101745_87 (sequence is synthesized)
catcactcaagagaatatcaataactttctcagttttttttcattgttatagtctgtattcaataaaattacccagatcttaactaggcagtttgataaatcctgacaaatgtaaacact

SEQ ID NO: 126439 - DNA, 120 bp, Artificial Sequence
  ENSG00000101745_88 (sequence is synthesized)
catgttaccatcacccaaattaagatattgtaaaacattttcattactctagaaagttcactcatgcctctctccagtcactacccctgaggcagccactgtgctgatttcccatcacca

SEQ ID NO: 126440 - DNA, 120 bp, Artificial Sequence
  ENSG00000101745_89 (sequence is synthesized)
tacattagttgtacctagccttgaacttcatagaaatagagtcatacatacttccttgtctgccttgtttctcaacatgatgttttgaaattcatccatgttgcacctaacagtaatgag

SEQ ID NO: 126441 - DNA, 120 bp, Artificial Sequence
  ENSG00000101745_90 (sequence is synthesized)
tcgtaatttattaatgagtagtagtgtattgtacaaatttgtttattcgttctcttgttggtatttggattgtttccagtttgggactattgttaataaacctgtgaatctgcaagccta

SEQ ID NO: 126442 - DNA, 120 bp, Artificial Sequence
  ENSG00000101745_91 (sequence is synthesized)
cggccgctcgggccgggagcgtcggaggtacccgggtcctgggagaggtggatgaaatcaagaaggggaaattgctgctttagtagtgtccggggaaagagcagccactctacagttctg

SEQ ID NO: 126443 - DNA, 120 bp, Artificial Sequence
  ENSG00000101745_92 (sequence is synthesized)
tcttaaatgccagtgtaaaataaccttgccgcattggacaggcagttcccgtcatcgtttttcaagtacccacttgtgatgcttcaagacccctggagcacgtcaggttcttagatctcg

SEQ ID NO: 126444 - DNA, 120 bp, Artificial Sequence
  ENSG00000101745_93 (sequence is synthesized)
ttttgaggagtgatgtggagtgacgcatccttacagatcccaaagcgttgaataaacggttgtacaaagagatccaggatgagaagactgataaaagaagaagctagctgaacagctgta

SEQ ID NO: 126445 - DNA, 120 bp, Artificial Sequence
  ENSG00000101745_94 (sequence is synthesized)
tggtgcggggccagacggccgccgccggcttagcgggggaacttcgcctagtcctcgggctgcggtcgcagcgtcattttgcctgagttggatcacgctcgtccacccaccccgtgtaaa

SEQ ID NO: 126446 - DNA, 120 bp, Artificial Sequence
  ENSG00000101745_95 (sequence is synthesized)
ctacgagcactggcccagtaattagacttctttagaaagaaggtccagaaaagaagaagacaaaaaaggaagctggaaataagaaatccacaccagttagcattctttttggttatccac

SEQ ID NO: 126447 - DNA, 120 bp, Artificial Sequence
  ENSG00000101745_96 (sequence is synthesized)
tatgcaatcagcaaattccagattgtgagaaagccaaacagccttggttctttaacagatattttgtgtggaaaagaaacagaagaagaccatgtagaaaaaaataaaaatgatttaaaa

SEQ ID NO: 126448 - DNA, 120 bp, Artificial Sequence
  ENSG00000101745_97 (sequence is synthesized)
ctgcgccggccttgcctcgggtccgtacgggtgaggggggcgtggcgacaggaaaggaggaaggaggggcgcggtttcgagcttgtccccggcgccagggaggagatcccctcagttctg

SEQ ID NO: 126449 - DNA, 120 bp, Artificial Sequence
  ENSG00000101745_98 (sequence is synthesized)
cgctgctcccgttccccctccccagagcaagatccaggatgagaagactgataaaagaagaagctagctgaacagctgtaaaatgcccaaatctgggttcacaaaaccaattcagagtga

SEQ ID NO: 126450 - DNA, 120 bp, Artificial Sequence
  ENSG00000101746_0 (sequence is synthesized)
ggatggtcctggtcacaaaatattaaagagaccgaccgctaagggaacaggaaaaacgtccgagacagccgttgcaattacgaatggaccagacttggtagcacggggcattgattgctg

SEQ ID NO: 126451 - DNA, 120 bp, Artificial Sequence
  ENSG00000101746_1 (sequence is synthesized)
gtgcccaaccggaccctcctcccctcttcccatcccttcccccacccaaagcaggctcccgctgcggccgggacctcgcatccctgcaacgtggccggggctgcatttttcatgagccta

SEQ ID NO: 126452 - DNA, 120 bp, Artificial Sequence
  ENSG00000101746_2 (sequence is synthesized)
gggtgaacaggtgcgaagtgcgctgggagcatccggccagcggccgagcgcggggaacatggagagcgagcgcgacatgtaccgccagttccaggactggtgcctcaggacttacgggga

SEQ ID NO: 126453 - DNA, 120 bp, Artificial Sequence
  ENSG00000101746_3 (sequence is synthesized)
ctcaggcaagaccaagacggtgacccgtaaaaaatacgaacggatcgtccagctcctcaatggctccgagtcgagctccacggacaacgccaaatttaaattctgggtcaaatcgaaggg

SEQ ID NO: 126454 - DNA, 120 bp, Artificial Sequence
  ENSG00000101746_4 (sequence is synthesized)
cttccagctgggccagccggacgaggtccgcgggggaggcggcggcgccaagcaagtgctctacgtgcctgtcaagaccacggatggcgtaggggtagatgagaagctatctttacgacg

SEQ ID NO: 126455 - DNA, 120 bp, Artificial Sequence
  ENSG00000101746_5 (sequence is synthesized)
ggtagctgtggttgaagatttctttgacattatttattcgatgcatgtggaaacggggccaaatggagaacaaattcggaaacacgctggacaaaagagaacttacaaagcaatttcaga

SEQ ID NO: 126456 - DNA, 120 bp, Artificial Sequence
  ENSG00000101746_6 (sequence is synthesized)
gagctatgccttcctaccaagagaagcggtgacacgatttctaatgagctgctcagagtgccagaaaagaatgcatttaaacccagatggaacagatcataaagataatggaaaacctcc

SEQ ID NO: 126457 - DNA, 120 bp, Artificial Sequence
  ENSG00000101746_7 (sequence is synthesized)
cactttggtgaccagcatgattgactacaacatgccaattaccatggcctacatgaaacacatgaagctgcagctgctaaactcacagcaagatgaggatgaaagttcaatagaaagtga

SEQ ID NO: 126458 - DNA, 120 bp, Artificial Sequence
  ENSG00000101746_8 (sequence is synthesized)
tgaatttgacatgagtgattcaacacggatgtcagctgtgaactctgatcttagctccaatcttgaagaaagaatgcaaagtccccagaatcttcatggccagcaagatgatgattctgc

SEQ ID NO: 126459 - DNA, 120 bp, Artificial Sequence
  ENSG00000101746_9 (sequence is synthesized)
tgcagagagctttaatggcaatgagactctggggcacagttcaattgcttcagggggaacacacagcagggagatgggagactccaacagtgatggcaaaactgggctggagcaagatga

SEQ ID NO: 126460 - DNA, 120 bp, Artificial Sequence
  ENSG00000101746_10 (sequence is synthesized)
acagccactgaacctgagtgacagtcccctctctgcgcagctaacttcggaatacagaatagatgatcacaacagtaatgggaaaaacaagtataagaatcttctaatttctgacctcaa

SEQ ID NO: 126461 - DNA, 120 bp, Artificial Sequence
  ENSG00000101746_11 (sequence is synthesized)
gatggaacgagaggcgagagaaaatggaagcaagtctcctgcacatagttactccagctatgactctggcaaaaatgagagtgtagaccgaggagctgaggacctctcactaaacagggg

SEQ ID NO: 126462 - DNA, 120 bp, Artificial Sequence
  ENSG00000101746_12 (sequence is synthesized)
agatgaggacgaagatgaccacgaggaccatgacgattcggagaaagttaatgagacagacggcgttgaagccgagcggctgaaagcttttaatatgtttgtcaggctgtttgtagatga

SEQ ID NO: 126463 - DNA, 120 bp, Artificial Sequence
  ENSG00000101746_13 (sequence is synthesized)
aaacttggaccgaatggtcccaatctctaagcagcccaaagaaaagatccaggctatcattgactcatgcaggcgacaattccctgagtatcaagagcgtgccagaaaacgtatacgtac

SEQ ID NO: 126464 - DNA, 120 bp, Artificial Sequence
  ENSG00000101746_14 (sequence is synthesized)
ttacctcaagtcctgcaggcggatgaaaagaagtggttttgagatgtctcgacctattccttcccaccttacttcagcagttgcagagagtatcttggcttcagcttgtgagagtgagag

SEQ ID NO: 126465 - DNA, 120 bp, Artificial Sequence
  ENSG00000101746_15 (sequence is synthesized)
tagaaatgccgccaagaggatgcgtctggagagacagcaggatgagtctgctccagctgacaaacagtgtaaaccagaggcgacccaggccacttactcaacatcagctgttccaggctc

SEQ ID NO: 126466 - DNA, 120 bp, Artificial Sequence
  ENSG00000101746_16 (sequence is synthesized)
catgaagagacaattggcgactagctcaggatcctccagcagctcaaactccagaccccagctgagtccaactgaaatcaatgccgtgagacagcttgttgcaggatatcgagaatcagc

SEQ ID NO: 126467 - DNA, 120 bp, Artificial Sequence
  ENSG00000101746_17 (sequence is synthesized)
tgcatttttattgcgatctgcagatgaactggaaaatctcattttacaacagaactgagacagacgaccaccatattcactgaggtctaaatttgcagtttccactaatgacattttgat

SEQ ID NO: 126468 - DNA, 120 bp, Artificial Sequence
  ENSG00000101746_18 (sequence is synthesized)
ttcccaacagagatacttctggtcttactgcacagtcttttaagagaaatacttccattatgccacattgtccttgatccgtaagtgatgtgttaaggtgcttcaaaggaactctgacct

SEQ ID NO: 126469 - DNA, 120 bp, Artificial Sequence
  ENSG00000101746_19 (sequence is synthesized)
ctgaagtacttgagctactttagtatgtccagcctattgctttttgttttagtgtgtcaccataaatatcaggggcataaaaggctatctattcttaattcaaggataaaacagaagaag

SEQ ID NO: 126470 - DNA, 120 bp, Artificial Sequence
  ENSG00000101746_20 (sequence is synthesized)
gaagcttgtggtataaaacaatagttcaagatccagctgaaatattagtggaatttgctactgactcattggactgaaagctgaagtacctggcaaaaaaaaaaaaaagaaaaaaaaaag

SEQ ID NO: 126471 - DNA, 120 bp, Artificial Sequence
  ENSG00000101746_21 (sequence is synthesized)
atttcttgttgctacaggatataacaacaatgaaaaggatctcgtattttaaaaaaatatgtaatttttataaaaagaaaacttgtttttcattcaaacttgtcatttttactttggtaa

SEQ ID NO: 126472 - DNA, 120 bp, Artificial Sequence
  ENSG00000101746_22 (sequence is synthesized)
ctttttcataggtcctaaaagaaaactgttttgagaaactactgtaagtaccttttccacatccctttgccttctcctctttccaaattctttctacaaaaataacacttgatgctggaa

SEQ ID NO: 126473 - DNA, 120 bp, Artificial Sequence
  ENSG00000101746_23 (sequence is synthesized)
aaacccttgcctacgttctttcaatcgtcacatcaggaactacttccaagagaagcctgcatttctgctctcatgctgatctcaaaaaccccactcaacactgcaactttatcatagcag

SEQ ID NO: 126474 - DNA, 120 bp, Artificial Sequence
  ENSG00000101746_24 (sequence is synthesized)
ttttcatcccagaattttttttttaataatgacaagacatgttgttgaaaaaaaatcacaccttggtttcttagagctgctcgttcctgattgccgctgctgtctccaggcatccctcta

SEQ ID NO: 126475 - DNA, 120 bp, Artificial Sequence
  ENSG00000101746_25 (sequence is synthesized)
gcagcacctggatgtagatgactgaatgttaagaggttgcaagtgacaatctgaaaatttgcactcttgtgtgtagttttcttttcatttctttcagaaatagtttccaaaaagaccatt

SEQ ID NO: 126476 - DNA, 120 bp, Artificial Sequence
  ENSG00000101746_26 (sequence is synthesized)
acatctcctgatatgatttgtataattttcagttctagctaaaaataatgtaaggaactctcagcggatgcagctgcaacttacaatgaactgtgccctcctatcccccatactttaccc

SEQ ID NO: 126477 - DNA, 120 bp, Artificial Sequence
  ENSG00000101746_27 (sequence is synthesized)
ttctttcttattttatagtgtgggatacacatgagtgatgttttctttgtgcactgagacaagcctattttttaaatatttagggagaagtactttagttcatgcttcttatacaacttt

SEQ ID NO: 126478 - DNA, 120 bp, Artificial Sequence
  ENSG00000101746_28 (sequence is synthesized)
tttctgttgtttagctttggttggattacaaattctttgtgcattcctgaatttgccttatttcatgtaaaatttatgtcattcagtttttgacaatgagtttgaggcatcagtgatatt

SEQ ID NO: 126479 - DNA, 120 bp, Artificial Sequence
  ENSG00000101746_29 (sequence is synthesized)
tcttatctacttgttacatatagtttttcaagtaatgactgtgattgtgaccgagtaatgtgcactttttcttgtaactgtggacattgctatgcttttttcttctagtgtttctagaat

SEQ ID NO: 126480 - DNA, 120 bp, Artificial Sequence
  ENSG00000101746_30 (sequence is synthesized)
tactgttccttacaattatgtaaacaaaaaacaaaaaaaaaacttttgtgatactgttggtgaatataatgtgaaaaatcttattgaaatatgagtattttggaaatacatagctgcaca

SEQ ID NO: 126481 - DNA, 120 bp, Artificial Sequence
  ENSG00000101746_31 (sequence is synthesized)
aacatcttttaagatgtggatttagagtttgcttatttaaatgaaaattcaaaaattgagggctggtataattttctctgttttgtttggtttaataaacagatttctgtgttaaaagaa

SEQ ID NO: 126482 - DNA, 120 bp, Artificial Sequence
  ENSG00000101746_32 (sequence is synthesized)
caaatgagtagaacaattctgtgtcaggatatctgggatacataaaataagccaggtgttatatgataaagaagagctgagaagagtactctacacaggatggtccaaaaaagttttatg

SEQ ID NO: 126483 - DNA, 120 bp, Artificial Sequence
  ENSG00000101746_33 (sequence is synthesized)
ctcttattttccaaagctccaggtgctgttttccttgggactcatatacagagtctttggttcaaatgctatggtacccaggctgaaaccttgagagaagaaccaccgccttggcccagt

SEQ ID NO: 126484 - DNA, 120 bp, Artificial Sequence
  ENSG00000101746_34 (sequence is synthesized)
agcgtcgattttcttcacaagaagatgggaactgtgggctacaagtaggatggcagatctgatgcaggagacctttctgcatcatgccacggatggcgtaggggtagatgagaagctatc

SEQ ID NO: 126485 - DNA, 120 bp, Artificial Sequence
  ENSG00000101746_35 (sequence is synthesized)
agtgggaggggtgggggtgaggggagaggcgagaggtttagcgtgtggagctgcctgcgctccgcccgggctgtcagtcccggctccagccgccgcgagaccttcccggagacgcgcgca

SEQ ID NO: 126486 - DNA, 120 bp, Artificial Sequence
  ENSG00000101746_36 (sequence is synthesized)
cacacagcgcaccccctgcacaccgcacaccctcgctcccttgctcacacacacgcacacactcagcctggccgagcaggagccactgaccattttgcaagtgtcaggaccagctacagc

SEQ ID NO: 126487 - DNA, 120 bp, Artificial Sequence
  ENSG00000101746_37 (sequence is synthesized)
aagaaaccagaggagtcctgtctgggggtcccatcattattcgggatacccgccgccagcggcctgccttcggttacccacatccccctggaacggatatctgtttggggcactacaatc

SEQ ID NO: 126488 - DNA, 120 bp, Artificial Sequence
  ENSG00000101746_38 (sequence is synthesized)
tatcctgtagaactatggccaaatctccatcaatgctttgctaatttctgggacttaactcgtagaatctacatacagggctggaatttattcaaaatgcatctgaagaaatgacatttt

SEQ ID NO: 126489 - DNA, 120 bp, Artificial Sequence
  ENSG00000101746_39 (sequence is synthesized)
aaaccgttttaaaaaatatcttgataaaaaattctgtaaaacagaatttgataggtttaaaaacatgacagcaggctcccgctgcggccgggacctcgcatccctgcaacgtggccgggg

SEQ ID NO: 126490 - DNA, 120 bp, Artificial Sequence
  ENSG00000101746_40 (sequence is synthesized)
aacaaagaaagatgggtttaggcgctatcgaatggtgtgtgtatttgttcctttttctggggtggctctagtctcatggccacaaagctctagcccaggcgccgcgaggcactggcattg

SEQ ID NO: 126491 - DNA, 120 bp, Artificial Sequence
  ENSG00000101746_41 (sequence is synthesized)
cttactgtgcagaggagagaatttaggggaagtcagactaatccctgggtgcacttcgagagaaaggttggacctcgcctgagggatgctggatctgcaatgatagaattggcctgccac

SEQ ID NO: 126492 - DNA, 120 bp, Artificial Sequence
  ENSG00000101751_0 (sequence is synthesized)
atgcgtgtcactctgggcaacaggctggtcggccacgactgcgcaggcgagaggcacagagcgactggagactgtagtcccccggtttccctggagaccaggcggaagcggccggaagta

SEQ ID NO: 126493 - DNA, 120 bp, Artificial Sequence
  ENSG00000101751_1 (sequence is synthesized)
gcgctgcggttggcagcggcgggatggagaagctgggggtggagccggaggaggaaggcggcggcgacgacgacgaggaagacgccgaggcctgggccatggaactggcggacgtggggg

SEQ ID NO: 126494 - DNA, 120 bp, Artificial Sequence
  ENSG00000101751_2 (sequence is synthesized)
cggcagccagctcgcagggagttcatgatcaagtgttgcccacaccaaatgcttcatccagagtcatagtacatgtggatctggattgcttttatgcacaagtagaaatgatctcaaatc

SEQ ID NO: 126495 - DNA, 120 bp, Artificial Sequence
  ENSG00000101751_3 (sequence is synthesized)
cagagctaaaagacaaacctttaggggttcaacagaaatatttggtggttacctgcaactatgaagctaggaaacttggagttaagaaacttatgaatgtcagagatgcaaaagaaaagt

SEQ ID NO: 126496 - DNA, 120 bp, Artificial Sequence
  ENSG00000101751_4 (sequence is synthesized)
gtccacagttggtattagttaatggagaagacctgacccgctacagagaaatgtcttataaggttacagaattactggaagaatttagtccagttgttgagagacttggatttgatgaaa

SEQ ID NO: 126497 - DNA, 120 bp, Artificial Sequence
  ENSG00000101751_5 (sequence is synthesized)
attttgtggatctaacagaaatggttgagaagagactacagcagctgcaaagtgatgaactttctgcggtgactgtgtcgggtcatgtatacaataatcagtctataaacctgcttgacg

SEQ ID NO: 126498 - DNA, 120 bp, Artificial Sequence
  ENSG00000101751_6 (sequence is synthesized)
tcttgcacatcagactacttgttggatctcagattgcagcagagatgcgggaagccatgtataatcagttggggctcactggctgtgctggagtggcttctaataaactgttggcaaaat

SEQ ID NO: 126499 - DNA, 120 bp, Artificial Sequence
  ENSG00000101751_7 (sequence is synthesized)
tagtttctggtgtctttaaaccaaatcaacaaacagtcttattacctgaaagttgtcaacatcttattcatagtttgaatcacataaaggaaatacctggtattggctataaaactgcca

SEQ ID NO: 126500 - DNA, 120 bp, Artificial Sequence
  ENSG00000101751_8 (sequence is synthesized)
aatgtcttgaagcactgggtatcaatagtgtgcgtgatctccaaaccttttcacccaaaattttagaaaaagaattaggaatttcagttgctcagcgtatccaaaagctcagttttggag

SEQ ID NO: 126501 - DNA, 120 bp, Artificial Sequence
  ENSG00000101751_9 (sequence is synthesized)
aggataactcccctgtgatactctcaggaccacctcagtcctttagtgaagaagattcatttaaaaaatgttcatctgaagttgaagctaaaaataagattgaagaactacttgctagtc

SEQ ID NO: 126502 - DNA, 120 bp, Artificial Sequence
  ENSG00000101751_10 (sequence is synthesized)
ttttaaacagagtatgccaagatggaaggaagcctcatacagtgagattaataatccgtcggtattcctctgagaagcactatggtcgtgagagtcgtcagtgccctattccttcacatg

SEQ ID NO: 126503 - DNA, 120 bp, Artificial Sequence
  ENSG00000101751_11 (sequence is synthesized)
taattcagaaattagggacaggaaattatgatgtgatgaccccaatggttgatatacttatgaaactttttcgaaatatggtgaatgtgaagatgccatttcaccttacccttctaagtg

SEQ ID NO: 126504 - DNA, 120 bp, Artificial Sequence
  ENSG00000101751_12 (sequence is synthesized)
tgtgcttctgcaaccttaaagcactaaatactgctaagaaagggcttattgattattatttaatgccatcattatcaactacttcacgctctggcaagcacagttttaaaatgaaagaca

SEQ ID NO: 126505 - DNA, 120 bp, Artificial Sequence
  ENSG00000101751_13 (sequence is synthesized)
ctcatatggaagattttcccaaagacaaagaaacaaaccgggatttcctaccaagtggaagaattgaaagtacaagaactagggagtctccactagataccacaaatttttctaaagaaa

SEQ ID NO: 126506 - DNA, 120 bp, Artificial Sequence
  ENSG00000101751_14 (sequence is synthesized)
aagacattaatgaattcccactctgttcacttcctgaaggtgttgaccaagaagtcttcaagcagcttccagtagatattcaagaagaaatcctttctggaaaatctagggaaaaatttc

SEQ ID NO: 126507 - DNA, 120 bp, Artificial Sequence
  ENSG00000101751_15 (sequence is synthesized)
aagggaaaggaagtgtgagttgtccattacatgcctctagaggagtattatctttcttttctaaaaaacaaatgcaagatattcccataaatcctagagatcatttatccagtagcaaac

SEQ ID NO: 126508 - DNA, 120 bp, Artificial Sequence
  ENSG00000101751_16 (sequence is synthesized)
aggtatcctctgtatctccttgtgaaccgggaacatcaggctttaatagcagtagttcttcttacatgtctagccaaaaggattattcatattatttagataatagattaaaagatgaac

SEQ ID NO: 126509 - DNA, 120 bp, Artificial Sequence
  ENSG00000101751_17 (sequence is synthesized)
gaataagtcaaggacctaaagaacctcaaggattccactttacaaattcaaaccctgctgtgtctgcttttcattcatttccaaacttgcagagtgagcaacttttctccagaaaccaca

SEQ ID NO: 126510 - DNA, 120 bp, Artificial Sequence
  ENSG00000101751_18 (sequence is synthesized)
ctacagatagccataagcaaacagtagcaacagactctcatgaaggacttacagaaaatagagagccagattctgttgatgagaaaattactttcccttctgacattgatcctcaagttt

SEQ ID NO: 126511 - DNA, 120 bp, Artificial Sequence
  ENSG00000101751_19 (sequence is synthesized)
tctatgaactaccagaagcagtacaaaaggaactgctggcagagtggaagagagcaggatcagatttccacattggacataaataagcatattcagcaaaaaggtctgaaaagcaaggga

SEQ ID NO: 126512 - DNA, 120 bp, Artificial Sequence
  ENSG00000101751_20 (sequence is synthesized)
ataccattattttcggattagcggtttattaagctcttctatattaaacactaatagatattcaataacggagtaaactgttccagataaagcaagaatagttgcaagaagtaaattctg

SEQ ID NO: 126513 - DNA, 120 bp, Artificial Sequence
  ENSG00000101751_21 (sequence is synthesized)
gcacaaagcgtaaaaatataacagaagaaataatgtaaaatactatcttttatgtctaaagccattttatattacttttcaataaaaagaatatcatggtcaacatagaatatttttcat

SEQ ID NO: 126514 - DNA, 120 bp, Artificial Sequence
  ENSG00000101751_22 (sequence is synthesized)
gaattggtggggagatgtatatgtttatatataaaaaatagccaaatcgttgcaatgatatggtaaaggacacattttttttttttttttcctgtgaaatgtggaatatctcaaattcag

SEQ ID NO: 126515 - DNA, 120 bp, Artificial Sequence
  ENSG00000101751_23 (sequence is synthesized)
cctcttaggctgaatagcaaatcctactgccaactaacctattaaaaatatagatagttttgactaaagtactacattacatttagtatgttgacttttaaaataccaaagcaatttata

SEQ ID NO: 126516 - DNA, 120 bp, Artificial Sequence
  ENSG00000101751_24 (sequence is synthesized)
ttcaattaatgcttcttcatacaccaagaatctaccacaatacacagcacacaaaggccgttcaataaacattgaatgaatgaatggtttggctagggccagggtggggagttaaagtga

SEQ ID NO: 126517 - DNA, 120 bp, Artificial Sequence
  ENSG00000101751_25 (sequence is synthesized)
gttatagagaacagtggtagaaggaactctccgtgcaagtaaattaagggaaagatggacaccagaaaggcaaggtgatgggcctataagcatactggataatggaagaagtccatttct

SEQ ID NO: 126518 - DNA, 120 bp, Artificial Sequence
  ENSG00000101751_26 (sequence is synthesized)
ttctagctagtttgaagggcctaaaagcactgagatgtttttgtatcttccctacatttggagatgatattaggttgtcataacaaccacaaatatagaccattactaaattggtggatg

SEQ ID NO: 126519 - DNA, 120 bp, Artificial Sequence
  ENSG00000101751_27 (sequence is synthesized)
tcctctttctcccattgttattgccttcctcttttgcctgctaaactaaaaattggatataagattgagaatgtattatataatttgcaagacatagaggatgtttatagaatatactaa

SEQ ID NO: 126520 - DNA, 120 bp, Artificial Sequence
  ENSG00000101751_28 (sequence is synthesized)
agtatccctcagcaccaatatgggagtatcctggtctcaagtttataatttttgcacatataatctaaagaagagactttaaaaataaagtacacaaatatgaaccaaagagtagcttaa

SEQ ID NO: 126521 - DNA, 120 bp, Artificial Sequence
  ENSG00000101751_29 (sequence is synthesized)
aaatactttcttctaggtctgaaattttcttttctttctttttttgttttggagacagagtctcactctgtcgcccagggtggagtacagtggcgcaatcccagctcactacaacctccg

SEQ ID NO: 126522 - DNA, 76 bp, Artificial Sequence
  ENSG00000101751_30 (sequence is synthesized)
tcctggccccagctctgaaattttaacttagttttggattccttggaatttgaaaatatgctaacacgaaggattg

SEQ ID NO: 126523 - DNA, 120 bp, Artificial Sequence
  ENSG00000101751_31 (sequence is synthesized)
gattccttggaatttgaaaatatgctaacacgaaggattgtaaataggtagtttgaggttatcaggaacagtaacttgaagcaagaacatcagaaattgttcaccatgcaaatatttagt

SEQ ID NO: 126524 - DNA, 120 bp, Artificial Sequence
  ENSG00000101751_32 (sequence is synthesized)
actctgaatcaaggaacatagtattttttacatgagtattccagtaaggtaattaaacttatgaaaagggtatataactttttgtaaatcattaaaacattttatagtccttgtaatgat

SEQ ID NO: 126525 - DNA, 120 bp, Artificial Sequence
  ENSG00000101751_33 (sequence is synthesized)
ttcaggaccttggacagctagaaggggcttaagaaaaaatggctaagaaaacaaagtaaatggttttggccagcttaaaaagagaaagcaaaatagttaaaaatacatttcatagattga

SEQ ID NO: 126526 - DNA, 120 bp, Artificial Sequence
  ENSG00000101751_34 (sequence is synthesized)
gaatgtacgggctatgtcacagttacgctacttattttgtggttttaagttagtctcaacatctttgggcctcagaatcaacttttttatgggatcttttttctctgtttttaagattat

SEQ ID NO: 126527 - DNA, 120 bp, Artificial Sequence
  ENSG00000101751_35 (sequence is synthesized)
ctcttttttctttggtgctttgcaggtttactgtattatttggaagtgcgaatttatttttattcttagtatatactggcttcttcctgtatcttttaattcatgttctgtaaaattctc

SEQ ID NO: 126528 - DNA, 120 bp, Artificial Sequence
  ENSG00000101751_36 (sequence is synthesized)
aaccactagctcttcaaatatttcttctctattctaggactgtatacaaatgatagactttcttactgtatccttcatgtctcttaatttctcatatttttcatcctcttgtttctcttt

SEQ ID NO: 126529 - DNA, 120 bp, Artificial Sequence
  ENSG00000101751_37 (sequence is synthesized)
actgcattttgggtaatttcatcagctctatctttctgtttactagttcatttttcagtagcatctcacctgctatttaaaacaatgatggttttaatttcaataaatatatttttcatt

SEQ ID NO: 126530 - DNA, 120 bp, Artificial Sequence
  ENSG00000101751_38 (sequence is synthesized)
tgattctttttaacttcccgtttactcattacagtcccttgtaagtctgtttctaatttttaaaagtcaaatatatgatatttttgataatttcaatattttaagtctttataagtctac

SEQ ID NO: 126531 - DNA, 120 bp, Artificial Sequence
  ENSG00000101751_39 (sequence is synthesized)
atttaaggttattattgcatatcattgtgacttatttccttgagtatgtgttaatctgcgagaagacagagggcctaaattgtgtatgttttccttcagtatgatttgagttcgttgctt

SEQ ID NO: 126532 - DNA, 120 bp, Artificial Sequence
  ENSG00000101751_40 (sequence is synthesized)
ctctgggtgaggtggtacaaactccttggcatactctattcacctttgtggatcctgattgaatgccttgtcttaagtgtaagctccctgacccttactactagccgaaggttttgtctc

SEQ ID NO: 126533 - DNA, 120 bp, Artificial Sequence
  ENSG00000101751_41 (sequence is synthesized)
tgcaggtcaattccaaactaacaggcagatgctgttagctatctgcctccagggataaaccccatctttcaagcttgcttcttgcttgatgctttctgctgctttcttgcttttgtttca

SEQ ID NO: 126534 - DNA, 120 bp, Artificial Sequence
  ENSG00000101751_42 (sequence is synthesized)
gctcgagtttgttgttgttttttttttttcctgtttctgtcttgaatgtagagggtatttttatttttattttttctgtttctctcttgagtgtatagtgtagagggggtttctgtcttg

SEQ ID NO: 126535 - DNA, 120 bp, Artificial Sequence
  ENSG00000101751_43 (sequence is synthesized)
agtgtaggcctggagatttcccttatatggtacaaaccagcaatgaattaagaggtctcttttctccaagatctagtgttttgtactaggagaactctaaaaagtatctattccactgta

SEQ ID NO: 126536 - DNA, 120 bp, Artificial Sequence
  ENSG00000101751_44 (sequence is synthesized)
gtgccaaagtacaaatttatttggatttattttttgccatcttattttttaatatatttctttttctatgttgtgcttctttcccacctttatctctcctcctatcttttgggatcagtt

SEQ ID NO: 126537 - DNA, 120 bp, Artificial Sequence
  ENSG00000101751_45 (sequence is synthesized)
gggttttctatttaatcatatattttccctttactgatttggaatgtgaatgttacaagtccttttgattatccttaaacatctaaaaatgctaccctctttccaaacaacacaaaggta

SEQ ID NO: 126538 - DNA, 120 bp, Artificial Sequence
  ENSG00000101751_46 (sequence is synthesized)
ttgaaataacattaattctaattaaattccacaagttctttattaaatctccaaattggatattattagtattttatatagtcaatgtttatttttttgatgggacatggtgggggctta

SEQ ID NO: 126539 - DNA, 120 bp, Artificial Sequence
  ENSG00000101751_47 (sequence is synthesized)
ccttttttcttgtgtgtcagatgttccttctaggtagaattctttataccttctgaaattatgtccttagagctgtagatttagaactgacatctcttgagctgttctaagataatatct

SEQ ID NO: 126540 - DNA, 120 bp, Artificial Sequence
  ENSG00000101751_48 (sequence is synthesized)
tttactttggagatacgcagtttttattatatgtctagctatagatttatcatggatttaggttcattatgaatctgcagatttgtgtcttccatcaaatctggattgttttcaatatta

SEQ ID NO: 126541 - DNA, 120 bp, Artificial Sequence
  ENSG00000101751_49 (sequence is synthesized)
aaaaaacttctattttaaaatctgtatatagaaaggtacataaacataaatgaacatgttaatgagtaattgtaacaactatgtaactgtccaagtcaagaaataaaacatatcaagtaa

SEQ ID NO: 126542 - DNA, 120 bp, Artificial Sequence
  ENSG00000101751_50 (sequence is synthesized)
caggaaaaataaacctaataacaaaggacaaaggatatgaataggcagttgacaagaagagcctaacccagtgtctaacaattatagggaaaaaatgctcaaattcattagtggccaagg

SEQ ID NO: 126543 - DNA, 120 bp, Artificial Sequence
  ENSG00000101751_51 (sequence is synthesized)
agaagctgggggtggagccggaggaggaaggcggcggcgacgacgacgaggaagacgccgaggcctgggccatggaactggcggacgtgggggcggcagccagctcgcagggggttcaac

SEQ ID NO: 126544 - DNA, 120 bp, Artificial Sequence
  ENSG00000101751_52 (sequence is synthesized)
gacgacgaggaagacgccgaggcctgggccatggaactggcggacgtgggggcggcagccagctcgcagggtgcgccgcagccagaggagccagcggcctccttgggtgtaaatgagaag

SEQ ID NO: 126545 - DNA, 120 bp, Artificial Sequence
  ENSG00000101751_53 (sequence is synthesized)
ggtggggcaggcggacgctcggggcggcggccactggggcgcgaccgtccccgccccactcggctcctctaagagagggctgcctccctctgccttgtgttacgcggcgggtacctctag

SEQ ID NO: 126546 - DNA, 120 bp, Artificial Sequence
  ENSG00000101751_54 (sequence is synthesized)
aggaatggcttcacccagcaggagtagggtggggcgcgtccacactacaaatacgtgtcgagggtttatctgcgccgtcctttcctctgtgaggggcgaggtggggcgggaatccctcag

SEQ ID NO: 126547 - DNA, 120 bp, Artificial Sequence
  ENSG00000101751_55 (sequence is synthesized)
ccagcccgacgaaaactgcagaggcttctgggccttttaactttggagaagttgaggaccttgtcgctcatttggcagaaggtgggacccggatctcagtcctggcaggaagggatggct

SEQ ID NO: 126548 - DNA, 120 bp, Artificial Sequence
  ENSG00000101751_56 (sequence is synthesized)
cagaacctaggcggagtcaggtccgctgtggtcacgtctccggtgacccacttccagctctggtctttaccttgtaccgcccacctcagggcctggatgtaaaggcaccggttctcattt

SEQ ID NO: 126549 - DNA, 120 bp, Artificial Sequence
  ENSG00000101751_57 (sequence is synthesized)
cctgctggttttgtttcattcattaatttagagacaaggtctccctgcagcctcgaacccctgggctcaagtgatcctccgccccagcctctccgtcccgagtagctgggacagcaggca

SEQ ID NO: 126550 - DNA, 90 bp, Artificial Sequence
  ENSG00000101751_58 (sequence is synthesized)
gccccagcctctccgtcccgagtagctgggacagcaggcacgtgccaccacacctggctgattttcagatttttttagatcaggtgtaag

SEQ ID NO: 126551 - DNA, 120 bp, Artificial Sequence
  ENSG00000101751_59 (sequence is synthesized)
gattacagtagttagccatcgtgcctggccttttaaattttggaactttaggtttacctgaaagttgcagagctagatccccctagtgttaacataaactcagtacatttgtcaaaacta

SEQ ID NO: 126552 - DNA, 120 bp, Artificial Sequence
  ENSG00000101751_60 (sequence is synthesized)
ggaaattaacattggtataatactattaattgaactacacgctttattaatattctaccagtttttctgctaacgttcattttctgttccaggatcccaaccagaatattgtattgtatt

SEQ ID NO: 126553 - DNA, 120 bp, Artificial Sequence
  ENSG00000101751_61 (sequence is synthesized)
ttgcctgtcttgtttttagccagtgttgagagaaggagtcgcctctgtcattccctccccgacaaataatgacctaacaactttttaaaatcaaagaactattcagtctttcaatttagt

SEQ ID NO: 126554 - DNA, 120 bp, Artificial Sequence
  ENSG00000101751_62 (sequence is synthesized)
tctgttatgtcctagacactgttttaggcactggcgatttagcattaaaccagataatcctgctgccatgggagctaaaaatagcccacacttgtacccactggttgtcttttgccattt

SEQ ID NO: 126555 - DNA, 120 bp, Artificial Sequence
  ENSG00000101751_63 (sequence is synthesized)
tgtatttcagtttttgttggtttgtttgttttaaatgtaagggcatgctgcttagaataattttcaagctgtgtgaaaatcaacgtcatttcaacttttctgccccttctggtttacact

SEQ ID NO: 126556 - DNA, 120 bp, Artificial Sequence
  ENSG00000101751_64 (sequence is synthesized)
aagagctactataaacttccaggtgatagtattagctctttcatcatccattatttatcacattttttcccttcaaacttattactatcctgagaaaaacgcagtgcacaaacagtaatt

SEQ ID NO: 126557 - DNA, 120 bp, Artificial Sequence
  ENSG00000101751_65 (sequence is synthesized)
aagaggactgaagaccctaccctaagtggagtttcatgtctttgtaatttttcgatgctttcacacataatccaggagaaaacacgtcactctgcattcttccttcacaggtaccatgtt

SEQ ID NO: 126558 - DNA, 120 bp, Artificial Sequence
  ENSG00000101751_66 (sequence is synthesized)
gtcccctctggaagtgaaactgctggcttttgcagccttcaccctgtaccaactgagctatgtaaagggacattcgaacagtcccagacagtgaagctgctatctcctactttcttagct

SEQ ID NO: 126559 - DNA, 120 bp, Artificial Sequence
  ENSG00000101751_67 (sequence is synthesized)
aacatatagcagctgttcatagatcagtacttctcactttgtttgcctttggttcatttccagatttccaccaaaatgattgtttttgacaatgttgttcagttttatagtagctttttg

SEQ ID NO: 126560 - DNA, 120 bp, Artificial Sequence
  ENSG00000101751_68 (sequence is synthesized)
agagaggattttctgaccatatcagtgtagtataaccagaaatcccatatttcaaatcttttgaaaatttttaaccatttagtattaatattgaaatgtcttaatttggtatataatgtc

SEQ ID NO: 126561 - DNA, 120 bp, Artificial Sequence
  ENSG00000101751_69 (sequence is synthesized)
gataactcccctgtgatactctcaggaccacctcagtgagtacaatagcttgcagataaaaaactgttaatataaaagtgaactaaatggctcaaactaaggacaagagtcctttagtga

SEQ ID NO: 126562 - DNA, 120 bp, Artificial Sequence
  ENSG00000101751_70 (sequence is synthesized)
attattaaagtaacagtgatggaagaagcagaagaacccttgtatctcttttgcctcagactgtaaaataaaatggagtcgaaggaaagaatggctagctggcgctgtgtgtgagtagga

SEQ ID NO: 126563 - DNA, 120 bp, Artificial Sequence
  ENSG00000101751_71 (sequence is synthesized)
tttgaatgagaaatatgctccaaaaatggagggtcttcacagggaattagcaagcaattaaatgcttttattctatcaggaattttcactggaaaactttgttgtttgtttatttattta

SEQ ID NO: 126564 - DNA, 120 bp, Artificial Sequence
  ENSG00000101751_72 (sequence is synthesized)
tttattttttgagacagggtcttgctctgcaccaaggctgaagtgcagtggtgctgtgatagctcactgcagcctttgtctcccaggctcaaacaattcttctgccccagcctcccgagt

SEQ ID NO: 126565 - DNA, 120 bp, Artificial Sequence
  ENSG00000101751_73 (sequence is synthesized)
ttactaaacactaaaggagttttactaaaggagtttcaaattcatgtgaccacgccacagtcaacacacagaacaggtttatcacaaggatccctcctgccaccctttcaaagcgaaagc

SEQ ID NO: 126566 - DNA, 120 bp, Artificial Sequence
  ENSG00000101751_74 (sequence is synthesized)
cactttctttctgctcctcccccacctccctaaccccagaaaccactaattctgttcatctttatcattttgtcatttcaaaaatgttaaataaatggaagaatccactatttaacctta

SEQ ID NO: 126567 - DNA, 120 bp, Artificial Sequence
  ENSG00000101751_75 (sequence is synthesized)
aactgttaatataaaagtgaactaaatggctcaaactaaggacaagaggtaagttagtgaagaatgtattgaatatttatttgactgtacactgataataattagatatagttatttgag

SEQ ID NO: 126568 - DNA, 120 bp, Artificial Sequence
  ENSG00000101752_0 (sequence is synthesized)
ctccgagcagccgcgggccgccctccactccgagcggggggcgcggcggcgacagctgggcagcggctttgggctccgcggggaccgcgccgccgcccccgtgagttattctcacgtccc

SEQ ID NO: 126569 - DNA, 120 bp, Artificial Sequence
  ENSG00000101752_1 (sequence is synthesized)
ggctttgggctccgcggggaccgcgccgccgcccccgtgagttattctcacgtcccccggggctcgctgccgcccccgccgacgcctagagtccggcccgggcccaactccctcacgggc

SEQ ID NO: 126570 - DNA, 120 bp, Artificial Sequence
  ENSG00000101752_2 (sequence is synthesized)
gcggagcccaccgcccgggccccgatgagtaactcccggaataaccgggtgatggtggaaggggttggcgctcgggtagtgcgcggcccggactggaagtgggggaagcaggacggcggc

SEQ ID NO: 126571 - DNA, 120 bp, Artificial Sequence
  ENSG00000101752_3 (sequence is synthesized)
gagggccatgtgggcaccgtccggagcttcgagagccccgaggaggtggtggtagtgtgggacaacggcacagctgccaactaccgctgctccggggcttacgacctccgcatcctggac

SEQ ID NO: 126572 - DNA, 120 bp, Artificial Sequence
  ENSG00000101752_4 (sequence is synthesized)
agcgcgcccaccggcatcaagcatgatggaaccatgtgtgatacctgccgccagcaaccaatcattggcattcgatggaagtgtgcagagtgtacaaattatgatttgtgcacagtgtgt

SEQ ID NO: 126573 - DNA, 120 bp, Artificial Sequence
  ENSG00000101752_5 (sequence is synthesized)
tatcatggagataaacatcatttaagacatcgcttttaccgaattactacaccgggaagtgagagggttctgttagagtctcgtaggaaatctaagaagattacagccagaggaatcttt

SEQ ID NO: 126574 - DNA, 120 bp, Artificial Sequence
  ENSG00000101752_6 (sequence is synthesized)
gcaggtgccagagtggtgcgaggagtggactggcagtgggaagatcaagatggaggaaatggacgtaggggaaaggtaacagaaatccaggactggagtgcatcaagcccacatagcgca

SEQ ID NO: 126575 - DNA, 120 bp, Artificial Sequence
  ENSG00000101752_7 (sequence is synthesized)
gcatatgtcctctgggataatggtgctaagaacctttacagagttggctttgagggcatgtctgatctgaaatgtgtccaggatgccaagggaggttctttctacagagatcactgccct

SEQ ID NO: 126576 - DNA, 120 bp, Artificial Sequence
  ENSG00000101752_8 (sequence is synthesized)
gtgctaggtgagcagaatggcaacaggaatcctggtggattgcagattggtgacctggtaaatatagatctcgacctcgaaattgtacagtctttgcagcatggtcatggaggatggact

SEQ ID NO: 126577 - DNA, 120 bp, Artificial Sequence
  ENSG00000101752_9 (sequence is synthesized)
gatggaatgtttgagactttaactacaactggaactgtttgtggcattgatgaagatcatgacattgtagtacagtatccaagtggcaataggtggaccttcaatcctgctgttctcact

SEQ ID NO: 126578 - DNA, 120 bp, Artificial Sequence
  ENSG00000101752_10 (sequence is synthesized)
aaagcgaacattgtccgaagtggagatgctgctcagggtgcagaaggaggcacctcgcagtttcaagtgggtgatcttgtacaagtttgttatgacctggaacgaattaaacttctacaa

SEQ ID NO: 126579 - DNA, 120 bp, Artificial Sequence
  ENSG00000101752_11 (sequence is synthesized)
agaggacatggagaatgggctgaagcgatgcttccaactttaggtaaagttggccgagtacaacagatttattcagacagtgatttaaaggtggaagtttgtggaacatcttggacatac

SEQ ID NO: 126580 - DNA, 120 bp, Artificial Sequence
  ENSG00000101752_12 (sequence is synthesized)
aatccagcagcagtttccaaggtggcatctgcaggatcagccattagcaatgcatctggtgaaagactctcacaactcctgaagaaattatttgaaacccaagaatctggtgacctcaat

SEQ ID NO: 126581 - DNA, 120 bp, Artificial Sequence
  ENSG00000101752_13 (sequence is synthesized)
gaagaattagttaaggctgctgccaatggagatgttgctaaagtggaagatttgcttaaaagaccagatgtggatgtaaatgggcaatgtgctggccacacagctatgcaagctgctagt

SEQ ID NO: 126582 - DNA, 120 bp, Artificial Sequence
  ENSG00000101752_14 (sequence is synthesized)
cagaatggacatgttgacattttgaagttacttttgaagcaaaacgtggatgtcgaagcagaggataaagatggtgatagagcagttcaccatgcagcttttggagatgaaggcgctgtt

SEQ ID NO: 126583 - DNA, 120 bp, Artificial Sequence
  ENSG00000101752_15 (sequence is synthesized)
atagaagtactacatcgaggtagtgctgatttgaatgctcgaaacaagcgccgacagacaccacttcatattgctgtcaataaaggtcatcttcaagttgtgaagactttattggacttt

SEQ ID NO: 126584 - DNA, 120 bp, Artificial Sequence
  ENSG00000101752_16 (sequence is synthesized)
ggctgtcatcccagtctccaggattctgaaggtgatacccctcttcatgatgcaataagtaagaaacgtgatgatatcctagcagttcttttggaagctggagcagatgttaccatcaca

SEQ ID NO: 126585 - DNA, 120 bp, Artificial Sequence
  ENSG00000101752_17 (sequence is synthesized)
aacaataatggatttaatgctctgcatcatgctgcactaaggggaaatcccagtgcaatgcgtgttttactatctaaattaccaagaccatggattgtggatgagaagaaagatgatggt

SEQ ID NO: 126586 - DNA, 120 bp, Artificial Sequence
  ENSG00000101752_18 (sequence is synthesized)
tatactgccttacatctggctgcccttaataatcacgtagaagtggctgaactgttggtacatcagggtaatgcaaacctggatatccagaatgtgaaccaacaaactgccctacacctt

SEQ ID NO: 126587 - DNA, 120 bp, Artificial Sequence
  ENSG00000101752_19 (sequence is synthesized)
gctgttgaacgacagcatacccagattgttaggcttttggtccgtgcaggtgccaagcttgatattcaggataaggatggggatactcctttgcatgaagctctaaggcatcacactttg

SEQ ID NO: 126588 - DNA, 120 bp, Artificial Sequence
  ENSG00000101752_20 (sequence is synthesized)
tctcagctacgtcagctccaagatatgcaagatgtggggaaggtggatgctgcctgggagccatccaaaaacacgttaataatgggacttggtacccagggggcagagaagaagagtgca

SEQ ID NO: 126589 - DNA, 120 bp, Artificial Sequence
  ENSG00000101752_21 (sequence is synthesized)
gcatctattgcctgtttcttggcagccaatggtgctgacctgagcattcgaaataagaagggtcaatcgccacttgatctctgtcctgatccgaatctctgcaaagcactggcaaagtgt

SEQ ID NO: 126590 - DNA, 120 bp, Artificial Sequence
  ENSG00000101752_22 (sequence is synthesized)
cataaggaaaaagtcagtggtcaagtgggttctcggagtccttctatgattagtaatgattctgaaaccttagaagagtgtatggtgtgctcagatatgaagagagatactctttttggt

SEQ ID NO: 126591 - DNA, 120 bp, Artificial Sequence
  ENSG00000101752_23 (sequence is synthesized)
ccatgtggacatattgctacctgttctttatgttctccacgtgtcaagaaatgcctcatctgtaaagaacaggttcaatccaggacaaagattgaagaatgtgtggtatgctctgacaag

SEQ ID NO: 126592 - DNA, 120 bp, Artificial Sequence
  ENSG00000101752_24 (sequence is synthesized)
aaagcagctgttctttttcaaccctgtggccacatgtgtgcttgtgagaactgtgctaacctgatgaaaaagtgtgtgcagtgtcgagcagtagttgaacgaagagtgcctttcattatg

SEQ ID NO: 126593 - DNA, 120 bp, Artificial Sequence
  ENSG00000101752_25 (sequence is synthesized)
tgctgtggagggaaaagttcagaagatgccactgatgatatctcaagtgggaatattccagtattacaaaaggacaaggataataccaatgtcaatgcagatgtgcaaaagttgcagcaa

SEQ ID NO: 126594 - DNA, 120 bp, Artificial Sequence
  ENSG00000101752_26 (sequence is synthesized)
cagttacaagacattaaagagcagacaatgtgccctgtgtgtctagatcgtctgaagaatatgattttcctttgtggtcacggaacctgtcaactctgtggagaccgcatgagtgaatgt

SEQ ID NO: 126595 - DNA, 120 bp, Artificial Sequence
  ENSG00000101752_27 (sequence is synthesized)
cctatctgtcgcaaggctattgaacgaaggattcttttgtattaactaagacacatggtgtattttgttagctaatgtatctagtcatgagatcttaataggcttttgatctagttggaa

SEQ ID NO: 126596 - DNA, 120 bp, Artificial Sequence
  ENSG00000101752_28 (sequence is synthesized)
gttctgatgagttaatttctaatatcatagtttctttactagagtataattgggctgtaaatgtaccagaacaaaaaaccctacaaaatggtgttggaaattgtgttttttgtttttgtt

SEQ ID NO: 126597 - DNA, 120 bp, Artificial Sequence
  ENSG00000101752_29 (sequence is synthesized)
ttaaatttgaaacatcaaattcatgtaactcataggataatttacctttggcttctaagaggaaagtcctttaaggatatccttttttaaaaaattgcatttttctcttataatttgtaa

SEQ ID NO: 126598 - DNA, 120 bp, Artificial Sequence
  ENSG00000101752_30 (sequence is synthesized)
atttgttggatctcaaaagacataattctttgtgatcagttatccttcatttcatcgtggttttacacagtgagttgataacaggttctctgagaagtcatgcatcaaataaaagaggca

SEQ ID NO: 126599 - DNA, 120 bp, Artificial Sequence
  ENSG00000101752_31 (sequence is synthesized)
ggtcaaacaattatgtcacatggtaaattataaaatgacagtacaagttccagatagttaagggaataccgaagggatgattctttttttaagataacaggaagttacccacatgtttgt

SEQ ID NO: 126600 - DNA, 120 bp, Artificial Sequence
  ENSG00000101752_32 (sequence is synthesized)
ttctgaattcttagagtaaatggaagcatagaatgagggaataatgactttgcatttctcttgttttctagattcaaaaggaacattgtttaacttgaatcagattaccagtttcaaggt

SEQ ID NO: 126601 - DNA, 120 bp, Artificial Sequence
  ENSG00000101752_33 (sequence is synthesized)
gactgatagacaagaaaaggaaaaataagcaataatagtgggcaactgaagagaaaaaaaaaacgagtatctattaactggccactaacagttgcctttcttacattaatttatacacta

SEQ ID NO: 126602 - DNA, 120 bp, Artificial Sequence
  ENSG00000101752_34 (sequence is synthesized)
ttttgttcagccagtgtttttaaaaaaaatctatgaaaagtgtacttccggttttctgtgattacttatctgggcttgatctgaccagtgaaatgacattgccctatttggacctctgag

SEQ ID NO: 126603 - DNA, 120 bp, Artificial Sequence
  ENSG00000101752_35 (sequence is synthesized)
gttctatttagctttgcagatgtacatagtatcccagtgatctgcaaaattaatgccttttccaagaaaaaatcttttcttctctgtatcagttaattctgacagtgttagtgattctgt

SEQ ID NO: 126604 - DNA, 120 bp, Artificial Sequence
  ENSG00000101752_36 (sequence is synthesized)
cttcattataggccttatttccattatctctttctttatagtattttttgttataaagaaaacagtctttctgtgtatacctacggatgagggtattatttaaactgccaacaatatcca

SEQ ID NO: 126605 - DNA, 120 bp, Artificial Sequence
  ENSG00000101752_37 (sequence is synthesized)
agacatggtcaataacctaattataaatactttagaaagagtgaccaggacatgtatagaaatgtctgcttacctgtagactttaaaaacaaacaaaatttttggagcatttaatcattt

SEQ ID NO: 126606 - DNA, 120 bp, Artificial Sequence
  ENSG00000101752_38 (sequence is synthesized)
tttttctccttttatctcctttgtaatcttattgtctcctgagtaaatatacacataaatgtttggggattcattgctgctagattatatcaggtgtttacatagtgtctactatatgct

SEQ ID NO: 126607 - DNA, 120 bp, Artificial Sequence
  ENSG00000101752_39 (sequence is synthesized)
caccaactaaatttgaaagtatgaagtctctagccctcttacactgtttctggctgtttaatccttgctgcctttgcaagtcctggtgaaagcaatggggagctttgctggctggttttg

SEQ ID NO: 126608 - DNA, 120 bp, Artificial Sequence
  ENSG00000101752_40 (sequence is synthesized)
tagtctcaacaattccatgtctgtgtttagctgagtaactgctatcatttagaacagtaaaatttttatagatttcaaatttgaaaattcatgtacactcagttatctaataaggggcca

SEQ ID NO: 126609 - DNA, 120 bp, Artificial Sequence
  ENSG00000101752_41 (sequence is synthesized)
ccgacgctgtttttaaaactattttgaagttataaaaaggtagaacatctgactgatgatgttcacataaagagacagacagactatcatgttgcagacatgaaaacagcatgtcaggtt

SEQ ID NO: 126610 - DNA, 120 bp, Artificial Sequence
  ENSG00000101752_42 (sequence is synthesized)
tttcctttccttccatgccatgggctacccatctcttcccactagatcacctggtgaggagggagcacctggctgactcatgcagagtttggccaatcagagaattgtgtggtctccagc

SEQ ID NO: 126611 - DNA, 120 bp, Artificial Sequence
  ENSG00000101752_43 (sequence is synthesized)
tctactttccttaaacaaatcctttctgttttctgagctgcagtgctaaaacagatccctaaaaggtaatagcatcttccagactagtttaattatttcctttataagaatatgacataa

SEQ ID NO: 126612 - DNA, 120 bp, Artificial Sequence
  ENSG00000101752_44 (sequence is synthesized)
atttttattatagaaataatgtcattataattttagtgctagtacttgtgggttttctgtatttgtatcaccttgaaatttgttccatgaatagaaaatacttctttattcatgttttca

SEQ ID NO: 126613 - DNA, 120 bp, Artificial Sequence
  ENSG00000101752_45 (sequence is synthesized)
atcacttagaattattttaaatttattttgggtttgtgagagataataagattaagaacttcatcatttcagtgactttcctccaactctctgaatctgctacctcttattatatgtccc

SEQ ID NO: 126614 - DNA, 120 bp, Artificial Sequence
  ENSG00000101752_46 (sequence is synthesized)
ttagcagtacttttccagttaggttcgttaccctgctcattagctaaacctctttatcttgtgcctcaaaagagcttttacttttcttagaaacatttataaaaaagaaaaaaactgaca

SEQ ID NO: 126615 - DNA, 120 bp, Artificial Sequence
  ENSG00000101752_47 (sequence is synthesized)
cgcattcattcaaaaaagtatttattgggctttagggattagatacacaacagtggaaaaatggcatcttagcacactcagaatttattgtgcagcagttgtgtattttaaggaatctgt

SEQ ID NO: 126616 - DNA, 120 bp, Artificial Sequence
  ENSG00000101752_48 (sequence is synthesized)
agttaaaaggaagagatccaaaggtcctgataacatttcctaacgtttcagaagagttgtcattgagtagtgtttggatttcctctctgtatccctcaccctaccattttctcctttatt

SEQ ID NO: 126617 - DNA, 120 bp, Artificial Sequence
  ENSG00000101752_49 (sequence is synthesized)
cttctaagattgttagcgttgttactcaaaacatacacatacaacataccagatggtgctgttctaatggtatttgttcacgtaatttaacgttcttactgcttatactatatacatatt

SEQ ID NO: 126618 - DNA, 120 bp, Artificial Sequence
  ENSG00000101752_50 (sequence is synthesized)
taattttgttgggagcaagaaggttttcaagaaaagataattttgtattagtgtaggaatatattagacaaatgtttagttggtcaaattatgcataagatatttgtaactttaaacatt

SEQ ID NO: 126619 - DNA, 120 bp, Artificial Sequence
  ENSG00000101752_51 (sequence is synthesized)
gcaaattgaccagctagctatggaagcataaaattaattgataattaatgttggaaatacatttctaaaatttatatttttatggtgttagcctgtaagagcattttagcatattgaaat

SEQ ID NO: 126620 - DNA, 120 bp, Artificial Sequence
  ENSG00000101752_52 (sequence is synthesized)
gcatgctgcttaagatgtgtctggttcaaatatcaaaacttgctgggtcatttttacatagtagaaacatactgtctatgtgttgcccaattgctgtttgtccactctgaattctggacc

SEQ ID NO: 126621 - DNA, 120 bp, Artificial Sequence
  ENSG00000101752_53 (sequence is synthesized)
ctttttggactaagaattagttaaattcatgaactaagagaattagagatggggtagagtaggatcaggacagtggggttacaacagataggaaaggaaagtcagcatttgagtgtagag

SEQ ID NO: 126622 - DNA, 120 bp, Artificial Sequence
  ENSG00000101752_54 (sequence is synthesized)
aaaaaaagaggatcatacagatgtcatcaaattataggctttaatacaggttgctttttttaatccaaaaggaaaagcacttatcctatcagaatgtctaccatgttttatagtaataat

SEQ ID NO: 126623 - DNA, 120 bp, Artificial Sequence
  ENSG00000101752_55 (sequence is synthesized)
ttgtgtaaaaaattgaatttttgaatagttttttgtattttttgtgatgaaaaactcataacataaaatttaccatattaactgtttctaaagaatacagttcagccatgtgaagtacat

SEQ ID NO: 126624 - DNA, 120 bp, Artificial Sequence
  ENSG00000101752_56 (sequence is synthesized)
ttacactgttgtgaagcagatctccagaactttttcatcttgcaaaactgaaactccatacccattaaacaactcccctttttgttttctcctcagtggaatagaattttgactccatat

SEQ ID NO: 126625 - DNA, 120 bp, Artificial Sequence
  ENSG00000101752_57 (sequence is synthesized)
aaatcaagaaacacctaaattctttagttgtttgtgtttgcaagatctaaggtcatggtaaacattaagttcttaaaatttttgggagggacagtgcacctctcctctgaattgttagca

SEQ ID NO: 126626 - DNA, 120 bp, Artificial Sequence
  ENSG00000101752_58 (sequence is synthesized)
attaaattgagtaggttttaaatgtctattcattggaagggtttgttatttcattttgagccagaggggagaggcacattttaaatatcagaattagattagctttgagtttgtacaatt

SEQ ID NO: 126627 - DNA, 120 bp, Artificial Sequence
  ENSG00000101752_59 (sequence is synthesized)
gggaacataatagattttcataaattatgtgtgccttgttggaagtgtcaactgtctttatgtctgcttgtaaaagtttcaaaatatgttttccctcaaaaaggcaacgttacttcattt

SEQ ID NO: 126628 - DNA, 120 bp, Artificial Sequence
  ENSG00000101752_60 (sequence is synthesized)
atttgcttgaatattatgataggaatgcttactgatattacttgatagtcatatatagcctaggaaatttaacatatatataactatagcagtattaataatgatagttgtacttcttta

SEQ ID NO: 126629 - DNA, 120 bp, Artificial Sequence
  ENSG00000101752_61 (sequence is synthesized)
attaaatttgaggaaactttaatgctgtctcgtgtacattgctttactacagtgagggggaatatcctttagattgagcctcaatttactggttagtagtatgtgaaactctggtataaa

SEQ ID NO: 126630 - DNA, 120 bp, Artificial Sequence
  ENSG00000101752_62 (sequence is synthesized)
aacgtaaactagacagtagagccgatgaattaaaattgtaaattgctacattggcattttctacctccttttctgtcagagtattactttttccagcatttattcttatttgtgagtaaa

SEQ ID NO: 126631 - DNA, 120 bp, Artificial Sequence
  ENSG00000101752_63 (sequence is synthesized)
gaggaaatgggaacctgaggttaaaattgacatttttgtttcattgagaatttaagcagtaggtacaggagaagtgacttgtcacattaatttggtgcctaaatctgtaactacaagttg

SEQ ID NO: 126632 - DNA, 120 bp, Artificial Sequence
  ENSG00000101752_64 (sequence is synthesized)
tgatcgacatgtacaaaatgtctaagaaaggtcatatgctgaatattttacttttcctgtatagtctgcatgatttgtttcataaacccagcttatttcctccaaaaagcaaaatggtcc

SEQ ID NO: 126633 - DNA, 120 bp, Artificial Sequence
  ENSG00000101752_65 (sequence is synthesized)
tgtaatttttaaagtaaaataaacgtgccattttgtctgcaatctataatttcaggaagttattgaaagttctgactcagggctttttaacagttcaagcaattgtcagttatattttgg

SEQ ID NO: 126634 - DNA, 120 bp, Artificial Sequence
  ENSG00000101752_66 (sequence is synthesized)
aaactccatctgtgtaattctccagtgccttgaaagaattattaacttggcaacactattaaaactttataaaagatggtctttagtgcacgtgtatcattatatacacgttttaaagtc

SEQ ID NO: 126635 - DNA, 120 bp, Artificial Sequence
  ENSG00000101752_67 (sequence is synthesized)
atattgcttagcttgttaataatgattctgcatgtgtgctgggtttgggtaattctttaaaggaagttttctagatttgcacttgatgtttgttttttaaaaactgattatttatggccg

SEQ ID NO: 126636 - DNA, 120 bp, Artificial Sequence
  ENSG00000101752_68 (sequence is synthesized)
tgacactgttaccagaaaagtaattctaattaagttattatgcaaagtcatctataagtagcatctgggaagaggagatcgaggccacagtttgctattttagtatgaaaggaggatctg

SEQ ID NO: 126637 - DNA, 120 bp, Artificial Sequence
  ENSG00000101752_69 (sequence is synthesized)
tttgggaaacatagattgtcttcccctcaaatgaggggaaaaaaaaaagaccctttgttcaaatggattctgttgtaaaaaattatttttaaaggaaatcacaaattgtatgtcattctt

SEQ ID NO: 126638 - DNA, 120 bp, Artificial Sequence
  ENSG00000101752_70 (sequence is synthesized)
aatgctagtcttatagaataaatccataaaattgtttttatgttcagtatgtttatgtcattctaaatgcagcaaattcaatgatagcagttcaattgactcatagcagtgttttgtatt

SEQ ID NO: 126639 - DNA, 120 bp, Artificial Sequence
  ENSG00000101752_71 (sequence is synthesized)
ttttctaattctttagctttcaatattggattaaagtcttgtttgtgaatatagtttccgtatggcaaatgatttcttgcttattagcttttgttaaagaatgcttagtaagagctaagc

SEQ ID NO: 126640 - DNA, 120 bp, Artificial Sequence
  ENSG00000101752_72 (sequence is synthesized)
ttttaaaagtaatgcaaacatttatcgttaataaaacctatggtgtaatatcatataatgcttttctttgatctttggagaattattcttttatagtagtatacatgaattttgattttt

SEQ ID NO: 126641 - DNA, 120 bp, Artificial Sequence
  ENSG00000101752_73 (sequence is synthesized)
aaagcatttaaaaacaaatctcaatacattaaaaaacctgttattgttaaaaaggaaattaccatgcctttaagaaacaaggatgtacatcttcaattcagcataagtgtccacatctag

SEQ ID NO: 126642 - DNA, 120 bp, Artificial Sequence
  ENSG00000101752_74 (sequence is synthesized)
aaggctctcattgcagttgtttacagttaaggtacctctatctaaagggccaaagaagcatttcatattttaacacctcacattctttcaggattaagacatatgaaaatagtctgaata

SEQ ID NO: 126643 - DNA, 120 bp, Artificial Sequence
  ENSG00000101752_75 (sequence is synthesized)
ggataaatttgataggaagtaacttaaccagtctggaagattcagctttttctataaaaagcttattcctcttcacaactcagatgtagatttcattttcaagaggtagatattttaaag

SEQ ID NO: 126644 - DNA, 120 bp, Artificial Sequence
  ENSG00000101752_76 (sequence is synthesized)
caatgatctatttgggttttagttttatgagtaaatcattaattgtatggtttgggggttattttattttccatgttaatataagcacttatttctgaagttattgagaggtcatctagc

SEQ ID NO: 126645 - DNA, 120 bp, Artificial Sequence
  ENSG00000101752_77 (sequence is synthesized)
tccagttcaaaagattatgtatatctgatgtttaagaggaaaaacatctgaaaaaatatcttttgtttatttgaaaaaagcatatatattccaactttaaaattgtgaatttattttgag

SEQ ID NO: 126646 - DNA, 120 bp, Artificial Sequence
  ENSG00000101752_78 (sequence is synthesized)
taacctctaattaactgtatttttttgtttctgttgctgtatagttagaaatttcatggcaatattttttactaaattgaaactataggttttaaaaataaagacattttagaaaatttg

SEQ ID NO: 126647 - DNA, 120 bp, Artificial Sequence
  ENSG00000101752_79 (sequence is synthesized)
aacgtggatgtcgaagcagagaaagaattatgactttggtgtgaagaatagattgggataagaaagtgaagggaggttgagttgtggtaatcatccaggataaagatggtgatagagcag

SEQ ID NO: 126648 - DNA, 120 bp, Artificial Sequence
  ENSG00000101752_80 (sequence is synthesized)
cccttctcaaaattaagaagtctgtagttatctgaactatgatatatggaacaccaacctaaattattctcgtggaatcatacagtatactagacttaaacctacaccgtatgtatatat

SEQ ID NO: 126649 - DNA, 120 bp, Artificial Sequence
  ENSG00000101752_81 (sequence is synthesized)
actgggttctcccagctaggtcgcagtgggcgatggggatccccaagggtgggccgagagctgacggatcggcagcgctggttaaggccccgcacctgcagccccagtgaccttgaacga

SEQ ID NO: 126650 - DNA, 120 bp, Artificial Sequence
  ENSG00000101773_0 (sequence is synthesized)
gcgggctcccgggcggggcgggtccggccgcctccgagcccggccggcagcccccggccttaaagcgcgggctgtccggaggggtcggctttcccaccgaggatttggcactctggtgag

SEQ ID NO: 126651 - DNA, 120 bp, Artificial Sequence
  ENSG00000101773_1 (sequence is synthesized)
cactctggtgagggaaaagggcgaaagagaaaagcgagcagccgtcctttcacagcctcagaaagtgctcgcttcccttcgggggctttcgcgaatcccgaggcaatctcggaggcggta

SEQ ID NO: 126652 - DNA, 120 bp, Artificial Sequence
  ENSG00000101773_2 (sequence is synthesized)
tttgacctgtccaaagacgacttgatacctctataatgtaacagaaaaggtcagaaaatattaagcaagtagaagtgtggagcatattaagcaagatgaacatctcgggaagcagctgtg

SEQ ID NO: 126653 - DNA, 120 bp, Artificial Sequence
  ENSG00000101773_3 (sequence is synthesized)
gaagccctaactctgcagatacatctagtgactttaaggacctttggacaaaactaaaagaatgtcatgatagagaagtacaaggtttacaagtaaaagtaaccaagctaaaacaggaac

SEQ ID NO: 126654 - DNA, 120 bp, Artificial Sequence
  ENSG00000101773_4 (sequence is synthesized)
gaatcttagatgcacaaagactagaagaattcttcaccaaaaatcaacagctgagggaacagcagaaagtccttcatgaaaccattaaagttttagaagatcggttaagagcaggcttat

SEQ ID NO: 126655 - DNA, 120 bp, Artificial Sequence
  ENSG00000101773_5 (sequence is synthesized)
gtgatcgctgtgcagtaactgaagaacatatgcggaaaaaacagcaagagtttgaaaatatccggcagcagaatcttaaacttattacagaacttatgaatgaaaggaatactctacagg

SEQ ID NO: 126656 - DNA, 120 bp, Artificial Sequence
  ENSG00000101773_6 (sequence is synthesized)
aagaaaataaaaagctttctgaacaactccagcagaaaattgagaatgatcaacagcatcaagcagctgagcttgaatgtgaggaagacgttattccagattcaccgataacagccttct

SEQ ID NO: 126657 - DNA, 120 bp, Artificial Sequence
  ENSG00000101773_7 (sequence is synthesized)
cattttctggcgttaaccggctacgaagaaaggagaacccccatgtccgatacatagaacaaacacatactaaattggagcactctgtgtgtgcaaatgaaatgagaaaagtttccaagt

SEQ ID NO: 126658 - DNA, 120 bp, Artificial Sequence
  ENSG00000101773_8 (sequence is synthesized)
cttcaactcatccacaacataatcctaatgaaaatgaaattctagtagctgacacttatgaccaaagtcaatctccaatggccaaagcacatggaacaagcagctatacccctgataagt

SEQ ID NO: 126659 - DNA, 120 bp, Artificial Sequence
  ENSG00000101773_9 (sequence is synthesized)
catcttttaatttagctacagttgttgctgaaacacttggacttggtgttcaagaagaatctgaaactcaaggtcccatgagcccccttggtgatgagctctaccactgtctggaaggaa

SEQ ID NO: 126660 - DNA, 120 bp, Artificial Sequence
  ENSG00000101773_10 (sequence is synthesized)
atcacaagaaacagccttttgaggaatctacaagaaatactgaagatagtttaagattttcagattctacttcaaagactcctcctcaagaagaattacctactcgagtgtcatctcctg

SEQ ID NO: 126661 - DNA, 120 bp, Artificial Sequence
  ENSG00000101773_11 (sequence is synthesized)
tatttggagctacctctagtatcaaaagtggtttagatttgaatacaagtttgtccccttctcttttacagcctgggaaaaaaaaacatctgaaaacactcccttttagcaacacttgta

SEQ ID NO: 126662 - DNA, 120 bp, Artificial Sequence
  ENSG00000101773_12 (sequence is synthesized)
tatctagattagaaaaaactagatcaaaatctgaagatagtgcccttttcacacatcacagtcttgggtctgaagtgaacaagatcattatccagtcatctaataaacagatacttataa

SEQ ID NO: 126663 - DNA, 120 bp, Artificial Sequence
  ENSG00000101773_13 (sequence is synthesized)
aggactgagtacggtaaagattctaacactgataaacatttggagcccctgaaatcattgggaggccgaacatccaaaaggaagaaaactgaggaagaaagtgaacatgaagtaagctgc

SEQ ID NO: 126664 - DNA, 120 bp, Artificial Sequence
  ENSG00000101773_14 (sequence is synthesized)
ccccaagcttcttttgataaagaaaatgctttcccttttccaatggataatcagttttccatgaatggagactgtgtgatggataaacctctggatctgtctgatcgattttcagctatt

SEQ ID NO: 126665 - DNA, 120 bp, Artificial Sequence
  ENSG00000101773_15 (sequence is synthesized)
cagcgtcaagagaaaagccaaggaagtgagacttctaaaaacaaatttaggcaagtgactctttatgaggctttgaagaccattccaaagggcttttcctcaagccgtaaggcctcagat

SEQ ID NO: 126666 - DNA, 120 bp, Artificial Sequence
  ENSG00000101773_16 (sequence is synthesized)
ggcaactgcacgttgcccaaagattccccaggggagccctgttcacaggaatgcatcatccttcagcccttgaataaatgctctccagacaataaaccatcattacaaataaaagaagaa

SEQ ID NO: 126667 - DNA, 120 bp, Artificial Sequence
  ENSG00000101773_17 (sequence is synthesized)
aatgctgtctttaaaattcctctacgtccacgtgaaagtttggagactgagaatgttttagatgacataaagagtgctggttctcatgagccaataaaaatacaaaccaggtcagaccat

SEQ ID NO: 126668 - DNA, 120 bp, Artificial Sequence
  ENSG00000101773_18 (sequence is synthesized)
ggaggatgtgaacttgcatcagttcttcagttaaatccatgtagaactggtaaaataaagtctctacaaaacaaccaagatgtatcctttgaaaatatccagtggagtatagatccggga

SEQ ID NO: 126669 - DNA, 120 bp, Artificial Sequence
  ENSG00000101773_19 (sequence is synthesized)
gcagacctttctcagtataaaatggatgttactgtaatagatacaaaggatggcagtcagtcaaaattaggaggagagacagtggacatggactgtacattggttagtgaaaccgttctc

SEQ ID NO: 126670 - DNA, 120 bp, Artificial Sequence
  ENSG00000101773_20 (sequence is synthesized)
ttaaaaatgaagaagcaagagcagaagggagaaaaaagttcaaatgaagaaagaaaaatgaatgatagcttggaagatatgtttgatcggacaacacatgaagagtatgaatcctgtttg

SEQ ID NO: 126671 - DNA, 120 bp, Artificial Sequence
  ENSG00000101773_21 (sequence is synthesized)
gcagacagtttctcccaagcagcagatgaagaggaggaattgtctactgccacaaagaaactacacactcatggtgataaacaagacaaagtcaagcagaaagcgtttgtggagccgtat

SEQ ID NO: 126672 - DNA, 120 bp, Artificial Sequence
  ENSG00000101773_22 (sequence is synthesized)
tttaaaggtgatgaaagagagactagcttgcaaaattttcctcatattgaggtggttcggaaaaaagaggagagaagaaaactgcttgggcacacgtgtaaggaatgtgaaatttattat

SEQ ID NO: 126673 - DNA, 120 bp, Artificial Sequence
  ENSG00000101773_23 (sequence is synthesized)
gcagatatgccagcagaagaaagagaaaagaaattggcttcctgctcaagacaccgattccgctacattccacccaacacaccagagaatttttgggaagttggttttccttccactcag

SEQ ID NO: 126674 - DNA, 120 bp, Artificial Sequence
  ENSG00000101773_24 (sequence is synthesized)
acttgtatggaaagaggttatattaaggaagatcttgatccttgtcctcgtccaaaaagacgtcagccttacaacgcaatattttctccaaaaggcaaggagcagaagacatagacgttg

SEQ ID NO: 126675 - DNA, 120 bp, Artificial Sequence
  ENSG00000101773_25 (sequence is synthesized)
aaacagaaacagaaggatgaaggacagttttttccttcttagttatttatagttaaagttggtactaaacattgatttttttgatcttctgtaaatggatttataaatcagttttctatt

SEQ ID NO: 126676 - DNA, 120 bp, Artificial Sequence
  ENSG00000101773_26 (sequence is synthesized)
gaaaatgtttgtgatattttgcttttgcacctttaaaacaataaggcgctttcattttgcactctaacttaagagtttttactttatgtagtgatacctaatacaattttgaaaatacaa

SEQ ID NO: 126677 - DNA, 120 bp, Artificial Sequence
  ENSG00000101773_27 (sequence is synthesized)
tgcgccgactgcggctcgcgcgcgcgcttcggaggttttttggccagacccgcacgcggaaccggcgcgggcacctggggagaaatggatggagaagggacctggctggaaagcctttgc

SEQ ID NO: 126678 - DNA, 120 bp, Artificial Sequence
  ENSG00000101773_28 (sequence is synthesized)
cccgctgctctgctccgcccataagaggacccctgaaatgtcccgtgcagtttgttcaagtcccctgtgtgatgaaatgtgcctctcgccttacccgtgtgagaatacctgtggtgtggc

SEQ ID NO: 126679 - DNA, 120 bp, Artificial Sequence
  ENSG00000101773_29 (sequence is synthesized)
acctggtttattatttagaggccagactgatgtgacttaatagtggagcatttgactcataaaggaactgttgtagaagtaataccttttctttttacttttcaggtttacaagtaaaag

SEQ ID NO: 126680 - DNA, 120 bp, Artificial Sequence
  ENSG00000101773_30 (sequence is synthesized)
tgggattgaaagtgatctttcccacagccttctctcacctttgaatgaatactttatgaaaacaaggatctattctttaagattttcattaattctgagatcacatcagtttacccttta

SEQ ID NO: 126681 - DNA, 120 bp, Artificial Sequence
  ENSG00000101773_31 (sequence is synthesized)
aatgatatctttatctggtgtttgatgtagtggaagctcaagggtagcaatgttctaattcatttaatgctttaattccagttttacttctaagtaggtggaaactgcttcacaattctg

SEQ ID NO: 126682 - DNA, 120 bp, Artificial Sequence
  ENSG00000101773_32 (sequence is synthesized)
acacacaaattacaggcctttgagcccagaatgcaacttgggaggtaagacgtgacgttctgagagattgaaaaatgtacattgtcgtcgtgcctcgaataacggttcattgcagagaga

SEQ ID NO: 126683 - DNA, 120 bp, Artificial Sequence
  ENSG00000101773_33 (sequence is synthesized)
gcactcagtatatagcttagatgcagcagaactcttccacatagcagtagtgtctagcaaaccagtgtggtccagagaggtggtgttcactgatttaatgtttaagttgatagattcagg

SEQ ID NO: 126684 - DNA, 120 bp, Artificial Sequence
  ENSG00000101773_34 (sequence is synthesized)
gaaagtgagcagtgaaacaatttctgcttttcaccaagagcagaggttttctaaataagtcgaaggggaaaacccttggatgcttcatagtcctacttctaggcagttctgcatgaattt

SEQ ID NO: 126685 - DNA, 120 bp, Artificial Sequence
  ENSG00000101773_35 (sequence is synthesized)
ctcggctcactgcaacctccgccccccaagttcaaacggttccccttttgaagagagcaattcagagggccattaactatataagcacaagaaaagtccaaagatcctggagctacctag

SEQ ID NO: 126686 - DNA, 120 bp, Artificial Sequence
  ENSG00000101773_36 (sequence is synthesized)
tcctggagctacctagggaacagagctccaaagaaagcctcctgcgtggaagcttccctgaggaagagctgataacaccttaaacctcctctggattcaagttaaagaattaacacagaa

SEQ ID NO: 126687 - DNA, 120 bp, Artificial Sequence
  ENSG00000101773_37 (sequence is synthesized)
aaataaaaagctttctgaacaactccagcagaaaattgagaccatcttaagcaagtctcttctcctgtgctacttgacgactcttttgatacatgaagacagctatcatggccctcctga

SEQ ID NO: 126688 - DNA, 120 bp, Artificial Sequence
  ENSG00000101782_0 (sequence is synthesized)
agttccggacgcggccgccgccgtcgccgccatctgtcacctccactccggcatcagcagccagtcgcccgtgtcccgcctgtctcctcggcggagcctgctgcccgtcctgccacctct

SEQ ID NO: 126689 - DNA, 120 bp, Artificial Sequence
  ENSG00000101782_1 (sequence is synthesized)
ctgctctgttcttgtctctgccttcattcccgaatggatctggtaggagtggcatcgcctgagcccgggacggcagcggcctggggacccagcaagtgtccatgggctattcctcaaaat

SEQ ID NO: 126690 - DNA, 120 bp, Artificial Sequence
  ENSG00000101782_2 (sequence is synthesized)
acaatatcttgttctttggctgatgtaatgagtgaacagctggccaaagaattgcagttagaagaagaagctgccgtttttcctgaagttgctgttgctgaaggaccatttattactgga

SEQ ID NO: 126691 - DNA, 120 bp, Artificial Sequence
  ENSG00000101782_3 (sequence is synthesized)
gaaaacattgatacttccagtgaccttatgctggctcagatgctacagatggaatatgacagagaatatgatgcacagcttaggcgtgaagaaaaaaaattcaatggagatagcaaagtt

SEQ ID NO: 126692 - DNA, 120 bp, Artificial Sequence
  ENSG00000101782_4 (sequence is synthesized)
tccatttcctttgaaaattatcgaaaagtgcatccttatgaagacagcgatagctctgaagatgaggttgactggcaggatactcgtgatgatccctacagaccagcaaaaccggttccc

SEQ ID NO: 126693 - DNA, 120 bp, Artificial Sequence
  ENSG00000101782_5 (sequence is synthesized)
actcctaaaaagggctttattggaaaaggaaaagatatcaccaccaaacatgatgaagtagtatgtgggagaaagaacacagcaagaatggaaaattttgcacctgagtttcaggtagga

SEQ ID NO: 126694 - DNA, 120 bp, Artificial Sequence
  ENSG00000101782_6 (sequence is synthesized)
gatggaattggaatggatttaaaactatcaaaccatgttttcaatgctttaaaacaacatgcctactcagaagaacgtcgaagtgcccgcctacatgagaaaaaggagcattctacagca

SEQ ID NO: 126695 - DNA, 120 bp, Artificial Sequence
  ENSG00000101782_7 (sequence is synthesized)
gaaaaagcagttgatcctaagacacgtttacttatgtataaaatggtcaactctggaatgttggagacaatcactggctgtattagtacaggaaaggagtctgttgtctttcatgcatat

SEQ ID NO: 126696 - DNA, 120 bp, Artificial Sequence
  ENSG00000101782_8 (sequence is synthesized)
ggagggagcatggaggatgaaaaggaagatagtaaagttatacctacagaatgtgccatcaaggtatttaaaacaacccttaatgaatttaagaatcgtgacaaatatattaaagatgat

SEQ ID NO: 126697 - DNA, 120 bp, Artificial Sequence
  ENSG00000101782_9 (sequence is synthesized)
ttcaggtttaaagatcgcttcagtaaactaaatccacgtaagatcatccgcatgtgggcagaaaaagaaatgcacaatctcgcaagaatgcagagagctggaattccttgtccaacagtt

SEQ ID NO: 126698 - DNA, 120 bp, Artificial Sequence
  ENSG00000101782_10 (sequence is synthesized)
gtactactgaagaaacacattttagttatgtcttttattggccatgatcaagttccagcccctaaattaaaagaagtaaagctcaatagtgaagaaatgaaagaagcctactatcaaact

SEQ ID NO: 126699 - DNA, 120 bp, Artificial Sequence
  ENSG00000101782_11 (sequence is synthesized)
cttcatttgatgcggcagttatatcatgaatgtacgcttgtccatgctgacctcagtgagtataacatgctgtggcatgctggaaaggtctggttgatcgatgtcagtcagtcagtagaa

SEQ ID NO: 126700 - DNA, 120 bp, Artificial Sequence
  ENSG00000101782_12 (sequence is synthesized)
cctacccaccctcacggcctggagttcttgttccgggactgcaggaatgtctcgcagtttttccagaaaggaggagtcaaggaagcccttagtgaacgagaactcttcaatgctgtttca

SEQ ID NO: 126701 - DNA, 120 bp, Artificial Sequence
  ENSG00000101782_13 (sequence is synthesized)
ggcttaaacatcacagcagataatgaagctgattttttagctgagatagaagctttggagaaaatgaatgaagatcacgttcagaagaatggaaggaaagctgcttcatttttgaaagat

SEQ ID NO: 126702 - DNA, 120 bp, Artificial Sequence
  ENSG00000101782_14 (sequence is synthesized)
aagttatgggtgacttgaaataccaaaacctgaggagtgggcaatggtgcttctgtgcttttcccccttgtaacccatgtgccagatgtgtggaatttttagctcagcattgagagaata

SEQ ID NO: 126703 - DNA, 120 bp, Artificial Sequence
  ENSG00000101782_15 (sequence is synthesized)
aaatgtcactacctctcatcttatgaacaggataatataattctttaacagctataggttatctggctgaagtagacctaattttatgtgacttgtggtgtaaaatgtcttgatgataat

SEQ ID NO: 126704 - DNA, 120 bp, Artificial Sequence
  ENSG00000101782_16 (sequence is synthesized)
ttttaaaacttgggtaacacttccaaatatgggaggaaaggacagatgtgtttacaagggaggattttacaacatacttgctttattcacctccctgttttgtgttgcgtctttccttga

SEQ ID NO: 126705 - DNA, 120 bp, Artificial Sequence
  ENSG00000101782_17 (sequence is synthesized)
atattttattggcccagagttagcctttctcaattatgtttccagactgtggccgtgattctaaaggaaaatgtgtgctctttagtgggtagaacaaatggaaatttggtttcagaatgg

SEQ ID NO: 126706 - DNA, 120 bp, Artificial Sequence
  ENSG00000101782_18 (sequence is synthesized)
ctgacagaaatcgacataagtcatgtaatttttgttgatatatcatgaaaatgaacagaattctttttccatacttatatctaagaaaaggcatcataggtttctgaaagagataactat

SEQ ID NO: 126707 - DNA, 120 bp, Artificial Sequence
  ENSG00000101782_19 (sequence is synthesized)
ataacagctttttaactatccagtcaactttcagcttttctacatttaggtaaaatggttaggatataactcatggtgtggctaatctacatttatcaataaaatgtaaattatctgaaa

SEQ ID NO: 126708 - DNA, 120 bp, Artificial Sequence
  ENSG00000101782_20 (sequence is synthesized)
ggacagaatataagatttaaccatgtttgacgtattttaatttagttaatgaagcaaaattcagtttatatttcactagaactgtgtacttgattgattttcagagaaatatcacaaatt

SEQ ID NO: 126709 - DNA, 120 bp, Artificial Sequence
  ENSG00000101782_21 (sequence is synthesized)
cttgattgattttcagagaaatatcacaaattagaaatattaaatctaaggatgaaaggtatatataaaacaatttgggggccaggcacgatggctcaaacctgtaatcccagcactttg

SEQ ID NO: 126710 - DNA, 120 bp, Artificial Sequence
  ENSG00000101782_22 (sequence is synthesized)
ctgagatcatgccactgcactccggcctaggtgacagagggaaactccatctccaggaaaaaaaaaaaaaaacccaatttggataccaaattaatcaactaatttgagctatctggcctt

SEQ ID NO: 126711 - DNA, 120 bp, Artificial Sequence
  ENSG00000101782_23 (sequence is synthesized)
accaaattaatcaactaatttgagctatctggccttactcttagtagtttttagtacgtgctggacaccacttttaaaaagcaatcactgtgctagaaaagtatattggctttgttagga

SEQ ID NO: 126712 - DNA, 120 bp, Artificial Sequence
  ENSG00000101782_24 (sequence is synthesized)
ttaaagttcattaacttcaatgtaatcatgcctcctattactgaagtcagattggaaccactaaagatccaaactttctgtctggtaatagaaagtaaaaatctagacatcatttacatt

SEQ ID NO: 126713 - DNA, 120 bp, Artificial Sequence
  ENSG00000101782_25 (sequence is synthesized)
tgagaaagctgtttttaacattattttaaaatgccaaatatgttctttctagaaaaatatttatttttgtttttgttggatagcttttaattacatttcagagaggtgtaattttgggta

SEQ ID NO: 126714 - DNA, 120 bp, Artificial Sequence
  ENSG00000101782_26 (sequence is synthesized)
gatgctcattacatttttgaaaggtttatgattccaaaataaagatttatatgactggtgatactggctttacagaaatttcagagaactaatttttaaaatctttagcatttaaaactt

SEQ ID NO: 126715 - DNA, 120 bp, Artificial Sequence
  ENSG00000101782_27 (sequence is synthesized)
tttttgttttgttttctgacatattctgacaaagagcagcaaaccactgctgtgtggcattcttggagtgtgctgtgaatgtgctttttaagaaattaaaaagagatcattttaaaattg

SEQ ID NO: 126716 - DNA, 120 bp, Artificial Sequence
  ENSG00000101782_28 (sequence is synthesized)
gtaagtaaaattcacaaatactttatctagcaacttatagcagagttttaggatttgatgagtaattgtcatgacaagtggtttggaaaaagcagtgcagaagaaagcaccatattgaga

SEQ ID NO: 126717 - DNA, 120 bp, Artificial Sequence
  ENSG00000101782_29 (sequence is synthesized)
gtccagtgatacttgaattttggtcctgattttgcattggttttcattattatcttggacaaaccactgtttctgtgggttttagttatatcgcgttaatgctgcagttgaactagatga

SEQ ID NO: 126718 - DNA, 120 bp, Artificial Sequence
  ENSG00000101782_30 (sequence is synthesized)
agtaaatcttcaactatttttgcttcttaagtttccatttcctttgaaaattatcgaaaagtgcatccttatgaagacagcgatagctctgaagatgaggttgactggcaggatactcgt

SEQ ID NO: 126719 - DNA, 120 bp, Artificial Sequence
  ENSG00000101782_31 (sequence is synthesized)
atggatttaaaactatcaaaccatgttttcaatgctttaaaacaacatgcctactcagaagaacgtcgaagtgcccgcctacatgagaaaaaggagcattctacagcacatggaggatga

SEQ ID NO: 126720 - DNA, 120 bp, Artificial Sequence
  ENSG00000101782_32 (sequence is synthesized)
ggagcacattttgttaacattcagatttaattactgtaagtaaaatttaaaatgtaaatacatcagttcatgttctgtattgaaataggtctggttgatcgatgtcagtcagtcagtaga

SEQ ID NO: 126721 - DNA, 120 bp, Artificial Sequence
  ENSG00000101782_33 (sequence is synthesized)
ggttgagaaatgaggcaaggaatgtagtggctcaagagatcctccctccttggcctcccaaagtgttgggataacaaggataacaggagtgagccgccatgcctggctgagccagtaatt

SEQ ID NO: 126722 - DNA, 120 bp, Artificial Sequence
  ENSG00000101782_34 (sequence is synthesized)
tttactctcttaaaaactaggttattcctaatgattctgcctttgagttgaaattactgtgtgtgtgtgtgtgtgcgtgtgcacacgtgcatgcatccaagtctttttataaatgtgctg

SEQ ID NO: 126723 - DNA, 120 bp, Artificial Sequence
  ENSG00000101782_35 (sequence is synthesized)
ctccctgtttttagtttataagagaacattgctaatacttcttactgactttcttgtatttccttactagtttttccagaaaggaggagtcaaggaagcccttagtgaacgagaactctt

SEQ ID NO: 126724 - DNA, 120 bp, Artificial Sequence
  ENSG00000101782_36 (sequence is synthesized)
gggccagcgcccttaaatcagcaagaagacgacacagatgactgacctcctccctcatcaacccttaagaataagggatggaaatctctgaagggggaatgagataggaagatcactggg

SEQ ID NO: 126725 - DNA, 120 bp, Artificial Sequence
  ENSG00000101782_37 (sequence is synthesized)
tgctcgcaagaggatggaagaatccacacaagagcttaaacaagagctaggcaaagaaactgtgggataacagaaaacccaaaatcaggaggagaaggctgggtttggtggctcatgact

SEQ ID NO: 126726 - DNA, 120 bp, Artificial Sequence
  ENSG00000101811_0 (sequence is synthesized)
ccgactcaacagagctatggcgggtttgactgtgagagacccagcggtggatcgttctctacgttctgtgttcgtggggaacattccttatgaagctactgaagagcagttgaaggacat

SEQ ID NO: 126727 - DNA, 120 bp, Artificial Sequence
  ENSG00000101811_1 (sequence is synthesized)
cttttctgaggttggacctgttgttagtttcagattggtatacgatagagagacaggaaagccaaagggttatggcttctgtgaataccaagaccaagagacagcacttagtgccatgcg

SEQ ID NO: 126728 - DNA, 120 bp, Artificial Sequence
  ENSG00000101811_2 (sequence is synthesized)
gaacctgaatgggcgcgaattcagtgggagagcacttcgagtggacaatgctgccagtgaaaagaacaaagaagagctgaagagccttggcactggtgcccctgtcattgagtcacctta

SEQ ID NO: 126729 - DNA, 120 bp, Artificial Sequence
  ENSG00000101811_3 (sequence is synthesized)
tggagagaccatcagtcctgaggatgcccctgagtccattagcaaagcagttgccagccttccaccagagcagatgtttgagctgatgaaacaaatgaagctctgtgtccagaatagtcc

SEQ ID NO: 126730 - DNA, 120 bp, Artificial Sequence
  ENSG00000101811_4 (sequence is synthesized)
ccaggaggcacggaacatgttacttcagaaccctcaactggcttatgctttgctgcaagcacaggtagtgatgagaattgtggatccggaaattgccctgaaaattctgcatcgccagac

SEQ ID NO: 126731 - DNA, 120 bp, Artificial Sequence
  ENSG00000101811_5 (sequence is synthesized)
aaatatcccaacgctgattgcaggcaaccctcagccagtccatggtgctgggcctggctcaggatccaatgtgtcaatgaaccagcagaatcctcaggcccctcaggcccagtctttggg

SEQ ID NO: 126732 - DNA, 120 bp, Artificial Sequence
  ENSG00000101811_6 (sequence is synthesized)
tggaatgcatgtcaatggcgcacctcctctgatgcaagcttctatgcagggtggagttccagcaccagggcaaatgccagctgctgtcacaggacctggccctggttccttagctcctgg

SEQ ID NO: 126733 - DNA, 120 bp, Artificial Sequence
  ENSG00000101811_7 (sequence is synthesized)
aggaggaatgcaggctcaggttggaatgccaggaagtggaccagtgtccatggaacgggggcaagtgccgatgcaagaccccagagcagctatgcagcggggatccttgcctgcgaatgt

SEQ ID NO: 126734 - DNA, 120 bp, Artificial Sequence
  ENSG00000101811_8 (sequence is synthesized)
atccacggggaggcactttactttctgtaactggagaggtagagcctagaggttacttgggaccacctcatcagggtccacccatgcaccatgtccctggccatgagagccgaggaccac

SEQ ID NO: 126735 - DNA, 120 bp, Artificial Sequence
  ENSG00000101811_9 (sequence is synthesized)
ccccacatgaactgaggggagggccattacccgagcccagacctctaatggcagaaccaagaggacccatgctagatcagaggggtccacccttggatggcagaggtggaagggatcccc

SEQ ID NO: 126736 - DNA, 120 bp, Artificial Sequence
  ENSG00000101811_10 (sequence is synthesized)
gaggaatagatgcacgagggatggaggcccgagccatggaggcaagagggttagatgccagaggattagaggcccgtgcaatggaggcccgtgcgatggaagctcgtgcaatggaggccc

SEQ ID NO: 126737 - DNA, 120 bp, Artificial Sequence
  ENSG00000101811_11 (sequence is synthesized)
gagcgatggaggcccgtgcaatggaagtccgagggatggaggccagaggcatggataccagaggcccagtgcctggccccagaggacctatacctagtggaatgcagggtcccagtccaa

SEQ ID NO: 126738 - DNA, 120 bp, Artificial Sequence
  ENSG00000101811_12 (sequence is synthesized)
ttaacatgggggcggttgtcccccagggatccagacaggtcccagtcatgcagggaacaggaatgcaaggagcaagtatacagggtggaagccagcctggcggctttagtcccgggcaga

SEQ ID NO: 126739 - DNA, 120 bp, Artificial Sequence
  ENSG00000101811_13 (sequence is synthesized)
accaagtcactccacaggatcatgagaaggctgctttgattatgcaggttctacaactgactgcagaccagattgccatgttgcctcctgagcaaaggcagagtatcctgattttaaagg

SEQ ID NO: 126740 - DNA, 120 bp, Artificial Sequence
  ENSG00000101811_14 (sequence is synthesized)
aacaaatacagaaatccactggagcaccttgataggttttcaaaaatacctggcaagaaatctggaaattctataattttgttgaaatattgaaaaaagatgacctgcatcctaaccctt

SEQ ID NO: 126741 - DNA, 120 bp, Artificial Sequence
  ENSG00000101811_15 (sequence is synthesized)
gaatgactcaaatcagtgccaggtggaggactcccatcaccttctctcagaacaaaatcacttcattttattgtcttagtttgtatattttctgtgacttgaaataaactttgaacacaa

SEQ ID NO: 126742 - DNA, 120 bp, Artificial Sequence
  ENSG00000101811_16 (sequence is synthesized)
atgaatcgctaccggagccgctgacggttcggacgtgcagttctccctgcttatcctgtagggcgtccaacctggtggactcatgagcaaagagatattcccattctgccgagtggggaa

SEQ ID NO: 126743 - DNA, 120 bp, Artificial Sequence
  ENSG00000101812_0 (sequence is synthesized)
aaccgtcactctctgttcttgctatctaatggccgctgcttccgccatggctgaggcttcctctgagacaacctcggaggaaggccagagcatccaggagcccaaagaggccaactccac

SEQ ID NO: 126744 - DNA, 120 bp, Artificial Sequence
  ENSG00000101812_1 (sequence is synthesized)
gaaggcccagaagcagaagaggcgagggtgccgaggctcccgcaggcgccacgccaaccgccgtggggacagcttcggggacagcttcaccccctatttcccccgggtgctgaagcaggt

SEQ ID NO: 126745 - DNA, 120 bp, Artificial Sequence
  ENSG00000101812_2 (sequence is synthesized)
tcaccagggcctcagcctttcccaggaggccgtgagtgtcatggattctatgatccatgacatattggaccgcatcgccaccgaggctggtcagctggcccattacaccaagcgcgtgac

SEQ ID NO: 126746 - DNA, 120 bp, Artificial Sequence
  ENSG00000101812_3 (sequence is synthesized)
catcacctcccgggacatccagatggccgtgcgactgctgctgccggggaagatgggcaagctcgccgaggcccagggcacgaatgccgccctcagaacttcattatgtgcgatatggca

SEQ ID NO: 126747 - DNA, 120 bp, Artificial Sequence
  ENSG00000101812_4 (sequence is synthesized)
acagagaaagtgaatatgctgatacaagaagcaagaaaccttccttacttccaggtgtgtgtcagtaggattacggagtgtccacggaaacagctcatgccctagtgtacagtggtacag

SEQ ID NO: 126748 - DNA, 120 bp, Artificial Sequence
  ENSG00000101812_5 (sequence is synthesized)
ccaatgagtgacctgcagtctatgagcaacagtcattgacccaatgtggggggagtgacccaagctgaacccacagcagccttcctgttatattcaacctggtgtttaaaggaacggcag

SEQ ID NO: 126749 - DNA, 120 bp, Artificial Sequence
  ENSG00000101812_6 (sequence is synthesized)
tgtgattctttacctgatgtttttgtttgcattgcttgtaatcatgatcttttagggatatgaatccaaagctaagattagaatatgtaccttgtccctaacatcaagttatacagaaca

SEQ ID NO: 126750 - DNA, 120 bp, Artificial Sequence
  ENSG00000101812_7 (sequence is synthesized)
gctacctttcattgtgctctcttctgggtcccaagtcttggcattttaagcatttttttctataagtgtattgctgaatttcagagcaggtgctcactttcccattgctttccttttcca

SEQ ID NO: 126751 - DNA, 120 bp, Artificial Sequence
  ENSG00000101812_8 (sequence is synthesized)
ttgatttccagtcgcccgagtatgtggacaagagaacatactctgggactgcaacccacaggaatttattatgttgtgccttgaagctcaacatgtggccatttttgttaaatgtttccc

SEQ ID NO: 126752 - DNA, 120 bp, Artificial Sequence
  ENSG00000101812_9 (sequence is synthesized)
gtaaattttgaaacatctcataaacaacccttctccttcatatgtagaaaccagtaaaggatggcactctcagtcaaaccatgaaacaaaagctggataaatgacaaaaatcaaaatttt

SEQ ID NO: 126753 - DNA, 120 bp, Artificial Sequence
  ENSG00000101812_10 (sequence is synthesized)
cttgagcccatcagaagtgggaaagaaccaccccagagggcccaacacatagccacatagattattccaccatttaaagaggaccccttggtcaagagggaaacagggtcagggcaagat

SEQ ID NO: 126754 - DNA, 120 bp, Artificial Sequence
  ENSG00000101812_11 (sequence is synthesized)
ggtagccagagcttccctgagtagtgcagatgggaagaggggaaggtcacctccagagctccacttgggatccatagagaaatgatatagaaccaagaagtccactcattgggatctgtt

SEQ ID NO: 126755 - DNA, 120 bp, Artificial Sequence
  ENSG00000101812_12 (sequence is synthesized)
actttctgtttttccagattattagaaaaatattacagaaatagctgaagagaaatgttatgaaaatagttgaagttgtgcttattgcacgaggagaccaagaaaaaccccacaaaatca

SEQ ID NO: 126756 - DNA, 120 bp, Artificial Sequence
  ENSG00000101812_13 (sequence is synthesized)
gctgcaagtaaatccttctggatggtgccaccaaatgttcctacaagtccggaacaacccttgccaaaccaaagacccttgccagaaccctgcttcttcccagagacagagctgtgtacc

SEQ ID NO: 126757 - DNA, 120 bp, Artificial Sequence
  ENSG00000101812_14 (sequence is synthesized)
tgacaaaacaccacatctcactcagtgacttatttctcattatgctaattgttttgctgtaaaatgccaatgtttctgtgaattaagacatacgaataaatttctgaagttacccttgca

SEQ ID NO: 126758 - DNA, 120 bp, Artificial Sequence
  ENSG00000101825_0 (sequence is synthesized)
gctgggaagccgagctgcctcacccccggccccgggaagggcatggccccggcaaactcccggccgtgactcgcgcgccccggctcggtggatgctcccggcgcaccgctcccgtgtgcg

SEQ ID NO: 126759 - DNA, 120 bp, Artificial Sequence
  ENSG00000101825_1 (sequence is synthesized)
gcggcttcccaaggacaggtatccgagaatcaggcaccccgacaagatgcccaagcgcgcgcactggggggccctctccgtggtgctgatcctgctttggggccatccgcgagtggcgct

SEQ ID NO: 126760 - DNA, 120 bp, Artificial Sequence
  ENSG00000101825_2 (sequence is synthesized)
ggcctgcccgcatccttgtgcctgctacgtccccagcgaggtccactgcacgttccgatccctggcttccgtgcccgctggcattgctaaacacgtggaaagaatcaatttggggtttaa

SEQ ID NO: 126761 - DNA, 120 bp, Artificial Sequence
  ENSG00000101825_3 (sequence is synthesized)
tagcatacaggccctgtcagaaacctcatttgcaggactgaccaagttggagctacttatgattcacggcaatgagatcccaagcatccccgatggagctttaagagacctcagctctct

SEQ ID NO: 126762 - DNA, 120 bp, Artificial Sequence
  ENSG00000101825_4 (sequence is synthesized)
tcaggttttcaagttcagctacaacaagctgagagtgatcacaggacagaccctccagggtctctctaacttaatgaggctgcacattgaccacaacaagatcgagtttatccaccctca

SEQ ID NO: 126763 - DNA, 120 bp, Artificial Sequence
  ENSG00000101825_5 (sequence is synthesized)
agctttcaacggcttaacgtctctgaggctactccatttggaaggaaatctcctccaccagctgcaccccagcaccttctccacgttcacatttttggattatttcagactctccaccat

SEQ ID NO: 126764 - DNA, 120 bp, Artificial Sequence
  ENSG00000101825_6 (sequence is synthesized)
aaggcacctctacttagcagagaacatggttagaactcttcctgccagcatgcttcggaacatgccgcttctggagaatctttacttgcagggaaatccgtggacctgcgattgtgagat

SEQ ID NO: 126765 - DNA, 120 bp, Artificial Sequence
  ENSG00000101825_7 (sequence is synthesized)
gagatggtttttggaatgggatgcaaaatccagaggaattctgaagtgtaaaaaggacaaagcttatgaaggcggtcagttgtgtgcaatgtgcttcagtccaaagaagttgtacaaaca

SEQ ID NO: 126766 - DNA, 120 bp, Artificial Sequence
  ENSG00000101825_8 (sequence is synthesized)
tgagatacacaagctgaaggacatgacttgtctgaagccttcaatagagtcccctctgagacagaacaggagcaggagtattgaggaggagcaagaacaggaagaggatggtggcagcca

SEQ ID NO: 126767 - DNA, 120 bp, Artificial Sequence
  ENSG00000101825_9 (sequence is synthesized)
gctcatcctggagaaattccaactgccccagtggagcatctctttgaatatgaccgacgagcacgggaacatggtgaacttggtctgtgacatcaagaaaccaatggatgtgtacaagat

SEQ ID NO: 126768 - DNA, 120 bp, Artificial Sequence
  ENSG00000101825_10 (sequence is synthesized)
tcacttgaaccaaacggatcctccagatattgacataaatgcaacagttgccttggactttgagtgtccaatgacccgagaaaactatgaaaagctatggaaattgatagcatactacag

SEQ ID NO: 126769 - DNA, 120 bp, Artificial Sequence
  ENSG00000101825_11 (sequence is synthesized)
tgaagttcccgtgaagctacacagagagctcatgctcagcaaagaccccagagtcagctaccagtacaggcaggatgctgatgaggaagctctttactacacaggtgtgagagcccagat

SEQ ID NO: 126770 - DNA, 120 bp, Artificial Sequence
  ENSG00000101825_12 (sequence is synthesized)
tcttgcagaaccagaatgggtcatgcagccatccatagatatccagctgaaccgacgtcagagtacggccaagaaggtgctactttcctactacacccagtattctcaaacaatatccac

SEQ ID NO: 126771 - DNA, 120 bp, Artificial Sequence
  ENSG00000101825_13 (sequence is synthesized)
caaagatacaaggcaggctcggggcagaagctgggtaatgattgagcctagtggagctgtgcaaagagatcagactgtcctggaagggggtccatgccagttgagctgcaacgtgaaagc

SEQ ID NO: 126772 - DNA, 120 bp, Artificial Sequence
  ENSG00000101825_14 (sequence is synthesized)
ttctgagagtccatctatcttctgggtgcttccagatggctccatcctgaaagcgcccatggatgacccagacagcaagttctccattctcagcagtggctggctgaggatcaagtccat

SEQ ID NO: 126773 - DNA, 120 bp, Artificial Sequence
  ENSG00000101825_15 (sequence is synthesized)
ggagccatctgactcaggcttgtaccagtgcattgctcaagtgagggatgaaatggaccgcatggtatatagggtacttgtgcagtctccctccactcagccagccgagaaagacacagt

SEQ ID NO: 126774 - DNA, 120 bp, Artificial Sequence
  ENSG00000101825_16 (sequence is synthesized)
gacaattggcaagaacccaggggagtcggtgacattgccttgcaatgctttagcaatacccgaagcccaccttagctggattcttccaaacagaaggataattaatgatttggctaacac

SEQ ID NO: 126775 - DNA, 120 bp, Artificial Sequence
  ENSG00000101825_17 (sequence is synthesized)
atcacatgtatacatgttgccaaatggaactctttccatcccaaaggtccaagtcagtgacagtggttactacagatgtgtggctgtcaaccagcaaggggcagaccattttacggtggg

SEQ ID NO: 126776 - DNA, 120 bp, Artificial Sequence
  ENSG00000101825_18 (sequence is synthesized)
aatcacagtgaccaagaaagggtctggcttgccatccaaaagaggcagacgcccaggtgcaaaggctctttccagagtcagagaagacatcgtggaggatgaagggggctcgggcatggg

SEQ ID NO: 126777 - DNA, 120 bp, Artificial Sequence
  ENSG00000101825_19 (sequence is synthesized)
agatgaagagaacacttcaaggagacttctgcatccaaaggaccaagaggtgttcctcaaaacaaaggatgatgccatcaatggagacaagaaagccaagaaagggagaagaaagctgaa

SEQ ID NO: 126778 - DNA, 120 bp, Artificial Sequence
  ENSG00000101825_20 (sequence is synthesized)
actctggaagcattcggaaaaagaaccagagaccaatgttgcagaaggtcgcagagtgtttgaatctagacgaaggataaacatggcaaacaaacagattaatccggagcgctgggctga

SEQ ID NO: 126779 - DNA, 120 bp, Artificial Sequence
  ENSG00000101825_21 (sequence is synthesized)
tattttagccaaagtccgtgggaaaaatctccctaagggcacagaagtacccccattgattaaaaccacaagtcctccatccttgagtctagaagtcacaccaccttttcctgctatttc

SEQ ID NO: 126780 - DNA, 120 bp, Artificial Sequence
  ENSG00000101825_22 (sequence is synthesized)
tcccccctcagcatctcctgtgcagacagtaaccagtgctgaagaatcctcagcagatgtacctctacttggtgaagaagagcacgttttgggtaccatttcctcagccagcatggggct

SEQ ID NO: 126781 - DNA, 120 bp, Artificial Sequence
  ENSG00000101825_23 (sequence is synthesized)
agaacacaaccacaatggagttattcttgttgaacctgaagtaacaagcacacctctggaggaagttgttgatgacctttccgagaagactgaggagataacttccactgaaggagacct

SEQ ID NO: 126782 - DNA, 120 bp, Artificial Sequence
  ENSG00000101825_24 (sequence is synthesized)
gaaggggacagcagcccctacacttatatctgagccttatgaaccatctcctactctgcacacattagacacagtctatgaaaagcccacccatgaagagacggcaacagagggttggtc

SEQ ID NO: 126783 - DNA, 120 bp, Artificial Sequence
  ENSG00000101825_25 (sequence is synthesized)
tgcagcagatgttggatcgtcaccagagcccacatccagtgagtatgagcctccattggatgctgtctccttggctgagtctgagcccatgcaatactttgacccagatttggagactaa

SEQ ID NO: 126784 - DNA, 120 bp, Artificial Sequence
  ENSG00000101825_26 (sequence is synthesized)
gtcacaaccagatgaggataagatgaaagaagacacctttgcacaccttactccaacccccaccatctgggttaatgactccagtacatcacagttatttgaggattctactatagggga

SEQ ID NO: 126785 - DNA, 120 bp, Artificial Sequence
  ENSG00000101825_27 (sequence is synthesized)
accaggtgtcccaggccaatcacatctacaaggactgacagacaacatccaccttgtgaaaagtagtctaagcactcaagacaccttactgattaaaaagggtatgaaagagatgtctca

SEQ ID NO: 126786 - DNA, 120 bp, Artificial Sequence
  ENSG00000101825_28 (sequence is synthesized)
gacactacagggaggaaatatgctagagggagaccccacacactccagaagttctgagagtgagggccaagagagcaaatccatcactttgcctgactccacactgggtataatgagcag

SEQ ID NO: 126787 - DNA, 120 bp, Artificial Sequence
  ENSG00000101825_29 (sequence is synthesized)
tatgtctccagttaagaagcctgcggaaaccacagttggtaccctcctagacaaagacaccacaacagcaacaacaacaccaaggcaaaaagttgctccgtcatccaccatgagcactca

SEQ ID NO: 126788 - DNA, 120 bp, Artificial Sequence
  ENSG00000101825_30 (sequence is synthesized)
cccttctcgaaggagacccaacgggagaaggagattacgccccaacaaattccgccaccggcacaagcaaaccccacccacaacttttgccccatcagagactttttctactcaaccaac

SEQ ID NO: 126789 - DNA, 120 bp, Artificial Sequence
  ENSG00000101825_31 (sequence is synthesized)
tcaagcacctgacattaagatttcaagtcaagtggagagttctctggttcctacagcttgggtggataacacagttaatacccccaaacagttggaaatggagaagaatgcagaacccac

SEQ ID NO: 126790 - DNA, 120 bp, Artificial Sequence
  ENSG00000101825_32 (sequence is synthesized)
atccaagggaacaccacggagaaaacacgggaagaggccaaacaaacatcgatataccccttctacagtgagctcaagagcgtccggatccaagcccagcccttctccagaaaataaaca

SEQ ID NO: 126791 - DNA, 120 bp, Artificial Sequence
  ENSG00000101825_33 (sequence is synthesized)
tagaaacattgttactcccagttcagaaactatacttttgcctagaactgtttctctgaaaactgagggcccttatgattccttagattacatgacaaccaccagaaaaatatattcatc

SEQ ID NO: 126792 - DNA, 120 bp, Artificial Sequence
  ENSG00000101825_34 (sequence is synthesized)
ttaccctaaagtccaagagacacttccagtcacatataaacccacatcagatggaaaagaaattaaggatgatgttgccacaaatgttgacaaacataaaagtgacattttagtcactgg

SEQ ID NO: 126793 - DNA, 120 bp, Artificial Sequence
  ENSG00000101825_35 (sequence is synthesized)
tgaatcaattactaatgccataccaacttctcgctccttggtctccactatgggagaatttaaggaagaatcctctcctgtaggctttccaggaactccaacctggaatccctcaaggac

SEQ ID NO: 126794 - DNA, 120 bp, Artificial Sequence
  ENSG00000101825_36 (sequence is synthesized)
ggcccagcctgggaggctacagacaggcatacctgttaccacttctggggaaaatcttacagaccctccccttcttaaagagcttgaggatgtggatttcacttccgagtttttgtcctc

SEQ ID NO: 126795 - DNA, 120 bp, Artificial Sequence
  ENSG00000101825_37 (sequence is synthesized)
tttgacagtctccacaccatttcaccaggaagaagctggttcttccacaactctctcaagcataaaagtggaggtggcttcaagtcaggcagaaaccaccacccttgatcaagatcatct

SEQ ID NO: 126796 - DNA, 120 bp, Artificial Sequence
  ENSG00000101825_38 (sequence is synthesized)
tgaaaccactgtggctattctcctttctgaaactagaccacagaatcacacccctactgctgcccggatgaaggagccagcatcctcgtccccatccacaattctcatgtctttgggaca

SEQ ID NO: 126797 - DNA, 120 bp, Artificial Sequence
  ENSG00000101825_39 (sequence is synthesized)
aaccaccaccactaagccagcacttcccagtccaagaatatctcaagcatctagagattccaaggaaaatgttttcttgaattatgtggggaatccagaaacagaagcaaccccagtgaa

SEQ ID NO: 126798 - DNA, 120 bp, Artificial Sequence
  ENSG00000101825_40 (sequence is synthesized)
gctggaattggaaaagcaagtatttggtagtaggagtctaccacgtggcccagatagccaacgccaggatggaagagttcatgcttctcatcaactaaccagagtccctgccaaacccat

SEQ ID NO: 126799 - DNA, 120 bp, Artificial Sequence
  ENSG00000101825_41 (sequence is synthesized)
cctaccaacagcaacagtgaggctgcctgaaatgtccacacaaagcgcttccagatactttgtaacttcccagtcacctcgtcactggaccaacaaaccggaaataactacatatccttc

SEQ ID NO: 126800 - DNA, 120 bp, Artificial Sequence
  ENSG00000101825_42 (sequence is synthesized)
tggggctttgccagagaacaaacagtttacaactccaagattatcaagtacaacaattcctctcccattgcacatgtccaaacccagcattcctagtaagtttactgaccgaagaactga

SEQ ID NO: 126801 - DNA, 120 bp, Artificial Sequence
  ENSG00000101825_43 (sequence is synthesized)
ccaattcaatggctactccaaagtgtttggaaataacaacatccctgaggcaagaaacccagttggaaagcctcccagtccaagaattcctcattattccaatggaagactccctttctt

SEQ ID NO: 126802 - DNA, 120 bp, Artificial Sequence
  ENSG00000101825_44 (sequence is synthesized)
taccaacaagactctttcttttccacagttgggagtcacccggagaccccagatacccacttctcctgccccagtaatgagagagagaaaagttattccaggttcctacaacaggataca

SEQ ID NO: 126803 - DNA, 120 bp, Artificial Sequence
  ENSG00000101825_45 (sequence is synthesized)
ttcccatagcaccttccatctggactttggccctccggcacctccgttgttgcacactccgcagaccacgggatcaccctcaactaacttacagaatatccctatggtctcttccaccca

SEQ ID NO: 126804 - DNA, 120 bp, Artificial Sequence
  ENSG00000101825_46 (sequence is synthesized)
gagttctatctcctttataacatcttctgtccagtcctcaggaagcttccaccagagcagctcaaagttctttgcaggaggacctcctgcatccaaattctggtctcttggggaaaagcc

SEQ ID NO: 126805 - DNA, 120 bp, Artificial Sequence
  ENSG00000101825_47 (sequence is synthesized)
acaaatcctcaccaagtccccacagactgtgtccgtcaccgctgagacagacactgtgttcccctgtgaggcaacaggaaaaccaaagcctttcgttacttggacaaaggtttccacagg

SEQ ID NO: 126806 - DNA, 120 bp, Artificial Sequence
  ENSG00000101825_48 (sequence is synthesized)
agctcttatgactccgaataccaggatacaacggtttgaggttctcaagaacggtaccttagtgatacggaaggttcaagtacaagatcgaggccagtatatgtgcaccgccagcaacct

SEQ ID NO: 126807 - DNA, 120 bp, Artificial Sequence
  ENSG00000101825_49 (sequence is synthesized)
gcacggcctggacaggatggtggtcttgctttcggtcaccgtgcagcaacctcaaatcctagcctcccactaccaggacgtcactgtctacctgggagacaccattgcaatggagtgtct

SEQ ID NO: 126808 - DNA, 120 bp, Artificial Sequence
  ENSG00000101825_50 (sequence is synthesized)
ggccaaagggaccccagccccccaaatttcctggatcttccctgacaggagggtgtggcaaactgtgtcccccgtggagggccgcatcaccctgcacgaaaaccggaccctttccatcaa

SEQ ID NO: 126809 - DNA, 120 bp, Artificial Sequence
  ENSG00000101825_51 (sequence is synthesized)
ggaggcgtccttctcagacagaggcgtctataagtgcgtggccagcaatgcagccggggcggacagcctggccatccgcctgcacgtggcggcactgccccccgttatccaccaggagaa

SEQ ID NO: 126810 - DNA, 120 bp, Artificial Sequence
  ENSG00000101825_52 (sequence is synthesized)
gctggagaacatctcgctgcccccggggctcagcattcacattcactgcactgccaaggctgcgcccctgcccagcgtgcgctgggtgctcggggacggtacccagatccgcccctcgca

SEQ ID NO: 126811 - DNA, 120 bp, Artificial Sequence
  ENSG00000101825_53 (sequence is synthesized)
gttcctccacgggaacttgtttgttttccccaacgggacgctctacatccgcaacctcgcgcccaaggacagcgggcgctatgagtgcgtggccgccaacctggtaggctccgcgcgcag

SEQ ID NO: 126812 - DNA, 120 bp, Artificial Sequence
  ENSG00000101825_54 (sequence is synthesized)
gacggtgcagctgaacgtgcagcgtgcagcagccaacgcgcgcatcacgggcacctccccgcggaggacggacgtcaggtacggaggaaccctcaagctggactgcagcgcctcggggga

SEQ ID NO: 126813 - DNA, 120 bp, Artificial Sequence
  ENSG00000101825_55 (sequence is synthesized)
cccctggccgcgcatcctctggaggctgccgtccaagaggatgatcgacgcgctcttcagttttgatagcagaatcaaggtgtttgccaatgggaccctggtggtgaaatcagtgacgga

SEQ ID NO: 126814 - DNA, 120 bp, Artificial Sequence
  ENSG00000101825_56 (sequence is synthesized)
caaagatgccggagattacctgtgcgtagctcgaaataaggttggtgatgactacgtggtgctcaaagtggatgtggtgatgaaaccggccaagattgaacacaaggaggagaacgacca

SEQ ID NO: 126815 - DNA, 120 bp, Artificial Sequence
  ENSG00000101825_57 (sequence is synthesized)
caaagtcttctacgggggtgacctgaaagtggactgtgtggccaccgggcttcccaatcccgagatctcctggagcctcccagacgggagtctggtgaactccttcatgcagtcggatga

SEQ ID NO: 126816 - DNA, 120 bp, Artificial Sequence
  ENSG00000101825_58 (sequence is synthesized)
cagcggtggacgcaccaagcgctatgtcgtcttcaacaatgggacactctactttaacgaagtggggatgagggaggaaggagactacacctgctttgctgaaaatcaggtcgggaagga

SEQ ID NO: 126817 - DNA, 120 bp, Artificial Sequence
  ENSG00000101825_59 (sequence is synthesized)
cgagatgagagtcagagtcaaggtggtgacagcgcccgccaccatccggaacaagacttacttggcggttcaggtgccctatggagacgtggtcactgtagcctgtgaggccaaaggaga

SEQ ID NO: 126818 - DNA, 120 bp, Artificial Sequence
  ENSG00000101825_60 (sequence is synthesized)
acccatgcccaaggtgacttggttgtccccaaccaacaaggtgatccccacctcctctgagaagtatcagatataccaagatggcactctccttattcagaaagcccagcgttctgacag

SEQ ID NO: 126819 - DNA, 120 bp, Artificial Sequence
  ENSG00000101825_61 (sequence is synthesized)
cggcaactacacctgcttggtcaggaacagcgcgggagaggataggaagacggtgtggattcacgtcaacgtccagccacccaagatcaacggtaaccccaaccccatcaccactgtgcg

SEQ ID NO: 126820 - DNA, 120 bp, Artificial Sequence
  ENSG00000101825_62 (sequence is synthesized)
ggagatagcagccgggggcagtcggaaactgattgactgcaaagctgaaggcatccccaccccgagggtgttatgggcttttcccgagggtgtggttctgccagctccatactatggaaa

SEQ ID NO: 126821 - DNA, 120 bp, Artificial Sequence
  ENSG00000101825_63 (sequence is synthesized)
ccggatcactgtccatggcaacggttccctggacatcaggagtttgaggaagagcgactccgtccagctggtatgcatggcacgcaacgagggaggggaggccaggttgatcctgcagct

SEQ ID NO: 126822 - DNA, 120 bp, Artificial Sequence
  ENSG00000101825_64 (sequence is synthesized)
cactgtcctggagcccatggagaaacccatcttccacgacccgatcagcgagaagatcacggccatggcgggccacaccatcagcctcaactgctctgccgcggggaccccgacacccag

SEQ ID NO: 126823 - DNA, 120 bp, Artificial Sequence
  ENSG00000101825_65 (sequence is synthesized)
cctggtgtgggtccttcccaatggcaccgatctgcagagtggacagcagctgcagcgcttctaccacaaggctgacggcatgctacacattagcggtctctcctcggtggacgccggggc

SEQ ID NO: 126824 - DNA, 120 bp, Artificial Sequence
  ENSG00000101825_66 (sequence is synthesized)
ctaccgctgcgtggcccgcaatgccgctggccacacggagaggctggtctccctgaaggtgggactgaagccagaagcaaacaagcagtatcataacctggtcagcatcatcaatggtga

SEQ ID NO: 126825 - DNA, 120 bp, Artificial Sequence
  ENSG00000101825_67 (sequence is synthesized)
gaccctgaagctcccctgcacccctcccggggctgggcagggacgtttctcctggacgctccccaatggcatgcatctggagggcccccaaaccctgggacgcgtttctcttctggacaa

SEQ ID NO: 126826 - DNA, 120 bp, Artificial Sequence
  ENSG00000101825_68 (sequence is synthesized)
tggcaccctcacggttcgtgaggcctcggtgtttgacaggggtacctatgtatgcaggatggagacggagtacggcccttcggtcaccagcatccccgtgattgtgatcgcctatcctcc

SEQ ID NO: 126827 - DNA, 120 bp, Artificial Sequence
  ENSG00000101825_69 (sequence is synthesized)
ccggatcaccagcgagcccaccccggtcatctacacccggcccgggaacaccgtgaaactgaactgcatggctatggggattcccaaagctgacatcacgtgggagttaccggataagtc

SEQ ID NO: 126828 - DNA, 120 bp, Artificial Sequence
  ENSG00000101825_70 (sequence is synthesized)
gcatctgaaggcaggggttcaggctcgtctgtatggaaacagatttcttcacccccagggatcactgaccatccagcatgccacacagagagatgccggcttctacaagtgcatggcaaa

SEQ ID NO: 126829 - DNA, 120 bp, Artificial Sequence
  ENSG00000101825_71 (sequence is synthesized)
aaacattctcggcagtgactccaaaacaacttacatccacgtcttctgaaatgtggattccagaatgattgcttaggaactgacaacaaagcggggtttgtaagggaagccaggttgggg

SEQ ID NO: 126830 - DNA, 120 bp, Artificial Sequence
  ENSG00000101825_72 (sequence is synthesized)
aataggagctcttaaataatgtgtcacagtgcatggtggcctctggtgggtttcaagttgaggttgatcttgatctacaattgttgggaaaaggaagcaatgcagacacgagaaggaggg

SEQ ID NO: 126831 - DNA, 120 bp, Artificial Sequence
  ENSG00000101825_73 (sequence is synthesized)
ctcagccttgctgagacactttcttttgtgtttacatcatgccaggggcttcattcagggtgtctgtgctctgactgcaatttttctttttttgcaaatgccactcgactgccttcataa

SEQ ID NO: 126832 - DNA, 120 bp, Artificial Sequence
  ENSG00000101825_74 (sequence is synthesized)
gcgtccataggatatctgaggaacattcatcaaaaataagccatagacatgaacaacacctcactaccccattgaagacgcatcacctagttaacctgctgcagtttttacatgatagac

SEQ ID NO: 126833 - DNA, 120 bp, Artificial Sequence
  ENSG00000101825_75 (sequence is synthesized)
tttgttccagattgacaagtcatctttcagttatttcctctgtcacttcaaaactccagcttgcccaataaggatttagaaccagagtgactgatatatatatatattttaattcagagt

SEQ ID NO: 126834 - DNA, 120 bp, Artificial Sequence
  ENSG00000101825_76 (sequence is synthesized)
tacatacatacagctaccattttatatgaaaaaagaaaaacatttcttcctggaactcactttttatataatgttttatatatatattttttcctttcaaatcagacgatgagactagaa

SEQ ID NO: 126835 - DNA, 120 bp, Artificial Sequence
  ENSG00000101825_77 (sequence is synthesized)
ggagaaatactttctgtcttattaaaattaataaattattggtctttacaagacttggatacattacagcagacatggaaatataattttaaaaaatttctctccaacctccttcaaatt

SEQ ID NO: 126836 - DNA, 120 bp, Artificial Sequence
  ENSG00000101825_78 (sequence is synthesized)
cagtcaccactgttatattaccttctccaggaaccctccagtggggaaggctgcgatattagatttccttgtatgcaaagtttttgttgaaagctgtgctcagaggaggtgagaggagag

SEQ ID NO: 126837 - DNA, 120 bp, Artificial Sequence
  ENSG00000101825_79 (sequence is synthesized)
gaaggagaaaactgcatcataactttacagaattgaatctagagtcttccccgaaaagcccagaaacttctctgcagtatctggcttgtccatctggtctaaggtggctgcttcttcccc

SEQ ID NO: 126838 - DNA, 120 bp, Artificial Sequence
  ENSG00000101825_80 (sequence is synthesized)
agccatgagtcagtttgtgcccatgaataatacacgacctgttatttccatgactgctttactgtatttttaaggtcaatatactgtacatttgataataaaataatattctcccaaaaa

SEQ ID NO: 126839 - DNA, 120 bp, Artificial Sequence
  ENSG00000101842_0 (sequence is synthesized)
ggcgatgcccagcagataagccaggcaaacctcggtgtgatcgaagaagccaatttgagactcagcctagtccaggcaagctactggcacctgctgctctcaactaacctccacacaatg

SEQ ID NO: 126840 - DNA, 120 bp, Artificial Sequence
  ENSG00000101842_1 (sequence is synthesized)
gtgttcgcattttggaaggtctttctgatcctaagctgccttgcaggtcaggttagtgtggtgcaagtgaccatcccagacggtttcgtgaacgtgactgttggatctaatgtcactctc

SEQ ID NO: 126841 - DNA, 120 bp, Artificial Sequence
  ENSG00000101842_2 (sequence is synthesized)
atctgcatctacaccaccactgtggcctcccgagaacagctttccatccagtggtctttcttccataagaaggagatggagccaatttctatttacttttctcaaggtggacaagctgta

SEQ ID NO: 126842 - DNA, 120 bp, Artificial Sequence
  ENSG00000101842_3 (sequence is synthesized)
gccatcgggcaatttaaagatcgaattacagggtccaacgatccaggtaatgcatctatcactatctcgcatatgcagccagcagacagtggaatttacatctgcgatgttaacaacccc

SEQ ID NO: 126843 - DNA, 120 bp, Artificial Sequence
  ENSG00000101842_4 (sequence is synthesized)
ccagactttctcggccaaaaccaaggcatcctcaacgtcagtgtgttagtgaaaccttctaagcccctttgtagcgttcaaggaagaccagaaactggccacactatttccctttcctgt

SEQ ID NO: 126844 - DNA, 120 bp, Artificial Sequence
  ENSG00000101842_5 (sequence is synthesized)
ctctctgcgcttggaacaccttcccctgtgtactactggcataaacttgagggaagagacatcgtgccagtgaaagaaaacttcaacccaaccaccgggattttggtcattggaaatctg

SEQ ID NO: 126845 - DNA, 120 bp, Artificial Sequence
  ENSG00000101842_6 (sequence is synthesized)
acaaattttgaacaaggttattaccagtgtactgccatcaacagacttggcaatagttcctgcgaaatcgatctcacttcttcacatccagaagttggaatcattgttggggccttgatt

SEQ ID NO: 126846 - DNA, 120 bp, Artificial Sequence
  ENSG00000101842_7 (sequence is synthesized)
ggtagcctggtaggtgccgccatcatcatctctgttgtgtgcttcgcaaggaataaggcaaaagcaaaggcaaaagaaagaaattctaagaccatcgcggaacttgagccaatgacaaag

SEQ ID NO: 126847 - DNA, 120 bp, Artificial Sequence
  ENSG00000101842_8 (sequence is synthesized)
ataaacccaaggggagaaagcgaagcaatgccaagagaagacgctacccaactagaagtaactctaccatcttccattcatgagactggccctgataccatccaagaaccagactatgag

SEQ ID NO: 126848 - DNA, 120 bp, Artificial Sequence
  ENSG00000101842_9 (sequence is synthesized)
ccaaagcctactcaggagcctgccccagagcctgccccaggatcagagcctatggcagtgcctgaccttgacatcgagctggagctggagccagaaacgcagtcggaattggagccagag

SEQ ID NO: 126849 - DNA, 120 bp, Artificial Sequence
  ENSG00000101842_10 (sequence is synthesized)
ccagagccagagccagagtcagagcctggggttgtagttgagcccttaagtgaagatgaaaagggagtggttaaggcataggctggtggcctaagtacagcattaatcattaaggaaccc

SEQ ID NO: 126850 - DNA, 120 bp, Artificial Sequence
  ENSG00000101842_11 (sequence is synthesized)
attactgccatttggaattcaaataacctaaccaacctccacctcctccttccattttgaccaaccttcttctaacaaggtgctcattcctactatgaatccagaataaacacgccaaga

SEQ ID NO: 126851 - DNA, 120 bp, Artificial Sequence
  ENSG00000101842_12 (sequence is synthesized)
acagtacctgtgttgttatttcagaaaatattatttctctctttttaactactctttttttttattttagacagagtcttgctccgtcgcgcaggctgtgatcgtagtggtgcgatctcg

SEQ ID NO: 126852 - DNA, 120 bp, Artificial Sequence
  ENSG00000101842_13 (sequence is synthesized)
actcttatgttccacatgcacatatgacaaggtggcattaattagattcaatattatttctaggaatagttcctcattcatttttatattgaccactaagaaaataattcatcagcatta

SEQ ID NO: 126853 - DNA, 120 bp, Artificial Sequence
  ENSG00000101842_14 (sequence is synthesized)
tctcatagattggaaaattttctccaaatacaatagaggagaatatgtaaagggtatacattaattggtacgtagcatttaaaatcaggtcttataattaatgcttcattcctcatatta

SEQ ID NO: 126854 - DNA, 120 bp, Artificial Sequence
  ENSG00000101842_15 (sequence is synthesized)
attaatgcttcattcctcatattagatttcccaagaaatcaccctggtatccaatatctgagcatggcaaatttaaaaaataacacaatttcttgcctgtaaccctagcactttgggagg

SEQ ID NO: 126855 - DNA, 77 bp, Artificial Sequence
  ENSG00000101842_16 (sequence is synthesized)
ttccatctgaaaaacaaaaacaaaaacagaaaacaaacaaacaaaaaacaaaaaatccccacaactttgtcaaataa

SEQ ID NO: 126856 - DNA, 120 bp, Artificial Sequence
  ENSG00000101842_17 (sequence is synthesized)
caaacaaaaaacaaaaaatccccacaactttgtcaaataatgtacaggcaaacactttcaaatataatttccttcagtgaatacaaaatgttgatatcataggtgatgtacaatttagtt

SEQ ID NO: 126857 - DNA, 120 bp, Artificial Sequence
  ENSG00000101842_18 (sequence is synthesized)
ttgaatgagttattatgttatcactgtgtctgatgttatctactttgaaaggcagtccagaaaagtgttctaagtgaactcttaagatctattttagataatttcaactaattaaataac

SEQ ID NO: 126858 - DNA, 120 bp, Artificial Sequence
  ENSG00000101842_19 (sequence is synthesized)
ctgttttactgcctgtacattccacattaataaagcgataccaatcttatatgaatgctaatattactaaaatgcactgatatcacttcttcttcccctgttgaaaagctttctcatgat

SEQ ID NO: 126859 - DNA, 120 bp, Artificial Sequence
  ENSG00000101842_20 (sequence is synthesized)
catatttcacccacatctcaccttgaagaaacttacaggtagacttaccttttcacttgtggaattaatcatatttaaatcttactttaaggctcaataaataatactcataatgtctca

SEQ ID NO: 126860 - DNA, 120 bp, Artificial Sequence
  ENSG00000101842_21 (sequence is synthesized)
tggagccaatttctcacagctcgtgcctcagtactgagggtatggaggaaaaggcagtcagtcagtgtctaaaaatgacgcacgcaagagacgctcggggaagatgtagctggacctctg

SEQ ID NO: 126861 - DNA, 120 bp, Artificial Sequence
  ENSG00000101842_22 (sequence is synthesized)
tatacaggctgatatgatgaatgaccatcctaatatctaatgctcacataataatatatgccatatgctgccctaaatcctttacaaaaagcaatttgtttgcttcacaaaatcgctaga

SEQ ID NO: 126862 - DNA, 120 bp, Artificial Sequence
  ENSG00000101842_23 (sequence is synthesized)
aggtaggtattactattcaatactaaaaaagaagcctttctgataacagcaggctgaatttctctttgtgatgctgttggtaaatccaggtgacactgtagctctgacaaacatatacct

SEQ ID NO: 126863 - DNA, 120 bp, Artificial Sequence
  ENSG00000101842_24 (sequence is synthesized)
tgcaaagatctgccactaataataatagtattataataataacactcgtacccacaatcacggtagctactatttgtggagcatgaattatgctgagtattatctcactctttcctccca

SEQ ID NO: 126864 - DNA, 120 bp, Artificial Sequence
  ENSG00000101843_0 (sequence is synthesized)
aagtagttgctgggacagcgaaatggaggggtgtgtgtctaacctaatggtctgcaacctggcctacagcgggaagctggaagagttgaaggagagtattctggccgataaatccctggc

SEQ ID NO: 126865 - DNA, 120 bp, Artificial Sequence
  ENSG00000101843_1 (sequence is synthesized)
tactagaactgaccaggacagcagaactgcattgcactgggcatgctcagctggacatacagaaattgttgaatttttgttgcaacttggagtgccagtgaatgataaagacgatgcagg

SEQ ID NO: 126866 - DNA, 120 bp, Artificial Sequence
  ENSG00000101843_2 (sequence is synthesized)
ttggtctcctcttcatattgcggcttctgctggccgggatgagattgtaaaagcccttctgggaaaaggtgctcaagtgaatgctgtcaatcaaaatggctgtactcccttacattatgc

SEQ ID NO: 126867 - DNA, 120 bp, Artificial Sequence
  ENSG00000101843_3 (sequence is synthesized)
agcttcgaaaaacaggcatgagatcgctgtcatgttactggaaggcggggctaatccagatgctaaggaccattatgaggctacagcaatgcaccgggcagcagccaagggtaacttgaa

SEQ ID NO: 126868 - DNA, 120 bp, Artificial Sequence
  ENSG00000101843_4 (sequence is synthesized)
gatgattcatatccttctgtactacaaagcatccacaaacatccaagacactgagggtaacactcctctacacttagcctgtgatgaggagagagtggaagaagcaaaactgctggtgtc

SEQ ID NO: 126869 - DNA, 120 bp, Artificial Sequence
  ENSG00000101843_5 (sequence is synthesized)
ccaaggagcaagtatttacattgagaataaagaagaaaagacacccctgcaagtggccaaaggtggcctgggtttaatactcaagagaatggtggaaggttaaacagcttggatttattc

SEQ ID NO: 126870 - DNA, 120 bp, Artificial Sequence
  ENSG00000101843_6 (sequence is synthesized)
tgtcctacaaactaatgtatttgtgcacaagacatcatctatgaatgatgaagttttctcaccttcaaagtcttataaacatgttgactcttgttcctgctgagttacttgttcgaagct

SEQ ID NO: 126871 - DNA, 120 bp, Artificial Sequence
  ENSG00000101843_7 (sequence is synthesized)
tacagcttgttttccaggcatcgaataactgttgagattgttctactgttgtcgtatattcttctatattgaattctggttaatttggagtaactaattctgtggctgttgtgagtcttc

SEQ ID NO: 126872 - DNA, 120 bp, Artificial Sequence
  ENSG00000101843_8 (sequence is synthesized)
agcaccctcccatgtaccttatatccctctctgaaacagaacagctccaatagcaacaagctagttgttctgccagatgtttctatgtggattctgtaatgttcctccatacagttaaaa

SEQ ID NO: 126873 - DNA, 120 bp, Artificial Sequence
  ENSG00000101843_9 (sequence is synthesized)
catcctaacttgtttttcaagctcactcaggcctacgccaaacgtttctgttttttttaaccatgaggtttaatttatttttgtgataggagggatatttacatattttagtggaccaca

SEQ ID NO: 126874 - DNA, 120 bp, Artificial Sequence
  ENSG00000101843_10 (sequence is synthesized)
ttttaagttggatggtgtgctctaaaatactgaaaaacaatagcccatatacctatgtatttgtttttgatgggttgtttactctgaaataaaatgtatggttttcttaaaaggaagttt

SEQ ID NO: 126875 - DNA, 120 bp, Artificial Sequence
  ENSG00000101843_11 (sequence is synthesized)
taaagtacctattttgtgtcatcctgtattgaaaagaatgtcaagcttgttaaaatgacatgtaacaaaaatgtattttgatttgtatttcagaaactaaaaaataaaatgttgaaagaa

SEQ ID NO: 126876 - DNA, 120 bp, Artificial Sequence
  ENSG00000101843_12 (sequence is synthesized)
tcccagttatctttgtactccagactggtgtttactgaagcctgtgcattaagcttataaagaaaattgtaacctttatgactggaaagttacatcatggcccttgtgatcaagcatgag

SEQ ID NO: 126877 - DNA, 120 bp, Artificial Sequence
  ENSG00000101843_13 (sequence is synthesized)
actcatggttgcattattttacaatgttatgtttgccactcatactctgtgatttaaggtaaacatacaggagaggctgaggtaggaggattgctccagcctagtagtttgaggctgcag

SEQ ID NO: 126878 - DNA, 120 bp, Artificial Sequence
  ENSG00000101843_14 (sequence is synthesized)
tccacaaacatccaagacactgagggtaacactcctctgtaagtgacaagtagcagtcatttgtattctacctgacattagccttcttgcaataattcttatacatcatttcttttttta

SEQ ID NO: 126879 - DNA, 120 bp, Artificial Sequence
  ENSG00000101843_15 (sequence is synthesized)
cttgccactcagaaataactactgatcacattcttgtgtatttcctcctggtcttttatattcaaatgtatatattttatacatacatattttttagcaaaattggggtcatactgtgta

SEQ ID NO: 126880 - DNA, 120 bp, Artificial Sequence
  ENSG00000101843_16 (sequence is synthesized)
tgtagttttagctcttgttcttttcacctcatagtataagcatatattaaatatgtttaaaacctttttaatgggtatataaaattctgtatagatgtgccataatttaatcattcctct

SEQ ID NO: 126881 - DNA, 120 bp, Artificial Sequence
  ENSG00000101843_17 (sequence is synthesized)
gtgccataatttaatcattcctctattactgtatatttaaacttttatgagtttttcactattataaataatggtacattgagccaggcataatggctcatgtctgtaatcccagcactt

SEQ ID NO: 126882 - DNA, 71 bp, Artificial Sequence
  ENSG00000101843_18 (sequence is synthesized)
cgtctctagaaaaaattaaaaacttagctaggcatggtggcatgcacctgtagtactaactactcgggagg

SEQ ID NO: 126883 - DNA, 120 bp, Artificial Sequence
  ENSG00000101844_0 (sequence is synthesized)
gtccgtagtcaagttgccggtggaattggcccaggatgacagctggagaatggagtcagttttatccaagtatgaagatcagattactattttcactgactacctagaagaatatccaga

SEQ ID NO: 126884 - DNA, 120 bp, Artificial Sequence
  ENSG00000101844_1 (sequence is synthesized)
tacagatgagctggtatggatcttagggaagcagcatctccttaaaacagaaaaatctaagctgttgtctgatataagtgctcgtctatggtttacatacagaaggaaattttcaccaat

SEQ ID NO: 126885 - DNA, 120 bp, Artificial Sequence
  ENSG00000101844_2 (sequence is synthesized)
tggtggaacgggcccttcatcagatgctggttggggatgtatgctacgctgtggacagatgatgctggctcaagcccttatctgtagacacttgggaagggactggagctgggagaaaca

SEQ ID NO: 126886 - DNA, 120 bp, Artificial Sequence
  ENSG00000101844_3 (sequence is synthesized)
aaaagaacaacccaaagaataccaacgcatcctacagtgcttcttagatagaaaagattgttgctactctatccatcaaatggcacaaatgggtgtaggagaagggaaatcaattggaga

SEQ ID NO: 126887 - DNA, 120 bp, Artificial Sequence
  ENSG00000101844_4 (sequence is synthesized)
atggtttggaccaaatacagttgcacaggtgttaaaaaaacttgctttatttgacgaatggaattccttggctgtttatgtttcaatggataacacagtggtcattgaagatatcaaaaa

SEQ ID NO: 126888 - DNA, 120 bp, Artificial Sequence
  ENSG00000101844_5 (sequence is synthesized)
aatgtgccgtgtccttcccttgagtgctgacacagctggtgacaggcctcccgattctttaactgcttcaaaccagagtaagggcacctctgcctactgctcagcctggaaacccctgct

SEQ ID NO: 126889 - DNA, 120 bp, Artificial Sequence
  ENSG00000101844_6 (sequence is synthesized)
gctcattgtgccccttcgcctgggcataaaccaaatcaatcctgtctatgttgatgcattcaaagagtgttttaagatgccacagtctttaggggcattaggaggaaaaccaaataacgc

SEQ ID NO: 126890 - DNA, 120 bp, Artificial Sequence
  ENSG00000101844_7 (sequence is synthesized)
gtattatttcataggattcttaggtgacgagctcatcttcttggaccctcatacaacccagacctttgttgacactgaagagaatggaacggttaatgaccagactttccattgcctgca

SEQ ID NO: 126891 - DNA, 120 bp, Artificial Sequence
  ENSG00000101844_8 (sequence is synthesized)
gtccccacagcgaatgaacatcctaaacctggatccttcagttgcattgggatttttctgcaaagaagaaaaagactttgataactggtgtagccttgttcagaaggaaattctaaagga

SEQ ID NO: 126892 - DNA, 120 bp, Artificial Sequence
  ENSG00000101844_9 (sequence is synthesized)
gcctccctttgtacctccagccaagccagaagtgacaaccactggggcagaattcattgactctactgagcaactggaggagtttgatctggaggaagattttgagattctgagtgtgta

SEQ ID NO: 126893 - DNA, 120 bp, Artificial Sequence
  ENSG00000101844_10 (sequence is synthesized)
gaatcctgggaactcaacttgaaggtctgtcttccatctggcaccataaaaacatgaacttattgcataaaacttttctagtcagcaagtgcctgatatgccaatagcatacaaactcaa

SEQ ID NO: 126894 - DNA, 120 bp, Artificial Sequence
  ENSG00000101844_11 (sequence is synthesized)
tagcaatcatgactgagccaatcactgtttctcagaaaaacaaaacaaaacaaaacaaatgacagtaacccttccccggaaagaaatagaacaatcatggagcctaggagcagagagatg

SEQ ID NO: 126895 - DNA, 120 bp, Artificial Sequence
  ENSG00000101844_12 (sequence is synthesized)
aggaggagttcattgcttcccagcttgtgttatatggctacagcaagtcttcagctgctgcaatgaggaaatgggcatctggaagacaaacagcaactctcagcttgcttcaagaaccag

SEQ ID NO: 126896 - DNA, 120 bp, Artificial Sequence
  ENSG00000101844_13 (sequence is synthesized)
cagataagagatggttaagctgttcttcaccctttcagatgtgacctcttttggactaagcagcaatctgttctcttgctcaaataataaagtgactgaatcagggaggaaaaggttctt

SEQ ID NO: 126897 - DNA, 120 bp, Artificial Sequence
  ENSG00000101844_14 (sequence is synthesized)
gttaaattatttgattgtgtagttgaagtaattataatttatatcaaaacgtttgtcaaagaaacgatgtcaaatatacacttcttgatctcccttctgtttgcggggatcttactattt

SEQ ID NO: 126898 - DNA, 120 bp, Artificial Sequence
  ENSG00000101844_15 (sequence is synthesized)
gatgggtcactgtccccattcttactgatacttttgtcagatatcaccctgtccttaaatcatgatcacttaaatcaggggtcagcaaactttttctgtaaagggccagacgggaaatat

SEQ ID NO: 126899 - DNA, 120 bp, Artificial Sequence
  ENSG00000101844_16 (sequence is synthesized)
tttgggctttgcaggccatgcggcctctgtcacatctactcaactctgctgttgacatgcaaaagcagcaatagacaatatgcgtgtaaatgagtgtggctgtaatccaagaaaacttta

SEQ ID NO: 126900 - DNA, 120 bp, Artificial Sequence
  ENSG00000101844_17 (sequence is synthesized)
tttacaaaagcaggtggagggctgggtttggcctgcaggctgtagcttgccaatcagtgacttaaattgttgatttttgtttgataaattaaaaataaattgtgtttgaagtatacccta

SEQ ID NO: 126901 - DNA, 120 bp, Artificial Sequence
  ENSG00000101844_18 (sequence is synthesized)
cattccattctcattgtcaccaagggaggggttaagagaaccagagtgcctcctcccaacaacagcagtgggccaggaccggtaatcctttgaaggttaagcatatctccttcaaaacag

SEQ ID NO: 126902 - DNA, 120 bp, Artificial Sequence
  ENSG00000101844_19 (sequence is synthesized)
aagattgtttttcatagtaaaaaaaaatcctactctgatacgactttactgcaagagaaagaaactaaggcaacaaagaaactatcaggaaattctaaaggagaatttaaggatgtttga

SEQ ID NO: 126903 - DNA, 120 bp, Artificial Sequence
  ENSG00000101844_20 (sequence is synthesized)
tgagctggtatggatcttagggaagcagcatctccttaaaacagattgggaaagaaagaccttttaacctgaaactgctaacagcccagcacccagataaagccagagcttggaaagagg

SEQ ID NO: 126904 - DNA, 120 bp, Artificial Sequence
  ENSG00000101844_21 (sequence is synthesized)
cagctctgagatttgtgtctttctgaggagacatcctcttcagaggccctcacttagcgtggaggaaggaacaggaagaggctgatgaaaaggcaggagaggaagttaggcattgtggag

SEQ ID NO: 126905 - DNA, 120 bp, Artificial Sequence
  ENSG00000101844_22 (sequence is synthesized)
ctcctcctgagcctggcttcattattttgattggagaattctgaacagtggaaagcctggagctagcaattaggagaccttttgtattcagactcttctaactcagaaaaatctaagctg

SEQ ID NO: 126906 - DNA, 120 bp, Artificial Sequence
  ENSG00000101844_23 (sequence is synthesized)
cgaccgtccgtccgtagtcaagttgccggtggaattggcccaggatgacagctggagaatggagtcaggtacggggagcggctttgagtggaaccgtgtgaaagagccgggttttatcca

SEQ ID NO: 126907 - DNA, 120 bp, Artificial Sequence
  ENSG00000101846_0 (sequence is synthesized)
acagtgctgttggccaagcctccagcagctgacgggacccagctgtagtgaggttgcagtgattgagtaggattggcctgcttcaaagcagaggtttctcatgggaatatgcttattaaa

SEQ ID NO: 126908 - DNA, 120 bp, Artificial Sequence
  ENSG00000101846_1 (sequence is synthesized)
ctcccactggtgcagaaaccatgaacagaggatgaacaagtgaagttgcaatctcctccatcacagctcagttccccaacaacaggatcacaagctggagatgcctttaaggaagatgaa

SEQ ID NO: 126909 - DNA, 120 bp, Artificial Sequence
  ENSG00000101846_2 (sequence is synthesized)
gatccctttcctcctactgttctttctgtgggaagccgagagccacgcagcatcaaggccgaacatcatcctggtgatggctgacgacctcggcattggagatcctgggtgctatgggaa

SEQ ID NO: 126910 - DNA, 120 bp, Artificial Sequence
  ENSG00000101846_3 (sequence is synthesized)
caaaactatcaggactcccaatatcgaccggttggccagtgggggagtgaaactcactcagcacctggcagcatcaccgctgtgcacaccaagcagggcagccttcatgactggccggta

SEQ ID NO: 126911 - DNA, 120 bp, Artificial Sequence
  ENSG00000101846_4 (sequence is synthesized)
ccctgtccgatcaggaatggcatcttggtcccgcactggagttttcctcttcacagcctcttcgggaggacttcccaccgatgagattacctttgctaagcttctgaaggatcaaggtta

SEQ ID NO: 126912 - DNA, 120 bp, Artificial Sequence
  ENSG00000101846_5 (sequence is synthesized)
ttcaacagcactgatagggaaatggcaccttgggatgagctgtcacagcaagactgacttctgtcaccaccctttacatcacggcttcaattatttctatgggatctctttgaccaatct

SEQ ID NO: 126913 - DNA, 120 bp, Artificial Sequence
  ENSG00000101846_6 (sequence is synthesized)
gagagactgcaagcccggagagggcagtgtcttcaccacgggcttcaagaggctggtcttcctccccctgcagatcgtcggggtcaccctccttacccttgctgcactcaattgtctggg

SEQ ID NO: 126914 - DNA, 120 bp, Artificial Sequence
  ENSG00000101846_7 (sequence is synthesized)
gctactccacgtgcctctaggcgtttttttcagccttctcttcctagcagccctaatcctgacccttttcttgggcttccttcattacttccggcccctgaactgcttcatgatgaggaa

SEQ ID NO: 126915 - DNA, 120 bp, Artificial Sequence
  ENSG00000101846_8 (sequence is synthesized)
ctacgagatcattcagcagcccatgtcctatgacaatctcacccagaggctaacggtggaggcggcccagttcatacagcggaacactgagactccgttcctgcttgtcttgtcctacct

SEQ ID NO: 126916 - DNA, 120 bp, Artificial Sequence
  ENSG00000101846_9 (sequence is synthesized)
ccacgtgcacacagccctgttctccagcaaagactttgctggcaaaagtcaacacggagtctacggggatgctgttgaggaaatggactggagtgtggggcagatcttgaaccttctgga

SEQ ID NO: 126917 - DNA, 120 bp, Artificial Sequence
  ENSG00000101846_10 (sequence is synthesized)
tgagctgagattggctaatgataccctcatctacttcacatcggaccagggagcacatgtagaagaagtgtcttccaaaggagaaattcatggcggaagtaatgggatctataaaggagg

SEQ ID NO: 126918 - DNA, 120 bp, Artificial Sequence
  ENSG00000101846_11 (sequence is synthesized)
aaaagcaaacaactgggaaggaggtatccgggttccaggcatccttcgttggcccagggtgatacaggctggccagaagattgatgagcccactagcaacatggacatatttcctacagt

SEQ ID NO: 126919 - DNA, 120 bp, Artificial Sequence
  ENSG00000101846_12 (sequence is synthesized)
agccaagctggctggagctcccttgcctgaggacaggatcattgatggacgtgatctgatgcccctgcttgaaggaaaaagccaacgctccgatcatgagtttctcttccattactgcaa

SEQ ID NO: 126920 - DNA, 120 bp, Artificial Sequence
  ENSG00000101846_13 (sequence is synthesized)
cgcctacttaaatgctgtgcgctggcaccctcagaacagcacatccatctggaaggcctttttcttcacccccaacttcaaccccgtgggttccaacggatgctttgccacacacgtgtg

SEQ ID NO: 126921 - DNA, 120 bp, Artificial Sequence
  ENSG00000101846_14 (sequence is synthesized)
cttctgtttcgggagttatgtcacccatcacgacccacctttactctttgatatttccaaagatcccagagagagaaacccactaactccagcatccgagccccggttttatgaaatcct

SEQ ID NO: 126922 - DNA, 120 bp, Artificial Sequence
  ENSG00000101846_15 (sequence is synthesized)
caaagtcatgcaggaagctgcggacagacacacccagaccctgccagaggtgcccgatcagttttcatggaacaactttctttggaagccctggcttcagctgtgctgtccttccaccgg

SEQ ID NO: 126923 - DNA, 120 bp, Artificial Sequence
  ENSG00000101846_16 (sequence is synthesized)
cctgtcttgccagtgtgatagagaaaaacaggataagagactgagccgctagcagcgcctggggaccagacagacgcatgtggcaaagctcaccatcttcactacaaacacgcctgagag

SEQ ID NO: 126924 - DNA, 120 bp, Artificial Sequence
  ENSG00000101846_17 (sequence is synthesized)
tggcactggggaaacataactccatctacaccttggatttggactgattctccattttatcacctgaaggcttgggccagagctcaacagctactcaactggaggggtgagggggataag

SEQ ID NO: 126925 - DNA, 120 bp, Artificial Sequence
  ENSG00000101846_18 (sequence is synthesized)
gtctgtagtatacagacaggaagatggtaggtttatgccttctgtggccagagtcttggactcatggaaatagaatgaatagaggggcattcacaaggcacaccagtgcaagcagatgac

SEQ ID NO: 126926 - DNA, 120 bp, Artificial Sequence
  ENSG00000101846_19 (sequence is synthesized)
aaaaaggtgcagaaggcaatcttaaaacagaaaggtgcaggaggtaccttaactcacccctcagcaaatacctatgtcaacagtataagttaccatttactctataatctgcagtgatgc

SEQ ID NO: 126927 - DNA, 120 bp, Artificial Sequence
  ENSG00000101846_20 (sequence is synthesized)
aataaccagcataataaaaaggcaatcacataaaaaagagtttagtcgtctaaacataagtaactttaaggtgaatgaaagatcttctttaggaataatagatgatggtaagttccactt

SEQ ID NO: 126928 - DNA, 120 bp, Artificial Sequence
  ENSG00000101846_21 (sequence is synthesized)
tggttattggaaggcaagtcattattactggtattagttaaaacacatatcaaatgcttgctcttcatcatatatatagttatgcatacatacacacacacacatacagtatattctttc

SEQ ID NO: 126929 - DNA, 120 bp, Artificial Sequence
  ENSG00000101846_22 (sequence is synthesized)
ctcaaaagggttaagatgtctaaaatagggacctagaagcttaacactatttaagtaaatacagtagaagctcacaaatagatttctttgcacaatgattttttgcaaaattttacagta

SEQ ID NO: 126930 - DNA, 120 bp, Artificial Sequence
  ENSG00000101846_23 (sequence is synthesized)
ataataatcccaaggcaaatctctcctgaactgctttccattccataatttgtagtataattcttggattccactgttttctttggggaatggaagttctgaattaaaagcccactgtgg

SEQ ID NO: 126931 - DNA, 120 bp, Artificial Sequence
  ENSG00000101846_24 (sequence is synthesized)
agatgctgtggttcatggaatctcttccagtgtaattcagaatcattggcctagaaagtctctgatatttggaggggaacaaaaatcactcacaagcaatccatgatctatacacataag

SEQ ID NO: 126932 - DNA, 120 bp, Artificial Sequence
  ENSG00000101846_25 (sequence is synthesized)
cataatttcctttagttctagttagtcatcagagaacagtcatgtatgcaagttttgtgactgagaaatttctgtgcttccaatccacaatgagatgcatgattttgttttcatcccatt

SEQ ID NO: 126933 - DNA, 120 bp, Artificial Sequence
  ENSG00000101846_26 (sequence is synthesized)
tcccccaagcccctgtaaatcagggaaaatgcgcaactgatcgcctaggagagggcctcgtagtggcacagctggagatagtttcaaagtctaaaccaccagcccatcctgaggaaagcc

SEQ ID NO: 126934 - DNA, 120 bp, Artificial Sequence
  ENSG00000101846_27 (sequence is synthesized)
actttccccaacaatgtgattggattcctttatggcaaaatcgagagaagctgccatccacctgcttatgcatttatctcttttgtggacttgtctgaccaccttctatttgcccagagt

SEQ ID NO: 126935 - DNA, 120 bp, Artificial Sequence
  ENSG00000101846_28 (sequence is synthesized)
ttgctcaattccaagacagtgcccatgaatgggacacctgtaatgtaacccacacagcggtttgcagagaatgttagccatgacttgggctttctgaaagttggctataatttctctatc

SEQ ID NO: 126936 - DNA, 120 bp, Artificial Sequence
  ENSG00000101846_29 (sequence is synthesized)
cctacccacaaccctgggaagttggagcaagaggggcatactattgggctgggaggatttgacagcatttccccagttgccctttaagttcttctatttcaaacgttaattttgcttctc

SEQ ID NO: 126937 - DNA, 120 bp, Artificial Sequence
  ENSG00000101846_30 (sequence is synthesized)
aaaaaaaaaaagaaagagaagaaagaagtgattcctaccccctacctccagagttgttgaaagctgaaaagcatacaagattcttccttttaacttggatttctcgttccagaaattgtg

SEQ ID NO: 126938 - DNA, 120 bp, Artificial Sequence
  ENSG00000101846_31 (sequence is synthesized)
ccagaaattgtgggataatctgtattcttgctttagaaaacattcttagagagggtactagcttactgatgatgtgttaggattgctactgatgctgtcatgtggaaactatttaaaggc

SEQ ID NO: 126939 - DNA, 120 bp, Artificial Sequence
  ENSG00000101846_32 (sequence is synthesized)
actattataaatttatcctataagatgacaatgtttactcaaagtctaacatattcaatgcaagtaagactttctgaaaacacttgatgatgtggaaatgctgcaggattaaataacttg

SEQ ID NO: 126940 - DNA, 120 bp, Artificial Sequence
  ENSG00000101846_33 (sequence is synthesized)
aagagcctttatagattatatgaatgcctatttgtgtctagaaccagttatttaacctgtaaaatgtcaatagcaaatgaaggatgaagtatatctctagatgcaaatacattgagttta

SEQ ID NO: 126941 - DNA, 120 bp, Artificial Sequence
  ENSG00000101846_34 (sequence is synthesized)
aaagtgcctcaaaataattgagatcacatttcaggacatttggaaatcaggtcgatttgtggtaactgtagtcatcttaaatttcaaaccatttaccatctgaaagttttgatttgaatg

SEQ ID NO: 126942 - DNA, 120 bp, Artificial Sequence
  ENSG00000101846_35 (sequence is synthesized)
taaaacaggaaattggaattcctttgtccaggagaaacctcacaaaccttctttaaggcatagttttgttgtttgtttgcttgtttgttgcaggctgtaaggcatggctgcttgtttaca

SEQ ID NO: 126943 - DNA, 120 bp, Artificial Sequence
  ENSG00000101846_36 (sequence is synthesized)
aagcatctcattcatattacctgtggagttgcatatccaaaccttagtgagttttgaagctttaagcaaattcttttaaaaaattcttgtatttctagcattactagatattaaaagtta

SEQ ID NO: 126944 - DNA, 120 bp, Artificial Sequence
  ENSG00000101846_37 (sequence is synthesized)
agcaaatagattaatgacgtatacataggcatcatttcacaaggtcagtaatgctgcaggaaaagcaaaattgcaatctacgtatctatggtactaaggaagtcctgtttttcaaaaatg

SEQ ID NO: 126945 - DNA, 120 bp, Artificial Sequence
  ENSG00000101846_38 (sequence is synthesized)
gaagcccacttctcagatttttctgaagggcatacaatgaaaagtgaaggggaaacacacacacacaaaaaaacaagtatttggcttgtcacaggaatctgattgcattaagtgaaagga

SEQ ID NO: 126946 - DNA, 120 bp, Artificial Sequence
  ENSG00000101846_39 (sequence is synthesized)
ttatttagaatatgttaatgcaaagctaaaataaaattttccttggcaattaaaaatgctgtgcgctaataccctgctttctatcgtgactcaattcaacaatgtggggaatgtttacta

SEQ ID NO: 126947 - DNA, 120 bp, Artificial Sequence
  ENSG00000101846_40 (sequence is synthesized)
catttccaacttgatgtcaagcaatggggaatacaagttccagttctgcaaagattcgtcaactttcttagctcaagagagaggctgagaaatgcagagaagaataagacataaaatagc

SEQ ID NO: 126948 - DNA, 120 bp, Artificial Sequence
  ENSG00000101846_41 (sequence is synthesized)
tccgacctccatgatccgagagtgggaaaaggcccgattattacccataaggcacactctctaaggccttttaaggggcctacaaaaatgttttattttataatcagaagaaaaggaaat

SEQ ID NO: 126949 - DNA, 120 bp, Artificial Sequence
  ENSG00000101846_42 (sequence is synthesized)
gggattgaaaatcatattggtatttgcaccaacatagtcataaaatagtatgttaatatgtttttactttatatatttatatattaaaatatatttaatatgttttgcctttgtggccca

SEQ ID NO: 126950 - DNA, 120 bp, Artificial Sequence
  ENSG00000101846_43 (sequence is synthesized)
gtggcccatgaaagtcttactgggccctggggaaggtatcctaccctggtgaagcagctgctttgctctacaaatacctggggcagaaatttgatttgaaaagtattattctctcttctc

SEQ ID NO: 126951 - DNA, 120 bp, Artificial Sequence
  ENSG00000101846_44 (sequence is synthesized)
tttgtttcaactggattcctttggaaaaccaaactagtatcagaacaaaccccgaaacagtaagaaattggagtgagaagggcatggtattgggactaggatcggctctcattcgatcga

SEQ ID NO: 126952 - DNA, 120 bp, Artificial Sequence
  ENSG00000101846_45 (sequence is synthesized)
gctattctcttaaaatgacaaaaagtgtccataaagaggctgctggagagtgcgtggccatagggagccgacatgcccgggaggaaaggtgttgattacatggatacttctaaaagctaa

SEQ ID NO: 126953 - DNA, 120 bp, Artificial Sequence
  ENSG00000101846_46 (sequence is synthesized)
agccttgttgccttctctttaatgcctagagaatgggatgtgtgatgcaaatgctcaaaacctcttaaatcatagctgtctgacctctacggacctcacatccatctgaggcttcatgga

SEQ ID NO: 126954 - DNA, 120 bp, Artificial Sequence
  ENSG00000101846_47 (sequence is synthesized)
caaagattctccacttggccaaactttagccaagctcctcaaccttctcccaggcccaatctgggcacttccttgtaaaatctagttttggcaagaagtctattaggtcagtttagcaag

SEQ ID NO: 126955 - DNA, 120 bp, Artificial Sequence
  ENSG00000101846_48 (sequence is synthesized)
aacacctaacccccccatatctgttcaacctcagtatctgatcaggctcctcagcctccaccatcccccaggtgatgtctggtcaactggcctgccttcagctagaatcctgttaggtcg

SEQ ID NO: 126956 - DNA, 120 bp, Artificial Sequence
  ENSG00000101846_49 (sequence is synthesized)
gtttagatgaatgctccctgatatttcctcttggtaatcttccatccactgcccctgaccctgttccctgtctataaatccccagttttccatggtgtattcagagctgagtccagtctc

SEQ ID NO: 126957 - DNA, 120 bp, Artificial Sequence
  ENSG00000101846_50 (sequence is synthesized)
tctcccctactacaagtccccattgctgtggtccccgtacctgtcatgatggtcctaaataaagtcttactgtgctttaataggtagcattgaaaaatttttttctttgacatcattcat

SEQ ID NO: 126958 - DNA, 120 bp, Artificial Sequence
  ENSG00000101846_51 (sequence is synthesized)
gacaacatgaaacctattgggacagcatgactgtgcagggtctttagagctcagctttctgaggccctgagcattcttggttttccgacatcgtgaacctgttctgtgttgcaagatatc

SEQ ID NO: 126959 - DNA, 120 bp, Artificial Sequence
  ENSG00000101846_52 (sequence is synthesized)
actcaagccagtgttgcttaataccatctctttgtgtaatagatctgaataaagtaattgtaatacaccaatattttactttgttgagtattattttaatgggagcctttccaatgaagg

SEQ ID NO: 126960 - DNA, 120 bp, Artificial Sequence
  ENSG00000101846_53 (sequence is synthesized)
aaacatcagctttccttgttagaatgcaagcagcttaaaaactacccatgtctttctggaaaggaaacattgccatgtaactatgtatcagttttctaagaacttcatgggccttccata

SEQ ID NO: 126961 - DNA, 120 bp, Artificial Sequence
  ENSG00000101846_54 (sequence is synthesized)
gacgtaccccgcgccgaccgtccccacgcccacacaagaccgcccttactggaggcggcggctgcacactacccacccagaagaagtccgtccatgtcaaagatgaggaagagcccgatg

SEQ ID NO: 126962 - DNA, 120 bp, Artificial Sequence
  ENSG00000101846_55 (sequence is synthesized)
cccttggtttgactctactaagagcccctcagttgctgaacctgcacacagtcatctcagtaagttaagatcttcctgaggacaatggcgcaagatcgtcttcagctgttcatagcgaag

SEQ ID NO: 126963 - DNA, 120 bp, Artificial Sequence
  ENSG00000101846_56 (sequence is synthesized)
tgccatcatgtagctgtttcctttggagccactcagtcattgactgctttccctggaatgaggggaatacccagtcattggtcatcaattgtttctgctggaccaactctgtcctgggct

SEQ ID NO: 126964 - DNA, 120 bp, Artificial Sequence
  ENSG00000101846_57 (sequence is synthesized)
ctgttccctccactgactcagtgattgactgttatccttggagtgactcaagtgtcggctgtcttcccaggtctgaggcaatcacttcctgtcatcctcttaacaactgttttccttaga

SEQ ID NO: 126965 - DNA, 120 bp, Artificial Sequence
  ENSG00000101846_58 (sequence is synthesized)
gtgacacagtcattcactgtttctcctggatatctccctgtcatttcatcatcaattttttctctagattgactcagttcaccatcaactgtgtcccctggagtgacttggtggtcaatt

SEQ ID NO: 126966 - DNA, 120 bp, Artificial Sequence
  ENSG00000101846_59 (sequence is synthesized)
attttccctgaattgatttggtcatcgattcttttgcctggactgactctgtcatcgactgttgtccctggaatgatttggtactcaactgctttccctggactgattggtcatcaactc

SEQ ID NO: 126967 - DNA, 120 bp, Artificial Sequence
  ENSG00000101846_60 (sequence is synthesized)
ttttccccggatttactcggtcattgactgtgttccctggactgacttggtactcaactgatttcccctggattaattcagtcattaactctttttcctagtttgactgggtactcaact

SEQ ID NO: 126968 - DNA, 120 bp, Artificial Sequence
  ENSG00000101846_61 (sequence is synthesized)
catttccctggaatgatttggtacccaactcatttccctgattcgactcggtactcaactggtttccctggaatgacttggtactcagctggtttccctggattgacaccatattcaact

SEQ ID NO: 126969 - DNA, 120 bp, Artificial Sequence
  ENSG00000101846_62 (sequence is synthesized)
tgtttccctggattaacttggtattcaactcatttccctggactgactctaccctgaaatgatttgtgccctggactgtctggtattcaactcttttccctggattgactcagtcatttg

SEQ ID NO: 126970 - DNA, 120 bp, Artificial Sequence
  ENSG00000101846_63 (sequence is synthesized)
ccctcatttcctgttttacttggaacaactcagtcattcactattttccacactgagggcatctccatgacttcctatcatcaatgctttccctggactaagtcagtcatagactctaat

SEQ ID NO: 126971 - DNA, 120 bp, Artificial Sequence
  ENSG00000101846_64 (sequence is synthesized)
ctctggaatgactcatgatcactattttccaatctctggaatgacttatgatcactattttttctggtgtggcttggtaactgtcttttttaaatgaactgaagagatcatgccctgcca

SEQ ID NO: 126972 - DNA, 120 bp, Artificial Sequence
  ENSG00000101846_65 (sequence is synthesized)
cctcatcaactatttatttcccttgttgtgactttgtcagaggctgtgttccctgggctgaggtcatctcctcttctttttgtcatcagtattttccctggagtgactcggtcatctctt

SEQ ID NO: 126973 - DNA, 120 bp, Artificial Sequence
  ENSG00000101846_66 (sequence is synthesized)
cttttccctgaactgttgtgtaatcacgtcttttccctggaatccctagatcatcaactattttccctggacagactcggttattgattatgttccctggagtgactcagtcattgattg

SEQ ID NO: 126974 - DNA, 120 bp, Artificial Sequence
  ENSG00000101846_67 (sequence is synthesized)
cttttcctggactgatctcttcatcacctcagtcgtcttagaagggagattgctggtaataaaagtatatttttattttcataaatatgtacacaaatacatgaacatatctttatacac

SEQ ID NO: 126975 - DNA, 120 bp, Artificial Sequence
  ENSG00000101846_68 (sequence is synthesized)
atgtgtatccaagcctccttcaggaagtttcagcccatctgagaatgcataacaatgccttccaaagttcatgtgtggcaaaacttttaatttttccccccagtatgataggggaggaat

SEQ ID NO: 126976 - DNA, 120 bp, Artificial Sequence
  ENSG00000101846_69 (sequence is synthesized)
ggtgtctgtgtttcctgttgtgctcattttacaatcagtttacttggacttcttcttcatgaatgtttttaatgttttttccttccattttcaattttttaaaaaaatgtgttaacgtta

SEQ ID NO: 126977 - DNA, 120 bp, Artificial Sequence
  ENSG00000101846_70 (sequence is synthesized)
gcccctttatgaggcaacttatacaattctgtgctgggaacacttcctgagaaatgcatccttggctgatttggcccttgtacaatcatcctagagtgcatgtacccaaacccggatggc

SEQ ID NO: 126978 - DNA, 120 bp, Artificial Sequence
  ENSG00000101846_71 (sequence is synthesized)
acaggtaactgcatacctgggctgtatagtgtagcctgctacactcctgtgcaacctgcgactgcactgaatactctaggcaactgtaacacatgttacatgtgatatttgtgcacctaa

SEQ ID NO: 126979 - DNA, 120 bp, Artificial Sequence
  ENSG00000101846_72 (sequence is synthesized)
acgtatccaaacctaggtaaggtaggctacatatacggtattataatctcatgggaccactgtcaaatatgtggtctgtcattgactgaaatattcttatatggtacatctctatatttc

SEQ ID NO: 126980 - DNA, 120 bp, Artificial Sequence
  ENSG00000101846_73 (sequence is synthesized)
tcatgactttttaattgcactgtttgcccagcaaattttttaaaaaattatatattcaaattttgtatatttgattgcatttggattttgagtggtacttagaaacctttctccacactg

SEQ ID NO: 126981 - DNA, 120 bp, Artificial Sequence
  ENSG00000101846_74 (sequence is synthesized)
tactcatctgacaaagggctaatatttagtttgccttctaaccttcagaaccctgccaattctgagagtatcattactattatttttttttacagcaatatcccctgtgcacaatgcacc

SEQ ID NO: 126982 - DNA, 120 bp, Artificial Sequence
  ENSG00000101846_75 (sequence is synthesized)
aatatcccctgtgcacaatgcacccttgcaggatttctgcctgactgtggcccatgcatagtgctcagtggagactgaaatatttctctgctaggctctgttctgcagatgcatttgcag

SEQ ID NO: 126983 - DNA, 120 bp, Artificial Sequence
  ENSG00000101846_76 (sequence is synthesized)
tgagctagaatacgcttgcctgccttgggaagctttgaggcaacaatagcgtgaaaccaatcacagtaattatcacattaactcatgtcattttgttcaaatactttcaacctttaaaat

SEQ ID NO: 126984 - DNA, 120 bp, Artificial Sequence
  ENSG00000101846_77 (sequence is synthesized)
gtgggagctaagctctaagatccaatgctgtctctagcatcctgatgcttgtatagcgtacatttagttaaaaggaaactcattttgaggttataattagcaagaaaaatttacaatctg

SEQ ID NO: 126985 - DNA, 120 bp, Artificial Sequence
  ENSG00000101846_78 (sequence is synthesized)
caagctcaggttctattcatggacttaactcccttttcttgcctgtctctaaaaatccaggccactgtattccactagcaatcgctattgttattttctgcacctaataattaaatttag

SEQ ID NO: 126986 - DNA, 120 bp, Artificial Sequence
  ENSG00000101846_79 (sequence is synthesized)
gggtggggccccagcttctacatttacaagtagcccacaggtgatgtccccggtgctggtcaccctaggcagccaggccacttgacggaccttctgtgcctctacactgttgacggcgcg

SEQ ID NO: 126987 - DNA, 120 bp, Artificial Sequence
  ENSG00000101846_80 (sequence is synthesized)
ggataattccttatggttgcatagggcactcctgtgcactgcgggaagtttaacagtatcactggtctggactccactagatgccagtgaccccatcactcctcgccagctgtgacagcc

SEQ ID NO: 126988 - DNA, 120 bp, Artificial Sequence
  ENSG00000101846_81 (sequence is synthesized)
aaaatgtctcctgacatcgccattgccagatgccctcagggctgcaaaaccgccaggtagagaaccgctaccatgcaggatgctaccatcaaagtgcgcccacagcagcaaccttggagc

SEQ ID NO: 126989 - DNA, 120 bp, Artificial Sequence
  ENSG00000101846_82 (sequence is synthesized)
aaaactatttttaagaaattaggaaacatctcaagatgaagtcattaagccaagctgaatgaagacaagaagttgtttcacagatctggctgcataacatgctcgagtcttcctcctagt

SEQ ID NO: 126990 - DNA, 120 bp, Artificial Sequence
  ENSG00000101846_83 (sequence is synthesized)
gggtcccgttgagcagacagtccaagcaagcagatacaatggttgcacctcgtcaccctcacaacctcacagcagactggattggggaagatgcctgacacggtggatgcagtgggtgga

SEQ ID NO: 126991 - DNA, 120 bp, Artificial Sequence
  ENSG00000101846_84 (sequence is synthesized)
tgcagcatctatcagttaccagactgcatttgcaacgatgcatgtctgcaagaccccatggacaactttcatctgatgcacgcactcattcttgctttgacactccaagccaagtcacat

SEQ ID NO: 126992 - DNA, 120 bp, Artificial Sequence
  ENSG00000101846_85 (sequence is synthesized)
ttgtttccaccaagtcagacaacttcgatggctctctgcatctcactatatctctgtcctgctgatgccaccaaatgaccagagatggtccagacaatttacaagaaaggacgtgggcaa

SEQ ID NO: 126993 - DNA, 120 bp, Artificial Sequence
  ENSG00000101846_86 (sequence is synthesized)
gcctcatgcaaagtaagaaatagctagcttgtctttggtatttagcaatgtttaaattgatttgctctttcctcacttcactcctggctagctcctcgggatttagagtgctgatgccca

SEQ ID NO: 126994 - DNA, 120 bp, Artificial Sequence
  ENSG00000101846_87 (sequence is synthesized)
agtattgaattgtaattgttccggatctgagctgccatccctgagctccctacctccagtgtacattttttttttccagaattacatctccctccttttcctcttttattttttgcattg

SEQ ID NO: 126995 - DNA, 120 bp, Artificial Sequence
  ENSG00000101846_88 (sequence is synthesized)
taatgcttctatcaggcaaacccgtaacaaattaagatgcctgaaacagttaacgtaaaaaaagattgtttatttttcaaattgaaataaaagcatgtagcataaacattgatttaattt

SEQ ID NO: 126996 - DNA, 120 bp, Artificial Sequence
  ENSG00000101846_89 (sequence is synthesized)
ttagtgtaatttcaggctgttttctttacaacttgaatatgtcttcctcttccaaggtttggtttcaaggccatctccctcataccacctgctgccatgcaccccgtcctcatgccccac

SEQ ID NO: 126997 - DNA, 120 bp, Artificial Sequence
  ENSG00000101846_90 (sequence is synthesized)
tctttcggaaaggattctttcttatttagaggtatcacaactttttttcttagcttctattatgcattttattctgccttggagagtgagttgctgacatgcccttattgatataagcta

SEQ ID NO: 126998 - DNA, 120 bp, Artificial Sequence
  ENSG00000101846_91 (sequence is synthesized)
catgatggcagcagtgaggtgtcacattaccttatcattttcagtagaaacaatgattcttccatggccaggttttaaaacctcttgccatagaagtcattgtttttactgaaacattct

SEQ ID NO: 126999 - DNA, 120 bp, Artificial Sequence
  ENSG00000101846_92 (sequence is synthesized)
gttttaaaaccagctggatgtagtggctcacgcctataatcccaacatttttggaggcggaggcgggaggatcgcttgagtccaggagtttgacgccaccctgggcaacatagggtgacc

SEQ ID NO: 127000 - DNA, 120 bp, Artificial Sequence
  ENSG00000101849_0 (sequence is synthesized)
gcccagggagcccaggagcaacgaagggcaggctcaagggaaggccccaccatgtccttctggggggccttgaatggcaactgatacataataagacacaatctattctgctgattcaca

SEQ ID NO: 127001 - DNA, 120 bp, Artificial Sequence
  ENSG00000101849_1 (sequence is synthesized)
attatggagactgtatttccgtgagggtggaagaaaatcataccatatcagatgcctcgcagagcaccaggcccaccgtgaaagctcctggcaaccactattccactccctgcttctttg

SEQ ID NO: 127002 - DNA, 120 bp, Artificial Sequence
  ENSG00000101849_2 (sequence is synthesized)
aatttcacaacttgaggtagcttgtgtaagtggaattattttaaaagctggttcatgttaaagtgcttagaacagagcttggtgagcatccggtcaacagctggtccctgcagacggctt

SEQ ID NO: 127003 - DNA, 120 bp, Artificial Sequence
  ENSG00000101849_3 (sequence is synthesized)
cccatttttatgaccggatgctgggaagcctgctggtccacaggtccatacatgaagtcaccataagagggtggttcccacttcatcaacacctcatcgccgcgaggtgaggctaagatg

SEQ ID NO: 127004 - DNA, 120 bp, Artificial Sequence
  ENSG00000101849_4 (sequence is synthesized)
agcataaccagtgacgaggtgaactttctggtgtatcggtatctccaggagtcaggtttttcccactcggctttcacgtttgggattgagagccacatcagccagtccaacatcaatggg

SEQ ID NO: 127005 - DNA, 120 bp, Artificial Sequence
  ENSG00000101849_5 (sequence is synthesized)
acgctagtgccaccggccgccctcatctccattctccagaagggcctgcagtatgtagaggccgagatcagtatcaacgaggatggcacagtgttcgacggccgccccatagagtccctg

SEQ ID NO: 127006 - DNA, 120 bp, Artificial Sequence
  ENSG00000101849_6 (sequence is synthesized)
tcactgatagacgccgtgatgcccgacgtggtgcagacgcggcagcaggcattccgagagaagctcgctcagcagcaagccagtgcggcggcggcggcggctgcggccacggcagcagcg

SEQ ID NO: 127007 - DNA, 120 bp, Artificial Sequence
  ENSG00000101849_7 (sequence is synthesized)
acagcagccaccacgacctcagccggcgtttcccaccaaaatccatcgaagaacagagaggccacggtgaatggggaagagaacagagcacattcagtcaataatcacgcgaagccaatg

SEQ ID NO: 127008 - DNA, 120 bp, Artificial Sequence
  ENSG00000101849_8 (sequence is synthesized)
gaaatagatggagaggttgagattccatccagcaaagccacagtccttcggggccatgagtctgaggtgttcatttgtgcctggaatcctgtcagtgatttgctagcctccggatctgga

SEQ ID NO: 127009 - DNA, 120 bp, Artificial Sequence
  ENSG00000101849_9 (sequence is synthesized)
gactcaactgcaaggatatggaacctgaatgagaatagcaacgggggctccacccagctcgtgttgaggcactgtatacgagaggggggccatgacgtcccgagtaacaaagacgtcacc

SEQ ID NO: 127010 - DNA, 120 bp, Artificial Sequence
  ENSG00000101849_10 (sequence is synthesized)
tcactggactggaataccaatggaacactcttggctacgggttcatatgacggttttgcaagaatatggacggaagatggtaacctggccagcaccttaggccaacataaaggccccatc

SEQ ID NO: 127011 - DNA, 120 bp, Artificial Sequence
  ENSG00000101849_11 (sequence is synthesized)
tttgccttgaaatggaaccgaaaggggaattacattttgagtgctggtgtagacaaaacaacaataatttgggatgcccacacaggagaagccaaacagcagtttccttttcattcagcc

SEQ ID NO: 127012 - DNA, 120 bp, Artificial Sequence
  ENSG00000101849_12 (sequence is synthesized)
cctgcccttgatgtggactggcagaacaacacgacctttgcctcctgtagcacagacatgtgtatccatgtgtgcaggctcggctgtgaccgcccagtcaaaaccttccagggacacaca

SEQ ID NO: 127013 - DNA, 120 bp, Artificial Sequence
  ENSG00000101849_13 (sequence is synthesized)
aacgaggtcaacgccatcaaatgggatccgtctggaatgttgctggcatcctgctcggatgacatgacattgaagatctggagcatgaaacaggaggtgtgcatccatgatcttcaggct

SEQ ID NO: 127014 - DNA, 120 bp, Artificial Sequence
  ENSG00000101849_14 (sequence is synthesized)
cacaataaagagatctacaccatcaagtggagccccactgggcccgccaccagcaacccaaactccaacatcatgttggcaagtgcttcgtttgattctacggtgcgactgtgggacata

SEQ ID NO: 127015 - DNA, 120 bp, Artificial Sequence
  ENSG00000101849_15 (sequence is synthesized)
gaacgaggcgtctgcacccacacgctcacgaagcatcaggagcctgtctatagcgtagctttcagccctgatgggaagtacttggccagtggatccttcgacaagtgcgtccatatctgg

SEQ ID NO: 127016 - DNA, 120 bp, Artificial Sequence
  ENSG00000101849_16 (sequence is synthesized)
aatactcagagtggaaatcttgtccacagctaccgaggcactggcggcatcttcgaggtgtgctggaacgcccgaggagacaaagtgggtgccagcgcgtccgacggctctgtgtgtgtt

SEQ ID NO: 127017 - DNA, 120 bp, Artificial Sequence
  ENSG00000101849_17 (sequence is synthesized)
ttggatctgcggaagtaaccacaaaatattatcgaaaaaagaaaagaattctaatgaccagccgtgaatgtgtagggttgcagctctattctccaaaactgtaggaacttgacttgcgtt

SEQ ID NO: 127018 - DNA, 120 bp, Artificial Sequence
  ENSG00000101849_18 (sequence is synthesized)
agagtgtactctgaaaccaactcgtctctggccgcaggagtctatatgttttcgtaatcttcatcaagaagtttttaaaaggcaagcaaaaacagaagcaaatcatatcaaacggggata

SEQ ID NO: 127019 - DNA, 120 bp, Artificial Sequence
  ENSG00000101849_19 (sequence is synthesized)
aaaaagctgtgccaaaaaaaaagcaaaatgctgtgataaaccaaacagggaagggggaaaaaccctcctccttgggattttttttttttgttttccctaacaatttggacactacaattg

SEQ ID NO: 127020 - DNA, 120 bp, Artificial Sequence
  ENSG00000101849_20 (sequence is synthesized)
ctctcacaaaggaggttcaaagaccagtttgtaccgatgaaacgcgcaactttgtaatcccaacactttctattttctagaatcttctttgttcattgggtggtttttcagtcggctgga

SEQ ID NO: 127021 - DNA, 120 bp, Artificial Sequence
  ENSG00000101849_21 (sequence is synthesized)
attctatcttctgggggccttccgtctgagatggaagctgtcttgggcttgttgtctcttccttctgttgctccctgcccctccccctgcctttccactctgtctggtgagctctgcttt

SEQ ID NO: 127022 - DNA, 120 bp, Artificial Sequence
  ENSG00000101849_22 (sequence is synthesized)
ttcagtgcaccatcaagagatgcagccccgtggacatgaagacacaatctcccacggacagctttcccccttccgccctctcccaccctctcctccccttgcgctcgcgctcgcgctcgc

SEQ ID NO: 127023 - DNA, 120 bp, Artificial Sequence
  ENSG00000101849_23 (sequence is synthesized)
tttctcactggcgtgctctctttctctctctctctccctctgtacctttctcatagttgcttcagatcttaggtctcaagggcactttggcgcgtagtaagtgctttatgtaagaaggca

SEQ ID NO: 127024 - DNA, 120 bp, Artificial Sequence
  ENSG00000101849_24 (sequence is synthesized)
gggcaggggggctttttacaggagaaaaaaaaatgacttataagagaaagagcctggagtatttttggaaaaaaaaataatatttttatgttaaaacaattttaaaatcttaaaatggcc

SEQ ID NO: 127025 - DNA, 120 bp, Artificial Sequence
  ENSG00000101849_25 (sequence is synthesized)
atcagacatagagagctttgtgtgattcatgttttaaaaagaaccgaagaagccacaggcagggcctgagggagcccctggctttcccctcagcctcaggaaaggtggtcaggaaaactc

SEQ ID NO: 127026 - DNA, 120 bp, Artificial Sequence
  ENSG00000101849_26 (sequence is synthesized)
tggctggacaagggtcagtcttcggggtcagcagcgagattgctctgcagccagtgagggaggtccccgccatgccggctggaagaagaacctcgcatcttttggtgtgtatgcaccttg

SEQ ID NO: 127027 - DNA, 120 bp, Artificial Sequence
  ENSG00000101849_27 (sequence is synthesized)
gcagccagcaggaaagcagcgaagagccgcgcgccctctggcctcaagggagcattggcagaaccataaggtactgcagaagccgtcgaaaccgactgctcggctggattaggcgtgttg

SEQ ID NO: 127028 - DNA, 120 bp, Artificial Sequence
  ENSG00000101849_28 (sequence is synthesized)
gctacatctttcccacaaccgtataacgaccgatggtcatttctccaagagcaggcttggcgagtccttgcagagctgacatagaggcgcccgcatgtcacttagtctaacgctgacaga

SEQ ID NO: 127029 - DNA, 120 bp, Artificial Sequence
  ENSG00000101849_29 (sequence is synthesized)
aatgaatgcagaaggaagattttcagtcctgaacgtgaattatagaggtagaacgtcgctaataatttctgccatctttataatttctttgtctcacagaagactaggagaaagatcttt

SEQ ID NO: 127030 - DNA, 120 bp, Artificial Sequence
  ENSG00000101849_30 (sequence is synthesized)
tttaaataatctttttgctgtttttaaaaaattaaacaaggctttgtgttcctagaagagcttcatttcagtgaatctggtgacctccatctgcttgctgtcataacccgacacggactt

SEQ ID NO: 127031 - DNA, 120 bp, Artificial Sequence
  ENSG00000101849_31 (sequence is synthesized)
atttttgtcattagcaagggggaaaaggccaaaggacaagggcctcttctcccattggttttcctgtgggcagaagggctgaggaagatggcccagcccgtgggggctgctgggtcacca

SEQ ID NO: 127032 - DNA, 120 bp, Artificial Sequence
  ENSG00000101849_32 (sequence is synthesized)
gcagtgggtagggtgcaatctggtgtgtgttccagcagtgagacggtgttattgtgaaggtggcattcatctgcggagccaaaacccagccatcggggaagggtcagggcttctgtggaa

SEQ ID NO: 127033 - DNA, 120 bp, Artificial Sequence
  ENSG00000101849_33 (sequence is synthesized)
cttggaacgtgccaggaccacctgcaaaagccagggtgcgttgatcattctcagatcattgattggcctccacttgggtatgtgaattattcatgtcccagaagaccaaaaagtgctctg

SEQ ID NO: 127034 - DNA, 120 bp, Artificial Sequence
  ENSG00000101849_34 (sequence is synthesized)
gttctgagatgagtattttattcgtgttctgtttccgaaacacttagcaaagaaggtcacagtgatgtggagtcgccgcacccatctttgaagatagccagtgtccctggatgaggtgat

SEQ ID NO: 127035 - DNA, 120 bp, Artificial Sequence
  ENSG00000101849_35 (sequence is synthesized)
gatttcccgtcccaaggactctgtgaagtttagagtacagtttgttggggtccaaaagacaccatctctaccccacccaaataaaaatgcactcatctctgtagaacatctgctgtcaaa

SEQ ID NO: 127036 - DNA, 120 bp, Artificial Sequence
  ENSG00000101849_36 (sequence is synthesized)
ggccagcctgtcgttagggcatggcttatgcttgacaaaccagtaacaactgtgggatggcgatggtgggatgtgtcgcaagcaattcactagacaatcttcacatgaatgtcggtagcc

SEQ ID NO: 127037 - DNA, 120 bp, Artificial Sequence
  ENSG00000101849_37 (sequence is synthesized)
agggtctctcccgagggatggctttagtcttgatgaatgtgaaccatgtcggaattgttaggtagaaacctgggctgggaggcctcggaccccaggctccatccctggcttccccagcct

SEQ ID NO: 127038 - DNA, 120 bp, Artificial Sequence
  ENSG00000101849_38 (sequence is synthesized)
acccttcatatccatccccgttctcagcgggacaacaccatggacagccgttttcagagcctccagcatttgcacaccactactcaccctctctgctgctggcatgttggtagagtcatc

SEQ ID NO: 127039 - DNA, 120 bp, Artificial Sequence
  ENSG00000101849_39 (sequence is synthesized)
cctgtaatcaagaaatggcctgtggaatgttattgttcaacgttgtttacagctcttaaaacatggtgaggaatgcctaagtcttagtgaccaaacgtgaccttgaaagcagacatagca

SEQ ID NO: 127040 - DNA, 120 bp, Artificial Sequence
  ENSG00000101849_40 (sequence is synthesized)
tgacagaccttcctagagtgtttggtcgggttcacagtgaccgagagtcaggtccagcacacacctgggaaagggatgctgccccaagggggaccaaaagggccggacgttacagggtga

SEQ ID NO: 127041 - DNA, 120 bp, Artificial Sequence
  ENSG00000101849_41 (sequence is synthesized)
aaccctctgacccctcgcgacaccgtaggacttgacttttgtttagtctttctaagaaatagatcatggagccaagtgaagtgcactttgtcaaatgtaagggtctgctttgttcttgtt

SEQ ID NO: 127042 - DNA, 120 bp, Artificial Sequence
  ENSG00000101849_42 (sequence is synthesized)
gcttttctgttttttaaccttttgttccgccatttaaaaaaagaaaaaaaaaaagcttatgtttcttgtcaaatgcagaaatgttccttccgccactcactgaagttttgcattctggct

SEQ ID NO: 127043 - DNA, 120 bp, Artificial Sequence
  ENSG00000101849_43 (sequence is synthesized)
tgtgcagtttttattgtctgtgtcagacgtacagccagacatgttctctattggcatttttccgattctgttcagatgacagcgaccgccttttcattccccccgccacctgtactcacc

SEQ ID NO: 127044 - DNA, 120 bp, Artificial Sequence
  ENSG00000101849_44 (sequence is synthesized)
ctcacgctctttgaagaaaaaaaaaaaaatcaccttgtgtgttgtagctcatttgtttcaagagagaatcaacagatcatattcagtgtcttgaataaattgctctattttgatattaga

SEQ ID NO: 127045 - DNA, 120 bp, Artificial Sequence
  ENSG00000101849_45 (sequence is synthesized)
tacaattatgaaggataatgctaccaggaatatcttcatctgtgtggctttttcatggtctgaagcattccttcaagatccatgctctgatattgtgagactgccaggagctttgataca

SEQ ID NO: 127046 - DNA, 120 bp, Artificial Sequence
  ENSG00000101849_46 (sequence is synthesized)
ctgcaccaaactgtttgaccagagttgaagcatttaataaggatcccgacaacaaacaaaacagccagctagcacactaaggccaggagcctattttgctcatcctgtatttaaatataa

SEQ ID NO: 127047 - DNA, 120 bp, Artificial Sequence
  ENSG00000101849_47 (sequence is synthesized)
catacatgaagtcaccataaggagccctggcctccttgcagaaacatcgaggtgacatgtagcatgaccgagctcgctggcgcctcttcatcgtgctgccaccgccctgcaggaagaggg

SEQ ID NO: 127048 - DNA, 80 bp, Artificial Sequence
  ENSG00000101849_48 (sequence is synthesized)
gcgctcgcggcagctccccgtggaggtcactgtccgtgccagtccctcccgctgtcccgccctctcccgctgccgccgcc

SEQ ID NO: 127049 - DNA, 120 bp, Artificial Sequence
  ENSG00000101849_49 (sequence is synthesized)
cactccgcgcttgggagcgaggagccgccagcgcccccgccccgccgccgccgcagcgccctcaggccgccattcgccaccgaaactttccagcgcccgcgctctctccgggactcggcg

SEQ ID NO: 127050 - DNA, 120 bp, Artificial Sequence
  ENSG00000101849_50 (sequence is synthesized)
gccgggccctcttcggccgccgcacggccgggactcggaggctgccggctggagggaggttcggagcgcggccgggcgcgcggcgccgccacaagttgcgctgctcgcgacgagatttcc

SEQ ID NO: 127051 - DNA, 120 bp, Artificial Sequence
  ENSG00000101849_51 (sequence is synthesized)
ccctccgtcagcagctaacccttgagcgggatgtgtgcttgtgccgggtgcattgcattaagagaatgcaactgaatagagaaggatcaggaccttttgtgcagaggctggtccctgcag

SEQ ID NO: 127052 - DNA, 120 bp, Artificial Sequence
  ENSG00000101849_52 (sequence is synthesized)
agctaaagcgtgttgtcttctcccgagggtgtgcacaggttcatgtatcagctgaataaggccctgttccaaaaactgatatttcaagggaaccttaatttatctttaaatttaatgctg

SEQ ID NO: 127053 - DNA, 120 bp, Artificial Sequence
  ENSG00000101849_53 (sequence is synthesized)
gtccctgcagacggcttcccatttttatgaccggatgctgggaagcctgctggtccacaggtccatacatgaagtcaccataagatggaggctcgctctgtcatcctggctgcagtgcag

SEQ ID NO: 127054 - DNA, 71 bp, Artificial Sequence
  ENSG00000101849_54 (sequence is synthesized)
taagatggaggctcgctctgtcatcctggctgcagtgcagtggcacaatcttgggtcgctgcaacctccat

SEQ ID NO: 127055 - DNA, 120 bp, Artificial Sequence
  ENSG00000101849_55 (sequence is synthesized)
agtgctgggattaacaggcgtgagccaccatgtcccgtcagggatgattttattctgtgaaaagcggcattccttttctaacacaaaacctctcctctgctctgccctcccaaccctgta

SEQ ID NO: 127056 - DNA, 120 bp, Artificial Sequence
  ENSG00000101849_56 (sequence is synthesized)
tgtagcctcatttcctatatagttgttttcatactgattatctctgaagacattgccaggtcgtttttgtttgttttgagacaaggtcttgctctgttacccaggctggagtacagtggc

SEQ ID NO: 127057 - DNA, 120 bp, Artificial Sequence
  ENSG00000101849_57 (sequence is synthesized)
acgatgtcggctcactgcagcctccacctcccagggtcaagcgattgtcgtgcctcagactcccaaatagctgggaatacaggggcatgcctccacacctagctaatttttgtatttttt

SEQ ID NO: 127058 - DNA, 69 bp, Artificial Sequence
  ENSG00000101849_58 (sequence is synthesized)
gtagagagcgaccacgcccagccgacattcccaggttttctttacgttttaataaatatgagtagtcca

SEQ ID NO: 127059 - DNA, 79 bp, Artificial Sequence
  ENSG00000101849_59 (sequence is synthesized)
gagcgggatgtgtgcttgtgccgggtgcattgcattaagagaatgcaactgaatagagaaggatcaggaccttttgtgc

SEQ ID NO: 127060 - DNA, 120 bp, Artificial Sequence
  ENSG00000101849_60 (sequence is synthesized)
agttcaagaccagcctgggcaacatatcaagacctccatctctatatttaaaaaaaataagaatttttttaaaagaaaaataataaaatggttaattttatgttgttacttttattccaa

SEQ ID NO: 127061 - DNA, 71 bp, Artificial Sequence
  ENSG00000101849_61 (sequence is synthesized)
aatgtatggtccaggggaatgtctatgttgggcctgaggtgtgctgttctggtttttcttaggtgaatggg

SEQ ID NO: 127062 - DNA, 120 bp, Artificial Sequence
  ENSG00000101849_62 (sequence is synthesized)
gcctgaggtgtgctgttctggtttttcttaggtgaatgggttctgaaggctgcatcaaaagaggagtctttaaagttgctaattctttcctgataggaaaagaatataatttctcaaaat

SEQ ID NO: 127063 - DNA, 120 bp, Artificial Sequence
  ENSG00000101849_63 (sequence is synthesized)
gactgctttcgaggaatgcccctttctgaatttgaaaacatagtattaaaaagaagagtctctcagtgctttagattattatttcttgtattcgatgtaaaaatcccttacagtggtttt

SEQ ID NO: 127064 - DNA, 120 bp, Artificial Sequence
  ENSG00000101849_64 (sequence is synthesized)
acaagtctgcagaggaattcacaaagcacgattgaaaagtgatgtacaggatttatagttgaatgggaacaaaccagctgatctgcatataggatgaaatttagctgagggtgctattga

SEQ ID NO: 127065 - DNA, 120 bp, Artificial Sequence
  ENSG00000101849_65 (sequence is synthesized)
gtttggacaacatttggctggacctttgtaactcttcagctctatgaaacaatagttgtgtgaagaattaaaaggtggaaaatgaactgtaggtggctggctcacatatgcctaggtcta

SEQ ID NO: 127066 - DNA, 120 bp, Artificial Sequence
  ENSG00000101849_66 (sequence is synthesized)
tttccagacacagcgaacagtgaaatgacagtgtcggtgaggcaccagttcaaggaaatacacaaagactgcctactcataaatacagacacaatggggtgataactggtgcttgcactt

SEQ ID NO: 127067 - DNA, 120 bp, Artificial Sequence
  ENSG00000101849_67 (sequence is synthesized)
ggagatctagaattctaaaacatcggaaaacaatagcagaccattctgtgtccttttctttaaaactatctcttgaaattttcgtgcttcccccaagaacatcctcaaagatgccagtaa

SEQ ID NO: 127068 - DNA, 120 bp, Artificial Sequence
  ENSG00000101849_68 (sequence is synthesized)
aaataactccacaggaatctttctgaattccaatatccatgtgaaaaggctgcattttattctgatttttcacaatagaattaaggcagacatgatgaagaaatgaatgtgtagaggact

SEQ ID NO: 127069 - DNA, 120 bp, Artificial Sequence
  ENSG00000101849_69 (sequence is synthesized)
tccgaaatctgtattaacgtgtgtgatcagcaactgtaatgttttgattgattatatatggtacatctttcattcattaagctaactttaatcaagtatgtgttatgtgtcaagcctgga

SEQ ID NO: 127070 - DNA, 120 bp, Artificial Sequence
  ENSG00000101849_70 (sequence is synthesized)
ctgtagaaatgaacttgaagaagaaaggactcttcctcctgttcgggtagaaaaggtataatgcgtgttatggatggtgtgaccgaaggaaacaccggataccatgaggaaaattgagat

SEQ ID NO: 127071 - DNA, 120 bp, Artificial Sequence
  ENSG00000101849_71 (sequence is synthesized)
catcacccagggattctgtattctacttagggaataggctaaacatcaaaatacagcaatttgagacaaaggcaggcggtagtcccagaagggtaggtgtcaaatccccaagagcatcgg

SEQ ID NO: 127072 - DNA, 120 bp, Artificial Sequence
  ENSG00000101849_72 (sequence is synthesized)
cggatccaggttcctgttgtgttactatcctgccttcctaagggtcagacaggctctcaagcaacccccatgaccacaagttgtgcacatcctttcccagctcctctcacctaccattgg

SEQ ID NO: 127073 - DNA, 120 bp, Artificial Sequence
  ENSG00000101850_0 (sequence is synthesized)
acacccgagccgcgtccgcgaacacagcccatggcctccccgcgcctagggaccttctgctgccccacgcgggacgcagccacgcagctcgtgctgagcttccagccgcgggccttccac

SEQ ID NO: 127074 - DNA, 80 bp, Artificial Sequence
  ENSG00000101850_1 (sequence is synthesized)
ccttccacgcgctctgcctgggcagcggcgggctccgcttggcgctgggccttctgcagctgctgcccggccgccggccc

SEQ ID NO: 127075 - DNA, 120 bp, Artificial Sequence
  ENSG00000101850_2 (sequence is synthesized)
ctgcgcgctgccgctgcctgcgaccttctcggctgcctgggtatggtgatccggtccaccgtgtggttaggattcccaaattttgttgacagcgtctcggatatgaaccacacggaaatt

SEQ ID NO: 127076 - DNA, 120 bp, Artificial Sequence
  ENSG00000101850_3 (sequence is synthesized)
tggcctgctgctttctgcgtggggagtgcgatgtggatccagctgttgtacagtgcctgcttctggtggctgttttgctatgcagtggatgcttatctggtgatccggagatcggcagga

SEQ ID NO: 127077 - DNA, 120 bp, Artificial Sequence
  ENSG00000101850_4 (sequence is synthesized)
ctgagcaccatcctgctgtatcacatcatggcgtggggcctggccaccctgctctgtgtggagggagccgccatgctctactacccttccgtgtccaggtgtgagcggggcctggaccac

SEQ ID NO: 127078 - DNA, 120 bp, Artificial Sequence
  ENSG00000101850_5 (sequence is synthesized)
gccatcccccactatgtcaccatgtacctgcccctgctgctggttctcgtggcgaaccccatcctgttccaaaagacagtgactgcagtggcctctttacttaaaggaagacaaggcatt

SEQ ID NO: 127079 - DNA, 120 bp, Artificial Sequence
  ENSG00000101850_6 (sequence is synthesized)
cgaatatcatcaatgaaagccttttattctatcttgagatgcaaacagatatcaatggaggttctttgaaacctgtcagaactgcagccaagaccacatggtttattatgggaatcctga

SEQ ID NO: 127080 - DNA, 120 bp, Artificial Sequence
  ENSG00000101850_7 (sequence is synthesized)
atccagcccagggatttctcttgtctttggccttctacggctggacaggatgcagcctgggttttcagtctcccaggaaggagatccagtgggaatcactgaccacctcggctgctgagg

SEQ ID NO: 127081 - DNA, 120 bp, Artificial Sequence
  ENSG00000101850_8 (sequence is synthesized)
gggctcacccatccccactgatgccccatgaaaaccctgcttccgggaaggtgtctcaagtgggtgggcagacttctgacgaagccctgagcatgctgtctgaaggttctgatgccagca

SEQ ID NO: 127082 - DNA, 120 bp, Artificial Sequence
  ENSG00000101850_9 (sequence is synthesized)
caattgaaattcacactgcaagtgaatcctgcaacaaaaatgagggtgaccctgctctcccaacccatggagacctatgaaggggatgtgctgggggtccagaccccatattcctcagac

SEQ ID NO: 127083 - DNA, 120 bp, Artificial Sequence
  ENSG00000101850_10 (sequence is synthesized)
tcaacaattcttgttctttagaactgtgttctcaccttcccaacactgcactgccgaagtgtagcggcccccaaaccttgctctcatcaccagctagagcttcttcccgaagggccttta

SEQ ID NO: 127084 - DNA, 120 bp, Artificial Sequence
  ENSG00000101850_11 (sequence is synthesized)
ggataggagaaagggttcatgcacacacgtgtgagaatggaagagccccctccagaccactctacagctgctctagccttagttgccactaggaagttttctgaggctggctgtaaagta

SEQ ID NO: 127085 - DNA, 120 bp, Artificial Sequence
  ENSG00000101850_12 (sequence is synthesized)
agtgtaaggtccacatccttggggaagtagttaaataaaatagttatgactgagctctcagcctgacttggattctgtcttaacacttctagcaaaagaaaataaatacatgtacagtta

SEQ ID NO: 127086 - DNA, 120 bp, Artificial Sequence
  ENSG00000101850_13 (sequence is synthesized)
gggagatgtggccgctggaactgtctcaagcatttcctcaagtttacattcctgtccatgcaaccctcagttgcaaagccaaggtctttccaaggatatatactctaacttccaatggaa

SEQ ID NO: 127087 - DNA, 120 bp, Artificial Sequence
  ENSG00000101850_14 (sequence is synthesized)
aactggaaaatggaagtggacagtgtctttgtctgtgatttttataccagggatcaacacagtgtagccctcaggacaaatccggcgttcttccgtttttgtaaataaagttttattgga

SEQ ID NO: 127088 - DNA, 120 bp, Artificial Sequence
  ENSG00000101850_15 (sequence is synthesized)
tggctgaagctaaaagacacagagagaagatttatttacagactttccgtctggtacaaatagttcacgaagcatgagggacccaccagctggaactgctgttagtctgtagagttactg

SEQ ID NO: 127089 - DNA, 120 bp, Artificial Sequence
  ENSG00000101850_16 (sequence is synthesized)
ataccatctagggaatgaagcaaaaaatgttatcttgaattatttggctttgcattcccatcctgctgttttaaagtggctgagcagatatttgacagtcaaataaaacactagaaataa

SEQ ID NO: 127090 - DNA, 120 bp, Artificial Sequence
  ENSG00000101856_0 (sequence is synthesized)
actcgctcgctcagagggaggagaaagtggcgagttccggatccctgcctagcgcggcccaacctttactccagagatcatggctgccgaggatgtggtggcgactggcgccgacccaag

SEQ ID NO: 127091 - DNA, 120 bp, Artificial Sequence
  ENSG00000101856_1 (sequence is synthesized)
cgatctggagagcggcgggctgctgcatgagattttcacgtcgccgctcaacctgctgctgcttggcctctgcatcttcctgctctacaagatcgtgcgcggggaccagccggcggccag

SEQ ID NO: 127092 - DNA, 120 bp, Artificial Sequence
  ENSG00000101856_2 (sequence is synthesized)
cggcgacagcgacgacgacgagccgccccctctgccccgcctcaagcggcgcgacttcacccccgccgagctgcggcgcttcgacggcgtccaggacccgcgcatactcatggccatcaa

SEQ ID NO: 127093 - DNA, 120 bp, Artificial Sequence
  ENSG00000101856_3 (sequence is synthesized)
cggcaaggtgttcgatgtgaccaaaggccgcaaattctacgggcccgaggggccgtatggggtctttgctggaagagatgcatccaggggccttgccacattttgcctggataaggaagc

SEQ ID NO: 127094 - DNA, 120 bp, Artificial Sequence
  ENSG00000101856_4 (sequence is synthesized)
actgaaggatgagtacgatgacctttctgacctcactgctgcccagcaggagactctgagtgactgggagtctcagttcactttcaagtatcatcacgtgggcaaactgctgaaggaggg

SEQ ID NO: 127095 - DNA, 120 bp, Artificial Sequence
  ENSG00000101856_5 (sequence is synthesized)
ggaggagcccactgtgtactcagatgaggaagaaccaaaagatgagagtgcccggaaaaatgattaaagcattcagtggaagtatatctatttttgtattttgcaaaatcatttgtaaca

SEQ ID NO: 127096 - DNA, 120 bp, Artificial Sequence
  ENSG00000101856_6 (sequence is synthesized)
gtccactctgtctttaaaacatagtgattacaatatttagaaagttttgagcacttgctataagttttttaattaacatcactagtgacactaataaaattaacttcttagaatgcatga

SEQ ID NO: 127097 - DNA, 120 bp, Artificial Sequence
  ENSG00000101856_7 (sequence is synthesized)
agttagtacaggatgaatttaaatgtgtttttcctgagagacaaggaagacttgggtatttcccaaaacaggtaaaaatcttaaatgtgcaccaagagcaaaggatcaacttttagtcat

SEQ ID NO: 127098 - DNA, 120 bp, Artificial Sequence
  ENSG00000101856_8 (sequence is synthesized)
gatgttctgtaaagacaacaaatccctttttttttctcaattgacttaactgcatgatttctgttttatctacctctaaagcaaatctgcagtgttccaaagactttggtatggattaag

SEQ ID NO: 127099 - DNA, 120 bp, Artificial Sequence
  ENSG00000101856_9 (sequence is synthesized)
cgctgtccagtaacaaaatgaaatctcaaaacagagctcagctgcaaaaaagcatattttctgtgtttctggactgcactgttgtccttgccctcacatagacactcagacaccctcaca

SEQ ID NO: 127100 - DNA, 120 bp, Artificial Sequence
  ENSG00000101856_10 (sequence is synthesized)
aacacagtagtctatagttaggattaaaataggatctgaacattcaaaagaaagctttggaaaaaaagagctggctggcctaaaaacctaaatatatgatgaagattgtaggactgtctt

SEQ ID NO: 127101 - DNA, 120 bp, Artificial Sequence
  ENSG00000101856_11 (sequence is synthesized)
cccaagccccatgttcatggtggggcaatggttatttggttattttactcaattggttactctcatttgaaatgagggagggacatacagaataggaacaggtgtttgctctcctaagag

SEQ ID NO: 127102 - DNA, 120 bp, Artificial Sequence
  ENSG00000101856_12 (sequence is synthesized)
ccttcatgcacacccctgaaccacgaggaaacagtacagtcgctagtcaagtggtttttaaagtaaagtatattcataaggtaacagttattctgttgttataaaactatacccactgca

SEQ ID NO: 127103 - DNA, 120 bp, Artificial Sequence
  ENSG00000101856_13 (sequence is synthesized)
aaagtagtagtcaagtgtctaggtctttgatattgctcttttggttaacactaagcttaagtagactatacagttgtatgaatttgtaaaagtatatgaacacctagtgagatttcaaac

SEQ ID NO: 127104 - DNA, 120 bp, Artificial Sequence
  ENSG00000101856_14 (sequence is synthesized)
ttgtaattgtggttaaatagtcattgtattttcttgtgaactgtgttttatgattttacctcaaatcagaaaacaaaatgatgtgctttggtcagttaataaaaatggttttacccacta

SEQ ID NO: 127105 - DNA, 120 bp, Artificial Sequence
  ENSG00000101868_0 (sequence is synthesized)
ccagttttgggctggttggcgcggaatcgggagattcgggaccatggcacctgtgcacggcgacgactgtgagataggggcgagtgctctgtcagattcagggagttttgtatcttctcg

SEQ ID NO: 127106 - DNA, 120 bp, Artificial Sequence
  ENSG00000101868_1 (sequence is synthesized)
agcccggcgagaaaaaaaatcaaagaaggggcgccaagaagccctagaaagactgaaaaaggctaaagctggtgagaagtataaatatgaagtcgaggacttcacaggtgtttatgaaga

SEQ ID NO: 127107 - DNA, 120 bp, Artificial Sequence
  ENSG00000101868_2 (sequence is synthesized)
agttgatgaagaacagtattcgaagctggttcaggcacgccaggatgatgactggattgtggatgatgatggtattggctatgtggaagatggccgagagatttttgatgatgaccttga

SEQ ID NO: 127108 - DNA, 120 bp, Artificial Sequence
  ENSG00000101868_3 (sequence is synthesized)
agatgatgcccttgatgctgatgagaaaggaaaagatggtaaagcacgcaataaagacaagaggaatgtaaagaagctcgcagtgacaaaaccgaacaacattaagtcaatgttcattgc

SEQ ID NO: 127109 - DNA, 120 bp, Artificial Sequence
  ENSG00000101868_4 (sequence is synthesized)
ttgtgctggaaagaaaactgcagataaagctgtagacttgtccaaggatggtctgctaggtgacattctacaggatcttaacactgagacacctcaaataactccaccacctgtaatgat

SEQ ID NO: 127110 - DNA, 120 bp, Artificial Sequence
  ENSG00000101868_5 (sequence is synthesized)
actgaagaagaaaagatccattggagcttcaccgaatcctttctctgtgcacaccgccacggcagttccttcaggaaaaattgcttcccctgtctccagaaaggagcctccattaactcc

SEQ ID NO: 127111 - DNA, 120 bp, Artificial Sequence
  ENSG00000101868_6 (sequence is synthesized)
tgttcctcttaaacgtgctgaatttgctggcgatgatgtacaggtcgagagtacagaagaagagcaggagtcaggggcaatggagtttgaagatggtgactttgatgagcccatggaagt

SEQ ID NO: 127112 - DNA, 120 bp, Artificial Sequence
  ENSG00000101868_7 (sequence is synthesized)
tgaagaggtggacctggagcctatggctgccaaggcttgggacaaagagagtgagccagcagaggaagtgaaacaagaggcggattctgggaaagggaccgtgtcctacttaggaagttt

SEQ ID NO: 127113 - DNA, 120 bp, Artificial Sequence
  ENSG00000101868_8 (sequence is synthesized)
tctcccggatgtctcttgttgggacattgatcaagaaggtgatagcagtttctcagtgcaagaagttcaagtggattccagtcacctcccattggtaaaaggggcagatgaggaacaagt

SEQ ID NO: 127114 - DNA, 120 bp, Artificial Sequence
  ENSG00000101868_9 (sequence is synthesized)
attccacttttattggttggatgcttatgaggatcagtacaaccaaccaggtgtggtatttctgtttgggaaagtttggattgaatcagccgagacccatgtgagctgttgtgtcatggt

SEQ ID NO: 127115 - DNA, 120 bp, Artificial Sequence
  ENSG00000101868_10 (sequence is synthesized)
gaaaaatatcgagcgaacgctttacttccttccccgtgaaatgaaaattgatctaaatacggggaaagaaacaggaactccaatttcaatgaaggatgtttatgaggaatttgatgagaa

SEQ ID NO: 127116 - DNA, 120 bp, Artificial Sequence
  ENSG00000101868_11 (sequence is synthesized)
aatagcaacaaaatataaaattatgaagttcaagtctaagccagtggaaaagaactatgcttttgagatacctgatgttccagaaaaatctgagtacttggaagttaaatactcggctga

SEQ ID NO: 127117 - DNA, 120 bp, Artificial Sequence
  ENSG00000101868_12 (sequence is synthesized)
aatgccacagcttcctcaagatttgaaaggagaaactttttctcatgtatttgggaccaacacatctagcctggaactgttcttgatgaacagaaagatcaaaggaccttgttggcttga

SEQ ID NO: 127118 - DNA, 120 bp, Artificial Sequence
  ENSG00000101868_13 (sequence is synthesized)
agtaaaaagtccacagctcttgaatcagccagtcagttggtgtaaagttgaggcaatggctttgaaaccagacctggtgaatgtaattaaggatgtcagtccaccaccgcttgtcgtgat

SEQ ID NO: 127119 - DNA, 120 bp, Artificial Sequence
  ENSG00000101868_14 (sequence is synthesized)
ggctttcagcatgaagacaatgcagaatgcaaagaaccatcaaaatgagattattgctatggcagctttggtccatcacagttttgcattggataaagcagccccaaagcctccctttca

SEQ ID NO: 127120 - DNA, 120 bp, Artificial Sequence
  ENSG00000101868_15 (sequence is synthesized)
gtcacacttctgtgttgtgtctaaaccaaaggactgtatttttccatatgctttcaaagaagtcattgagaaaaagaatgtgaaggttgaggttgctgcaacagaaagaacactgctagg

SEQ ID NO: 127121 - DNA, 120 bp, Artificial Sequence
  ENSG00000101868_16 (sequence is synthesized)
ttttttccttgcaaaagttcacaaaattgatcctgatatcattgtgggtcataatatttatgggtttgaactggaagtactactgcagagaattaatgtgtgcaaagctcctcactggtc

SEQ ID NO: 127122 - DNA, 120 bp, Artificial Sequence
  ENSG00000101868_17 (sequence is synthesized)
caagataggtcgactgaagcgatccaacatgccaaagcttgggggccggagtggatttggtgaaagaaatgctacctgtggtcgaatgatctgtgatgtggaaatttcagcaaaggaatt

SEQ ID NO: 127123 - DNA, 120 bp, Artificial Sequence
  ENSG00000101868_18 (sequence is synthesized)
gattcgttgtaaaagctaccatctgtctgaacttgttcagcagattctaaaaactgaaagggttgtaatcccaatggaaaatatacaaaatatgtacagtgaatcttctcaactgttata

SEQ ID NO: 127124 - DNA, 120 bp, Artificial Sequence
  ENSG00000101868_19 (sequence is synthesized)
cctgttggaacacacctggaaagatgccaagttcattttgcagatcatgtgtgagctaaatgttcttccattagcattgcagatcactaacatcgctgggaacattatgtccaggacgct

SEQ ID NO: 127125 - DNA, 120 bp, Artificial Sequence
  ENSG00000101868_20 (sequence is synthesized)
gatgggtggacgatccgagcgtaacgagttcttgttgcttcatgcattttacgaaaacaactatattgtgcctgacaagcagattttcagaaagcctcagcaaaaactgggagatgaaga

SEQ ID NO: 127126 - DNA, 120 bp, Artificial Sequence
  ENSG00000101868_21 (sequence is synthesized)
tgaagaaattgatggagataccaataaatacaagaaaggacgtaagaaagcagcttatgctggaggcttggttttggaccccaaagttggtttttatgataagttcattttgcttctgga

SEQ ID NO: 127127 - DNA, 120 bp, Artificial Sequence
  ENSG00000101868_22 (sequence is synthesized)
ttacagaggatggagaacaagaacagatccctgagttgccagatccaagcttagaaatgggcattttgcccagagagatccggaaactggtagaacggagaaaacaagtcaaacagctaa

SEQ ID NO: 127128 - DNA, 120 bp, Artificial Sequence
  ENSG00000101868_23 (sequence is synthesized)
tgaaacagcaagacttaaatccagaccttattcttcagtatgacattcgacagaaggctttgaagctcacagcgaacagtatgtatggttgcctgggattttcctatagcagattttacg

SEQ ID NO: 127129 - DNA, 120 bp, Artificial Sequence
  ENSG00000101868_24 (sequence is synthesized)
ccaaaccactggctgccttggtgacatacaaaggaagggagattttgatgcatacgaaagagatggtacaaaagatgaatcttgaagttatttatggagatacagattcaattatgataa

SEQ ID NO: 127130 - DNA, 120 bp, Artificial Sequence
  ENSG00000101868_25 (sequence is synthesized)
acaccaatagcaccaatctggaagaagtatttaagttgggaaacaaggtaaaaagtgaagtgaataagttgtacaaactgcttgaaatagacattgatggggttttcaagtctctgctac

SEQ ID NO: 127131 - DNA, 120 bp, Artificial Sequence
  ENSG00000101868_26 (sequence is synthesized)
tgctgaaaaaaaagaagtacgctgctctggttgttgagccaacgtcggatgggaattatgtcaccaaacaggagctcaaaggattagatatagttagaagagattggtgtgatcttgcta

SEQ ID NO: 127132 - DNA, 120 bp, Artificial Sequence
  ENSG00000101868_27 (sequence is synthesized)
aagacactggaaactttgtgattggccagattctttctgatcaaagccgggacactatagtggaaaacattcagaagaggctgatagaaattggagaaaatgtgctaaatggcagtgtcc

SEQ ID NO: 127133 - DNA, 120 bp, Artificial Sequence
  ENSG00000101868_28 (sequence is synthesized)
cagtgagccagtttgaaattaacaaggcattgacaaaggatccccaggattaccctgataaaaaaagcctacctcatgtacatgttgccctctggataaattctcaaggaggcagaaagg

SEQ ID NO: 127134 - DNA, 120 bp, Artificial Sequence
  ENSG00000101868_29 (sequence is synthesized)
tgaaagctggagatactgtgtcatatgtcatctgtcaggatggatcaaacctcactgcaagtcagagggcctatgcgcctgagcagctgcagaaacaggataatctaaccattgacaccc

SEQ ID NO: 127135 - DNA, 120 bp, Artificial Sequence
  ENSG00000101868_30 (sequence is synthesized)
agtactacctggcccagcagatccacccagtcgtggctcggatctgtgaaccaatagacggaattgatgctgtcctcattgcaacgtggttgggacttgaccccacccaatttagagttc

SEQ ID NO: 127136 - DNA, 120 bp, Artificial Sequence
  ENSG00000101868_31 (sequence is synthesized)
atcattatcataaagatgaagagaatgatgctctacttggtggcccagcacagctcactgatgaagagaaatacagggactgtgaaagattcaaatgtccatgccctacatgtggaactg

SEQ ID NO: 127137 - DNA, 120 bp, Artificial Sequence
  ENSG00000101868_32 (sequence is synthesized)
agaatatttatgataatgtctttgatggttcgggaacagatatggagcccagcttgtatcgttgcagtaacatcgattgtaaggcttcacctctgacctttacagtacaactgagcaaca

SEQ ID NO: 127138 - DNA, 120 bp, Artificial Sequence
  ENSG00000101868_33 (sequence is synthesized)
aattgatcatggacattagacgtttcattaaaaagtactatgatggctggttgatatgtgaagagccaacctgtcgcaatcgaactcgtcaccttccccttcaattctcccgaactgggc

SEQ ID NO: 127139 - DNA, 120 bp, Artificial Sequence
  ENSG00000101868_34 (sequence is synthesized)
ctctttgcccagcctgcatgaaagctacacttcaaccagagtattctgacaagtccctgtacacccagctgtgcttttaccggtacatttttgatgcggagtgtgcactggagaaactta

SEQ ID NO: 127140 - DNA, 120 bp, Artificial Sequence
  ENSG00000101868_35 (sequence is synthesized)
ctaccgatcatgagaaagataaattgaagaagcaattttttacccccaaagttctgcaggactacagaaaactcaagaacacagcagagcaattcttgtcccgaagtggctactccgaag

SEQ ID NO: 127141 - DNA, 120 bp, Artificial Sequence
  ENSG00000101868_36 (sequence is synthesized)
tgaatctgagcaaactcttcgctggttgtgccgtgaaatcctaagggaatcccaggagtaaccaaggagggggtagttgaaaaatcccagcttcctctgtgcctccactctggccctaaa

SEQ ID NO: 127142 - DNA, 120 bp, Artificial Sequence
  ENSG00000101868_37 (sequence is synthesized)
tgctcctccagcatctgtttctcccttgggactgtgtctcatgtttgtgtgaatgtagaccaggaaagggggctgcaaaaatgttgagtctaatgttcgtaagcatcatagaaattcctg

SEQ ID NO: 127143 - DNA, 120 bp, Artificial Sequence
  ENSG00000101868_38 (sequence is synthesized)
tcttcatattaagatgtactgctttaaaacacaactccagagcccctccccaagctcccctccccaagctcctgaagacccggtttctgagggagggaaattgctacttggattgagagt

SEQ ID NO: 127144 - DNA, 120 bp, Artificial Sequence
  ENSG00000101868_39 (sequence is synthesized)
agctggaatgtaagtgaccccaggctttgcctcagggcctttagcctatgtcccccccacataaagagagcttctcagagcctgactgaagagctgacgttttgctttttcatatgccaa

SEQ ID NO: 127145 - DNA, 120 bp, Artificial Sequence
  ENSG00000101868_40 (sequence is synthesized)
ttaaacccggtctaaatccaaatgcttctccagccatccaggagtggctgtccttttcagtcttgtcttttatataggtagctgagggggaagatttagaagccttgcactcactaaata

SEQ ID NO: 127146 - DNA, 120 bp, Artificial Sequence
  ENSG00000101868_41 (sequence is synthesized)
gattaaacagagcaggcttgtttgttgaattgctccaaagtccaacagacacacactgagcaggtgttttacactcacattccctttttgccccttaaatagaaagtgcaggtaaaggtt

SEQ ID NO: 127147 - DNA, 120 bp, Artificial Sequence
  ENSG00000101868_42 (sequence is synthesized)
tatacaacaagaaagcacattgaaaataatttgatactctaacaatccattaacatgtgtaggggttacggtgaggatcactgtgttgtattcagaaaaacggggagagggatgcttaat

SEQ ID NO: 127148 - DNA, 120 bp, Artificial Sequence
  ENSG00000101868_43 (sequence is synthesized)
tggccctggcgcttgctatttttttctcatttcttcacaataggaccgtctttggcagcagcaaaatgtatttcagtatggcagtctttcctctcttacattattggtaagattatacta

SEQ ID NO: 127149 - DNA, 120 bp, Artificial Sequence
  ENSG00000101868_44 (sequence is synthesized)
acaaaatgtttccccttgtacaattatgctgtgtttttaaaaaacattgacctgtgtgtttttataaaagaaaaagtatgttgtgccttcttcttaagaataaagttttctaaagggaaa

SEQ ID NO: 127150 - DNA, 120 bp, Artificial Sequence
  ENSG00000101868_45 (sequence is synthesized)
acttgtataaaggccttacccccttcccccactatggggtatataaaaagggcgaaataaacacacacatgttgctttcatgtgtttaaagaattttagcatcatgtgaaatctaccttc

SEQ ID NO: 127151 - DNA, 120 bp, Artificial Sequence
  ENSG00000101868_46 (sequence is synthesized)
agtgataaactcctggcaccaccgcattttgctgttgatactagtgtgtgtctatagcttgtggtacagaagcactaagtgaggtccatgctgtacagtgagaagccgaaagagttgctg

SEQ ID NO: 127152 - DNA, 120 bp, Artificial Sequence
  ENSG00000101868_47 (sequence is synthesized)
ctctgtgtgccagattttgatgcatacgaaagagatggtacaaaagatgaatcttgaagttatttatggagatacagattcaattatgataaacaccaatagcaccaatctggaagaagt

SEQ ID NO: 127153 - DNA, 120 bp, Artificial Sequence
  ENSG00000101868_48 (sequence is synthesized)
tggtatggactagtagaaaaaaggtgttttatattttattagattcattcctgccagattggactatgacatcgacccattaaaatgtattagacatacacctagaagcattatttaaca

SEQ ID NO: 127154 - DNA, 120 bp, Artificial Sequence
  ENSG00000101868_49 (sequence is synthesized)
atgtttaaatgttttactacctgaaaataatgggattctgtactgtattggtggttggataggctcaaacccccctccaatagcttaattagaagcttctctaaaatgcatgatcatatg

SEQ ID NO: 127155 - DNA, 120 bp, Artificial Sequence
  ENSG00000101868_50 (sequence is synthesized)
attcctgttttgggaaggtgttgggtagagtccctccccagcttgagggaagctaaatgaagttgggaatactgtggacgttaaagagccatgtattgacaaagttgacatggggttggc

SEQ ID NO: 127156 - DNA, 120 bp, Artificial Sequence
  ENSG00000101868_51 (sequence is synthesized)
caaaatggatcagtgatctctaaattccagcgtgctccatgaagaagttttcatgggtccttaataaaatggggaggagtgggaagtagtataatgtagtgaatttttcacaaaggtaaa

SEQ ID NO: 127157 - DNA, 120 bp, Artificial Sequence
  ENSG00000101868_52 (sequence is synthesized)
tggaccccaaagttgctcagtttttgtacaggtaaatgtgccgtccattttattttttgaagctgttgtaaaagaataaattactctaccaggcgcggtggctcacgcctgtaatttcag

SEQ ID NO: 127158 - DNA, 120 bp, Artificial Sequence
  ENSG00000101868_53 (sequence is synthesized)
ttgaacccgggaggcagaggttgcggtttttatgataagttcattttgcttctggacttcaacagtctatatccttccatcattcaggaatttaacatttgttttacaacagtacaaaga

SEQ ID NO: 127159 - DNA, 120 bp, Artificial Sequence
  ENSG00000101871_0 (sequence is synthesized)
gattggcgaagctcctccgcggcccaagccagccacctacaacgtctctgagaactgatttgaaataagagccaggcggtcctcgcttccctgcgaccgacttttcataggctgggggag

SEQ ID NO: 127160 - DNA, 120 bp, Artificial Sequence
  ENSG00000101871_1 (sequence is synthesized)
aaaaggttgagaaacttgacattgtctcgagcagagtgcgtgtagcaacagatcaaagaaaaagaggacgaaaacgtgctctttgctgcccgtagatttcgccgggttgcttttgtcttg

SEQ ID NO: 127161 - DNA, 120 bp, Artificial Sequence
  ENSG00000101871_2 (sequence is synthesized)
cgggctcctgtcgggttcggtgtttccgctctgaagactgcgacgcgggctccgatgcagctcgctccctgccggatgggtcatgggattctaaacatgaggcagatagctgatcagctt

SEQ ID NO: 127162 - DNA, 120 bp, Artificial Sequence
  ENSG00000101871_3 (sequence is synthesized)
ccttgggttttgctgatgacacaagagagctttgcctgaagatggaaacactggagtcagaactgacctgccctatttgtctggagctctttgaggaccctcttctactgccctgcgcac

SEQ ID NO: 127163 - DNA, 120 bp, Artificial Sequence
  ENSG00000101871_4 (sequence is synthesized)
acagcctctgcttcaactgcgcccaccgcatcctagtatcacactgtgccaccaacgagtctgtggagtccatcaccgccttccagtgccccacctgccggcatgtcatcaccctcagcc

SEQ ID NO: 127164 - DNA, 120 bp, Artificial Sequence
  ENSG00000101871_5 (sequence is synthesized)
agcgaggtctagacgggctcaagcgcaacgtcaccctacagaacatcatcgacaggttccagaaagcatcagtgagcgggcccaactctcccagcgagacccgtcgggagcgggcctttg

SEQ ID NO: 127165 - DNA, 120 bp, Artificial Sequence
  ENSG00000101871_6 (sequence is synthesized)
acgccaacaccatgacctccgccgagaaggtcctctgccagttttgtgaccaggatcctgcccaggacgctgtgaagacctgtgtcacttgtgaagtatcctactgtgacgagtgcctga

SEQ ID NO: 127166 - DNA, 120 bp, Artificial Sequence
  ENSG00000101871_7 (sequence is synthesized)
aagccactcacccgaataagaagccctttacaggccatcgtctgattgagccaattccggactctcacatccgggggctgatgtgcttggagcatgaggatgagaaggtgaatatgtact

SEQ ID NO: 127167 - DNA, 120 bp, Artificial Sequence
  ENSG00000101871_8 (sequence is synthesized)
gtgtgaccgatgaccagttaatctgtgccttgtgtaaactggttgggcggcaccgcgatcatcaggtggcagctttgagtgagcgctatgacaaattgaagcaaaacttagagagtaacc

SEQ ID NO: 127168 - DNA, 120 bp, Artificial Sequence
  ENSG00000101871_9 (sequence is synthesized)
tcaccaaccttattaagaggaacacagaactggagacccttttggctaaactcatccaaacctgtcaacatgttgaagtcaatgcatcacgtcaagaagccaaattgacagaggagtgtg

SEQ ID NO: 127169 - DNA, 120 bp, Artificial Sequence
  ENSG00000101871_10 (sequence is synthesized)
atcttctcattgagatcattcagcaaagacgacagattattggaaccaagatcaaagaagggaaggtgatgaggcttcgcaaactggctcagcagattgcaaactgcaaacagtgcattg

SEQ ID NO: 127170 - DNA, 120 bp, Artificial Sequence
  ENSG00000101871_11 (sequence is synthesized)
agcggtcagcatcactcatctcccaagcggaacactctctgaaggagaatgatcatgcgcgtttcctacagactgctaagaatatcaccgagagagtctccatggcaactgcatcctccc

SEQ ID NO: 127171 - DNA, 120 bp, Artificial Sequence
  ENSG00000101871_12 (sequence is synthesized)
aggttctaattcctgaaatcaacctcaatgacacatttgacacctttgccttagatttttcccgagagaagaaactgctagaatgtctggattaccttacagctcccaaccctcccacaa

SEQ ID NO: 127172 - DNA, 120 bp, Artificial Sequence
  ENSG00000101871_13 (sequence is synthesized)
ttagagaagagctctgcacagcttcatatgacaccatcactgtgcattggacctccgatgatgagttcagcgtggtctcctacgagctccagtacaccatattcaccggacaagccaacg

SEQ ID NO: 127173 - DNA, 120 bp, Artificial Sequence
  ENSG00000101871_14 (sequence is synthesized)
tcgttagtctgtgtaattcggctgatagctggatgatagtacccaacatcaagcagaaccactacacggtgcacggtctgcagagcggcaccaagtacatcttcatggtcaaggccatca

SEQ ID NO: 127174 - DNA, 120 bp, Artificial Sequence
  ENSG00000101871_15 (sequence is synthesized)
accaggcgggcagccgcagcagtgagcctgggaagttgaagacaaacagccaaccatttaaactggatcccaaatctgctcatcgaaaactgaaggtgtcccatgataacttgacagtag

SEQ ID NO: 127175 - DNA, 120 bp, Artificial Sequence
  ENSG00000101871_16 (sequence is synthesized)
aacgtgatgagtcatcatccaagaagagtcacacacctgaacgcttcaccagccaggggagctatggagtagctggaaatgtgtttattgatagtggccggcattattgggaagtggtca

SEQ ID NO: 127176 - DNA, 120 bp, Artificial Sequence
  ENSG00000101871_17 (sequence is synthesized)
taagtggaagcacatggtatgccattggtcttgcttacaaatcagccccgaagcatgaatggattgggaagaactctgcttcctgggcgctctgccgctgcaacaataactgggtggtga

SEQ ID NO: 127177 - DNA, 120 bp, Artificial Sequence
  ENSG00000101871_18 (sequence is synthesized)
gacacaatagcaaggaaatccccattgagcctgccccccacctccggcgcgtgggcatcctgctggactatgataacggctctatcgccttttatgatgctttgaactccatccacctct

SEQ ID NO: 127178 - DNA, 120 bp, Artificial Sequence
  ENSG00000101871_19 (sequence is synthesized)
acaccttcgacgtcgcatttgcgcagcctgtttgccccaccttcaccgtgtggaacaagtgtctgacgattatcactgggctccctatcccagaccatttggactgcacagagcagctgc

SEQ ID NO: 127179 - DNA, 120 bp, Artificial Sequence
  ENSG00000101871_20 (sequence is synthesized)
cgtgagcgtctggccacatggagctgctttctggggaacagtaaggttcaggccactatttaggggactgagaaagcacaggcttcatgagtgtaatgaaatctcaccagaagtgtcccg

SEQ ID NO: 127180 - DNA, 120 bp, Artificial Sequence
  ENSG00000101871_21 (sequence is synthesized)
aaatcggctcagatagggctcaaaacaagagattcctctccttttactgtgtcttgtattaagtacgggctttaataatttctttaatttttttgtatttagaggaaaatctatagatta

SEQ ID NO: 127181 - DNA, 120 bp, Artificial Sequence
  ENSG00000101871_22 (sequence is synthesized)
tttataagagaaacataatcaggattacaacttttaggaattacttggttttgcacattaagaggcccataagtttatcagctatttacaaccttcatttcatcacaatctgtgggctta

SEQ ID NO: 127182 - DNA, 120 bp, Artificial Sequence
  ENSG00000101871_23 (sequence is synthesized)
caaaaaaacaaaaacttttgtagttttgtatgttactcatcttcttacctgatatcccatgatgatcccatggtaggtcttctcacctcgatggtgcataacaggatgtgtttgaaccta

SEQ ID NO: 127183 - DNA, 120 bp, Artificial Sequence
  ENSG00000101871_24 (sequence is synthesized)
gtaggggaggaaacaggctttcttactctggtttaatttgaagtgttttaattgtgatgtcaaaaagttgtatcagatcaactaaaatggagagcaagacagagaatgaaaagagttgat

SEQ ID NO: 127184 - DNA, 120 bp, Artificial Sequence
  ENSG00000101871_25 (sequence is synthesized)
tttggacctcggaccttgccgtggctaaatctttaccttctcatagctgatgggataatgttggaaagaaaggttctgaatcctttggccacattttgccctgcttctctcagggttaag

SEQ ID NO: 127185 - DNA, 120 bp, Artificial Sequence
  ENSG00000101871_26 (sequence is synthesized)
ggattctgttttatagtatagaatctactttatccttccttttaatagttcctttagacctgtgaaatttcttcactacatttaatagttctcctatttcccgctcccccatatcaattt

SEQ ID NO: 127186 - DNA, 120 bp, Artificial Sequence
  ENSG00000101871_27 (sequence is synthesized)
tccttttgtctccggggctgagtaaataaacatgttctgtcacaaatagcagcaccactttggattgattttgctctccaggacatcagcacatggccctgatcagcactaccacatcca

SEQ ID NO: 127187 - DNA, 120 bp, Artificial Sequence
  ENSG00000101871_28 (sequence is synthesized)
aacataagtcactgaaaaacacttaatatttatgagttggtaatgacaagggacattgtataaagtactatttgctagattcatgcctcaaaagttattataaacagacctttattaaac

SEQ ID NO: 127188 - DNA, 120 bp, Artificial Sequence
  ENSG00000101871_29 (sequence is synthesized)
acatcttgaaagatgtagaagtccctctatagtctagtatagtttacaatagagttgtaagaccaaaaaaaaaaaaaaaaaattcaaactcgttattcaggaacctgcttataaaatgtc

SEQ ID NO: 127189 - DNA, 120 bp, Artificial Sequence
  ENSG00000101871_30 (sequence is synthesized)
agctgggattctttgcatgccaatctgatgcgttggaatggtccatgaattaaggctttcttgagcagttcttggcccagaactctggcattggttctagtttgatgaagggcatgacct

SEQ ID NO: 127190 - DNA, 120 bp, Artificial Sequence
  ENSG00000101871_31 (sequence is synthesized)
ctataaatggtttcaattgctaaaatatttacctgggatactgggtcagccattttgactgagcagactagtggatttagacattgtttttagttattttgtttttaaccaaatcaacca

SEQ ID NO: 127191 - DNA, 120 bp, Artificial Sequence
  ENSG00000101871_32 (sequence is synthesized)
actgcctccctgaaataagtcaatgaactcattgtttcagcatcacgtggccaaaggtcatgtgattgcaaatctggatttcaagggaggccaagccagcttcctgggtccttccatcct

SEQ ID NO: 127192 - DNA, 120 bp, Artificial Sequence
  ENSG00000101871_33 (sequence is synthesized)
cttccctagcagacactctcctttttcttaacagatagattctatatatttactatattatttatacccagatgaatattttgatagatacctaagacaatttcacatctaaaagatgga

SEQ ID NO: 127193 - DNA, 120 bp, Artificial Sequence
  ENSG00000101871_34 (sequence is synthesized)
cgcctcaatggaaaaaaaacaatctttctctggaaaccttataggtttttctttttattacaatataaaagcaatgtgtgtttgccttctctgagtaaactgaaagggttgtctcagtaa

SEQ ID NO: 127194 - DNA, 120 bp, Artificial Sequence
  ENSG00000101871_35 (sequence is synthesized)
tttttacatacattttgggtaactggataatggatattttaatgcactttgtacactaacaggttctaaataaaagggtctaaaactcagcttctgagtttttaaaatcacggtctccag

SEQ ID NO: 127195 - DNA, 120 bp, Artificial Sequence
  ENSG00000101871_36 (sequence is synthesized)
gtaccaataaatgctacagtttgccttatgatgttaacataaaacacttagtagaaggacaatatttccatgaaaataatgtttttcaatattaagaagttactactcaaattttcacag

SEQ ID NO: 127196 - DNA, 120 bp, Artificial Sequence
  ENSG00000101871_37 (sequence is synthesized)
taagccatttagggtatgtttggctatttttataaggacatgagagattatgtcataattttgttgtggaagtctcactcttggctaacttaaaagcattgtggatagtagcagttacta

SEQ ID NO: 127197 - DNA, 120 bp, Artificial Sequence
  ENSG00000101871_38 (sequence is synthesized)
gttccaggttgtcatatttacaggaaaatatgtatatggtgaaaggccaccgtgtttaattactataatgatgtagaaaagattcccgtgtgaattttttttttgaaagtctaaaaaatg

SEQ ID NO: 127198 - DNA, 120 bp, Artificial Sequence
  ENSG00000101871_39 (sequence is synthesized)
tatgctgtaaaaatttgctgcagtgtaattttgcattctctttaaactgattgaggtcacagtattttattatttggggtcctcaccacaggaaacactgcgatacaggggcaaaagaga

SEQ ID NO: 127199 - DNA, 120 bp, Artificial Sequence
  ENSG00000101871_40 (sequence is synthesized)
tggcagtgccaattaaattaatacaacaaaatcaatgcagcaccaaccaagactgccaggtctggtgtcatgggtatgcccagagcccaggagttcagaagggccctaagcctgatttaa

SEQ ID NO: 127200 - DNA, 120 bp, Artificial Sequence
  ENSG00000101871_41 (sequence is synthesized)
tgctctgctgttgatgtcttgaaattcttaacaatttttgaacaaggggcctgcgttttcacttcgcactgggccttgcaaattacatagcgagtgctcataaaagaactcagaaacgtg

SEQ ID NO: 127201 - DNA, 120 bp, Artificial Sequence
  ENSG00000101871_42 (sequence is synthesized)
gtacctctcttcctggtggatacaaataaagaaatctggatccaaagttgaaagttgctggcgatatcattcaagtaggactctaaatagtggattaagatgagggtgggcctgggtgaa

SEQ ID NO: 127202 - DNA, 120 bp, Artificial Sequence
  ENSG00000101871_43 (sequence is synthesized)
gattctttccagctttaaaagaaagtgacttcaaaaactgactgcaaatattgacgatggtttctgctggaggaaaagaaacagcttgaatacagacaggcttttttattacggtactga

SEQ ID NO: 127203 - DNA, 120 bp, Artificial Sequence
  ENSG00000101871_44 (sequence is synthesized)
tatattgaccttaaacttgctgaggaactgaactaacgtcctccagtgaccgtggaattccatctcagctccaggaacatgcagatacctgcaaagagacacgcatatatgctggcatac

SEQ ID NO: 127204 - DNA, 120 bp, Artificial Sequence
  ENSG00000101871_45 (sequence is synthesized)
atgtgcatttggtgttgggaagttgaccatctggtctatcttaataaaatggtaaaaagcacaccaagacaatgatgggggcaggaggatgtttttgaaaacagcgcttctcaaccagtg

SEQ ID NO: 127205 - DNA, 120 bp, Artificial Sequence
  ENSG00000101871_46 (sequence is synthesized)
ctcgattttgccccccaggagacatttggcaatgcaatggcaacttttggttgtcgcagccggggaagggaagctaccagcatctagtgcgtagaggtcatggacgccgttaaacatcct

SEQ ID NO: 127206 - DNA, 120 bp, Artificial Sequence
  ENSG00000101871_47 (sequence is synthesized)
acagtgcaagcgcagcccccgaccacgaagagttgtcttgctcaaatatcaacagtgctgcagtgtagaaacttgatcgttggttttcttttaatgcaaaactctcataaaaacctttca

SEQ ID NO: 127207 - DNA, 120 bp, Artificial Sequence
  ENSG00000101871_48 (sequence is synthesized)
cttttcctgtcattgattatatgcttgatacacccaaaaagaaaaggggaggggcaccaattcacctacactccagtggctccatcacctttaaaaatatttataaaatagttccaaaaa

SEQ ID NO: 127208 - DNA, 120 bp, Artificial Sequence
  ENSG00000101871_49 (sequence is synthesized)
tctgatatctgaaaagcaatccaagcctgtgtaaatgggaatcactgataagtatcatcatctgtatcagcttggcttggacatgaaaaattgattctctttatgtcactccttgcacct

SEQ ID NO: 127209 - DNA, 120 bp, Artificial Sequence
  ENSG00000101871_50 (sequence is synthesized)
ggacaaattcaatccccggtacttaagtcacactgccaagccctcggccctgactattgtcttgattgctgttcctttctggttcaaaataaaatcatttttgtggcaccaagaccctct

SEQ ID NO: 127210 - DNA, 120 bp, Artificial Sequence
  ENSG00000101871_51 (sequence is synthesized)
gtctctgcctgtctctgttgccttttcatcattttgtgtttttgcagttatgatgttgacaaatatttattcaacatctaccatttattcatactactttatgacatataattcattttc

SEQ ID NO: 127211 - DNA, 120 bp, Artificial Sequence
  ENSG00000101871_52 (sequence is synthesized)
ttttactgtctctcatccactatttgcctttccctattcaaaatacaattcttttgcaacactcaaaatattctccagggaatttttaaaacacaataaaagaaagcctatatagaagtg

SEQ ID NO: 127212 - DNA, 120 bp, Artificial Sequence
  ENSG00000101871_53 (sequence is synthesized)
gaccgattttcctgttgtgtttcactgttgacgcactcacagacacacaggaccgctccagcactgcctgccacccaccgtctggtctcggtggcctgtctatcatttcgtgggtcccca

SEQ ID NO: 127213 - DNA, 120 bp, Artificial Sequence
  ENSG00000101871_54 (sequence is synthesized)
ccctttcttctttatctcggtgtctgaggagttttgtctgcggcttgtcttgctacatttcttggttccctgaccaggaagcgaggtgattaacagacggttgaggcagctccttaggtg

SEQ ID NO: 127214 - DNA, 120 bp, Artificial Sequence
  ENSG00000101871_55 (sequence is synthesized)
gctttagcctgccctgtggaacatccctgcgggggactccaaccagccggagcgacgcggatcctgagagcgctcccgggtaggcatttgcccaggtgggacgcctcgccagagccgtgt

SEQ ID NO: 127215 - DNA, 120 bp, Artificial Sequence
  ENSG00000101871_56 (sequence is synthesized)
gattctatgcagggtcactatgaaagaggcagcctgccccagtttgggtattctgaagtgttagtatgtagtggagctggtggtgtgaagctgattcattttgtttcaaagccccaaatg

SEQ ID NO: 127216 - DNA, 120 bp, Artificial Sequence
  ENSG00000101871_57 (sequence is synthesized)
gcatgctgccgaacacaggcacaagcacagcagcgtctccttagaaataatgactccaaggcaaacagccctcattgcaaaatgtagaagactgccatctgcttgtctccactgtggttt

SEQ ID NO: 127217 - DNA, 120 bp, Artificial Sequence
  ENSG00000101871_58 (sequence is synthesized)
ggagcacctgcaaagttatttgggcctggatatacagggcagggagaattttggaggcaaaaatgcaatctgccacatctacgttagtgaagtcagtttttcgtacatgactaccaagac

SEQ ID NO: 127218 - DNA, 120 bp, Artificial Sequence
  ENSG00000101871_59 (sequence is synthesized)
aaagcacttcacttaccaactctattcaaataaatggaaattattcaacctaaaattatgcaaacattgctccccttgtgccaaagaactgcaccatgtctgattggctttgcaggtctg

SEQ ID NO: 127219 - DNA, 120 bp, Artificial Sequence
  ENSG00000101871_60 (sequence is synthesized)
gagagaagcagcagtattaccctaggaataggagaaagtgggtcagcaactccctacaggcaagactgatggggagaagatgcatttcaagacgcgaaagaaaactgactctagatgtag

SEQ ID NO: 127220 - DNA, 120 bp, Artificial Sequence
  ENSG00000101871_61 (sequence is synthesized)
acttcaaaggaagacaaggaaggaaagaacacacaatatttattgacttgtctttcttgaacaaaaaagtgatagcactcacttgtactacattagtaaaaacagctggctaaatattga

SEQ ID NO: 127221 - DNA, 120 bp, Artificial Sequence
  ENSG00000101871_62 (sequence is synthesized)
tgaaaattaatgacctctagcaaaccacatggatgttaagggaaagaagccagaaacaaatatatagagagaaacaaatatatagagagatacatagagagagaaacaaatatatatata

SEQ ID NO: 127222 - DNA, 120 bp, Artificial Sequence
  ENSG00000101871_63 (sequence is synthesized)
tagtattaatccacatataggttcataacttaaagatcaaaataaactattttgcttaaagaaacattcataggtgttaaaactataaaccctgggcaacctggtgaaaccccatctcta

SEQ ID NO: 127223 - DNA, 120 bp, Artificial Sequence
  ENSG00000101871_64 (sequence is synthesized)
agcaaaacttagagagtaacctcaccaaccttattaagaggaacacagaactggagacccttttggctaaactcatccaaacctgtcaacatgttgaactggaatgttctgtactgtttc

SEQ ID NO: 127224 - DNA, 120 bp, Artificial Sequence
  ENSG00000101871_65 (sequence is synthesized)
ccagagttgcccaatggggttaatctccagttgcccaaggtggtcttggtaagtcacactttactggcttcgtagttgtccctgtttcacttcctacccagtactggtgttttctggcaa

SEQ ID NO: 127225 - DNA, 120 bp, Artificial Sequence
  ENSG00000101871_66 (sequence is synthesized)
gaggatacaactgccaaccatgtctaaaatgaaatgatagcacaagtctctttttctagtcatggctatagctcacatgttcaatttctctaaactcaagtctctttcattgtgtttgaa

SEQ ID NO: 127226 - DNA, 120 bp, Artificial Sequence
  ENSG00000101871_67 (sequence is synthesized)
taaacgtacatgtgaatcactggacatcaaagatatttaaaaatcaatctactcacttctcctgatattctagaatgacaacaacagggcaagatatttcatagatatcacttgtgggtg

SEQ ID NO: 127227 - DNA, 120 bp, Artificial Sequence
  ENSG00000101871_68 (sequence is synthesized)
cgtcatgaaggcagaacaaagcttaacattttccagttgtacctcccagttaagttctatcagtgacgtaatcacgtgtatttcactcactgtacggaataccaaagagcagaaacccaa

SEQ ID NO: 127228 - DNA, 120 bp, Artificial Sequence
  ENSG00000101871_69 (sequence is synthesized)
tgttcattttccagaactttgcagaagcagatggcttctatacctgagtaactgaaacccaaaaaggggtccaactcagtatttttccagtacatcacttttcaggaatcatggcacaac

SEQ ID NO: 127229 - DNA, 120 bp, Artificial Sequence
  ENSG00000101871_70 (sequence is synthesized)
aactaaaaggaatgtcacttaatgagaaataacatgtaagattgaaagtgattaaggtaaagtcatagagtagaggtttcctctttccattagaaataacttcccttcccttaaacacgt

SEQ ID NO: 127230 - DNA, 120 bp, Artificial Sequence
  ENSG00000101871_71 (sequence is synthesized)
cacctccatctttcctggcactccattaatggtcatctgctaaaagttattgtttaccctctgaccacaacatcaaatgccaaacacatttgttgaaaattatttaatagaaatcgctac

SEQ ID NO: 127231 - DNA, 120 bp, Artificial Sequence
  ENSG00000101871_72 (sequence is synthesized)
ttttcagaaactttatgaaaaagacgtgatagagacaaacacccatggcaggttaagtagatttcttttcattcagtgtgcccagcccaaacggaagggtgtgaagcatttgttttataa

SEQ ID NO: 127232 - DNA, 120 bp, Artificial Sequence
  ENSG00000101871_73 (sequence is synthesized)
agtgtgtaattaataagagaaaggaagggaggagtttattgtttttcaatgaattatgagcaaccccttccattctgcttcttcattttggaactgcttctaacaaagttaccattaaac

SEQ ID NO: 127233 - DNA, 120 bp, Artificial Sequence
  ENSG00000101882_0 (sequence is synthesized)
gcagaagtacccagaactgtgtccaaggtttcctcagatttgggctgttccgcagcggcaggtcccgggaaccaaggcaacagacatcttcctaggctcgcgagagcgcccccttgtccc

SEQ ID NO: 127234 - DNA, 120 bp, Artificial Sequence
  ENSG00000101882_1 (sequence is synthesized)
acggctgctggggccccccagtagccatggctccggtgtccggctcacgcagcccggatagggaggcctcgggctcggggggaagacgtcgcagttcgtcgaagagtccgaagcccagca

SEQ ID NO: 127235 - DNA, 120 bp, Artificial Sequence
  ENSG00000101882_2 (sequence is synthesized)
aatctgcccgctccccgcggggccgccgctctcgctcgcactcttgctctcggtccggggaccggaatggactcacccatcagctgggtggcctcagccaaggctcccgaaaccagtcct

SEQ ID NO: 127236 - DNA, 120 bp, Artificial Sequence
  ENSG00000101882_3 (sequence is synthesized)
accgctcacgctcgcggtcgcgttctagagagcggccctctgcgccccggggcatccccttcgcttctgcctcctcgtcagtctattacggcagctactcgcgcccctacgggagcgaca

SEQ ID NO: 127237 - DNA, 120 bp, Artificial Sequence
  ENSG00000101882_4 (sequence is synthesized)
agccttggcctagcctcctcgacaaggagagggaggagagcctgcggcagaagagattaagtgagagagagagaattggagaattgggagctcctgaagtatggggactttctccaaaga

SEQ ID NO: 127238 - DNA, 120 bp, Artificial Sequence
  ENSG00000101882_5 (sequence is synthesized)
atcctgaaccagattctgatgaacatacaccagtggaggatgaagagccaaagaaaagcactacttcagcttctacttcagaagaagaaaaaaagaagaagtctagccgttcaaaagaaa

SEQ ID NO: 127239 - DNA, 120 bp, Artificial Sequence
  ENSG00000101882_6 (sequence is synthesized)
ggtccaagaaaaggagaaagaaaaaatcatcgaaaagaaaacataagaagtattctgaagatagcgacagtgactctgattctgaaacagactccagtgatgaagataacaaaaggagag

SEQ ID NO: 127240 - DNA, 120 bp, Artificial Sequence
  ENSG00000101882_7 (sequence is synthesized)
caaagaaagccaagaaaaaggaaaagaagaagaaacacagatcgaagaaatataagaaaaagaggtctaagaagagcagaaaagagtccagtgattcaagctctaaagaatcccaagaag

SEQ ID NO: 127241 - DNA, 120 bp, Artificial Sequence
  ENSG00000101882_8 (sequence is synthesized)
agtttctggaaaatccctggaaggatcgaacaaaggctgaagaaccatcagatttaattggcccagaggctccaaaaacacttacctctcaagatgataaacctttgaactatggccatg

SEQ ID NO: 127242 - DNA, 120 bp, Artificial Sequence
  ENSG00000101882_9 (sequence is synthesized)
ctctgttacctggtgaaggtgcagctatggctgaatatgtaaaagctggaaaacgtatcccacgaagaggtgaaattggcttgacaagtgaagaaattgcatcatttgaatgctcaggtt

SEQ ID NO: 127243 - DNA, 120 bp, Artificial Sequence
  ENSG00000101882_10 (sequence is synthesized)
atgtaatgagtggtagcaggcatcgccgaatggaggctgtgcgactgcgaaaagagaaccagatctacagtgctgatgagaagagagcccttgcatcctttaaccaagaagagagacgaa

SEQ ID NO: 127244 - DNA, 120 bp, Artificial Sequence
  ENSG00000101882_11 (sequence is synthesized)
agagagagaacaagattctggccagttttcgagaaatggtttacagaaagaccaaagggaaggatgacaaataaagattttctgattgtccagaagacatttttaacaacaaaaaagaaa

SEQ ID NO: 127245 - DNA, 120 bp, Artificial Sequence
  ENSG00000101882_12 (sequence is synthesized)
gtctgggttccacacatacatagaaaaagattattatgttctgagaaagctttacagtgctactgtgccttctatttaattctttcagtccttcaataaaaagctgcttattgatataac

SEQ ID NO: 127246 - DNA, 120 bp, Artificial Sequence
  ENSG00000101882_13 (sequence is synthesized)
taaaaagctgcttattgatataactttagcaagttctttgggttattttggattgaccatagtaactttctggtttaaaaatccaaattatgggctgggcacggttgctcacgcctgtaa

SEQ ID NO: 127247 - DNA, 120 bp, Artificial Sequence
  ENSG00000101882_14 (sequence is synthesized)
tgaaactctgtctcaaaaaaaaaaaatccaaattatgaataaaatgctactgtattggaggaggtggcttgaacaaaaagtgttagtgagatgagaaacttcaatctcacaccatgagac

SEQ ID NO: 127248 - DNA, 120 bp, Artificial Sequence
  ENSG00000101882_15 (sequence is synthesized)
agatgagaaacttcaatctcacaccatgagacagtgctactattagctctatgtgatgcctgccccaccccgacctctaccccagctgaacttttgggaaattatcactcctctgtgttg

SEQ ID NO: 127249 - DNA, 120 bp, Artificial Sequence
  ENSG00000101882_16 (sequence is synthesized)
aatgtgttataaatggacttgataggaacatataggaggccacttttgttaacaaaatgaaggcattgctgcgaaaagcaaatctggaatttgaaaactgacttgtgtactataatatat

SEQ ID NO: 127250 - DNA, 120 bp, Artificial Sequence
  ENSG00000101882_17 (sequence is synthesized)
gatctaccctggaaataatgggttttgatttaagtccctacctccactctaaaaccaacaaacaaaccaaaaagcaaactaacccacagatttgttgaattgaaaatgtgaacattagat

SEQ ID NO: 127251 - DNA, 88 bp, Artificial Sequence
  ENSG00000101882_18 (sequence is synthesized)
aacccacagatttgttgaattgaaaatgtgaacattagatattttaaattgttttttttgagatggaatcggtgatctcggctcacca

SEQ ID NO: 127252 - DNA, 120 bp, Artificial Sequence
  ENSG00000101882_19 (sequence is synthesized)
aaattcttaataagttacttaaaaatagttatttgaaatataaagtcttaagaagtctactcttatccccatgtaaatactttatttcaatctgagctgatatgagcttgaggataggat

SEQ ID NO: 127253 - DNA, 120 bp, Artificial Sequence
  ENSG00000101882_20 (sequence is synthesized)
aacatccaaaagaataggagtcaactatggtcaagagttttgataaggaaaaatataatgagtcagtattttagcttaattgtttcataagagaaactaaaatgatattaaatattttta

SEQ ID NO: 127254 - DNA, 120 bp, Artificial Sequence
  ENSG00000101882_21 (sequence is synthesized)
actgtctttcatatactaagtagatttcattttaaacacttaaacctttctgtttgtttttaagttggggagaaatggaaaattgtgggactatgatatcgtggtcttgttcctttgttt

SEQ ID NO: 127255 - DNA, 120 bp, Artificial Sequence
  ENSG00000101882_22 (sequence is synthesized)
atttcgttcaattttaattaggtcagaagagtgaatgggggagggaacccaggaagttttggctgttttcattaaggttggttttctgttttttgttttttgagatagagtctcactctg

SEQ ID NO: 127256 - DNA, 120 bp, Artificial Sequence
  ENSG00000101882_23 (sequence is synthesized)
ggtgtgagcaaccgtgcctggccgtttttgttaaggttatttgatctgcattattattacatgcctatgataaatttaaattacctgagtgataaggacattctgattatactattgtaa

SEQ ID NO: 127257 - DNA, 120 bp, Artificial Sequence
  ENSG00000101882_24 (sequence is synthesized)
aatgcccgcttgccttatatttttaagtggttgtttttcaaaagtgtttaaataaggcagtcatatttcaaagtatagagcaaaagtttttttattattatttttgagacagggtctccc

SEQ ID NO: 127258 - DNA, 90 bp, Artificial Sequence
  ENSG00000101882_25 (sequence is synthesized)
agttagtagagacaaggtttcaccttattgcccaggctggtctcaaactccagacctcaaacaatccgcccgcctcggcctcccaaagtg

SEQ ID NO: 127259 - DNA, 120 bp, Artificial Sequence
  ENSG00000101882_26 (sequence is synthesized)
ataggcgtgagccaccacacccggcccaaagttttataattaaacagtattaacagtcttaaatactattaaatatatgttccaggaaatgtctacttttaacccgcaactactgaaaat

SEQ ID NO: 127260 - DNA, 120 bp, Artificial Sequence
  ENSG00000101882_27 (sequence is synthesized)
aagagtcagcatgtagcagcattaatgacccctgaatttgaaatgatttctgtttatttatacctaattgtagttgctgcctagcctaataaatctgtagttttcaaaagttaaaagaaa

SEQ ID NO: 127261 - DNA, 120 bp, Artificial Sequence
  ENSG00000101882_28 (sequence is synthesized)
gaaactagttcccaaagttttgagtctcaatccatctacttccctgaataataaaacctgaattttgtaatacccacttaaaaattttattctcagctgggcgtggtggctcacacctat

SEQ ID NO: 127262 - DNA, 120 bp, Artificial Sequence
  ENSG00000101882_29 (sequence is synthesized)
agactccgtctctaaataaacaaacaaataaaaatgtattctctaaggacattttttttttggttactggttcctagagatgaaatgattatcttattttcagtaggcaaggtagtttaa

SEQ ID NO: 127263 - DNA, 120 bp, Artificial Sequence
  ENSG00000101882_30 (sequence is synthesized)
atgcagaaattctgcgatatatgaatattgtgacatcaagaacagcttcattggcatattctttgggaaagaggcaagaagaataaaagggctaaaagtattttattttcagcttatgag

SEQ ID NO: 127264 - DNA, 120 bp, Artificial Sequence
  ENSG00000101882_31 (sequence is synthesized)
tgttgttactgcttcaaattgtgtttagtcacctgagccataaatcagttgtagtagggctattgtattttaaatatattttttgttctccaaggagacttatctagtttgccacctcct

SEQ ID NO: 127265 - DNA, 120 bp, Artificial Sequence
  ENSG00000101882_32 (sequence is synthesized)
tgcctattgctctgatgtggttttccctccttttttatttattgcacaaatatctaacagttaaaaaagaaaaatttcagtaccatatcaattgtctttcatattttgtgttcctccttt

SEQ ID NO: 127266 - DNA, 120 bp, Artificial Sequence
  ENSG00000101882_33 (sequence is synthesized)
ccagtgcttttctatgtaagtaaatattctgatgtacttgtaagtaatcactcagagcataatgtaattttgtctttggtgtcttaaaattttgcagccaggcaagagaggttcacaggg

SEQ ID NO: 127267 - DNA, 120 bp, Artificial Sequence
  ENSG00000101882_34 (sequence is synthesized)
aaggtaggaacaagtgattattcagtgtgaggatgggaagaagatcaaagataagtaagggcaatgattgtatccttcccgtgtcattgcccctagtccccaagccaccctcctgcaatc

SEQ ID NO: 127268 - DNA, 120 bp, Artificial Sequence
  ENSG00000101882_35 (sequence is synthesized)
atgagtatagtggtgtattgtggaaggcagcatgcccagttttccagtttcaaaatatattatttagcagtgaggcttaactcccagtaaatgaaggggtctgtgagtaggggaaccctt

SEQ ID NO: 127269 - DNA, 120 bp, Artificial Sequence
  ENSG00000101882_36 (sequence is synthesized)
cagactggttatattatgagctgtagaactgttgccattttgttgttcccagttgtgcccataaagagatgtgtctgagctggagacttaggctcagatggggaacaaacagccaagtac

SEQ ID NO: 127270 - DNA, 120 bp, Artificial Sequence
  ENSG00000101882_37 (sequence is synthesized)
caaccttagtttggtccaataggtgaattttagcaactctctaaactcagctctatacctgtaagactcagaagtgatacatatagtgatagaaaaaaatactttagaaaatagaaaaca

SEQ ID NO: 127271 - DNA, 120 bp, Artificial Sequence
  ENSG00000101882_38 (sequence is synthesized)
acttactggttactctgctaatgtgatggaggttgcagaatggaaaatgaatgaatgcaaaaaaatacagctggattgtgtgccacaagtttattactcaataaatattctgtggtttga

SEQ ID NO: 127272 - DNA, 120 bp, Artificial Sequence
  ENSG00000101882_39 (sequence is synthesized)
ccacccgcctcagtcttccaatgtgctgggattacaggggtgaaacactacacccagcctcctttagtgataatttttatagcaaaagatgatttggttaaataagttagaatacttttt

SEQ ID NO: 127273 - DNA, 86 bp, Artificial Sequence
  ENSG00000101882_40 (sequence is synthesized)
agcaaaagatgatttggttaaataagttagaatactttttaaaaaaattcttaagaggcagtgctaatcatagctcattgcagcct

SEQ ID NO: 127274 - DNA, 120 bp, Artificial Sequence
  ENSG00000101882_41 (sequence is synthesized)
tgaatagcttagactacagatgtgtgccatcacacccagctacttttttttttttttaatagagacggggtcttgctctgtttcccaggttcagttagaagcagatttttttaagtaaaa

SEQ ID NO: 127275 - DNA, 120 bp, Artificial Sequence
  ENSG00000101882_42 (sequence is synthesized)
ttgtcacctttctttgccttgaaaaattaagatgtatagtcaccagttcaaaatttaaaaagaaaagaaaaattaagatgccctctaacataggaagattaagtgaatttgtatcaaatt

SEQ ID NO: 127276 - DNA, 120 bp, Artificial Sequence
  ENSG00000101882_43 (sequence is synthesized)
aatataccagtatggttttgttaatattcctatatccaatactatctgcagacttaatgctttttctttttgcttatttcttttctctttgatgctactcataagtttcttcttccctct

SEQ ID NO: 127277 - DNA, 120 bp, Artificial Sequence
  ENSG00000101882_44 (sequence is synthesized)
ctgtttctgtgccaactttaggttgagttgagacaatgtgcttgacaggtaaacctgtaatttgtgattggataataaagcattattatctgaaacttgttcttacagatacctttagaa

SEQ ID NO: 127278 - DNA, 120 bp, Artificial Sequence
  ENSG00000101882_45 (sequence is synthesized)
ggcaaataacaagactatttaaaagaaaaaaaaaagaaaacacttgaagaacctgaatgtattgaattagagttggaaggaaccctaaaaatagttttctttcttctttttttttttttt

SEQ ID NO: 127279 - DNA, 120 bp, Artificial Sequence
  ENSG00000101882_46 (sequence is synthesized)
gcgtgagccactgcacccagccaaaataattttctagataatatttaaattactccaagtatgatcttcagaggaaaagattatatgatgtggaaactccttttctaaactattgtagaa

SEQ ID NO: 127280 - DNA, 120 bp, Artificial Sequence
  ENSG00000101882_47 (sequence is synthesized)
ttgtagaatttgaataatactcattttcagaattctctgcaacagaacaacatctctttagactgtagtttgttaggtttttgctctgaggagacagaacagttgctgctttaccatttg

SEQ ID NO: 127281 - DNA, 120 bp, Artificial Sequence
  ENSG00000101882_48 (sequence is synthesized)
tcttttacgtgcttaaaataaaattataaagtctttcttcagccttcttatacccagtttctttaatctttcctatggttcctgtttctctactttttccctgtggtttcttgtgaaaat

SEQ ID NO: 127282 - DNA, 120 bp, Artificial Sequence
  ENSG00000101882_49 (sequence is synthesized)
aagttattttattattacaaagatggtagacccttgaactgcacgtttatgaaagtagttcagtgcttgctttgttgttgttttggtttttttgattcccaagttctgccttaggatctc

SEQ ID NO: 127283 - DNA, 120 bp, Artificial Sequence
  ENSG00000101882_50 (sequence is synthesized)
caatgcttgcttttaatggttcttggacaatcgatgctgttactgaaaaatttggagttcatatctttacactccatggtccatatctcatcactttcctaattcttataaccattttat

SEQ ID NO: 127284 - DNA, 120 bp, Artificial Sequence
  ENSG00000101883_0 (sequence is synthesized)
actccagctgcagacgccacggagtttgtgcaggggcgcagcgctccagccatggcgcgttcgctcgtccacgacaccgtgttctactgcctgagtgtataccaggtaaaaataagcccc

SEQ ID NO: 127285 - DNA, 120 bp, Artificial Sequence
  ENSG00000101883_1 (sequence is synthesized)
acacctcagctgggggcagcatcaagcgcagaaggccatgttggccaaggagctccaggcctcatgggtaatatgaaccctgagggcggtgtgaaccacgagaacggcatgaaccgcgat

SEQ ID NO: 127286 - DNA, 120 bp, Artificial Sequence
  ENSG00000101883_2 (sequence is synthesized)
ggcggcatgatccccgagggcggcggtggaaaccaggagcctcggcagcagccgcagcccccgccggaggagccggcccaggcggccatggagggtccgcagcccgagaacatgcagcca

SEQ ID NO: 127287 - DNA, 120 bp, Artificial Sequence
  ENSG00000101883_3 (sequence is synthesized)
ttgcaggtggaggagctggaaagtgttttccgacacactcaataccctgatgtgcccacaagaagggaacttgccgaaaacttaggtgtgactgaagacaaagtgcgggtttggtttaag

SEQ ID NO: 127288 - DNA, 120 bp, Artificial Sequence
  ENSG00000101883_4 (sequence is synthesized)
aataaaagggccagatgtaggcgacatcagagagaattaatgctcgccaatgaactacgtgctgacccagacgactgtgtctacatcgtcgtggactagccctagaatgccatccttctt

SEQ ID NO: 127289 - DNA, 120 bp, Artificial Sequence
  ENSG00000101883_5 (sequence is synthesized)
caggagctagtttggagatgggtttttctggtgccactgacacctgggctgcccatgccgctcaggctacccttatctcctctgcacttatgttatcaataaagaggcaaattctcaata

SEQ ID NO: 127290 - DNA, 120 bp, Artificial Sequence
  ENSG00000101888_0 (sequence is synthesized)
gtggaaaattttgtgcgtttggcgggtttcgctctcttcataagtattgatcattccgcagccctgcggaccggacacgtgaggaggtagtgacgccgacactgccagaacacactgcta

SEQ ID NO: 127291 - DNA, 120 bp, Artificial Sequence
  ENSG00000101888_1 (sequence is synthesized)
caaggtcccagatggccacgtctctggattttaaaacttatgtagatcaggcatgtagagctgctgaggagtttgtcaatatttactatgagacaatggataaaagaagacgggcactaa

SEQ ID NO: 127292 - DNA, 120 bp, Artificial Sequence
  ENSG00000101888_2 (sequence is synthesized)
ccaggctgtatctggacaaggccaccttaatatggaatggaaatgctgtttcagggctggatgccctaaataatttttttgacacattgccttctagtgagttccaggtcaatatgttag

SEQ ID NO: 127293 - DNA, 120 bp, Artificial Sequence
  ENSG00000101888_3 (sequence is synthesized)
attgccaaccagttcatgagcaagcaactcagtcccaaactacagttcttgttgtgaccagtggaactgtgaagtttgatggaaacaaacaacatttcttcaaccagaacttcctgctga

SEQ ID NO: 127294 - DNA, 120 bp, Artificial Sequence
  ENSG00000101888_4 (sequence is synthesized)
ctgctcagtccactcccaacaatactgtgtggaagattgcaagtgattgcttccgttttcaagattggtctagtagttaaaggggcaaaagtccattctcatttggtccattagttccag

SEQ ID NO: 127295 - DNA, 120 bp, Artificial Sequence
  ENSG00000101888_5 (sequence is synthesized)
caattgaaatttatgtgaattattttgattgtagaagcactataatatgtgctgaaactaaatttctttaatattttctattcctgtcagcaccttttctagcagctgccagtttggagc

SEQ ID NO: 127296 - DNA, 120 bp, Artificial Sequence
  ENSG00000101888_6 (sequence is synthesized)
attgccctctaagagctttaaaactatttttttacatgccttatatacattccactaatgacattcttataataatattaaacacatgatcttggtactaacatactcactgtgaaccca

SEQ ID NO: 127297 - DNA, 120 bp, Artificial Sequence
  ENSG00000101888_7 (sequence is synthesized)
gcctattgcaaaaataaaatctttttataatattatctatgggatgtcagcacaatataacactctgggaagaagtggagttttttggttattaggttaattttctagtaaaacacgttg

SEQ ID NO: 127298 - DNA, 120 bp, Artificial Sequence
  ENSG00000101888_8 (sequence is synthesized)
cctgttttcagttaacactggtaatgccattttaatatatggctttttcaaatcagttcagtgaaaatagtacagatttaggtttacataactactctgacatactggaattgcatatag

SEQ ID NO: 127299 - DNA, 120 bp, Artificial Sequence
  ENSG00000101888_9 (sequence is synthesized)
agatgttcagtggtcgtttttcattttaagtaatttttgttttggcatttttttgtgtgaagtaaattaatcaactagagaggtgcaaaacgttctcagttgatatctgagtattgggtg

SEQ ID NO: 127300 - DNA, 120 bp, Artificial Sequence
  ENSG00000101888_10 (sequence is synthesized)
ttggcagctccaggtctatacatttaggtaatgaatggtagtagaactaatagctttaacaggagaatagggaatgagaaatagaaatccaaggctgaagccaaaagtaaggagggtggc

SEQ ID NO: 127301 - DNA, 120 bp, Artificial Sequence
  ENSG00000101888_11 (sequence is synthesized)
caaatggtaaactattggtacttgttttctacctcctaaaaatgtagcttatttttaggatttaaatcactaagtaaataagtatccttgccaagtgatcatgagtgtcatttttgttct

SEQ ID NO: 127302 - DNA, 120 bp, Artificial Sequence
  ENSG00000101888_12 (sequence is synthesized)
aagactaatatttttagatctttttacttcacctcatacttatcaccaatgtatatctccatttattcaataacttactggggtaaaataacagcaataaacctaaccttttaacagggt

SEQ ID NO: 127303 - DNA, 120 bp, Artificial Sequence
  ENSG00000101888_13 (sequence is synthesized)
ctaacatgagagttggagtcaaagccattgttatcttttggtgacacccttaaattttaagtcttccagtcttccatgtgaactttaggcccaaagtttcttatgtatcacacatccccc

SEQ ID NO: 127304 - DNA, 120 bp, Artificial Sequence
  ENSG00000101888_14 (sequence is synthesized)
aaataagtgattttttcccagtgctttgtactgtcaactgcattatctttaattatttaaaggtagaattatttaattttgtgatttgttcttccatatgacattgagcaaatagatctg

SEQ ID NO: 127305 - DNA, 120 bp, Artificial Sequence
  ENSG00000101888_15 (sequence is synthesized)
tttcaaaatatgttcccgctatgtggataactcttctttttaaaaagaaaatagagaatagcaaatcttcatgataatcctcaaaagaacaaaatgcttaactttatctcttaatttcta

SEQ ID NO: 127306 - DNA, 120 bp, Artificial Sequence
  ENSG00000101888_16 (sequence is synthesized)
aaggtaaataacctaggttcagcttttgcttaaacattaaatatcttttccattttttaatgtttgtaagctagatatgccagctttgtttctacattgcaaccaaaaactgtttctttt

SEQ ID NO: 127307 - DNA, 120 bp, Artificial Sequence
  ENSG00000101888_17 (sequence is synthesized)
cacttaattataaaaccagtaattcatttactcttgcccaaaactatacactgtatttctgttatagtaacaaaatagagttatgtagaattgtatggaactcaaatttaaaccatgctt

SEQ ID NO: 127308 - DNA, 120 bp, Artificial Sequence
  ENSG00000101888_18 (sequence is synthesized)
tcttgtagtactgattgaaacttacacgttttattctactcatagtgagcttattcttattttggattgattttccaaaaccacagcttcagcagcaacaatcagaatgtccaaatgctg

SEQ ID NO: 127309 - DNA, 120 bp, Artificial Sequence
  ENSG00000101888_19 (sequence is synthesized)
tcctttcccttacagagaagaacaatggtaactaaaagctgcatataactagcaataactacattgaacggtgtgcattgttcatgattgttgtgttttaagacttgtatataaactgct

SEQ ID NO: 127310 - DNA, 120 bp, Artificial Sequence
  ENSG00000101888_20 (sequence is synthesized)
ttttccaaactctgtataacttttaaatggctggaactactcgtataaggactagactgtatttttgacatgctcctatttttgtaacttgaaaaaataaaattttgccttgtgacagat

SEQ ID NO: 127311 - DNA, 120 bp, Artificial Sequence
  ENSG00000101888_21 (sequence is synthesized)
agtcagaggttaacggaaaacggaagctggctggctgagaagaagcttccgttagtcctaccttgaagagaaaagagccagataaagagaaagattaaaagtatgagaaaatacagaagc

SEQ ID NO: 127312 - DNA, 120 bp, Artificial Sequence
  ENSG00000101888_22 (sequence is synthesized)
cactggtctcagggagacagagaaggataccaaagaagaagtaactattatgaggggccacacaccagccactcaagccctgcggaccggacacgtgaggaggtagtgacgccgacactg

SEQ ID NO: 127313 - DNA, 120 bp, Artificial Sequence
  ENSG00000101888_23 (sequence is synthesized)
gtgacgaatcacgtcccggctctctgcactgcggggcggggcccacgctttgctgcccgccctgccggccccacccccagcctggttagcagtcgctttctgatcccggaaaggaccctg

SEQ ID NO: 127314 - DNA, 120 bp, Artificial Sequence
  ENSG00000101888_24 (sequence is synthesized)
cccaggcttgtcgttagaaaagtaggggactttcctgttgagtatcatgtttacaaaagcaaagtggcttttaaattttaaactaagtatcaaacaagtagataaggtggatgggaggga

SEQ ID NO: 127315 - DNA, 120 bp, Artificial Sequence
  ENSG00000101890_0 (sequence is synthesized)
aatccaagtcttggtctgcggatgctgaagagtgattttcaaaacatttactaacgctttcaattatttaccccattaatggaatttgtcaacagactggagtccttgacaggattgtga

SEQ ID NO: 127316 - DNA, 120 bp, Artificial Sequence
  ENSG00000101890_1 (sequence is synthesized)
atgcatagaggatgcaaagaaatggacacactgaggtagctatgccagtggtctgcatgcgcaggcagtaaactgaagacatttgagcggtgaattacttggcatttggaaacaccaccg

SEQ ID NO: 127317 - DNA, 120 bp, Artificial Sequence
  ENSG00000101890_2 (sequence is synthesized)
tctgtgtcgggaaagcagaataactctccagtatctcgtcattagcttgctggaagcaggagggctatgttcctgggactcgggcgcttttctcgccttgttctctggtttgcggctttc

SEQ ID NO: 127318 - DNA, 120 bp, Artificial Sequence
  ENSG00000101890_3 (sequence is synthesized)
aggaaactgctgggacaccatggccttgcatctgccaagttcctgtggtgcttgtgccttctgtctgtcatgtcccttccgcagcaggtgtggacactcccctacaagataggggtggtg

SEQ ID NO: 127319 - DNA, 120 bp, Artificial Sequence
  ENSG00000101890_4 (sequence is synthesized)
ggcccttgggcttgtgattcgctgttttcaaaggccctgcctgaggttgctgcgcgattagccattgagcgaatcaaccgggacccatcttttgacctgagttattcttttgaatacgtg

SEQ ID NO: 127320 - DNA, 120 bp, Artificial Sequence
  ENSG00000101890_5 (sequence is synthesized)
attctcaatgaagactgccagacttcgagggctctctccagtttcatttcccaccaccagatggcctcaggatttattggacctaccaaccctggctactgcgaggcagcctcgctcctg

SEQ ID NO: 127321 - DNA, 120 bp, Artificial Sequence
  ENSG00000101890_6 (sequence is synthesized)
ggaaacagctgggacaaaggaattttctcttgggcttgtgtgaattatgaattagacaataaaattagctacccgaccttttctcggacactcccttctcccatccgggtgcttgtaact

SEQ ID NO: 127322 - DNA, 120 bp, Artificial Sequence
  ENSG00000101890_7 (sequence is synthesized)
gtcatgaaatatttccagtgggctcatgctggagtcatttcctcagatgaagacatttgggtgcatacagccaatcgagtcgcaagtgctcttcggagccacggcttacctgtaggggtc

SEQ ID NO: 127323 - DNA, 120 bp, Artificial Sequence
  ENSG00000101890_8 (sequence is synthesized)
gtcctgaccacaggacaagacagccaaagcatgcggaaagccctccagaggattcaccaggcagacagaattcgcataatcatcatgtgtatgcattcagctttgattgggggagagact

SEQ ID NO: 127324 - DNA, 120 bp, Artificial Sequence
  ENSG00000101890_9 (sequence is synthesized)
cagatgcatctcttggaatgtgctcatgatctgaaaatgactgatggaacctacgtctttgttccttatgatgccctgctctacagtttaccttataagcacaccccctaccgggtccta

SEQ ID NO: 127325 - DNA, 120 bp, Artificial Sequence
  ENSG00000101890_10 (sequence is synthesized)
aggaacaacccaaagctccgggaagcctatgatgcagtgttgaccattacagtggagtcccaagaaaagaccttctatcaagccttcacagaggcagcagcaagaggtgaaattcctgag

SEQ ID NO: 127326 - DNA, 120 bp, Artificial Sequence
  ENSG00000101890_11 (sequence is synthesized)
aagctggagttcgatcaagtttcaccgttgtttggaaccatctacaattcaatttactttatcgcacaagccatgaataatgctatgaaagaaaatggacaggctggtgctgccagcctg

SEQ ID NO: 127327 - DNA, 120 bp, Artificial Sequence
  ENSG00000101890_12 (sequence is synthesized)
gttcagcattccagaaacatgcagttccatggattcaaccagttgatgaggacagattcaaatggaaatggaatttcagaatatgtaatcctggacaccaacttgaaagaatgggaactc

SEQ ID NO: 127328 - DNA, 120 bp, Artificial Sequence
  ENSG00000101890_13 (sequence is synthesized)
catagcacctacactgtggacatggaaatggagctgctacgtttcggagggacccctattcacttccctggtggcaggccccctagagcagatgcaaaatgctggtttgcagaagggaag

SEQ ID NO: 127329 - DNA, 120 bp, Artificial Sequence
  ENSG00000101890_14 (sequence is synthesized)
atctgccatggaggcatcgaccctgcctttgccatgatggtctgccttactttgcttatagccctgctgtctattaatggatttgcttactttataaggcgtcgtataaataaaatccag

SEQ ID NO: 127330 - DNA, 120 bp, Artificial Sequence
  ENSG00000101890_15 (sequence is synthesized)
aggacccaatagaattctactgactttggaggatgtaacgtttatcaatccccactttggcagtaagagaggaagtcgtgccagtgtaagcttccagattacctcagaggtccaaagtgg

SEQ ID NO: 127331 - DNA, 120 bp, Artificial Sequence
  ENSG00000101890_16 (sequence is synthesized)
gaggtccccaagactctccttttcttcagggagtctaactccagctacctatgaaaactccaacatagcgatttatgagggtgattgggtgtggctgaaaaagttctcccttggagattt

SEQ ID NO: 127332 - DNA, 120 bp, Artificial Sequence
  ENSG00000101890_17 (sequence is synthesized)
tggagaccttaagtccatcaaatcaagagcaagtgatgtgttcgaaatgatgaaggacttgcgtcatgagaatattaaccctttattgggtttcttctatgattcggggatgtttgccat

SEQ ID NO: 127333 - DNA, 120 bp, Artificial Sequence
  ENSG00000101890_18 (sequence is synthesized)
tgtgacagaattctgttcccgagggagcctagaagacatactgacaaatcaagatgtgaaacttgactggatgtttaaatcatcactcttgctggatctcataaagggcatgaagtactt

SEQ ID NO: 127334 - DNA, 120 bp, Artificial Sequence
  ENSG00000101890_19 (sequence is synthesized)
acaccacagagagtttgttcatgggaggctaaagtctcgaaactgtgtggtagatgggcgttttgtactaaaagtgacagattatggctttaacgacatcttagaaatgctgagactctc

SEQ ID NO: 127335 - DNA, 120 bp, Artificial Sequence
  ENSG00000101890_20 (sequence is synthesized)
tgaagaggaatcttctatggaagagctgctgtggacggcccctgaactgttgagagctccaagaggcagcaggttaggttcttttgcaggagatgtctatagctttgccatcatcatgca

SEQ ID NO: 127336 - DNA, 120 bp, Artificial Sequence
  ENSG00000101890_21 (sequence is synthesized)
agaagtgatggtccggggtaccccattctgcatgatggatctgccagctcaagaaatcataaacagacttaagaagcctcctcctgtgtacagaccagtagttcctcctgagcatgcccc

SEQ ID NO: 127337 - DNA, 120 bp, Artificial Sequence
  ENSG00000101890_22 (sequence is synthesized)
tccagaatgtctccagctgatgaagcagtgctgggctgaggctgcagaacaacgaccaacttttgatgaaatatttaaccagtttaaaacttttaataaagggaagaagaccaatattat

SEQ ID NO: 127338 - DNA, 120 bp, Artificial Sequence
  ENSG00000101890_23 (sequence is synthesized)
tgattctatgcttcggatgttggagcaatattctagcaacttggaagatttgattcgggagcggactgaagagctggaaattgaaaaacagaaaacggaaaagcttctaacacagatgct

SEQ ID NO: 127339 - DNA, 120 bp, Artificial Sequence
  ENSG00000101890_24 (sequence is synthesized)
accaccatcagttgctgaatctctcaaaaagggctgcacagttgaacctgagggctttgacttggtcaccttgtacttcagcgacattgtgggcttcacaaccatttcagccatgagtga

SEQ ID NO: 127340 - DNA, 120 bp, Artificial Sequence
  ENSG00000101890_25 (sequence is synthesized)
gcccattgaggtcgtggatcttctgaatgacctgtacacactctttgatgcaataattggcagtcatgatgtctacaaggtagagaccattggagatgcctacatggtggcttcaggcct

SEQ ID NO: 127341 - DNA, 120 bp, Artificial Sequence
  ENSG00000101890_26 (sequence is synthesized)
cccaaagaggaatggcagtaggcatgcagctgagattgcaaacatgtccttagatatcctgagctctgtgggcactttcaagatgcggcacatgccagaagtgccggtccgaattcgaat

SEQ ID NO: 127342 - DNA, 120 bp, Artificial Sequence
  ENSG00000101890_27 (sequence is synthesized)
tggccttcactcagggccggttgttgctggagtggtgggcctcaccatgcccagatactgcttgtttggagacactgtgaacacagcttctcggatggaatctacaggcttaccttatcg

SEQ ID NO: 127343 - DNA, 120 bp, Artificial Sequence
  ENSG00000101890_28 (sequence is synthesized)
cattcatgtcagtctcagcactgttacaattcttcaaaatctgagtgagggctatgaagtggagcttcgaggaagaacagagctcaagggcaaaggcacagaggaaaccttctggctgat

SEQ ID NO: 127344 - DNA, 120 bp, Artificial Sequence
  ENSG00000101890_29 (sequence is synthesized)
tgggaaaaaaggcttcatgaagccccttcctgtgcccccaccagtggacaaagatgggcaagtgggccatggcctgcaaccagtggagattgcagccttccaaagaagaaaagcagaaag

SEQ ID NO: 127345 - DNA, 120 bp, Artificial Sequence
  ENSG00000101890_30 (sequence is synthesized)
gcagttggtgagaaacaagccataaggggcaaagggctccaggatttgaatcttctcttggtgaggcaatgggaaagctcacttcagttcaagaaattgttctgcctgggcaagaaatta

SEQ ID NO: 127346 - DNA, 120 bp, Artificial Sequence
  ENSG00000101892_0 (sequence is synthesized)
ctccagaactctcacccgattgcctgcctctgctgcgtctttgcccactgaacagccatgagaaggcaactccggtccagaagggctccatcctttccttacagttatcgctacagactc

SEQ ID NO: 127347 - DNA, 120 bp, Artificial Sequence
  ENSG00000101892_1 (sequence is synthesized)
gatgatccggatgaagcgaaccagaactacttagcagatgaagaggaggaagcagaagaagaggctcgggtgacggtggtgcccaaatcggaggaggaggaagaagaggaggagaaagaa

SEQ ID NO: 127348 - DNA, 120 bp, Artificial Sequence
  ENSG00000101892_2 (sequence is synthesized)
gaggaggaagaggaggaaaaggaggaggaagagggtcaaggtcagccaacaggcaatgcctggtggcagaaattgcagatcatgagtgaatacctgtgggatccagagagaaggatgttt

SEQ ID NO: 127349 - DNA, 120 bp, Artificial Sequence
  ENSG00000101892_3 (sequence is synthesized)
ctggcccgaacaggcctgatcttactcatttacttcttcttctatgcctccttggctgctgtgatcaccctctgcatgtacacactatttctgaccatcagtccctatataccaaccttc

SEQ ID NO: 127350 - DNA, 120 bp, Artificial Sequence
  ENSG00000101892_4 (sequence is synthesized)
acggagcgggtaaagcctcctggagttatgatcagacccttcgcccatagccttaacttcaacttcaacgtttctgaacccgacacttggcagcattatgtgattagcctaaatggcttt

SEQ ID NO: 127351 - DNA, 120 bp, Artificial Sequence
  ENSG00000101892_5 (sequence is synthesized)
ctccagggttataatgacagtcttcaagaggaaatgaatgtagattgtcccccggggcagtacttcatccaagatggcaatgaggatgaggacaagaaggcctgccaatttaagcgctcc

SEQ ID NO: 127352 - DNA, 120 bp, Artificial Sequence
  ENSG00000101892_6 (sequence is synthesized)
ttcctaaagaactgctctggtctggaggacccaacttttggatactctactggacagccctgcatccttctaaagatgaaccggattgtaggctttcgtcctgagcttggagatcctgtg

SEQ ID NO: 127353 - DNA, 120 bp, Artificial Sequence
  ENSG00000101892_7 (sequence is synthesized)
aaggtttcctgcaaagttcagagaggtgatgaaaatgacatccgatccatcagttactacccagagtcggcttcttttgacctccgctactacccttactacggcaaactgactcacgtt

SEQ ID NO: 127354 - DNA, 120 bp, Artificial Sequence
  ENSG00000101892_8 (sequence is synthesized)
aactacacatcccccttggtggcaatgcactttacagacgtggtgaagaaccaagcagtgcctgtgcagtgccaactgaagggcaaaggcgtcataaatgatgtcatcaatgatcgtttt

SEQ ID NO: 127355 - DNA, 120 bp, Artificial Sequence
  ENSG00000101892_9 (sequence is synthesized)
gtgggcagggtaatctttaccctgaacatagaaacttaagaacttcagggggccattcttaccagttctgtttctgttttatctcatggtatctctggtagcacctgaattctttttctt

SEQ ID NO: 127356 - DNA, 120 bp, Artificial Sequence
  ENSG00000101892_10 (sequence is synthesized)
caattaggacacagccagatggacatctaagacagccgatcatctttccttgcctatgacatgtgtataaaatgacattgtgggagctgttcgattttttaaaggtagtgtctcctgatg

SEQ ID NO: 127357 - DNA, 120 bp, Artificial Sequence
  ENSG00000101892_11 (sequence is synthesized)
acaaacagagtatattaatttcctttccctccacttaaaactaaagcctgttcttgctgctggtaatctccctgtagcgtaaacatagtatctgataaaatttacaatagccacgcaata

SEQ ID NO: 127358 - DNA, 120 bp, Artificial Sequence
  ENSG00000101892_12 (sequence is synthesized)
gccatcaaggagaatttctattatgattataaattcatcatgttttctaaaattctgttggttttagaggtcagattcctcccaaccaggctaataacctaacacatgtttaaaaaaaat

SEQ ID NO: 127359 - DNA, 120 bp, Artificial Sequence
  ENSG00000101892_13 (sequence is synthesized)
cccaaccaggctaataacctaacacatgtttaaaaaaaatctgcctaagccgggtgtggtggcatgcatctgtagtcccacctattcaggagattaaggcaggaggatcacttgagccca

SEQ ID NO: 127360 - DNA, 120 bp, Artificial Sequence
  ENSG00000101892_14 (sequence is synthesized)
gggtgacagagtgagatcctgtctctgaagaaaaaaaaaacctgcctggcaaggtccttccctgggaatcaccactcggtccaacctagacaaccaagaccgctatacctaaagacctct

SEQ ID NO: 127361 - DNA, 120 bp, Artificial Sequence
  ENSG00000101892_15 (sequence is synthesized)
atatcctggtgcctaagaaacttctgcctcccacagacaactaagtgcttattcaaagactaggttattttcaactgggaaaaaagcagtgctaacaggatattgttctgggatagagat

SEQ ID NO: 127362 - DNA, 120 bp, Artificial Sequence
  ENSG00000101892_16 (sequence is synthesized)
actttttaaagaggtggggctcactgcaactggggagaacacttagcatatggatatgattggtgtttgattccttgctctctggtgtaatcgtctaaaggcaaacattcctgcaaacag

SEQ ID NO: 127363 - DNA, 120 bp, Artificial Sequence
  ENSG00000101892_17 (sequence is synthesized)
gtttttctcagcttcaggcagaggagacaacatggaagaagattcccaccagctaattcttcttgggctatttgtttgacagtagcatgatgttttttgagaccatcaggggtggttaca

SEQ ID NO: 127364 - DNA, 120 bp, Artificial Sequence
  ENSG00000101892_18 (sequence is synthesized)
tagaccagcagctacagctctggaaattgaaatcataatctgtcaatgaatacatgacaagacagaacgttccttgccaggccaggcaaaagccaaggcccattagccagtttagcattt

SEQ ID NO: 127365 - DNA, 120 bp, Artificial Sequence
  ENSG00000101892_19 (sequence is synthesized)
actttaaaaatgacatgaggcagattcttatccaggatgtggatcagccaggtcactttgtcttatctttggtcacctgatcactcaactgcttcttaacacctccaccagggggaaggc

SEQ ID NO: 127366 - DNA, 120 bp, Artificial Sequence
  ENSG00000101892_20 (sequence is synthesized)
tggcacaaggagaaaaaaaaagcaagcatcagcgaatagtatagtgtctcagggtccgaagcaagtttaaatgccacctaggaggatccaaagtctgaatctcctctacaatgtttcctt

SEQ ID NO: 127367 - DNA, 120 bp, Artificial Sequence
  ENSG00000101892_21 (sequence is synthesized)
tctcccaaaacagggaactgactgtctggtagtgaagacaagcaagtggagaagttatacgatatagtttaatgagagttaaaaaactagtatgtggaaagctatgggaatatgaggaaa

SEQ ID NO: 127368 - DNA, 120 bp, Artificial Sequence
  ENSG00000101892_22 (sequence is synthesized)
aatatcttgagctaagaaagtagcagaggaaatttcacatgcaaagccacagtcatgaagagaccatggtgtgtctgggtaactgtgagcagtttatgtaactggaatgaaaagggctca

SEQ ID NO: 127369 - DNA, 120 bp, Artificial Sequence
  ENSG00000101892_23 (sequence is synthesized)
gaggaatggcagggatggcaagagatccagctagagaggtattcagggatggaaagaggactttgagttttatccaataggtgaaaatgagtaattaaagcattttaatcagggaggctc

SEQ ID NO: 127370 - DNA, 120 bp, Artificial Sequence
  ENSG00000101892_24 (sequence is synthesized)
cattttaatcagggaggctctgtgatcacatttgtgttttattttattttactttattatttatttgtttatttttgagatggagtttcgctgttgtcacccaggctggagtgcagtggt

SEQ ID NO: 127371 - DNA, 60 bp, Artificial Sequence
  ENSG00000101892_25 (sequence is synthesized)
gcaatttagaaagggcacttggcaaccactatgtgaagggtgattggagaaggacaagac

SEQ ID NO: 127372 - DNA, 120 bp, Artificial Sequence
  ENSG00000101892_26 (sequence is synthesized)
ggcaaccactatgtgaagggtgattggagaaggacaagactgtggaatggggaataaggaaggaggagtttggagaatgactccaaaggtttgagcttggctagaaccggtaagatggtg

SEQ ID NO: 127373 - DNA, 120 bp, Artificial Sequence
  ENSG00000101892_27 (sequence is synthesized)
acattgttgatcaagactgggaatataagagagaagcaggtttggagagatcaattttgaacattttagacatgattttctattggtcagacattgatgtggagatgtaaacacatgtag

SEQ ID NO: 127374 - DNA, 120 bp, Artificial Sequence
  ENSG00000101892_28 (sequence is synthesized)
ggttggtgagaaggaaagatgagaacaaaagcaacattgggttaagggaactcgcttaagaaattttaagctatttaatcttgggaactgaagccagtcatgtaaacatactataccaat

SEQ ID NO: 127375 - DNA, 120 bp, Artificial Sequence
  ENSG00000101892_29 (sequence is synthesized)
ctagtccctaacagtgttttttctcttgtggcagaaagaattgctgttcctctttggaatctccttcccagacaccttcaaagtcttattgacacagtaaagggaggccaaccactacta

SEQ ID NO: 127376 - DNA, 120 bp, Artificial Sequence
  ENSG00000101892_30 (sequence is synthesized)
acaagttctagaagatataggatcttctatagtaggttaatggaaaatacaaaaacaaacaaacatacaatgaaactgcctcctctcaacccattttcttaacaaattcaattttcaaaa

SEQ ID NO: 127377 - DNA, 120 bp, Artificial Sequence
  ENSG00000101892_31 (sequence is synthesized)
aatgaaaaagacaataacttttaaaccacttgaaaattacctcaatcaaactctcaagattcagtagtaaaagataatagaatgttagatctggaaaggatattagagagtgtttagaaa

SEQ ID NO: 127378 - DNA, 120 bp, Artificial Sequence
  ENSG00000101892_32 (sequence is synthesized)
aaacaacttgcattgcatctgactccaggtccagtgctctttctactctgagctgctgcttaccagaaagtaccatcttcttaaaaatcaatgaatgatatcccaaacattttgaaacgt

SEQ ID NO: 127379 - DNA, 120 bp, Artificial Sequence
  ENSG00000101892_33 (sequence is synthesized)
atgtaaattttgagttaaaatagttaacatttcacaggaattcaactactggtgctatactttatacataatacattatcctgttaaatgcattgactattagacaaggaattatgaatc

SEQ ID NO: 127380 - DNA, 120 bp, Artificial Sequence
  ENSG00000101892_34 (sequence is synthesized)
atttgtcaaataatatttatctttcaatggaatccattgtgtccacaattgcaaagcaatattgaagggtactaagatagtttgggttgtcagctaggacatgaaaaatgtaggtttact

SEQ ID NO: 127381 - DNA, 120 bp, Artificial Sequence
  ENSG00000101892_35 (sequence is synthesized)
atacagaactggatatgataatatattcattaaagttatgttctaactgttcaatagacttctagtagattaatttaaatagttccccataccgtgctgcatcaggatttgatttgtatg

SEQ ID NO: 127382 - DNA, 120 bp, Artificial Sequence
  ENSG00000101892_36 (sequence is synthesized)
ccatctgttgcaatgcacttggttttacttgcttgtcaatgagaaatactacttccaaatgtcttcatggttttgtccatactggactttgggttatgatttttcaccttctactcccct

SEQ ID NO: 127383 - DNA, 120 bp, Artificial Sequence
  ENSG00000101892_37 (sequence is synthesized)
gaaatcattatcctaaagtaactttttttaggcacctattttctggggatcaacatgtaaaaaaacatttatattgtcttgaggagttgtcaacaacaataaattgaaataaaaaagaaa

SEQ ID NO: 127384 - DNA, 120 bp, Artificial Sequence
  ENSG00000101898_0 (sequence is synthesized)
gtggcgcccgcgccggccttcctgcaggggactccaccggagccttgccaattccgtttgtttccctgttgtcgcccgcttcaccctggatcatgttcaagaagtttgatgaaaaggaaa

SEQ ID NO: 127385 - DNA, 120 bp, Artificial Sequence
  ENSG00000101898_1 (sequence is synthesized)
gtgtgtccaactgcatccagttgaaaacgtcagttattaagggcattaagagccaactggtagagcaatttccaggtattgaaccatggcttaatcaaatcatgcctaagaaagatcctg

SEQ ID NO: 127386 - DNA, 120 bp, Artificial Sequence
  ENSG00000101898_2 (sequence is synthesized)
aagaaaggggcctttttgtccaactctaaggttgcttcacaaatacccttttatcctgccacaccagcaggttgataaaggagctatcaaatttgtactcagtggcgcaaatattatgtg

SEQ ID NO: 127387 - DNA, 120 bp, Artificial Sequence
  ENSG00000101898_3 (sequence is synthesized)
tccaggtttaacttctcctggagctaagctgtaccctgctgcagtagatacgattgtagcagtcacagcggaaggaaaacagcatgctctgtgtgttggggtcatgaagatgtctgcaga

SEQ ID NO: 127388 - DNA, 120 bp, Artificial Sequence
  ENSG00000101898_4 (sequence is synthesized)
agatattgagaaagtcaacaaaggaattggcattgaaaatatccattatttaaatgatgggctgtggcacatgaagacatataaatgagcctcagaaggaatgcatttggggggctaaat

SEQ ID NO: 127389 - DNA, 120 bp, Artificial Sequence
  ENSG00000101901_0 (sequence is synthesized)
agttgcgtcatatccggcccttgcgatcagggcttgaggaacccgcgccatgaagtgcgtgtttgttaccgtagggaccaccagctttgacgacctcattgcgtgtgtgtcggcgcccga

SEQ ID NO: 127390 - DNA, 120 bp, Artificial Sequence
  ENSG00000101901_1 (sequence is synthesized)
cagtctgcaaaaaatcgagagccttggttacaaccgacttatcctgcaaattggtagaggaacggtggtacctgaacccttcagtactgagtcgtttactctggatgtttacaggtacaa

SEQ ID NO: 127391 - DNA, 120 bp, Artificial Sequence
  ENSG00000101901_2 (sequence is synthesized)
ggattccttgaaagaagacattcagaaagcagatcttgttattagtcacgcaggtgcaggaagctgtttggagactctggaaaaaggaaagccactcgtagtggttataaacgaaaagtt

SEQ ID NO: 127392 - DNA, 120 bp, Artificial Sequence
  ENSG00000101901_3 (sequence is synthesized)
gatgaacaatcatcagctggaactggcaaagcagctacacaaagagggtcatctcttctattgtacctgcagggtcctgacttgtcctgggcaagccaagtccattgcttctgctcctgg

SEQ ID NO: 127393 - DNA, 120 bp, Artificial Sequence
  ENSG00000101901_4 (sequence is synthesized)
gaagtgccaagattctgcagcgctgacttcaactgccttttcaggcctagactttgggctgctttccggatacctgcataagcaagcccttgttactgctacccatcctacctgcaccct

SEQ ID NO: 127394 - DNA, 120 bp, Artificial Sequence
  ENSG00000101901_5 (sequence is synthesized)
gctttttccctcttgccacgctttttttcctctccctcttacccccaccctgtacaaaatgcataaaggatggaaaaactactgcagccagaagtctttgaatgaggcatcaatggatga

SEQ ID NO: 127395 - DNA, 120 bp, Artificial Sequence
  ENSG00000101901_6 (sequence is synthesized)
atatttaggcagcttagggctgtttcgaaagctgactgccaaggatgcctcttgcctctttcgggccatttcggagcagttgttttgcagccaggtccatcatttggaaatcaggaaggc

SEQ ID NO: 127396 - DNA, 120 bp, Artificial Sequence
  ENSG00000101901_7 (sequence is synthesized)
ttgtgtctcatatatgagggaaaatcaacaaacttttgagtcttatgtggagggatcttttgagaaatacctggaacggttgggagatcccaaggaaagtgctggccagctggaaataag

SEQ ID NO: 127397 - DNA, 120 bp, Artificial Sequence
  ENSG00000101901_8 (sequence is synthesized)
agctctttctctaatttataatcgggatttcattctttatcgctttcctggaaaacctccaacttatgtcacagataatggctatgaagacaagattctactctgctactcaagtagtgg

SEQ ID NO: 127398 - DNA, 120 bp, Artificial Sequence
  ENSG00000101901_9 (sequence is synthesized)
tcactatgattctgtgtactcaaaacaatttcagtcaagtgcagctgtttgtcaggctgtattgtacgaaattctctataaagatgtgtttgttgtggatgaagaagagttgaagactgc

SEQ ID NO: 127399 - DNA, 120 bp, Artificial Sequence
  ENSG00000101901_10 (sequence is synthesized)
gattaaattgtttcgaagtggttctaagaagaacagaaataatgctgtaactggaagcgaggatgcccatactgattacaagagttcaaatcagaataggatggaagagtggggtgcctg

SEQ ID NO: 127400 - DNA, 120 bp, Artificial Sequence
  ENSG00000101901_11 (sequence is synthesized)
ctacaatgctgaaaatataccagagggctacaataaaggaacagaagaaacaaagtctccagaaaatccatcaaagatgcccttcccctataaggtgctcaaagccctggatccagaaat

SEQ ID NO: 127401 - DNA, 120 bp, Artificial Sequence
  ENSG00000101901_12 (sequence is synthesized)
ctatcgtaatgtagaatttgatgtttggttggacagcagaaaagaacttcaaaaatctgattacatggagtatgctgggagacagtactatttgggagacaagtgtcaggtttgcttgga

SEQ ID NO: 127402 - DNA, 120 bp, Artificial Sequence
  ENSG00000101901_13 (sequence is synthesized)
atcagaaggaagatattataatgctcatatccaggaagttggaaatgagaacaattcagtaacagtcttcattgaagaattggcggaaaagcatgttgttccactggctaacttaaaacc

SEQ ID NO: 127403 - DNA, 120 bp, Artificial Sequence
  ENSG00000101901_14 (sequence is synthesized)
agttacccaagtgatgtctgttcctgcctggaatgctatgcccagtcggaaaggaagaggttaccagaaaatgcctgggggttatgtcccggaaatagttatatcagagatggacataaa

SEQ ID NO: 127404 - DNA, 120 bp, Artificial Sequence
  ENSG00000101901_15 (sequence is synthesized)
gcaacagaagaagatgttcaagaaaattcgagggaaagaagtttacatgactatggcttacggcaagggagaccccctcctcccacccaggctgcagcacagtatgcattatgggcacga

SEQ ID NO: 127405 - DNA, 120 bp, Artificial Sequence
  ENSG00000101901_16 (sequence is synthesized)
tcctccaatgcactactcacagacagctggcaatgttatgtctaatgaacattttcatcctcagcatccatctccgagacaaggtcggggatatgggatgcccaggaattcatctcggtt

SEQ ID NO: 127406 - DNA, 120 bp, Artificial Sequence
  ENSG00000101901_17 (sequence is synthesized)
tgatttttacccaggcccaggtaaaaggtgctgccagagctatgataacttctcttatagatctcgttcatttagacgtagtcaccgccagatgagttgtgtgaataaggagtcccagta

SEQ ID NO: 127407 - DNA, 120 bp, Artificial Sequence
  ENSG00000101901_18 (sequence is synthesized)
tggatttaccccagggaatggacagatgcccaggggcttggaagaaactattactttttatgaagttgaagaaggggatgagactgcttatccaactttacctaatcatggaggtccctc

SEQ ID NO: 127408 - DNA, 120 bp, Artificial Sequence
  ENSG00000101901_19 (sequence is synthesized)
tacaatggttcctgctacttcaggatactgtgttggaaggcggggacatagctcaggcaaacagactttgaatttagaggagggcaatggccagagtgaaaatgggcgatatcatgaaga

SEQ ID NO: 127409 - DNA, 120 bp, Artificial Sequence
  ENSG00000101901_20 (sequence is synthesized)
atatctttatcgtgcagagccagactatgaaacttcaggtgtttatagcacaactgcatctacagcaaacttgtctcttcaggacagaaagtcatgttctatgtctcctcaggacacagt

SEQ ID NO: 127410 - DNA, 120 bp, Artificial Sequence
  ENSG00000101901_21 (sequence is synthesized)
tacctcatacaactacccccagaagatgatgggaaatattgcagcagttgcagcttcctgtgccaataatgttccagctccagtcttatctaacggtgcagcggctaatcaagctattag

SEQ ID NO: 127411 - DNA, 120 bp, Artificial Sequence
  ENSG00000101901_22 (sequence is synthesized)
taccacttcagtttcctcacagaatgctatacagcctctctttgtatctccacctacacacggcaggccagtgattgcctcaccatcctatccatgccattctgctattcctcatgctgg

SEQ ID NO: 127412 - DNA, 80 bp, Artificial Sequence
  ENSG00000101901_23 (sequence is synthesized)
ccaccaccaccactcttgatgtgggagagacttcaaacttacaaccaccaccaccactaccacctccaccttattcctgt

SEQ ID NO: 127413 - DNA, 120 bp, Artificial Sequence
  ENSG00000101901_24 (sequence is synthesized)
acaaccaccaccaccactaccacctccaccttattcctgtgatccaagcggcagtgatttgcctcaagatacaaaagttttgcagtactatttcaatctaggattgcagtgctattacca

SEQ ID NO: 127414 - DNA, 120 bp, Artificial Sequence
  ENSG00000101901_25 (sequence is synthesized)
cagctactggcactccatggtctatgtgccacagatgcagcagcagcttcatgtagagaattatccagtctatactgagccacctctggtagatcaaaccgttcctcaatgctacagtga

SEQ ID NO: 127415 - DNA, 120 bp, Artificial Sequence
  ENSG00000101901_26 (sequence is synthesized)
ggtgaggagagaagatggcatacaggcggaagcatcagcaaatgatacttttccgaatgctgattcttcatctgtccctcatggagcagtctattatccagtaatgtcagatccctatgg

SEQ ID NO: 127416 - DNA, 120 bp, Artificial Sequence
  ENSG00000101901_27 (sequence is synthesized)
gcagccacctttgccaggttttgactcctgccttccggttgtgccagattattcctgtgttcccccctggcatccagttggtacagcatatggtggttcttctcaaattcatggtgctat

SEQ ID NO: 127417 - DNA, 120 bp, Artificial Sequence
  ENSG00000101901_28 (sequence is synthesized)
aaatcctgggccaattggctgtattgctccatctcccccagcttctcattatgtacctcagggtatgtaagatccagcagtatgaagtattcttgcactgccattttcttgctgtttttg

SEQ ID NO: 127418 - DNA, 120 bp, Artificial Sequence
  ENSG00000101901_29 (sequence is synthesized)
attttatgttagtggttaaatgatttaggtgattagtgtttactattgtatttgtctttaaaattattttatcttttgatttaaaatagtactttaaaattaaggggtattattttgggc

SEQ ID NO: 127419 - DNA, 120 bp, Artificial Sequence
  ENSG00000101901_30 (sequence is synthesized)
attattttgggctgtgactaaggaaattgagatggatgtacaactagccccatattgagcatacttcattgtattcagctgttttcctgtcagccatttgtcagctttatattagctgat

SEQ ID NO: 127420 - DNA, 120 bp, Artificial Sequence
  ENSG00000101901_31 (sequence is synthesized)
ggtaccaattgataaaatgaatataaagtatttcattggttcaaaaatcacacatcatattaaaccatgcagaattggagtaacttccacttttttctagaaagtaaaaccaagagcctt

SEQ ID NO: 127421 - DNA, 120 bp, Artificial Sequence
  ENSG00000101901_32 (sequence is synthesized)
tgcttctggataactcacttaatattaaattaaagagctcttcacgtttcttgagaattatctgaagccagttgcattctgtgatatcagttttgaaggcacatggttctctgctttaga

SEQ ID NO: 127422 - DNA, 120 bp, Artificial Sequence
  ENSG00000101901_33 (sequence is synthesized)
tttatcccatatgctattgtttaatactggatgtatgtaagtgttttactgcactgtattgaattggtgtcttttgcacagttagcagtaaataaaaattagcatttaaaattgccaaaa

SEQ ID NO: 127423 - DNA, 120 bp, Artificial Sequence
  ENSG00000101901_34 (sequence is synthesized)
accaccactaccacctccaccttattcctgtgatccaagcggcagtgatttgcctcaagatacaaaagttttgcagtactatttcaatctaggattgcaggtaagtgccatgttaaaatt

SEQ ID NO: 127424 - DNA, 120 bp, Artificial Sequence
  ENSG00000101901_35 (sequence is synthesized)
aaggggactaaacattttaattctgtctaagagatctctgaagatgacatagttcagttgtctgctttagcctcccagtgctttagtttctcttataaaatagtcgttaaactgaagaga

SEQ ID NO: 127425 - DNA, 120 bp, Artificial Sequence
  ENSG00000101901_36 (sequence is synthesized)
ggggtactgggctgtaagcagcacaatcagcatatattagatgagccatcatatttaacattacatgctaacttttcactgtggtgttctgtctcaaaataaatgaattatcctaaaata

SEQ ID NO: 127426 - DNA, 120 bp, Artificial Sequence
  ENSG00000101901_37 (sequence is synthesized)
agtgagtgagggaggcgagcaggcggcggcttggctcgccacccgccatctccggccatactgccagccgcgttagccttgcctgaccgtcgcgctcggaaagaaacccccgcaactcta

SEQ ID NO: 127427 - DNA, 120 bp, Artificial Sequence
  ENSG00000101901_38 (sequence is synthesized)
ctgggctgttacagtcaatggacttatcaacactgaaatgttatcctcctggccagccagaaaaattttctgcatttttggataaagttgttggattacaaaaataaacactaaactctc

SEQ ID NO: 127428 - DNA, 120 bp, Artificial Sequence
  ENSG00000101901_39 (sequence is synthesized)
tctcaacactttaaaagcaacccccaaattcaacctatgtaatgtgattaaatcaaattaaatacataatatatatttacaaaataatataattaataaacttcctacatctatagaatg

SEQ ID NO: 127429 - DNA, 120 bp, Artificial Sequence
  ENSG00000101901_40 (sequence is synthesized)
ggaaattttatgttgtgcacatttgcattgggtccaaatcctaattgcagtttagtgaaattactagatttttttctaatcttcagtatgtagtgagcattcacaggttttctcctagaa

SEQ ID NO: 127430 - DNA, 120 bp, Artificial Sequence
  ENSG00000101901_41 (sequence is synthesized)
atgtagaatttgatgtttggttggacagcagaaaaggtttgcttggaatcagaaggaagatattataatgctcatatccaggaagttggaaatgagaacaattcagtaacagtcttcatt

SEQ ID NO: 127431 - DNA, 120 bp, Artificial Sequence
  ENSG00000101901_42 (sequence is synthesized)
atatatgagggaaaatcaacaaacttttgagtcttcgggatttcattctttatcgctttcctggaaaacctccaacttatgtcacagataatggctatgaagacaagagatggggatctc

SEQ ID NO: 127432 - DNA, 120 bp, Artificial Sequence
  ENSG00000101901_43 (sequence is synthesized)
caacttttatgtaaaaaaattttacataagagttagcatctttagctttataatctaaggaaccaaatttaaaaaatgatggattatgctctgtgaaatgaaaagttcaatcattgccta

SEQ ID NO: 127433 - DNA, 120 bp, Artificial Sequence
  ENSG00000101901_44 (sequence is synthesized)
aaaaagatgatcaagttagttgatctcttgtacttggaaaagctacttttttcctaaagaacagagtggagtggatatattcactttttttttctaaaacatacaaagtgataaaataat

SEQ ID NO: 127434 - DNA, 120 bp, Artificial Sequence
  ENSG00000101901_45 (sequence is synthesized)
cgtgcctaatgtcaaaactttactggtttgagaagaataatcaaaaaggacttataccaataggacttactattgttttttaaggatctcctctcacagtggtaatgaaacattaactgt

SEQ ID NO: 127435 - DNA, 120 bp, Artificial Sequence
  ENSG00000101901_46 (sequence is synthesized)
tacaatttatgtgcttataaaattagttttatgaatgaacaataaactgatgcatataatggcttaaatatatggttttaaaattgacttaacttgagcaagatacattatgaagttctt

SEQ ID NO: 127436 - DNA, 120 bp, Artificial Sequence
  ENSG00000101901_47 (sequence is synthesized)
tctgattagagtgtgtggtctcaagacctttacagtagattatccttaagtgtccatagctctctggtacaatgtttagatatagtttatctatcaaaatagaacattcactataaagac

SEQ ID NO: 127437 - DNA, 120 bp, Artificial Sequence
  ENSG00000101901_48 (sequence is synthesized)
ctctcttccattccaatcatattatcccaacatgctaaatgttccaaacattttatttggaatgcattttatcatgtttttataggtttatttttctgattgtgttttatttaggctaat

SEQ ID NO: 127438 - DNA, 120 bp, Artificial Sequence
  ENSG00000101901_49 (sequence is synthesized)
attaaaaaaatgcttactagtggtagaaggtggtgacaaagaaatactctgggtagcaggaggaagccaacttggattaaaattttgctgagaataatctaaaaagtgagtaatctggtt

SEQ ID NO: 127439 - DNA, 120 bp, Artificial Sequence
  ENSG00000101901_50 (sequence is synthesized)
gagaattcacagcaccataatcataattgtatatcaatgttatgttttaggaaaggtcctattcaaatccagggagagaatctttagtgttttctgggccctcataaatacgtttttctc

SEQ ID NO: 127440 - DNA, 120 bp, Artificial Sequence
  ENSG00000101901_51 (sequence is synthesized)
atttgagaaaattgtgactttatgttggtcacttagtttttatagtttatgatgaagaattaaagagaaacaaatgaaaggcaaggtctactcaaatatcagacaactaaaaggctatac

SEQ ID NO: 127441 - DNA, 120 bp, Artificial Sequence
  ENSG00000101901_52 (sequence is synthesized)
agcccctaaatcctttgctatctacttccccagaataatgcataacctaaattccattatttcatttagcagaggtttaagccgttgttgtcaattgtgtgcagtaacgcctctgacttc

SEQ ID NO: 127442 - DNA, 120 bp, Artificial Sequence
  ENSG00000101901_53 (sequence is synthesized)
ccttttgtggaattttgtatcgattttggatttttaagtcaaaggagactttaaaatcattttgatttggcacggattcttgagattatctagtccaattccatcatattcagattttac

SEQ ID NO: 127443 - DNA, 120 bp, Artificial Sequence
  ENSG00000101901_54 (sequence is synthesized)
catttgcttaaagtatagcttttggcagaactgcccctaggagcagctccttgattcccagtcccctgctctttctaccctgcataatatatgttgtaagctttttgtttctttatagtt

SEQ ID NO: 127444 - DNA, 120 bp, Artificial Sequence
  ENSG00000101901_55 (sequence is synthesized)
gtttgcctagtgttcattttagttactcgaattccttgcaaggtaggttttgtttgtttatttatggaagttatttagtaggaatttcacacttaactgggttttcctttggcgtatgac

SEQ ID NO: 127445 - DNA, 120 bp, Artificial Sequence
  ENSG00000101901_56 (sequence is synthesized)
aaccttacctaggacttagaaatctgtgatttctgagtttttggaatttaggaaaatgctctgggtaggattgatagtagattgaataaattaagactttaagacagaattgtagacttt

SEQ ID NO: 127446 - DNA, 120 bp, Artificial Sequence
  ENSG00000101901_57 (sequence is synthesized)
tggagttgggagataatttaaagaatattttaaaccaccagttttacagatgaggaaacatgctaaattaatcaccacatttacatcttattagtccttattaaagaatggtaaccaaaa

SEQ ID NO: 127447 - DNA, 120 bp, Artificial Sequence
  ENSG00000101901_58 (sequence is synthesized)
taaatactatgtgcaatgttttttgcttttaaaaatactataaaagacacctttgtatacaggtcttttagattatttcctaaaagaattcttaggtttaaatatgagatacaaatgctg

SEQ ID NO: 127448 - DNA, 120 bp, Artificial Sequence
  ENSG00000101901_59 (sequence is synthesized)
caaaagatcctaaagttctaatagagaacagactgtcaagtttttaggtcaaaaaagtcattgctacctcacctgaaaatcgtggcccaattcttattttttttttttttttgtctgtgg

SEQ ID NO: 127449 - DNA, 120 bp, Artificial Sequence
  ENSG00000101901_60 (sequence is synthesized)
tcctcaggcccccctgtggaccgcacgtcggcgccggcgtctgagccagccgagctcgcctcagagcccggctccttcccctcagcacttggccggagcccgcgcggttcctctcctcag

SEQ ID NO: 127450 - DNA, 120 bp, Artificial Sequence
  ENSG00000101901_61 (sequence is synthesized)
aaaaatgcttactagtggtagaaggtggtgacaaagaaatactctgggtagcaggaggaagccaacttggattaaaattttgctgagaataatctaaaaaggtcctgacttgtcctgggc

SEQ ID NO: 127451 - DNA, 120 bp, Artificial Sequence
  ENSG00000101901_62 (sequence is synthesized)
ctcttatccacctacctaacccatctgtctcttctgcctcttaccttctcccagttaccaaaccttttgattttctcagctgtaaaatcctcccatttgtttgtctcccattttgcaatc

SEQ ID NO: 127452 - DNA, 120 bp, Artificial Sequence
  ENSG00000101911_0 (sequence is synthesized)
cctccccttccctacatctagccgccgcgctttcccgctcccgcagcagcagcctcccgcgtcgctgtcgctgttgcctccgccacctcctccgccgccgcgcgcccctcggagttccgc

SEQ ID NO: 127453 - DNA, 120 bp, Artificial Sequence
  ENSG00000101911_1 (sequence is synthesized)
gccccaccatgcccaacatcgtgctgttcagcggcagctcgcatcaggacctgtcccagcgcgtggccgaccgcctgggcctggagctgggcaaggtggtcacgaagaagttcagcaacc

SEQ ID NO: 127454 - DNA, 120 bp, Artificial Sequence
  ENSG00000101911_2 (sequence is synthesized)
aggagaccagcgtggagattggtgaaagcgtgagaggggaagatgtctacatcatccagagcggctgcggggaaattaacgacaacctgatggaactcctcatcatgatcaatgcctgca

SEQ ID NO: 127455 - DNA, 120 bp, Artificial Sequence
  ENSG00000101911_3 (sequence is synthesized)
agattgcgtcatcatccagagtaactgccgtgatcccgtgtttcccatacgcccgacaagataaaaaggacaagagtcgtgccccaatttctgcaaaacttgtggccaatatgctgtcgg

SEQ ID NO: 127456 - DNA, 120 bp, Artificial Sequence
  ENSG00000101911_4 (sequence is synthesized)
tggctggggcggatcacatcatcaccatggacctgcatgcttctcagatacagggattctttgatattcctgtggataatttgtatgcggagcccgcagtcctgcagtggattcgggaaa

SEQ ID NO: 127457 - DNA, 120 bp, Artificial Sequence
  ENSG00000101911_5 (sequence is synthesized)
acattgccgagtggaagaactgtatcattgtttcacctgacgcagggggagccaaaagggttacatcaattgcagacaggttgaatgtggaatttgctttgatccacaaagagaggaaga

SEQ ID NO: 127458 - DNA, 120 bp, Artificial Sequence
  ENSG00000101911_6 (sequence is synthesized)
aggcgaatgaagtggaccggatggtcctggtgggcgacgtgaaggaccgtgtggccatcctcgtggatgacatggctgacacttgcggcaccatctgccatgctgcggacaagctgctgt

SEQ ID NO: 127459 - DNA, 120 bp, Artificial Sequence
  ENSG00000101911_7 (sequence is synthesized)
cagctggagccaccaaagtgtatgctatccttacccatgggatcttctctggaccagctatttccagaataaataatgccgcctttgaggctgttgtcgtcacaaacacaattccgcaag

SEQ ID NO: 127460 - DNA, 120 bp, Artificial Sequence
  ENSG00000101911_8 (sequence is synthesized)
aggacaaaatgaaacactgcaccaagattcaggtcattgacatttccatgatcttggccgaagcaatccgaaggacacacaatggggaatccgtgtcctacctgttcagccatgtcccgc

SEQ ID NO: 127461 - DNA, 120 bp, Artificial Sequence
  ENSG00000101911_9 (sequence is synthesized)
tataaatccagaatgggaagtgtccagcaagcctactctgacttctgacttgtttttgttttctggatttttagctgtaggtattcagcaatgataggttaatcactggcaaaagcatca

SEQ ID NO: 127462 - DNA, 120 bp, Artificial Sequence
  ENSG00000101911_10 (sequence is synthesized)
aaatgagaaacgtttttgtcattttgacttttaacaggtacaggtgatctcttcctttgttctttcagtactttgaggcgacaactttcaagtatataatttcattgtggaagtcatagt

SEQ ID NO: 127463 - DNA, 120 bp, Artificial Sequence
  ENSG00000101911_11 (sequence is synthesized)
ttatatatttcgaggttgccaaaggtgacttcagattaaagccttctgtgtaaatatatactgataatgcctatggacatttgggtaaaaccctgtatagaattaattatccttttactt

SEQ ID NO: 127464 - DNA, 120 bp, Artificial Sequence
  ENSG00000101911_12 (sequence is synthesized)
tggagtgaaccttggaaaatttataattataataccatggattttgaattttccttttttttttttttttggataactcagtttcagataaaccatcttggttactgtgcttaatttgga

SEQ ID NO: 127465 - DNA, 120 bp, Artificial Sequence
  ENSG00000101911_13 (sequence is synthesized)
ccaaattttatttagcttaatatggacactgacacattttggggggtatacattagacatatcagagcagtgtatttctggatcattttttaaatgacctcttctaaaacataactgtca

SEQ ID NO: 127466 - DNA, 120 bp, Artificial Sequence
  ENSG00000101911_14 (sequence is synthesized)
cttacctgaaatgctgcatcctaaaattccaaaattatattgagcaatcgccaaggcctaaagccaactgacttaaaggtaatcatttcagctaagattaaatttaaagcctaagaatgt

SEQ ID NO: 127467 - DNA, 120 bp, Artificial Sequence
  ENSG00000101911_15 (sequence is synthesized)
atagagctagttttaaaataatgatctcagatttttaaaaaggatataggaacctgcattgtcattctctgaattaagaactgatggtttctatcattatttagccccacctttgtattt

SEQ ID NO: 127468 - DNA, 120 bp, Artificial Sequence
  ENSG00000101911_16 (sequence is synthesized)
taaaatccttcagaatacatttatgaaccaatgcgactggacttagccacacacaatggaaattcagaccttgactatttggtgtttccagttcacaaaggtgatgaagactgtcttggg

SEQ ID NO: 127469 - DNA, 120 bp, Artificial Sequence
  ENSG00000101911_17 (sequence is synthesized)
agcagcttaatcccaaaatttgtacatttcttgctgctcctggcgtggaaacttaagtgagaccaccaaatacattggtcctgtccaattctactgaatgggggtggacctggcatttat

SEQ ID NO: 127470 - DNA, 120 bp, Artificial Sequence
  ENSG00000101911_18 (sequence is synthesized)
ctggccaaaaacaggagccagagaaatatgaatataccaaagttgtttgtttagcctccaacttaaattacattagtcaacttatagatactcatatgatcacttttctttttagatact

SEQ ID NO: 127471 - DNA, 120 bp, Artificial Sequence
  ENSG00000101911_19 (sequence is synthesized)
acatcaactagattcaggagtatatcatttgcagtgcttgtattggtttaaaatgtaagattttaagatcctctaacactgtactaaaacatttcaataaaatcattctgactgcgttca

SEQ ID NO: 127472 - DNA, 120 bp, Artificial Sequence
  ENSG00000101911_20 (sequence is synthesized)
gcagggggagccaaaaggtatcatgcaggctacaccttgcagatttctccatctgctgattggtttttccttttccgatgtattagataaggaagcatgctgtaaattacttaaagcttt

SEQ ID NO: 127473 - DNA, 120 bp, Artificial Sequence
  ENSG00000101911_21 (sequence is synthesized)
attttgctaatgagcaagtaagtagaccgcaggcttcacttccagagcagaaacccatcatctttgttaatatttcgtcattcaggaaagaagaaaatacagagacacacatacacaata

SEQ ID NO: 127474 - DNA, 120 bp, Artificial Sequence
  ENSG00000101916_0 (sequence is synthesized)
ctcctgcatagagggtaccattctgcgctgctgcaagttacggaatgaaaaattagaacaacagaaacatggttctcttgacacttcagtgttagggaacatcagcaagacccatcccag

SEQ ID NO: 127475 - DNA, 120 bp, Artificial Sequence
  ENSG00000101916_1 (sequence is synthesized)
gagaccttgaaggaagcctttgaaagggagaatgaaggagtcatctttgcaaaatagctcctgcagcctgggaaaggagactaaaaaggaaaacatgttccttcagtcgtcaatgctgac

SEQ ID NO: 127476 - DNA, 120 bp, Artificial Sequence
  ENSG00000101916_2 (sequence is synthesized)
ctgcattttcctgctaatatctggttcctgtgagttatgcgccgaagaaaatttttctagaagctatccttgtgatgagaaaaagcaaaatgactcagttattgcagagtgcagcaatcg

SEQ ID NO: 127477 - DNA, 120 bp, Artificial Sequence
  ENSG00000101916_3 (sequence is synthesized)
tcgactacaggaagttccccaaacggtgggcaaatatgtgacagaactagacctgtctgataatttcatcacacacataacgaatgaatcatttcaagggctgcaaaatctcactaaaat

SEQ ID NO: 127478 - DNA, 120 bp, Artificial Sequence
  ENSG00000101916_4 (sequence is synthesized)
aaatctaaaccacaaccccaatgtacagcaccagaacggaaatcccggtatacaatcaaatggcttgaatatcacagacggggcattcctcaacctaaaaaacctaagggagttactgct

SEQ ID NO: 127479 - DNA, 120 bp, Artificial Sequence
  ENSG00000101916_5 (sequence is synthesized)
tgaagacaaccagttaccccaaataccctctggtttgccagagtctttgacagaacttagtctaattcaaaacaatatatacaacataactaaagagggcatttcaagacttataaactt

SEQ ID NO: 127480 - DNA, 120 bp, Artificial Sequence
  ENSG00000101916_6 (sequence is synthesized)
gaaaaatctctatttggcctggaactgctattttaacaaagtttgcgagaaaactaacatagaagatggagtatttgaaacgctgacaaatttggagttgctatcactatctttcaattc

SEQ ID NO: 127481 - DNA, 120 bp, Artificial Sequence
  ENSG00000101916_7 (sequence is synthesized)
tctttcacacgtgccacccaaactgccaagctccctacgcaaactttttctgagcaacacccagatcaaatacattagtgaagaagatttcaagggattgataaatttaacattactaga

SEQ ID NO: 127482 - DNA, 120 bp, Artificial Sequence
  ENSG00000101916_8 (sequence is synthesized)
tttaagcgggaactgtccgaggtgcttcaatgccccatttccatgcgtgccttgtgatggtggtgcttcaattaatatagatcgttttgcttttcaaaacttgacccaacttcgatacct

SEQ ID NO: 127483 - DNA, 120 bp, Artificial Sequence
  ENSG00000101916_9 (sequence is synthesized)
aaacctctctagcacttccctcaggaagattaatgctgcctggtttaaaaatatgcctcatctgaaggtgctggatcttgaattcaactatttagtgggagaaatagcctctggggcatt

SEQ ID NO: 127484 - DNA, 120 bp, Artificial Sequence
  ENSG00000101916_10 (sequence is synthesized)
tttaacgatgctgccccgcttagaaatacttgacttgtcttttaactatataaaggggagttatccacagcatattaatatttccagaaacttctctaaacttttgtctctacgggcatt

SEQ ID NO: 127485 - DNA, 120 bp, Artificial Sequence
  ENSG00000101916_11 (sequence is synthesized)
gcatttaagaggttatgtgttccaggaactcagagaagatgatttccagcccctgatgcagcttccaaacttatcgactatcaacttgggtattaattttattaagcaaatcgatttcaa

SEQ ID NO: 127486 - DNA, 120 bp, Artificial Sequence
  ENSG00000101916_12 (sequence is synthesized)
acttttccaaaatttctccaatctggaaattatttacttgtcagaaaacagaatatcaccgttggtaaaagatacccggcagagttatgcaaatagttcctcttttcaacgtcatatccg

SEQ ID NO: 127487 - DNA, 120 bp, Artificial Sequence
  ENSG00000101916_13 (sequence is synthesized)
gaaacgacgctcaacagattttgagtttgacccacattcgaacttttatcatttcacccgtcctttaataaagccacaatgtgctgcttatggaaaagccttagatttaagcctcaacag

SEQ ID NO: 127488 - DNA, 120 bp, Artificial Sequence
  ENSG00000101916_14 (sequence is synthesized)
ttcattgggccaaaccaatttgaaaatcttcctgacattgcctgtttaaatctgtctgcaaatagcaatgctcaagtgttaagtggaactgaattttcagccattcctcatgtcaaatat

SEQ ID NO: 127489 - DNA, 120 bp, Artificial Sequence
  ENSG00000101916_15 (sequence is synthesized)
ttggatttgacaaacaatagactagactttgataatgctagtgctcttactgaattgtccgacttggaagttctagatctcagctataattcacactatttcagaatagcaggcgtaaca

SEQ ID NO: 127490 - DNA, 120 bp, Artificial Sequence
  ENSG00000101916_16 (sequence is synthesized)
catcatctagaatttattcaaaatttcacaaatctaaaagttttaaacttgagccacaacaacatttatactttaacagataagtataacctggaaagcaagtccctggtagaattagtt

SEQ ID NO: 127491 - DNA, 120 bp, Artificial Sequence
  ENSG00000101916_17 (sequence is synthesized)
ttcagtggcaatcgccttgacattttgtggaatgatgatgacaacaggtatatctccattttcaaaggtctcaagaatctgacacgtctggatttatcccttaataggctgaagcacatc

SEQ ID NO: 127492 - DNA, 120 bp, Artificial Sequence
  ENSG00000101916_18 (sequence is synthesized)
ccaaatgaagcattccttaatttgccagcgagtctcactgaactacatataaatgataatatgttaaagttttttaactggacattactccagcagtttcctcgtctcgagttgcttgac

SEQ ID NO: 127493 - DNA, 120 bp, Artificial Sequence
  ENSG00000101916_19 (sequence is synthesized)
ttacgtggaaacaaactactctttttaactgatagcctatctgactttacatcttcccttcggacactgctgctgagtcataacaggatttcccacctaccctctggctttctttctgaa

SEQ ID NO: 127494 - DNA, 120 bp, Artificial Sequence
  ENSG00000101916_20 (sequence is synthesized)
gtcagtagtctgaagcacctcgatttaagttccaatctgctaaaaacaatcaacaaatccgcacttgaaactaagaccaccaccaaattatctatgttggaactacacggaaaccccttt

SEQ ID NO: 127495 - DNA, 120 bp, Artificial Sequence
  ENSG00000101916_21 (sequence is synthesized)
gaatgcacctgtgacattggagatttccgaagatggatggatgaacatctgaatgtcaaaattcccagactggtagatgtcatttgtgccagtcctggggatcaaagagggaagagtatt

SEQ ID NO: 127496 - DNA, 120 bp, Artificial Sequence
  ENSG00000101916_22 (sequence is synthesized)
gtgagtctggagctaacaacttgtgtttcagatgtcactgcagtgatattatttttcttcacgttctttatcaccaccatggttatgttggctgccctggctcaccatttgttttactgg

SEQ ID NO: 127497 - DNA, 120 bp, Artificial Sequence
  ENSG00000101916_23 (sequence is synthesized)
gatgtttggtttatatataatgtgtgtttagctaaggtaaaaggctacaggtctctttccacatcccaaactttctatgatgcttacatttcttatgacaccaaagatgcctctgttact

SEQ ID NO: 127498 - DNA, 120 bp, Artificial Sequence
  ENSG00000101916_24 (sequence is synthesized)
gactgggtgataaatgagctgcgctaccaccttgaagagagccgagacaaaaacgttctcctttgtctagaggagagggattgggacccgggattggccatcatcgacaacctcatgcag

SEQ ID NO: 127499 - DNA, 120 bp, Artificial Sequence
  ENSG00000101916_25 (sequence is synthesized)
agcatcaaccaaagcaagaaaacagtatttgttttaaccaaaaaatatgcaaaaagctggaactttaaaacagctttttacttggctttgcagaggctaatggatgagaacatggatgtg

SEQ ID NO: 127500 - DNA, 120 bp, Artificial Sequence
  ENSG00000101916_26 (sequence is synthesized)
attatatttatcctgctggagccagtgttacagcattctcagtatttgaggctacggcagcggatctgtaagagctccatcctccagtggcctgacaacccgaaggcagaaggcttgttt

SEQ ID NO: 127501 - DNA, 120 bp, Artificial Sequence
  ENSG00000101916_27 (sequence is synthesized)
tggcaaactctgagaaatgtggtcttgactgaaaatgattcacggtataacaatatgtatgtcgattccattaagcaatactaactgacgttaagtcatgatttcgcgccataataaaga

SEQ ID NO: 127502 - DNA, 120 bp, Artificial Sequence
  ENSG00000101916_28 (sequence is synthesized)
agtttctcttctcggccacctcctgcatagagggtaccattctgcgctgctgcaagttacggaatgaaaaattagaacaacagaaacatggaaaacatgttccttcagtcgtcaatgctg

SEQ ID NO: 127503 - DNA, 120 bp, Artificial Sequence
  ENSG00000101916_29 (sequence is synthesized)
gaatgacatttctgtattagttatctattgctatgtaacaaattatcccaaaacttagtggtttaaaacaacacatttgctggcccacagtttttgagggtcaggagtccaggcccagca

SEQ ID NO: 127504 - DNA, 120 bp, Artificial Sequence
  ENSG00000101916_30 (sequence is synthesized)
taactgggtcctctgctcagggtgtctcagaggctgcaatgtaggtgttcaccagagacataggcatcactggggtcacactcatgtggttgttttctggattcaattcctcctgggcta

SEQ ID NO: 127505 - DNA, 120 bp, Artificial Sequence
  ENSG00000101916_31 (sequence is synthesized)
ttggccaaaggctatactcatgtaagccatgcgagcctctcccacaaggcagcttgcttcatcagagctagcaaaaaagagaggttgctagcaagatgaagtcacaatcttttgtaatcg

SEQ ID NO: 127506 - DNA, 120 bp, Artificial Sequence
  ENSG00000101916_32 (sequence is synthesized)
aatcaaaaaagtgatatctcatcactttggccatattctatttgttagaagtaaaccacaggtcccaccagctccatgggagtgaccacctcagtccagggaaaacagctgaagaccaag

SEQ ID NO: 127507 - DNA, 120 bp, Artificial Sequence
  ENSG00000101916_33 (sequence is synthesized)
atggtgagctctgattgcttcagttggtcatcaactattttcccttgactgctgtcctgggatggcctgctatcttgatgatagattgtgaatatcaggaggcagggatcactgtggacc

SEQ ID NO: 127508 - DNA, 120 bp, Artificial Sequence
  ENSG00000101916_34 (sequence is synthesized)
atcttagcagttgacctaacacatcttcttttcaatatctaagaacttttgccactgtgactaatggtcctaatattaagctgttgtttatatttatcatatatctatggctacatggtt

SEQ ID NO: 127509 - DNA, 120 bp, Artificial Sequence
  ENSG00000101916_35 (sequence is synthesized)
atattatgctgtggttgcgttcggttttatttacagttgcttttacaaatatttgctgtaacatttgacttctaaggtttagatgccatttaagaactgagatggatagcttttaaagca

SEQ ID NO: 127510 - DNA, 120 bp, Artificial Sequence
  ENSG00000101916_36 (sequence is synthesized)
tcttttacttcttaccattttttaaaagtatgcagctaaattcgaagcttttggtctatattgttaattgccattgctgtaaatcttaaaatgaatgaataaaaatgtttcattttacaa

SEQ ID NO: 127511 - DNA, 120 bp, Artificial Sequence
  ENSG00000101928_0 (sequence is synthesized)
ggaggagcagtcgcagctgctttccgaggaagccggtgttgccgagattgccaaaatgctttggagtttttaactgaatctaagaaaagtccaaaatagatttgagactgtaaaaacaga

SEQ ID NO: 127512 - DNA, 120 bp, Artificial Sequence
  ENSG00000101928_1 (sequence is synthesized)
aactgcagcaagggggattcagtgccaatgcatcaacaaaaaagacaaccagagttagtggaaggaaatcttcctgttttcgtgttccccacggagctcatattttatgcagatgatcag

SEQ ID NO: 127513 - DNA, 120 bp, Artificial Sequence
  ENSG00000101928_2 (sequence is synthesized)
tcaacacataagcaagtgttgacactgtacaatccctatgagtttgccttaaagttcaaagttttgtgtactactccaaataagtatgttgtcgttgatgctgcaggtgcagtaaagcct

SEQ ID NO: 127514 - DNA, 120 bp, Artificial Sequence
  ENSG00000101928_3 (sequence is synthesized)
tggtgtaatagacaaattccgtctccaagtttccgagcaaagccaaaggaaggctttgggaagaaaagaggttgttgctactcttctcccatcagcaaaagaacaacaaaaggaagaaga

SEQ ID NO: 127515 - DNA, 120 bp, Artificial Sequence
  ENSG00000101928_4 (sequence is synthesized)
ggaaaaaagattaaaggaacatttaactgaaagtttattttttgagcagtcgtttcaaccaggtcttatcacaatggccatacttagaacatgagcaaggatttcaattgacttctgaag

SEQ ID NO: 127516 - DNA, 120 bp, Artificial Sequence
  ENSG00000101928_5 (sequence is synthesized)
taaatctgtcttgaaaatatgaatgtggactgccttttatctctatttcactccattaacatgcaacaaactattgaatgatttcaaataattgcaaatgtataatatatattttaaatt

SEQ ID NO: 127517 - DNA, 120 bp, Artificial Sequence
  ENSG00000101928_6 (sequence is synthesized)
accaggtaaaaacagagctgtatcctcaggacctagtttactaactgtcttcctgggagtggtgtgcattgcagccctgatgctgcctacactgggggatgtggaatcgctggtgcctct

SEQ ID NO: 127518 - DNA, 120 bp, Artificial Sequence
  ENSG00000101928_7 (sequence is synthesized)
atgcttcgaagttacaggactaaaagagcaaactgaccggcctaaaactaaaatgacatttattccctagctacaaacatcagcgttattatgttaattataccttgccctctatcatta

SEQ ID NO: 127519 - DNA, 120 bp, Artificial Sequence
  ENSG00000101928_8 (sequence is synthesized)
taaatggttgccatggtgtttctaaaaataagtgttttaccattaatgtgtagagggcaaacaaagcataaagtactaagggatcatgcttatcctagggtctcacagaagagaggacat

SEQ ID NO: 127520 - DNA, 120 bp, Artificial Sequence
  ENSG00000101928_9 (sequence is synthesized)
atttaattaatcttgtgaattacagaacaggttgtggtccagacaccaagaatcataggggtttttttttaaaaaacctaatagaagtagggtgacctctctctttggtctaagagttct

SEQ ID NO: 127521 - DNA, 120 bp, Artificial Sequence
  ENSG00000101928_10 (sequence is synthesized)
aaaggaaggtaggcatctgtttaattagttggttcaccctggctttacctctggttaatgctttgtgttaataggaaggaaaaatcactttatcttttcttccaagcccctccctgcctg

SEQ ID NO: 127522 - DNA, 120 bp, Artificial Sequence
  ENSG00000101928_11 (sequence is synthesized)
acttacccagactgggattaccagataccaggtgatttatgtggagatgatttttcacctttaaactctaagccaagtgtaagaaactcttgatagctatgtctattttatatcagtcac

SEQ ID NO: 127523 - DNA, 120 bp, Artificial Sequence
  ENSG00000101928_12 (sequence is synthesized)
tgagacttttttttaagtttttatttattattaagacaactttgccaaaaaagtcccctaagcacaactatttacatttctttatagcctcttctgatctctaacacatatgcagtttta

SEQ ID NO: 127524 - DNA, 120 bp, Artificial Sequence
  ENSG00000101928_13 (sequence is synthesized)
actgttattttcatagtaactgatcttttgtctaaggatttttacctgaaagcacaatgtattgagtctcttgaaaatcatctttcagatctttttacagaatgaacttatgcactgcta

SEQ ID NO: 127525 - DNA, 120 bp, Artificial Sequence
  ENSG00000101928_14 (sequence is synthesized)
ctgtagtattctcaaggaatatatgtaaacacaaatgtatgcctgaggttggtttttgcagaaaacagtctctgcttctaaaaacttctatgtctagtcttccataggaaatcctcactg

SEQ ID NO: 127526 - DNA, 120 bp, Artificial Sequence
  ENSG00000101928_15 (sequence is synthesized)
tttaaccatgtgaggagcctaagtcattaaacggatcatgtctgtacattgtgtaatgaatgaaaagcacataaatgtaatctactttgaactttgtaaaaatgatgtgtggaggctatt

SEQ ID NO: 127527 - DNA, 120 bp, Artificial Sequence
  ENSG00000101928_16 (sequence is synthesized)
cttgtttctccatctcaagtcctgtgtgtgcacgtgtgtgcaagtgcacatgtgtgtgtgtaataacacattgtaaagaacagaaattactttaaaaaataaacagaaatggagacctga

SEQ ID NO: 127528 - DNA, 120 bp, Artificial Sequence
  ENSG00000101928_17 (sequence is synthesized)
agtcgcagctgctttccgaggaagccggtgttgccgagtcggagtctccctctgtagcccaggctggagtgcagcagtgtgatctcgggtcactgcatcctttacctcccaggttcaagc

SEQ ID NO: 127529 - DNA, 120 bp, Artificial Sequence
  ENSG00000101928_18 (sequence is synthesized)
ctgggtttttaactggtccctactaattttttacttgtagaaactaattaaaaaaaaaaaacactaatggccattgtgactttttctttcagttttgtgtactactccaaataagtatgt

SEQ ID NO: 127530 - DNA, 120 bp, Artificial Sequence
  ENSG00000101928_19 (sequence is synthesized)
tgtcgttgatgctgcaggtgcagtaaagcctcagtgttgtgtggatatgtaagtcaagatcaattcctggtaacacgttttaagtgtgttaatatttatgtttttaacttgaaaaaaaaa

SEQ ID NO: 127531 - DNA, 120 bp, Artificial Sequence
  ENSG00000101935_0 (sequence is synthesized)
gagactgttccaagatggcggcgggttgctgcggggtgaagaagcagaaactgtccagttcgcccccctctggctcgggtggcggtggtggcgcctcctcctcctcccactgcagcggag

SEQ ID NO: 127532 - DNA, 120 bp, Artificial Sequence
  ENSG00000101935_1 (sequence is synthesized)
agagccagtgccgagctggggagctgggactaggaggcgccggtacgcggctcaacgggctgggaggtctaaccggaggaggtagcggcagcggctgtaccctctctcccccccagggct

SEQ ID NO: 127533 - DNA, 120 bp, Artificial Sequence
  ENSG00000101935_2 (sequence is synthesized)
gcggcggcggcggcggggggatcgccctgtcgccacctccgagctgcggagtggggaccctactttctaccccggccgccgccacctcttcctcaccctcctcatcgtccgccgcctcgt

SEQ ID NO: 127534 - DNA, 120 bp, Artificial Sequence
  ENSG00000101935_3 (sequence is synthesized)
cctcatcgccgggctcccggaagatggtggtgtcagcagagatgtgctgcttttgcttcgatgtgctctactgtcacctgtatggataccagcagccccggaccccccgattcaccaacg

SEQ ID NO: 127535 - DNA, 120 bp, Artificial Sequence
  ENSG00000101935_4 (sequence is synthesized)
agccctacccactgtttgtaacatggaagattggtcgagacaaaagattacgtggatgcataggtactttttctgccatgaatttgcattcaggactcagggagtacacacttaccagtg

SEQ ID NO: 127536 - DNA, 120 bp, Artificial Sequence
  ENSG00000101935_5 (sequence is synthesized)
cccttaaagatagccgttttcccccaatgacaagggatgagctgccacggcttttctgctcagtgtctctgctcactaactttgaagatgtctgtgattatttggactgggaggtgggtg

SEQ ID NO: 127537 - DNA, 120 bp, Artificial Sequence
  ENSG00000101935_6 (sequence is synthesized)
tacatggcattagaatagaattcatcaatgaaaaaggatcaaaacgcaccgccacctacctaccggaggttgcaaaggagcaaggatgggaccatatacagaccatagactccttattga

SEQ ID NO: 127538 - DNA, 120 bp, Artificial Sequence
  ENSG00000101935_7 (sequence is synthesized)
ggaaaggaggatacaaagctccgattactaatgaattcaggaaaaccataaaactgaccaggtatcgtagtgaaaagatgaccctgagctatgctgaataccttgctcatcgccagcatc

SEQ ID NO: 127539 - DNA, 120 bp, Artificial Sequence
  ENSG00000101935_8 (sequence is synthesized)
atcatttccaaaatggcattgggcatccccttccgccatacaaccattattcctgacactgagccgcacaaccagtcactgggcctctctgcagacctcttcccaggagaccctacacct

SEQ ID NO: 127540 - DNA, 120 bp, Artificial Sequence
  ENSG00000101935_9 (sequence is synthesized)
tcttggtctagctatctcttttactgtaccattttatgatgatagtttccgttgccatggtgaagcttcgacatcgtcaactaagatcatcatggtaacgggtagaaaaatggcatttgt

SEQ ID NO: 127541 - DNA, 120 bp, Artificial Sequence
  ENSG00000101935_10 (sequence is synthesized)
taagatcctgttttattattttagatcgttgattttttttttgcagcatatataattttgggtttttttttccttataatattatgtagaattttgctttgctgtctcagtcaggtttct

SEQ ID NO: 127542 - DNA, 120 bp, Artificial Sequence
  ENSG00000101935_11 (sequence is synthesized)
gtttttctgtcctccttgcctttcttcccgttttgcttcctgttttccttcttccttcccgttttccttcttccttccctgcctcccttcctttgactgtggatggaagaaagtgtgcag

SEQ ID NO: 127543 - DNA, 120 bp, Artificial Sequence
  ENSG00000101935_12 (sequence is synthesized)
tttttagggattttacttaggttcgtctttagttttcctcagtaagatagttgttttttgatacctgagtttgggattaattcatatcaaattcaggtatttgtatattactcttgattt

SEQ ID NO: 127544 - DNA, 120 bp, Artificial Sequence
  ENSG00000101935_13 (sequence is synthesized)
ttgtctgaaattcactttgctatgacagcctagtagttgggtcttcactccttaagtatatgtttttcccatggtgaaaatacatgaactttagttctagtagtgagcattcaaaggtcc

SEQ ID NO: 127545 - DNA, 120 bp, Artificial Sequence
  ENSG00000101935_14 (sequence is synthesized)
gtgatagggcttgtcacagagagagagaaatcatttatccctattgtgctggttatcatagaagagactgcctcaccactttatagaaccaatttgcaaactaaaacactgtttggagaa

SEQ ID NO: 127546 - DNA, 120 bp, Artificial Sequence
  ENSG00000101935_15 (sequence is synthesized)
ggtacaaactacctttcaaaaaggctacaggaaacattttatgagcagcaaatattaggaagagagcagatacagaatttagtgcctttgagaagaatataattaagtggaattaagagg

SEQ ID NO: 127547 - DNA, 120 bp, Artificial Sequence
  ENSG00000101935_16 (sequence is synthesized)
ggttagaaaaaaggcaatttagaaaaatattcttgtaaaactttattgtttctatatgtgaaacagaagattagacaaattccttactcttaagtatttttttaagctgaaaaaaaatta

SEQ ID NO: 127548 - DNA, 120 bp, Artificial Sequence
  ENSG00000101935_17 (sequence is synthesized)
ttttgagcaaataaccaataagagacatttgtctattttatattaatttaaatttgttagctctaggtttcaataagtcatgattggctagaatccattttagctaccatctaaagatat

SEQ ID NO: 127549 - DNA, 120 bp, Artificial Sequence
  ENSG00000101935_18 (sequence is synthesized)
ggtaaagataatttagtaaaacaaaagttcatatttgccatgatttcagatatgtttgtcatggggacaatattagagttttagagatactataaaatagcttgaatttctttctgcact

SEQ ID NO: 127550 - DNA, 120 bp, Artificial Sequence
  ENSG00000101935_19 (sequence is synthesized)
acatacttttgatagaaacacatttactacattgataagatgttatgtcacacctgtgaaaatggagttggcattcagatatgctatagttagagcccagctcatctgcaagtatagtct

SEQ ID NO: 127551 - DNA, 120 bp, Artificial Sequence
  ENSG00000101935_20 (sequence is synthesized)
tcccatgatgcatacaaagataacttactgatgtcgataggaggtccatacatatatccccaggaaaaatgacagattattctggaggaagatgaccttcattttatggttatgtgtgtg

SEQ ID NO: 127552 - DNA, 120 bp, Artificial Sequence
  ENSG00000101935_21 (sequence is synthesized)
tgtctgtgtgtctttggaaaaatatatataattttttcaaataggaagccaacatatcaagtgatgaattaaagtatgctgcagaatatatattctaaaactacaaaaaagtcactgaat

SEQ ID NO: 127553 - DNA, 120 bp, Artificial Sequence
  ENSG00000101935_22 (sequence is synthesized)
tcctttcctagtttgtgagataatgggctaaattccttctgcctgccactggggcaaagcaaattgctttagtttttgatgagagttcttagaagtttgttggtattccttcatccacag

SEQ ID NO: 127554 - DNA, 120 bp, Artificial Sequence
  ENSG00000101935_23 (sequence is synthesized)
catccattgttgaaataaccattttcagttgtgatgccttaactaagaagccaattgttagcctgaaatgcaatcttggtagccagtttcaatgaagctagagattagtcagaaaaagtt

SEQ ID NO: 127555 - DNA, 120 bp, Artificial Sequence
  ENSG00000101935_24 (sequence is synthesized)
agctgttgggctttagaaagggattttgagtcctgtcatttctacttgggagcattttggagcagattagtctttcagtataaaaacaagtggctacctgatggaaacttttcttaccct

SEQ ID NO: 127556 - DNA, 80 bp, Artificial Sequence
  ENSG00000101935_25 (sequence is synthesized)
taaaaacaagtggctacctgatggaaacttttcttacccttatagggaaactgagcacaagctgaatgatattgtctgct

SEQ ID NO: 127557 - DNA, 120 bp, Artificial Sequence
  ENSG00000101935_26 (sequence is synthesized)
gagagacaaaatagaccaatattatcgtgaaatccatcttatccatcatctcatcggttcaacaggctcctcgtcctgggtgagcttatggttagaagtttttttagcaaagatttatta

SEQ ID NO: 127558 - DNA, 120 bp, Artificial Sequence
  ENSG00000101935_27 (sequence is synthesized)
catacatagatgtgtgtgtgtacatatacttacacatacatacatacatatatgtgtgtttatttaacggtgctaatcaatcttgagcaggtcacgtgactggtcatgcggactctaaaa

SEQ ID NO: 127559 - DNA, 120 bp, Artificial Sequence
  ENSG00000101935_28 (sequence is synthesized)
tcatatcagattttttaaaatccttgatatatgcagatgttatacagattttcttagcagtgtaataacgttaaactgaagaaataaccatcctgcaggcttcaaaggacgaggtcagca

SEQ ID NO: 127560 - DNA, 120 bp, Artificial Sequence
  ENSG00000101935_29 (sequence is synthesized)
atatttcccaacatggcttgggggaaaaggatagttttgtctccttttgtattcaagtaatgcaaagtgcatttttgtctctaagtagcttttgactaaaagactttgtagtgtaaaggg

SEQ ID NO: 127561 - DNA, 120 bp, Artificial Sequence
  ENSG00000101935_30 (sequence is synthesized)
tgttatacaaactgtaatggtgtgcttcaaacaaatgctagaccctttcacctttgtcgtatatacaaagctgttaattatgtggtatgaattaactttgaacatgttgaaatatgtagc

SEQ ID NO: 127562 - DNA, 120 bp, Artificial Sequence
  ENSG00000101935_31 (sequence is synthesized)
atgtctttaactcagacgaagattctgattgcacaggttgtgttctagccagttgtgatttatttgttcagaaacacaaatgtgaattgcactcttatcatcagaatattgtatgagttc

SEQ ID NO: 127563 - DNA, 120 bp, Artificial Sequence
  ENSG00000101935_32 (sequence is synthesized)
agtgatctttaaacagctcagaagtaatacttgaacttcatttgagtagcacaaagtttacatagccccttttaaatgttaattcgttccatttaagttttccattttcagatgcaactg

SEQ ID NO: 127564 - DNA, 120 bp, Artificial Sequence
  ENSG00000101935_33 (sequence is synthesized)
ggtatttttcctcttggaaatagtacgtactttgctttggtatgtagcaaaaggcttccatttctggaagggttttcttgttcttaaacaaggtcagccaggtaccagattctaaaagaa

SEQ ID NO: 127565 - DNA, 120 bp, Artificial Sequence
  ENSG00000101935_34 (sequence is synthesized)
caaattgtcccccacccctcaagtggccttctgactgcacgagaatgtgctactaccctctgtagtctcccctaacacgagaggtcagtgaaattgatggaggaagtgcaaggcttgctt

SEQ ID NO: 127566 - DNA, 120 bp, Artificial Sequence
  ENSG00000101935_35 (sequence is synthesized)
cccctcacccttaaagcttaaagcagttgtaagattttcagtccagcacatacagtcccagtgcccagcacaccggaagtttgtatactggcctcttatcttgtcttcaaatgtgcagga

SEQ ID NO: 127567 - DNA, 120 bp, Artificial Sequence
  ENSG00000101935_36 (sequence is synthesized)
aatttgaaactgtcatctggaataggttccatctcttatgtgtgttagatcaaaccaaagaagcccccagccatgcccaaatgctgcttcaaaagcctgccttccagtccttacaaaaac

SEQ ID NO: 127568 - DNA, 120 bp, Artificial Sequence
  ENSG00000101935_37 (sequence is synthesized)
cttgcaggattaaatgtgttaacttttttatttttgtacagtttctaagtgatttttgctagtgatgttaaaatgaattaagtttatttgaggggtgtgagcacctcctccatttaaata

SEQ ID NO: 127569 - DNA, 120 bp, Artificial Sequence
  ENSG00000101935_38 (sequence is synthesized)
aactggtgactttccttttattttttaaaagtggaaacccgttgtgtgcctctcgatttaagggtttctgatgacattattcttaagaccagcattgatcctttatatacaaatatatgt

SEQ ID NO: 127570 - DNA, 120 bp, Artificial Sequence
  ENSG00000101935_39 (sequence is synthesized)
tttccttgttttttattgctatttcagaagaaaatgaaccttttattttgctctacccagtaactgcgctggtacatagacgcactgagcaaacaaacttttgtaaccacctctgactac

SEQ ID NO: 127571 - DNA, 120 bp, Artificial Sequence
  ENSG00000101935_40 (sequence is synthesized)
ttttgtatatcaaagttgattacttttgaaatatttggatctagtttctaagttattttagtgttttatatgttccccaaaattactttgaatctgtcaccagcataatgagttcttggt

SEQ ID NO: 127572 - DNA, 120 bp, Artificial Sequence
  ENSG00000101935_41 (sequence is synthesized)
gatacaatggtgagacttgtaatgagcaaaaagctacctggagtagctcctcttttccttctttcttagtaacctgttttttgattaccgtaagacatcacagattacctgaaacccctt

SEQ ID NO: 127573 - DNA, 120 bp, Artificial Sequence
  ENSG00000101935_42 (sequence is synthesized)
ccagtataactaggccctccttccttccacatttaattgcttaatagtttgaagaaactattggaaatgggcattttatatgacatgtatggctttacaatattaaatatgagcaaaaag

SEQ ID NO: 127574 - DNA, 120 bp, Artificial Sequence
  ENSG00000101935_43 (sequence is synthesized)
aaaaaatatgagaaggtttatgtgggtctgtaaggtatggctgtggaaagatattgtagtagttttgacactattgttattacctttaaaatcatttacccaataaaatgttaaaaccga

SEQ ID NO: 127575 - DNA, 120 bp, Artificial Sequence
  ENSG00000101935_44 (sequence is synthesized)
ctctttctctgggctaatcgtttagaggacagtcgctcctgccaacctaatcccatgagcctgactaccttgccgggccacaggctcaaagaagcagtgtggctgccagcaccctcacgg

SEQ ID NO: 127576 - DNA, 120 bp, Artificial Sequence
  ENSG00000101935_45 (sequence is synthesized)
taaggggcacggaggcaccaggcagtctggcaggatgagagacatcctgggggtggtctgagtttggatgtgggctgagaagacaaagcagggggctttcgggggacaagattttccaaa

SEQ ID NO: 127577 - DNA, 120 bp, Artificial Sequence
  ENSG00000101935_46 (sequence is synthesized)
catcttattcttaggatcatcacttcctaatctgatgcaactgactcggcaggcattcgggagcctgtaagctccattttcctgttccaaattcttctgcacctcaccatgagtcctcac

SEQ ID NO: 127578 - DNA, 120 bp, Artificial Sequence
  ENSG00000101935_47 (sequence is synthesized)
cttgaccctaatcaacttgggattctcctcaaagtacttagaaaggaaaaggaagacggtgactaccctgacatgatggccacccacccgagctccaggtatgaagcctgctcctctgga

SEQ ID NO: 127579 - DNA, 120 bp, Artificial Sequence
  ENSG00000101935_48 (sequence is synthesized)
cattcgatatactttcactgtgatctgtaagcatattacatacaactttagtaacatattttctagtgagatcttggattgctgcaaggtggtaacagattctctgctttgcttcaggtg

SEQ ID NO: 127580 - DNA, 120 bp, Artificial Sequence
  ENSG00000101935_49 (sequence is synthesized)
ttagtggatctttgagtaattcctatggaatggagtctctgaaaaattggttttgatgctgttagcctaggggtcccacagcactgtatctgcctcaaataaatgcttatgtactagtta

SEQ ID NO: 127581 - DNA, 120 bp, Artificial Sequence
  ENSG00000101935_50 (sequence is synthesized)
acaaacaacaaggctccatgtcatgagaaaagcactgtagcctgatcttcacttatgttttaggtatttgaaaattacattgatttcaaatagtttgaactgcattgagctaaaacttat

SEQ ID NO: 127582 - DNA, 120 bp, Artificial Sequence
  ENSG00000101938_0 (sequence is synthesized)
gacggagaaggccagtgcccagcttgaaggttctgtcaccttttgcagtggtccaaatgagaaaaaagtggaaaatgggaggcatgaaatacatcttttcgttgttgttctttcttttgc

SEQ ID NO: 127583 - DNA, 120 bp, Artificial Sequence
  ENSG00000101938_1 (sequence is synthesized)
tagaaggaggcaaaacagagcaagtaaaacattcagagacatattgcatgtttcaagacaagaagtacagagtgggtgagagatggcatccttacctggaaccttatgggttggtttact

SEQ ID NO: 127584 - DNA, 120 bp, Artificial Sequence
  ENSG00000101938_2 (sequence is synthesized)
gcgtgaactgcatctgctcagagaatgggaatgtgctttgcagccgagtcagatgtccaaatgttcattgcctttctcctgtgcatattcctcatctgtgctgccctcgctgcccagact

SEQ ID NO: 127585 - DNA, 120 bp, Artificial Sequence
  ENSG00000101938_3 (sequence is synthesized)
ccttacccccagtgaacaataaggtgaccagcaagtcttgcgagtacaatgggacaacttaccaacatggagagctgttcgtagctgaagggctctttcagaatcggcaacccaatcaat

SEQ ID NO: 127586 - DNA, 120 bp, Artificial Sequence
  ENSG00000101938_4 (sequence is synthesized)
gcacccagtgcagctgttcggagggaaacgtgtattgtggtctcaagacttgccccaaattaacctgtgccttcccagtctctgttccagattcctgctgccgggtatgcagaggagatg

SEQ ID NO: 127587 - DNA, 120 bp, Artificial Sequence
  ENSG00000101938_5 (sequence is synthesized)
gagaactgtcatgggaacattctgatggtgatatcttccggcaacctgccaacagagaagcaagacattcttaccaccgctctcactatgatcctccaccaagccgacaggctggaggtc

SEQ ID NO: 127588 - DNA, 120 bp, Artificial Sequence
  ENSG00000101938_6 (sequence is synthesized)
tgtcccgctttcctggggccagaagtcaccggggagctcttatggattcccagcaagcatcaggaaccattgtgcaaattgtcatcaataacaaacacaagcatggacaagtgtgtgttt

SEQ ID NO: 127589 - DNA, 120 bp, Artificial Sequence
  ENSG00000101938_7 (sequence is synthesized)
ccaatggaaagacctattctcatggcgagtcctggcacccaaacctccgggcatttggcattgtggagtgtgtgctatgtacttgtaatgtcaccaagcaagagtgtaagaaaatccact

SEQ ID NO: 127590 - DNA, 120 bp, Artificial Sequence
  ENSG00000101938_8 (sequence is synthesized)
gccccaatcgatacccctgcaagtatcctcaaaaaatagacggaaaatgctgcaaggtgtgtccaggtaaaaaagcaaaagaacttccaggccaaagctttgacaataaaggctacttct

SEQ ID NO: 127591 - DNA, 120 bp, Artificial Sequence
  ENSG00000101938_9 (sequence is synthesized)
gcggggaagaaacgatgcctgtgtatgagtctgtattcatggaggatggggagacaaccagaaaaatagcactggagactgagagaccacctcaggtagaggtccacgtttggactattc

SEQ ID NO: 127592 - DNA, 120 bp, Artificial Sequence
  ENSG00000101938_10 (sequence is synthesized)
ccagcacttccatattgagaagatctccaagaggatgtttgaggagcttcctcacttcaagctggtgaccagaacaaccctgagccagtggaagatcttcaccgaaggagaagctcagat

SEQ ID NO: 127593 - DNA, 120 bp, Artificial Sequence
  ENSG00000101938_11 (sequence is synthesized)
cagccagatgtgttcaagtcgtgtatgcagaacagagcttgaagatttagtcaaggttttgtacctggagagatctgaaaagggccactgttaggcaagacagacagtattggatagggt

SEQ ID NO: 127594 - DNA, 120 bp, Artificial Sequence
  ENSG00000101938_12 (sequence is synthesized)
aaagcaagaaaactcaagctgcagctggactgcaggcttattttgcttaagtcaacagtgccctaaaactccaaactcaaatgcagtcaattattcacgccatgcacagcataatttgct

SEQ ID NO: 127595 - DNA, 120 bp, Artificial Sequence
  ENSG00000101938_13 (sequence is synthesized)
cctttgtgtggagtggtgtgtcagcccttgaacatctcctccaaagagactagaagagtcttaaattatatgtgggaggaggagggatagaacatcacaacactgctctagtttcttgga

SEQ ID NO: 127596 - DNA, 120 bp, Artificial Sequence
  ENSG00000101938_14 (sequence is synthesized)
gaatcacatttctttacaggttaaagacaaacaagaccccagggtttttatctagaaagttattcaagtgaaagaaagagaagggaattgcttagtaggagttctgcagtatagaacaat

SEQ ID NO: 127597 - DNA, 120 bp, Artificial Sequence
  ENSG00000101938_15 (sequence is synthesized)
tacttgtatgaaattatacctttgaattttagaatgtcatgtgttcttttaaaaaaattagctccccatcctccctcctcactccctccctccctccttctctctctctctctctctccc

SEQ ID NO: 127598 - DNA, 120 bp, Artificial Sequence
  ENSG00000101938_16 (sequence is synthesized)
acacacacacacacacacacacacgcacgtccacactcacattaaacgaaagctttatttgaagcaaagctagccaagattctacgttacttttcccttgactggatcccaagtagcttg

SEQ ID NO: 127599 - DNA, 120 bp, Artificial Sequence
  ENSG00000101938_17 (sequence is synthesized)
cttgactggatcccaagtagcttggaagtttttgtgcccaggagagtaaataactgtgaacaagaggctctgcccttaggtctttgtggctgtttaagtcaccaacaatagagtcagggt

SEQ ID NO: 127600 - DNA, 120 bp, Artificial Sequence
  ENSG00000101938_18 (sequence is synthesized)
aaagaataaaaacactttcatagcctcattcattcacttagaagtggtaataatttttccctaatgataccacttttcttttccccctgtacctatgggacttccagaaagaagttaaat

SEQ ID NO: 127601 - DNA, 120 bp, Artificial Sequence
  ENSG00000101938_19 (sequence is synthesized)
tgagtaaaatcatcagaaactgaatccatgtaagaaaaaataattgttgaagaaagaagttgatagaattcaaaaaggccatctttttgctttcacatcaataaaatttaccaagtaata

SEQ ID NO: 127602 - DNA, 120 bp, Artificial Sequence
  ENSG00000101938_20 (sequence is synthesized)
tctagaagctctttaaaagggaagttttccttcttctccaattataggagttgatttttactttgcaaagtggctcggtcctcatgagcatctgcatgttgactcttcagttaagaaaat

SEQ ID NO: 127603 - DNA, 120 bp, Artificial Sequence
  ENSG00000101938_21 (sequence is synthesized)
tgttgttcatttagggaggtggatattctgatgaagatctttatcctaaaccttcctactatccttgtcttattcatcaagcagatattttagtcaagaattccagagaaggctgctcct

SEQ ID NO: 127604 - DNA, 120 bp, Artificial Sequence
  ENSG00000101938_22 (sequence is synthesized)
aaaatgtctacttgcagcccaataccagagcataaactatccattctggggtctggctttagaaatcatctttgtgggaagacctaattcttcacagcaaggatctcaggcatgccttct

SEQ ID NO: 127605 - DNA, 120 bp, Artificial Sequence
  ENSG00000101938_23 (sequence is synthesized)
agatttgttccctctgaggggcaggaatgaactgtagaaatgttttaaggacccagaaaccccatatgtctcattccatgactataggtgagagaattctttcctaagagggtttgatac

SEQ ID NO: 127606 - DNA, 120 bp, Artificial Sequence
  ENSG00000101938_24 (sequence is synthesized)
caataggggaaaatgtaaaatgttcagtctttatgacaacctggcataaaggagtcaattcttatgaaagagacacaagggccttatggccagggtttcttgggacaagactctcaccag

SEQ ID NO: 127607 - DNA, 120 bp, Artificial Sequence
  ENSG00000101938_25 (sequence is synthesized)
gggtttcttgggacaagactctcaccagcacatcacacacgttctccttggaagagagaagcagtacatcccggttgagaggtcacaaagcattagtttgtgtgtgtgtgtgtgtgtgtg

SEQ ID NO: 127608 - DNA, 120 bp, Artificial Sequence
  ENSG00000101938_26 (sequence is synthesized)
aaaggggggaaggtgttatgcggctgctccctccgtcccagaggtggcagtgattccataatgtggagactagtaactagatcctaaggcaaagaggtgtttctccttctggatgattca

SEQ ID NO: 127609 - DNA, 120 bp, Artificial Sequence
  ENSG00000101938_27 (sequence is synthesized)
tcccaaagccttcccacccaggtgttctctgaaagcttagccttaagagaacacgcagagagtttccctagatatactcctgcctccaggtgctgggacacacctttgcaaaatgctgtg

SEQ ID NO: 127610 - DNA, 120 bp, Artificial Sequence
  ENSG00000101938_28 (sequence is synthesized)
ggaagcaggagctggggagctgtgttaagtcaaagtagaaaccctccagtgtttggtgttgtgtagagaataggacatagggtaaagaggccaagctgcctgtagttagtagagaagaat

SEQ ID NO: 127611 - DNA, 120 bp, Artificial Sequence
  ENSG00000101938_29 (sequence is synthesized)
ggatgtggttcttcttgtgtatttatttgtatcataaacacttggaacaacaaagaccataagcatcatttagcagttgtagccattttctagttaactcatgtaaacaagtaagagtaa

SEQ ID NO: 127612 - DNA, 120 bp, Artificial Sequence
  ENSG00000101938_30 (sequence is synthesized)
cataacagtattaccctttcactgttctcacaggacatgtacctaattatggtacttatttatgtagtcactgtatttctggatttttaaattaataaaaaagttaattttgaaaaatca

SEQ ID NO: 127613 - DNA, 120 bp, Artificial Sequence
  ENSG00000101940_0 (sequence is synthesized)
ctttctgatagcaggcagccatcttgcctggagcctgagaaagggaggagagacagaaggaaccggcgacagtggtctcagggccgctccggggggcctcaagaaccggaggcagccccg

SEQ ID NO: 127614 - DNA, 120 bp, Artificial Sequence
  ENSG00000101940_1 (sequence is synthesized)
gaggtggtccccgatcccgggctatgctcttggatctgagaagggaaggcggagggcggcggggacaagatgggtggagaatgtcaagcaaggaatgctaggcgggggaggggcgttgct

SEQ ID NO: 127615 - DNA, 120 bp, Artificial Sequence
  ENSG00000101940_2 (sequence is synthesized)
atggcgactggggaggggcggtgtctgttctgaatcgctgtgtgtcacccgggcgctgcccaggaagggcagggctggggtgatgaccatggtaacacccgggggggagttcgtgacatc

SEQ ID NO: 127616 - DNA, 120 bp, Artificial Sequence
  ENSG00000101940_3 (sequence is synthesized)
tccggcgcggagggactcgatgtctatggcaatggtcgcctggtggaagggacggaactagatcccttcgctcgggacgctcacattccaggcccttgtcctgcaggctgccgcgggcgg

SEQ ID NO: 127617 - DNA, 120 bp, Artificial Sequence
  ENSG00000101940_4 (sequence is synthesized)
acacgccagaggaggaggccggggaatggccgcggtgtggcagcaagtcttagcagtggacgcgaggtacaacgcgtaccgcacaccaacgtttccacagtttcggacgcagtatatccg

SEQ ID NO: 127618 - DNA, 120 bp, Artificial Sequence
  ENSG00000101940_5 (sequence is synthesized)
ccggcgcagccagctgctgcgggagaatgccaaggctgggcaccccccagcgctgcgtcggcagtacctgaggcttcgggggcagctgctgggccagcgctacgggcccctctccgagcc

SEQ ID NO: 127619 - DNA, 120 bp, Artificial Sequence
  ENSG00000101940_6 (sequence is synthesized)
aggcagtgctcgtgcctatagcaacagcatcgtccgcagtagccgcactactcttgaccgcatggaggactttgaggatgatcctcgggccctgggggcccgtgggcaccgtcgttctgt

SEQ ID NO: 127620 - DNA, 120 bp, Artificial Sequence
  ENSG00000101940_7 (sequence is synthesized)
cagcagaggctcctaccagctgcaggcgcagatgaaccgtgccgtctatgaggacaggccccctggcagcgtggtgcccacgtcagcagcagaggcaagtcgggccatggccggggacac

SEQ ID NO: 127621 - DNA, 120 bp, Artificial Sequence
  ENSG00000101940_8 (sequence is synthesized)
cgccaatgatgaccgacaccgcctggcctgctgctcactcgacggcagcatctccctgtgccagctggtgcctgccccacccacagtgcttcgcgtgctacggggccacacccgtggtgt

SEQ ID NO: 127622 - DNA, 120 bp, Artificial Sequence
  ENSG00000101940_9 (sequence is synthesized)
ctccgacttcgcctggtccctctccaatgacatcctcgtgtccacctcactggatgccaccatgcgcatctgggcctctgaggatggtcgctgcatccgagagatccctgaccccgatag

SEQ ID NO: 127623 - DNA, 120 bp, Artificial Sequence
  ENSG00000101940_10 (sequence is synthesized)
cgctgaactgctctgctgcaccttccagcctgtcaacaacaacctcactgtggtggggaacgccaagcacaacgtgcatgtcatgaacatctccacaggcaagaaagtgaaggggggctc

SEQ ID NO: 127624 - DNA, 120 bp, Artificial Sequence
  ENSG00000101940_11 (sequence is synthesized)
cagcaagctgacaggccgtgtccttgctctgtcctttgatgcccctggccggctgctctgggcgggtgatgaccgtggcagtgtcttctctttcctctttgatatggccacagggaagct

SEQ ID NO: 127625 - DNA, 120 bp, Artificial Sequence
  ENSG00000101940_12 (sequence is synthesized)
gaccaaagccaagcgtttggtggtgcatgaggggagccctgtgaccagcatctcagcccggtcctgggtcagccgcgaggcccgggatccctcactgctcatcaatgcttgcctcaacaa

SEQ ID NO: 127626 - DNA, 120 bp, Artificial Sequence
  ENSG00000101940_13 (sequence is synthesized)
gttgctgctctacagggtggtagacaacgaggggaccctgcagctgaagagaagcttccccatcgagcagagctcacatcctgtgcgcagcatcttctgtcccctcatgtccttccgcca

SEQ ID NO: 127627 - DNA, 120 bp, Artificial Sequence
  ENSG00000101940_14 (sequence is synthesized)
gggggcctgcgtggtgacgggcagtgaggacatgtgcgtgcacttctttgatgtggagcgggcggccaaggctgctgtcaacaagctgcagggccacagtgcacctgtgcttgatgtcag

SEQ ID NO: 127628 - DNA, 120 bp, Artificial Sequence
  ENSG00000101940_15 (sequence is synthesized)
cttcaactgcgacgagagcctactggcctccagtgacgccagcggcatggtcatcgtctggaggcgggagcagaagtagggtcctgtcggccctgctgctgtcctccatcccacccctct

SEQ ID NO: 127629 - DNA, 120 bp, Artificial Sequence
  ENSG00000101940_16 (sequence is synthesized)
tactccagcctcgtgttgtaaataaagtttcggtggtcatgctgagggccggctcccagctctgccggggacggacagggcagagggcagcgggcagctccaggaacacggtggaacggg

SEQ ID NO: 127630 - DNA, 120 bp, Artificial Sequence
  ENSG00000101940_17 (sequence is synthesized)
cattcatgcatcgacggattcattcattccacaagcattgattgaatgtctgctgggttacaggccctgccttaactgttttacacacttatgcattcgatagacattagtgagccctga

SEQ ID NO: 127631 - DNA, 120 bp, Artificial Sequence
  ENSG00000101940_18 (sequence is synthesized)
ccgtgtgccaggaactgttctaggcactggggatactgctctgacctaaactgatggaaatgcctgccttcattgggcttgcatcatagcggagacagtagataaaaacatggaacaggc

SEQ ID NO: 127632 - DNA, 120 bp, Artificial Sequence
  ENSG00000101940_19 (sequence is synthesized)
cagctaatgatgagtggtatgaagaaaataaagcaaggatgggagacagagctgcagaagttgggggagtgggctctttatggtgacagcatcagggaagatgatcctgacagggtgact

SEQ ID NO: 127633 - DNA, 62 bp, Artificial Sequence
  ENSG00000101940_20 (sequence is synthesized)
agggtctcactctgtcacccaggttggaaacttaagcctcccaagtagctgggactacaggt

SEQ ID NO: 127634 - DNA, 120 bp, Artificial Sequence
  ENSG00000101940_21 (sequence is synthesized)
tacaggcatgaaccaccacgcctggctcagggtgacatttaaagacctgaatgaagtgagtgggagtcatagtgtagggggagaacattccaggcagagagaaagccagcctaaaggcac

SEQ ID NO: 127635 - DNA, 120 bp, Artificial Sequence
  ENSG00000101940_22 (sequence is synthesized)
gagagaaagccagcctaaaggcactgaggctggagcgctccagaaggatcattgtgtatgccagagtcttgctggaccagagtgtgacagtacatgaggtcagacaggccagatgcttca

SEQ ID NO: 127636 - DNA, 120 bp, Artificial Sequence
  ENSG00000101940_23 (sequence is synthesized)
agcagaggaggaacatgatctgacttggtcatagaggctccctctggctgctgaaggggacagattgggggtgggggtagaagcaggggacccagcaggagacccctctgagcgcagtga

SEQ ID NO: 127637 - DNA, 120 bp, Artificial Sequence
  ENSG00000101940_24 (sequence is synthesized)
tggggacttgcaccagggtagtgacagtggaggagttggcgggggaatgttgggtcggacccccagggggttcactatgttaggctgcaggactctgctgcctcctcagggggcgatatt

SEQ ID NO: 127638 - DNA, 120 bp, Artificial Sequence
  ENSG00000101940_25 (sequence is synthesized)
cccaacccttctgtgcattgtgttgtttattaaaagcagggagcagaggtgttgagtcctggagccccaagctggtgcaggagcaacgggaagttaaggctgacctggggcctcctgctg

SEQ ID NO: 127639 - DNA, 120 bp, Artificial Sequence
  ENSG00000101940_26 (sequence is synthesized)
tgtggcggaatctccatccctcagaccacccctgtctcctcccagccccatccagggtacaaattccagccctggaacagctcagagaccaaaaagtgatgttaagtatttgaggggagc

SEQ ID NO: 127640 - DNA, 120 bp, Artificial Sequence
  ENSG00000101940_27 (sequence is synthesized)
cccaagagaggagaaaaagctttgagtattgatgggggtaaataaccaaaatcacttatcagtggcctgcgtcaccagaaaatgtcaaagttacctgaagcagcaaagaggctcttgctc

SEQ ID NO: 127641 - DNA, 120 bp, Artificial Sequence
  ENSG00000101940_28 (sequence is synthesized)
cggcccctcccttccttctcagctccatttgttgccacatatgcgttgactggaactgcgactgacatcttgggaccttagggtcagtccacagcgtggtagagactccagcttggccca

SEQ ID NO: 127642 - DNA, 120 bp, Artificial Sequence
  ENSG00000101940_29 (sequence is synthesized)
gcattgctgagctgctgaactcgcaccaacagtcttgttggagggaaataatctcccgtttgttcagtccagttatttgacagtgtggttacttgcaccccaagcatttctaactggcac

SEQ ID NO: 127643 - DNA, 120 bp, Artificial Sequence
  ENSG00000101940_30 (sequence is synthesized)
ttccatctaatagacctcagggtacatggtggtgagatagggacatcagtgagctggattgttcccatggtaaaggtcatgtatgtgtgtgtgtgtcatggtcctcaataccagccccaa

SEQ ID NO: 127644 - DNA, 120 bp, Artificial Sequence
  ENSG00000101940_31 (sequence is synthesized)
gcccagtgatttgctaggaggactcccaagactcagtatgtggttgtattcatggctacgattgacttattacaacaaaaagatatggagcaaaatcagcaaaaagaaatggtgtgcagg

SEQ ID NO: 127645 - DNA, 120 bp, Artificial Sequence
  ENSG00000101940_32 (sequence is synthesized)
accaactcccagagagacccaggcacaagtttccagggcttctctctcattggagtcacacaagatgtgctcggttcacagtaatgggttgtgacaatacatgcgaaatgttgctgacca

SEQ ID NO: 127646 - DNA, 120 bp, Artificial Sequence
  ENSG00000101940_33 (sequence is synthesized)
aggaagctcaattagagactcagcacccagaggttttttttgttgttgttgttgttttggtttttttttggcgggggggggggggtcttgctctgacgcccaggctggaatgcagtggca

SEQ ID NO: 127647 - DNA, 81 bp, Artificial Sequence
  ENSG00000101940_34 (sequence is synthesized)
cagcctccacctcctgggttcaagcgatcctcgggcctcagcttcccgaatagctggaactacaggcgcgcaccagcaagc

SEQ ID NO: 127648 - DNA, 120 bp, Artificial Sequence
  ENSG00000101940_35 (sequence is synthesized)
gtttttattggggcatggtcacataggcaccccctgcctggcacctacccaaatcccaggctcccaaaaggaaagcaggggctcagcataaaccacctttttttttttttttttaattga

SEQ ID NO: 127649 - DNA, 64 bp, Artificial Sequence
  ENSG00000101940_36 (sequence is synthesized)
ttacaggcatgagccaccgctcctggcccacttttttatacaaacagcttaggtagagtaagcc

SEQ ID NO: 127650 - DNA, 120 bp, Artificial Sequence
  ENSG00000101940_37 (sequence is synthesized)
tgcccaggctggagtgcagtggctcaaacatggttcgctgcagcctcaacctcccaggctcaagcggtcctgctgcctcatcctccaaagtagctgggaccacagacatgcaccaccatg

SEQ ID NO: 127651 - DNA, 70 bp, Artificial Sequence
  ENSG00000101940_38 (sequence is synthesized)
cctgctgcctcatcctccaaagtagctgggaccacagacatgcaccaccatgaccccagctgatttttgc

SEQ ID NO: 127652 - DNA, 120 bp, Artificial Sequence
  ENSG00000101940_39 (sequence is synthesized)
acaggtgtgagccaccacacccggcccgagtgagccattcttatctcttagggaatggtgggaaccctcctggagtctatgttcttagacaccacccaagggccaaccttgaagcaggcc

SEQ ID NO: 127653 - DNA, 120 bp, Artificial Sequence
  ENSG00000101940_40 (sequence is synthesized)
tttccaaggatcgcagttgaggcctgctctgttactgtttttctgcacagtgtgcaacaccacacagatgcccagtttctaccaaggtctgtggatggcaggataattttgaggaacctc

SEQ ID NO: 127654 - DNA, 120 bp, Artificial Sequence
  ENSG00000101940_41 (sequence is synthesized)
ctttttcgctaacactttcttcttttgtttacactcttcacattgtctattgagtctggattcaagatgattgattgtgaatattgttgtgcatgattttgggggtttcctccttgtgaa

SEQ ID NO: 127655 - DNA, 120 bp, Artificial Sequence
  ENSG00000101940_42 (sequence is synthesized)
attttgaggtggcagatttgacattctactttaaactcatcttggtggcacttttcttgactcaccacctaagggggaataaataatgaagaaagaataaaaatagtgttatcagtcaca

SEQ ID NO: 127656 - DNA, 120 bp, Artificial Sequence
  ENSG00000101940_43 (sequence is synthesized)
ctgctctgctgcaccttccagcctgtcaacaacaacctcactgtggtcaggctccaggacacccactcaccaagggtggggaacgccaagcacaacgtgcatgtcatgaacatctccaca

SEQ ID NO: 127657 - DNA, 120 bp, Artificial Sequence
  ENSG00000101940_44 (sequence is synthesized)
aagcccatgggagcagaacttactgtggtgcatgcgcaatggcgataagtgaggctgggcggagaacttgccttatgcggctgcgtgggcatgccggaggtgagcatgcgcagtagcggg

SEQ ID NO: 127658 - DNA, 120 bp, Artificial Sequence
  ENSG00000101940_45 (sequence is synthesized)
ggcgggcacgcccgcggtgagttggctgcgccggagaggattctaaacagcaagctgggaaaatgtggtcagatgtgggcatgcgcaaagcggctacctgtgagagggaggtggggctca

SEQ ID NO: 127659 - DNA, 120 bp, Artificial Sequence
  ENSG00000101940_46 (sequence is synthesized)
ctatctaccaaggagcctgttgtgagacagttttctccccacctcctgaggttctggtggggtttgaggctttctacccctcacctctgggctatagaactgcttagctgcagcatgaaa

SEQ ID NO: 127660 - DNA, 120 bp, Artificial Sequence
  ENSG00000101940_47 (sequence is synthesized)
gcaccttccagcctgtcaacaacaacctcactgtggtcaggctccaggacacccactcaccaagggctggtgggctgggtcaggaaggctatctgagggaatcagagtataaggagggac

SEQ ID NO: 127661 - DNA, 120 bp, Artificial Sequence
  ENSG00000101940_48 (sequence is synthesized)
cacctcccaacgctgacccccataatgtcagtctgatttctgtcgccctggtatactgaccctaattattgtctgcgctgacccagtcaccccgtagggaccccagcacggcagcagact

SEQ ID NO: 127662 - DNA, 120 bp, Artificial Sequence
  ENSG00000101940_49 (sequence is synthesized)
gactctgttgtctgcaaactgacctcatgaccatgctcattattactgcagactcactcccaccacaggaccaagaggtccctcatcaccactgctagtcattcttaccacctaggcccc

SEQ ID NO: 127663 - DNA, 120 bp, Artificial Sequence
  ENSG00000101940_50 (sequence is synthesized)
agtcactgccacacacctcactctcctgccgtacccccccccccgagctgattgattccctctgtcctgtgcctgctgcctgccctgcatcctgaccctgcaggtacaacgcgtaccgca

SEQ ID NO: 127664 - DNA, 120 bp, Artificial Sequence
  ENSG00000101940_51 (sequence is synthesized)
gaccgcatggaggtgagcttctggccacattcacccccgggcataccctgcctgcacacattcactccactgactttcatcaagcacctgctctttgctgggcactgttctgcatcagca

SEQ ID NO: 127665 - DNA, 120 bp, Artificial Sequence
  ENSG00000101940_52 (sequence is synthesized)
gaggacaaaaagataatatgccaagtaaaccagtaaacacacaaactttgtaaacaggtcagtaaacatatagcaagccctgtctttagtatctgctgagcagggggagggcaggaacag

SEQ ID NO: 127666 - DNA, 120 bp, Artificial Sequence
  ENSG00000101940_53 (sequence is synthesized)
cagaactcgtgaggaagccactgcagtagtacaagtgggcagcggtggtggtggcaggggacacagtgagaagtgatctgactctaggtagattttcagggctccacacctcaaaggttc

SEQ ID NO: 127667 - DNA, 120 bp, Artificial Sequence
  ENSG00000101940_54 (sequence is synthesized)
tgtatcatgtttttgaccagcacgtggatgaggcaggtgagccagtgggtagcgggttccatcaccaagcgtttgcccaaactgtgacaaccaaccaaggcatccttttctgaatccaag

SEQ ID NO: 127668 - DNA, 120 bp, Artificial Sequence
  ENSG00000101940_55 (sequence is synthesized)
gcccctggcacactccaaaggaggaatgaccatccataaagccttttgtagactgaaaatccctctgcaaagtggtcagtgcttcgtctactggaaagggcctcagaagcctaagagaga

SEQ ID NO: 127669 - DNA, 120 bp, Artificial Sequence
  ENSG00000101940_56 (sequence is synthesized)
gccctttgcagcaggctgcctgggttcctgagtcacttggaagagttcaaagcctttgctgatgataaatccccttgcagagggcagagtgggctacagtgtcaagggttttgcaaattg

SEQ ID NO: 127670 - DNA, 120 bp, Artificial Sequence
  ENSG00000101940_57 (sequence is synthesized)
ccaagaccttgattataaagtgttcgctaagacaggaactttttcatgttgcagaagacttttgcaatctgcaaaggagctgctaagacttagggagctttggcagagggtcttcagggg

SEQ ID NO: 127671 - DNA, 120 bp, Artificial Sequence
  ENSG00000101940_58 (sequence is synthesized)
ttacagttccctttgtcagccaaggaaagccctttgctgaggccactgttcctcatgcagtggggccccagccccaggcacacacgtcagagccttttagagagaaaagtgcccagtgag

SEQ ID NO: 127672 - DNA, 120 bp, Artificial Sequence
  ENSG00000101945_0 (sequence is synthesized)
gcggcgagcacccgcctccgggaccgagccgggcggcagggaggggttcggtcacggctctccggttggtccgcgcgggtgctgcgagtcgggagccgcggccaataggctgcgcgttcc

SEQ ID NO: 127673 - DNA, 120 bp, Artificial Sequence
  ENSG00000101945_1 (sequence is synthesized)
cggccacgcccgcgcgagcgctcttctcgcgaggccggctaggcccgaatgtcgttagccgtggggaaagatggcggaaaatttaaaaggctgcagcgtgtgttgcaagtcttcttggaa

SEQ ID NO: 127674 - DNA, 120 bp, Artificial Sequence
  ENSG00000101945_2 (sequence is synthesized)
tcagctgcaggacctgtgccgcctggccaagctctcctgccctgccctcggtatctctaagaggaacctctatgactttgaagtcgagtacctgtgcgattacaagaagatccgcgaaca

SEQ ID NO: 127675 - DNA, 120 bp, Artificial Sequence
  ENSG00000101945_3 (sequence is synthesized)
ggaatattacctggtgaaatggcgtggatatccagactcagagagcacctgggagccacggcagaatctcaagtgtgtgcgtatcctcaagcagttccacaaggacttagaaagggagct

SEQ ID NO: 127676 - DNA, 120 bp, Artificial Sequence
  ENSG00000101945_4 (sequence is synthesized)
gctccggcggcaccaccggtcaaagaccccccggcacctggacccaagcttggccaactacctggtgcagaaggccaagcagaggcgggcgctccgtcgctgggagcaggagctcaatgc

SEQ ID NO: 127677 - DNA, 120 bp, Artificial Sequence
  ENSG00000101945_5 (sequence is synthesized)
caagcgcagccatctgggacgcatcactgtagagaatgaggtggacctggacggccctccgcgggccttcgtgtacatcaatgagtaccgtgttggtgagggcatcaccctcaaccaggt

SEQ ID NO: 127678 - DNA, 120 bp, Artificial Sequence
  ENSG00000101945_6 (sequence is synthesized)
ggctgtgggctgcgagtgccaggactgtctgtgggcacccactggaggctgctgcccgggggcgtcactgcacaagtttgcctacaatgaccagggccaggtgcggcttcgagccgggct

SEQ ID NO: 127679 - DNA, 120 bp, Artificial Sequence
  ENSG00000101945_7 (sequence is synthesized)
gcccatctacgagtgcaactcccgctgccgctgcggctatgactgcccaaatcgtgtggtacagaagggtatccgatatgacctctgcatcttccgcacggatgatgggcgtggctgggg

SEQ ID NO: 127680 - DNA, 120 bp, Artificial Sequence
  ENSG00000101945_8 (sequence is synthesized)
cgtccgcaccctggagaagattcgcaagaacagcttcgtcatggagtacgtgggagagatcattacctcagaggaggcagagcggcggggccagatctacgaccgtcagggcgccaccta

SEQ ID NO: 127681 - DNA, 120 bp, Artificial Sequence
  ENSG00000101945_9 (sequence is synthesized)
cctctttgacctggactacgtggaggacgtgtacaccgtggatgccgcctactatggcaacatctcccactttgtcaaccacagttgtgaccccaacctgcaggtgtacaacgtcttcat

SEQ ID NO: 127682 - DNA, 120 bp, Artificial Sequence
  ENSG00000101945_10 (sequence is synthesized)
agacaaccttgacgagcggctgccccgcatcgctttctttgccacaagaaccatccgggcaggcgaggagctcacctttgattacaacatgcaagtggaccccgtggacatggagagcac

SEQ ID NO: 127683 - DNA, 120 bp, Artificial Sequence
  ENSG00000101945_11 (sequence is synthesized)
cttagaagtctgaggccagactgactgagggggcctgaagctacatgcacctcccccactgctgccctcctgtcgagaatgactgccagggcctcgcctgcctccacctgcccccacctg

SEQ ID NO: 127684 - DNA, 120 bp, Artificial Sequence
  ENSG00000101945_12 (sequence is synthesized)
ctcctacctgctctacgttcagggctgtggccgtggtgaggaccgactccaggagtcccctttccctgtcccagccccatctgtgggttgcacttacaaacccccacccaccttcagaaa

SEQ ID NO: 127685 - DNA, 120 bp, Artificial Sequence
  ENSG00000101945_13 (sequence is synthesized)
tagtttttcaacatcaagactctctgtcgttgggattcatggcctattaaggaggtccaaggggtgagtcccaacccagccccagaatatatttgtttttgcacctgcttctgcctggag

SEQ ID NO: 127686 - DNA, 120 bp, Artificial Sequence
  ENSG00000101945_14 (sequence is synthesized)
attgaggggtctgctgcaggcctcctccctgctgccccaaaggtatggggaagcaaccccagagcaggcagacatcagaggccagagtgcctagcccgacatgaagctggttccccaacc

SEQ ID NO: 127687 - DNA, 120 bp, Artificial Sequence
  ENSG00000101945_15 (sequence is synthesized)
acagaaactttgtactagtgaaagaaagggggtccctgggctacgggctgaggctggtttctgctcgtgcttacagtgctgggtagtgttggccctaagagctgtagggtctcttcttca

SEQ ID NO: 127688 - DNA, 120 bp, Artificial Sequence
  ENSG00000101945_16 (sequence is synthesized)
gggctgcatatctgagaagtggatgcccacatgccactggaagggaagtgggtgtccatgggccactgagcagtgagaggaaggcagtgcagagctggccagccctggaggtaggctggg

SEQ ID NO: 127689 - DNA, 120 bp, Artificial Sequence
  ENSG00000101945_17 (sequence is synthesized)
accaagctctgccttcacagtgcagtgaaggtacctagggctcttgggagctctgcggttgctaggggccctgacctggggtgtcatgaccgctgacaccactcagagctggaaccaaga

SEQ ID NO: 127690 - DNA, 120 bp, Artificial Sequence
  ENSG00000101945_18 (sequence is synthesized)
tctagatagtccgtagatagcacttaggacaagaatgtgcattgatggggtggtgatgaggtgccaggcactgggtagagcacctggtccacgtggattgtctcagggaagccttgaaaa

SEQ ID NO: 127691 - DNA, 120 bp, Artificial Sequence
  ENSG00000101945_19 (sequence is synthesized)
ccacggaggtggatgccaggaaagggcccatgtggcagaaggcaaagtacaggccaagaattgggggtgggggagatggcttccccactatgggatgacgaggcgagagggaagcccttg

SEQ ID NO: 127692 - DNA, 120 bp, Artificial Sequence
  ENSG00000101945_20 (sequence is synthesized)
ctgcctgccattcccagaccccagccctttgtgctcaccctggttccactggtctcaaaagtcacctgcctacaaatgtacaaaaggcgaaggttctgatggctgccttgctccttgctc

SEQ ID NO: 127693 - DNA, 120 bp, Artificial Sequence
  ENSG00000101945_21 (sequence is synthesized)
ccccaccccctgtgaggacttctctaggaagtccttcctgactacctgtgcccagagtgcccctacatgagactgtatgccctgctatcagatgccagatctatgtgtctgtctgtgtgt

SEQ ID NO: 127694 - DNA, 120 bp, Artificial Sequence
  ENSG00000101945_22 (sequence is synthesized)
ccatcccgccggccccccagactaacctccaggcatggactgaatctggttctcctcttgtacacccctcaaccctatgcagcctggagtgggcatcaataaaatgaactgtcgactgaa

SEQ ID NO: 127695 - DNA, 120 bp, Artificial Sequence
  ENSG00000101945_23 (sequence is synthesized)
gacagaggacaggctgctaagccaggaagcagaatcaaagtaaacagcagtccccatgtgtctcctgtgtgctgtgcactgttcttggctgagatcattacctcagaggaggcagagcgg

SEQ ID NO: 127696 - DNA, 120 bp, Artificial Sequence
  ENSG00000101945_24 (sequence is synthesized)
ctacgaccgtcagggcgccacctacctctttgacctggactacgtggaggacgtgtacaccgtggatgccgcctactatggcaacatctcccactttgtcaaccacagtgtgggtacccc

SEQ ID NO: 127697 - DNA, 120 bp, Artificial Sequence
  ENSG00000101945_25 (sequence is synthesized)
gatcaactatccacgctgctcgaatcacagcatgctggagggcctggctgggtgctctgactgactgatcacctgacagacggtgcggtcagtcggatgctgagaatgactgacgatgtg

SEQ ID NO: 127698 - DNA, 120 bp, Artificial Sequence
  ENSG00000101945_26 (sequence is synthesized)
atgaggggcggattgaacgagtcacaggccagctggccaggagcaaaatcggcatagctgtctgactcgatggctgtacgtggttacggactgtctgccctgatagaatctcagcttcaa

SEQ ID NO: 127699 - DNA, 120 bp, Artificial Sequence
  ENSG00000101951_0 (sequence is synthesized)
gccacttctcttcccttcattcttcgccaggctctctgctgactcaagttcttcagttcacgatcttctagttgcagcgatgagtgcacgagtgagatcaagatccagaggaagaggaga

SEQ ID NO: 127700 - DNA, 120 bp, Artificial Sequence
  ENSG00000101951_1 (sequence is synthesized)
tggtcaggaggctcccgatgtggttgcattcgtggctcccggtgaatctcagcaagaggaaccaccaactgacaatcaggatattgaacctggacaagagagagaaggaacacctccgat

SEQ ID NO: 127701 - DNA, 120 bp, Artificial Sequence
  ENSG00000101951_2 (sequence is synthesized)
cgaagaacgtaaagtagaaggtgattgccaggaaatggatctggaaaagactcggagtgagcgtggagatggctctgatgtaaaagagaagactccacctaatcctaagcatgctaagac

SEQ ID NO: 127702 - DNA, 120 bp, Artificial Sequence
  ENSG00000101951_3 (sequence is synthesized)
cacattgaaaatgtgactgaaaatttgaaaattctctcaataaagtttgagttttctctgaagaagtcatgcgtgtcttttgtaaaatttattcctaggaaattgacactattgtaaatg

SEQ ID NO: 127703 - DNA, 120 bp, Artificial Sequence
  ENSG00000101951_4 (sequence is synthesized)
gtatctttaaaaaatccttgtgttctgtttagagctggtatatatttttgtatactgattttgtgttgggcaacattgctaaacttgcctattctgttggtttatccctacgtccttttg

SEQ ID NO: 127704 - DNA, 120 bp, Artificial Sequence
  ENSG00000101951_5 (sequence is synthesized)
gattttctccatacacaatcataccacatgtaaataatgataattctgttttttccttttgaggctttgtactttcatttctggtccttatgacactggccagacccctccagtacaatg

SEQ ID NO: 127705 - DNA, 120 bp, Artificial Sequence
  ENSG00000101951_6 (sequence is synthesized)
aagtgtaagtgagaacaggtgtgagtgagtgggccggcgggcttctggtgggtcgggcactgtggtccctggcctcagagaaggaagggcctcgaggtcatcatccttctcctagcaggc

SEQ ID NO: 127706 - DNA, 120 bp, Artificial Sequence
  ENSG00000101951_7 (sequence is synthesized)
agctatgcggcggggcagggacaggggaggaaggagggccatgaaggggaggagggtcagccaagatgctgtgagttttggagcgggacactatctgagtcctggaggcatatgaaactg

SEQ ID NO: 127707 - DNA, 120 bp, Artificial Sequence
  ENSG00000101951_8 (sequence is synthesized)
tccataaaggacggatgctggggtcctcagtgggggccagggaaagggtgggacagcccgcgcttgacagcgcctgcctcagtgctcgtgttcactgggggtcttcccatcagccccttc

SEQ ID NO: 127708 - DNA, 120 bp, Artificial Sequence
  ENSG00000101951_9 (sequence is synthesized)
acccacgaggtgaactgccgcggagctgtgagggtgccgtttgcattccaattgtcgggactctttcacctgagactgagactcagtgggtgggtccaccgatcgttcctccatgggagt

SEQ ID NO: 127709 - DNA, 120 bp, Artificial Sequence
  ENSG00000101951_10 (sequence is synthesized)
ttaagtgtgaagaggagctggtgggcttcaggagggtcgggcagcacagtccgtggcctcggaggaggaagggcctcacaggtggtggcgccgccatgaccttgtggttgtggcagggct

SEQ ID NO: 127710 - DNA, 120 bp, Artificial Sequence
  ENSG00000101951_11 (sequence is synthesized)
ggggcgagggaggaagttgggccacggaggggagagggatcagatggagcaaaacttggggggtactttttgaggtatctttgagtcccagaggcacctgaaactgccgaaagaggacag

SEQ ID NO: 127711 - DNA, 120 bp, Artificial Sequence
  ENSG00000101951_12 (sequence is synthesized)
attaaaaaatctcttcataatggagtttagttatgaaattaagtctctttaggaaagaccccatgttttgatctaggacttgaagatcacttctctgccgagctggctgtggaagaaaca

SEQ ID NO: 127712 - DNA, 120 bp, Artificial Sequence
  ENSG00000101951_13 (sequence is synthesized)
aagcagtttgcagatagatttatttgatgtgattggaaaccaggcgtagttattattaactcaggacctattatggaaatctcacaaaattaaaaaaaattacaatcagcagatggccat

SEQ ID NO: 127713 - DNA, 120 bp, Artificial Sequence
  ENSG00000101951_14 (sequence is synthesized)
gggcatggaggagcattttgtgtttcatgtatgattttatactagtaacaggaataaataaaccatcccctaaaaattggctggaaacctgtaaagtaatccttggtaagggaatagtgt

SEQ ID NO: 127714 - DNA, 120 bp, Artificial Sequence
  ENSG00000101951_15 (sequence is synthesized)
agttttcagctgctgtagtccttgtgataaattttctcttcagcattttacttatcttatatcttaagagttctttggcatacttggaaaatacaatccttgccaagactctatattagc

SEQ ID NO: 127715 - DNA, 120 bp, Artificial Sequence
  ENSG00000101951_16 (sequence is synthesized)
ctgcatatgtatgtttttaagagtctggaaatagtcttatgactttcctatcatgcttattaataaataatacagcccagagaagatgaaaatgggttccagaattattggtccttgcag

SEQ ID NO: 127716 - DNA, 120 bp, Artificial Sequence
  ENSG00000101955_0 (sequence is synthesized)
agtcccttggtctcttcggtctcctgccgcccccgggaagcgcgctgcgctgccgaggcgagctaagcgcccgctcgccatggggagccccgcacatcggcccgcgctgctgctgctgct

SEQ ID NO: 127717 - DNA, 120 bp, Artificial Sequence
  ENSG00000101955_1 (sequence is synthesized)
gccgcctctgctgctgctgctgctgctgcgcgtcccgcccagccgcagcttcccaggatcgggagactcaccactagaagacgatgaagtcgggtattcacaccctagatataaagatac

SEQ ID NO: 127718 - DNA, 120 bp, Artificial Sequence
  ENSG00000101955_2 (sequence is synthesized)
cccgtggtgctcccccatcaaggtgaagtatggggatgtgtactgcagggcccctcaaggaggatactacaaaacagccctgggaaccaggtgcgacattcgctgccagaagggctacga

SEQ ID NO: 127719 - DNA, 120 bp, Artificial Sequence
  ENSG00000101955_3 (sequence is synthesized)
gctgcatggctcttccctactgatctgccagtcaaacaaacgatggtctgacaaggtcatctgcaaacaaaagcgatgtcctacccttgccatgccagcaaatggagggtttaagtgtgt

SEQ ID NO: 127720 - DNA, 120 bp, Artificial Sequence
  ENSG00000101955_4 (sequence is synthesized)
agatggtgcctactttaactcccggtgtgagtattattgttcaccaggatacacgttgaaaggggagcggaccgtcacatgtatggacaacaaggcctggagcggccggccagcctcctg

SEQ ID NO: 127721 - DNA, 120 bp, Artificial Sequence
  ENSG00000101955_5 (sequence is synthesized)
tgtggatatggaacctcctagaatcaagtgcccaagtgtgaaggaacgcattgcagaacccaacaaactgacagtccgggtgtcctgggagacacccgaaggaagagacacagcagatgg

SEQ ID NO: 127722 - DNA, 120 bp, Artificial Sequence
  ENSG00000101955_6 (sequence is synthesized)
aattcttactgatgtcattctaaaaggcctccccccaggctccaactttccagaaggagaccacaagatccagtacacagtctatgacagagctgagaataagggcacttgcaaatttcg

SEQ ID NO: 127723 - DNA, 120 bp, Artificial Sequence
  ENSG00000101955_7 (sequence is synthesized)
aatggttacatgaagtgctccagcgacggtgataattatggagccacctgtgagttctcctgcatcggcggctatgagctccagggtagccctgcccgagtatgtcaatccaacctggct

SEQ ID NO: 127724 - DNA, 120 bp, Artificial Sequence
  ENSG00000101955_8 (sequence is synthesized)
tggtctggcacggagcccacctgtgcagccatgaacgtcaatgtgggtgtcagaacggcagctgcacttctggatcagttttatgagaaaaggagactcctcattgtgtccacacccaca

SEQ ID NO: 127725 - DNA, 120 bp, Artificial Sequence
  ENSG00000101955_9 (sequence is synthesized)
gcccgaaacctcctttaccggctccagctaggaatgctgcagcaagcacagtgtggccttgatcttcgacacatcaccgtggtggagctggtgggtgtgttcccgactctcattggcagg

SEQ ID NO: 127726 - DNA, 120 bp, Artificial Sequence
  ENSG00000101955_10 (sequence is synthesized)
ataggagcaaagattatgcctccagccctagcgctgcagctcaggctgttgctgcgaatcccactctactccttcagtatggtgctagtggataagcatggcatggacaaagagcgctat

SEQ ID NO: 127727 - DNA, 120 bp, Artificial Sequence
  ENSG00000101955_11 (sequence is synthesized)
gtctccctggtgatgcctgtggccctgttcaacctgattgacacttttcccttgagaaaagaagagatggtcctacaagccgaaatgagccagacctgtaacacctgacatgatggttcc

SEQ ID NO: 127728 - DNA, 120 bp, Artificial Sequence
  ENSG00000101955_12 (sequence is synthesized)
tctcttggcaattcctcttcattgtctacatagtgacatgcacacgggaaagccttaaaaatatccttgatgtacagattttatttgtaattttaaaagtctattttattatgagctttc

SEQ ID NO: 127729 - DNA, 120 bp, Artificial Sequence
  ENSG00000101955_13 (sequence is synthesized)
tttgcacttaaaaattagcatgctgctttttgtacttggaagtgtttcaaaaaattatatgaccatatttactctttctaactttctttactccatcatggctgcttgattttgtagaga

SEQ ID NO: 127730 - DNA, 120 bp, Artificial Sequence
  ENSG00000101955_14 (sequence is synthesized)
aattagaacccataaccatacacaggctatcaacatgttattcaatgtgacacctaactcttttctattttgttttttaagtaagacttttattaataaaacaaaatgttttggagcaaa

SEQ ID NO: 127731 - DNA, 120 bp, Artificial Sequence
  ENSG00000101958_0 (sequence is synthesized)
gtctcattctatagccctcattccagcacaggatctcagcaatttttccctcttccccccacccactccagcgcgcagagtcctttcttctctctcatttacaacttctttttaaaagaa

SEQ ID NO: 127732 - DNA, 120 bp, Artificial Sequence
  ENSG00000101958_1 (sequence is synthesized)
aacattttctagaaaaagggctttgctaaacagaaaagatataaaacaaaagccacagctatctagcatggcattgtcaccaactccctttgcatggtgatgcgattaaggtagcagcat

SEQ ID NO: 127733 - DNA, 120 bp, Artificial Sequence
  ENSG00000101958_2 (sequence is synthesized)
ttttattattcaggaaaagcagctgggggattcatcagttctgaggctttgtctttctgggttaactgatggtcccaagcctcggtttgacctgaccatgatgcccaggactggcacttt

SEQ ID NO: 127734 - DNA, 120 bp, Artificial Sequence
  ENSG00000101958_3 (sequence is synthesized)
ttcttttttctcagcaaactgtacaaaaccaaatctctttttgattttcaaggaaactaggttcctgccaaattttgaatctggacaataaacagacactttgtcctagcatctttctgg

SEQ ID NO: 127735 - DNA, 120 bp, Artificial Sequence
  ENSG00000101958_4 (sequence is synthesized)
aatcatttcgggatattttccacaagcaacacagaaacaggaatgaaccggcagctagtgaacattttgacagccttgtttgcatttttcttagagacaaaccacttcaggacggctttc

SEQ ID NO: 127736 - DNA, 120 bp, Artificial Sequence
  ENSG00000101958_5 (sequence is synthesized)
tgcaaagaccatgactccaggtctggaaaacaaccttcacagaccctatctccttcagatttcttggacaagttaatgggaaggacatcaggatatgatgcaagaatcaggccaaatttt

SEQ ID NO: 127737 - DNA, 120 bp, Artificial Sequence
  ENSG00000101958_6 (sequence is synthesized)
aaaggtcctccagtaaacgttacttgcaatatttttatcaacagttttggatcagtcacagaaacgaccatggactaccgagtgaatatttttctgagacaacagtggaatgattcacgg

SEQ ID NO: 127738 - DNA, 120 bp, Artificial Sequence
  ENSG00000101958_7 (sequence is synthesized)
ctggcgtacagtgagtacccagatgactccctggacttggacccatccatgctagactccatttggaaaccagatttgttctttgccaatgagaagggtgccaacttccacgatgtcacc

SEQ ID NO: 127739 - DNA, 120 bp, Artificial Sequence
  ENSG00000101958_8 (sequence is synthesized)
actgacaacaaattgctacggatttcgaaaaatggcaaagtgctctacagtatcagactcaccttgaccttatcctgtcccatggacttgaagaactttccgatggatgtccagacctgt

SEQ ID NO: 127740 - DNA, 120 bp, Artificial Sequence
  ENSG00000101958_9 (sequence is synthesized)
acaatgcagctggagagttttgggtacacgatgaatgacctgatatttgagtggttaagtgatggtccagtgcaagttgctgaaggattgaccctgccccagtttattttgaaagaagag

SEQ ID NO: 127741 - DNA, 120 bp, Artificial Sequence
  ENSG00000101958_10 (sequence is synthesized)
aaggaacttggctactgtacaaagcactacaacactggaaagtttacctgcattgaggtcaagtttcatctggaacgccaaatgggatattatttgatccagatgtacatcccaagcctg

SEQ ID NO: 127742 - DNA, 120 bp, Artificial Sequence
  ENSG00000101958_11 (sequence is synthesized)
cttatagtaattttgtcctgggtttccttttggataaatatggatgcagcccctgccagggtcgcactgggcatcaccacagtcttaacgatgaccacccagagttcaggctccagggca

SEQ ID NO: 127743 - DNA, 120 bp, Artificial Sequence
  ENSG00000101958_12 (sequence is synthesized)
tctctgccaaaggtctcctatgtaaaagcgattgacatctggatggcggtgtgccttctgtttgtgtttgctgccttactggaatacgcagcggtgaacttcgtctccaggcaacacaag

SEQ ID NO: 127744 - DNA, 120 bp, Artificial Sequence
  ENSG00000101958_13 (sequence is synthesized)
ggatgggtcactgcctccaagtgaaagatggaacagctgtcaaggccacacctgccaacccactcccacaaccgccaaaagatggagatgctatcaagaagaagtttgtggaccgggcaa

SEQ ID NO: 127745 - DNA, 120 bp, Artificial Sequence
  ENSG00000101958_14 (sequence is synthesized)
aaaggattgacacgatatctcgagctgccttcccattggccttcctcattttcaacatcttttactggatcacatacaagatcattcggcatgaagatgtccacaagaaatagatgtgcc

SEQ ID NO: 127746 - DNA, 120 bp, Artificial Sequence
  ENSG00000101958_15 (sequence is synthesized)
ctacagaccctgggaccttcttgcctcagtgttgtgcttgtaaatacacagtgaaattgtctttatatcactttgacagaggagaagattgagggaggggggagggagggtcatgggggt

SEQ ID NO: 127747 - DNA, 120 bp, Artificial Sequence
  ENSG00000101958_16 (sequence is synthesized)
gggtttcctggcacctacatgaaaaaaaagacaagttatatgggtgatgaagaaaactgcacaaaattaaggggttgcagaatcacgggagcataataattcccttccataatctttagc

SEQ ID NO: 127748 - DNA, 120 bp, Artificial Sequence
  ENSG00000101958_17 (sequence is synthesized)
attgttctttcagtcagacatgatatgcgcaacattcagacatgatatgcgcatcattcagacatgatatgcggggtcaagttcttaagggctgtttgccttttggtccttttggtttgg

SEQ ID NO: 127749 - DNA, 72 bp, Artificial Sequence
  ENSG00000101958_18 (sequence is synthesized)
gttcttaagggctgtttgccttttggtccttttggtttggtttggctttgactaattctggtactgaaaagt

SEQ ID NO: 127750 - DNA, 120 bp, Artificial Sequence
  ENSG00000101958_19 (sequence is synthesized)
ctgaccatagtgactagcctatagtgagtcgaggaccaaactttttcaggaaaatgctgcctcgtttttaaaacaagcctcctaagctatgttctttacaatgtctgtaattagtgtttc

SEQ ID NO: 127751 - DNA, 120 bp, Artificial Sequence
  ENSG00000101958_20 (sequence is synthesized)
acttgagaaagccttttgtgggtcgtaaattatttctacttatccagtaaataacaatgacaaaataaacaccaatgacagaaaaatttctactttactgtccatataggtgtgcatttt

SEQ ID NO: 127752 - DNA, 120 bp, Artificial Sequence
  ENSG00000101958_21 (sequence is synthesized)
aatatttttctttccaagataaaattttgaaacttaaattgtgtattgtgtaattaatttgatagtgtaccctcttaataaatgcccactttattttatatccaagttagtgcattatat

SEQ ID NO: 127753 - DNA, 120 bp, Artificial Sequence
  ENSG00000101958_22 (sequence is synthesized)
atatatttttgctttggctatatttacacgtgactttaatcgcccaactgtgactagtcattgcagctactcagctacagtatttatggagatggtgtgtcctgaacagtgtagctcagg

SEQ ID NO: 127754 - DNA, 120 bp, Artificial Sequence
  ENSG00000101958_23 (sequence is synthesized)
tcagcttgaactttccatttctgctctcattgtaggtgtaactactagtcctaatgtcaactgacccatgatttctactgtcagtcaatataagtgaacattgttttaaatatccttaac

SEQ ID NO: 127755 - DNA, 120 bp, Artificial Sequence
  ENSG00000101958_24 (sequence is synthesized)
taacttaaagaattttaaaattgtactgtgattttcataacccgttgcctttttggtaccagagctacgtggtttgaattctggctacatgttttaagtaagaaaaaaaaagacgtattt

SEQ ID NO: 127756 - DNA, 120 bp, Artificial Sequence
  ENSG00000101958_25 (sequence is synthesized)
ttgcttactcagataaaagacaacctgtaaaaatataataattaaattttacatgtgctgtacaaggggttattttaaaaagcatttgttcaatttcaataaagctaagtgtgccgcaaa

SEQ ID NO: 127757 - DNA, 120 bp, Artificial Sequence
  ENSG00000101958_26 (sequence is synthesized)
acttccctcaccctctccgtctcccgacctctcttctcctcttgctgtcatcgtacccccttcagtatcccctcgctgaacggccagtcactctttgccttcgaacagcaggcacgtccc

SEQ ID NO: 127758 - DNA, 120 bp, Artificial Sequence
  ENSG00000101958_27 (sequence is synthesized)
ctcttgaatgcttttccccgacccccgccccaagcaactgaaaaaggaaacatgcgcacttcagagcttggagctgtccgagtgctgaaatttataggctgggaaactaggttcctgcca

SEQ ID NO: 127759 - DNA, 120 bp, Artificial Sequence
  ENSG00000101958_28 (sequence is synthesized)
ctactatgattaagaaaaaatataggctggtttttattagaatcatcatcatcatcatcatcctcaccaccaccaccatcataatcaaataatacttgattaatcagatgaatctgcata

SEQ ID NO: 127760 - DNA, 120 bp, Artificial Sequence
  ENSG00000101966_0 (sequence is synthesized)
tcgggccggctgtcctggcgcggtgggtacagcttgtgtaggctttcccctcccccgctttccctccttcccctctcctccctcccctcttcttttcccctccacttccctcgggccggc

SEQ ID NO: 127761 - DNA, 120 bp, Artificial Sequence
  ENSG00000101966_1 (sequence is synthesized)
gctgctggggagggcgggaaggccgcgccagcccatcaggggtggcccggccccggctgcttgcccgggttcctcggactgccgacggcaggcgtgggtgggtgggtgacttcaggcctg

SEQ ID NO: 127762 - DNA, 120 bp, Artificial Sequence
  ENSG00000101966_2 (sequence is synthesized)
caggattgccttcctaaaccctgtgacacctaagaaaaggtggacaagtcctattttcaagagaagatgacttttaacagttttgaaggatctaaaacttgtgtacctgcagacatcaat

SEQ ID NO: 127763 - DNA, 120 bp, Artificial Sequence
  ENSG00000101966_3 (sequence is synthesized)
aaggaagaagaatttgtagaagagtttaatagattaaaaacttttgctaattttccaagtggtagtcctgtttcagcatcaacactggcacgagcagggtttctttatactggtgaagga

SEQ ID NO: 127764 - DNA, 120 bp, Artificial Sequence
  ENSG00000101966_4 (sequence is synthesized)
gataccgtgcggtgctttagttgtcatgcagctgtagatagatggcaatatggagactcagcagttggaagacacaggaaagtatccccaaattgcagatttatcaacggcttttatctt

SEQ ID NO: 127765 - DNA, 120 bp, Artificial Sequence
  ENSG00000101966_5 (sequence is synthesized)
gaaaatagtgccacgcagtctacaaattctggtatccagaatggtcagtacaaagttgaaaactatctgggaagcagagatcattttgccttagacaggccatctgagacacatgcagac

SEQ ID NO: 127766 - DNA, 120 bp, Artificial Sequence
  ENSG00000101966_6 (sequence is synthesized)
tatcttttgagaactgggcaggttgtagatatatcagacaccatatacccgaggaaccctgccatgtatagtgaagaagctagattaaagtcctttcagaactggccagactatgctcac

SEQ ID NO: 127767 - DNA, 120 bp, Artificial Sequence
  ENSG00000101966_7 (sequence is synthesized)
ctaaccccaagagagttagcaagtgctggactctactacacaggtattggtgaccaagtgcagtgcttttgttgtggtggaaaactgaaaaattgggaaccttgtgatcgtgcctggtca

SEQ ID NO: 127768 - DNA, 120 bp, Artificial Sequence
  ENSG00000101966_8 (sequence is synthesized)
gaacacaggcgacactttcctaattgcttctttgttttgggccggaatcttaatattcgaagtgaatctgatgctgtgagttctgataggaatttcccaaattcaacaaatcttccaaga

SEQ ID NO: 127769 - DNA, 120 bp, Artificial Sequence
  ENSG00000101966_9 (sequence is synthesized)
aatccatccatggcagattatgaagcacggatctttacttttgggacatggatatactcagttaacaaggagcagcttgcaagagctggattttatgctttaggtgaaggtgataaagta

SEQ ID NO: 127770 - DNA, 120 bp, Artificial Sequence
  ENSG00000101966_10 (sequence is synthesized)
aagtgctttcactgtggaggagggctaactgattggaagcccagtgaagacccttgggaacaacatgctaaatggtatccagggtgcaaatatctgttagaacagaagggacaagaatat

SEQ ID NO: 127771 - DNA, 120 bp, Artificial Sequence
  ENSG00000101966_11 (sequence is synthesized)
ataaacaatattcatttaactcattcacttgaggagtgtctggtaagaactactgagaaaacaccatcactaactagaagaattgatgataccatcttccaaaatcctatggtacaagaa

SEQ ID NO: 127772 - DNA, 120 bp, Artificial Sequence
  ENSG00000101966_12 (sequence is synthesized)
gctatacgaatggggttcagtttcaaggacattaagaaaataatggaggaaaaaattcagatatctgggagcaactataaatcacttgaggttctggttgcagatctagtgaatgctcag

SEQ ID NO: 127773 - DNA, 120 bp, Artificial Sequence
  ENSG00000101966_13 (sequence is synthesized)
aaagacagtatgcaagatgagtcaagtcagacttcattacagaaagagattagtactgaagagcagctaaggcgcctgcaagaggagaagctttgcaaaatctgtatggatagaaatatt

SEQ ID NO: 127774 - DNA, 120 bp, Artificial Sequence
  ENSG00000101966_14 (sequence is synthesized)
gctatcgtttttgttccttgtggacatctagtcacttgtaaacaatgtgctgaagcagttgacaagtgtcccatgtgctacacagtcattactttcaagcaaaaaatttttatgtcttaa

SEQ ID NO: 127775 - DNA, 120 bp, Artificial Sequence
  ENSG00000101966_15 (sequence is synthesized)
tctaactctatagtaggcatgttatgttgttcttattaccctgattgaatgtgtgatgtgaactgactttaagtaatcaggattgaattccattagcatttgctaccaagtaggaaaaaa

SEQ ID NO: 127776 - DNA, 120 bp, Artificial Sequence
  ENSG00000101966_16 (sequence is synthesized)
aatgtacatggcagtgttttagttggcaatataatctttgaatttcttgatttttcagggtattagctgtattatccattttttttactgttatttaattgaaaccatagactaagaata

SEQ ID NO: 127777 - DNA, 120 bp, Artificial Sequence
  ENSG00000101966_17 (sequence is synthesized)
agaagcatcatactataactgaacacaatgtgtattcatagtatactgatttaatttctaagtgtaagtgaattaatcatctggattttttattcttttcagataggcttaacaaatgga

SEQ ID NO: 127778 - DNA, 120 bp, Artificial Sequence
  ENSG00000101966_18 (sequence is synthesized)
gctttctgtatataaatgtggagattagagttaatctccccaatcacataatttgttttgtgtgaaaaaggaataaattgttccatgctggtggaaagatagagattgtttttagaggtt

SEQ ID NO: 127779 - DNA, 120 bp, Artificial Sequence
  ENSG00000101966_19 (sequence is synthesized)
ggttgttgtgttttaggattctgtccattttcttttaaagttataaacacgtacttgtgcgaattatttttttaaagtgatttgccatttttgaaagcgtatttaatgatagaatactat

SEQ ID NO: 127780 - DNA, 120 bp, Artificial Sequence
  ENSG00000101966_20 (sequence is synthesized)
cgagccaacatgtactgacatggaaagatgtcaaagatatgttaagtgtaaaatgcaagtggcaaaacactatgtatagtctgagccagatcaaagtatgtatgtttttaatatgcatag

SEQ ID NO: 127781 - DNA, 120 bp, Artificial Sequence
  ENSG00000101966_21 (sequence is synthesized)
aacaaaagatttggaaagatatacaccaaactgttaaatgtggtttctcttcggggagggggggattgggggaggggccccagaggggttttataggggccttttcactttctacttttt

SEQ ID NO: 127782 - DNA, 120 bp, Artificial Sequence
  ENSG00000101966_22 (sequence is synthesized)
tcattttgttctgttcgaattttttataagtatgtattacttttgtaatcagaatttttagaaagtattttgctgatttaaaggcttaggcatgttcaaacgcctgcaaaactacttatc

SEQ ID NO: 127783 - DNA, 120 bp, Artificial Sequence
  ENSG00000101966_23 (sequence is synthesized)
actcagctttagtttttctaatccaagaaggcagggcagttaacctttttggtgccaatgtgaaatgtaaatgattttatgtttttcctgctttgtggatgaaaaatatttctgagtggt

SEQ ID NO: 127784 - DNA, 120 bp, Artificial Sequence
  ENSG00000101966_24 (sequence is synthesized)
agttttttgacaggtagaccatgtcttatcttgtttcaaaataagtatttctgattttgtaaaatgaaatataaaatatgtctcagatcttccaattaattagtaaggattcatccttaa

SEQ ID NO: 127785 - DNA, 120 bp, Artificial Sequence
  ENSG00000101966_25 (sequence is synthesized)
tccttgctagtttaagcctgcctaagtcactttactaaaagatctttgttaactcagtattttaaacatctgtcagcttatgtaggtaaaagtagaagcatgtttgtacactgcttgtag

SEQ ID NO: 127786 - DNA, 120 bp, Artificial Sequence
  ENSG00000101966_26 (sequence is synthesized)
ttatagtgacagctttccatgttgagattctcatatcatcttgtatcttaaagtttcatgtgagtttttaccgttaggatgattaagatgtatataggacaaaatgttaagtctttcctc

SEQ ID NO: 127787 - DNA, 120 bp, Artificial Sequence
  ENSG00000101966_27 (sequence is synthesized)
tacctacatttgttttcttggctagtaatagtagtagatacttctgaaataaatgttctctcaagatccttaaaacctcttggaaattataaaaatattggcaagaaaagaagaatagtt

SEQ ID NO: 127788 - DNA, 120 bp, Artificial Sequence
  ENSG00000101966_28 (sequence is synthesized)
gtttaaatattttttaaaaaacacttgaataagaatcagtagggtataaactagaagtttaaaaatgcttcatagaacgtccagggtttacattacaagattctcacaacaaacctattg

SEQ ID NO: 127789 - DNA, 120 bp, Artificial Sequence
  ENSG00000101966_29 (sequence is synthesized)
tagaggtgagtaaggcatgttactacagaggaaagtttgagagtaaaactgtaaaaaattatatttttgttgtactttctaagagaaagagtattgttatgttctcctaacttctgttga

SEQ ID NO: 127790 - DNA, 120 bp, Artificial Sequence
  ENSG00000101966_30 (sequence is synthesized)
aacttctgttgattactactttaagtgatattcatttaaaacattgcaaatttattttatttatttaattttctttttgagatggagtcttgcttgtcacccaggctggagtgcagtgga

SEQ ID NO: 127791 - DNA, 66 bp, Artificial Sequence
  ENSG00000101966_31 (sequence is synthesized)
ctcaagagatccactaaaacattgcaaatttaaatgagagttttaaaaattaaataatgactgccc

SEQ ID NO: 127792 - DNA, 120 bp, Artificial Sequence
  ENSG00000101966_32 (sequence is synthesized)
aatttaaatgagagttttaaaaattaaataatgactgccctgtttctgttttagtatgtaaatcctcagttcttcacctttgcactgtctgccacttagtttggttatatagtcattaac

SEQ ID NO: 127793 - DNA, 120 bp, Artificial Sequence
  ENSG00000101966_33 (sequence is synthesized)
ttgaatttggtctgtatagtctagactttaaatttaaagttttctacaaggggagaaaagtgttaaaatttttaaaatatgttttccaggacacttcacttccaagtcaggtaggtagtt

SEQ ID NO: 127794 - DNA, 120 bp, Artificial Sequence
  ENSG00000101966_34 (sequence is synthesized)
gggagccgcacttcattaaaattcttctaaaacttgtatgtttagagttaagcaagactttttttcttcctctccatgagttgtgaaatttaatgcacaacgctgatgtggctaacaagt

SEQ ID NO: 127795 - DNA, 120 bp, Artificial Sequence
  ENSG00000101966_35 (sequence is synthesized)
ttattttaagaattgtttagaaatgctgttgcttcaggttcttaaaatcactcagcactccaacttctaatcaaatttttggagacttaacagcatttgtctgtgtttgaactataaaaa

SEQ ID NO: 127796 - DNA, 120 bp, Artificial Sequence
  ENSG00000101966_36 (sequence is synthesized)
gcaccggatcttttccatctaattccgcaaaaattgatcatttgcaaagtcaaaactatagccatatccaaatcttttccccctcccaagagttctcagtgtctacatgtagactattcc

SEQ ID NO: 127797 - DNA, 120 bp, Artificial Sequence
  ENSG00000101966_37 (sequence is synthesized)
ttttctgtataaagttcactctaggatttcaagtcaccacttattttacattttagtcatgcaaagattcaagtagttttgcaataagtacttatctttatttgtaataatttagtctgc

SEQ ID NO: 127798 - DNA, 120 bp, Artificial Sequence
  ENSG00000101966_38 (sequence is synthesized)
tgatcaaaagcattgtcttaatttttgagaactggttttagcatttacaaactaaattccagttaattaattaatagctttatattgcctttcctgctacatttggttttttcccctgtc

SEQ ID NO: 127799 - DNA, 120 bp, Artificial Sequence
  ENSG00000101966_39 (sequence is synthesized)
cctttgattacgggctaaggtagggtagagtgggtgtagtgagtgtatataatgtgatttggccctgtgtattatgatattttgttatttttgttgttatattatttacatttcagtagt

SEQ ID NO: 127800 - DNA, 120 bp, Artificial Sequence
  ENSG00000101966_40 (sequence is synthesized)
tgttttttgtgtttccattttagtggataaaatttgtattttgaactatgaatggagactaccgccccagcattagtttcacatgatataccctttaaacccgaatcattgttttatttc

SEQ ID NO: 127801 - DNA, 120 bp, Artificial Sequence
  ENSG00000101966_41 (sequence is synthesized)
ctgattacacaggtgttgaatggggaaaggggctagtatatcagtaggatatactatgggatgtatatatatcattgctgttagagaaatgaaataaaatggggctgggctcagtggctc

SEQ ID NO: 127802 - DNA, 120 bp, Artificial Sequence
  ENSG00000101966_42 (sequence is synthesized)
aaaaaaaaaaaaaagaaataagaaaatgggaagcaatatttgacatagttctttttagtcaaatctacttgttaaaaaaagggtagcagtttattcatctgtgaaaggaaaataatactt

SEQ ID NO: 127803 - DNA, 120 bp, Artificial Sequence
  ENSG00000101966_43 (sequence is synthesized)
atctgtgaaaggaaaataatacttatcttacaaggttgcaagagctcaaggagaccatgtatgtaaagttcctgctgtaaatatgaactcccatcctaatacccttttacctctctgtgg

SEQ ID NO: 127804 - DNA, 120 bp, Artificial Sequence
  ENSG00000101966_44 (sequence is synthesized)
gtttgtcttgacctggaaatttgggctaaaacttagaaaaaattcttacatgataactcagtgatgcttactcatagtttttggtgtttctcatagataagatataaatcagctgggcgc

SEQ ID NO: 127805 - DNA, 120 bp, Artificial Sequence
  ENSG00000101966_45 (sequence is synthesized)
aaactctgtctcaaaaaaaaaaaaagatataaatcacaataaataaataggtcaatacaaatgttagccaggcgtggtggcacatgcccatagtcgcagctactctggaggcagaggcag

SEQ ID NO: 127806 - DNA, 120 bp, Artificial Sequence
  ENSG00000101966_46 (sequence is synthesized)
atgttagccaggcgtggtggcacatgcccatagtcgcagctactctggaggcagaggcaggaggatcacttgagcccatgaatttgaggcagcagtgagctatgattgtgccactgtact

SEQ ID NO: 127807 - DNA, 120 bp, Artificial Sequence
  ENSG00000101966_47 (sequence is synthesized)
taggtcaaacccttaaaaatatttaaattcttaaaaaattgaaaagattattcttctcaaatttagttgagctttctaagagaagcaattggctttttcccacttcaataatcattttca

SEQ ID NO: 127808 - DNA, 120 bp, Artificial Sequence
  ENSG00000101966_48 (sequence is synthesized)
gtttgactcatacagttaacacaatgtgaatttcttcctcagcataacagagttatagaatgacagggctggaagtgaccttagagagtatccagttctttcattttacaggtgaggcaa

SEQ ID NO: 127809 - DNA, 120 bp, Artificial Sequence
  ENSG00000101966_49 (sequence is synthesized)
ctgagactcaaaggtgatgtaatttgtgcaaagattatagctaattagtagcagagccctgactgggacatagtttgaaggtgaaaaacttcaccaagctacctttcttgaaaggtccaa

SEQ ID NO: 127810 - DNA, 120 bp, Artificial Sequence
  ENSG00000101966_50 (sequence is synthesized)
atgtttatgttttcaactactctttccactgtaccataactttcactacatattaaatgacactttataactaatataataggacaatcatcaatgcatatatagccagcccttcatatc

SEQ ID NO: 127811 - DNA, 120 bp, Artificial Sequence
  ENSG00000101966_51 (sequence is synthesized)
tgtgggttttgcatccatggattcaaccaaggaggaattgaaaacactgagaaaaaaaaaaaagaccacacaataaaaaaaaaaaatacaaaataatacaaagaaaaagccaaaattgtc

SEQ ID NO: 127812 - DNA, 120 bp, Artificial Sequence
  ENSG00000101966_52 (sequence is synthesized)
atactgttgttaagcaacagtataacaactatttacatagcattaaggttggtgcaaaaatgcaaaaaaaaaaaaagcaattatttttaaaccaacctaatatattgtattaggtattaa

SEQ ID NO: 127813 - DNA, 86 bp, Artificial Sequence
  ENSG00000101966_53 (sequence is synthesized)
ttatttttaaaccaacctaatatattgtattaggtattaaagtcatctggacatgaattaaagtatatgatgccagcctggacaaa

SEQ ID NO: 127814 - DNA, 120 bp, Artificial Sequence
  ENSG00000101966_54 (sequence is synthesized)
ggtgggaggatcgcttgagtctgggaggcagaggctgcattgagctatgatcatggcactgcattccagcctgggtgacagtgcaagaccttgtctcagaataaataaagtatgtgatga

SEQ ID NO: 127815 - DNA, 120 bp, Artificial Sequence
  ENSG00000101966_55 (sequence is synthesized)
agtatgtgatgaagatgtgcatacattatatgcaaatactgttttttttttttttaatttaaacagtctcactgtgttgcccaggatggagtgcaatggcacaatcttggctcatggcaa

SEQ ID NO: 127816 - DNA, 120 bp, Artificial Sequence
  ENSG00000101966_56 (sequence is synthesized)
ccaggatggagtgcaatggcacaatcttggctcatggcaaactctgcctcgcaagcagctgggactacaggcatgctccacggtgcccagttaattttttttgtattcttagtagagaca

SEQ ID NO: 127817 - DNA, 73 bp, Artificial Sequence
  ENSG00000101966_57 (sequence is synthesized)
aagtgatttaatttttgtattttttagtagtgactggtttcgcggtgttgaccaggctggtctcgaactcctg

SEQ ID NO: 127818 - DNA, 120 bp, Artificial Sequence
  ENSG00000101966_58 (sequence is synthesized)
gctgggattacaggtgtgaaccactgctcccggccttgtgtgattttatctaagggacttaagcgtcctcaggtcctagggggtcgtgaaaccaaaaccccagggatagcaagggacaat

SEQ ID NO: 127819 - DNA, 120 bp, Artificial Sequence
  ENSG00000101966_59 (sequence is synthesized)
agggacttaagcgtcctcaggtcctagggggtcgtgaaaccaaaaccccagggatagcaagggacaattgtatcttcaaagtagacaaatggcgccgggcacggtggctcacgcctgtaa

SEQ ID NO: 127820 - DNA, 64 bp, Artificial Sequence
  ENSG00000101966_60 (sequence is synthesized)
ccgaggctgaggcaggcgggtacaaaaatacaaaaatagctgggcatggtggcgcatgcctgta

SEQ ID NO: 127821 - DNA, 120 bp, Artificial Sequence
  ENSG00000101966_61 (sequence is synthesized)
aggcggaggttgcagggagccaagatggcgccaccgcactccagcctaggtgatagagtgagactccctctcaaaaacaaaacaaaacaaaaaaattagacaaatgctacattaatgttt

SEQ ID NO: 127822 - DNA, 120 bp, Artificial Sequence
  ENSG00000101966_62 (sequence is synthesized)
aaaaaaattagacaaatgctacattaatgtttgggtggtcagattctactttgaatctgaagtttgcagatatgcctatagatttttggagtttaccactttcttattctgtatcattaa

SEQ ID NO: 127823 - DNA, 120 bp, Artificial Sequence
  ENSG00000101966_63 (sequence is synthesized)
tgtaatattttaaattactatatatgttaccatttttctggatttagtaagaaatttgcagttttggtttgatgtaacaagggttttaatgtaatttatgttagattttgcatttttttc

SEQ ID NO: 127824 - DNA, 120 bp, Artificial Sequence
  ENSG00000101966_64 (sequence is synthesized)
attactgttatattttaacctgactgactgatctaattgtattagtattgtgaataatcatgtgaaatgttttgagacagagtactatatttgtgaatataattttatggtttttttcac

SEQ ID NO: 127825 - DNA, 120 bp, Artificial Sequence
  ENSG00000101966_65 (sequence is synthesized)
ttagaacctttctgtgtggaaaactaagaaaattgctttctgctgtataatctggcattcattgtagattaaagcttatttttctgtgaataaaacgtattcaataaaatactattcttt

SEQ ID NO: 127826 - DNA, 120 bp, Artificial Sequence
  ENSG00000101966_66 (sequence is synthesized)
tgacggaccgcgcccggtgtctctttgaggccctgacgtggacacacttcgggtttcacgactccgggtttctccaggggatgggccggccggtagaggcgcgtgagggagacgaaggga

SEQ ID NO: 127827 - DNA, 120 bp, Artificial Sequence
  ENSG00000101966_67 (sequence is synthesized)
cttccgtttccttcacctaggctggggccaagccgcagagcggagttggcatttccagattggggctcgggccgcgcctcctccgggaccctccccttggaccgagccgatcgccgcggg

SEQ ID NO: 127828 - DNA, 120 bp, Artificial Sequence
  ENSG00000101966_68 (sequence is synthesized)
ttcttactgcccccatccggttcggggaggtggcgggaccttggcggcgcccggagccggcgtggcgctcatcgagggacgcccggcccaagtgaaaaggtggacaagtcctattttcaa

SEQ ID NO: 127829 - DNA, 120 bp, Artificial Sequence
  ENSG00000101966_69 (sequence is synthesized)
gggggggtcgggtgggggtgggggtaggggttgcaagggcctcattttttcttactgcccccatccggttcggggaggtggcgggaccttggcggcgcccggagccggcgtggcgctcat

SEQ ID NO: 127830 - DNA, 120 bp, Artificial Sequence
  ENSG00000101966_70 (sequence is synthesized)
ggagtaagaactactgagaaaacaccatcactaactagaagaattgatgataccatcttccaaaatcctatggtacaagaagctatacgaatggggttcagtttcaaggacattaagaaa

SEQ ID NO: 127831 - DNA, 120 bp, Artificial Sequence
  ENSG00000101966_71 (sequence is synthesized)
gggtgggtgacttcaggcctgcaggattgccttcctaaaccctgtgacacctaaggtgaaggtgataaagtaaagtgctttcactgtggaggagggctaactgattggaagcccagtgaa

SEQ ID NO: 127832 - DNA, 120 bp, Artificial Sequence
  ENSG00000101972_0 (sequence is synthesized)
ttcatgtgacgggcccctctgcttctcccccgccccatcatctccagcgcgtggtgggggaactgctggggaaggcgattggcatcgatctctccatcccttccgaggcccgacttcggt

SEQ ID NO: 127833 - DNA, 120 bp, Artificial Sequence
  ENSG00000101972_1 (sequence is synthesized)
ggccaccgagtactaaattcacttgggaataaaagaaaaacataagaaaattataagagaaaggaattgtcttagaagaaagaaggcaagccaccattttacccacgtaaatatatgaat

SEQ ID NO: 127834 - DNA, 120 bp, Artificial Sequence
  ENSG00000101972_2 (sequence is synthesized)
atatttctgacattgaggtgttccagaagatgataaagaaatgatagcagctccagaaataccaactgattttaatctactacaggagtcagaaacacatttttcttctgacacagattt

SEQ ID NO: 127835 - DNA, 120 bp, Artificial Sequence
  ENSG00000101972_3 (sequence is synthesized)
tgaagatatcgaaggaaaaaaccaaaagcaaggcaaaggcaaaacttgtaaaaaaggcaaaaagggcccagcagaaaagggcaaaggtggaaatggaggaggaaaacctccttctggtcc

SEQ ID NO: 127836 - DNA, 120 bp, Artificial Sequence
  ENSG00000101972_4 (sequence is synthesized)
aaaccgaatgaatggtcatcaccaacagaatggagtggaaaacatgatgttgtttgaagttgttaaaatgggcaagagtgctatgcagtcggtggtagatgattggatagaatcatacaa

SEQ ID NO: 127837 - DNA, 120 bp, Artificial Sequence
  ENSG00000101972_5 (sequence is synthesized)
gcatgaccgagatatagcacttcttgaccttatcaacttttttattcagtgttcaggctgtaaaggagttgtcacagcagaaatgtttagacatatgcagaactctgagataattcgaaa

SEQ ID NO: 127838 - DNA, 120 bp, Artificial Sequence
  ENSG00000101972_6 (sequence is synthesized)
aatgactgaagaattcgatgaggatagtggagattatccacttaccatggctggtcctcagtggaagaagttcaaatccagtttttgtgaattcattggcgtgttagtacggcaatgtca

SEQ ID NO: 127839 - DNA, 120 bp, Artificial Sequence
  ENSG00000101972_7 (sequence is synthesized)
atatagtatcatatatgatgagtatatgatggatacagtcatttcacttcttacaggattgtctgactcacaagtcagagcatttcgacatacaagcaccctggcagctatgaagttgat

SEQ ID NO: 127840 - DNA, 120 bp, Artificial Sequence
  ENSG00000101972_8 (sequence is synthesized)
gacagctttggtgaatgtggcactaaatcttagcattaatatggataatacacaaagacaatatgaagcagaacggaataaaatgattggaaaacgagccaatgagaggctagaactcct

SEQ ID NO: 127841 - DNA, 120 bp, Artificial Sequence
  ENSG00000101972_9 (sequence is synthesized)
gctacaaaagcggaaagagcttcaggaaaatcaagatgaaatagaaaatatgatgaatgcaatatttaaaggagtgtttgtacatagataccgtgatgcgatagctgaaattcgagctat

SEQ ID NO: 127842 - DNA, 120 bp, Artificial Sequence
  ENSG00000101972_10 (sequence is synthesized)
ttgcattgaagagattggcatttggatgaagatgtatagtgatgcctttcttaatgacagttatttaaaatatgttggttggactatgcatgataagcaaggtgaagtaagactcaaatg

SEQ ID NO: 127843 - DNA, 120 bp, Artificial Sequence
  ENSG00000101972_11 (sequence is synthesized)
tcttactgctctacaagggctttattataacaaagagcttaattccaaactggaactttttaccagtcggttcaaggatagaattgtgtctatgacccttgacaaagaatatgatgttgc

SEQ ID NO: 127844 - DNA, 120 bp, Artificial Sequence
  ENSG00000101972_12 (sequence is synthesized)
agtacaagcaataaaattactcactcttgttttacagagtagtgaagaagttctcactgcagaagattgtgaaaatgtctatcatctggtttattcagctcaccggccagtagcagtagc

SEQ ID NO: 127845 - DNA, 120 bp, Artificial Sequence
  ENSG00000101972_13 (sequence is synthesized)
agctggagaatttctctacaaaaagctcttcagtcgtagagatccagaggaggatggaatgatgaaaagaagaggaagacaaggtccaaatgccaaccttgttaagacattggttttttt

SEQ ID NO: 127846 - DNA, 120 bp, Artificial Sequence
  ENSG00000101972_14 (sequence is synthesized)
ctttctagaaagtgagttacatgagcatgcagcataccttgtggatagcatgtgggactgtgctactgagctgctgaaagactgggaatgtatgaatagcttgttactggaagagccact

SEQ ID NO: 127847 - DNA, 120 bp, Artificial Sequence
  ENSG00000101972_15 (sequence is synthesized)
tagtggagaggaagcactaacagataggcaagagagtgctctgattgaaataatgctttgtaccattagacaagcggctgaatgtcatcctcccgtgggaagagggacaggaaaaagggt

SEQ ID NO: 127848 - DNA, 120 bp, Artificial Sequence
  ENSG00000101972_16 (sequence is synthesized)
gcttacagcaaaggagaagaagacacagttggatgataggacaaaaatcactgagctttttgccgtggcccttcctcagttattagcaaaatactctgtagatgcagaaaaggtgactaa

SEQ ID NO: 127849 - DNA, 120 bp, Artificial Sequence
  ENSG00000101972_17 (sequence is synthesized)
acagatccggaatattgtagagaagcacacagatacagatgttttggaagcatgttctaaaacttaccatgcactctgtaatgaagagttcacaatcttcaacagagtagatatttcaag

SEQ ID NO: 127850 - DNA, 120 bp, Artificial Sequence
  ENSG00000101972_18 (sequence is synthesized)
aagtcaactgatagatgaattggcagataaatttaaccggcttcttgaagattttctgcaagagggtgaagaacctgatgaagatgatgcatatcaggtattgtcaacattgaagaggat

SEQ ID NO: 127851 - DNA, 120 bp, Artificial Sequence
  ENSG00000101972_19 (sequence is synthesized)
cactgcttttcataatgcccatgacctttcaaagtgggatttatttgcttgtaattacaaactcttgaaaactggaatcgaaaatggagacatgcctgagcagattgttattcacgcact

SEQ ID NO: 127852 - DNA, 120 bp, Artificial Sequence
  ENSG00000101972_20 (sequence is synthesized)
gcagtgtactcactatgtaatcctttggcaacttgctaagataactgaaagcagctctacaaaggaggacttgctgcgtttaaagaaacaaatgagagtattttgtcagatatgtcaaca

SEQ ID NO: 127853 - DNA, 120 bp, Artificial Sequence
  ENSG00000101972_21 (sequence is synthesized)
ttacctgaccaacgtgaatactactgttaaggaacaggccttcactattctgtgtgatattttgatgatcttcagccatcagattatgtcaggagggcgtgacatgttagagccattagt

SEQ ID NO: 127854 - DNA, 120 bp, Artificial Sequence
  ENSG00000101972_22 (sequence is synthesized)
gtatacccctgattcttcattgcagtctgagttgctcagctttattttggatcatgtcttcattgaacaggatgatgataataatagtgcagatggtcagcaagaggatgaagccagtaa

SEQ ID NO: 127855 - DNA, 120 bp, Artificial Sequence
  ENSG00000101972_23 (sequence is synthesized)
aattgaagctctgcacaagagaagaaatttacttgcagcattttgtaagctaattgtatatactgtggtggagatgaatacagctgcagatatcttcaaacagtatatgaagtattataa

SEQ ID NO: 127856 - DNA, 120 bp, Artificial Sequence
  ENSG00000101972_24 (sequence is synthesized)
tgactatggagatatcatcaaagaaacaatgagtaaaacaaggcagatagacaaaattcagtgtgctaagacccttattctcagtctgcaacagctttttaatgaaatgatacaagaaaa

SEQ ID NO: 127857 - DNA, 120 bp, Artificial Sequence
  ENSG00000101972_25 (sequence is synthesized)
tggctataattttgatagatcatcctctacatttagtggcataaaagaacttgctcgacgttttgctttaacttttggacttgatcagttgaaaacaagagaagccattgccatgctaca

SEQ ID NO: 127858 - DNA, 120 bp, Artificial Sequence
  ENSG00000101972_26 (sequence is synthesized)
caaagatggcatagaatttgcttttaaagagcctaatccgcaaggggagagccatccacctttaaatttggcatttcttgatattctgagtgaattttcttctaaactacttcgacaaga

SEQ ID NO: 127859 - DNA, 120 bp, Artificial Sequence
  ENSG00000101972_27 (sequence is synthesized)
caaaagaacagtgtatgtttacttggaaaagttcatgacctttcagatgtcactccgaagagaggatgtgtggcttccactgatgtcttaccgaaattctttgctagctggtggtgatga

SEQ ID NO: 127860 - DNA, 120 bp, Artificial Sequence
  ENSG00000101972_28 (sequence is synthesized)
tgacaccatgtcagtcattagtggaatcagcagccgggggtcaacagtacggagtaaaaaatcaaaaccatctacaggaaaacggaaagtggttgagggcatgcagctttcactcactga

SEQ ID NO: 127861 - DNA, 120 bp, Artificial Sequence
  ENSG00000101972_29 (sequence is synthesized)
agaaagtagtagtagtgacagtatgtggttaagcagagaacaaacactgcacacccctgttatgatgcagacaccacaactcacctccactattatgagagagcccaaaagattacggcc

SEQ ID NO: 127862 - DNA, 120 bp, Artificial Sequence
  ENSG00000101972_30 (sequence is synthesized)
tgaggatagcttcatgagtgtttatccaatgcagactgaacatcatcaaacacctcttgattataatcggcgtggcacaagcctaatggaagatgatgaagagccaattgtggaagatgt

SEQ ID NO: 127863 - DNA, 120 bp, Artificial Sequence
  ENSG00000101972_31 (sequence is synthesized)
tatgatgtcctcagaagggaggattgaggatcttaatgagggaatggattttgacaccatggatatagatttgccaccatcaaagaacagacgagagagaacagaactgaagcctgattt

SEQ ID NO: 127864 - DNA, 120 bp, Artificial Sequence
  ENSG00000101972_32 (sequence is synthesized)
ctttgatccagcttcaattatggatgaatcagttcttggagtgtcaatgttttaataccagtacacaattaaatctgtggtgaagtcattttctaagtggaagaggaaattttaaagtgt

SEQ ID NO: 127865 - DNA, 120 bp, Artificial Sequence
  ENSG00000101972_33 (sequence is synthesized)
ggtagatacagtgaaattctgtacagatttttctctaaggagaatatgacatgcttatgcttaccaagatcaagtgcattgaggggcagttttgtttgcctgaataaacgtaaaggacaa

SEQ ID NO: 127866 - DNA, 120 bp, Artificial Sequence
  ENSG00000101972_34 (sequence is synthesized)
gtaaacaatttgatgataagctacagtttttcttagaaagtaaatattttatttatgcgctgttagttggcttttgaatcgattatttcatgcttttttttaaaaaaaaaaaaaaacaaa

SEQ ID NO: 127867 - DNA, 120 bp, Artificial Sequence
  ENSG00000101972_35 (sequence is synthesized)
tgacctctgctggatttctgtttacatccagaaaacaatgttaaggatgtatttattcccctaccctgaagaaagtgtaggatagaattgtttttagcattctaaatttaaatgcttaaa

SEQ ID NO: 127868 - DNA, 120 bp, Artificial Sequence
  ENSG00000101972_36 (sequence is synthesized)
acgtcaatcaacaaaactttgttttaaatattgtaattgtggagaaaagtaaacttataagcagaacttttacaattttttcatctaaaagtattttaagatatttttaaaatccaagag

SEQ ID NO: 127869 - DNA, 120 bp, Artificial Sequence
  ENSG00000101972_37 (sequence is synthesized)
cttctctatacttttcagaaatatccagatgcagtgaactgccagaaggtaaccagtctcaaacatgcttatcccattatcaaccctgaaagtttgcttgtcctttaagataaaaatgta

SEQ ID NO: 127870 - DNA, 120 bp, Artificial Sequence
  ENSG00000101972_38 (sequence is synthesized)
atgttgtgatattccttccagtaatgccactgtattttgtctccaaataaaagaagcttattgtagtatgtttgcagaaaaattctaaacaaaaattatacagcttattagagtgtggga

SEQ ID NO: 127871 - DNA, 120 bp, Artificial Sequence
  ENSG00000101972_39 (sequence is synthesized)
gggaatagggatctaaattttaaataaaattatatatatatataaattggtgctgattttataattgcgcagtttgtttagttttttcttacttttaaattccaacttaaaattatgagg

SEQ ID NO: 127872 - DNA, 120 bp, Artificial Sequence
  ENSG00000101972_40 (sequence is synthesized)
agaaatatattgaaagtttaacaatgtttaaaaatagaaaagcatgagtgttcatgctttaaaatgatttttaaatttgtattttatattgttttatctatctgtctttgcaagcagtct

SEQ ID NO: 127873 - DNA, 120 bp, Artificial Sequence
  ENSG00000101972_41 (sequence is synthesized)
tcaggttaaagatacttctaacaggttacagtacatttcctctgtatgtaaattagatgggataatagaattcataacccataatattctttgaaagctaagctttaaacttcattttat

SEQ ID NO: 127874 - DNA, 120 bp, Artificial Sequence
  ENSG00000101972_42 (sequence is synthesized)
gtcctttcacaaataaattagtttaaaacagaaagtggctacttgccattttgacatcaactcattttgcgaggcttaggcagctagacatcgtttaaaacaaaatattaacttatatta

SEQ ID NO: 127875 - DNA, 120 bp, Artificial Sequence
  ENSG00000101972_43 (sequence is synthesized)
catgtgtatctatctattgtcagtcgtctctcagttcttgaggtatattattttaatcattccatgccttaatatgcttgcaatacaagaatatcttcagatgggtgaataccaaaaggc

SEQ ID NO: 127876 - DNA, 120 bp, Artificial Sequence
  ENSG00000101972_44 (sequence is synthesized)
tttcagtttttagtcagaaatcaagcattgggctgtggtagccaaaaaccataggttagctaaaaagatcatgatacaattattttattaagtcatggttaataacaaatgaatccagac

SEQ ID NO: 127877 - DNA, 120 bp, Artificial Sequence
  ENSG00000101972_45 (sequence is synthesized)
ttgtctaacagattttccatcaacaaatattgttatgtgcaaaagtattgcctatgttgttttacacaccactgcattaactagaactgctgagaggactgtatatatgattttaaacct

SEQ ID NO: 127878 - DNA, 120 bp, Artificial Sequence
  ENSG00000101972_46 (sequence is synthesized)
aagttgattttttttctcactcttgaaaggagtacttctttgtgaaagcagttcttacagctttgttttcaaccagctaaaaatgttttatatattactctaacctgttgtcctccacat

SEQ ID NO: 127879 - DNA, 120 bp, Artificial Sequence
  ENSG00000101972_47 (sequence is synthesized)
tctattgtcctaattgtactgttttctgatttgtatttatgtcttgagacagtaactttttgaataaaaataaacctacagtatgttgtatgttttctcttgtactcaaagggggagggt

SEQ ID NO: 127880 - DNA, 120 bp, Artificial Sequence
  ENSG00000101972_48 (sequence is synthesized)
ggctataaatggtttgcaaatttatatctattatcacatcttttaatgtgtttggggaataatttatagagaataccatcagtttatatttttaataaatcatatgtatttacaatgaaa

SEQ ID NO: 127881 - DNA, 120 bp, Artificial Sequence
  ENSG00000101972_49 (sequence is synthesized)
gggtggcccaaaatggagaacgcggagcagcgcaagatggaggctccgcttctctgtgtagcagtagatttaggttccttttctccggcaggctcctaagcctaggagagcccgaactgg

SEQ ID NO: 127882 - DNA, 78 bp, Artificial Sequence
  ENSG00000101972_50 (sequence is synthesized)
gtggccgacagatggcgcctgcgcgttccattcgcctccaagtcgccgaagagcgaacaccccaaacaatcccgaagc

SEQ ID NO: 127883 - DNA, 120 bp, Artificial Sequence
  ENSG00000101972_51 (sequence is synthesized)
aaaaagaaaaaaaaccccgccggatccgaccgccactttcaaaaccccccaccgctctagaaccgcgggagcttccgtccctgagtagaattcgagggtgtaaagaagaggaaggggaaa

SEQ ID NO: 127884 - DNA, 120 bp, Artificial Sequence
  ENSG00000101972_52 (sequence is synthesized)
aagcaaggcaacagcaggagagagcagcaatgagctatgttaaactgcgaactaatcttcagcatgccattcggcgtggcacaagcctaatggaagatgatgaagagccaattgtggaag

SEQ ID NO: 127885 - DNA, 120 bp, Artificial Sequence
  ENSG00000101972_53 (sequence is synthesized)
attcctggctctagcagggcctgctcgggagctgctggtgtttgttactgtcctcgcagcacttttctgccaaccttctctctctgcgtattggttaggagcaaaagcaggaggcggtct

SEQ ID NO: 127886 - DNA, 120 bp, Artificial Sequence
  ENSG00000101972_54 (sequence is synthesized)
cctaattctgtctgtagcctagcgcgttgcgtttaagggtatatctgaacttattttgttaaaaaaaaggctctgggaagtggatgcatttgtttaatgacatataattcaggaattgtc

SEQ ID NO: 127887 - DNA, 120 bp, Artificial Sequence
  ENSG00000101972_55 (sequence is synthesized)
aatatcttgtaccagcccaggggtgaagaagcccccggcctgagaaagaaggaggagtgggggaggcgaacagtctcgttgctgcctctgtgtacgctgaggggggaggaattgtcttag

SEQ ID NO: 127888 - DNA, 120 bp, Artificial Sequence
  ENSG00000101972_56 (sequence is synthesized)
atcatctccagcgcgtggtgggggaactgctggggaaggcgattggcatcgatctctccatcccttccgaggcccgacttcggaattgtcttagaagaaagaaggagtagtgaagaagtt

SEQ ID NO: 127889 - DNA, 120 bp, Artificial Sequence
  ENSG00000101972_57 (sequence is synthesized)
tcccctcgacaccccactaaagacagaagaaccgcggctcgatcgggtccgcggcggaagcgcggccaaacgaatgagaattgtcttagaagaaagaaggcaagccaccattttacccac

SEQ ID NO: 127890 - DNA, 120 bp, Artificial Sequence
  ENSG00000101972_58 (sequence is synthesized)
tttatattgtctcatgacatactttgaaaaagtcttaacaatacagaagtttacgatgaccaaagtgaaatttttccataatcctatcacctggagacttgtaaaaaaggcaaaaagggc

SEQ ID NO: 127891 - DNA, 87 bp, Artificial Sequence
  ENSG00000101972_59 (sequence is synthesized)
atataattcttaatgaaaaggggaatgcatctttccagactgagtgtcgaagaaacaagtttaatcaaaatctcttctgctgtgtgt

SEQ ID NO: 127892 - DNA, 120 bp, Artificial Sequence
  ENSG00000101972_60 (sequence is synthesized)
ctgctgtgtgtttcccttcggtgcctccatcctttggtgcagagatacaagccgatatgctccaacgaatcccttcaggccacagcatgggagcaaacccaccctctttgcatgcagggc

SEQ ID NO: 127893 - DNA, 120 bp, Artificial Sequence
  ENSG00000101972_61 (sequence is synthesized)
acagcactcacctaaccaggctgcaaattatagctgctgaattgtgccatcaggaaatgacagttgccttcatagccatcagaagtggatttgctatgaagagcagcccgctgtgggaga

SEQ ID NO: 127894 - DNA, 120 bp, Artificial Sequence
  ENSG00000101972_62 (sequence is synthesized)
cactgatggccctcgctgactctagagtggagtgaattgctaccttgctgaccaggaaatgatcgatgcctggcacctggcagtgaatggggcgtcctgcgatgatccgaacacgcctgt

SEQ ID NO: 127895 - DNA, 120 bp, Artificial Sequence
  ENSG00000101972_63 (sequence is synthesized)
tctcagaaatttgcagcacaatgttgttatccaagacatacaatgaattgtccataggatttactgcaaggtctgttggccactctaatcgcacctgtgaaacgaacagaacacatacca

SEQ ID NO: 127896 - DNA, 120 bp, Artificial Sequence
  ENSG00000101972_64 (sequence is synthesized)
tcgatctctccatcccttccgaggcccgacttcggcacgaactgagctgatccttgccccaggaattgtcttagaagaaagaaggagtagtgaagaagttctcactgcagaagattgtga

SEQ ID NO: 127897 - DNA, 120 bp, Artificial Sequence
  ENSG00000101972_65 (sequence is synthesized)
ggcccaaaatggagaacgcggagcagcgcaagatggaggctccgcttctctgtgtagcagtagatttaggttccttttctccggcaggctcctaagcctaggagagcccgaactggaggt

SEQ ID NO: 127898 - DNA, 120 bp, Artificial Sequence
  ENSG00000101972_66 (sequence is synthesized)
agtgctgcttttcattcccacccccacccgcactgtctttctcaaggcacgaactgagctgatccttgccccaggaattgtcttagaagaaagaaggcaagccaccattttacccacgta

SEQ ID NO: 127899 - DNA, 120 bp, Artificial Sequence
  ENSG00000101972_67 (sequence is synthesized)
catcattttccattatacttgaatatagagagccacatactgctgcctagatattaatagtcacgacattagttcagatcttgactttgttttatatttctctagtcggcgtggcacaag

SEQ ID NO: 127900 - DNA, 120 bp, Artificial Sequence
  ENSG00000101972_68 (sequence is synthesized)
gaggtaagttataaaatggcggaggcgaagcttctagaagtttggaggggcacccggagggcgcttggcccaccgtgaggaattgtcttagaagaaagaaggcaagccaccattttaccc

SEQ ID NO: 127901 - DNA, 120 bp, Artificial Sequence
  ENSG00000101974_0 (sequence is synthesized)
ttacaaggatcacaggggttggtacaagttgcttgataatctgcagcattctctctgagatttagctgccattgtgttgccaaatttctgcatgtcagtatgcagatggtcccatctctc

SEQ ID NO: 127902 - DNA, 120 bp, Artificial Sequence
  ENSG00000101974_1 (sequence is synthesized)
cctccagcctctgagtgtgctggagaagagaaacgagttggcacacgcacagtgtttgttggcaatcatccagtttcggaaacagaagcttacattgcacaaagattttgtgataataga

SEQ ID NO: 127903 - DNA, 120 bp, Artificial Sequence
  ENSG00000101974_2 (sequence is synthesized)
atagtctcatctaagtatacactttggaattttctcccaaagaatctgtttgaacagtttagaagaattgcaaatttttattttctcataatcttccttgtacaggtcacagtagacaca

SEQ ID NO: 127904 - DNA, 120 bp, Artificial Sequence
  ENSG00000101974_3 (sequence is synthesized)
ccaactagcccagttaccagtggacttccacttttctttgttataactgttacagccatcaagcagggatatgaggattgtctgagacacagagctgacaatgaagtcaacaaaagcact

SEQ ID NO: 127905 - DNA, 120 bp, Artificial Sequence
  ENSG00000101974_4 (sequence is synthesized)
gtttacattattgaaaatgcaaagcgagtgagaaaagaaagtgaaaaaatcaaggttggtgatgtagtagaagtacaggcagatgaaacctttccctgtgatcttattcttctatcatct

SEQ ID NO: 127906 - DNA, 120 bp, Artificial Sequence
  ENSG00000101974_5 (sequence is synthesized)
tgcaccactgatggaacctgttatgtcactacagccagtcttgatggggaatccaattgcaagacacattatgcagtacgtgataccattgcactgtgtacagcagaatccatcgatacc

SEQ ID NO: 127907 - DNA, 120 bp, Artificial Sequence
  ENSG00000101974_6 (sequence is synthesized)
ctccgagcagcaattgaatgtgaacagcctcaacctgacctctacaaatttgttgggcgaatcaatatctacagtaatagtcttgaggctgttgccaggtctttgggacctgaaaatctc

SEQ ID NO: 127908 - DNA, 120 bp, Artificial Sequence
  ENSG00000101974_7 (sequence is synthesized)
ttgctgaaaggagctacgctaaaaaataccgagaagatatatggagttgctgtttacactggaatggaaaccaaaatggctttgaactaccaagggaaatctcagaaacgttctgctgtt

SEQ ID NO: 127909 - DNA, 120 bp, Artificial Sequence
  ENSG00000101974_8 (sequence is synthesized)
gaaaaatctattaatgctttcctgattgtatatttatttatcttactgaccaaagctgcagtatgcactactctaaagtatgtttggcaaagtaccccatacaatgatgaaccttggtat

SEQ ID NO: 127910 - DNA, 120 bp, Artificial Sequence
  ENSG00000101974_9 (sequence is synthesized)
aaccaaaagactcagaaagagcgagagaccttgaaggttttaaaaatgttcaccgacttcctatcatttatggttctattcaactttatcattcctgtctccatgtacgtcacagtagaa

SEQ ID NO: 127911 - DNA, 120 bp, Artificial Sequence
  ENSG00000101974_10 (sequence is synthesized)
atgcagaaattcttgggctccttcttcatctcatgggataaggacttttatgatgaagaaattaatgaaggagccctggttaacacatcagaccttaatgaagaacttggtcaggtggat

SEQ ID NO: 127912 - DNA, 120 bp, Artificial Sequence
  ENSG00000101974_11 (sequence is synthesized)
tatgtatttacagataagactggaacactcactgaaaacagcatggaattcattgaatgctgcatagatggccacaaatataaaggtgtaactcaagaggttgatggattatctcaaact

SEQ ID NO: 127913 - DNA, 120 bp, Artificial Sequence
  ENSG00000101974_12 (sequence is synthesized)
gatggaactttaacatattttgacaaagtagataagaatcgagaagagctgtttctacgtgccttgtgtttatgtcatactgtagaaatcaaaacaaacgatgctgttgatggagctaca

SEQ ID NO: 127914 - DNA, 120 bp, Artificial Sequence
  ENSG00000101974_13 (sequence is synthesized)
gaatcagctgaattaacctatatctcctcttcaccagatgaaatagctttggtgaaaggagctaaaaggtacgggttcacatttttaggaaatcgaaatggatatatgagagtagagaac

SEQ ID NO: 127915 - DNA, 120 bp, Artificial Sequence
  ENSG00000101974_14 (sequence is synthesized)
caaagaaaagaaatagaagaatatgaacttcttcacaccttaaactttgatgctgtccggcgacgtatgagtgtaattgtgaagactcaagaaggagacatacttctcttttgtaaagga

SEQ ID NO: 127916 - DNA, 120 bp, Artificial Sequence
  ENSG00000101974_15 (sequence is synthesized)
gcagactcggcagtttttcccagagtgcaaaatcatgaaattgagttaactaaagtccatgtggaacgtaatgcaatggatgggtatcggacactctgtgtagccttcaaagaaattgct

SEQ ID NO: 127917 - DNA, 120 bp, Artificial Sequence
  ENSG00000101974_16 (sequence is synthesized)
ccagatgattatgaaagaattaacagacagctcatagaggcaaaaatggccttacaagacagagaagaaaaaatggaaaaagttttcgatgatattgagacaaacatgaatttaattgga

SEQ ID NO: 127918 - DNA, 120 bp, Artificial Sequence
  ENSG00000101974_17 (sequence is synthesized)
gccactgcagttgaagacaagctacaagatcaagctgcagagaccattgaagctctgcatgcagcaggcctgaaagtctgggtgctcactggggacaagatggagacagctaaatccaca

SEQ ID NO: 127919 - DNA, 120 bp, Artificial Sequence
  ENSG00000101974_18 (sequence is synthesized)
tgctatgcctgccgccttttccagaccaacactgagctcttagaactaaccacaaaaaccattgaagaaagtgaaaggaaagaagatcgattacatgaattattgatagaatatcgcaag

SEQ ID NO: 127920 - DNA, 120 bp, Artificial Sequence
  ENSG00000101974_19 (sequence is synthesized)
aaattgctgcatgagtttcctaaaagtactagaagctttaaaaaagcatggacagaacatcaggaatatggattaatcatagatggctccacattgtcactcatactaaattctagtcaa

SEQ ID NO: 127921 - DNA, 120 bp, Artificial Sequence
  ENSG00000101974_20 (sequence is synthesized)
gactctagttcaaacaattacaaaagcattttcctacaaatatgtatgaagtgtactgcagtgctctgctgtcggatggcaccattacagaaagcccagattgtcagaatggtgaagaat

SEQ ID NO: 127922 - DNA, 120 bp, Artificial Sequence
  ENSG00000101974_21 (sequence is synthesized)
ttaaaaggcagcccaataactctgtcgataggtgatggtgccaatgatgttagtatgatcttggaatcccatgtgggaataggtattaaaggcaaagaaggtcgccaagcagctaggaat

SEQ ID NO: 127923 - DNA, 120 bp, Artificial Sequence
  ENSG00000101974_22 (sequence is synthesized)
agcgattattctgttccaaagtttaaacacttaaagaaactgctgttggctcatggacatctatattatgtgagaatagcacaccttgtacagtacttcttctataagaacctttgtttc

SEQ ID NO: 127924 - DNA, 120 bp, Artificial Sequence
  ENSG00000101974_23 (sequence is synthesized)
attttgccacagtttttgtaccagttcttctgtggattctcacaacagccactgtatgatgctgcttaccttacaatgtacaatatctgcttcacatccttgcccatcctggcctatagt

SEQ ID NO: 127925 - DNA, 120 bp, Artificial Sequence
  ENSG00000101974_24 (sequence is synthesized)
ctactggaacagcacatcaacattgacactctgacctcagatccccgattgtatatgaaaatttctggcaatgccatgctacagttgggccccttcttatattggacatttctggctgcc

SEQ ID NO: 127926 - DNA, 120 bp, Artificial Sequence
  ENSG00000101974_25 (sequence is synthesized)
tagtattcactgtaaccctgaagcttgccttggatacccgattctggacgtggataaatcactttgtgatttggggttctttagccttctatgtatttttctcattcttctggggaggaa

SEQ ID NO: 127927 - DNA, 120 bp, Artificial Sequence
  ENSG00000101974_26 (sequence is synthesized)
ttatttggccttttctcaagcaacagagaatgtattttgtatttgcccaaatgctgtcttctgtatccacatggttggctataattcttctaatatttatcagcctgttccctgagattc

SEQ ID NO: 127928 - DNA, 120 bp, Artificial Sequence
  ENSG00000101974_27 (sequence is synthesized)
ttctgatagtattaaagaatgtaagaagaagaagtgccaggagaaatctgagctgtagaagggcatctgactcattatccgccagaccttcagtcagacctcttcttttacgaacattct

SEQ ID NO: 127929 - DNA, 120 bp, Artificial Sequence
  ENSG00000101974_28 (sequence is synthesized)
cagacgaatctaatgtattgtaacagaatccgaatcttgaactgcctatgttattgtcctacaagcatactgacagtggttacagctaaaaaagaaagcatgaagaaacaactacaaaaa

SEQ ID NO: 127930 - DNA, 120 bp, Artificial Sequence
  ENSG00000101974_29 (sequence is synthesized)
gttatcatctcaggatacttgatacgcaacacactaaaccactctcatgtctagagttcacaataaatgttcattaaaataccaaatgattctcttaagcatttaccattattgtaagta

SEQ ID NO: 127931 - DNA, 120 bp, Artificial Sequence
  ENSG00000101974_30 (sequence is synthesized)
gcctttatggccaaagctgtaagttaagaattatatgaaagttgaaagcaagaatacttagaattctggctttagttagagtaatataactcaaatgggtgctcttttaacccatgaact

SEQ ID NO: 127932 - DNA, 120 bp, Artificial Sequence
  ENSG00000101974_31 (sequence is synthesized)
ttgtgaatggatttaaatacaatagtatgaagtagaagttatgcaatgagaatgaatagattttgctaatactactttttttgcctggcagaagaaatagactatttggatcacatttct

SEQ ID NO: 127933 - DNA, 120 bp, Artificial Sequence
  ENSG00000101974_32 (sequence is synthesized)
cattcctcctaaatgatcatcttaattttttttcccaagtacataaggaatacttgaaaatacagaataactaaatagtatcaatgcatcagacagaatagttaatcccttctgtttacc

SEQ ID NO: 127934 - DNA, 120 bp, Artificial Sequence
  ENSG00000101974_33 (sequence is synthesized)
catgtgctactaatgtcttggtagaatattcttgccaaaaaaataccttgaacgcttatgtggaaagtgttaacttacgggtatttttgtgggaatagaaaaaaattgtttattttttat

SEQ ID NO: 127935 - DNA, 120 bp, Artificial Sequence
  ENSG00000101974_34 (sequence is synthesized)
tcttctgaattaaaccccacttatgggtgtaagcctactagacttgaaaataaagtataaaacatttccaatcacttagtagcccctcaaagtagttagaaaataaacagatttttccag

SEQ ID NO: 127936 - DNA, 120 bp, Artificial Sequence
  ENSG00000101974_35 (sequence is synthesized)
tgttgattttactgggatctgcagtaaggtggtttaaaccatagttatataaaaataaaggtcattctgaatatcagccttttataattttatgtgaagaggaagaaatatagcttattt

SEQ ID NO: 127937 - DNA, 120 bp, Artificial Sequence
  ENSG00000101974_36 (sequence is synthesized)
taaacttttgacggtttttatttgaaagagattgcatttatgcatatatgcagtgctttttcttaaacttggccaatttggaaagggggaaggagccaccccaaaacggtggttcagctt

SEQ ID NO: 127938 - DNA, 120 bp, Artificial Sequence
  ENSG00000101974_37 (sequence is synthesized)
gtagagccatgactctgtgaagatgaatgttgtctcttaacttggacagggaaatggtctaactctaaaccatgtaactgaccttagtaaagtccttgactaactgaactagaaggaagg

SEQ ID NO: 127939 - DNA, 120 bp, Artificial Sequence
  ENSG00000101974_38 (sequence is synthesized)
tttagccttctaattagttcacttgaaacataaatgtgaaatgtcttcattcaatgttaaacacatacttttttggatataaatgaccatatttatttgactgctagtttttttgttttt

SEQ ID NO: 127940 - DNA, 120 bp, Artificial Sequence
  ENSG00000101974_39 (sequence is synthesized)
tttttgtctttctggcatgcctgtactattattaatgtttatattgtaccttgatttggaaaagtattggagttaatctgtattatatttatatagtccatatggcacatttgattcttc

SEQ ID NO: 127941 - DNA, 120 bp, Artificial Sequence
  ENSG00000101974_40 (sequence is synthesized)
cacatatattttgtgttaatgtttaggtatgatttttttctaaattctagaaaagaacataatttcagttatcagaagccattccatcattatagaccctttttcattatttcatttgct

SEQ ID NO: 127942 - DNA, 120 bp, Artificial Sequence
  ENSG00000101974_41 (sequence is synthesized)
ctcatatatcagtattatttttgagcattttgttacatgtcattcacaacttacctaagtgtgctgtgttctggtagcccgtatttgaggtaagctgctgaaaacaaaagtctctatatt

SEQ ID NO: 127943 - DNA, 120 bp, Artificial Sequence
  ENSG00000101974_42 (sequence is synthesized)
ctttgcctattccaaagagctaaaaaagtctaacccaggaaagcttttgatattttgtgtttgttttcttgttcttatggttgttgttgctgtattatgattgctgttttacataaaatc

SEQ ID NO: 127944 - DNA, 120 bp, Artificial Sequence
  ENSG00000101974_43 (sequence is synthesized)
tatgggaactgtgaatacagacaagagagccacagtagagaggcttgtttaatgcagtaccattggagagttaacagaataatctagtagaaaaataactggttgcatgtaaaattcctt

SEQ ID NO: 127945 - DNA, 120 bp, Artificial Sequence
  ENSG00000101974_44 (sequence is synthesized)
ccagccagaaagaaagaaagacaaggagtaagggggatttagagttatgtctcagctacacattacattgtgatactgcagctcaaattcagaatggcaatgatacatgatatcatggcc

SEQ ID NO: 127946 - DNA, 120 bp, Artificial Sequence
  ENSG00000101974_45 (sequence is synthesized)
tagatccttgagagggacctggctttcctttttaaaagatattttactgaagagctaaaaactggccagtgtggggttagcagatcgaataacttgaaatagaccatgcagtattcctag

SEQ ID NO: 127947 - DNA, 120 bp, Artificial Sequence
  ENSG00000101974_46 (sequence is synthesized)
cactcaatgtaatcaccctatttgtgacagagaaagggaaaaaaatataataagatcatctacctataatttgaataattttgagctatcaaaatgtctttgtaattttcacaaccgctg

SEQ ID NO: 127948 - DNA, 120 bp, Artificial Sequence
  ENSG00000101974_47 (sequence is synthesized)
tccattgtttgaggatgttacctactaaactgaaaacattcattccatatctacttacacatacaccagcaacagtataaatgtaagcctaactttgcaaaattcgtaataatttagtga

SEQ ID NO: 127949 - DNA, 120 bp, Artificial Sequence
  ENSG00000101974_48 (sequence is synthesized)
tggaattttttaataacatgcagtatataaatgtgcagattttatgcgtgttgacaaaatcatttttcagcttgcaaaatgggactgcaatattacatttttcacttaagcagtttttta

SEQ ID NO: 127950 - DNA, 120 bp, Artificial Sequence
  ENSG00000101974_49 (sequence is synthesized)
catctacgttgttgctttctaaaatgaatgtgaatgccatcttttatgactgcaacttgccttttccattacagaaatttttgtttgatgtaatcaataaactttggtatgatatgattg

SEQ ID NO: 127951 - DNA, 120 bp, Artificial Sequence
  ENSG00000101974_50 (sequence is synthesized)
cgctgcgcagcagcaacgacacaaagcctgactttacaacctcagagaaagtggaagtaagaaggcttaggtgggcaggcaggacgagagaaagactgagaggagggaaagccgcgtagg

SEQ ID NO: 127952 - DNA, 120 bp, Artificial Sequence
  ENSG00000101974_51 (sequence is synthesized)
tgggagtacagcggcgcgagggtcgagggggaaccctcgtcggtgcagatgaggagggtgggctttcagaactagtcccccctcgcaccccgccccgcccctcccgcgctggggtcttca

SEQ ID NO: 127953 - DNA, 120 bp, Artificial Sequence
  ENSG00000101974_52 (sequence is synthesized)
cggtgccctgcctcagagcccggctccaccacgcccggaagagggagtctggccgtcggctggctcagggcgggccggttggctgtacccaggctccctggcccgagtgcgggaccagag

SEQ ID NO: 127954 - DNA, 120 bp, Artificial Sequence
  ENSG00000101974_53 (sequence is synthesized)
agagcgcggggcggcgcggcagccgcggaccgaggaggggctgcgagcgaaacggcgcggcgcggcacggcggacgagttagggccggggcgagggaggctgtggctcccgacagagaca

SEQ ID NO: 127955 - DNA, 120 bp, Artificial Sequence
  ENSG00000101974_54 (sequence is synthesized)
gacaggggagtagtgtcgggctgaggcgaggtgaggcgcggggtgcctcgggagggttccccgtgccccgaggggggcggccgcggagtccagcggggaggcgggcggtggtgccgcgtc

SEQ ID NO: 127956 - DNA, 120 bp, Artificial Sequence
  ENSG00000101974_55 (sequence is synthesized)
gggtgccgagcccggcgctggcggagagacgggggcgccccctccccacaggaggagcctcgcgctcctccgccatccttcccccgcgcggcgggctcgccttctcagtgggtgctgcgc

SEQ ID NO: 127957 - DNA, 80 bp, Artificial Sequence
  ENSG00000101974_56 (sequence is synthesized)
tcagtgggtgctgcgcgagctgccggcccggggtgccggggccagataagggcgatccgcggggccgccgcccccgggtc

SEQ ID NO: 127958 - DNA, 80 bp, Artificial Sequence
  ENSG00000101974_57 (sequence is synthesized)
aggcggcgagcgggtggcccggccgcccgcctcgctgctccgcttggcgccgccggcccacgccgcagtgtgttttgtgg

SEQ ID NO: 127959 - DNA, 120 bp, Artificial Sequence
  ENSG00000101977_0 (sequence is synthesized)
agtcccatcaagcctgctcctaggaagagagctggtttttttttcctcctccttccactcttaggacatgcctgatcttcttgagcagtccagcacaagctaatccacaaggttcaatca

SEQ ID NO: 127960 - DNA, 120 bp, Artificial Sequence
  ENSG00000101977_1 (sequence is synthesized)
ggctaagtaattggaggaatgtgttaactctgaattacaaggagcagaagggaaggatctgtcagctgactaatcagggatagtggtttttttttttttttcctccccagcattgctgcc

SEQ ID NO: 127961 - DNA, 120 bp, Artificial Sequence
  ENSG00000101977_2 (sequence is synthesized)
actgtgctaatggaagcagccacggcagctttgtttgatagagatttttggctgccgtttttaaatactacccaagaagcagctcgtatttcatcaacgttgcgttgacaattggaaaag

SEQ ID NO: 127962 - DNA, 120 bp, Artificial Sequence
  ENSG00000101977_3 (sequence is synthesized)
aaaagtgtaattgcgtacaggcgaaatggcagaagcaaatccccggagaggcaagatgaggttcagaaggaatgcggcttccttccctgggaacttgcacttggttttggttttacgtcc

SEQ ID NO: 127963 - DNA, 120 bp, Artificial Sequence
  ENSG00000101977_4 (sequence is synthesized)
taccagctttcttcaacgaacgttcacagacattggattttggtttagtcaggaggattttatgcttaaattaccagttgttatgctgagctcagttagtgatttgctgacatacattga

SEQ ID NO: 127964 - DNA, 120 bp, Artificial Sequence
  ENSG00000101977_5 (sequence is synthesized)
tgacaagcaattaacccctgagttaggcggcaccttgcagtactgccacagtgaatggatcatcttcagaaatgctatagaaaattttgccctcacagtgaaagaaatggctcagatgtt

SEQ ID NO: 127965 - DNA, 120 bp, Artificial Sequence
  ENSG00000101977_6 (sequence is synthesized)
acagtcctttggaactgaactggctgagacagaactaccagatgatattccctcaatagaagaaattctggcaattcgtgctgaaaggtatcatctgttgaagaatgatattacagctgt

SEQ ID NO: 127966 - DNA, 120 bp, Artificial Sequence
  ENSG00000101977_7 (sequence is synthesized)
aaccaaagaaggaaaaattctgctaacaaatctggaagtgcctgacactgaaggagctgtcagttcaagactagaatgtcatcggcaaataagtggtgactggcaaactattaataagtt

SEQ ID NO: 127967 - DNA, 120 bp, Artificial Sequence
  ENSG00000101977_8 (sequence is synthesized)
gctgactcaagtacatgatatggaaacagcttttgatggattttgggaaaaacatcaattaaaaatggagcagtatctgcaactatggaagtttgagcaggattttcaacagcttgtgac

SEQ ID NO: 127968 - DNA, 120 bp, Artificial Sequence
  ENSG00000101977_9 (sequence is synthesized)
tgaagttgaatttctattaaaccaacaagcagaactggctgatgtaacagggactatagctcaagtaaaacaaaaaataaaaaaattggaaaacttagatgaaaattctcaggagctatt

SEQ ID NO: 127969 - DNA, 120 bp, Artificial Sequence
  ENSG00000101977_10 (sequence is synthesized)
atcaaaggcccagtttgtgatattacatggacacaagcttgcagcaaatcaccattatgcacttgatttaatctgccagaggtgcaatgagctacgttacctttctgatattttggttaa

SEQ ID NO: 127970 - DNA, 120 bp, Artificial Sequence
  ENSG00000101977_11 (sequence is synthesized)
tgagataaaagcaaaacggatacaactcagcaggaccttcaaaatgcataaactcctacagcaggctcgtcaatgctgtgatgaaggggaatgtcttctagctaatcaggaaatagataa

SEQ ID NO: 127971 - DNA, 120 bp, Artificial Sequence
  ENSG00000101977_12 (sequence is synthesized)
gtttcagtctaaagaagatgctcagaaagctctccaagacattgaaaattttcttgaaatggctctaccctttataaattatgaacctgaaacactgcagtatgaatttgatgtaatatt

SEQ ID NO: 127972 - DNA, 120 bp, Artificial Sequence
  ENSG00000101977_13 (sequence is synthesized)
atctcctgagcttaaggttcaaatgaagactatacaactcaagcttgaaaacattcgaagtatatttgagaaccagcaggctggtttcaggaacctggcagataagcatgtgaggccaat

SEQ ID NO: 127973 - DNA, 120 bp, Artificial Sequence
  ENSG00000101977_14 (sequence is synthesized)
ccaatttgtggtacccacacctgaaaatttggtcacatctgggacaccatttttttcatctaaacaagggaagaagacttggagacaaaatcagagcaacttaaaaattgaagtggtgcc

SEQ ID NO: 127974 - DNA, 120 bp, Artificial Sequence
  ENSG00000101977_15 (sequence is synthesized)
tgattgtcaggagaagagaagttctggtccatcctccagtttggacaatggcaatagcttggatgttttaaagaaccacgtactaaatgaactgatacagactgagagagtttatgttcg

SEQ ID NO: 127975 - DNA, 120 bp, Artificial Sequence
  ENSG00000101977_16 (sequence is synthesized)
ttatagagcggagatggataatccagagatgtttgatcttatgccacctctcctgagaaataaaaaggacattctctttggaaacatggcagaaatatatgaattccataacgacatttt

SEQ ID NO: 127976 - DNA, 120 bp, Artificial Sequence
  ENSG00000101977_17 (sequence is synthesized)
cttgagcagcctggaaaattgtgctcatgctccagaaagagtgggaccttgtttcctggaaaggaaggatgattttcagatgtatgcaaaatattgtcagaataagcccagatcagaaac

SEQ ID NO: 127977 - DNA, 120 bp, Artificial Sequence
  ENSG00000101977_18 (sequence is synthesized)
aatttggaggaagtattcagaatgcgcatttttccaggaatgtcaaagaaagttaaaacacagacttagactggattcctatttactcaaaccagtgcaacgaatcactaaatatcagtt

SEQ ID NO: 127978 - DNA, 120 bp, Artificial Sequence
  ENSG00000101977_19 (sequence is synthesized)
attgttgaaggagctattaaaatatagcaaagactgtgaaggatctgctctgttgaagaaggcactcgatgcaatgctggatttactgaagtcagttaatgattctatgcatcagattgc

SEQ ID NO: 127979 - DNA, 120 bp, Artificial Sequence
  ENSG00000101977_20 (sequence is synthesized)
aataaatggctatattggaaacttaaatgaactgggcaagatgataatgcaaggtggattcagcgtttggatagggcacaagaaaggtgctacaaaaatgaaggatttggctagattcaa

SEQ ID NO: 127980 - DNA, 120 bp, Artificial Sequence
  ENSG00000101977_21 (sequence is synthesized)
accaatgcagcgacaccttttcttgtatgaaaaagccattgttttttgcaaaaggcgtgttgaaagtggagaaggctctgacagatacccgtcatacagttttaaacactgttggaaaat

SEQ ID NO: 127981 - DNA, 120 bp, Artificial Sequence
  ENSG00000101977_22 (sequence is synthesized)
ggatgaagttggaatcactgaatatgtaaaaggtgataaccgcaagtttgaaatctggtatggtgaaaaggaagaagtttatattgtccaggcttctaatgtagatgtgaagatgacgtg

SEQ ID NO: 127982 - DNA, 120 bp, Artificial Sequence
  ENSG00000101977_23 (sequence is synthesized)
gctaaaagaaataagaaatattttgttgaagcagcaggaacttttgacagttaaaaaaagaaagcaacaggatcaattaacagaacgggataagtttcagatttctcttcagcagaatga

SEQ ID NO: 127983 - DNA, 120 bp, Artificial Sequence
  ENSG00000101977_24 (sequence is synthesized)
tgaaaagcaacagggagcttttataagtactgaggaaactgaattggaacacaccagcactgtggtggaggtctgtgaggcaattgcgtcagttcaggcagaagcaaatacagtttggac

SEQ ID NO: 127984 - DNA, 120 bp, Artificial Sequence
  ENSG00000101977_25 (sequence is synthesized)
tgaggcatcacaatctgcagaaatctctgaagaacctgcggaatggtcaagcaactatttctaccctacttatgatgaaaatgaagaagaaaataggcccctcatgagacctgtgtcgga

SEQ ID NO: 127985 - DNA, 120 bp, Artificial Sequence
  ENSG00000101977_26 (sequence is synthesized)
gatggctctcctatattgatgaagctactatgtcaaatggcaagtagctctttcctgcctgcttctcagctcatttggaaaaatactgcgcaaaagacattgagctcaaatgatgcagat

SEQ ID NO: 127986 - DNA, 120 bp, Artificial Sequence
  ENSG00000101977_27 (sequence is synthesized)
gttgttttcaggttaatggacacgcaaagaaaccacagcacatacttcttttctttcatttaataaagcttttaattatggtacgctgtctttttaaaatcatgtatttaatgtgtcaga

SEQ ID NO: 127987 - DNA, 120 bp, Artificial Sequence
  ENSG00000101977_28 (sequence is synthesized)
tattgtgcttgaaagattctcatctcagaatacttttggacttgaaaattatttcttctctactttgtaaccaaatgcaatcggtgtgccttggattatttagtttattaatgaattaag

SEQ ID NO: 127988 - DNA, 120 bp, Artificial Sequence
  ENSG00000101977_29 (sequence is synthesized)
tcaaaattacggctgcaaaatggctaaggtcaagtaaagcacaacattatgatttaatatgcttttgttgaaaccacagcttttgtgcccattgttttaacttgtgtgaaacaatacaaa

SEQ ID NO: 127989 - DNA, 120 bp, Artificial Sequence
  ENSG00000101977_30 (sequence is synthesized)
gcccagaaattcttttcggggcatgagtaaattttgttcagggctactgtctgtatgtgcccagataaaattttcatgagagtagtttacaaaagccgtatttaaaagttaatattttca

SEQ ID NO: 127990 - DNA, 120 bp, Artificial Sequence
  ENSG00000101977_31 (sequence is synthesized)
cactttttttctggatttctgcttataattaatgtaacttaaattagttgtgctctgctattttctgtatatttcatgttgtaattctttttttcaaataaaaattaattcttcaggtta

SEQ ID NO: 127991 - DNA, 120 bp, Artificial Sequence
  ENSG00000101977_32 (sequence is synthesized)
catgttaagagcaagaaggcttttgttcttggagcaggcagagagtattgtacattcttttggccgaggaaacagaatgagctgcgacagtcttaaggacaaacatttgtgaaaccgatc

SEQ ID NO: 127992 - DNA, 120 bp, Artificial Sequence
  ENSG00000101977_33 (sequence is synthesized)
tgctcctccgtataaaggacatcagtcatttcttaatgcaagacatcgccttcttgtctggtggccggggaaaggacaatgcttggatcattacgtttccagaaaactgtaattttagat

SEQ ID NO: 127993 - DNA, 120 bp, Artificial Sequence
  ENSG00000101977_34 (sequence is synthesized)
gtataccagaggaagtaatagcaaaagtacttacttacctgacatctattgcaaggcaaaatggatcagactcccggtttaccattattctggatcgaagattggatacatggtcttctc

SEQ ID NO: 127994 - DNA, 120 bp, Artificial Sequence
  ENSG00000101977_35 (sequence is synthesized)
aatttggtcacatctgggacaccatttttttcatctaaacaagtgggagttggatactctttctttcaagcatgtaaacttttttcaaaagggaagaagacttggagacaaaatcagagc

SEQ ID NO: 127995 - DNA, 120 bp, Artificial Sequence
  ENSG00000101977_36 (sequence is synthesized)
cctgggttcgccaaggcgggcggccaggcacatgccccaagctgccgcttcggcgccgtggacctcagtgtcctgcggcaggatcccaggcctgccccagaacccagatggctgcacttt

SEQ ID NO: 127996 - DNA, 120 bp, Artificial Sequence
  ENSG00000101977_37 (sequence is synthesized)
catgccgatagcccaggcgatccctctgcaggtggacatggccatggccctgcagcgcgtgaggattgccgagaagtacgggaagaactacctctgcctcctgcaagcagtcttcgtggc

SEQ ID NO: 127997 - DNA, 120 bp, Artificial Sequence
  ENSG00000101977_38 (sequence is synthesized)
aagaagtatcctttatttattaatataaactcacatacacatctaactgtgggagtctggttcagtgttcaaggccaatgtgattagaaatttgagttcacagaatggggttttactggg

SEQ ID NO: 127998 - DNA, 120 bp, Artificial Sequence
  ENSG00000101977_39 (sequence is synthesized)
ctatagcctatttatgtgatttgaagaaaattaactaaactttttcagaatgttggtatcttcttttttttaccccagactgaaataaaatggaggttttcgtttatcattcttaaaaaa

SEQ ID NO: 127999 - DNA, 120 bp, Artificial Sequence
  ENSG00000101977_40 (sequence is synthesized)
agttttattattatttttcattgacacataatcattgtacatatttatggaatacagtgtgaaattttgatacatgtgtacaatgtataatgatcaaatcatggtagttagcttatctat

SEQ ID NO: 128000 - DNA, 120 bp, Artificial Sequence
  ENSG00000101977_41 (sequence is synthesized)
taattcttcagctttattgatatataattgacaaaattatgtatatttaaagtgtacaatgtgatgctttgatatgtgtatatattgtgaaatgattaccatatcaagttagttaacaca

SEQ ID NO: 128001 - DNA, 120 bp, Artificial Sequence
  ENSG00000101981_0 (sequence is synthesized)
aaaggttatgcagcgcgtgaacatgatcatggcagaatcaccaggcctcatcaccatctgccttttaggatatctactcagtgctgaatgtacagtttttcttgatcatgaaaacgccaa

SEQ ID NO: 128002 - DNA, 120 bp, Artificial Sequence
  ENSG00000101981_1 (sequence is synthesized)
caaaattctgaatcggccaaagaggtataattcaggtaaattggaagagtttgttcaagggaaccttgagagagaatgtatggaagaaaagtgtagttttgaagaagcacgagaagtttt

SEQ ID NO: 128003 - DNA, 120 bp, Artificial Sequence
  ENSG00000101981_2 (sequence is synthesized)
tgaaaacactgaaagaacaactgaattttggaagcagtatgttgatggagatcagtgtgagtccaatccatgtttaaatggcggcagttgcaaggatgacattaattcctatgaatgttg

SEQ ID NO: 128004 - DNA, 120 bp, Artificial Sequence
  ENSG00000101981_3 (sequence is synthesized)
gtgtccctttggatttgaaggaaagaactgtgaattagatgtaacatgtaacattaagaatggcagatgcgagcagttttgtaaaaatagtgctgataacaaggtggtttgctcctgtac

SEQ ID NO: 128005 - DNA, 120 bp, Artificial Sequence
  ENSG00000101981_4 (sequence is synthesized)
tgagggatatcgacttgcagaaaaccagaagtcctgtgaaccagcagtgccatttccatgtggaagagtttctgtttcacaaacttctaagctcacccgtgctgagactgtttttcctga

SEQ ID NO: 128006 - DNA, 120 bp, Artificial Sequence
  ENSG00000101981_5 (sequence is synthesized)
tgtggactatgtaaattctactgaagctgaaaccattttggataacatcactcaaagcacccaatcatttaatgacttcactcgggttgttggtggagaagatgccaaaccaggtcaatt

SEQ ID NO: 128007 - DNA, 120 bp, Artificial Sequence
  ENSG00000101981_6 (sequence is synthesized)
cccttggcaggttgttttgaatggtaaagttgatgcattctgtggaggctctatcgttaatgaaaaatggattgtaactgctgcccactgtgttgaaactggtgttaaaattacagttgt

SEQ ID NO: 128008 - DNA, 120 bp, Artificial Sequence
  ENSG00000101981_7 (sequence is synthesized)
cgcaggtgaacataatattgaggagacagaacatacagagcaaaagcgaaatgtgattcgaattattcctcaccacaactacaatgcagctattaataagtacaaccatgacattgccct

SEQ ID NO: 128009 - DNA, 120 bp, Artificial Sequence
  ENSG00000101981_8 (sequence is synthesized)
tctggaactggacgaacccttagtgctaaacagctacgttacacctatttgcattgctgacaaggaatacacgaacatcttcctcaaatttggatctggctatgtaagtggctggggaag

SEQ ID NO: 128010 - DNA, 120 bp, Artificial Sequence
  ENSG00000101981_9 (sequence is synthesized)
agtcttccacaaagggagatcagctttagttcttcagtaccttagagttccacttgttgaccgagccacatgtcttcgatctacaaagttcaccatctataacaacatgttctgtgctgg

SEQ ID NO: 128011 - DNA, 120 bp, Artificial Sequence
  ENSG00000101981_10 (sequence is synthesized)
cttccatgaaggaggtagagattcatgtcaaggagatagtgggggaccccatgttactgaagtggaagggaccagtttcttaactggaattattagctggggtgaagagtgtgcaatgaa

SEQ ID NO: 128012 - DNA, 120 bp, Artificial Sequence
  ENSG00000101981_11 (sequence is synthesized)
ccaaggtatcccggtatgtcaactggattaaggaaaaaacaaagctcacttaatgaaagatggatttccaaggttaattcattggaattgaaaattaacagggcctctcactaactaatc

SEQ ID NO: 128013 - DNA, 120 bp, Artificial Sequence
  ENSG00000101981_12 (sequence is synthesized)
actttcccatcttttgttagatttgaatatatacattctatgatcattgctttttctctttacaggggagaatttcatattttacctgagcaaattgattagaaaatggaaccactagag

SEQ ID NO: 128014 - DNA, 120 bp, Artificial Sequence
  ENSG00000101981_13 (sequence is synthesized)
gaatataatgtgttaggaaattacagtcatttctaagggcccagcccttgacaaaattgtgaagttaaattctccactctgtccatcagatactatggttctccactatggcaactaact

SEQ ID NO: 128015 - DNA, 120 bp, Artificial Sequence
  ENSG00000101981_14 (sequence is synthesized)
cactcaattttccctccttagcagcattccatcttcccgatcttctttgcttctccaaccaaaacatcaatgtttattagttctgtatacagtacaggatctttggtctactctatcaca

SEQ ID NO: 128016 - DNA, 120 bp, Artificial Sequence
  ENSG00000101981_15 (sequence is synthesized)
aggccagtaccacactcatgaagaaagaacacaggagtagctgagaggctaaaactcatcaaaaacactactccttttcctctaccctattcctcaatcttttaccttttccaaatccca

SEQ ID NO: 128017 - DNA, 120 bp, Artificial Sequence
  ENSG00000101981_16 (sequence is synthesized)
atccccaaatcagtttttctctttcttactccctctctcccttttaccctccatggtcgttaaaggagagatggggagcatcattctgttatacttctgtacacagttatacatgtctat

SEQ ID NO: 128018 - DNA, 120 bp, Artificial Sequence
  ENSG00000101981_17 (sequence is synthesized)
caaacccagacttgcttccgtagtggagacttgcttttcagaacatagggatgaagtaaggtgcctgaaaagtttgggggaaaagtttctttcagagagttaagttattttatatatata

SEQ ID NO: 128019 - DNA, 120 bp, Artificial Sequence
  ENSG00000101981_18 (sequence is synthesized)
atatatatataaaatatataatatacaatataaatatatagtgtgtgtgtatgcgtgtgtgtagacacacacgcatacacacatataatggaagcaataagccattctaagagcttgtat

SEQ ID NO: 128020 - DNA, 120 bp, Artificial Sequence
  ENSG00000101981_19 (sequence is synthesized)
ggttatggaggtctgactaggcatgatttcacgaaggcaagattggcatatcattgtaactaaaaaagctgacattgacccagacatattgtactctttctaaaaataataataataatg

SEQ ID NO: 128021 - DNA, 120 bp, Artificial Sequence
  ENSG00000101981_20 (sequence is synthesized)
ctaacagaaagaagagaaccgttcgtttgcaatctacagctagtagagactttgaggaagaattcaacagtgtgtcttcagcagtgttcagagccaagcaagaagttgaagttgcctaga

SEQ ID NO: 128022 - DNA, 120 bp, Artificial Sequence
  ENSG00000101981_21 (sequence is synthesized)
ccagaggacataagtatcatgtctcctttaactagcataccccgaagtggagaagggtgcagcaggctcaaaggcataagtcattccaatcagccaactaagttgtccttttctggtttc

SEQ ID NO: 128023 - DNA, 120 bp, Artificial Sequence
  ENSG00000101981_22 (sequence is synthesized)
gtgttcaccatggaacattttgattatagttaatccttctatcttgaatcttctagagagttgctgaccaactgacgtatgtttccctttgtgaattaataaactggtgttctggttcat

SEQ ID NO: 128024 - DNA, 120 bp, Artificial Sequence
  ENSG00000101981_23 (sequence is synthesized)
gggggcaagagaaaggaactgaagagtgaggcagaaaggaaaagaaagccaataagaggatgagttatcaaactactcgtttctaacagcaactgattgcttaacttcctgggactgtct

SEQ ID NO: 128025 - DNA, 120 bp, Artificial Sequence
  ENSG00000101981_24 (sequence is synthesized)
ccaataagtcaaattggcctcaggttagtccacctgagtgggaagaagcggtgaaagaatttgtctgtcagtatctgtctctcattggttagaagttcgacttatggggaattaactccc

SEQ ID NO: 128026 - DNA, 120 bp, Artificial Sequence
  ENSG00000101981_25 (sequence is synthesized)
tcacatttcctagttggatatgcttgggtacccagagggtcatatggcatccatgcctcagcatgaacagggaagcttcaaggcaaaagacacatagtgcagctatgagccaaggcaatt

SEQ ID NO: 128027 - DNA, 120 bp, Artificial Sequence
  ENSG00000101981_26 (sequence is synthesized)
caaggatacacccataggaggctggttgacatccacccagagctaatcaccaccatgctggaaaaagacacaggtgaagctgagaagaatgaaggtggtgcataggagaaagcaaaaatt

SEQ ID NO: 128028 - DNA, 120 bp, Artificial Sequence
  ENSG00000101981_27 (sequence is synthesized)
tcttaaaatacaaaaagtgatcaccataaaggaaaagattgataaactggactatattaaaactaaggactcctgttcagcaaaagacactacttcgactgaaaagacaagtcacagagt

SEQ ID NO: 128029 - DNA, 120 bp, Artificial Sequence
  ENSG00000101981_28 (sequence is synthesized)
gagacaagatatctgcaatacagatacctaataactgaaccccatacagtgatggtgggaatttaagttcgtacaatcattttagaaaattgcttggcagtatctactagatctgaacat

SEQ ID NO: 128030 - DNA, 120 bp, Artificial Sequence
  ENSG00000101981_29 (sequence is synthesized)
gtgatccagtaattacactcataattataagccagtaaaaaggcatgtttatgtcaccaaaagatatatacaagaatgttcattacactattatacataagagccaaaaactggaaacaa

SEQ ID NO: 128031 - DNA, 120 bp, Artificial Sequence
  ENSG00000101981_30 (sequence is synthesized)
gacaaaatgttaaatgaaagacacagacgagtacatattgcgaacttctgtttataattcaagaactggcaagaactgtttactgtgttagaagtccagatgtaacatgtaacattaaga

SEQ ID NO: 128032 - DNA, 120 bp, Artificial Sequence
  ENSG00000101986_0 (sequence is synthesized)
actgtcgcttcagccaggctgcggagcggacggacgcgcctggtgccccggggaggggcgccaccgggggaggaggaggaggagaaggtggagaggaagagacgccccctctgcccgaga

SEQ ID NO: 128033 - DNA, 120 bp, Artificial Sequence
  ENSG00000101986_1 (sequence is synthesized)
cctctcaaggccctgacctcaggggccagggcactgacaggacaggagagccaagttcctccacttgggctgcccgaagaggccgcgaccctggagggccctgagcccaccgcaccaggg

SEQ ID NO: 128034 - DNA, 120 bp, Artificial Sequence
  ENSG00000101986_2 (sequence is synthesized)
gccccagcaccaccccgggggcctaaagcgacagtctcaggggccatcgcaaggtttccagttgcctagacaacaggcccagggtcagagcaacaatccttccagccacctgcctcaact

SEQ ID NO: 128035 - DNA, 120 bp, Artificial Sequence
  ENSG00000101986_3 (sequence is synthesized)
gctgccccaggcaccagccccagtccctacgcggcagccagcccaggtgacatgccggtgctctccaggccccggccctggcgggggaacacgctgaagcgcacggccgtgctcctggcc

SEQ ID NO: 128036 - DNA, 120 bp, Artificial Sequence
  ENSG00000101986_4 (sequence is synthesized)
ctcgcggcctatggagcccacaaagtctaccccttggtgcgccagtgcctggccccggccaggggtcttcaggcgcccgccggggagcccacgcaggaggcctccggggtcgcggcggcc

SEQ ID NO: 128037 - DNA, 120 bp, Artificial Sequence
  ENSG00000101986_5 (sequence is synthesized)
aaagctggcatgaaccgggtattcctgcagcggctcctgtggctcctgcggctgctgttcccccgggtcctgtgccgggagacggggctgctggccctgcactcggccgccttggtgagc

SEQ ID NO: 128038 - DNA, 120 bp, Artificial Sequence
  ENSG00000101986_6 (sequence is synthesized)
cgcaccttcctgtcggtgtatgtggcccgcctggacggaaggctggcccgctgcatcgtccgcaaggacccgcgggcttttggctggcagctgctgcagtggctcctcatcgccctccct

SEQ ID NO: 128039 - DNA, 120 bp, Artificial Sequence
  ENSG00000101986_7 (sequence is synthesized)
gctaccttcgtcaacagtgccatccgttacctggagggccaactggccctgtcgttccgcagccgtctggtggcccacgcctaccgcctctacttctcccagcagacctactaccgggtc

SEQ ID NO: 128040 - DNA, 120 bp, Artificial Sequence
  ENSG00000101986_8 (sequence is synthesized)
agcaacatggacgggcggcttcgcaaccctgaccagtctctgacggaggacgtggtggcctttgcggcctctgtggcccacctctactccaacctgaccaagccactcctggacgtggct

SEQ ID NO: 128041 - DNA, 120 bp, Artificial Sequence
  ENSG00000101986_9 (sequence is synthesized)
gtgacttcctacaccctgcttcgggcggcccgctcccgtggagccggcacagcctggccctcggccatcgccggcctcgtggtgttcctcacggccaacgtgctgcgggccttctcgccc

SEQ ID NO: 128042 - DNA, 120 bp, Artificial Sequence
  ENSG00000101986_10 (sequence is synthesized)
aagttcggggagctggtggcagaggaggcgcggcggaagggggagctgcgctacatgcactcgcgtgtggtggccaactcggaggagatcgccttctatgggggccatgaggtggagctg

SEQ ID NO: 128043 - DNA, 120 bp, Artificial Sequence
  ENSG00000101986_11 (sequence is synthesized)
gccctgctacagcgctcctaccaggacctggcctcgcagatcaacctcatccttctggaacgcctgtggtatgttatgctggagcagttcctcatgaagtatgtgtggagcgcctcgggc

SEQ ID NO: 128044 - DNA, 120 bp, Artificial Sequence
  ENSG00000101986_12 (sequence is synthesized)
ctgctcatggtggctgtccccatcatcactgccactggctactcagagtcagatgcagaggccgtgaagaaggcagccttggaaaagaaggaggaggagctggtgagcgagcgcacagaa

SEQ ID NO: 128045 - DNA, 120 bp, Artificial Sequence
  ENSG00000101986_13 (sequence is synthesized)
gccttcactattgcccgcaacctcctgacagcggctgcagatgccattgagcggatcatgtcgtcgtacaaggaggtgacggagctggctggctacacagcccgggtgcacgagatgttc

SEQ ID NO: 128046 - DNA, 120 bp, Artificial Sequence
  ENSG00000101986_14 (sequence is synthesized)
caggtatttgaagatgttcagcgctgtcacttcaagaggcccagggagctagaggacgctcaggcggggtctgggaccataggccggtctggtgtccgtgtggagggccccctgaagatc

SEQ ID NO: 128047 - DNA, 120 bp, Artificial Sequence
  ENSG00000101986_15 (sequence is synthesized)
gaggtggtggtggccagcctcaacatcagggtggaggaaggcatgcatctgctcatcacaggccccaatggctgcggcaagagctccctgttccggatcctgggtgggctctggcccacg

SEQ ID NO: 128048 - DNA, 120 bp, Artificial Sequence
  ENSG00000101986_16 (sequence is synthesized)
tacggtggtgtgctctacaagcccccaccccagcgcatgttctacatcccgcagaggccctacatgtctgtgggctccctgcgtgaccaggtgatctacccggactcagtggaggacatg

SEQ ID NO: 128049 - DNA, 120 bp, Artificial Sequence
  ENSG00000101986_17 (sequence is synthesized)
caaaggaagggctactcggagcaggacctggaagccatcctggacgtcgtgcacctgcaccacatcctgcagcgggagggaggttgggaggctatgtgtgactggaaggacgtcctgtcg

SEQ ID NO: 128050 - DNA, 120 bp, Artificial Sequence
  ENSG00000101986_18 (sequence is synthesized)
ggtggcgagaagcagagaatcggcatggcccgcatgttctaccacaggcccaagtacgccctcctggatgaatgcaccagcgccgtgagcatcgacgtggaaggcaagatcttccaggcg

SEQ ID NO: 128051 - DNA, 120 bp, Artificial Sequence
  ENSG00000101986_19 (sequence is synthesized)
gccaaggacgcgggcattgccctgctctccatcacccaccggccctccctgtggaaataccacacacacttgctacagttcgatggggagggcggctggaagttcgagaagctggactca

SEQ ID NO: 128052 - DNA, 120 bp, Artificial Sequence
  ENSG00000101986_20 (sequence is synthesized)
gctgcccgcctgagcctgacggaggagaagcagcggctggagcagcagctggcgggcattcccaagatgcagcggcgcctccaggagctctgccagatcctgggcgaggccgtggcccca

SEQ ID NO: 128053 - DNA, 120 bp, Artificial Sequence
  ENSG00000101986_21 (sequence is synthesized)
gcgcatgtgccggcacctagcccgcaaggccctggtggcctccagggtgcctccacctgacacaaccgtccccggcccctgccccgcccccaagctcggatcacatgaaggagacagcag

SEQ ID NO: 128054 - DNA, 120 bp, Artificial Sequence
  ENSG00000101986_22 (sequence is synthesized)
cacccacccatgcacgcaccccgcccctgcatgcctggcccctcctcctagaaaacccttcccgccctcgggaaagtagatgtggagggtggcgccctgcgtaaccctcgccctgtccct

SEQ ID NO: 128055 - DNA, 120 bp, Artificial Sequence
  ENSG00000101986_23 (sequence is synthesized)
cccactccctgggggcgctgttccacagtgactgggccctgtccagggcagtgagtcctctactttgctccgtggaggaagctggggtacaaggggcccagtgctggccacacagcagcg

SEQ ID NO: 128056 - DNA, 120 bp, Artificial Sequence
  ENSG00000101986_24 (sequence is synthesized)
cagccgagccccaggagcccgtcaggccacagcccctggcactgcaggtggcctccctccagagactcgagtccccatgattccctcctcgtcagtctctcaaagaccccatggtccatc

SEQ ID NO: 128057 - DNA, 120 bp, Artificial Sequence
  ENSG00000101986_25 (sequence is synthesized)
ccctgagggtggtcagccaaggctcccgttccgtgggatgccataaaagccgcccagtgggacccacagtcacacagagcgcctcacctgcatcctctcccccacaagagccccaaagat

SEQ ID NO: 128058 - DNA, 120 bp, Artificial Sequence
  ENSG00000101986_26 (sequence is synthesized)
cccacgggagaggggagagggacgcacagcactgcctgccaagcgagaatgcaggccccgccccctcggcccctcaccacctctttctacagcctaatttattggattccctattcgtag

SEQ ID NO: 128059 - DNA, 120 bp, Artificial Sequence
  ENSG00000101986_27 (sequence is synthesized)
ccatctccgtggccaatgtgactaccgtgccagcagcgggggcggcccagcctctgagtcccgtggggccccggctcccaccggtgccaaacccagcccctgcggccgtcaccccgccag

SEQ ID NO: 128060 - DNA, 120 bp, Artificial Sequence
  ENSG00000101986_28 (sequence is synthesized)
cctacactgccagccgccaccggggcacacgggcctctgcttgccagccaggagtgcggacaccatgttcccagctcagtgccaaagaggggtcaccagggggagctgtctgcggagcca

SEQ ID NO: 128061 - DNA, 120 bp, Artificial Sequence
  ENSG00000101986_29 (sequence is synthesized)
gcgcctgcccgagagagaccccaccgccaccgtgtgcctttcccgggccctcagccctcgggccgggcaccacccccagtccccccagtaaaagcctccactggcaaatgcagtccttcc

SEQ ID NO: 128062 - DNA, 120 bp, Artificial Sequence
  ENSG00000101986_30 (sequence is synthesized)
gactgttctccacagtggctgccccattttaccttcccgccagcagtgttggagggttccaccttttcatcgtggctagcactgatgcagaggccgtgaagaaggcagccttggaaaaga

SEQ ID NO: 128063 - DNA, 120 bp, Artificial Sequence
  ENSG00000101986_31 (sequence is synthesized)
acccagggctccaagaggatccaggccaggggcctgtcccccataccgctgggtgctgagctcacgagggcccaactcagccagcccgccgcccacttctgctgccggggccaccgaggc

SEQ ID NO: 128064 - DNA, 120 bp, Artificial Sequence
  ENSG00000101986_32 (sequence is synthesized)
cctgctgccagccttgatgctttcagaggttgagctcgccttgcccctccttgttgccttttgccctgcgcgcacctcacgccctttgttaccactcagacaagcccaggactgcaagtc

SEQ ID NO: 128065 - DNA, 120 bp, Artificial Sequence
  ENSG00000101986_33 (sequence is synthesized)
aggaacactacatgtcacttctccaggcacagataccctcacccacctgtccctgtcctcaacccaactgcgacttagaggtgggagaatgtgcggagtacctggagtgagccccttcat

SEQ ID NO: 128066 - DNA, 120 bp, Artificial Sequence
  ENSG00000101986_34 (sequence is synthesized)
cactccagccttggtttcctcgccctgaaacagctcttgcaccctaaggtgttttagaggagtgggaagcctgttctacctgttattttagtgataagattaaatgtttaggtttctgca

SEQ ID NO: 128067 - DNA, 120 bp, Artificial Sequence
  ENSG00000101997_0 (sequence is synthesized)
acatccggcatgcgccgtgctcgctcacagaactacactttccaactctccccacacgacccgtgacactctgtggaccgcgagcacggagcagggtttctacagctgctccccactttc

SEQ ID NO: 128068 - DNA, 120 bp, Artificial Sequence
  ENSG00000101997_1 (sequence is synthesized)
tcggacccggtcctggacccagcccccgactccgacacggctccaccatggaggaggcggaccgaatcctcatccattcgctgcgccaggccggcacggcagttcctccagatgtgcaga

SEQ ID NO: 128069 - DNA, 120 bp, Artificial Sequence
  ENSG00000101997_2 (sequence is synthesized)
ccttgcgcgccttcaccactgagctggttgtagaggctgtggtccgctgcctgcgtgtgatcaaccctgcggtgggctctggcctcagccctctgctgcctcttgccatgtctgcccggt

SEQ ID NO: 128070 - DNA, 120 bp, Artificial Sequence
  ENSG00000101997_3 (sequence is synthesized)
tccgcctggccatgagcctggctcaggcctgcatggacctgggctatcccttggagcttggctatcagaacttcctctaccccagtgagcctgacctccgagacctgcttctcttcttgg

SEQ ID NO: 128071 - DNA, 120 bp, Artificial Sequence
  ENSG00000101997_4 (sequence is synthesized)
ctgagcgtctgcccaccgatgcctctgaggatgcagaccagcctgcaggtgactcagctattctcctccgggccattgggagccaaattcgggaccagctggcactgccttgggtcccgc

SEQ ID NO: 128072 - DNA, 120 bp, Artificial Sequence
  ENSG00000101997_5 (sequence is synthesized)
cccaccttcgcactcccaagctgcagcacctccagggctcggccctccagaagcctttccatgccagcaggctggtcgtgccagaattgagttccagaggtgagccacgggagttccagg

SEQ ID NO: 128073 - DNA, 120 bp, Artificial Sequence
  ENSG00000101997_6 (sequence is synthesized)
cgagtcccctgctgcttccagtccctacccaggtgcctcagcctgttggaagggtggcctcgctcctcgaacaccatgccctgcagctctgccagcagacgggccgggaccggccagggg

SEQ ID NO: 128074 - DNA, 120 bp, Artificial Sequence
  ENSG00000101997_7 (sequence is synthesized)
atgaggactgggtccaccggacatcccgcctcccaccccaggaggacacacgggctcagcggcagcggctgcaaaagcaactgactgagcatctgcgccaaagctggggcctgcttgggg

SEQ ID NO: 128075 - DNA, 120 bp, Artificial Sequence
  ENSG00000101997_8 (sequence is synthesized)
cccccatacaagcccgggacctgggagaactgctgcaggcctggggtgctggggccaagactggtgctcctaagggctcccgcttcacgcactcagagaagttcaccttccatctggagc

SEQ ID NO: 128076 - DNA, 120 bp, Artificial Sequence
  ENSG00000101997_9 (sequence is synthesized)
tgccagccacctcccggcggcctgaacaggtcacgtgggcagctcaggaacaggagctcgagtcccttcgggagcagctggaaggagtgaaccgcagcattgaggaggttgaggccgaca

SEQ ID NO: 128077 - DNA, 120 bp, Artificial Sequence
  ENSG00000101997_10 (sequence is synthesized)
tgaagaccctgggcgtcagctttgtgcaggcagagtctgagtgccggcacagcaagctcagtacagcagagcgtgagcaggccctgcgcctgaagagccgcgcggtggagctgctgcccg

SEQ ID NO: 128078 - DNA, 120 bp, Artificial Sequence
  ENSG00000101997_11 (sequence is synthesized)
atgggactgccaaccttgccaagctgcagcttgtggtggagaatagtgcccagcgggtcatccacttggcgggtcagtgggagaagcaccgggtcccactcctcgctgagtaccgccacc

SEQ ID NO: 128079 - DNA, 120 bp, Artificial Sequence
  ENSG00000101997_12 (sequence is synthesized)
tccgaaagctgcaggattgcagagagctggaatcttctcgacggctggcagagatccaagaactgcaccagagtgtccgggcggctgctgaagaggcccgcaggaaggaggaggtctata

SEQ ID NO: 128080 - DNA, 120 bp, Artificial Sequence
  ENSG00000101997_13 (sequence is synthesized)
agcagctgatgtcagagctggagactctgcccagagatgtgtcccggctggcctacacccagcgcatcctggagatcgtgggcaacatccggaagcagaaggaagagatcaccaagatct

SEQ ID NO: 128081 - DNA, 120 bp, Artificial Sequence
  ENSG00000101997_14 (sequence is synthesized)
tgtctgatacgaaggagcttcagaaggaaatcaactccctatctgggaagctggaccggacgtttgcggtgactgatgagcttgtgttcaaggatgccaagaaggacgatgctgttcgga

SEQ ID NO: 128082 - DNA, 120 bp, Artificial Sequence
  ENSG00000101997_15 (sequence is synthesized)
aggcctataagtatctagctgctctgcacgagaactgcagccagctcatccagaccatcgaggacacaggcaccatcatgcgggaggttcgagacctcgaggagcagatcgagacagagc

SEQ ID NO: 128083 - DNA, 120 bp, Artificial Sequence
  ENSG00000101997_16 (sequence is synthesized)
tgggcaagaagaccctcagcaacctggagaagatccgggaggactaccgagccctccgccaggagaacgctggcctcctaggccgggtccgggaggcctgaggagccgccggcagaggtc

SEQ ID NO: 128084 - DNA, 120 bp, Artificial Sequence
  ENSG00000101997_17 (sequence is synthesized)
tctccccagcctcaggcagggatttggggtgctggaggcagtggccaagcacatgccctagctacttcctccgctgtccagttcctcctgctgcggccttggacccagacccctgcccac

SEQ ID NO: 128085 - DNA, 120 bp, Artificial Sequence
  ENSG00000101997_18 (sequence is synthesized)
tgaccgcaacccttatatggggtgatagtccagcatgtggggagctcggctgcagtttattggggacggtactgtgggttgggggccttggatcccaaataaatgagtagttcctctgca

SEQ ID NO: 128086 - DNA, 120 bp, Artificial Sequence
  ENSG00000101997_19 (sequence is synthesized)
cttaggacttgaggatttccctagttcctggttttccaaatggaagtcacagtcaccaacatccaggatctgtctgaactgtaggcatcctccctgccccgaccctggtactagtgtttc

SEQ ID NO: 128087 - DNA, 120 bp, Artificial Sequence
  ENSG00000102001_0 (sequence is synthesized)
ctccaaagctgggggaagagaggggggttgtgtgcagatggcccttcaatctcgaaagaaagatgtcggaatctgaaggcgggaaagacaccaccccagagcccagtccagccaatgggg

SEQ ID NO: 128088 - DNA, 120 bp, Artificial Sequence
  ENSG00000102001_1 (sequence is synthesized)
caggccctggtcccgaatgggggctgtgccccgggcccccagctgtggaaggtgaaagcagtggggcatcaggcctagggacccctaagcgaagaaaccagcacagcaagcacaagacag

SEQ ID NO: 128089 - DNA, 120 bp, Artificial Sequence
  ENSG00000102001_2 (sequence is synthesized)
tggcagtggccagtgcccagcggtcacctcgggcactcttctgcctcaccctggccaatcctctgcgacggtcctgcatcagcatcgtggagtggaagcccttcgacatcctcatcctgc

SEQ ID NO: 128090 - DNA, 120 bp, Artificial Sequence
  ENSG00000102001_3 (sequence is synthesized)
tgaccatctttgccaactgcgtggccctgggagtttacatccccttccctgaggacgactccaacactgccaaccacaacctggagcaggtggagtacgtattcctggtgattttcactg

SEQ ID NO: 128091 - DNA, 120 bp, Artificial Sequence
  ENSG00000102001_4 (sequence is synthesized)
tggagacggtgctcaagatcgtggcctacgggctggtgctccaccccagcgcctacatccgcaatggctggaacctactcgacttcatcatcgtcgtggtcgggctgttcagcgttctgc

SEQ ID NO: 128092 - DNA, 120 bp, Artificial Sequence
  ENSG00000102001_5 (sequence is synthesized)
tggagcagggccccggacggccaggcgacgccccgcacaccgggggaaagccaggaggcttcgatgtgaaggcattgagggcgtttcgggtgctgcggccactgaggctggtgtctgggg

SEQ ID NO: 128093 - DNA, 120 bp, Artificial Sequence
  ENSG00000102001_6 (sequence is synthesized)
tcccgagcctgcacatagtgctcaattccatcatgaaggctctggtgccgctgctgcacattgcactgctcgtgctcttcgtcatcatcatttatgccatcattgggctcgagctgttcc

SEQ ID NO: 128094 - DNA, 120 bp, Artificial Sequence
  ENSG00000102001_7 (sequence is synthesized)
ttggacgaatgcacaagacgtgctacttcctgggatccgacatggaagcggaggaggacccatcgccctgtgcgtcttcgggatcagggcgtgcgtgcacgctgaaccagactgagtgcc

SEQ ID NO: 128095 - DNA, 120 bp, Artificial Sequence
  ENSG00000102001_8 (sequence is synthesized)
gcgggcgctggccagggcccaatggaggcatcaccaactttgacaacttcttcttcgccatgctgacagtcttccagtgtgtcaccatggaaggctggaccgatgtgctctactggatgc

SEQ ID NO: 128096 - DNA, 120 bp, Artificial Sequence
  ENSG00000102001_9 (sequence is synthesized)
aagatgccatggggtatgaactgccctgggtgtactttgtgagccttgtcatctttgggtccttcttcgtcctcaaccttgtgcttggcgtcctgagtggggagttctccaaggagagag

SEQ ID NO: 128097 - DNA, 120 bp, Artificial Sequence
  ENSG00000102001_10 (sequence is synthesized)
agaaagcgaaagctcgcggggacttccagaagcagcgggagaagcagcagatggaggaagacctgcggggctacctggactggatcactcaagccgaagagctggacatggaggacccct

SEQ ID NO: 128098 - DNA, 120 bp, Artificial Sequence
  ENSG00000102001_11 (sequence is synthesized)
ccgccgatgacaaccttggttctatggctgaagagggccgggcgggccatcggccacagctggccgagctgaccaataggaggcgtggacgtctgcgctggttcagtcattctactcgct

SEQ ID NO: 128099 - DNA, 120 bp, Artificial Sequence
  ENSG00000102001_12 (sequence is synthesized)
ccacacactccaccagcagccatgccagcctcccagccagtgacaccggttccatgacagagacccaaggcgatgaggatgaggaggagggggctctggccagctgtacacgctgcctaa

SEQ ID NO: 128100 - DNA, 120 bp, Artificial Sequence
  ENSG00000102001_13 (sequence is synthesized)
acaagatcatgaaaaccagagtctgccgccgcctccgccgagccaaccgggtccttcgggcacgctgccgtcgggcagtgaagtccaatgcctgctactgggctgtgctgttgctcgtct

SEQ ID NO: 128101 - DNA, 120 bp, Artificial Sequence
  ENSG00000102001_14 (sequence is synthesized)
tcctcaacacgttgaccatcgcctctgagcaccacgggcagcctgtgtggctcacccagatccaggagtatgccaacaaagtgttgctctgtctgttcacggtggagatgcttctcaaat

SEQ ID NO: 128102 - DNA, 120 bp, Artificial Sequence
  ENSG00000102001_15 (sequence is synthesized)
tgtacggtctgggcccctctgcctatgtgtcttccttcttcaaccgctttgactgctttgtggtctgtgggggcatcctagagaccaccttggtggaggtgggtgccatgcagcccttgg

SEQ ID NO: 128103 - DNA, 120 bp, Artificial Sequence
  ENSG00000102001_16 (sequence is synthesized)
gcatctcagtgctccgatgtgtgcgcctcctcaggatctttaaggtcaccagacactgggcttctctgagcaatctggtggcatccctgctcaattcaatgaaatccatcgcatccttgc

SEQ ID NO: 128104 - DNA, 120 bp, Artificial Sequence
  ENSG00000102001_17 (sequence is synthesized)
tgcttctcctcttcctcttcatcattatcttctccctgcttggcatgcagctgtttgggggcaagttcaactttgaccagacccacaccaagcgaagcacctttgacacgttcccccagg

SEQ ID NO: 128105 - DNA, 120 bp, Artificial Sequence
  ENSG00000102001_18 (sequence is synthesized)
ccctcctcactgtctttcagatcctgacaggtgaggactggaacgtggtcatgtatgatggtatcatggcatatggtggccccttcttcccaggaatgttggtgtgcatctatttcatca

SEQ ID NO: 128106 - DNA, 120 bp, Artificial Sequence
  ENSG00000102001_19 (sequence is synthesized)
ttctcttcatctgtggcaactacatcctgttgaacgtgtttcttgccattgctgtggacaacctggccagtggagatgcaggcactgccaaggacaagggcggggagaagagcaatgaga

SEQ ID NO: 128107 - DNA, 120 bp, Artificial Sequence
  ENSG00000102001_20 (sequence is synthesized)
aggatctcccacaggagaatgaaggcctggtgcctggtgtggagaaagaggaagaggagggtgcaaggagggaaggagcagacatggaggaggaggaggaggaggaagaagaggaagaag

SEQ ID NO: 128108 - DNA, 120 bp, Artificial Sequence
  ENSG00000102001_21 (sequence is synthesized)
aggaagaagaggaagagggtgcagggggtgtggaactcctgcaggaagttgtacccaaggagaaggtggtacccatccctgagggcagcgccttcttctgcctcagccaaaccaacccgc

SEQ ID NO: 128109 - DNA, 120 bp, Artificial Sequence
  ENSG00000102001_22 (sequence is synthesized)
tgaggaagggctgccacaccctcatccaccatcatgtcttcaccaatcttatcctggtgttcatcatcctcagcagtgtgtccctggccgctgaggaccccatccgagcccactccttcc

SEQ ID NO: 128110 - DNA, 120 bp, Artificial Sequence
  ENSG00000102001_23 (sequence is synthesized)
gcaaccatattctgggttacttcgattatgccttcacctccattttcactgtggagattctactaaagatgacagtgtttggggccttcctgcaccgcggctccttctgccgtagctggt

SEQ ID NO: 128111 - DNA, 120 bp, Artificial Sequence
  ENSG00000102001_24 (sequence is synthesized)
ttaatatgttggatctgctggtggtcagtgtgtccctcatctcctttggcatccactccagcgccatctcggtggtgaagattctgcgagtactccgagtactgcggcccctccgagcca

SEQ ID NO: 128112 - DNA, 120 bp, Artificial Sequence
  ENSG00000102001_25 (sequence is synthesized)
catgattgtcaccacacttctgcaatttatgttcgcctgcatcggggtgcagctcttcaaggggaaattctacacctgcacggacgaggccaaacacacccctcaagaatgcaagggctc

SEQ ID NO: 128113 - DNA, 120 bp, Artificial Sequence
  ENSG00000102001_26 (sequence is synthesized)
cttcctggtatacccagatggagacgtgtcacggcccctggtccgggagcggctctgggtcaacagtgatttcaactttgacaatgtcctttcagccatgatggccctgttcactgtctc

SEQ ID NO: 128114 - DNA, 120 bp, Artificial Sequence
  ENSG00000102001_27 (sequence is synthesized)
cacctttgaaggctggcctgcactgctatacaaggccatcgatgcatatgcagaggaccacggccccatctataattaccgtgtggagatctcagtgttcttcattgtctacatcatcat

SEQ ID NO: 128115 - DNA, 120 bp, Artificial Sequence
  ENSG00000102001_28 (sequence is synthesized)
cattgcgttcttcatgatgaacatcttcgtgggcttcgtcatcatcactttccgtgcccagggcgagcaggagtaccaaaactgtgagctggacaagaaccagcgtcaatgtgtggaata

SEQ ID NO: 128116 - DNA, 120 bp, Artificial Sequence
  ENSG00000102001_29 (sequence is synthesized)
tgccctcaaggcccagccactccgccgttacatccccaagaacccgcatcagtatcgtgtgtgggccactgtgaactctgctgcctttgagtacctgatgttcctgctcatcctgctcaa

SEQ ID NO: 128117 - DNA, 120 bp, Artificial Sequence
  ENSG00000102001_30 (sequence is synthesized)
cacagttgccctagccatgcagcactatgagcagactgctcccttcaactatgccatggacatcctcaacatggtcttcactggcctcttcactattgagatggtgctcaaaatcatcgc

SEQ ID NO: 128118 - DNA, 120 bp, Artificial Sequence
  ENSG00000102001_31 (sequence is synthesized)
cttcaagcccaagcattacttcactgatgcctggaacacgtttgacgctcttattgtggtgggcagcatagtggatattgccgtcactgaagtcaataatggtggccaccttggcgagag

SEQ ID NO: 128119 - DNA, 120 bp, Artificial Sequence
  ENSG00000102001_32 (sequence is synthesized)
ctctgaggacagctcccgcatttccattaccttctttcgcctcttccgagttatgcggctggtcaagcttctcagtaagggtgaagggatccgcacattgctctggacattcatcaagtc

SEQ ID NO: 128120 - DNA, 120 bp, Artificial Sequence
  ENSG00000102001_33 (sequence is synthesized)
cttccaggccttgccctatgtggctcttctcatcgcaatgatattcttcatctatgccgtcattggcatgcagatgttcggcaaggtggctcttcaggatggcacacagataaaccgaaa

SEQ ID NO: 128121 - DNA, 120 bp, Artificial Sequence
  ENSG00000102001_34 (sequence is synthesized)
caacaacttccagacctttccacaggctgtgctgcttctgttcaggtgtgccactggtgaggcatggcaggagataatgcttgccagccttcccggaaatcggtgtgatcctgagtctga

SEQ ID NO: 128122 - DNA, 120 bp, Artificial Sequence
  ENSG00000102001_35 (sequence is synthesized)
cttcggccctggtgaagagtttacctgtggtagcaattttgccatcgcctatttcatcagcttcttcatgctctgtgccttcctgatcataaatctctttgtggctgtgatcatggacaa

SEQ ID NO: 128123 - DNA, 120 bp, Artificial Sequence
  ENSG00000102001_36 (sequence is synthesized)
ctttgattatctcaccagagattggtccatcctgggcccccatcaccttgatgaattcaagaggatctggtctgaatatgaccctggggccaagggccgcatcaaacacttggatgtggt

SEQ ID NO: 128124 - DNA, 120 bp, Artificial Sequence
  ENSG00000102001_37 (sequence is synthesized)
tgccctgctgagacgtatccagccccctctgggatttgggaagctgtgcccacaccgagtggcctgcaagagacttgtggcaatgaacatgcccctcaactcagatgggacggtgacatt

SEQ ID NO: 128125 - DNA, 120 bp, Artificial Sequence
  ENSG00000102001_38 (sequence is synthesized)
caacgccacactctttgccctggtccggacatccctgaagatcaaaacagaagggaacctggagcaagccaaccaggagctgcggattgtcatcaaaaagatctggaagcggatgaaaca

SEQ ID NO: 128126 - DNA, 120 bp, Artificial Sequence
  ENSG00000102001_39 (sequence is synthesized)
gaagctgctagatgaggtcatccccccaccagacgaggaggaggtcaccgtgggcaaattctacgccacatttctgatccaggactatttccgcaaattccggcggaggaaagaaaaagg

SEQ ID NO: 128127 - DNA, 120 bp, Artificial Sequence
  ENSG00000102001_40 (sequence is synthesized)
gctactaggcaacgacgccgcccctagcacctcttccgcccttcaggctggtctgcggagcctgcaggacttgggtcctgagatgcggcaggccctcacctgtgacacagaggaggagga

SEQ ID NO: 128128 - DNA, 120 bp, Artificial Sequence
  ENSG00000102001_41 (sequence is synthesized)
agaagaggggcaggagggagtggaggaggaagatgaaaaggacttggaaactaacaaagccacgatggtctcccagccctcagctcgccggggctccgggatttctgtgtctctgcctgt

SEQ ID NO: 128129 - DNA, 120 bp, Artificial Sequence
  ENSG00000102001_42 (sequence is synthesized)
cggggacagacttccagattcactctcctttgggcccagtgatgatgacagggggactcccacctccagtcagcccagtgtgccccaggctggatccaacacccacaggagaggctctgg

SEQ ID NO: 128130 - DNA, 120 bp, Artificial Sequence
  ENSG00000102001_43 (sequence is synthesized)
ggctctcattttcaccatcccagaagaaggaaattctcagcccaagggaaccaaagggcaaaacaagcaagatgaggatgaggaagtccctgatcggctttcctacctagatgagcaggc

SEQ ID NO: 128131 - DNA, 120 bp, Artificial Sequence
  ENSG00000102001_44 (sequence is synthesized)
agggactcccccgtgctcagtccttttgccacctcacagagctcagagatacatggatgggcacctggtaccacgccgccgtctgctgccccccacacctgcaggtcggaagccctcctt

SEQ ID NO: 128132 - DNA, 120 bp, Artificial Sequence
  ENSG00000102001_45 (sequence is synthesized)
caccatccagtgtctgcagcgccagggcagttgtgaggatttacccatcccaggcacctatcatcgtgggcgaaattcagggcccaatagggctcagggttcctgggcaacaccacctca

SEQ ID NO: 128133 - DNA, 120 bp, Artificial Sequence
  ENSG00000102001_46 (sequence is synthesized)
gcggggtcggctcctgtatgccccgctgttgttggtggaagagggcgcagcgggggaggggtacctcggcagatccagtggcccactgcgcaccttcacctgtctgcacgtgcctggaac

SEQ ID NO: 128134 - DNA, 120 bp, Artificial Sequence
  ENSG00000102001_47 (sequence is synthesized)
ccactcggaccccagccatgggaagaggggcagtgccgacagcttggtggaggctgtgcttatctcagagggtctgggcctctttgctcgagacccacgtttcgtggccctggccaagca

SEQ ID NO: 128135 - DNA, 120 bp, Artificial Sequence
  ENSG00000102001_48 (sequence is synthesized)
ggagattgcagatgcgtgtcgcctgacgctggatgagatggacaatgctgccagtgacctgctggcacagggaaccagctctctctatagcgacgaggagtccatcctctcccgcttcga

SEQ ID NO: 128136 - DNA, 120 bp, Artificial Sequence
  ENSG00000102001_49 (sequence is synthesized)
tgaggaggacttgggagacgagatggcctgcgtccacgccctctgaattcccacccctccccaactgctcaataaacctcctgccctcccctccccagcaggaggcaggcatggaccaca

SEQ ID NO: 128137 - DNA, 120 bp, Artificial Sequence
  ENSG00000102001_50 (sequence is synthesized)
tcgtcaatcccctgagtgattttgacactgcttctgggaagaagctcccccagagaagccccctctgcaatagaaaaatatttatttgaggctgggagtggtggctcatgcctataatcc

SEQ ID NO: 128138 - DNA, 120 bp, Artificial Sequence
  ENSG00000102001_51 (sequence is synthesized)
gtggaaggatcgcttgaaccctagggttcaagaccagtcctggcaaaatagtgaaaccgcctctctacaaaaaaatttaaaaattagctaggagtggtggtgcaagcctgtagtcccagc

SEQ ID NO: 128139 - DNA, 89 bp, Artificial Sequence
  ENSG00000102001_52 (sequence is synthesized)
gaggattgcttgaacctgggaggatgaggcccgcctggtgacaggacaagaccctatcgcaaatatttatttatttatttacgtattta

SEQ ID NO: 128140 - DNA, 120 bp, Artificial Sequence
  ENSG00000102001_53 (sequence is synthesized)
aagaggatctggtctgaatatgaccctggggccaagtatgccctctatacccttacctagaatccaggggacaatgtattgccctacacagtcccctagcccccaaacctccgactgctg

SEQ ID NO: 128141 - DNA, 120 bp, Artificial Sequence
  ENSG00000102001_54 (sequence is synthesized)
catctcattacccagtcaatagatgccccaaagtttccactgccccatcctctgccctctctgactgccctccagttcttccctggcaagctctggggtattggtaggaggaggtagtga

SEQ ID NO: 128142 - DNA, 120 bp, Artificial Sequence
  ENSG00000102003_0 (sequence is synthesized)
aacgagcgcgcgccgcccccgccgcgccccgcgccgcccttgctagccgagcctcccgccccctgcattgctgatgctgctgctggcggacatggacgtggtgaatcagctggtggctgg

SEQ ID NO: 128143 - DNA, 120 bp, Artificial Sequence
  ENSG00000102003_1 (sequence is synthesized)
gggtcagttccgggtggtcaaggagcccctcggctttgtgaaggtgctgcaatgggtcttcgccatcttcgcctttgccacatgcggcagctacagtggggagctccagctgagcgtgga

SEQ ID NO: 128144 - DNA, 120 bp, Artificial Sequence
  ENSG00000102003_2 (sequence is synthesized)
ttgtgccaacaagaccgagagtgacctcagcatcgaggtcgagttcgagtaccccttcaggctgcaccaagtgtactttgatgcacccacctgccgagggggcaccaccaaggtcttctt

SEQ ID NO: 128145 - DNA, 120 bp, Artificial Sequence
  ENSG00000102003_3 (sequence is synthesized)
agttggggactactcctcgtcagccgaattctttgtcaccgtggccgtgtttgccttcctctactccatgggggctctggccacctacatcttcctgcagaacaagtaccgagagaataa

SEQ ID NO: 128146 - DNA, 120 bp, Artificial Sequence
  ENSG00000102003_4 (sequence is synthesized)
caaagggcccatgctggactttctggccacggctgtgttcgccttcatgtggctagttagctcatcggcatgggccaaggggctgtcagatgtgaagatggccacagacccagagaacat

SEQ ID NO: 128147 - DNA, 120 bp, Artificial Sequence
  ENSG00000102003_5 (sequence is synthesized)
tatcaaggagatgcctgtctgccgccagacagggaacacatgcaaggagctgagagaccctgtgacctcgggactcaacacctcggtggtgttcggcttcctgaacctggtgctctgggt

SEQ ID NO: 128148 - DNA, 120 bp, Artificial Sequence
  ENSG00000102003_6 (sequence is synthesized)
cggcaacctgtggttcgtgtttaaggagacaggctgggccgccccgttcctgcgcgcgcctcccggcgcccccgagaaacaaccggcacccggggacgcctacggcgatgcaggctacgg

SEQ ID NO: 128149 - DNA, 120 bp, Artificial Sequence
  ENSG00000102003_7 (sequence is synthesized)
gcagggccccggcgggtacgggccccaggattcctacgggcctcagggcggctaccagcctgactatggtcaaccagccggcagcggtggcagtggctacgggcctcagggcgactatgg

SEQ ID NO: 128150 - DNA, 120 bp, Artificial Sequence
  ENSG00000102003_8 (sequence is synthesized)
gcagcaaggctacggcccgcagggtgcacccacctccttctccaatcagatgtagtctggtcagtgaagcccaggaggacctggggggggcaagagctcaggagaaggcctgcccccctt

SEQ ID NO: 128151 - DNA, 120 bp, Artificial Sequence
  ENSG00000102003_9 (sequence is synthesized)
cccacccctataccctaggtctccacccctcaagccaggagaccctgtctttgctgtttatatatatatatattatatataaatatctatttatctgtctgagccctgccctcactccac

SEQ ID NO: 128152 - DNA, 120 bp, Artificial Sequence
  ENSG00000102003_10 (sequence is synthesized)
cccctgaggttaaggggatctaaaaggaggacagggagggaacagacctcggctgtgtggggagggtgggcgtgacttcagactctctcctctctctccctccactcctcccaactctgg

SEQ ID NO: 128153 - DNA, 120 bp, Artificial Sequence
  ENSG00000102003_11 (sequence is synthesized)
ccttggttcctccagcaatgcctgcctgaacaaaggccgttagggaaatccaactccagggttaaagaaaggcagagattgggggggcttggggtagagaggacagtttaggacccaagg

SEQ ID NO: 128154 - DNA, 120 bp, Artificial Sequence
  ENSG00000102003_12 (sequence is synthesized)
tggtcttggagaggaggtgtggagtggaggggtcagcaggggggttgggttccagacagagtggatctggagtctgaaggagaggagtgcgctagagcattctggggtggggcttggaag

SEQ ID NO: 128155 - DNA, 120 bp, Artificial Sequence
  ENSG00000102003_13 (sequence is synthesized)
ggcgctgagggcagggttctagaaggggcgaggctttaagcgaggcagaatggtgggctccagagtaggtgggtcttggattggtaccagagcctatggaaagggtgtggcttggaacat

SEQ ID NO: 128156 - DNA, 120 bp, Artificial Sequence
  ENSG00000102003_14 (sequence is synthesized)
ttgggagactgagcttgattctaaaggggacagatcttgagcaaggcaagaagtgggattcaggaatgggccaagccagggttccagacagggtggggcttagaatggggcttccatggt

SEQ ID NO: 128157 - DNA, 120 bp, Artificial Sequence
  ENSG00000102003_15 (sequence is synthesized)
ggtttcagaaagggcagcccctccccatggtgcagtgaagaaaatgttttacaatggctgggtttgggcagtggagaggggacttggataggagcttccagatgggttttgttaggggtg

SEQ ID NO: 128158 - DNA, 120 bp, Artificial Sequence
  ENSG00000102003_16 (sequence is synthesized)
ggggagaatggctctggctacgacttgggacggaagtggcctgagaagagtcgagtgatatggcttgtagggtgaggcgtgggatccagagagaagcaccccaccacacacacccttccc

SEQ ID NO: 128159 - DNA, 120 bp, Artificial Sequence
  ENSG00000102003_17 (sequence is synthesized)
cactcccgtgatgaaacagctaggttaataggaggacagaaccaacgggtctgtgggactggcccacccctcttcccccttcccctgcgccctccctccctccacacctccacccgtcct

SEQ ID NO: 128160 - DNA, 120 bp, Artificial Sequence
  ENSG00000102003_18 (sequence is synthesized)
ggggtggttggaggcctggtctggagcccctatcctgcaccctctgctatgtctgtgatgtcagtagtgcctgtgatcgtgtgttgccattttgtctggctgtggcccctccttctcccc

SEQ ID NO: 128161 - DNA, 120 bp, Artificial Sequence
  ENSG00000102003_19 (sequence is synthesized)
tccagacccctaccctttcccaaacccttcggtattgttcaaagaacccccctccccaaggaagaacaaatatgattctcctctcccaaataaactccttaaccacctagtctacccggc

SEQ ID NO: 128162 - DNA, 120 bp, Artificial Sequence
  ENSG00000102003_20 (sequence is synthesized)
gcgggtcagtgaaccaataagagtcaggggtagagagtacgtaaggcgtttactggggcaagtaaggactgaagtttgaaggagccaatcaagaggcagaactacctgctaagagctgaa

SEQ ID NO: 128163 - DNA, 120 bp, Artificial Sequence
  ENSG00000102003_21 (sequence is synthesized)
aaactagctaatgaatggagaaaagaagaatggtgcttcaagatggacagaatgaagagccaatgggagggaggtagaagggcaactcggcggaaaggcggggggagagaagcagagcaa

SEQ ID NO: 128164 - DNA, 120 bp, Artificial Sequence
  ENSG00000102003_22 (sequence is synthesized)
ccaataaagggagggaatatcgggggacttgcgcagtggcgaatcagcggagcgcaagagccacggaagcgacgaggaggtgggtcttagaagtgactgataagccaataggtgataagg

SEQ ID NO: 128165 - DNA, 120 bp, Artificial Sequence
  ENSG00000102003_23 (sequence is synthesized)
ccaatagatggtgagggtaaatgggcgtggatcttgaaggtcagacgagctcaccaatccgggaggaggggatagatctgccgcctctccccaacgctggaggggagggaagtagtgtgg

SEQ ID NO: 128166 - DNA, 120 bp, Artificial Sequence
  ENSG00000102003_24 (sequence is synthesized)
gtggaatttcaaaggaggaagagggatagggtggggtcctggaaaggtttgccggccttcttgctgggccttaaaagagaagtgagggtcggggcttggtggctcatgcctgtaatctca

SEQ ID NO: 128167 - DNA, 88 bp, Artificial Sequence
  ENSG00000102003_25 (sequence is synthesized)
ttagccgggcgtggtggcatgcatctgtggacccataagcccaggaggttgaggctgccgtgagctatgatcctgccactgcactcca

SEQ ID NO: 128168 - DNA, 120 bp, Artificial Sequence
  ENSG00000102003_26 (sequence is synthesized)
gcattgctgatgctgctgctggcggacatggacgtggtgaatcagctggtggctgggggtcagttccgggtggtcaaggagcccctcggctttgtgaaggtgctgcaatgggtgagtgtg

SEQ ID NO: 128169 - DNA, 120 bp, Artificial Sequence
  ENSG00000102003_27 (sequence is synthesized)
gtccgggctgttggggcagagtgcagggagagagggaggtcatggggtccagaagagcaggggtggagtaggggcgagtagccagggatgagtgcgggggttgtaggggatgggggaatt

SEQ ID NO: 128170 - DNA, 120 bp, Artificial Sequence
  ENSG00000102003_28 (sequence is synthesized)
gggctccagggtgaggtttcaggggtctgaagccagaaaacagatgagctgtgacgtcacatagggctgagggtacccccgttgtgaagtgggagactgtgacgtcctacctcctctctt

SEQ ID NO: 128171 - DNA, 120 bp, Artificial Sequence
  ENSG00000102003_29 (sequence is synthesized)
gaagtgagggaggggtgggggaggtggagcctgtagcagatgctgggtgagagatgcaaagtcagagaaacccagagacagtgaaggtgacagagagaatgagggacagggaatgataaa

SEQ ID NO: 128172 - DNA, 120 bp, Artificial Sequence
  ENSG00000102003_30 (sequence is synthesized)
gacagagatggaaatactgagaaaaaaaaaagaaatatggagatgagaagagatacagacataagagagaagagacaaacagaaacaaagaaaaaggagacacagaaaacagatgcaaag

SEQ ID NO: 128173 - DNA, 120 bp, Artificial Sequence
  ENSG00000102003_31 (sequence is synthesized)
agaaacagacgcagggagagaggcaggaaaacagggtgagggagagagagacacagagagaaagagacactcagaaaaaagagaaaccaacacacagaggcaagagggagacagagagag

SEQ ID NO: 128174 - DNA, 120 bp, Artificial Sequence
  ENSG00000102003_32 (sequence is synthesized)
aaccatccggagaccgagtgagagacaggacagagagacagagacaaacagaccaagaaacagaaagacacagacatacaggcatacacttacacagacagagaaaaaagagacaaaaag

SEQ ID NO: 128175 - DNA, 120 bp, Artificial Sequence
  ENSG00000102003_33 (sequence is synthesized)
agacatcgacagatcagataggcagaggcagagaggatcagagacacagagagacaaagagacatctgagaaagacaaagacacatagagaaacagagataccgagagaaacagagacac

SEQ ID NO: 128176 - DNA, 120 bp, Artificial Sequence
  ENSG00000102003_34 (sequence is synthesized)
agagacaaacagagaagagggaggtcagcatggaaaggcagagacagagagagacacagagagagaaacaggaagagacagccatacccttgtaatcagcttgtccttggtcccgatgag

SEQ ID NO: 128177 - DNA, 120 bp, Artificial Sequence
  ENSG00000102003_35 (sequence is synthesized)
ccctgattagggggtgggggtggggactgctccatctgctgctgcctgtgctgggcccccgatctgtccagaggagggcacctccctcccacatgcacacaggttcactgtggccatccc

SEQ ID NO: 128178 - DNA, 120 bp, Artificial Sequence
  ENSG00000102003_36 (sequence is synthesized)
tcgagttcgagtaccccttcaggtgtgctcccaccctgggataccaacagacctgggagaggaaggggcagggtggaaccggccaatacctccccccgcaagtagctcctgcccagctcc

SEQ ID NO: 128179 - DNA, 120 bp, Artificial Sequence
  ENSG00000102003_37 (sequence is synthesized)
cacctcgaggctacatccactgggatcactgagcacctgccttgtacctggcactgctctggactctaggactatgtggtgagcaaggcagacataggctgtggccctctggctctgttc

SEQ ID NO: 128180 - DNA, 120 bp, Artificial Sequence
  ENSG00000102003_38 (sequence is synthesized)
cagcgaaggggtaagggacaggcaataaacaagatacaaaagtaagacaggtgtatatacataccttaacccagtaggtacccaattaatgttagccaatattattatttaatccccatt

SEQ ID NO: 128181 - DNA, 120 bp, Artificial Sequence
  ENSG00000102003_39 (sequence is synthesized)
cattcattctatacacatttttgagaacttattttatatctggtactactcaaagtgctggaagcatgatagtaactaaaacagacccaactcccgccaggcacagtggctcacgcctgt

SEQ ID NO: 128182 - DNA, 120 bp, Artificial Sequence
  ENSG00000102003_40 (sequence is synthesized)
attgctgatgctgctgctggcggacatggacgtggtgaatcagctggtggctgggggtcagttccgggtggtcaaggagcccctcggctttgtgaaggtgctgcaatgggctgcaccaag

SEQ ID NO: 128183 - DNA, 120 bp, Artificial Sequence
  ENSG00000102007_0 (sequence is synthesized)
cttcccggccagacggcgggcaagacagctgggtgtacagcgtcctcgaaaccacgagcaagtgagcagatcctccgaggcaccagggactccagcccatgccatggcggattctgagcg

SEQ ID NO: 128184 - DNA, 120 bp, Artificial Sequence
  ENSG00000102007_1 (sequence is synthesized)
cctctcggctcctggctgctgggccgcctgcaccaacttctcgcgcactcgaaagggaatcctcctgtttgctgagattatattatgcctggtgatcctgatctgcttcagtgcctccac

SEQ ID NO: 128185 - DNA, 120 bp, Artificial Sequence
  ENSG00000102007_2 (sequence is synthesized)
accaggctactcctccctgtcggtgattgagatgatccttgctgctattttctttgttgtctacatgtgtgacctgcacaccaagataccattcatcaactggccctggagtgatttctt

SEQ ID NO: 128186 - DNA, 120 bp, Artificial Sequence
  ENSG00000102007_3 (sequence is synthesized)
ccgaaccctcatagcggcaatcctctacctgatcacctccattgttgtccttgttgagagaggaaaccactccaaaatcgtcgcaggggtactgggcctaatcgctacgtgcctctttgg

SEQ ID NO: 128187 - DNA, 120 bp, Artificial Sequence
  ENSG00000102007_4 (sequence is synthesized)
ccgttcggcagccaagacatacagcagcccccactgaccccgcagatggcccggtgtaggcgaacttccctcatttctctctgcaatctgcaaataactcctccattgaaataactcctc

SEQ ID NO: 128188 - DNA, 120 bp, Artificial Sequence
  ENSG00000102007_5 (sequence is synthesized)
cccaccccaacaacaacattcccagcagaccaactcccaccccctctttgaggtaaaagtgcctttattgggagacttttgtcttccagcctgccaatcaaccctcctgggtgtggccac

SEQ ID NO: 128189 - DNA, 120 bp, Artificial Sequence
  ENSG00000102007_6 (sequence is synthesized)
catatgtgtgtgcctaggtcctccttctgcacgatccaataggagacaccagttctgactgaaccatgcccccacctaagtcacaaaatgagggaagtggggagttagatttcagagtcc

SEQ ID NO: 128190 - DNA, 120 bp, Artificial Sequence
  ENSG00000102007_7 (sequence is synthesized)
aggccctaggttgggacccactccaaataatctcctcggtgtgggtggtggttctatagagggataaatgaataataaacattgttaaaatatacgataatgaataaagtaatcctttca

SEQ ID NO: 128191 - DNA, 120 bp, Artificial Sequence
  ENSG00000102007_8 (sequence is synthesized)
tcaaatgtgggtaaatttcaagcatcaggagggggaaatggagtggaaacagctggggcaaggaggcaaagaagccaggcctgttttacaacaaatattaaattacttcaataatacaaa

SEQ ID NO: 128192 - DNA, 120 bp, Artificial Sequence
  ENSG00000102007_9 (sequence is synthesized)
agaaatcgtgtgacccacagcaagtcacacttgtcctcagacatggaggaaagtctggcccaggacttggttttgcctcccaaggtcttcatttgctgtgaagggaagtcccttgtcaga

SEQ ID NO: 128193 - DNA, 120 bp, Artificial Sequence
  ENSG00000102010_0 (sequence is synthesized)
gtgatggtgcctcaaagcagtaactttttgcttagagcttgagagtcaaagttaaggacccacatgtatacttcggctctagcgagtctaaggatgataatatggatacaaaatctattc

SEQ ID NO: 128194 - DNA, 120 bp, Artificial Sequence
  ENSG00000102010_1 (sequence is synthesized)
tagaagaacttcttctcaaaagatcacagcaaaagaagaaaatgtcaccaaataattacaaagaacggctttttgttttgaccaaaacaaacctttcctactatgaatatgacaaaatga

SEQ ID NO: 128195 - DNA, 120 bp, Artificial Sequence
  ENSG00000102010_2 (sequence is synthesized)
aaaggggcagcagaaaaggatccattgaaattaagaaaatcagatgtgtggagaaagtaaatctcgaggagcagacgcctgtagagagacagtacccatttcagattgtctataaagatg

SEQ ID NO: 128196 - DNA, 120 bp, Artificial Sequence
  ENSG00000102010_3 (sequence is synthesized)
ggcttctctatgtctatgcatcaaatgaagagagccgaagtcagtggttgaaagcattacaaaaagagataaggggtaacccccacctgctggtcaagtaccatagtgggttcttcgtgg

SEQ ID NO: 128197 - DNA, 120 bp, Artificial Sequence
  ENSG00000102010_4 (sequence is synthesized)
acgggaagttcctgtgttgccagcagagctgtaaagcagccccaggatgtaccctctgggaagcatatgctaatctgcatactgcagtcaatgaagagaaacacagagttcccaccttcc

SEQ ID NO: 128198 - DNA, 120 bp, Artificial Sequence
  ENSG00000102010_5 (sequence is synthesized)
cagacagagtgctgaagatacctcgggcagttcctgttctcaaaatggatgcaccatcttcaagtaccactctagcccaatatgacaacgaatcaaagaaaaactatggctcccagccac

SEQ ID NO: 128199 - DNA, 120 bp, Artificial Sequence
  ENSG00000102010_6 (sequence is synthesized)
catcttcaagtaccagtctagcgcaatatgacagcaactcaaagaaaatctatggctcccagccaaacttcaacatgcagtatattccaagggaagacttccctgactggtggcaagtaa

SEQ ID NO: 128200 - DNA, 120 bp, Artificial Sequence
  ENSG00000102010_7 (sequence is synthesized)
gaaaactgaaaagtagcagcagcagtgaagatgttgcaagcagtaaccaaaaagaaagaaatgtgaatcacaccacctcaaagatttcatgggaattccctgagtcaagttcatctgaag

SEQ ID NO: 128201 - DNA, 120 bp, Artificial Sequence
  ENSG00000102010_8 (sequence is synthesized)
aagaggaaaacctggatgattatgactggtttgctggtaacatctccagatcacaatctgaacagttactcagacaaaagggaaaagaaggagcatttatggttagaaattcgagccaag

SEQ ID NO: 128202 - DNA, 120 bp, Artificial Sequence
  ENSG00000102010_9 (sequence is synthesized)
tgggaatgtacacagtgtccttatttagtaaggctgtgaatgataaaaaaggaactgtcaaacattaccacgtgcatacaaatgctgagaacaaattatacctggcagaaaactactgtt

SEQ ID NO: 128203 - DNA, 120 bp, Artificial Sequence
  ENSG00000102010_10 (sequence is synthesized)
ccgactctgtgtccctgggaaatggaatctgggaactgaaaagagaagagattaccttgttgaaggagctgggaagtggccagtttggagtggtccagctgggcaagtggaaggggcagt

SEQ ID NO: 128204 - DNA, 120 bp, Artificial Sequence
  ENSG00000102010_11 (sequence is synthesized)
atgatgttgctgttaagatgatcaaggagggctccatgtcagaagatgaattctttcaggaggcccagactatgatgaaactcagccatcccaagctggttaaattctatggagtgtgtt

SEQ ID NO: 128205 - DNA, 120 bp, Artificial Sequence
  ENSG00000102010_12 (sequence is synthesized)
caaaggaataccccatatacatagtgactgaatatataagcaatggctgcttgctgaattacctgaggagtcacggaaaaggacttgaaccttcccagctcttagaaatgtgctacgatg

SEQ ID NO: 128206 - DNA, 120 bp, Artificial Sequence
  ENSG00000102010_13 (sequence is synthesized)
tctgtgaaggcatggccttcttggagagtcaccaattcatacaccgggacttggctgctcgtaactgcttggtggacagagatctctgtgtgaaagtatctgactttggaatgacaaggt

SEQ ID NO: 128207 - DNA, 120 bp, Artificial Sequence
  ENSG00000102010_14 (sequence is synthesized)
atgttcttgatgaccagtatgtcagttcagtcggaacaaagtttccagtcaagtggtcagctccagaggtgtttcattacttcaaatacagcagcaagtcagacgtatgggcatttggga

SEQ ID NO: 128208 - DNA, 120 bp, Artificial Sequence
  ENSG00000102010_15 (sequence is synthesized)
tcctgatgtgggaggtgttcagcctggggaagcagccctatgacttgtatgacaactcccaggtggttctgaaggtctcccagggccacaggctttaccggccccacctggcatcggaca

SEQ ID NO: 128209 - DNA, 120 bp, Artificial Sequence
  ENSG00000102010_16 (sequence is synthesized)
ccatctaccagatcatgtacagctgctggcacgagcttccagaaaagcgtcccacatttcagcaactcctgtcttccattgaaccacttcgggaaaaagacaagcattgaagaagaaatt

SEQ ID NO: 128210 - DNA, 120 bp, Artificial Sequence
  ENSG00000102010_17 (sequence is synthesized)
aggagtgctgataagaatgaatatagatgctggccagcattttcattcattttaaggaaagtagcaaggcataatgtaatttagctagtttttaatagtgttctctgtattgtctattat

SEQ ID NO: 128211 - DNA, 120 bp, Artificial Sequence
  ENSG00000102010_18 (sequence is synthesized)
ttagaaatgaacaaggcaggaaacaaaagattcccttgaaatttagatcaaattagtaattttgtttatgctgctcctgatataacactttccagcctatagcagaagcacattttcaga

SEQ ID NO: 128212 - DNA, 120 bp, Artificial Sequence
  ENSG00000102010_19 (sequence is synthesized)
ctgcaatatagagactgtgttcatgtgtaaagactgagcagaactgaaaaattacttattggatattcattcttttctttatattgtcattgtcacaacaattaaatatactaccaagta

SEQ ID NO: 128213 - DNA, 120 bp, Artificial Sequence
  ENSG00000102010_20 (sequence is synthesized)
agccatttctgacccggcagccaggaaaatgtgaaacaatttgcttctggaaacaggacagccggggccgtgttcctgcaacagcagaccaagcaccgcggcggacccaggcaagcacgg

SEQ ID NO: 128214 - DNA, 120 bp, Artificial Sequence
  ENSG00000102010_21 (sequence is synthesized)
atgaacatacatcacaatgtgaacagtggtcatctccagatagtagaatttcagatatgtttctttccatttttctgacagtttgaattttctgtaataattaattgacttttatacaat

SEQ ID NO: 128215 - DNA, 120 bp, Artificial Sequence
  ENSG00000102021_0 (sequence is synthesized)
acacgcgccctacctcggagtgtgtggcgccatgatgcagggaagatggcttcgtttcggaagctaacgctttctgaaaaagtgccgccaaatcatcccagtcggaaaaaggttaacttc

SEQ ID NO: 128216 - DNA, 120 bp, Artificial Sequence
  ENSG00000102021_1 (sequence is synthesized)
ctagatatgtctctagacgacattataatctataaagagttagaagggacaaatgctgaagaagaaaagaataaaagacagaaccatagtaaaaaggaatcgccttcaagacagcaatca

SEQ ID NO: 128217 - DNA, 120 bp, Artificial Sequence
  ENSG00000102021_2 (sequence is synthesized)
aaagctcatagacatcgccatcggagaggctactcaagatgcagaagcaactctgaggaaggaaatcatgataaaaaaccatcccaaaaaccttctggattcaagtctggacaacaccct

SEQ ID NO: 128218 - DNA, 120 bp, Artificial Sequence
  ENSG00000102021_3 (sequence is synthesized)
ttaaatgggcagcctttaattgagcaggagaagtgcagtgacaattatgaggcccaagcagagaagaatcaaggccagtcagaggggaaccagcatcaatcagaaggaaatccggacaaa

SEQ ID NO: 128219 - DNA, 120 bp, Artificial Sequence
  ENSG00000102021_4 (sequence is synthesized)
tcagaagaatcccagggccaaccagaagaaaatcatcattctgagcgatcccgaaaccacttagagagatctctttctcagtcagacagatctcaagggcagctaaagagacatcatccc

SEQ ID NO: 128220 - DNA, 120 bp, Artificial Sequence
  ENSG00000102021_5 (sequence is synthesized)
caatatgagagatctcatggccaatacaagagatctcatggtcaatctgagagatctcatggccactcagagagatctcatggtcactcagagagatctcatggtcactcagagagatct

SEQ ID NO: 128221 - DNA, 120 bp, Artificial Sequence
  ENSG00000102021_6 (sequence is synthesized)
catggtcactcaaagagatctcgtagccagggagatcttgtggacactcagagtgatctcatagccactcagagagatctcatagccactcagaaagatctcatagccactcagagagat

SEQ ID NO: 128222 - DNA, 120 bp, Artificial Sequence
  ENSG00000102021_7 (sequence is synthesized)
ataaatcagtcagggagatctcatggccaatcagaaagacatcagagatactcaacaggtaaaaatacaataactacttaatcatcagaacaatgtgttgaattctgtggaaatagaaaa

SEQ ID NO: 128223 - DNA, 120 bp, Artificial Sequence
  ENSG00000102021_8 (sequence is synthesized)
gcatatatctatattctaatggctaaatatgtatttgttgaaacatgtatattgggacaaagacataaatattagaatggaggtaatacatacatagtatcaatattgtttcaacttgat

SEQ ID NO: 128224 - DNA, 120 bp, Artificial Sequence
  ENSG00000102021_9 (sequence is synthesized)
gtcctctaagctatcatccagttacccaggatgtcccattaagttgttcccggtaggtctgctttccctggaagagccgtatgtactcagcctttcctattgggccttccccacaattag

SEQ ID NO: 128225 - DNA, 120 bp, Artificial Sequence
  ENSG00000102021_10 (sequence is synthesized)
aatattttgacttagtgtcctgtcccccttggacgttccaacttgacttagtgtccagtgccccttggacattccaacctggtaggtaagctaatctaacaactaactgccaaattgata

SEQ ID NO: 128226 - DNA, 120 bp, Artificial Sequence
  ENSG00000102021_11 (sequence is synthesized)
atatataatctatgataatgaatatctcttttgtgtctccttcctaagccatcctcagagagtccttagcagacaaatggtagatgtatctttgggcagctgaacttttctgctttcctc

SEQ ID NO: 128227 - DNA, 120 bp, Artificial Sequence
  ENSG00000102021_12 (sequence is synthesized)
aaatcagaccatatgagaggatatattctatgcatagatgtaatgctaaccttctgaatatattttgaatacatttatatattcactgttgccttataaaactgttagggtaggtctgtc

SEQ ID NO: 128228 - DNA, 120 bp, Artificial Sequence
  ENSG00000102021_13 (sequence is synthesized)
taccctagcaaaagaaacacagaaatttaaatgtactgggagttatgttgttaaaaacacaagatatgttaactgcagtttgtttggttattcaataaaagttttagttttaatttctca

SEQ ID NO: 128229 - DNA, 120 bp, Artificial Sequence
  ENSG00000102024_0 (sequence is synthesized)
acagctgcaaagattccgaggtgcagaagttgtctgagtgggttggtcggcggcagtcgggccagacccaggactctgcgactttacatctttaaatggatgagatggctaccactcaga

SEQ ID NO: 128230 - DNA, 120 bp, Artificial Sequence
  ENSG00000102024_1 (sequence is synthesized)
tttccaaagatgagcttgatgaactcaaagaggcctttgcaaaagttgatctcaacagcaacggattcatttgtgactatgaacttcatgagctcttcaaggaagctaatatgccattac

SEQ ID NO: 128231 - DNA, 120 bp, Artificial Sequence
  ENSG00000102024_2 (sequence is synthesized)
caggatataaagtgagagaaattattcagaaactcatgctggatggtgacaggaataaagatgggaaaataagttttgacgaatttgtttatatttttcaagaggtaaaaagtagtgata

SEQ ID NO: 128232 - DNA, 120 bp, Artificial Sequence
  ENSG00000102024_3 (sequence is synthesized)
ttgccaagaccttccgcaaagcaatcaacaggaaagaaggtatttgtgctctgggtggaacttcagagttgtccagcgaaggaacacagcattcttactcagaggaagaaaaatatgctt

SEQ ID NO: 128233 - DNA, 120 bp, Artificial Sequence
  ENSG00000102024_4 (sequence is synthesized)
ttgttaactggataaacaaagctttggaaaatgatcctgattgtagacatgttataccaatgaaccctaacaccgatgacctgttcaaagctgttggtgatggaattgtgctttgtaaaa

SEQ ID NO: 128234 - DNA, 120 bp, Artificial Sequence
  ENSG00000102024_5 (sequence is synthesized)
tgattaacctttcagttcctgataccattgatgaaagagcaatcaacaagaagaaacttacacccttcatcattcaggaaaacttgaacttggcactgaactctgcttctgccattgggt

SEQ ID NO: 128235 - DNA, 120 bp, Artificial Sequence
  ENSG00000102024_6 (sequence is synthesized)
gtcatgttgtgaacattggtgcagaagatttgagggctgggaaacctcatctggttttgggactgctttggcagatcattaagatcggtttgttcgctgacattgaattaagcaggaatg

SEQ ID NO: 128236 - DNA, 120 bp, Artificial Sequence
  ENSG00000102024_7 (sequence is synthesized)
aagccttggctgctttactccgagatggtgagactttggaggaacttatgaaattgtctccagaagagcttctgcttagatgggcaaactttcatttggaaaactcgggctggcaaaaaa

SEQ ID NO: 128237 - DNA, 120 bp, Artificial Sequence
  ENSG00000102024_8 (sequence is synthesized)
ttaacaactttagtgctgacatcaaggattccaaagcctatttccatcttctcaatcaaatcgcaccaaaaggacaaaaggaaggtgaaccacggatagatattaacatgtcaggtttca

SEQ ID NO: 128238 - DNA, 120 bp, Artificial Sequence
  ENSG00000102024_9 (sequence is synthesized)
atgaaacagatgatttgaagagagctgagagtatgcttcaacaagcagataaattaggttgcagacagtttgttacccctgctgatgttgtcagtggaaaccccaaactcaacttagctt

SEQ ID NO: 128239 - DNA, 120 bp, Artificial Sequence
  ENSG00000102024_10 (sequence is synthesized)
tcgtggctaacctgtttaataaatacccagcactaactaagccagagaaccaggatattgactggactctattagaaggagaaactcgtgaagaaagaaccttccgtaactggatgaact

SEQ ID NO: 128240 - DNA, 120 bp, Artificial Sequence
  ENSG00000102024_11 (sequence is synthesized)
ctcttggtgtcaatcctcacgtaaaccatctctatgctgacctgcaagatgccctggtaatcttacagttatatgaacgaattaaagttcctgttgactggagtaaggttaataaacctc

SEQ ID NO: 128241 - DNA, 120 bp, Artificial Sequence
  ENSG00000102024_12 (sequence is synthesized)
catacccgaaactgggagccaacatgaaaaagctagaaaactgcaactatgctgttgaattagggaagcatcctgctaaattctccctggttggcattggagggcaagacctgaatgatg

SEQ ID NO: 128242 - DNA, 120 bp, Artificial Sequence
  ENSG00000102024_13 (sequence is synthesized)
ataccctcaatgtcctggaagatcttggagatggtcagaaagccaatgacgacatcattgtgaactgggtgaacagaacgttgagtgaagctggaaaatcaacttccattcagagtttta

SEQ ID NO: 128243 - DNA, 120 bp, Artificial Sequence
  ENSG00000102024_14 (sequence is synthesized)
aggacaagacgatcagctccagtttggcagttgtggatttaattgatgccatccagccaggctgtataaactatgaccttgtgaagagtggcaatctaacagaagatgacaagcacaata

SEQ ID NO: 128244 - DNA, 120 bp, Artificial Sequence
  ENSG00000102024_15 (sequence is synthesized)
atgccaagtatgcagtgtcaatggctagaagaatcggagccagagtgtatgctctccctgaagaccttgtggaagtaaagcccaagatggtcatgactgtgtttgcatgtttgatgggca

SEQ ID NO: 128245 - DNA, 120 bp, Artificial Sequence
  ENSG00000102024_16 (sequence is synthesized)
ggggaatgaagagagtgtaaaataaccaatctgaataaaacagccatgctcccaggtgcatgattcgcaggtcagctatttccaggtgaagtgcttatggcttaaggaactcttggccat

SEQ ID NO: 128246 - DNA, 120 bp, Artificial Sequence
  ENSG00000102024_17 (sequence is synthesized)
tcaaaggacttttcattttgattaacaggactagcttatcatgagagccctcaggggaaagggtttaagaaaaacaactcctctttcccatagtcagagttgaatttgtcaggcacgcct

SEQ ID NO: 128247 - DNA, 120 bp, Artificial Sequence
  ENSG00000102024_18 (sequence is synthesized)
gaaatgtgctcatagccaaaacattttactctctcctcctagaatgctgcccttgacatttcccattgctgtatgttatttcttgctctgttatcttttgccctcttagaatgtccctct

SEQ ID NO: 128248 - DNA, 120 bp, Artificial Sequence
  ENSG00000102024_19 (sequence is synthesized)
cttgggacttgcttagatgatgggatatgaatattattagacagtaattttgctttccatccagtatgctagttcttattcgagaactatggtcagagcgtatttggatatgagtatcct

SEQ ID NO: 128249 - DNA, 120 bp, Artificial Sequence
  ENSG00000102024_20 (sequence is synthesized)
ttgcttatctttgtagtactgaaaatttgccgaagtaactggctgtgcagaatgtaatagaagcttttcttattcttttattcttaagatcagtatctttttacagtattctttctacat

SEQ ID NO: 128250 - DNA, 120 bp, Artificial Sequence
  ENSG00000102024_21 (sequence is synthesized)
gatccttttttgtacatttaagaatattttgattatattaaacaagactgctgattttgctactttttttaaggggtcttcaagtaagtaaaacatacatcgtagctagaagaaaaatgt

SEQ ID NO: 128251 - DNA, 120 bp, Artificial Sequence
  ENSG00000102024_22 (sequence is synthesized)
accttaaatttgcatcttccctctcatacccaagctgtaaacaattgaaatattttgtcttaaatcacttggttcaatacatgcttatttgttttaaaacctgtatcatcaaactctctc

SEQ ID NO: 128252 - DNA, 120 bp, Artificial Sequence
  ENSG00000102024_23 (sequence is synthesized)
tctaaatttaaaatgctgttgaatatgatacttttgaggagagagtgtgctcagaacttagacgggatttggtaggccaagtatgctaagtgtacaatatattttttaattttacacctg

SEQ ID NO: 128253 - DNA, 120 bp, Artificial Sequence
  ENSG00000102024_24 (sequence is synthesized)
aaacaaagaaatgtggtcactaaaaataaaagtatatatgtaggaattaatgtactcttgctttgtcaagctgtttgctatagtttccaaggtattatgttactctaactctgaaaagtg

SEQ ID NO: 128254 - DNA, 120 bp, Artificial Sequence
  ENSG00000102024_25 (sequence is synthesized)
atgtaatctggtagcaatgtagtagttcaaataaaggcatttacataataattagtctgttcttcatgcttttgtctcttaggaagtatgccaatgtttgtcaggatttttttctttttg

SEQ ID NO: 128255 - DNA, 120 bp, Artificial Sequence
  ENSG00000102024_26 (sequence is synthesized)
tttttctgatgtattctgtaaaatggtgtttgttaaatttgagttttgggagctgaattagaggtactgaattaaggacagtacaaatgaagtaaaaaggttttctccaatttaccaaaa

SEQ ID NO: 128256 - DNA, 120 bp, Artificial Sequence
  ENSG00000102024_27 (sequence is synthesized)
ttattctcaaaaaatccaatgcaaatagccttccaaacatgggacaataggatacattcattccttgtaactgtgatctcactgacattttcaattctttgtaggattccaaagcctatt

SEQ ID NO: 128257 - DNA, 87 bp, Artificial Sequence
  ENSG00000102024_28 (sequence is synthesized)
actttacatctttaaatggatgagatggctaccactcagatttccaaagatgagcttgatgaactcaaagaggcctttgcaaaagtt

SEQ ID NO: 128258 - DNA, 120 bp, Artificial Sequence
  ENSG00000102024_29 (sequence is synthesized)
agacgtgagccaccgcgcctggcctacacacatgtatttttaaaacgagagttgcagcaggggaaaaatgatggccaaactgctggaaattttgagtcagaaaaggactgataaacattt

SEQ ID NO: 128259 - DNA, 120 bp, Artificial Sequence
  ENSG00000102024_30 (sequence is synthesized)
aatccactagtacagtgaattctaaagcagcaacctccagtctacccttagctggaactcattaaactgcctcttatatttgctgcagtgagctacctcaaaagatctcaacagcaacgg

SEQ ID NO: 128260 - DNA, 120 bp, Artificial Sequence
  ENSG00000102024_31 (sequence is synthesized)
agtcgggccagacccaggactctgcgactttacatctttaaatggatgagatggctaccactcagatttccaaagatgagcttgatgaactcaaagaggcctttgcaaaagttgatcgtt

SEQ ID NO: 128261 - DNA, 120 bp, Artificial Sequence
  ENSG00000102024_32 (sequence is synthesized)
ctacctcgccacgttaaattatagcttcagtataagatgagaaggcatagcatgctatttgatttatcctttatcatcatataacatgccttacaattgagcagctatggaagatctcaa

SEQ ID NO: 128262 - DNA, 120 bp, Artificial Sequence
  ENSG00000102030_0 (sequence is synthesized)
accgccccttccgccgtcgcccagcgagcccagctccggtcccagccccggccgtcccggcgtcgcttcggagcgcggcggcagctgactgcgccttcacgatccgctgggacccgcgag

SEQ ID NO: 128263 - DNA, 120 bp, Artificial Sequence
  ENSG00000102030_1 (sequence is synthesized)
ccccgccgccgttatgaacatccgcaatgcgaggccagaggacctaatgaacatgcagcactgcaacctcctctgcctgcccgagaactaccagatgaaatactacttctaccatggcct

SEQ ID NO: 128264 - DNA, 120 bp, Artificial Sequence
  ENSG00000102030_2 (sequence is synthesized)
ttcctggccccagctctcttacattgctgaggacgagaatgggaagattgtggggtatgtcctggccaaaatggaagaggacccagatgatgtgccccatggacatatcacctcattggc

SEQ ID NO: 128265 - DNA, 120 bp, Artificial Sequence
  ENSG00000102030_3 (sequence is synthesized)
tgtgaagcgttcccaccggcgcctcggtctggctcagaaactgatggaccaggcctctcgagccatgatagagaacttcaatgccaaatatgtctccctgcatgtcaggaagagtaaccg

SEQ ID NO: 128266 - DNA, 120 bp, Artificial Sequence
  ENSG00000102030_4 (sequence is synthesized)
ggccgccctgcacctctattccaacaccctcaactttcagatcagtgaagtggagcccaaatactatgcagatggggaggacgcctatgccatgaagcgggacctcactcagatggccga

SEQ ID NO: 128267 - DNA, 120 bp, Artificial Sequence
  ENSG00000102030_5 (sequence is synthesized)
cgagctgaggcggcacctggagctgaaagagaagggcaggcacgtggtgctgggtgccatcgagaacaaggtggagagcaaaggcaattcacctccgagctcaggagaggcctgtcgcga

SEQ ID NO: 128268 - DNA, 120 bp, Artificial Sequence
  ENSG00000102030_6 (sequence is synthesized)
gacctcagcgaggtcagcgagaccacagagagcacagatgtcaaggacagctcagaggcctccgactcagcctcctagagcctgccccatcccctcctcaccccacgagctttcacaata

SEQ ID NO: 128269 - DNA, 120 bp, Artificial Sequence
  ENSG00000102030_7 (sequence is synthesized)
aattcgctccgtggcactggggaactttgtgtgtgagcgcgcgcacatttagagggtgtgtttctccaggtcctctggtggggatgtgagccttggccttttgacccagagcatcctgcc

SEQ ID NO: 128270 - DNA, 120 bp, Artificial Sequence
  ENSG00000102030_8 (sequence is synthesized)
aggcccgagtacaaggaaagagctttggaggtgggactccctagtctcatgaccttcagcagctgtggccccggggaaggaggccctggacttatgggagagaccctgccttggaggtct

SEQ ID NO: 128271 - DNA, 120 bp, Artificial Sequence
  ENSG00000102030_9 (sequence is synthesized)
gcttggccacgctgaatgtgttttgtggcacaagccggggctgctcaggctcaaagctcaacagcagggctcccactcttggtggccttcagttctcttcccaccttcaccttcagactt

SEQ ID NO: 128272 - DNA, 120 bp, Artificial Sequence
  ENSG00000102030_10 (sequence is synthesized)
tctctccctaatcacacctgcttcgggctacagcagctccccagcatacccgtgggctccagatgtggacatccaactgctcattgggcttatctacaaatgtcctgtctgagtaatgac

SEQ ID NO: 128273 - DNA, 120 bp, Artificial Sequence
  ENSG00000102030_11 (sequence is synthesized)
ccagccagatgccccatcaacagtccttgagtcctccctcccctgccaccctaatggtcagtgagtccatgatacctcttgagtctactccctaacctgagtttgcatttgaaaataatt

SEQ ID NO: 128274 - DNA, 120 bp, Artificial Sequence
  ENSG00000102030_12 (sequence is synthesized)
tatttttagtacaattccccgcgtttccccattgacattttgtattagttggtgtatttgttattgttgatgcgccaatactgataagttattgtaaactacagcccatggtttacagta

SEQ ID NO: 128275 - DNA, 120 bp, Artificial Sequence
  ENSG00000102030_13 (sequence is synthesized)
gtcggtggcgtcctgggtgttttcagctggcagacaggggcaaaggaaaagaaggcgcccgaagggagcagagaataggggcaggatccccactttgcgtcttctttctgggtatgggca

SEQ ID NO: 128276 - DNA, 120 bp, Artificial Sequence
  ENSG00000102030_14 (sequence is synthesized)
gggcacagtgtggcgagggggagaccaagccactcagcccggaggtcatgagccatcacacaactcgccactcgtccagtttgtgtccctctaaagggctcttctagctccgacaagaag

SEQ ID NO: 128277 - DNA, 120 bp, Artificial Sequence
  ENSG00000102030_15 (sequence is synthesized)
ggccctgagtgtgcctgcggccgctggacctatggggctggcccagcccgccgaagaggccggggcgcggggccggggctgcgattccctcctgtttgcgtgatgtcgggcctccgttgg

SEQ ID NO: 128278 - DNA, 120 bp, Artificial Sequence
  ENSG00000102030_16 (sequence is synthesized)
gtgggctccggggacctccggggcgcccactcctgttcctgtgctccgggcgttgtgcaaagtcagatcgtcacagtgcctgcccagccccgagggagcggggccgagcagaccgacggg

SEQ ID NO: 128279 - DNA, 120 bp, Artificial Sequence
  ENSG00000102030_17 (sequence is synthesized)
tgagggggagagatactgccttgacgggggtcctggggtacctcagcttttggtgaagatccaggaagtgggattggggggaaggagggaccaggaggaggggcaagacctggacgtgct

SEQ ID NO: 128280 - DNA, 66 bp, Artificial Sequence
  ENSG00000102030_18 (sequence is synthesized)
tctcatgtcttgattttttttttgtagagacaaaaaaaagtgttgtccaggctggtctcgaactcc

SEQ ID NO: 128281 - DNA, 120 bp, Artificial Sequence
  ENSG00000102030_19 (sequence is synthesized)
cgaactcctgggctcaagcagtcctcttgccccggcctgccaagtagctggaactataggcgtgtgccccacacccggcaggcttggggttttcaggcagcagagggtggcaggatcggc

SEQ ID NO: 128282 - DNA, 120 bp, Artificial Sequence
  ENSG00000102030_20 (sequence is synthesized)
ggcaggatcggctgctctgatccaagaggctcccggctctcccccagctggggtcttagggggctgtagtgcatgtccactctacaaatggcaggggggctggaggtggctgtgcctaca

SEQ ID NO: 128283 - DNA, 120 bp, Artificial Sequence
  ENSG00000102030_21 (sequence is synthesized)
gccaggagtcacgacctcagtttcctaggctgggctttagaggaggccatctgcctagcagcctggagggtgatgggagaggcagagggaggaggcttttagaagggaagtggggaggtc

SEQ ID NO: 128284 - DNA, 120 bp, Artificial Sequence
  ENSG00000102030_22 (sequence is synthesized)
tagggaccagtgggtggcctgcctgctcaaaggtagttctgagtcagggttctgcccaaggctcatcgggtggcagggctggtcaaggggcagcgctctgtcgtgggggcctccatggta

SEQ ID NO: 128285 - DNA, 120 bp, Artificial Sequence
  ENSG00000102030_23 (sequence is synthesized)
gtcggtaagcccaggtagcggtggactggggctccagccaggtgtccccactcagtcccgcgtgtcctgcctagccctgctgcctcactatgcccctctcctcagccagcgacagggcca

SEQ ID NO: 128286 - DNA, 120 bp, Artificial Sequence
  ENSG00000102030_24 (sequence is synthesized)
gatgcctctgtgggctttaaaaaaaatgaataggcttcttcttttcagtacagttgaaagtttatagaaaaattgaacagaaaggacatggagttcttatagcacccctcagcatcccct

SEQ ID NO: 128287 - DNA, 120 bp, Artificial Sequence
  ENSG00000102030_25 (sequence is synthesized)
ccctgccagcttcctctgttagtagcatgttggatttgtgtggtccacttgtgacaagtgataaatgaatgtgatatgttactattattattattactattattatttgagacggagtct

SEQ ID NO: 128288 - DNA, 120 bp, Artificial Sequence
  ENSG00000102030_26 (sequence is synthesized)
tgggaagggcggtggcctctgggctggatgctggcaagagggatctgtgacccagatgacgatgtctggtgggaattgctttatagctaagtcagcaatcctcatgtcttaggcctggca

SEQ ID NO: 128289 - DNA, 120 bp, Artificial Sequence
  ENSG00000102030_27 (sequence is synthesized)
gggccagcctaggccattgagtccagctccccttccagggacatggccacgcgagtctgcacacacacctgcccagtgtagtcacggccccagagctgctcaggcagggctcaccgtctt

SEQ ID NO: 128290 - DNA, 120 bp, Artificial Sequence
  ENSG00000102030_28 (sequence is synthesized)
tcctgggttctgatggctgttgtgaggcagctcagtaagggacagggcgcagggcagggagggaaggggaaggctgaattcagggcttcagctcacaagaaaccgcagaaatggatcctt

SEQ ID NO: 128291 - DNA, 120 bp, Artificial Sequence
  ENSG00000102030_29 (sequence is synthesized)
agtatccaggctaaggacacagaacgggggcaggacgggtggggcgggccgctgtgtcctggagcctttgctggagagaacagagggcaggtcacactggacttgttgtctcaggatgga

SEQ ID NO: 128292 - DNA, 120 bp, Artificial Sequence
  ENSG00000102030_30 (sequence is synthesized)
cttgttcccctgcagtaaccgggccgccctgcacctctattccaacaccctcaactttcagtaagtagatctcgatttttctaatgggctggggttgatcccaggtctggcccatcaggg

SEQ ID NO: 128293 - DNA, 120 bp, Artificial Sequence
  ENSG00000102030_31 (sequence is synthesized)
cacctgagaccggctgagttgccttccaggtcgggggtgggccggctgtggggaagaggctgtggaccccagcactgccaggatacctccacattcactcggcggctgatggttgaaaag

SEQ ID NO: 128294 - DNA, 120 bp, Artificial Sequence
  ENSG00000102030_32 (sequence is synthesized)
ccggcatggagacagcacctgcctgctgaaacgtgctccatgtgttgtgatggaggagctctggcccatgatggctgaggctggcgaagggcacacgggctgtttagtaatgtttgggaa

SEQ ID NO: 128295 - DNA, 120 bp, Artificial Sequence
  ENSG00000102032_0 (sequence is synthesized)
aactctgtctggcttcctagaggagcaggagggatgagcaagggtctcccagcgcgacaggacatggagaaagagcgagagactctgcaggcctggaaggagcgcgtggggcaggagctg

SEQ ID NO: 128296 - DNA, 120 bp, Artificial Sequence
  ENSG00000102032_1 (sequence is synthesized)
gaccgcgtggtggctttctggatggagcactcccacgaccaggagcacgggggcttcttcacgtgccttggccgcgaggggcgggtgtatgatgacctcaagtatgtgtggctgcagggg

SEQ ID NO: 128297 - DNA, 120 bp, Artificial Sequence
  ENSG00000102032_2 (sequence is synthesized)
aggcaggtatggatgtattgtcgcctgtaccgcactttcgagcgcttccgccatgctcagcttctggacgcagcaaaagcaggtggtgagttcttgctgcggtatgcccgggtggcacct

SEQ ID NO: 128298 - DNA, 120 bp, Artificial Sequence
  ENSG00000102032_3 (sequence is synthesized)
cctggcaagaagtgtgcctttgtgctgactcgggacggccgcccggtcaaggtgcagcgaaccatcttcagtgagtgtttctacaccatggccatgaacgagctgtggagagccacaggg

SEQ ID NO: 128299 - DNA, 120 bp, Artificial Sequence
  ENSG00000102032_4 (sequence is synthesized)
gaagtgcggtaccagacggaagcggtggagatgatggatcagatcgtccactgggtgcaggaggacgcgtcgggactgggccggccccagctccagggggccccggctgcggagcccatg

SEQ ID NO: 128300 - DNA, 120 bp, Artificial Sequence
  ENSG00000102032_5 (sequence is synthesized)
gctactgaacctggtggagcagctcggggaggcagatgaggagctggcgggcaaatacgcagagctgggggactggtgcgcccggaggattctgcagcacgtgcagagggatggacaagc

SEQ ID NO: 128301 - DNA, 120 bp, Artificial Sequence
  ENSG00000102032_6 (sequence is synthesized)
tgtgctggagaatgtgtcagagggtggcaaggaacttcctggctgcctggggagacagcagaacccaggccacacgctggaagccggctggtttctgctccgtcattgcattcggaaagg

SEQ ID NO: 128302 - DNA, 120 bp, Artificial Sequence
  ENSG00000102032_7 (sequence is synthesized)
cgaccccgaacttcgagcccacgtgattgacaagttcctattgttgcccttccactccggatgggaccctgaccacggaggcctcttttacttccaggatgctgataacttctgccccac

SEQ ID NO: 128303 - DNA, 120 bp, Artificial Sequence
  ENSG00000102032_8 (sequence is synthesized)
ccagctggagtgggccatgaagctctggtggccacacagtgaagccatgattgccttcctcatgggttacagtgacagtggggaccctgtgctgctgcgcctcttctaccaagtggctga

SEQ ID NO: 128304 - DNA, 120 bp, Artificial Sequence
  ENSG00000102032_9 (sequence is synthesized)
gtacaccttccgccagtttcgcgatcccgagtacggggaatggtttggctacctgagccgagagggcaaggtggccctctccatcaagggaggtcctttcaaaggctgcttccacgtgcc

SEQ ID NO: 128305 - DNA, 85 bp, Artificial Sequence
  ENSG00000102032_10 (sequence is synthesized)
ccatcaagggaggtcctttcaaaggctgcttccacgtgccgcggtgcctagccatgtgcgaggagatgctgggcgccctgctgag

SEQ ID NO: 128306 - DNA, 62 bp, Artificial Sequence
  ENSG00000102032_11 (sequence is synthesized)
tattctcccgcctcagcctcccgagtatactgctgggattacaatttcgcgatcccgagtac

SEQ ID NO: 128307 - DNA, 76 bp, Artificial Sequence
  ENSG00000102032_12 (sequence is synthesized)
taatcccagcctctattgtagtgagtcgagattgcggccactgcactttagcctgggtgacagagcaagactctgt

SEQ ID NO: 128308 - DNA, 120 bp, Artificial Sequence
  ENSG00000102032_13 (sequence is synthesized)
gaccgcgtggtggctttctggatggagcactcccacgaccaggagcacgggtactcggcgtgcttctggagtcctcagcagggtttttgcccttcctgaggccccttctcactctcaggc

SEQ ID NO: 128309 - DNA, 120 bp, Artificial Sequence
  ENSG00000102032_14 (sequence is synthesized)
cagatttgctggccccagaggggcaggaggggctggcaaggcccgttccagactttgctaaccctgccttcccacaggggcttcttcacgtgccttggccgcgaggggcgggtgtatgat

SEQ ID NO: 128310 - DNA, 80 bp, Artificial Sequence
  ENSG00000102034_0 (sequence is synthesized)
ttctcctttcgccggcgccgagttcctggcgccgctcgcccggcccggcttccgaggggagaggacgggctggcggggct

SEQ ID NO: 128311 - DNA, 120 bp, Artificial Sequence
  ENSG00000102034_1 (sequence is synthesized)
acagaccccggcccggcgaccgagctgggcccgtgagccactcggcctcaggtcgctcctgtggttggtccagcccagaatgcagccttgagcctggcttaggccaccacctactccagc

SEQ ID NO: 128312 - DNA, 120 bp, Artificial Sequence
  ENSG00000102034_2 (sequence is synthesized)
tctctccaccccctattttactgcagctcagggggtaggctctaggctccaaagtacctgggtattgtcccttcatcaagaaagccccacagctctggagggctctgataatcccgttgt

SEQ ID NO: 128313 - DNA, 120 bp, Artificial Sequence
  ENSG00000102034_3 (sequence is synthesized)
cagctctctgaaaagacagcatggctattaccctacagcccagtgacctgatctttgagttcgcaagcaacgggatggatgatgatatccaccagctggaagacccctctgtgttcccag

SEQ ID NO: 128314 - DNA, 120 bp, Artificial Sequence
  ENSG00000102034_4 (sequence is synthesized)
ctgtgatcgtggagcaggtaccctaccctgatttactgcatctgtactcgggactggagttggacgacgttcacaatggcatcataacagacgggaccttgtgcatgacgcaggatcaga

SEQ ID NO: 128315 - DNA, 120 bp, Artificial Sequence
  ENSG00000102034_5 (sequence is synthesized)
tcctggaaggcagttttttgctgacagatgacaatgaggccacctcgcacaccatgtcaaccgcggaagtcttactcaatatggagtctcccagcgatatcctggatgagaagcagatct

SEQ ID NO: 128316 - DNA, 120 bp, Artificial Sequence
  ENSG00000102034_6 (sequence is synthesized)
tcagtacctccgaaatgcttccagactcggaccctgcaccagctgtcactctgcccaactacctgtttcctgcctctgagcccgatgccctgaacagggcgggtgacactagtgaccagg

SEQ ID NO: 128317 - DNA, 120 bp, Artificial Sequence
  ENSG00000102034_7 (sequence is synthesized)
aggggcattctctggaggagaaggcctccagagaggaaagtgccaagaagactgggaaatcaaagaagagaatccggaagaccaagggcaaccgaagtacctcacctgtcactgacccca

SEQ ID NO: 128318 - DNA, 120 bp, Artificial Sequence
  ENSG00000102034_8 (sequence is synthesized)
gcatccccattaggaagaaatcaaaggatggcaaaggcagcaccatctatctgtgggagttcctcctggctcttctgcaagacagaaacacctgtcccaagtacatcaagtggacccagc

SEQ ID NO: 128319 - DNA, 120 bp, Artificial Sequence
  ENSG00000102034_9 (sequence is synthesized)
gagagaaaggcatcttcaaactggtggactccaaagctgtgtccaagctgtgggggaagcagaaaaacaagcctgacatgaactatgagacaatggggcgggcactaagatactactacc

SEQ ID NO: 128320 - DNA, 120 bp, Artificial Sequence
  ENSG00000102034_10 (sequence is synthesized)
aaagaggcatactggccaaagtggaagggcagaggctggtgtaccagtttaaggagatgcccaaggacctggtggtcattgaagatgaggatgagagcagcgaagccacagcagccccac

SEQ ID NO: 128321 - DNA, 120 bp, Artificial Sequence
  ENSG00000102034_11 (sequence is synthesized)
ctcaggcctccacggcctctgtggcctctgccagtaccacccggcgaaccagctccagggtctcatccagatctgccccccagggcaagggcagctcttcttgggagaagccaaaaattc

SEQ ID NO: 128322 - DNA, 120 bp, Artificial Sequence
  ENSG00000102034_12 (sequence is synthesized)
agcatgtcggtctccagccatctgcgagtctggaattgggaccgtcgctagacgaggagatccccactacctccaccatgctcgtctctccagcagagggccaggtcaagctcaccaaag

SEQ ID NO: 128323 - DNA, 120 bp, Artificial Sequence
  ENSG00000102034_13 (sequence is synthesized)
ctgtgagtgcatcttcagtgcccagcaacatccacctaggagtggcccccgtggggtcgggctcggccctgaccctgcagacgatcccactgaccacggtgctgaccaatgggcctcctg

SEQ ID NO: 128324 - DNA, 120 bp, Artificial Sequence
  ENSG00000102034_14 (sequence is synthesized)
ccagtactactgctcccactcagctcgttctccagagtgttccagcggcctctactttcaaggacaccttcactttgcaggcctctttccccctgaacgccagtttccaagacagccagg

SEQ ID NO: 128325 - DNA, 120 bp, Artificial Sequence
  ENSG00000102034_15 (sequence is synthesized)
tggcagccccaggggctccactgattctcagtggcctcccccaacttctggctggggccaaccgtccgaccaacccggcgccacccacggtcacaggggctggaccagcagggcccagct

SEQ ID NO: 128326 - DNA, 120 bp, Artificial Sequence
  ENSG00000102034_16 (sequence is synthesized)
ctcagccccctgggactgtcattgctgccttcatcaggacttctggcactacagcagcccctagggtcaaggaggggccactgaggtcctcctcctatgttcagggtatggtgacggggg

SEQ ID NO: 128327 - DNA, 120 bp, Artificial Sequence
  ENSG00000102034_17 (sequence is synthesized)
ggtggtttccaggggttcccacaatccgagccttctgggcaaccagactttgtctcctcccagccgccccactgttgggctgaccccagtggctgaacttgagctctcctcaggctcagg

SEQ ID NO: 128328 - DNA, 120 bp, Artificial Sequence
  ENSG00000102034_18 (sequence is synthesized)
gtccctgctgatggctgagcctagtgtgaccacatctgggagccttctgacaagatcccccaccccagcccctttctccccattcaaccctacttccctcattaagatggagccccatga

SEQ ID NO: 128329 - DNA, 120 bp, Artificial Sequence
  ENSG00000102034_19 (sequence is synthesized)
catataagcaaaggggtcagggcaagtgtgacccaccaggcaaaattgagcagcattttcatagggaccgacttcagtagcacacctgcccctgcatttcagtgggatgtcaatacactt

SEQ ID NO: 128330 - DNA, 120 bp, Artificial Sequence
  ENSG00000102034_20 (sequence is synthesized)
gaccccaagtcccccggccctgcctggtgtcactgtggccaaacagtgcccagcttaagcatccctggcatcagactatggccttcaagagcactagggcatatgcttttggcagcataa

SEQ ID NO: 128331 - DNA, 120 bp, Artificial Sequence
  ENSG00000102034_21 (sequence is synthesized)
cgggctgacttggtgatggagggaaaaagccttgagccaggcagaagtttgtggccagggtttgtgcagcagctttgtgagaagagcccttctacctggctctatctcactggctgcatt

SEQ ID NO: 128332 - DNA, 120 bp, Artificial Sequence
  ENSG00000102034_22 (sequence is synthesized)
ccctacacagggaatttactaccctatatgtgaatatccctgtatgtacttgtgtgtacttgttggtctgtatcttagtttctttggggaggacagggctgtagctgtgaggtcttgtct

SEQ ID NO: 128333 - DNA, 120 bp, Artificial Sequence
  ENSG00000102034_23 (sequence is synthesized)
ccaagggtgtgtgtatgtctccgtggatcagccacagggatagggattttgtttttaagggaaagcattctctaattccctttgttcatgccgagattcagttgctctgagactatgggg

SEQ ID NO: 128334 - DNA, 120 bp, Artificial Sequence
  ENSG00000102034_24 (sequence is synthesized)
tacaagtttgatcctccgaatctggagatgttgtagagctggaacgagtgcagagtaggaacgctttgatgcgcatgcacattggggaagatgcgctcctcagggacacaaaggccgagt

SEQ ID NO: 128335 - DNA, 120 bp, Artificial Sequence
  ENSG00000102034_25 (sequence is synthesized)
ggggtaaaaccacgaagggagggaagggaagtcagctctgggagcagccctcactggctggaccaaggtactcttcctggagtttgccgtgttagcaaccacagtcaccttgcagtcagg

SEQ ID NO: 128336 - DNA, 120 bp, Artificial Sequence
  ENSG00000102034_26 (sequence is synthesized)
ctggaatcttgggccaccccaaagtgctttgctgaaggatttagacggggatgaagtgccctccagcctcagagctagccacaaagcccccagagctgaattcattgagtatttgtgcct

SEQ ID NO: 128337 - DNA, 120 bp, Artificial Sequence
  ENSG00000102034_27 (sequence is synthesized)
agggcttgggctgtttgtgtgataccggccccccgccagacaatagcctttgctgacaccccagcctacttccccgatcctgggctccctcttgattactttttgacattttccagctgt

SEQ ID NO: 128338 - DNA, 120 bp, Artificial Sequence
  ENSG00000102034_28 (sequence is synthesized)
caggcatcactgcggctagtccggcagcgacctagatggggtccacccccattcctgctcaagcatgggcacctaccacatggtttctgctgctcagcctgcctgcaactcacctcgaag

SEQ ID NO: 128339 - DNA, 120 bp, Artificial Sequence
  ENSG00000102034_29 (sequence is synthesized)
gcggaccagcctgcctctgtgatgactgcagcagacctccttgggtgtaccaatgcccctcatctcccactttcacacctaaccctgactccttcaccaagaagacgggagtcggcagcc

SEQ ID NO: 128340 - DNA, 120 bp, Artificial Sequence
  ENSG00000102034_30 (sequence is synthesized)
aggagttcccgtggcacctctctctcttcgtggctccctgcttcccccttccctctttccgaggaagggtcaacctattctctctcaaagccaacccctaggccaattgcctggatctcc

SEQ ID NO: 128341 - DNA, 120 bp, Artificial Sequence
  ENSG00000102034_31 (sequence is synthesized)
tcccctctcccttctttaaacgagcttgcctccctcctgccaagtttgagggcaaggctaagaaatgtcagccacggaaacaactctattatctggtgactttgggtaatgtgaatcagt

SEQ ID NO: 128342 - DNA, 120 bp, Artificial Sequence
  ENSG00000102034_32 (sequence is synthesized)
gcctgaggacctttgctgtgtccttggtacagaaccatccacttgacctaactacctcccctggccgcgctctcgctcttctcttctttgttaagccaacaactatcaccctctcctact

SEQ ID NO: 128343 - DNA, 120 bp, Artificial Sequence
  ENSG00000102034_33 (sequence is synthesized)
cttcttctccctgccccctggagggcactgtgtttggttgtgcaaatgtatttactatgcgtgtttccagcagttggcattaaagtgcctttttctaataaaatcagtttattatgacag

SEQ ID NO: 128344 - DNA, 120 bp, Artificial Sequence
  ENSG00000102034_34 (sequence is synthesized)
ggtatttgcatctctccctccaacttgccattggcggcgcgaagtgtgggagagccctgcgcctcgcccgcccggaccagcctgccccggcgccgaggtcgctcctgtggttggtccagc

SEQ ID NO: 128345 - DNA, 120 bp, Artificial Sequence
  ENSG00000102038_0 (sequence is synthesized)
gagcgaaggggttggaagcggagtgattccccacccctgctccatctagctctttccagtgcagccactgccgccgcccaggagccctcgtcccctgccttgtccccctactcgttcccg

SEQ ID NO: 128346 - DNA, 120 bp, Artificial Sequence
  ENSG00000102038_1 (sequence is synthesized)
ctcccacggcatggagcaggacactgccgcagtggcagccaccgtggcagccgcggatgcgaccgccactatcgtggtcatagaggacgagcagcccgggccgtccacctctcaggagga

SEQ ID NO: 128347 - DNA, 120 bp, Artificial Sequence
  ENSG00000102038_2 (sequence is synthesized)
gggagcggccgccgcggccaccgaagccaccgcggccacggagaagggcgagaagaagaaggagaaaaacgtttcttcatttcaactcaaacttgctgctaaagcgcctaaatctgaaaa

SEQ ID NO: 128348 - DNA, 120 bp, Artificial Sequence
  ENSG00000102038_3 (sequence is synthesized)
ggaaatggacccagaatatgaagagaaaatgaaagccgaccgagcaaagagatttgaatttttactgaagcagacagaactttttgcacatttcattcagccttcagcacagaaatctcc

SEQ ID NO: 128349 - DNA, 120 bp, Artificial Sequence
  ENSG00000102038_4 (sequence is synthesized)
aacatctccactgaacatgaaattgggacgtccccgaataaagaaagatgaaaagcagagcttaatttctgctggagactaccgccataggcgcacagagcaagaagaagatgaagagct

SEQ ID NO: 128350 - DNA, 120 bp, Artificial Sequence
  ENSG00000102038_5 (sequence is synthesized)
actgtctgagagtcggaaaacatctaatgtgtgtattagatttgaggtgtcaccttcatatgtgaaaggggggccactgagagattatcagattcgaggactgaattggttgatctcttt

SEQ ID NO: 128351 - DNA, 120 bp, Artificial Sequence
  ENSG00000102038_6 (sequence is synthesized)
atatgaaaatggagtcaatggcattttggctgatgaaatgggccttgggaaaactttacaaacaattgctttgcttggttacctgaaacactaccgaaatattcctggacctcacatggt

SEQ ID NO: 128352 - DNA, 120 bp, Artificial Sequence
  ENSG00000102038_7 (sequence is synthesized)
tttagttccaaagtctactttacacaactggatgaatgaatttaaacgatgggtcccatctctccgtgtcatttgttttgtcggagacaaggatgccagagctgcttttattcgtgatga

SEQ ID NO: 128353 - DNA, 120 bp, Artificial Sequence
  ENSG00000102038_8 (sequence is synthesized)
aatgatgccaggagagtgggatgtttgcgttacttcttatgagatggtaattaaagaaaaatctgtattcaaaaagtttcactggcgatacctggtcattgatgaagctcacagaataaa

SEQ ID NO: 128354 - DNA, 120 bp, Artificial Sequence
  ENSG00000102038_9 (sequence is synthesized)
gaatgaaaaatctaagctttcagagattgttcgtgagttcaagtcgactaaccgcttgctcctaactggaacacctttgcagaataacctgcatgaactgtgggccttactcaacttttt

SEQ ID NO: 128355 - DNA, 120 bp, Artificial Sequence
  ENSG00000102038_10 (sequence is synthesized)
attgcctgatgtctttaattctgcagatgactttgattcttggtttgacactaaaaattgtcttggtgatcaaaaactcgtggaaagacttcatgcagttttaaaaccatttttgttacg

SEQ ID NO: 128356 - DNA, 120 bp, Artificial Sequence
  ENSG00000102038_11 (sequence is synthesized)
ccgtataaaaactgatgtagagaagagtctgccacctaaaaaggaaataaagatttacttggggctgagtaagatgcaacgagaatggtatacaaaaatcctgatgaaagatattgatgt

SEQ ID NO: 128357 - DNA, 120 bp, Artificial Sequence
  ENSG00000102038_12 (sequence is synthesized)
tttaaactcttctggcaagatggacaagatgcgactcttaaacattctgatgcagcttcgaaagtgttgtaatcatccatatctgtttgatggtgctgaacctggtccaccttataccac

SEQ ID NO: 128358 - DNA, 120 bp, Artificial Sequence
  ENSG00000102038_13 (sequence is synthesized)
tgatgagcatattgtcagcaacagtggtaaaatggtagttctggataaactattggccaaactcaaagaacagggttcaagggttctcattttcagccagatgactcgcttgctggatat

SEQ ID NO: 128359 - DNA, 120 bp, Artificial Sequence
  ENSG00000102038_14 (sequence is synthesized)
tttggaagattattgcatgtggcgtggttatgagtattgtcgactggatggacaaaccccgcatgaagaaagagaggataaattcctagaagtggaatttctgggtcaaagggaagcaat

SEQ ID NO: 128360 - DNA, 120 bp, Artificial Sequence
  ENSG00000102038_15 (sequence is synthesized)
agaggcttttaatgctcctaatagtagcaaattcatctttatgctaagtaccagggctggaggtctcggaattaacctggcaagtgctgatgtggttatactatatgattcagactggaa

SEQ ID NO: 128361 - DNA, 120 bp, Artificial Sequence
  ENSG00000102038_16 (sequence is synthesized)
cccacaggttgatctacaagctatggatcgagcacatcgtattggtcagaagaaaccagtacgtgtattccgtctcatcactgacaacactgttgaagagaggattgtagaaagagctga

SEQ ID NO: 128362 - DNA, 120 bp, Artificial Sequence
  ENSG00000102038_17 (sequence is synthesized)
tcaattgttatacaacaaggaagactcattgaccaacagtctaacaagctggcaaaagaggaaatgttacaaatgatacggcatggagccacccatgtttttgcttctaaagagagtgag

SEQ ID NO: 128363 - DNA, 120 bp, Artificial Sequence
  ENSG00000102038_18 (sequence is synthesized)
ttgacagatgaagacattacaactattctggaaagaggggaaaagaagactgcagagatgaatgaacgcctgcaaaaaatgggagagtcttctctaagaaattttagaatggacattgaa

SEQ ID NO: 128364 - DNA, 120 bp, Artificial Sequence
  ENSG00000102038_19 (sequence is synthesized)
caaagtttatacaaatttgagggagaagattatagagaaaaacagaagcttggcatggtggaatggattgaacctcctaaacgagaacgcaaagcaaactacgcagtggatgcctacttt

SEQ ID NO: 128365 - DNA, 120 bp, Artificial Sequence
  ENSG00000102038_20 (sequence is synthesized)
agagaggctttgcgtgtcagcgagccaaagattccaaaggctccacggcctccaaaacagccaaatgttcaggattttcaatttttcccaccacgcttatttgagctcctggaaaaggaa

SEQ ID NO: 128366 - DNA, 120 bp, Artificial Sequence
  ENSG00000102038_21 (sequence is synthesized)
attctttattatcggaagacaataggctataaggttccaaggaatcctgatatcccaaatccagctctggctcaaagagaagagcaaaaaaagattgatggagctgaacctcttacacca

SEQ ID NO: 128367 - DNA, 120 bp, Artificial Sequence
  ENSG00000102038_22 (sequence is synthesized)
gaagagactgaagaaaaggaaaaacttctcacacaaggtttcacaaactggactaaacgagattttaaccagtttattaaagctaatgagaaatatggaagagatgacattgataacata

SEQ ID NO: 128368 - DNA, 120 bp, Artificial Sequence
  ENSG00000102038_23 (sequence is synthesized)
gctcgagaggtagagggcaaatcccctgaggaggtcatggagtattcagctgtattttgggaacgttgcaatgaattacaggacattgagaaaattatggctcaaattgaacgtggagaa

SEQ ID NO: 128369 - DNA, 120 bp, Artificial Sequence
  ENSG00000102038_24 (sequence is synthesized)
gcaagaattcaacgaaggatcagtatcaagaaagccctggatgccaaaattgcaagatacaaggctccatttcatcagttgcgcattcagtatggaaccagcaaaggaaagaactatact

SEQ ID NO: 128370 - DNA, 120 bp, Artificial Sequence
  ENSG00000102038_25 (sequence is synthesized)
gaggaagaagatagattcttgatttgtatgttacacaaaatgggctttgatagagaaaatgtatatgaagaattaagacagtgtgtacgaaatgctccccagtttagatttgactggttt

SEQ ID NO: 128371 - DNA, 120 bp, Artificial Sequence
  ENSG00000102038_26 (sequence is synthesized)
atcaagtctaggactgccatggaattccagagacgctgtaacactctgatttcattgattgagaaagaaaatatggaaattgaggaaagagagagagcagaaaagaagaaacgggcaact

SEQ ID NO: 128372 - DNA, 120 bp, Artificial Sequence
  ENSG00000102038_27 (sequence is synthesized)
aaaactccaatggtaaaattttcagcattttcctaacttttagatttaacattgttgggccatttaaaatgtgcatattggagcagaacattaaatctgtttccattttagtcacagaaa

SEQ ID NO: 128373 - DNA, 120 bp, Artificial Sequence
  ENSG00000102038_28 (sequence is synthesized)
agaaaagcagagtcagctactgagagctctggaaagaaggatgtcaagaaggtgaaatcctaaagcctagaaataaagttttaaatgggaaactgctattttcttgttcccatcttcaaa

SEQ ID NO: 128374 - DNA, 120 bp, Artificial Sequence
  ENSG00000102038_29 (sequence is synthesized)
tgctaattgccagttccagtgtattcatggtactctaagaaaaatctctttggttttgatttcttgcatattttatatattttacaatgctttctacctgaaatgtgtagctttatattt

SEQ ID NO: 128375 - DNA, 120 bp, Artificial Sequence
  ENSG00000102038_30 (sequence is synthesized)
tatggcattctagtatttttgtgtactgtattttgtgcatttcatgtcttcatcaaaatcctctcagtccttgttcttttgaagcttgtgctgaggttttagcttttctatgttttatat

SEQ ID NO: 128376 - DNA, 120 bp, Artificial Sequence
  ENSG00000102038_31 (sequence is synthesized)
gccgctgctttgaaagagaacctagattctatagttgtattattgttgtttcatactttaaatttatatggctgtggaaaaacgaattaaaatgttttgaggagaaagactttttcactt

SEQ ID NO: 128377 - DNA, 120 bp, Artificial Sequence
  ENSG00000102038_32 (sequence is synthesized)
ctttgttgctttcttttctattgagtctgggcttgtttgtgttactgcatactgtgattagcataataattgtttctttgaggtcatctaaatatttttttcctaaaggaataaagggtg

SEQ ID NO: 128378 - DNA, 120 bp, Artificial Sequence
  ENSG00000102038_33 (sequence is synthesized)
aggaaagaaaaatattaaaaaagctaatatttgatactgtgcttgctgtcagtatgcattacatttaaattattctctattcaagtgggaaaatataataaagaaatgtctataagaaat

SEQ ID NO: 128379 - DNA, 120 bp, Artificial Sequence
  ENSG00000102038_34 (sequence is synthesized)
ccaaagattccaaaggtaaaactgtacaaggccagtttttatgtcctaaagtagatttctgttgcaacatgatctatgggtcagatttacttgtatcattgccaaatcatagtctctaaa

SEQ ID NO: 128380 - DNA, 120 bp, Artificial Sequence
  ENSG00000102038_35 (sequence is synthesized)
atataacagtacaaaaaagtatctgatttggcccagccatataaatggattttattgtatttattgttccatatatcacagaaatagtaaaagataagtaagtttacttcatgtactgaa

SEQ ID NO: 128381 - DNA, 120 bp, Artificial Sequence
  ENSG00000102043_0 (sequence is synthesized)
gaaacccgggttgaggcaggaggcggctagaccggtggcggcggcatctggagtagcactgagatcttccggtggcgggaactgcagtcatggatcatattacggtacccaaggtagaaa

SEQ ID NO: 128382 - DNA, 120 bp, Artificial Sequence
  ENSG00000102043_1 (sequence is synthesized)
acgtgaaattggtggatcgttatgtgagtaagaaaccagctaatgggattctttatcttactgcaacccacctgatctatgtggaggcttcaggtgcagcccggaaagaaacatggattg

SEQ ID NO: 128383 - DNA, 120 bp, Artificial Sequence
  ENSG00000102043_2 (sequence is synthesized)
cactccatcacattgccactgtggagaagttacccatcactagcctgggttgtcccctgaccctccgctgcaagaatttccgggtggcccactttgttttagattctgaccttgtgtgcc

SEQ ID NO: 128384 - DNA, 120 bp, Artificial Sequence
  ENSG00000102043_3 (sequence is synthesized)
atgaggtttatatttcactgctcaagctttctcagccagcattacctgaagatctttatgctttttcttataatcccaaatcctcaaaagagatgagggaaagtggatggaaactgattg

SEQ ID NO: 128385 - DNA, 120 bp, Artificial Sequence
  ENSG00000102043_4 (sequence is synthesized)
acccaatatcagactttgggcgtatgggaatacccaacagaaactggaccataacagatgccaacagaaactatgagatatgcagcacctaccctcctgaaatagtggttcctaaatctg

SEQ ID NO: 128386 - DNA, 120 bp, Artificial Sequence
  ENSG00000102043_5 (sequence is synthesized)
ttaccttgggaacggtggttggaagttcaaagttcagaagtaaagaacgtgtccctgtgctctcctacctctacaaagagaacaatgctgccatttgccgctgtagccagcctctctctg

SEQ ID NO: 128387 - DNA, 120 bp, Artificial Sequence
  ENSG00000102043_6 (sequence is synthesized)
gattttacactcgctgtgtagatgatgagctcttgttggaggccattagccaaacaaacccagggagccagtttatgtatgttgtagacacaagaccaaagttgaatgccatggccaacc

SEQ ID NO: 128388 - DNA, 120 bp, Artificial Sequence
  ENSG00000102043_7 (sequence is synthesized)
gagcagctgggaaggggtatgaaaatgaagacaactatgccaacattcgcttcagattcatgggcattgagaacatccatgtaatgcggagcagtctgcagaaactcttggaagtttgtg

SEQ ID NO: 128389 - DNA, 120 bp, Artificial Sequence
  ENSG00000102043_8 (sequence is synthesized)
aattgaaaactccaacaatgagtgaatttcttagcggcctggagagctcagggtggttaagacacattaaagctattatggatgctggaattttcattacaaaggcagtgaaggtagaaa

SEQ ID NO: 128390 - DNA, 120 bp, Artificial Sequence
  ENSG00000102043_9 (sequence is synthesized)
aggccagtgtcttagtccattgttctgatggatgggaccgcacagcacaagtctgctcagtggctagcatcctcctagatccattttataggacattcaaaggactcatgatcttgatag

SEQ ID NO: 128391 - DNA, 120 bp, Artificial Sequence
  ENSG00000102043_10 (sequence is synthesized)
agaaggaatggatatccatgggccacaagttttcccaaaggtgtggccacctcgatggggactctaaagaagtgtcccctatcttcacccagttcctagactgtatctggcaattaatgg

SEQ ID NO: 128392 - DNA, 120 bp, Artificial Sequence
  ENSG00000102043_11 (sequence is synthesized)
gagtttaatgaaaacttcctgctggagattcatgaccatgttttctcctgccagtttggaaacttccttggtaactgccagaaggatcgggaagatctaagagtctatgagaaaacacat

SEQ ID NO: 128393 - DNA, 120 bp, Artificial Sequence
  ENSG00000102043_12 (sequence is synthesized)
tctgtgtggcctttcttggttcagaggaaaccagacttcaggaaccctctctataaaggcttcactatgtatggggtactcaatcctagtactgtgccctacaacattcagttctggtgt

SEQ ID NO: 128394 - DNA, 120 bp, Artificial Sequence
  ENSG00000102043_13 (sequence is synthesized)
gggatgtataaccgctttgacaaagggctgcagcccaagcagagtatgctagagagcctcctggaaattaagaaacagagagcaatgctggagacagatgtgcatgaactagaaaagaaa

SEQ ID NO: 128395 - DNA, 120 bp, Artificial Sequence
  ENSG00000102043_14 (sequence is synthesized)
ctaaaagtccgtgatgagccaccagaagagatctgtacctgctctcaattaggaaacatattatcccagcatctgggaagtcctttgaccaatcctcttggctttatgggtatcaatgga

SEQ ID NO: 128396 - DNA, 120 bp, Artificial Sequence
  ENSG00000102043_15 (sequence is synthesized)
gacctgaataccctgatggagaatggcaccctatccagggaaggaggcctccgagctcagatggatcaagtaaaaagccagggtgcagacctccaccataactgttgtgagattgtgggc

SEQ ID NO: 128397 - DNA, 120 bp, Artificial Sequence
  ENSG00000102043_16 (sequence is synthesized)
agccttagggccataaatatctctggggatgtgggcatctctgaggccatgggcatctctggagacatgtgcacctttgaggctacgggcttctccaaagacttaggaatctgtggggcc

SEQ ID NO: 128398 - DNA, 120 bp, Artificial Sequence
  ENSG00000102043_17 (sequence is synthesized)
atggacatctctgaggccactggcatctctggaaacttgggtatttctgaggccaggggtttctctggggacatgggcatcttgggggacacaggcatctccaaggccagcaccaaggag

SEQ ID NO: 128399 - DNA, 120 bp, Artificial Sequence
  ENSG00000102043_18 (sequence is synthesized)
gcagactactccaagcatcagtgagttagttactcatcttccatgctaggtatacctacagcagctacaatgattcttgtcccagagagggctatgctgcttttccaattggtttaagtg

SEQ ID NO: 128400 - DNA, 120 bp, Artificial Sequence
  ENSG00000102043_19 (sequence is synthesized)
ggtgaagccagggcacccctctccccacttaagtctggaagggaattactttactgattaagtgaccaatatgttcatattaagcagtacagagtgtaggcaagagaaagaatatgttat

SEQ ID NO: 128401 - DNA, 120 bp, Artificial Sequence
  ENSG00000102043_20 (sequence is synthesized)
tgttctaaaatgggatttaactatagaaatgttgcctctcagctgagacacatattaagctggttctactgtctgttttccttaatgatcgacctgccctattttctatcctcactgcag

SEQ ID NO: 128402 - DNA, 120 bp, Artificial Sequence
  ENSG00000102043_21 (sequence is synthesized)
taatgtgaaagtgaagtggaaatattgtcacaatggtcaataatgacccttttgagggtatggagagatggtatacagcaggtaactgtgaattgcagaataaattgaaagaaaatttta

SEQ ID NO: 128403 - DNA, 120 bp, Artificial Sequence
  ENSG00000102043_22 (sequence is synthesized)
gagaagacactgaacagggagaaggtggtcagtgcaaaaagaatgtacctaccaccctgaatttggcatagcagtcaagaaaggggaggagataacaataataaaaagaacttttgaagc

SEQ ID NO: 128404 - DNA, 120 bp, Artificial Sequence
  ENSG00000102048_0 (sequence is synthesized)
gtacacgagcgcatgcctctctctgatcacaggtagcactcagattaccctgcctgctctgtgctttgctgcagaccatttgaccagaacgtgtgcagctcagccagccacagaactgga

SEQ ID NO: 128405 - DNA, 120 bp, Artificial Sequence
  ENSG00000102048_1 (sequence is synthesized)
atttttcaggagcagggggagcatggagtttggactttgctgagcaactgaagtggagcgcagagcttgctcgcttaggagagagcatcatggatggcaaacaagggggcatggatggga

SEQ ID NO: 128406 - DNA, 120 bp, Artificial Sequence
  ENSG00000102048_2 (sequence is synthesized)
gcaagcccgcggggccaagggactttcctggcatcaggcttctttcaaacccattgatgggcgatgctgtgtctgattggtctcctatgcatgaagctgcaatccacggacatcagctgt

SEQ ID NO: 128407 - DNA, 120 bp, Artificial Sequence
  ENSG00000102048_3 (sequence is synthesized)
ctctgaggaacctcatcagccaggggtgggctgtgaacatcatcacggcagatcatgtttccccactccatgaagcctgtcttggaggtcatctctcttgtgtgaagattttattaaagc

SEQ ID NO: 128408 - DNA, 120 bp, Artificial Sequence
  ENSG00000102048_4 (sequence is synthesized)
atggagctcaggtgaatggtgtgacagcagactggcacactccactgtttaatgcttgtgtcagcggcagctgggattgtgtgaatttgcttctgcagcacggagccagcgttcaacctg

SEQ ID NO: 128409 - DNA, 120 bp, Artificial Sequence
  ENSG00000102048_5 (sequence is synthesized)
agagtgatctggcatcccccatccatgaagctgctaggagaggccacgtggagtgtgtcaactctcttatagcttatgggggcaacattgaccataagatcagccacctgggcactccac

SEQ ID NO: 128410 - DNA, 120 bp, Artificial Sequence
  ENSG00000102048_6 (sequence is synthesized)
tcaggagcggacgtgaaccaagggaaaggtcaggattccccacttcatgcagtggccaggacagccagtgaagagctggcctgcctgctcatggattttggagcggacacccaggccaag

SEQ ID NO: 128411 - DNA, 120 bp, Artificial Sequence
  ENSG00000102048_7 (sequence is synthesized)
aatgctgaaggcaaacgtcctgtggagctggtgcctccagagagccccttggcccagctcttcttggagagagaagggcccccttctttgatgcagttatgccgccttagaattcggaag

SEQ ID NO: 128412 - DNA, 120 bp, Artificial Sequence
  ENSG00000102048_8 (sequence is synthesized)
tgttttggaatccagcagcatcataagataaccaaactcgtcctcccagaggatctgaaacagtttctcctacatctttaaatgcatctagggaatggattcacaaacgatgtgaaaaca

SEQ ID NO: 128413 - DNA, 120 bp, Artificial Sequence
  ENSG00000102048_9 (sequence is synthesized)
ttattgagtgttgtagccactagaattttaaaatcaagttggatttatagagtttgactagttttttcgattagatttgtatttgttataaacttgtttatggagtttgactaatttttt

SEQ ID NO: 128414 - DNA, 120 bp, Artificial Sequence
  ENSG00000102048_10 (sequence is synthesized)
ctattcaatttgtatttgttaaactcaagccagggttgaaagacactgcatacgtttgtattattagttagaaggcatgaagacttttttccctgcatggagagtgtcataagttattgt

SEQ ID NO: 128415 - DNA, 120 bp, Artificial Sequence
  ENSG00000102048_11 (sequence is synthesized)
tttgcatatctactgcatgccaagcactttctgcatcatctaatttagccctcacagccactgggtcaagatgtccaattttccagagtaaggatagaggagtcaaattcaaatacaggt

SEQ ID NO: 128416 - DNA, 120 bp, Artificial Sequence
  ENSG00000102048_12 (sequence is synthesized)
tttctgacattaacttatgtgatgacttgatcgaggcaggcttttccagcatcactgtcctggttccatctctgctatatgggaatgaaaataaagaaacatatttcttggcttgtctaa

SEQ ID NO: 128417 - DNA, 120 bp, Artificial Sequence
  ENSG00000102048_13 (sequence is synthesized)
tgtgcacaaaaaatattaataaagaagagaaatgctgaattcctgatgggaattttggttgagtgaatccaatgtctccctccatccagggcctgttaggctcttattgatgggcaagga

SEQ ID NO: 128418 - DNA, 120 bp, Artificial Sequence
  ENSG00000102048_14 (sequence is synthesized)
gtacagatggccagggcgtgctgtgcatgttactgtgcaagcaattcagcagggctgctgcaaaaccagctttctcagctctgggtgctcgggcttgtctccataacaagctaccatgta

SEQ ID NO: 128419 - DNA, 120 bp, Artificial Sequence
  ENSG00000102048_15 (sequence is synthesized)
acaaacggatctcagcagggtgaacaacagttgcagaaagtgagctgtttccttcacccccaccctgctcccttcactctcaaaagttacaaactgagtttccttcctgataaactccaa

SEQ ID NO: 128420 - DNA, 120 bp, Artificial Sequence
  ENSG00000102048_16 (sequence is synthesized)
ggcttcctcactgattggtctcagtttgggaaaggacgtgacatcagcaacttcgcagacttagggctggagggttcttgtggcctctggcgggcctccagccagttagaccatttgacc

SEQ ID NO: 128421 - DNA, 120 bp, Artificial Sequence
  ENSG00000102048_17 (sequence is synthesized)
cttcttggagagagaaggtgcttctttgccaaaacctaagccctaatctgttgacatcccttggggctctagtagaagggcccccttctttgatgcagttatgccgccttagaattcgga

SEQ ID NO: 128422 - DNA, 120 bp, Artificial Sequence
  ENSG00000102053_0 (sequence is synthesized)
catgtggattccaagcaggctaaaaagaaaaagaactgattagacctcagacgacccactaaacgggatgacggccacagctgaggtagagacaccaaaaatggagaagagtgcctccaa

SEQ ID NO: 128423 - DNA, 120 bp, Artificial Sequence
  ENSG00000102053_1 (sequence is synthesized)
ggaagagaagcagcagcctaagcaggacagcacagagcagggcaatgctgattctgaagagtggatgagctctgagagtgaccctgaacagataagccttaagagtagcgacaacagcaa

SEQ ID NO: 128424 - DNA, 120 bp, Artificial Sequence
  ENSG00000102053_2 (sequence is synthesized)
gagctgccaacctagggatggtcagttgaagaaaaaggagatgcactccaagccacaccgccagctctgtcgatcaccctgcctagatcgtccaagtttctcccagagcagcattttaca

SEQ ID NO: 128425 - DNA, 120 bp, Artificial Sequence
  ENSG00000102053_3 (sequence is synthesized)
ggatggtaaacttgacttggagaaggaataccaagctaagatggagtttgcgctaaagctgggctatgcagaggaacagattcaatcagtgctaaacaagctgggcccagaatcacttat

SEQ ID NO: 128426 - DNA, 120 bp, Artificial Sequence
  ENSG00000102053_4 (sequence is synthesized)
taatgatgtattggcagagcttgtcagacttgggaacaaaggtgattcagaagggcagatcaacttgagtctgttagtgcctcgtgggcccagctccagagagattgcaagccctgaatt

SEQ ID NO: 128427 - DNA, 120 bp, Artificial Sequence
  ENSG00000102053_5 (sequence is synthesized)
gtctcttgaagatgaaatagataacagtgacaatttgaggccagttgtcattgatggaagtaatgtggcaatgagccatgggaataaagaagaattctcctgcagaggaatacaacttgc

SEQ ID NO: 128428 - DNA, 120 bp, Artificial Sequence
  ENSG00000102053_6 (sequence is synthesized)
tgtggattggtttctagataaaggccataaagatattactgtatttgtgcctgcatggagaaaggagcaatcccgccctgatgcaccaattacagatcaagatattctacgaaaactgga

SEQ ID NO: 128429 - DNA, 120 bp, Artificial Sequence
  ENSG00000102053_7 (sequence is synthesized)
gaaggaaaagattcttgtcttcacaccatcccgaagagtccaaggcaggagggttgtctgctatgatgaccggttcatagtcaaactggcttttgattctgatggcatcattgtgtccaa

SEQ ID NO: 128430 - DNA, 120 bp, Artificial Sequence
  ENSG00000102053_8 (sequence is synthesized)
tgataactaccgagaccttcaagttgaaaagccagaatggaagaagtttatagaggagcggttgctgatgtattcttttgtgaatgacaaatttatgcctccagatgatccattaggacg

SEQ ID NO: 128431 - DNA, 120 bp, Artificial Sequence
  ENSG00000102053_9 (sequence is synthesized)
ccacggcccaagccttgaaaatttcttaagaaagagacccattgttcctgagcataagaagcaaccatgtccttatggcaaaaaatgcacctacggccacaagtgcaaatactaccatcc

SEQ ID NO: 128432 - DNA, 120 bp, Artificial Sequence
  ENSG00000102053_10 (sequence is synthesized)
ggagcgggccaaccaaccccagcgttcggtggctgatgagctccgcatcagtgccaaactgtccacagtgaaaactatgagtgaaggcaccctggccaagtgtggcacagggatgtctag

SEQ ID NO: 128433 - DNA, 120 bp, Artificial Sequence
  ENSG00000102053_11 (sequence is synthesized)
tgccaaaggtgagataacctcagaggtcaaacgtgtggcccccaagcgccaatcagatcccagcatccggtctgtggctatggagcctgaggaatggctgtccattgcccgtaagcctga

SEQ ID NO: 128434 - DNA, 120 bp, Artificial Sequence
  ENSG00000102053_12 (sequence is synthesized)
ggctagttctgtcccctcgcttgtgactgccctaagtgttcccacaatcccaccccccaaaagccatgcagtgggtgcactcaacacccgttcggccagcagcccagtgccaggatcctc

SEQ ID NO: 128435 - DNA, 120 bp, Artificial Sequence
  ENSG00000102053_13 (sequence is synthesized)
ccatttcccccaccagaaggcctctttggagcatatggccagcatgcagtatcctcccatcttggttaccaacagccatgggacccctattagctatgctgagcaatacccaaagtttga

SEQ ID NO: 128436 - DNA, 120 bp, Artificial Sequence
  ENSG00000102053_14 (sequence is synthesized)
atccatgggggaccatggctactattcaatgttaggtgacttctccaaactgaacatcaacagcatgcataaccgagagtattacatggctgaagtagaccggggggtgtatgcccggaa

SEQ ID NO: 128437 - DNA, 120 bp, Artificial Sequence
  ENSG00000102053_15 (sequence is synthesized)
tcctaacctctgttctgacagccgtgtgagccataccaggaatgacaactattcctcttacaacaacgtgtatttggctgtagctgatacccatcctgaaggcaatttgaagctgcaccg

SEQ ID NO: 128438 - DNA, 120 bp, Artificial Sequence
  ENSG00000102053_16 (sequence is synthesized)
ctcagcatcccagaaccgacttcagccttttcctcatggttaccatgaagccttaacacgagtgcagagctatggcccagaggattctaagcaaggcccccacaaacagtcagtccccca

SEQ ID NO: 128439 - DNA, 120 bp, Artificial Sequence
  ENSG00000102053_17 (sequence is synthesized)
cttagctctgcatgcccagcacccatcaactggaacacgttccagctgtcctgcagactaccccatgcctcccaatatccatcctggggcaaccccccagccaggccgtgccctggtgat

SEQ ID NO: 128440 - DNA, 120 bp, Artificial Sequence
  ENSG00000102053_18 (sequence is synthesized)
gactcggatggatagcatttccgactcccgcctctatgagagcaaccccgtgaggcaaagacgacctcccctgtgccgggaacagcatgccagctgggacccgctgccctgtacaactga

SEQ ID NO: 128441 - DNA, 120 bp, Artificial Sequence
  ENSG00000102053_19 (sequence is synthesized)
ctcctatggctaccactcctatcccttgagtaacagcctcatgcaaccatgttatgagccagtcatggtacggagcgtgcctgaaaagatggagcagctttggaggaatccttgggttgg

SEQ ID NO: 128442 - DNA, 120 bp, Artificial Sequence
  ENSG00000102053_20 (sequence is synthesized)
aatgtgcaatgattccagggagcatatgatcccagaacaccagtatcagacctacaagaacctctgcaatattttcccttctaacatcgtccttgcagtgatggagaagaatccccacac

SEQ ID NO: 128443 - DNA, 120 bp, Artificial Sequence
  ENSG00000102053_21 (sequence is synthesized)
agcagatgcccagcaactggcagccttgattgttgctaagcttagggctgcacgttgatatgacatagtacttatttctttatacaaatatgaatattaatactaataatacactaatac

SEQ ID NO: 128444 - DNA, 120 bp, Artificial Sequence
  ENSG00000102053_22 (sequence is synthesized)
aataattatagtaactaataatttgtgttgcgctttacaagttagagtgtttatatcatttaagcgcttaacaaccctgtgaggtacgtcttactaacatcctcttttatagagaaggaa

SEQ ID NO: 128445 - DNA, 120 bp, Artificial Sequence
  ENSG00000102053_23 (sequence is synthesized)
ggtgaaggtcagtgaaattaagtggctagccagggtcacactgctagcaaatgactaagtcaagacacacacccaagtcctctaaatccaagtcccatgcccctttgcactgcaccatgc

SEQ ID NO: 128446 - DNA, 120 bp, Artificial Sequence
  ENSG00000102053_24 (sequence is synthesized)
aggtaatggaggacaaaacccagggggagaggtctagatgtaagaaatcccagaggattccattaccagagttttcctttttctcttttcgtttctttctttctttctttattttttttt

SEQ ID NO: 128447 - DNA, 120 bp, Artificial Sequence
  ENSG00000102053_25 (sequence is synthesized)
caggtgtgagccactgcgcccagcctaccagagttttcgtagtcacatattctatattacaaagtatggatgatatatccaatttagagagcaaaagcatcaggatcagatcatatgttg

SEQ ID NO: 128448 - DNA, 120 bp, Artificial Sequence
  ENSG00000102053_26 (sequence is synthesized)
caggatcagatcatatgttgaattaaccttttaggttttttctaatagaaatatttaaagctatttaaaagtaaatgcatactttattgcatggatatctgatcactcaatctatattaa

SEQ ID NO: 128449 - DNA, 120 bp, Artificial Sequence
  ENSG00000102053_27 (sequence is synthesized)
tgaaactatagggtcacattgaagcttctagaactatattttaaagctattattagcaattatattgcatgtatgaatatatatatttggtttgagatgtgtgtgtatctctgtataacc

SEQ ID NO: 128450 - DNA, 120 bp, Artificial Sequence
  ENSG00000102053_28 (sequence is synthesized)
ataggtcactaatctgacttgatgattttaagtcacatttcatagttttaactagttatgagagagaaattatatggcaatatttgaacattgctttcttaggcaccagagcaaagcaac

SEQ ID NO: 128451 - DNA, 120 bp, Artificial Sequence
  ENSG00000102053_29 (sequence is synthesized)
tctgtttcctttgcacattttacctgccaacatttattaacagttcttaccttccaagtctcttcaccttagcaaattagggatcaggttgcagtcttctgcagagaaactgatggttaa

SEQ ID NO: 128452 - DNA, 120 bp, Artificial Sequence
  ENSG00000102053_30 (sequence is synthesized)
gctcaagttccaagcatagtatgtgtgtgctacacaagctcagaagagtttgacaaggaccaggggacttactaccacaatccacttcccttatcccaggagagatggccaaacccatgt

SEQ ID NO: 128453 - DNA, 120 bp, Artificial Sequence
  ENSG00000102053_31 (sequence is synthesized)
ggcattaaatggtgaataaaaaagcttcactcaaggagggactattggatgctctttggacttctgacctatgcagtattcaacatcattggatgaaatgtaatggaggacagtgcacag

SEQ ID NO: 128454 - DNA, 120 bp, Artificial Sequence
  ENSG00000102053_32 (sequence is synthesized)
ccatgtatccactttctcttcctgtccaccctttgggtaataaggtcaatcattggtggaacagaatttctctaggaaacaaaaccaggggattttatttgtggaaaaaggaagtttcca

SEQ ID NO: 128455 - DNA, 120 bp, Artificial Sequence
  ENSG00000102053_33 (sequence is synthesized)
aaaggggatactgcatctttactaatagctggctcagttactcactttaaatccatgcaaagagtgcacttgctgttaaataattgttaaatgagttattagaaggcaggacttttggtt

SEQ ID NO: 128456 - DNA, 120 bp, Artificial Sequence
  ENSG00000102053_34 (sequence is synthesized)
tgggcgacaccatttgcgcaacttgtatcttgctcagggtggaaaacttcatagctaaatgcctctagaagaggtgtttattgttttttttaagctgcactaaatgaattccctttttga

SEQ ID NO: 128457 - DNA, 120 bp, Artificial Sequence
  ENSG00000102053_35 (sequence is synthesized)
atccattgtatatttcaatatttcgaaccatgatcagctcactatttcctgagctggaacttgctaacttctatgatcgttttttcatgaaagttgagaaggccgggccttggccttttg

SEQ ID NO: 128458 - DNA, 120 bp, Artificial Sequence
  ENSG00000102053_36 (sequence is synthesized)
tttcttcatgagaaggtgtgacactgcctataaatgtttcttactgtgaaacactctgaatgtgaggctgtagtcagggttgtttctggtggtttgacaatggcttgcatgctgctttct

SEQ ID NO: 128459 - DNA, 120 bp, Artificial Sequence
  ENSG00000102053_37 (sequence is synthesized)
ggctttctgtctctgtccaagttgatcaatactgcatcttaaccaatgtttcacttgagttaaccacagctttacattctatctcctatcttctgatcttcgtataccccagcatattga

SEQ ID NO: 128460 - DNA, 120 bp, Artificial Sequence
  ENSG00000102053_38 (sequence is synthesized)
aaaagagtaaaagtattttctatcaatcaggtagatccacagagtgacagttgccactgcagtgcttgctatttcacacaaacaccatttcataccttcaacttcttggactttctaaat

SEQ ID NO: 128461 - DNA, 120 bp, Artificial Sequence
  ENSG00000102053_39 (sequence is synthesized)
cggactcgtgtctaaatcagggtatttgacaatctcagatgatgctactgcctatgtgccagttagttcatcttcctaccaagatcatgaatggcaccacactatccactagctgtacaa

SEQ ID NO: 128462 - DNA, 120 bp, Artificial Sequence
  ENSG00000102053_40 (sequence is synthesized)
tttacagagaagcacaagattcatcttgtcacctacaattcgtcttgaacatgttcatatttagtactcagaaactgtgtaagctcctcccaatacagaaaatattttttaaggcagcat

SEQ ID NO: 128463 - DNA, 120 bp, Artificial Sequence
  ENSG00000102053_41 (sequence is synthesized)
atgtatttctgatttactaaaaacgattgtcattctcctctcattcttctttttggtatgaaccaaaagcggctaggagcaatgcctcaaataaccagaaatgaccttttgttgatacaa

SEQ ID NO: 128464 - DNA, 120 bp, Artificial Sequence
  ENSG00000102053_42 (sequence is synthesized)
attgtatctctttttttcctgattgtatagaaacaaatgtacaaaactcatctgaagctaggtttggcactgaattttcaccatgaggtttgtggcactgtgtgtcacagggaagtagct

SEQ ID NO: 128465 - DNA, 120 bp, Artificial Sequence
  ENSG00000102053_43 (sequence is synthesized)
caggggttgtgagggagcttttatttctaaagggcagtagtaatttatagacaaaaacaatttttcaaggcctctttattaccactgcacagctatcatgtgtaaaatttcaagcattat

SEQ ID NO: 128466 - DNA, 120 bp, Artificial Sequence
  ENSG00000102053_44 (sequence is synthesized)
attgcataagttctctttagcctattaaatttaatatgtccttgcaaaagggattttgtgtaaaaagtgtcagtgttagtgactcatctgcaagaatctacaaatggagctatacaacta

SEQ ID NO: 128467 - DNA, 120 bp, Artificial Sequence
  ENSG00000102053_45 (sequence is synthesized)
tgaatacataaatacagcatggttcctagttattagagaaacattttctttatattgaggtctacgcacttcttgactttccattttgtctgtaattataaaacagcaaataacaaagaa

SEQ ID NO: 128468 - DNA, 120 bp, Artificial Sequence
  ENSG00000102053_46 (sequence is synthesized)
gcattgggaccccctcggctgccttgataataaaatcaagcttccttcatgggactaagcatgtgtccttcaggatacttacctctaagcactcagcaggggttactacaaagcgttttg

SEQ ID NO: 128469 - DNA, 120 bp, Artificial Sequence
  ENSG00000102053_47 (sequence is synthesized)
tgtggttttcaaaaaacagtgtattttgcaagaggtgctttgtaattttaattatttcactgattttctgacctcataggaagtctgtgcctgttgaggccttcaattttgtagcttttc

SEQ ID NO: 128470 - DNA, 120 bp, Artificial Sequence
  ENSG00000102053_48 (sequence is synthesized)
tgattttttttcttctttttgtgattttgttgttgttttcattttgatctaaaggagaagtgtgaccccggagtggcatggtcaatccagggcaccctttctgtaagacaactcaaagga

SEQ ID NO: 128471 - DNA, 120 bp, Artificial Sequence
  ENSG00000102053_49 (sequence is synthesized)
aaagaagccttttcaaaggtaatatcgagccattgcactctctcttaaggtgccaggtatgggagaatgacagatgccttatggaaatggtctacaaaacttttcttcttctaagtaata

SEQ ID NO: 128472 - DNA, 120 bp, Artificial Sequence
  ENSG00000102053_50 (sequence is synthesized)
aaacacatagcatgattctctctccctctctctctctctctctgcccaccccctgctagtttccaggagaatacttctctaaaattcatttttttctattttggaataaattatctttat

SEQ ID NO: 128473 - DNA, 120 bp, Artificial Sequence
  ENSG00000102053_51 (sequence is synthesized)
acagtaattcaaacactgatttccattaacctttggccctgagttttcttctaacatagaagagttcattttgagaggcactcagttaccattcaatctgtgctgtaagtatgggacttt

SEQ ID NO: 128474 - DNA, 120 bp, Artificial Sequence
  ENSG00000102053_52 (sequence is synthesized)
gtacaaatgccctttttgagggccaaaaatttcaatacactttgttctactttgtgaaccaggtctggatctgcacagagaaagtaatgctgagctgtccaaagagtccgctcaggtctc

SEQ ID NO: 128475 - DNA, 120 bp, Artificial Sequence
  ENSG00000102053_53 (sequence is synthesized)
cctcctaaccctcctctgccttcccctagtttgcttatcctcacgtctgacactgaggagtgcatagtcttcaactgaaatggcactacagttagttctcattggaaacaaacaagtgta

SEQ ID NO: 128476 - DNA, 120 bp, Artificial Sequence
  ENSG00000102053_54 (sequence is synthesized)
tttctggaacctgctcgtctaaaatagtcaatgcctttgtaaagactcagcatattcaatatctattgtatggtagctagctatatacatagattgactatttttagtcctggtttgtgt

SEQ ID NO: 128477 - DNA, 120 bp, Artificial Sequence
  ENSG00000102053_55 (sequence is synthesized)
attgttgagctatagtagtttgctttatccatttgtgggattaaacaatactgtttaatggttgtaaacttttataaaatctctttgggttttttgtttgacccaaacataatgtaagtc

SEQ ID NO: 128478 - DNA, 120 bp, Artificial Sequence
  ENSG00000102053_56 (sequence is synthesized)
ttaatgacaaaatacacaaagttaaccagaggtgagtgaaaatatagcccttccccagttttgtctgcccctataatgcacgtgcattgctttgtaatatgctctcgctagcatgaatgt

SEQ ID NO: 128479 - DNA, 120 bp, Artificial Sequence
  ENSG00000102053_57 (sequence is synthesized)
gctatgactacttcatgaggttttgtttcacctataattgtgatggaaaatgctgtattgctgacaacaatgaactgtaaccacagttatttactgcataaactatttgtgtactaacca

SEQ ID NO: 128480 - DNA, 120 bp, Artificial Sequence
  ENSG00000102053_58 (sequence is synthesized)
gaaatagactaaatagccaagttgcaagataccactgcttcttttaagagtgatgggtttcccaggtgatacttgaaagaagagataacgaccacctatctccttcatcctggttacaca

SEQ ID NO: 128481 - DNA, 120 bp, Artificial Sequence
  ENSG00000102053_59 (sequence is synthesized)
ggaaggctatggactccttttggcatttctgcctcagcaacagaggataaaagtcatgttgtgatggataagtcacaaaagtaaaaaatacagacgtggactacaggcctccaaagaaga

SEQ ID NO: 128482 - DNA, 120 bp, Artificial Sequence
  ENSG00000102053_60 (sequence is synthesized)
attgagcatgctgaggatcgatgccagacattggacatttttgaggtgttaagagatgtgcatgcttccaacattgtgaagatgtgtgtgctttccagtcaccttccaccatgactgtaa

SEQ ID NO: 128483 - DNA, 120 bp, Artificial Sequence
  ENSG00000102053_61 (sequence is synthesized)
gttttctgaggctgcccagtcatgcttcctgttaagcctgcagaactggactgataacatctgaacataccaaaccacacagtcaaactcttgcaccatcgctaccacgacattttacta

SEQ ID NO: 128484 - DNA, 120 bp, Artificial Sequence
  ENSG00000102054_0 (sequence is synthesized)
ggtctcggcgccggagccgttggctcccagacccgcctctccgcctcctctcacttttcccagggcggatgcgcctgcgctcagctgcctgggcgggctgggaggcgcgggttgaaaagt

SEQ ID NO: 128485 - DNA, 120 bp, Artificial Sequence
  ENSG00000102054_1 (sequence is synthesized)
ctcgttccaagtttggagagagagagaagagcgcctcagacctcggtacccgcgagcggggaggaggcaggaaagaaggacgcggcgtctggggagcacccaggcagcaagacggggccc

SEQ ID NO: 128486 - DNA, 120 bp, Artificial Sequence
  ENSG00000102054_2 (sequence is synthesized)
gggctttcgacagtggggagtgtgacgcgcttgggaaaggcaggagcgccagcggtcgggctgctcttggctaacgagaggagtccgaggcggcggcgaggggcgaacgacccgacgcaa

SEQ ID NO: 128487 - DNA, 120 bp, Artificial Sequence
  ENSG00000102054_3 (sequence is synthesized)
gatggcgagtaaagagatgtttgaagatactgtggaggagcgtgtcatcaatgaagaatataaaatctggaagaagaatacaccgtttctatatgacctggttatgacccatgctcttca

SEQ ID NO: 128488 - DNA, 120 bp, Artificial Sequence
  ENSG00000102054_4 (sequence is synthesized)
gtggcccagtcttaccgttcagtggcttcctgaagtgactaaacctgaaggaaaagattatgcccttcattggctagtgctggggactcatacgtctgatgagcagaatcatctggtggt

SEQ ID NO: 128489 - DNA, 120 bp, Artificial Sequence
  ENSG00000102054_5 (sequence is synthesized)
tgctcgagtacatattcccaatgatgatgcacagtttgatgcttcccattgtgacagtgacaagggtgaatttggtggctttggttctgtaacaggaaaaattgaatgtgaaattaaaat

SEQ ID NO: 128490 - DNA, 120 bp, Artificial Sequence
  ENSG00000102054_6 (sequence is synthesized)
caatcacgaaggagaagtaaaccgtgctcgttacatgccgcagaatcctcacatcattgctacaaaaacaccatcttctgatgtgttggtttttgactatacaaaacaccctgctaaacc

SEQ ID NO: 128491 - DNA, 120 bp, Artificial Sequence
  ENSG00000102054_7 (sequence is synthesized)
agacccaagtggagaatgtaatcctgatctcagattaagaggtcaccagaaggaaggctatggtctctcctggaattcaaatttgagtggacatctcctaagtgcatctgatgaccatac

SEQ ID NO: 128492 - DNA, 120 bp, Artificial Sequence
  ENSG00000102054_8 (sequence is synthesized)
tgtttgtctgtgggatataaacgcaggaccaaaagaaggcaaaattgtggatgctaaagccatctttactggccactcagctgttgtagaggatgtggcctggcacctgctgcacgagtc

SEQ ID NO: 128493 - DNA, 120 bp, Artificial Sequence
  ENSG00000102054_9 (sequence is synthesized)
ccaataccacctccaagccgagtcacttggtggatgcgcacactgccgaagtcaactgcctctcattcaatccctacagcgaatttattctagccaccggctctgcggataagaccgtag

SEQ ID NO: 128494 - DNA, 120 bp, Artificial Sequence
  ENSG00000102054_10 (sequence is synthesized)
ctttatgggatctgcgtaacttaaaattaaaactccataccttcgaatctcataaagatgaaattttccaggtccactggtctccacataatgaaactattctggcttcaagtggtactg

SEQ ID NO: 128495 - DNA, 120 bp, Artificial Sequence
  ENSG00000102054_11 (sequence is synthesized)
accgccgcctgaatgtgtgggatttaagtaaaattggggaagaacaatcagcagaagatgcagaagatgggcctccagaactcctgtttattcatggaggacacactgctaagatttcag

SEQ ID NO: 128496 - DNA, 120 bp, Artificial Sequence
  ENSG00000102054_12 (sequence is synthesized)
attttagctggaaccccaatgagccttgggtcatttgctcagtgtctgaggataacatcatgcagatatggcaaatggctgaaaatatttacaatgatgaagagtcagatgtcacgacat

SEQ ID NO: 128497 - DNA, 120 bp, Artificial Sequence
  ENSG00000102054_13 (sequence is synthesized)
ccgaactggagggacaaggatcttaaacccaaagtacgagaaatgtttctgttgaatgtaatgctacatgaatgcttgatttatcaagcgccaaaaaggcattgtatagtaggaaatgta

SEQ ID NO: 128498 - DNA, 120 bp, Artificial Sequence
  ENSG00000102054_14 (sequence is synthesized)
agtggggtggcttatggcttctttatcctctgattctagcactttcaagtgagctgttgcgtactgtatcatattgtagctattagggaagagaagaatgttgcttaagaaagaacatca

SEQ ID NO: 128499 - DNA, 120 bp, Artificial Sequence
  ENSG00000102054_15 (sequence is synthesized)
ccattgattttaaatacaagtagcagggtattgcctttgattcaactgttttaagtcctcattttctcaaactaagtgcttgctgttcccaaatatgcaagaataacttttacacttttt

SEQ ID NO: 128500 - DNA, 120 bp, Artificial Sequence
  ENSG00000102054_16 (sequence is synthesized)
ccttccaacacttcttgattggctttgcagaaataaagttttaaaataaaacttgtgtttttttaaaagcttagtgggggggggcgggggagtctactttttgagtagaaatgggtaaaa

SEQ ID NO: 128501 - DNA, 120 bp, Artificial Sequence
  ENSG00000102054_17 (sequence is synthesized)
tggtacctttggactcctacagttaaggtcacatggataatgaaagaatacacagaagctgttaagtttatcatacatatttacttaatctatacagaatcaagtagataaaatcagatt

SEQ ID NO: 128502 - DNA, 120 bp, Artificial Sequence
  ENSG00000102054_18 (sequence is synthesized)
cacattagtgaaaaatctctacaaaatgtctttgaaaagcaaaacgagactgcctcttaacaattcgtatcctcatgaaagacgtgggctgtaaaaataaagcagtgtgtttagcacaaa

SEQ ID NO: 128503 - DNA, 120 bp, Artificial Sequence
  ENSG00000102054_19 (sequence is synthesized)
gacgcaagatggcgatgtttgaagatactgtggaggagcgtgtcatcaatgaagaatataaaatctggaagaagaatacaccgtttctatatgacctggttatgacccatgctcttcagt

SEQ ID NO: 128504 - DNA, 120 bp, Artificial Sequence
  ENSG00000102054_20 (sequence is synthesized)
gtcagaacttcgaattctagctcttgcagatggtttcaaaatggaggccctgaaggttattgcaactgggctttgacatttatcaaaaatagtaaatggagcccagtaggtttttatgaa

SEQ ID NO: 128505 - DNA, 120 bp, Artificial Sequence
  ENSG00000102054_21 (sequence is synthesized)
tgtttcactgagaatggtttgaggtcctggaaaatagtatatagtaatttctcactgatttcaactctggtatttgtgatggtttggggatggggagtgagtataattgctattcagttg

SEQ ID NO: 128506 - DNA, 120 bp, Artificial Sequence
  ENSG00000102054_22 (sequence is synthesized)
gcagtacttaacatttcctaacagtatagaaaaaattttaaatgctttttaagtttcctgcccagaaaaggagtgctttctcaatcttgatgttagcagagcccactatctccctcccat

SEQ ID NO: 128507 - DNA, 120 bp, Artificial Sequence
  ENSG00000102054_23 (sequence is synthesized)
gcctgattgaagcatcacgcatctccttggccctttgaaagcttatgtggtggtatctgcccatcctcattcttcccgtctgagtccttcagtgctcacttcgtcatttttctatgaagc

SEQ ID NO: 128508 - DNA, 120 bp, Artificial Sequence
  ENSG00000102054_24 (sequence is synthesized)
attgccggatttagcaatggttccctgtccttgctctgaatccaacatttgtctcctcccattatttggccgatagtcactcatcactctgtcatttacgattttagttctaatgccagt

SEQ ID NO: 128509 - DNA, 120 bp, Artificial Sequence
  ENSG00000102054_25 (sequence is synthesized)
actcatttttggcacacttgtactttgtccatgagttttatttattcattttttctgtgaacctatggagtatattgaatgtccacaagttttcaaaggtaaagaaggtccttgagagca

SEQ ID NO: 128510 - DNA, 120 bp, Artificial Sequence
  ENSG00000102054_26 (sequence is synthesized)
agccctgcacacagaagatgttcactaagcccaccttgtaagaatgctccagacccttttattttgatgacggctttactgagatataatttacataccacacagttcacttctttaaag

SEQ ID NO: 128511 - DNA, 120 bp, Artificial Sequence
  ENSG00000102054_27 (sequence is synthesized)
tgtacagttcagtggggagggagtgttcttgggttttgggggttttttttctttttttgttcttgaagtcagtggtttttagtatattcatagacttgtaaaactatcaccacaaatcaa

SEQ ID NO: 128512 - DNA, 120 bp, Artificial Sequence
  ENSG00000102054_28 (sequence is synthesized)
ttctagaacattattcatcccctccaaaagaaactatagctatcacctcccaattctcttcttcctccagcccttggcaactactgtgctactttctggcactataagattgggctattc

SEQ ID NO: 128513 - DNA, 120 bp, Artificial Sequence
  ENSG00000102054_29 (sequence is synthesized)
tagatatttcatataaatatgacttttgtcttttgggactgattctttcacatagtacaatgttttcaaggtctccagctattttttttagggagaaaggaaagcgtattactttgtata

SEQ ID NO: 128514 - DNA, 120 bp, Artificial Sequence
  ENSG00000102054_30 (sequence is synthesized)
ttatgcctctgcaacaattccaaggtccttgagaaaatacactaggattttgctttttacaagagagcttgaaatcaagggacatttgagagtagtaaactgggcctgggcatggtggct

SEQ ID NO: 128515 - DNA, 120 bp, Artificial Sequence
  ENSG00000102054_31 (sequence is synthesized)
ggaggccaaggcaggtggatcacgtgagcccacaagttcaagaccaggctgggaaacatggcaaaaccctgtcctgtctctaccaaaaaaaaaaaaaaatacataaattagccaggtgtg

SEQ ID NO: 128516 - DNA, 120 bp, Artificial Sequence
  ENSG00000102054_32 (sequence is synthesized)
actgcactccagcctgggcaatgggagtgagaccctgtcccaaaaacaaagtagtaaactattccaccagtatgctttgataactcctgtatgttttctaagccccagtgatcttaaaat

SEQ ID NO: 128517 - DNA, 120 bp, Artificial Sequence
  ENSG00000102054_33 (sequence is synthesized)
tgagccaccacacccggccagtatattcacttgtgtaccccttaagagtactttaaaaagctatttacctcttttttttttaagtcaaggtctggttctgtcacccaggctggagtgcag

SEQ ID NO: 128518 - DNA, 78 bp, Artificial Sequence
  ENSG00000102054_34 (sequence is synthesized)
cctccacctcccaggttcaagctgaccccaccacgcccggctaattttcgtattttttgtagagacggggttttgtca

SEQ ID NO: 128519 - DNA, 82 bp, Artificial Sequence
  ENSG00000102054_35 (sequence is synthesized)
ttacccagccccacctcatatttttaacccgataagattattcggtaaaatagatacattgcataatacctagttggcaggc

SEQ ID NO: 128520 - DNA, 120 bp, Artificial Sequence
  ENSG00000102054_36 (sequence is synthesized)
cggtaaaatagatacattgcataatacctagttggcaggcagagacctcattgtcaaactagagtcaaatcagactttgtcagaaagtgtgatgtcccagttccaaacagtgtatttagt

SEQ ID NO: 128521 - DNA, 120 bp, Artificial Sequence
  ENSG00000102054_37 (sequence is synthesized)
actgtccttgtgaagaagtgtttcgtttaaatcttaattctaagataaaaaaataaggcatagtgcattccgacgaggttgtctcttgcggggaacaactgctctcttcagaattgttta

SEQ ID NO: 128522 - DNA, 120 bp, Artificial Sequence
  ENSG00000102054_38 (sequence is synthesized)
gcaaagctctcaccttaggcatagcttatgagggactatctggagctatgcttttggagccagggattttctttcaccctggtgctgtctgtgtacgttggaaagatgggcaagaagtat

SEQ ID NO: 128523 - DNA, 120 bp, Artificial Sequence
  ENSG00000102054_39 (sequence is synthesized)
gcctctctcagtaaagtggagaggggaagaaccagaagactcctcaggccccttgtataatagaagagtatgttacatggcatataacggattgattaccttagatgtttgcacctaact

SEQ ID NO: 128524 - DNA, 120 bp, Artificial Sequence
  ENSG00000102054_40 (sequence is synthesized)
gtatatgagcaaatgatgctggattaatgttcatcataatcagtatggaaatggcattttgactaggaaaatgtcctcattcttaagggatgcaggctgaagtcttcagccatttcattg

SEQ ID NO: 128525 - DNA, 120 bp, Artificial Sequence
  ENSG00000102054_41 (sequence is synthesized)
tataggctcatggataaagcatcagttatgctagtatcacttggtgaatctaggtaaagggtatacaggtatccattgtactatattctgtcacctattctggaggtttggaaatttgca

SEQ ID NO: 128526 - DNA, 120 bp, Artificial Sequence
  ENSG00000102054_42 (sequence is synthesized)
aaataagtataaatagattactgagcctgtaccaccttctaaaaccagacagcacccacccccagttgaaatactgatagctctaaaaacttagtaaaacctttgttaggattaacagga

SEQ ID NO: 128527 - DNA, 80 bp, Artificial Sequence
  ENSG00000102054_43 (sequence is synthesized)
ggagccgggcgcggggccgagggctgggcccccctcttcccttccctcctccagcggctgcgctccctccggcgccctcg

SEQ ID NO: 128528 - DNA, 120 bp, Artificial Sequence
  ENSG00000102054_44 (sequence is synthesized)
gcggaggcggcccccgccgctgggaagcgagcgccgcggctctttctacgcgcgcgcgcgcgttgaccgcctcggggtcgcggcccttgtccgggggttgctggggtcctcaggcctatg

SEQ ID NO: 128529 - DNA, 120 bp, Artificial Sequence
  ENSG00000102054_45 (sequence is synthesized)
ggcctatggctgccgaggcgggcgtcgtgggagctggggcctcccctgatggggattggagagaccaggcctgtgggcttctgctacacgtgcatttgtcttcccgactgggtcgcgcag

SEQ ID NO: 128530 - DNA, 120 bp, Artificial Sequence
  ENSG00000102054_46 (sequence is synthesized)
aaaaaatgtcttgtacgtggtgttacatggagatgctcatagggtccactggtctccacataatgaaactattctggcttcaagtggtactgaccgccgcctgaatgtgtgggatttaag

SEQ ID NO: 128531 - DNA, 120 bp, Artificial Sequence
  ENSG00000102054_47 (sequence is synthesized)
cttaaacccaaaattcttgggaggacagcgatcttcagccccacaagacattaagaactgacactccaccacaacctccaagaacacatcagtttcagaactcaaggcagcatgattcag

SEQ ID NO: 128532 - DNA, 120 bp, Artificial Sequence
  ENSG00000102054_48 (sequence is synthesized)
ttgcagagcacttgaaagtcggggacaagagagtgaggccatcaggccaaggataagataatagagtgcaagatgggaaaatatcagattagaacaacagccacaaacctagcagcggat

SEQ ID NO: 128533 - DNA, 120 bp, Artificial Sequence
  ENSG00000102054_49 (sequence is synthesized)
gtgattgctgcaggctgtagtttgattttttttttttaagttatggctttaaaaaacagctttaggtagcttactcctgtaatctcaataccttgggaagctgaggcaggaggattgctt

SEQ ID NO: 128534 - DNA, 75 bp, Artificial Sequence
  ENSG00000102054_50 (sequence is synthesized)
ctgaggcaggaggattgcttgagaccaggagtgtgagactctacacaaaatttaaaaacaaaaaattagttgggt

SEQ ID NO: 128535 - DNA, 120 bp, Artificial Sequence
  ENSG00000102054_51 (sequence is synthesized)
atcaaggtgtggccacagggcttcattcacttataatcttataaagaaatacctgaggcaaatgtgacaaaatactgggcatttgtcaaaactagttttaggtatcagattgtgacatta

SEQ ID NO: 128536 - DNA, 120 bp, Artificial Sequence
  ENSG00000102054_52 (sequence is synthesized)
ttctctacatagtctgtattttgtgtacacttgaaatagttggtaattaaaataggaatctaatttaaaaaacaggactaacagccctagcttgttctctgtaggtttcgaatgtatcat

SEQ ID NO: 128537 - DNA, 120 bp, Artificial Sequence
  ENSG00000102054_53 (sequence is synthesized)
ttagtggtcgaggtctgaatcaccagctgtgtggttggtttcttcatgaaggggagcacatagtggagctagttgtggagtgcagtgacagtgatgtgaggccgaatgtgagtgtgtcat

SEQ ID NO: 128538 - DNA, 120 bp, Artificial Sequence
  ENSG00000102054_54 (sequence is synthesized)
aggtaaagcatagaaatcattttcacttgttatttttctttagaccgtagctttatgggatctgcgtaacttaaaattaaaactccataccttcgaatctcataaagatgaaattttcca

SEQ ID NO: 128539 - DNA, 120 bp, Artificial Sequence
  ENSG00000102055_0 (sequence is synthesized)
acagaccgccctgcagtttcagactggagggcggtggacggctactcagcggcccaactctctcgcagcccttctctccgcaaaatgtcagcctccacctcctcgcaccggcccatcaag

SEQ ID NO: 128540 - DNA, 120 bp, Artificial Sequence
  ENSG00000102055_1 (sequence is synthesized)
gggatcctgaaaaacaaaagctcgtcgggttcctcggtggcgacttccggtcagcagtctggagggactattcaagatgtgaagagaaagaaatcccaaaagtgggacgaatcaagcatc

SEQ ID NO: 128541 - DNA, 120 bp, Artificial Sequence
  ENSG00000102055_2 (sequence is synthesized)
cttgcggcacaccgcgcaacgtacagagattacgatttaatgaaggcaaatgagcccggcacttcctacatgagtgtgcaagataatggggaagattcagtgcgcgatgtcgaaggagaa

SEQ ID NO: 128542 - DNA, 120 bp, Artificial Sequence
  ENSG00000102055_3 (sequence is synthesized)
agtgaggcctacatgagaaaaatcctcctccacaaacaggagaaaaagcggcagttcgaaatgagaagaaggcttcactacaacgaagaattgaacatcaaattagctagacaattaatg

SEQ ID NO: 128543 - DNA, 120 bp, Artificial Sequence
  ENSG00000102055_4 (sequence is synthesized)
tggaaagagctacaaagtgaagataatgaaaacgaagaaacgccacaaggcacgaacgaagagaagactgctgcggaagaatcagaggaagctcctctgaccggtggactgcaaacccag

SEQ ID NO: 128544 - DNA, 120 bp, Artificial Sequence
  ENSG00000102055_5 (sequence is synthesized)
tcatgcgacccttagaagatgcctgcttcacccttgcaattgtttgtgaatatgtgacgcttagaagatatctgcttcacccttgcaattgtttgtgaaatacaaaccttgttactgtaa

SEQ ID NO: 128545 - DNA, 120 bp, Artificial Sequence
  ENSG00000102057_0 (sequence is synthesized)
agaggaggaggagaactcaggcagctctgcagagggggccaggagctcgggtgtttggtacccccagccccaccgctgttgctgctcctgcagcggggacacaggtgaggacgccccgag

SEQ ID NO: 128546 - DNA, 120 bp, Artificial Sequence
  ENSG00000102057_1 (sequence is synthesized)
agagagggggagggggaccaccactagcgctgtcctcatccttccctggtccagcccccacgccctaacccatcctgggatagtccccaggggtcccactggaccttgcccttcccaggc

SEQ ID NO: 128547 - DNA, 120 bp, Artificial Sequence
  ENSG00000102057_2 (sequence is synthesized)
ctccttccagggaccccgcaccctccccctgcctatgccaccttctctcctatgcctggctgtggttgcttctcttcctcctgctgccgctgctgctactgccactgcccagtacacacc

SEQ ID NO: 128548 - DNA, 120 bp, Artificial Sequence
  ENSG00000102057_3 (sequence is synthesized)
gccagcccctcggggtgtggtttccccagacctgcccccaacggtgggacccagccttctcccggcgtctcctgccagcttcctgcaaagcccaggagcccccctccctggagacacacc

SEQ ID NO: 128549 - DNA, 120 bp, Artificial Sequence
  ENSG00000102057_4 (sequence is synthesized)
caactccctttcaacaccccacccccctcttaatcccattttggggttaacccccttcctcttatttagtcttcatagatcccctgggtgctctgggattgtgcccaacttcctaacatt

SEQ ID NO: 128550 - DNA, 120 bp, Artificial Sequence
  ENSG00000102057_5 (sequence is synthesized)
tgagtcccggcccttggaattccccaggcccctttttcctccctgtagaactcctgagagtgtcgaccaggctttgttggcccgtctagatacccacctcccccagataactctcagcct

SEQ ID NO: 128551 - DNA, 120 bp, Artificial Sequence
  ENSG00000102057_6 (sequence is synthesized)
ctcaaaaaataacccagccccctgtctacccctttagataaccccttcccctctccagccctactaggaggctctggcctctcctttcttccccagaactcctgtagagtatagacaccc

SEQ ID NO: 128552 - DNA, 120 bp, Artificial Sequence
  ENSG00000102057_7 (sequence is synthesized)
ccccgggctattcttggcaactctaggcagtcccaagacacctttcagcctctttacaacctcctggatccacagccacccctcaagatgcaccagctccctttccagatccatgagggg

SEQ ID NO: 128553 - DNA, 120 bp, Artificial Sequence
  ENSG00000102057_8 (sequence is synthesized)
ggtctaaccctcttatgcttcccctagaagtcttgagggtgtggacaaccctcctcacctgtctcagcccctctagaacccccacttccaggcactctcagtctctttcaagcacctctg

SEQ ID NO: 128554 - DNA, 120 bp, Artificial Sequence
  ENSG00000102057_9 (sequence is synthesized)
gtcccatttctacccctctggatgccccagtctcctctccaccactgcaaaggaattccaggctcttctgccttccctgagactcttgagagtgcagagaattccccacgtgtttcttgg

SEQ ID NO: 128555 - DNA, 120 bp, Artificial Sequence
  ENSG00000102057_10 (sequence is synthesized)
cccctctagacgcccccagacacctctcaggcacaggctgactcctttagaatcatctcagtctctctaaaccctccctcagctccttcttggccccatccccacaccccttttctgctc

SEQ ID NO: 128556 - DNA, 120 bp, Artificial Sequence
  ENSG00000102057_11 (sequence is synthesized)
ttctccatgtccccaaggcccttctcagtccctcagaacattgcccaggcccctcctaggttctgtaaatgtcccccagactccttcccatctctttagttcttcctcctggttcctctt

SEQ ID NO: 128557 - DNA, 120 bp, Artificial Sequence
  ENSG00000102057_12 (sequence is synthesized)
ggcctctctagacacccccagtttccttgtttgggtggctcaaggtgtctccaagcccccaccatcctggagacagccacattctcctaaacgccaccctcactaagtctccctgggctt

SEQ ID NO: 128558 - DNA, 120 bp, Artificial Sequence
  ENSG00000102057_13 (sequence is synthesized)
ggggagtggcacgatggcggcaggcctggccacgtggctgccttttgctcgggcagcagcagtgggctggctgcccctggcccagcaacccctgcccccggcaccgggggtgaaggcatc

SEQ ID NO: 128559 - DNA, 120 bp, Artificial Sequence
  ENSG00000102057_14 (sequence is synthesized)
tcgaggagatgaggttctggtggtgaacgtgagcggacggcgctttgagacttggaagaatacgctggaccgctacccagacaccttgctgggcagctcggagaaggaattcttctacga

SEQ ID NO: 128560 - DNA, 120 bp, Artificial Sequence
  ENSG00000102057_15 (sequence is synthesized)
tgctgactcaggcgagtacttcttcgatcgcgaccctgacatgttccgccatgtgctgaacttctaccgaacggggcggctgcattgcccacggcaggagtgcatccaggccttcgacga

SEQ ID NO: 128561 - DNA, 120 bp, Artificial Sequence
  ENSG00000102057_16 (sequence is synthesized)
agagctggctttctacggcctggttcccgagctagtcggtgactgctgccttgaagagtatcgggaccgaaagaaggagaatgccgagcgcctggcagaggatgaggaggcagagcaggc

SEQ ID NO: 128562 - DNA, 120 bp, Artificial Sequence
  ENSG00000102057_17 (sequence is synthesized)
cggggacggcccagccctgccagcaggcagctccctgcggcagcggctctggcgggccttcgagaatccacacacgagcaccgcagccctcgttttctactatgtgaccggcttcttcat

SEQ ID NO: 128563 - DNA, 120 bp, Artificial Sequence
  ENSG00000102057_18 (sequence is synthesized)
cgccgtgtcggtcatcgccaatgtggtggagaccatcccatgccgcggctctgcacgcaggtcctcaagggagcagccctgtggcgaacgcttcccacaggcctttttctgcatggacac

SEQ ID NO: 128564 - DNA, 120 bp, Artificial Sequence
  ENSG00000102057_19 (sequence is synthesized)
ggctgtttgccgcccccagccgttgccgcttcctgcggagtgtcatgagcctcatcgacgtggtggccatcctgccctactacattgggcttttggtgcccaagaacgacgatgtctctg

SEQ ID NO: 128565 - DNA, 120 bp, Artificial Sequence
  ENSG00000102057_20 (sequence is synthesized)
gcgcctttgtcaccctgcgtgtgttccgggtgtttcgcatcttcaagttctccaggcactcacagggcttgaggattctgggctacacactcaagagctgtgcctctgagctgggctttc

SEQ ID NO: 128566 - DNA, 120 bp, Artificial Sequence
  ENSG00000102057_21 (sequence is synthesized)
tcctcttttccctaaccatggccatcatcatctttgccactgtcatgttttatgctgagaagggcacaaacaagaccaactttacaagcatccctgcggccttctggtataccattgtca

SEQ ID NO: 128567 - DNA, 120 bp, Artificial Sequence
  ENSG00000102057_22 (sequence is synthesized)
ccatgaccacgcttggctacggagacatggtgcccagcaccattgctggcaagattttcgggtccatctgctcactcagtggcgtcttggtcattgccctgcctgtgccagtcattgtgt

SEQ ID NO: 128568 - DNA, 120 bp, Artificial Sequence
  ENSG00000102057_23 (sequence is synthesized)
ccaactttagccgcatctaccaccagaaccagcgggctgacaagcgccgagcacagcagaaggtgcgcttggcaaggatccgattggcaaagagtggtaccaccaatgccttcctgcagt

SEQ ID NO: 128569 - DNA, 120 bp, Artificial Sequence
  ENSG00000102057_24 (sequence is synthesized)
acaagcagaatgggggccttgaggacagcggcagtggcgaggaacaggctctttgtgtcaggaaccgttctgcctttgaacagcaacatcaccacttgctgcactgtctagagaagacaa

SEQ ID NO: 128570 - DNA, 120 bp, Artificial Sequence
  ENSG00000102057_25 (sequence is synthesized)
cgtgccatgagttcacagatgagctcaccttcagtgaagccctgggagccgtctcgccgggtggccgcaccagccgtagcacctctgtgtcttcccagccagtgggacccggaagcctgc

SEQ ID NO: 128571 - DNA, 120 bp, Artificial Sequence
  ENSG00000102057_26 (sequence is synthesized)
tgtcttcttgctgccctcgcagggccaagcgccgcgccatccgccttgccaactccactgcctcagtcagccgtggcagcatgcaggagctggacatgctggcagggctgcgcaggagcc

SEQ ID NO: 128572 - DNA, 120 bp, Artificial Sequence
  ENSG00000102057_27 (sequence is synthesized)
atgcccctcagagccgttccagcctcaatgccaagccccatgacagccttgacctgaactgcgacagccgggacttcgtggctgccattatcagcatccctacccctcctgccaacaccc

SEQ ID NO: 128573 - DNA, 120 bp, Artificial Sequence
  ENSG00000102057_28 (sequence is synthesized)
cagatgagagccaaccttcctcccctggcggcggtggcagggccggcagcaccctcaggaactccagcctgggtaccccttgcctcttccccgagactgtcaagatctcatccctgtgag

SEQ ID NO: 128574 - DNA, 120 bp, Artificial Sequence
  ENSG00000102057_29 (sequence is synthesized)
gggtaggcctgctgattcagagggtcctcttcatttttgggaactcctttccaaagccatatttttgggaggcagagaggggcaggcttgggcaccccttctgccccccccactgagaac

SEQ ID NO: 128575 - DNA, 120 bp, Artificial Sequence
  ENSG00000102057_30 (sequence is synthesized)
tatgcaatggagtttcatgaaatggtccacatagtggggaagtagccaggaaatgagaaacttcctcccaccccagacatttttcctggtgggagctgaagcactgggcttccacaggcc

SEQ ID NO: 128576 - DNA, 120 bp, Artificial Sequence
  ENSG00000102057_31 (sequence is synthesized)
cctggcctccttgccctagcacactgggactggccccactctcccagctggactcctgcatgctcctccccttgggctctcagatgaaggcaaagctttgatccgacatctgagctctag

SEQ ID NO: 128577 - DNA, 120 bp, Artificial Sequence
  ENSG00000102057_32 (sequence is synthesized)
cctaagaaggagagttgagatttcctcctccctctggctgggatatggagctttggaggttcagagaagagaaccctcacctctgatctggcctctacgagaggtcctcatctccatctg

SEQ ID NO: 128578 - DNA, 120 bp, Artificial Sequence
  ENSG00000102057_33 (sequence is synthesized)
gcccaacaattcccagattctgaagcttggaatgcaaacacaggcttcatgggctgtggcctctgcagcgacctgccatccccaggccttgcctgaggggtcaggctgcctctcccaaca

SEQ ID NO: 128579 - DNA, 120 bp, Artificial Sequence
  ENSG00000102057_34 (sequence is synthesized)
cacactcagatagcacaaattctaccatccccttccctggctgctggaaatggaccccgcaaccctgtcctctgctgggcccccagcaaactctagcaatagcagctgctgccgtgtcat

SEQ ID NO: 128580 - DNA, 120 bp, Artificial Sequence
  ENSG00000102057_35 (sequence is synthesized)
tatgcaaagcctctgaccagtttgctgcagcatttacatctgccctaatcagaggggccacctctaactcctcctcctcctctcttctcctctggtttgcgtccttcctgggttgggctg

SEQ ID NO: 128581 - DNA, 120 bp, Artificial Sequence
  ENSG00000102057_36 (sequence is synthesized)
gagtctggactggctgagataagagcctggcaaccagcaagagctgggctgtatttggagatcatgggctgattccatgttcttgggcaacagtccagaagcatcaggggctccggcctg

SEQ ID NO: 128582 - DNA, 120 bp, Artificial Sequence
  ENSG00000102057_37 (sequence is synthesized)
ggatgtttctgaactttgggagttataggagacaggaggaacttctcctcctcctcctcccctacaattccttttcacatattcctttcttctccctcttgggtgaccttccaaaactct

SEQ ID NO: 128583 - DNA, 120 bp, Artificial Sequence
  ENSG00000102057_38 (sequence is synthesized)
gctctcaggctgaaatctggcatcatctcaggttccctgtccccagcactgtccccatggagctggtggctgacaaagatgtagtttccatcagtcaataaaacctgagaggagagatga

SEQ ID NO: 128584 - DNA, 120 bp, Artificial Sequence
  ENSG00000102057_39 (sequence is synthesized)
ccttgatgtttcccagaacaagatgttttcagcatttttattattattatttttttgtcgatccctgcagaagaaacagagttgggataaaagtatcaaatggaatcatcgaactcatga

SEQ ID NO: 128585 - DNA, 120 bp, Artificial Sequence
  ENSG00000102057_40 (sequence is synthesized)
gctttccaaagatactgtctagggcagatgctgtgatccttctctaagtttccatcactgggattgggtatacagttggtgctcagtatctgttgaaggaatgactgaatgaattgggtt

SEQ ID NO: 128586 - DNA, 120 bp, Artificial Sequence
  ENSG00000102057_41 (sequence is synthesized)
tgctcagtttcttcatagaggtacaaaaaaaagttgatttggggtttctaaagcgtagaaaccccaattctggttggaggtccaggatcagactgacaaacaaatactgagcgctgacag

SEQ ID NO: 128587 - DNA, 120 bp, Artificial Sequence
  ENSG00000102057_42 (sequence is synthesized)
tgggctggaactgagtattttgatggcttttactctattcaagtcctcacaacaactctgtgatggtggatggctgcccatgtctcacagttgaggacacgctctgagatgacacatcac

SEQ ID NO: 128588 - DNA, 120 bp, Artificial Sequence
  ENSG00000102057_43 (sequence is synthesized)
agagccagcaatggccaagttggaaagacttttgagcagagtcctgaatgcttaaaatgagtgaaaataccgaaataaggaacagccatcctagggcacagcctgagaaaaggcttagag

SEQ ID NO: 128589 - DNA, 120 bp, Artificial Sequence
  ENSG00000102057_44 (sequence is synthesized)
gctgaagactgcagaggctgtgtttctctggaggagttctgattggttctgcggtcagaacaagagtatgcagtgtgatcttgggcgagtcagttacagaatctccctgatcttcagggg

SEQ ID NO: 128590 - DNA, 120 bp, Artificial Sequence
  ENSG00000102057_45 (sequence is synthesized)
agctctctgtgaacaagttagtaaggttggctctgctctgtctctgtgggaggtgggtggcatggagaaaggcaggagggtttcaaggctcctccctgttttgtcatatgtggacagttt

SEQ ID NO: 128591 - DNA, 120 bp, Artificial Sequence
  ENSG00000102057_46 (sequence is synthesized)
tcaaggattcccctataggggaatgaaaaggggtcctacctagagcaggtaagacagaggcagccaaaaccaacaaaacactcctcccgggacttgaagcccttcggctggcctgtggtg

SEQ ID NO: 128592 - DNA, 120 bp, Artificial Sequence
  ENSG00000102057_47 (sequence is synthesized)
ctgggactctctccccaggaggctgtgttcactgcctgtgacttcctcatgctcccctctgcttggttttcatagatttctagctgactcaggtgcttggtatgtagcttggacaggggc

SEQ ID NO: 128593 - DNA, 120 bp, Artificial Sequence
  ENSG00000102057_48 (sequence is synthesized)
agcagatggtaggggttgagggccaggcccatttctcacttggccacccagcattttacagagcaagaaactgagggactcagaaggtttgagtgcctggccagggtcacagagctagtc

SEQ ID NO: 128594 - DNA, 120 bp, Artificial Sequence
  ENSG00000102076_0 (sequence is synthesized)
gccagggccggctgccgtcggggacagggctttccatagccatggcccagcagtggagcctccaaaggctcgcaggccgccatccgcaggacagctatgaggacagcacccagtccagca

SEQ ID NO: 128595 - DNA, 120 bp, Artificial Sequence
  ENSG00000102076_1 (sequence is synthesized)
tcttcacctacaccaacagcaactccaccagaggccccttcgaaggcccgaattaccacatcgctcccagatgggtgtaccacctcaccagtgtctggatgatctttgtggtcactgcat

SEQ ID NO: 128596 - DNA, 120 bp, Artificial Sequence
  ENSG00000102076_2 (sequence is synthesized)
ccgtcttcacaaatgggcttgtgctggcggccaccatgaagttcaagaagctgcgccacccgctgaactggatcctggtgaacctggcggtcgctgacctagcagagaccgtcatcgcca

SEQ ID NO: 128597 - DNA, 120 bp, Artificial Sequence
  ENSG00000102076_3 (sequence is synthesized)
gcactatcagcattgtgaaccaggtctctggctacttcgtgctgggccaccctatgtgtgtcctggagggctacaccgtctccctgtgtgggatcacaggtctctggtctctggccatca

SEQ ID NO: 128598 - DNA, 120 bp, Artificial Sequence
  ENSG00000102076_4 (sequence is synthesized)
tttcctgggagagatggatggtggtctgcaagccctttggcaatgtgagatttgatgccaagctggccatcgtgggcattgccttctcctggatctgggctgctgtgtggacagccccgc

SEQ ID NO: 128599 - DNA, 120 bp, Artificial Sequence
  ENSG00000102076_5 (sequence is synthesized)
cttcatgcggcccagacgtgttcagcggcagctcgtaccccggggtgcagtcttacatgattgtcctcatggtcacctgctgcatcatcccactcgctatcatcatgctctgctacctcc

SEQ ID NO: 128600 - DNA, 120 bp, Artificial Sequence
  ENSG00000102076_6 (sequence is synthesized)
aagtgtggctggccatccgagcggtggcaaagcagcagaaagagtctgaatccacccagaaggcagagaaggaagtgacgcgcatggtggtggtgatgatctttgcgtactgcgtctgct

SEQ ID NO: 128601 - DNA, 120 bp, Artificial Sequence
  ENSG00000102076_7 (sequence is synthesized)
ggggaccctacaccttcttcgcatgctttgctgctgccaaccctggttacgccttccaccctttgatggctgccctgccggcctactttgccaaaagtgccactatctacaaccccgtta

SEQ ID NO: 128602 - DNA, 120 bp, Artificial Sequence
  ENSG00000102076_8 (sequence is synthesized)
tctatgtctttatgaaccggcagtttcgaaactgcatcttgcagcttttcgggaagaaggttgacgatggctctgaactctccagcgcctccaaaacggaggtctcatctgtgtcctcgg

SEQ ID NO: 128603 - DNA, 120 bp, Artificial Sequence
  ENSG00000102076_9 (sequence is synthesized)
tatcgcctgcatgaggtctgcctcctacccatcccgcccaccggggctttggccacctctcctttccccctccttctccatccctgtaaaataaatgtaatttatctttgccaaaaccaa

SEQ ID NO: 128604 - DNA, 120 bp, Artificial Sequence
  ENSG00000102076_10 (sequence is synthesized)
tctttggttggagcaggtggcaaagcagcagaaagagtctgaatccacccagaaggcagagaaggaagtgacgcgcatggtggtggtgatgatctttgcgtactgcgtctgctggggacc

SEQ ID NO: 128605 - DNA, 120 bp, Artificial Sequence
  ENSG00000102078_0 (sequence is synthesized)
ctggttcccggcctgggaggggcttaacggtcctctggtctctctctcccctcagctgagtcccttccctgtctttcactcttctggcatcggtggttttacttcttcgattgaaccctg

SEQ ID NO: 128606 - DNA, 120 bp, Artificial Sequence
  ENSG00000102078_1 (sequence is synthesized)
cttcctcgacccccctgggaggccgccttcttcaggcgcctcccttctctccacgagctcgctctgacagctgaggaactggcaagatcctgctacccagagggtgaatgggtatctttc

SEQ ID NO: 128607 - DNA, 120 bp, Artificial Sequence
  ENSG00000102078_2 (sequence is synthesized)
ccggaataatcctaatttttctaagggtgaagtttgcaacggcggccgtgattgtaagcggacaccagaaaagtaccactgtaagtcatgagatgtctggtctgaattggaaaccctttg

SEQ ID NO: 128608 - DNA, 120 bp, Artificial Sequence
  ENSG00000102078_3 (sequence is synthesized)
tatatggcggccttgcctctatcgtggctgagtttgggactttccctgtggaccttaccaaaacacgacttcaggttcaaggccaaagcattgatgcccgtttcaaagagataaaatata

SEQ ID NO: 128609 - DNA, 120 bp, Artificial Sequence
  ENSG00000102078_4 (sequence is synthesized)
gagggatgttccatgcgctgtttcgcatctgtaaagaggaaggtgtattggctctctattcaggaattgctcctgcgttgctaagacaagcatcatatggcaccattaaaattgggattt

SEQ ID NO: 128610 - DNA, 120 bp, Artificial Sequence
  ENSG00000102078_5 (sequence is synthesized)
accaaagcttgaagcgcttattcgtagaacgtttagaagatgaaactcttttaattaatatgatctgtggggtagtgtcaggagtgatatcttccactatagccaatcccaccgatgttc

SEQ ID NO: 128611 - DNA, 120 bp, Artificial Sequence
  ENSG00000102078_6 (sequence is synthesized)
tttatcgatatataccaacaagaaggcaccaggggtctgtggaggggtgtggttccaactgctcagcgtgctgccatcgttgtaggagtagagctaccagtctatgatattactaagaag

SEQ ID NO: 128612 - DNA, 120 bp, Artificial Sequence
  ENSG00000102078_7 (sequence is synthesized)
catttaatattgtcaggaatgatgggcgatacaattttaactcacttcgtttccagctttacatgtggtttggctggggctctggcctccaacccggttgatgtggttcgaactcgcatg

SEQ ID NO: 128613 - DNA, 120 bp, Artificial Sequence
  ENSG00000102078_8 (sequence is synthesized)
atgaaccagagggcaatcgtgggacatgtggatctctataagggcactgttgatggtattttaaagatgtggaaacatgagggcttttttgcactctataaaggattttggccaaactgg

SEQ ID NO: 128614 - DNA, 120 bp, Artificial Sequence
  ENSG00000102078_9 (sequence is synthesized)
cttcggcttggaccctggaacatcattttttttattacatacgagcagctaaagaggcttcaaatctaagaactgaattatatgtgagcccagccctgccagcctttctactcctttgcc

SEQ ID NO: 128615 - DNA, 120 bp, Artificial Sequence
  ENSG00000102078_10 (sequence is synthesized)
cttttcccgtgttctaatgtattttgacaatgttgtaagtgtttaccaagccgttggtctcctaagggcctcctgatggaagaacagtggggtggttcaaagttatttctatgtttgtgt

SEQ ID NO: 128616 - DNA, 120 bp, Artificial Sequence
  ENSG00000102078_11 (sequence is synthesized)
taccatgttaacttttccccgagagaaagtgttaacattgagactctggccccagattggtatcttctatgaagatggatactgatgggtgacattgaaaacggcctgctttccaaatgt

SEQ ID NO: 128617 - DNA, 120 bp, Artificial Sequence
  ENSG00000102078_12 (sequence is synthesized)
ggttaaatgtaattggttagccccagacttgggctagagcagaaggcataggccagggtggttattgctatatgtgttacagacctcggttctcattaaagtatttattggcagaatcac

SEQ ID NO: 128618 - DNA, 73 bp, Artificial Sequence
  ENSG00000102078_13 (sequence is synthesized)
tatcgatatataccaacaagaaggcaccaggggtctgtggaggtgcttatgttcaaaagctgttaccggctgt

SEQ ID NO: 128619 - DNA, 120 bp, Artificial Sequence
  ENSG00000102078_14 (sequence is synthesized)
cagaaaagtaccactgtaagtcatgagatgtctggtctgaattggaaaccctttgtatatggcggccttgcctctatcgtggctgagtttgaattgctcctgcgttgctaagacaagcat

SEQ ID NO: 128620 - DNA, 120 bp, Artificial Sequence
  ENSG00000102078_15 (sequence is synthesized)
gttggtttcaatgcttccgggttggcgctgcagtggcgtttccgactgtgggagcctcagcttcccagtcgtccgatgagcccgagcagctgagtcccttccctgtctttcactcttctg

SEQ ID NO: 128621 - DNA, 120 bp, Artificial Sequence
  ENSG00000102078_16 (sequence is synthesized)
tggcgctgcagtggcgtttccgactgtgggagcctcagcttcccagtcgtccgatgagcccgagcagcaccagaaaagtaccactgtaagtcatgagatgtctggtctgaattggaaacc

SEQ ID NO: 128622 - DNA, 120 bp, Artificial Sequence
  ENSG00000102078_17 (sequence is synthesized)
ttgaagcgcttattcgtagaacgtttagaaggtcagtatacttaccctcttttgaggtgatactcaaagggattgttgaaatcatgcttagtgagaaatgttggtcatgaggtgcctgag

SEQ ID NO: 128623 - DNA, 120 bp, Artificial Sequence
  ENSG00000102078_18 (sequence is synthesized)
aatggaggagagtcactgcaaagacaaagtgagcttgttctaacttggaataaatctttgcagaggtgatatatgaattagagagacctgttcttcaaatttgtcccttttcctatcaac

SEQ ID NO: 128624 - DNA, 120 bp, Artificial Sequence
  ENSG00000102078_19 (sequence is synthesized)
aaaaaaggcatgtgatcatcccaaaagaaacatggaacaatcttgtccagaaaattaatgctatcttcatcaataagaggacttcaactgtaaggcattttctagctggcaattttgata

SEQ ID NO: 128625 - DNA, 120 bp, Artificial Sequence
  ENSG00000102078_20 (sequence is synthesized)
cacaaaaagcctcttttactgaaatcctcaggtggaatttgataactggtacgtatggcctaaattcccttgtctctcctattatcagaacttcaagccttatgaacactttatacttca

SEQ ID NO: 128626 - DNA, 120 bp, Artificial Sequence
  ENSG00000102078_21 (sequence is synthesized)
cagaaatgccaggtgctatgggggcttgggtacttgggaacattgtctaatacagcagcctatcagaggtctatttgatttacatttatccatacatagcttctatatctaataagcaca

SEQ ID NO: 128627 - DNA, 120 bp, Artificial Sequence
  ENSG00000102078_22 (sequence is synthesized)
ttgaaaaatttatgtaactaatacatggtgcatgatactttctacttaggaatcttgttaggtttagaaactctcctttaaaaaaaaggctgagtttcagattgaaaattgaagggacag

SEQ ID NO: 128628 - DNA, 120 bp, Artificial Sequence
  ENSG00000102078_23 (sequence is synthesized)
cctttgaatgatgtctctttagaaaaatttcctgtctctttagattgtaacgaaaggccaagtgccaggttttatctgatgggtctgagttatattgtacagtttacgtttggcctaatt

SEQ ID NO: 128629 - DNA, 120 bp, Artificial Sequence
  ENSG00000102078_24 (sequence is synthesized)
ttcctgctattatcctacactctcagttcctacaatttgcagagaatttttttttatataaagacataaaatcgtgaattataatccaaaaactaaggtaagaaactcctcatctccctt

SEQ ID NO: 128630 - DNA, 120 bp, Artificial Sequence
  ENSG00000102078_25 (sequence is synthesized)
gaaaggcccaaaacttatcattggccttttatttctgcataatgtttggggattatataggtggggaaagttattacattatttgagatggctgtttcgatcatattcacagtgaatgta

SEQ ID NO: 128631 - DNA, 120 bp, Artificial Sequence
  ENSG00000102081_0 (sequence is synthesized)
cggcggcggcggcggcggcggcggcggctgggcctcgagcgcccgcagcccacctctcgggggcgggctcccggcgctagcagggctgaagagaagatggaggagctggtggtggaagtg

SEQ ID NO: 128632 - DNA, 120 bp, Artificial Sequence
  ENSG00000102081_1 (sequence is synthesized)
aagagaagatggaggagctggtggtggaagtgcggggctccaatggcgctttctacaaggcatttgtaaaggatgttcatgaagattcaataacagttgcatttgaaaacaactggcagc

SEQ ID NO: 128633 - DNA, 120 bp, Artificial Sequence
  ENSG00000102081_2 (sequence is synthesized)
ctgataggcagattccatttcatgatgtcagattcccacctcctgtaggttataataaagatataaatgaaagtgatgaagttgaggtgtattccagagcaaatgaaaaagagccttgct

SEQ ID NO: 128634 - DNA, 120 bp, Artificial Sequence
  ENSG00000102081_3 (sequence is synthesized)
gttggtggttagctaaagtgaggatgataaagggtgagttttatgtgatagaatatgcagcatgtgatgcaacttacaatgaaattgtcacaattgaacgtctaagatctgttaatccca

SEQ ID NO: 128635 - DNA, 120 bp, Artificial Sequence
  ENSG00000102081_4 (sequence is synthesized)
acaaacctgccacaaaagatactttccataagatcaagctggatgtgccagaagacttacggcaaatgtgtgccaaagaggcggcacataaggattttaaaaaggcagttggtgcctttt

SEQ ID NO: 128636 - DNA, 120 bp, Artificial Sequence
  ENSG00000102081_5 (sequence is synthesized)
ctgtaacttatgatccagaaaattatcagcttgtcattttgtccatcaatgaagtcacctcaaagcgagcacatatgctgattgacatgcactttcggagtctgcgcactaagttgtctc

SEQ ID NO: 128637 - DNA, 120 bp, Artificial Sequence
  ENSG00000102081_6 (sequence is synthesized)
tgataatgagaaatgaagaagctagtaagcagctggagagttcaaggcagcttgcctcgagatttcatgaacagtttatcgtaagagaagatctgatgggtctagctattggtactcatg

SEQ ID NO: 128638 - DNA, 120 bp, Artificial Sequence
  ENSG00000102081_7 (sequence is synthesized)
gtgctaatattcagcaagctagaaaagtacctggggtcactgctattgatctagatgaagatacctgcacatttcatatttatggagaggatcaggatgcagtgaaaaaagctagaagct

SEQ ID NO: 128639 - DNA, 120 bp, Artificial Sequence
  ENSG00000102081_8 (sequence is synthesized)
ttctcgaatttgctgaagatgtaatacaagttccaaggaacttagtaggcaaagtaataggaaaaaatggaaagctgattcaggagattgtggacaagtcaggagttgtgagggtgagga

SEQ ID NO: 128640 - DNA, 120 bp, Artificial Sequence
  ENSG00000102081_9 (sequence is synthesized)
ttgaggctgaaaatgagaaaaatgttccacaagaagaggaaattatgccaccaaattcccttccttccaataattcaagggttggacctaatgccccagaagaaaaaaaacatttagata

SEQ ID NO: 128641 - DNA, 120 bp, Artificial Sequence
  ENSG00000102081_10 (sequence is synthesized)
taaaggaaaacagcacccatttttctcaacctaacagtacaaaagtccagagggtgttagtggcttcatcagttgtagcaggggaatcccagaaacctgaactcaaggcttggcagggta

SEQ ID NO: 128642 - DNA, 120 bp, Artificial Sequence
  ENSG00000102081_11 (sequence is synthesized)
tggtaccatttgtttttgtgggaacaaaggacagcatcgctaatgccactgttcttttggattatcacctgaactatttaaaggaagtagaccagttgcgtttggagagattacaaattg

SEQ ID NO: 128643 - DNA, 120 bp, Artificial Sequence
  ENSG00000102081_12 (sequence is synthesized)
atgagcagttgcgacagattggagctagttctagaccaccaccaaatcgtacagataaggaaaaaagctatgtgactgatgatggtcaaggaatgggtcgaggtagtagaccttacagaa

SEQ ID NO: 128644 - DNA, 120 bp, Artificial Sequence
  ENSG00000102081_13 (sequence is synthesized)
atagggggcacggcagacgcggtcctggatatacttcaggaactaattctgaagcatcaaatgcttctgaaacagaatctgaccacagagacgaactcagtgattggtcattagctccaa

SEQ ID NO: 128645 - DNA, 120 bp, Artificial Sequence
  ENSG00000102081_14 (sequence is synthesized)
cagaggaagagagggagagcttcctgcgcagaggagacggacggcggcgtggagggggaggaagaggacaaggaggaagaggacgtggaggaggcttcaaaggaaacgacgatcactccc

SEQ ID NO: 128646 - DNA, 120 bp, Artificial Sequence
  ENSG00000102081_15 (sequence is synthesized)
gaacagataatcgtccacgtaatccaagagaggctaaaggaagaacaacagatggatcccttcagatcagagttgactgcaataatgaaaggagtgtccacactaaaacattacagaata

SEQ ID NO: 128647 - DNA, 120 bp, Artificial Sequence
  ENSG00000102081_16 (sequence is synthesized)
cctccagtgaaggtagtcggctgcgcacgggtaaagatcgtaaccagaagaaagagaagccagacagcgtggatggtcagcaaccactcgtgaatggagtaccctaaactgcataattct

SEQ ID NO: 128648 - DNA, 120 bp, Artificial Sequence
  ENSG00000102081_17 (sequence is synthesized)
aaattatgctaagaattttttattttttggtattggccataagcaacaattttcagatttgcacaaaaagataccttaaaatttgaaacattgcttttaaaactacttagcacttcaggg

SEQ ID NO: 128649 - DNA, 120 bp, Artificial Sequence
  ENSG00000102081_18 (sequence is synthesized)
cagattttagttttattttctaaagtactgagcagtgatattctttgttaatttggaccattttcctgcattgggtgatcattcaccagtacattctcagtttttcttaatatatagcat

SEQ ID NO: 128650 - DNA, 120 bp, Artificial Sequence
  ENSG00000102081_19 (sequence is synthesized)
ttatggtaatcatattagacttctgttttcaatctcgtatagaagtcttcatgaaatgctatgtcatttcatgtcctgtgtcagtttatgttttggtccacttttccagtattttagtgg

SEQ ID NO: 128651 - DNA, 120 bp, Artificial Sequence
  ENSG00000102081_20 (sequence is synthesized)
accctgaaatgtgtgtgatgtgacatttgtcattttcattagcaaaaaaagttgtatgatctgtgccttttttatatcttggcaggtaggaatattatatttggatgcagagttcaggga

SEQ ID NO: 128652 - DNA, 120 bp, Artificial Sequence
  ENSG00000102081_21 (sequence is synthesized)
agataagttggaaacactaaatgttaaagatgtagcaaaccctgtcaaacattagtactttatagaagaatgcatgctttccatatttttttccttacataaacatcaggttaggcagta

SEQ ID NO: 128653 - DNA, 120 bp, Artificial Sequence
  ENSG00000102081_22 (sequence is synthesized)
taaagaataggacttgtttttgtttttgttttgttgcactgaagtttgataaatagtgttattgagagagatgtgtaatttttctgtatagacaggagaagaaagaactatcttcatctg

SEQ ID NO: 128654 - DNA, 120 bp, Artificial Sequence
  ENSG00000102081_23 (sequence is synthesized)
agagaggctaaaatgttttcagctaggaacaaatcttcctggtcgaaagttagtaggatatgcctgctctttggcctgatgaccaattttaacttagagctttttttttttaattttgtc

SEQ ID NO: 128655 - DNA, 120 bp, Artificial Sequence
  ENSG00000102081_24 (sequence is synthesized)
tgccccaagttttgtgaaatttttcatattttaatttcaagcttattttggagagataggaaggtcatttccatgtatgcataataatcctgcaaagtacaggtactttgtctaagaaac

SEQ ID NO: 128656 - DNA, 120 bp, Artificial Sequence
  ENSG00000102081_25 (sequence is synthesized)
attggaagcaggttaaatgttttgtaaactttgaaatatatggtctaatgtttaagcagaattggaaaagactaagatcggttaacaaataacaacttttttttctttttttcttttgtt

SEQ ID NO: 128657 - DNA, 120 bp, Artificial Sequence
  ENSG00000102081_26 (sequence is synthesized)
ttttgaagtgttggggtttggttttgttttttgagtcttttttttttaagtgaaatttattgaggaaaaatatgtgaaggaccttcactctaagatgttatatttttcttaaaaagtaac

SEQ ID NO: 128658 - DNA, 120 bp, Artificial Sequence
  ENSG00000102081_27 (sequence is synthesized)
tcctagtaggggtaccactgaatctgtacagagccgtaaaaactgaagttctgcctctgatgtattttgtgagtttgtttctttgaattttcattttacagttacttttccttgcataca

SEQ ID NO: 128659 - DNA, 120 bp, Artificial Sequence
  ENSG00000102081_28 (sequence is synthesized)
aacaagcatataaaatggcaacaaactgcacatgatttcacaaatattaaaaagtcttttaaaaagtattgccaaacattaatgttgatttctagttatttattctgggaatgtatagta

SEQ ID NO: 128660 - DNA, 120 bp, Artificial Sequence
  ENSG00000102081_29 (sequence is synthesized)
tttgaaaacagaaattggtaccttgcacacatcatctgtaagctgtttggttttaaaatactgtagataattaaccaaggtagaatgaccttgtaatgtaactgctcttgggcaatattc

SEQ ID NO: 128661 - DNA, 120 bp, Artificial Sequence
  ENSG00000102081_30 (sequence is synthesized)
tctgtacatattagcgacaacagattggattttatgttgacatttgtttggttatagtgcaatatattttgtatgcaagcagtttcaataaagtttgatcttcctctgctaaattgatgt

SEQ ID NO: 128662 - DNA, 120 bp, Artificial Sequence
  ENSG00000102081_31 (sequence is synthesized)
tgatgcaatccttacaaatgattgcttttaaaattttaagctaggaaaagaaatctatagaaagtgttctgttacaaaatgtaactgttaccattggaaatttcacgtcataggaagtta

SEQ ID NO: 128663 - DNA, 120 bp, Artificial Sequence
  ENSG00000102081_32 (sequence is synthesized)
gcctttatctaccaactttcaagaacttgtttaataaagcgaaaaactcaaccaaatggtacaaaaccacagtgtaccattaaaatatgcactaagtctcttttttacaaaggctgtatt

SEQ ID NO: 128664 - DNA, 120 bp, Artificial Sequence
  ENSG00000102081_33 (sequence is synthesized)
cagcaaggcgctaacttgcttaaatgtgaattactaacttctaaaactgtactttgattcacatgttttcaaatggagttggagttcattcatattacaatatttgtgtgctaaacgtgt

SEQ ID NO: 128665 - DNA, 120 bp, Artificial Sequence
  ENSG00000102081_34 (sequence is synthesized)
atgtttttcagttcaaagtcatgatgtttttaaaatcttattaaagtttcaaaaatctgaagattgtttatctagatgtaaatttttattaaaaagttgcacttatgaaaaagcaaaaaa

SEQ ID NO: 128666 - DNA, 120 bp, Artificial Sequence
  ENSG00000102081_35 (sequence is synthesized)
gaagacatgataggattgtgagtttttctctaactttggatgcagtgagatgaccagtgtgttccagttaaagaagaagagtgttttaaaatcataaaccaaataaagaatcctacctta

SEQ ID NO: 128667 - DNA, 120 bp, Artificial Sequence
  ENSG00000102081_36 (sequence is synthesized)
cgcccgcagcccacctctcgggggcgggctcccggcgctagcagggctgaagagaagatggaggagctggtggtggaagtgcggggctccaatggcgctttctacaagcattgggacttc

SEQ ID NO: 128668 - DNA, 120 bp, Artificial Sequence
  ENSG00000102081_37 (sequence is synthesized)
ggagagctccactgttctgggcgagggctgtgaagaaagagtagtaagaagcggtagtcggcaccaaatcacaatggcaactgatttttagtggcttctctttgtggatttcggaggaga

SEQ ID NO: 128669 - DNA, 120 bp, Artificial Sequence
  ENSG00000102081_38 (sequence is synthesized)
ttttagatccaaaagtttcaggaagaccctaacatggcccagcagtgcattgaagaagttgatcatcgtgaatattcgcgtccccctttttgttaaacggggtaaattcaggaatgcaca

SEQ ID NO: 128670 - DNA, 120 bp, Artificial Sequence
  ENSG00000102081_39 (sequence is synthesized)
tgcttcagcgtctaaaaccattagcagcgctgctacttaaaaattgtgtgtgtgtgtttaagtttccaaagacctaaatatatgccatgaaacttcaggtaattaactgagagtatatta

SEQ ID NO: 128671 - DNA, 120 bp, Artificial Sequence
  ENSG00000102081_40 (sequence is synthesized)
ttactagggcattttttttttaactgagcgaaaatatttttgtgcccctaagaacttgaccacatttcctttgaatttgtggtgttgcagtggactgaattgttgaggctttatataggc

SEQ ID NO: 128672 - DNA, 120 bp, Artificial Sequence
  ENSG00000102081_41 (sequence is synthesized)
attcatgggtttactgtgctttttaaagttacaccattgcagatcaactaacacctttcagttttaaaaggaagatttacaaatttgatgtagcagtagtgcgtttgttggtatgtaggt

SEQ ID NO: 128673 - DNA, 120 bp, Artificial Sequence
  ENSG00000102081_42 (sequence is synthesized)
gctgtataaattcatctataaattctcatttccttttgaatgtctataacctctttcaataatatcccaccttactacagtattttggcaatagaaggtgcgtgtggaaggaaggctgga

SEQ ID NO: 128674 - DNA, 120 bp, Artificial Sequence
  ENSG00000102081_43 (sequence is synthesized)
taaatgtattgtagaatggcttgaatgtttcagacaggacacgtttggctataggaaaataaacaattgactttattctgtgtttaccaattttatgaagacatttggagatcagtatat

SEQ ID NO: 128675 - DNA, 120 bp, Artificial Sequence
  ENSG00000102081_44 (sequence is synthesized)
ttcataaatgagtaaagtatgtaaactgttccatactttgagcacaaagataaagccttttgctgtaaaaggaggcaaaaggtaaccccgcgtttatgttcttaacagtctcatgaatat

SEQ ID NO: 128676 - DNA, 120 bp, Artificial Sequence
  ENSG00000102081_45 (sequence is synthesized)
gaaattgtttcagttgactctgcagtcaaaattttaatttcattgattttattgatccataatttcttctggtgagtttgcgtagaatcgttcacggtcctagattagtggttttggtca

SEQ ID NO: 128677 - DNA, 120 bp, Artificial Sequence
  ENSG00000102081_46 (sequence is synthesized)
ctagatttctggcactaataactataatacatatacatatatatgtgtgagtaacggctaatggttaggcaagattttgattgacctgtgatataaacttagattggatgccactaaagt

SEQ ID NO: 128678 - DNA, 120 bp, Artificial Sequence
  ENSG00000102081_47 (sequence is synthesized)
ttgcttatcacagagggcaagtagcacattatggccttgaagtacttattgttctcttccagcaacttatgatttgctccagtgattttgcttgcacactgactggaatataagaaatgc

SEQ ID NO: 128679 - DNA, 120 bp, Artificial Sequence
  ENSG00000102081_48 (sequence is synthesized)
cttctatttttgctattaattccctccttttttgttttgttttgtaacgaagttgtttaacttgaaggtgaatgaagaataggttggttgccccttagttccctgaggagaaatgttaat

SEQ ID NO: 128680 - DNA, 120 bp, Artificial Sequence
  ENSG00000102081_49 (sequence is synthesized)
acttgaacaagtgtgtgtcagacaaattgctgttatgtttatttaattaagtttgatttctaagaaaatctcaaatggtctgcactgatggaagaacagtttctgtaacaaaaaagcttg

SEQ ID NO: 128681 - DNA, 120 bp, Artificial Sequence
  ENSG00000102081_50 (sequence is synthesized)
aaatttttatatgacttataatactgctgtgagttttaaaagtaaagcaaaagtaaactgagttgcttgtccagtgggatggacaggaaagatgtgaaataaaaaccaatgaaaaatgaa

SEQ ID NO: 128682 - DNA, 120 bp, Artificial Sequence
  ENSG00000102081_51 (sequence is synthesized)
aaaaaagaaaaaaaaaaaagaaaaaattttgatcaggataaagcctttcataaatgaattagagcatcttatactactcattttgtttatacatctcatggtaaagcttgtataattttg

SEQ ID NO: 128683 - DNA, 120 bp, Artificial Sequence
  ENSG00000102081_52 (sequence is synthesized)
catggtaaagcttgtataattttgaattatacattttgtgattttgctgatactgaatactagtctttataataatctgatacgtttaaaaggttgctattgatctattcgtattcacag

SEQ ID NO: 128684 - DNA, 120 bp, Artificial Sequence
  ENSG00000102081_53 (sequence is synthesized)
gttccaaagctagaagaaacttcagatgtctctgggactttctgcaaagtcaatagtaattcttcattttgacttgagtagtgttttatcaccatcaccatcgcaaagtaataggaaaaa

SEQ ID NO: 128685 - DNA, 120 bp, Artificial Sequence
  ENSG00000102081_54 (sequence is synthesized)
cttcaccaatactcctaaatgctgcagatatctttagtagaacatatcaaaaccaggtgcagttttatcaagaaagctacatatgtttttaatttgtaaataaaattgggacatactgcc

SEQ ID NO: 128686 - DNA, 120 bp, Artificial Sequence
  ENSG00000102081_55 (sequence is synthesized)
tagggggcacggcagacgcggtcctggatatacttcaggtacaaactaagcattttactcagtaactttatctgttcctagacttatagctgctaatctctaatattcattagaacccca

SEQ ID NO: 128687 - DNA, 120 bp, Artificial Sequence
  ENSG00000102081_56 (sequence is synthesized)
gttcacagggccggtgcaagttctgttcatgctctgattgggggtaaatctgcaaagcccttgtgtgttgatgattttcttaaggcctctcctgattttataactgtatagtcaaaactt

SEQ ID NO: 128688 - DNA, 120 bp, Artificial Sequence
  ENSG00000102081_57 (sequence is synthesized)
ttttcatttgtgtactgtggctcatttttattttgtcaggtatgtgctggtcatacttgctggatggactgtgtaaatcaggggtctgcctcttgtggctcataaggtgattttgagtga

SEQ ID NO: 128689 - DNA, 120 bp, Artificial Sequence
  ENSG00000102081_58 (sequence is synthesized)
catggccaaagtcagccctaggcacagtcaagaagtaggcgaagtttctctttgccttcccagcttttctgtccgtgcttctttcttctctcccagtacctttcagtgaacctgatcccc

SEQ ID NO: 128690 - DNA, 120 bp, Artificial Sequence
  ENSG00000102081_59 (sequence is synthesized)
agtgatatccagaggattgccaccatgaagttgtcatttttagtggagaggaagcaggagaccagaaagtgaccaaggatctgtccatttagttccaggagatatgactgccagagtggt

SEQ ID NO: 128691 - DNA, 120 bp, Artificial Sequence
  ENSG00000102081_60 (sequence is synthesized)
atccttagtgggctgaatgttcagtggtcttactttagtgaccaagcaacaagacagtagggcatggtcagtaactttcagtcaatttttgcttactaggataaagcaaaaataagctta

SEQ ID NO: 128692 - DNA, 120 bp, Artificial Sequence
  ENSG00000102081_61 (sequence is synthesized)
tacatttttagatacattttttgtaacttgctgagtacccaaggaaagtgtgcttgtatttatgggcgtctattttcagagcactaattattgctgaattagaacagaaatataggaaaa

SEQ ID NO: 128693 - DNA, 120 bp, Artificial Sequence
  ENSG00000102081_62 (sequence is synthesized)
ctgatttttacaaggagcttcaaagcaatctcaggtagtttctgattatgtatctctgcctacctcggggtacatagacagggttacaatttggttgaggatatatgacatgtggttttt

SEQ ID NO: 128694 - DNA, 120 bp, Artificial Sequence
  ENSG00000102081_63 (sequence is synthesized)
aaagacacctaggggcattttaagaaaatttcctcgatatctgaaaatctgtagatttcaaaattatgttaatcatgaaatattctgtgttgtaatttttgtgtaggtgtattccagagc

SEQ ID NO: 128695 - DNA, 120 bp, Artificial Sequence
  ENSG00000102081_64 (sequence is synthesized)
agaacaacagatggatcccttcagatacctccagtgaaggtagtcggctgcgcacgggtaaagatcgtaaccagaagaaagagaagccagacagcgtggatggtcagcaaccactcgtga

SEQ ID NO: 128696 - DNA, 120 bp, Artificial Sequence
  ENSG00000102081_65 (sequence is synthesized)
ttcattttgagtttaaaattttgttttatgaaatggaaagtgataatactctttgtgggcttataaattgggaagagttttggattacccctgaaacgtctctggaagcttctgttaacc

SEQ ID NO: 128697 - DNA, 120 bp, Artificial Sequence
  ENSG00000102081_66 (sequence is synthesized)
acaacagatggatcccttcaggtaaaacctgtctgcctcttttcatcttaattgtttgaatatggtagtttgagatttatgagtttattttactttattaaaaacatgttcaaagattac

SEQ ID NO: 128698 - DNA, 120 bp, Artificial Sequence
  ENSG00000102081_67 (sequence is synthesized)
tgaggtaggaaaatgcctatttaaatttttttcttatattgtttcctttttttaaacccaggttgtacattcccgtgtggatttctattttgaagtaatatctaattttgagtaatttaa

SEQ ID NO: 128699 - DNA, 120 bp, Artificial Sequence
  ENSG00000102081_68 (sequence is synthesized)
ttaaaatgttttcactatgtgttcagtatgtttctgttggtcataaattttttcacatagattatttattttaaaataactgaatagggagaacttcttattcttactttaaaaattgtg

SEQ ID NO: 128700 - DNA, 120 bp, Artificial Sequence
  ENSG00000102096_0 (sequence is synthesized)
agtagcattggggctggcgcgcgcggcgaatctcaacgctgcgccgtctgcgggcgcttccgggccaccagtttctctgctttccaccctggcgccccccagccctggctccccagctgc

SEQ ID NO: 128701 - DNA, 120 bp, Artificial Sequence
  ENSG00000102096_1 (sequence is synthesized)
gctgccccgggcgtccacgccctgcgggcttagcgggttcagtgggctcaatctgcgcagcgccacctccatgttgaccaagcctctacaggggcctcccgcgccccccgggacccccac

SEQ ID NO: 128702 - DNA, 120 bp, Artificial Sequence
  ENSG00000102096_2 (sequence is synthesized)
gccgccgccaggaggcaaggatcgggaagcgttcgaggccgagtatcgactcggccccctcctgggtaaggggggctttggcaccgtcttcgcaggacaccgcctcacagatcgactcca

SEQ ID NO: 128703 - DNA, 120 bp, Artificial Sequence
  ENSG00000102096_3 (sequence is synthesized)
ggtggccatcaaagtgattccccggaatcgtgtgctgggctggtcccccttgtcagactcagtcacatgcccactcgaagtcgcactgctatggaaagtgggtgcaggtggtgggcaccc

SEQ ID NO: 128704 - DNA, 120 bp, Artificial Sequence
  ENSG00000102096_4 (sequence is synthesized)
tggcgtgatccgcctgcttgactggtttgagacacaggagggcttcatgctggtcctcgagcggcctttgcccgcccaggatctctttgactatatcacagagaagggcccactgggtga

SEQ ID NO: 128705 - DNA, 120 bp, Artificial Sequence
  ENSG00000102096_5 (sequence is synthesized)
aggcccaagccgctgcttctttggccaagtagtggcagccatccagcactgccattcccgtggagttgtccatcgtgacatcaaggatgagaacatcctgatagacctacgccgtggctg

SEQ ID NO: 128706 - DNA, 120 bp, Artificial Sequence
  ENSG00000102096_6 (sequence is synthesized)
tgccaaactcattgattttggttctggtgccctgcttcatgatgaaccctacactgactttgatgggacaagggtgtacagccccccagagtggatctctcgacaccagtaccatgcact

SEQ ID NO: 128707 - DNA, 120 bp, Artificial Sequence
  ENSG00000102096_7 (sequence is synthesized)
cccggccactgtctggtcactgggcatcctcctctatgacatggtgtgtggggacattccctttgagagggaccaggagattctggaagctgagctccacttcccagcccatgtctcccc

SEQ ID NO: 128708 - DNA, 120 bp, Artificial Sequence
  ENSG00000102096_8 (sequence is synthesized)
ccaaaccttcttcccgaccctcactggaagagatcctgctggacccctggatgcaaacaccagccgaggatgtacccctcaacccctccaaaggaggccctgcccctttggcctggtcct

SEQ ID NO: 128709 - DNA, 120 bp, Artificial Sequence
  ENSG00000102096_9 (sequence is synthesized)
tgctaccctaagcctggcctggcctggcctggcccccaatggtcagaagagccatcccatggccatgtcacagggatagatggacatttgttgacttggttttacaggtcattaccagtc

SEQ ID NO: 128710 - DNA, 120 bp, Artificial Sequence
  ENSG00000102096_10 (sequence is synthesized)
attaaagtccagtattactaaggtaagggattgaggatcaggggttagaagacataaaccaagtctgcccagttcccttcccaatcctacaaaggagccttcctcccagaacctgtggtc

SEQ ID NO: 128711 - DNA, 120 bp, Artificial Sequence
  ENSG00000102096_11 (sequence is synthesized)
cctgattctggagggggaacttcttgcttctcattttgctaaggaagtttattttggtgaagttgttcccattctgagccccgggactcttattctgatgatgtgtcaccccacattggc

SEQ ID NO: 128712 - DNA, 120 bp, Artificial Sequence
  ENSG00000102096_12 (sequence is synthesized)
acctcctactaccaccacacaaacttagttcatatgctcttacttgggcaagggtgctttccttccaataccccagtagcttttattttagtaaagggaccctttcccctagcctagggt

SEQ ID NO: 128713 - DNA, 120 bp, Artificial Sequence
  ENSG00000102096_13 (sequence is synthesized)
cccatattgggtcaagctgcttacctgcctcagcccaggattctttattctgggggaggtaatgccctgttgttaccccaaggcttcttttttttttttttttttttgggtgaggggacc

SEQ ID NO: 128714 - DNA, 120 bp, Artificial Sequence
  ENSG00000102096_14 (sequence is synthesized)
ctactctgttatcccaagtgctcttattctggtgagaagaaccttacttccataatttgggaaggaatggaagatggacaccaccggacaccaccagacactaggatgggatggatggtt

SEQ ID NO: 128715 - DNA, 120 bp, Artificial Sequence
  ENSG00000102096_15 (sequence is synthesized)
ttttgggggatgggctaggggaaataaggcttgctgtttgttctcctggggcgctccctccaacttttgcagattcttgcaacctcctcctgagccgggattgtccaattactaaaatgt

SEQ ID NO: 128716 - DNA, 120 bp, Artificial Sequence
  ENSG00000102096_16 (sequence is synthesized)
aaataatcacgtattgtggggaggggagttccaagtgtgccctcctctcttctcctgcctggattatttaaaaagccatgtgtggaaacccactatttaataaaagtaatagaatcagaa

SEQ ID NO: 128717 - DNA, 120 bp, Artificial Sequence
  ENSG00000102096_17 (sequence is synthesized)
ttatataagatgatcgattgctaatactggggattctcagccttgccctctgataaagtccatcttttaatggtgtgctaaccttattctgggctcctattctggtgaggggatcctgtt

SEQ ID NO: 128718 - DNA, 120 bp, Artificial Sequence
  ENSG00000102096_18 (sequence is synthesized)
accatcctgagtattctttctctggtaaggggatcctgttacttttcagtgcttttattctgttgaggggactctgttattttagctgctttttatctagtgaggggactctgcttttat

SEQ ID NO: 128719 - DNA, 120 bp, Artificial Sequence
  ENSG00000102096_19 (sequence is synthesized)
cacatcagcctcccaaagtgctgggattgcagggatgagccactgtgcctggccgaacttctttcgtttattcaaatgtttattgatctacgacatgcgagatttgtgcaggctctttgc

SEQ ID NO: 128720 - DNA, 120 bp, Artificial Sequence
  ENSG00000102096_20 (sequence is synthesized)
acatgcgagatttgtgcaggctctttgctggtttcaccctctcaatcgctgtgtgagtttgtgtctttagggaaagtgaggcccaggaagggaagtgagttgcttagcgacacactgtca

SEQ ID NO: 128721 - DNA, 120 bp, Artificial Sequence
  ENSG00000102096_21 (sequence is synthesized)
ggaaaaggggccctgagttgagcttaggtaaaaagcctcagagctgttgccctgacatctgtcttttttctctccctgcttcccaccccacctgtgcccccagtcagactcagtcacatg

SEQ ID NO: 128722 - DNA, 120 bp, Artificial Sequence
  ENSG00000102098_0 (sequence is synthesized)
gcggcttctcaaacatggcggcggcggtgtgaagctcggtgccggctcgcgcgatcggtgggacagaatttcgttgttttcaccgacgagactggaggaaacaacaccaaatagggatac

SEQ ID NO: 128723 - DNA, 120 bp, Artificial Sequence
  ENSG00000102098_1 (sequence is synthesized)
catgggacaaacagtgaatgaagattccatggatgtcaagaaggagaatcaagagaaaactcctcagtcaagtacatcttctgtacaaagggatgatttccactgggaggagtatttgaa

SEQ ID NO: 128724 - DNA, 120 bp, Artificial Sequence
  ENSG00000102098_2 (sequence is synthesized)
agagactgggtctataagtgctccttcagagtgcttccgtcagtctcagattccacctgtgaatgatttcaaagttggtatgaaattggaagcccgtgaccctcgcaatgccacttcagt

SEQ ID NO: 128725 - DNA, 120 bp, Artificial Sequence
  ENSG00000102098_3 (sequence is synthesized)
atgtattgctacggttattggaattactggggccaggttacggttacgactggatggtagtgacaacagaaatgatttttggaggcttgtcgattccccagacatacaacctgttgggac

SEQ ID NO: 128726 - DNA, 120 bp, Artificial Sequence
  ENSG00000102098_4 (sequence is synthesized)
atgtgaaaaggaaggagacttacttcaacctccactagggtaccagatgaatacatcctcctggccgatgttcctcttaaagacactaaatgggtctgaaatggcatctgccacattatt

SEQ ID NO: 128727 - DNA, 120 bp, Artificial Sequence
  ENSG00000102098_5 (sequence is synthesized)
taagaaggaaccaccaaagcccccactaaataattttaaagtggggatgaaactggaagctattgacaaaaagaacccgtatctcatctgtcctgcgaccattggagatgttaaagggga

SEQ ID NO: 128728 - DNA, 120 bp, Artificial Sequence
  ENSG00000102098_6 (sequence is synthesized)
tgaagttcatatcacatttgatggctggagtggagcttttgattactggtgcaagtatgattctcgagatattttcccagctgggtggtgtcgcctgacaggagatgtattacaaccccc

SEQ ID NO: 128729 - DNA, 120 bp, Artificial Sequence
  ENSG00000102098_7 (sequence is synthesized)
aggaactagtgttcctattgtaaagaatatagcaaaaacagagtcttctccttccgaagcaagccagcattcaatgcagtctccacagaaaactactctaatattaccaacacagcaggt

SEQ ID NO: 128730 - DNA, 120 bp, Artificial Sequence
  ENSG00000102098_8 (sequence is synthesized)
caggagatcaagtcgaattaaaccacctggacctactgcagtccccaaaaggagcagttctgttaaaaatatcacaccaaggaaaaaaggtccaaactcaggaaaaaaggaaaaaccttt

SEQ ID NO: 128731 - DNA, 120 bp, Artificial Sequence
  ENSG00000102098_9 (sequence is synthesized)
gcccgtgatatgttctacatctgcagcttctctaaaatcgctgaccagagaccgtggcatgttatataaagatgtcgcttctgggccatgtaaaatagtgatgtctacagtctgtgtcta

SEQ ID NO: 128732 - DNA, 120 bp, Artificial Sequence
  ENSG00000102098_10 (sequence is synthesized)
tgtaaacaaacatggaaactttggccctcatctggatcccaagagaatccagcagctgcctgaccacttcggcccgggcccggtgaatgtggtgcttcgccggattgtgcaggcctgtgt

SEQ ID NO: 128733 - DNA, 120 bp, Artificial Sequence
  ENSG00000102098_11 (sequence is synthesized)
ggattgtgcccttgaaactaaaactgtttttggatacctgaagccagataatcgtggaggagaagtgataactgcctcctttgatggggaaactcattccatccagctccctccagtgaa

SEQ ID NO: 128734 - DNA, 120 bp, Artificial Sequence
  ENSG00000102098_12 (sequence is synthesized)
cagtgcatcatttgctcttcgctttcttgagaacttctgccacagtctgcagtgtgataaccttttgagtagccagccttttagttcttccaggggtcatactcacagctctgcagagca

SEQ ID NO: 128735 - DNA, 120 bp, Artificial Sequence
  ENSG00000102098_13 (sequence is synthesized)
tgataaaaatcagtcagcaaaagaagatgtaacagaaaggcaaagcaccaaacgatctcctcagcaaactgtaccatatgttgttcctctctctcctaagctccccaaaacaaaggagta

SEQ ID NO: 128736 - DNA, 120 bp, Artificial Sequence
  ENSG00000102098_14 (sequence is synthesized)
tgcgtctgaaggagaaccattgtttgctgggggaagtgccattcccaaagaggagaatctttcagaagattctaagagctcatcactaaattcaggaaattatttgaatcctgcctgtag

SEQ ID NO: 128737 - DNA, 120 bp, Artificial Sequence
  ENSG00000102098_15 (sequence is synthesized)
aaatcctatgtatattcatacttcagtctcccaggatttttctcgaagtgtgccaggcaccacaagttcaccactagttggggacatatcccccaagagcagtccccatgaagttaaatt

SEQ ID NO: 128738 - DNA, 120 bp, Artificial Sequence
  ENSG00000102098_16 (sequence is synthesized)
ccaaatgcagaggaaaagtgaagctccaagttatatagctgtacctgatcccagtgtcctgaaacaaggcttctctaaggacccttcaacctggtctgtggatgaagtgatacagtttat

SEQ ID NO: 128739 - DNA, 120 bp, Artificial Sequence
  ENSG00000102098_17 (sequence is synthesized)
ctcaagagtgatgtgatgatgaagtatatggggctgaagctggggccagcattaaagctgtgttactacattgaaaagcttaaagaaggaaaatacagttaaaaaaatgtgtaagtttag

SEQ ID NO: 128740 - DNA, 120 bp, Artificial Sequence
  ENSG00000102098_18 (sequence is synthesized)
attggacataattctcaggtgtactgttaacattttaatttaaaagtatttctcttagcagtttttgttttgtagacagttcccataaaaatattttatcagaattgcagaactgtagta

SEQ ID NO: 128741 - DNA, 120 bp, Artificial Sequence
  ENSG00000102098_19 (sequence is synthesized)
acagttcagtcaactttgtttttttcctggagtcaccaaccagctttgggagacacagccgccactcccccagtctacttctttaaaaagcatttaacaggttagtattggcatattcaa

SEQ ID NO: 128742 - DNA, 120 bp, Artificial Sequence
  ENSG00000102098_20 (sequence is synthesized)
attggcagttctttatgtctttttaaattttcattgtacagtttacaaatatacttaatgtagttaacagagaaaaacctttgattttggttaacctttatatctagaaccaaaacagct

SEQ ID NO: 128743 - DNA, 120 bp, Artificial Sequence
  ENSG00000102098_21 (sequence is synthesized)
aaatcccaaaggggaaaatatcagggattgacaacttctataattaaatccatgagaatttttcctcactagagaatttaaaggtgcacctgtagatatcatcttttctcagatattttg

SEQ ID NO: 128744 - DNA, 120 bp, Artificial Sequence
  ENSG00000102098_22 (sequence is synthesized)
tgtgatactctgtggtgttctgttcatgttctatcagtatatctagaaagggaatagccatataaattattttccttttattatttctctgtatgttgtatttgatcatatttaaaggaa

SEQ ID NO: 128745 - DNA, 120 bp, Artificial Sequence
  ENSG00000102098_23 (sequence is synthesized)
aaaagcaagcttataagctttcatgaagtgttcttaccagtttttgataaattttttaaattataggatagaattgtcattttatgcaggagatatttatactacgagggttgtttggat

SEQ ID NO: 128746 - DNA, 120 bp, Artificial Sequence
  ENSG00000102098_24 (sequence is synthesized)
ggagtcagattaaattttttcagtgaaattcctattattttaaaactttccatattttcactacgcttggacatttaactaggcattcttttcttacatctctatatgaagatacctgtg

SEQ ID NO: 128747 - DNA, 120 bp, Artificial Sequence
  ENSG00000102098_25 (sequence is synthesized)
tccaaaatttttgaagatatatattgtatgtgtttattcttcatatggtactttaccatatttatatattgttttatacctgtaggtttacacacaagtaaatcttttttttcttgaatt

SEQ ID NO: 128748 - DNA, 120 bp, Artificial Sequence
  ENSG00000102098_26 (sequence is synthesized)
taatctggcactttgcactgccacagaggtgacgatgaactatgtatatagttagatgttttgatttcgtaaaaaatatatgtccatcgtttgctatcaccagtacctctcagcttactc

SEQ ID NO: 128749 - DNA, 120 bp, Artificial Sequence
  ENSG00000102098_27 (sequence is synthesized)
ttcaggggatatgaaacaatctgtagattggtttccatacagggaagttctctgtcctatgcaatgtttctaattaatttgcttagttctgagccatttattctgctacactttgaaaga

SEQ ID NO: 128750 - DNA, 72 bp, Artificial Sequence
  ENSG00000102098_28 (sequence is synthesized)
gcttagttctgagccatttattctgctacactttgaaagatatattagttctgacttattgtttggggcttt

SEQ ID NO: 128751 - DNA, 85 bp, Artificial Sequence
  ENSG00000102098_29 (sequence is synthesized)
agctcgatctcggctcactgcaacctgattacaggaatgcaccaccacgcccagctaattttgtagagatggggtttctccatgt

SEQ ID NO: 128752 - DNA, 89 bp, Artificial Sequence
  ENSG00000102098_30 (sequence is synthesized)
tttggggctttattttataagttagaactttgaagaggaaatggtgctatatgtttattgttattactttgtgtaactttgatgtaatg

SEQ ID NO: 128753 - DNA, 120 bp, Artificial Sequence
  ENSG00000102098_31 (sequence is synthesized)
tatgtttattgttattactttgtgtaactttgatgtaatgtttataagctatgagaatcagttataaaagtattagccatttgttgtaaatgccaataaaatattcaccaggggcaagaa

SEQ ID NO: 128754 - DNA, 120 bp, Artificial Sequence
  ENSG00000102098_32 (sequence is synthesized)
tgtacattttctttttagaaaaccaaatgtactttagacatgaatgcaactatttaaagaatagcttcatttatgttattccttacatgtcataagattcttacttaaacttggtcttct

SEQ ID NO: 128755 - DNA, 120 bp, Artificial Sequence
  ENSG00000102098_33 (sequence is synthesized)
ttcaagttgtttgtatgaagatgctgtacccacttgaacagtcctcaggtgtttacataaatactatgttttacagttttcatattttaaaatattaataaagttaatcgcaacgattca

SEQ ID NO: 128756 - DNA, 120 bp, Artificial Sequence
  ENSG00000102098_34 (sequence is synthesized)
gctagaaattcaggcttgctcaggcaacatgggctttgttgacttgctttctccagaaaggcaattttattcctggtaaggagcaaggctatcctatcatttggaacctaaatcacctta

SEQ ID NO: 128757 - DNA, 120 bp, Artificial Sequence
  ENSG00000102100_0 (sequence is synthesized)
agatgccaacatggcagcggttggggctggtggttccaccgcggcgcccgggccaggggcggtttccgcgggtgcattggagccggggaccgccagtgcggctcacaggcgcctgaagta

SEQ ID NO: 128758 - DNA, 120 bp, Artificial Sequence
  ENSG00000102100_1 (sequence is synthesized)
catatccctagctgtgctggtggtccagaatgcctccctcatcctcagcatccgctacgcccgcacgttgccaggggaccgcttctttgccaccactgctgtggtcatggcggaagtgct

SEQ ID NO: 128759 - DNA, 120 bp, Artificial Sequence
  ENSG00000102100_2 (sequence is synthesized)
caaaggtctcacctgcctgctgctgctcttcgcacagaagaggggtaacgtgaagcacctggttctcttcctccatgaggctgtcctggtgcagtatgtggacacgctcaagctcgcagt

SEQ ID NO: 128760 - DNA, 120 bp, Artificial Sequence
  ENSG00000102100_3 (sequence is synthesized)
gccctctctcatctacaccttgcagaataacctccagtatgttgccatctctaacctaccagctgccactttccaggtgacataccagctgaagatcctgaccacagcgctgttctccgt

SEQ ID NO: 128761 - DNA, 120 bp, Artificial Sequence
  ENSG00000102100_4 (sequence is synthesized)
gctcatgctgaatcgcagcctttcccggctgcagtgggcctccctgctgctcctcttcactggcgtcgccattgtccaggcacagcaagccggtgggggaggcccacggccactggatca

SEQ ID NO: 128762 - DNA, 120 bp, Artificial Sequence
  ENSG00000102100_5 (sequence is synthesized)
gaaccctggggcaggcctggcagccgtcgtggcctcctgtctctcctccggcttcgcaggtgtctactttgagaagatcctcaaaggcagctcaggctccgtgtggctgcgcaacctgca

SEQ ID NO: 128763 - DNA, 120 bp, Artificial Sequence
  ENSG00000102100_6 (sequence is synthesized)
acagcactgggcctggtggggctctggtgggctgagggtaccgccgtggccacccgtggtttcttttttgggtacacacctgctgtctggggcgtggtgctcaaccaggccttcggcggg

SEQ ID NO: 128764 - DNA, 120 bp, Artificial Sequence
  ENSG00000102100_7 (sequence is synthesized)
ctactggtggctgtggttgtcaagtacgctgacaatatcctcaagggctttgccacctccctgtccattgtgctgtccactgttgcctccattcgcctctttggcttccacgtggaccca

SEQ ID NO: 128765 - DNA, 120 bp, Artificial Sequence
  ENSG00000102100_8 (sequence is synthesized)
ttatttgcccttggcgctggactcgtcattggtgctgtctacctctacagccttccccgaggtgcagccaaagccatagcctctgcctctgcctccgcctccgggccctgcgttcaccag

SEQ ID NO: 128766 - DNA, 120 bp, Artificial Sequence
  ENSG00000102100_9 (sequence is synthesized)
cagcctcccgggcagccaccaccaccgcagctgtcttcccaccgtggagacctcatcacggagccctttctgccaaagttgctcaccaaggtgaagggttcctagccgctgggattgaag

SEQ ID NO: 128767 - DNA, 120 bp, Artificial Sequence
  ENSG00000102100_10 (sequence is synthesized)
acattggcctggcctcgttctctcttcttgcccttggcccagctgggaccaaactctgatcagtattaggggtagagtgaggtagacactggactccctgtccccaccacccctgcccca

SEQ ID NO: 128768 - DNA, 120 bp, Artificial Sequence
  ENSG00000102100_11 (sequence is synthesized)
cccagggccaacatgactaagctctctcatgacccacctcagctcagccccccagcccctgccagctccacactatctcttagctgagtttttgcaaataaaatgtgttgtgtatcttgc

SEQ ID NO: 128769 - DNA, 120 bp, Artificial Sequence
  ENSG00000102100_12 (sequence is synthesized)
atcgggggatgatctggaaagcgcgatcagtgaagcggacgaacggcaggataaggcgggtctagtgacaggaatgggccgatgaagctctgtagggatggtgggtaggccgatcgggcc

SEQ ID NO: 128770 - DNA, 120 bp, Artificial Sequence
  ENSG00000102100_13 (sequence is synthesized)
gtgtccccggcctcccgatccgacggaatttggaaatcccggggctattcatacattgagcttttaggagcggaggagaaaagccaccaccctgacgatcccggctctcgctccaccttc

SEQ ID NO: 128771 - DNA, 120 bp, Artificial Sequence
  ENSG00000102100_14 (sequence is synthesized)
cagtgctggtgaagtgagggctggcagcaatggggggacacaagggagggggactggggtggagggtgttgggcatctgcaggacccaagtcgccaccctccggggcctggctcctctgg

SEQ ID NO: 128772 - DNA, 120 bp, Artificial Sequence
  ENSG00000102100_15 (sequence is synthesized)
gtttgggagatggtcttttctcccaggtcactgagacttctggaggggtgtgggactagagctgggtgtcacgtgaacccttcctggtagggtgacccccttcccctggagggggtttta

SEQ ID NO: 128773 - DNA, 120 bp, Artificial Sequence
  ENSG00000102100_16 (sequence is synthesized)
gagctgccgcctctgctccctctaacctctttggaggcagggttgggggtattgtcattcaaggccttttttttgtctgctccctccccgaccctgtgccctcttctggaggtttctcgt

SEQ ID NO: 128774 - DNA, 120 bp, Artificial Sequence
  ENSG00000102100_17 (sequence is synthesized)
ctgggagagtccctcccagcagtccctccacctccataaggacacactggacaaaactcccgcagctcttcaggaatgaccgatgcctacctgtggggttcagttgcccatagtttgagg

SEQ ID NO: 128775 - DNA, 120 bp, Artificial Sequence
  ENSG00000102100_18 (sequence is synthesized)
ccttctctcctcccttaccaccgctctggatcatgttactagttccgtcttttgtgtggccttgggccagcttccttgataccttgaagatgggcttcttgtgagtccccagggagaaag

SEQ ID NO: 128776 - DNA, 120 bp, Artificial Sequence
  ENSG00000102100_19 (sequence is synthesized)
ggacaagagctaagatttttgcatcagcccttctggcagaaggtgtggtaggggccatttgttttttttagtggacttgggatttgtggtgtaatcatatcattaatgatccagggtgtg

SEQ ID NO: 128777 - DNA, 120 bp, Artificial Sequence
  ENSG00000102100_20 (sequence is synthesized)
ggaaaaatggaggtccttgaagtggctgaatctcattgtatttaagacactgtcagttgccagatgtaggcttatttttggagatgtctaggagaggaaaaagctaccaatcatactctt

SEQ ID NO: 128778 - DNA, 120 bp, Artificial Sequence
  ENSG00000102100_21 (sequence is synthesized)
gatatccgtctggctgtgtgaggcacccctacctcatgggggtgtcttgggattgatgaactgtggaacctgcctcctgcgctccccaaagcttattaaccccttaactgtatcggggcg

SEQ ID NO: 128779 - DNA, 120 bp, Artificial Sequence
  ENSG00000102100_22 (sequence is synthesized)
gggtgtgtgtgtgcatggaagatgcctgggctgtctttgctatatgtaaatagagccattggatctttatttttgattaatttgttctgattttttggtttgttttttaaggaactgtaa

SEQ ID NO: 128780 - DNA, 120 bp, Artificial Sequence
  ENSG00000102100_23 (sequence is synthesized)
tgaacaaatgtcaggatatccaatgccaaataaagatgttgtatttatttagtccacgtgtagctttctgaccaggtgggcaccattactaaccccaggactaccagcctcaccaccgcc

SEQ ID NO: 128781 - DNA, 120 bp, Artificial Sequence
  ENSG00000102100_24 (sequence is synthesized)
gccctcacttgctcaggaaacccgcctgccagcctagcccagctttgtgtttttctttcctccccattcccaccacaggttgctcaccaaggtgaagggttcctagccgctgggattgaa

SEQ ID NO: 128782 - DNA, 120 bp, Artificial Sequence
  ENSG00000102100_25 (sequence is synthesized)
agatgccaacatggcagcggttggggctggtggttccaccgcggcgcccgggccaggggcggtttccgcgggtgcattggagccggggaccgccagtgcggagttgcttctcacttggga

SEQ ID NO: 128783 - DNA, 120 bp, Artificial Sequence
  ENSG00000102100_26 (sequence is synthesized)
agatgccaacatggcagcggttggggctggtggttccaccgcggcgcccgggccaggggcggtttccgcgggtgcattggagccggggaccgccagtgcgggtgagacagtctgcccgag

SEQ ID NO: 128784 - DNA, 120 bp, Artificial Sequence
  ENSG00000102100_27 (sequence is synthesized)
agtatgggaatagcgtggtgggggggtgttgcagaggacaggggctatgtcaccttcagaatgtccttggaactccttcaacctcccttttctcgtctgtgaaaattgggggtggaaata

SEQ ID NO: 128785 - DNA, 120 bp, Artificial Sequence
  ENSG00000102100_28 (sequence is synthesized)
gtaatgcctgttcactgagatgctaggatacttaaaagaaataatacctgtgaagagcccttgattggtgacagataagctttaggctatttgtgggcagctttgtgaaatggttaaaga

SEQ ID NO: 128786 - DNA, 120 bp, Artificial Sequence
  ENSG00000102100_29 (sequence is synthesized)
gcctggattctggggccaggctgtctgggttcaaatctcagctctgctaccttccagctgtgtgattttggggcacgtcacctaacctctctgtgccttagttttctcacctttaaattg

SEQ ID NO: 128787 - DNA, 120 bp, Artificial Sequence
  ENSG00000102100_30 (sequence is synthesized)
gggcttacagtggtgctcacttcagaatggtgttgtgagaattaaatgaatgaattcacgtgcagtgcctagaaccacactgatatattgtaagcactatgtaagtatttgctgacattg

SEQ ID NO: 128788 - DNA, 120 bp, Artificial Sequence
  ENSG00000102103_0 (sequence is synthesized)
gggagaggaacagggccctggagcacctggtttcggggacagtagggttggtgggagttgcgatgatattgccacctacctcttacatcttttagtgcgtatgttctgtccacccagcta

SEQ ID NO: 128789 - DNA, 120 bp, Artificial Sequence
  ENSG00000102103_1 (sequence is synthesized)
ctggttcatttgagtagatcggagtcagatgagtacatgtttacgggaggcgcttggttacgggatccagataggaatctttatctgagctgcttgtcagtttgttcgtctgtccctagg

SEQ ID NO: 128790 - DNA, 120 bp, Artificial Sequence
  ENSG00000102103_2 (sequence is synthesized)
tctgtctgctatcagctatgccgctgcccgttgcgctgcagacccgcttggccaagagaggcatcctcaaacatctggagcctgaaccagaggaagagatcattgccgaggactatgacg

SEQ ID NO: 128791 - DNA, 120 bp, Artificial Sequence
  ENSG00000102103_3 (sequence is synthesized)
atgatcctgtggactacgaggccaccaggttggagggcctaccaccaagctggtacaaggtgttcgacccttcctgcgggctcccttactactggaatgcagacacagaccttgtatcct

SEQ ID NO: 128792 - DNA, 120 bp, Artificial Sequence
  ENSG00000102103_4 (sequence is synthesized)
ccaaatcggccaagaagctcagaagcagtaatgcagatgctgaagaaaagttggaccggagccatgacaagtcggacaggggccatgacaagtcggaccgcagccatgagaaactagaca

SEQ ID NO: 128793 - DNA, 120 bp, Artificial Sequence
  ENSG00000102103_5 (sequence is synthesized)
ggggccacgacaagtcagaccggggccacgacaagtctgacagggatcgagagcgtggctatgacaaggtagacagagagagagagcgagacagggaacgggatcgggaccgcgggtatg

SEQ ID NO: 128794 - DNA, 120 bp, Artificial Sequence
  ENSG00000102103_6 (sequence is synthesized)
acaaggcagaccgggaagagggcaaagaacggcgccaccatcgccgggaggagctggctccctatcccaagagcaagaaggcagtaagccgaaaggatgaagagttagaccccatggacc

SEQ ID NO: 128795 - DNA, 120 bp, Artificial Sequence
  ENSG00000102103_7 (sequence is synthesized)
ctagctcatactcagacgccccccggggcacgtggtcaacaggactccccaagcggaatgaggccaagactggcgctgacaccacagcagctgggcccctcttccagcagcggccgtatc

SEQ ID NO: 128796 - DNA, 120 bp, Artificial Sequence
  ENSG00000102103_8 (sequence is synthesized)
catccccaggggctgtgctccgggccaatgcagaggcctcccgaaccaagcagcaggattgaagcttcggcctccctggccctgggttaaaataaaagctttctggtgatcctgcccacc

SEQ ID NO: 128797 - DNA, 120 bp, Artificial Sequence
  ENSG00000102103_9 (sequence is synthesized)
tgcctcctgagcgtagtccagttactttcaggctcggggagtgaaggcctcgttgagagaaggtctcattcggtgttttgggaagagagtcgtgtgggcccaggtatcgtagcggcgaca

SEQ ID NO: 128798 - DNA, 120 bp, Artificial Sequence
  ENSG00000102103_10 (sequence is synthesized)
cctttgatctctccgtaaactctggcttctctttctatgtctttctccctattctctttctgtccctttgattcccccatgtctgtctctttctccctgacctgtcggggtctgtccctg

SEQ ID NO: 128799 - DNA, 120 bp, Artificial Sequence
  ENSG00000102103_11 (sequence is synthesized)
aggaagtgagtaaagtgatcccacacctgtcagggctggacccccttgctcttctctgatcccacccacctccttaacccctcttgcccacagactatttcccttctccccatgcagaca

SEQ ID NO: 128800 - DNA, 120 bp, Artificial Sequence
  ENSG00000102103_12 (sequence is synthesized)
ggtgggtggcaaactcaagggccaccggggtcacactgtgaaagcaccagccagggagaccaaagcaaaaaaaatgaggatgcggagctgagagatcaagacagatagaggcagagacta

SEQ ID NO: 128801 - DNA, 120 bp, Artificial Sequence
  ENSG00000102103_13 (sequence is synthesized)
agggcttaggcagggaggaagcaggaagaaacaggaggaggaacctgagacagagccgctgaagtccttgctggaagcagatgggattaaatgagcgacgagactgggagagtgccagag

SEQ ID NO: 128802 - DNA, 120 bp, Artificial Sequence
  ENSG00000102103_14 (sequence is synthesized)
agagacaccaagaggatgcagggctaggagattacgaagtcaggagaaacatggcgtggttcggccttcgccgcaccttctctggttgtggcccctcataacggagcccgaatgacagga

SEQ ID NO: 128803 - DNA, 120 bp, Artificial Sequence
  ENSG00000102103_15 (sequence is synthesized)
accgagtgggggtagcgggagatacgttaagagtcccccgagtctggtacatggctctgtgcggccgatgcctcccccgcccgacccccacggctggccttggcgtcgcagcaatattcc

SEQ ID NO: 128804 - DNA, 120 bp, Artificial Sequence
  ENSG00000102103_16 (sequence is synthesized)
ggatgcctgtgcccattgccgtaccagggctcccgagcgtactcctccatggcgctggcgtctggccgcgcagtcaggccacgcccccagcgtagacgcacaccggcgtcggagctttcc

SEQ ID NO: 128805 - DNA, 120 bp, Artificial Sequence
  ENSG00000102103_17 (sequence is synthesized)
ttccactacctgcacgagtgtattggtaacgttggggtgggtgcactcttttggagctggaggaagtgctgccctctgctcccccatcccagcgctttggtttctcccacccggcagtca

SEQ ID NO: 128806 - DNA, 89 bp, Artificial Sequence
  ENSG00000102103_18 (sequence is synthesized)
tcctgtggactacgaggccaccaggttggagggcctaccaccaagctggtacaaggtgttcgacccttcctgcccgtggcaacctccgc

SEQ ID NO: 128807 - DNA, 120 bp, Artificial Sequence
  ENSG00000102103_19 (sequence is synthesized)
aggagctggctccctatcccaagagcaagaagggtaagctgggcagaatggggctcggtgagaccaacaaggtgcagggtgcactgcgtgaggaagccttccctcaaaaagatgcctgga

SEQ ID NO: 128808 - DNA, 120 bp, Artificial Sequence
  ENSG00000102103_20 (sequence is synthesized)
cctggggctagaggagggtgctgtggtacatggcagccaggggcttcatttcttcttgtggggtggggctcagtgatcaggggatcctggtgcctctattgaagactttgccctgccact

SEQ ID NO: 128809 - DNA, 120 bp, Artificial Sequence
  ENSG00000102103_21 (sequence is synthesized)
tccacagcagtaagccgaaaggatgaagagttagaccccatggaccctagctcatactcagacgccccccggtaagtgacaacccctcttgactcagtacgtggacaccatcctccggcc

SEQ ID NO: 128810 - DNA, 120 bp, Artificial Sequence
  ENSG00000102104_0 (sequence is synthesized)
cagttcagtaaggtagagctttggccgaggacgaggggaagatgtcacgcaagatagaaggctttttgttattacttctctttggctatgaagccacattgggattatcgtctaccgagg

SEQ ID NO: 128811 - DNA, 120 bp, Artificial Sequence
  ENSG00000102104_1 (sequence is synthesized)
atgaaggcgaggacccctggtaccaaaaagcatgcaagtgcgattgccaaggaggacccaatgctctgtggtctgcaggtgccacctccttggactgtataccagaatgcccatatcaca

SEQ ID NO: 128812 - DNA, 120 bp, Artificial Sequence
  ENSG00000102104_2 (sequence is synthesized)
agcctctgggtttcgagtcaggggaggtcacaccggaccagatcacctgctctaacccggagcagtatgtgggctggtattcttcgtggactgcaaacaaggcccggctcaacagtcaag

SEQ ID NO: 128813 - DNA, 120 bp, Artificial Sequence
  ENSG00000102104_3 (sequence is synthesized)
gctttgggtgtgcctggctctccaagttccaggacagtagccagtggttacagatagatctgaaggagatcaaagtgatttcagggatcctcacccaggggcgctgtgacatcgatgagt

SEQ ID NO: 128814 - DNA, 120 bp, Artificial Sequence
  ENSG00000102104_4 (sequence is synthesized)
ggatgaccaagtacagcgtgcagtacaggaccgatgagcgcctgaactggatttactacaaggaccagactggaaacaaccgggtcttctatggcaactcggaccgcacctccacggttc

SEQ ID NO: 128815 - DNA, 120 bp, Artificial Sequence
  ENSG00000102104_5 (sequence is synthesized)
agaacctgctgcggccccccatcatctcccgcttcatccgcctcatcccgctgggctggcacgtccgcattgccatccggatggagctgctggagtgcgtcagcaagtgtgcctgatgcc

SEQ ID NO: 128816 - DNA, 120 bp, Artificial Sequence
  ENSG00000102104_6 (sequence is synthesized)
tgcctcagctcggcgcctgccagggggtgactggcacagagcgggccgtaggggaccccctcacacaccaccgagatggacagggctatatttcgcaaagcaattgtaactgcagtgctg

SEQ ID NO: 128817 - DNA, 120 bp, Artificial Sequence
  ENSG00000102104_7 (sequence is synthesized)
ggtagataatttttttttttttaagatatagctttctgatttcaatgaaataaaaatgaacttattccccactcagggccagagaaagtcagaacaaagaaaatgtccccgaaacgaatt

SEQ ID NO: 128818 - DNA, 120 bp, Artificial Sequence
  ENSG00000102104_8 (sequence is synthesized)
ttcttacaaaagcctaagtagcaggggtaattttctgctcattttttgtctcagtgatactgtgaaaggtgcagtctcaggggaacacaaagcagccctgataatttgaaaattcatttg

SEQ ID NO: 128819 - DNA, 120 bp, Artificial Sequence
  ENSG00000102104_9 (sequence is synthesized)
ctttaccacattcaagacagaaacatacagtttcctaaagcctggctttgaatgcagaagggagcagctcctcctagttaagtttccactaaatcatcgccaaagaggacttcagagccc

SEQ ID NO: 128820 - DNA, 120 bp, Artificial Sequence
  ENSG00000102104_10 (sequence is synthesized)
tggggaggcagctgagggtctcaagggtgactgggtggcagggatgagtgcggtgggtgagaatcccggtgccctgagaggctatacgtgacaaatgaccaaaagcccaaggtaggggag

SEQ ID NO: 128821 - DNA, 120 bp, Artificial Sequence
  ENSG00000102104_11 (sequence is synthesized)
tcatgaacacagggattggggagggaccagagcgcccaatacacacagctccattatgcaatccattccagcaaattccccgtgtctgtggtcaccatttaggtgatcatacaggacagg

SEQ ID NO: 128822 - DNA, 120 bp, Artificial Sequence
  ENSG00000102104_12 (sequence is synthesized)
ctgcacatctcagtatatgtagggaccccaaatgaccacaacacagtacaattgccctttacctagggctaccatttcctagcaaaccaaacatagttcgagaacagctggcccaggagc

SEQ ID NO: 128823 - DNA, 120 bp, Artificial Sequence
  ENSG00000102104_13 (sequence is synthesized)
taccactggctactcagaggaggctcattagctggctacatgcttcgcaggaagtgggaaggactcacatcataaaaaggaccatgtagctttttccctgaaagcttctcaccctccacc

SEQ ID NO: 128824 - DNA, 120 bp, Artificial Sequence
  ENSG00000102104_14 (sequence is synthesized)
ctctgccttgcaatacgcaaactgcgcctgctcctgaaaagctctctgggaaggaatgggcctggctttccgttcctggaggcggcgccttagattgggaggcctcattggccacttaga

SEQ ID NO: 128825 - DNA, 120 bp, Artificial Sequence
  ENSG00000102104_15 (sequence is synthesized)
gcgcagcctgagtttccaggccccttcctgggagaggctgttaacacgggggaggggcaggagagggatatggagagcaggtggtggaatcagaggacgaggctgctctaaagactgttc

SEQ ID NO: 128826 - DNA, 120 bp, Artificial Sequence
  ENSG00000102104_16 (sequence is synthesized)
tggccccagacacagggtagtctttgctagcagctcatttccgagttacttttcattttcaaatgccaaggcaagtgactagactcgcgctaatacagtgctggacaacacattcacctt

SEQ ID NO: 128827 - DNA, 120 bp, Artificial Sequence
  ENSG00000102104_17 (sequence is synthesized)
ttctgtgaacaggcagccttctaaaagccccaaacatccttcttgatgctttgggggctcaattattttatatccaacccagcatctttctagtccctatgctgtatgcttgaacttcgg

SEQ ID NO: 128828 - DNA, 90 bp, Artificial Sequence
  ENSG00000102104_18 (sequence is synthesized)
agcatctttctagtccctatgctgtatgcttgaacttcggaaaatgcttttccccgcccaatcttctctcaaatataaacacatcacaca

SEQ ID NO: 128829 - DNA, 120 bp, Artificial Sequence
  ENSG00000102104_19 (sequence is synthesized)
tggatagaaatgcctgaacagagacccttatttggaaaggtgaattaactttggtcacgacatggactgtcagacaaaatggcagtatcctaagagttaaggcacatcaaacacaggagt

SEQ ID NO: 128830 - DNA, 120 bp, Artificial Sequence
  ENSG00000102104_20 (sequence is synthesized)
cgagagagtgcagttcagggaaaaaggagaggaggaaacagtgaggcagggagaaaggctttccaaataagagttcatgttggaaacttttgtcacggctttattgagattaagttcaca

SEQ ID NO: 128831 - DNA, 120 bp, Artificial Sequence
  ENSG00000102104_21 (sequence is synthesized)
tacaatttgtatccatttaaagtgtacaatttgatgacttttggtatattcagagttgtgcaaccattatcactagatcaattttagaaagtttatcaccccaaagagaaatcctgcacc

SEQ ID NO: 128832 - DNA, 120 bp, Artificial Sequence
  ENSG00000102104_22 (sequence is synthesized)
catcagccaacactccccaacccatcggccaccccaagccctctgcaaccacgaatcgactgtctctgtagattggccttctggacgttctacataaatgaaatcatatagtatgtggta

SEQ ID NO: 128833 - DNA, 120 bp, Artificial Sequence
  ENSG00000102104_23 (sequence is synthesized)
gcacatggaagtgcctcggacctggagtactggatagggagcaggactggagattggacgatgaagggctcggtttgggacgcacggagtgtgaggcttctttgggtcaccacagcagaa

SEQ ID NO: 128834 - DNA, 120 bp, Artificial Sequence
  ENSG00000102104_24 (sequence is synthesized)
gtattctcctggaaaatattcagagggcagtggaatgaagcttggggcccgggaggcaggcatcggctcccagacaccagctgaagccaaggtgacagtgagagcgtcaccttccctggg

SEQ ID NO: 128835 - DNA, 120 bp, Artificial Sequence
  ENSG00000102104_25 (sequence is synthesized)
gagtaagtacagcatccacgtctggacacacgggtctttagatcgcagagtgagccacacattctctgctgcctggacaggccctcccaggctgtcaaggccattggccctggccaggta

SEQ ID NO: 128836 - DNA, 120 bp, Artificial Sequence
  ENSG00000102104_26 (sequence is synthesized)
cccctgcagggctacagaccgctctggagtgttagatgagctatttgggaagaaatggcaaaagagatgtgaaggggaaacagatgaagaagagcaaagtgccaagaataagatctctaa

SEQ ID NO: 128837 - DNA, 120 bp, Artificial Sequence
  ENSG00000102104_27 (sequence is synthesized)
gttggtggaggaggtgaagtatttctcaaaattccacacaccccttgtgaagttgccatagagccacttccctctgcttttacaaaggctgttgagtctctatggcaattcctttacttc

SEQ ID NO: 128838 - DNA, 80 bp, Artificial Sequence
  ENSG00000102109_0 (sequence is synthesized)
gcagcctcgccagctcgccccggcactgcgcacttgccagccagtccgcccgtccggagcccggctcgctggggcagcat

SEQ ID NO: 128839 - DNA, 120 bp, Artificial Sequence
  ENSG00000102109_1 (sequence is synthesized)
gtcggccttttggtgctgctgctgctcggcctgtttcggccgccccccgcgctctgcgcgcggccggtaaaggagccccgcggcctaagcgcagcgtctccgcccttggctgagactggc

SEQ ID NO: 128840 - DNA, 120 bp, Artificial Sequence
  ENSG00000102109_2 (sequence is synthesized)
gctcctcgccgcttccggcggtcagtgccccgaggtgaggcggcgggggcggtgcaggagctggcgcgggcgctggcgcatctgctggaggccgaacgtcaggagcgggcgcgggccgag

SEQ ID NO: 128841 - DNA, 120 bp, Artificial Sequence
  ENSG00000102109_3 (sequence is synthesized)
gcgcaggaggctgaggatcagcaggcgcgcgtcctggcgcagctgctgcgcgtctggggcgccccccgcaactctgatccggctctgggcctggacgacgaccccgacgcgcctgcagcg

SEQ ID NO: 128842 - DNA, 120 bp, Artificial Sequence
  ENSG00000102109_4 (sequence is synthesized)
cgcgcccgtccccgccgcggcgctccgaccccggcccccggtctacgacgacggccccgcgggcccggatgctgaggaggcaggcgacgagacacccgacgtggaccccgagctgttgag

SEQ ID NO: 128843 - DNA, 120 bp, Artificial Sequence
  ENSG00000102109_5 (sequence is synthesized)
gtacttgctgggacggattcttgcgggaagcgcggactccgagggggtggcagccccgcgccgcctccgccgtgccgccgaccacgatgtgggctctgagctgccccctgagggcgtgct

SEQ ID NO: 128844 - DNA, 120 bp, Artificial Sequence
  ENSG00000102109_6 (sequence is synthesized)
gggggcgctgctgcgtgtgaaacgcctagagaccccggcgccccaggtgcctgcacgccgcctcttgccaccctgagcactgcccggatcccgtgcaccctgggacccagaagtgccccc

SEQ ID NO: 128845 - DNA, 120 bp, Artificial Sequence
  ENSG00000102109_7 (sequence is synthesized)
gccatcccgccaccaggactgctccccgccagcacgtccagagcaacttaccccggccagccagccctctcacccgaggatccctaccccctggccccacaataaacatgatctgaagca

SEQ ID NO: 128846 - DNA, 120 bp, Artificial Sequence
  ENSG00000102109_8 (sequence is synthesized)
tgtgtgtgtgtgtgtgtgtgtgtgatttcgtttgtgtttgagagggaatggtcttcgcatctccgtgtgcacattccatagtggttctgttggaccaagtgcctgggatttcgtttgcgt

SEQ ID NO: 128847 - DNA, 120 bp, Artificial Sequence
  ENSG00000102109_9 (sequence is synthesized)
gactgtttctctccgtttctttgtggagctgtgtcatcctgaggagaggagccatgatgtctctctgctgcattgtgtctttaaggatggtgcatgtccttgcacctgggtggcttggcg

SEQ ID NO: 128848 - DNA, 120 bp, Artificial Sequence
  ENSG00000102109_10 (sequence is synthesized)
attgtaactgcaggagcagctgcggatgtgaacgtgtgcaggagccccgcggcctaagcgcagcgtctccgcccttggctgagactggcgctcctcgccgcttccggcggtcagtgcccc

SEQ ID NO: 128849 - DNA, 120 bp, Artificial Sequence
  ENSG00000102119_0 (sequence is synthesized)
cgcggccccagcctcccagctctcagggcacggccggtctgtgccggctgctcccgcggttaggtcccgccccgcgcagcgcgcgcagcctgcggagccagcggccgtgacgcgacaacg

SEQ ID NO: 128850 - DNA, 120 bp, Artificial Sequence
  ENSG00000102119_1 (sequence is synthesized)
gacgcgacaacgattcggctgtgacgcgacaacgattcggctgtgacgcgagcgcggccgctcccgatgcgctcgtgccgcccccgccgtgctcctcggcagccgttgctcggccggttt

SEQ ID NO: 128851 - DNA, 120 bp, Artificial Sequence
  ENSG00000102119_2 (sequence is synthesized)
tggtaggcccgggccgccgccaggcctccgcctgagcccgcacccgccatggacaactacgcagatctttcggataccgagctgaccaccttgctgcgccggtacaacatcccgcacggg

SEQ ID NO: 128852 - DNA, 120 bp, Artificial Sequence
  ENSG00000102119_3 (sequence is synthesized)
cctgtagtaggatcaactcgtaggctttacgagaagaagatcttcgagtacgagacccagaggcggcggctctcgccccccagctcgtccgccgcctcctcttatagcttctctgacttg

SEQ ID NO: 128853 - DNA, 120 bp, Artificial Sequence
  ENSG00000102119_4 (sequence is synthesized)
aattcgactagaggggatgcagatatgtatgatcttcccaagaaagaggacgctttactctaccagagcaagggctacaatgacgactactatgaagagagctacttcaccaccaggact

SEQ ID NO: 128854 - DNA, 120 bp, Artificial Sequence
  ENSG00000102119_5 (sequence is synthesized)
cccagatgctgacgctttccatcaccaggtgcatgatgacgatcttttgtcttcttctgaagaggagtgcaaggatagggaacgccccatgtacggccgggacagtgcctaccagagcat

SEQ ID NO: 128855 - DNA, 120 bp, Artificial Sequence
  ENSG00000102119_6 (sequence is synthesized)
cacgcactaccgccctgtttcagcctccaggagctccctggacctgtcctattatcctacttcctcctccacctcttttatgtcctcctcatcatcttcctcttcatggctcacccgccg

SEQ ID NO: 128856 - DNA, 120 bp, Artificial Sequence
  ENSG00000102119_7 (sequence is synthesized)
tgccatccggcctgaaaaccgtgctcctggggctgggctgggccaggatcgccaggtcccgctctggggccagctgctgcttttcctggtctttgtgatcgtcctcttcttcatttacca

SEQ ID NO: 128857 - DNA, 120 bp, Artificial Sequence
  ENSG00000102119_8 (sequence is synthesized)
cttcatgcaggctgaagaaggcaaccccttctagagggagccatgagggtctgggcttcagagctaggtctttggggaagtcctggctgactgccttagcagtgggggtgggggtggggg

SEQ ID NO: 128858 - DNA, 120 bp, Artificial Sequence
  ENSG00000102119_9 (sequence is synthesized)
caggggcaggggctttatgtgtttttgcttggggggcgctgggcctagcccagagtagtgcttgctccccctgccttgtcccaccagggaggcagcagactcaggccctccatggtcctc

SEQ ID NO: 128859 - DNA, 120 bp, Artificial Sequence
  ENSG00000102119_10 (sequence is synthesized)
tttgtcattttgttgacatgcattcctccttttgtcatcttgttggggggaggggattaaccaaaggccaccctgactttgtttttgtggacacacaataaaagccccgtttatttgtaa

SEQ ID NO: 128860 - DNA, 120 bp, Artificial Sequence
  ENSG00000102119_11 (sequence is synthesized)
agtcccaaccactccagcagccttaggagggagaaactgttacaggtcccgaaatgggattcagattagggccatcaggccaggcggggcacaccgatgccccctctgctaccgctgccc

SEQ ID NO: 128861 - DNA, 120 bp, Artificial Sequence
  ENSG00000102119_12 (sequence is synthesized)
agatgctgacgctttccatcaccaggtgagctggctggcaggcgtcctgtacttgggtacaacctaggggatcgcggctgtgtttggataaatccaggggggcactgggtacaaatggtg

SEQ ID NO: 128862 - DNA, 120 bp, Artificial Sequence
  ENSG00000102119_13 (sequence is synthesized)
taggtgcgtagtgggggagcccagggacgggctggttctgggtccaggctcctggcccacttgctcccctcttttgcctcagggaacgccccatgtacggccgggacagtgcctaccaga

SEQ ID NO: 128863 - DNA, 120 bp, Artificial Sequence
  ENSG00000102119_14 (sequence is synthesized)
ggcatgagcacaagtggcaaggccccatggataaagggctgaacacccagagccattcaggagggtgtgggttcctggcctctaaccaaaggtcagaggggactggctggggaagtttgg

SEQ ID NO: 128864 - DNA, 120 bp, Artificial Sequence
  ENSG00000102125_0 (sequence is synthesized)
gctttccggcggttgcaccgggccggggtgccagcgcccgccttcccgtttcctcccgttccgcagcgcgcccacggcctgtgaccccggcgaccgctccccagtgacgagagagcgggg

SEQ ID NO: 128865 - DNA, 120 bp, Artificial Sequence
  ENSG00000102125_1 (sequence is synthesized)
ccgggcgctgctccggcctgacctgcgaagggacctcggtccagtcccctgttgcgccgcgcccccgtccgtccgtgcgcgggccagtcaggggccagtgtctcgagcggtcgaggtcgc

SEQ ID NO: 128866 - DNA, 120 bp, Artificial Sequence
  ENSG00000102125_2 (sequence is synthesized)
tctcgagcggtcgaggtcgcagacctagaggcgccccacaggccggcccggggcgctgggagcgccggccgcgggccgggtggggatgcctctgcacgtgaagtggccgttccccgcggt

SEQ ID NO: 128867 - DNA, 120 bp, Artificial Sequence
  ENSG00000102125_3 (sequence is synthesized)
tggccagcagcgtcgtcatgggcttggtgggcacctacagctgcttctggaccaagtacatgaaccacctgaccgtgcacaacagggaggtgctgtacgagctcatcgagaagcgaggcc

SEQ ID NO: 128868 - DNA, 120 bp, Artificial Sequence
  ENSG00000102125_4 (sequence is synthesized)
cggccacgcccctcatcaccgtgtccaatcaccagtcctgcatggacgaccctcatctctgggggatcctgaaactccgccacatctggaacctgaagttgatgcgttggacccctgcag

SEQ ID NO: 128869 - DNA, 120 bp, Artificial Sequence
  ENSG00000102125_5 (sequence is synthesized)
ctgcagacatctgcttcaccaaggagctacactcccacttcttcagcttgggcaagtgtgtgcctgtgtgccgaggagatggcgtctaccagaaggggatggacttcattttggagaagc

SEQ ID NO: 128870 - DNA, 120 bp, Artificial Sequence
  ENSG00000102125_6 (sequence is synthesized)
tcaaccatggggactgggtgcatatcttcccagaagggaaagtgaacatgagttccgaattcctgcgtttcaagtggggaatcgggcgcctgattgctgagtgtcatctcaaccccatca

SEQ ID NO: 128871 - DNA, 120 bp, Artificial Sequence
  ENSG00000102125_7 (sequence is synthesized)
ctgcctgtactcgagcggctccgggcggagaacaagtcggctgtggagatgcggaaagccctgacggacttcattcaagaggaattccagcatctgaagactcaggcagagcagctccac

SEQ ID NO: 128872 - DNA, 120 bp, Artificial Sequence
  ENSG00000102125_8 (sequence is synthesized)
aaccacctccagcctgggagataggccttgcttgctgccttctggattcttggcccgcacagagctggggctgagggatggactgatgcttttagctcaaacgtggcttttagacagatt

SEQ ID NO: 128873 - DNA, 120 bp, Artificial Sequence
  ENSG00000102125_9 (sequence is synthesized)
tgttcatagaccctctcaagtgccctctccgagctggtaggcattccagctcctccgtgcttcctcagttacacaaaggacctcagctgcttctcccacttggccaagcagggaggaaga

SEQ ID NO: 128874 - DNA, 120 bp, Artificial Sequence
  ENSG00000102125_10 (sequence is synthesized)
agcttaggcagggctctctttccttcttgccttcagatgttctctcccaggggctggcttcaggagggagcatagaaggcaggtgagcaaccagttggctaggggagcagggggcccacc

SEQ ID NO: 128875 - DNA, 120 bp, Artificial Sequence
  ENSG00000102125_11 (sequence is synthesized)
agagctgtggagaggggaccctaagactcctcggcctggctcctacccaccgcccttgccgaaccaggagctgctcactacctcctcagggatggccgttggccacgtcttccttctgcc

SEQ ID NO: 128876 - DNA, 120 bp, Artificial Sequence
  ENSG00000102125_12 (sequence is synthesized)
tgagcttcccccccaccacaggccctttcctcaggcaaggtctggcctcaggtgggccgcaggcgggaaaagcagcccttggccagaagtcaagcccagccacgtggagcctagagtgag

SEQ ID NO: 128877 - DNA, 120 bp, Artificial Sequence
  ENSG00000102125_13 (sequence is synthesized)
ggcctgaggtctggctgcttgcccccatgctggcgccaacaacttctccatcctttctgcctctcaacatcacttgaatcctagggcctgggttttcatgtttttgaaacagaaccataa

SEQ ID NO: 128878 - DNA, 120 bp, Artificial Sequence
  ENSG00000102125_14 (sequence is synthesized)
tggcgtctaccagaaggggatggacttcattttggagaagctcaaccatggggactgggtgcatatcttcccagaaggtcagcagggctgactgggtcgagcccccccagtatgagcggg

SEQ ID NO: 128879 - DNA, 120 bp, Artificial Sequence
  ENSG00000102125_15 (sequence is synthesized)
atgggctcccaagcctcgcctctgtgctctctcaccagggaaagtgaacatgagttccgaattcctgcgtttcaagtggggtaagggctgctggtctctggccacagccatcctcccggc

SEQ ID NO: 128880 - DNA, 120 bp, Artificial Sequence
  ENSG00000102125_16 (sequence is synthesized)
ggccgggtggaggggtgcctggggcttccactcctgaacagagagcttaactgtcctagagttcatggggagccacctagccacactggagcccttcagagctcaccctggctgctgggt

SEQ ID NO: 128881 - DNA, 120 bp, Artificial Sequence
  ENSG00000102125_17 (sequence is synthesized)
gccaggaaggaggacttggagccatccactagcctagactgggctggttgcagtgacagtacagggagaagtatagaagaatgggcattgtccaagtatgttggggagggatcctgaaac

SEQ ID NO: 128882 - DNA, 120 bp, Artificial Sequence
  ENSG00000102125_18 (sequence is synthesized)
tgtcgggggtggcagtggccagaggctggcacagaagcttggctcagggcccagcttatgctaacatttctacctcccccctgggcaggaatcgggcgcctgattgctgagtgtcatctc

SEQ ID NO: 128883 - DNA, 120 bp, Artificial Sequence
  ENSG00000102125_19 (sequence is synthesized)
cacatgccaggtgctggaaaaagaagagagaaagcatccccaggcttccagccagcacgcagcagccaacattggcttcagaaggaaggaggagatggcgtctaccagaaggggatggac

SEQ ID NO: 128884 - DNA, 120 bp, Artificial Sequence
  ENSG00000102125_20 (sequence is synthesized)
ccgccccctcgggctggcttgtatgggggtagatgggcgtgtttgtagcgccaggaaggggacaggtgctgagactaggcctgcctctcgcaggggcttgcccaagggagctgaattgaa

SEQ ID NO: 128885 - DNA, 120 bp, Artificial Sequence
  ENSG00000102125_21 (sequence is synthesized)
aggagccagggagaactgaatgatctggcctaagggtctgaaagatgccactttgggctgtagggaaatggtagtgctgctgtccctcattccctgagatggggtgaaggaagggcactc

SEQ ID NO: 128886 - DNA, 120 bp, Artificial Sequence
  ENSG00000102125_22 (sequence is synthesized)
cctggggatatgggaagttggggcatgaagcctttcctgtcctctagggatcctgaaactccgccacatctggaacctgaagttgatgcgttggtgaggaggaatgggcccctcgaagtg

SEQ ID NO: 128887 - DNA, 120 bp, Artificial Sequence
  ENSG00000102125_23 (sequence is synthesized)
ggccgggccggccccacctgcctctgcccagatttgccctcctcctgctctgcccaggaggtggcgtccagcagtccaggcagggcatggggtggggccccgcaggccctcccctgtgcc

SEQ ID NO: 128888 - DNA, 120 bp, Artificial Sequence
  ENSG00000102125_24 (sequence is synthesized)
ccgcccgggtacccatgcccggccggaggtgggacttagggtgggggacgccgcggccccgacctagcgggcgagcccggagcgcctgacttctccttccccgccagagtacatgaacca

SEQ ID NO: 128889 - DNA, 120 bp, Artificial Sequence
  ENSG00000102125_25 (sequence is synthesized)
ccgggccagtgtgctgggcagggggaggaaaggcgaggattcgggacgggcccagcctcgtcagaacaaaccccttctcgctgccttttcatggagccctggcactccggtttccgggcg

SEQ ID NO: 128890 - DNA, 120 bp, Artificial Sequence
  ENSG00000102125_26 (sequence is synthesized)
ttctgccccagggctgagacttggatttgtggctcctgcagcatccctgagggagcatgatttggagagggccttgggcatggagcaggaccaaggaacggccacagggcatatcttaca

SEQ ID NO: 128891 - DNA, 120 bp, Artificial Sequence
  ENSG00000102125_27 (sequence is synthesized)
gctcctttaacgtcaggcctccagaaccctctgttctctaaaccatccagggccccacagtcttgggaaaaatttgggggttggacataggatatcctgtgaggaagttctgggccaggg

SEQ ID NO: 128892 - DNA, 120 bp, Artificial Sequence
  ENSG00000102125_28 (sequence is synthesized)
actggaagcccagtgtcctggcttcaggtttgcccctggctgggcgtgtaccgttcagccctatttgggagcctggttgccacacctagaggttcctgctctgctgacttcacaggaagt

SEQ ID NO: 128893 - DNA, 120 bp, Artificial Sequence
  ENSG00000102125_29 (sequence is synthesized)
ccggccccacctgcctctgcccagatttgccctcctcctgctctgcccaggaggacccctgcagctgcagacatctgcttcaccaaggagctacactcccacttcttcagcttgggcaag

SEQ ID NO: 128894 - DNA, 120 bp, Artificial Sequence
  ENSG00000102125_30 (sequence is synthesized)
ggaggagggatgggtccttggaaagtcctcaactctctgcaactgcccagggatcctgtggacctggagccttggcattagaattcaaggaggcattatccataaccccttctctcaggg

SEQ ID NO: 128895 - DNA, 120 bp, Artificial Sequence
  ENSG00000102125_31 (sequence is synthesized)
atgtcactaagagactcattgagaacagtgcgttgtcattggtccatggtggcagtagcatgtacctgcaggccagagggttttgcttctaggagaacaaacaggcttgtggggtgagaa

SEQ ID NO: 128896 - DNA, 120 bp, Artificial Sequence
  ENSG00000102125_32 (sequence is synthesized)
ccccaggggataggggccattttgatccctattctccagacagggaggatcacagagattaagctgctggcccaaggtcatggggtaggaggtggcaaagccaggatttgaatccagatt

SEQ ID NO: 128897 - DNA, 120 bp, Artificial Sequence
  ENSG00000102125_33 (sequence is synthesized)
gctccttcctctgcaggagcagaatttttccaagcagagaatgaggggaaaggtgttctagacacaggcaggcacatgccaggtgctggaaaaagaagagagaaaggtaagccaggcata

SEQ ID NO: 128898 - DNA, 120 bp, Artificial Sequence
  ENSG00000102125_34 (sequence is synthesized)
gctggaaaaagaagagagaaaggtaagccaggcatagcggttcacacttgtcatcccagcactttgtgaggtcgaggtgagaggatcactcaagcccaggagtttgagaccagcctgggc

SEQ ID NO: 128899 - DNA, 120 bp, Artificial Sequence
  ENSG00000102125_35 (sequence is synthesized)
aaaaataaaaatattttaaacaaaagaaaggtagaaaatatgagttgtatgtagaatatgaaggttctagaataatcctattaagaattttggattctggctgggcgcggtggctcacgc

SEQ ID NO: 128900 - DNA, 120 bp, Artificial Sequence
  ENSG00000102125_36 (sequence is synthesized)
actcagcactatggaggccagctgcaggaggagctgagcatgaggctacagcaggggacagagtggaacatagacagggacttcctggcaccgagacattaaaatgagagcagaggaagt

SEQ ID NO: 128901 - DNA, 120 bp, Artificial Sequence
  ENSG00000102125_37 (sequence is synthesized)
tgtctgccatgtgattacttttccatcaccaaggttgatgagatccttactgtgtacttactgtctccaagcatccccaggcttccagccagcacgcagcagccaacattggcttcagaa

SEQ ID NO: 128902 - DNA, 120 bp, Artificial Sequence
  ENSG00000102125_38 (sequence is synthesized)
ggaaggaggtttgcatttccttctcttgggtccagtgccatggtctcagggttatctccaatgtggaaagttgctagaccaggagcagtttgactccactgtttttcagtctagcaagtt

SEQ ID NO: 128903 - DNA, 120 bp, Artificial Sequence
  ENSG00000102125_39 (sequence is synthesized)
tgagtttttcccaagctcttgatgtgtgttcaaatgaatgttctccctttcccaagagacctccctataagggagggtctagtttcccggggtgccctgagaagaaggggtcagcagggg

SEQ ID NO: 128904 - DNA, 120 bp, Artificial Sequence
  ENSG00000102125_40 (sequence is synthesized)
ggaggaatggtggaggctgaggcctcaggcaggtgccctgtgaggagtggctgtgacaagcggctgagatcccagcaaagggttgttgcccagaatctggggcctaagcgaggttggaaa

SEQ ID NO: 128905 - DNA, 120 bp, Artificial Sequence
  ENSG00000102125_41 (sequence is synthesized)
tcacaaatgcacttggtttctctagcagctggcacatagtaggatcagcccaggagtggcaccttcaaagagaaaggaacgcatgaggctccgagagcggtcggctggcagccagggcct

SEQ ID NO: 128906 - DNA, 120 bp, Artificial Sequence
  ENSG00000102125_42 (sequence is synthesized)
ggctggggagggagggcaggtggtgcgctgacctggggatctttgagagtgtgcaggagtatgtggctgaagcggcccagctggtgagccactgaagatgggggtcataggtagatggag

SEQ ID NO: 128907 - DNA, 120 bp, Artificial Sequence
  ENSG00000102125_43 (sequence is synthesized)
gaattgccaggtcagaatctcggtaggagatgacttgagctgatgctgcctggcacataggggtttagaagatattaggaaggaagccccacagcgtgcccaagtgccatgcaggccctg

SEQ ID NO: 128908 - DNA, 120 bp, Artificial Sequence
  ENSG00000102125_44 (sequence is synthesized)
gagacggtcattggagggcgtctgtggatggcgcagtgggggatgggaagtccctaatctgctggggctttcccagcaagcagggactgagggggatagtccccaacacatgggccccag

SEQ ID NO: 128909 - DNA, 120 bp, Artificial Sequence
  ENSG00000102125_45 (sequence is synthesized)
tgagtgtcatctcaaccccatcatcctgcccctgtggcatgtcggtgagcctggggacggggacagagagatggcatctggggtggggggcctgggactccctctggtcccaggctgccc

SEQ ID NO: 128910 - DNA, 120 bp, Artificial Sequence
  ENSG00000102125_46 (sequence is synthesized)
tgctccaccccacgtctggccttctgtccactgtgctgcaggaatgaatgacgtccttcctaacagtccgccctacttcccccgctttggacagaaaatcactgtgctgatcgggaagcc

SEQ ID NO: 128911 - DNA, 120 bp, Artificial Sequence
  ENSG00000102128_0 (sequence is synthesized)
cgcacaaccttgctggtctggcccaggcggggggcggggccagcacgatgagcgccccgggcagccccgaccaggcctacgacttcctgctcaagttcctgctggtgggcgacagggacg

SEQ ID NO: 128912 - DNA, 120 bp, Artificial Sequence
  ENSG00000102128_1 (sequence is synthesized)
taggcaagagtgagatcctggagagcctgcaggacggcacggccgagtccccgtacagtcacctggggggaatcgactacaagacgaccaccatcctgctggacggccagcgggtgaagc

SEQ ID NO: 128913 - DNA, 120 bp, Artificial Sequence
  ENSG00000102128_2 (sequence is synthesized)
tgaagctctgggatacgtcggggcagggaagattttgtaccatattccgctcctactctcgtggtgcacaaggagtgatcctggtctacgacattgcaaaccgctggtctttcgagggta

SEQ ID NO: 128914 - DNA, 120 bp, Artificial Sequence
  ENSG00000102128_3 (sequence is synthesized)
tggatcgatggattaagaagattgaggaacatgcccctggtgtccctaaaatcctggtggggaatcgcctacatctggcattcaagaggcaggtgcccagggagcaggcccaggcctacg

SEQ ID NO: 128915 - DNA, 120 bp, Artificial Sequence
  ENSG00000102128_4 (sequence is synthesized)
cggagctggccaggatagtgctgctgcggcacaggttgaactggctcgggaggccgagcaaggtactgagcttgcaagacctctgctgccgcaccatcgtgtcctgcacacctgtgcatc

SEQ ID NO: 128916 - DNA, 120 bp, Artificial Sequence
  ENSG00000102128_5 (sequence is synthesized)
tggtggacaagctcccgctccccattgccttaagaagccacctcaagtccttctccatggctaagggcctgaatgccaggatgatgcgaggcctctcctactccctcaccaccagctcca

SEQ ID NO: 128917 - DNA, 120 bp, Artificial Sequence
  ENSG00000102128_6 (sequence is synthesized)
ctcacaaaaggagcagcctctgcaaagtgaagatcgtctgcccaccccagagcccacccaaaaactgcaccagaaacagctgcaaaatttcttaaggaaggcaccaaaaggaaacaagct

SEQ ID NO: 128918 - DNA, 120 bp, Artificial Sequence
  ENSG00000102128_7 (sequence is synthesized)
ggaatcgctccaggaaaaactctgaatggttacacctggaagagggaagatgcattctagattcaaagaaatacgttttcagtttctcatgggaacaatgctgcttgggaatgtgtgtga

SEQ ID NO: 128919 - DNA, 120 bp, Artificial Sequence
  ENSG00000102144_0 (sequence is synthesized)
gttccgcattctgcaagcctccggagcgcacgtcggcagtcggctccctcgttgaccgaatcaccgacctctctccccagctgtatttccaaaatgtcgctttctaacaagctgacgctg

SEQ ID NO: 128920 - DNA, 120 bp, Artificial Sequence
  ENSG00000102144_1 (sequence is synthesized)
gacaagctggacgttaaagggaagcgggtcgttatgagagtcgacttcaatgttcctatgaagaacaaccagataacaaacaaccagaggattaaggctgctgtcccaagcatcaaattc

SEQ ID NO: 128921 - DNA, 120 bp, Artificial Sequence
  ENSG00000102144_2 (sequence is synthesized)
tgcttggacaatggagccaagtcggtagtccttatgagccacctaggccggcctgatggtgtgcccatgcctgacaagtactccttagagccagttgctgtagaactcaaatctctgctg

SEQ ID NO: 128922 - DNA, 120 bp, Artificial Sequence
  ENSG00000102144_3 (sequence is synthesized)
ggcaaggatgttctgttcttgaaggactgtgtaggcccagaagtggagaaagcctgtgccaacccagctgctgggtctgtcatcctgctggagaacctccgctttcatgtggaggaagaa

SEQ ID NO: 128923 - DNA, 120 bp, Artificial Sequence
  ENSG00000102144_4 (sequence is synthesized)
gggaagggaaaagatgcttctgggaacaaggttaaagccgagccagccaaaatagaagctttccgagcttcactttccaagctaggggatgtctatgtcaatgatgcttttggcactgct

SEQ ID NO: 128924 - DNA, 120 bp, Artificial Sequence
  ENSG00000102144_5 (sequence is synthesized)
cacagagcccacagctccatggtaggagtcaatctgccacagaaggctggtgggtttttgatgaagaaggagctgaactactttgcaaaggccttggagagcccagagcgacccttcctg

SEQ ID NO: 128925 - DNA, 120 bp, Artificial Sequence
  ENSG00000102144_6 (sequence is synthesized)
gccatcctgggcggagctaaagttgcagacaagatccagctcatcaataatatgctggacaaagtcaatgagatgattattggtggtggaatggcttttaccttccttaaggtgctcaac

SEQ ID NO: 128926 - DNA, 120 bp, Artificial Sequence
  ENSG00000102144_7 (sequence is synthesized)
aacatggagattggcacttctctgtttgatgaagagggagccaagattgtcaaagacctaatgtccaaagctgagaagaatggtgtgaagattaccttgcctgttgactttgtcactgct

SEQ ID NO: 128927 - DNA, 120 bp, Artificial Sequence
  ENSG00000102144_8 (sequence is synthesized)
gacaagtttgatgagaatgccaagactggccaagccactgtggcttctggcatacctgctggctggatgggcttggactgtggtcctgaaagcagcaagaagtatgctgaggctgtcact

SEQ ID NO: 128928 - DNA, 120 bp, Artificial Sequence
  ENSG00000102144_9 (sequence is synthesized)
cgggctaagcagattgtgtggaatggtcctgtgggggtatttgaatgggaagcttttgcccggggaaccaaagctctcatggatgaggtggtgaaagccacttctaggggctgcatcacc

SEQ ID NO: 128929 - DNA, 120 bp, Artificial Sequence
  ENSG00000102144_10 (sequence is synthesized)
atcataggtggtggagacactgccacttgctgtgccaaatggaacacggaggataaagtcagccatgtgagcactgggggtggtgccagtttggagctcctggaaggtaaagtccttcct

SEQ ID NO: 128930 - DNA, 120 bp, Artificial Sequence
  ENSG00000102144_11 (sequence is synthesized)
ggggtggatgctctcagcaatatttagtactttcctgccttttagttcctgtgcacagcccctaagtcaacttagcattttctgcatctccacttggcattagctaaaaccttccatgtc

SEQ ID NO: 128931 - DNA, 120 bp, Artificial Sequence
  ENSG00000102144_12 (sequence is synthesized)
aagattcagctagtggccaagagatgcagtgccaggaacccttaaacagttgcacagcatctcagctcatcttcactgcaccctggatttgcatacattcttcaagatcccatttgaatt

SEQ ID NO: 128932 - DNA, 120 bp, Artificial Sequence
  ENSG00000102144_13 (sequence is synthesized)
ttttagtgactaaaccattgtgcattctagagtgcatatatttatattttgcctgttaaaaagaaagtgagcagtgttagcttagttctcttttgatgtaggttattatgattagctttg

SEQ ID NO: 128933 - DNA, 120 bp, Artificial Sequence
  ENSG00000102144_14 (sequence is synthesized)
tcactgtttcactactcagcatggaaacaagatgaaattccatttgtaggtagtgagacaaaattgatgatccattaagtaaacaataaaagtgtccattgaaaccgtgatttttttttt

SEQ ID NO: 128934 - DNA, 120 bp, Artificial Sequence
  ENSG00000102144_15 (sequence is synthesized)
tttcctgtcatactttgttaggaagggtgagaatagaatcttgaggaacggatcagatgtctatattgctgaatgcaagaagtggggcagcagcagtggagagatgggacaattagataa

SEQ ID NO: 128935 - DNA, 120 bp, Artificial Sequence
  ENSG00000102144_16 (sequence is synthesized)
atgtccattctttatcaagggcctactttatggcagacattgtgctagtgcttttattctaacttttatttttatcagttacacatgatcataatttaaaaagtcaaggcttataacaaa

SEQ ID NO: 128936 - DNA, 120 bp, Artificial Sequence
  ENSG00000102144_17 (sequence is synthesized)
aaagccccagcccattcctcccattcaagattcccactccccagaggtgaccactttcaactcttgagtttttcaggtatatacctccatgtttctaagtaatatgcttatattgttcac

SEQ ID NO: 128937 - DNA, 120 bp, Artificial Sequence
  ENSG00000102144_18 (sequence is synthesized)
ttcttttttttttattttttaaagaaatctatttcataccatggaggaaggctctgttccacatatatttccacttcttcattctctcggtatagttttgtcacaattatagattagatc

SEQ ID NO: 128938 - DNA, 120 bp, Artificial Sequence
  ENSG00000102144_19 (sequence is synthesized)
aaaagtctacataactaatacagctgagctatgtagtatgctatgattaaatttacttatgtaacttttattgtctttggcattaacagtgtttcaaaaaattttctgtgtatacccatc

SEQ ID NO: 128939 - DNA, 120 bp, Artificial Sequence
  ENSG00000102144_20 (sequence is synthesized)
ccaaatcttctagaagcataagtgtctcaatatattaaaacatattgaataatccttgttagagttatccctgcaggagtccttagtgctcctttatccaatttgtacttgatgccctct

SEQ ID NO: 128940 - DNA, 120 bp, Artificial Sequence
  ENSG00000102144_21 (sequence is synthesized)
aggcagggtgtacagctagctgttgctctggtatttcctataaccttcttggggatttcttttacctcctgtgttagactcctgttttctggattcccccttttccctctttcttggtct

SEQ ID NO: 128941 - DNA, 120 bp, Artificial Sequence
  ENSG00000102144_22 (sequence is synthesized)
actttttgtagaacacaagactctactagcttcctgagaaagggtgcctgggaggcaaaatctctaagactttgtaagtctgaaaatgtctttattcgacccttatacttgattcctagt

SEQ ID NO: 128942 - DNA, 120 bp, Artificial Sequence
  ENSG00000102144_23 (sequence is synthesized)
ttggctatatatagaattttagcctgagtatcactttttgagactcgaagccactgtttcattgtcactattgagaatctaaatggccattcggattctttcatcatctttataatttta

SEQ ID NO: 128943 - DNA, 120 bp, Artificial Sequence
  ENSG00000102144_24 (sequence is synthesized)
ccttcctatttctttcctgtccttttaatggagttttgggagagagcagaggtaaacatgatttgaaaaagccatgtctgaccagaaattctgtgctggaaagatatgtatttcaccttt

SEQ ID NO: 128944 - DNA, 120 bp, Artificial Sequence
  ENSG00000102144_25 (sequence is synthesized)
agggacaaagaaataaacttttggacaggaccacagagctagtaagtaacagcagggattcaagtccaggtttgtctggttccagtggctgatgcttttccaatgtgcctccgtccctga

SEQ ID NO: 128945 - DNA, 120 bp, Artificial Sequence
  ENSG00000102144_26 (sequence is synthesized)
catgatgcttctaggctatagatgcttctagactctatccctgacatgatgcttctagactattttgtttaaccctggatagaatagcaaaagaaaattttggtggttgctctaaacaaa

SEQ ID NO: 128946 - DNA, 120 bp, Artificial Sequence
  ENSG00000102144_27 (sequence is synthesized)
acagaaatttgaaagctcaagttttttcttcatttgtattttagttaatactgtacccatatttgtagttaattttaaattgtaccatgtttctgcatacctctatgggtactcaggaat

SEQ ID NO: 128947 - DNA, 120 bp, Artificial Sequence
  ENSG00000102144_28 (sequence is synthesized)
tctagtccaatttttgtgactttttcctactgattacctttcctccaacgttttaaaaattatttcaaatggaactgaaagaagcataaactcccataaacccagcacctagactctaca

SEQ ID NO: 128948 - DNA, 120 bp, Artificial Sequence
  ENSG00000102144_29 (sequence is synthesized)
attgccaacattatctatccaacaatctctgactgtaccttttaagtactttctactggactgtttccaggatcacccctcatttatttgggttgttaacctaaagaatgaatgggggaa

SEQ ID NO: 128949 - DNA, 120 bp, Artificial Sequence
  ENSG00000102144_30 (sequence is synthesized)
tctccagtcataaacaacttgtcaattaggcaaatatttgagttccttctatgtgcttaaagacgtgatagagggaatataagagcatttatgttctgaaggaatttttaacctaaccaa

SEQ ID NO: 128950 - DNA, 120 bp, Artificial Sequence
  ENSG00000102144_31 (sequence is synthesized)
aagagcatttatgttctgaaggaatttttaacctaaccaaagaagatagtagataacttgtgtgcatataagctagaacagtataaggggccgggcatggtggcttacgcctgtaatccc

SEQ ID NO: 128951 - DNA, 90 bp, Artificial Sequence
  ENSG00000102144_32 (sequence is synthesized)
gatcacgctactgcattcctgctcaaaaaccccacaaaacagtataaggatgtgctttctaatttggaattatgaattattggtaaaata

SEQ ID NO: 128952 - DNA, 120 bp, Artificial Sequence
  ENSG00000102144_33 (sequence is synthesized)
tgtgctttctaatttggaattatgaattattggtaaaatattgcaaaggtgtatgctttaagttgtaaattcacctttaaccctagactatatatgtgtgtttatatgcagaaaaaaata

SEQ ID NO: 128953 - DNA, 120 bp, Artificial Sequence
  ENSG00000102144_34 (sequence is synthesized)
attcccatgtcgtaagtgaacaatttggttctttagctcagtgttttcctgttttcttcatttccaaaatttccctctagcacaggggtttacacatgatcaaaaaggagtatacaatga

SEQ ID NO: 128954 - DNA, 120 bp, Artificial Sequence
  ENSG00000102144_35 (sequence is synthesized)
agacaccttcctcagtcccctacctaccagtttccctccccagaagcaacctctggaagaccagtttctttcaatctaaggctatttaatatacattaagaggccgggcgcagtggctca

SEQ ID NO: 128955 - DNA, 70 bp, Artificial Sequence
  ENSG00000102144_36 (sequence is synthesized)
tccagcctgggcaacagtgagactctgcataaagagcatacccatgtgtatagatatattaaaatgtaaa

SEQ ID NO: 128956 - DNA, 120 bp, Artificial Sequence
  ENSG00000102144_37 (sequence is synthesized)
ccgattgtgtgagctttgttggagcctgcgtacgtggatttatcgctgccacggtctgcgtagctccagaggtttaaccataggatagagaaaccagagtcgacttcaatgttcctatga

SEQ ID NO: 128957 - DNA, 120 bp, Artificial Sequence
  ENSG00000102144_38 (sequence is synthesized)
ctacaagttcacaatgcctttgaaggatgctggcaaaagcaatggggtcatcagccttggaaagaaactcagaagttctcatgagtcagtccagagggaactccggtcttgaagtaatct

SEQ ID NO: 128958 - DNA, 120 bp, Artificial Sequence
  ENSG00000102144_39 (sequence is synthesized)
aaagttgcagacaagatccagctcatcaataatatgctggacaaagtcaatgagatgattattggtggtggaatggcttttaccttccttaaggtgctcaacaacatggaggtaggaaac

SEQ ID NO: 128959 - DNA, 120 bp, Artificial Sequence
  ENSG00000102144_40 (sequence is synthesized)
ggaatggtcctgtgggggtatttgaatgggaagcttttgcccggggaaccaaagctctcatggatgaggtggtgaaagccacttctaggggctgcatcaccatcataggtaagcggtcct

SEQ ID NO: 128960 - DNA, 120 bp, Artificial Sequence
  ENSG00000102144_41 (sequence is synthesized)
atacaaagctaatacccatataagctggcagaattctgatcagaggaaggtggaatggagaacttcttctatgtctctttattctgggtaaatgttaagaggtaaacaggtaggtaattt

SEQ ID NO: 128961 - DNA, 120 bp, Artificial Sequence
  ENSG00000102144_42 (sequence is synthesized)
acagaggagcctcttggtaagatagagttgggggtttatcagctaccttttgggttggggagcacactgccttacagttttggtgccaatcccttttttttcttttctctcttttccctt

SEQ ID NO: 128962 - DNA, 120 bp, Artificial Sequence
  ENSG00000102145_0 (sequence is synthesized)
caaaggccaaggccagccaggacaccccctgggatcacactgagcttgccacatccccaaggcggccgaaccctccgcaaccaccagcccaggttaatccccagaggctccatggagttc

SEQ ID NO: 128963 - DNA, 120 bp, Artificial Sequence
  ENSG00000102145_1 (sequence is synthesized)
cctggcctggggtccctggggacctcagagcccctcccccagtttgtggatcctgctctggtgtcctccacaccagaatcaggggttttcttcccctctgggcctgagggcttggatgca

SEQ ID NO: 128964 - DNA, 120 bp, Artificial Sequence
  ENSG00000102145_2 (sequence is synthesized)
gcagcttcctccactgccccgagcacagccaccgctgcagctgcggcactggcctactacagggacgctgaggcctacagacactccccagtctttcaggtgtacccattgctcaactgt

SEQ ID NO: 128965 - DNA, 120 bp, Artificial Sequence
  ENSG00000102145_3 (sequence is synthesized)
atggaggggatcccagggggctcaccatatgccggctgggcctacggcaagacggggctctaccctgcctcaactgtgtgtcccacccgcgaggactctcctccccaggccgtggaagat

SEQ ID NO: 128966 - DNA, 120 bp, Artificial Sequence
  ENSG00000102145_4 (sequence is synthesized)
ctggatggaaaaggcagcaccagcttcctggagactttgaagacagagcggctgagcccagacctcctgaccctgggacctgcactgccttcatcactccctgtccccaatagtgcttat

SEQ ID NO: 128967 - DNA, 120 bp, Artificial Sequence
  ENSG00000102145_5 (sequence is synthesized)
gggggccctgacttttccagtaccttcttttctcccaccgggagccccctcaattcagcagcctattcctctcccaagcttcgtggaactctccccctgcctccctgtgaggccagggag

SEQ ID NO: 128968 - DNA, 120 bp, Artificial Sequence
  ENSG00000102145_6 (sequence is synthesized)
ctatgcaacgcctgcggcctctatcacaagatgaatgggcagaacaggcccctcatccggcccaagaagcgcctgattgtcagtaaacgggcaggtactcagtgcaccaactgccagacg

SEQ ID NO: 128969 - DNA, 120 bp, Artificial Sequence
  ENSG00000102145_7 (sequence is synthesized)
accaccacgacactgtggcggagaaatgccagtggggatcccgtgtgcaatgcctgcggcctctactacaagctacaccaggtgaaccggccactgaccatgcggaaggatggtattcag

SEQ ID NO: 128970 - DNA, 120 bp, Artificial Sequence
  ENSG00000102145_8 (sequence is synthesized)
actcgaaaccgcaaggcatctggaaaagggaaaaagaaacggggctccagtctgggaggcacaggagcagccgaaggaccagctggtggctttatggtggtggctgggggcagcggtagc

SEQ ID NO: 128971 - DNA, 120 bp, Artificial Sequence
  ENSG00000102145_9 (sequence is synthesized)
gggaattgtggggaggtggcttcaggcctgacactgggccccccaggtactgcccatctctaccaaggcctgggccctgtggtgctgtcagggcctgttagccacctcatgcctttccct

SEQ ID NO: 128972 - DNA, 120 bp, Artificial Sequence
  ENSG00000102145_10 (sequence is synthesized)
ggacccctactgggctcacccacgggctccttccccacaggccccatgccccccaccaccagcactactgtggtggctccgctcagctcatgagggcacagagcatggcctccagaggag

SEQ ID NO: 128973 - DNA, 120 bp, Artificial Sequence
  ENSG00000102145_11 (sequence is synthesized)
gggtggtgtccttctcctcttgtagccagaattctggacaacccaagtctctgggccccaggcaccccctggcttgaaccttcaaagcttttgtaaaataaaaccaccaaagtcctgaaa

SEQ ID NO: 128974 - DNA, 120 bp, Artificial Sequence
  ENSG00000102158_0 (sequence is synthesized)
agaaatcaaccttcttttagcgggcgtgtagcgccagcgcgctgtgacgtaatgtgaggggtctcccggcagggctgagctggaccaatgaggaaaggcaaggggccgatttgcctgttc

SEQ ID NO: 128975 - DNA, 120 bp, Artificial Sequence
  ENSG00000102158_1 (sequence is synthesized)
tcacgccccaccctcagacctagccggagcaaagtttcacttatagaagggagaggagcgaacatggcagcgcgttggcggttttggtgtgtctctgtgaccatggtggtggcgctgctc

SEQ ID NO: 128976 - DNA, 120 bp, Artificial Sequence
  ENSG00000102158_2 (sequence is synthesized)
atcgtttgcgacgttccctcagcctctgcccaaagaaagaaggagatggtgttatctgaaaaggttagtcagctgatggaatggactaacaaaagacctgtaataagaatgaatggagac

SEQ ID NO: 128977 - DNA, 120 bp, Artificial Sequence
  ENSG00000102158_3 (sequence is synthesized)
aagttccgtcgccttgtgaaagccccaccgagaaattactccgttatcgtcatgttcactgctctccaactgcatagacagtgtgtcgtttgcaagcaagctgatgaagaattccagatc

SEQ ID NO: 128978 - DNA, 120 bp, Artificial Sequence
  ENSG00000102158_4 (sequence is synthesized)
ctggcaaactcctggcgatactccagtgcattcaccaacaggatattttttgccatggtggattttgatgaaggctctgatgtatttcagatgctaaacatgaattcagctccaactttc

SEQ ID NO: 128979 - DNA, 120 bp, Artificial Sequence
  ENSG00000102158_5 (sequence is synthesized)
atcaactttcctgcaaaagggaaacccaaacggggtgatacatatgagttacaggtgcggggtttttcagctgagcagattgcccggtggatcgccgacagaactgatgtcaatattaga

SEQ ID NO: 128980 - DNA, 120 bp, Artificial Sequence
  ENSG00000102158_6 (sequence is synthesized)
gtgattagacccccaaattatgctggtccccttatgttgggattgcttttggctgttattggtggacttgtgtatcttcgaagaagtaatatggaatttctctttaataaaactggatgg

SEQ ID NO: 128981 - DNA, 120 bp, Artificial Sequence
  ENSG00000102158_7 (sequence is synthesized)
gcttttgcagctttgtgttttgtgcttgctatgacatctggtcaaatgtggaaccatataagaggaccaccatatgcccataagaatccccacacgggacatgtgaattatatccatgga

SEQ ID NO: 128982 - DNA, 120 bp, Artificial Sequence
  ENSG00000102158_8 (sequence is synthesized)
agcagtcaagcccagtttgtagctgaaacacacattgttcttctgtttaatggtggagttaccttaggaatggtgcttttatgtgaagctgctacctctgacatggatattggaaagcga

SEQ ID NO: 128983 - DNA, 120 bp, Artificial Sequence
  ENSG00000102158_9 (sequence is synthesized)
aagataatgtgtgtggctggtattggacttgttgtattattcttcagttggatgctctctatttttagatctaaatatcatggctacccatacagctttctgatgagttaaaaaggtccc

SEQ ID NO: 128984 - DNA, 120 bp, Artificial Sequence
  ENSG00000102158_10 (sequence is synthesized)
agagatatatagacactggagtactggaaattgaaaaacgaaaatcgtgtgtgtttgaaaagaagaatgcaacttgtatattttgtattacctctttttttcaagtgatttaaatagtta

SEQ ID NO: 128985 - DNA, 120 bp, Artificial Sequence
  ENSG00000102158_11 (sequence is synthesized)
atcatttaaccaaagaagatgtgtagtgccttaacaagcaatcctctgtcaaaatctgaggtatttgaaaataattatcctcttaaccttctcttcccagtgaactttatggaacattta

SEQ ID NO: 128986 - DNA, 120 bp, Artificial Sequence
  ENSG00000102158_12 (sequence is synthesized)
atttagtacaattaagtatattataaaaattgtaaaactactactttgttttagttagaacaaagctcaaaactactttagttaacttggtcatctgattttatattgccttatccaaag

SEQ ID NO: 128987 - DNA, 120 bp, Artificial Sequence
  ENSG00000102158_13 (sequence is synthesized)
atggggaaagtaagtcctgaccaggtgttcccacatatgcctgttacagataactacattaggaattcattcttagcttcttcatctttgtgtggatgtgtatactttacgcatctttcc

SEQ ID NO: 128988 - DNA, 120 bp, Artificial Sequence
  ENSG00000102158_14 (sequence is synthesized)
ttttgagtagagaaattatgtgtgtcatgtggtcttctgaaaatggaacaccattcttcagagcacacgtctagccctcagcaagacagttgtttctcctcctccttgcatatttcctac

SEQ ID NO: 128989 - DNA, 120 bp, Artificial Sequence
  ENSG00000102158_15 (sequence is synthesized)
tgaaatacagtgctgtctatgattgtttttgttttgttgtttttttgagacggtctcgctgtgtcacacaggctggagtgcagtggcgtgagctcggctgactgcaaactctgcctccca

SEQ ID NO: 128990 - DNA, 73 bp, Artificial Sequence
  ENSG00000102158_16 (sequence is synthesized)
gaggatgacatgtgtgagctaccacaccagcaatgtctatgcttctcgatagctgtgaacatgaaaagacatc

SEQ ID NO: 128991 - DNA, 120 bp, Artificial Sequence
  ENSG00000102158_17 (sequence is synthesized)
aaagtgcgaggatgacatgtgtgagctaccacaccagcaatgtctatgcttctcgatagctgtgaacatgaaaagacatctattgggagtccgaggcaggtggattgcttgaggccagga

SEQ ID NO: 128992 - DNA, 120 bp, Artificial Sequence
  ENSG00000102158_18 (sequence is synthesized)
tcacgctactgcgctccagcctgagtgatagagtgagactctgtctcaaaaaaaagtatctctaaatacaggattataatttctgcttgagtatggtgttaactaccttgtatttagaaa

SEQ ID NO: 128993 - DNA, 120 bp, Artificial Sequence
  ENSG00000102158_19 (sequence is synthesized)
gatttcagattcattccatctccttagttttcttttaaggtgacccatctgtgataaaaatatagcttagtgctaaaatcagtgtaacttatacatggcctaaaatgtttctacaaatta

SEQ ID NO: 128994 - DNA, 120 bp, Artificial Sequence
  ENSG00000102158_20 (sequence is synthesized)
ttctacaaattagagtttgtcacttattccatttgtacctaagagaaaaataggctcagttagaaaaggactccctggccaggcgcagtgacttacgcctgtaatctcagcactttggga

SEQ ID NO: 128995 - DNA, 120 bp, Artificial Sequence
  ENSG00000102158_21 (sequence is synthesized)
taagaaagaaaaggactcccttagaatgggaaagaaaaatcataaaatattgagctgatgcctgtatatagaaattaagcgtttctcgaaagctgttctatgttttgctgttattttagt

SEQ ID NO: 128996 - DNA, 120 bp, Artificial Sequence
  ENSG00000102158_22 (sequence is synthesized)
ctttattctcttcctttaggtggagaaacaaagtaccaatttgaagggattttttttattttgtcttttggtttctgtcagtagaaataaccatatgtgctaaccaaatttctgtgaaga

SEQ ID NO: 128997 - DNA, 120 bp, Artificial Sequence
  ENSG00000102158_23 (sequence is synthesized)
atgttttcatggttatcattatatctaactataacctcccccatagttatgaagagtaacctgaaatgccactattgtggaaataggataattgtaattgtgaaaaaataattttaagga

SEQ ID NO: 128998 - DNA, 120 bp, Artificial Sequence
  ENSG00000102158_24 (sequence is synthesized)
aatcttacaagtattacattaaaaagatactatgactgccacctgccatttaccttctaataaccctgccatgtggtttgcagaaagagatggatatagtagcctcagaagaaatatttt

SEQ ID NO: 128999 - DNA, 120 bp, Artificial Sequence
  ENSG00000102158_25 (sequence is synthesized)
atgtgggttttttgtttttcgttactagatttcatggatgaggggatatggttgaccttttactttttaatggagcagccagtttttgttaattactcacttgtaaattgtgagattctg

SEQ ID NO: 129000 - DNA, 120 bp, Artificial Sequence
  ENSG00000102158_26 (sequence is synthesized)
aattccttacctgctattcttgtacttgtctcaggccaaatctatgctgtggttcttatgagacttgtatgaagatgccctgatttgtacagattgaccacgggaatactactgccatgt

SEQ ID NO: 129001 - DNA, 120 bp, Artificial Sequence
  ENSG00000102158_27 (sequence is synthesized)
aatctgtatagttccagataatttgtcatgaacattgacagaatgacaattttttgtatttgctttttctccctttaagagcacattcttctgtaaggagaaaggcagcattctggctaa

SEQ ID NO: 129002 - DNA, 120 bp, Artificial Sequence
  ENSG00000102158_28 (sequence is synthesized)
aatgtgtagaaggtaatttactacacttataaaatagtgtgacttttgtgaaaattttgaattagctttcatatgaagtgccttaagtagactcttcatttacttttctggtaatggttt

SEQ ID NO: 129003 - DNA, 120 bp, Artificial Sequence
  ENSG00000102158_29 (sequence is synthesized)
aaatatcatttgttatgcatttttaagatacagttcagaatgacacattgtagtggcaaagataaccaaatgtctggctgtttgctttttgaccatatcaataaacttttacaatctaaa

SEQ ID NO: 129004 - DNA, 120 bp, Artificial Sequence
  ENSG00000102158_30 (sequence is synthesized)
agcttcagcatctctactagttctttccccttgcatataaatacttaaggacatagattcaattttgtctttgtttataaatgtgtctaattcatatatttgaacatattttactcaatt

SEQ ID NO: 129005 - DNA, 120 bp, Artificial Sequence
  ENSG00000102158_31 (sequence is synthesized)
gtatcaaacataaaaggaaaaagctggatataatgccttgctatacatcttcatatgaatgacttcccaatctaaaaatttattatatcccaaattaaactgttttctcttccactttca

SEQ ID NO: 129006 - DNA, 120 bp, Artificial Sequence
  ENSG00000102158_32 (sequence is synthesized)
aataaaattcctaatagtgtatttttaggtaagcttttatttatgtgagaagtagcattttatttcttacctgaggaaaatagttttatatattttaattttctgtcttaaaatcagttt

SEQ ID NO: 129007 - DNA, 120 bp, Artificial Sequence
  ENSG00000102158_33 (sequence is synthesized)
gtttcattcattatctcataaggatggccagaacttcaaggaactgattgtacctgccttttattcaacctaaatgacagactgtcatctctatgaaaatctctagttgttctgaaaata

SEQ ID NO: 129008 - DNA, 120 bp, Artificial Sequence
  ENSG00000102172_0 (sequence is synthesized)
agtcctggcctccccgggcgcagcacactcccagccggccgcagcctgacacgccgcgcggccccccagtctcccgcggctgctcccccaggcatggcacagggcctcgcctcactatgg

SEQ ID NO: 129009 - DNA, 120 bp, Artificial Sequence
  ENSG00000102172_1 (sequence is synthesized)
cagcagcacggcacagcacgctcgacttcatgctcggcgccaaagctgatggtgagaccattctaaaaggcctccagtccattttccaggagcaggggatggcggagtcggtgcacacct

SEQ ID NO: 129010 - DNA, 120 bp, Artificial Sequence
  ENSG00000102172_2 (sequence is synthesized)
ggcaggaccatggctatttagcaacctacacaaacaagaacggcagctttgccaatttgagaatttacccacatggattggtgttgctggaccttcagagttatgatggtgatgcgcaag

SEQ ID NO: 129011 - DNA, 120 bp, Artificial Sequence
  ENSG00000102172_3 (sequence is synthesized)
gcaaagaagagatcgacagtattttgaacaaagtagaggaaagaatgaaagaattgagtcaggacagtactgggcgggtgaaacgattaccacccatagtgcgaggaggagccatcgaca

SEQ ID NO: 129012 - DNA, 120 bp, Artificial Sequence
  ENSG00000102172_4 (sequence is synthesized)
gatactggcccaccgccgacgggcgcctggttgaatatgacatagatgaagtggtatatgacgaagattcaccttatcaaaatataaaaattctacactcgaagcagtttggaaatattc

SEQ ID NO: 129013 - DNA, 120 bp, Artificial Sequence
  ENSG00000102172_5 (sequence is synthesized)
tcatccttagtggggatgttaatttggcagagagtgatttggcatatacccgggccatcatgggcagtggcaaagaagattacactggcaaagatgtactcattctgggaggtggagacg

SEQ ID NO: 129014 - DNA, 120 bp, Artificial Sequence
  ENSG00000102172_6 (sequence is synthesized)
gaggcatattgtgtgaaatagtcaaactaaaaccaaagatggtcactatggtagagattgaccaaatggtgattgatgggtgtaagaaatacatgcgaaaaacgtgtggcgatgtcttag

SEQ ID NO: 129015 - DNA, 120 bp, Artificial Sequence
  ENSG00000102172_7 (sequence is synthesized)
caggttctaatagaagactgtatcccggtactgaagaggtacgccaaagaagggagagaatttgattatgtgattaatgatttgacagctgttccaatctccacgtctccagaagaagat

SEQ ID NO: 129016 - DNA, 120 bp, Artificial Sequence
  ENSG00000102172_8 (sequence is synthesized)
tccacatgggagtttctcagactgattcttgacctctcaatgaaagtgttgaaacaggatgggaaatattttacacaggggaactgtgtcaatctgacagaagcactgtcgctctatgaa

SEQ ID NO: 129017 - DNA, 120 bp, Artificial Sequence
  ENSG00000102172_9 (sequence is synthesized)
gaacagctggggcgcctgtattgtcctgtggaattttcaaaggagatcgtctgtgtcccttcatacttggaattgtgggtattttacactgtttggaagaaagctaaaccctgaagatca

SEQ ID NO: 129018 - DNA, 120 bp, Artificial Sequence
  ENSG00000102172_10 (sequence is synthesized)
gtagcccctaatcacatgtgctgcaaatagccttcctgacctccatatgctgtacatgacatcaaaatgagtcaggcaattgattgtgaattccttaaagttttcctttttttaataatt

SEQ ID NO: 129019 - DNA, 120 bp, Artificial Sequence
  ENSG00000102172_11 (sequence is synthesized)
atttttaatttaaaaaagcaaatggaaaatgtatattttgatgagcttagggtgttttttttttgaaagtcagctgaaggatggttagacagcacagcgaagactgctaaatgcactgac

SEQ ID NO: 129020 - DNA, 120 bp, Artificial Sequence
  ENSG00000102172_12 (sequence is synthesized)
cccccccattagaatgtgatttttgttcctttttatttctctgtgggcttttgtttttgtttttgttttggtagatcttcaatttggatatttggaggagtgaacatcgttgttttgctg

SEQ ID NO: 129021 - DNA, 120 bp, Artificial Sequence
  ENSG00000102172_13 (sequence is synthesized)
gagggaagatcttgatggtgtttctttccccaaaaattgacttagatattaaaatttggtgcttataagagagagttaaaaaaaaataggattgcttcaattaaaattacaaaagagaca

SEQ ID NO: 129022 - DNA, 80 bp, Artificial Sequence
  ENSG00000102172_14 (sequence is synthesized)
ccgctcggggagtccccgggctgccgggcgcgggcggaccccccatgggacgagggttgcagggactgcggcggagcgag

SEQ ID NO: 129023 - DNA, 120 bp, Artificial Sequence
  ENSG00000102172_15 (sequence is synthesized)
gcgtgacccgcgcggcgagcccgggctgggggcgtgcgccgagcggggctgcccgcgcgaccttttcctgttcttgcaggcggctgatggtgagaccattctaaaaggcctccagtccat

SEQ ID NO: 129024 - DNA, 120 bp, Artificial Sequence
  ENSG00000102174_0 (sequence is synthesized)
aattgctactttgcactgcactggactatgactgatttttggcacatgctatcatacacaaagttcctgaaataaaatgctccaggatatcctaggaactcttagaaggctttaaaaagg

SEQ ID NO: 129025 - DNA, 120 bp, Artificial Sequence
  ENSG00000102174_1 (sequence is synthesized)
gactcacacactgaaagaatatctttgatgaagacaattcaggcaagcagaatgattcttgcaacagaattacatgattaattgagatcttgaagtgggtccggtgaatcctggccacct

SEQ ID NO: 129026 - DNA, 120 bp, Artificial Sequence
  ENSG00000102174_2 (sequence is synthesized)
aacttatcatgatttgggggagtttcacgagaatccagttttgataaaacaattgtttttttcctccccaagtgactatacatttaaatagctaaaacatctgttcagcaacatagtaaa

SEQ ID NO: 129027 - DNA, 120 bp, Artificial Sequence
  ENSG00000102174_3 (sequence is synthesized)
acatatatactcggaacgcttgagagaagagcctgccaaacagggactttgctgagggagagcaccaagataaagcaacactgtttgttttgtctagtcagggggaaagccaaggcaacc

SEQ ID NO: 129028 - DNA, 120 bp, Artificial Sequence
  ENSG00000102174_4 (sequence is synthesized)
aatattttggtttttataattttcatttgtgaagaattatttgagaaagggtggcgaggggagatttcctgacggcagtttcttaagctgtccattagtagaagagcaagaaagccttgg

SEQ ID NO: 129029 - DNA, 120 bp, Artificial Sequence
  ENSG00000102174_5 (sequence is synthesized)
atgtcaacgcctcgctcttgagaccagccaccaaaccacgaaaagtgactttcttctcgtgtgctctctacggcccttctgatggaagcagaaacagggagcagcgtggagactggaaag

SEQ ID NO: 129030 - DNA, 120 bp, Artificial Sequence
  ENSG00000102174_6 (sequence is synthesized)
aaggccaacagaggcactcgaattgccctggtcgtgtttgtcggtggcaccctagttctgggcacgatcctctttctagtgagtcaaggtctcttaagtctccaagctaaacaggagtac

SEQ ID NO: 129031 - DNA, 120 bp, Artificial Sequence
  ENSG00000102174_7 (sequence is synthesized)
tgcctgaagccagaatgcatcgaagcggctgctgccatcttaagtaaagtaaatctgtctgtggatccttgtgataatttcttccggttcgcttgtgatggctggataagcaataatcca

SEQ ID NO: 129032 - DNA, 120 bp, Artificial Sequence
  ENSG00000102174_8 (sequence is synthesized)
attcccgaagatatgccaagctatggggtttatccttggctgagacataatgttgacctcaagttgaaggaacttttggagaaatcaatcagtagaaggcgggacaccgaagccatacag

SEQ ID NO: 129033 - DNA, 120 bp, Artificial Sequence
  ENSG00000102174_9 (sequence is synthesized)
aaagccaaaatcctttattcatcctgcatgaatgagaaagcgattgaaaaagcagatgccaagccactgctacacatcctacggcattcacctttccgctggcccgtgcttgaatctaat

SEQ ID NO: 129034 - DNA, 120 bp, Artificial Sequence
  ENSG00000102174_10 (sequence is synthesized)
attggccctgaaggggtttggtcagagagaaagttcagccttctgcagacacttgcaacgtttcgtggtcaatacagcaattctgtgttcatccgtttgtatgtgtcccctgatgacaaa

SEQ ID NO: 129035 - DNA, 120 bp, Artificial Sequence
  ENSG00000102174_11 (sequence is synthesized)
gcatccaatgaacatatcttgaagctggaccaagcaacactctccctggccgtgagggaagactaccttgataacagtacagaagccaagtcttatcgggatgccctttacaagttcatg

SEQ ID NO: 129036 - DNA, 120 bp, Artificial Sequence
  ENSG00000102174_12 (sequence is synthesized)
gtggatactgccgtgcttttaggagctaacagttccagagcagagcatgacatgaagtcagtgctcagattggaaattaagatagctgagataatgattccacatgaaaaccgaaccagc

SEQ ID NO: 129037 - DNA, 120 bp, Artificial Sequence
  ENSG00000102174_13 (sequence is synthesized)
gaggccatgtacaacaaaatgaacatttctgaactgagtgctatgattccccagttcgactggctgggctacatcaagaaggtcattgacaccagactctacccccatctgaaagacatc

SEQ ID NO: 129038 - DNA, 120 bp, Artificial Sequence
  ENSG00000102174_14 (sequence is synthesized)
agcccctccgagaatgtggtggtccgcgtcccgcagtactttaaagatttgtttaggatattagggtctgagagaaagaagaccattgccaactatttggtgtggagaatggtttattcc

SEQ ID NO: 129039 - DNA, 120 bp, Artificial Sequence
  ENSG00000102174_15 (sequence is synthesized)
agaattccaaaccttagcaggcgctttcagtatagatggctggaattctcaagggtaatccaggggaccacaactttgctgcctcaatgggacaaatgtgtaaactttattgaaagtgcc

SEQ ID NO: 129040 - DNA, 120 bp, Artificial Sequence
  ENSG00000102174_16 (sequence is synthesized)
ctcccttatgttgttggaaagatgtttgtagatgtgtacttccaggaagataagaaggaaatgatggaggaattggttgagggcgttcgctgggcctttattgacatgctagagaaagaa

SEQ ID NO: 129041 - DNA, 120 bp, Artificial Sequence
  ENSG00000102174_17 (sequence is synthesized)
aatgagtggatggatgcaggaacgaaaaggaaagccaaagaaaaggcgagagctgttttggcaaaagttggctatccagagtttataatgaatgatactcatgttaatgaagacctcaaa

SEQ ID NO: 129042 - DNA, 120 bp, Artificial Sequence
  ENSG00000102174_18 (sequence is synthesized)
gctatcaagttttcagaagccgactactttggcaacgtcctacaaactcgcaagtatttagcacagtctgatttcttctggctaagaaaagccgttccaaaaacagagtggtttacaaat

SEQ ID NO: 129043 - DNA, 120 bp, Artificial Sequence
  ENSG00000102174_19 (sequence is synthesized)
ccgacgactgtcaatgccttctacagtgcatccaccaaccagatccgatttccagcaggagagctccagaagcctttcttttggggaacagaatatcctcgatctctgagttatggtgct

SEQ ID NO: 129044 - DNA, 120 bp, Artificial Sequence
  ENSG00000102174_20 (sequence is synthesized)
ataggagtaattgtcggacatgaatttacacatggatttgataataatggtagaaaatatgataaaaatggaaacctggatccttggtggtctactgaatcagaagaaaagtttaaggaa

SEQ ID NO: 129045 - DNA, 120 bp, Artificial Sequence
  ENSG00000102174_21 (sequence is synthesized)
aaaacaaaatgcatgattaaccagtatagcaactattattggaagaaagctggcttaaatgtcaaggggaagaggaccctgggagaaaatattgctgataatggaggcctgcgggaagct

SEQ ID NO: 129046 - DNA, 120 bp, Artificial Sequence
  ENSG00000102174_22 (sequence is synthesized)
tttagggcttacaggaaatggataaatgacagaaggcagggacttgaggagcctcttctaccaggcatcacattcaccaacaaccagctcttcttcctgagttatgctcatgtgaggtgc

SEQ ID NO: 129047 - DNA, 120 bp, Artificial Sequence
  ENSG00000102174_23 (sequence is synthesized)
aattcctacagaccagaagctgcccgagaacaagtccaaattggtgctcacagtccccctcagtttagggtcaatggtgcaattagtaactttgaagaattccagaaagcttttaactgt

SEQ ID NO: 129048 - DNA, 120 bp, Artificial Sequence
  ENSG00000102174_24 (sequence is synthesized)
ccacccaattccacgatgaacagaggcatggactcctgccgactctggtagctgggacgctggtttatggcatcctgagacagttgcacagtgccagcggaggctgcactgagccttcat

SEQ ID NO: 129049 - DNA, 120 bp, Artificial Sequence
  ENSG00000102174_25 (sequence is synthesized)
cgcccattgctttaggcctggagactttcatttttagtgcattttcattatttgggtaggtgacctgcttggatctagacagcatctgttcaaagttgtagggcttataaagtggaatat

SEQ ID NO: 129050 - DNA, 120 bp, Artificial Sequence
  ENSG00000102174_26 (sequence is synthesized)
aatccctaggctacttttgttaaaatgctatctgctaaattgttgctattgtccattttagggtgttggccacagttatgtggtacatagcatttcaatctatagctttgtgggaagcct

SEQ ID NO: 129051 - DNA, 120 bp, Artificial Sequence
  ENSG00000102174_27 (sequence is synthesized)
aaattgatgtatcctttaaaagttcaatctattaaacttgtagcctctcaatgatgaagacatgtgcatgaatacctgggagggcttgctgctctgtggaatgcagtgcacgtttttatg

SEQ ID NO: 129052 - DNA, 120 bp, Artificial Sequence
  ENSG00000102174_28 (sequence is synthesized)
gacagtaattacacagcattcctcaactgtaaggtagttaaattagaaatatgtttgatctccattttacactttttgatgaagttcttgccttcagctttggagtctgttggaatgaaa

SEQ ID NO: 129053 - DNA, 120 bp, Artificial Sequence
  ENSG00000102174_29 (sequence is synthesized)
ctgtgtctcacagcttgcatctgatgtagcagattgccctgttcaagtcagcatgaacaaagctcgcagaaaggctactaggtaacggatttgagtttattcagtagaaaaaaagggaat

SEQ ID NO: 129054 - DNA, 120 bp, Artificial Sequence
  ENSG00000102174_30 (sequence is synthesized)
gaggacatatctttaggtcccagaagcagcaaaacctcctagttacataacagcagggaaactaggagatgaaatctccaaaattttgtccagtctgtatgaactgcagtgattgtctgt

SEQ ID NO: 129055 - DNA, 120 bp, Artificial Sequence
  ENSG00000102174_31 (sequence is synthesized)
ctgctagacacttttttttagcctaattcttgttcgtttcattaccttcatatgtgtgcattgtactggttttgaaatgagcagacattgagaaaacaattttctgattccccattagga

SEQ ID NO: 129056 - DNA, 120 bp, Artificial Sequence
  ENSG00000102174_32 (sequence is synthesized)
acatatgattttcatttccctttagtgcaaaggaacaaacatcacattgaggagggagaagtgtacccttctttttcagcttaatgttacctctctttaaaaaaaaaacatttttgaaaa

SEQ ID NO: 129057 - DNA, 120 bp, Artificial Sequence
  ENSG00000102174_33 (sequence is synthesized)
atttcttgactgatgacattctagaatttattgattcaatttaaaattccctgcatagtccaaataaacataatttttactcttcaagtcatctaaagagttgtgagaaagagcagtact

SEQ ID NO: 129058 - DNA, 120 bp, Artificial Sequence
  ENSG00000102174_34 (sequence is synthesized)
tcttcaagtcatctaaagagttgtgagaaagagcagtactatgtgttttatccttagagcattatccttctaagtgaactcctttcttattactgagcgtgtgtgtgtgtgtgtgtgtgt

SEQ ID NO: 129059 - DNA, 120 bp, Artificial Sequence
  ENSG00000102174_35 (sequence is synthesized)
tacctggcatttttggtttcttaaaataggcatccccctactccctttacattattcattagacatgaggtgctgggttaagtgggccaataggaaaatctcaaaagcaaaatgacaaat

SEQ ID NO: 129060 - DNA, 89 bp, Artificial Sequence
  ENSG00000102174_36 (sequence is synthesized)
agtgggccaataggaaaatctcaaaagcaaaatgacaaattcagattaaccacaggaagccattgtgtgtccctgtgatttgtgattct

SEQ ID NO: 129061 - DNA, 120 bp, Artificial Sequence
  ENSG00000102174_37 (sequence is synthesized)
atgtccttttgtagccatgggaacgtttgaatggagaaaaatggaggggcaccatcatgaggaaacaattatactgcattagtcagaggagagcgattttccctttgacttcttcctctc

SEQ ID NO: 129062 - DNA, 120 bp, Artificial Sequence
  ENSG00000102174_38 (sequence is synthesized)
tgaatggataaacttgtgaagggcagctaccttgtcctcctcttaacctggcttaatgtgaccttagtttgtatttccaaaaacaagcagtattaggttggaattgtatgtgtcttttct

SEQ ID NO: 129063 - DNA, 120 bp, Artificial Sequence
  ENSG00000102174_39 (sequence is synthesized)
ctggaggaagcattctgacttggtttagacatataagatactctgttttattcctggacttgggtgtttaaaatcagctgaggtttatcatgcttatatgaatagtgtttcccttctaga

SEQ ID NO: 129064 - DNA, 120 bp, Artificial Sequence
  ENSG00000102174_40 (sequence is synthesized)
tttcctttataaactccaaataaacacattcctgcaggtcagagaaagtgtttgataaaagcatagaattatggctttggaaagacaaactaagtcacttgttggtttagcaaaactggt

SEQ ID NO: 129065 - DNA, 120 bp, Artificial Sequence
  ENSG00000102174_41 (sequence is synthesized)
tggtgattagttggggccctcacagtttctagatgagaagcttaccttatcctgattaactttacttgctgtaactgttataccgaaaattgtaggtaggatgtccattactcaaacaaa

SEQ ID NO: 129066 - DNA, 120 bp, Artificial Sequence
  ENSG00000102174_42 (sequence is synthesized)
gcagaacaaaacaacaaaccaaaagcagcaataccaaatcatcactactagctagaacaatgagaaggattgaatttccaaatacatgcttatgtttaactcaactcttccaattacatt

SEQ ID NO: 129067 - DNA, 120 bp, Artificial Sequence
  ENSG00000102174_43 (sequence is synthesized)
ctcattgtcctttctcttggataccgattgctaagataaacagacactgattaagtggtagaaagagaaaggtaaaatgcaactggaagggaaagaaaaaagtagggagaagctggccta

SEQ ID NO: 129068 - DNA, 120 bp, Artificial Sequence
  ENSG00000102174_44 (sequence is synthesized)
tggatgtggctttgaagagaagacaggattttggcattccttgctaagcacgttcaatggaggagagccatgaagttttacaaaaataattatggtaaattaaaaggatattagatattg

SEQ ID NO: 129069 - DNA, 120 bp, Artificial Sequence
  ENSG00000102174_45 (sequence is synthesized)
gatctcagactagggctgctataatacagttctctgattcgcacaccagatgttctgccagcgaactgttgtctgggcattggaaggagttaggttttttgtgtttgtgaaaatctcctg

SEQ ID NO: 129070 - DNA, 120 bp, Artificial Sequence
  ENSG00000102174_46 (sequence is synthesized)
gattagtaaaaaaattttctagatataaagtggttttatttgggctcatgaccattgcccaaagtgtactgagcttttcactaagtgctcagcattggcctcctgttctcatttattcat

SEQ ID NO: 129071 - DNA, 120 bp, Artificial Sequence
  ENSG00000102174_47 (sequence is synthesized)
tttatgagatggacttggacatcactaatgcaaacacaggattcataaattattctgaagtttatttagtgccttgcctcaatggagcttaaagcatagcacataaattttatcttattt

SEQ ID NO: 129072 - DNA, 120 bp, Artificial Sequence
  ENSG00000102174_48 (sequence is synthesized)
agccctggagcatcactaagaagcagctaggaactatggcttgccagacagattatgcttgtgccagagaagtggagaagcctgaaatcccttgtcaagtattccacaggaaggaaaggt

SEQ ID NO: 129073 - DNA, 120 bp, Artificial Sequence
  ENSG00000102174_49 (sequence is synthesized)
agtctttgggctttggtctactgacctgtggattaaactctatcccttagattatcccatttctaaatacatttattcaatcagtatttctataatcacttagcatttgataggcttctt

SEQ ID NO: 129074 - DNA, 120 bp, Artificial Sequence
  ENSG00000102174_50 (sequence is synthesized)
ccttgatacatttaacataacgcctcagttgcatattacattatggaagaatatacgattgcttcatataacaacattctcatcaccagtgacagtgtcctactggtttgaagaaagata

SEQ ID NO: 129075 - DNA, 120 bp, Artificial Sequence
  ENSG00000102174_51 (sequence is synthesized)
ttcttggattatgtgttttatatctaaatggttattctgagactggttgtattttcttctcctactcgtgaaacgatgtgaacaagcattttaaggacaataaaaagttagctggttgaa

SEQ ID NO: 129076 - DNA, 120 bp, Artificial Sequence
  ENSG00000102174_52 (sequence is synthesized)
ttaggatattagggtctgagagaaagaagtaagaactttcacatgaattttactgtgacttttgtgttttctttaaattataagggcttcccttctcacatcctttgaaaactgttttta

SEQ ID NO: 129077 - DNA, 120 bp, Artificial Sequence
  ENSG00000102174_53 (sequence is synthesized)
aagaatgttacatcaaaagagtcatagggaaaatcccggtgtcctttgtgatgaactggccaaaagcactgtctggtgtaatttacttgctgcaatgataacaaatgtttttgcccttta

SEQ ID NO: 129078 - DNA, 120 bp, Artificial Sequence
  ENSG00000102178_0 (sequence is synthesized)
gccggcccgagtggacgccgtcgcgaccgccatgcagctgacggtgaaggcgctgcagggccgcgagtgcagcctgcaggtgccagaggacgagctggtgtccacgctgaagcagctggt

SEQ ID NO: 129079 - DNA, 120 bp, Artificial Sequence
  ENSG00000102178_1 (sequence is synthesized)
ctccgagaagctgaacgtcccagtgcgccagcagcggctgctgttcaagggcaaggccctggcagatgggaaacgactctcggattatagcatcgggcccaactccaagctcaacctagt

SEQ ID NO: 129080 - DNA, 120 bp, Artificial Sequence
  ENSG00000102178_2 (sequence is synthesized)
ggtcaaacccctggagaaggtgctactagaagaaggcgaggcccagaggctggccgactccccacccccgcaggtctggcagctgatctccaaagtcttggcccgccacttcagtgcggc

SEQ ID NO: 129081 - DNA, 120 bp, Artificial Sequence
  ENSG00000102178_3 (sequence is synthesized)
agatgccagcagggtcctggaacagctacagagggattacgagaggtccctgagtcgcctgacgctggacgacatcgaacggttggccagccgcttcctgcaccctgaagtgactgagac

SEQ ID NO: 129082 - DNA, 120 bp, Artificial Sequence
  ENSG00000102178_4 (sequence is synthesized)
aatggagaagggcttctccaaatagaattctcggagcatggggaggtgcccaacgccaggctaccgctgcatgtcgcactaagtgtgttctcctgttgcagttgggctcatcatcatcat

SEQ ID NO: 129083 - DNA, 120 bp, Artificial Sequence
  ENSG00000102178_5 (sequence is synthesized)
agctggcatgtacctggctctggccaggtgctaggcactcctcacagcttgacctgggtttgcttccacaccctcagaagaggagagccggcacagcagaggcaccggcgatgaagtggc

SEQ ID NO: 129084 - DNA, 120 bp, Artificial Sequence
  ENSG00000102178_6 (sequence is synthesized)
acagccccagtcggaatccagcggcttctgaaagtgccttggtgtgagaaggaggaaggggccgcttggagagctgggctctcgcatgtcatgtttagcccactgagaatataccctcag

SEQ ID NO: 129085 - DNA, 120 bp, Artificial Sequence
  ENSG00000102178_7 (sequence is synthesized)
gtgactccctcccgatcctgaaagggaaagcagctgtcacctgacttctggcgggtccaacatagccctcagcttacctctgcaggaggccaagtgacagccagccctggaaccccccga

SEQ ID NO: 129086 - DNA, 120 bp, Artificial Sequence
  ENSG00000102178_8 (sequence is synthesized)
cccccgcagctgctgcagccagtgtgccagtgtgcgttcgacaaatggaaaagcagattggggccagggagtcagcaaggcaccccagctctgtgatgtgactttgggcgagtctcagtg

SEQ ID NO: 129087 - DNA, 120 bp, Artificial Sequence
  ENSG00000102178_9 (sequence is synthesized)
gacctgagtcagtgtcctctgtctcacagggcccctctcccttctgttcagtaaacaaactgaagccaaaaatgaagccgtggccaagtgtgacccagagatggggtgtcctggccctta

SEQ ID NO: 129088 - DNA, 120 bp, Artificial Sequence
  ENSG00000102178_10 (sequence is synthesized)
gtgacacagctcctctctggggcaccctatctgcttgtctcgtccaggaagcgttagggctgatgggtgactcagcaaggcagtgtcagagctgggactgggcgtaggcctttgtcctca

SEQ ID NO: 129089 - DNA, 120 bp, Artificial Sequence
  ENSG00000102178_11 (sequence is synthesized)
tccccagcactggcctccctgtggaagatgaacatatcccagccacctgtgtacaggggctcactttgtgtgctccttgttgcctgagaagaaaccttggggtgccagggtgggggcaga

SEQ ID NO: 129090 - DNA, 120 bp, Artificial Sequence
  ENSG00000102178_12 (sequence is synthesized)
agcatggactgggttccggttcatcctcctccaccctgccgtgtgtgtgggcacaagaggacatctaaccacctgctccttggaggaggcccccaggggtggtagaggctggaaggaagc

SEQ ID NO: 129091 - DNA, 120 bp, Artificial Sequence
  ENSG00000102178_13 (sequence is synthesized)
cacatcaggaggacgccactccggcccttcacccttgccaagtgagctgctcacagtgtggtcagggctgcgcgtgctggaggccctcctgcctgggccttgtggggcaaatattgggtc

SEQ ID NO: 129092 - DNA, 120 bp, Artificial Sequence
  ENSG00000102178_14 (sequence is synthesized)
cccaggctggaaagatggacagaggcccaatgggtgaaggctttgaagagcacacagaagcccctggccccccacgagagctggagagccatgtatatggcttcaaagccacctacggca

SEQ ID NO: 129093 - DNA, 120 bp, Artificial Sequence
  ENSG00000102178_15 (sequence is synthesized)
gggacacactcgtgagcatgtgtggcctgcagttcaggtgatacatttaccagtgttcttgtttgtgtggtgccaggaaattgattttggaaaaagtgaaataacattaaaggtgaatgt

SEQ ID NO: 129094 - DNA, 120 bp, Artificial Sequence
  ENSG00000102178_16 (sequence is synthesized)
gaggcttctacttttatccaaaaggagctatattagctaggctgtttctgatatccaatcattggtttaacaataaaggcaatttgtttaatcagttaacggaaatttcttggcttatga

SEQ ID NO: 129095 - DNA, 120 bp, Artificial Sequence
  ENSG00000102178_17 (sequence is synthesized)
aagtgaaaagtccagtggtattggcattggcagcaggtgagcaatttcacccagtgtcttctgcctccctctgcgttggtatctgctacatcccaggccaccacctccgaggatgaaaag

SEQ ID NO: 129096 - DNA, 120 bp, Artificial Sequence
  ENSG00000102178_18 (sequence is synthesized)
atggctgcctgcagcttccacggaatccctccctcactgccagagcagcatcttctctgtgtaccacctctgctgtctcagatgcccccagcaaataaacactcttctcgttggtcagaa

SEQ ID NO: 129097 - DNA, 120 bp, Artificial Sequence
  ENSG00000102178_19 (sequence is synthesized)
gcggccgcatgcctcacagccggatgccgcagcgctccgctcccgccgcccgaggcggcctcgcgccccgggccacccccacggcggtggaggaggaggaacccatcgatctgtctttgg

SEQ ID NO: 129098 - DNA, 120 bp, Artificial Sequence
  ENSG00000102178_20 (sequence is synthesized)
ggcccgagtggacgccgtcgcgaccgccatgcagctgacggtgaaggcgctgcagggccgcgagtgcagcctgcagatgggaaacgactctcggattatagcatcgggcccaactccaag

SEQ ID NO: 129099 - DNA, 120 bp, Artificial Sequence
  ENSG00000102178_21 (sequence is synthesized)
ccagcagccgtgtgtcgggtcggggtgcgggcgccaagcgccacatgaccccaagggaggcggccgcatgcctcacagccggatgccgcagcgctccgctcccgccgcccgaggcggcct

SEQ ID NO: 129100 - DNA, 120 bp, Artificial Sequence
  ENSG00000102181_0 (sequence is synthesized)
gctaactgtgctcctccggggccctccgcctgctcccagccatggtggcctggcgctcggcgttccttgtctgcctcgctttctccttggccaccctggtccagcgaggatctggggact

SEQ ID NO: 129101 - DNA, 120 bp, Artificial Sequence
  ENSG00000102181_1 (sequence is synthesized)
ttgatgattttaacctggaggatgcagtgaaagaaacttcctcagtaaagcagagatggaaccatgtaaccaccacgaccaagaggccagtaaccaccagagctccagcaaatactttag

SEQ ID NO: 129102 - DNA, 120 bp, Artificial Sequence
  ENSG00000102181_2 (sequence is synthesized)
gaaatgattttgacttggctgatgccctggatgatcgaaatgatcgagatgatggccgcaggaaaccaattgctggaggaggaggtttttcagacaaggatcttgaagacatagtagggg

SEQ ID NO: 129103 - DNA, 120 bp, Artificial Sequence
  ENSG00000102181_3 (sequence is synthesized)
gtggagaatacaaacctgacaagggtaaaggtgatggccggtacggcagcaatgacgaccctggatctggcatggtggcagagcctggcaccattgccggggtggccagcgccctggcca

SEQ ID NO: 129104 - DNA, 120 bp, Artificial Sequence
  ENSG00000102181_4 (sequence is synthesized)
catctcctaccagcagaagaagttctgcttcagcattcagcagggtctcaacgcagactacgtgaagggagagaacctggaagccgtggtatgtgaggaaccccaagtgaaatactccac

SEQ ID NO: 129105 - DNA, 120 bp, Artificial Sequence
  ENSG00000102181_5 (sequence is synthesized)
gttgcacacgcagtctgcagagccgccgccgccgcccgaaccagcccggatctgagggccctgtccagctgcaggcatgcacaatggtgccaccgcttgtcacccggctccccccacccc

SEQ ID NO: 129106 - DNA, 120 bp, Artificial Sequence
  ENSG00000102181_6 (sequence is synthesized)
ttcatttggacccgcagctgctgtgctgctctgtgccatcggctccttgttggtctgagtttcccggatgagctctgggtgtttgtgagtttggtttctctgccctgccccaagcgtgct

SEQ ID NO: 129107 - DNA, 120 bp, Artificial Sequence
  ENSG00000102181_7 (sequence is synthesized)
gagacttggtgccgaaattcaagagccagctctgatagaaagccagcaccagcctcgggagctgctgagccaccaactcccaaagccagcctgcctccagctttactgagcacaggatgc

SEQ ID NO: 129108 - DNA, 120 bp, Artificial Sequence
  ENSG00000102181_8 (sequence is synthesized)
ccaataggccaggaaccaccagagctccggcaaaacctccaggtagtggattggacttggctgatgctttggatgatcaagatgatggccgcaggaaaccgggtataggaggaagagaga

SEQ ID NO: 129109 - DNA, 120 bp, Artificial Sequence
  ENSG00000102181_9 (sequence is synthesized)
atgacatttatgcttaggggacaagagtttgaactcaagggactgtgacccctgcacactggagtggctcattgtggcaggtttctgccaatagacagcccctgacagtggcctcaagga

SEQ ID NO: 129110 - DNA, 120 bp, Artificial Sequence
  ENSG00000102181_10 (sequence is synthesized)
gctgcaggtggggggctcagcctgcacccacttggagcccctgcaaggagcgaaccggtcagcaccaagtaacaccacacacacgcagcacccaggatgatggtttcacttcagtcttcc

SEQ ID NO: 129111 - DNA, 120 bp, Artificial Sequence
  ENSG00000102181_11 (sequence is synthesized)
ccatcccaggttttatgttgctgggcttccggagagccggtccaagcggaggctttcagtgatttaagtacaaacatgcatctcgtgatagtcctgccttgagagcttaggaatcttccg

SEQ ID NO: 129112 - DNA, 120 bp, Artificial Sequence
  ENSG00000102181_12 (sequence is synthesized)
gataagtatgaagcaattcgtaggcctgtttcccatctgattccatagggggctgggtgtggccttcgggttgacatgagaaaggtctttagcaatcatttctgcaccggagatgagttt

SEQ ID NO: 129113 - DNA, 120 bp, Artificial Sequence
  ENSG00000102181_13 (sequence is synthesized)
agccagaatcctgcttgtttgcttaaaaatgtaattgggggcggcgggggaggagaggggaaagagacattcgcttggtttagtgaaacgcaggtgactttgtagctctgtggtcagcct

SEQ ID NO: 129114 - DNA, 120 bp, Artificial Sequence
  ENSG00000102181_14 (sequence is synthesized)
acttgtctgctctgagggagagtgcgtggggagccatgctcaccgtggcaaacacaggaaccccatgactcgcccctcacctggcgtggagctgcctggtttgggctggagcagagctgg

SEQ ID NO: 129115 - DNA, 120 bp, Artificial Sequence
  ENSG00000102181_15 (sequence is synthesized)
tttcctggaatgttcctttggcccacatatggttctgtcccggtgagctctgttgtcagaggctcacgggacagaaccacatgctagggtctagggcccctgtctactgatagtcagttt

SEQ ID NO: 129116 - DNA, 120 bp, Artificial Sequence
  ENSG00000102181_16 (sequence is synthesized)
gctgtgtcagaaagcacttctgaaagcagatatgagtcaccagacaggcaggatcttacaaaactcacgggcctctttggtctgcatgatggccccatgcgtttcataggctgtccactg

SEQ ID NO: 129117 - DNA, 120 bp, Artificial Sequence
  ENSG00000102181_17 (sequence is synthesized)
agcgggattgtctgctgagtgggatgagccaactccagtttcttaaggaaaccactggaatctgcagcccccacatgcatctgtctaacgcatgcctcgtgttcgttttgcaaacatgcc

SEQ ID NO: 129118 - DNA, 120 bp, Artificial Sequence
  ENSG00000102181_18 (sequence is synthesized)
tgtggtggagggtggtcagttgtagccctgtgcgtctcaaggctgccttgtgaggccattcccagtgcgtgcccttgagctccttaccaccccttttcctgctcggccctttaatccctg

SEQ ID NO: 129119 - DNA, 120 bp, Artificial Sequence
  ENSG00000102181_19 (sequence is synthesized)
acagacctggactgtgtggctgaagggggacctgcagcactgcagaaatgcctctgcgtggtgccatgaaggaaagaaaccttggcctggtctcgagaagcttcccatgcttcaggaagt

SEQ ID NO: 129120 - DNA, 120 bp, Artificial Sequence
  ENSG00000102181_20 (sequence is synthesized)
tagtaagggtggggtggcttgcaggattggcctgtttccagggcctcccacactcattggccagattgtgaactttgtcaggcttgtccctccctgataccaagtatgtcgagaaccgat

SEQ ID NO: 129121 - DNA, 120 bp, Artificial Sequence
  ENSG00000102181_21 (sequence is synthesized)
ggccccaccctctggctggtgctgggccggaggtggctatggaggattttggcatgcgtggcctgtcgccacctggacagcgtgacctcaggggttgtccactttacctttatggtgagg

SEQ ID NO: 129122 - DNA, 120 bp, Artificial Sequence
  ENSG00000102181_22 (sequence is synthesized)
cctgtcggatggctaagtccttgaaaccctagagctgtgacgtagaatatgtgctgtctgtgagaccgtgttcccaggagcactgactgcagttgagagagacccattttgctctccctt

SEQ ID NO: 129123 - DNA, 120 bp, Artificial Sequence
  ENSG00000102181_23 (sequence is synthesized)
accgccccccgccccgggtgctttctgcacaaagcctagagcctggcactcaagcccaccggtggcagctcctagtgactggacatgcctggaagacccctcagccttctgtttgcagaa

SEQ ID NO: 129124 - DNA, 120 bp, Artificial Sequence
  ENSG00000102181_24 (sequence is synthesized)
cgttcatttcaggagcttctccttcccacagacatcttacacttgctcgacactgccacctgcagaagcctggcgggctctggtcaccatgtgtctatctgaaggttgcactggccagca

SEQ ID NO: 129125 - DNA, 120 bp, Artificial Sequence
  ENSG00000102181_25 (sequence is synthesized)
tgggcctgtcccaagcgagaggggagacacagtggactgaaaggactggttgaaagtggccaatctctatcagcttaatttggcagagaaaatttgtaacaactctgagcacatgctggg

SEQ ID NO: 129126 - DNA, 120 bp, Artificial Sequence
  ENSG00000102181_26 (sequence is synthesized)
tgaagtcacagctcaaggaaagataaagctgggcggaaggaggtgtgcgtggcttctggggtgggacccagaggggaggctctgggacaggggctggggttcagtgccagggccctgagg

SEQ ID NO: 129127 - DNA, 120 bp, Artificial Sequence
  ENSG00000102181_27 (sequence is synthesized)
aagaaatggggactgatctcaaaattccagaattccctgtacatctgttcacgtgcttgtgtccaggtgtgacttgtaaactgtctagtgtttgcattaaataaaatggcaccgagcaga

SEQ ID NO: 129128 - DNA, 80 bp, Artificial Sequence
  ENSG00000102181_28 (sequence is synthesized)
gcagcctcgccccgccccccggcctaaccccagcccaggcgccctcaggcgccggctctctagcgcgcccgacctccatc

SEQ ID NO: 129129 - DNA, 120 bp, Artificial Sequence
  ENSG00000102181_29 (sequence is synthesized)
ccatgggaccacaccaccaccaccacaaccaataggccaggaaccaccagagctccggcaaaacctccagggcccactgaaggtagtggattggacttggctgatgctttggatgatcaa

SEQ ID NO: 129130 - DNA, 120 bp, Artificial Sequence
  ENSG00000102181_30 (sequence is synthesized)
caaaatcactaagccaagggaaaagtcaagctagaaactgcatcaggcaaacgtgcctcccattctactcctaaataagatagctgcaaagatggaaaaagctgcacgcctccctcacaa

SEQ ID NO: 129131 - DNA, 120 bp, Artificial Sequence
  ENSG00000102181_31 (sequence is synthesized)
tttgcctacaaagaaatttcttatgggcctcaatatctttaccctaaaacagttctgtgaatttcaccctggcaatacaaactgatagctgatctttacagagggagagagagccgtccc

SEQ ID NO: 129132 - DNA, 120 bp, Artificial Sequence
  ENSG00000102181_32 (sequence is synthesized)
tctgctcccctgatacaaatgcatctctggttgcttcctctgcccaattgcttatgtaaaaatgcaggttcactgagccagacaaaattgtgtattcagtgaaaggctgatcaaggactc

SEQ ID NO: 129133 - DNA, 120 bp, Artificial Sequence
  ENSG00000102181_33 (sequence is synthesized)
aaaagaatgcaaccttttgtctctttctcttatctccctatgacctggaagcaccccacctctacccctgctttgagttgtcccacctttctggaccaaaccaatgtacgtcttacacat

SEQ ID NO: 129134 - DNA, 120 bp, Artificial Sequence
  ENSG00000102181_34 (sequence is synthesized)
catgctcaggctgtggaactccctggaccacgtgccatctccagcagatctgggtgcaagcccaggttcactaatcaccaggtcacatgtgagaccatgtccacctcaccaccctcagcc

SEQ ID NO: 129135 - DNA, 120 bp, Artificial Sequence
  ENSG00000102181_35 (sequence is synthesized)
tccaaagaaaaagccatgggaccacaccaccaccaccacaaccaataggccaggaaccaccagagctccggcaaaacctccaggtagtggattggacttggctgatgctttggatgatca

SEQ ID NO: 129136 - DNA, 120 bp, Artificial Sequence
  ENSG00000102181_36 (sequence is synthesized)
atgctagaagttctatatcaaggtgttggttgggccacattctctctgaaggctctagggaagaatctttccttgactttccccacttctggtggctctaggtgttccttggtttgtggt

SEQ ID NO: 129137 - DNA, 120 bp, Artificial Sequence
  ENSG00000102181_37 (sequence is synthesized)
tgcatcactccaatctctgcctctgttgtcacgtggtgttcccctttctgtgtctctctcctttctcttacaaagatgcttgttagtgggtttaaggcccacctggataatccaggatga

SEQ ID NO: 129138 - DNA, 120 bp, Artificial Sequence
  ENSG00000102181_38 (sequence is synthesized)
atgatctcatcttgagatctttcacttaattacatctgcagagatcctttttccaaataaggaaatatatatttatagatatataatatatatacacatacatatatgtgcgcatatata

SEQ ID NO: 129139 - DNA, 120 bp, Artificial Sequence
  ENSG00000102181_39 (sequence is synthesized)
cacacatcccttattcgttttaagcactgcacggtatgccatagtatgcattcagtaaatgtctgagtgccagctgtgtatcagttactgttttaggctttggggctacagccatggaca

SEQ ID NO: 129140 - DNA, 120 bp, Artificial Sequence
  ENSG00000102181_40 (sequence is synthesized)
aatcacacataaacctgtgccttgtggagccagcgttccagtagtgtggatttggccatgacctgtattgccatttccttactggcagacacgtggtttatttcctttttatgcaattac

SEQ ID NO: 129141 - DNA, 120 bp, Artificial Sequence
  ENSG00000102181_41 (sequence is synthesized)
aaatagggctacagtggacattcttgtccatgtcctttgtgcctaagtgcattgtgactgctaggaccaaagatatgtgttttttatattataaaaaacgctgccaaattgttttccaaa

SEQ ID NO: 129142 - DNA, 120 bp, Artificial Sequence
  ENSG00000102181_42 (sequence is synthesized)
gtggatttgccattatgcactgtcactgatgttgttataatagtacctgttttcccagacccacgccaacactgaattttatcaataaaaatattttaccaatatgatggacaaaataat

SEQ ID NO: 129143 - DNA, 120 bp, Artificial Sequence
  ENSG00000102181_43 (sequence is synthesized)
atctcattgcttattatgcattcccctgattgtagtcaaatggagcatcatatatttactggccatttgcatttgcctctttggtaaattgttcacattcttcccccatttttctgccag

SEQ ID NO: 129144 - DNA, 120 bp, Artificial Sequence
  ENSG00000102181_44 (sequence is synthesized)
attgcttgccttttaaaaatgggtttattaagatctctttgtattatatattgagttgagaaagtcaagggctttggagtcagacttcttgggtctaaactctacctctgccacttctga

SEQ ID NO: 129145 - DNA, 120 bp, Artificial Sequence
  ENSG00000102181_45 (sequence is synthesized)
actgtcaccttgggtaagtcacctgacttgtctgcacctcagtttccttatctcttacatgaagataataagaagccctacctcctaggatcactgtaaggatgacatgggaggagccat

SEQ ID NO: 129146 - DNA, 120 bp, Artificial Sequence
  ENSG00000102181_46 (sequence is synthesized)
aaatgaatctcaggaccccaaaatcactaagccaagggaaaagtcaagctagaaactgcatcaggcatggtggcagagcctggcaccattgccggggtggccagcgccctggccatggcc

SEQ ID NO: 129147 - DNA, 120 bp, Artificial Sequence
  ENSG00000102189_0 (sequence is synthesized)
ggaggcgctcgcaggctgcctagtcgttcgctcgctctctctcgcgtgctccctctcgccgcctgtggggaagtcggggccgcccgagcggccgtcgccaccgcctcgccccgacctcct

SEQ ID NO: 129148 - DNA, 120 bp, Artificial Sequence
  ENSG00000102189_1 (sequence is synthesized)
tcccggtcccctcccggcccagtccctcccgcccgcgcaccccgagtagtgagtggccccgcgcagggtctggagagtcaccgcggcggcgccgggtggtggttaaaccatgttaaggag

SEQ ID NO: 129149 - DNA, 120 bp, Artificial Sequence
  ENSG00000102189_2 (sequence is synthesized)
gattttacagaggactcctgggagagttggctctcaaggttctgatttagattcatcagcaactcctataaacacagtggacgtcaataatgaaagctcttcagagggtttcatatgtcc

SEQ ID NO: 129150 - DNA, 120 bp, Artificial Sequence
  ENSG00000102189_3 (sequence is synthesized)
ccagtgtatgaaatctcttggatctgctgatgaacttttcaaacattatgaagctgttcatgatgctggtaatgactcaggtcatggaggagagtctaatcttgctttgaagcgagatga

SEQ ID NO: 129151 - DNA, 120 bp, Artificial Sequence
  ENSG00000102189_4 (sequence is synthesized)
tgtaacactgctcagacaagaggtccaagacctacaggcttcacttaaggaagaaaaatggtactcggaagaattaaagaaggaattagaaaaatatcaagggctgcagcagcaagaggc

SEQ ID NO: 129152 - DNA, 120 bp, Artificial Sequence
  ENSG00000102189_5 (sequence is synthesized)
caaacctgatgggttggtgactgattcatcagcagaactacagtctttggaacagcaattagaagaagcccaaacagaaaattttaatattaagcaaatgaaagacttatttgaacagaa

SEQ ID NO: 129153 - DNA, 120 bp, Artificial Sequence
  ENSG00000102189_6 (sequence is synthesized)
agcagcccaacttgctactgaaattgcagatataaagtcaaagtatgatgaagaaaggagtcttcgagaagctgctgaacaaaaagtgacacgtctgacagaagaattaaacaaagaggc

SEQ ID NO: 129154 - DNA, 120 bp, Artificial Sequence
  ENSG00000102189_7 (sequence is synthesized)
aactgtaattcaagatctgaagacggaactgcttcagagacctggtatagaagatgttgccgtgctaaagaaagaactggtccaagttcaaacactaatggataacatgaccttggaacg

SEQ ID NO: 129155 - DNA, 120 bp, Artificial Sequence
  ENSG00000102189_8 (sequence is synthesized)
tgagcgagaatctgaaaaactcaaagatgaatgcaaaaaattgcagtcacaatatgctagctcagaggccacaataagccagctaaggagtgaacttgccaaaggcccccaggaagttgc

SEQ ID NO: 129156 - DNA, 120 bp, Artificial Sequence
  ENSG00000102189_9 (sequence is synthesized)
tgtatatgtacaggaactacaaaaactgaaaagttcagttaatgaattaacacaaaaaaatcagaccttgacagaaaacttgctgaaaaaagaacaagactatactaagttagaggagaa

SEQ ID NO: 129157 - DNA, 120 bp, Artificial Sequence
  ENSG00000102189_10 (sequence is synthesized)
acataatgaagaatctgtgagtaaaaagaatattcaggcaacccttcatcaaaaagacctagattgtcaacagcttcagtcaagattgtctgcatctgaaacctcactgcatagaataca

SEQ ID NO: 129158 - DNA, 120 bp, Artificial Sequence
  ENSG00000102189_11 (sequence is synthesized)
tgtagaactaagtgaaaaaggagaagctactcaaaagctcaaagaagaattatctgaggtagagaccaagtaccagcatctaaaggcggagtttaagcagctacaacaacagagagaaga

SEQ ID NO: 129159 - DNA, 120 bp, Artificial Sequence
  ENSG00000102189_12 (sequence is synthesized)
aaaggagcagcatgggttacaactccaaagtgaaattaatcaattacatagcaaacttctggagacagagcgccaactaggggaagctcatggtaggctgaaggaacagagacagctttc

SEQ ID NO: 129160 - DNA, 120 bp, Artificial Sequence
  ENSG00000102189_13 (sequence is synthesized)
aagtgaaaagttgatggataaagaacaacaagtggctgatttacaactcaaactttctcggttagaagagcagttgaaggaaaaagttacaaattctacagaattgcagcatcaattaga

SEQ ID NO: 129161 - DNA, 120 bp, Artificial Sequence
  ENSG00000102189_14 (sequence is synthesized)
taaaacaaagcaacagcatcaagaacaacaggctcttcagcaaagcaccacggcaaaacttcgagaagctcagaatgatttggaacaagttctacgtcaaattggcgataaggaccaaaa

SEQ ID NO: 129162 - DNA, 120 bp, Artificial Sequence
  ENSG00000102189_15 (sequence is synthesized)
gatccagaaccttgaagctttattacagaagagtaaagaaaatatttcattactagaaaaagaaagagaagatctttatgcaaaaattcaggctggtgaaggagagactgctgttcttaa

SEQ ID NO: 129163 - DNA, 120 bp, Artificial Sequence
  ENSG00000102189_16 (sequence is synthesized)
ccagttacaagaaaaaaaccatacactacaggagcaagtaactcaactaacagagaagctgaagaatcagtcagaaagtcataaacaagcccaggagaatttgcatgaccaggtacaaga

SEQ ID NO: 129164 - DNA, 120 bp, Artificial Sequence
  ENSG00000102189_17 (sequence is synthesized)
gcagaaggcacatcttagagctgcacaagaccgtgtcctttccctagaaactagtgtcaatgaattaaatagtcaattaaatgaaagcaaggagaaggtctcccagcttgacatacagat

SEQ ID NO: 129165 - DNA, 120 bp, Artificial Sequence
  ENSG00000102189_18 (sequence is synthesized)
taaagccaaaaccgaactattactatcagcagaagcagcaaaaactgctcaaagagctgatcttcagaatcatttggacacagctcaaaatgcattacaagataaacagcaggagttaaa

SEQ ID NO: 129166 - DNA, 120 bp, Artificial Sequence
  ENSG00000102189_19 (sequence is synthesized)
taagattactactcagttggatcaggtcactgcaaagttacaagacaagcaagaacattgcagtcagctggaaagtcatcttaaagaatataaagagaaatacctctctttagaacagaa

SEQ ID NO: 129167 - DNA, 120 bp, Artificial Sequence
  ENSG00000102189_20 (sequence is synthesized)
aaccgaagagctagaaggtcaaattaagaaactagaagctgatagtcttgaagttaaagcaagcaaggagcaggctttgcaagatctacaacagcaaagacagctgaacacagatttaga

SEQ ID NO: 129168 - DNA, 120 bp, Artificial Sequence
  ENSG00000102189_21 (sequence is synthesized)
gctcagagccacagaattgagtaaacaacttgaaatggagaaggaaatagtatccagtacaagattggatctacagaaaaaatctgaagcccttgaaagtatcaagcaaaagcttaccaa

SEQ ID NO: 129169 - DNA, 120 bp, Artificial Sequence
  ENSG00000102189_22 (sequence is synthesized)
gcaagaggaagaaaaaaaaatcctgaaacaagattttgaaactttaagtcaagaaacaaagattcagcatgaggaattgaataacagaattcaaacaacagtaacagaactacaaaaagt

SEQ ID NO: 129170 - DNA, 120 bp, Artificial Sequence
  ENSG00000102189_23 (sequence is synthesized)
gaaaatggagaaagaagctttaatgacagagctttctacagtaaaggacaaactatcaaaagtttctgattctttgaaaaactctaaaagtgaatttgaaaaggagaatcagaaaggaaa

SEQ ID NO: 129171 - DNA, 120 bp, Artificial Sequence
  ENSG00000102189_24 (sequence is synthesized)
agccgctatattagacttggaaaaaacttgcaaagaattaaagcatcaacttcaagtgcagatggaaaacacacttaaggaacagaaggaactgaaaaagtcacttgaaaaagagaagga

SEQ ID NO: 129172 - DNA, 120 bp, Artificial Sequence
  ENSG00000102189_25 (sequence is synthesized)
ggcttctcatcagttgaaattggaactcaattcaatgcaggaacaacttatacaggcccagaatactttaaaacaaaatgaaaaagaagagcaacaacttcaggggaacataaatgagct

SEQ ID NO: 129173 - DNA, 120 bp, Artificial Sequence
  ENSG00000102189_26 (sequence is synthesized)
aaagcaatcaagtgaacagaagaaaaaacaaattgaagcactccaaggagagcttaaaattgctgttttacagaagacagagcttgagaataaactacagcagcagttaacacaggcagc

SEQ ID NO: 129174 - DNA, 120 bp, Artificial Sequence
  ENSG00000102189_27 (sequence is synthesized)
ccaggaacttgcagcagagaaagagaaaatatcagtattacaaaacaactatgaaaaaagtcaggaaactttcaaacagcttcaatctgatttctatgggagggaatctgaacttctagc

SEQ ID NO: 129175 - DNA, 120 bp, Artificial Sequence
  ENSG00000102189_28 (sequence is synthesized)
caccaggcaagatcttaagtctgtagaagagaagctttctctagcacaggaggacttgatttcaaacagaaatcaaattggaaatcaaaataaattgattcaagaactgaagactgccaa

SEQ ID NO: 129176 - DNA, 120 bp, Artificial Sequence
  ENSG00000102189_29 (sequence is synthesized)
ggctacattggagcaggattcagcaaagaaagaacagcaattgcaggagcgatgtaaagcactacaagacattcagaaagaaaagtcactgaaagaaaaagaactggtaaatgagaagtc

SEQ ID NO: 129177 - DNA, 120 bp, Artificial Sequence
  ENSG00000102189_30 (sequence is synthesized)
taaattggcagagatagaagaaattaaatgtagacaagaaaaagaaatcactaaactaaacgaagaactcaagtcccacaaactagaaagcataaaggagataacaaatcttaaagatgc

SEQ ID NO: 129178 - DNA, 120 bp, Artificial Sequence
  ENSG00000102189_31 (sequence is synthesized)
taaacagcttctaattcagcagaaattagaacttcaaggaaaagcggactccctgaaggcagctgttgaacaggagaagagaaatcagcagatactaaaagaccaggtgaaaaaggaaga

SEQ ID NO: 129179 - DNA, 120 bp, Artificial Sequence
  ENSG00000102189_32 (sequence is synthesized)
agaggagctgaagaaagaatttattgagaaagaagctaagttgcattccgaaataaaagaaaaggaagtaggaatgaagaagcatgaagaaaatgaggctaaacttaccatgcagattac

SEQ ID NO: 129180 - DNA, 120 bp, Artificial Sequence
  ENSG00000102189_33 (sequence is synthesized)
agcattaaatgaaaacttaggcactgtgaagaaggagtggcaatctagtcaacggagagttagtgagcttgagaaacaaacggatgacttacggggtgaaattgcagtattagaagcaac

SEQ ID NO: 129181 - DNA, 120 bp, Artificial Sequence
  ENSG00000102189_34 (sequence is synthesized)
ggttcagaataatcaagatgaaaggagagcactactggaaagatgtcttaaaggagaaggtgaaatagaaaagcttcaaaccaaagtattagaattgcaaagaaagctggataatacaac

SEQ ID NO: 129182 - DNA, 120 bp, Artificial Sequence
  ENSG00000102189_35 (sequence is synthesized)
tgcagcagtgcaggagctgggcagagaaaaccaatcacttcagatcaaacatacacaagcgttgaatagaaagtgggccgaagacaatgaagtacaaaactgtatggcctgtgggaaagg

SEQ ID NO: 129183 - DNA, 120 bp, Artificial Sequence
  ENSG00000102189_36 (sequence is synthesized)
cttttcagtaacagtgagacggcatcactgccgacagtgtggaaatatcttctgtgctgaatgttcagccaaaaatgccttaactccttcctccaagaagcctgttcgtgtctgtgatgc

SEQ ID NO: 129184 - DNA, 120 bp, Artificial Sequence
  ENSG00000102189_37 (sequence is synthesized)
atgtttcaatgacttgcaaggataatgggttatcacaacttcagagtaatattacactaacattagatttttaataaatgtacttaatagaggtcttggactactatttggtttggacac

SEQ ID NO: 129185 - DNA, 120 bp, Artificial Sequence
  ENSG00000102189_38 (sequence is synthesized)
tggttgcaatactagaccaaataggaattagtatattttggaatgttatggatatcaagtaaaactcttctatttttgtgagacttgggcttatcatctttcattacttttttcccattt

SEQ ID NO: 129186 - DNA, 120 bp, Artificial Sequence
  ENSG00000102189_39 (sequence is synthesized)
agcccctggaatagctttcatgccaagtttagaattagccaatgaaatgtaaataaactttggacagaaaatagcaatgtatttttttaatataatttcattattcacaaatgaagaatg

SEQ ID NO: 129187 - DNA, 120 bp, Artificial Sequence
  ENSG00000102189_40 (sequence is synthesized)
ttgtgaagttatgcacagaactgtaacactttcctctgcctttttctcttatatgtgggttcatggttcagttgcattgttatgttatgaatttactacttgggtgttctaaatacagtt

SEQ ID NO: 129188 - DNA, 120 bp, Artificial Sequence
  ENSG00000102189_41 (sequence is synthesized)
aatatgtagtaatatgaattcaaaaatggtttttgttttaacaatattaattaaattttcttgggtggattttataaaaacctctgtaaaatcaatttgtttacttatagttatctgggg

SEQ ID NO: 129189 - DNA, 120 bp, Artificial Sequence
  ENSG00000102189_42 (sequence is synthesized)
atctggggttgtattgcaaagaatagggttaatttttctttttgtctttttctgtctctttcttaaactcccacgcattgtccatttagaatcttagaaagcttcttaccctcgctgtca

SEQ ID NO: 129190 - DNA, 120 bp, Artificial Sequence
  ENSG00000102189_43 (sequence is synthesized)
gttggaggatgaataataaacattgtataatgttcttattctcggtttcttgtaagtgggaagtcttttgagatcagccttcatatcatacccttattttgtctctctagcatcttcagg

SEQ ID NO: 129191 - DNA, 120 bp, Artificial Sequence
  ENSG00000102189_44 (sequence is synthesized)
aacctgagtttgctttttacatagatctgattttttcctttatttggtttaacattttcaagcatagatcagcttcatgtatttgttttataattttgcatcttaaagctagtaactaat

SEQ ID NO: 129192 - DNA, 120 bp, Artificial Sequence
  ENSG00000102189_45 (sequence is synthesized)
attgctgtggtcttattggtgaaaacaaaatataaaatgataagaagacattaaatattttactttctatttcttaccctattgggaagaatttttaaaagttgtaaaattgacttaaag

SEQ ID NO: 129193 - DNA, 120 bp, Artificial Sequence
  ENSG00000102189_46 (sequence is synthesized)
ttaaaatggttctgaatttggtgttccatgtcaactgttcccagttttaattttaactttgcaaaaataatgttgtgaaattccctttaagtaactaacacctagaaatagagtatcacc

SEQ ID NO: 129194 - DNA, 120 bp, Artificial Sequence
  ENSG00000102189_47 (sequence is synthesized)
aaaaacaaatgtatttaggaatcccagttacaataaaaactgaaacagcatggctaagcatcttaaggataattaagaaattagcttatttgtatgctgaacaatggaatcgaactttaa

SEQ ID NO: 129195 - DNA, 120 bp, Artificial Sequence
  ENSG00000102189_48 (sequence is synthesized)
tttagcatagtcttattaatttggaaaattgtaaaacatctcaagagagaagttattaatattggtttattaatctttctagagaagaagtgtagttatacattcattcagtgcaatcat

SEQ ID NO: 129196 - DNA, 120 bp, Artificial Sequence
  ENSG00000102189_49 (sequence is synthesized)
taacagtagttaatatttcatttataatagttcttaatatacatttgctttcaaatattctgaaatgaaattatattcatgctatacctacagtgtatgtaaactaaagagatcactaca

SEQ ID NO: 129197 - DNA, 120 bp, Artificial Sequence
  ENSG00000102189_50 (sequence is synthesized)
tacatatttgtttaattatttaaaaaaaaatttaagtaaaccctgttgtcattagctattaagaacattgattaagtccctggacttggataaacatatatccttgaacatatataatga

SEQ ID NO: 129198 - DNA, 120 bp, Artificial Sequence
  ENSG00000102189_51 (sequence is synthesized)
gttggataatataaactgaactatttatgcatttttatatacttataaatccttccaaatagttttaattctatccttttacatataaataacttaataagtgtgctggaaaaacacaga

SEQ ID NO: 129199 - DNA, 120 bp, Artificial Sequence
  ENSG00000102189_52 (sequence is synthesized)
ataacttaataagtgtgctggaaaaacacagatattcacagcaccactgttttttttttttttttgagataataaattccatgagaaatctgggtttgaatatttgtttactttgtctcc

SEQ ID NO: 129200 - DNA, 120 bp, Artificial Sequence
  ENSG00000102189_53 (sequence is synthesized)
taattgaacaccactccaggccttctgtctgtctcccctttacccccaaaatactcacaaaaaaattttaagacaacaagtaaccatatataggtgtttgaatgattttctcatttttat

SEQ ID NO: 129201 - DNA, 120 bp, Artificial Sequence
  ENSG00000102189_54 (sequence is synthesized)
ctaatttcatttcataagtcccgagtaatttacctaccataggctactatactgataatataaatgaaaccgaacattttttgctactaactctccccaatttaatgtgttttcgaaata

SEQ ID NO: 129202 - DNA, 120 bp, Artificial Sequence
  ENSG00000102189_55 (sequence is synthesized)
aaaatttaaatttttttccttttaattaaaaagtcatctttgaagtccttattggctgtacattttacatgtttgctggtactattattttgtcagtcagttaaagctggcatgtacagc

SEQ ID NO: 129203 - DNA, 120 bp, Artificial Sequence
  ENSG00000102189_56 (sequence is synthesized)
tcttggctttaatgaaaagcacattgacataatgttagtaaattccaaaccccggcacagaatgtgagttaaaattaagtcttgctgggttagtgtacaataaactatacctacagactt

SEQ ID NO: 129204 - DNA, 120 bp, Artificial Sequence
  ENSG00000102189_57 (sequence is synthesized)
ttttttaatagaaagaagacaaagctgctggtataggatttgttcctttgaagaaaaaatgagggaaacaaacacaaaaacctcaatgcagtgtataaataacattttgttcaactacct

SEQ ID NO: 129205 - DNA, 120 bp, Artificial Sequence
  ENSG00000102189_58 (sequence is synthesized)
cttaatgtggaattatctactttaatagtttcctgacagtaatgttaaatagtaactgccaaatttgttattttcccatctctcttaaaaaagtctttatgattattttatatagttttg

SEQ ID NO: 129206 - DNA, 120 bp, Artificial Sequence
  ENSG00000102189_59 (sequence is synthesized)
agaactttaaagccacttttttttaaccttacatttgcataaaaatgtttagcttttaagtagagagcaaattatgatcatatattttgatattcatgacctgtttgactataggagttt

SEQ ID NO: 129207 - DNA, 120 bp, Artificial Sequence
  ENSG00000102189_60 (sequence is synthesized)
ttttaaaaaaatgcactttggctataaaaccatggatgatttgatccataagatttaaatgtgccaccattatagtattcctagacatgagcttgatgaatggtattctgtaattataac

SEQ ID NO: 129208 - DNA, 120 bp, Artificial Sequence
  ENSG00000102189_61 (sequence is synthesized)
gtgccacacattattgtgtcttaattgcccttagcctgaattttaatgatcaatttgttattgttgcagatgtgaatattgtgcataaacttactaaatttatgtaaaattgtataaaat

SEQ ID NO: 129209 - DNA, 120 bp, Artificial Sequence
  ENSG00000102189_62 (sequence is synthesized)
agaattagaagtcactaagttctttctgtgtagaagtaataaatttattgtaacacaatgcagttgtgtatatgacattctgtaattccttgaactggatcatatattcataagttctgt

SEQ ID NO: 129210 - DNA, 120 bp, Artificial Sequence
  ENSG00000102189_63 (sequence is synthesized)
agatacttatgcatgaacattttctcatttagtttttgggttcattatttgtattgtgtttactacttgtgatcatgtagttgtgccttactttgtgagaaaggttagctcagtaaatac

SEQ ID NO: 129211 - DNA, 120 bp, Artificial Sequence
  ENSG00000102189_64 (sequence is synthesized)
tgcaatttctaaactcagtgattggaaggttattaattataaatgtaactgataaagtacgtgacagcatttaaatctgtataaagaacaatggaaggatccttattgaattgttgcttt

SEQ ID NO: 129212 - DNA, 120 bp, Artificial Sequence
  ENSG00000102189_65 (sequence is synthesized)
cttttttttaatatgtttaaatattatattaaaaacatttctttctaaactagttgtattctgtgactataaattgttttgtctaacaaaagagagaacactgtattaaccattttgcat

SEQ ID NO: 129213 - DNA, 120 bp, Artificial Sequence
  ENSG00000102189_66 (sequence is synthesized)
ttatttacagaatattaggactttgcacttggatatagacagtggtgttttaatgttgttcaatttcgaatagtaattaaattcctgatctcaagagaaattattaatgccattttgcct

SEQ ID NO: 129214 - DNA, 120 bp, Artificial Sequence
  ENSG00000102189_67 (sequence is synthesized)
tagacattccatttaatattgtagagaattaacaaaactaaaaacaaatataaaaaatatgtaattaaccccttatttcattgtgtgtctgcatttaatacccagatgaccatttaaaga

SEQ ID NO: 129215 - DNA, 120 bp, Artificial Sequence
  ENSG00000102189_68 (sequence is synthesized)
acattatttatttatttatttatttatttttctccctcccctccccaaagatactttttggaaggcccaatgtgccattgttttttgctattttttcttcctgggagccacggttctaga

SEQ ID NO: 129216 - DNA, 120 bp, Artificial Sequence
  ENSG00000102189_69 (sequence is synthesized)
gttctagaatggtttttgttctgacccccgtgatcccttcattcgaatgtgcttcattctaaaccctccaaagagtttaatgtgcatatcctcaaacatctaatatattgtatattagac

SEQ ID NO: 129217 - DNA, 120 bp, Artificial Sequence
  ENSG00000102189_70 (sequence is synthesized)
atgttactttgtgagctttatagaattccagtttatgtacagcatattcttgagctgttttatatattttgttaatttagtcagtctgtctctccctttaatgagattcagagggagaaa

SEQ ID NO: 129218 - DNA, 120 bp, Artificial Sequence
  ENSG00000102189_71 (sequence is synthesized)
actacctttatacatgtaagtctgtggttgctggattcatgggactaaaggaatttgagaggccacctcatcctagtccactgctcacctccgaggttagtttatatctaaacatttgca

SEQ ID NO: 129219 - DNA, 120 bp, Artificial Sequence
  ENSG00000102189_72 (sequence is synthesized)
agatgattgttaatgtaaaaattttttttaaccagaaatttctttataaaatcttctcttgcataatctatattgtattctcctggacataactgctttcagtcccatccagatgccatc

SEQ ID NO: 129220 - DNA, 120 bp, Artificial Sequence
  ENSG00000102189_73 (sequence is synthesized)
tctaggaattcacttgaagcttgaagtctattctcccctttttctcccctccacctcatttattcttagctattaacaatagttactgtcctccagattttcctttttttcttctattaa

SEQ ID NO: 129221 - DNA, 120 bp, Artificial Sequence
  ENSG00000102189_74 (sequence is synthesized)
atttctgacattattataaagaggttattagtctccattctaatagtgcttgccttgtacaaaagcctttctgctgcacttgtctttactgctttgtttgcatagtgaaatttcaccttc

SEQ ID NO: 129222 - DNA, 120 bp, Artificial Sequence
  ENSG00000102189_75 (sequence is synthesized)
ctcaaggaattactgggcacatgacttgcccaaacattatcctctctaccccattcttcagcttaacaaaatcagctaaggcttcagttgtcttgcagccaaatttgataaatttactac

SEQ ID NO: 129223 - DNA, 120 bp, Artificial Sequence
  ENSG00000102189_76 (sequence is synthesized)
tttcactttgcaaattgcaaaaggtacgattctgaaatggaagtttgtggacttccctttgatgcaataatctgaccctaagaactagttccttgaatgtagttaatagtatatatcctg

SEQ ID NO: 129224 - DNA, 120 bp, Artificial Sequence
  ENSG00000102189_77 (sequence is synthesized)
ccatgataataattattcaaactgcctttcatgataaaaattctgaagaaatttgaagtcctgccaaataaaattaagtgactgtactgtgctaacacacacacacacacacacacacac

SEQ ID NO: 129225 - DNA, 120 bp, Artificial Sequence
  ENSG00000102189_78 (sequence is synthesized)
caatcaaaaccagaaagtatttttatggcaaacaccatcattcttcaaaaaataaagttaagagacagataccttactatgtctatgaaaatctgtacacttcacaacaggccaagaaaa

SEQ ID NO: 129226 - DNA, 120 bp, Artificial Sequence
  ENSG00000102189_79 (sequence is synthesized)
gccatgcaaaagtgttaactggtgaaagccagattttttttttcttcctatcttaaagtaatggaatttagtctttgggattttctacttccacgttagagtactatatacctgagatga

SEQ ID NO: 129227 - DNA, 120 bp, Artificial Sequence
  ENSG00000102189_80 (sequence is synthesized)
gtttgagaataggaattttaaaactgctacttaaatgtagtccctatttattgctttgtatattaaaagaacaatcaagctttgtatctaaagatttatcattatgtttgaggtaggact

SEQ ID NO: 129228 - DNA, 120 bp, Artificial Sequence
  ENSG00000102189_81 (sequence is synthesized)
gcatccctaatctgaaaattcaaaatccgaaatgctgcaaaattccaaacttgagtgccgaaatgatgttcatttcagattttggatttttttggattaggatgtccaactgggtttcat

SEQ ID NO: 129229 - DNA, 120 bp, Artificial Sequence
  ENSG00000102195_0 (sequence is synthesized)
gctgtcatttgctctctgactctcagagagggaggcacgctttcctggagctcctggtgacagaacaggtgtttgctgtctggacctggctgctgatcctgagcctgctgggagatctta

SEQ ID NO: 129230 - DNA, 120 bp, Artificial Sequence
  ENSG00000102195_1 (sequence is synthesized)
acgatccccaggagcaacatggggcccaccctagcggttcccaccccctatggctgtattggctgtaagctaccccagccagaatacccaccggctctaatcatctttatgttctgcgcg

SEQ ID NO: 129231 - DNA, 120 bp, Artificial Sequence
  ENSG00000102195_2 (sequence is synthesized)
atggttatcaccatcgttgtagacctaatcggcaactccatggtcattttggctgtgacgaagaacaagaagctccggaattctggcaacatcttcgtggtcagtctctctgtggccgat

SEQ ID NO: 129232 - DNA, 120 bp, Artificial Sequence
  ENSG00000102195_3 (sequence is synthesized)
atgctggtggccatctacccataccctttgatgctgcatgccatgtccattgggggctgggatctgagccagttacagtgccagatggtcgggttcatcacagggctgagtgtggtcggc

SEQ ID NO: 129233 - DNA, 120 bp, Artificial Sequence
  ENSG00000102195_4 (sequence is synthesized)
tccatcttcaacatcgtggcaatcgctatcaaccgttactgctacatctgccacagcctccagtacgaacggatcttcagtgtgcgcaatacctgcatctacctggtcatcacctggatc

SEQ ID NO: 129234 - DNA, 120 bp, Artificial Sequence
  ENSG00000102195_5 (sequence is synthesized)
atgaccgtcctggctgtcctgcccaacatgtacattggcaccatcgagtacgatcctcgcacctacacctgcatcttcaactatctgaacaaccctgtcttcactgttaccatcgtctgc

SEQ ID NO: 129235 - DNA, 120 bp, Artificial Sequence
  ENSG00000102195_6 (sequence is synthesized)
atccacttcgtcctccctctcctcatcgtgggtttctgctacgtgaggatctggaccaaagtgctggcggcccgtgaccctgcagggcagaatcctgacaaccaacttgctgaggttcgc

SEQ ID NO: 129236 - DNA, 120 bp, Artificial Sequence
  ENSG00000102195_7 (sequence is synthesized)
aattttctaaccatgtttgtgatcttcctcctctttgcagtgtgctggtgccctatcaacgtgctcactgtcttggtggctgtcagtccgaaggagatggcaggcaagatccccaactgg

SEQ ID NO: 129237 - DNA, 120 bp, Artificial Sequence
  ENSG00000102195_8 (sequence is synthesized)
tcttccatgctatgcggcaccctatcatattcttctctggcctcatcagtgatattcgtgagatgcaggaggcccgtaccctggcccgcgcccgtgcccatgctcgcgaccaagctcgtg

SEQ ID NO: 129238 - DNA, 120 bp, Artificial Sequence
  ENSG00000102195_9 (sequence is synthesized)
aacaagaccgtgcccatgcctgtcctgctgtggaggaaaccccgatgaatgtccggaatgttccattacctggtgatgctgcagctggccaccccgaccgtgcctctggccaccctaagc

SEQ ID NO: 129239 - DNA, 120 bp, Artificial Sequence
  ENSG00000102195_10 (sequence is synthesized)
cccattccagatcctcctctgcctatcgcaaatctgcctctacccaccacaagtctgtctttagccactccaaggctgcctctggtcacctcaagcctgtctctggccactccaagcctg

SEQ ID NO: 129240 - DNA, 120 bp, Artificial Sequence
  ENSG00000102195_11 (sequence is synthesized)
cctctggtcaccccaagtctgccactgtctaccctaagcctgcctctgtccatttcaaggctgactctgtccatttcaagggtgactctgtccatttcaagcctgactctgttcatttca

SEQ ID NO: 129241 - DNA, 120 bp, Artificial Sequence
  ENSG00000102195_12 (sequence is synthesized)
agcctgcttccagcaaccccaagcccatcactggccaccatgtctctgctggcagccactccaagtctgccttcagtgctgccaccagccaccctaaacccaccactggccacatcaagc

SEQ ID NO: 129242 - DNA, 120 bp, Artificial Sequence
  ENSG00000102195_13 (sequence is synthesized)
cagctaccagccatgctgagcccaccactgctgactatcccaagcctgccactaccagccaccctaagcccactgctgctgacaaccctgagctctctgcctcccattgccccgagatcc

SEQ ID NO: 129243 - DNA, 120 bp, Artificial Sequence
  ENSG00000102195_14 (sequence is synthesized)
ctgccattgcccaccctgtgtctgacgacagtgacctccctgagtcggcctctagccctgccgctgggcccaccaagcctgctgccagccagctggagtctgacaccatcgctgaccttc

SEQ ID NO: 129244 - DNA, 120 bp, Artificial Sequence
  ENSG00000102195_15 (sequence is synthesized)
ctgaccctactgtagtcactaccagtaccaatgattaccatgatgtcgtggttattgatgttgaagatgatcctgatgaaatggctgtgtgaaaaatgctctcgtaggtggccaggcagt

SEQ ID NO: 129245 - DNA, 120 bp, Artificial Sequence
  ENSG00000102218_0 (sequence is synthesized)
acactctaggaagtgcctgagctagtgagctggccaacgagctccgcgggctgggaccatgggctgcttcttctccaagagacggaaggctgacaaggagtcgcggcccgagaacgagga

SEQ ID NO: 129246 - DNA, 120 bp, Artificial Sequence
  ENSG00000102218_1 (sequence is synthesized)
ggagcggccaaagcagtacagctgggatcagcgcgagaaggttgatccaaaagactacatgttcagtggactgaaggatgaaacagtaggtcgcttacctgggacggtagcaggacaaca

SEQ ID NO: 129247 - DNA, 120 bp, Artificial Sequence
  ENSG00000102218_2 (sequence is synthesized)
gtttctcattcaagactgtgagaactgtaacatctatatttttgatcactctgctacagttaccattgatgactgtactaactgcataatttttctgggacccgtgaaaggcagcgtgtt

SEQ ID NO: 129248 - DNA, 120 bp, Artificial Sequence
  ENSG00000102218_3 (sequence is synthesized)
tttccggaattgcagagattgcaagtgcacattagcctgccaacaatttcgtgtgcgagattgtagaaagctggaagtctttttgtgttgtgccactcaacccatcattgagtcttcctc

SEQ ID NO: 129249 - DNA, 120 bp, Artificial Sequence
  ENSG00000102218_4 (sequence is synthesized)
aaatatcaaatttggatgttttcaatggtactatcctgaattagctttccagttcaaagatgcagggctaagtatcttcaacaatacatggagtaacattcatgactttacacctgtgtc

SEQ ID NO: 129250 - DNA, 120 bp, Artificial Sequence
  ENSG00000102218_5 (sequence is synthesized)
aggagaactcaactggagccttcttccagaagatgctgtggttcaggactatgttcctatacctactaccgaagagctcaaagctgttcgtgtttccacagaagccaatagaagcattgt

SEQ ID NO: 129251 - DNA, 120 bp, Artificial Sequence
  ENSG00000102218_6 (sequence is synthesized)
tccaatatcccggggtcagagacagaagagcagcgatgaatcatgcttagtggtattatttgctggtgattacactattgcaaatgccagaaaactaattgatgagatggttggtaaagg

SEQ ID NO: 129252 - DNA, 120 bp, Artificial Sequence
  ENSG00000102218_7 (sequence is synthesized)
ctttttcctagttcagacaaaggaagtgtccatgaaagctgaggatgctcaaagggtttttcgggaaaaagcacctgacttccttcctcttctgaacaaaggtcctgttattgccttgga

SEQ ID NO: 129253 - DNA, 120 bp, Artificial Sequence
  ENSG00000102218_8 (sequence is synthesized)
gtttaatggggatggtgctgtagaagtatgtcaacttattgtaaacgagatattcaatgggaccaagatgtttgtatctgaaagcaaggagacggcatctggagatgtagacagcttcta

SEQ ID NO: 129254 - DNA, 120 bp, Artificial Sequence
  ENSG00000102218_9 (sequence is synthesized)
caactttgctgatatacagatgggaatatgaagtgcaatgtggaaccaggacttggtattaagcctttcccaacttgtgaatatagaatttgataatacacttttgtgtattagcaatgg

SEQ ID NO: 129255 - DNA, 120 bp, Artificial Sequence
  ENSG00000102218_10 (sequence is synthesized)
tacacttttgtgtattagcaatggtttttactaatgctaaaacttttaaagtttattttttaataaattgttgagtattacatcatttacttgaggttcaaaaataattcattttaaatt

SEQ ID NO: 129256 - DNA, 120 bp, Artificial Sequence
  ENSG00000102218_11 (sequence is synthesized)
ctatttaacccattttaataagcttgcagttttgtttctctgcatatgatattcttattagaaaacagaagtagctaaaagtttattattttaatcctatttaaatgttctttcaaatct

SEQ ID NO: 129257 - DNA, 120 bp, Artificial Sequence
  ENSG00000102218_12 (sequence is synthesized)
ctaataatttaaactttcctcagtgctccatgatactttttttgagactccatatcattgcttattttacctttttcaatttagagggatttgttactagtcgatcaattagaatgaacc

SEQ ID NO: 129258 - DNA, 120 bp, Artificial Sequence
  ENSG00000102218_13 (sequence is synthesized)
tatgcacatttttatgtacacatatccagttatataattgcttcctagttgcattatatggcaaatgagattttgtacatggagttgacataatactttgtaaattgaattttttaaaga

SEQ ID NO: 129259 - DNA, 120 bp, Artificial Sequence
  ENSG00000102218_14 (sequence is synthesized)
aataggcatttgataaccagcttggcaagtaactctactaacagatgttggtatagctatttaaagactacttcgtaagtagtatgattatttgaataaattacacattgtttagttttt

SEQ ID NO: 129260 - DNA, 120 bp, Artificial Sequence
  ENSG00000102218_15 (sequence is synthesized)
ataacttttattagctcttgtgggctatcaagagaattggaacaaaaccttgtgacttttaggtaagaaataggcatgatgataagctatgcagattattaaaaagcttgatacatttga

SEQ ID NO: 129261 - DNA, 120 bp, Artificial Sequence
  ENSG00000102218_16 (sequence is synthesized)
tttttcattagatatgccattcatatcaagtaatgttcaagtatgataaaattattttggttgctttaaagcactgtttcccaaatctacctgatcataataatttaccaggaagcagag

SEQ ID NO: 129262 - DNA, 120 bp, Artificial Sequence
  ENSG00000102218_17 (sequence is synthesized)
gagagctacttgtttaaaaatccacattcttggacccaatcctcagatgcacggattcagtcttcaggggaaactctgttttaaggggtatgttgtaatctaaagtaattggttcaggag

SEQ ID NO: 129263 - DNA, 120 bp, Artificial Sequence
  ENSG00000102218_18 (sequence is synthesized)
gtgtcaataggttgaacttgtgagaaggcactgaatctgccatccacatcacatatagcagctattatgaaatcagctttcataggcctatttttaaaaggaatctgaaatttaattcta

SEQ ID NO: 129264 - DNA, 120 bp, Artificial Sequence
  ENSG00000102218_19 (sequence is synthesized)
ttttgataaaactaagactgaaaataaccacttgtaaacattcctatgattgttactaaaatgtattttcatgtttaaaatgtttttggatatttttgggttaataactactacattgaa

SEQ ID NO: 129265 - DNA, 120 bp, Artificial Sequence
  ENSG00000102218_20 (sequence is synthesized)
ttgcatgttaaggtgcagaaataatacattaaaagattttcactttaaattaattagtaatattgagcgctcaccctgtgcgtggccttgtgctaaccattagcactgcatcatttcaat

SEQ ID NO: 129266 - DNA, 120 bp, Artificial Sequence
  ENSG00000102218_21 (sequence is synthesized)
tcttttataagggcattcaatactacaaaatcaacatgatttcataaggtgcaaataaaagttggtgacagatttaatataattttgatcacaatttacaaatgatctttgcaaatagtg

SEQ ID NO: 129267 - DNA, 120 bp, Artificial Sequence
  ENSG00000102218_22 (sequence is synthesized)
aatttacaaatgatctttgcaaatagtggtcagacggcattagtttttcccttagttaagctaaattaaagggactccatcctgttatgattatattattattattattattattatttt

SEQ ID NO: 129268 - DNA, 120 bp, Artificial Sequence
  ENSG00000102218_23 (sequence is synthesized)
gctaccgcgcctggccatgatgatattattaaacaccattattcacatttcaaataataacaatactttttgtttttcaaaaataaaatgcaatgttatataaagctataaactaagttc

SEQ ID NO: 129269 - DNA, 120 bp, Artificial Sequence
  ENSG00000102218_24 (sequence is synthesized)
tttatgatatttgagcaacaactcaggaatataacatataagggagatgttaatttaaaaatttccactacacttattatctattaaccaaagcttaaaattttgtattcttctgttaga

SEQ ID NO: 129270 - DNA, 120 bp, Artificial Sequence
  ENSG00000102218_25 (sequence is synthesized)
taagaccttttacccatttaatttgtctttaaggacagtcatttggcttctgaatgtttgaaacgattttaaaaaataagtagtgctatggttgtttctataattctaacctttgatagt

SEQ ID NO: 129271 - DNA, 120 bp, Artificial Sequence
  ENSG00000102218_26 (sequence is synthesized)
tggttgtttctataattctaacctttgatagtaatcagaatgtattacatttcatttctgaatagcttttgaatttatgaaaaattattaacaatgaaaaattggtaattttattaagtt

SEQ ID NO: 129272 - DNA, 120 bp, Artificial Sequence
  ENSG00000102218_27 (sequence is synthesized)
tcttgcattaatagtactgctgtttttgttttgcttctttatatttatgtctagcttttatatgtaatttatctagtgtttataaaatgtgatttgtaataaatgttgttaaaatgaaaa

SEQ ID NO: 129273 - DNA, 120 bp, Artificial Sequence
  ENSG00000102221_0 (sequence is synthesized)
gggtggcgacggcgcccagcccgccagaagaacgcgcggcgggcagacggctgggagccgctccggatgctccaggatgaaacgccataggcctgtcagcagcagtgacagttcagacga

SEQ ID NO: 129274 - DNA, 120 bp, Artificial Sequence
  ENSG00000102221_1 (sequence is synthesized)
aagtccttccacttcctttacttctggctcaatgtataggatcaagtcaaaaattccaaatgaacacaagaaacctgctgaggtattccggaaggacctcatcagtgccatgaaacttcc

SEQ ID NO: 129275 - DNA, 120 bp, Artificial Sequence
  ENSG00000102221_2 (sequence is synthesized)
agattctcaccacattaatcctgatagctattacctctttgctgatacatggaaggaagaatgggaaaagggagtccaggtaccagccagtccagacaccgttccacagccttctctcag

SEQ ID NO: 129276 - DNA, 120 bp, Artificial Sequence
  ENSG00000102221_3 (sequence is synthesized)
gattatagctgagaaggtaaaggacgttctgtttatccgaccccggaagtatattcactgctccagcccagacaccacagagcctggctacatcaacatcatggagttggcagcatctgt

SEQ ID NO: 129277 - DNA, 120 bp, Artificial Sequence
  ENSG00000102221_4 (sequence is synthesized)
ttgccgctatgacctagatgacatggacatcttctggcttcaggaactcaatgaagaccttgcagaaatgggttgtgggccagttgatgagaatcttatggaaaagacagtagaagtcct

SEQ ID NO: 129278 - DNA, 120 bp, Artificial Sequence
  ENSG00000102221_5 (sequence is synthesized)
ggaacgccattgccatgaaaatatgaaccatgctattgagacagaggaagggctaggcatagagtatgatgaagatgtgatctgtgatgtgtgccggtctccagacagtgaagaagggaa

SEQ ID NO: 129279 - DNA, 120 bp, Artificial Sequence
  ENSG00000102221_6 (sequence is synthesized)
tgatatggtgttctgtgataagtgtaacgtctgtgtgcatcaggcctgctatggcatcctcaaggtcccagaaggcagctggctgtgtcgctcctgtgtcctgggcatttatccgcaatg

SEQ ID NO: 129280 - DNA, 120 bp, Artificial Sequence
  ENSG00000102221_7 (sequence is synthesized)
tgtgttatgtccaaagaaaggtggagccctgaagaccaccaagacagggactaaatgggctcatgtcagctgtgccctgtggatcccagaggtcagcattgcttgtcctgagaggatgga

SEQ ID NO: 129281 - DNA, 120 bp, Artificial Sequence
  ENSG00000102221_8 (sequence is synthesized)
accgatcacgaagatctcccacatcccacccagtcggtgggccttagtctgcaacttgtgcaagttgaagacgggggcttgtattcagtgctctataaaaagctgcatcactgccttcca

SEQ ID NO: 129282 - DNA, 120 bp, Artificial Sequence
  ENSG00000102221_9 (sequence is synthesized)
cgtcacctgtgcctttgagcacggcctagagatgaagaccatcctagatgagggagacgaagtgaagttcaagtcatattgcctcaagcatagccaaaacaggcagaaacttggagaagc

SEQ ID NO: 129283 - DNA, 120 bp, Artificial Sequence
  ENSG00000102221_10 (sequence is synthesized)
tgagtacccccaccacagggctaaagagcagagccaggccaaaagtgagaaaaccagcctgcgggcacagaagcttcgggagctggaggaggagttctattccttggtacgagtggaaga

SEQ ID NO: 129284 - DNA, 120 bp, Artificial Sequence
  ENSG00000102221_11 (sequence is synthesized)
tgtggccgcagagctgggtatgcccacgctagctgtggactttatctataactactggaaactgaagcggaaaagtaacttcaataagccattatttcctccaaaggaggatgaagaaaa

SEQ ID NO: 129285 - DNA, 120 bp, Artificial Sequence
  ENSG00000102221_12 (sequence is synthesized)
tgggctggtgcagccaaaagaggaaagcattcacactcgaatgagaatgtttatgcatctacgccaggacctggagagggtccgaaatctgtgctatatgataagcagacgagagaagct

SEQ ID NO: 129286 - DNA, 120 bp, Artificial Sequence
  ENSG00000102221_13 (sequence is synthesized)
gaagctgtcacacaacaaaatacaggaacagatcttcggtttgcaagtccagcttcttaaccaagaaattgatgcagggcttcctttgacaaatgcacttgaaaactcactgttttaccc

SEQ ID NO: 129287 - DNA, 120 bp, Artificial Sequence
  ENSG00000102221_14 (sequence is synthesized)
accaccaagaattaccttgaagttaaaaatgcccaaatcaaccccagaagaccacagaaacagctccacagaaaccgatcagcagccccactctcctgacagcagctcatctgttcacag

SEQ ID NO: 129288 - DNA, 120 bp, Artificial Sequence
  ENSG00000102221_15 (sequence is synthesized)
tataaggaacatgcaggtgcctcaggagtcactagaaatgagaacaaaatcgtatccgagatacccactagagagcaagaataaccgtttgctggccagtctcagccattctaggagtga

SEQ ID NO: 129289 - DNA, 120 bp, Artificial Sequence
  ENSG00000102221_16 (sequence is synthesized)
agcaaaggagtccagtcctgcttggagaaccccgtcctcggagtgctatcatgggcagtcactgggaaagcctctggtccttcaggctgccctccatggacagtcttccattgggaatgg

SEQ ID NO: 129290 - DNA, 120 bp, Artificial Sequence
  ENSG00000102221_17 (sequence is synthesized)
gaaaagtcagcctaactccaagtttgccaaatccaatggcctggagggcagctggtctgggaatgtcacccaaaaagacagctcgagtgagatgttctgtgaccaggagcctgtgttcag

SEQ ID NO: 129291 - DNA, 120 bp, Artificial Sequence
  ENSG00000102221_18 (sequence is synthesized)
cccccacttggtcagtcagggcagctttagaaaatccactgtagaacactttagtaggtcctttaaagagaccaccaataggtgggtgaagaacacagaggacctccagtgctatgtgaa

SEQ ID NO: 129292 - DNA, 120 bp, Artificial Sequence
  ENSG00000102221_19 (sequence is synthesized)
ctggggtagacaggttctcaggcggtctgcagggagagctccatatcaggaaaatgatggctattgcccagatttggagctgagtgattcagaggcagaaagtgatgggaataaagaaaa

SEQ ID NO: 129293 - DNA, 120 bp, Artificial Sequence
  ENSG00000102221_20 (sequence is synthesized)
agtcagggtaaggaaagatagctcagacagggaaaatcctccccatgactctagacgggattgccatggtaaaagcaagacacatcccctttcccacagttcaatgcaaaggtgattaga

SEQ ID NO: 129294 - DNA, 120 bp, Artificial Sequence
  ENSG00000102221_21 (sequence is synthesized)
aacttccaaggatgacccaacctttgcctttgccccatatattggggaaaacccatacaccaaaaggattttagcatatgttaagaggaattgcagtgaaaaggataacatttttccata

SEQ ID NO: 129295 - DNA, 120 bp, Artificial Sequence
  ENSG00000102221_22 (sequence is synthesized)
gtaaattgtcttgcagtttttgaaaatgtttcaagtctagtttttacaagcacattacagtaattgcaggttgtccagaggttggtttgtcagaggctattgggaacagctgggcccagg

SEQ ID NO: 129296 - DNA, 120 bp, Artificial Sequence
  ENSG00000102221_23 (sequence is synthesized)
gtatttgctcagtaaatattttggggcagctttccggttatataacacattgacaagtatatgtattaagagtccttgcattgttaactgatttgcaagagaccatgattatcagacact

SEQ ID NO: 129297 - DNA, 120 bp, Artificial Sequence
  ENSG00000102221_24 (sequence is synthesized)
aaaactacttatcttttgaagctacagcatgtgactccccagagctcctgtctgtaggaagtttctaattccactggtatctataaacccttttcaggggagagaccaggagaccaccat

SEQ ID NO: 129298 - DNA, 120 bp, Artificial Sequence
  ENSG00000102221_25 (sequence is synthesized)
cttagatactgtcaaactcactactgtcttcctttgttctgcacaaggttgagtttctttcacagtatcttaacttactgagtcaatactcctcatgcttatcagtgtccagtgcctgtt

SEQ ID NO: 129299 - DNA, 120 bp, Artificial Sequence
  ENSG00000102221_26 (sequence is synthesized)
cctaaacttgcttgttggggacacactcataactatttcacctgactgacaagcataaaaggctaacttgtggatagtgtttacaaaagtacaaaagtactacttccaaggaaaatgctc

SEQ ID NO: 129300 - DNA, 120 bp, Artificial Sequence
  ENSG00000102221_27 (sequence is synthesized)
tgattctctgtttaggcatttgtgaaggattccagagcctttcccaaagtgagaccatttctggggtatttgtaccaggtcagggtttttgtgttgttttcaaataagtttgactaaaat

SEQ ID NO: 129301 - DNA, 120 bp, Artificial Sequence
  ENSG00000102221_28 (sequence is synthesized)
aagtttggctgacagtttttgtatacctgctttaatgtttataaaatttttattgaggtataattaaaatatagtaaaatgcacagaggttaagtattcttacctgctttaattttgaaa

SEQ ID NO: 129302 - DNA, 120 bp, Artificial Sequence
  ENSG00000102221_29 (sequence is synthesized)
cagatttttattgtcaaacagaatttgaaagcatgtgtttaacacatggatataatttagctttgtgtcacctttgaatctgaggcagtttcccaaacaaaaaggctggagccatttttc

SEQ ID NO: 129303 - DNA, 120 bp, Artificial Sequence
  ENSG00000102221_30 (sequence is synthesized)
agaagttgcttataccctgttcccaaactatcagccttgattaatttctagtaggaagagaataattacatttgcgggggggggggtggataaaaacatgtctgcttctcatttaaataa

SEQ ID NO: 129304 - DNA, 120 bp, Artificial Sequence
  ENSG00000102221_31 (sequence is synthesized)
gagagaaatgatgccgttttttaaatgtgaagcagactataattctcagctctcttttcttcttagccttaaattaatattctctttcttctagttttggaaagtgtagtgggaatattc

SEQ ID NO: 129305 - DNA, 120 bp, Artificial Sequence
  ENSG00000102221_32 (sequence is synthesized)
agacaaaagaggccattttccatttttaaagcttcttactggtgaaacagcccagttgtagtaggtgccagtcagtcaaggcaggggccctctctccgtcaatatggaaaactcagcagt

SEQ ID NO: 129306 - DNA, 120 bp, Artificial Sequence
  ENSG00000102221_33 (sequence is synthesized)
tttcctctcccccagttgtgttcttgtaacgttgttaatgggttcctttgctttttgctttctccttttctgaaaatgtatgtgttttgcctctcttttggctacatcttcaaaatattt

SEQ ID NO: 129307 - DNA, 120 bp, Artificial Sequence
  ENSG00000102221_34 (sequence is synthesized)
cttttgtgcctatgtacatgtgtaaacatgccatagcatgtgtggtaggtgtcctgtattttgtttgggaaaaaaactatcaaaatgaggaagagaatttcccctatttatgcactaggt

SEQ ID NO: 129308 - DNA, 120 bp, Artificial Sequence
  ENSG00000102221_35 (sequence is synthesized)
ttctgtgctttttctttgagttctctggagtagatattaatttgataccttcatggtaatgaaattatgatggagctgtgttataaattccttatgtcagaggccagtgcggtagccttt

SEQ ID NO: 129309 - DNA, 120 bp, Artificial Sequence
  ENSG00000102221_36 (sequence is synthesized)
gtcccttcatgcctttcaattctgagtgggaggaaaagcaaacatcaaaacagtgcttcagccaaattccatatgtaatgccattgggagagtattgactaaaatatcattcgtcaggga

SEQ ID NO: 129310 - DNA, 120 bp, Artificial Sequence
  ENSG00000102221_37 (sequence is synthesized)
aatatagttgtaatatttttacaggatattcctaggtaaatgaaggagccttcagttgtaaatttcaattaccccaaaatgtatttgctacattttgttgtttgaagtattacctcttaa

SEQ ID NO: 129311 - DNA, 120 bp, Artificial Sequence
  ENSG00000102221_38 (sequence is synthesized)
ccttctttgttaatttttttcattttgtcttatatagtccagttttccaagataagctcagtcctttttcaaatgtcccctttttaccaatactttttcattaaattatgaaaactgcta

SEQ ID NO: 129312 - DNA, 120 bp, Artificial Sequence
  ENSG00000102221_39 (sequence is synthesized)
acagtgtcaggaatacaatagtgctccgcgccgcctcagccgccgccgccgcccaaccgcctgcccagcgctgaggcctgacgggccgggcggacgagggccgagggcgggagctgaggc

SEQ ID NO: 129313 - DNA, 120 bp, Artificial Sequence
  ENSG00000102221_40 (sequence is synthesized)
gcggggggcggccccggcggggggcgggggcgaggaggggattaaggggcaggtgcgagggagggaagagaagaaagcgagcggttaggggggcggttaccactccgaccggactcaccc

SEQ ID NO: 129314 - DNA, 120 bp, Artificial Sequence
  ENSG00000102221_41 (sequence is synthesized)
gtggaagcgggcggcgcggagcgcacagtcccggcccggcctcgccgcgctccgggtcgctccggttccacatcgtggtcgcctccggcgtccccggcgccttggggccgagagcgtgtg

SEQ ID NO: 129315 - DNA, 120 bp, Artificial Sequence
  ENSG00000102225_0 (sequence is synthesized)
ccacttcacccttccgagcgcctgcgtgcgcatgcgcggagcgcggcgcgcgcggcggttgggccgttggctgttcggccctgggatccgccgccactccgcgatcagaccgctctgtgc

SEQ ID NO: 129316 - DNA, 120 bp, Artificial Sequence
  ENSG00000102225_1 (sequence is synthesized)
cgcgagccgccgtgagcactcggattcaagccggcgccaacgagtccgggggcatcgcccgcagcggccaagctcatggccggctgagcgggacgccgcctccgcctcagccaccgccgc

SEQ ID NO: 129317 - DNA, 120 bp, Artificial Sequence
  ENSG00000102225_2 (sequence is synthesized)
cgccgccgcctcctcctcctcagccggcggcggcccgggcccagcaaccatggctgaagactactgggacgggcgcctgcggcgaacaggaggagaaggaggtcgcgcggcctcatcccg

SEQ ID NO: 129318 - DNA, 120 bp, Artificial Sequence
  ENSG00000102225_3 (sequence is synthesized)
ggccgccgccccaggcgccgccgcgccggccccgcggctctgaggttgctcgcgcgcccccgccgatcgccatggatcggatgaagaagatcaaacggcagctgtcaatgacactccgag

SEQ ID NO: 129319 - DNA, 120 bp, Artificial Sequence
  ENSG00000102225_4 (sequence is synthesized)
gtggccgaggcatagacaagaccaatggtgcccctgagcagataggcctggatgagagtggtggtggtggcggcagtgaccctggagaggcccccacacgtgctgctcctggggaacttc

SEQ ID NO: 129320 - DNA, 120 bp, Artificial Sequence
  ENSG00000102225_5 (sequence is synthesized)
gttctgcacggggcccactcagctctgcaccagagattgtgcacgaggacttgaagatggggtctgatggggagagtgaccaggcttcagccacgtcctcggatgaggtgcagtctccag

SEQ ID NO: 129321 - DNA, 120 bp, Artificial Sequence
  ENSG00000102225_6 (sequence is synthesized)
tgagagtgcgtatgcgcaaccatcccccacgcaagatctccactgaggacatcaacaagcgcctatcactaccagctgacatccggctgcctgagggctacctggagaagctgaccctca

SEQ ID NO: 129322 - DNA, 120 bp, Artificial Sequence
  ENSG00000102225_7 (sequence is synthesized)
atagccccatctttgacaagcccctcagccgccgcctccgtcgtgtcagcctatctgagattggctttgggaaactggagacctacattaagctggacaaactgggcgagggtacctatg

SEQ ID NO: 129323 - DNA, 120 bp, Artificial Sequence
  ENSG00000102225_8 (sequence is synthesized)
ccaccgtctacaaaggcaaaagcaagctcacagacaaccttgtggcactcaaggagatcagactggaacatgaagagggggcaccctgcaccgccatccgggaagtgtccctgctcaagg

SEQ ID NO: 129324 - DNA, 120 bp, Artificial Sequence
  ENSG00000102225_9 (sequence is synthesized)
acctcaaacacgccaacatcgttacgctacatgacattatccacacggagaagtccctcacccttgtctttgagtacctggacaaggacctgaagcagtacctggatgactgtgggaaca

SEQ ID NO: 129325 - DNA, 120 bp, Artificial Sequence
  ENSG00000102225_10 (sequence is synthesized)
tcatcaacatgcacaacgtgaaactgttcctgttccagctgctccgtggcctggcctactgccaccggcagaaggtgctacaccgagacctcaagccccagaacctgctcatcaacgaga

SEQ ID NO: 129326 - DNA, 120 bp, Artificial Sequence
  ENSG00000102225_11 (sequence is synthesized)
ggggagagctcaagctggctgactttggcctggcccgagccaagtcaatcccaacaaagacatactccaatgaggtggtgacactgtggtaccggccccctgacatcctgcttgggtcca

SEQ ID NO: 129327 - DNA, 120 bp, Artificial Sequence
  ENSG00000102225_12 (sequence is synthesized)
cggactactccactcagattgacatgtggggtgtgggctgcatcttctatgagatggccacaggccgtcccctctttccgggctccacggtggaggaacagctacacttcatcttccgta

SEQ ID NO: 129328 - DNA, 120 bp, Artificial Sequence
  ENSG00000102225_13 (sequence is synthesized)
aggcatcctgtccaacgaggagttcaagacatacaactaccccaagtaccgagccgaggcccttttgagccacgcaccccgacttgatagcgacggggccgacctcctcaccaagctgtt

SEQ ID NO: 129329 - DNA, 120 bp, Artificial Sequence
  ENSG00000102225_14 (sequence is synthesized)
gcagtttgagggtcgaaatcggatctccgcagaggatgccatgaaacatccattcttcctcagtctgggggagcggatccacaaacttcctgacactacttccatatttgcactaaagga

SEQ ID NO: 129330 - DNA, 120 bp, Artificial Sequence
  ENSG00000102225_15 (sequence is synthesized)
gattcagctacaaaaggaggccagccttcggtcttcgtcgatgcctgactcaggcaggccagctttccgcgtggtggacaccgagttctaagccacagaccgaggccccagcaggcagcg

SEQ ID NO: 129331 - DNA, 120 bp, Artificial Sequence
  ENSG00000102225_16 (sequence is synthesized)
gctggagggatgccacacccctcacagggcagcccccaactacatcttccctgcttactctctgcctacctgcctgagccatgttcacctgcccacttgtcccctgctgcctgcccaaac

SEQ ID NO: 129332 - DNA, 120 bp, Artificial Sequence
  ENSG00000102225_17 (sequence is synthesized)
accccaccattggcctgtcaacccacccattggcctgtctgctgggtgctaacaaagctctcatcactccttcacttggtctgtctgtctctgtcttggtagttgccggtggacagcatg

SEQ ID NO: 129333 - DNA, 120 bp, Artificial Sequence
  ENSG00000102225_18 (sequence is synthesized)
gccgtgccagcctcccacactgaggccaggtctaccccccatcataccagcccccaggaccactaccccacggccagccaggggtccagagctagcccaggctggggatctcgactcaga

SEQ ID NO: 129334 - DNA, 120 bp, Artificial Sequence
  ENSG00000102225_19 (sequence is synthesized)
caagatggtgacaatgccttgagtctgaggcatcctctgcctgctttcctgcctgccccacctgcctcatattgtgtgggcctttttttgtttgtttcattcattgttttttttttttta

SEQ ID NO: 129335 - DNA, 120 bp, Artificial Sequence
  ENSG00000102225_20 (sequence is synthesized)
attattttaaatgagatttttgttttttttaaatgcaatatctctgtatacagactggctgggccccaccccctgcgtgtggccctcccacagtattttgtgcaatgaagccctgctccc

SEQ ID NO: 129336 - DNA, 120 bp, Artificial Sequence
  ENSG00000102225_21 (sequence is synthesized)
agcctttcagagacagggacacagcccctatttggaaccctgatcatcaccagaccctgggattggctatgggaaagcatgccacagccactcgccttcctacccccgcccgccatcccc

SEQ ID NO: 129337 - DNA, 120 bp, Artificial Sequence
  ENSG00000102225_22 (sequence is synthesized)
agttgcagggggatctggggactaccagagactctgggaaatggacaaggtggggggccccactctttctctcctgcagtcccgtagctggggcctccttccttctcagggtctccccag

SEQ ID NO: 129338 - DNA, 120 bp, Artificial Sequence
  ENSG00000102225_23 (sequence is synthesized)
cccagtccccttgctcccatcccactcggtgctgttgggtaggggccctgccaggaactgaccagctcagcgaggagccataatgtgcatatgtgcacaagcagggttgggggagggggg

SEQ ID NO: 129339 - DNA, 120 bp, Artificial Sequence
  ENSG00000102225_24 (sequence is synthesized)
tgtgaggggttgtgcccaggtgttgccccctatctcctggggagggtgaggcagggcagggacagtctccagggtcagtccctggatgggtggttacctccccttcctccaccctaagcc

SEQ ID NO: 129340 - DNA, 120 bp, Artificial Sequence
  ENSG00000102225_25 (sequence is synthesized)
ctggggccctgaaatggggtgggagggcaggggtgggagccctcctagtgggtttggggggttgggttcctgaatgcaccataatcgctgtatgaaatattaaaaagtctaaagtgaaaa

SEQ ID NO: 129341 - DNA, 120 bp, Artificial Sequence
  ENSG00000102225_26 (sequence is synthesized)
gatgagtgctagagaagtcaggaagagggtccctgtggccacagggaatagtctgccttggcctttgagggtggtgctaggggaactatgccactctatggccgtgctcgagaccatgtc

SEQ ID NO: 129342 - DNA, 120 bp, Artificial Sequence
  ENSG00000102225_27 (sequence is synthesized)
acccatccttcaattctgggcacacgccctggccgacccatggctgggcccatcactgcagctgtacctgagaagatctgcaatggagccttctgctcctgcagtggggcttttccccta

SEQ ID NO: 129343 - DNA, 120 bp, Artificial Sequence
  ENSG00000102225_28 (sequence is synthesized)
ggagggggcagttgggcggggataggccgtcctagctaaggtggtaaaggccaataactcttcaggctgcctctcctcgaaaagtcatcttctcgcgaacctttaaaatgccttcctccc

SEQ ID NO: 129344 - DNA, 120 bp, Artificial Sequence
  ENSG00000102225_29 (sequence is synthesized)
caagcacctcaagggactagaactgagtgcttcatttgtcttttttcctccttgcaaaagtcccgtttgccaccatggggatgtaccaagtgagaccgagtagggggaacgagtggtgat

SEQ ID NO: 129345 - DNA, 120 bp, Artificial Sequence
  ENSG00000102225_30 (sequence is synthesized)
tgacgcgccaggttactggccactgctcacctaggcgctagcaaacttctgccaagatcggaactgagtactaaacagcctccacagttctccctggtgccgtctccggcttggcgccgc

SEQ ID NO: 129346 - DNA, 120 bp, Artificial Sequence
  ENSG00000102225_31 (sequence is synthesized)
atcctcctctgggctcgcgatggccgcgtcccctcccgctgcggacgggtcctttggtacatgcagtccgagatcgccatggatcggatgaagaagatcaaacggcagctgtcaatgaca

SEQ ID NO: 129347 - DNA, 120 bp, Artificial Sequence
  ENSG00000102225_32 (sequence is synthesized)
aggagaccccacccccgccgacggtgaaaacctatgaaacctgggcggaggcgtgcggagtcgggtagagagcgaaatcacgcctcttcagtcagccacgccctttattcttgctcggcc

SEQ ID NO: 129348 - DNA, 120 bp, Artificial Sequence
  ENSG00000102225_33 (sequence is synthesized)
tcgccacagagagcaaatcagattggctgggcgacaacctcaaagggcggggctgcacacgttcactacgggaatgagtcccgtttgccaccatggggatgtaccaagtgagaccgagta

SEQ ID NO: 129349 - DNA, 120 bp, Artificial Sequence
  ENSG00000102225_34 (sequence is synthesized)
ggactgctggggccagctggcgggttgtgtaggattctggctgtgccacctctacgtggggggacatcttgttcacgtgtgtgatgggttgtatttgttatgaaaacattttttagtttt

SEQ ID NO: 129350 - DNA, 120 bp, Artificial Sequence
  ENSG00000102225_35 (sequence is synthesized)
tttaaaacatacataaaaatatatgcaatagcactttactttttttaaagtagacatttccttacatgtgctaaaaaatgcacaaatcataagtatactatacaatgaattttcataaat

SEQ ID NO: 129351 - DNA, 120 bp, Artificial Sequence
  ENSG00000102225_36 (sequence is synthesized)
gaaacacatccttgtaactagcacaaaagtcaagaaacagaatgttaaaagctccccacccccagctcccttgcatctccttcagttattcccagccccttcccaaagggtggccactgt

SEQ ID NO: 129352 - DNA, 120 bp, Artificial Sequence
  ENSG00000102225_37 (sequence is synthesized)
tttgacctctaacagcaaggataagttttttctgtccttgtactttatagaaatagaatcacatgtgatgttctttttatatctggcttttaaaaactttttaatatggatattttcaaa

SEQ ID NO: 129353 - DNA, 120 bp, Artificial Sequence
  ENSG00000102225_38 (sequence is synthesized)
tatatgtatttatatattagtcaaagtaatatgatgagtccctaagtactccagtgagtcatcaattcatggtcaatctggttttatctatattctctctgattattttgaatcacatcc

SEQ ID NO: 129354 - DNA, 120 bp, Artificial Sequence
  ENSG00000102225_39 (sequence is synthesized)
aaacggacttttccctttggctttttttgctaggagcccttggagggcactgggaccctgtcctcttttgtgtgacaaggctctgggcctagtgtctgtgtttgggaggggagcagtgcc

SEQ ID NO: 129355 - DNA, 120 bp, Artificial Sequence
  ENSG00000102225_40 (sequence is synthesized)
acttagtctcacttcccttcagccttgccagattttgcctaggacaccctcagtctcaactgcactctccccgagactttgcccatgactccctcattctagctgtcctttctctgattt

SEQ ID NO: 129356 - DNA, 120 bp, Artificial Sequence
  ENSG00000102225_41 (sequence is synthesized)
taccttgtttagggttgttcaatgaatagcagggactcatcacctcagcagaggttggtcctaggccctcagccccctgattcacttatttctgccataagcactttttgagcatctact

SEQ ID NO: 129357 - DNA, 120 bp, Artificial Sequence
  ENSG00000102225_42 (sequence is synthesized)
ctgtgtcagtcactattccaggtcctcaggatatagccgtgacctaaacacagaaatctaccctggcggagctgatcttctagttgtggcgatcgccatggatcggatgaagaagatcaa

SEQ ID NO: 129358 - DNA, 120 bp, Artificial Sequence
  ENSG00000102225_43 (sequence is synthesized)
ttttaaaacaacaatattattatcaaacctacaaaaaacatttgctcactttccctatcttcccactggattaatatataaagcaaaccccaaacaccacccatcacctagacttaacag

SEQ ID NO: 129359 - DNA, 120 bp, Artificial Sequence
  ENSG00000102225_44 (sequence is synthesized)
gtggtaattgcaataccataattcacttgacaaagttaataatgatttctttgtgtcatgtaatagtctatatttcatcttccctggttgtagctggtttgtgtatggaattgtttgaca

SEQ ID NO: 129360 - DNA, 120 bp, Artificial Sequence
  ENSG00000102225_45 (sequence is synthesized)
ctggcagccctgagaagagctggtgtacactgagacccccccgccctccacacaatcccacccagtggttgggtctgggcaggacaccctgacacacgctcccctccccccccccacctg

SEQ ID NO: 129361 - DNA, 120 bp, Artificial Sequence
  ENSG00000102225_46 (sequence is synthesized)
tcccagtggggctggctgtgtgggtgggcaggtactgacaaagatccccatccatgctgggtttccagaactcctgagtggctctggggtccatagtggttgagtgagcactgacaagtt

SEQ ID NO: 129362 - DNA, 120 bp, Artificial Sequence
  ENSG00000102225_47 (sequence is synthesized)
catgtcagtgccccctgctaggctgtgggctttagggaacccatggtgatcaagcaaatgctaataagagacccatttccatccttgtcccttgctcagatcgccatggatcggatgaag

SEQ ID NO: 129363 - DNA, 120 bp, Artificial Sequence
  ENSG00000102225_48 (sequence is synthesized)
gatgcctgactcaggtaggtatagccccttgtcttcctccctgccccacccacctacctgcttacccaccaacagccatctgctctgctttcccccacaggcaggccagctttccgcgtg

SEQ ID NO: 129364 - DNA, 120 bp, Artificial Sequence
  ENSG00000102225_49 (sequence is synthesized)
gttctgcacggggcccactcagctctgcaccagattgtgcacgaggacttgaagatggggtctgatggggagagtgaccaggcttcagccacgtcctcggatgaggtgcagtctccagtg

SEQ ID NO: 129365 - DNA, 120 bp, Artificial Sequence
  ENSG00000102225_50 (sequence is synthesized)
aaggatccgcctctttccttctttctcagcctgggttccaccccgggaggcccgctgtatgagatggagggcgggctaaaggcgggacgagactcgattgagcgcaattatgaccaatca

SEQ ID NO: 129366 - DNA, 120 bp, Artificial Sequence
  ENSG00000102225_51 (sequence is synthesized)
ccttgcggaatattcggcctatagcgaaggaggagctcagaacaaaaaggagaccccacccccgccgacgtcccgtttgccaccatggggatgtaccaagtgagaccgagtagggggaac

SEQ ID NO: 129367 - DNA, 120 bp, Artificial Sequence
  ENSG00000102226_0 (sequence is synthesized)
ttaccccacctagcccttcgacgcgtctgtgcacggggccatttccaatatggcagtagccccgcgactgtttggggggctctgcttccgtttccgggaccagaatccggaagtggctgt

SEQ ID NO: 129368 - DNA, 120 bp, Artificial Sequence
  ENSG00000102226_1 (sequence is synthesized)
tgaggggcgtcttccaatctcgcacagctgcgttggctgtagaagagaacggacggcgatggcgacggtcgcagcaaatccagctgctgctgcggcggctgtggcggcggcagcggcggt

SEQ ID NO: 129369 - DNA, 120 bp, Artificial Sequence
  ENSG00000102226_2 (sequence is synthesized)
gactgaggatagagagccacagcacgaggagctgccaggcctggacagccagtggcgccagatagaaaacggcgagagtgggcgagaacgtccactgcgggccggcgaaagctggttcct

SEQ ID NO: 129370 - DNA, 120 bp, Artificial Sequence
  ENSG00000102226_3 (sequence is synthesized)
tgtggagaagcactggtataagcagtgggaggcatacgtgcagggaggggaccaggactccagcaccttccctggctgcatcaacaatgccacactctttcaagatgagataaactggcg

SEQ ID NO: 129371 - DNA, 120 bp, Artificial Sequence
  ENSG00000102226_4 (sequence is synthesized)
cctcaaggagggactggtggaaggcgaggattatgtgctgctcccagcagctgcttggcattacctggtcagctggtatggtctagagcatggccagccacccattgaacgcaaggtcat

SEQ ID NO: 129372 - DNA, 120 bp, Artificial Sequence
  ENSG00000102226_5 (sequence is synthesized)
agagctgcccaacatccagaaggtcgaagtgtacccagtagaactgctgcttgtccggcacaatgatttgggcaaatctcacactgttcagttcagccataccgattctattggcctagt

SEQ ID NO: 129373 - DNA, 120 bp, Artificial Sequence
  ENSG00000102226_6 (sequence is synthesized)
attgcgcacagctcgggagcggtttctggtggagccccaggaagacactcggctttgggccaagaactcagaaggctctttggataggttgtatgacacacacatcacggttctcgatgc

SEQ ID NO: 129374 - DNA, 120 bp, Artificial Sequence
  ENSG00000102226_7 (sequence is synthesized)
ggcccttgagactgggcagttgatcatcatggagacccgcaagaaagatggcacttggcccagcgcacagctgcatgtcatgaacaacaacatgtcggaagaggatgaggacttcaaggg

SEQ ID NO: 129375 - DNA, 120 bp, Artificial Sequence
  ENSG00000102226_8 (sequence is synthesized)
tcagccaggcatctgtggcctcaccaatctgggcaacacgtgcttcatgaactcggccctgcagtgcctcagcaatgtgccacagctcaccgagtacttcctcaacaactgctacctgga

SEQ ID NO: 129376 - DNA, 120 bp, Artificial Sequence
  ENSG00000102226_9 (sequence is synthesized)
ggagctcaacttccgcaacccactgggcatgaagggtgagatcgcagaggcctatgcagacctggtgaagcaggcgtggtctggccaccaccgctccattgtgccacatgtgttcaagaa

SEQ ID NO: 129377 - DNA, 120 bp, Artificial Sequence
  ENSG00000102226_10 (sequence is synthesized)
caaggttggccattttgcatcccaatttctgggctaccagcagcatgactctcaggagctgctgtcattcctcctggacgggctgcatgaggaccttaatcgggtgaagaagaaggagta

SEQ ID NO: 129378 - DNA, 120 bp, Artificial Sequence
  ENSG00000102226_11 (sequence is synthesized)
tgtggagctgtgcgatgctgctgggcgaccggatcaggaggtggcacaggaggcatggcaaaaccacaaacggcggaacgattctgtgatcgtggacactttccacggcctcttcaagtc

SEQ ID NO: 129379 - DNA, 120 bp, Artificial Sequence
  ENSG00000102226_12 (sequence is synthesized)
cacgctggtgtgccccgattgtggcaatgtatctgtgaccttcgaccccttctgctacctcagtgttccactgcctatcagccacaagagggtcttggaggtcttctttatccccatgga

SEQ ID NO: 129380 - DNA, 120 bp, Artificial Sequence
  ENSG00000102226_13 (sequence is synthesized)
cagagaggatgatggtggctgatgtcttcagtcaccgcttctataagctctatcagctagaggagcctctgagcagcatcttggaccgtgatgatatcttcgtctatgaggtgtcaggtc

SEQ ID NO: 129381 - DNA, 120 bp, Artificial Sequence
  ENSG00000102226_14 (sequence is synthesized)
gcattgaggccattgagggctcaagagaggacatcgtggttcctgtctacctgcgggagcgcacccctgcccgtgactacaacaactcctactacggcctgatgctttttggacaccccc

SEQ ID NO: 129382 - DNA, 120 bp, Artificial Sequence
  ENSG00000102226_15 (sequence is synthesized)
tcctggtatcagtgccccgggaccgcttcacctgggagggcctgtataacgtcctgatgtaccggctctcacgctacgtgaccaaacccaactcagatgatgaggacgatggggatgaga

SEQ ID NO: 129383 - DNA, 120 bp, Artificial Sequence
  ENSG00000102226_16 (sequence is synthesized)
aagaagatgacgaggaggataaagatgacgtccctgggccctcaactgggggcagcctccgagaccctgagccagagcaggctgggcccagctctggagtcacgaacaggtgcccgttcc

SEQ ID NO: 129384 - DNA, 120 bp, Artificial Sequence
  ENSG00000102226_17 (sequence is synthesized)
tcctggacaattgccttggcacatctcagtggcccccaaggcgacgacgcaagcagctgttcaccctgcagacggtgaactccaatgggaccagcgaccgcacaacctcccctgaagaag

SEQ ID NO: 129385 - DNA, 120 bp, Artificial Sequence
  ENSG00000102226_18 (sequence is synthesized)
tccatgcccagccgtacattgctatcgactgggagccagagatgaagaagcgttactatgacgaggtagaggctgagggctacgtgaagcatgactgcgtcgggtacgtgatgaagaagg

SEQ ID NO: 129386 - DNA, 120 bp, Artificial Sequence
  ENSG00000102226_19 (sequence is synthesized)
ctcccgtgcggctgcaggagtgcattgagctcttcaccactgtggagaccctggagaaggaaaacccctggtactgcccttcctgcaagcagcaccagctggcaaccaagaagctggacc

SEQ ID NO: 129387 - DNA, 120 bp, Artificial Sequence
  ENSG00000102226_20 (sequence is synthesized)
tgtggatgctgccggagattctcatcatccacctgaaacgcttttcctacaccaagttctcccgagagaagctggacaccctcgtggagtttcctatccgggacctggacttctctgagt

SEQ ID NO: 129388 - DNA, 120 bp, Artificial Sequence
  ENSG00000102226_21 (sequence is synthesized)
ttgtcatccagccacagaatgagtcgaatccggagctgtacaaatatgacctcatcgcggtttccaaccattatgggggcatgcgtgatggacactacacaacatttgcctgcaacaagg

SEQ ID NO: 129389 - DNA, 120 bp, Artificial Sequence
  ENSG00000102226_22 (sequence is synthesized)
acagcggccagtggcactactttgatgacaacagcgtctcccctgtcaatgagaatcagatcgagtccaaggcagcctatgtcctcttctaccaacgccaggacgtggcgcgacgcctgc

SEQ ID NO: 129390 - DNA, 120 bp, Artificial Sequence
  ENSG00000102226_23 (sequence is synthesized)
tgtccccggccggctcatctggcgccccagcctcccctgcctgcagctccccacccagctctgagttcatggatgttaattgagagccctgggtcctgccacagaaaaaaaaaaaaaaaa

SEQ ID NO: 129391 - DNA, 120 bp, Artificial Sequence
  ENSG00000102226_24 (sequence is synthesized)
gccctctctgcaatctcgcttctcgtgtccgccccgcttctcttattcgtgttaggtgcccccgccaggcattgcaggcttagtcgtggctactgttctcctgtgccgctgcatcgctct

SEQ ID NO: 129392 - DNA, 120 bp, Artificial Sequence
  ENSG00000102226_25 (sequence is synthesized)
ctcccgggaaagaacaggtcgtgtctcctcctagcagtgcgcgccccgcctgtgtttgcccttccagcagtgaccctcccttctagtctttatttatggtcgtgcccttccctctcctca

SEQ ID NO: 129393 - DNA, 120 bp, Artificial Sequence
  ENSG00000102226_26 (sequence is synthesized)
gcccagagtgttctgcgtgggtggtgatgggggttcacctgaacacagagtgtattttcttattgaggccctgtaccttctgctgtgtgtgtgtatatataaagcaccagtctgctcccc

SEQ ID NO: 129394 - DNA, 120 bp, Artificial Sequence
  ENSG00000102226_27 (sequence is synthesized)
gatggtacaatgaagggcattctgatcaggctaacaaaaacactgctcccagggtaggagtcctagcccacctcgggaacctcagcctccactttccatgccacctgtgccctaagtcta

SEQ ID NO: 129395 - DNA, 120 bp, Artificial Sequence
  ENSG00000102226_28 (sequence is synthesized)
ggagggtgcatggcggggagtgcgtagtaagaaagccttgtaggcccagcatgggtacagatccatgtatgctgggtaggtacacatatgtctgctctcttccccctcctagctcatcat

SEQ ID NO: 129396 - DNA, 120 bp, Artificial Sequence
  ENSG00000102226_29 (sequence is synthesized)
acaggtatctttgtctgctgtgtgtgttcccctgtgtggctctctttacagaccattgtatatgtgtgtttgtatgctatgtttgtaaggcagagtgtgtgctcctctcatttgagaggt

SEQ ID NO: 129397 - DNA, 120 bp, Artificial Sequence
  ENSG00000102226_30 (sequence is synthesized)
aacgtctggaaaaggggcggggcctgtgtggtgcagtctgacgcctgagaacaaaatggggtttgttgtgatgagaccagtttcggtcctggaggtggggccgggcctgcgtagtgaaac

SEQ ID NO: 129398 - DNA, 120 bp, Artificial Sequence
  ENSG00000102226_31 (sequence is synthesized)
gtgctctgaggccgagggacgacagtggaggggaggtggtgcctatgaggcagaaaatggcgcctgcgaataagcaaagtttatgacgcgccgtggtttttgattctggcggaagccttc

SEQ ID NO: 129399 - DNA, 120 bp, Artificial Sequence
  ENSG00000102226_32 (sequence is synthesized)
gggatgtgagccagtggtgaggttatcgtggtgggaggagtgacaagagtgaatctggacacttctgagaggcaggaagggtaggcgaggataactctccttccctttcagacacaacat

SEQ ID NO: 129400 - DNA, 120 bp, Artificial Sequence
  ENSG00000102226_33 (sequence is synthesized)
gggagatttcctggcagcaggatccatgaccacctctccctcacccccagcccagccgtacattgctatcgactgggagccagagatgaagaagcgttactatgacgaggtagaggctga

SEQ ID NO: 129401 - DNA, 120 bp, Artificial Sequence
  ENSG00000102226_34 (sequence is synthesized)
ggtaaatgagatcccagggatggggggtacttccagctcttgcccctcaactcttcgtacatcctccccacaactcctctagctgggaacagagccaagagatccaggtcaagcttggcc

SEQ ID NO: 129402 - DNA, 120 bp, Artificial Sequence
  ENSG00000102226_35 (sequence is synthesized)
ttggggcctgaacacctactgagagctccagggcctgaggttcctagcttcaaagtcggtgctctgacccactcagtgtgtgtctcccccgctgggcccccactccccatttctccatct

SEQ ID NO: 129403 - DNA, 120 bp, Artificial Sequence
  ENSG00000102226_36 (sequence is synthesized)
gggacagagctggggtcctgaggggactacagggcaaggggtcaggatgaaagctgaggccccacaagtctgaagtggcacgcccacgttcattcctgaactatcagcctcttctctcag

SEQ ID NO: 129404 - DNA, 120 bp, Artificial Sequence
  ENSG00000102226_37 (sequence is synthesized)
cttgccctcattttccctcttctcttccctgttcccacgttcttccttctcgtgaaatcctaatgccttctctcccctactctcctgctcctctctctcctcccttccccttctctcttg

SEQ ID NO: 129405 - DNA, 120 bp, Artificial Sequence
  ENSG00000102230_0 (sequence is synthesized)
agtgtcgtctggttgttatagtgataaactgaggccttgcctcttggcttctgggagagagagagagagagaggggcggggggtaacctctttacttcccctagggaagacagaaagaag

SEQ ID NO: 129406 - DNA, 120 bp, Artificial Sequence
  ENSG00000102230_1 (sequence is synthesized)
gggagaagaagcggggggatgggtggagggtagaggggagaaaaatacgtgacaaagaaaacattctctgcctgggaggagactctctgagggtgtagagctagagggagcattcactgg

SEQ ID NO: 129407 - DNA, 120 bp, Artificial Sequence
  ENSG00000102230_2 (sequence is synthesized)
ccatgccagtagttaccactgatgctgagtcagaaacaggtatcccaaaatccctttccaatgagcctccctcagaaaccatggaggaaatagagcacacatgcccacagcctcgactga

SEQ ID NO: 129408 - DNA, 120 bp, Artificial Sequence
  ENSG00000102230_3 (sequence is synthesized)
ccctgactgcacctgccccatttgctgatgaaaccaactgccagtgtcaagcaccccatgaaaaactgaccattgctcaggcccgcttaggaacaccagctgacaggcctgtcagagtat

SEQ ID NO: 129409 - DNA, 120 bp, Artificial Sequence
  ENSG00000102230_4 (sequence is synthesized)
acgccgatggaatatttgacctcttccactcaggtcatgcaagagcccttatgcaagcaaaaacactgtttcccaacagctacttgttggtaggagtttgcagtgatgatctcacccaca

SEQ ID NO: 129410 - DNA, 120 bp, Artificial Sequence
  ENSG00000102230_5 (sequence is synthesized)
aattcaaaggtttcaccgtgatgaatgaagccgagagatacgaagctctcagacactgtcgctacgtagacgaagttatcagagatgctccctggacactcacgccagagtttctggaaa

SEQ ID NO: 129411 - DNA, 120 bp, Artificial Sequence
  ENSG00000102230_6 (sequence is synthesized)
aacacaagattgactttgtggctcatgatgacattccgtattcctctgctggctctgatgatgtttacaagcacataaaggaagcagggatgttcgttccaacgcagagaacagaaggca

SEQ ID NO: 129412 - DNA, 120 bp, Artificial Sequence
  ENSG00000102230_7 (sequence is synthesized)
tctcaacatcggacatcattaccagaattgttcgtgactatgatgtttatgcccgacgtaacctccagagagggtatacagccaaggaactgaatgtcagctttataaatgagaagaggt

SEQ ID NO: 129413 - DNA, 120 bp, Artificial Sequence
  ENSG00000102230_8 (sequence is synthesized)
accgtttccagaaccaagtggacaaaatgaaggaaaaagtcaagaatgtggaggaaagatcaaaggaatttgtgaacagagtggaagaaaagagccatgatctaattcaaaagtgggaag

SEQ ID NO: 129414 - DNA, 120 bp, Artificial Sequence
  ENSG00000102230_9 (sequence is synthesized)
agaagtcaagggaattcattggcaacttcctagaactgtttggacctgatggagcatggaagcagatgttccaggagaggagcagccggatgctgcaggccttatccccgaagcagagcc

SEQ ID NO: 129415 - DNA, 120 bp, Artificial Sequence
  ENSG00000102230_10 (sequence is synthesized)
ctgtgagcagcccaacccggagccggtccccttcccgctccccatcgcccaccttctcatggcttccactcaaaacctcacccccttcctcacccaaagcagcctcagcctctatcagca

SEQ ID NO: 129416 - DNA, 120 bp, Artificial Sequence
  ENSG00000102230_11 (sequence is synthesized)
gcatgagcgagggggatgaggatgaaaagtagaggctgctgggaggcaagagccgcaccatgcaggatggggaggagggcgagagtcacagggttgcctgggtggtgtttgaagggtaat

SEQ ID NO: 129417 - DNA, 120 bp, Artificial Sequence
  ENSG00000102230_12 (sequence is synthesized)
agtcacaggagctgcagctcagcagagagaccctgaactctgctaagggaaggtcttgggaccagttctctctcactctccgtacagctgaagagttgggcgaggtgcagagacttctag

SEQ ID NO: 129418 - DNA, 120 bp, Artificial Sequence
  ENSG00000102230_13 (sequence is synthesized)
ctggacaacctacacaaaccttagcgtctagagtcactctaaccttgctaaggaaggatgcagagttccctagagagacttgcactgatggggtgacttctgctttggtccttccaccac

SEQ ID NO: 129419 - DNA, 120 bp, Artificial Sequence
  ENSG00000102230_14 (sequence is synthesized)
ccccaccaagtaaaccacctgtggcagcggctgttccctcaacctgctacttctgcgtccataagggtcctgcacgttgcctcccaccaccccagctctgccagaataaaattgtttcca

SEQ ID NO: 129420 - DNA, 120 bp, Artificial Sequence
  ENSG00000102230_15 (sequence is synthesized)
atagaggtggcaaagtgcttctgaaatagtcgagaaaaagacagattccaacctcctcagtccagccactgagacctgatgttggaacgcatcagctccttccagttccatgaatgtggc

SEQ ID NO: 129421 - DNA, 120 bp, Artificial Sequence
  ENSG00000102230_16 (sequence is synthesized)
tcatagacaaagccttgctttaggctggttataaaaggtcatctagtgtgaaccttaactttttattcaaaggacagttttgtcaagaactccacgtaaggcctgatgtgctcctggttg

SEQ ID NO: 129422 - DNA, 120 bp, Artificial Sequence
  ENSG00000102230_17 (sequence is synthesized)
tactttctcatcactggtttgacttcattgttttgcagaaattaccttaatccgtgggaactgcaacaaagaaaaacttcctaatatataaaaaagaggagctgctttgctttgcctcca

SEQ ID NO: 129423 - DNA, 120 bp, Artificial Sequence
  ENSG00000102230_18 (sequence is synthesized)
ggtttagcggacaagaaatgtctcctgaagcttctccttaaaggatgctattatggaatggcttttcccatttctgaccagttaacagtttcatagacctcaagtaacagtttgaggtat

SEQ ID NO: 129424 - DNA, 120 bp, Artificial Sequence
  ENSG00000102230_19 (sequence is synthesized)
caaacatagtataccaatagggggtgctacctgcacgtatctgttctatatatgctccaatatgtcatccccgggtgtatcccatgtgcaatatgagtatatagtggtggcattttataa

SEQ ID NO: 129425 - DNA, 120 bp, Artificial Sequence
  ENSG00000102230_20 (sequence is synthesized)
tagaccccactcctgcgctccaccataatactcctctgaaatccttggtctcaagaaacatctgttctcttgtgacttgggcactttgtcaagcttattccagattcctgtggaaacgtt

SEQ ID NO: 129426 - DNA, 120 bp, Artificial Sequence
  ENSG00000102230_21 (sequence is synthesized)
ttatcccaaccaggaaattagtattttgttctcgtggcctcctataacatttttgggtgaaggagaactcaagactttttacagagaactgtgggctcagttatgatctcagcatctgaa

SEQ ID NO: 129427 - DNA, 120 bp, Artificial Sequence
  ENSG00000102230_22 (sequence is synthesized)
tggtctaggtagtatcaccattatctctggccctaggtttgccaagtaggatgaagactctaagtgttcctgctgagttgtccaaaggtcctgctccttagtcacctgtgcgaaatgagc

SEQ ID NO: 129428 - DNA, 120 bp, Artificial Sequence
  ENSG00000102230_23 (sequence is synthesized)
ttgtatgggtatgccagtaaattcagacacagagctggggtctgactgaatagaggcccaaaccagcaacttgtaggcagagcccagaatctcttgtgatagaaataccccttttcagag

SEQ ID NO: 129429 - DNA, 120 bp, Artificial Sequence
  ENSG00000102230_24 (sequence is synthesized)
gccttgggaaccagccttctaggtgacaaggggacaaccagtgaaggaaggcggcatgtctttccccttcttgttggggttgaactacctccctatccacttggagatgagtgctgtctg

SEQ ID NO: 129430 - DNA, 120 bp, Artificial Sequence
  ENSG00000102230_25 (sequence is synthesized)
ctgtgaagcaaaactatgaggctgagctggcttggaacctctttgttcttggcactttccttctccaggactctgggaagcactcatatgggacagagggctggcaggaacatggcatgt

SEQ ID NO: 129431 - DNA, 120 bp, Artificial Sequence
  ENSG00000102230_26 (sequence is synthesized)
gaagaagaaaacttctttttgcagtcaagggccacccagaatattgctcttcagagagggacaagggcctcattcttccatttggtctctgtcttccatcatgcactcaggtcaagccat

SEQ ID NO: 129432 - DNA, 120 bp, Artificial Sequence
  ENSG00000102230_27 (sequence is synthesized)
gcaagtctgcctaccatttgagttagttggcacttgtagcagtgaaggatgaggccagccaggcaagggaaggtggcgggaacaagggaagagaaaaggaggaaagaagttcctggaggg

SEQ ID NO: 129433 - DNA, 120 bp, Artificial Sequence
  ENSG00000102230_28 (sequence is synthesized)
aggaaaggaggataaagaaaatctgctctcataaaaccatttcaggacctcactttacaggtgagactctcttgggaaggcctttgtgcccctgctccatggcccagggcagatagattc

SEQ ID NO: 129434 - DNA, 120 bp, Artificial Sequence
  ENSG00000102230_29 (sequence is synthesized)
acttttacctgaatcttatactctggagcaaatagtgtatcaggctgactatacatttgcaggccttacacgccatactgacaggtgccacttacgtgactcatcagataatgtcaccat

SEQ ID NO: 129435 - DNA, 120 bp, Artificial Sequence
  ENSG00000102230_30 (sequence is synthesized)
tgctgccaattatgggaaataactaatgcctattccagggatgagcccaaaccacacataaatgggttctaaatctcaccctcctaacctgcagtgagtccccccgttccaccctcttga

SEQ ID NO: 129436 - DNA, 120 bp, Artificial Sequence
  ENSG00000102230_31 (sequence is synthesized)
ggctgcaaatctactgagaaggaatgggaaggattctacaacccaacttttgatactttttggccatctctcagtctctcccagcccctacccccacaccacctccctgctcccaggcag

SEQ ID NO: 129437 - DNA, 120 bp, Artificial Sequence
  ENSG00000102230_32 (sequence is synthesized)
agaccgggttgcactttgttagggccagcaggtcaactgtaatggccaagagtgagttaaggctggaatgagaaatatgccccaagcttggaggggtaagcaggaataacacaaagcaag

SEQ ID NO: 129438 - DNA, 120 bp, Artificial Sequence
  ENSG00000102230_33 (sequence is synthesized)
gaaagagattctttttgccctagtgaggaaaggaagcttcagaatgagggctggaggatagcaacttaggactgcagaagggggcagcttatgaagatgggagaaagtgggactgaagtt

SEQ ID NO: 129439 - DNA, 120 bp, Artificial Sequence
  ENSG00000102230_34 (sequence is synthesized)
ggggcagcttatgaagatgggagaaagtgggactgaagttgtaggggagcaggagggtagtgattttccgcttttctttctttctttcttttactttctttctctttctttctctctctc

SEQ ID NO: 129440 - DNA, 120 bp, Artificial Sequence
  ENSG00000102230_35 (sequence is synthesized)
tttctttttctttcttctttctctttttctttcctctttttctttctttctttttctttctctttcttccttctttctttcattcttctttgttctttcttctttctttctttttttttt

SEQ ID NO: 129441 - DNA, 120 bp, Artificial Sequence
  ENSG00000102230_36 (sequence is synthesized)
cggcgtccagccgattttccgctccctttcaagtgttaactcaccccctgacaggtgaagagggaagggttccttttacgcacaaccaaggttagcaaatgcccatgcaggatatggggt

SEQ ID NO: 129442 - DNA, 120 bp, Artificial Sequence
  ENSG00000102230_37 (sequence is synthesized)
ccctgcctctctggttgcttcatttcagcacttctatattagctgcttatggggaccctaaaatgaactggtcacccctccaccagctaagaaacaagggtgggattgctgtgccataag

SEQ ID NO: 129443 - DNA, 120 bp, Artificial Sequence
  ENSG00000102230_38 (sequence is synthesized)
tcacactgaacgacttgcttctggcaagcatgctcctgtgtgtcaggaccttaccaaggcaaagaaatgccaggctcaagaggagcaggacgtgagacattggcctggcttctaacctgg

SEQ ID NO: 129444 - DNA, 120 bp, Artificial Sequence
  ENSG00000102230_39 (sequence is synthesized)
tctgagtggaagagacacagcttagggatttcagttttgctcttaggctactagatactgttatttcaccccctgagggagggacaggaagagcacggatttattttctctccgtcttca

SEQ ID NO: 129445 - DNA, 120 bp, Artificial Sequence
  ENSG00000102230_40 (sequence is synthesized)
gtacttattttagcatctagtcataccccagggagagatgcgagacggtgtcactggctcagctgaagcagatgagcccgtctctagcagagatgtgcctgtttcttaggcatccgttca

SEQ ID NO: 129446 - DNA, 120 bp, Artificial Sequence
  ENSG00000102230_41 (sequence is synthesized)
gcactagtcttggccatcagatttttaaaaaagaaatagctcatgaggcatttgcaacttctcctctctagacttctttctagttttcctctgttgtgtcactgcgatgtgtccagggac

SEQ ID NO: 129447 - DNA, 120 bp, Artificial Sequence
  ENSG00000102230_42 (sequence is synthesized)
aaagccataagtagagcatacatacttaagactatgctgtacatataagacaagacctgtctgggttaaagcacgaccttatgcccaagcatttactctggtgctgaataacgcgaacta

SEQ ID NO: 129448 - DNA, 120 bp, Artificial Sequence
  ENSG00000102230_43 (sequence is synthesized)
ctggaatcagcctcccccaactctgcgcgccccctgcccccctgctcctatcccattcttgctctcaaatggaccacaccattctcaactcgtttataaataaagggatgcagaattgca

SEQ ID NO: 129449 - DNA, 120 bp, Artificial Sequence
  ENSG00000102239_0 (sequence is synthesized)
acacagaactgaagcaaaggagtatctggatgtcttggattttcttcccattctgttctgttctgttctcctaataccatctcgttactagacgtaggcattggacgtgacaatcaactg

SEQ ID NO: 129450 - DNA, 120 bp, Artificial Sequence
  ENSG00000102239_1 (sequence is synthesized)
catttgaactgagaagaagaaatattaaagacacagtcttcagaagaaatggctcaaaggcagcctcactcacctaatcagactttaatttcaatcacaaatgacacagaatcatcaagc

SEQ ID NO: 129451 - DNA, 120 bp, Artificial Sequence
  ENSG00000102239_2 (sequence is synthesized)
tctgtggtttctaacgataacacaaataaaggatggagcggggacaactctccaggaatagaagcattgtgtgccatctatattacttatgctgtgatcatttcagtgggcatccttgga

SEQ ID NO: 129452 - DNA, 120 bp, Artificial Sequence
  ENSG00000102239_3 (sequence is synthesized)
aatgctattctcatcaaagtctttttcaagaccaaatccatgcaaacagttccaaatattttcatcaccagcctggcttttggagatcttttacttctgctaacttgtgtgccagtggat

SEQ ID NO: 129453 - DNA, 120 bp, Artificial Sequence
  ENSG00000102239_4 (sequence is synthesized)
gcaactcactaccttgcagaaggatggctgttcggaagaattggttgtaaggtgctctctttcatccggctcacttctgttggtgtgtcagtgttcacattaacaattctcagcgctgac

SEQ ID NO: 129454 - DNA, 120 bp, Artificial Sequence
  ENSG00000102239_5 (sequence is synthesized)
agatacaaggcagttgtgaagccacttgagcgacagccctccaatgccatcctgaagacttgtgtaaaagctggctgcgtctggatcgtgtctatgatatttgctctacctgaggctata

SEQ ID NO: 129455 - DNA, 120 bp, Artificial Sequence
  ENSG00000102239_6 (sequence is synthesized)
ttttcaaatgtatacacttttcgagatcccaataaaaatatgacatttgaatcatgtacctcttatcctgtctctaagaagctcttgcaagaaatacattctctgctgtgcttcttagtg

SEQ ID NO: 129456 - DNA, 120 bp, Artificial Sequence
  ENSG00000102239_7 (sequence is synthesized)
ttctacattattccactctctattatctctgtctactattccttgattgctaggaccctttacaaaagcaccctgaacatacctactgaggaacaaagccatgcccgtaagcagattgaa

SEQ ID NO: 129457 - DNA, 120 bp, Artificial Sequence
  ENSG00000102239_8 (sequence is synthesized)
tcccgaaagagaattgccagaacggtattggtgttggtggctctgtttgccctctgctggttgccaaatcacctcctgtacctctaccattcattcacttctcaaacctatgtagacccc

SEQ ID NO: 129458 - DNA, 120 bp, Artificial Sequence
  ENSG00000102239_9 (sequence is synthesized)
tctgccatgcatttcattttcaccattttctctcgggttttggctttcagcaattcttgcgtaaacccctttgctctctactggctgagcaaaagcttccagaagcattttaaagctcag

SEQ ID NO: 129459 - DNA, 120 bp, Artificial Sequence
  ENSG00000102239_10 (sequence is synthesized)
ttgttctgttgcaaggcggagcggcctgagcctcctgttgctgacacctctcttaccaccctggctgtgatgggaacggtcccgggcactgggagcatacagatgtctgaaattagtgtg

SEQ ID NO: 129460 - DNA, 120 bp, Artificial Sequence
  ENSG00000102239_11 (sequence is synthesized)
ggtgtagtgtgaagcaggcagaggacagattctagcttttcaaggaaaaatgctgcttctcctcccagcgtgtgtatccgactctaagctgtgtgcaggtgtatggtgtccagatttttg

SEQ ID NO: 129461 - DNA, 120 bp, Artificial Sequence
  ENSG00000102239_12 (sequence is synthesized)
ttgtttgaaaagtgtgttgaaatcttaggagtgaaggatccctataagtaagtaaaatacaaaccattactttcttcaaagtacaaatagtaatgtcatcgggctttctaaataaaatga

SEQ ID NO: 129462 - DNA, 120 bp, Artificial Sequence
  ENSG00000102239_13 (sequence is synthesized)
agccccactaagtgcagaaagacaagtttatatatgccagtgaatcgtaagggaagtcaaatgggaaggaaggtgtaataaacaagatgaaacttaaaaatctcatttgttgtttaatca

SEQ ID NO: 129463 - DNA, 120 bp, Artificial Sequence
  ENSG00000102239_14 (sequence is synthesized)
catctgtgatgcttctaactcctcatatactgtgatttgcataaaattgtgtttgtgtttactgtgtggtgtaaatctagagatactttgtatgtgaaaaggggatcacaaaagagagaa

SEQ ID NO: 129464 - DNA, 120 bp, Artificial Sequence
  ENSG00000102239_15 (sequence is synthesized)
agcatctcttaggctattttcttaaaaataaaccttcacagaatggctgtccttttccattaatctgtattccattgtagctgaatctgtgcagttgaaatgaaaatgttttggagtcag

SEQ ID NO: 129465 - DNA, 120 bp, Artificial Sequence
  ENSG00000102239_16 (sequence is synthesized)
cgaatataaagcactgagtaaggatctggggcacagtgcttgccttactgggtcaacacttacaactgccatggattaataactgggctaagttatcattcacaaatattgttaggaact

SEQ ID NO: 129466 - DNA, 120 bp, Artificial Sequence
  ENSG00000102239_17 (sequence is synthesized)
tgccttattcataggcagaataagtggtcatgtttatggtgtcatttgaggacctctgttgaaaaatctgcaaacctgccacagtgtctgaaattcttcctttacagaaattcgtttctt

SEQ ID NO: 129467 - DNA, 120 bp, Artificial Sequence
  ENSG00000102239_18 (sequence is synthesized)
tctggtaagcagtgccctctttctaaaaacatgcagaagtaccatatgaaatccctaacccctgggtgtgcaattgtgatcagatcatcttcctgcttgactttattaaacccaatgggt

SEQ ID NO: 129468 - DNA, 120 bp, Artificial Sequence
  ENSG00000102239_19 (sequence is synthesized)
gcctaagtcctgtaagtgtatggcctaattaatctctgcccatggaaatcagatggaaagttctgattttctatcctgtgctcctacctgctaacatcattcacttgttaataattattg

SEQ ID NO: 129469 - DNA, 120 bp, Artificial Sequence
  ENSG00000102239_20 (sequence is synthesized)
ttttaaaaaaaaaaactcttgtcaatagacgtgtcagatttagacctgtggtttcagaaaaatttttggagcaaatttaaacatgtttggcactataggtaaatttgtatttaaaaaaaa

SEQ ID NO: 129470 - DNA, 120 bp, Artificial Sequence
  ENSG00000102239_21 (sequence is synthesized)
aaacaatgtttgagtgtgcttttggtaatgctgagctttctttaaatggcttgtggagtcgtgaacttttgctaatgatgtggctccaaaaggtaatacatattaacattagactttaac

SEQ ID NO: 129471 - DNA, 120 bp, Artificial Sequence
  ENSG00000102239_22 (sequence is synthesized)
tttctgtaaaattggtttacttaaagttgggcggggggtgtgatactgtattagtattgttttaaagtggacactgtaacacgtgtggaaaaacaaataaatatgaaataaagttttaaa

SEQ ID NO: 129472 - DNA, 120 bp, Artificial Sequence
  ENSG00000102241_0 (sequence is synthesized)
agagcgcggttgacctccctttctctgctcagctccagcgtcatttcggcctcttagttcttctgaaccctgctcctgagctaggtaggaaacatgagcggcaccaacttggatgggaac

SEQ ID NO: 129473 - DNA, 120 bp, Artificial Sequence
  ENSG00000102241_1 (sequence is synthesized)
gatgagtttgatgagcagttgcgaatgcaagaattgtacggagacggcaaggatggtgacacccagaccgatgccggcggagaacccgattctctcgggcagcagccgacggacactccc

SEQ ID NO: 129474 - DNA, 120 bp, Artificial Sequence
  ENSG00000102241_2 (sequence is synthesized)
tacgagtgggacctggacaaaaaggcttggttccccaagattactgaagatttcattgctacatatcaggccaattatggcttctctaacgatggcgcatctagttctaccgcaaatgtt

SEQ ID NO: 129475 - DNA, 120 bp, Artificial Sequence
  ENSG00000102241_3 (sequence is synthesized)
gaagatgtccatgctaggactgcagaggaacctccacaagaaaaagccccggaacccactgatgccagaaagaagggagaaaaaagaaaggctgagtcaggatggtttcatgttgaagaa

SEQ ID NO: 129476 - DNA, 120 bp, Artificial Sequence
  ENSG00000102241_4 (sequence is synthesized)
gacagaaatacaaatgtatacgtgtctggtttgcctccagatattacagtggatgaatttatacaacttatgtccaagtttggcattattatgagagatcctcagacagaagaatttaag

SEQ ID NO: 129477 - DNA, 120 bp, Artificial Sequence
  ENSG00000102241_5 (sequence is synthesized)
gtcaaactttacaaagataatcaaggaaatcttaaaggagacggtctttgctgttatttgaaaagagaatctgtggaacttgcattaaaacttttggatgaagatgaaattagaggctac

SEQ ID NO: 129478 - DNA, 120 bp, Artificial Sequence
  ENSG00000102241_6 (sequence is synthesized)
aaattacatgttgaggtggcaaagtttcaactgaagggagaatatgatgcctcaaagaagaagaagaagtgcaaagactataagaagaagctgtctatgcaacaaaagcagttggattgg

SEQ ID NO: 129479 - DNA, 120 bp, Artificial Sequence
  ENSG00000102241_7 (sequence is synthesized)
agacctgagaggcgagccggaccatcccggatgcgccatgagcgagttgtcatcatcaagaatatgtttcatcctatggattttgaggatgatccgttggtgctgaatgagatcagagaa

SEQ ID NO: 129480 - DNA, 120 bp, Artificial Sequence
  ENSG00000102241_8 (sequence is synthesized)
gaccttcgagtagagtgttcgaagtttggacaaattaggaaactccttctctttgataggcacccagatggtgtggcctctgtgtcctttcgggatccagaggaagctgattattgtatt

SEQ ID NO: 129481 - DNA, 120 bp, Artificial Sequence
  ENSG00000102241_9 (sequence is synthesized)
cagactctcgatggaagatggtttggtggccgtcaaatcactgcccaggcatgggatgggactacagattatcaggtggaggaaacctcaagagaaagggaggaaaggctgagaggatgg

SEQ ID NO: 129482 - DNA, 120 bp, Artificial Sequence
  ENSG00000102241_10 (sequence is synthesized)
gaggctttcctcaatgctcctgaggccaacagaggccttaggcgttcagattctgtctctgcttccgaaagggcagggccttctagagcaaggcatttttcagagcaccccagcacatct

SEQ ID NO: 129483 - DNA, 120 bp, Artificial Sequence
  ENSG00000102241_11 (sequence is synthesized)
gagaagaagtttgaaaagacagaagatgggggagaatttgaagaaggtgcttctgaaaacaatgctaaggaaagtagccccgaaaaagaggctgaagaaggctgccctgaaaaagaatct

SEQ ID NO: 129484 - DNA, 120 bp, Artificial Sequence
  ENSG00000102241_12 (sequence is synthesized)
gaagagggctgccccaaaagagggtttgaaggcagctgctcccaaaaagagtctgaagaaggcaatcccgtaagaggatctgaagaggatagtcctaaaaaagagtctaaaaagaagaca

SEQ ID NO: 129485 - DNA, 120 bp, Artificial Sequence
  ENSG00000102241_13 (sequence is synthesized)
ctcaaaaatgattgtgaagagaatggccttgcaaaggaatctgaagatgacctcaacaaggagtctgaagaggaggttggccccacaaaagagtccgaagaagatgactcagagaaagag

SEQ ID NO: 129486 - DNA, 120 bp, Artificial Sequence
  ENSG00000102241_14 (sequence is synthesized)
tctgatgaagactgctctgaaaaacagtctgaagatggctccgaaagagaatttgaagaaaatggtctcgagaaagatttggacgaggaaggttctgaaaaggagcttcatgaaaatgtt

SEQ ID NO: 129487 - DNA, 120 bp, Artificial Sequence
  ENSG00000102241_15 (sequence is synthesized)
cttgacaaagagttagaagaaaatgactctgaaaactccgaatttgaagatgacggctctgaaaaagtgttagatgaggaaggctctgagagagagtttgacgaagattcagatgaaaag

SEQ ID NO: 129488 - DNA, 120 bp, Artificial Sequence
  ENSG00000102241_16 (sequence is synthesized)
gaagaagaggaggatacatatgaaaaagtatttgatgatgagtctgatgagaaagaggatgaagaatatgcagatgaaaaggggcttgaagctgctgataaaaaggcggaagaaggtgat

SEQ ID NO: 129489 - DNA, 120 bp, Artificial Sequence
  ENSG00000102241_17 (sequence is synthesized)
gcagatgaaaagctgtttgaagagtcagatgacaaggaagatgaagatgcagatggaaaggaagttgaagatgctgacgaaaagttgttcgaagatgatgattccaatgagaagttgttt

SEQ ID NO: 129490 - DNA, 120 bp, Artificial Sequence
  ENSG00000102241_18 (sequence is synthesized)
gatgaggaggaagattccagtgagaagttgtttgacgattctgatgagagggggactttgggtggttttgggagtgttgaagaagggcccctatccactggcagcagctttattctcagt

SEQ ID NO: 129491 - DNA, 120 bp, Artificial Sequence
  ENSG00000102241_19 (sequence is synthesized)
agcgatgatgatgacgatgatatttaatcccttaaacttgctttttagggagagtcctccatctacatttgcctgtgcttcagggtaattactagtagtgttacatgaacatgtgcatag

SEQ ID NO: 129492 - DNA, 120 bp, Artificial Sequence
  ENSG00000102241_20 (sequence is synthesized)
tggtaggatgccatcagattaaagcattgaagtgtttcattgttacctgtacctaatggttttaaatatatgttaattgattgtttagttaaaatgtcatagttacaatgcaagtaaact

SEQ ID NO: 129493 - DNA, 120 bp, Artificial Sequence
  ENSG00000102241_21 (sequence is synthesized)
ggatacttgttcttttgtcagatttgttaaatgcatgcagaataatatttttaagagtattgattgaagtttgtgatattcatcaataaaaatgagttgataatatgcagaaactgaaaa

SEQ ID NO: 129494 - DNA, 120 bp, Artificial Sequence
  ENSG00000102241_22 (sequence is synthesized)
ccccaaacccgaccccggtgggcgtcgacgcgcagcagcagcgggtccccccaaccccggcgccccgcctccccgggcctcgcgccgcatgccggcgtcggcgctttttgacgccatagt

SEQ ID NO: 129495 - DNA, 120 bp, Artificial Sequence
  ENSG00000102241_23 (sequence is synthesized)
tttttgacgccatagtgggcgtgtcggcgcgacccgcgacgtcgccacgcgccgacaatggcggctgcgtcggcctgagcagggcttagtttagaagtaatttcctgacgttgccgaggg

SEQ ID NO: 129496 - DNA, 120 bp, Artificial Sequence
  ENSG00000102241_24 (sequence is synthesized)
gtaatttcctgacgttgccgagggagccgcagtcgcctcagatccggtcggcggcggcggcggtggcggcggcggcagcgcgcctgcgcgctcccgcagcgccctggacctagcggcggt

SEQ ID NO: 129497 - DNA, 120 bp, Artificial Sequence
  ENSG00000102243_0 (sequence is synthesized)
actaacctgctctgaagtgagccaggcagctctggccatcttttcccagccacagaatcaggtgatggtccagaattaagagctgtcacctgtgtcattcactcacaatggaagaaatga

SEQ ID NO: 129498 - DNA, 120 bp, Artificial Sequence
  ENSG00000102243_1 (sequence is synthesized)
agaagactgccatccggctgcccaaaggcaaacagaagcctataaagacggaatggaattcccggtgtgtccttttcacctacttccaaggggacatcagcagcgtagtggatgaacact

SEQ ID NO: 129499 - DNA, 120 bp, Artificial Sequence
  ENSG00000102243_2 (sequence is synthesized)
tctccagagctctgagcaatatcaagagcccccaggaattgaccccctcgagtcagagtgaaggtgtgatgctgaaaaacgatgatagcatgtctccaaatcagtggcgttactcgtctc

SEQ ID NO: 129500 - DNA, 120 bp, Artificial Sequence
  ENSG00000102243_3 (sequence is synthesized)
catggacaaagccacaaccagaagtacctgtcacaaaccgtgccgccaactgcaacttgcatgtgcctggtcccatggctgtgaatcagttctcaccgtccctggctaggagggcctctg

SEQ ID NO: 129501 - DNA, 120 bp, Artificial Sequence
  ENSG00000102243_4 (sequence is synthesized)
ctctcatcccttccccgctcggcacctggttccagagccccagcctgatgggaaacgtgagcctctcctaagtctcctccagcaagacagatgcctagcccgtcctcaggaatctgccgc

SEQ ID NO: 129502 - DNA, 120 bp, Artificial Sequence
  ENSG00000102243_5 (sequence is synthesized)
cagggagaatggcaaccctggccagatagctggaagcacagggttgctcttcaacctgcctcccggctcagttcactataagaaactatatgtatctcgtggatctgccagtaccagcct

SEQ ID NO: 129503 - DNA, 120 bp, Artificial Sequence
  ENSG00000102243_6 (sequence is synthesized)
tccaaatgaaactctttcagagttagagacacctgggaaatactcacttacaccaccaaaccactggggccacccacatcgatacctgcagcatctttagtcaagttggaggagaaagac

SEQ ID NO: 129504 - DNA, 120 bp, Artificial Sequence
  ENSG00000102243_7 (sequence is synthesized)
aacacttggtctaagacacggcagcaagacatccctgcatattgttccagataaaaatgaaagctgctcacacccacttgcctccccaatctgttaaacagcttcgtgtctagtatgagc

SEQ ID NO: 129505 - DNA, 120 bp, Artificial Sequence
  ENSG00000102243_8 (sequence is synthesized)
tcagtacttgccctgtgaaaatcccagaagcccccgctgtcaatgttccccatccacaccctgcttgctcctgtgtaacagctcagatgatgaataataataaaactgtacttttttgga

SEQ ID NO: 129506 - DNA, 120 bp, Artificial Sequence
  ENSG00000102243_9 (sequence is synthesized)
gccccagcctgatgggaaacataagaaactatatgtatctcgtggatctgccagtaccagccttccaaatgaaactctttcagagttagagacacctgggaaatactcacttacaccacc

SEQ ID NO: 129507 - DNA, 120 bp, Artificial Sequence
  ENSG00000102243_10 (sequence is synthesized)
aaatctcaagacacattcacaaacaaatggttatcaccaaggtcttcatgctctactcatgttgacatgagttgtattaattggtgactggaagtccaggatctgttgaggaagtcagtg

SEQ ID NO: 129508 - DNA, 120 bp, Artificial Sequence
  ENSG00000102243_11 (sequence is synthesized)
acccttaatcaggaacactgccttggaaggtggtggacctttaaaacagaagcttctcagtttttgtagcatctgatatgagagaatatgctagatattcataaacttagggccaggcaa

SEQ ID NO: 129509 - DNA, 120 bp, Artificial Sequence
  ENSG00000102243_12 (sequence is synthesized)
tgtggggcccctggaatgctactgggcactctctaacctagtcctagaaatttcagttccaataatgttttcttcttcttttctagataagaaactatatgtatctcgtggatctgccag

SEQ ID NO: 129510 - DNA, 120 bp, Artificial Sequence
  ENSG00000102245_0 (sequence is synthesized)
catgctgcctctgccaccttctctgccagaagataccatttcaactttaacacagcatgatcgaaacatacaaccaaacttctccccgatctgcggccactggactgcccatcagcatga

SEQ ID NO: 129511 - DNA, 120 bp, Artificial Sequence
  ENSG00000102245_1 (sequence is synthesized)
aaatttttatgtatttacttactgtttttcttatcacccagatgattgggtcagcactttttgctgtgtatcttcatagaaggttggacaagatagaagatgaaaggaatcttcatgaag

SEQ ID NO: 129512 - DNA, 120 bp, Artificial Sequence
  ENSG00000102245_2 (sequence is synthesized)
attttgtattcatgaaaacgatacagagatgcaacacaggagaaagatccttatccttactgaactgtgaggagattaaaagccagtttgaaggctttgtgaaggatataatgttaaaca

SEQ ID NO: 129513 - DNA, 120 bp, Artificial Sequence
  ENSG00000102245_3 (sequence is synthesized)
aagaggagacgaagaaagaaaacagctttgaaatgcaaaaaggtgatcagaatcctcaaattgcggcacatgtcataagtgaggccagcagtaaaacaacatctgtgttacagtgggctg

SEQ ID NO: 129514 - DNA, 120 bp, Artificial Sequence
  ENSG00000102245_4 (sequence is synthesized)
aaaaaggatactacaccatgagcaacaacttggtaaccctggaaaatgggaaacagctgaccgttaaaagacaaggactctattatatctatgcccaagtcaccttctgttccaatcggg

SEQ ID NO: 129515 - DNA, 120 bp, Artificial Sequence
  ENSG00000102245_5 (sequence is synthesized)
aagcttcgagtcaagctccatttatagccagcctctgcctaaagtcccccggtagattcgagagaatcttactcagagctgcaaatacccacagttccgccaaaccttgcgggcaacaat

SEQ ID NO: 129516 - DNA, 120 bp, Artificial Sequence
  ENSG00000102245_6 (sequence is synthesized)
ccattcacttgggaggagtatttgaattgcaaccaggtgcttcggtgtttgtcaatgtgactgatccaagccaagtgagccatggcactggcttcacgtcctttggcttactcaaactct

SEQ ID NO: 129517 - DNA, 120 bp, Artificial Sequence
  ENSG00000102245_7 (sequence is synthesized)
aggctgtggtggagctgacgctgggagtcttcataatacagcacagcggttaagcccaccccctgttaactgcctatttataaccctaggatcctccttatggagaactatttattatac

SEQ ID NO: 129518 - DNA, 120 bp, Artificial Sequence
  ENSG00000102245_8 (sequence is synthesized)
actccaaggcatgtagaactgtaataagtgaattacaggtcacatgaaaccaaaacgggccctgctccataagagcttatatatctgaagcagcaaccccactgatgcagacatccagag

SEQ ID NO: 129519 - DNA, 120 bp, Artificial Sequence
  ENSG00000102245_9 (sequence is synthesized)
agtcctatgaaaagacaaggccattatgcacaggttgaattctgagtaaacagcagataacttgccaagttcagttttgtttctttgcgtgcagtgtctttccatggataatgcatttga

SEQ ID NO: 129520 - DNA, 120 bp, Artificial Sequence
  ENSG00000102245_10 (sequence is synthesized)
tttatcagtgaagatgcagaagggaaatggggagcctcagctcacattcagttatggttgactctgggttcctatggccttgttggagggggccaggctctagaacgtctaacacagtgg

SEQ ID NO: 129521 - DNA, 120 bp, Artificial Sequence
  ENSG00000102245_11 (sequence is synthesized)
agaaccgaaaccccccccccccccccgccaccctctcggacagttattcattctctttcaatctctctctctccatctctctctttcagtctctctctctcaacctctttcttccaatct

SEQ ID NO: 129522 - DNA, 120 bp, Artificial Sequence
  ENSG00000102245_12 (sequence is synthesized)
ctctcaacctctttcttccaatctctctttctcaatctctctgtttccctttgtcagtctcttccctcccccagtctctcttctcaatccccctttctaacacacacacacacacacaca

SEQ ID NO: 129523 - DNA, 120 bp, Artificial Sequence
  ENSG00000102245_13 (sequence is synthesized)
cacacacagagtcaggccgttgctagtcagttctcttctttccaccctgtccctatctctaccactatagatgagggtgaggagtagggagtgcagccctgagcctgcccactcctcatt

SEQ ID NO: 129524 - DNA, 120 bp, Artificial Sequence
  ENSG00000102245_14 (sequence is synthesized)
acgaaatgactgtatttaaaggaaatctattgtatctacctgcagtctccattgtttccagagtgaacttgtaattatcttgttatttattttttgaataataaagacctcttaacatta

SEQ ID NO: 129525 - DNA, 120 bp, Artificial Sequence
  ENSG00000102265_0 (sequence is synthesized)
gccatcgccgcagatccagcgcccagagagacaccagagaacccaccatggccccctttgagcccctggcttctggcatcctgttgttgctgtggctgatagcccccagcagggcctgca

SEQ ID NO: 129526 - DNA, 120 bp, Artificial Sequence
  ENSG00000102265_1 (sequence is synthesized)
cctgtgtcccaccccacccacagacggccttctgcaattccgacctcgtcatcagggccaagttcgtggggacaccagaagtcaaccagaccaccttataccagcgttatgagatcaaga

SEQ ID NO: 129527 - DNA, 120 bp, Artificial Sequence
  ENSG00000102265_2 (sequence is synthesized)
tgaccaagatgtataaagggttccaagccttaggggatgccgctgacatccggttcgtctacacccccgccatggagagtgtctgcggatacttccacaggtcccacaaccgcagcgagg

SEQ ID NO: 129528 - DNA, 120 bp, Artificial Sequence
  ENSG00000102265_3 (sequence is synthesized)
ctgcagttttgtggctccctggaacagcctgagcttagctcagcgccggggcttcaccaagacctacactgttggctgtgaggaatgcacagtgtttccctgtttatccatcccctgcaa

SEQ ID NO: 129529 - DNA, 120 bp, Artificial Sequence
  ENSG00000102265_4 (sequence is synthesized)
actgcagagtggcactcattgcttgtggacggaccagctcctccaaggctctgaaaagggcttccagtcccgtcaccttgcctgcctgcctcgggagccagggctgtgcacctggcagtc

SEQ ID NO: 129530 - DNA, 120 bp, Artificial Sequence
  ENSG00000102265_5 (sequence is synthesized)
cctgcggtcccagatagcctgaatcctgcccggagtggaagctgaagcctgcacagtgtccaccctgttcccactcccatctttcttccggacaatgaaataaagagttaccacccagca

SEQ ID NO: 129531 - DNA, 120 bp, Artificial Sequence
  ENSG00000102265_6 (sequence is synthesized)
tcccactggaaatggggaccaccccaatttcagtctatcagaaggccgggcctttggcagcttggcagctcagccaatcacaagctgcttgtcggtccccgccccgcctttctccttagg

SEQ ID NO: 129532 - DNA, 120 bp, Artificial Sequence
  ENSG00000102265_7 (sequence is synthesized)
cacagtgagtgcctggaccctgacctccaacgggagatccttcccggggccattccctaaatcgtgggcttgtttcttgctccctctggctattctgtgtccctgtggctgctccccaac

SEQ ID NO: 129533 - DNA, 120 bp, Artificial Sequence
  ENSG00000102265_8 (sequence is synthesized)
cctaagggctgtccctgatctctcttgctatttccccaagcccgagactgctcccttacaaattctggctgctccctttccctgtgtccaataccgtgtgatcacctgtccctccctggt

SEQ ID NO: 129534 - DNA, 120 bp, Artificial Sequence
  ENSG00000102265_9 (sequence is synthesized)
ccctctaattctcccttgtgactattctgtaatcccactccccgttcctgagcccccgggattgtttcttggttccccagaatgttctccaagaacccaaagtgctgttccctaatccca

SEQ ID NO: 129535 - DNA, 120 bp, Artificial Sequence
  ENSG00000102271_0 (sequence is synthesized)
gaagaggcagaaaaacaagagataacaaaggctccgtttcctttctgtgagagaaggcttttgtctttcctcctgctacgatgtcagtgtctggcaagaaagagtttgatgtgaaacaga

SEQ ID NO: 129536 - DNA, 120 bp, Artificial Sequence
  ENSG00000102271_1 (sequence is synthesized)
tcctaaggctacgctggaggtggtttagtcatccttttcaaggttccaccaacactggaagctgtcttcagcaggaaggatatgagcatagagggaccccggttcagggcaggttgaaga

SEQ ID NO: 129537 - DNA, 120 bp, Artificial Sequence
  ENSG00000102271_2 (sequence is synthesized)
gccactctcgggacagaaacggactgaagaaaagcaacagtcctgtccaccacaatatactggcaccagtgccaggaccggcccctgcccatcagagagccgttcagaatttgcagcaac

SEQ ID NO: 129538 - DNA, 120 bp, Artificial Sequence
  ENSG00000102271_3 (sequence is synthesized)
ataatctgatagtacattttcaagcaaatgaagatactcctaaatcagttccagagaagaatttattcaaagaagcttgtgagaaacgcgcacaagatttggagatgatggctgatgaca

SEQ ID NO: 129539 - DNA, 120 bp, Artificial Sequence
  ENSG00000102271_4 (sequence is synthesized)
atatagaagattctacagcaagattagatacacaacactctgaagacatgaatgccaccagatctgaagagcagttccatgttataaaccacgcagagcaaactcttcgtaaaatggaga

SEQ ID NO: 129540 - DNA, 120 bp, Artificial Sequence
  ENSG00000102271_5 (sequence is synthesized)
actacttgaaagagaaacaactatgtgatgtgctactgattgcaggacacctccgcatcccagcccataggttggttctcagcgcagtgtctgattattttgctgcaatgtttactaatg

SEQ ID NO: 129541 - DNA, 120 bp, Artificial Sequence
  ENSG00000102271_6 (sequence is synthesized)
atgtgcttgaagccaaacaagaagaggtcaggatggaaggagtagatccaaatgcactaaattccttggtgcagtatgcttacacaggagtcctgcaattgaaagaagataccattgaaa

SEQ ID NO: 129542 - DNA, 120 bp, Artificial Sequence
  ENSG00000102271_7 (sequence is synthesized)
gtttgctggctgcagcttgtcttctgcagctgactcaggtcattgatgtttgctccaattttctcataaagcagctccatccttcaaactgcttagggattcgatcatttggagatgccc

SEQ ID NO: 129543 - DNA, 120 bp, Artificial Sequence
  ENSG00000102271_8 (sequence is synthesized)
aaggctgtacagaacttctgaacgtggcacacaaatacactatggaacacttcattgaggtaataaaaaaccaagaattcctcctgcttccagctaatgaaatttcaaaacttctgtgca

SEQ ID NO: 129544 - DNA, 120 bp, Artificial Sequence
  ENSG00000102271_9 (sequence is synthesized)
gtgatgacattaatgtgcctgatgaagagaccatttttcatgctctaatgcagtgggtggggcatgatgtgcagaataggcaaggagaactggggatgctgctttcttacatcagactgc

SEQ ID NO: 129545 - DNA, 120 bp, Artificial Sequence
  ENSG00000102271_10 (sequence is synthesized)
tgtttactggtgatcttgagtgtcagaagctcctgatggaagctatgaagtatcatcttttgcctgagagaagatccatgatgcaaagccctcggacaaagcctagaaaatcaactgtgg

SEQ ID NO: 129546 - DNA, 120 bp, Artificial Sequence
  ENSG00000102271_11 (sequence is synthesized)
gggcactttatgctgtaggaggcatggatgctatgaaaggtactactactattgaaaaatatgacctcaggaccaacagttggctacatattggcaccatgaatggccgtaggcttcaat

SEQ ID NO: 129547 - DNA, 120 bp, Artificial Sequence
  ENSG00000102271_12 (sequence is synthesized)
ttggagtcgcagttattgataataagctctatgtcgtgggaggaagagacggtttaaaaactttgaatacagtggaatgttttaatccagttggcaaaatctggactgtgatgcctccca

SEQ ID NO: 129548 - DNA, 120 bp, Artificial Sequence
  ENSG00000102271_13 (sequence is synthesized)
tgtcaacacatcggcacggcttaggtgtagccactcttgaaggaccaatgtatgctgtaggtggtcatgatggatggagctatctaaatactgtagaaagatgggaccctgagggacgac

SEQ ID NO: 129549 - DNA, 120 bp, Artificial Sequence
  ENSG00000102271_14 (sequence is synthesized)
agtggaattacgtagccagtatgtcaactcctagaagcacagttggtgttgttgcattaaacaacaaattatatgctattggtggacgtgatggaagttcctgcctcaaatcaatggaat

SEQ ID NO: 129550 - DNA, 120 bp, Artificial Sequence
  ENSG00000102271_15 (sequence is synthesized)
actttgacccacacactaacaagtggagtttgtgtgctccaatgtccaaaagacgtggaggtgtgggagttgccacatacaatggattcttatatgttgtaggggggcatgatgcccctg

SEQ ID NO: 129551 - DNA, 120 bp, Artificial Sequence
  ENSG00000102271_16 (sequence is synthesized)
cttccaaccattgctccaggctttctgactgtgtggaacggtatgatccaaaaggtgattcatggtcaactgtggcacctctgagtgttcctcgagatgctgttgctgtgtgccctcttg

SEQ ID NO: 129552 - DNA, 120 bp, Artificial Sequence
  ENSG00000102271_17 (sequence is synthesized)
gagacaaactctacgtggttggaggatatgacggacatacttatttgaacacagttgagtcatatgatgcacagagaaatgaatggaaagagagcatgcaagaacttctacaaaacttct

SEQ ID NO: 129553 - DNA, 120 bp, Artificial Sequence
  ENSG00000102271_18 (sequence is synthesized)
ataccacacagaagctgaaagagactctggggcactaaattcagatcctttctccacacagcaatgacatttatcaatctgactcaggtgtggctgttgcccctttttgatatggaggga

SEQ ID NO: 129554 - DNA, 120 bp, Artificial Sequence
  ENSG00000102271_19 (sequence is synthesized)
acactgaaagacagtttccttctggagttccaaatgcaatatagaaaaaaaaaccctgtgactctggattttattttaagttctctaacaagactcctaccttgagatcttagtctaggt

SEQ ID NO: 129555 - DNA, 120 bp, Artificial Sequence
  ENSG00000102271_20 (sequence is synthesized)
tagataatttcaagaaactgagtaggacaaagggagaaagaaatacatgttctttttcctgcaattaataatcagactggaaaattgttgtatcattttaatttgtagttacaattgctt

SEQ ID NO: 129556 - DNA, 120 bp, Artificial Sequence
  ENSG00000102271_21 (sequence is synthesized)
tcattcgtgaagccgaaacgtttttaaacatgaattacatatgaattattaagcatatgtgctttcgcagctgataatataaaaggaaatcccacagtctagatatagccccattactac

SEQ ID NO: 129557 - DNA, 120 bp, Artificial Sequence
  ENSG00000102271_22 (sequence is synthesized)
aaaatgctaaaatatttaatgaaaattgatggtggccacagtgtgcaggttataaaagcattaatacatttcaaggtaagagccttaaaagttaaaaacattttcagtttttttttaaaa

SEQ ID NO: 129558 - DNA, 120 bp, Artificial Sequence
  ENSG00000102271_23 (sequence is synthesized)
aacgtactcttattatctggaacatagaaatataaaaggtaacatctaaagcttagaatagtgtgatttttagtaagccattattctcctattcaaataatatcccaaagagctaaacaa

SEQ ID NO: 129559 - DNA, 120 bp, Artificial Sequence
  ENSG00000102271_24 (sequence is synthesized)
ttccttacatttaccaagaggaaagcttttactgtgttgaagctaaaaaaataatggctctttgacaaaacttgttatgttgatcgcggtatgtcaaaatttttacaggtttgctcatct

SEQ ID NO: 129560 - DNA, 120 bp, Artificial Sequence
  ENSG00000102271_25 (sequence is synthesized)
ccagagcacacatataaatttggtatttcttaacatattatcttgttagatttgttaccagtaaaatattactgtaatttcatatacacagtctatacaatgaaataatgaatatttatc

SEQ ID NO: 129561 - DNA, 120 bp, Artificial Sequence
  ENSG00000102271_26 (sequence is synthesized)
tgatacaaactgtgacctcagcttcagagtgtcagggcctcacttgtatagaatgtaatgttctcctcaaacatttatgttaactctataaacaaatatcgttaagttaaacaagttttc

SEQ ID NO: 129562 - DNA, 120 bp, Artificial Sequence
  ENSG00000102271_27 (sequence is synthesized)
aaaaacaaaacaatttttaaagtaccttaaaattgaggatgttactcagtgttaacacatgggaacaccaaaatattcaataagcctggtcaattctatagttatcttttttgtaccaac

SEQ ID NO: 129563 - DNA, 120 bp, Artificial Sequence
  ENSG00000102271_28 (sequence is synthesized)
acatgcttttctgttactgttatattatccagtagaaaatgttaggatatgtgtgctatataaaaaaaaaaaaagacttgttaagttttaaaataacaaaaatggctagttgaatagtat

SEQ ID NO: 129564 - DNA, 120 bp, Artificial Sequence
  ENSG00000102271_29 (sequence is synthesized)
tttatgtgtaattcttccatttattctgtttaattatacaactaagatgaaatattgaaaaaccctttgtgaaagtaacttttcaagtaaatgcacaactttagaatttctacaaataag

SEQ ID NO: 129565 - DNA, 120 bp, Artificial Sequence
  ENSG00000102271_30 (sequence is synthesized)
ttcttttaaacagtctttttattgtggattgtgaaatcaaaatctggagaaatgcttataaaatatactactagcttttaagttttaagaaagaagaacgtaagttgtacaaagatattt

SEQ ID NO: 129566 - DNA, 120 bp, Artificial Sequence
  ENSG00000102271_31 (sequence is synthesized)
gtactttgacaaactgaatttaaataaactttatttcctctcactatagtgtggctttagaatatatcaagtacaacctgaatggactttttgattttacatttcctatatcactaaaat

SEQ ID NO: 129567 - DNA, 120 bp, Artificial Sequence
  ENSG00000102271_32 (sequence is synthesized)
acttaaacacaaaaataaaattccactcctttatttcttcttacacctgccattgtctctaattctaaagagagagctatagatttctgcagttctagaggtgaagatagagacatagag

SEQ ID NO: 129568 - DNA, 120 bp, Artificial Sequence
  ENSG00000102271_33 (sequence is synthesized)
aggctgtgaaacacacatacagccctgttaggtcttttgaattcacaccttattgaaatcagtgtagaagtagagttacctaaacctttatcgccaatgcacagcttggcctgttaagtt

SEQ ID NO: 129569 - DNA, 120 bp, Artificial Sequence
  ENSG00000102271_34 (sequence is synthesized)
aaatgtgggtgtcaaccagtggaaaagatcaaaggaccttttgcagcctagcttgccaatcttccagtaacaacgaggtgctaccaataggcagactgtgtctagagtcatgcatggaca

SEQ ID NO: 129570 - DNA, 120 bp, Artificial Sequence
  ENSG00000102271_35 (sequence is synthesized)
agaggaaagtgaaagttgaatactctcttctcaatggcatagctggacttgattaagtattgactcatagaagagacatgtatgtttcccggggctaccccttcatagctgcatttaaaa

SEQ ID NO: 129571 - DNA, 120 bp, Artificial Sequence
  ENSG00000102271_36 (sequence is synthesized)
atggtgttcaggccactatggctgctgtggtttgaatatttttttccctcgaaaactcatgttgaaacttaactcctaatgtagcagtactgagaggcagggcccttaagaggtgattgg

SEQ ID NO: 129572 - DNA, 120 bp, Artificial Sequence
  ENSG00000102271_37 (sequence is synthesized)
gccatgaggtctgtgccctcctgaatggattaatccattcatggattaatggattattatgagtgggggactggtgactttatatgaaaaggaaggaagagtgacctaagctagcatgct

SEQ ID NO: 129573 - DNA, 120 bp, Artificial Sequence
  ENSG00000102271_38 (sequence is synthesized)
cagggtgcaccgtatgtcccctggtcatgtgatgctatgtgttaccttgggacttacctgacagctcttaccaacaagaaggccatcccagatatggcctctcaacctcagacttctcag

SEQ ID NO: 129574 - DNA, 120 bp, Artificial Sequence
  ENSG00000102271_39 (sequence is synthesized)
cctgcctaactgtaagaaattaattctttttctttataaattacccaggttctgttttaagcctcagaaaatgaactaagacaatgccctagatgagctgccaaaatctgagcagatatg

SEQ ID NO: 129575 - DNA, 120 bp, Artificial Sequence
  ENSG00000102271_40 (sequence is synthesized)
agccatcagaatagagacctgcagaggcccagggcactcaaacataactgtgcttgtctcagtcaaacttaattgggaaaaggaggagtaagagcaggccctttctgacatgctttagca

SEQ ID NO: 129576 - DNA, 120 bp, Artificial Sequence
  ENSG00000102271_41 (sequence is synthesized)
gagataacttatcagggctagtttaaacaaatgtgtataggaaaggatgttatttatatattcttacaagagtgtaagggctcacacatttactgtactcagatctgaaagacaatgttg

SEQ ID NO: 129577 - DNA, 120 bp, Artificial Sequence
  ENSG00000102271_42 (sequence is synthesized)
cttcttgatttttttctataatcactatgaccgtgttcacgattccctactctgcaactctcagcatgcatcatgatgattctctaacactgtctgtcaccttcctgtatttccacagag

SEQ ID NO: 129578 - DNA, 120 bp, Artificial Sequence
  ENSG00000102271_43 (sequence is synthesized)
agatttttcagttgctatttctcttcgtaatgaattttctttacatcctgtccacactgctggagatactaagtcccaacctaaatgatggaaggagcatctcccctcttgtctgtggaa

SEQ ID NO: 129579 - DNA, 120 bp, Artificial Sequence
  ENSG00000102271_44 (sequence is synthesized)
gatatcacatgaactacctaattttcaagcatggatctccatatttcaaaggaaagttttaaaaatgtttttaaaacttcaaatatctcaccacagtgaattatgggtaaggtgataata

SEQ ID NO: 129580 - DNA, 120 bp, Artificial Sequence
  ENSG00000102271_45 (sequence is synthesized)
tgtttaattagcttgatttaatcatcccacactgtatacatatgccaaaatatcattttgtatgccataatatatatgatttatgaattatagtaatattaataaaagtgttaaagcttt

SEQ ID NO: 129581 - DNA, 120 bp, Artificial Sequence
  ENSG00000102271_46 (sequence is synthesized)
gagaaatgaatctagcaggggaggcgtgagtagaaggaatctagaagaaaataagtttaaacacttcgctttggctcacttgcctgggtttcagctgcagctactgtactttgatactga

SEQ ID NO: 129582 - DNA, 120 bp, Artificial Sequence
  ENSG00000102271_47 (sequence is synthesized)
agaagcagggctagatatttgcaagtccaagcaggagggctgcaagcctgcaaatctaacagctggagagtgttgtggtggctgctttcctgtggtaagctgatttacttgtttaaggtc

SEQ ID NO: 129583 - DNA, 120 bp, Artificial Sequence
  ENSG00000102271_48 (sequence is synthesized)
tgacctcatcatcctgtcagcatgggttcccacctacactgttagctgcagccttctgcttctgctagaaggctacaagtattcacagtgtatcataggcagtgggggaggggagagaaa

SEQ ID NO: 129584 - DNA, 120 bp, Artificial Sequence
  ENSG00000102287_0 (sequence is synthesized)
agagcgtgagccgcgacctccgcgcaggtggtcgcgccggtctccgcggaaatgttgtccaaagttcttccagtcctcctaggcatcttattgatcctccagtcgagggtcgagggacct

SEQ ID NO: 129585 - DNA, 120 bp, Artificial Sequence
  ENSG00000102287_1 (sequence is synthesized)
cagactgaatcaaagaatgaagcctcttcccgtgatgttgtctatggcccccagccccagcctctggaaaatcagctcctctctgaggaaacaaagtcaactgagactgagactgggagc

SEQ ID NO: 129586 - DNA, 120 bp, Artificial Sequence
  ENSG00000102287_2 (sequence is synthesized)
agagttggcaaactgccagaagcctctcgcatcctgaacactatcctgagtaattatgaccacaaactgcgccctggcattggagagaagcccactgtggtcactgttgagatctccgtc

SEQ ID NO: 129587 - DNA, 120 bp, Artificial Sequence
  ENSG00000102287_3 (sequence is synthesized)
aacagccttggtcctctctctatcctagacatggaatacaccattgacatcatcttctcccagacctggtacgacgaacgcctctgttacaacgacacctttgagtctcttgttctgaat

SEQ ID NO: 129588 - DNA, 120 bp, Artificial Sequence
  ENSG00000102287_4 (sequence is synthesized)
ggcaatgtggtgagccagctatggatcccggacaccttttttaggaattctaagaggacccacgagcatgagatcaccatgcccaaccagatggtccgcatctacaaggatggcaaggtg

SEQ ID NO: 129589 - DNA, 120 bp, Artificial Sequence
  ENSG00000102287_5 (sequence is synthesized)
ttgtacacaattaggatgaccattgatgccggatgctcactccacatgctcagatttccaatggattctcactcttgccctctatctttctctagcttttcctatcctgagaatgagatg

SEQ ID NO: 129590 - DNA, 120 bp, Artificial Sequence
  ENSG00000102287_6 (sequence is synthesized)
atctacaagtgggaaaatttcaagcttgaaatcaatgagaagaactcctggaagctcttccagtttgattttacaggagtgagcaacaaaactgaaataatcacaaccccagttggtgac

SEQ ID NO: 129591 - DNA, 120 bp, Artificial Sequence
  ENSG00000102287_7 (sequence is synthesized)
ttcatggtcatgacgattttcttcaatgtgagcaggcggtttggctatgttgcctttcaaaactatgtcccttcttccgtgaccacgatgctctcctgggtttccttttggatcaagaca

SEQ ID NO: 129592 - DNA, 120 bp, Artificial Sequence
  ENSG00000102287_8 (sequence is synthesized)
gagtctgctccagcccggacctctctagggatcacctctgttctgaccatgaccacgttgggcaccttttctcgtaagaatttcccgcgtgtctcctatatcacagccttggatttctat

SEQ ID NO: 129593 - DNA, 120 bp, Artificial Sequence
  ENSG00000102287_9 (sequence is synthesized)
atcgccatctgcttcgtcttctgcttctgcgctctgttggagtttgctgtgctcaacttcctgatctacaaccagacaaaagcccatgcttctcctaaactccgccatcctcgtatcaat

SEQ ID NO: 129594 - DNA, 120 bp, Artificial Sequence
  ENSG00000102287_10 (sequence is synthesized)
agccgtgcccatgcccgtacccgtgcacgttcccgagcctgtgcccgccaacatcaggaagcttttgtgtgccagattgtcaccactgagggaagtgatggagaggagcgcccgtcttgc

SEQ ID NO: 129595 - DNA, 120 bp, Artificial Sequence
  ENSG00000102287_11 (sequence is synthesized)
tcagcccagcagccccctagcccaggtagccctgagggtccccgcagcctctgctccaagctggcctgctgtgagtggtgcaagcgttttaagaagtacttctgcatggtccccgattgt

SEQ ID NO: 129596 - DNA, 120 bp, Artificial Sequence
  ENSG00000102287_12 (sequence is synthesized)
gagggcagtacctggcagcagggccgcctctgcatccatgtctaccgcctggataactactcgagagttgttttcccagtgactttcttcttcttcaatgtgctctactggcttgtttgc

SEQ ID NO: 129597 - DNA, 120 bp, Artificial Sequence
  ENSG00000102287_13 (sequence is synthesized)
gtggggcaacctctccagttccccaggaggtccaagccccttgccaagggagttgggggaaagcagcagcagcagcaggagcgactagagtttttcctgccccattccccaaacagaagc

SEQ ID NO: 129598 - DNA, 120 bp, Artificial Sequence
  ENSG00000102287_14 (sequence is synthesized)
ttgcagagggtttgtctttgctgcccctctcccctacctggcccattcactgagtcttctcagcagaccatttcaaattattaataaatgggccacctccctcttcttcaaggagcatcc

SEQ ID NO: 129599 - DNA, 120 bp, Artificial Sequence
  ENSG00000102287_15 (sequence is synthesized)
gtgatgctcagtgttcaaaaccacagccacttagtgatcagctccctaaaaccatgcctaagtacaggcggattagctatcttccaacaatgctgaccaccagacaattactgcattttt

SEQ ID NO: 129600 - DNA, 120 bp, Artificial Sequence
  ENSG00000102287_16 (sequence is synthesized)
ccagaagcccactattgcctttgtagtgctttcggcccagttctggcctcagcctcaaagtgcaccgactagttgcttgcctatacctggcacctcattaagatgctgggcagcagtata

SEQ ID NO: 129601 - DNA, 120 bp, Artificial Sequence
  ENSG00000102287_17 (sequence is synthesized)
acaggaggaagagatccctctcctttggtcagattattatgttctcagttctctctccctgctacccctttctctgcagatagatagacactggcattatccctttaggaagaggggggg

SEQ ID NO: 129602 - DNA, 120 bp, Artificial Sequence
  ENSG00000102287_18 (sequence is synthesized)
gcagcaagagagcctatttgggacagcattcctctctctctgctgctgtgacatctccctctccttgctggctccatctttcgtctgcactaccaattcaatgcccttcatccaatgggt

SEQ ID NO: 129603 - DNA, 120 bp, Artificial Sequence
  ENSG00000102287_19 (sequence is synthesized)
atctatttttgtgtgtgattatagtaactactccctgctttatatgccaccctcttccttctctttgacccctgtgactctttctgtaactttcccagtgacttcccctagccctgaccc

SEQ ID NO: 129604 - DNA, 120 bp, Artificial Sequence
  ENSG00000102287_20 (sequence is synthesized)
aggcactaggccttggtgacttcctggggccaagaaactaaggaaactcggctttgcaacaggcattactcgccattgattggtgcccacccagggcacactgtcggagttctatcactt

SEQ ID NO: 129605 - DNA, 120 bp, Artificial Sequence
  ENSG00000102287_21 (sequence is synthesized)
gcttgacccctggacccataaaccagtccactgttatacccggggcactctaaccatcacaatcaatcaatcaaattcccttaaatttgtatggcactggaactttggcaaagcactttt

SEQ ID NO: 129606 - DNA, 120 bp, Artificial Sequence
  ENSG00000102287_22 (sequence is synthesized)
gacaagttgtgtctgattggagcttcatgatagccttgtgacatctttagggcaggattcttatccccattttgcagatgaaaaccctgagtcacagatttctgtgggactgtggatctc

SEQ ID NO: 129607 - DNA, 120 bp, Artificial Sequence
  ENSG00000102287_23 (sequence is synthesized)
actggaagctatccaagagcccactgtcaccttctagaccacatgatagggctagacagctcagttcaccatgattctcttctgtcacctctgctggcacaccagtggcaaggcccagaa

SEQ ID NO: 129608 - DNA, 120 bp, Artificial Sequence
  ENSG00000102287_24 (sequence is synthesized)
tggcgacctctctttagctcaatttctgggcctgaggtgctcagactgcccccaagatcaaatctctcctggctgtagtaacccagtggaatgaatttggacatgccccaatgcttctat

SEQ ID NO: 129609 - DNA, 120 bp, Artificial Sequence
  ENSG00000102287_25 (sequence is synthesized)
atgctaagtgaaatctgtgtctgtaatttgttggggggtggatagggtggggtctccatctactttttgtcaccatcatctgaaatggggaaatatgtaaataaatatatcagcaaagca

SEQ ID NO: 129610 - DNA, 120 bp, Artificial Sequence
  ENSG00000102287_26 (sequence is synthesized)
ctaattagaagtgtcttaaattgcagtcaagatcccacggcaagaggacttttgataaatacattctggccagtaggcaagtgcgagggtggtccgtgcagcagctctggaggagttcta

SEQ ID NO: 129611 - DNA, 120 bp, Artificial Sequence
  ENSG00000102287_27 (sequence is synthesized)
tcccaaagctatactcaacacacaggtttcccactgacaacaggtcgctcccttgccttcttccagaagaatctgagaagctttgctccttgagtttcagtgctgccaaggtgagtacga

SEQ ID NO: 129612 - DNA, 120 bp, Artificial Sequence
  ENSG00000102287_28 (sequence is synthesized)
ggcaaggctttggagtgtagagacatgctagcaagggtactggggttatggcacatgggtggtcagcttgctgagtgatggaatgttacccagggtggtggcggggttgaatcaacttcc

SEQ ID NO: 129613 - DNA, 120 bp, Artificial Sequence
  ENSG00000102287_29 (sequence is synthesized)
tgatgtaatggtgagaagttggaggagagaagccaagatatggtgtgccaaagacagtttccagaaaatccggaggcagcacttagacttgggttatcttcccttgacttttccccactt

SEQ ID NO: 129614 - DNA, 120 bp, Artificial Sequence
  ENSG00000102287_30 (sequence is synthesized)
aaccagccatttgtcgtgagaggcatcttgttctgctaccatgtgactaggcagaaaatctgcttttgtttcatttattgagtcagtctctggatgagggaaagctcatgctcatgtggc

SEQ ID NO: 129615 - DNA, 120 bp, Artificial Sequence
  ENSG00000102287_31 (sequence is synthesized)
tagagctttgcttgcacagtattaggcaggggcagagggctgggctaccttaaaaatacttgccctttttcttggggactctggggaagcggttttactacctttgacttgggagccttg

SEQ ID NO: 129616 - DNA, 120 bp, Artificial Sequence
  ENSG00000102287_32 (sequence is synthesized)
ctcttctgccagctaaccatgggcctgcctcttggttttctgcacctcagcttttcccggataggtggggacccatcatcaaaagtgacagagaagataaggcccaggggctttcaagtc

SEQ ID NO: 129617 - DNA, 120 bp, Artificial Sequence
  ENSG00000102287_33 (sequence is synthesized)
gtcactgtcttataatttgctattaccagtcacaatttaactaggttttgtgttgaaaacttgttttggtttgcttctgtcccaagaggcactagctggggcccctacagagtgcagggc

SEQ ID NO: 129618 - DNA, 120 bp, Artificial Sequence
  ENSG00000102287_34 (sequence is synthesized)
ctagcccaggggctgacctatgggaccttccacagacttctgctttctgctctgtacttctgtaacaactccaataatttattttctggagggagaaagggattttttaaccactggttt

SEQ ID NO: 129619 - DNA, 120 bp, Artificial Sequence
  ENSG00000102287_35 (sequence is synthesized)
gagaatgagactggaaaaggtaagtcccttgctacttgaagaggatcttcagaatcatgaccatatcttccagttttttcattcaaaatagaaataataaagcaatgttaaacaccacaa

SEQ ID NO: 129620 - DNA, 120 bp, Artificial Sequence
  ENSG00000102287_36 (sequence is synthesized)
tctgtatagctcatgtgaaacagggagccaccaaaactttggggagcaggctagtgccggttttgaccacctgtggagcagtgctcactcacgaaggcattttgccatcacatgaatgtg

SEQ ID NO: 129621 - DNA, 120 bp, Artificial Sequence
  ENSG00000102287_37 (sequence is synthesized)
cagaaaggaggccaaaagcattctgtgcttctccaccacagcacagacttccctagtctcatttgctgagagtagacattctgagggccagcagtgcaggtgtgatgtgcctcagagggt

SEQ ID NO: 129622 - DNA, 120 bp, Artificial Sequence
  ENSG00000102287_38 (sequence is synthesized)
atgaagcccttagtcagccatctggatatcagctgcgtgggcatgatatctagaaggctaattgattttttcactttcacctgactctcttgccaacctgcagagacagacattgggtgt

SEQ ID NO: 129623 - DNA, 120 bp, Artificial Sequence
  ENSG00000102287_39 (sequence is synthesized)
gcgacctccgcgcaggtggtcgcgccggtctccgcggaaatgttgtccaaagttcttccagtcctcctaggcatcttattgatcctccagtcgagaacatgtatacagagaagtgctcaa

SEQ ID NO: 129624 - DNA, 120 bp, Artificial Sequence
  ENSG00000102287_40 (sequence is synthesized)
atcataagtgtacagctgatgagttgtcagaatatgaccacagcggtgtaaagaaagccaaatcaaggacccgaatgtgagcaggacctcagaagccccctttgtcactgcctcccagca

SEQ ID NO: 129625 - DNA, 120 bp, Artificial Sequence
  ENSG00000102287_41 (sequence is synthesized)
cagaacgacgttcttcccctcctagagggtccaggggttgagggcataggcatggagaatgcacctgggcagtaacagagggtgccatgctcatggacaggaacatctgctattgacctg

SEQ ID NO: 129626 - DNA, 120 bp, Artificial Sequence
  ENSG00000102287_42 (sequence is synthesized)
gtcttataattgctaagcacttacaactgtttgcagaggaaactgagactttgtaactatgtctcagtctcatctgcaaagaagtaagtgctttgccaagctccttgagaggttaggtaa

SEQ ID NO: 129627 - DNA, 120 bp, Artificial Sequence
  ENSG00000102287_43 (sequence is synthesized)
gtagataaagttctgctgctgtcggaatgtgcagctggctttttcatgcagacccttcagtttcgaggttacaactctgacctctttggatgactttggggaatggagctcgtgtgagtt

SEQ ID NO: 129628 - DNA, 120 bp, Artificial Sequence
  ENSG00000102287_44 (sequence is synthesized)
ctccatacccagaaccaatccagtctggttgaatgggaagcaaagtccattgtagtgggaggtggaggctagagttctaatgtcagctagtttaaggctgggaaagtctggaggaagtta

SEQ ID NO: 129629 - DNA, 120 bp, Artificial Sequence
  ENSG00000102287_45 (sequence is synthesized)
cagcagctacactggctgctgcattgacatttatcttaaaggaacaagtctgaaaagcacagattcttatcaaaggcttcatggtggattccacatagacatagtggccactggttttct

SEQ ID NO: 129630 - DNA, 120 bp, Artificial Sequence
  ENSG00000102287_46 (sequence is synthesized)
gaccttttctctgacaaagactaaaggggaaggtcctgggtatcttacacttcagctcccaattagatgtgagcaccttcacttatgttcctaggtgacctgaatgaggagccaagggac

SEQ ID NO: 129631 - DNA, 120 bp, Artificial Sequence
  ENSG00000102287_47 (sequence is synthesized)
tagtggttccgtttagtagatgattgtgcattgtttcaaaatggtgccctagtgactacaaagccccagagccagcatcatcatcaaagcaatgacagtaggtaagcaccagacctcctt

SEQ ID NO: 129632 - DNA, 120 bp, Artificial Sequence
  ENSG00000102287_48 (sequence is synthesized)
gggagtgaggaggattcttgaggagaaaagaggtcttctttctcctctgctggagactagttgatctggagacgtggttccttcaatgtcagagttatctttgggactggtctcaaactc

SEQ ID NO: 129633 - DNA, 120 bp, Artificial Sequence
  ENSG00000102287_49 (sequence is synthesized)
ttccagttgggccctggggcaggtctctccatctggagcatacttacgtgctcggcgattaagggttcagaatgcagtggtagcctgctactctggccatcttggaccttgatccagaga

SEQ ID NO: 129634 - DNA, 120 bp, Artificial Sequence
  ENSG00000102287_50 (sequence is synthesized)
atctctgcttcaggagcttctaagagagtccagccctgcctccagagagaggcttgcccttcactgatggctgtggagcctctgatggaatattattgctggtcaggaattcactgtctt

SEQ ID NO: 129635 - DNA, 120 bp, Artificial Sequence
  ENSG00000102287_51 (sequence is synthesized)
acaaggaggtttccttcttctctagacagttctgttcatcaaaaaactctccctgttcttctgaaattggagtctctggaagttccacacattaagcttagttctttttccttggaactg

SEQ ID NO: 129636 - DNA, 120 bp, Artificial Sequence
  ENSG00000102287_52 (sequence is synthesized)
tccaggttacattagtccagccactgtttcacaggaccgagattaaacgatcaacatcatcattcccggcatggatcatagtctgttgtagtctacatagccctagtttatttttcttcc

SEQ ID NO: 129637 - DNA, 120 bp, Artificial Sequence
  ENSG00000102287_53 (sequence is synthesized)
cttattcttcaaagctttgggtccattcattcttctagtcccagtcctctggacatggtctatttaattgtgtccctctgacactgcagtgaccaaccatgatctggtcaaagaggataa

SEQ ID NO: 129638 - DNA, 120 bp, Artificial Sequence
  ENSG00000102287_54 (sequence is synthesized)
gagtttgagcagaaaaccatctttagcatatatttttttgctttggttcatcagccccagatatattgttttccttacccgtgcttctctcactcctcaagaagaagaaagtgtgtgtta

SEQ ID NO: 129639 - DNA, 120 bp, Artificial Sequence
  ENSG00000102287_55 (sequence is synthesized)
gcatctttctcttgtccttcaagacaaattggcatctcttgacgagcggagaaggttcttttttggccagaataaataaaattaaaatagaatcatccaacagaataataaatcttcgtg

SEQ ID NO: 129640 - DNA, 120 bp, Artificial Sequence
  ENSG00000102287_56 (sequence is synthesized)
ggaggacacacggacaggttagtgttctggtctgctttacaaagctgttgcctgacaggagcaagagttgctgagtgtctgctgggttccaggctgttctgagcttggatgggcaggggc

SEQ ID NO: 129641 - DNA, 120 bp, Artificial Sequence
  ENSG00000102287_57 (sequence is synthesized)
taagccacagggcctgcatgagccctgccttgaagggacttaaaagacgacctaattataggcctaggaattttacagtattgcaactgcaatgtgatgctgaaagtggaaaatgatgtc

SEQ ID NO: 129642 - DNA, 120 bp, Artificial Sequence
  ENSG00000102287_58 (sequence is synthesized)
ctgggctcagagaaaagcccacaccagcctgggagtcatgatagcagcagagtgcttggggagggtgtgtcagagcataaagcagcatgaatgctacaaaagaagatgccaactagagat

SEQ ID NO: 129643 - DNA, 120 bp, Artificial Sequence
  ENSG00000102287_59 (sequence is synthesized)
ataggttgtcatcaggtcccggaggagccatgaccgtctagctgagagccatgaccaaggacacaatgtccaagtgactgtgaggacctcagtctgccctgtggatgtgtatgccacaga

SEQ ID NO: 129644 - DNA, 120 bp, Artificial Sequence
  ENSG00000102287_60 (sequence is synthesized)
ctgaaacactcagtttgggttaggggtcatagactaagaccaaagagtccagggttagaatcttggtgtaaaattgcaggccatctcaggaaatctgtgagcagatgggattggctttgg

SEQ ID NO: 129645 - DNA, 120 bp, Artificial Sequence
  ENSG00000102287_61 (sequence is synthesized)
gcttagctctcaactggccattggtcttgcagtaagtcttttttctgggcttcttctggtcctatttgtatgtattgcattgtcacatcatgcctctatcctagggaatactgtgagctg

SEQ ID NO: 129646 - DNA, 120 bp, Artificial Sequence
  ENSG00000102287_62 (sequence is synthesized)
tttattgcagacctagtctaggggcaggagggctttggtggtctcagtgctttcaggtttatttgtttgcctctgcacttttaaacttggggcagcggggaggatctcgtccatggattt

SEQ ID NO: 129647 - DNA, 120 bp, Artificial Sequence
  ENSG00000102287_63 (sequence is synthesized)
cagacatctgggaggggctgcttcaggcgtttaggtggtcctgtctggcagtgctcagtctaccactgactgccagttctgattgtgccacgtttccagccacatcactcattttacagg

SEQ ID NO: 129648 - DNA, 120 bp, Artificial Sequence
  ENSG00000102287_64 (sequence is synthesized)
gtctcagggctccatttttcctcctctcttcccatagtcactggcccttatcttttgagatggctgggagtttggcctcagggaaagaggacatcttctagatatggcatttgaaagtag

SEQ ID NO: 129649 - DNA, 120 bp, Artificial Sequence
  ENSG00000102287_65 (sequence is synthesized)
aaactgtattttccaagcccagttcttccctcgcccacaatgggaagtagccacttcagacatgagaaatggtgtggatttggcacatctgtatgccacttaagcaattctaacagcttg

SEQ ID NO: 129650 - DNA, 120 bp, Artificial Sequence
  ENSG00000102287_66 (sequence is synthesized)
aaatactgcagaaaaaatgcattttgcttcttaagttggcagtcccttggtccgcaatacaggggtcatgccaacgtctcttgccctgtttaccccttattttaggaaacaaattgcctt

SEQ ID NO: 129651 - DNA, 120 bp, Artificial Sequence
  ENSG00000102287_67 (sequence is synthesized)
atggcttaaaaaaatccttttggaagtgtgacgtgccagtagaaaagcatagacatcatgagtgaacagctcagtggcttttcacaagtaaacaggcccgtgtaaccaacacctagatca

SEQ ID NO: 129652 - DNA, 60 bp, Artificial Sequence
  ENSG00000102287_68 (sequence is synthesized)
ttcacaagtaaacaggcccgtgtaaccaacacctagatcaggaaatacagcattgcaacc

SEQ ID NO: 129653 - DNA, 120 bp, Artificial Sequence
  ENSG00000102287_69 (sequence is synthesized)
aaaatgcctgtccccgtacactttcctccccaaaggaaaccactctcctgccttccagtatcacagattaatatgggacgatggcttttaaaaagacttttaattataattttttaaaga

SEQ ID NO: 129654 - DNA, 120 bp, Artificial Sequence
  ENSG00000102287_70 (sequence is synthesized)
ttgtttgtgaactcatggccactcttattttcttttacaccacccaccctccaattccaacttagattgtcttgaagcatatctcagacatcatatcattttatatgtaattgttttagt

SEQ ID NO: 129655 - DNA, 120 bp, Artificial Sequence
  ENSG00000102287_71 (sequence is synthesized)
atgtatttctagtcattaatatttcacaaacataagaaaataccataattacaccaaaaattaaagaataatttattcatgtctcaactgtccactcagtgttcaaatctctcctattgt

SEQ ID NO: 129656 - DNA, 120 bp, Artificial Sequence
  ENSG00000102287_72 (sequence is synthesized)
gtcataaatgatttctgtttgtttttcaagagtttgcttttaaataaaataagatccagatattagcaagtggggcattttgatttttaaaaacactttttatggaattagaacatgtat

SEQ ID NO: 129657 - DNA, 120 bp, Artificial Sequence
  ENSG00000102287_73 (sequence is synthesized)
gtggtaaaatgagaggactaaactagattgttgatcttcaagatgtgtgtccaattcttaacagtccgtgagcttggttttgccatgaaagaataaataaagaaataggattagatgctg

SEQ ID NO: 129658 - DNA, 120 bp, Artificial Sequence
  ENSG00000102290_0 (sequence is synthesized)
ctggtggtccagtacctccaaagatatggaatacactcctgaaatatcctgaaaacttttttttttcagaatcctttaataagcagttatgtcaatctgaaagttgcttacttgtacttt

SEQ ID NO: 129659 - DNA, 120 bp, Artificial Sequence
  ENSG00000102290_1 (sequence is synthesized)
atattaatagctattcttgtttttcttatccaaagaaaaatcctctaatccccttttcacatgatagttgttaccatgtttaggcattagtcacatcaacccctctcctctcccaaactt

SEQ ID NO: 129660 - DNA, 120 bp, Artificial Sequence
  ENSG00000102290_2 (sequence is synthesized)
ctcttcttcaaatcaaactttattagtccctcctttataatgattccttgcctcgttttatccagatcaattttttttcactttgatgcccagagctgaagaaatggactactgtataaa

SEQ ID NO: 129661 - DNA, 120 bp, Artificial Sequence
  ENSG00000102290_3 (sequence is synthesized)
ttattcattgccaagagaataattgcattttaaacccatattataacaaagaataatgattatattttgtgatttgtaacaaataccctttattttcccttaactattgaattaaatatt

SEQ ID NO: 129662 - DNA, 120 bp, Artificial Sequence
  ENSG00000102290_4 (sequence is synthesized)
ttaattatttgtattctctttaactatcttggtatattaaagtattatcttttatatatttatcaatggtggacacttttataggtactctgtgtcatttttgatactgtaggtatctta

SEQ ID NO: 129663 - DNA, 120 bp, Artificial Sequence
  ENSG00000102290_5 (sequence is synthesized)
tttcatttatctttattcttaatgtacgaattcataatatttgattcagaacaaatttatcactaattaacagagtgtcaattatgctaacatctcatttactgattttaatttaaaaca

SEQ ID NO: 129664 - DNA, 120 bp, Artificial Sequence
  ENSG00000102290_6 (sequence is synthesized)
gtttttgttaacatgcatgtttagggttggcttcttaataatttcttcttcctcttctctctctcctcttcttttggtcagtgttgtgcgggttaatacaacaaactgtaacaagtgtac

SEQ ID NO: 129665 - DNA, 120 bp, Artificial Sequence
  ENSG00000102290_7 (sequence is synthesized)
ctggtatggacttgttgtccgggacgtacattttcgcggtcctgctagcatgcgtggtgttccactctggcgcccaggagaaaaactacaccatccgagaagaaatgccagaaaacgtcc

SEQ ID NO: 129666 - DNA, 120 bp, Artificial Sequence
  ENSG00000102290_8 (sequence is synthesized)
tgataggcgacttgttgaaagaccttaacttgtcgctgattccaaacaagtccttgacaactgctatgcagttcaagctagtgtacaagaccggagatgtgccactgattcgaattgaag

SEQ ID NO: 129667 - DNA, 120 bp, Artificial Sequence
  ENSG00000102290_9 (sequence is synthesized)
aggatactggtgagatcttcactactggcgctcgcattgatcgtgagaaattatgtgctggtatcccaagggatgagcattgcttttatgaagtggaggttgccattttgccggatgaaa

SEQ ID NO: 129668 - DNA, 120 bp, Artificial Sequence
  ENSG00000102290_10 (sequence is synthesized)
tatttagactggttaagatacgttttctgatagaagatataaatgataatgcaccattgttcccagcaacagttatcaacatatcaattccagagaactcggctataaactctaaatata

SEQ ID NO: 129669 - DNA, 120 bp, Artificial Sequence
  ENSG00000102290_11 (sequence is synthesized)
ctctcccagcggctgttgatcctgacgtaggaataaacggagttcaaaactacgaactaattaagagtcaaaacatttttggcctcgatgtcattgaaacaccagaaggagacaagatgc

SEQ ID NO: 129670 - DNA, 120 bp, Artificial Sequence
  ENSG00000102290_12 (sequence is synthesized)
cacaactgattgttcaaaaggagttagatagggaagagaaggatacctacgtgatgaaagtaaaggttgaagatggtggctttcctcaaagatccagtactgctattttgcaagtgagtg

SEQ ID NO: 129671 - DNA, 120 bp, Artificial Sequence
  ENSG00000102290_13 (sequence is synthesized)
ttactgatacaaatgacaaccacccagtctttaaggagacagagattgaagtcagtataccagaaaatgctcctgtaggcacttcagtgacacagctccatgccacagatgctgacatag

SEQ ID NO: 129672 - DNA, 120 bp, Artificial Sequence
  ENSG00000102290_14 (sequence is synthesized)
gtgaaaatgccaagatccacttctctttcagcaatctagtctccaacattgccaggagattatttcacctcaatgccaccactggacttatcacaatcaaagaaccactggatagggaag

SEQ ID NO: 129673 - DNA, 120 bp, Artificial Sequence
  ENSG00000102290_15 (sequence is synthesized)
aaacaccaaaccacaagttactggttttggcaagtgatggtggattgatgccagcaagagcaatggtgctggtaaatgttacagatgtcaatgataatgtcccatccattgacataagat

SEQ ID NO: 129674 - DNA, 120 bp, Artificial Sequence
  ENSG00000102290_16 (sequence is synthesized)
acatcgtcaatcctgtcaatgacacagttgttctttcagaaaatattccactcaacaccaaaattgctctcataactgtgacggataaggatgcggaccataatggcagggtgacatgct

SEQ ID NO: 129675 - DNA, 120 bp, Artificial Sequence
  ENSG00000102290_17 (sequence is synthesized)
tcacagatcatgaaatccctttcagattaaggccagtattcagtaatcagttcctcctggagactgcagcatatcttgactatgagtccacaaaagaatatgccattaaattactggctg

SEQ ID NO: 129676 - DNA, 120 bp, Artificial Sequence
  ENSG00000102290_18 (sequence is synthesized)
cagatgctggcaaacctcctttgaatcagtcagcaatgctcttcatcaaagtgaaagatgaaaatgacaatgctccagttttcacccagtctttcgtaactgtttctattcctgagaata

SEQ ID NO: 129677 - DNA, 120 bp, Artificial Sequence
  ENSG00000102290_19 (sequence is synthesized)
actctcctggcatccagttgacgaaagtaagtgcaatggatgcagacagtgggcctaatgctaagatcaattacctgctaggccctgatgctccacctgaattcagcctggattgtcgta

SEQ ID NO: 129678 - DNA, 120 bp, Artificial Sequence
  ENSG00000102290_20 (sequence is synthesized)
caggcatgctgactgtagtgaagaaactagatagagaaaaagaggataaatatttattcacaattctggcaaaagataacggggtaccacccttaaccagcaatgtcacagtctttgtaa

SEQ ID NO: 129679 - DNA, 120 bp, Artificial Sequence
  ENSG00000102290_21 (sequence is synthesized)
gcattattgatcagaatgacaatagcccagttttcactcacaatgaatacaacttctatgtcccagaaaaccttccaaggcatggtacagtaggactaatcactgtaactgatcctgatt

SEQ ID NO: 129680 - DNA, 120 bp, Artificial Sequence
  ENSG00000102290_22 (sequence is synthesized)
atggagacaattctgcagttacgctctccattttagatgagaatgatgacttcaccattgattcacaaactggtgtcatccgaccaaatatttcatttgatagagaaaaacaagaatctt

SEQ ID NO: 129681 - DNA, 120 bp, Artificial Sequence
  ENSG00000102290_23 (sequence is synthesized)
acactttctatgtaaaggctgaggatggtggtagagtatcacgttcttcaagtgccaaagtaaccataaatgtggttgatgtcaatgacaacaaaccagttttcattgtccctccttcca

SEQ ID NO: 129682 - DNA, 120 bp, Artificial Sequence
  ENSG00000102290_24 (sequence is synthesized)
actgttcttatgaattggttctaccgtccactaatccaggcacagtggtctttcaggtaattgctgttgacaatgacactggcatgaatgcagaggttcgttacagcattgtaggaggaa

SEQ ID NO: 129683 - DNA, 120 bp, Artificial Sequence
  ENSG00000102290_25 (sequence is synthesized)
acacaagagatctgtttgcaatcgaccaagaaacaggcaacataacattgatggagaaatgtgatgttacagaccttggtttacacagagtgttggtcaaagctaatgacttaggacagc

SEQ ID NO: 129684 - DNA, 120 bp, Artificial Sequence
  ENSG00000102290_26 (sequence is synthesized)
ctgattctctcttcagtgttgtaattgtcaatctgttcgtgaatgagtcggtgaccaatgctacactgattaatgaactggtgcgcaaaagcactgaagcaccagtgaccccaaatactg

SEQ ID NO: 129685 - DNA, 120 bp, Artificial Sequence
  ENSG00000102290_27 (sequence is synthesized)
agatagctgatgtatcctcaccaactagtgactatgtcaagatcctggttgcagctgttgctggcaccataactgtcgttgtagttattttcatcactgctgtagtaagatgtcgccagg

SEQ ID NO: 129686 - DNA, 120 bp, Artificial Sequence
  ENSG00000102290_28 (sequence is synthesized)
caccacaccttaaggctgctcagaaaaacaagcagaattctgaatgggctaccccaaacccagaaaacaggcagatgataatgatgaagaaaaagaaaaagaagaagaagcattccccta

SEQ ID NO: 129687 - DNA, 120 bp, Artificial Sequence
  ENSG00000102290_29 (sequence is synthesized)
agaacttgctgcttaattttgtcactattgaagaaactaaggcagatgatgttgacagtgatggaaacagagtcacactagaccttcctattgatctagaagagcaaacaatgggaaagt

SEQ ID NO: 129688 - DNA, 120 bp, Artificial Sequence
  ENSG00000102290_30 (sequence is synthesized)
acaattgggtaactacacctactactttcaagcccgacagccctgatttggcccgacactacaaatctgcctctccacagcctgccttccaaattcagcctgaaactcccctgaattcga

SEQ ID NO: 129689 - DNA, 120 bp, Artificial Sequence
  ENSG00000102290_31 (sequence is synthesized)
agcaccacatcatccaagaactgcctctcgataacacctttgtggcctgtgactctatctccaagtgttcctcaagcagttcagatccctacagcgtttctgactgtggctatccagtga

SEQ ID NO: 129690 - DNA, 120 bp, Artificial Sequence
  ENSG00000102290_32 (sequence is synthesized)
cgaccttcgaggtacctgtgtccgtacacaccagaccgccaatgaaggaggttgtgcgatcttgcacccccatgaaagagtctacaactatggagatctggattcatccccaaccacagc

SEQ ID NO: 129691 - DNA, 120 bp, Artificial Sequence
  ENSG00000102290_33 (sequence is synthesized)
ggaaatctgaagggaaagtggcaggaaagtcccagcggcgtgtcacatttcacctgccagaaggctctcaggaaagcagcagtgatggtggactgggagaccatgatgcaggcagcctta

SEQ ID NO: 129692 - DNA, 120 bp, Artificial Sequence
  ENSG00000102290_34 (sequence is synthesized)
ccagcacatctcatggcctgccccttggctatcctcaggaggagtactttgatcgtgctacacccagcaatcgcactgaaggggatggcaactccgatcctgaatctactttcatacctg

SEQ ID NO: 129693 - DNA, 120 bp, Artificial Sequence
  ENSG00000102290_35 (sequence is synthesized)
gactaaagaaagctgcagaaataactgttcaaccaactgtggaagaggcctctgacaactgcactcaagaatgtctcatctatggccattctgatgcctgctggatgccggcatctctgg

SEQ ID NO: 129694 - DNA, 120 bp, Artificial Sequence
  ENSG00000102290_36 (sequence is synthesized)
atcattccagctcttcgcaagcacaggcctctgctctatgccacagcccaccactgtcacaggcctctactcagcaccacagcccacgagtgacacagaccattgctctctgccacagcc

SEQ ID NO: 129695 - DNA, 120 bp, Artificial Sequence
  ENSG00000102290_37 (sequence is synthesized)
ctccagtgacacagaccatcgcattgtgccacagcccaccaccgatacaggtgtctgctctccaccacagtcctcctctagtgcaggctactgcacttcaccacagcccaccatcagcac

SEQ ID NO: 129696 - DNA, 120 bp, Artificial Sequence
  ENSG00000102290_38 (sequence is synthesized)
tctcctctgccacaggttattgccctccatcgtagtcaggcccaatcatcagtcagtttgcagcaaggttgggtgcaaggtgctgatgggctatgctctgttgatcagggagtgcaaggt

SEQ ID NO: 129697 - DNA, 120 bp, Artificial Sequence
  ENSG00000102290_39 (sequence is synthesized)
agtgcaacatctcagttttacaccatgtctgaaagacttcatcccagtgatgattcaattaaagtcattcctttgacaaccttcactccacgccaacaggccagaccgtccagaggtgat

SEQ ID NO: 129698 - DNA, 120 bp, Artificial Sequence
  ENSG00000102290_40 (sequence is synthesized)
tcccccattatggaagaacatcccttgtaaagctaaaatagttacttcaaattttcagaaaagatgtatatagtcaaaatttaagatacaattccaatgagtattctgattatcagattt

SEQ ID NO: 129699 - DNA, 120 bp, Artificial Sequence
  ENSG00000102290_41 (sequence is synthesized)
gtaaataactatgtaaatagaaacagataccagaataaatctacagctagacccttagtcaatagttaaccaaaaaattgcaatttgtttaattcagaatgtgtatttaaaaagaaaagg

SEQ ID NO: 129700 - DNA, 120 bp, Artificial Sequence
  ENSG00000102290_42 (sequence is synthesized)
aatttaacaatttgcatccccttgtacagtaaggcttatcatgacagagcgcactatttctgatgtacagtattttttgttgtttttatcatcatgtgcaatattactgatttgtttcca

SEQ ID NO: 129701 - DNA, 120 bp, Artificial Sequence
  ENSG00000102290_43 (sequence is synthesized)
tgctgattgtgtggaaccagtatgtagcaaatggaaagcctagaaatatcttattttctaagtttacctttagtttacctaaacttttgttcagataacgttaaaaggtatacgtactct

SEQ ID NO: 129702 - DNA, 120 bp, Artificial Sequence
  ENSG00000102290_44 (sequence is synthesized)
agcctttttttgggctttctttttgatttttgtttgttgttttcagtttttttgttgttgttagtgagtctcccttcaaaatacgcagtaggtagtgtaaatactgcttgtttgtgtctc

SEQ ID NO: 129703 - DNA, 120 bp, Artificial Sequence
  ENSG00000102290_45 (sequence is synthesized)
tctgctgtcatgttttctaccttattccaatactatattgttgataaaatttgtatatacattttcaataaagaatatgtataaactgtacagatctagatctacaacctatttctctac

SEQ ID NO: 129704 - DNA, 120 bp, Artificial Sequence
  ENSG00000102290_46 (sequence is synthesized)
tctttagtagagttcgagacacagaagtgcaataactgccctaattaagcaactatttgttaaaaagggcctctttttactttaatagtttagtgtaaagtacatcagaaataaagctgt

SEQ ID NO: 129705 - DNA, 120 bp, Artificial Sequence
  ENSG00000102290_47 (sequence is synthesized)
atctgccattttaagcctgtagtccattattacttgggtctttacttctgggaatttgtatgtaacagcctagaaaattaaaaggaggtggatgcatccaaagcacgagtcacttaaaat

SEQ ID NO: 129706 - DNA, 120 bp, Artificial Sequence
  ENSG00000102290_48 (sequence is synthesized)
atcgacggtaaactactattttgtagagaaactcaggaagatttaaatgttgatttgacagctcaataggctgttaccaaagggtgttcagtaaaaataacaaatacatgtaactgtaga

SEQ ID NO: 129707 - DNA, 120 bp, Artificial Sequence
  ENSG00000102290_49 (sequence is synthesized)
taaaaccatatactaaatctataagactaagggatttttgttattctagctcaacttactgaagaaaaccactaataacaacaagaatatcaggaaggaacttttcaagaaatgtaatta

SEQ ID NO: 129708 - DNA, 120 bp, Artificial Sequence
  ENSG00000102290_50 (sequence is synthesized)
taaatctacatcaaacagaattttaaggaaaaatgcagagggagaaataaggcacatgactgcttcttgcagtcaacaagaaataccaataacacacacagaacaaaaaccatcaaaatc

SEQ ID NO: 129709 - DNA, 120 bp, Artificial Sequence
  ENSG00000102290_51 (sequence is synthesized)
tcatatatgaaataaaatatattcttctaagcaaagaaacagtactattcatagaaaacattagttttcttctgttgtctgttatttccttcttgtatcctcttaactggccattatctt

SEQ ID NO: 129710 - DNA, 120 bp, Artificial Sequence
  ENSG00000102290_52 (sequence is synthesized)
gtatgtgcacattttataaatgtacagaaacatcaccaacttaattttcttccatagcaaaactgagaaaataccttgtttcagtataacactaaaccaagagacaattgatgtttaatg

SEQ ID NO: 129711 - DNA, 120 bp, Artificial Sequence
  ENSG00000102290_53 (sequence is synthesized)
ggggcggttggggtgggggggggagtcaatatctcctattgattaacttagacatagattttgtaatgtataacttgatatttaatttatgattaaactgtgtgtaaattttgtaacata

SEQ ID NO: 129712 - DNA, 120 bp, Artificial Sequence
  ENSG00000102290_54 (sequence is synthesized)
aactgtggtaattgcataatttcattggtgaggatttccactgaatattgagaaagtttcttttcatgtgcccagcaggttaagtagcgttttcagaatatacattattcccatccattg

SEQ ID NO: 129713 - DNA, 120 bp, Artificial Sequence
  ENSG00000102290_55 (sequence is synthesized)
taaagttccttaagtcatatttgactgggcgtgcagaataacttcttaacttttaactatcagagtttgattaataaaattaattaatgttttttctccttcgtgttgttaatgttccaa

SEQ ID NO: 129714 - DNA, 120 bp, Artificial Sequence
  ENSG00000102290_56 (sequence is synthesized)
gggatttggagcatactggttttccaggtgcatgtgaatcccgaaggactgatgatatttgaatgtttattaaattattatcatacaaatgtgttgatattgtggctattgttgatgttg

SEQ ID NO: 129715 - DNA, 120 bp, Artificial Sequence
  ENSG00000102290_57 (sequence is synthesized)
aaaattttaaacttggggaagattaagaaaagaaccaatagtgacaaaaatcagtgcttccagtagattttagaacattctttgcctcaaaaaacctgcaaagatgatgtgagatttttt

SEQ ID NO: 129716 - DNA, 120 bp, Artificial Sequence
  ENSG00000102290_58 (sequence is synthesized)
aaaaaacctgcaaagatgatgtgagattttttcttgtgttttaattattttcacattttctctctgcaaaactttagttttctgatgatctacacacacacacacacacacacgtgcaca

SEQ ID NO: 129717 - DNA, 120 bp, Artificial Sequence
  ENSG00000102290_59 (sequence is synthesized)
ggttgaaagattattaaataacttatcaggcatctcaatggttactatctatgttagtgaaaatcaaataggactcaaagttggatatttgggatttttcttctgacagtataatttatt

SEQ ID NO: 129718 - DNA, 120 bp, Artificial Sequence
  ENSG00000102290_60 (sequence is synthesized)
gagttactagggaggttcttaaatcctcatatctggaaacttgtgacgttttgacacctttcctatagatgatataggaatgaaccaatacgcttttattaccctttctaactctgattt

SEQ ID NO: 129719 - DNA, 120 bp, Artificial Sequence
  ENSG00000102290_61 (sequence is synthesized)
tataatcagacttagattgtgtttagaatattaaatgactgggcaccctcttcttggtttttaccagagaggctttgaatggaagcaggctgagagtagccaaagaggcaaggggtatta

SEQ ID NO: 129720 - DNA, 120 bp, Artificial Sequence
  ENSG00000102290_62 (sequence is synthesized)
gcccagttattctcccctatgccttccttctctttctaagcgtccactaggtctggccttggaaacctgttacttctagggcttcagatctgatgatatctttttcatcacattacaagt

SEQ ID NO: 129721 - DNA, 120 bp, Artificial Sequence
  ENSG00000102290_63 (sequence is synthesized)
tatttctctgactgaatagacagtggtataggttgacacagcacacaagtggctattgtgatgtatgatgtatgtagtcctacaactgcaaaacgtcttactgaaccaacaatcaaaaaa

SEQ ID NO: 129722 - DNA, 120 bp, Artificial Sequence
  ENSG00000102290_64 (sequence is synthesized)
tggttctgttttaaaaaggattttgtttgatttgaaattaaaacttcaagctgaatgacttatatgagaataatacgttcaatcaaagtagttattctattttgtgtccatattccatta

SEQ ID NO: 129723 - DNA, 120 bp, Artificial Sequence
  ENSG00000102290_65 (sequence is synthesized)
gattgtgattattaattttctagctatggtattactatatcacacttgtgagtatgtattcaaatactaagtatcttatatgctacgtgcatacacattcttttcttaaactttacctgt

SEQ ID NO: 129724 - DNA, 120 bp, Artificial Sequence
  ENSG00000102290_66 (sequence is synthesized)
acacattcttttcttaaactttacctgtgttttaactaatattgtgtcagtgtattaaaaattagcttttacatatgatatctacaatgtaataaatttagagagtaattttgtgtattc

SEQ ID NO: 129725 - DNA, 120 bp, Artificial Sequence
  ENSG00000102290_67 (sequence is synthesized)
atgtaaatttggttagaaaataataataaatggttagtgctattgtgtaatggtagcagttacaaagagcctctgccttcccaaactaatatttatcacacatggtcattaaatgggaaa

SEQ ID NO: 129726 - DNA, 120 bp, Artificial Sequence
  ENSG00000102290_68 (sequence is synthesized)
aaaatagactaaacaaatcacaaattgttcagttcttaaaatgtaattatgtcacacacacaaaaaatccttttcaatcctgagaaaattaaaggcgttttactcacatggctatttcaa

SEQ ID NO: 129727 - DNA, 120 bp, Artificial Sequence
  ENSG00000102290_69 (sequence is synthesized)
cattagttttttttgtttgtttctttttcatggtattactgaaggtgtgtatactccctaatacacatttatgaaaatctacttgtttaggcttttatttatactcttctgatttatatt

SEQ ID NO: 129728 - DNA, 120 bp, Artificial Sequence
  ENSG00000102290_70 (sequence is synthesized)
attataattattatttcttatctttcttcttttatattttttggaaaccaaatttatagttagtttaggtaaactttttattatgaccattagaaactattttgaatgcttccaactggc

SEQ ID NO: 129729 - DNA, 120 bp, Artificial Sequence
  ENSG00000102290_71 (sequence is synthesized)
tggctcaattggccgggaaaacatgggagcaagagaagctgaaatatatttctgcaagaacctttctatattatgtgccaattaccacaccagatcaattttatgcagaggccttaaaat

SEQ ID NO: 129730 - DNA, 120 bp, Artificial Sequence; identical to SEQ ID NO: 107559
  ENSG00000102290_72 (sequence is synthesized)

SEQ ID NO: 129731 - DNA, 120 bp, Artificial Sequence
  ENSG00000102290_73 (sequence is synthesized)
tatgtgcacaaataaaaaaaattaatggcaattgtttagtgattgtaagtgatactttttaaagagtaaactgtgtgaaatttatactatccctgcttaaaatattaagatttttatgaa

SEQ ID NO: 129732 - DNA, 120 bp, Artificial Sequence
  ENSG00000102290_74 (sequence is synthesized)
atatgtatttatgtttgtattgtgggaagattcctcctctgtgatatcatacagcatctgaaagtgaacagtatcccaaagcagttccaaccatgctttggaagtaagaaggttgactat

SEQ ID NO: 129733 - DNA, 120 bp, Artificial Sequence; identical to SEQ ID NO: 107562
  ENSG00000102290_75 (sequence is synthesized)

SEQ ID NO: 129734 - DNA, 120 bp, Artificial Sequence
  ENSG00000102290_76 (sequence is synthesized)
tcacttctctccccacgccttcccctggttcaccccccttccttcccctttctccccctcggttaagtccctccccctcgccattcaaaagggctggctcggcactggctccttgcagtc

SEQ ID NO: 129735 - DNA, 120 bp, Artificial Sequence
  ENSG00000102290_77 (sequence is synthesized)
ggcgaactgtcggggcgggaggagccgtgagcagtagctgcactcagctgcccgcgcggcaaagaggaaggcaagccaaacagagtgcgcagagtggcagtgccagcggcgacacaggca

SEQ ID NO: 129736 - DNA, 120 bp, Artificial Sequence
  ENSG00000102290_78 (sequence is synthesized)
gcacaggcagcccgggctgcctgaatagcctcagaaacaacctcagcgactccggctgctctgcggactgcgagctgtggcggtagagcccgctacagcagtcgcagtctccgtggagcg

SEQ ID NO: 129737 - DNA, 120 bp, Artificial Sequence
  ENSG00000102290_79 (sequence is synthesized)
ggcggaagccttttttctccctttcgtttacctcttcattctactctaaaggcatcgttattaggaaaatcctgttgcgaataagaaggattccacagatcacataccggagaggttttg

SEQ ID NO: 129738 - DNA, 120 bp, Artificial Sequence
  ENSG00000102290_80 (sequence is synthesized)
cctcagctgctctcaactttgtaatcttgtgaagaagctgacaagcttggctgattgcagagcactatgaggactgaacgacagtgggttttaattcagatatttcaagtgttgtgcggg

SEQ ID NO: 129739 - DNA, 120 bp, Artificial Sequence
  ENSG00000102290_81 (sequence is synthesized)
attgaaatctgcagtgagatataactttctaggaacaacaaaattccattccccttccaaaaaatttcaatgattgtgatttcaaaattaggctaagatcattaattttgtaatctagat

SEQ ID NO: 129740 - DNA, 120 bp, Artificial Sequence
  ENSG00000102290_82 (sequence is synthesized)
ttcccattataaaagcaagcaaaaatcatcttaaaaatgatgtcctagtgaaccttgtgctttctttagctgtaatctggcaatggaaatttaaaatttatggaagagacagtgcagcac

SEQ ID NO: 129741 - DNA, 120 bp, Artificial Sequence
  ENSG00000102290_83 (sequence is synthesized)
aataacagagtactctcatgctgtttctctgtttgctctgaatcaacagccatgatgtaatataaggctgtcttggtgtatacacttatggttaatatatcagtcatgaaacatgcaatt

SEQ ID NO: 129742 - DNA, 120 bp, Artificial Sequence; identical to SEQ ID NO: 107518
  ENSG00000102290_84 (sequence is synthesized)

SEQ ID NO: 129743 - DNA, 120 bp, Artificial Sequence
  ENSG00000102290_85 (sequence is synthesized)
aacaaacaaaaaacaaaaccaaaacactctggttcagtgttttgaaaatattcactaacataatattgctgagaaaatcatttttattacccaccactctgcttaaaagttgagtgggcc

SEQ ID NO: 129744 - DNA, 120 bp, Artificial Sequence
  ENSG00000102290_86 (sequence is synthesized)
aagactctgtctcaaaaagaaaaaaatgttcaatgatagaaaataattttactaggtttttatgttgattgtactcatgctgttccactccttttaattattaaaaagttatttttggct

SEQ ID NO: 129745 - DNA, 120 bp, Artificial Sequence
  ENSG00000102290_87 (sequence is synthesized)
tatccaagtttctaacacaactttctaactatttttttattattattttcagttgatgtagaactttacaaaatctattgacttcaaagagggatcaaaacaatcatattctacagatgt

SEQ ID NO: 129746 - DNA, 120 bp, Artificial Sequence
  ENSG00000102290_88 (sequence is synthesized)
acccaatagatatatggattcaattaagtttggtagaagatgagaacaaaataactactgatttaggaaaattggatgcagaataataattatagtaggggcaattttgtctgtagatgg

SEQ ID NO: 129747 - DNA, 120 bp, Artificial Sequence
  ENSG00000102290_89 (sequence is synthesized)
cagtatgacaattcttgctagagaatatattgaaaaaaacttcaacacaaagggttgtagcactgtcctcagtaccattgtgtgcatgaggatcagaatagtctgggctagatacatcac

SEQ ID NO: 129748 - DNA, 120 bp, Artificial Sequence
  ENSG00000102290_90 (sequence is synthesized)
attaaagcttttcagaatctgataaatagctctaaatactaatgatattgagaagcctagcttcacttgggaaaatctgtggctgttcacagaaattcagcaccaagttattccccccat

SEQ ID NO: 129749 - DNA, 120 bp, Artificial Sequence
  ENSG00000102290_91 (sequence is synthesized)
actctaccaggccttcaggtcctcataaagaaaagtgtcgttttcagattaggaactcaaaattattttggtgcatcaaatctacagtcacacaatataacaagaatgggattagaaaaa

SEQ ID NO: 129750 - DNA, 120 bp, Artificial Sequence
  ENSG00000102290_92 (sequence is synthesized)
tgaaagcctactcattctcatctttaagccagagaatgaaatatatatgaggtctctggatagctatttaaatatttgcatatttatgcaaggtattttgagcccttcagaagacattct

SEQ ID NO: 129751 - DNA, 120 bp, Artificial Sequence
  ENSG00000102302_0 (sequence is synthesized)
aactgggtcccagtgccgctgtggctgcggctgcctctgcgaggctcccgcctccccaccccccttcccagggctccttcccgcccgccgccgccgagacccaggctgaagctggggagg

SEQ ID NO: 129752 - DNA, 120 bp, Artificial Sequence
  ENSG00000102302_1 (sequence is synthesized)
acggtggagcccggcccaggccgttctcctgcccccgcggctggagcatcgtctgggactactggctgaaggcgagccccgcagcccaagcgcagcgcacacgcgcgcccccggccaccg

SEQ ID NO: 129753 - DNA, 120 bp, Artificial Sequence
  ENSG00000102302_2 (sequence is synthesized)
ccgttctctcttccctcccctcctctcccctcccctctcctccgcccccggcctcggctgcggcgggaggaagaacgcttcccaaccagccaggagagcccagatctattcccattcggg

SEQ ID NO: 129754 - DNA, 120 bp, Artificial Sequence
  ENSG00000102302_3 (sequence is synthesized)
gagaaagaagagaccccgcacttggatccgaccgacttctcgccccggggccacggaagtggctcgccgtccaccggagagtccccgccgagcgtagccctccaaccctcgcccaaccgc

SEQ ID NO: 129755 - DNA, 80 bp, Artificial Sequence
  ENSG00000102302_4 (sequence is synthesized)
tccaaccctcgcccaaccgcagccgcatagacagcgctccccagcgggcccccggccccgccgagcccactccccgcgcg

SEQ ID NO: 129756 - DNA, 120 bp, Artificial Sequence
  ENSG00000102302_5 (sequence is synthesized)
gctgctactgccaccgctgccacggctgctggcccgggcccgggctgggggcttgagtctctgcagtggggctgagcccgcagtcccgccccccgatcctgaggccgctgctccgccggg

SEQ ID NO: 129757 - DNA, 80 bp, Artificial Sequence
  ENSG00000102302_6 (sequence is synthesized)
ctcctccgcccgcgcctccgccccaggagctggagccaagcggggagctcgggccccgcgcccaggcccggaccatgcat

SEQ ID NO: 129758 - DNA, 120 bp, Artificial Sequence
  ENSG00000102302_7 (sequence is synthesized)
ggagcccgaacacccggccacgaacccgccgggcgccgctccgccggcctgtgccgactcggaccctggagcctcggaacccggactgctggcgcgcaggggctcaggttcggctcttgg

SEQ ID NO: 129759 - DNA, 120 bp, Artificial Sequence
  ENSG00000102302_8 (sequence is synthesized)
cggcccactggatccccagtttgtcggaccctcggacaccagcctgggcgctgctccaggccaccgggtcttgccctgcggtcccagtccacagcaccaccgggccctgcgcttctctta

SEQ ID NO: 129760 - DNA, 120 bp, Artificial Sequence
  ENSG00000102302_9 (sequence is synthesized)
ccacctggagggctcgcagcctcggcctgggctgcaccagggaaaccggatcctggttaaaagtttgtcccttgaccctggccaaagcctagagcctcatccagaaggtccccagcggct

SEQ ID NO: 129761 - DNA, 120 bp, Artificial Sequence
  ENSG00000102302_10 (sequence is synthesized)
tcgctcagacccaggtcccccgactgaaacccctagccagcgtccttcaccactgaagcgggcaccgggcccgaagccacaggtgcccccaaagcccagctacctgcagatgccccggat

SEQ ID NO: 129762 - DNA, 120 bp, Artificial Sequence
  ENSG00000102302_11 (sequence is synthesized)
gccccccccactggagcccatcccccctccaccatcacgcccactgcctgccgacccccgagtggccaagggcctggctcccagggcagaggccagccccagttctgcagcagtatcctc

SEQ ID NO: 129763 - DNA, 120 bp, Artificial Sequence
  ENSG00000102302_12 (sequence is synthesized)
actgattgagaagtttgaaagagagcctgtgattgtcgcctcggatagaccagtccctggccccagcccaggtcccccagagccagtcatgttgccacagccaacctcgcagccaccagt

SEQ ID NO: 129764 - DNA, 120 bp, Artificial Sequence
  ENSG00000102302_13 (sequence is synthesized)
gccccagctccccgagggtgaggcctcccgctgcctgtttctgctggctcctgggccccgggacggtgagaaggtgcccaaccgggacagcggcattgatagcatcagctcgccatccaa

SEQ ID NO: 129765 - DNA, 120 bp, Artificial Sequence
  ENSG00000102302_14 (sequence is synthesized)
cagcgaggagacctgcttcgtcagtgatgacgggccccccagccacagcctctgccctgggccccctgccctggctagtgtgcctgttgccttggccgacccccaccggcctggctccca

SEQ ID NO: 129766 - DNA, 120 bp, Artificial Sequence
  ENSG00000102302_15 (sequence is synthesized)
agaggttgacagtgacctggaggaggaggacgacgaggaggaggaggaagagaaggacagagaaatcccagtgcccctgatggagagacaggagtctgtggagttgactgtgcagcaaaa

SEQ ID NO: 129767 - DNA, 120 bp, Artificial Sequence
  ENSG00000102302_16 (sequence is synthesized)
ggtgtttcacattgccaatgagctcctgcaaactgagaaggcctacgtttccaggctccatctcctggatcaggtgttctgtgcccggctgctggaagaagctcggaaccgcagttcctt

SEQ ID NO: 129768 - DNA, 120 bp, Artificial Sequence
  ENSG00000102302_17 (sequence is synthesized)
cccggccgacgttgtccacggcatcttctctaacatctgctccatctattgcttccaccagcagttcctgctgcctgagctagagaagcgcatggaggaatgggaccgctatccacgcat

SEQ ID NO: 129769 - DNA, 120 bp, Artificial Sequence
  ENSG00000102302_18 (sequence is synthesized)
cccccttcctcaagatgtatggtgagtatgtgaagaactttgaccgggccgtggagctggtcaacacctggacagagcgctccacccagtttaaagtcatcatccatgaggtgcagaagg

SEQ ID NO: 129770 - DNA, 120 bp, Artificial Sequence
  ENSG00000102302_19 (sequence is synthesized)
aggaagcctgtggcaacctgacattgcagcaccacatgctggagcctgtgcagcgcatcccccgctatgagcttcttctcaaggactatctgttaaagctgccccatggctccccggaca

SEQ ID NO: 129771 - DNA, 120 bp, Artificial Sequence
  ENSG00000102302_20 (sequence is synthesized)
gcaaggatgcccaaaagtctctggagctgatcgccacagcagcagagcactcgaatgctgccatccgcaaaatggagcgaatgcataagctgctgaaggtatatgagctgttagggggcg

SEQ ID NO: 129772 - DNA, 120 bp, Artificial Sequence
  ENSG00000102302_21 (sequence is synthesized)
aggaggacattgtcagccccaccaaagagctcataaaagaaggccacatccttaagctgtcagcaaagaatgggaccactcaagaccgatacctcatactattcaacgaccgcctccttt

SEQ ID NO: 129773 - DNA, 120 bp, Artificial Sequence
  ENSG00000102302_22 (sequence is synthesized)
actgcgtgcccaggctgcggctccttggccagaagtttagcgtgcgggcacgcattgatgtagatggcatggagctaaaggagagctccaacctcaatctgcctcgaaccttcctggtgt

SEQ ID NO: 129774 - DNA, 120 bp, Artificial Sequence
  ENSG00000102302_23 (sequence is synthesized)
caggaaagcagcgctccctcgagctccaggccaggactgaggaggagaagaaagactgggtccaggccatcaactccaccctcctgaagcatgaacagacgctggagactttcaaactgt

SEQ ID NO: 129775 - DNA, 120 bp, Artificial Sequence
  ENSG00000102302_24 (sequence is synthesized)
tgaactcaacaaacagggaagatgaagacaccccacccaactctccaaacgtggatcttgggaagcgggcacctacgcccatccgggaaaaggaagtcaccatgtgcatgcgctgccagg

SEQ ID NO: 129776 - DNA, 120 bp, Artificial Sequence
  ENSG00000102302_25 (sequence is synthesized)
agcccttcaattctatcaccaaacgcaggcaccactgcaaggcctgcgggcatgtggtttgtgggaagtgctccgagttccgggcccgcctcgtctatgacaacaaccgctccaaccgtg

SEQ ID NO: 129777 - DNA, 120 bp, Artificial Sequence
  ENSG00000102302_26 (sequence is synthesized)
tgtgcactgattgctatgtggccttgcacggggtgcctgggagcagtccagcctgcagccagcatacaccccagcgccggaggtccatcctggagaaacaggcctcagtggctgcagaga

SEQ ID NO: 129778 - DNA, 120 bp, Artificial Sequence
  ENSG00000102302_27 (sequence is synthesized)
acagcgtcatctgcagcttcctgcactacatggagaagggtggcaaaggatggcacaaggcatggttcgtggtccctgaaaatgaacccttggtgctgtatatctacggagcccctcagg

SEQ ID NO: 129779 - DNA, 120 bp, Artificial Sequence
  ENSG00000102302_28 (sequence is synthesized)
atgtgaaagcccagcgcagcctgcccctcattggcttcgaggtgggaccgcccgaggcaggggagcggcctgacagaaggcatgtcttcaagatcacccagagccacctcagctggtact

SEQ ID NO: 129780 - DNA, 120 bp, Artificial Sequence
  ENSG00000102302_29 (sequence is synthesized)
tcagccctgagacagaggaactacagcgacgctggatggctgtgcttggccgggcgggccgaggggacacgttctgcccggggcccacactgtctgaggacagggagatggaggaggcac

SEQ ID NO: 129781 - DNA, 120 bp, Artificial Sequence
  ENSG00000102302_30 (sequence is synthesized)
cggtggctgctttaggagccactgctgaaccccccgaatccccccagacccgagacaagacctagagggtttgggacaaactgggagcccccaccccacactctagttgcccatgtctga

SEQ ID NO: 129782 - DNA, 120 bp, Artificial Sequence
  ENSG00000102302_31 (sequence is synthesized)
ttgggggctctagccccttccctcccagctcagtcaatacttgaactcccatcacgggcactttcaatcccgaatgctgggtcttgggttttttaattcatcttttcacaaaacgtgggc

SEQ ID NO: 129783 - DNA, 120 bp, Artificial Sequence
  ENSG00000102302_32 (sequence is synthesized)
ttttaaaaaatatattcctacagtgatgtcaatttttattaatccctgtccccagggagggtgggagccgttgccagtcctacctgaattaggtcgtttttctccctcatccctcaatac

SEQ ID NO: 129784 - DNA, 120 bp, Artificial Sequence
  ENSG00000102302_33 (sequence is synthesized)
cctaccacagatcctgcctccacccagttccccacaaagcaccagaggtaggagacctggattcaagtgccagctctgccactgaccctggggccccgacccagccctgcctcctcagcc

SEQ ID NO: 129785 - DNA, 120 bp, Artificial Sequence
  ENSG00000102302_34 (sequence is synthesized)
agtgtcttcacacgtacaactccacgtggggtggcaactagacctctcctgcctctcccatggcttacagcttctacccggccccaaggctacccagtattttatcgtccagacccatgg

SEQ ID NO: 129786 - DNA, 120 bp, Artificial Sequence
  ENSG00000102302_35 (sequence is synthesized)
gccccaaggctacccagtattttatcgtccagacccatggcagggccagcgggcaggacagggaaacaggggggaggacaatggatactcagttttttgtgtttttttgtgtgttttttt

SEQ ID NO: 129787 - DNA, 120 bp, Artificial Sequence
  ENSG00000102309_0 (sequence is synthesized)
ggttcagcgttcaacaacaagcttccaagatgccgcccaaaggaaaaagtggttctggaaaagcggggaaagggggagcagcctctgggagtgacagtgctgacaagaaggctcaaggtc

SEQ ID NO: 129788 - DNA, 120 bp, Artificial Sequence
  ENSG00000102309_1 (sequence is synthesized)
ccaaaggtggtggcaatgcagtaaaggtcagacacattctatgtgaaaaacatggcaaaatcatggaagccatggaaaagttaaagtctgggatgagattcaatgaagtggccgcacagt

SEQ ID NO: 129789 - DNA, 120 bp, Artificial Sequence
  ENSG00000102309_2 (sequence is synthesized)
atagtgaagataaagccaggcaagggggtgacttgggttggatgaccagagggtccatggtgggaccatttcaagaagcagcatttgccttgcctgtaagtgggatggataagcctgtgt

SEQ ID NO: 129790 - DNA, 120 bp, Artificial Sequence
  ENSG00000102309_3 (sequence is synthesized)
ttacagacccaccggttaagacaaaatttggatatcatattattatggtcgaaggaagaaaataaaatcatatgaaagactgaataagttttatacattttgtttctttaaaaggtatta

SEQ ID NO: 129791 - DNA, 120 bp, Artificial Sequence
  ENSG00000102309_4 (sequence is synthesized)
catattcttttgagctggagctgcaaggaaatacaaaaatttttaaaaagaaaagatattggatgctccttgtattctgtgaaagctctaagtatgggtttgtaggtgtaagagagggtg

SEQ ID NO: 129792 - DNA, 120 bp, Artificial Sequence
  ENSG00000102309_5 (sequence is synthesized)
tctttctcaaagagaagtcaagcagactccctttaacctgtattctctttcctcccagaactatatctgactctcagtctgtcccataaattaattcagaaaccatcttcaggggaagca

SEQ ID NO: 129793 - DNA, 120 bp, Artificial Sequence
  ENSG00000102309_6 (sequence is synthesized)
gatatcaactcacactattcacacaactgaaaatattgggcatcaaatagattagtgtgtgagaatcataaaataagttcctagacaacatttgttttacatgttagtcaactctgatct

SEQ ID NO: 129794 - DNA, 120 bp, Artificial Sequence
  ENSG00000102309_7 (sequence is synthesized)
tccaggacaggtggtattagctccactgtcttaacatagtacgtggcacgttatgcctttcagtgttaactcctttctttttaaataaatgtttattggaggaaaaaagcactcagttgt

SEQ ID NO: 129795 - DNA, 120 bp, Artificial Sequence
  ENSG00000102309_8 (sequence is synthesized)
tccatgagttgttttgtactagactaaccgagtgctggttaaagggagggatgtcagcataaaaatgtcattccctcatcttcagtgtatgggttacattaagactgtcctttccagggc

SEQ ID NO: 129796 - DNA, 120 bp, Artificial Sequence
  ENSG00000102309_9 (sequence is synthesized)
caatgttctgtgcatctaaatttttaaaatttaaaatgccatatttatgacatataaaaaagtataaagattactaatataaatactatactgcttcaaaaataaaactttgccaacaca

SEQ ID NO: 129797 - DNA, 120 bp, Artificial Sequence
  ENSG00000102309_10 (sequence is synthesized)
ttggtatcatatttacaaaccaccccttaaagtggattattttgcagatggctgatctcatctattcaatgttgattctattagttccaatttcagaaggtgacattttctgactttgtc

SEQ ID NO: 129798 - DNA, 120 bp, Artificial Sequence
  ENSG00000102309_11 (sequence is synthesized)
cccttaagcacaaacaaaaactatggatttttgtttttgttttcagaaaagagaaagtacaaggtgtgcttggggaacagcaaggaaaccagacagatgtgggggcgggtttgtagggga

SEQ ID NO: 129799 - DNA, 120 bp, Artificial Sequence
  ENSG00000102309_12 (sequence is synthesized)
actgctggatgtacctcattaatttgttcatttgttcagcacccacagggtgccagtgaacgggctaggtgctggggatagagtggtgaacaagatgagccttatgcacctcacagtctc

SEQ ID NO: 129800 - DNA, 120 bp, Artificial Sequence
  ENSG00000102309_13 (sequence is synthesized)
caaaggaaaaagtggttctggaaaagcggggaaaggtagagcggccagagcgatcaaggagaatgggggcgggtgaggagcgaagggagggaacagacagtccatctccggagtccggga

SEQ ID NO: 129801 - DNA, 120 bp, Artificial Sequence
  ENSG00000102309_14 (sequence is synthesized)
cctccacagaagaaacacagaagtagggatcattcctttgttcaaccattggttgtagcgatattttggtttaaagatctcaaaagcagaaatgtccaacttgtaaatagtagaataagg

SEQ ID NO: 129802 - DNA, 120 bp, Artificial Sequence
  ENSG00000102309_15 (sequence is synthesized)
gtcatctatgtcaaaacctatgcatgaccaaacttgcacggctaacttcaaagtccagcagtgttgagagtacttatgtgttcagtctagttagacttcttctacctatttgtccttatt

SEQ ID NO: 129803 - DNA, 120 bp, Artificial Sequence
  ENSG00000102309_16 (sequence is synthesized)
gagcctattcctgtattgctcttaggaatatacctcgtaaccttagcaaaatgttgggaaattctctcaagctacagtagaactgttccctcttctgggccacttgatatcacttatctt

SEQ ID NO: 129804 - DNA, 120 bp, Artificial Sequence
  ENSG00000102309_17 (sequence is synthesized)
cctctataatcttctccttcccagctagccactcacaaccccgccatgggcctcagaattgctaaagggacatcagaccatactacacatcattagatctcaatgaagaacacctctagt

SEQ ID NO: 129805 - DNA, 120 bp, Artificial Sequence
  ENSG00000102309_18 (sequence is synthesized)
tggcccgtctctttgtgaggtgccacccttgacatcaagtgcaggcctcgacgttgttggcatttcagagccttggcagaagttggataaattggcgggaagtgatgctgccagctggag

SEQ ID NO: 129806 - DNA, 120 bp, Artificial Sequence
  ENSG00000102309_19 (sequence is synthesized)
agaaatggtgtgtgtgagtccctcaccttcccagaggtttcccaggggaagcaacgtttcagctgagacctgaaggatggatgacagtccaccagaaaaaagttagtggagcggggacaa

SEQ ID NO: 129807 - DNA, 120 bp, Artificial Sequence
  ENSG00000102309_20 (sequence is synthesized)
aaactgtccaaagagtctgaagagaaaagggaacagggtgaatttgaggccctacaagaaaaacaggagaccattcaacaggagacgcccagggagcaggtggctttgtgggcctgatgt

SEQ ID NO: 129808 - DNA, 120 bp, Artificial Sequence
  ENSG00000102309_21 (sequence is synthesized)
ccaagaaagaagtcgtggtggtaaacagagacttgggattgcaagctactgttgtctttctattgaaaaaatagctgagcaccacactagggaggccttgcaaggacagcccaaagaatt

SEQ ID NO: 129809 - DNA, 120 bp, Artificial Sequence
  ENSG00000102309_22 (sequence is synthesized)
tgaacttgattctacaggcagtgattttgaacaagaggttttgaagagaacgtgacacacgtcaagctgagctctagggagtgggcagcagcctgcagaagagggactaggctaggagca

SEQ ID NO: 129810 - DNA, 120 bp, Artificial Sequence
  ENSG00000102309_23 (sequence is synthesized)
cagaaagtagcccacggcagaggtagcagaaggaatggaggagtgcccatgtgaggggtactgaggtggcacacttgccagaatcagggcagcctgcttggtctcataccagctggaacc

SEQ ID NO: 129811 - DNA, 120 bp, Artificial Sequence
  ENSG00000102309_24 (sequence is synthesized)
agttcctaccagctcccaagggctaattgttaaactttcaggaattttctcagcattcattaaaaatgaaaaaaagtatcaatattaaaaatatttttgctggacatggtgtctcaggcc

SEQ ID NO: 129812 - DNA, 79 bp, Artificial Sequence
  ENSG00000102309_25 (sequence is synthesized)
caatcctgcctcttttttgtttgttttgtttttagagacagggtcttgctttgtcacccaggttggagtgcagtggtgc

SEQ ID NO: 129813 - DNA, 120 bp, Artificial Sequence
  ENSG00000102309_26 (sequence is synthesized)
gtgcagtggtgcaatcatagctcactgccaccctgaactcctgagctcaagggatcctccttcctcagcctcccaaatagctgggaatacaggcacatacccccttgcctgactaatttt

SEQ ID NO: 129814 - DNA, 61 bp, Artificial Sequence
  ENSG00000102309_27 (sequence is synthesized)
gatcctccttcctcagcctcccaaatagctgggaatacaggcacatacccccttgcctgac

SEQ ID NO: 129815 - DNA, 120 bp, Artificial Sequence
  ENSG00000102309_28 (sequence is synthesized)
cgccgagggactgcagagccacccacccccgtggctcctactgcgcacgcgtgaaaaaagccaggttgaggggaacgggggagcttcgggcgtagagtgtggggagtgggggatctggtg

SEQ ID NO: 129816 - DNA, 120 bp, Artificial Sequence
  ENSG00000102309_29 (sequence is synthesized)
caaattagggtgcgtgaaagaagtcacaaaaagcgcagaggccaggcttcccgccctaatccggcctttgtctccgcccctctgcctttgtttcggcccaagcgtcttattggtcagaca

SEQ ID NO: 129817 - DNA, 120 bp, Artificial Sequence
  ENSG00000102309_30 (sequence is synthesized)
tcttcagccccattggtccaagagccaaaggacggggtctgccccaagctgtgcctgcttccggagccgcaataagaacggtcaattgagatgcggctttcaggcatttgtttaggacat

SEQ ID NO: 129818 - DNA, 120 bp, Artificial Sequence
  ENSG00000102309_31 (sequence is synthesized)
tgttagcgtattttgtgtggcccaagataattcttccattgtggcccagggaagctgaaaggttggatacccttgttgtaaagtgtctggccgagttcccttttgaagtgtggcgttatg

SEQ ID NO: 129819 - DNA, 120 bp, Artificial Sequence
  ENSG00000102309_32 (sequence is synthesized)
atggaaatatccactccggttgtgtgttggacctttctgtaaacatggaggtgcagtttaaatgagtacctgtcatctcttctctaaagggggagcagcctctgggagtgacagtgctga

SEQ ID NO: 129820 - DNA, 120 bp, Artificial Sequence
  ENSG00000102312_0 (sequence is synthesized)
tgacagatctatccatctggccatccatccgtgggggtctgcaatggccacctttagccgccaggaatttttccagcagctactgcaaggctgtctcctgcctactgcccagcagggcct

SEQ ID NO: 129821 - DNA, 120 bp, Artificial Sequence
  ENSG00000102312_1 (sequence is synthesized)
tgaccagatctggctgctccttgccatctgcctcgcctgccgcctcctctggaggctcgggttgccatcctacctgaagcatgcaagcaccgtggcaggcgggttcttcagcctctacca

SEQ ID NO: 129822 - DNA, 120 bp, Artificial Sequence
  ENSG00000102312_2 (sequence is synthesized)
cttcttccagctgcacatggtttgggtcgtgctgctcagcctcctgtgctacctcgtgctgttcctctgccgacattcctcccatcgaggcgtcttcctatccgtcaccatcctcatcta

SEQ ID NO: 129823 - DNA, 120 bp, Artificial Sequence
  ENSG00000102312_3 (sequence is synthesized)
cctactcatgggtgagatgcacatggtagacaccgtgacatggcacaagatgcgaggggcacagatgattgtggccatgaaggcagtgtctctgggcttcgacctggaccggggcgaggt

SEQ ID NO: 129824 - DNA, 120 bp, Artificial Sequence
  ENSG00000102312_4 (sequence is synthesized)
gggtacggtgccctcgccagtggagttcatgggctacctctacttcgtgggcaccatcgtcttcgggccctggatatccttccacagctacctacaagctgtccaaggccgcccactgag

SEQ ID NO: 129825 - DNA, 120 bp, Artificial Sequence
  ENSG00000102312_5 (sequence is synthesized)
ctgccggtggctgcagaaggtggcccggagcctggcactggccctgctgtgccttgtgctgtccacttgcgtgggcccctacctcttcccgtacttcatccccctcaacggtgaccgcct

SEQ ID NO: 129826 - DNA, 120 bp, Artificial Sequence
  ENSG00000102312_6 (sequence is synthesized)
ccttcgcaacaagaaacgcaaagccaggggcaccatggtaaggtggctgcgagcctacgagagtgctgtctccttccacttcagcaactattttgtgggctttctttccgaggccacggc

SEQ ID NO: 129827 - DNA, 120 bp, Artificial Sequence
  ENSG00000102312_7 (sequence is synthesized)
tgtggagctgcctcggtcaatggtggaagttgtcacaagctggaacctgcccatgtcttattggctaaataactatgttttcaagaatgctctccgcctggggaccttctcggctgtgct

SEQ ID NO: 129828 - DNA, 120 bp, Artificial Sequence
  ENSG00000102312_8 (sequence is synthesized)
ggtcacctatgcagccagcgccctcctacatggcttcagtttccacctggctgcggtcctgctgtccctggcttttatcacttacgtggagcatgtcctccggaagcgcctggctcggat

SEQ ID NO: 129829 - DNA, 120 bp, Artificial Sequence
  ENSG00000102312_9 (sequence is synthesized)
cctcagtgcctgtgtcttgtcaaagcggtgcccgccagactgttcgcaccagcatcgcttgggcctgggggtgcgagccttaaacttgctctttggagctctggccatcttccacctggc

SEQ ID NO: 129830 - DNA, 120 bp, Artificial Sequence
  ENSG00000102312_10 (sequence is synthesized)
ctacctgggctccctgtttgatgtcgatgtggatgacaccacagaggagcagggctacggcatggcatacactgtccacaagtggtcagagctcagctgggccagtcactgggtcacttt

SEQ ID NO: 129831 - DNA, 120 bp, Artificial Sequence
  ENSG00000102312_11 (sequence is synthesized)
tggatgctggatcttctaccgtctcataggctgaggcacatctgtggaccctcataaccctcttaagacccctctcagggtgccactgatgggggatgagggaaggccctctctctactc

SEQ ID NO: 129832 - DNA, 120 bp, Artificial Sequence
  ENSG00000102312_12 (sequence is synthesized)
cacacacacacacacacacaaaatcacaccattttcatgcctgtcaatccccaccccaccacaaggcaggaagggggtggtgcctgctggggcctagagggggatgcttggggaaacaga

SEQ ID NO: 129833 - DNA, 120 bp, Artificial Sequence
  ENSG00000102312_13 (sequence is synthesized)
tgcctgctggggcctagagggggatgcttggggaaacagagaaggggagatccagggcctccccgccttccttcttcctttttatatacaatttgttattgtcaaataaaagtaggaaat

SEQ ID NO: 129834 - DNA, 120 bp, Artificial Sequence
  ENSG00000102312_14 (sequence is synthesized)
gcgccgctctgggagccgctgctggtcccggccttgcggcctgcgggggaggctgcccggaggaggcagcggcggcggcagcgcgtcctcggtccccaggaccacggcttctttcctgcc

SEQ ID NO: 129835 - DNA, 120 bp, Artificial Sequence
  ENSG00000102312_15 (sequence is synthesized)
tgggagtttggggagggcaaatcaagggtaattcccaggtttttgccctgaggaactggaaacgtggagttgacattgactgaacttgatgagactgggaggagcaggctgggaagatcg

SEQ ID NO: 129836 - DNA, 120 bp, Artificial Sequence
  ENSG00000102312_16 (sequence is synthesized)
ggagctgggctttgggcatgtgaagtttgaggccatctaaggactttatcctgggggctccaacaggttgtgggtattctcatcctgctgatggccctccaggaggggctgggggacttt

SEQ ID NO: 129837 - DNA, 120 bp, Artificial Sequence
  ENSG00000102312_17 (sequence is synthesized)
gcggtgcccgccagactgttcgcaccagcatcgcttggtgagggttcagcctgggcaaccttgtgcccaacactccctgtcaaaaatgttccttctatctctatcttgtatgtgtctcag

SEQ ID NO: 129838 - DNA, 120 bp, Artificial Sequence
  ENSG00000102312_18 (sequence is synthesized)
cggcttctttcctgccagagcgactctaccttggaaaccagggattccccttcccgtcgcccgccccatttgatatatgggcctgaaatgtatgccatcccatcaccatcggactggact

SEQ ID NO: 129839 - DNA, 120 bp, Artificial Sequence
  ENSG00000102312_19 (sequence is synthesized)
gagccgctgctggtcccggccttgcggcctgcgggggaggctgcccggaggaggcagcggcggcggcagcgcgtcctcggtccccaggaccacggcttctttcctgccaggtcacaggct

SEQ ID NO: 129840 - DNA, 120 bp, Artificial Sequence
  ENSG00000102312_20 (sequence is synthesized)
gtgcgtgtgcatgccgaacacccacatgcacacagttggtggctcagtctgatgtacctgacttctcacgccttcccccagtcctccagtaccgtgcctctacatgggctgggcagcccc

SEQ ID NO: 129841 - DNA, 120 bp, Artificial Sequence
  ENSG00000102312_21 (sequence is synthesized)
tgctccttgccatctgcctcgcctgccgcctcctctggaggctcgtgagatgcacatggtagacaccgtgacatggcacaagatgcgaggtggctgcgagcctacgagagtgctgtctcc

SEQ ID NO: 129842 - DNA, 120 bp, Artificial Sequence
  ENSG00000102312_22 (sequence is synthesized)
ctcatgggtgagatgcacatggtagacaccgtgacatggcacaagatgcgaggtaggtagccctgcccctctcacctgcccaacccccctgccccactcctcgtctcctaactgccccca

SEQ ID NO: 129843 - DNA, 120 bp, Artificial Sequence
  ENSG00000102312_23 (sequence is synthesized)
ccctgtgcctttcctctcctgcttttctccctcacctgcccaccccactggacgtgcagacctcacattactcttgggtccgtgtctctttccaccgtgcattttcccgaagtctgtctg

SEQ ID NO: 129844 - DNA, 120 bp, Artificial Sequence
  ENSG00000102312_24 (sequence is synthesized)
tctcgtgtcatgtatgtgcctgactctctggagtaagggcatctatctgtcctgggcttccttgcccacctgcctatctgtcccatgcccacctatccatccttgtgcccgcttttccta

SEQ ID NO: 129845 - DNA, 120 bp, Artificial Sequence
  ENSG00000102312_25 (sequence is synthesized)
ccacatctcacctggtgcacctcctccttgccatgctgatctgctctctgcccatccacttgaccatgggcaccacacataggggcacagatgattgtggccatgaaggcagtgtctctg

SEQ ID NO: 129846 - DNA, 120 bp, Artificial Sequence
  ENSG00000102313_0 (sequence is synthesized)
agatcttctggatgtgaacaacagatccaggccagaggtggcatcatgtctgggtggaggtacctcatctgtgtcagctttttgctgaccattcttcttgaactgacataccagggaccc

SEQ ID NO: 129847 - DNA, 120 bp, Artificial Sequence
  ENSG00000102313_1 (sequence is synthesized)
cctgtccccgcttcatcaagcacaaagttgttaatgacaagctattctatgcgctccacggtggtgtctcgctatgcccacaccttggtcacctctgtcctgtttaatccacatgctgaa

SEQ ID NO: 129848 - DNA, 120 bp, Artificial Sequence
  ENSG00000102313_2 (sequence is synthesized)
gcccatgaagccatctttgacctggatctgcctcatcttgcctttatctccaatttcactatgaccatcaacaataaagtctacattgcagaagtcaaagagaagcaccaggcaaagaaa

SEQ ID NO: 129849 - DNA, 120 bp, Artificial Sequence
  ENSG00000102313_3 (sequence is synthesized)
atctatgaagaagcccatcagcagggaaagacagctgctcatgtaggcatcagggaccgggaatcagagaagttccgcatctccaccagcctggcagcaggcacagaggtgactttttcc

SEQ ID NO: 129850 - DNA, 120 bp, Artificial Sequence
  ENSG00000102313_4 (sequence is synthesized)
ctggcctatgaggaactgcttcagcggcaccagggccagtaccagctggtggtgagcctgaggcctggccaattggtgaagaggctgagcatagaggttacagtgtcagaaaggacaggc

SEQ ID NO: 129851 - DNA, 120 bp, Artificial Sequence
  ENSG00000102313_5 (sequence is synthesized)
atctcctatgtgcacataccacccctgaggaccggccgtctgcgcaccaatgcccatgcaagtgaggtggattcacccccatccaccaggatcgagaggggagagacctgtgtccgaatc

SEQ ID NO: 129852 - DNA, 120 bp, Artificial Sequence
  ENSG00000102313_6 (sequence is synthesized)
acctactgcccgacattgcaagaccagtcgtccatctctgggtcaggcatcatggctgacttcctggttcagtacgatgtggtcatggaggacatcattggagacgtgcagatttacgat

SEQ ID NO: 129853 - DNA, 120 bp, Artificial Sequence
  ENSG00000102313_7 (sequence is synthesized)
gactatttcattcactactttgcccccagaggccttccacctatggagaagaatgtggtttttgttattgacgtaagcagctccatgtttggtaccaagatggaacagactaaaacggcc

SEQ ID NO: 129854 - DNA, 120 bp, Artificial Sequence
  ENSG00000102313_8 (sequence is synthesized)
atgaatgtgatcctcagtgaccttcaagccaatgactacttcaacatcatctccttttctgacacagttaatgtttggaaagctggaggctcaatccaggccaccatccagaatgtccac

SEQ ID NO: 129855 - DNA, 120 bp, Artificial Sequence
  ENSG00000102313_9 (sequence is synthesized)
agtgccaaggactacctgcattgcatggaagccgatggctggacagacgtcaactcagctctgctggcagctgcttcagtgctgaaccatagcaaccaggagcctgggaggggccccagt

SEQ ID NO: 129856 - DNA, 120 bp, Artificial Sequence
  ENSG00000102313_10 (sequence is synthesized)
gtggggaggatccctcttatcatcttcctgacggatggggagcccacggccggcgtgacgacccccagtgtgatcctctccaatgtccgtcaggcgctaggccacagggtatcccttttc

SEQ ID NO: 129857 - DNA, 120 bp, Artificial Sequence
  ENSG00000102313_11 (sequence is synthesized)
agcttggcctttggggatgatgctgactttacactgctgcgccgcctgtccctggaaaaccggggaatagcccggcgcatatatgaggacactgatgcggccctacagctgaagggcctc

SEQ ID NO: 129858 - DNA, 120 bp, Artificial Sequence
  ENSG00000102313_12 (sequence is synthesized)
tatgaggagatctccatgcctctgctggcagatgtgcgtctgaactacctgggtggcttggttggggcctccccttgggccgttttccccaactactttggtggctctgagctggtggtg

SEQ ID NO: 129859 - DNA, 120 bp, Artificial Sequence
  ENSG00000102313_13 (sequence is synthesized)
gcaggacaggtgcagccaggcaaacaggaactgggcatccacctggcagcccgtggccccaaggatcagcttcttgtggcccaccacagtgaaggggccaccaacaacagccagaaggcc

SEQ ID NO: 129860 - DNA, 120 bp, Artificial Sequence
  ENSG00000102313_14 (sequence is synthesized)
tttggttgcccaggggagccagcccccaatgtggcccacttcatccgccgcctctgggcctatgtcaccattggagaactgctggatgcacacttccaagctcgtgacaccaccactcgc

SEQ ID NO: 129861 - DNA, 120 bp, Artificial Sequence
  ENSG00000102313_15 (sequence is synthesized)
cacctgctggctgccaaagtcctcaacctgtcccttgaatacaactttgtcacacctctgacttcactggtcatggtgcaacccaaacaggccagtgaggagaccaggagacagacttcc

SEQ ID NO: 129862 - DNA, 120 bp, Artificial Sequence
  ENSG00000102313_16 (sequence is synthesized)
acctctgctgggccagacaccatcatgccctcatccagcagcaggcatggcctaggggtaagcacagctcagccagccttggtgcccaaggtcatctcccccaaatcaaggcctgtgaaa

SEQ ID NO: 129863 - DNA, 120 bp, Artificial Sequence
  ENSG00000102313_17 (sequence is synthesized)
ccaaagttctacttatcctcaactactactgcctctaccaagaagatgctaagttccaaagagctggagccattgggagagagccctcataccctgtcaatgcccacatacccaaaggcc

SEQ ID NO: 129864 - DNA, 120 bp, Artificial Sequence
  ENSG00000102313_18 (sequence is synthesized)
aaaattccagcacaacaggattctggcaccttggcccagccaactctcaggacaaaacctaccattcttgtgccctcaaattctggtactctgttgcctctgaagcccggctctctatca

SEQ ID NO: 129865 - DNA, 120 bp, Artificial Sequence
  ENSG00000102313_19 (sequence is synthesized)
caccagaatcctgatatattacccacgaactccaggacacaagtcccacctgtgaaacctggcatcccagcctcgcccaaagctgacactgtgaaatgtgttactccactgcattccaaa

SEQ ID NO: 129866 - DNA, 120 bp, Artificial Sequence
  ENSG00000102313_20 (sequence is synthesized)
ggcacctaaaggcctgccacagtcaagacctggagtctctacacttcaggttcccaagtacccactacacaccagacctagggttcctgctcccaagacccgaaacaacatgccacacct

SEQ ID NO: 129867 - DNA, 120 bp, Artificial Sequence
  ENSG00000102313_21 (sequence is synthesized)
ggggcctggaatcctcttgtccaagacccctaaaatcttattatctcttaaaccgagtgccccaccacaccaaatttccacaagcatatcactttccaagcctgagaccccaaaccccca

SEQ ID NO: 129868 - DNA, 120 bp, Artificial Sequence
  ENSG00000102313_22 (sequence is synthesized)
tatgcctcaaaccccactacctcctagacctgacagaccaaggcccccacttcctgagagcctaagcacattcccaaatacaatctcaagttccacaggtcccagcagtaccacaaccac

SEQ ID NO: 129869 - DNA, 120 bp, Artificial Sequence
  ENSG00000102313_23 (sequence is synthesized)
ctctgtccttggagaacccctccccatgccctttactcccactctgccccctggaaggttctggcatcagtatgacctcctcccgggtccccagaggaccaggcaagttctgggaccatc

SEQ ID NO: 129870 - DNA, 120 bp, Artificial Sequence
  ENSG00000102313_24 (sequence is synthesized)
taggccaggagttccaacaatgagcctactcaacagctccaggcctacaccagaaggcagccctccaaacctgccaatcttgctgccttctagcatcctccctgaggccatcagtctgct

SEQ ID NO: 129871 - DNA, 120 bp, Artificial Sequence
  ENSG00000102313_25 (sequence is synthesized)
ccttctccctgaggagctagagctgctgtctgaatcaatggtggaatccaagttcgtggagtccttgaacccaccagctttctataccttcctcactcctgatgaagatggaagtccaaa

SEQ ID NO: 129872 - DNA, 120 bp, Artificial Sequence
  ENSG00000102313_26 (sequence is synthesized)
ctgggatggcaattctgaggagatcctgggaggagctggaggcagcatggaatctcaaggaagttctgtggggttagcaaaaggcacattgcctagcatcttcaccttctcctcctcagt

SEQ ID NO: 129873 - DNA, 120 bp, Artificial Sequence
  ENSG00000102313_27 (sequence is synthesized)
ggacggggacccccactttgtgatccaaatcccacactcagaagagaagatctgcttcacactgaatgggcaccctggggacttgctgcagctcatagaggacccaaaggcagggctgca

SEQ ID NO: 129874 - DNA, 120 bp, Artificial Sequence
  ENSG00000102313_28 (sequence is synthesized)
tgtgagtgggaagctgcttggcgcaccaccaaggccgggccacaaggaccagactcgcacctacttccagatcatcacagtcactacagacaaaccccgggcctatactatcaccatcag

SEQ ID NO: 129875 - DNA, 120 bp, Artificial Sequence
  ENSG00000102313_29 (sequence is synthesized)
ccgcagttctatatctttgcgaggcgagggtaccttgcgcctgtcctgggaccaacctgccctgctgaagaggccccagctggagctctatgtggctgctgcagcccgccttaccctccg

SEQ ID NO: 129876 - DNA, 120 bp, Artificial Sequence
  ENSG00000102313_30 (sequence is synthesized)
ccttgggccctaccttgagttcctagtcctccgacaccgctacaggcatcccagtaccctgcaactaccccacctggggttctacgtggccaatggctcaggcctcagcccctcagcccg

SEQ ID NO: 129877 - DNA, 120 bp, Artificial Sequence
  ENSG00000102313_31 (sequence is synthesized)
tggcctgatagggcagttccagcacgcagacatccgactggtgacaggacctatggggccatgcttacgaaggcaccatggcccagatgtgcctgtgattctaggcaagaggctgctgaa

SEQ ID NO: 129878 - DNA, 120 bp, Artificial Sequence
  ENSG00000102313_32 (sequence is synthesized)
ggactcaccaaggctgctgccccgctgggcttcctgctggctggtgaagcgctctcatgtagagctgcttctgggccacccctacctctcctatgtcctgtgatggcttctgaattccag

SEQ ID NO: 129879 - DNA, 120 bp, Artificial Sequence
  ENSG00000102313_33 (sequence is synthesized)
agccaggagacctgaatttgggagatccagaaaccagggcatggggtgagccagggacagagacccaaggacatggaagcacacacagggacacacagactcacgcatgttctaaggaac

SEQ ID NO: 129880 - DNA, 120 bp, Artificial Sequence
  ENSG00000102313_34 (sequence is synthesized)
acatatacaagggtatacaaacacatagacatgcagagacatagagtcagggactcctgcatcttcatggtccttcacatctccagtctcaccctctccaaatccatgctcctcaccagc

SEQ ID NO: 129881 - DNA, 120 bp, Artificial Sequence
  ENSG00000102313_35 (sequence is synthesized)
cctacaagccacttttgtaaaacgaaaaaatgatcagtagttctgctcacagctttccctaactcctatggcatattcaaggctctcagagtttccctaacaaaccatgctcactcctac

SEQ ID NO: 129882 - DNA, 120 bp, Artificial Sequence
  ENSG00000102313_36 (sequence is synthesized)
cactggaccattgcatgtgcttttccttctgcatgaaacactcttcctttgttcctgtaggtgagtataattcatccttcaaatcctagttgttacctcttctaggaggcctttcctgat

SEQ ID NO: 129883 - DNA, 120 bp, Artificial Sequence
  ENSG00000102313_37 (sequence is synthesized)
gcctgccctagattgagtttggtcctgtcctctgggttcctatagcccacccccaaccctccacgctcacagtatttatactgtgtagtaatcatctgtttacttgtctggatccctgac

SEQ ID NO: 129884 - DNA, 120 bp, Artificial Sequence
  ENSG00000102313_38 (sequence is synthesized)
ttagactgtgagatctttgagggcaaggaccttttctgaatcatctatgtatccccagtgcctctcacataataggtgcttagtaaatatttgttaaaagaatgaattaattaattaaca

SEQ ID NO: 129885 - DNA, 120 bp, Artificial Sequence
  ENSG00000102313_39 (sequence is synthesized)
aaaaaggatcccataacatagcaatagacacacatatatacatactcacaaccaaagacacaggatcacacccggaaaaacagtgacaagggcacagatatggatggatagagggacaga

SEQ ID NO: 129886 - DNA, 120 bp, Artificial Sequence
  ENSG00000102313_40 (sequence is synthesized)
catttatggaaacacaggaatcacaaaacaaacatggacataggggtatagagacataaaaagatggggacagggagccagagtggcagaatcagggacataaactcagagaaaaaggaa

SEQ ID NO: 129887 - DNA, 120 bp, Artificial Sequence
  ENSG00000102313_41 (sequence is synthesized)
gacgtgcagcatcctcgtgttcctgaaacactgccgaaacacctcctccttgatgactccagtccaccaacaattcgtttgtctgccctggactaaaaatgacctatggttgaacgtttt

SEQ ID NO: 129888 - DNA, 120 bp, Artificial Sequence
  ENSG00000102313_42 (sequence is synthesized)
tactcattgactctgacaactcagaagtgagtcggacacagccactcatctccctctgccatcaccccatcctgaagcacccagatacacagagccttgtcggtcatcaaatgttctagg

SEQ ID NO: 129889 - DNA, 120 bp, Artificial Sequence
  ENSG00000102313_43 (sequence is synthesized)
tgctgtgtttgagtgtgtcatggattctgcagaggtgccagtggaggagggtttcagggccgtcatcctaaaggagttggaatttaagtaagcatgggaaaaatgaattggatatatctg

SEQ ID NO: 129890 - DNA, 120 bp, Artificial Sequence
  ENSG00000102313_44 (sequence is synthesized)
caagtcagtcagtcaggtgaagggaaagacatgcagagagaaggaacagcatgtgcagaggcacagaggtgtggctcagtctgttgtgcaggaggaataaaagttattctcctgccagga

SEQ ID NO: 129891 - DNA, 120 bp, Artificial Sequence
  ENSG00000102316_0 (sequence is synthesized)
gcgggaccacttccggcctagagaggggagggcagtctccgagtttcggaggggcttggagtgagtggacgcactcgggaattgtaggaggacgaggctcagctcttgccaggccaaatt

SEQ ID NO: 129892 - DNA, 120 bp, Artificial Sequence
  ENSG00000102316_1 (sequence is synthesized)
gagacatgtctgacacaagcgagagtggtgcaggtctaactcgcttccaggctgaagcttcagaaaaggacagtagctcgatgatgcagactctgttgacagtgacccagaatgtggagg

SEQ ID NO: 129893 - DNA, 120 bp, Artificial Sequence
  ENSG00000102316_2 (sequence is synthesized)
tcccagagacaccgaaggcctcaaaggcactggaggtctcagaggatgtgaaggtctcaaaagcctctggggtctcaaaggccacagaggtctcaaagaccccagaggctcgggaggcac

SEQ ID NO: 129894 - DNA, 120 bp, Artificial Sequence
  ENSG00000102316_3 (sequence is synthesized)
ctgccacccaggcctcatctactactcagctgactgatacccaggttctggcagctgaaaacaagagtctagcagctgacaccaagaaacagaatgctgacccgcaggctgtgacaatgc

SEQ ID NO: 129895 - DNA, 120 bp, Artificial Sequence
  ENSG00000102316_4 (sequence is synthesized)
ctgccactgagaccaaaaaggtcagccatgtggctgatacaaaggtcaatacaaaggctcaggagactgaggctgcaccctctcaggccccagcagatgaacctgagcctgagagtgcag

SEQ ID NO: 129896 - DNA, 120 bp, Artificial Sequence
  ENSG00000102316_5 (sequence is synthesized)
ctgcccagtctcaggagaatcaggatactcggcccaaggtcaaagccaagaaagcccgaaaggtgaagcatctggatggggaagaggatggcagcagtgatcagagtcaggcttctggaa

SEQ ID NO: 129897 - DNA, 120 bp, Artificial Sequence
  ENSG00000102316_6 (sequence is synthesized)
ccacaggtggccgaagggtctcaaaggccctaatggcctcaatggcccgcagggcttcaaggggtcccatagccttttgggcccgcagggcatcaaggactcggttggctgcttgggccc

SEQ ID NO: 129898 - DNA, 120 bp, Artificial Sequence
  ENSG00000102316_7 (sequence is synthesized)
ggagagccttgctctccctgagatcacctaaagcccgtaggggcaaggctcgccgtagagctgccaagctccagtcatcccaagagcctgaagcaccaccacctcgggatgtggcccttt

SEQ ID NO: 129899 - DNA, 120 bp, Artificial Sequence
  ENSG00000102316_8 (sequence is synthesized)
gctaaagaccagacgaagattcccatcaagcgctcggacatgctgaaggacatcatcaaagaatacactgatgtgtaccccgaaatcattgaacgagcaggctattccttggagaaggta

SEQ ID NO: 129900 - DNA, 120 bp, Artificial Sequence
  ENSG00000102316_9 (sequence is synthesized)
tttgggattcaattgaaggaaattgataagaatgaccacttgtacattcttctcagcaccttagagcccactgatgcaggcatactgggaacgactaaggactcacccaagctgggtctg

SEQ ID NO: 129901 - DNA, 120 bp, Artificial Sequence
  ENSG00000102316_10 (sequence is synthesized)
ctcatggtgcttcttagcatcatcttcatgaatggaaatcggtccagtgaggctgtcatctgggaggtgctgcgcaagttggggctgcgccctgggatacatcattcactctttggggac

SEQ ID NO: 129902 - DNA, 120 bp, Artificial Sequence
  ENSG00000102316_11 (sequence is synthesized)
gtgaagaagctcatcactgatgagtttgtgaagcagaagtacctggactatgccagagtccccaatagcaatccccctgaatatgagttcttctggggcctgcgctcttactatgagacc

SEQ ID NO: 129903 - DNA, 120 bp, Artificial Sequence
  ENSG00000102316_12 (sequence is synthesized)
agcaagatgaaagtcctcaagtttgcctgcaaggtacaaaagaaggatcccaaggaatgggcagctcagtaccgagaggcgatggaagcggatttgaaggctgcagctgaggctgcagct

SEQ ID NO: 129904 - DNA, 120 bp, Artificial Sequence
  ENSG00000102316_13 (sequence is synthesized)
gaagccaaggctagggccgagattagagctcgaatgggcattgggctcggctcggagaatgctgccgggccctgcaactgggacgaagctgatatcggaccctgggccaaagcccggatc

SEQ ID NO: 129905 - DNA, 120 bp, Artificial Sequence
  ENSG00000102316_14 (sequence is synthesized)
caggcgggagcagaagctaaagccaaagcccaagagagtggcagtgccagcactggtgccagtaccagtaccaataacagtgccagtgccagtgccagcaccagtggtggcttcagtgct

SEQ ID NO: 129906 - DNA, 120 bp, Artificial Sequence
  ENSG00000102316_15 (sequence is synthesized)
ggtgccagcctgaccgccactctcacatttgggctcttcgctggccttggtggagctggtgccagcaccagtggcagctctggtgcctgtggtttctcctacaagtgagattttaggtat

SEQ ID NO: 129907 - DNA, 120 bp, Artificial Sequence
  ENSG00000102316_16 (sequence is synthesized)
agtggcataaacatgggctttggcgtcagacagccctgagcggggccccattgccccacccccgaggaaggcgagggggggtggcagggggctgcggaaaggggctgggctgggttgggc

SEQ ID NO: 129908 - DNA, 120 bp, Artificial Sequence
  ENSG00000102316_17 (sequence is synthesized)
taatcctgccagtctttctcttcaagccagggtgcatcctcagaaacctactcaacacagcactctaggcagccactatcaatcaattgaagttgacactctgcattaaatctatttgcc

SEQ ID NO: 129909 - DNA, 120 bp, Artificial Sequence
  ENSG00000102316_18 (sequence is synthesized)
gggaaaaggggcggggtcctcagagctgccgcgctggcacatcttcctggagaaggggagggtgcggctgcagagaattgagacttagaagctttgaattcctgtatctgagaacggagt

SEQ ID NO: 129910 - DNA, 120 bp, Artificial Sequence
  ENSG00000102316_19 (sequence is synthesized)
caagttggagaatgatgtggagagtgtgccaagacactgcttttggcattttattcctttctgtttgctggatgtcaattgacccttttattttctcttacttgtgttttcagatattgt

SEQ ID NO: 129911 - DNA, 120 bp, Artificial Sequence
  ENSG00000102316_20 (sequence is synthesized)
gacggtcctaggattgcatcagtctggtggtctggtggagcgggtggggtgctggactgggtagagggcccagggttctgacctgggtggatgatgggtgaatggtcctgaactctctgc

SEQ ID NO: 129912 - DNA, 120 bp, Artificial Sequence
  ENSG00000102317_0 (sequence is synthesized)
atgcgcaatgtggccccctaatggtggctgcgctgagccagctcctcagattaccaccttattggccgcctttctcagcttttctgtagttacccatattttgttcctctttcttgtcta

SEQ ID NO: 129913 - DNA, 120 bp, Artificial Sequence
  ENSG00000102317_1 (sequence is synthesized)
ttttctgtgctttttctctgctttccgtctcgctattttctcacatctccattttctttctccttcctgccaccattcttcatgttcttcccacaggacttgaactgccatgtcctctga

SEQ ID NO: 129914 - DNA, 120 bp, Artificial Sequence
  ENSG00000102317_2 (sequence is synthesized)
agaaggaaagctcttcgtgggagggctcaactttaacaccgacgagcaggcactggaagaccacttcagcagtttcggacctatctctgaggtggtcgttgtcaaggaccgggagactca

SEQ ID NO: 129915 - DNA, 120 bp, Artificial Sequence
  ENSG00000102317_3 (sequence is synthesized)
gcggtccaggggttttggtttcatcaccttcaccaacccagagcatgcttcagttgccatgagagccatgaacggagagtctctggatggtcgtcagatccgtgtggatcatgcaggcaa

SEQ ID NO: 129916 - DNA, 120 bp, Artificial Sequence
  ENSG00000102317_4 (sequence is synthesized)
gcagctactctagaggtggtggggaccagggctatgggagtggcaggtattatgacagtcgacctggagggtatggatatggatatggacgttccagagactataatggcagaaaccagg

SEQ ID NO: 129917 - DNA, 120 bp, Artificial Sequence
  ENSG00000102317_5 (sequence is synthesized)
gtggttatgaccgctactcaggaggaaattacagagacaattatgacaactgaaatgagacatgcacataatatagatacacaaggaataatttctgatccaggatcgtccttccaaatg

SEQ ID NO: 129918 - DNA, 120 bp, Artificial Sequence
  ENSG00000102317_6 (sequence is synthesized)
gctgtatttataaaggtttttggagctgcaccgaagcatcttattttatagtatatcaaccttttgtttttaaattgacctgccaaggtagctgaagaccttttagacagttccatcttt

SEQ ID NO: 129919 - DNA, 120 bp, Artificial Sequence
  ENSG00000102317_7 (sequence is synthesized)
ttttttaaattttttctgcctatttaaagacaaattatgggacgtttgtagaacctgagtatttttctttttaccagttttttagtttgagctcttaggtttattggagctagcaataat

SEQ ID NO: 129920 - DNA, 120 bp, Artificial Sequence
  ENSG00000102317_8 (sequence is synthesized)
tggttctggcaagtttggccagactgacttcaaaaaattaatgtgtatccagggacattttaaaaacctgtacacagtgtttattgtggttaggaagcaatttcccaatgtacctataag

SEQ ID NO: 129921 - DNA, 120 bp, Artificial Sequence
  ENSG00000102317_9 (sequence is synthesized)
cgagactccatctcaaaaaaaaaggaaatgtgtatcaagaacatgattatccagcggtattttctaattcagatcatcaaactgattatatagaagagttggctttaaaatgtttgcaaa

SEQ ID NO: 129922 - DNA, 120 bp, Artificial Sequence
  ENSG00000102317_10 (sequence is synthesized)
tgtctttttttttttaatactggaagaaaaaatattctgttgtgtctcatacagtgcttaggatgtctttcacagagcttattaaaaagatgaaacctgagaacaaactgctttattctt

SEQ ID NO: 129923 - DNA, 70 bp, Artificial Sequence
  ENSG00000102317_11 (sequence is synthesized)
attaaaaagatgaaacctgagaacaaactgctttattcttactcagcccattttgcaaattaaaagtggg

SEQ ID NO: 129924 - DNA, 120 bp, Artificial Sequence
  ENSG00000102317_12 (sequence is synthesized)
caagactctgtctcaaaaaaaaaaaaatggcacatcaacgagagggaggcttggagaatatttggttggtgggtgggcagggactgccagagggttaggtgtacattgaggcctgaggcc

SEQ ID NO: 129925 - DNA, 120 bp, Artificial Sequence
  ENSG00000102317_13 (sequence is synthesized)
aggcctgaggcctgctggaattgggtttccttaactggtctcttatcttagtcccattgttctgagaacataagcacctaatctcatggcgtgagctaatccctatcataaatagtggta

SEQ ID NO: 129926 - DNA, 120 bp, Artificial Sequence
  ENSG00000102317_14 (sequence is synthesized)
ccagttcattccttcccctgaaatgatgggggttgggcagagatgcactgaactcatctttgtgtatgagggccatgagagaggcctggtttgaaaacaatgctaagagctcagattcca

SEQ ID NO: 129927 - DNA, 120 bp, Artificial Sequence
  ENSG00000102317_15 (sequence is synthesized)
ggttaattggcatataaagccactgagaagagttggcaaagctctcagtcacggggatttgatcttttttggtgtgtgtgtgtcttgggtggtaaagtggtaattttgtaattctagctg

SEQ ID NO: 129928 - DNA, 120 bp, Artificial Sequence
  ENSG00000102317_16 (sequence is synthesized)
gtcttagttcctcagttctgctccctttagtcatggttctttctagtggctgtattgaggccccatgggtgttatccctccattggttctagtttggaacagaaaaatctgttgtattca

SEQ ID NO: 129929 - DNA, 120 bp, Artificial Sequence
  ENSG00000102317_17 (sequence is synthesized)
tggctttcacctggctaatactgagctaagttaccaccaggttgcaaactccaggacattattgtcctgagctgcctattcccttgctggtgcgttgtggaaccctgtattattagttcc

SEQ ID NO: 129930 - DNA, 120 bp, Artificial Sequence
  ENSG00000102317_18 (sequence is synthesized)
agtcctggaggcctgcctcctgagtttcccagctagttgggacaggccccaatatcccttcttcctgtaacccaaacagtcatgaatttgctttggcaggtggatggagacttgggaact

SEQ ID NO: 129931 - DNA, 120 bp, Artificial Sequence
  ENSG00000102317_19 (sequence is synthesized)
tccacctcacccactaagccaggcccaggctatggggcattgtggctaaccccaccaggtggatacttggtctgaggacgcatcttattctgggcctttagggagctaaggcagtgagaa

SEQ ID NO: 129932 - DNA, 120 bp, Artificial Sequence
  ENSG00000102317_20 (sequence is synthesized)
ttggcaggaggactgctgtgaatgccttgtaggtcgggggattggagggggtcctctgctccctgtctctcaggatggcaatgtacctctcacccccagtgtcagctgaggtaggatcca

SEQ ID NO: 129933 - DNA, 120 bp, Artificial Sequence
  ENSG00000102317_21 (sequence is synthesized)
taatcagtaatattcctgcaacaaaatgttcctaagtggaatcaatgaagaccaaaatttatttgtataacaactctaaacctgctctgctctgctgtgtttacaatgtgctttgtgatc

SEQ ID NO: 129934 - DNA, 120 bp, Artificial Sequence
  ENSG00000102317_22 (sequence is synthesized)
atccagcccagggagtcccagtctctggctgtctatctgctctaaggaagagagcccacagttctctatagtgccatagtctgtgatgaataaagttccagatttgaggtcaacccccga

SEQ ID NO: 129935 - DNA, 120 bp, Artificial Sequence
  ENSG00000102317_23 (sequence is synthesized)
ccacccttaaagtgcttgttggtctcctactttggtttgtcttcagcatccaactgatgcacatttgtcaagaacccactgaggctagaaaccccccaaacactcaaggtaccttgagaa

SEQ ID NO: 129936 - DNA, 120 bp, Artificial Sequence
  ENSG00000102317_24 (sequence is synthesized)
catgtatcccaagacctgcaaagaccaaacacatggcctgtaactacttttcactttcaagccctggaacttgtctgtaccaaaaatctttctgaaccattcaccaaatctcttgtcaag

SEQ ID NO: 129937 - DNA, 120 bp, Artificial Sequence
  ENSG00000102317_25 (sequence is synthesized)
ggccagaataaattaagagattggcttttggttttcaattaggctttcaagtcctaagcccaacccctcctatcccacctaggcagaaatcacttcagatccttgcttcctagtttaatt

SEQ ID NO: 129938 - DNA, 120 bp, Artificial Sequence
  ENSG00000102317_26 (sequence is synthesized)
tcttctctgcctcagttataacatccataaaatggaaataataatacccacctcacacaggggttaggagtgtttttttgttggtttttttccagacagggtctcactctgtctcccagg

SEQ ID NO: 129939 - DNA, 120 bp, Artificial Sequence
  ENSG00000102317_27 (sequence is synthesized)
cacacctggcctaggagttaagagtattaaatgttaagaacagaccaagtccatcaaacagctccacacccttgttccatgttctggattggggagttgtgggggtggaggtgtagaact

SEQ ID NO: 129940 - DNA, 120 bp, Artificial Sequence
  ENSG00000102317_28 (sequence is synthesized)
tttaaaaagcttcttaaaataagttgctgtgaatacttcaggtatataaaaaaacattggttgacaataagccagtgttctgccattcttacctgcttatcaagacaaaacctgctcaag

SEQ ID NO: 129941 - DNA, 120 bp, Artificial Sequence
  ENSG00000102317_29 (sequence is synthesized)
tccctgcccagctgcattccaagtgttttcaagtttggtggtaagacctgacctgaggcttcttataacctttactcagtgggaatatgcatacagttcactacagaaatatttgtattt

SEQ ID NO: 129942 - DNA, 120 bp, Artificial Sequence
  ENSG00000102317_30 (sequence is synthesized)
acttagaggaagtgccctggatctgggggcgggggggggcggggggaatgggtcttttctaaattgttaaaagcagttcatgccattattcttaataaacatttctaatatgctgtgaaa

SEQ ID NO: 129943 - DNA, 120 bp, Artificial Sequence
  ENSG00000102317_31 (sequence is synthesized)
atgagagccatgaacggagaggtggggcctcctatctgcagagggaccttgtccccatctgcggcttccttcattctttttgtttttccctctgtgtctgctcggggcagcgtggccacc

SEQ ID NO: 129944 - DNA, 120 bp, Artificial Sequence
  ENSG00000102317_32 (sequence is synthesized)
atgaggccgagaagccacctgtggatggttgacctgccttgggcttaggtagtagagtctgcagacctgtgggcctggcccggagaggacctcgtgagtcttctgacatggactctgaag

SEQ ID NO: 129945 - DNA, 120 bp, Artificial Sequence
  ENSG00000102317_33 (sequence is synthesized)
cctcaaaccaagagaggtgtctgtctagccctgatagtcgggcagcttagaggagtggggaggagaactcagcctgagttcagtcaagatgtaagtagtagcaaggggaacatggtgcat

SEQ ID NO: 129946 - DNA, 120 bp, Artificial Sequence
  ENSG00000102317_34 (sequence is synthesized)
tcaggtcattttgtgtgggattctatagctcctgatgaagccattctggggtaaaggagcttattctggaacatggcacccagaacctggtgcccagcaggaatttttggcctcttttgc

SEQ ID NO: 129947 - DNA, 120 bp, Artificial Sequence
  ENSG00000102317_35 (sequence is synthesized)
ccacttacccttgcctgctcttccctcaccattgccctgactgactgccaacccatcatccttgtgtctcccacacttagtctctggatggtcgtcagatccgtgtggatcatgcaggca

SEQ ID NO: 129948 - DNA, 120 bp, Artificial Sequence
  ENSG00000102317_36 (sequence is synthesized)
ggaacgttccgggacgttctcgctacgtactctttatcaatcgtcttccggcgcagccccgtccctgttttttgtgctcctccgagctcgctgttcgtccgggttttttacgttttaatt

SEQ ID NO: 129949 - DNA, 120 bp, Artificial Sequence
  ENSG00000102317_37 (sequence is synthesized)
tgaaaagttaggacccacgcctccaaattctttttcttcctaagcctatggtgtagactaaggatgaggggaagcgtctttgggattagtgggagcgctccgttttccctacctatgcca

SEQ ID NO: 129950 - DNA, 120 bp, Artificial Sequence
  ENSG00000102317_38 (sequence is synthesized)
cattgagtgaacctgtttgtcacactctgtcatgaccctctcaccttttctggcaagactgctctgcatttctgctgccctcatacctcacccagccaacctaccaaacattcctagcta

SEQ ID NO: 129951 - DNA, 120 bp, Artificial Sequence
  ENSG00000102317_39 (sequence is synthesized)
ttgtgtgggatggaggaaatgaaggtgtgtccctgttgtccaaccctcagcatcttcatcagctctaggaggtgagcatgttgtcagctgttacttcatgacatcacaattctccccctc

SEQ ID NO: 129952 - DNA, 120 bp, Artificial Sequence
  ENSG00000102349_0 (sequence is synthesized)
actttgcactctcctctagcggccgcctgtcctttttaaggaactccaccctaggtggagtcctcacgatagtcacacctctcctttgggcctagcagggccagagaaagacggaatcac

SEQ ID NO: 129953 - DNA, 120 bp, Artificial Sequence
  ENSG00000102349_1 (sequence is synthesized)
tctacccactcaggttgcccagagagcactttaggttctgactcgcgtggggcgcgaggtaccccgtggggcagctaggtgcctccaagaaaccccgccccagaggacccgcacgagttg

SEQ ID NO: 129954 - DNA, 120 bp, Artificial Sequence
  ENSG00000102349_2 (sequence is synthesized)
ctgccatttttcgctgaagcccctgccctggggctggtgttcttctctatgattctaccaatcgtcggcatttttttcctcccttctttctttttaggaaggcgctggggtgtgcggcgg

SEQ ID NO: 129955 - DNA, 120 bp, Artificial Sequence
  ENSG00000102349_3 (sequence is synthesized)
caacggcggcggtgaagggatcctcttgtggtatctcctcgtgggttcctgtcttgaaggatttcttctccgcctcaactttatgttcaagtagcgctttgggggttgggttggttttca

SEQ ID NO: 129956 - DNA, 120 bp, Artificial Sequence
  ENSG00000102349_4 (sequence is synthesized)
tagcccccacccccggccctctccttttaaagggtgtgtggagttcagaggatgggtggagagcgggcttggccggaactgaattggtagaggtaaaaggggaacggaggaccttaagct

SEQ ID NO: 129957 - DNA, 120 bp, Artificial Sequence
  ENSG00000102349_5 (sequence is synthesized)
ctggccacttcggcccagcgaacccactttatttttgtccaaggaaaagctgcaggggggaggattctttttaggaagtctactctgccggcccctgatttttgggttggatgcttgaga

SEQ ID NO: 129958 - DNA, 120 bp, Artificial Sequence
  ENSG00000102349_6 (sequence is synthesized)
gctttgtttcccttgttccgagagtggcccagctgggtctgaatcgactccctcccctttcgaccccctcctcattttccagcccggagaaataggggagtgggggcccaagaacgagaa

SEQ ID NO: 129959 - DNA, 120 bp, Artificial Sequence
  ENSG00000102349_7 (sequence is synthesized)
gacgagaacgcgtcgccctgcgctatgtcagaatggggcgggtgtgaggggaacagctctcttgcgatcagctcaggagtatgagcctcccggaggacggcatgagttctggacacttca

SEQ ID NO: 129960 - DNA, 120 bp, Artificial Sequence
  ENSG00000102349_8 (sequence is synthesized)
ggagtcctcagctagtgacatggtcgatatggataaactcataaacaacttggaggtccaacttaattcagaaggtggctcaatgcaggtattcaagcaggtcactgcttctgttcggaa

SEQ ID NO: 129961 - DNA, 120 bp, Artificial Sequence
  ENSG00000102349_9 (sequence is synthesized)
cagagatccccctgagatagaatacagaagtaatatgacttctccaacactcctggatgccaaccccatggagaacccagcactgtttaatgacatcaagattgagcccccagaagaact

SEQ ID NO: 129962 - DNA, 120 bp, Artificial Sequence
  ENSG00000102349_10 (sequence is synthesized)
tttggctagtgatttcagcctgccccaagtggaaccagttgacctctcctttcacaagcccaaggctcctctccagcctgctagcatgctacaagctccaatacgtccccccaagccaca

SEQ ID NO: 129963 - DNA, 120 bp, Artificial Sequence
  ENSG00000102349_11 (sequence is synthesized)
gtcttctccccagacccttgtggtgtccacgtcaacatctgacatgagcacttcagcaaacattcctactgttctgaccccaggctctgtcctgacctcctctcagagcactggtagcca

SEQ ID NO: 129964 - DNA, 120 bp, Artificial Sequence
  ENSG00000102349_12 (sequence is synthesized)
gcagatcttacatgtcattcacactatcccctcagtcagtctgccaaataagatgggtggcctgaagaccatcccagtggtagtgcagtctctgcccatggtgtatactactttgcctgc

SEQ ID NO: 129965 - DNA, 120 bp, Artificial Sequence
  ENSG00000102349_13 (sequence is synthesized)
agatgggggccctgcagccattacagtcccactcattggaggagatggtaaaaatgctggatcagtgaaagttgaccccacctccatgtctccactggaaattccaagtgacagtgagga

SEQ ID NO: 129966 - DNA, 120 bp, Artificial Sequence
  ENSG00000102349_14 (sequence is synthesized)
gagtacaattgagagtggatcctcagccttgcagagtctgcagggactacagcaagaaccagcagcaatggcccaaatgcagggagaagagtcgcttgacttgaagagaagacggattca

SEQ ID NO: 129967 - DNA, 120 bp, Artificial Sequence
  ENSG00000102349_15 (sequence is synthesized)
ccaatgtgactttgcaggatgcagcaaagtgtacaccaaaagctctcacctgaaagctcaccgcagaatccatacaggagagaagccttataaatgcacctgggatggctgctcctggaa

SEQ ID NO: 129968 - DNA, 120 bp, Artificial Sequence
  ENSG00000102349_16 (sequence is synthesized)
atttgctcgctcagatgagctcactcgccatttccgcaagcacacaggcatcaagccttttcggtgcacagactgcaaccgcagcttttctcgttctgaccacctgtccctgcatcgccg

SEQ ID NO: 129969 - DNA, 120 bp, Artificial Sequence
  ENSG00000102349_17 (sequence is synthesized)
tcgccatgacaccatgtgagccgcacaggtcacactagagaagctgcgctggtatctttcctggtcgtgtgctgaggttgggacaattttttcctctttgacttcagcttgcatatgggg

SEQ ID NO: 129970 - DNA, 120 bp, Artificial Sequence
  ENSG00000102349_18 (sequence is synthesized)
ttgaagcagcccactgagccaagttgaggagactggaggaaaagagagctggtctcccgtggggctcttcatattctaccttcacttctccactgtccagacccgtttttttcaacctcc

SEQ ID NO: 129971 - DNA, 120 bp, Artificial Sequence
  ENSG00000102349_19 (sequence is synthesized)
acatgggttgaattccagtgtggcacccatggctgccttcccatccccccctgctctgaaataggacatttttcctacagtaacaaaacaggaatcaaactcaaggctgtgaacaaacat

SEQ ID NO: 129972 - DNA, 120 bp, Artificial Sequence
  ENSG00000102349_20 (sequence is synthesized)
acgctgctttattctttccaatttttctcttgttttctagaactcttatccatatgtttttaaaataagtacctaaaagtggtttgatagtgtcctaaacgacttttttaacttcctaaa

SEQ ID NO: 129973 - DNA, 120 bp, Artificial Sequence
  ENSG00000102349_21 (sequence is synthesized)
tggaaagagcataacaatgtagttgattggtaagatttacagggatttggtttctgagtttgaggcacattcccagtgaataagctgagtcccataccacactcaaaaggttttaataaa

SEQ ID NO: 129974 - DNA, 120 bp, Artificial Sequence
  ENSG00000102349_22 (sequence is synthesized)
tctaatcctatttcttcttaaagtttggttttcagacagtgctggtgcttctgcttcttaagttcatcaagggaatgaggagttcttgtccttctcctcctcttttttttcttttccact

SEQ ID NO: 129975 - DNA, 120 bp, Artificial Sequence
  ENSG00000102349_23 (sequence is synthesized)
ttctccttcaggattaaagattttgctgcacaattgttatttgttaggttaaatttggacaaatattcaaagcacacatagacatataagtaaggagaaaaatgttccaggagagtaggt

SEQ ID NO: 129976 - DNA, 120 bp, Artificial Sequence
  ENSG00000102349_24 (sequence is synthesized)
tgggcagtgacaggaacaaacagacctaggatgatcctgagaacaaatagaggggttcctttacttgtataggatatcaaaagtgctgttaatcacaaacctcattcaaatggcaggctg

SEQ ID NO: 129977 - DNA, 120 bp, Artificial Sequence
  ENSG00000102349_25 (sequence is synthesized)
tcgagacagtgtcttgaggggctggctgtactgtttattttttcgtttacacaaagaagcaattgagtatattgcatgatgagaaatcacacactagggtcatgttatacagaagtaagg

SEQ ID NO: 129978 - DNA, 120 bp, Artificial Sequence
  ENSG00000102349_26 (sequence is synthesized)
ggttggaaaaatggaatgttgttcactccatggaattattggcattcattcctgtgtttcaaatgaaacatagatgcttttcatgaaaactgacctacaaaaagcaatttgatgttctgc

SEQ ID NO: 129979 - DNA, 120 bp, Artificial Sequence
  ENSG00000102349_27 (sequence is synthesized)
aactgctatgaaaacctaagccatttattttagctgatagcagattgcataatatactcatttagctgcccaatcagattgttttataatattacctggggtacaaaatcctctgttcct

SEQ ID NO: 129980 - DNA, 120 bp, Artificial Sequence
  ENSG00000102349_28 (sequence is synthesized)
ggccctggaccacagatctacctccacatggcatatttcctttctggggtcaggggtaggggagggggctttgcatcacttgaatttagactcagcctctctttaaaagattgtctttat

SEQ ID NO: 129981 - DNA, 120 bp, Artificial Sequence
  ENSG00000102349_29 (sequence is synthesized)
attgaacacctttttcttttcaaccctgcttgaatactttaggttactatttcctgaggctgtccattctcactatattgtagaattctagcaccaagaagggatcccgttaaccatcta

SEQ ID NO: 129982 - DNA, 120 bp, Artificial Sequence
  ENSG00000102349_30 (sequence is synthesized)
gtcctatccatccctcatattttacagatgagacaaatacgggtcagatttttttctccagatgtttctttgagcccttatacacctgcacgcttattctcctggggatcacataatttt

SEQ ID NO: 129983 - DNA, 66 bp, Artificial Sequence
  ENSG00000102349_31 (sequence is synthesized)
tacacctgcacgcttattctcctggggatcacataattttatttatttattttttgagagacggtt

SEQ ID NO: 129984 - DNA, 74 bp, Artificial Sequence
  ENSG00000102349_32 (sequence is synthesized)
tggattacaggtgcgtgccaccacacctagctaagttttgtattattagtagagatggggtttcgccatgttgg

SEQ ID NO: 129985 - DNA, 120 bp, Artificial Sequence
  ENSG00000102349_33 (sequence is synthesized)
caaagtgctgggatcacaggtgtgagtcaccacacctggccaggatcacattattaaaccaaattaaagtttatgtgattggttgcaatatttgtctaattttatatgttttcttcagga

SEQ ID NO: 129986 - DNA, 120 bp, Artificial Sequence
  ENSG00000102349_34 (sequence is synthesized)
tatgttttcttcaggaaaactttagaactcaaaaatcatttacagctgattaaatagcaagtaaaatgtacttgtggtcattgccgtataacattaggcacacgcttctaacacttctat

SEQ ID NO: 129987 - DNA, 120 bp, Artificial Sequence
  ENSG00000102349_35 (sequence is synthesized)
aatatctagattttatttacctcattttaacttgcaatgtctgtctatctcatgaactctccataaatccaagaactgcctgtagttttcaaaatgacatgtgggtttttactgttatca

SEQ ID NO: 129988 - DNA, 120 bp, Artificial Sequence
  ENSG00000102349_36 (sequence is synthesized)
ttgttatttcgatagggctttttcctgattttgggtatacaagttccaaacttgcataataattgctaacgcactaggcgatatctagggccagtctgttaaaggggacctctaatgtag

SEQ ID NO: 129989 - DNA, 120 bp, Artificial Sequence
  ENSG00000102349_37 (sequence is synthesized)
ttttttcaaaatttggatcctgatactcctttttcagagttcagaactgaactgctcccctaagacctcagaatcttttgcattgagacatatgatctatttataaataaaggttatcaa

SEQ ID NO: 129990 - DNA, 120 bp, Artificial Sequence
  ENSG00000102349_38 (sequence is synthesized)
atatcttgttgaactaattaggttgatcaaattaggatcccaaatattggggtccctgacatctgagcctttatctaaaaatgtttctgtaacataatgacagcctttatgtttgttaat

SEQ ID NO: 129991 - DNA, 120 bp, Artificial Sequence
  ENSG00000102349_39 (sequence is synthesized)
tgcctatagtaaagaagcaattttaagcctattctcatttccctctcccctacaaaaaatgataaaagctttccaattacttacatatgctctaacaagtgtctcaggattcattaacag

SEQ ID NO: 129992 - DNA, 120 bp, Artificial Sequence
  ENSG00000102349_40 (sequence is synthesized)
aattttatagagtacagtaattcaaatatagcacagtacagagtttaccaaaaacacataaaactttgctagatagacagtgaggtggaaaggaactaaaatgtatctctcttgaatagc

SEQ ID NO: 129993 - DNA, 120 bp, Artificial Sequence
  ENSG00000102349_41 (sequence is synthesized)
atttggggttcaattgaatttgttgtgtttacaacagcaaagcaccgttagcctggacagttgcttatggcatcgatagggttggataatattctgggatttgttgcagcagaattcctc

SEQ ID NO: 129994 - DNA, 120 bp, Artificial Sequence
  ENSG00000102349_42 (sequence is synthesized)
tatctgatgatcagcagttgaacataaacttcataattatagtaaaatttaggaaaaactatgagtgtgaagagtatgaactgattgggtagattaggcagagtgcattatgggcaagac

SEQ ID NO: 129995 - DNA, 120 bp, Artificial Sequence
  ENSG00000102349_43 (sequence is synthesized)
aaaggttttcgatattaacttcttttaaaataaactttttattttcaaacagtttcagttttacagaaaaaatgtgaagctagtacagagaggtctcatttaccccacacccagtttctc

SEQ ID NO: 129996 - DNA, 120 bp, Artificial Sequence
  ENSG00000102349_44 (sequence is synthesized)
ctgttattagcatctcacattaatatgtggtatatttgttacaattaataaaacacattgatatgttaatattattaactgaagtccatactttattcaggtttctttagtttttaccta

SEQ ID NO: 129997 - DNA, 120 bp, Artificial Sequence
  ENSG00000102349_45 (sequence is synthesized)
cttcactccagcctgggtgacagagcgacacacttgatctcaaaaaaaaaaaaattgtttcagcatcttgttcaggattccacattacatctaatagtcatatctccttaggatcctttt

SEQ ID NO: 129998 - DNA, 120 bp, Artificial Sequence
  ENSG00000102349_46 (sequence is synthesized)
aatagtcatatctccttaggatccttttgattgtgacagtttctcagactttccttgttttcagtgaccttgacacttttgagagagattttcctcaactgggatttgtcagttgtcttt

SEQ ID NO: 129999 - DNA, 120 bp, Artificial Sequence
  ENSG00000102349_47 (sequence is synthesized)
ctcatgattagactgaggttatgagtttttgaaagtaggaccacggagaagaagtgccattttcatcacatcatacaggcatactttggagacaatgcagatttggttccagatcactgc

SEQ ID NO: 130000 - DNA, 120 bp, Artificial Sequence
  ENSG00000102349_48 (sequence is synthesized)
aatgaagcaaatattacaataaagcaagtcacacaaattttttggtttcccagtgcatataaaattttatgtttacactatcctgtagtctggtaaatgtgcaatagcattatgtctaaa

SEQ ID NO: 130001 - DNA, 120 bp, Artificial Sequence
  ENSG00000102349_49 (sequence is synthesized)
aaacaatgtacataccttattttaaaatactttattgctaacatgttactggcacaaacacgaagtgagcacatgctgttggaaaaatggtgccaatagacttgttggtcacagggttgc

SEQ ID NO: 130002 - DNA, 120 bp, Artificial Sequence
  ENSG00000102349_50 (sequence is synthesized)
cacaaacttttaatttgtaaaaaatgcaatatcagcaaagtgcaataaagtgaagcacaataaaacgaggtatgcctgtatttacatgactcatcactgttgtttaaccttgatcacctg

SEQ ID NO: 130003 - DNA, 120 bp, Artificial Sequence
  ENSG00000102349_51 (sequence is synthesized)
gctgaaatagttgttgtcaggtttctcccctgtactctttttttcctcccctccatactgtactctctgaaaggaaatcactatgtgcagcccatgcttctggagtggtaagttatatgc

SEQ ID NO: 130004 - DNA, 120 bp, Artificial Sequence
  ENSG00000102349_52 (sequence is synthesized)
cacacccttcagagcatgtatcttacataaattatttggaattattctctaagggagattgtctcttctcccccatttatttatttatacaatactttatttatatcagcatggactcat

SEQ ID NO: 130005 - DNA, 120 bp, Artificial Sequence
  ENSG00000102349_53 (sequence is synthesized)
gggtatttattttatacttcgagttataatctaatactactactttattttattgctcgaattgttccagctttggccattgggagctcttttgggtgattctcaagttcttttgacaca

SEQ ID NO: 130006 - DNA, 120 bp, Artificial Sequence
  ENSG00000102349_54 (sequence is synthesized)
cccccatcatttttttttagcacgtccttactttctgccactgcaagatcttccaggctcatcttgtatattttgtggcctactcctataatcagccatttcttcaagaagtcctggttt

SEQ ID NO: 130007 - DNA, 120 bp, Artificial Sequence
  ENSG00000102349_55 (sequence is synthesized)
cttttactggaaaattgtattagaaaccaatatctgggcattaggtatgttcattgttactgggctattgttgcttctagggtgtctcagctaacagcaaggaaacatatgtgtgtatac

SEQ ID NO: 130008 - DNA, 120 bp, Artificial Sequence
  ENSG00000102349_56 (sequence is synthesized)
tatcctatgtatatgcacattctataaatatttctatatgtaatcacccagatttttatttagctaaacatgagttcatattgatgttttcaactctaacctgttaccacgtgaatcatt

SEQ ID NO: 130009 - DNA, 120 bp, Artificial Sequence
  ENSG00000102349_57 (sequence is synthesized)
ctagcttcttcctgttagttacatgaagcctcccacactaatactgagaaacctggctctcaacctctgtcatctatttacttaatttttcaaattcagtgtgcacatatagcagtatct

SEQ ID NO: 130010 - DNA, 120 bp, Artificial Sequence
  ENSG00000102349_58 (sequence is synthesized)
gaattgttaacctgtatacccatgggaaacaactttatcaactacagcacagtgtgtatgtacataaaaatagtaatatttttagaactccaacagctctttgaaacaaagtggtctgca

SEQ ID NO: 130011 - DNA, 120 bp, Artificial Sequence
  ENSG00000102349_59 (sequence is synthesized)
aaattctggaattagggatttctgtgatctgagttccaagattctggggtctatcctgcccccaaaaagttttctcatgaaccaaaccatcaagaatgtacctaaccttaaataagccaa

SEQ ID NO: 130012 - DNA, 120 bp, Artificial Sequence
  ENSG00000102349_60 (sequence is synthesized)
gggaacttactgatgctccacagtttgctaattcttgtatgaggtactgtagagggatggatacagaaggaactgggtgggccaaatttaaataaacacatagcactatcttttctcact

SEQ ID NO: 130013 - DNA, 120 bp, Artificial Sequence
  ENSG00000102349_61 (sequence is synthesized)
gttaaatatggctctctgacaacagtgatgctaccctgagttacctctcttctgtattttcccagatctcacttggttgaccttaggcaagtcatatcacctctctgtgcctcaattaat

SEQ ID NO: 130014 - DNA, 120 bp, Artificial Sequence
  ENSG00000102349_62 (sequence is synthesized)
ccatttgcaaaatggggatctcaatatctacctcacaggaatgttgtgaggcttctcataaattgattttggcaaaaatgaaagatctttaagtgaacaaccaagtattataaccattgt

SEQ ID NO: 130015 - DNA, 120 bp, Artificial Sequence
  ENSG00000102349_63 (sequence is synthesized)
tataatgatagttatagtaccttatatttaccctatgtaaaagagaagattaggcttcctaggtgataaacagataaatttgagtaagaaggataattaaagagtggccactggaagcaa

SEQ ID NO: 130016 - DNA, 120 bp, Artificial Sequence
  ENSG00000102349_64 (sequence is synthesized)
tattatttattctcttactttcactttccctatatcttctttgttactaacaatacgattatcatctgtttccatacttgaaatgtattaggacctaaaggaagaggtaggcaaaattca

SEQ ID NO: 130017 - DNA, 120 bp, Artificial Sequence
  ENSG00000102349_65 (sequence is synthesized)
ttgcttcagaagctgtattcttccccctttgtaactctgcttggaccacattccatgtcacattctcagaagcacaaaggcaattttccagagccctttaagctttggccagttcagttt

SEQ ID NO: 130018 - DNA, 120 bp, Artificial Sequence
  ENSG00000102349_66 (sequence is synthesized)
caccacttatattttctctttcccaacttactttactctgaatagtataggtaggaggagggaagttgggtagggtggttgggggtgggagtgggttggaagaggatgggatttatacca

SEQ ID NO: 130019 - DNA, 120 bp, Artificial Sequence
  ENSG00000102349_67 (sequence is synthesized)
gtggcaggatatttctctgttttccaaacactggttttaatttccatttccttttctggtgttggggtggggtcaggggaagagatactattttgttaactgttaaaagctctccttcct

SEQ ID NO: 130020 - DNA, 120 bp, Artificial Sequence
  ENSG00000102349_68 (sequence is synthesized)
ttcctagagtcgctacaagtagctgtgttggacattactttataactatgctgtatgccatgctgttttcattgtatcacagaattaaaaggggaagagagttcctagtggtgtccatcc

SEQ ID NO: 130021 - DNA, 120 bp, Artificial Sequence
  ENSG00000102349_69 (sequence is synthesized)
ctgttttttgacaggcagtcacacaggtgagcagtgccagaaactggttctcttttttgtgttggggaaaggagcctgcagtgaaaggatcagttggattttttgtcattgttagtttgt

SEQ ID NO: 130022 - DNA, 120 bp, Artificial Sequence
  ENSG00000102349_70 (sequence is synthesized)
ttaaataaattataagacagtatattaagctttagtctctgtaactcttatgtttgtgccccattattttagtgctttagagcaacaccttgtttttcctctattttatactagttcttg

SEQ ID NO: 130023 - DNA, 120 bp, Artificial Sequence
  ENSG00000102349_71 (sequence is synthesized)
ctccagaggcatggctttgaggctagaatcatgagcaatctctcataaacaagtctgttatgcacctggagatactcaagatttgcctctgttagcatggccacttagagattactctgt

SEQ ID NO: 130024 - DNA, 120 bp, Artificial Sequence
  ENSG00000102349_72 (sequence is synthesized)
tctacttcagagaccctccactatggcatccatgcagggtgtgtgcttggggactaagcaatcttgttcagtttaattattgtacttttttattaataaaaaggtcttaaacttcagaaa

SEQ ID NO: 130025 - DNA, 120 bp, Artificial Sequence
  ENSG00000102349_73 (sequence is synthesized)
agtcatcctatctcctgtctcttttcacttcctccaattattcttgcacactgcttcaagagtaatctttcaaaagtactgttttttatgtctttttaatgcttaagaatgtacaatgag

SEQ ID NO: 130026 - DNA, 120 bp, Artificial Sequence
  ENSG00000102349_74 (sequence is synthesized)
tcttgattagaccatgcttctcaaacaagtacaagtatgcatatctatcagtgacatatcaaacaacttcctggaacttccacattatttgatattaaataatttaagcattttatattt

SEQ ID NO: 130027 - DNA, 120 bp, Artificial Sequence
  ENSG00000102349_75 (sequence is synthesized)
aaaatatgattatcttgtattacaaaatgcaaaatttaaaaacctgttaagataaaccacatgcttcaaaaatagttgaagcttactaaaggcatccaccctcggacttttcaggagaat

SEQ ID NO: 130028 - DNA, 120 bp, Artificial Sequence
  ENSG00000102349_76 (sequence is synthesized)
gtgtttattttatgccattcagaatgctttggtgggaaagttgagaacaatatttctatctcaaacatacttagccagtattagctcctgcctctaccaatactttcccttttctcttcc

SEQ ID NO: 130029 - DNA, 120 bp, Artificial Sequence
  ENSG00000102349_77 (sequence is synthesized)
ctacaaaagaagtaattgaaatattgtcatcttccctgtgttcttcctcatttggcatctatcactttccattttacttatttatttgcctgtatcacaagagtttgggcattattcaca

SEQ ID NO: 130030 - DNA, 120 bp, Artificial Sequence
  ENSG00000102349_78 (sequence is synthesized)
actgaattgtaaattcctgaaaaataatactctatcttaatttttttatgtatgcctccagagaacttaacacagtgctaggagttgtcttgcaacagataatttgatgaacaaacaaac

SEQ ID NO: 130031 - DNA, 120 bp, Artificial Sequence
  ENSG00000102349_79 (sequence is synthesized)
ttgaaaatttgtccaagagagaattcaaatgctataatcttccattttattttatttttaaaataagttcagaattcagaaaggtataaattaagtctctcttccaccactatcccccaa

SEQ ID NO: 130032 - DNA, 120 bp, Artificial Sequence
  ENSG00000102349_80 (sequence is synthesized)
ccactagttttcctcccagaggtatatctgttttagtttgtaatcaggaatgatcaaggaaaattatgtggcctctaaagcaggctgataatgttttgcataaatcggaaaggccaaggg

SEQ ID NO: 130033 - DNA, 120 bp, Artificial Sequence
  ENSG00000102349_81 (sequence is synthesized)
gtggaaatgactaggaagcagatttcagcttactgtaaaagagtatctacccttgaaatttgatgccctgtactaaatgtaggaggctgaaaaacaacatactactaagcatcaagttgc

SEQ ID NO: 130034 - DNA, 120 bp, Artificial Sequence
  ENSG00000102349_82 (sequence is synthesized)
tgagactctgcactggtcttctgaatacaaatattattattgactagtggttaattgtggtaatgataagtgttcataatcttattttgagatgtgatatccattccatatatgaaggga

SEQ ID NO: 130035 - DNA, 120 bp, Artificial Sequence
  ENSG00000102349_83 (sequence is synthesized)
gagccaaacaaacaaaccaaaaaaaggaaacaaacaaaaaaggaaataaaattcctcgtgtgacagtttatgctgagataaaggcagtggtaacatcaaaggatggtttgaaggagcttt

SEQ ID NO: 130036 - DNA, 120 bp, Artificial Sequence
  ENSG00000102349_84 (sequence is synthesized)
gaatagtccccataatatcatcagtccatcagagccactctaaataaacaggataaattttaaatgtgctcaatgtggttccaagctaagggcattggcccaatggtgtctgtattagtt

SEQ ID NO: 130037 - DNA, 64 bp, Artificial Sequence
  ENSG00000102349_85 (sequence is synthesized)
ggaaagggaaaactggccaccatgattcaattaactcctcctgggtccctcccacaacatgtgg

SEQ ID NO: 130038 - DNA, 80 bp, Artificial Sequence
  ENSG00000102349_86 (sequence is synthesized)
tcactatcatgagaatagcaggggaaaactggccaccatgattcaattaactcctcctgggtccctcccacaacatgtgg

SEQ ID NO: 130039 - DNA, 120 bp, Artificial Sequence
  ENSG00000102349_87 (sequence is synthesized)
actaaaccttagggggcacatataaaacaattggagtgcaagaagaaagtatcaaaatttgtattttcttacccttaaaaattgacaggtaatattgtatgttttaatcatctatagcat

SEQ ID NO: 130040 - DNA, 120 bp, Artificial Sequence
  ENSG00000102349_88 (sequence is synthesized)
gatgttttgaagtacatatgcattgtggaatggttaaatctagctaaataataaatgcattacctcattatcatttttgtggtgagagcacttaatgtccattctctttacaattttaat

SEQ ID NO: 130041 - DNA, 120 bp, Artificial Sequence
  ENSG00000102349_89 (sequence is synthesized)
aaataaaatgtatcatcattaactatacttgccttgctatacaatagatctcttgaaatgtattcctcctatctagctataattacgtatcctttgaccaatatctccccatccccctcc

SEQ ID NO: 130042 - DNA, 120 bp, Artificial Sequence
  ENSG00000102349_90 (sequence is synthesized)
ccactagccaccccagcctctggtaactaccattctactctacttgcatgagattaacttttttagattccacatatgagtgagatcatgcactatttgtccttctgtgcctggcatatt

SEQ ID NO: 130043 - DNA, 120 bp, Artificial Sequence
  ENSG00000102349_91 (sequence is synthesized)
ttaacataatgtcctccaggttcatctatgctctcacaaatggcaggattttattctttgttataactgaataatattatattgtatatatatatatgtcacatttcatttattcattca

SEQ ID NO: 130044 - DNA, 120 bp, Artificial Sequence
  ENSG00000102349_92 (sequence is synthesized)
ttcatttgttgatagatattttaggttggttccacatcttggctgttgtgaataatgctgcactaaacagggatgcagttatcttttgggcatgtgattttatttcctttggatatatac

SEQ ID NO: 130045 - DNA, 120 bp, Artificial Sequence
  ENSG00000102349_93 (sequence is synthesized)
ccagaagggagattgccagatcatacggtagttctaattttaagtttttgaggaacctccatactattttccataaaggctataactagtttacattcccatcaacagtgtgtaagtgtt

SEQ ID NO: 130046 - DNA, 120 bp, Artificial Sequence
  ENSG00000102349_94 (sequence is synthesized)
cccttttctccacatactcaccagcacttactgtcttttgtcttttcgataatagtcactctaacttaagtgagatgacatactactttttgtttgttttcttataatgtatacaaaatt

SEQ ID NO: 130047 - DNA, 120 bp, Artificial Sequence
  ENSG00000102349_95 (sequence is synthesized)
gtaggataccgatacatgtatatcacatacatgcacaaacatgcacacctcaagatacatgcttaaaactttttagtgaatgatatgcaaagtatagagacaactcttttaaccaaatac

SEQ ID NO: 130048 - DNA, 120 bp, Artificial Sequence
  ENSG00000102349_96 (sequence is synthesized)
cctgattgagtttttaggaattagaaacatcaggggttgataataaggaatatttgacagcttctcccaacataggtggaaaggaaggttgtatcaagcacctactaggtggtaggtata

SEQ ID NO: 130049 - DNA, 120 bp, Artificial Sequence
  ENSG00000102349_97 (sequence is synthesized)
cgtttcatctcattgacttatttctgtttaggagcacaaaggccaaggtggatgttctcacatctggactaatcctagaatttgattttaggacagccaggagctattcagtgagttcaa

SEQ ID NO: 130050 - DNA, 120 bp, Artificial Sequence
  ENSG00000102349_98 (sequence is synthesized)
ttcaacacacacacacacacacacacgttgaaactaacttttcagctgaccctgtcctggtagctggagatagaaagatgaatcatacccagaccacatcctagagacactctcatttga

SEQ ID NO: 130051 - DNA, 120 bp, Artificial Sequence
  ENSG00000102349_99 (sequence is synthesized)
taccactcatagtggtatcagaactcttcatactactcttactttaaaggcatttctgttccctgctatgcaaaaaaaaaaaataaaatgttattctcttccttccatgcaaatacactt

SEQ ID NO: 130052 - DNA, 120 bp, Artificial Sequence
  ENSG00000102349_100 (sequence is synthesized)
ctttcatcttgttttttatttctttatttttctgtcttgctgccacttcttaaggtgggacaaactgggaatcctgaaaatgattaaagaggcacatacatcttcagctcacactgctcc

SEQ ID NO: 130053 - DNA, 120 bp, Artificial Sequence
  ENSG00000102359_0 (sequence is synthesized)
acacttccccctcttctgcagcagacggactgagttcctctaatccctgtgttccttctcccccatctttctaaaacccttctctgagagaggaataactatagcttcagggataatata

SEQ ID NO: 130054 - DNA, 120 bp, Artificial Sequence
  ENSG00000102359_1 (sequence is synthesized)
gctttaaggaaacttttggcagatgtggacgtcgtaacatctgggcagtgttaacagaatcccggaggccgggacagaccaggagccactcgttctaggaatgttaaagtagaaggtttt

SEQ ID NO: 130055 - DNA, 120 bp, Artificial Sequence
  ENSG00000102359_2 (sequence is synthesized)
ttccaattgatgagaggagcagagaggaaggagaaagaggaggagagagaaaaagggcacaaaataccataaaacagatcccatatttctgcttcccctcacttttagaagttaattgat

SEQ ID NO: 130056 - DNA, 120 bp, Artificial Sequence
  ENSG00000102359_3 (sequence is synthesized)
ggctgacttctgaaagtcactttcctttgccctggtacttcaggccatatacatcttttcttgtctccataatcctccctttcaaggatggccagtcagctaactcaaagaggagctctc

SEQ ID NO: 130057 - DNA, 120 bp, Artificial Sequence
  ENSG00000102359_4 (sequence is synthesized)
tttctgctgttcttcctaactccggcagtgacaccaacatggtatgcaggttctggctactatccggatgaaagctacaatgaagtatatgcagaggaggtcccacaggctcctgccctg

SEQ ID NO: 130058 - DNA, 120 bp, Artificial Sequence
  ENSG00000102359_5 (sequence is synthesized)
gactaccgagtcccccgatggtgttatacattaaatatccaggatggagaagccacatgctactcaccgaagggaggaaattatcacagcagcctgggcacgcgttgtgagctctcctgt

SEQ ID NO: 130059 - DNA, 120 bp, Artificial Sequence
  ENSG00000102359_6 (sequence is synthesized)
gaccggggctttcgattgattggaaggaggtcggtgcaatgcctgccaagccgtcgttggtctggaactgcctactgcaggcagatgagatgccacgcactaccattcatcactagtggc

SEQ ID NO: 130060 - DNA, 120 bp, Artificial Sequence
  ENSG00000102359_7 (sequence is synthesized)
acttacacctgcacaaatggagtgcttcttgactctcgctgtgactacagctgttccagtggctaccacctggaaggtgatcgcagccgaatctgcatggaagatgggagatggagtgga

SEQ ID NO: 130061 - DNA, 120 bp, Artificial Sequence
  ENSG00000102359_8 (sequence is synthesized)
ggcgagcctgtatgtgtagacatagatccccccaagatccgctgtccccactcacgtgagaagatggcagagccagagaaattgactgctcgagtatactgggacccaccgttggtgaaa

SEQ ID NO: 130062 - DNA, 120 bp, Artificial Sequence
  ENSG00000102359_9 (sequence is synthesized)
gattctgctgatggtaccatcaccagggtgacacttcggggccctgagcctggctctcactttcccgaaggagagcatgtgattcgttacactgcctatgaccgagcctacaaccgggcc

SEQ ID NO: 130063 - DNA, 120 bp, Artificial Sequence
  ENSG00000102359_10 (sequence is synthesized)
agctgcaagttcattgtgaaagtacaagtgagacgctgcccaactctgaaacctccgcagcacggctacctcacctgcacctcagcgggggacaactatggtgccacctgtgaataccac

SEQ ID NO: 130064 - DNA, 120 bp, Artificial Sequence
  ENSG00000102359_11 (sequence is synthesized)
tgtgatggcggttatgatcgccaggggacaccctcccgggtctgtcagtccagccgccagtggtcaggttcaccaccaatctgtgctcctatgaagattaacgtcaacgtcaactcagct

SEQ ID NO: 130065 - DNA, 120 bp, Artificial Sequence
  ENSG00000102359_12 (sequence is synthesized)
gctggtctcttggatcaattctatgagaaacagcgactcctcatcatctcagctcctgatccttccaaccgatattataaaatgcagatctctatgctacagcaatccacctgtggactg

SEQ ID NO: 130066 - DNA, 120 bp, Artificial Sequence
  ENSG00000102359_13 (sequence is synthesized)
gatttgcggcatgtgaccatcattgaactggtgggacagccacctcaggaggtggggcgcatccgggagcaacagctgtcagccaacatcatcgaggagctcaggcaatttcagcgcctc

SEQ ID NO: 130067 - DNA, 120 bp, Artificial Sequence
  ENSG00000102359_14 (sequence is synthesized)
actcgctcctacttcaacatggtgttgattgacaagcagggtattgaccgagaccgctacatggaacctgtcacccccgaggaaatcttcacattcattgatgactacctactgagcaat

SEQ ID NO: 130068 - DNA, 120 bp, Artificial Sequence
  ENSG00000102359_15 (sequence is synthesized)
caggagttgacccagcgtcgggagcaaagggacatatgcgagtgaacttgagccagggcatggttaaagtcaagggaaaagctcctctagttagctgaaactgggacctaataaaaggag

SEQ ID NO: 130069 - DNA, 120 bp, Artificial Sequence
  ENSG00000102359_16 (sequence is synthesized)
gaaatgttttcccacagttctagggacaggactctgaggtgggtgagtttgacaaatcctgcggtgtttccaggcatccttttaggactgtgtaatagtttccctagaagctaggtaggg

SEQ ID NO: 130070 - DNA, 120 bp, Artificial Sequence
  ENSG00000102359_17 (sequence is synthesized)
actgaggacaggccttgggcagtgggttgggggtagaagttcttcctttcctaacccgggcccctgcccagctctccaaagtctttcagaaaagtaaatcctaaattcagtgatgaactg

SEQ ID NO: 130071 - DNA, 120 bp, Artificial Sequence
  ENSG00000102359_18 (sequence is synthesized)
gctgttttaactggttcctctaccctgaggtgacagcagagggcagcacgagcacaacagaaaccagcttacactttaagcaagtgtagctggattttccttacaggatgaggggtgggt

SEQ ID NO: 130072 - DNA, 85 bp, Artificial Sequence
  ENSG00000102359_19 (sequence is synthesized)
caagtgtagctggattttccttacaggatgaggggtgggtagcagggtacaaaacattgcgcccaggctggagtgcagtggcgcg

SEQ ID NO: 130073 - DNA, 80 bp, Artificial Sequence
  ENSG00000102359_20 (sequence is synthesized)
cattcttgaacttgtttgtcatttccccttctagggcactgggcagcaaatgttatctgaaccattgcttcactgttaga

SEQ ID NO: 130074 - DNA, 120 bp, Artificial Sequence
  ENSG00000102359_21 (sequence is synthesized)
gggcagcaaatgttatctgaaccattgcttcactgttagaaaaaccctgcagtgggagagagcttggtaagatgtatccaatcagagcagaatgttctctggggccctccagctggctca

SEQ ID NO: 130075 - DNA, 120 bp, Artificial Sequence
  ENSG00000102359_22 (sequence is synthesized)
cgggcaagaaccccttcttcctgaggcctcccgtttctgtagcagaaggcaaacgattctctcccttcctcagaggagtccccagcttgttacttaggaaacttcaaaaccaccactgca

SEQ ID NO: 130076 - DNA, 120 bp, Artificial Sequence
  ENSG00000102359_23 (sequence is synthesized)
ggtcgtagggaaagaaaagaaaaacagactcagcctcatgtattaacttcttcagatacttgtccccttttgagagatgagcacagagcaggtgggagctatagcagcacaaaatcaagc

SEQ ID NO: 130077 - DNA, 120 bp, Artificial Sequence
  ENSG00000102359_24 (sequence is synthesized)
cttaccaggcctaaaattcgaggtggagccacacacagatccctgctctgactgcagtccctctcaatggtgtgccagtgtctgaaagacaagtgttctctcccttgctgctgagagcct

SEQ ID NO: 130078 - DNA, 120 bp, Artificial Sequence
  ENSG00000102359_25 (sequence is synthesized)
tctttcatacagtcatggaacccagagtcatagctaagactcagcagcctctctccttcagctttactcagggggtcatcagtggatgacttgaggggagaaggaagcaggctgggtggg

SEQ ID NO: 130079 - DNA, 120 bp, Artificial Sequence
  ENSG00000102359_26 (sequence is synthesized)
taaacactctactgattgactccgaagccttcacaagaaccctatgaggtaggtactgttattaaccccattttacagatgaggaaattgaagctgagtgagattaggtaatttgcctaa

SEQ ID NO: 130080 - DNA, 120 bp, Artificial Sequence
  ENSG00000102359_27 (sequence is synthesized)
gatcagacagctagtaagtggcagagtcaggatttcaacaccagcagcctggctctagaggcaatgttcttcttagacattatgccatcctgacgctacttcttttcctactttccattt

SEQ ID NO: 130081 - DNA, 120 bp, Artificial Sequence
  ENSG00000102359_28 (sequence is synthesized)
aaagacaactgaaagctgtaagcaaggagaaactttccatgttctataatcctacccagacacaaggctcagagtgggctcaggaggaaagagggaaatggaaatgaaagggtctcaacc

SEQ ID NO: 130082 - DNA, 120 bp, Artificial Sequence
  ENSG00000102359_29 (sequence is synthesized)
tgagaaaattcagtcttgaaagcggagtgatgggacataaatcatgagcccagaacaaattgggggagcagtgagtcagagagaatctccttccactgggattttagtggaaatctcatt

SEQ ID NO: 130083 - DNA, 120 bp, Artificial Sequence
  ENSG00000102359_30 (sequence is synthesized)
tttaaaatgcaatataaaaaattagggagttgctgggtagaatggaacatggaggaaatgttcaaagttggagcaaaaaggtcccttctccctcttccctccagggaaatatgggaactg

SEQ ID NO: 130084 - DNA, 120 bp, Artificial Sequence
  ENSG00000102359_31 (sequence is synthesized)
tgagaggcagcaggcaagttatgggcagaggcagatacaatgagttcatgtgggaaatttctggtcagactagctctgtggttccaaaggcaaagactgcaccttgggcgagatgaatgc

SEQ ID NO: 130085 - DNA, 120 bp, Artificial Sequence
  ENSG00000102359_32 (sequence is synthesized)
ccttcgttgtctttatcactaacacttcaaatggggcaagccaggacatactagcaggtcaaaggcccaaacagcggaggcctactacctcctgaacagagctccacctggacctgactc

SEQ ID NO: 130086 - DNA, 120 bp, Artificial Sequence
  ENSG00000102359_33 (sequence is synthesized)
aaggaacatttatatgcaactgaggagcttttgtttcatttcattttgaatagtcaagtcagtcttgctttctttaggtaaagttttacagtaacctcctttgtagtcctttgaagatga

SEQ ID NO: 130087 - DNA, 120 bp, Artificial Sequence
  ENSG00000102359_34 (sequence is synthesized)
ggatttgagaaatcccaactcctaaagtaggggagagacagcagcagaatatgacccacagccagacccaaaggggctagcccgacccctgtatatattgtacctctctctctgcccacc

SEQ ID NO: 130088 - DNA, 120 bp, Artificial Sequence
  ENSG00000102359_35 (sequence is synthesized)
tctcccccacttctccccactgccccattctctcttatcctgcctattcctctcccctatttctctgtctctctctctctcacatacacacacactcactcacaagcagtacagtcacta

SEQ ID NO: 130089 - DNA, 120 bp, Artificial Sequence
  ENSG00000102359_36 (sequence is synthesized)
agttggctaggtaatatccaaagcattctgattgtcctactttttgtaaattgaacttatttaagatattttagaagagatgagtcacgtcttcctttgacccttcacccataacacaca

SEQ ID NO: 130090 - DNA, 120 bp, Artificial Sequence
  ENSG00000102359_37 (sequence is synthesized)
taccattctcacaggaggccacatggtgcagtagagtcagactttgattcaaagcccaactctgtcacgtgacagtaggcttgagtttcctcatctgtaaaaagggaagatttcctactt

SEQ ID NO: 130091 - DNA, 120 bp, Artificial Sequence
  ENSG00000102359_38 (sequence is synthesized)
cataaagtggttggagaaattaaagaaatagtatatgaagccttgcacataaaaagcatttgatatatattaatgcccttttgcacaagaggtcaagaattgcttgggttctacctagaa

SEQ ID NO: 130092 - DNA, 120 bp, Artificial Sequence
  ENSG00000102359_39 (sequence is synthesized)
atcaagagccttatttctgagctgggttacttggcacctgtgttatttctctctcaaaactacataatggtaggaggagtaaaagaaaaagtccccgcctcccagagaaattgaaggatc

SEQ ID NO: 130093 - DNA, 120 bp, Artificial Sequence
  ENSG00000102359_40 (sequence is synthesized)
cagaaagaagtgcttatagcagggaatgtctcccctcacctcctgtatgaacatctctctccttcctccagtataggagggtctgcaaagctaaaggaagagttcctttgttacaagata

SEQ ID NO: 130094 - DNA, 120 bp, Artificial Sequence
  ENSG00000102359_41 (sequence is synthesized)
gaaaagtggtgccactttaaagatgatttctcagtgttctccttagataccaaatacaaaggacgagggatcaagctcagcgaaagtatcaggcatttaaggtatcaggcagcaatgcgg

SEQ ID NO: 130095 - DNA, 120 bp, Artificial Sequence
  ENSG00000102359_42 (sequence is synthesized)
ggaaaggtgaattttcttcaatcagcataggatggttagggaagagcatttatcactttggttcttatccttcaagccaggggaaaagcaacagtgaggacatcagagacaaaagcattt

SEQ ID NO: 130096 - DNA, 120 bp, Artificial Sequence
  ENSG00000102359_43 (sequence is synthesized)
atagaactaacaaacacaaacgtttgacaagtgagaaagctttattaaagcacacatacatgtcaggggggtgggaaacaaaagagcaagttacagcccgggatcccaagttatgccttc

SEQ ID NO: 130097 - DNA, 120 bp, Artificial Sequence
  ENSG00000102359_44 (sequence is synthesized)
cattacaattgcaatccacaccaaatcaatctttgaaaacattcctccattcggttcatacatacagtagaaaccactgtggctgcccttaatccagtgtgcttataggaaatcagttag

SEQ ID NO: 130098 - DNA, 120 bp, Artificial Sequence
  ENSG00000102359_45 (sequence is synthesized)
cagctgactctgttgaaagggatttcctctctgctatacactccttccacacacaactttgggtagaaacgcttatgagaatagaaaggtcagtttgatcaatgagtaccagaagatgaa

SEQ ID NO: 130099 - DNA, 120 bp, Artificial Sequence
  ENSG00000102359_46 (sequence is synthesized)
acttagctcactagacccttctttgaaaagcctcaacacactacacccatgtaatatgtaggtcaaatttaggaaacaatagcaaaaacaggaactgaaagctcatcaagcaggaagtca

SEQ ID NO: 130100 - DNA, 120 bp, Artificial Sequence
  ENSG00000102359_47 (sequence is synthesized)
gaataacagggagactctgtctacattcccttagagcccttaacagtccccagcctggagaaacactgggccaattgagataacacttggctcttctggttgacacagtgggatgtagac

SEQ ID NO: 130101 - DNA, 120 bp, Artificial Sequence
  ENSG00000102359_48 (sequence is synthesized)
catgctctgtttgataacacaccccagacgcaaacactaagacagatgtggtacatgaggatgaatatatctcatctttcattcgagaaatgaggagctctctctccaatgactgcagta

SEQ ID NO: 130102 - DNA, 120 bp, Artificial Sequence
  ENSG00000102359_49 (sequence is synthesized)
tcagtttaaaatgcagaaaattcagcatgggctgtgagacactttaccctcagtcactctggtcctctgagatcagctagaagctctcactgggcatcctcgtgatttagtcaaaataca

SEQ ID NO: 130103 - DNA, 120 bp, Artificial Sequence
  ENSG00000102359_50 (sequence is synthesized)
ttatctaattaaagtgcttttcaaaagcagctccattataagagtcccccaaaggtctagtaaagatatctagaactggaaaaagcttgggaattctgttagcatttcaaagaaaagcat

SEQ ID NO: 130104 - DNA, 120 bp, Artificial Sequence
  ENSG00000102359_51 (sequence is synthesized)
tagaccaaagcaaggtggaaactgcttaaaaactagaaaagttaaatttaaaagccaagttccagaagtttatccaggtagaaaataagttaaaagcataaattggagaggagaaagagg

SEQ ID NO: 130105 - DNA, 120 bp, Artificial Sequence
  ENSG00000102359_52 (sequence is synthesized)
aaggaactactcacctctccccaacattcctgtctttactaaccaaccctgcttcccagagccttaaaacccagactggtcctaatgcgaaaggtagccagggcttcctagggaagtagg

SEQ ID NO: 130106 - DNA, 120 bp, Artificial Sequence
  ENSG00000102359_53 (sequence is synthesized)
aacaatgatagcaagacagaagataaaaagttgttttaaaagctgtttttaagttaagtgaaccttataaagacataagaaaaaatggactctgaaaataaactagattatacacagaaa

SEQ ID NO: 130107 - DNA, 120 bp, Artificial Sequence
  ENSG00000102359_54 (sequence is synthesized)
ctacaatgaagtatatgcagaggaggtcccacaggctcctgccctggactaccgaggattttgtgtggacacaggtttttatttcactggcataaatacctttaagtgggattgcagagt

SEQ ID NO: 130108 - DNA, 120 bp, Artificial Sequence
  ENSG00000102359_55 (sequence is synthesized)
cgtatgtcccccgatggtgttatacattaaatatccaggatggagaagccacatgctactcaccgaagggaggaaattatcacagcagcctgggcacgcgttgtgagctctcctgtgacc

SEQ ID NO: 130109 - DNA, 120 bp, Artificial Sequence
  ENSG00000102359_56 (sequence is synthesized)
cataaataacaaacagagtcttgttattctataacatgaaagatccttatgagggagataatataaaaggcattcattaattataaaatctctcttcttcctcacagatcccatatttct

SEQ ID NO: 130110 - DNA, 120 bp, Artificial Sequence
  ENSG00000102359_57 (sequence is synthesized)
ggaagacctaatactttagggaatcacccacatctggcctcctgtttacaggacctataaagctttgaggctaatactgaactgaaacagctgacaaaaattccatgacccgccccccga

SEQ ID NO: 130111 - DNA, 120 bp, Artificial Sequence
  ENSG00000102359_58 (sequence is synthesized)
ctcccccgcacccaccaaagaaacctcccattatgggaaaaaagagagcaggggagatgaggtctgagaagaaatcaacggaagccagaagaagaactgaaatgggaaaacagaaaaaaa

SEQ ID NO: 130112 - DNA, 120 bp, Artificial Sequence
  ENSG00000102359_59 (sequence is synthesized)
cagaaaaaaagaaaaaggggaaaaagaaaaaatgaactctttcctctggaatgagggcaaaccaacgaggacatgatttcataaggttctggctactatccggatgaaagctacaatgaa

SEQ ID NO: 130113 - DNA, 120 bp, Artificial Sequence
  ENSG00000102359_60 (sequence is synthesized)
gactaccgaggtaatctaccctgcttctcaagcccagaaaatctcttttctggcctcagacctaggcccttccctgaagcatccccatcaggcttggctcacatgtgtcaaaactgtagc

SEQ ID NO: 130114 - DNA, 120 bp, Artificial Sequence
  ENSG00000102359_61 (sequence is synthesized)
acagggaatcaggggctgtgatttctcatcatgaacttggttactgacttactgtgtgacctcacctctccagcctgaaggttctccatgtattattaatcattaagtattgactagtta

SEQ ID NO: 130115 - DNA, 120 bp, Artificial Sequence
  ENSG00000102362_0 (sequence is synthesized)
gagggtgagaagggccggctgccggagctgggttgcgatcttcccggagccggagaccctcccttgaaaccggcactgggacttctcgatctctggaggcacctgttgcaagtgacaggc

SEQ ID NO: 130116 - DNA, 120 bp, Artificial Sequence
  ENSG00000102362_1 (sequence is synthesized)
aactctggtagctctccttgtctggttgttttgaagaaagaagagtagaagaaaaagttgagtaaatcatgtcggagttactggacctttcttttctgtctgaggaggaaaaggatttga

SEQ ID NO: 130117 - DNA, 120 bp, Artificial Sequence
  ENSG00000102362_2 (sequence is synthesized)
ttctcagtgttctacagcgagatgaagaggtccggaaagcagatgagaaaaggattaggcgactaaagaatgagttactggagataaaaaggaaaggggccaagaggggcagccaacact

SEQ ID NO: 130118 - DNA, 120 bp, Artificial Sequence
  ENSG00000102362_3 (sequence is synthesized)
acagtgatcggacctgtgcccggtgccaggagagcctgggccgtttgagtcccaaaaccaatacttgtcggggttgtaatcacctggtgtgtcgggactgccgcatacaggaaagcaatg

SEQ ID NO: 130119 - DNA, 120 bp, Artificial Sequence
  ENSG00000102362_4 (sequence is synthesized)
gtacctggaggtgcaaggtgtgcgccaaggaaatagagttgaagaaagcaactggggactggttttatgaccagaaagtgaatcgctttgcttaccgcacaggtagtgagataatcagga

SEQ ID NO: 130120 - DNA, 120 bp, Artificial Sequence
  ENSG00000102362_5 (sequence is synthesized)
tgtccctgcgccacaaacctgcagtgagtaaaagagagacagtgggacagtccctccttcatcagacacagatgggtgacatctggccaggaagaaagatcattcaggagcggcagaagg

SEQ ID NO: 130121 - DNA, 120 bp, Artificial Sequence
  ENSG00000102362_6 (sequence is synthesized)
agcccagtgtgctatttgaagtgccaaagctgaaaagtggaaagagtgcattggaagctgagagtgagagtctggatagcttcacagctgactcggatagcacctccaggagagactctc

SEQ ID NO: 130122 - DNA, 120 bp, Artificial Sequence
  ENSG00000102362_7 (sequence is synthesized)
tggataaatctggcctctttccagaatggaagaagatgtctgctcccaaatctcaagtagaaaaggaaactcagcctggaggtcaaaatgtggtatttgtggatgagggtgagatgatat

SEQ ID NO: 130123 - DNA, 120 bp, Artificial Sequence
  ENSG00000102362_8 (sequence is synthesized)
ttaagaagaacaccagaaaaatcctcaggccttcagagtacactaaatctgtgatagatcttcgcccagaagatgtggtacatgaaagtggctccttgggagacagaagcaaatccgtcc

SEQ ID NO: 130124 - DNA, 120 bp, Artificial Sequence
  ENSG00000102362_9 (sequence is synthesized)
agtgaagttacatcgccagaagctagccagaagcagcatgcaaagtggctcctccatgagtacgatcggcagcatgatgagcatctacagtgaagctggtgatttcgggaacatctttgt

SEQ ID NO: 130125 - DNA, 120 bp, Artificial Sequence
  ENSG00000102362_10 (sequence is synthesized)
gactggcaggattgccttttccctgaagtatgagcagcaaacccagagtctggttgtccatgtgaaggagtgccatcagctggcctatgctgatgaagccaagaagcgctctaacccata

SEQ ID NO: 130126 - DNA, 120 bp, Artificial Sequence
  ENSG00000102362_11 (sequence is synthesized)
tgtgaagacttaccttctgcctgacaagtcccgccaaggaaaaagaaaaaccagcatcaagcgggacactattaatccactatatgatgagacgctgaggtatgagatcccagaatctct

SEQ ID NO: 130127 - DNA, 120 bp, Artificial Sequence
  ENSG00000102362_12 (sequence is synthesized)
cctggcccagaggaccctgcagttctcagtttggcatcatggtcgttttggcagaaacactttccttggagaggcagagatccagatggattcctggaagcttgataagaaactggatca

SEQ ID NO: 130128 - DNA, 120 bp, Artificial Sequence
  ENSG00000102362_13 (sequence is synthesized)
ttgcctccctttacatggaaagatcagtgctgagtccccgactggcttgccatcacacaaaggcgagttggtggtttcattgaaatacatcccagcctccaaaacccctgttggaggtga

SEQ ID NO: 130129 - DNA, 120 bp, Artificial Sequence
  ENSG00000102362_14 (sequence is synthesized)
ccggaaaaagagtaaaggtggggaagggggagagctccaggtgtggatcaaagaagccaagaacttgacggctgccaaagcaggagggacttcagacagctttgtcaagggatacctcct

SEQ ID NO: 130130 - DNA, 120 bp, Artificial Sequence
  ENSG00000102362_15 (sequence is synthesized)
tcccatgaggaacaaggccagtaaacgtaaaactcctgtgatgaagaagaccctgaatcctcactacaaccatacatttgtctacaatggtgtgaggctggaagatctacagcatatgtg

SEQ ID NO: 130131 - DNA, 120 bp, Artificial Sequence
  ENSG00000102362_16 (sequence is synthesized)
cctggaactgactgtgtgggaccgggagcccctggccagcaatgacttcctgggaggggtcaggctgggtgttggcactgggatcagtaatggggaagtggtggactggatggactcgac

SEQ ID NO: 130132 - DNA, 120 bp, Artificial Sequence
  ENSG00000102362_17 (sequence is synthesized)
tggggaagaagtgagcctgtggcagaagatgcgacagtacccagggtcttgggcagaagggactctgcagctccgttcctcaatggccaagcagaagctgggtttatgagtccctgtcct

SEQ ID NO: 130133 - DNA, 120 bp, Artificial Sequence
  ENSG00000102362_18 (sequence is synthesized)
agtccctgtcctcttctgcaggtccagccctggcgagggcaggtcagaggaagtgaagaaatcaagagcaaagatttataatttaatgtgtatgtgtgtatgtgtgtatgtgtgtgtgtg

SEQ ID NO: 130134 - DNA, 120 bp, Artificial Sequence
  ENSG00000102362_19 (sequence is synthesized)
caagaataagcatttctttaaaatgtttctgtgtataatctagtttattttcagagtccattttttcttatgtctttataaggttcacttaacttaaaaacagcttttaaaacaactttt

SEQ ID NO: 130135 - DNA, 120 bp, Artificial Sequence
  ENSG00000102362_20 (sequence is synthesized)
tatcttctgtcttgctatcattgttcctacttccctaggaagccctggctacctttcgcattaggaccagtctgggttttaaggctctgggaagcagggttggttagtaaagacaggaat

SEQ ID NO: 130136 - DNA, 120 bp, Artificial Sequence
  ENSG00000102362_21 (sequence is synthesized)
gttggggagaggtgagtagttccttcctctttctcctctccaatttatgcttttaacttattttctacctggataaacttctggaacttggcttttaaatttaacttttctagtttttaa

SEQ ID NO: 130137 - DNA, 120 bp, Artificial Sequence
  ENSG00000102362_22 (sequence is synthesized)
gcagtttccaccttgctttggtctaatgcttttctttgaaatgctaacagaattcccaagctttttccagttctagatatctttactagacctttgggggactcttataatggagctgct

SEQ ID NO: 130138 - DNA, 120 bp, Artificial Sequence
  ENSG00000102362_23 (sequence is synthesized)
tttgaaaagcactttaattagataatgtattttgactaaatcacgaggatgcccagtgagagcttctagctgatctcagaggaccagagtgactgagggtaaagtgtctcacagcccatg

SEQ ID NO: 130139 - DNA, 120 bp, Artificial Sequence
  ENSG00000102362_24 (sequence is synthesized)
ctgaattttctgcattttaaactgatactgcagtcattggagagagagctcctcatttctcgaatgaaagatgagatatattcatcctcatgtaccacatctgtcttagtgtttgcgtct

SEQ ID NO: 130140 - DNA, 120 bp, Artificial Sequence
  ENSG00000102362_25 (sequence is synthesized)
ggggtgtgttatcaaacagagcatggtctacatcccactgtgtcaaccagaagagccaagtgttatctcaattggcccagtgtttctccaggctggggactgttaagggctctaagggaa

SEQ ID NO: 130141 - DNA, 120 bp, Artificial Sequence
  ENSG00000102362_26 (sequence is synthesized)
tgtagacagagtctccctgttattctgacttcctgcttgatgagctttcagttcctgtttttgctattgtttcctaaatttgacctacatattacatgggtgtagtgtgttgaggctttt

SEQ ID NO: 130142 - DNA, 120 bp, Artificial Sequence
  ENSG00000102362_27 (sequence is synthesized)
caaagaagggtctagtgagctaagtttcatcttctggtactcattgatcaaactgacctttctattctcataagcgtttctacccaaagttgtgtgtggaaggagtgtatagcagagagg

SEQ ID NO: 130143 - DNA, 120 bp, Artificial Sequence
  ENSG00000102362_28 (sequence is synthesized)
aaatccctttcaacagagtcagctgctaactgatttcctataagcacactggattaagggcagccacagtggtttctactgtatgtatgaaccgaatggaggaatgttttcaaagattga

SEQ ID NO: 130144 - DNA, 120 bp, Artificial Sequence
  ENSG00000102362_29 (sequence is synthesized)
tttggtgtggattgcaattgtaatggaaggcataacttgggatcccgggctgtaacttgctcttttgtttcccacccccctgacatgtatgtgtgctttaataaagctttctcacttgtc

SEQ ID NO: 130145 - DNA, 120 bp, Artificial Sequence
  ENSG00000102362_30 (sequence is synthesized)
cacagcgctcggccgtcgagcggggtcgctaacccgcactctcttcggacctacgacatcgcggcttctctggcgttggccagtcagccacagggaactagtaaaaaaagaaaaagaaaa

SEQ ID NO: 130146 - DNA, 120 bp, Artificial Sequence
  ENSG00000102362_31 (sequence is synthesized)
cacagggaactagtaaaaaaagaaaaagaaaaaataaagtgaaagaggcgtgttgtctagtttcaaaggagaggagagaagagactgagtcgccctgtgttgcccaggctggtcttgaac

SEQ ID NO: 130147 - DNA, 120 bp, Artificial Sequence
  ENSG00000102362_32 (sequence is synthesized)
caggtgaatgatctagtagaggtagtgggaactctgcttcagcagattcaaggaggggcgtgtgtagtaggatctggatgtgggttcatcttcttgggctaggcctgtggtaggggaaag

SEQ ID NO: 130148 - DNA, 120 bp, Artificial Sequence
  ENSG00000102362_33 (sequence is synthesized)
ctctggaggcacctgttgcaagtgacagcgctcggccgtcgagcggggtcgctaacccgcactctcttcggacctacgacatcgcggcttctctggcgttggccagtcagccacaggtaa

SEQ ID NO: 130149 - DNA, 120 bp, Artificial Sequence
  ENSG00000102362_34 (sequence is synthesized)
tattagatctgtggttacaggcatgttggggtactaggaagaaaagaagcacctccctagagcagattcgggacctggggaaaccatcctagtcactcttttcaggtaagtaagatcatt

SEQ ID NO: 130150 - DNA, 120 bp, Artificial Sequence
  ENSG00000102362_35 (sequence is synthesized)
tgtttgttcctatcctcaatttagactataggtgcttagtgtacatctaggtgacttcctgagcccccacctggagattattacattacagcttgggacatttttcatcacagctttgtg

SEQ ID NO: 130151 - DNA, 120 bp, Artificial Sequence
  ENSG00000102362_36 (sequence is synthesized)
aacaataaccttaacttatcctctaaaggggtacccaggctatgaagtgagcaagatcagatttcttcatcatagcccattccaaattctcaacattaaaagaaagtgagtgtcatgaga

SEQ ID NO: 130152 - DNA, 120 bp, Artificial Sequence
  ENSG00000102362_37 (sequence is synthesized)
ggggctctggcagggttgatcgacatcagggtatggttaacaagcaataataccagtcaggataatgaatttaaagggaacatttaagaatcagggcctggttctgtcataagcatgaag

SEQ ID NO: 130153 - DNA, 120 bp, Artificial Sequence
  ENSG00000102362_38 (sequence is synthesized)
attgatatttagggaaacaggaacaagggtgaacagaatttgttcacactcacacacaggaagagaatgtcagctcgcatgaccgattactaccagaaaggaaggtgccttttcacttct

SEQ ID NO: 130154 - DNA, 120 bp, Artificial Sequence
  ENSG00000102362_39 (sequence is synthesized)
ggtggggtttcctccctcccactcactcccagttctggccaaatctcttttctctgtaggccctgataagacataaggtggataagagaaacccacagataattaaggcaccttgtttta

SEQ ID NO: 130155 - DNA, 120 bp, Artificial Sequence
  ENSG00000102362_40 (sequence is synthesized)
gttagtaactaacccccttctagctggtgttttagtgtatataacacattccccagatggacttaactgcaccttgcctctgctccctgcccacctcctggggcaggtgaaaatgaacac

SEQ ID NO: 130156 - DNA, 120 bp, Artificial Sequence
  ENSG00000102362_41 (sequence is synthesized)
taaaatttgtaaaaagagttgaggaagagaagctaagaggctaggtgagccatgagctgattcattcacctgaacaattttgagtgctggtagttctctcttaccctctgggtcaaggaa

SEQ ID NO: 130157 - DNA, 120 bp, Artificial Sequence
  ENSG00000102362_42 (sequence is synthesized)
tgtcagcagcactggcttattgcaggggcttctgaaacttctgttcagtgactgtggttttatcatgagggaagatgtgagcaatgcgggcgggggagtgtgccttccccagatgttcgt

SEQ ID NO: 130158 - DNA, 120 bp, Artificial Sequence
  ENSG00000102362_43 (sequence is synthesized)
ctgggggagcagggaggtgtaatgtaggaaaagaaccaggattgggaaaaagcaagaatggcatgtctaagagggcttgaggtgacatttttgacatcacatgtcaccatggcatatcta

SEQ ID NO: 130159 - DNA, 120 bp, Artificial Sequence
  ENSG00000102362_44 (sequence is synthesized)
tatggagaggaggaaagtgaaaagcaggcttgagaaaggccagcaaattactcagtgctgtctttggtttctagatatgtgaagacttaccttctgcctgacaagtcccgccaaggaaaa

SEQ ID NO: 130160 - DNA, 120 bp, Artificial Sequence
  ENSG00000102362_45 (sequence is synthesized)
agaaaaaccagcatcaagcgggacactattaatccactatatgatgagacgctgagggtaagtatctagacctcaagggtaggagaacttgttctgtcttgtgccctaagctgtagctat

SEQ ID NO: 130161 - DNA, 120 bp, Artificial Sequence
  ENSG00000102362_46 (sequence is synthesized)
tcctctgcaacatgaccaggtgacacgggcttcagtgggccatgtctgtgtctgaggatacattgggtatctgttcacatcctgatctcccagtgaagagaacaaaggtgatctgccttt

SEQ ID NO: 130162 - DNA, 120 bp, Artificial Sequence
  ENSG00000102362_47 (sequence is synthesized)
cctggattgatgtgaagtttgagattcacatggccacaaatctcatgtaaaaaagacatttgagataaggagtctccttggcagttctttttggacaatccagtgttatctcatccactt

SEQ ID NO: 130163 - DNA, 120 bp, Artificial Sequence
  ENSG00000102362_48 (sequence is synthesized)
aagaaaaaatgaattttccaggtcctcctatggaatatggtaggtttttataaaatgagttaagttgaggctttgagtgaggaaactcaaagtgctcagggaacataaagtaatttggta

SEQ ID NO: 130164 - DNA, 120 bp, Artificial Sequence
  ENSG00000102362_49 (sequence is synthesized)
ttcaggactagtgacttcaggaatggttgctcaggttttggaataatcttgtctgaagaattacccttaactaatcatcttgggcttttactttcccttcacagtatgagatcccagaat

SEQ ID NO: 130165 - DNA, 120 bp, Artificial Sequence
  ENSG00000102362_50 (sequence is synthesized)
gtcttctctggagttctagtgccccctgctggtgtttctgagtttgacagcaatttcagaggcatttgtctatcaagtgtgagttctgtgtaaaccaggcaaagtgtgaagccatggttt

SEQ ID NO: 130166 - DNA, 120 bp, Artificial Sequence
  ENSG00000102362_51 (sequence is synthesized)
tgctttgaaaaaattttcatatgtgtaccaaactttgtctcctaaccttccagaatctgggtgtatcctaacatcctaactcgcacctcttctccgagctaaccttctgtgtatatccta

SEQ ID NO: 130167 - DNA, 120 bp, Artificial Sequence
  ENSG00000102362_52 (sequence is synthesized)
atctgtacccttttgccaagccactgctttacttccaagtgggaagtaaagcaattcatggagctccaattgctatgctcttggttacagaggccagggaaatattactttggagatggc

SEQ ID NO: 130168 - DNA, 120 bp, Artificial Sequence
  ENSG00000102362_53 (sequence is synthesized)
acctcgggccacagtgtagcagtatggcataatcatgcctgggatctgagtgcagacctgtgttggaatcctggttctgtcacttgccaactagatgagtcacttaactacaaaataatg

SEQ ID NO: 130169 - DNA, 120 bp, Artificial Sequence
  ENSG00000102362_54 (sequence is synthesized)
tagggaaatcatctggctaagaagaaatagctaaaacagaggacttattcagcaacttcttgattatcagaactacacaatgacatgacaaagttcatcttatttttttttacactagcg

SEQ ID NO: 130170 - DNA, 120 bp, Artificial Sequence
  ENSG00000102362_55 (sequence is synthesized)
ttttaaatgtgggatggttttacatggtccatagactttgggaagttagatgagaaactagtcatggtggctgcctctaggaatggagactgaggtagaaggaatatttagttttctcta

SEQ ID NO: 130171 - DNA, 120 bp, Artificial Sequence
  ENSG00000102362_56 (sequence is synthesized)
tatcccctttttaagcatttgaactttttaccatattaagaaaattaagcaaaaatggacttatgtacacatgattcaaaattaaaacaacataaagtatattaaaaggaaagtaggttc

SEQ ID NO: 130172 - DNA, 120 bp, Artificial Sequence
  ENSG00000102362_57 (sequence is synthesized)
taaagtatattaaaaggaaagtaggttccattccttagaaataaccagtgttaacactacttgtgtatccttctagaaattttttatggctaggtatggtggctcacgcctgtaatccca

SEQ ID NO: 130173 - DNA, 120 bp, Artificial Sequence
  ENSG00000102383_0 (sequence is synthesized)
cttcgagccaaagatgcggcgaggctggaagatggctctgtctggggggctgcggtgctgccgccgggtactgtcctgggtgccagtgctcgttattgtcctcgtcgtgctctggtccta

SEQ ID NO: 130174 - DNA, 120 bp, Artificial Sequence
  ENSG00000102383_1 (sequence is synthesized)
ctatgcctacgtctttgaactctgcctggtgactgttttgagcccagcagaaaaagttatttacctcatactctaccatgccatctttgtgttctttacctggacctactggaagtctat

SEQ ID NO: 130175 - DNA, 120 bp, Artificial Sequence
  ENSG00000102383_2 (sequence is synthesized)
ctttacactcccacagcagccaaaccagaagttccacttgtcctacacagacaaggagcgctatgaaaatgaagaaagacctgaggtccagaagcagatgcttgttgatatggccaaaaa

SEQ ID NO: 130176 - DNA, 120 bp, Artificial Sequence
  ENSG00000102383_3 (sequence is synthesized)
gctaccggtttacacaagaactggaagtggagctgtacgattctgtgaccggtgtcatctgatcaagccagaccgctgccaccactgctctgtctgtgctatgtgtgtgttaaaaatgga

SEQ ID NO: 130177 - DNA, 120 bp, Artificial Sequence
  ENSG00000102383_4 (sequence is synthesized)
tcatcactgcccttgggttaataactgcattggattttccaactacaaattcttccttcaattcttagcttactctgttctctactgcctgtacattgctacgacagtcttcagctattt

SEQ ID NO: 130178 - DNA, 120 bp, Artificial Sequence
  ENSG00000102383_5 (sequence is synthesized)
catcaaatactggagaggggaattacccagtgttcgctctaagttccatgtcctttttcttctctttgtggcctgcatgttttttgtcagccttgtgattctctttggttaccattgttg

SEQ ID NO: 130179 - DNA, 120 bp, Artificial Sequence
  ENSG00000102383_6 (sequence is synthesized)
gcttgtcagcagaaacaaaaccaccttagaggccttctgcactccagtgtttacaagtggcccagagaaaaatgggttcaaccttggcttcatcaagaatatccagcaggtgtttggaga

SEQ ID NO: 130180 - DNA, 120 bp, Artificial Sequence
  ENSG00000102383_7 (sequence is synthesized)
taagaagaagttctggttaatacctattggttccagccctggtgatggacactccttccctatgaggtctatgaatgagtcacagaacccactgctagcaaatgaagaaacctgggaaga

SEQ ID NO: 130181 - DNA, 120 bp, Artificial Sequence
  ENSG00000102383_8 (sequence is synthesized)
caacgaggatgacaaccaagattatccagaaggctcatcatctcttgctgtggaaacggaaacatagcagttttcacatttcctgcatctctcagacaggactcaccatctctgcctccc

SEQ ID NO: 130182 - DNA, 120 bp, Artificial Sequence
  ENSG00000102383_9 (sequence is synthesized)
atgaggcttacagagttcaatgttggaaatcattgtaatcttcaaaataagtcaccgtgttggattgaaagcttcaaaatttgaaagaattccatcaaatacttgctgtgtaaatgtttc

SEQ ID NO: 130183 - DNA, 120 bp, Artificial Sequence
  ENSG00000102383_10 (sequence is synthesized)
tggactttatgttatttaatttactgactgaaatccaatttggaatttggtagcagttaattcaagccaattttttttgtttcttcatttcccctcccccaatccatgaaagcctaaatg

SEQ ID NO: 130184 - DNA, 120 bp, Artificial Sequence
  ENSG00000102383_11 (sequence is synthesized)
taaaatatatcttttcattcatcttatcaggtaaaaggaaattcagaaaatttccttagagtctttaattcccccacaaagattattaatcacatatatagggcctttttggtgttgaag

SEQ ID NO: 130185 - DNA, 120 bp, Artificial Sequence
  ENSG00000102383_12 (sequence is synthesized)
ggaatcaaactacatttgctgcttgtgtgcgtgtgcatttgtgaacacgtacagcatatctatacaaaattctgctatagtgtgaaaatcagggctaaaaacctgaagcctttgtttaat

SEQ ID NO: 130186 - DNA, 120 bp, Artificial Sequence
  ENSG00000102383_13 (sequence is synthesized)
tatgcttttcctctaaatagcaacttaaatatttgctagactttgaatcatcgctatatcaagtatctaaaatttgggagggtgaatcagtacactgtgaccaaggtcctcaaattggaa

SEQ ID NO: 130187 - DNA, 120 bp, Artificial Sequence
  ENSG00000102383_14 (sequence is synthesized)
tttgaacaacaatgtaaaacctgttctgtcacaaatgttcctgaaagcaccacagctactcaagaagatcaaattcaggacataaactttattgaacataataaccagtgttttttaaag

SEQ ID NO: 130188 - DNA, 120 bp, Artificial Sequence
  ENSG00000102383_15 (sequence is synthesized)
acttttttgtcagggtgcagtaaaattctccaattacttttattcatttatctgcttcctagttttattttagcctttatgagttattttatgatgaaagaaaatctataagcctaagtt

SEQ ID NO: 130189 - DNA, 120 bp, Artificial Sequence
  ENSG00000102383_16 (sequence is synthesized)
atggcccataggttttgttaagggttttcagagtgattttcaggtttaatttcactgcctttcataagggtaaagtttcacagctgacattagcctgaggattagcactaaagagctgtg

SEQ ID NO: 130190 - DNA, 120 bp, Artificial Sequence
  ENSG00000102383_17 (sequence is synthesized)
ttttcatagcaggggctattgtacagacagtgataaccaaatagtaatatgccagttctttcttctttttttagcttcagtagtagctaagccattaatacagtttgcatcaatttcccc

SEQ ID NO: 130191 - DNA, 120 bp, Artificial Sequence
  ENSG00000102383_18 (sequence is synthesized)
atttatttataatcagcctttcttttagtcctagtgcctgaatcaatgagtgagaatactagtactgattctttacaataataatatcttaagagtattgatatctttcattttttcatc

SEQ ID NO: 130192 - DNA, 120 bp, Artificial Sequence
  ENSG00000102383_19 (sequence is synthesized)
cagcagtctagtgcccagctgctgacaataaaagctccaactcttttagagatcagtggaatttagaagcatcttacaggtatcaaggaattgagcttctagagggatggtttggcttac

SEQ ID NO: 130193 - DNA, 120 bp, Artificial Sequence
  ENSG00000102383_20 (sequence is synthesized)
taatttatcttccctgaaatatgtttgagtaaaaaagagttgcctgccacaatttagtgttggggttccagtggagctgagaaagtgaacaatccagctacttaaagcaacaacaaaacc

SEQ ID NO: 130194 - DNA, 120 bp, Artificial Sequence
  ENSG00000102383_21 (sequence is synthesized)
tgttcatctggatccctaggtaattttgaccaaggtgagacttttggcataaattaaatggattgtggtcagcattacatttgagagaatactagacatgactacacttattagggctag

SEQ ID NO: 130195 - DNA, 120 bp, Artificial Sequence
  ENSG00000102383_22 (sequence is synthesized)
tgactttctcaaactcagaagctaaaaagcagcctagatgactatgcacacactgggtttcaagatgaaatcttcttatatattcagatggaaaaaaatttccccttacactctttctca

SEQ ID NO: 130196 - DNA, 120 bp, Artificial Sequence
  ENSG00000102383_23 (sequence is synthesized)
acagacaagccttgtcttctattcatatagatatgcacctttttctacatgtatggcctttacttactacacagcaagtaggcctcaaagtaatcttcctctttcccatcaatcatcttc

SEQ ID NO: 130197 - DNA, 120 bp, Artificial Sequence
  ENSG00000102383_24 (sequence is synthesized)
tgccaagcattcaggcagagcagctgttaactgtgattcaaagtcagaaaaacatcaagaacttctttgatgcatagggtgtatcagcactcagctcccacagaagtcaagtcacaaaat

SEQ ID NO: 130198 - DNA, 120 bp, Artificial Sequence
  ENSG00000102383_25 (sequence is synthesized)
atagtgtcagttaactataaggaagttccggagaggtaaagctcaggaaagatgtaatgcaaagctgattgtttaatgtcttacagatttacactgtctttaaaaggccaaataaggctg

SEQ ID NO: 130199 - DNA, 73 bp, Artificial Sequence
  ENSG00000102383_26 (sequence is synthesized)
ttacagatttacactgtctttaaaaggccaaatcccaaggcggccggaccacctgaggtcgggagttcaagac

SEQ ID NO: 130200 - DNA, 86 bp, Artificial Sequence
  ENSG00000102383_27 (sequence is synthesized)
cagggttttaccaggggctcagagataaaaagaaaacctattcctatcttagcattttggtctcattggtttatagactctgataa

SEQ ID NO: 130201 - DNA, 120 bp, Artificial Sequence
  ENSG00000102383_28 (sequence is synthesized)
tcttagcattttggtctcattggtttatagactctgataatatccctatccatggatcatttgagtattgactaatgtacataggtacccaactggttgattattaatcaagaatacaga

SEQ ID NO: 130202 - DNA, 120 bp, Artificial Sequence
  ENSG00000102383_29 (sequence is synthesized)
actttatttaataattagcacaccctgatctggcttctttgcttgcttttctttggatccctgtccaataacctctgtggaatctcattccctaattgttgatactcattttctccgttt

SEQ ID NO: 130203 - DNA, 120 bp, Artificial Sequence
  ENSG00000102383_30 (sequence is synthesized)
gcaaaatgaagatactcattgttaggatcctactgctgaagggtgctatgtcactttctagtgctcttatatgtctttaattataggactggaatgaaaagcttaaccatacagtatttc

SEQ ID NO: 130204 - DNA, 120 bp, Artificial Sequence
  ENSG00000102383_31 (sequence is synthesized)
taagcaaaataatgtactccattcttttgtccatgctctcattgctgatttgttcttgcaggacttagagcactttgttaatgttcttccattcactccaacagcgtcctcagaaagaga

SEQ ID NO: 130205 - DNA, 120 bp, Artificial Sequence
  ENSG00000102383_32 (sequence is synthesized)
cagaataaaaaaattgttccccatggtacagctggaaaaattaaggggaaaagagattaagtggtccccaatggaacacagctgtcttatgcagggctcacagttaccatgttcagtaca

SEQ ID NO: 130206 - DNA, 120 bp, Artificial Sequence
  ENSG00000102383_33 (sequence is synthesized)
ttgttaaagtaacttggcttcccaggactggaattatcatggagcagttagaattttgagagtaattacaacaggatcacattctgaaagagtcacattttgtcaaaaatctgaaaagta

SEQ ID NO: 130207 - DNA, 120 bp, Artificial Sequence
  ENSG00000102383_34 (sequence is synthesized)
tgcaatttgtacaactcttactttctatgtgataagaatgcaatatgtgcctctttcccctactagccccatgtgacacatatttttcacactatgtggcatcaaccagtgccattacct

SEQ ID NO: 130208 - DNA, 120 bp, Artificial Sequence
  ENSG00000102383_35 (sequence is synthesized)
cctgtggcaccatagagcccaatctcagggcagacattgccaaggtaaagaatgcactccatgtttataccaaattgcacaaagtatagacattgaggttaatggagatttaagcacaat

SEQ ID NO: 130209 - DNA, 120 bp, Artificial Sequence
  ENSG00000102383_36 (sequence is synthesized)
cctagcaagtaagttttaagaatactgaatattatacattattgtaacatgaacctaaaattaatttaacagggcccaaattcataggaatgtaacagtcattgaaagcctattcttttc

SEQ ID NO: 130210 - DNA, 81 bp, Artificial Sequence
  ENSG00000102383_37 (sequence is synthesized)
ttctccaaagcaggctgcctcttcagcaggagcaaatactttaatttaaaagaatgattatctgttttctccttttagaaa

SEQ ID NO: 130211 - DNA, 120 bp, Artificial Sequence
  ENSG00000102383_38 (sequence is synthesized)
taatttaaaagaatgattatctgttttctccttttagaaaaagagtctaagaaacacagcatgtgaagaacattagatttatacattccagaatctctgctctcagagtagctaagagat

SEQ ID NO: 130212 - DNA, 120 bp, Artificial Sequence
  ENSG00000102383_39 (sequence is synthesized)
tcggtacagaagacgttctatggagaagcacagggggcatctaatgagattgtcaggcccttggacaagatccatattcttagaaaattaatgagttccatctcgttaggaattggttga

SEQ ID NO: 130213 - DNA, 120 bp, Artificial Sequence
  ENSG00000102383_40 (sequence is synthesized)
tgaggtatggtacatctgcatttctttaaccatagctgtaatgtaccatattaaattgtagccttttgcatgcgggtattatataataatgaatgggtggctcctagtagcatgcaaccc

SEQ ID NO: 130214 - DNA, 120 bp, Artificial Sequence
  ENSG00000102383_41 (sequence is synthesized)
atgactgtttacttccctaaaagggttaggtctgtgtcctgcacagtgttcaaaaccattaaatgtgttctttgtagcaggatggtacacagccatcagcagaatgagttaaaaccaaca

SEQ ID NO: 130215 - DNA, 120 bp, Artificial Sequence
  ENSG00000102383_42 (sequence is synthesized)
atgaattcaatataccaggaaatagattgttagtagggaatggcattaaaggaaaaaaaaattagataagatgcattcaaggaataattactttcactctgctggcttaatcagtgaagg

SEQ ID NO: 130216 - DNA, 120 bp, Artificial Sequence
  ENSG00000102383_43 (sequence is synthesized)
aacataaaaggaaagctggcagtgggtcttggtaatatatgaactatattagagtgccagaaaaggagacctcagaagttaagcataggttgccaatctgctacaattatttttcccacc

SEQ ID NO: 130217 - DNA, 120 bp, Artificial Sequence
  ENSG00000102383_44 (sequence is synthesized)
aatctgctcaaaatgattgtatatagtattcttaaaaccatgtgtcttggtgcagaaatattgacaaatgctggccagctttatcttcctatatccttcattaaaagtatatgcatataa

SEQ ID NO: 130218 - DNA, 120 bp, Artificial Sequence
  ENSG00000102383_45 (sequence is synthesized)
ggggaaaggaaatctggacacagataggtacagaaggaagaccatgtgaagacacagggagaagatgactatctacatgccaaggagagaggccttcaaaatggccaatcctgctgacac

SEQ ID NO: 130219 - DNA, 120 bp, Artificial Sequence
  ENSG00000102383_46 (sequence is synthesized)
ttttatcttggacttctaacctccagaattgtgagacaataaatttctgccatttagagacccagtctgtgttactttattatggcagccctagcaaactgatacaagaatattaggttt

SEQ ID NO: 130220 - DNA, 89 bp, Artificial Sequence
  ENSG00000102383_47 (sequence is synthesized)
aaactatcaacagagtaaacaatctacagaatgggagaactatgcacttgaaaaaagtctaatatccagcagctataaagaacttaaat

SEQ ID NO: 130221 - DNA, 120 bp, Artificial Sequence
  ENSG00000102383_48 (sequence is synthesized)
gaaaaaagtctaatatccagcagctataaagaacttaaatttataagagaacatcaaataatcccattgaaaagtgggcaaagggcatgaacagacaattttcaaaagaaaacatacctg

SEQ ID NO: 130222 - DNA, 89 bp, Artificial Sequence
  ENSG00000102383_49 (sequence is synthesized)
aagggcatgaacagacaattttcaaaagaaaacatacctgtggccgacaaatgtgaataaaagctcaatatcactcatcattacagaac

SEQ ID NO: 130223 - DNA, 120 bp, Artificial Sequence
  ENSG00000102383_50 (sequence is synthesized)
aataatagatgctggtgagattgtggagaaaagggaacacttacacactgttggtgggagtgcaaattagttcaacaattgtggaagacagcgtggtgattcctcaaagacctaaaaaca

SEQ ID NO: 130224 - DNA, 120 bp, Artificial Sequence
  ENSG00000102383_51 (sequence is synthesized)
gtgtgtaactgtgggggggggtagcagggggagagaaagagaacgaagggagacagagagactgagacagaaacaaagagggcggacgcagtgcagtaagagcagatgggcggacccaaa

SEQ ID NO: 130225 - DNA, 120 bp, Artificial Sequence
  ENSG00000102383_52 (sequence is synthesized)
tttcttcggcttcacgattttgcggaggtctagccctgcatccagccttgaaacagggtggggaggaggcagaaaggggagggactgcactccctctgagcgtgctagctccgactgcct

SEQ ID NO: 130226 - DNA, 120 bp, Artificial Sequence
  ENSG00000102383_53 (sequence is synthesized)
gacggatcacccttccgctccaacatggctagttcctcaacgccgtgactcaagcctgttgtgccaggcagggcgcactcagcagcgcagccccacaggtggcgaaggctccgcgagagg

SEQ ID NO: 130227 - DNA, 89 bp, Artificial Sequence
  ENSG00000102384_0 (sequence is synthesized)
ttacaggtgtgtgccaccatgcccaactagtttttgtattttttagcagagacggggtttcctacgcctgacctcaagtcaggcccacc

SEQ ID NO: 130228 - DNA, 120 bp, Artificial Sequence
  ENSG00000102384_1 (sequence is synthesized)
cctcccagagtgctgggattacagaacatatgcagtaatgtcacctcaaaagagagttaagaacgtccaggcacaaaacaggacttcacaaggtagtagtagttttcagaccacgctttc

SEQ ID NO: 130229 - DNA, 120 bp, Artificial Sequence
  ENSG00000102384_2 (sequence is synthesized)
agcctggaaagtaaaacaggatccaagcaactcgaagaacatctcaaaacatggacaaaacaatccagtgggagattatgaacatgctgatgatcaagctgaagaagatgctttgcaaat

SEQ ID NO: 130230 - DNA, 120 bp, Artificial Sequence
  ENSG00000102384_3 (sequence is synthesized)
ggcagtgggatattttgagaaaggtcccattaaagcttcacagaataaagataaaaccttggaaaaacacttgaaaactgtggaaaatgtggcttggaagaatgggttagcttcagaaga

SEQ ID NO: 130231 - DNA, 120 bp, Artificial Sequence
  ENSG00000102384_4 (sequence is synthesized)
aattgatattctattaaatattgcactcagtggcaaatttggaaatgctgtaaacacacggatattgaagtgcatgatcccagcaacagtaatatcagaagattctgtggttaaggcagt
